United States Patent Application Publication US 2005/0244851 A1 - sequence listing, part 24

SEQ ID NO: 918640 - DNA, 25 bp, Homo sapien
cagggatagcaaatgctcctccagg

SEQ ID NO: 918641 - DNA, 25 bp, Homo sapien
gggatagcaaatgctcctccaggtt

SEQ ID NO: 918642 - DNA, 25 bp, Homo sapien
aactatgctccccagcagtagttcc

SEQ ID NO: 918643 - DNA, 25 bp, Homo sapien
aatgtttcatcaaagtccctaacta

SEQ ID NO: 918644 - DNA, 25 bp, Homo sapien
gttcccctatctcgtattctccaaa

SEQ ID NO: 918645 - DNA, 25 bp, Homo sapien
tttcatcaaagtccctaactatgct

SEQ ID NO: 918646 - DNA, 25 bp, Homo sapien
ttaatcctgcaagtccgataatttc

SEQ ID NO: 918647 - DNA, 25 bp, Homo sapien
aatcctgcaagtccgataatttctg

SEQ ID NO: 918648 - DNA, 25 bp, Homo sapien
taatcctgcaagtccgataatttct

SEQ ID NO: 918649 - DNA, 25 bp, Homo sapien
tcttaatcctgcaagtccgataatt

SEQ ID NO: 918650 - DNA, 25 bp, Homo sapien
gtccttttgctacatcaaaacttga

SEQ ID NO: 918651 - DNA, 25 bp, Homo sapien
gctgtatattaaaggtatcaatgta

SEQ ID NO: 918652 - DNA, 25 bp, Homo sapien
tgctgtatattaaaggtatcaatgt

SEQ ID NO: 918653 - DNA, 25 bp, Homo sapien
ttatgtccttttgctacatcaaaac

SEQ ID NO: 918654 - DNA, 25 bp, Homo sapien
ggaatttgccaatacaacagagcag

SEQ ID NO: 918655 - DNA, 25 bp, Homo sapien
gaatttgccaatacaacagagcagt

SEQ ID NO: 918656 - DNA, 25 bp, Homo sapien
cagagcagtagacaattttcttgga

SEQ ID NO: 918657 - DNA, 25 bp, Homo sapien
tacaacagagcagtagacaattttc

SEQ ID NO: 918658 - DNA, 25 bp, Homo sapien
ggatctcttcgagtgaagcgaccag

SEQ ID NO: 918659 - DNA, 25 bp, Homo sapien
gaagcgaccagacagtagacacttt

SEQ ID NO: 918660 - DNA, 25 bp, Homo sapien
cagtagacactttttatgagtagct

SEQ ID NO: 918661 - DNA, 25 bp, Homo sapien
agacactttttatgagtagctgtga

SEQ ID NO: 918662 - DNA, 25 bp, Homo sapien
gaacacggagacaagtataattcct

SEQ ID NO: 918663 - DNA, 25 bp, Homo sapien
taagcagtacacatagaacacggag

SEQ ID NO: 918664 - DNA, 25 bp, Homo sapien
tacacagatgtcagttcataagcag

SEQ ID NO: 918665 - DNA, 25 bp, Homo sapien
caaaggatagtgaagtaacctgtca

SEQ ID NO: 918666 - DNA, 25 bp, Homo sapien
acatctgaaggagaaggtgcattac

SEQ ID NO: 918667 - DNA, 25 bp, Homo sapien
ggtgcattactcaaaatcagaagta

SEQ ID NO: 918668 - DNA, 25 bp, Homo sapien
tgctttgtttgaatcagtggttaaa

SEQ ID NO: 918669 - DNA, 25 bp, Homo sapien
taaaacatcttgtacagtctgtgct

SEQ ID NO: 918670 - DNA, 25 bp, Homo sapien
caggatctctgctaaaactcctcat

SEQ ID NO: 918671 - DNA, 25 bp, Homo sapien
gcagttgttccaggatctctgctaa

SEQ ID NO: 918672 - DNA, 25 bp, Homo sapien
cctgataggcagcagttgttccagg

SEQ ID NO: 918673 - DNA, 25 bp, Homo sapien
tgataggcagcagttgttccaggat

SEQ ID NO: 918674 - DNA, 25 bp, Homo sapien
agctagtttaccaggaataacccag

SEQ ID NO: 918675 - DNA, 25 bp, Homo sapien
ctaagaagagcccttctggtgtcag

SEQ ID NO: 918676 - DNA, 25 bp, Homo sapien
gtcagctagtttaccaggaataacc

SEQ ID NO: 918677 - DNA, 25 bp, Homo sapien
gagcccttctggtgtcaggaagaag

SEQ ID NO: 918678 - DNA, 25 bp, Homo sapien
ttatttcgtactgccattcctagac

SEQ ID NO: 918679 - DNA, 25 bp, Homo sapien
tatttcgtactgccattcctagact

SEQ ID NO: 918680 - DNA, 25 bp, Homo sapien
gacagtggaacacgatggaaagact

SEQ ID NO: 918681 - DNA, 25 bp, Homo sapien
gcttgtagtcttcctatctggtgtg

SEQ ID NO: 918682 - DNA, 25 bp, Homo sapien
ctgggacagtggaacacgatggaaa

SEQ ID NO: 918683 - DNA, 25 bp, Homo sapien
cttttgaggttgcttgtagtcttcc

SEQ ID NO: 918684 - DNA, 25 bp, Homo sapien
tctacgttgggcagcgaccaactcg

SEQ ID NO: 918685 - DNA, 25 bp, Homo sapien
tgggcagcgaccaactcgacatgaa

SEQ ID NO: 918686 - DNA, 25 bp, Homo sapien
gcagcaaggcgagccgcgttcacgt

SEQ ID NO: 918687 - DNA, 25 bp, Homo sapien
gcgagccgcgttcacgtggctccag

SEQ ID NO: 918688 - DNA, 25 bp, Homo sapien
tcttgtggtcctggactccctagcc

SEQ ID NO: 918689 - DNA, 25 bp, Homo sapien
tgtggtcctggactccctagccctt

SEQ ID NO: 918690 - DNA, 25 bp, Homo sapien
gactcttgtggtcctggactcccta

SEQ ID NO: 918691 - DNA, 25 bp, Homo sapien
gggactcttgtggtcctggactccc

SEQ ID NO: 918692 - DNA, 25 bp, Homo sapien
cctgggagatggcatcgggtggaac

SEQ ID NO: 918693 - DNA, 25 bp, Homo sapien
gggtggaacggagcatctgtcttca

SEQ ID NO: 918694 - DNA, 25 bp, Homo sapien
ttcatcatatgagggggctgcaccc

SEQ ID NO: 918695 - DNA, 25 bp, Homo sapien
ccatctcaccactagccatatgatg

SEQ ID NO: 918696 - DNA, 25 bp, Homo sapien
gaggagcaacaggatcaaagccatg

SEQ ID NO: 918697 - DNA, 25 bp, Homo sapien
aacaaggcaagtgggtcagcaatgc

SEQ ID NO: 918698 - DNA, 25 bp, Homo sapien
agcaacaggatcaaagccatgtggt

SEQ ID NO: 918699 - DNA, 25 bp, Homo sapien
caaggcaagtgggtcagcaatgcta

SEQ ID NO: 918700 - DNA, 25 bp, Homo sapien
aagggacaacggagggacatgacca

SEQ ID NO: 918701 - DNA, 25 bp, Homo sapien
tttgagaaaattatcaggctgatat

SEQ ID NO: 918702 - DNA, 25 bp, Homo sapien
tagtcaaagggacaacggagggaca

SEQ ID NO: 918703 - DNA, 25 bp, Homo sapien
gtttgagaaaattatcaggctgata

SEQ ID NO: 918704 - DNA, 25 bp, Homo sapien
cctccagaacagtatgtggttccaa

SEQ ID NO: 918705 - DNA, 25 bp, Homo sapien
ccagaacagtatgtggttccaaact

SEQ ID NO: 918706 - DNA, 25 bp, Homo sapien
gaggtcccctccagaacagtatgtg

SEQ ID NO: 918707 - DNA, 25 bp, Homo sapien
tcccctccagaacagtatgtggttc

SEQ ID NO: 918708 - DNA, 25 bp, Homo sapien
gtgactccagtttgctgctctcttc

SEQ ID NO: 918709 - DNA, 25 bp, Homo sapien
tagtgactccagtttgctgctctct

SEQ ID NO: 918710 - DNA, 25 bp, Homo sapien
ctgtagtgactccagtttgctgctc

SEQ ID NO: 918711 - DNA, 25 bp, Homo sapien
tgtagtgactccagtttgctgctct

SEQ ID NO: 918712 - DNA, 25 bp, Homo sapien
tccttcctctctccctgggcttgtc

SEQ ID NO: 918713 - DNA, 25 bp, Homo sapien
agaccccatccttcctctctccctg

SEQ ID NO: 918714 - DNA, 25 bp, Homo sapien
tcctctctccctgggcttgtcgcat

SEQ ID NO: 918715 - DNA, 25 bp, Homo sapien
cttcctctctccctgggcttgtcgc

SEQ ID NO: 918716 - DNA, 25 bp, Homo sapien
gactgacacaaattgcactacaggg

SEQ ID NO: 918717 - DNA, 25 bp, Homo sapien
agactgacacaaattgcactacagg

SEQ ID NO: 918718 - DNA, 25 bp, Homo sapien
cccactgttctgatggagttggtcc

SEQ ID NO: 918719 - DNA, 25 bp, Homo sapien
gttctgatggagttggtccctggat

SEQ ID NO: 918720 - DNA, 25 bp, Homo sapien
cactgttctgatggagttggtccct

SEQ ID NO: 918721 - DNA, 25 bp, Homo sapien
tgatggagttggtccctggataact

SEQ ID NO: 918722 - DNA, 25 bp, Homo sapien
tgtttcactctactagcatgagggc

SEQ ID NO: 918723 - DNA, 25 bp, Homo sapien
cagtcttggtgtgcacaagagtgac

SEQ ID NO: 918724 - DNA, 25 bp, Homo sapien
agagatgtcagaggacagttcctgg

SEQ ID NO: 918725 - DNA, 25 bp, Homo sapien
tatctgagtggactcagtggctgac

SEQ ID NO: 918726 - DNA, 25 bp, Homo sapien
ggtgaacatctgatcccagtcggat

SEQ ID NO: 918727 - DNA, 25 bp, Homo sapien
agtcggatatcaggccccaggagaa

SEQ ID NO: 918728 - DNA, 25 bp, Homo sapien
tggacttgaggtgtacatcaggcct

SEQ ID NO: 918729 - DNA, 25 bp, Homo sapien
taactccaggccttaggtgaacatc

SEQ ID NO: 918730 - DNA, 25 bp, Homo sapien
cagggagacccttgtccccaggtga

SEQ ID NO: 918731 - DNA, 25 bp, Homo sapien
ggacatcaggccctaggtagacagc

SEQ ID NO: 918732 - DNA, 25 bp, Homo sapien
ggtagacagcaggttcaaggtgaat

SEQ ID NO: 918733 - DNA, 25 bp, Homo sapien
tatgagactcccgataaacaccggt

SEQ ID NO: 918734 - DNA, 25 bp, Homo sapien
tccacctgcacatcattccccaggt

SEQ ID NO: 918735 - DNA, 25 bp, Homo sapien
acatcattccccaggtgtataccta

SEQ ID NO: 918736 - DNA, 25 bp, Homo sapien
cattccccaggtgtatacctaggcc

SEQ ID NO: 918737 - DNA, 25 bp, Homo sapien
ctgcacatcattccccaggtgtata

SEQ ID NO: 918738 - DNA, 25 bp, Homo sapien
atgctccttgctcacaaaaggatgc

SEQ ID NO: 918739 - DNA, 25 bp, Homo sapien
catcatgctccttgctcacaaaagg

SEQ ID NO: 918740 - DNA, 25 bp, Homo sapien
tcatgctccttgctcacaaaaggat

SEQ ID NO: 918741 - DNA, 25 bp, Homo sapien
catgctccttgctcacaaaaggatg

SEQ ID NO: 918742 - DNA, 25 bp, Homo sapien
gcgcccctgaagtcacgccatggga

SEQ ID NO: 918743 - DNA, 25 bp, Homo sapien
gctcctgcgcccctgaagtcacgcc

SEQ ID NO: 918744 - DNA, 25 bp, Homo sapien
tgggagcgaggagcttgccgaggcc

SEQ ID NO: 918745 - DNA, 25 bp, Homo sapien
ccatgggagcgaggagcttgccgag

SEQ ID NO: 918746 - DNA, 25 bp, Homo sapien
gagatgatcaccctcggcagggata

SEQ ID NO: 918747 - DNA, 25 bp, Homo sapien
tcgagatgatcaccctcggcaggga

SEQ ID NO: 918748 - DNA, 25 bp, Homo sapien
tcctcgagatgatcaccctcggcag

SEQ ID NO: 918749 - DNA, 25 bp, Homo sapien
gactttccgctcctcgagatgatca

SEQ ID NO: 918750 - DNA, 25 bp, Homo sapien
agtgcagacccgcacttcgtgtaac

SEQ ID NO: 918751 - DNA, 25 bp, Homo sapien
tgtaactcctactgcacgttccaca

SEQ ID NO: 918752 - DNA, 25 bp, Homo sapien
gggcgtagagaccactccgggatgt

SEQ ID NO: 918753 - DNA, 25 bp, Homo sapien
gaggcagcggataccttccaaagtt

SEQ ID NO: 918754 - DNA, 25 bp, Homo sapien
gaaagctcacccctcacagtagttc

SEQ ID NO: 918755 - DNA, 25 bp, Homo sapien
tggtgggcacaactacagtcaatca

SEQ ID NO: 918756 - DNA, 25 bp, Homo sapien
tccctggtactagacttgctaaggt

SEQ ID NO: 918757 - DNA, 25 bp, Homo sapien
tctcttgatccttgaaagttcaggg

SEQ ID NO: 918758 - DNA, 25 bp, Homo sapien
acaggaactggtgggcacaactaca

SEQ ID NO: 918759 - DNA, 25 bp, Homo sapien
gctcctcaagaccaggggcatccct

SEQ ID NO: 918760 - DNA, 25 bp, Homo sapien
accagatgtggatgaggcatctgct

SEQ ID NO: 918761 - DNA, 25 bp, Homo sapien
gcatgccaggcatgtgtgggcactg

SEQ ID NO: 918762 - DNA, 25 bp, Homo sapien
gagctcctcaagaccaggggcatcc

SEQ ID NO: 918763 - DNA, 25 bp, Homo sapien
cagtgaggggaccaagcactgcctg

SEQ ID NO: 918764 - DNA, 25 bp, Homo sapien
gcactgcctggagccagggagcttc

SEQ ID NO: 918765 - DNA, 25 bp, Homo sapien
cactgcctggagccagggagcttct

SEQ ID NO: 918766 - DNA, 25 bp, Homo sapien
ctgcagtgaggggaccaagcactgc

SEQ ID NO: 918767 - DNA, 25 bp, Homo sapien
ctaaacggaagagaggtcctatagc

SEQ ID NO: 918768 - DNA, 25 bp, Homo sapien
actaaacggaagagaggtcctatag

SEQ ID NO: 918769 - DNA, 25 bp, Homo sapien
ccatttgagagcattttcagcttct

SEQ ID NO: 918770 - DNA, 25 bp, Homo sapien
gaattttccatttgagagcattttc

SEQ ID NO: 918771 - DNA, 25 bp, Homo sapien
gacatttcacccaaaattccagatt

SEQ ID NO: 918772 - DNA, 25 bp, Homo sapien
ttttcagcttctggaaacagacatt

SEQ ID NO: 918773 - DNA, 25 bp, Homo sapien
ggttaattctttgtatatttgaaga

SEQ ID NO: 918774 - DNA, 25 bp, Homo sapien
taattctttgtatatttgaagagac

SEQ ID NO: 918775 - DNA, 25 bp, Homo sapien
tggttaattctttgtatatttgaag

SEQ ID NO: 918776 - DNA, 25 bp, Homo sapien
ttctttgtatatttgaagagacagg

SEQ ID NO: 918777 - DNA, 25 bp, Homo sapien
cttgtccttggctgcagtgtgttca

SEQ ID NO: 918778 - DNA, 25 bp, Homo sapien
gctcttgtccttggctgcagtgtgt

SEQ ID NO: 918779 - DNA, 25 bp, Homo sapien
acgtgggtccgctgctctcctgcag

SEQ ID NO: 918780 - DNA, 25 bp, Homo sapien
tcctgtggggctcttgtccttggct

SEQ ID NO: 918781 - DNA, 25 bp, Homo sapien
cgacacccaagcacctccatggagg

SEQ ID NO: 918782 - DNA, 25 bp, Homo sapien
agacaacggtgggaaccactgtgat

SEQ ID NO: 918783 - DNA, 25 bp, Homo sapien
caagcacctccatggagggctcctg

SEQ ID NO: 918784 - DNA, 25 bp, Homo sapien
acaacggtgggaaccactgtgatgg

SEQ ID NO: 918785 - DNA, 25 bp, Homo sapien
ttctctgacgtgtgtccggccctct

SEQ ID NO: 918786 - DNA, 25 bp, Homo sapien
gttgaagacatttgaccagagcgag

SEQ ID NO: 918787 - DNA, 25 bp, Homo sapien
cttccagactgtaacatggtgtggc

SEQ ID NO: 918788 - DNA, 25 bp, Homo sapien
agaaacagggtagggagagcaagag

SEQ ID NO: 918789 - DNA, 25 bp, Homo sapien
gacagggcgacatgcgagaaatcgc

SEQ ID NO: 918790 - DNA, 25 bp, Homo sapien
acatgcgagaaatcgctttgtggcg

SEQ ID NO: 918791 - DNA, 25 bp, Homo sapien
cgaagacagggcgacatgcgagaaa

SEQ ID NO: 918792 - DNA, 25 bp, Homo sapien
gagaaatcgctttgtggcgcatagg

SEQ ID NO: 918793 - DNA, 25 bp, Homo sapien
gctgtgctgctaccctcggactacg

SEQ ID NO: 918794 - DNA, 25 bp, Homo sapien
ctgctaccctcggactacgcctgtg

SEQ ID NO: 918795 - DNA, 25 bp, Homo sapien
ctaccctcggactacgcctgtggtt

SEQ ID NO: 918796 - DNA, 25 bp, Homo sapien
tgctgtgctgctaccctcggactac

SEQ ID NO: 918797 - DNA, 25 bp, Homo sapien
tagtccttgggcacacaagcagacc

SEQ ID NO: 918798 - DNA, 25 bp, Homo sapien
caggcaatcactgaggctgcgggtt

SEQ ID NO: 918799 - DNA, 25 bp, Homo sapien
gaccctcgggtcagagagtagtcct

SEQ ID NO: 918800 - DNA, 25 bp, Homo sapien
gatcgctttgtagtgcactgggcac

SEQ ID NO: 918801 - DNA, 25 bp, Homo sapien
ttcttcactttccataagtagtttc

SEQ ID NO: 918802 - DNA, 25 bp, Homo sapien
ttatcatggagtcgttgatgtaaaa

SEQ ID NO: 918803 - DNA, 25 bp, Homo sapien
ctctttatcatggagtcgttgatgt

SEQ ID NO: 918804 - DNA, 25 bp, Homo sapien
taaaaatcgatgacactttcttcct

SEQ ID NO: 918805 - DNA, 25 bp, Homo sapien
tgctgactgaacgtggggcaggaga

SEQ ID NO: 918806 - DNA, 25 bp, Homo sapien
gctggctcagtgctgactgaacgtg

SEQ ID NO: 918807 - DNA, 25 bp, Homo sapien
tgatctcaggatatgacctgtgaga

SEQ ID NO: 918808 - DNA, 25 bp, Homo sapien
ggagagccccaggagcaacacatgt

SEQ ID NO: 918809 - DNA, 25 bp, Homo sapien
aatttgagttcattggatttatgct

SEQ ID NO: 918810 - DNA, 25 bp, Homo sapien
tgactattggtagctgttgctgctt

SEQ ID NO: 918811 - DNA, 25 bp, Homo sapien
ccacacaggctgactattggtagct

SEQ ID NO: 918812 - DNA, 25 bp, Homo sapien
agttcattggatttatgcttctccc

SEQ ID NO: 918813 - DNA, 25 bp, Homo sapien
ttggaagaatggctgacaaccgccg

SEQ ID NO: 918814 - DNA, 25 bp, Homo sapien
gaatggctgacaaccgccggggtca

SEQ ID NO: 918815 - DNA, 25 bp, Homo sapien
ctccccttgccaaaaagccacattt

SEQ ID NO: 918816 - DNA, 25 bp, Homo sapien
tttccatggctcctgaatccacagt

SEQ ID NO: 918817 - DNA, 25 bp, Homo sapien
aggtcatcagggaggcactcctcca

SEQ ID NO: 918818 - DNA, 25 bp, Homo sapien
ttgaggtgtggatgggatctcgcac

SEQ ID NO: 918819 - DNA, 25 bp, Homo sapien
agaatctgttgaggtgtggatggga

SEQ ID NO: 918820 - DNA, 25 bp, Homo sapien
ggtgaggatagaatctgttgaggtg

SEQ ID NO: 918821 - DNA, 25 bp, Homo sapien
tgtggatgggatctcgcaccttcac

SEQ ID NO: 918822 - DNA, 25 bp, Homo sapien
ccccaggagacccaattcatgcaca

SEQ ID NO: 918823 - DNA, 25 bp, Homo sapien
caggagacccaattcatgcacacag

SEQ ID NO: 918824 - DNA, 25 bp, Homo sapien
agactttattcccatccccaggaga

SEQ ID NO: 918825 - DNA, 25 bp, Homo sapien
ggagacccaattcatgcacacagcc

SEQ ID NO: 918826 - DNA, 25 bp, Homo sapien
tcatcttggcggagaaggagtcctc

SEQ ID NO: 918827 - DNA, 25 bp, Homo sapien
gatattcccacaatcctaggagcgg

SEQ ID NO: 918828 - DNA, 25 bp, Homo sapien
aagaaacatcaagtggagccccagg

SEQ ID NO: 918829 - DNA, 25 bp, Homo sapien
aaaggatacccacgatgagtcaggc

SEQ ID NO: 918830 - DNA, 25 bp, Homo sapien
ctttgtttttccatggttcctgagt

SEQ ID NO: 918831 - DNA, 25 bp, Homo sapien
ggttcctgagtccacggtgagttgg

SEQ ID NO: 918832 - DNA, 25 bp, Homo sapien
agttggggggatggttgagactcac

SEQ ID NO: 918833 - DNA, 25 bp, Homo sapien
gtgtacaaatcacccccccatacga

SEQ ID NO: 918834 - DNA, 25 bp, Homo sapien
ttaatacattccagaattagactgt

SEQ ID NO: 918835 - DNA, 25 bp, Homo sapien
tttcttaaaagaggcctcaatgggc

SEQ ID NO: 918836 - DNA, 25 bp, Homo sapien
gactgtctgcaacctgctgaataaa

SEQ ID NO: 918837 - DNA, 25 bp, Homo sapien
tccaatctgctaaatcaaaacacag

SEQ ID NO: 918838 - DNA, 25 bp, Homo sapien
atatctcctcatcaattgtacaaaa

SEQ ID NO: 918839 - DNA, 25 bp, Homo sapien
gcagtgttggcttggaggagcccca

SEQ ID NO: 918840 - DNA, 25 bp, Homo sapien
ttcagctgacaccacgcgttgaggc

SEQ ID NO: 918841 - DNA, 25 bp, Homo sapien
ctgacaccacgcgttgaggcccatt

SEQ ID NO: 918842 - DNA, 25 bp, Homo sapien
tgaattttcagctgacaccacgcgt

SEQ ID NO: 918843 - DNA, 25 bp, Homo sapien
ggagacgcgttggtccggagcaatt

SEQ ID NO: 918844 - DNA, 25 bp, Homo sapien
ttgcatgtcggctggtctttggtga

SEQ ID NO: 918845 - DNA, 25 bp, Homo sapien
gtgaggagacgcgttggtccggagc

SEQ ID NO: 918846 - DNA, 25 bp, Homo sapien
gccagaaagctatttcttgcatgtc

SEQ ID NO: 918847 - DNA, 25 bp, Homo sapien
agatgcatctaggtctggctgaatg

SEQ ID NO: 918848 - DNA, 25 bp, Homo sapien
gatgcatctaggtctggctgaatgt

SEQ ID NO: 918849 - DNA, 25 bp, Homo sapien
acatgggtgcaccgtggttcagcca

SEQ ID NO: 918850 - DNA, 25 bp, Homo sapien
caaaaggagatgtgctcgggttgct

SEQ ID NO: 918851 - DNA, 25 bp, Homo sapien
gggtgcaccgtggttcagccagcac

SEQ ID NO: 918852 - DNA, 25 bp, Homo sapien
gtacggggccctggagacaagccag

SEQ ID NO: 918853 - DNA, 25 bp, Homo sapien
gatgagaaattccacccaggaaatt

SEQ ID NO: 918854 - DNA, 25 bp, Homo sapien
gtgatcacccaaaagcttccaggct

SEQ ID NO: 918855 - DNA, 25 bp, Homo sapien
gggacatggttatttatgaagctcc

SEQ ID NO: 918856 - DNA, 25 bp, Homo sapien
gctggacaagttgggactcagttct

SEQ ID NO: 918857 - DNA, 25 bp, Homo sapien
gcaagcggctgtgagtgatgcctcc

SEQ ID NO: 918858 - DNA, 25 bp, Homo sapien
cccggtgtcgcaagcggctgtgagt

SEQ ID NO: 918859 - DNA, 25 bp, Homo sapien
tcgcaagcggctgtgagtgatgcct

SEQ ID NO: 918860 - DNA, 25 bp, Homo sapien
tgtcgcaagcggctgtgagtgatgc

SEQ ID NO: 918861 - DNA, 25 bp, Homo sapien
aacttcaggaatcccgggccagctg

SEQ ID NO: 918862 - DNA, 25 bp, Homo sapien
atcagctaacttcaggaatcccggg

SEQ ID NO: 918863 - DNA, 25 bp, Homo sapien
tcagctaacttcaggaatcccgggc

SEQ ID NO: 918864 - DNA, 25 bp, Homo sapien
gctaacttcaggaatcccgggccag

SEQ ID NO: 918865 - DNA, 25 bp, Homo sapien
cagggccgagagcaggcagcccagg

SEQ ID NO: 918866 - DNA, 25 bp, Homo sapien
agagggtccgcaggcagggccgaga

SEQ ID NO: 918867 - DNA, 25 bp, Homo sapien
gcagggccgagagcaggcagcccag

SEQ ID NO: 918868 - DNA, 25 bp, Homo sapien
acaaaaggcagagggtccgcaggca

SEQ ID NO: 918869 - DNA, 25 bp, Homo sapien
tcgctcccatggcgtgacttcaggg

SEQ ID NO: 918870 - DNA, 25 bp, Homo sapien
ctcgctcccatggcgtgacttcagg

SEQ ID NO: 918871 - DNA, 25 bp, Homo sapien
cctcgctcccatggcgtgacttcag

SEQ ID NO: 918872 - DNA, 25 bp, Homo sapien
tccactgggacatgatacccactgg

SEQ ID NO: 918873 - DNA, 25 bp, Homo sapien
cactgggacatgatacccactggga

SEQ ID NO: 918874 - DNA, 25 bp, Homo sapien
ccactgggacatgatacccactggg

SEQ ID NO: 918875 - DNA, 25 bp, Homo sapien
ctgatatccacctgtagtatgggtg

SEQ ID NO: 918876 - DNA, 25 bp, Homo sapien
ggcggatgttcagctggcgtccact

SEQ ID NO: 918877 - DNA, 25 bp, Homo sapien
tgtcaaccttggggcggatgttcag

SEQ ID NO: 918878 - DNA, 25 bp, Homo sapien
cctgtagtatgggtgtcaaccttgg

SEQ ID NO: 918879 - DNA, 25 bp, Homo sapien
caggtgatcttcaggccctaggtga

SEQ ID NO: 918880 - DNA, 25 bp, Homo sapien
tcttcaggccctaggtgaaaactcc

SEQ ID NO: 918881 - DNA, 25 bp, Homo sapien
ctgatgtttactggggccagatgtc

SEQ ID NO: 918882 - DNA, 25 bp, Homo sapien
gtgaaaactccaggctctaagtgga

SEQ ID NO: 918883 - DNA, 25 bp, Homo sapien
ggtaaccacctagggcatggtgtta

SEQ ID NO: 918884 - DNA, 25 bp, Homo sapien
cctaggtaaccacctagggcatggt

SEQ ID NO: 918885 - DNA, 25 bp, Homo sapien
ggcctgatgaccacctgaggtccag

SEQ ID NO: 918886 - DNA, 25 bp, Homo sapien
aggttctggtatccacatggagcct

SEQ ID NO: 918887 - DNA, 25 bp, Homo sapien
cacctggggcctttagactccaaat

SEQ ID NO: 918888 - DNA, 25 bp, Homo sapien
gtacacctggggcctttagactcca

SEQ ID NO: 918889 - DNA, 25 bp, Homo sapien
ctggggcctttagactccaaatgtc

SEQ ID NO: 918890 - DNA, 25 bp, Homo sapien
tacacctggggcctttagactccaa

SEQ ID NO: 918891 - DNA, 25 bp, Homo sapien
taaacttggtataagcagggacctg

SEQ ID NO: 918892 - DNA, 25 bp, Homo sapien
taaacatggtgcctttctgatagcc

SEQ ID NO: 918893 - DNA, 25 bp, Homo sapien
tcctctcaagtacaataagggctgc

SEQ ID NO: 918894 - DNA, 25 bp, Homo sapien
gaattggactcccttactagctgtt

SEQ ID NO: 918895 - DNA, 25 bp, Homo sapien
taaatgagagcagaaggcacgtgtg

SEQ ID NO: 918896 - DNA, 25 bp, Homo sapien
tctctatgtgcatgttggcatcacc

SEQ ID NO: 918897 - DNA, 25 bp, Homo sapien
ctggaccatatagtgtcagctggga

SEQ ID NO: 918898 - DNA, 25 bp, Homo sapien
gagggtctggagtggctacattttc

SEQ ID NO: 918899 - DNA, 25 bp, Homo sapien
tgtctaggtctccttgtcactcttg

SEQ ID NO: 918900 - DNA, 25 bp, Homo sapien
ctgagtccactcagatatcttctgc

SEQ ID NO: 918901 - DNA, 25 bp, Homo sapien
aaaccaaaacagagacagcttccat

SEQ ID NO: 918902 - DNA, 25 bp, Homo sapien
gtcactcttgtgcacaccaagactg

SEQ ID NO: 918903 - DNA, 25 bp, Homo sapien
aagcaagaacgtcagaggtgacccc

SEQ ID NO: 918904 - DNA, 25 bp, Homo sapien
cagtcacttccgtattcttattaga

SEQ ID NO: 918905 - DNA, 25 bp, Homo sapien
tggaaatctgtgtttagattggcca

SEQ ID NO: 918906 - DNA, 25 bp, Homo sapien
agaggatttctctttaggtgtggaa

SEQ ID NO: 918907 - DNA, 25 bp, Homo sapien
catgatttagtccaagatgaacaca

SEQ ID NO: 918908 - DNA, 25 bp, Homo sapien
gtggctctggtacatttcctaataa

SEQ ID NO: 918909 - DNA, 25 bp, Homo sapien
cctggccctgtttgttcttttacat

SEQ ID NO: 918910 - DNA, 25 bp, Homo sapien
tataatggattgcatgtacatttac

SEQ ID NO: 918911 - DNA, 25 bp, Homo sapien
attagaagggtacatggtacatata

SEQ ID NO: 918912 - DNA, 25 bp, Homo sapien
gggtacatggtacatataattgtat

SEQ ID NO: 918913 - DNA, 25 bp, Homo sapien
tagaagggtacatggtacatataat

SEQ ID NO: 918914 - DNA, 25 bp, Homo sapien
gaagggtacatggtacatataattg

SEQ ID NO: 918915 - DNA, 25 bp, Homo sapien
gagcgctttgcgaactatggtagaa

SEQ ID NO: 918916 - DNA, 25 bp, Homo sapien
gtgaggtttgcattcacctcacaca

SEQ ID NO: 918917 - DNA, 25 bp, Homo sapien
tgtgaggtttgcattcacctcacac

SEQ ID NO: 918918 - DNA, 25 bp, Homo sapien
gctttgcgaactatggtagaaaagg

SEQ ID NO: 918919 - DNA, 25 bp, Homo sapien
tgaggcctatggtggaaaaggaaac

SEQ ID NO: 918920 - DNA, 25 bp, Homo sapien
ggcctatggtggaaaaggaaacatc

SEQ ID NO: 918921 - DNA, 25 bp, Homo sapien
agaagcattctgacaaacttctttg

SEQ ID NO: 918922 - DNA, 25 bp, Homo sapien
acttctttgtgatgtgtacattcat

SEQ ID NO: 918923 - DNA, 25 bp, Homo sapien
cacagagttgaatctttcttttgat

SEQ ID NO: 918924 - DNA, 25 bp, Homo sapien
gagttgaatctttcttttgattgag

SEQ ID NO: 918925 - DNA, 25 bp, Homo sapien
agttgaatctttcttttgattgagc

SEQ ID NO: 918926 - DNA, 25 bp, Homo sapien
cagagttgaatctttcttttgattg

SEQ ID NO: 918927 - DNA, 25 bp, Homo sapien
actttgcggcctatgctagaaaagg

SEQ ID NO: 918928 - DNA, 25 bp, Homo sapien
gacacttggagtactttgcggccta

SEQ ID NO: 918929 - DNA, 25 bp, Homo sapien
aagtggacacttggagtactttgcg

SEQ ID NO: 918930 - DNA, 25 bp, Homo sapien
cttggagtactttgcggcctatgct

SEQ ID NO: 918931 - DNA, 25 bp, Homo sapien
aaaatctagacagaagcaatctgag

SEQ ID NO: 918932 - DNA, 25 bp, Homo sapien
acataaaatctagacagaagcaatc

SEQ ID NO: 918933 - DNA, 25 bp, Homo sapien
ataaaatctagacagaagcaatctg

SEQ ID NO: 918934 - DNA, 25 bp, Homo sapien
aatctagacagaagcaatctgagaa

SEQ ID NO: 918935 - DNA, 25 bp, Homo sapien
tctcacagagttaaaccattctttt

SEQ ID NO: 918936 - DNA, 25 bp, Homo sapien
catctcacagagttaaaccattctt

SEQ ID NO: 918937 - DNA, 25 bp, Homo sapien
cacagagttaaaccattcttttgat

SEQ ID NO: 918938 - DNA, 25 bp, Homo sapien
tcatctcacagagttaaaccattct

SEQ ID NO: 918939 - DNA, 25 bp, Homo sapien
tttcaagtggacatttgtagcactt

SEQ ID NO: 918940 - DNA, 25 bp, Homo sapien
tcacataaaaactagacagaataat

SEQ ID NO: 918941 - DNA, 25 bp, Homo sapien
cataaaaactagacagaataattct

SEQ ID NO: 918942 - DNA, 25 bp, Homo sapien
cacataaaaactagacagaataatt

SEQ ID NO: 918943 - DNA, 25 bp, Homo sapien
taaaaactagacagaataattctga

SEQ ID NO: 918944 - DNA, 25 bp, Homo sapien
catcaaatggactctaatggaatca

SEQ ID NO: 918945 - DNA, 25 bp, Homo sapien
aatcatcaaatggactctaatggaa

SEQ ID NO: 918946 - DNA, 25 bp, Homo sapien
tcaaatggactctaatggaatcatc

SEQ ID NO: 918947 - DNA, 25 bp, Homo sapien
ggaatcatcaaatggactctaatgg

SEQ ID NO: 918948 - DNA, 25 bp, Homo sapien
aatggactcgaatggaatcctcatc

SEQ ID NO: 918949 - DNA, 25 bp, Homo sapien
gactcgaatggaatcctcatcgaat

SEQ ID NO: 918950 - DNA, 25 bp, Homo sapien
cgaatggaagcatcgaatggactcg

SEQ ID NO: 918951 - DNA, 25 bp, Homo sapien
atcgaatggaagcatcgaatggact

SEQ ID NO: 918952 - DNA, 25 bp, Homo sapien
acttgaatggaatcatcattgaatg

SEQ ID NO: 918953 - DNA, 25 bp, Homo sapien
atcgaatgcacttgaatggaatcat

SEQ ID NO: 918954 - DNA, 25 bp, Homo sapien
tcgaatgcacttgaatggaatcatc

SEQ ID NO: 918955 - DNA, 25 bp, Homo sapien
tgcacttgaatggaatcatcattga

SEQ ID NO: 918956 - DNA, 25 bp, Homo sapien
atcgaatggaatcatcatcaaatgg

SEQ ID NO: 918957 - DNA, 25 bp, Homo sapien
tcgaatggaatcatcatcaaatgga

SEQ ID NO: 918958 - DNA, 25 bp, Homo sapien
caatcgaatggaatcatcatcaaat

SEQ ID NO: 918959 - DNA, 25 bp, Homo sapien
aatcgaatggaatcatcatcaaatg

SEQ ID NO: 918960 - DNA, 25 bp, Homo sapien
atggaatcgaatagaatcatcaagt

SEQ ID NO: 918961 - DNA, 25 bp, Homo sapien
tcattaaatggaatcgaatagaatc

SEQ ID NO: 918962 - DNA, 25 bp, Homo sapien
aaatggaatcgaatagaatcatcaa

SEQ ID NO: 918963 - DNA, 25 bp, Homo sapien
attaaatggaatcgaatagaatcat

SEQ ID NO: 918964 - DNA, 25 bp, Homo sapien
aatagaattgaatcatcatcgaatg

SEQ ID NO: 918965 - DNA, 25 bp, Homo sapien
atagaattgaatcatcatcgaatgg

SEQ ID NO: 918966 - DNA, 25 bp, Homo sapien
agcaaacatagggtttggcattccc

SEQ ID NO: 918967 - DNA, 25 bp, Homo sapien
gtttggcattccctccaatattgca

SEQ ID NO: 918968 - DNA, 25 bp, Homo sapien
tggcattccctccaatattgcaaaa

SEQ ID NO: 918969 - DNA, 25 bp, Homo sapien
ttccacagcaaacatagggtttggc

SEQ ID NO: 918970 - DNA, 25 bp, Homo sapien
gcctcgcggaatttagcccctgccg

SEQ ID NO: 918971 - DNA, 25 bp, Homo sapien
gccgtggctttctgcccccggcctc

SEQ ID NO: 918972 - DNA, 25 bp, Homo sapien
tgccgccgtggatttttgaccccgc

SEQ ID NO: 918973 - DNA, 25 bp, Homo sapien
agcccctgccgccaaggctttttgg

SEQ ID NO: 918974 - DNA, 25 bp, Homo sapien
gccaccgcgaatttttctgccgcgg

SEQ ID NO: 918975 - DNA, 25 bp, Homo sapien
cccgccaccgcgaatttttctgccg

SEQ ID NO: 918976 - DNA, 25 bp, Homo sapien
accgcgaatttttctgccgcggctt

SEQ ID NO: 918977 - DNA, 25 bp, Homo sapien
caccgcgaatttttctgccgcggct

SEQ ID NO: 918978 - DNA, 25 bp, Homo sapien
ccaccgccacaggtttttaccgctg

SEQ ID NO: 918979 - DNA, 25 bp, Homo sapien
cacaggtttttaccgctgcggcttt

SEQ ID NO: 918980 - DNA, 25 bp, Homo sapien
cggctttttcaccccggcatcgcgg

SEQ ID NO: 918981 - DNA, 25 bp, Homo sapien
gccacaggtttttaccgctgcggct

SEQ ID NO: 918982 - DNA, 25 bp, Homo sapien
tatggaccgcattgaggccttcgtt

SEQ ID NO: 918983 - DNA, 25 bp, Homo sapien
atatatggaccgcattgaggccttc

SEQ ID NO: 918984 - DNA, 25 bp, Homo sapien
agagtggaacgtccctttacacaga

SEQ ID NO: 918985 - DNA, 25 bp, Homo sapien
ctcacagagtggaacgtccctttac

SEQ ID NO: 918986 - DNA, 25 bp, Homo sapien
aaacacactgtttgtaaagtctgca

SEQ ID NO: 918987 - DNA, 25 bp, Homo sapien
ttggaaacacactgtttgtaaagtc

SEQ ID NO: 918988 - DNA, 25 bp, Homo sapien
actgtttgtaaagtctgcaagtgga

SEQ ID NO: 918989 - DNA, 25 bp, Homo sapien
cagtttggaaacacactgtttgtaa

SEQ ID NO: 918990 - DNA, 25 bp, Homo sapien
ctctttgaggccttcgttggaaacg

SEQ ID NO: 918991 - DNA, 25 bp, Homo sapien
ttggaaacgggatttcttcatataa

SEQ ID NO: 918992 - DNA, 25 bp, Homo sapien
tcgttggaaacgggatttcttcata

SEQ ID NO: 918993 - DNA, 25 bp, Homo sapien
gacctctttgaggccttcgttggaa

SEQ ID NO: 918994 - DNA, 25 bp, Homo sapien
attctcagaaatatatttgtgatgt

SEQ ID NO: 918995 - DNA, 25 bp, Homo sapien
ttctcagaaatatatttgtgatgtg

SEQ ID NO: 918996 - DNA, 25 bp, Homo sapien
tctcagaaatatatttgtgatgtgt

SEQ ID NO: 918997 - DNA, 25 bp, Homo sapien
aattctcagaaatatatttgtgatg

SEQ ID NO: 918998 - DNA, 25 bp, Homo sapien
ccatgctaatgttcactgtatagtt

SEQ ID NO: 918999 - DNA, 25 bp, Homo sapien
gccatgctaatgttcactgtatagt

SEQ ID NO: 919000 - DNA, 25 bp, Homo sapien
gggcggtgttcagatcctgatgcat

SEQ ID NO: 919001 - DNA, 25 bp, Homo sapien
cacacgatggggcggtgttcagatc

SEQ ID NO: 919002 - DNA, 25 bp, Homo sapien
cacgatggggcggtgttcagatcct

SEQ ID NO: 919003 - DNA, 25 bp, Homo sapien
cggtgttcagatcctgatgcattag

SEQ ID NO: 919004 - DNA, 25 bp, Homo sapien
tcctttcgctgggaccatccacgaa

SEQ ID NO: 919005 - DNA, 25 bp, Homo sapien
ttcgctgggaccatccacgaagtgt

SEQ ID NO: 919006 - DNA, 25 bp, Homo sapien
ctttcgctgggaccatccacgaagt

SEQ ID NO: 919007 - DNA, 25 bp, Homo sapien
ctcctttcgctgggaccatccacga

SEQ ID NO: 919008 - DNA, 25 bp, Homo sapien
tcacgtggctttgaggattaggctc

SEQ ID NO: 919009 - DNA, 25 bp, Homo sapien
cacatttaaagatatcaaaggcgct

SEQ ID NO: 919010 - DNA, 25 bp, Homo sapien
gctctcaaagcggaaaagtgtcggt

SEQ ID NO: 919011 - DNA, 25 bp, Homo sapien
aaaagtgtcggtggctttgacagaa

SEQ ID NO: 919012 - DNA, 25 bp, Homo sapien
aacgggtttcgtggctatccagtgc

SEQ ID NO: 919013 - DNA, 25 bp, Homo sapien
ctggagaacgggtttcgtggctatc

SEQ ID NO: 919014 - DNA, 25 bp, Homo sapien
tggtggtgcctaagttgtgagttgt

SEQ ID NO: 919015 - DNA, 25 bp, Homo sapien
gagaacgggtttcgtggctatccag

SEQ ID NO: 919016 - DNA, 25 bp, Homo sapien
tgacaagatgcaaccagctatgggc

SEQ ID NO: 919017 - DNA, 25 bp, Homo sapien
gggcccaagcgatggaactgcatct

SEQ ID NO: 919018 - DNA, 25 bp, Homo sapien
gacacacatctccatctccgggtgt

SEQ ID NO: 919019 - DNA, 25 bp, Homo sapien
tgggcttaggactgagacacacatc

SEQ ID NO: 919020 - DNA, 25 bp, Homo sapien
ggcacacactggtccgttcagtatg

SEQ ID NO: 919021 - DNA, 25 bp, Homo sapien
gacaacaactagaatgccatgacca

SEQ ID NO: 919022 - DNA, 25 bp, Homo sapien
catgaccagtcatctcattctaacc

SEQ ID NO: 919023 - DNA, 25 bp, Homo sapien
tatcttaaccgcatgctagcacagg

SEQ ID NO: 919024 - DNA, 25 bp, Homo sapien
taggctgtgcttccaacgacgccac

SEQ ID NO: 919025 - DNA, 25 bp, Homo sapien
ctaggctgtgcttccaacgacgcca

SEQ ID NO: 919026 - DNA, 25 bp, Homo sapien
gggctcattaacaccgggctcgcct

SEQ ID NO: 919027 - DNA, 25 bp, Homo sapien
ggggctcattaacaccgggctcgcc

SEQ ID NO: 919028 - DNA, 25 bp, Homo sapien
caaagccccacgaagaggatcttgg

SEQ ID NO: 919029 - DNA, 25 bp, Homo sapien
gccccacgaagaggatcttggcctt

SEQ ID NO: 919030 - DNA, 25 bp, Homo sapien
ctcgcaaagccccacgaagaggatc

SEQ ID NO: 919031 - DNA, 25 bp, Homo sapien
tcgcaaagccccacgaagaggatct

SEQ ID NO: 919032 - DNA, 25 bp, Homo sapien
gccgctttcgtttccatggcgacgg

SEQ ID NO: 919033 - DNA, 25 bp, Homo sapien
agccggcgcgttagggcggagccct

SEQ ID NO: 919034 - DNA, 25 bp, Homo sapien
tttcgtttccatggcgacggcgagc

SEQ ID NO: 919035 - DNA, 25 bp, Homo sapien
atgggactcggccactttcggcacg

SEQ ID NO: 919036 - DNA, 25 bp, Homo sapien
tctgtaaaaggattcaccactcact

SEQ ID NO: 919037 - DNA, 25 bp, Homo sapien
atcgtttagtcagtgcaggtgtcta

SEQ ID NO: 919038 - DNA, 25 bp, Homo sapien
tctaggagaaaccaaagagatgatg

SEQ ID NO: 919039 - DNA, 25 bp, Homo sapien
gactggaatcgtttagtcagtgcag

SEQ ID NO: 919040 - DNA, 25 bp, Homo sapien
aaggccttgctctcatagcagcaaa

SEQ ID NO: 919041 - DNA, 25 bp, Homo sapien
gccagggcactaaggcatgttaacc

SEQ ID NO: 919042 - DNA, 25 bp, Homo sapien
agcagcaaagcctgtctgttgcaca

SEQ ID NO: 919043 - DNA, 25 bp, Homo sapien
cacagtggggctcttggtagcatct

SEQ ID NO: 919044 - DNA, 25 bp, Homo sapien
tgttagaaactgaaggagcgagcaa

SEQ ID NO: 919045 - DNA, 25 bp, Homo sapien
agaaactgaaggagcgagcaatgct

SEQ ID NO: 919046 - DNA, 25 bp, Homo sapien
ttgttagaaactgaaggagcgagca

SEQ ID NO: 919047 - DNA, 25 bp, Homo sapien
ttagaaactgaaggagcgagcaatg

SEQ ID NO: 919048 - DNA, 25 bp, Homo sapien
tttgaattacaggttcgtgcaagca

SEQ ID NO: 919049 - DNA, 25 bp, Homo sapien
ttgaattacaggttcgtgcaagcac

SEQ ID NO: 919050 - DNA, 25 bp, Homo sapien
catccaagaaaaaggcgctggtgag

SEQ ID NO: 919051 - DNA, 25 bp, Homo sapien
ttttcacgaaaccacagtccatgtt

SEQ ID NO: 919052 - DNA, 25 bp, Homo sapien
ttcacgaaaccacagtccatgttac

SEQ ID NO: 919053 - DNA, 25 bp, Homo sapien
gccgcctcaacatccacatccaaga

SEQ ID NO: 919054 - DNA, 25 bp, Homo sapien
ccatagcggctgcactgcgctctgg

SEQ ID NO: 919055 - DNA, 25 bp, Homo sapien
ctgaacttgtgcactggcgggccag

SEQ ID NO: 919056 - DNA, 25 bp, Homo sapien
atttctccccatagcggctgcactg

SEQ ID NO: 919057 - DNA, 25 bp, Homo sapien
ggccaggcggcggatttctccccat

SEQ ID NO: 919058 - DNA, 25 bp, Homo sapien
cccctcctgtccctctccggactca

SEQ ID NO: 919059 - DNA, 25 bp, Homo sapien
ccctcctgtccctctccggactcac

SEQ ID NO: 919060 - DNA, 25 bp, Homo sapien
tgcccctcctgtccctctccggact

SEQ ID NO: 919061 - DNA, 25 bp, Homo sapien
ctgcccctcctgtccctctccggac

SEQ ID NO: 919062 - DNA, 25 bp, Homo sapien
catggcaaggaggtgcccgcgatca

SEQ ID NO: 919063 - DNA, 25 bp, Homo sapien
tggaagcggcgaggtccacactgcc

SEQ ID NO: 919064 - DNA, 25 bp, Homo sapien
tgccctgcccaaccctcttgggctg

SEQ ID NO: 919065 - DNA, 25 bp, Homo sapien
agtagccagcatcgctgtggaagcg

SEQ ID NO: 919066 - DNA, 25 bp, Homo sapien
tacctgggcactcagtgggccttag

SEQ ID NO: 919067 - DNA, 25 bp, Homo sapien
tcaagtaccacagcagtgagtcccc

SEQ ID NO: 919068 - DNA, 25 bp, Homo sapien
ccagtgtagctgtctgacttccaga

SEQ ID NO: 919069 - DNA, 25 bp, Homo sapien
tcacagtggagctgatagcccagtg

SEQ ID NO: 919070 - DNA, 25 bp, Homo sapien
tgggcttgaaaccaaccccatattc

SEQ ID NO: 919071 - DNA, 25 bp, Homo sapien
tctcaatcgattgtgctgctccatg

SEQ ID NO: 919072 - DNA, 25 bp, Homo sapien
cctcctgagtctgaagattataatt

SEQ ID NO: 919073 - DNA, 25 bp, Homo sapien
tattcctcctgagtctgaagattat

SEQ ID NO: 919074 - DNA, 25 bp, Homo sapien
tccaccactcagaggtaagatgggc

SEQ ID NO: 919075 - DNA, 25 bp, Homo sapien
tcctgcagctttgcagtcggacagc

SEQ ID NO: 919076 - DNA, 25 bp, Homo sapien
tcagaggtaagatgggcctgacgcc

SEQ ID NO: 919077 - DNA, 25 bp, Homo sapien
gcagtcggacagctcttcagattca

SEQ ID NO: 919078 - DNA, 25 bp, Homo sapien
tgcatggccagtttggaggtctcca

SEQ ID NO: 919079 - DNA, 25 bp, Homo sapien
gaggaatcatctcctgcatggccag

SEQ ID NO: 919080 - DNA, 25 bp, Homo sapien
ctgtgctgtgtgaggaatcatctcc

SEQ ID NO: 919081 - DNA, 25 bp, Homo sapien
cacagcctcatctgtgctgtgtgag

SEQ ID NO: 919082 - DNA, 25 bp, Homo sapien
cagacagggtgacactccctttaga

SEQ ID NO: 919083 - DNA, 25 bp, Homo sapien
gcagtgcagtcagaagcagtagcag

SEQ ID NO: 919084 - DNA, 25 bp, Homo sapien
tgcagtgcagtcagaagcagtagca

SEQ ID NO: 919085 - DNA, 25 bp, Homo sapien
gacagggtgacactccctttagaga

SEQ ID NO: 919086 - DNA, 25 bp, Homo sapien
gaagctccacaccagcacgatggac

SEQ ID NO: 919087 - DNA, 25 bp, Homo sapien
acaccagcacgatggaccagcatgg

SEQ ID NO: 919088 - DNA, 25 bp, Homo sapien
acgatggaccagcatgggaaccaga

SEQ ID NO: 919089 - DNA, 25 bp, Homo sapien
cagcacgatggaccagcatgggaac

SEQ ID NO: 919090 - DNA, 25 bp, Homo sapien
gaataactgatttgagaacccatta

SEQ ID NO: 919091 - DNA, 25 bp, Homo sapien
gagaataactgatttgagaacccat

SEQ ID NO: 919092 - DNA, 25 bp, Homo sapien
agaataactgatttgagaacccatt

SEQ ID NO: 919093 - DNA, 25 bp, Homo sapien
gctttgtcacattcaacacattgaa

SEQ ID NO: 919094 - DNA, 25 bp, Homo sapien
tggtaagggtagttgataaatattg

SEQ ID NO: 919095 - DNA, 25 bp, Homo sapien
cattgaaagattttggtaagggtag

SEQ ID NO: 919096 - DNA, 25 bp, Homo sapien
cattcaacacattgaaagattttgg

SEQ ID NO: 919097 - DNA, 25 bp, Homo sapien
tcaaagtggccctgggcaaggtgga

SEQ ID NO: 919098 - DNA, 25 bp, Homo sapien
ggaggccaggaaagcggtggggctc

SEQ ID NO: 919099 - DNA, 25 bp, Homo sapien
gaggccaggaaagcggtggggctcc

SEQ ID NO: 919100 - DNA, 25 bp, Homo sapien
agtggccctgggcaaggtggagagg

SEQ ID NO: 919101 - DNA, 25 bp, Homo sapien
tggagttgagtttgaaggcaccctg

SEQ ID NO: 919102 - DNA, 25 bp, Homo sapien
gagttgagtttgaaggcaccctggg

SEQ ID NO: 919103 - DNA, 25 bp, Homo sapien
ggagttgagtttgaaggcaccctgg

SEQ ID NO: 919104 - DNA, 25 bp, Homo sapien
agtcccggaagcacaccttgggagg

SEQ ID NO: 919105 - DNA, 25 bp, Homo sapien
gagtcccggaagcacaccttgggag

SEQ ID NO: 919106 - DNA, 25 bp, Homo sapien
tgagtcccggaagcacaccttggga

SEQ ID NO: 919107 - DNA, 25 bp, Homo sapien
cgaagataatcaggtatcagcagct

SEQ ID NO: 919108 - DNA, 25 bp, Homo sapien
tcacgaagataatcaggtatcagca

SEQ ID NO: 919109 - DNA, 25 bp, Homo sapien
tctcctccatcacgaagataatcag

SEQ ID NO: 919110 - DNA, 25 bp, Homo sapien
taatcaggtatcagcagcttccact

SEQ ID NO: 919111 - DNA, 25 bp, Homo sapien
acccgtgagctctaaattcgtctga

SEQ ID NO: 919112 - DNA, 25 bp, Homo sapien
aattcgtctgagttggtaaacctgg

SEQ ID NO: 919113 - DNA, 25 bp, Homo sapien
aaaaagcaggtttggcacccgtgag

SEQ ID NO: 919114 - DNA, 25 bp, Homo sapien
ggtaaacctggactctccacagctc

SEQ ID NO: 919115 - DNA, 25 bp, Homo sapien
tgccgtggagaggagaactgctttt

SEQ ID NO: 919116 - DNA, 25 bp, Homo sapien
catttggttgaatttagcggtgtgc

SEQ ID NO: 919117 - DNA, 25 bp, Homo sapien
ttagcggtgtgcctacatttattat

SEQ ID NO: 919118 - DNA, 25 bp, Homo sapien
actgccgtggagaggagaactgctt

SEQ ID NO: 919119 - DNA, 25 bp, Homo sapien
catctgcttccgttagagtgacagc

SEQ ID NO: 919120 - DNA, 25 bp, Homo sapien
ttctgttggcagttgttggaagtgc

SEQ ID NO: 919121 - DNA, 25 bp, Homo sapien
gagtgacagctaccttgtcctggtg

SEQ ID NO: 919122 - DNA, 25 bp, Homo sapien
ttggacccgcatcggagccgcgcag

SEQ ID NO: 919123 - DNA, 25 bp, Homo sapien
tcaagacagccccagcccatgtcag

SEQ ID NO: 919124 - DNA, 25 bp, Homo sapien
ctatgcagactcaagacagccccag

SEQ ID NO: 919125 - DNA, 25 bp, Homo sapien
agacagccccagcccatgtcagcac

SEQ ID NO: 919126 - DNA, 25 bp, Homo sapien
tatgcagactcaagacagccccagc

SEQ ID NO: 919127 - DNA, 25 bp, Homo sapien
caggagctaaaacggagtcaagggt

SEQ ID NO: 919128 - DNA, 25 bp, Homo sapien
gggagcccatttggcaatgcgggca

SEQ ID NO: 919129 - DNA, 25 bp, Homo sapien
cccatttggcaatgcgggcaggaag

SEQ ID NO: 919130 - DNA, 25 bp, Homo sapien
gagcccatttggcaatgcgggcagg

SEQ ID NO: 919131 - DNA, 25 bp, Homo sapien
tgctgccggcccagggacgaagtgg

SEQ ID NO: 919132 - DNA, 25 bp, Homo sapien
ccatagtcggtgctggtgctcctgc

SEQ ID NO: 919133 - DNA, 25 bp, Homo sapien
gactagatgaagtccagaggcgccc

SEQ ID NO: 919134 - DNA, 25 bp, Homo sapien
acgaagtggacgtgcgggcaggacc

SEQ ID NO: 919135 - DNA, 25 bp, Homo sapien
gcggccccgcgccgtcatctccaaa

SEQ ID NO: 919136 - DNA, 25 bp, Homo sapien
tgctgctggtaccagccgcggcccc

SEQ ID NO: 919137 - DNA, 25 bp, Homo sapien
ccgcggccccgcgccgtcatctcca

SEQ ID NO: 919138 - DNA, 25 bp, Homo sapien
ggccccgcgccgtcatctccaaagc

SEQ ID NO: 919139 - DNA, 25 bp, Homo sapien
ggtgatggtgtgactccgacgttcc

SEQ ID NO: 919140 - DNA, 25 bp, Homo sapien
tggtgtgactccgacgttcccctgg

SEQ ID NO: 919141 - DNA, 25 bp, Homo sapien
ccgacgttcccctggggcactggag

SEQ ID NO: 919142 - DNA, 25 bp, Homo sapien
gatggtgtgactccgacgttcccct

SEQ ID NO: 919143 - DNA, 25 bp, Homo sapien
ctgcacctgcgtctgcactccggct

SEQ ID NO: 919144 - DNA, 25 bp, Homo sapien
cacctgcgtctgcactccggctcgg

SEQ ID NO: 919145 - DNA, 25 bp, Homo sapien
cactccggctcggttccagcgcggt

SEQ ID NO: 919146 - DNA, 25 bp, Homo sapien
actccggctcggttccagcgcggtg

SEQ ID NO: 919147 - DNA, 25 bp, Homo sapien
gaccgtccgcggctcttcagcgggc

SEQ ID NO: 919148 - DNA, 25 bp, Homo sapien
accgtccgcggctcttcagcgggcg

SEQ ID NO: 919149 - DNA, 25 bp, Homo sapien
agcagcgtggtgcgcaagccggcca

SEQ ID NO: 919150 - DNA, 25 bp, Homo sapien
cagcagcgtggtgcgcaagccggcc

SEQ ID NO: 919151 - DNA, 25 bp, Homo sapien
gcagcgtggtgcgcaagccggccac

SEQ ID NO: 919152 - DNA, 25 bp, Homo sapien
ccgcgtggctgctcccacgtgttgg

SEQ ID NO: 919153 - DNA, 25 bp, Homo sapien
agcaccccgcgtggctgctcccacg

SEQ ID NO: 919154 - DNA, 25 bp, Homo sapien
gtggctgctcccacgtgttggcgcc

SEQ ID NO: 919155 - DNA, 25 bp, Homo sapien
accccgcgtggctgctcccacgtgt

SEQ ID NO: 919156 - DNA, 25 bp, Homo sapien
ctcgtgcaggtgcctgcagccgcac

SEQ ID NO: 919157 - DNA, 25 bp, Homo sapien
gcgcaggcacgggggtaggcacgcg

SEQ ID NO: 919158 - DNA, 25 bp, Homo sapien
gcaggcacgggggtaggcacgcggc

SEQ ID NO: 919159 - DNA, 25 bp, Homo sapien
cgcaggcacgggggtaggcacgcgg

SEQ ID NO: 919160 - DNA, 25 bp, Homo sapien
caggcacgggggtaggcacgcggcc

SEQ ID NO: 919161 - DNA, 25 bp, Homo sapien
ttataaaatctattatttctccttc

SEQ ID NO: 919162 - DNA, 25 bp, Homo sapien
tcctgctgttgaatcattttgagat

SEQ ID NO: 919163 - DNA, 25 bp, Homo sapien
ttttgagatgctcgaacttgtcctg

SEQ ID NO: 919164 - DNA, 25 bp, Homo sapien
atctcctgctgttgaatcattttga

SEQ ID NO: 919165 - DNA, 25 bp, Homo sapien
gcaaattatatccaacttcagtact

SEQ ID NO: 919166 - DNA, 25 bp, Homo sapien
tagtgcaaattatatccaacttcag

SEQ ID NO: 919167 - DNA, 25 bp, Homo sapien
gtgcaaattatatccaacttcagta

SEQ ID NO: 919168 - DNA, 25 bp, Homo sapien
ttagtgcaaattatatccaacttca

SEQ ID NO: 919169 - DNA, 25 bp, Homo sapien
ggcttctttaaatgttgcttctttc

SEQ ID NO: 919170 - DNA, 25 bp, Homo sapien
cttctttaaatgttgcttctttctc

SEQ ID NO: 919171 - DNA, 25 bp, Homo sapien
ttggcttctttaaatgttgcttctt

SEQ ID NO: 919172 - DNA, 25 bp, Homo sapien
ttttggcttctttaaatgttgcttc

SEQ ID NO: 919173 - DNA, 25 bp, Homo sapien
ttgcctctgacattgatcatagaac

SEQ ID NO: 919174 - DNA, 25 bp, Homo sapien
gcctctgacattgatcatagaactc

SEQ ID NO: 919175 - DNA, 25 bp, Homo sapien
ttcttgcctctgacattgatcatag

SEQ ID NO: 919176 - DNA, 25 bp, Homo sapien
ttcttcttgcctctgacattgatca

SEQ ID NO: 919177 - DNA, 25 bp, Homo sapien
aactggctggttcccacatctgcaa

SEQ ID NO: 919178 - DNA, 25 bp, Homo sapien
actggctggttcccacatctgcaaa

SEQ ID NO: 919179 - DNA, 25 bp, Homo sapien
taactggctggttcccacatctgca

SEQ ID NO: 919180 - DNA, 25 bp, Homo sapien
gtatctcagagcttaatgaagtcac

SEQ ID NO: 919181 - DNA, 25 bp, Homo sapien
gcgtatctcagagcttaatgaagtc

SEQ ID NO: 919182 - DNA, 25 bp, Homo sapien
gaagcgtatctcagagcttaatgaa

SEQ ID NO: 919183 - DNA, 25 bp, Homo sapien
aaagaagcgtatctcagagcttaat

SEQ ID NO: 919184 - DNA, 25 bp, Homo sapien
cccaagggtagtaacagcctctgac

SEQ ID NO: 919185 - DNA, 25 bp, Homo sapien
tagtaacagcctctgaccacccttt

SEQ ID NO: 919186 - DNA, 25 bp, Homo sapien
aagggtagtaacagcctctgaccac

SEQ ID NO: 919187 - DNA, 25 bp, Homo sapien
ctccccaagggtagtaacagcctct

SEQ ID NO: 919188 - DNA, 25 bp, Homo sapien
ctccctaccacagcaaacggtaaca

SEQ ID NO: 919189 - DNA, 25 bp, Homo sapien
tccctaccacagcaaacggtaacag

SEQ ID NO: 919190 - DNA, 25 bp, Homo sapien
cctaccacagcaaacggtaacagtc

SEQ ID NO: 919191 - DNA, 25 bp, Homo sapien
ctaccacagcaaacggtaacagtcc

SEQ ID NO: 919192 - DNA, 25 bp, Homo sapien
gaggagttcgcttgagcagcagttt

SEQ ID NO: 919193 - DNA, 25 bp, Homo sapien
ggagttcgcttgagcagcagtttct

SEQ ID NO: 919194 - DNA, 25 bp, Homo sapien
aggagttcgcttgagcagcagtttc

SEQ ID NO: 919195 - DNA, 25 bp, Homo sapien
tgaggagttcgcttgagcagcagtt

SEQ ID NO: 919196 - DNA, 25 bp, Homo sapien
tggcaatcagcggtataatgttcac

SEQ ID NO: 919197 - DNA, 25 bp, Homo sapien
tcatttttagaaattgtgtctgctt

SEQ ID NO: 919198 - DNA, 25 bp, Homo sapien
tgctttggcaatcagcggtataatg

SEQ ID NO: 919199 - DNA, 25 bp, Homo sapien
ttttagaaattgtgtctgctttggc

SEQ ID NO: 919200 - DNA, 25 bp, Homo sapien
cccataagaattagtaacctgaatt

SEQ ID NO: 919201 - DNA, 25 bp, Homo sapien
acccataagaattagtaacctgaat

SEQ ID NO: 919202 - DNA, 25 bp, Homo sapien
ccataagaattagtaacctgaatta

SEQ ID NO: 919203 - DNA, 25 bp, Homo sapien
ataagaattagtaacctgaattaat

SEQ ID NO: 919204 - DNA, 25 bp, Homo sapien
cagagcctcttcatcaataggtgag

SEQ ID NO: 919205 - DNA, 25 bp, Homo sapien
catatcctgctttgatggactggaa

SEQ ID NO: 919206 - DNA, 25 bp, Homo sapien
actggaagatgagacgtgctttacg

SEQ ID NO: 919207 - DNA, 25 bp, Homo sapien
gagacgtgctttacgcagagcctct

SEQ ID NO: 919208 - DNA, 25 bp, Homo sapien
aaatcttgtatcttggtcatgtggc

SEQ ID NO: 919209 - DNA, 25 bp, Homo sapien
cctcaaatcttgtatcttggtcatg

SEQ ID NO: 919210 - DNA, 25 bp, Homo sapien
aactgcctcaaatcttgtatcttgg

SEQ ID NO: 919211 - DNA, 25 bp, Homo sapien
tgcctcaaatcttgtatcttggtca

SEQ ID NO: 919212 - DNA, 25 bp, Homo sapien
accatcttccttgcgagattcccca

SEQ ID NO: 919213 - DNA, 25 bp, Homo sapien
cataccatcttccttgcgagattcc

SEQ ID NO: 919214 - DNA, 25 bp, Homo sapien
catcttccttgcgagattccccagc

SEQ ID NO: 919215 - DNA, 25 bp, Homo sapien
atcttccttgcgagattccccagca

SEQ ID NO: 919216 - DNA, 25 bp, Homo sapien
gcagagatggtacaaggtacaccac

SEQ ID NO: 919217 - DNA, 25 bp, Homo sapien
ggtacaaggtacaccacaagggcag

SEQ ID NO: 919218 - DNA, 25 bp, Homo sapien
gatggtacaaggtacaccacaaggg

SEQ ID NO: 919219 - DNA, 25 bp, Homo sapien
acaaggtacaccacaagggcagtca

SEQ ID NO: 919220 - DNA, 25 bp, Homo sapien
cctagggcgtacttcaagagcctgg

SEQ ID NO: 919221 - DNA, 25 bp, Homo sapien
caagcatgagaaagcgaaggtgaag

SEQ ID NO: 919222 - DNA, 25 bp, Homo sapien
gtgaaggtcagtggccctaaatgaa

SEQ ID NO: 919223 - DNA, 25 bp, Homo sapien
cctggaaattagagggcacaagcat

SEQ ID NO: 919224 - DNA, 25 bp, Homo sapien
ttcagaagaaaagggcagctgactg

SEQ ID NO: 919225 - DNA, 25 bp, Homo sapien
atgagacattcttgtggggagtgac

SEQ ID NO: 919226 - DNA, 25 bp, Homo sapien
attcagaagaaaagggcagctgact

SEQ ID NO: 919227 - DNA, 25 bp, Homo sapien
agacattcttgtggggagtgacttt

SEQ ID NO: 919228 - DNA, 25 bp, Homo sapien
catgcttgaagtgtcagcagcaccc

SEQ ID NO: 919229 - DNA, 25 bp, Homo sapien
gaagtcttaggataggtgatcggca

SEQ ID NO: 919230 - DNA, 25 bp, Homo sapien
tgtaacctggagcaccaccacaatt

SEQ ID NO: 919231 - DNA, 25 bp, Homo sapien
cagcagagctgacatggacaaaaca

SEQ ID NO: 919232 - DNA, 25 bp, Homo sapien
ggttctgagacagttttggattgga

SEQ ID NO: 919233 - DNA, 25 bp, Homo sapien
gttctgagacagttttggattggaa

SEQ ID NO: 919234 - DNA, 25 bp, Homo sapien
ccttcccaggtcattccaggggtat

SEQ ID NO: 919235 - DNA, 25 bp, Homo sapien
gcattattttcccttcccaggtcat

SEQ ID NO: 919236 - DNA, 25 bp, Homo sapien
gaaaaccaaaactgaagatggcatt

SEQ ID NO: 919237 - DNA, 25 bp, Homo sapien
ccaaaactgaagatggcattatttt

SEQ ID NO: 919238 - DNA, 25 bp, Homo sapien
cagagtaataagcatgagaccaggc

SEQ ID NO: 919239 - DNA, 25 bp, Homo sapien
agcccttagctaccctttgctggaa

SEQ ID NO: 919240 - DNA, 25 bp, Homo sapien
ccttagctaccctttgctggaatgc

SEQ ID NO: 919241 - DNA, 25 bp, Homo sapien
tgctagagacacttcgtggaagacc

SEQ ID NO: 919242 - DNA, 25 bp, Homo sapien
tgcagcccttagctaccctttgctg

SEQ ID NO: 919243 - DNA, 25 bp, Homo sapien
ttgacttgtatttccgtggcttccc

SEQ ID NO: 919244 - DNA, 25 bp, Homo sapien
tgacttgtatttccgtggcttcccc

SEQ ID NO: 919245 - DNA, 25 bp, Homo sapien
ctttgacttgtatttccgtggcttc

SEQ ID NO: 919246 - DNA, 25 bp, Homo sapien
ccctttgacttgtatttccgtggct

SEQ ID NO: 919247 - DNA, 25 bp, Homo sapien
ttcttgaaaagggttgcccagctct

SEQ ID NO: 919248 - DNA, 25 bp, Homo sapien
tcttgaaaagggttgcccagctctg

SEQ ID NO: 919249 - DNA, 25 bp, Homo sapien
gtgttcttgaaaagggttgcccagc

SEQ ID NO: 919250 - DNA, 25 bp, Homo sapien
gtgtgttcttgaaaagggttgccca

SEQ ID NO: 919251 - DNA, 25 bp, Homo sapien
aggcgtcgatgagccggcgcagagg

SEQ ID NO: 919252 - DNA, 25 bp, Homo sapien
taggcgtcgatgagccggcgcagag

SEQ ID NO: 919253 - DNA, 25 bp, Homo sapien
tagtagctccgcactgaagccacca

SEQ ID NO: 919254 - DNA, 25 bp, Homo sapien
tggtactggtagtagctccgcactg

SEQ ID NO: 919255 - DNA, 25 bp, Homo sapien
tgaagccaccacagtcagagcgatc

SEQ ID NO: 919256 - DNA, 25 bp, Homo sapien
ttcacccggtggtactggtagtagc

SEQ ID NO: 919257 - DNA, 25 bp, Homo sapien
cagctctggggttgcaccaacagga

SEQ ID NO: 919258 - DNA, 25 bp, Homo sapien
agctctggggttgcaccaacaggaa

SEQ ID NO: 919259 - DNA, 25 bp, Homo sapien
ggtccttcatggtgtctgagtaatc

SEQ ID NO: 919260 - DNA, 25 bp, Homo sapien
gtccttcatggtgtctgagtaatca

SEQ ID NO: 919261 - DNA, 25 bp, Homo sapien
ccttcatggtgtctgagtaatcatc

SEQ ID NO: 919262 - DNA, 25 bp, Homo sapien
caggtccttcatggtgtctgagtaa

SEQ ID NO: 919263 - DNA, 25 bp, Homo sapien
tgtacatgatgacgcccgtgctcca

SEQ ID NO: 919264 - DNA, 25 bp, Homo sapien
gcagcatgtacatgatgacgcccgt

SEQ ID NO: 919265 - DNA, 25 bp, Homo sapien
tggtagatgctgctcatgatcatcc

SEQ ID NO: 919266 - DNA, 25 bp, Homo sapien
agccagcagcatgtacatgatgacg

SEQ ID NO: 919267 - DNA, 25 bp, Homo sapien
atggagcactccatgatctcagggc

SEQ ID NO: 919268 - DNA, 25 bp, Homo sapien
ctccttccgtagcccggatggtcct

SEQ ID NO: 919269 - DNA, 25 bp, Homo sapien
tggagcactccatgatctcagggcc

SEQ ID NO: 919270 - DNA, 25 bp, Homo sapien
cggatggtcctcattcatggagcac

SEQ ID NO: 919271 - DNA, 25 bp, Homo sapien
ccatagttctcgcagtggacattgt

SEQ ID NO: 919272 - DNA, 25 bp, Homo sapien
tagttctcgcagtggacattgttag

SEQ ID NO: 919273 - DNA, 25 bp, Homo sapien
cgcagtggacattgttagtaacatc

SEQ ID NO: 919274 - DNA, 25 bp, Homo sapien
ctgcttccatagttctcgcagtgga

SEQ ID NO: 919275 - DNA, 25 bp, Homo sapien
ctgtcataaataaacagcaagagtt

SEQ ID NO: 919276 - DNA, 25 bp, Homo sapien
tcataaataaacagcaagagtttgc

SEQ ID NO: 919277 - DNA, 25 bp, Homo sapien
cataaataaacagcaagagtttgct

SEQ ID NO: 919278 - DNA, 25 bp, Homo sapien
aacagcaagagtttgcttctgttaa

SEQ ID NO: 919279 - DNA, 25 bp, Homo sapien
tggatatacgtggggtggcaatact

SEQ ID NO: 919280 - DNA, 25 bp, Homo sapien
acgtggggtggcaatactctgtatt

SEQ ID NO: 919281 - DNA, 25 bp, Homo sapien
gggtggcaatactctgtattgtcag

SEQ ID NO: 919282 - DNA, 25 bp, Homo sapien
tatacgtggggtggcaatactctgt

SEQ ID NO: 919283 - DNA, 25 bp, Homo sapien
tctttttagttctatgagaaggacc

SEQ ID NO: 919284 - DNA, 25 bp, Homo sapien
tttagttctatgagaaggacctggg

SEQ ID NO: 919285 - DNA, 25 bp, Homo sapien
tagttctatgagaaggacctgggta

SEQ ID NO: 919286 - DNA, 25 bp, Homo sapien
gttctatgagaaggacctgggtact

SEQ ID NO: 919287 - DNA, 25 bp, Homo sapien
aactatcttactaccataacgtgtg

SEQ ID NO: 919288 - DNA, 25 bp, Homo sapien
aaactatcttactaccataacgtgt

SEQ ID NO: 919289 - DNA, 25 bp, Homo sapien
actatcttactaccataacgtgtga

SEQ ID NO: 919290 - DNA, 25 bp, Homo sapien
attaccatattgcttattgcagggt

SEQ ID NO: 919291 - DNA, 25 bp, Homo sapien
ttaccatattgcttattgcagggtt

SEQ ID NO: 919292 - DNA, 25 bp, Homo sapien
taccatattgcttattgcagggttt

SEQ ID NO: 919293 - DNA, 25 bp, Homo sapien
ctgagggtggactttgccacattat

SEQ ID NO: 919294 - DNA, 25 bp, Homo sapien
aaggcctgagggtggactttgccac

SEQ ID NO: 919295 - DNA, 25 bp, Homo sapien
ggcctgagggtggactttgccacat

SEQ ID NO: 919296 - DNA, 25 bp, Homo sapien
tgaattctcttacgttcaattaagg

SEQ ID NO: 919297 - DNA, 25 bp, Homo sapien
gaatgccacttaaaagcttggtcac

SEQ ID NO: 919298 - DNA, 25 bp, Homo sapien
ttatgtttagcaagacttgaatgcc

SEQ ID NO: 919299 - DNA, 25 bp, Homo sapien
tttagcaagacttgaatgccactta

SEQ ID NO: 919300 - DNA, 25 bp, Homo sapien
ttgaatgccacttaaaagcttggtc

SEQ ID NO: 919301 - DNA, 25 bp, Homo sapien
gctgaggagcgcctaaagtcttggc

SEQ ID NO: 919302 - DNA, 25 bp, Homo sapien
gtaagtgctgaggagcgcctaaagt

SEQ ID NO: 919303 - DNA, 25 bp, Homo sapien
ctgaggagcgcctaaagtcttggcc

SEQ ID NO: 919304 - DNA, 25 bp, Homo sapien
aagtgctgaggagcgcctaaagtct

SEQ ID NO: 919305 - DNA, 25 bp, Homo sapien
ctagtaaggttcgaggataagctaa

SEQ ID NO: 919306 - DNA, 25 bp, Homo sapien
ttcacaggcatagggttttctctag

SEQ ID NO: 919307 - DNA, 25 bp, Homo sapien
ttcttcacaggcatagggttttctc

SEQ ID NO: 919308 - DNA, 25 bp, Homo sapien
ttcgaggataagctaaaggcttggc

SEQ ID NO: 919309 - DNA, 25 bp, Homo sapien
tcagtgagggttgaggatacgctaa

SEQ ID NO: 919310 - DNA, 25 bp, Homo sapien
gtcagtgagggttgaggatacgcta

SEQ ID NO: 919311 - DNA, 25 bp, Homo sapien
ctgaggagcgcctaaaggcttggcc

SEQ ID NO: 919312 - DNA, 25 bp, Homo sapien
gtaagtgctgaggagcgcctaaagg

SEQ ID NO: 919313 - DNA, 25 bp, Homo sapien
gatgttgatttaggtgtgaaagcat

SEQ ID NO: 919314 - DNA, 25 bp, Homo sapien
ctgatgttgatttaggtgtgaaagc

SEQ ID NO: 919315 - DNA, 25 bp, Homo sapien
tgatgttgatttaggtgtgaaagca

SEQ ID NO: 919316 - DNA, 25 bp, Homo sapien
gttttatctctattggaatttgaaa

SEQ ID NO: 919317 - DNA, 25 bp, Homo sapien
tccagtatatcttgttttatctcta

SEQ ID NO: 919318 - DNA, 25 bp, Homo sapien
tctttccagtatatcttgttttatc

SEQ ID NO: 919319 - DNA, 25 bp, Homo sapien
tgatttgccatatttgttacatttg

SEQ ID NO: 919320 - DNA, 25 bp, Homo sapien
caaagactttgacatatttatgagt

SEQ ID NO: 919321 - DNA, 25 bp, Homo sapien
gttgacaaacattggttaacttcac

SEQ ID NO: 919322 - DNA, 25 bp, Homo sapien
acaaacattggttaacttcactata

SEQ ID NO: 919323 - DNA, 25 bp, Homo sapien
tgacaaacattggttaacttcacta

SEQ ID NO: 919324 - DNA, 25 bp, Homo sapien
tgttttgggtagttgacaaacattg

SEQ ID NO: 919325 - DNA, 25 bp, Homo sapien
ggagtgaatctttgatgccctgctc

SEQ ID NO: 919326 - DNA, 25 bp, Homo sapien
tcttgggtgaaatgggaatgcgtaa

SEQ ID NO: 919327 - DNA, 25 bp, Homo sapien
tttccatatgttcttggtattactt

SEQ ID NO: 919328 - DNA, 25 bp, Homo sapien
atgttcttggtattactttttggag

SEQ ID NO: 919329 - DNA, 25 bp, Homo sapien
cagtgtctcccaagaaatcggtgac

SEQ ID NO: 919330 - DNA, 25 bp, Homo sapien
tgcatgcgcaacaaagaggagaaca

SEQ ID NO: 919331 - DNA, 25 bp, Homo sapien
tagatatgccatcaaatgcatgcgc

SEQ ID NO: 919332 - DNA, 25 bp, Homo sapien
catttaatagagtgacagtgtctcc

SEQ ID NO: 919333 - DNA, 25 bp, Homo sapien
atttctctttatattctgggactct

SEQ ID NO: 919334 - DNA, 25 bp, Homo sapien
atattctgggactctttattttgct

SEQ ID NO: 919335 - DNA, 25 bp, Homo sapien
tctctttatattctgggactcttta

SEQ ID NO: 919336 - DNA, 25 bp, Homo sapien
attctgggactctttattttgctcc

SEQ ID NO: 919337 - DNA, 25 bp, Homo sapien
taaattccgctgagcacaatccagg

SEQ ID NO: 919338 - DNA, 25 bp, Homo sapien
aattccgctgagcacaatccaggca

SEQ ID NO: 919339 - DNA, 25 bp, Homo sapien
atataaattccgctgagcacaatcc

SEQ ID NO: 919340 - DNA, 25 bp, Homo sapien
ataaattccgctgagcacaatccag

SEQ ID NO: 919341 - DNA, 25 bp, Homo sapien
ccacgggcggaagaccgagacttgc

SEQ ID NO: 919342 - DNA, 25 bp, Homo sapien
ccatggtgtctctgttaccaaagac

SEQ ID NO: 919343 - DNA, 25 bp, Homo sapien
tgtctctgttaccaaagaccaattg

SEQ ID NO: 919344 - DNA, 25 bp, Homo sapien
gctggttgggattagatcccaggac

SEQ ID NO: 919345 - DNA, 25 bp, Homo sapien
ctcgatgtgggtggcaacttagctc

SEQ ID NO: 919346 - DNA, 25 bp, Homo sapien
ggttgggtgtcggttctgcccctgc

SEQ ID NO: 919347 - DNA, 25 bp, Homo sapien
gttgggtgtcggttctgcccctgca

SEQ ID NO: 919348 - DNA, 25 bp, Homo sapien
ctgcaggtgccacatcaactgctgc

SEQ ID NO: 919349 - DNA, 25 bp, Homo sapien
tgccacatcaactgctgcacccagg

SEQ ID NO: 919350 - DNA, 25 bp, Homo sapien
tattttgcagagtgagcgtagtaag

SEQ ID NO: 919351 - DNA, 25 bp, Homo sapien
caggacttggttttgggaatgctac

SEQ ID NO: 919352 - DNA, 25 bp, Homo sapien
tctgttttagcatgatttcagacag

SEQ ID NO: 919353 - DNA, 25 bp, Homo sapien
gatttcagacagagtcgcaggactt

SEQ ID NO: 919354 - DNA, 25 bp, Homo sapien
agcacaggtagtggccaagaaaacc

SEQ ID NO: 919355 - DNA, 25 bp, Homo sapien
cttcggagctgtgtataaatagagg

SEQ ID NO: 919356 - DNA, 25 bp, Homo sapien
ccaggcagataattagcagatttcc

SEQ ID NO: 919357 - DNA, 25 bp, Homo sapien
cttccaacaggtttgcagggtatct

SEQ ID NO: 919358 - DNA, 25 bp, Homo sapien
ccacctcggcctcatttaagttaat

SEQ ID NO: 919359 - DNA, 25 bp, Homo sapien
ccgtctcccggattatatatataaa

SEQ ID NO: 919360 - DNA, 25 bp, Homo sapien
gataatatacaaacacgtagataga

SEQ ID NO: 919361 - DNA, 25 bp, Homo sapien
taatctcaatcaactttgaccatac

SEQ ID NO: 919362 - DNA, 25 bp, Homo sapien
caaatccaagaagtcatgcatggct

SEQ ID NO: 919363 - DNA, 25 bp, Homo sapien
aaaggcgtacctgaactagtgactc

SEQ ID NO: 919364 - DNA, 25 bp, Homo sapien
caatggtcggtaaaacagaagaaca

SEQ ID NO: 919365 - DNA, 25 bp, Homo sapien
taaacatgtgtgagaccaaatccaa

SEQ ID NO: 919366 - DNA, 25 bp, Homo sapien
ttgaaaagattgtccaaatggaagc

SEQ ID NO: 919367 - DNA, 25 bp, Homo sapien
tataaaaattggctcccaacagagt

SEQ ID NO: 919368 - DNA, 25 bp, Homo sapien
gacctctgctctaaaaagagacact

SEQ ID NO: 919369 - DNA, 25 bp, Homo sapien
cacacaaggctgttagttatttaaa

SEQ ID NO: 919370 - DNA, 25 bp, Homo sapien
tgagatagtccaggttaatcaggat

SEQ ID NO: 919371 - DNA, 25 bp, Homo sapien
tggactgcaggcctaagcccactga

SEQ ID NO: 919372 - DNA, 25 bp, Homo sapien
tcttcaccattaagacgaccatagt

SEQ ID NO: 919373 - DNA, 25 bp, Homo sapien
cgaccatagtccacttatgacacta

SEQ ID NO: 919374 - DNA, 25 bp, Homo sapien
gcccttgtccacttagtgatgctcc

SEQ ID NO: 919375 - DNA, 25 bp, Homo sapien
tcacctggcccttgtccacttagtg

SEQ ID NO: 919376 - DNA, 25 bp, Homo sapien
tcactgtgagcttcttggcatctct

SEQ ID NO: 919377 - DNA, 25 bp, Homo sapien
ctctggacctctttgagtcacagta

SEQ ID NO: 919378 - DNA, 25 bp, Homo sapien
catagagggatgagggctctccatc

SEQ ID NO: 919379 - DNA, 25 bp, Homo sapien
ttctacatgcatagagggatgaggg

SEQ ID NO: 919380 - DNA, 25 bp, Homo sapien
tacatgcatagagggatgagggctc

SEQ ID NO: 919381 - DNA, 25 bp, Homo sapien
catgcatagagggatgagggctctc

SEQ ID NO: 919382 - DNA, 25 bp, Homo sapien
gaaaactatgctgccaagaacttgg

SEQ ID NO: 919383 - DNA, 25 bp, Homo sapien
tatcaaatttcttccaaccgggcca

SEQ ID NO: 919384 - DNA, 25 bp, Homo sapien
gggagaggcaatcccatcacttgag

SEQ ID NO: 919385 - DNA, 25 bp, Homo sapien
cacttaagatgctcctgttggtaga

SEQ ID NO: 919386 - DNA, 25 bp, Homo sapien
tcaagccaatggtaggagaagcgct

SEQ ID NO: 919387 - DNA, 25 bp, Homo sapien
ggcgcagtgtcgcatgacgtagaaa

SEQ ID NO: 919388 - DNA, 25 bp, Homo sapien
agaatgcagtgaaaccaggccgagg

SEQ ID NO: 919389 - DNA, 25 bp, Homo sapien
gacgtagaaaatgaatcacaggccc

SEQ ID NO: 919390 - DNA, 25 bp, Homo sapien
agatggacctccagccacggccggg

SEQ ID NO: 919391 - DNA, 25 bp, Homo sapien
cacggccgggccagactcgtggaca

SEQ ID NO: 919392 - DNA, 25 bp, Homo sapien
gccacggccgggccagactcgtgga

SEQ ID NO: 919393 - DNA, 25 bp, Homo sapien
cagatggacctccagccacggccgg

SEQ ID NO: 919394 - DNA, 25 bp, Homo sapien
ggacgtgacaccacaatgcacaggg

SEQ ID NO: 919395 - DNA, 25 bp, Homo sapien
ctaggggacaaatggacgtgacacc

SEQ ID NO: 919396 - DNA, 25 bp, Homo sapien
gggccttttggcatttctgcgctgg

SEQ ID NO: 919397 - DNA, 25 bp, Homo sapien
gccttttggcatttctgcgctggaa

SEQ ID NO: 919398 - DNA, 25 bp, Homo sapien
catgtgagacaagggtggtggccgc

SEQ ID NO: 919399 - DNA, 25 bp, Homo sapien
tcatgtgagacaagggtggtggccg

SEQ ID NO: 919400 - DNA, 25 bp, Homo sapien
gtggtggccgctctggaggtgcctg

SEQ ID NO: 919401 - DNA, 25 bp, Homo sapien
gtgagacaagggtggtggccgctct

SEQ ID NO: 919402 - DNA, 25 bp, Homo sapien
ccctctgggcttagtccatcctcca

SEQ ID NO: 919403 - DNA, 25 bp, Homo sapien
acactgttgtgcagcttctccacct

SEQ ID NO: 919404 - DNA, 25 bp, Homo sapien
tcctccacactgttgtgcagcttct

SEQ ID NO: 919405 - DNA, 25 bp, Homo sapien
agtccatcctccacactgttgtgca

SEQ ID NO: 919406 - DNA, 25 bp, Homo sapien
atccggtctcgatcccatccagagg

SEQ ID NO: 919407 - DNA, 25 bp, Homo sapien
gtgttccgcgtttgtgctgctccag

SEQ ID NO: 919408 - DNA, 25 bp, Homo sapien
cccatccagaggagcgtttcccaag

SEQ ID NO: 919409 - DNA, 25 bp, Homo sapien
tcaggatctgcagccataggccggt

SEQ ID NO: 919410 - DNA, 25 bp, Homo sapien
agaccccagcgaccagcgggtccat

SEQ ID NO: 919411 - DNA, 25 bp, Homo sapien
tggctgcgcccacaatggctccgaa

SEQ ID NO: 919412 - DNA, 25 bp, Homo sapien
gctgcgcccacaatggctccgaaga

SEQ ID NO: 919413 - DNA, 25 bp, Homo sapien
tgcgcccacaatggctccgaagacc

SEQ ID NO: 919414 - DNA, 25 bp, Homo sapien
tgctggggttgtcccctcggtacca

SEQ ID NO: 919415 - DNA, 25 bp, Homo sapien
gcttgctggggttgtcccctcggta

SEQ ID NO: 919416 - DNA, 25 bp, Homo sapien
cctgctttagcgtgggtgccatgag

SEQ ID NO: 919417 - DNA, 25 bp, Homo sapien
gagaagcagacggcctggttccagc

SEQ ID NO: 919418 - DNA, 25 bp, Homo sapien
cagccctgctttagcgtgggtgcca

SEQ ID NO: 919419 - DNA, 25 bp, Homo sapien
tttagcgtgggtgccatgaggcccc

SEQ ID NO: 919420 - DNA, 25 bp, Homo sapien
tgtccatggaacatacgaccaccat

SEQ ID NO: 919421 - DNA, 25 bp, Homo sapien
gatggtgtccatggaacatacgacc

SEQ ID NO: 919422 - DNA, 25 bp, Homo sapien
ccttgatggtgtccatggaacatac

SEQ ID NO: 919423 - DNA, 25 bp, Homo sapien
tggaacatacgaccaccatggcctc

SEQ ID NO: 919424 - DNA, 25 bp, Homo sapien
cgggacgccatgaccgcgacagtgc

SEQ ID NO: 919425 - DNA, 25 bp, Homo sapien
tcccgcgtctggctgctgtggaact

SEQ ID NO: 919426 - DNA, 25 bp, Homo sapien
cctggagacaagagccgcagagcag

SEQ ID NO: 919427 - DNA, 25 bp, Homo sapien
agcgctgccgtcaggccgtccctgg

SEQ ID NO: 919428 - DNA, 25 bp, Homo sapien
gacccagtctacatggatctttgtc

SEQ ID NO: 919429 - DNA, 25 bp, Homo sapien
tttgatggctaagagcatcgggctc

SEQ ID NO: 919430 - DNA, 25 bp, Homo sapien
caactttgagtgattgccttgaaaa

SEQ ID NO: 919431 - DNA, 25 bp, Homo sapien
tcagaaatatcgtttatgccaaggt

SEQ ID NO: 919432 - DNA, 25 bp, Homo sapien
cgaccacacaaagccgtcaaagact

SEQ ID NO: 919433 - DNA, 25 bp, Homo sapien
gcctcatatcccttgccctgaaatt

SEQ ID NO: 919434 - DNA, 25 bp, Homo sapien
caggaacccaggtccatggggtgca

SEQ ID NO: 919435 - DNA, 25 bp, Homo sapien
tcctcagtatcaaaacaagtcgacc

SEQ ID NO: 919436 - DNA, 25 bp, Homo sapien
gtctggctagcctgtccctggctca

SEQ ID NO: 919437 - DNA, 25 bp, Homo sapien
tgcaaggtggaaaagctgaccaagt

SEQ ID NO: 919438 - DNA, 25 bp, Homo sapien
gaaaccagggcaataggctgctctc

SEQ ID NO: 919439 - DNA, 25 bp, Homo sapien
tgagctgtccctgaggctaaggccc

SEQ ID NO: 919440 - DNA, 25 bp, Homo sapien
acatccatgtaaaaggctctggtga

SEQ ID NO: 919441 - DNA, 25 bp, Homo sapien
aagccacagcccatgtcaaccccct

SEQ ID NO: 919442 - DNA, 25 bp, Homo sapien
tcacatccatgtaaaaggctctggt

SEQ ID NO: 919443 - DNA, 25 bp, Homo sapien
ccatgtaaaaggctctggtgagggt

SEQ ID NO: 919444 - DNA, 25 bp, Homo sapien
acaatggacagcgtctgggacctca

SEQ ID NO: 919445 - DNA, 25 bp, Homo sapien
caatggacagcgtctgggacctcag

SEQ ID NO: 919446 - DNA, 25 bp, Homo sapien
aatggacagcgtctgggacctcagg

SEQ ID NO: 919447 - DNA, 25 bp, Homo sapien
atggacagcgtctgggacctcaggc

SEQ ID NO: 919448 - DNA, 25 bp, Homo sapien
cagggatggcacagaatcagtggcc

SEQ ID NO: 919449 - DNA, 25 bp, Homo sapien
gactcactccccttagccagggatg

SEQ ID NO: 919450 - DNA, 25 bp, Homo sapien
acccgcccgatttaggcaaagatga

SEQ ID NO: 919451 - DNA, 25 bp, Homo sapien
ggtgcacttcgcagcgtcacactct

SEQ ID NO: 919452 - DNA, 25 bp, Homo sapien
ccactcccgttgcatgctgggattg

SEQ ID NO: 919453 - DNA, 25 bp, Homo sapien
gatcaacggccggaagcggctaaaa

SEQ ID NO: 919454 - DNA, 25 bp, Homo sapien
gctgggattgtagttgatcgcctgc

SEQ ID NO: 919455 - DNA, 25 bp, Homo sapien
cgcaggagcaaaccgcgccatgtct

SEQ ID NO: 919456 - DNA, 25 bp, Homo sapien
tccagtgcagttccgccgtgcggag

SEQ ID NO: 919457 - DNA, 25 bp, Homo sapien
ttccgccgtgcggagggaagcttgg

SEQ ID NO: 919458 - DNA, 25 bp, Homo sapien
gcaaaggtccctcctccaccgagct

SEQ ID NO: 919459 - DNA, 25 bp, Homo sapien
caggcttccagtgcagttccgccgt

SEQ ID NO: 919460 - DNA, 25 bp, Homo sapien
ttgtcattgtgacacggtgtctccc

SEQ ID NO: 919461 - DNA, 25 bp, Homo sapien
cattgtgacacggtgtctccccaac

SEQ ID NO: 919462 - DNA, 25 bp, Homo sapien
tgtgacacggtgtctccccaacgtg

SEQ ID NO: 919463 - DNA, 25 bp, Homo sapien
tgacacggtgtctccccaacgtgct

SEQ ID NO: 919464 - DNA, 25 bp, Homo sapien
gtctctggtaacctggcacttccct

SEQ ID NO: 919465 - DNA, 25 bp, Homo sapien
ctggtaacctggcacttcccttttg

SEQ ID NO: 919466 - DNA, 25 bp, Homo sapien
cagtctctggtaacctggcacttcc

SEQ ID NO: 919467 - DNA, 25 bp, Homo sapien
ctctggtaacctggcacttcccttt

SEQ ID NO: 919468 - DNA, 25 bp, Homo sapien
tctctctgggctgccacgaatcccc

SEQ ID NO: 919469 - DNA, 25 bp, Homo sapien
ctgggctgccacgaatccccctgta

SEQ ID NO: 919470 - DNA, 25 bp, Homo sapien
tctctctctgggctgccacgaatcc

SEQ ID NO: 919471 - DNA, 25 bp, Homo sapien
gggctgccacgaatccccctgtact

SEQ ID NO: 919472 - DNA, 25 bp, Homo sapien
cctccggaaattcaggacaactggg

SEQ ID NO: 919473 - DNA, 25 bp, Homo sapien
catacacccataacaggattgagga

SEQ ID NO: 919474 - DNA, 25 bp, Homo sapien
cagtggaataacagtggcatatgca

SEQ ID NO: 919475 - DNA, 25 bp, Homo sapien
aaagcaactcataacagcaggatgg

SEQ ID NO: 919476 - DNA, 25 bp, Homo sapien
gatgatcaagtcatggaactttggc

SEQ ID NO: 919477 - DNA, 25 bp, Homo sapien
gcagtaaggagcattagaatatgac

SEQ ID NO: 919478 - DNA, 25 bp, Homo sapien
aatatgactgaggaccaagtggcag

SEQ ID NO: 919479 - DNA, 25 bp, Homo sapien
cagtaaggagcattagaatatgact

SEQ ID NO: 919480 - DNA, 25 bp, Homo sapien
cagttccaggttctttccaaataag

SEQ ID NO: 919481 - DNA, 25 bp, Homo sapien
cagcccagtgctttattcagacata

SEQ ID NO: 919482 - DNA, 25 bp, Homo sapien
tgattatagagtgtaccgggttgga

SEQ ID NO: 919483 - DNA, 25 bp, Homo sapien
caatgataacatagtgatagtagct

SEQ ID NO: 919484 - DNA, 25 bp, Homo sapien
ctttaaagcagggaggttatcctgg

SEQ ID NO: 919485 - DNA, 25 bp, Homo sapien
taatgcttttccaacggtgtccaca

SEQ ID NO: 919486 - DNA, 25 bp, Homo sapien
tccccagactgcagatatattaggt

SEQ ID NO: 919487 - DNA, 25 bp, Homo sapien
gatcggtgataaacagactaatgct

SEQ ID NO: 919488 - DNA, 25 bp, Homo sapien
ccctcgtccacatagtgaacttctt

SEQ ID NO: 919489 - DNA, 25 bp, Homo sapien
ccaaatctgtttgcatcattgaact

SEQ ID NO: 919490 - DNA, 25 bp, Homo sapien
ttgcccctcgtccacatagtgaact

SEQ ID NO: 919491 - DNA, 25 bp, Homo sapien
ttcttcattgcactgttattgcagt

SEQ ID NO: 919492 - DNA, 25 bp, Homo sapien
catccagaccatactgctgctggta

SEQ ID NO: 919493 - DNA, 25 bp, Homo sapien
aaacgggccatccagaccatactgc

SEQ ID NO: 919494 - DNA, 25 bp, Homo sapien
aacgggccatccagaccatactgct

SEQ ID NO: 919495 - DNA, 25 bp, Homo sapien
cgggccatccagaccatactgctgc

SEQ ID NO: 919496 - DNA, 25 bp, Homo sapien
caagaaggtagttgaataatcccca

SEQ ID NO: 919497 - DNA, 25 bp, Homo sapien
taatccccaaagcctgaggtccctg

SEQ ID NO: 919498 - DNA, 25 bp, Homo sapien
ataatccccaaagcctgaggtccct

SEQ ID NO: 919499 - DNA, 25 bp, Homo sapien
ttacttcttgtcctggaaggttcca

SEQ ID NO: 919500 - DNA, 25 bp, Homo sapien
catgttttctattagctttggtggg

SEQ ID NO: 919501 - DNA, 25 bp, Homo sapien
gcttctcactttgattactcctctg

SEQ ID NO: 919502 - DNA, 25 bp, Homo sapien
tcactttgattactcctctgggttg

SEQ ID NO: 919503 - DNA, 25 bp, Homo sapien
gcatcaaatgagatttgtaaataca

SEQ ID NO: 919504 - DNA, 25 bp, Homo sapien
aaaacatcaaatattcaccatgcat

SEQ ID NO: 919505 - DNA, 25 bp, Homo sapien
ctgcatcaaatgagatttgtaaata

SEQ ID NO: 919506 - DNA, 25 bp, Homo sapien
tgttctaaaacatcaaatattcacc

SEQ ID NO: 919507 - DNA, 25 bp, Homo sapien
aataagtgcaatgggttaataaggc

SEQ ID NO: 919508 - DNA, 25 bp, Homo sapien
ctgagaataagtgcaatgggttaat

SEQ ID NO: 919509 - DNA, 25 bp, Homo sapien
agtgcaatgggttaataaggcggaa

SEQ ID NO: 919510 - DNA, 25 bp, Homo sapien
gcctctgagaataagtgcaatgggt

SEQ ID NO: 919511 - DNA, 25 bp, Homo sapien
atgctccctttctttgcgatctgct

SEQ ID NO: 919512 - DNA, 25 bp, Homo sapien
tttctttgcgatctgctgacgctct

SEQ ID NO: 919513 - DNA, 25 bp, Homo sapien
gctccctttctttgcgatctgctga

SEQ ID NO: 919514 - DNA, 25 bp, Homo sapien
ccctttctttgcgatctgctgacgc

SEQ ID NO: 919515 - DNA, 25 bp, Homo sapien
tgtgacagagctgtttggaacttac

SEQ ID NO: 919516 - DNA, 25 bp, Homo sapien
ctgtgacagagctgtttggaactta

SEQ ID NO: 919517 - DNA, 25 bp, Homo sapien
tgtgaccccattgtgagctgctagc

SEQ ID NO: 919518 - DNA, 25 bp, Homo sapien
gtgaccccattgtgagctgctagct

SEQ ID NO: 919519 - DNA, 25 bp, Homo sapien
gagcagctcctagtgccgatcccca

SEQ ID NO: 919520 - DNA, 25 bp, Homo sapien
cttgtgaccccattgtgagctgcta

SEQ ID NO: 919521 - DNA, 25 bp, Homo sapien
ggagaaaggactcatgactcctggg

SEQ ID NO: 919522 - DNA, 25 bp, Homo sapien
aatgacttattggagaaaggactca

SEQ ID NO: 919523 - DNA, 25 bp, Homo sapien
aaaggactcatgactcctgggcctg

SEQ ID NO: 919524 - DNA, 25 bp, Homo sapien
gagaaaggactcatgactcctgggc

SEQ ID NO: 919525 - DNA, 25 bp, Homo sapien
cttgaaactgtccttggcctgtatg

SEQ ID NO: 919526 - DNA, 25 bp, Homo sapien
acaacagttcgatgaaataaaaggc

SEQ ID NO: 919527 - DNA, 25 bp, Homo sapien
ttgcatgccccttctagcaagatgc

SEQ ID NO: 919528 - DNA, 25 bp, Homo sapien
ttaaggccactatgtgcagctgagg

SEQ ID NO: 919529 - DNA, 25 bp, Homo sapien
ccagtttcaaaagcgtgtagttgtg

SEQ ID NO: 919530 - DNA, 25 bp, Homo sapien
cgccctgcacagaactaacgctatg

SEQ ID NO: 919531 - DNA, 25 bp, Homo sapien
aattgatgctccgaaaagatgccca

SEQ ID NO: 919532 - DNA, 25 bp, Homo sapien
tatgccaacgccagtttcaaaagcg

SEQ ID NO: 919533 - DNA, 25 bp, Homo sapien
gggagcactacgcatgtctgaaggg

SEQ ID NO: 919534 - DNA, 25 bp, Homo sapien
ggaaagggcggtgtcgagccggctg

SEQ ID NO: 919535 - DNA, 25 bp, Homo sapien
agggacaataagaggacgtggctaa

SEQ ID NO: 919536 - DNA, 25 bp, Homo sapien
gctaaaacgagtggcccttcagagg

SEQ ID NO: 919537 - DNA, 25 bp, Homo sapien
gtggaaaatcaaactctgggcacaa

SEQ ID NO: 919538 - DNA, 25 bp, Homo sapien
ctggtctgtggaaaatcaaactctg

SEQ ID NO: 919539 - DNA, 25 bp, Homo sapien
ccaagcttccctccgcacggcggaa

SEQ ID NO: 919540 - DNA, 25 bp, Homo sapien
gctcttggcctctacctggtctgtg

SEQ ID NO: 919541 - DNA, 25 bp, Homo sapien
agacatggcgcggtttgctcctgcg

SEQ ID NO: 919542 - DNA, 25 bp, Homo sapien
tcgtaggctcgcaggactacaatcc

SEQ ID NO: 919543 - DNA, 25 bp, Homo sapien
actaaacaggattgtgagcggtgcg

SEQ ID NO: 919544 - DNA, 25 bp, Homo sapien
ccagctattagtcgtaggctcgcag

SEQ ID NO: 919545 - DNA, 25 bp, Homo sapien
agctcggtttccctccagagcatca

SEQ ID NO: 919546 - DNA, 25 bp, Homo sapien
gtggtcctggaagggccggcccatg

SEQ ID NO: 919547 - DNA, 25 bp, Homo sapien
ctgggccttagcctcagggacagct

SEQ ID NO: 919548 - DNA, 25 bp, Homo sapien
ggatgacccatgggcttctggagct

SEQ ID NO: 919549 - DNA, 25 bp, Homo sapien
tgtggaagtctcttcatgctgctgg

SEQ ID NO: 919550 - DNA, 25 bp, Homo sapien
aatatacgttaagggtagatctggc

SEQ ID NO: 919551 - DNA, 25 bp, Homo sapien
gtaatatgacctcctccacttgaaa

SEQ ID NO: 919552 - DNA, 25 bp, Homo sapien
ttcaagtataactgcaatcagggct

SEQ ID NO: 919553 - DNA, 25 bp, Homo sapien
tatgtccagtagtcaaggacaaatg

SEQ ID NO: 919554 - DNA, 25 bp, Homo sapien
ctctgcggctcttgtctccagggcg

SEQ ID NO: 919555 - DNA, 25 bp, Homo sapien
tgggacttcagatcacagcgggcgc

SEQ ID NO: 919556 - DNA, 25 bp, Homo sapien
cggcattgaaatgggcgtccgctcc

SEQ ID NO: 919557 - DNA, 25 bp, Homo sapien
gcggcgttgggttctgaatgttcca

SEQ ID NO: 919558 - DNA, 25 bp, Homo sapien
cctctggatgggatcgagaccggat

SEQ ID NO: 919559 - DNA, 25 bp, Homo sapien
cacccacgctaaagcagggctggaa

SEQ ID NO: 919560 - DNA, 25 bp, Homo sapien
gggcctcatggcacccacgctaaag

SEQ ID NO: 919561 - DNA, 25 bp, Homo sapien
gggaaacgctcctctggatgggatc

SEQ ID NO: 919562 - DNA, 25 bp, Homo sapien
cataaaagggctaacagatagaaat

SEQ ID NO: 919563 - DNA, 25 bp, Homo sapien
attagcataaaagggctaacagata

SEQ ID NO: 919564 - DNA, 25 bp, Homo sapien
gggctaacagatagaaattgcccat

SEQ ID NO: 919565 - DNA, 25 bp, Homo sapien
taacagatagaaattgcccataagc

SEQ ID NO: 919566 - DNA, 25 bp, Homo sapien
ggcacattgctgtcggtcacattag

SEQ ID NO: 919567 - DNA, 25 bp, Homo sapien
gatacttggcacattgctgtcggtc

SEQ ID NO: 919568 - DNA, 25 bp, Homo sapien
tttactgatacttggcacattgctg

SEQ ID NO: 919569 - DNA, 25 bp, Homo sapien
cattgctgtcggtcacattagaaga

SEQ ID NO: 919570 - DNA, 25 bp, Homo sapien
tgacagcctggagcacactccggag

SEQ ID NO: 919571 - DNA, 25 bp, Homo sapien
tatgcatgtagaagaataccttaca

SEQ ID NO: 919572 - DNA, 25 bp, Homo sapien
atgcatgtagaagaataccttacac

SEQ ID NO: 919573 - DNA, 25 bp, Homo sapien
cagcctggagcacactccggaggca

SEQ ID NO: 919574 - DNA, 25 bp, Homo sapien
catgatgtgttgagaaccccaaagt

SEQ ID NO: 919575 - DNA, 25 bp, Homo sapien
taatgaagtaagacagtagtccttg

SEQ ID NO: 919576 - DNA, 25 bp, Homo sapien
caaatcccatagaggttctgagtga

SEQ ID NO: 919577 - DNA, 25 bp, Homo sapien
aatacatgatgtgttgagaacccca

SEQ ID NO: 919578 - DNA, 25 bp, Homo sapien
gacgatttagaggtattcccctcca

SEQ ID NO: 919579 - DNA, 25 bp, Homo sapien
ggagtaaggtcaggctcaagacagc

SEQ ID NO: 919580 - DNA, 25 bp, Homo sapien
caggcaccacatggcttcgggcagt

SEQ ID NO: 919581 - DNA, 25 bp, Homo sapien
aagacagcctgtgttgagtagtcag

SEQ ID NO: 919582 - DNA, 25 bp, Homo sapien
gggttcaggtcagctgcgatccaca

SEQ ID NO: 919583 - DNA, 25 bp, Homo sapien
cactgtggccagacgagagtcactc

SEQ ID NO: 919584 - DNA, 25 bp, Homo sapien
ggtcagctgcgatccacaaaacaga

SEQ ID NO: 919585 - DNA, 25 bp, Homo sapien
tgtggccagacgagagtcactcatc

SEQ ID NO: 919586 - DNA, 25 bp, Homo sapien
ctttgtgcacatggctttccgcttt

SEQ ID NO: 919587 - DNA, 25 bp, Homo sapien
tccgctttaattccgctggatagtc

SEQ ID NO: 919588 - DNA, 25 bp, Homo sapien
tggctttccgctttaattccgctgg

SEQ ID NO: 919589 - DNA, 25 bp, Homo sapien
tttaattccgctggatagtctcctt

SEQ ID NO: 919590 - DNA, 25 bp, Homo sapien
tctctaagaaggacaccatcatcat

SEQ ID NO: 919591 - DNA, 25 bp, Homo sapien
ctctctaagaaggacaccatcatca

SEQ ID NO: 919592 - DNA, 25 bp, Homo sapien
gcgcctgggtggaaagtggttgcca

SEQ ID NO: 919593 - DNA, 25 bp, Homo sapien
cgggcgcctgggtggaaagtggttg

SEQ ID NO: 919594 - DNA, 25 bp, Homo sapien
ggcgcctgggtggaaagtggttgcc

SEQ ID NO: 919595 - DNA, 25 bp, Homo sapien
cgcctgggtggaaagtggttgccag

SEQ ID NO: 919596 - DNA, 25 bp, Homo sapien
ccccaggggtgctgaacgcaaggag

SEQ ID NO: 919597 - DNA, 25 bp, Homo sapien
ctggcgagctaatgggtctcccccc

SEQ ID NO: 919598 - DNA, 25 bp, Homo sapien
aggaggagggtagcgggccaatgtc

SEQ ID NO: 919599 - DNA, 25 bp, Homo sapien
tgctgaacgcaaggaggagggtagc

SEQ ID NO: 919600 - DNA, 25 bp, Homo sapien
acagccaattcctagggggaccgag

SEQ ID NO: 919601 - DNA, 25 bp, Homo sapien
caattcctagggggaccgaggcatc

SEQ ID NO: 919602 - DNA, 25 bp, Homo sapien
cctagggggaccgaggcatcctcat

SEQ ID NO: 919603 - DNA, 25 bp, Homo sapien
cagccaattcctagggggaccgagg

SEQ ID NO: 919604 - DNA, 25 bp, Homo sapien
tgttctttccatggggcgctttggt

SEQ ID NO: 919605 - DNA, 25 bp, Homo sapien
ccatggggcgctttggttgcagtca

SEQ ID NO: 919606 - DNA, 25 bp, Homo sapien
ttcaggacatagcgcctcttgggct

SEQ ID NO: 919607 - DNA, 25 bp, Homo sapien
tgggctccatccatgggctgttctt

SEQ ID NO: 919608 - DNA, 25 bp, Homo sapien
agctcagctccttttgggtctcctg

SEQ ID NO: 919609 - DNA, 25 bp, Homo sapien
gctcagctccttttgggtctcctga

SEQ ID NO: 919610 - DNA, 25 bp, Homo sapien
tgtgctcttagtgccgactcacgcc

SEQ ID NO: 919611 - DNA, 25 bp, Homo sapien
ccaggccatgtgctcttagtgccga

SEQ ID NO: 919612 - DNA, 25 bp, Homo sapien
aatgactgctgtgtggagcgtccat

SEQ ID NO: 919613 - DNA, 25 bp, Homo sapien
ttctgtaatgactgctgtgtggagc

SEQ ID NO: 919614 - DNA, 25 bp, Homo sapien
tgtgtggagcgtccatataagtgca

SEQ ID NO: 919615 - DNA, 25 bp, Homo sapien
gactgctgtgtggagcgtccatata

SEQ ID NO: 919616 - DNA, 25 bp, Homo sapien
tcagacactacaggtgctggatgag

SEQ ID NO: 919617 - DNA, 25 bp, Homo sapien
cctcagacactacaggtgctggatg

SEQ ID NO: 919618 - DNA, 25 bp, Homo sapien
gcctcagacactacaggtgctggat

SEQ ID NO: 919619 - DNA, 25 bp, Homo sapien
gagcctcagacactacaggtgctgg

SEQ ID NO: 919620 - DNA, 25 bp, Homo sapien
taaaccccatccccactccctctca

SEQ ID NO: 919621 - DNA, 25 bp, Homo sapien
aaaccccatccccactccctctcat

SEQ ID NO: 919622 - DNA, 25 bp, Homo sapien
tcttttgtctctcaagacgtacaaa

SEQ ID NO: 919623 - DNA, 25 bp, Homo sapien
caactattccatggtttcccagctg

SEQ ID NO: 919624 - DNA, 25 bp, Homo sapien
ctcaagacgtacaaagcagctgcca

SEQ ID NO: 919625 - DNA, 25 bp, Homo sapien
gcagctgccaactattccatggttt

SEQ ID NO: 919626 - DNA, 25 bp, Homo sapien
acataattgtacaatgtgaagctca

SEQ ID NO: 919627 - DNA, 25 bp, Homo sapien
tgggacactcttggatttcaggaac

SEQ ID NO: 919628 - DNA, 25 bp, Homo sapien
ctatgggacactcttggatttcagg

SEQ ID NO: 919629 - DNA, 25 bp, Homo sapien
cttaagctatgggacactcttggat

SEQ ID NO: 919630 - DNA, 25 bp, Homo sapien
agctatgggacactcttggatttca

SEQ ID NO: 919631 - DNA, 25 bp, Homo sapien
gcatccatcggggcaaagccaaggc

SEQ ID NO: 919632 - DNA, 25 bp, Homo sapien
atccatcggggcaaagccaaggctg

SEQ ID NO: 919633 - DNA, 25 bp, Homo sapien
catccatcggggcaaagccaaggct

SEQ ID NO: 919634 - DNA, 25 bp, Homo sapien
ttagtgccttccagcctccgacatg

SEQ ID NO: 919635 - DNA, 25 bp, Homo sapien
gacatgtagcaagtgaaagctgttt

SEQ ID NO: 919636 - DNA, 25 bp, Homo sapien
tccagcctccgacatgtagcaagtg

SEQ ID NO: 919637 - DNA, 25 bp, Homo sapien
tgaggtagttattgagtagctggtt

SEQ ID NO: 919638 - DNA, 25 bp, Homo sapien
cgcacccgacctgccattactttta

SEQ ID NO: 919639 - DNA, 25 bp, Homo sapien
tttgcactgacctaatagaaaacta

SEQ ID NO: 919640 - DNA, 25 bp, Homo sapien
ccgcacccgacctgccattactttt

SEQ ID NO: 919641 - DNA, 25 bp, Homo sapien
ttctgaaacagaatctccctctgtt

SEQ ID NO: 919642 - DNA, 25 bp, Homo sapien
tctgaaacagaatctccctctgttg

SEQ ID NO: 919643 - DNA, 25 bp, Homo sapien
tgcctggcatctggtctgatcctgt

SEQ ID NO: 919644 - DNA, 25 bp, Homo sapien
tgatcctgttgtagtactagtgagg

SEQ ID NO: 919645 - DNA, 25 bp, Homo sapien
agtagaactgggcaagaaagtgcaa

SEQ ID NO: 919646 - DNA, 25 bp, Homo sapien
gacagtatcagagatccaggactct

SEQ ID NO: 919647 - DNA, 25 bp, Homo sapien
tccgccacaggtgggacatcagtgc

SEQ ID NO: 919648 - DNA, 25 bp, Homo sapien
aatgtccgccacaggtgggacatca

SEQ ID NO: 919649 - DNA, 25 bp, Homo sapien
cacaatgtccgccacaggtgggaca

SEQ ID NO: 919650 - DNA, 25 bp, Homo sapien
accagacacaatgtccgccacaggt

SEQ ID NO: 919651 - DNA, 25 bp, Homo sapien
ttttgtagacattcaagaaagctgc

SEQ ID NO: 919652 - DNA, 25 bp, Homo sapien
ggatgtcaatcaatcttttgtagac

SEQ ID NO: 919653 - DNA, 25 bp, Homo sapien
ctgggatgtcaatcaatcttttgta

SEQ ID NO: 919654 - DNA, 25 bp, Homo sapien
agacattcaagaaagctgcttcagc

SEQ ID NO: 919655 - DNA, 25 bp, Homo sapien
ggtgggaacgtggatacatatgcag

SEQ ID NO: 919656 - DNA, 25 bp, Homo sapien
tgggtgacgcagttgggcaagcaaa

SEQ ID NO: 919657 - DNA, 25 bp, Homo sapien
cacaagagcaagtggtgcagggtga

SEQ ID NO: 919658 - DNA, 25 bp, Homo sapien
gataggggacccacgagagtctgcc

SEQ ID NO: 919659 - DNA, 25 bp, Homo sapien
aggaagagatcactctggagtcatt

SEQ ID NO: 919660 - DNA, 25 bp, Homo sapien
cagcagtcggggagaaaagagcaca

SEQ ID NO: 919661 - DNA, 25 bp, Homo sapien
aagagatcactctggagtcattgct

SEQ ID NO: 919662 - DNA, 25 bp, Homo sapien
cacagggggcggcaaggaggaagag

SEQ ID NO: 919663 - DNA, 25 bp, Homo sapien
ccagaagaacaaggcgaatcgagga

SEQ ID NO: 919664 - DNA, 25 bp, Homo sapien
gacgatgcccaggattccagattag

SEQ ID NO: 919665 - DNA, 25 bp, Homo sapien
cagtttcctccagcgtagacgtcta

SEQ ID NO: 919666 - DNA, 25 bp, Homo sapien
taactggtgaggttttgcgatcgtg

SEQ ID NO: 919667 - DNA, 25 bp, Homo sapien
ctgtgccggacgcacatgcaaagag

SEQ ID NO: 919668 - DNA, 25 bp, Homo sapien
tgtgccggacgcacatgcaaagagc

SEQ ID NO: 919669 - DNA, 25 bp, Homo sapien
aggcctttgaatgccagccccacct

SEQ ID NO: 919670 - DNA, 25 bp, Homo sapien
ccagacctcgagctgggttcctggg

SEQ ID NO: 919671 - DNA, 25 bp, Homo sapien
tcccccagacctcgagctgggttcc

SEQ ID NO: 919672 - DNA, 25 bp, Homo sapien
caggcctttgaatgccagccccacc

SEQ ID NO: 919673 - DNA, 25 bp, Homo sapien
ctccaggtgtccacacggctactgg

SEQ ID NO: 919674 - DNA, 25 bp, Homo sapien
tccaggtgtccacacggctactggc

SEQ ID NO: 919675 - DNA, 25 bp, Homo sapien
caccaggagactagctgtccagtgg

SEQ ID NO: 919676 - DNA, 25 bp, Homo sapien
ggataatagtaatttgtgcactggg

SEQ ID NO: 919677 - DNA, 25 bp, Homo sapien
tgtccagtgggtgcctccccatgtg

SEQ ID NO: 919678 - DNA, 25 bp, Homo sapien
tgtgctgcacaacagggtacctggc

SEQ ID NO: 919679 - DNA, 25 bp, Homo sapien
cgcgtgcaccacgacgtcgtcgccg

SEQ ID NO: 919680 - DNA, 25 bp, Homo sapien
tgcaccacgacgtcgtcgccgggga

SEQ ID NO: 919681 - DNA, 25 bp, Homo sapien
ctaccgcgtgcaccacgacgtcgtc

SEQ ID NO: 919682 - DNA, 25 bp, Homo sapien
taccgcgtgcaccacgacgtcgtcg

SEQ ID NO: 919683 - DNA, 25 bp, Homo sapien
aaagatcacacagaatttgccaaca

SEQ ID NO: 919684 - DNA, 25 bp, Homo sapien
aagatcacacagaatttgccaacaa

SEQ ID NO: 919685 - DNA, 25 bp, Homo sapien
gtgcctttgataccccgggctgcaa

SEQ ID NO: 919686 - DNA, 25 bp, Homo sapien
cagctggcatcgggccaccccatcc

SEQ ID NO: 919687 - DNA, 25 bp, Homo sapien
ccatcccatgcacagtgggaggcct

SEQ ID NO: 919688 - DNA, 25 bp, Homo sapien
cctggtgcctttgataccccgggct

SEQ ID NO: 919689 - DNA, 25 bp, Homo sapien
gtccacatgcgaggactggtatagc

SEQ ID NO: 919690 - DNA, 25 bp, Homo sapien
cattttcgtccacatgcgaggactg

SEQ ID NO: 919691 - DNA, 25 bp, Homo sapien
acaccgtctgcacgtcattttcgtc

SEQ ID NO: 919692 - DNA, 25 bp, Homo sapien
tcctggtacttcttggtcttcagca

SEQ ID NO: 919693 - DNA, 25 bp, Homo sapien
ctgcggctggacttctggtcccagt

SEQ ID NO: 919694 - DNA, 25 bp, Homo sapien
ggctgcggctggacttctggtccca

SEQ ID NO: 919695 - DNA, 25 bp, Homo sapien
tgcggctggacttctggtcccagtg

SEQ ID NO: 919696 - DNA, 25 bp, Homo sapien
gctgcggctggacttctggtcccag

SEQ ID NO: 919697 - DNA, 25 bp, Homo sapien
gacgcggaccaccatgttgttgccc

SEQ ID NO: 919698 - DNA, 25 bp, Homo sapien
acttgacgcggaccaccatgttgtt

SEQ ID NO: 919699 - DNA, 25 bp, Homo sapien
ttgacgcggaccaccatgttgttgc

SEQ ID NO: 919700 - DNA, 25 bp, Homo sapien
gtagaaccacttgacgcggaccacc

SEQ ID NO: 919701 - DNA, 25 bp, Homo sapien
ggcgctgacgcctgtgggtctgtgc

SEQ ID NO: 919702 - DNA, 25 bp, Homo sapien
ggtggctctgcctcgcaggaccaga

SEQ ID NO: 919703 - DNA, 25 bp, Homo sapien
gggtctgtgctgatctttgcacgtt

SEQ ID NO: 919704 - DNA, 25 bp, Homo sapien
tgggctccacatgagggtggctctg

SEQ ID NO: 919705 - DNA, 25 bp, Homo sapien
tcaggcatcggagtccgacagaccc

SEQ ID NO: 919706 - DNA, 25 bp, Homo sapien
ggactcaggcatcggagtccgacag

SEQ ID NO: 919707 - DNA, 25 bp, Homo sapien
gcatcggagtccgacagacccaggt

SEQ ID NO: 919708 - DNA, 25 bp, Homo sapien
atcggagtccgacagacccaggtgc

SEQ ID NO: 919709 - DNA, 25 bp, Homo sapien
gggtgggcttgccgaaccacttcca

SEQ ID NO: 919710 - DNA, 25 bp, Homo sapien
tgggcttgccgaaccacttccagag

SEQ ID NO: 919711 - DNA, 25 bp, Homo sapien
ctgggtgggcttgccgaaccacttc

SEQ ID NO: 919712 - DNA, 25 bp, Homo sapien
gtgggcttgccgaaccacttccaga

SEQ ID NO: 919713 - DNA, 25 bp, Homo sapien
aggctggcaggaaggcggcaatctt

SEQ ID NO: 919714 - DNA, 25 bp, Homo sapien
caggaaggcggcaatcttgggccgg

SEQ ID NO: 919715 - DNA, 25 bp, Homo sapien
ggctggcaggaaggcggcaatcttg

SEQ ID NO: 919716 - DNA, 25 bp, Homo sapien
ggcggcaatcttgggccggttctcc

SEQ ID NO: 919717 - DNA, 25 bp, Homo sapien
gggaggtggacgccctctctcttct

SEQ ID NO: 919718 - DNA, 25 bp, Homo sapien
tctctcttcttgggtcggctcttgg

SEQ ID NO: 919719 - DNA, 25 bp, Homo sapien
ctcttcttgggtcggctcttggccc

SEQ ID NO: 919720 - DNA, 25 bp, Homo sapien
tggggaggtggacgccctctctctt

SEQ ID NO: 919721 - DNA, 25 bp, Homo sapien
tgcggaggaggcgcctggggctggg

SEQ ID NO: 919722 - DNA, 25 bp, Homo sapien
cctggggctggggcgcgggcgtctt

SEQ ID NO: 919723 - DNA, 25 bp, Homo sapien
ctgcggaggaggcgcctggggctgg

SEQ ID NO: 919724 - DNA, 25 bp, Homo sapien
gggctggggcgcgggcgtcttcttg

SEQ ID NO: 919725 - DNA, 25 bp, Homo sapien
ggagtgggccgagggccgcgccttg

SEQ ID NO: 919726 - DNA, 25 bp, Homo sapien
agggccgcgccttgccagcctgctt

SEQ ID NO: 919727 - DNA, 25 bp, Homo sapien
cagcctgcttggtggccttggtggg

SEQ ID NO: 919728 - DNA, 25 bp, Homo sapien
ccttgccagcctgcttggtggcctt

SEQ ID NO: 919729 - DNA, 25 bp, Homo sapien
cgcagaagggccagccgtgggggcg

SEQ ID NO: 919730 - DNA, 25 bp, Homo sapien
ggcgggggctgcctcatcgtccgag

SEQ ID NO: 919731 - DNA, 25 bp, Homo sapien
cagaagggccagccgtgggggcggg

SEQ ID NO: 919732 - DNA, 25 bp, Homo sapien
ctgcgcagaagggccagccgtgggg

SEQ ID NO: 919733 - DNA, 25 bp, Homo sapien
gaggaggccggtgaggtcgccctgg

SEQ ID NO: 919734 - DNA, 25 bp, Homo sapien
tcgccctggagctggcagcgctgca

SEQ ID NO: 919735 - DNA, 25 bp, Homo sapien
ctgcaggaagagtcctcatctgtgg

SEQ ID NO: 919736 - DNA, 25 bp, Homo sapien
cccttctgtctccgagccgctgctg

SEQ ID NO: 919737 - DNA, 25 bp, Homo sapien
tcttcggccccgtcctgctcagcct

SEQ ID NO: 919738 - DNA, 25 bp, Homo sapien
tgtccgggctcttggggttcccaga

SEQ ID NO: 919739 - DNA, 25 bp, Homo sapien
tcttggggttcccagagtcctcgaa

SEQ ID NO: 919740 - DNA, 25 bp, Homo sapien
gctcagcctgggccttgtccgggct

SEQ ID NO: 919741 - DNA, 25 bp, Homo sapien
ccttgggctcgctgctgccggccgc

SEQ ID NO: 919742 - DNA, 25 bp, Homo sapien
ccagggtgccttgggctcgctgctg

SEQ ID NO: 919743 - DNA, 25 bp, Homo sapien
gggtgccttgggctcgctgctgccg

SEQ ID NO: 919744 - DNA, 25 bp, Homo sapien
ccaggctcaggaggctcttgggctc

SEQ ID NO: 919745 - DNA, 25 bp, Homo sapien
cccttggcacccgactccttggctg

SEQ ID NO: 919746 - DNA, 25 bp, Homo sapien
ttggctgcccgcgccttcttgggct

SEQ ID NO: 919747 - DNA, 25 bp, Homo sapien
ttggcacccgactccttggctgccc

SEQ ID NO: 919748 - DNA, 25 bp, Homo sapien
tcgtgatccagtttgacaagcagct

SEQ ID NO: 919749 - DNA, 25 bp, Homo sapien
cgggtggtgcgggactgggctgcgg

SEQ ID NO: 919750 - DNA, 25 bp, Homo sapien
tggtgcgggactgggctgcggcagt

SEQ ID NO: 919751 - DNA, 25 bp, Homo sapien
gtggcaggagctggcagctccacaa

SEQ ID NO: 919752 - DNA, 25 bp, Homo sapien
agctccacaaatggctcgggtgctg

SEQ ID NO: 919753 - DNA, 25 bp, Homo sapien
cttgggggccttggctcgcttgtcc

SEQ ID NO: 919754 - DNA, 25 bp, Homo sapien
ttggctcgcttgtccacaggctctg

SEQ ID NO: 919755 - DNA, 25 bp, Homo sapien
gggggccttggctcgcttgtccaca

SEQ ID NO: 919756 - DNA, 25 bp, Homo sapien
cttggctcgcttgtccacaggctct

SEQ ID NO: 919757 - DNA, 25 bp, Homo sapien
gccttggcgctgggtttccacccac

SEQ ID NO: 919758 - DNA, 25 bp, Homo sapien
ctggccttggcgctgggtttccacc

SEQ ID NO: 919759 - DNA, 25 bp, Homo sapien
ccctggccttggcgctgggtttcca

SEQ ID NO: 919760 - DNA, 25 bp, Homo sapien
ggccttggcgctgggtttccaccca

SEQ ID NO: 919761 - DNA, 25 bp, Homo sapien
tgctggtcttctggctgcggcgctt

SEQ ID NO: 919762 - DNA, 25 bp, Homo sapien
ttgccctccccggtgtctttgctgg

SEQ ID NO: 919763 - DNA, 25 bp, Homo sapien
tgcggcgcttggcacttggcaccag

SEQ ID NO: 919764 - DNA, 25 bp, Homo sapien
cgacccagccgtgccaccgtctttg

SEQ ID NO: 919765 - DNA, 25 bp, Homo sapien
cgttgtcaaactccacggtggtcaa

SEQ ID NO: 919766 - DNA, 25 bp, Homo sapien
tctccgttgtcaaactccacggtgg

SEQ ID NO: 919767 - DNA, 25 bp, Homo sapien
cctgtgtctccgttgtcaaactcca

SEQ ID NO: 919768 - DNA, 25 bp, Homo sapien
aactccacggtggtcaagtccccat

SEQ ID NO: 919769 - DNA, 25 bp, Homo sapien
aggggccatgggacctagcccaagt

SEQ ID NO: 919770 - DNA, 25 bp, Homo sapien
agccactgccgctggtggagaattt

SEQ ID NO: 919771 - DNA, 25 bp, Homo sapien
gttgtgctacaagtagagcttccaa

SEQ ID NO: 919772 - DNA, 25 bp, Homo sapien
gatgtaagccactgccgctggtgga

SEQ ID NO: 919773 - DNA, 25 bp, Homo sapien
cctggtcccttgtggcaagaagcga

SEQ ID NO: 919774 - DNA, 25 bp, Homo sapien
cctgggtagagacagcggtactgct

SEQ ID NO: 919775 - DNA, 25 bp, Homo sapien
caatcctggtcccttgtggcaagaa

SEQ ID NO: 919776 - DNA, 25 bp, Homo sapien
gtaggctgcaatcctggtcccttgt

SEQ ID NO: 919777 - DNA, 25 bp, Homo sapien
aactgctccagacagtagatgtggg

SEQ ID NO: 919778 - DNA, 25 bp, Homo sapien
agatgtggggctggttcccatgctc

SEQ ID NO: 919779 - DNA, 25 bp, Homo sapien
ctgcagcaactgctccagacagtag

SEQ ID NO: 919780 - DNA, 25 bp, Homo sapien
agcaactgctccagacagtagatgt

SEQ ID NO: 919781 - DNA, 25 bp, Homo sapien
tctggtgagtgcacggtctgcacgt

SEQ ID NO: 919782 - DNA, 25 bp, Homo sapien
agtgcacggtctgcacgtgcccagc

SEQ ID NO: 919783 - DNA, 25 bp, Homo sapien
gtgagtgcacggtctgcacgtgccc

SEQ ID NO: 919784 - DNA, 25 bp, Homo sapien
atgtctggtgagtgcacggtctgca

SEQ ID NO: 919785 - DNA, 25 bp, Homo sapien
atgagcacacgcaggccgtccttca

SEQ ID NO: 919786 - DNA, 25 bp, Homo sapien
gatgagcacacgcaggccgtccttc

SEQ ID NO: 919787 - DNA, 25 bp, Homo sapien
tgagcacacgcaggccgtccttcag

SEQ ID NO: 919788 - DNA, 25 bp, Homo sapien
tccttgtcgatgatgcaggagcgag

SEQ ID NO: 919789 - DNA, 25 bp, Homo sapien
tgcaggggttggatcgtgaggcaag

SEQ ID NO: 919790 - DNA, 25 bp, Homo sapien
agccaggggtgtctgcgacacctct

SEQ ID NO: 919791 - DNA, 25 bp, Homo sapien
gggtgtctgcgacacctctccctcc

SEQ ID NO: 919792 - DNA, 25 bp, Homo sapien
caggggttggatcgtgaggcaagac

SEQ ID NO: 919793 - DNA, 25 bp, Homo sapien
tgctgggtgggcctgtggatctgag

SEQ ID NO: 919794 - DNA, 25 bp, Homo sapien
tgcctgtatgtgtacccgtgcagac

SEQ ID NO: 919795 - DNA, 25 bp, Homo sapien
tgtgcactccttcgtctgcctgtat

SEQ ID NO: 919796 - DNA, 25 bp, Homo sapien
tgtggatctgagacatgtgcactcc

SEQ ID NO: 919797 - DNA, 25 bp, Homo sapien
accggacactcacagcgaccatcct

SEQ ID NO: 919798 - DNA, 25 bp, Homo sapien
tgggttccagccatcaccggacact

SEQ ID NO: 919799 - DNA, 25 bp, Homo sapien
atcaccggacactcacagcgaccat

SEQ ID NO: 919800 - DNA, 25 bp, Homo sapien
gacactcacagcgaccatcctccat

SEQ ID NO: 919801 - DNA, 25 bp, Homo sapien
tgccctcaccttactgctgccctca

SEQ ID NO: 919802 - DNA, 25 bp, Homo sapien
ccctcaccttactgctgccctcagc

SEQ ID NO: 919803 - DNA, 25 bp, Homo sapien
gtctgccctcaccttactgctgccc

SEQ ID NO: 919804 - DNA, 25 bp, Homo sapien
gacgtctgccctcaccttactgctg

SEQ ID NO: 919805 - DNA, 25 bp, Homo sapien
tggtctgtccccgacattcccatta

SEQ ID NO: 919806 - DNA, 25 bp, Homo sapien
acattcccattacccagatgactcg

SEQ ID NO: 919807 - DNA, 25 bp, Homo sapien
cctggtctgtccccgacattcccat

SEQ ID NO: 919808 - DNA, 25 bp, Homo sapien
cccgacattcccattacccagatga

SEQ ID NO: 919809 - DNA, 25 bp, Homo sapien
ttgggttcaaagtcctcctcggctg

SEQ ID NO: 919810 - DNA, 25 bp, Homo sapien
ggcaggtgctcgtcctcagagaagc

SEQ ID NO: 919811 - DNA, 25 bp, Homo sapien
cctcggctgccatgctctccatcag

SEQ ID NO: 919812 - DNA, 25 bp, Homo sapien
gctcgagtcttggttgggttcaaag

SEQ ID NO: 919813 - DNA, 25 bp, Homo sapien
gccgacaaatgacttaggacctgaa

SEQ ID NO: 919814 - DNA, 25 bp, Homo sapien
catggccgacaaatgacttaggacc

SEQ ID NO: 919815 - DNA, 25 bp, Homo sapien
tggccgacaaatgacttaggacctg

SEQ ID NO: 919816 - DNA, 25 bp, Homo sapien
ccgacaaatgacttaggacctgaac

SEQ ID NO: 919817 - DNA, 25 bp, Homo sapien
gtgaaatgggcccaaaacccagctg

SEQ ID NO: 919818 - DNA, 25 bp, Homo sapien
tcagcactcagtactcactaccata

SEQ ID NO: 919819 - DNA, 25 bp, Homo sapien
cagttaggggcaccccagaggccag

SEQ ID NO: 919820 - DNA, 25 bp, Homo sapien
ggtgctcaatactcagtactctgtg

SEQ ID NO: 919821 - DNA, 25 bp, Homo sapien
gggagatgccgtgaggagccctggc

SEQ ID NO: 919822 - DNA, 25 bp, Homo sapien
tcctggcatggcctctttccctttc

SEQ ID NO: 919823 - DNA, 25 bp, Homo sapien
tccttctggcagcagtcagggagat

SEQ ID NO: 919824 - DNA, 25 bp, Homo sapien
ctcagagggcaaggcgggagcttgg

SEQ ID NO: 919825 - DNA, 25 bp, Homo sapien
gagcactctctcttctgtgcaaggc

SEQ ID NO: 919826 - DNA, 25 bp, Homo sapien
cagaccctaggaccaagcagatggt

SEQ ID NO: 919827 - DNA, 25 bp, Homo sapien
ggaccaagcagatggtcacagagca

SEQ ID NO: 919828 - DNA, 25 bp, Homo sapien
agagcccagaccctaggaccaagca

SEQ ID NO: 919829 - DNA, 25 bp, Homo sapien
cattatcaacgggacgtgcattgag

SEQ ID NO: 919830 - DNA, 25 bp, Homo sapien
caacgggacgtgcattgagtttcct

SEQ ID NO: 919831 - DNA, 25 bp, Homo sapien
aaagggcattatcaacgggacgtgc

SEQ ID NO: 919832 - DNA, 25 bp, Homo sapien
gggcattatcaacgggacgtgcatt

SEQ ID NO: 919833 - DNA, 25 bp, Homo sapien
cacggacgccaaacattttccctgg

SEQ ID NO: 919834 - DNA, 25 bp, Homo sapien
ggttaccctgctaatttgctcacag

SEQ ID NO: 919835 - DNA, 25 bp, Homo sapien
tagagagtacaaaggctcctccgag

SEQ ID NO: 919836 - DNA, 25 bp, Homo sapien
tgtatgccgggcagacgctgatgcc

SEQ ID NO: 919837 - DNA, 25 bp, Homo sapien
cttgggcccaccataaggtggccca

SEQ ID NO: 919838 - DNA, 25 bp, Homo sapien
ttgggcccaccataaggtggcccag

SEQ ID NO: 919839 - DNA, 25 bp, Homo sapien
tgggcccaccataaggtggcccagt

SEQ ID NO: 919840 - DNA, 25 bp, Homo sapien
gggcccaccataaggtggcccagtc

SEQ ID NO: 919841 - DNA, 25 bp, Homo sapien
ccaggtccctgtgcgaatgagagga

SEQ ID NO: 919842 - DNA, 25 bp, Homo sapien
tgtgcgaatgagaggagctgacttc

SEQ ID NO: 919843 - DNA, 25 bp, Homo sapien
tgagaggagctgacttctatgaaag

SEQ ID NO: 919844 - DNA, 25 bp, Homo sapien
agctgacttctatgaaagccactcc

SEQ ID NO: 919845 - DNA, 25 bp, Homo sapien
ccactgcgtgtacggattgacggga

SEQ ID NO: 919846 - DNA, 25 bp, Homo sapien
ttgacgggaaagattctaatgggct

SEQ ID NO: 919847 - DNA, 25 bp, Homo sapien
gaattaagtttgatctctgccagaa

SEQ ID NO: 919848 - DNA, 25 bp, Homo sapien
tctaatgggctttaagttaacaagc

SEQ ID NO: 919849 - DNA, 25 bp, Homo sapien
ctggtggctcggacctggagggtct

SEQ ID NO: 919850 - DNA, 25 bp, Homo sapien
tggctcggacctggagggtctctcc

SEQ ID NO: 919851 - DNA, 25 bp, Homo sapien
gtctctcctgatccccatagacagg

SEQ ID NO: 919852 - DNA, 25 bp, Homo sapien
gggtctctcctgatccccatagaca

SEQ ID NO: 919853 - DNA, 25 bp, Homo sapien
gctggctgatgttctatgcctgggc

SEQ ID NO: 919854 - DNA, 25 bp, Homo sapien
ctggttcctgatttcaccttgaggc

SEQ ID NO: 919855 - DNA, 25 bp, Homo sapien
ggctgatgttctatgcctgggcccc

SEQ ID NO: 919856 - DNA, 25 bp, Homo sapien
ttctcccagccagtaacactcgcag

SEQ ID NO: 919857 - DNA, 25 bp, Homo sapien
actggcggcgttgctggcctcccag

SEQ ID NO: 919858 - DNA, 25 bp, Homo sapien
tggacctgtttagggggcgctgcct

SEQ ID NO: 919859 - DNA, 25 bp, Homo sapien
cgagtggacctgtttagggggcgct

SEQ ID NO: 919860 - DNA, 25 bp, Homo sapien
gcctcccaggcgagtggacctgttt

SEQ ID NO: 919861 - DNA, 25 bp, Homo sapien
cgggcaaggcagaaacctcggcttt

SEQ ID NO: 919862 - DNA, 25 bp, Homo sapien
atctcgggggctcttgctgaacaca

SEQ ID NO: 919863 - DNA, 25 bp, Homo sapien
gctggatgccgagcacgtccacctt

SEQ ID NO: 919864 - DNA, 25 bp, Homo sapien
acagtagctggccaagtcgggcagt

SEQ ID NO: 919865 - DNA, 25 bp, Homo sapien
gctctggcttcaaagccccagtgag

SEQ ID NO: 919866 - DNA, 25 bp, Homo sapien
ccagcccccaagacctggaaatggg

SEQ ID NO: 919867 - DNA, 25 bp, Homo sapien
ggccccagttaaaattctgtagtga

SEQ ID NO: 919868 - DNA, 25 bp, Homo sapien
tgtcagggactgaatctccccagcc

SEQ ID NO: 919869 - DNA, 25 bp, Homo sapien
tcacagggaggtgcttggtaactga

SEQ ID NO: 919870 - DNA, 25 bp, Homo sapien
ggacatcgggtcacagggaggtgct

SEQ ID NO: 919871 - DNA, 25 bp, Homo sapien
ggaggtgcttggtaactgatcatca

SEQ ID NO: 919872 - DNA, 25 bp, Homo sapien
tgcttggtaactgatcatcaaaacc

SEQ ID NO: 919873 - DNA, 25 bp, Homo sapien
gctttcacggataccagtaagtagg

SEQ ID NO: 919874 - DNA, 25 bp, Homo sapien
cagacccgggcatagtgatgagcgt

SEQ ID NO: 919875 - DNA, 25 bp, Homo sapien
gctctgtcgggagccagtgccttga

SEQ ID NO: 919876 - DNA, 25 bp, Homo sapien
ccttcgacagtcaccagctggagga

SEQ ID NO: 919877 - DNA, 25 bp, Homo sapien
gggcatgaagtgatcacttaggact

SEQ ID NO: 919878 - DNA, 25 bp, Homo sapien
cttaggactagatggcaactggtgg

SEQ ID NO: 919879 - DNA, 25 bp, Homo sapien
tcacttaggactagatggcaactgg

SEQ ID NO: 919880 - DNA, 25 bp, Homo sapien
aagtgatcacttaggactagatggc

SEQ ID NO: 919881 - DNA, 25 bp, Homo sapien
aggaagccagtgggtctctcaaaat

SEQ ID NO: 919882 - DNA, 25 bp, Homo sapien
ctagagaactaggaagccagtgggt

SEQ ID NO: 919883 - DNA, 25 bp, Homo sapien
aactaggaagccagtgggtctctca

SEQ ID NO: 919884 - DNA, 25 bp, Homo sapien
taggaagccagtgggtctctcaaaa

SEQ ID NO: 919885 - DNA, 25 bp, Homo sapien
ccatggaagctcttcagcagcggtg

SEQ ID NO: 919886 - DNA, 25 bp, Homo sapien
gcggtgctacctgcttgcgcaaatc

SEQ ID NO: 919887 - DNA, 25 bp, Homo sapien
cagcggtgctacctgcttgcgcaaa

SEQ ID NO: 919888 - DNA, 25 bp, Homo sapien
tcagcagcggtgctacctgcttgcg

SEQ ID NO: 919889 - DNA, 25 bp, Homo sapien
caggggcagctcagacaggacactg

SEQ ID NO: 919890 - DNA, 25 bp, Homo sapien
gagaacttttcattgtcaagggcaa

SEQ ID NO: 919891 - DNA, 25 bp, Homo sapien
tcaagggcaaggctgtttgtccact

SEQ ID NO: 919892 - DNA, 25 bp, Homo sapien
gcaaggctgtttgtccactctgaga

SEQ ID NO: 919893 - DNA, 25 bp, Homo sapien
cactgagaggggcatgcaagcacca

SEQ ID NO: 919894 - DNA, 25 bp, Homo sapien
ctggggatcagatatcccactgaga

SEQ ID NO: 919895 - DNA, 25 bp, Homo sapien
tggggatcagatatcccactgagag

SEQ ID NO: 919896 - DNA, 25 bp, Homo sapien
agaggggcatgcaagcaccagctcc

SEQ ID NO: 919897 - DNA, 25 bp, Homo sapien
caaagacttggaatgacgcatatga

SEQ ID NO: 919898 - DNA, 25 bp, Homo sapien
cgacagatgtttgttgagtggctat

SEQ ID NO: 919899 - DNA, 25 bp, Homo sapien
tgtagcctggagtcagtatgattac

SEQ ID NO: 919900 - DNA, 25 bp, Homo sapien
gggctctttcaatcatgagcagaga

SEQ ID NO: 919901 - DNA, 25 bp, Homo sapien
ctttcttcagtgcatacattagggt

SEQ ID NO: 919902 - DNA, 25 bp, Homo sapien
cttcagtgcatacattagggtgctg

SEQ ID NO: 919903 - DNA, 25 bp, Homo sapien
ttcttcagtgcatacattagggtgc

SEQ ID NO: 919904 - DNA, 25 bp, Homo sapien
tcagtgcatacattagggtgctgtg

SEQ ID NO: 919905 - DNA, 25 bp, Homo sapien
ggaatcatccctgtcgtgtaaatag

SEQ ID NO: 919906 - DNA, 25 bp, Homo sapien
tttgtgcgtccagtgtcacgacagc

SEQ ID NO: 919907 - DNA, 25 bp, Homo sapien
gaactcccagaggttgtacattgca

SEQ ID NO: 919908 - DNA, 25 bp, Homo sapien
taaataggaaatctggaactcccag

SEQ ID NO: 919909 - DNA, 25 bp, Homo sapien
aatcacacagatacggtgctagggg

SEQ ID NO: 919910 - DNA, 25 bp, Homo sapien
tggcggggcggaccagcaccgctcg

SEQ ID NO: 919911 - DNA, 25 bp, Homo sapien
cagatacggtgctaggggtggaggt

SEQ ID NO: 919912 - DNA, 25 bp, Homo sapien
gaccagcaccgctcgcagatctgca

SEQ ID NO: 919913 - DNA, 25 bp, Homo sapien
aaggcagccttgtaccaatgccggg

SEQ ID NO: 919914 - DNA, 25 bp, Homo sapien
cgctagtaagttccatatgggacct

SEQ ID NO: 919915 - DNA, 25 bp, Homo sapien
tgatctgtaactcccaagtgggacc

SEQ ID NO: 919916 - DNA, 25 bp, Homo sapien
tggcctagaattccgctgtgatgct

SEQ ID NO: 919917 - DNA, 25 bp, Homo sapien
cagtacatgtgcagctgcggcccat

SEQ ID NO: 919918 - DNA, 25 bp, Homo sapien
ctggtaaatgtgtactggcagccca

SEQ ID NO: 919919 - DNA, 25 bp, Homo sapien
tgcgcacacccagtacatgtgcagc

SEQ ID NO: 919920 - DNA, 25 bp, Homo sapien
atccacactgcgcacacccagtaca

SEQ ID NO: 919921 - DNA, 25 bp, Homo sapien
gccctgccattcacactgcacgcac

SEQ ID NO: 919922 - DNA, 25 bp, Homo sapien
cgcacctggtaaatgtgtacctgca

SEQ ID NO: 919923 - DNA, 25 bp, Homo sapien
attcacactgcacgcacctggtaaa

SEQ ID NO: 919924 - DNA, 25 bp, Homo sapien
cctggtaaatgtgtacctgcagcct

SEQ ID NO: 919925 - DNA, 25 bp, Homo sapien
agacatgcagcagactccgtgcccg

SEQ ID NO: 919926 - DNA, 25 bp, Homo sapien
ccatagagacatgcagcagactccg

SEQ ID NO: 919927 - DNA, 25 bp, Homo sapien
tatggaaatgtccatagagacatgc

SEQ ID NO: 919928 - DNA, 25 bp, Homo sapien
ttatggaaatgtccatagagacatg

SEQ ID NO: 919929 - DNA, 25 bp, Homo sapien
tccacaggtagtgagcacaagggcc

SEQ ID NO: 919930 - DNA, 25 bp, Homo sapien
gaatctcctaacagaggccacggtg

SEQ ID NO: 919931 - DNA, 25 bp, Homo sapien
gccacggtgcgcaggaatactggaa

SEQ ID NO: 919932 - DNA, 25 bp, Homo sapien
caagggcccaattcaggtccagatc

SEQ ID NO: 919933 - DNA, 25 bp, Homo sapien
tctcttgtaacgaaagtaacatatg

SEQ ID NO: 919934 - DNA, 25 bp, Homo sapien
ctggagcaaaggatagcaacacagg

SEQ ID NO: 919935 - DNA, 25 bp, Homo sapien
cacaggaagtatctgcagtcactct

SEQ ID NO: 919936 - DNA, 25 bp, Homo sapien
taagacattctcttgtaacgaaagt

SEQ ID NO: 919937 - DNA, 25 bp, Homo sapien
ctcgagttccaattggctgcgcgtg

SEQ ID NO: 919938 - DNA, 25 bp, Homo sapien
ggcggtcggtccgatgtgacgccat

SEQ ID NO: 919939 - DNA, 25 bp, Homo sapien
cgtggcggtcggtccgatgtgacgc

SEQ ID NO: 919940 - DNA, 25 bp, Homo sapien
ttccaattggctgcgcgtggcggtc

SEQ ID NO: 919941 - DNA, 25 bp, Homo sapien
cataagtccttcatggaaaagcctg

SEQ ID NO: 919942 - DNA, 25 bp, Homo sapien
tttttctagctagaggtgacaagtg

SEQ ID NO: 919943 - DNA, 25 bp, Homo sapien
ctggcactttccattgcccctgaag

SEQ ID NO: 919944 - DNA, 25 bp, Homo sapien
gcctccatggtgtttagaggcacca

SEQ ID NO: 919945 - DNA, 25 bp, Homo sapien
agggtgagagaaggttccagttaag

SEQ ID NO: 919946 - DNA, 25 bp, Homo sapien
tcttctggagggtgagagaaggttc

SEQ ID NO: 919947 - DNA, 25 bp, Homo sapien
tccagttaaggtgacttttgaagcc

SEQ ID NO: 919948 - DNA, 25 bp, Homo sapien
ttctggagggtgagagaaggttcca

SEQ ID NO: 919949 - DNA, 25 bp, Homo sapien
tcccgagtccaaagctccggcctct

SEQ ID NO: 919950 - DNA, 25 bp, Homo sapien
tcctgcctcccgaaagcttgcacag

SEQ ID NO: 919951 - DNA, 25 bp, Homo sapien
ggcccatggggctcattcctcacaa

SEQ ID NO: 919952 - DNA, 25 bp, Homo sapien
cggcctctccgccgcttcggcaggc

SEQ ID NO: 919953 - DNA, 25 bp, Homo sapien
cggcctctccgccgcttcggcaggc

SEQ ID NO: 919954 - DNA, 25 bp, Homo sapien
tcccgagtccaaagctccggcctct

SEQ ID NO: 919955 - DNA, 25 bp, Homo sapien
ggcccatggggctcattcctcacaa

SEQ ID NO: 919956 - DNA, 25 bp, Homo sapien
tcctgcctcccgaaagcttgcacag

SEQ ID NO: 919957 - DNA, 25 bp, Homo sapien
cagctcgtggctgtaggcagccttc

SEQ ID NO: 919958 - DNA, 25 bp, Homo sapien
cccagctcgtggctgtaggcagcct

SEQ ID NO: 919959 - DNA, 25 bp, Homo sapien
ccagctcgtggctgtaggcagcctt

SEQ ID NO: 919960 - DNA, 25 bp, Homo sapien
ggcacaatagaaaatatcgcccatg

SEQ ID NO: 919961 - DNA, 25 bp, Homo sapien
cacaatagaaaatatcgcccatgat

SEQ ID NO: 919962 - DNA, 25 bp, Homo sapien
caatagaaaatatcgcccatgatca

SEQ ID NO: 919963 - DNA, 25 bp, Homo sapien
aatagaaaatatcgcccatgatcaa

SEQ ID NO: 919964 - DNA, 25 bp, Homo sapien
ccctattccacaggcacctccctgt

SEQ ID NO: 919965 - DNA, 25 bp, Homo sapien
atgaactccccctattccacaggca

SEQ ID NO: 919966 - DNA, 25 bp, Homo sapien
ctattccacaggcacctccctgtgg

SEQ ID NO: 919967 - DNA, 25 bp, Homo sapien
tccccctattccacaggcacctccc

SEQ ID NO: 919968 - DNA, 25 bp, Homo sapien
agatgtgtgcatagtgggcctggag

SEQ ID NO: 919969 - DNA, 25 bp, Homo sapien
gaagatgtgtgcatagtgggcctgg

SEQ ID NO: 919970 - DNA, 25 bp, Homo sapien
gggaagatgtgtgcatagtgggcct

SEQ ID NO: 919971 - DNA, 25 bp, Homo sapien
atgtgtgcatagtgggcctggagag

SEQ ID NO: 919972 - DNA, 25 bp, Homo sapien
cctggaaaagctgcacgatcagggc

SEQ ID NO: 919973 - DNA, 25 bp, Homo sapien
gaaaagctgcacgatcagggccggc

SEQ ID NO: 919974 - DNA, 25 bp, Homo sapien
ggcactggtccagggcgcgtgcagt

SEQ ID NO: 919975 - DNA, 25 bp, Homo sapien
ccagggcgcgtgcagtgaagaggac

SEQ ID NO: 919976 - DNA, 25 bp, Homo sapien
aggcaaaggggaagctgtccccatc

SEQ ID NO: 919977 - DNA, 25 bp, Homo sapien
ctgtacaggcaaaggggaagctgtc

SEQ ID NO: 919978 - DNA, 25 bp, Homo sapien
gtacaggcaaaggggaagctgtccc

SEQ ID NO: 919979 - DNA, 25 bp, Homo sapien
gcaaaggggaagctgtccccatcac

SEQ ID NO: 919980 - DNA, 25 bp, Homo sapien
tgcgggatccatgtccgtggggttc

SEQ ID NO: 919981 - DNA, 25 bp, Homo sapien
ggtgtggtggggtcgtccagtgcgg

SEQ ID NO: 919982 - DNA, 25 bp, Homo sapien
caaagcccagtttctcctcttcagg

SEQ ID NO: 919983 - DNA, 25 bp, Homo sapien
ggatccatgtccgtggggttccctc

SEQ ID NO: 919984 - DNA, 25 bp, Homo sapien
ggtctcttgcaccagaaggtggaag

SEQ ID NO: 919985 - DNA, 25 bp, Homo sapien
gggcctggtagctccaggtcgccca

SEQ ID NO: 919986 - DNA, 25 bp, Homo sapien
caggtctcttgcaccagaaggtgga

SEQ ID NO: 919987 - DNA, 25 bp, Homo sapien
ttgggagggactgcgatgactgagg

SEQ ID NO: 919988 - DNA, 25 bp, Homo sapien
gctgccctgaccagactcctaggct

SEQ ID NO: 919989 - DNA, 25 bp, Homo sapien
gtagggggcccactctgctgccctg

SEQ ID NO: 919990 - DNA, 25 bp, Homo sapien
gtgggaccatggactttgccaaaaa

SEQ ID NO: 919991 - DNA, 25 bp, Homo sapien
gccctgaccagactcctaggctttg

SEQ ID NO: 919992 - DNA, 25 bp, Homo sapien
tgctcctcatcactcactatgtcgt

SEQ ID NO: 919993 - DNA, 25 bp, Homo sapien
tcctcatcactcactatgtcgtcac

SEQ ID NO: 919994 - DNA, 25 bp, Homo sapien
tcatcactcactatgtcgtcactgg

SEQ ID NO: 919995 - DNA, 25 bp, Homo sapien
atgtgctcctcatcactcactatgt

SEQ ID NO: 919996 - DNA, 25 bp, Homo sapien
cttctgtcagttcctgtagtgcctg

SEQ ID NO: 919997 - DNA, 25 bp, Homo sapien
ccagacaccacttctgtcagttcct

SEQ ID NO: 919998 - DNA, 25 bp, Homo sapien
acaccacttctgtcagttcctgtag

SEQ ID NO: 919999 - DNA, 25 bp, Homo sapien
cacttctgtcagttcctgtagtgcc

SEQ ID NO: 920000 - DNA, 25 bp, Homo sapien
gagccaggttccctgtatgcagccg

SEQ ID NO: 920001 - DNA, 25 bp, Homo sapien
caggttccctgtatgcagccgttct

SEQ ID NO: 920002 - DNA, 25 bp, Homo sapien
gccaggttccctgtatgcagccgtt

SEQ ID NO: 920003 - DNA, 25 bp, Homo sapien
ggttccctgtatgcagccgttctgc

SEQ ID NO: 920004 - DNA, 25 bp, Homo sapien
ggcagtggcagtgctcgtctctgat

SEQ ID NO: 920005 - DNA, 25 bp, Homo sapien
gtggcagtgctcgtctctgatatac

SEQ ID NO: 920006 - DNA, 25 bp, Homo sapien
ctgacaggagttcagaggacacccc

SEQ ID NO: 920007 - DNA, 25 bp, Homo sapien
cagtggcagtgctcgtctctgatat

SEQ ID NO: 920008 - DNA, 25 bp, Homo sapien
gtacttctttcggtccctgttgcaa

SEQ ID NO: 920009 - DNA, 25 bp, Homo sapien
tctgctcccaggagcccttgtatac

SEQ ID NO: 920010 - DNA, 25 bp, Homo sapien
tcccaggagcccttgtatactcctg

SEQ ID NO: 920011 - DNA, 25 bp, Homo sapien
tacttctttcggtccctgttgcaag

SEQ ID NO: 920012 - DNA, 25 bp, Homo sapien
gatctggcagacggtccggttgtcc

SEQ ID NO: 920013 - DNA, 25 bp, Homo sapien
caggatctggcagacggtccggttg

SEQ ID NO: 920014 - DNA, 25 bp, Homo sapien
ccaggtcgtggtacttctgcatctc

SEQ ID NO: 920015 - DNA, 25 bp, Homo sapien
ggccaggtcgtggtacttctgcatc

SEQ ID NO: 920016 - DNA, 25 bp, Homo sapien
ttgctgaagctcatgaccaccactt

SEQ ID NO: 920017 - DNA, 25 bp, Homo sapien
gaccaccacttatgggccacgggat

SEQ ID NO: 920018 - DNA, 25 bp, Homo sapien
tgaagctcatgaccaccacttatgg

SEQ ID NO: 920019 - DNA, 25 bp, Homo sapien
gctcatgaccaccacttatgggcca

SEQ ID NO: 920020 - DNA, 25 bp, Homo sapien
atggtgggaggtgggcccttaccag

SEQ ID NO: 920021 - DNA, 25 bp, Homo sapien
gacatcatctgagtggtagaggcaa

SEQ ID NO: 920022 - DNA, 25 bp, Homo sapien
catcgtggtcattctctgtctcatt

SEQ ID NO: 920023 - DNA, 25 bp, Homo sapien
catgacggagaggaaagcatcatcg

SEQ ID NO: 920024 - DNA, 25 bp, Homo sapien
cacgggaggcctcgctggacacagt

SEQ ID NO: 920025 - DNA, 25 bp, Homo sapien
acacgaacacgctgacgccacggga

SEQ ID NO: 920026 - DNA, 25 bp, Homo sapien
cgaacacgctgacgccacgggaggc

SEQ ID NO: 920027 - DNA, 25 bp, Homo sapien
gccacgggaggcctcgctggacaca

SEQ ID NO: 920028 - DNA, 25 bp, Homo sapien
gagacacgagttgggcctaaacagg

SEQ ID NO: 920029 - DNA, 25 bp, Homo sapien
tgccagagacacgagttgggcctaa

SEQ ID NO: 920030 - DNA, 25 bp, Homo sapien
cagagacacgagttgggcctaaaca

SEQ ID NO: 920031 - DNA, 25 bp, Homo sapien
gtgccagagacacgagttgggccta

SEQ ID NO: 920032 - DNA, 25 bp, Homo sapien
ctggaggggccctcattgaggacgc

SEQ ID NO: 920033 - DNA, 25 bp, Homo sapien
ggccctcattgaggacgcgttgcac

SEQ ID NO: 920034 - DNA, 25 bp, Homo sapien
gggccctcattgaggacgcgttgca

SEQ ID NO: 920035 - DNA, 25 bp, Homo sapien
tggaggggccctcattgaggacgcg

SEQ ID NO: 920036 - DNA, 25 bp, Homo sapien
ggccaccgggaagccggagctgggc

SEQ ID NO: 920037 - DNA, 25 bp, Homo sapien
ctggagaggccaccgggaagccgga

SEQ ID NO: 920038 - DNA, 25 bp, Homo sapien
cctggaggaccccaccgaccagagg

SEQ ID NO: 920039 - DNA, 25 bp, Homo sapien
tggaggaccccaccgaccagaggcc

SEQ ID NO: 920040 - DNA, 25 bp, Homo sapien
gagaggctgaatggagtaaattcag

SEQ ID NO: 920041 - DNA, 25 bp, Homo sapien
agaggctgaatggagtaaattcagg

SEQ ID NO: 920042 - DNA, 25 bp, Homo sapien
catcctccaagtggccccttcaggg

SEQ ID NO: 920043 - DNA, 25 bp, Homo sapien
cagactttctccagttagcttctcg

SEQ ID NO: 920044 - DNA, 25 bp, Homo sapien
tttctccagttagcttctcgaggcc

SEQ ID NO: 920045 - DNA, 25 bp, Homo sapien
tccagttagcttctcgaggcccagc

SEQ ID NO: 920046 - DNA, 25 bp, Homo sapien
tctcaacagcctctcgaggtcgagt

SEQ ID NO: 920047 - DNA, 25 bp, Homo sapien
tttgcctcacaacgtcctctttgga

SEQ ID NO: 920048 - DNA, 25 bp, Homo sapien
ttggattagctcctgtgcagctcct

SEQ ID NO: 920049 - DNA, 25 bp, Homo sapien
agaactttctcaagtctgcctctcc

SEQ ID NO: 920050 - DNA, 25 bp, Homo sapien
atctttggcctcatagtggccactg

SEQ ID NO: 920051 - DNA, 25 bp, Homo sapien
ttggcctcatagtggccactggaac

SEQ ID NO: 920052 - DNA, 25 bp, Homo sapien
ccagtcgaacccatgatggcctctt

SEQ ID NO: 920053 - DNA, 25 bp, Homo sapien
tcatagtggccagtcgaacccatga

SEQ ID NO: 920054 - DNA, 25 bp, Homo sapien
tggagacaatgacttgtctctcctc

SEQ ID NO: 920055 - DNA, 25 bp, Homo sapien
gagacaatgacttgtctctcctcat

SEQ ID NO: 920056 - DNA, 25 bp, Homo sapien
gacaatgacttgtctctcctcatat

SEQ ID NO: 920057 - DNA, 25 bp, Homo sapien
agacaatgacttgtctctcctcata

SEQ ID NO: 920058 - DNA, 25 bp, Homo sapien
gttaaaaacacagtggaatgtctct

SEQ ID NO: 920059 - DNA, 25 bp, Homo sapien
aaaaacacagtggaatgtctctttg

SEQ ID NO: 920060 - DNA, 25 bp, Homo sapien
aacacagtggaatgtctctttgtcc

SEQ ID NO: 920061 - DNA, 25 bp, Homo sapien
acacagtggaatgtctctttgtcca

SEQ ID NO: 920062 - DNA, 25 bp, Homo sapien
ctgctcccatgatgcctgtcaaggg

SEQ ID NO: 920063 - DNA, 25 bp, Homo sapien
cccatgatgcctgtcaaggggcaca

SEQ ID NO: 920064 - DNA, 25 bp, Homo sapien
tccctgctcccatgatgcctgtcaa

SEQ ID NO: 920065 - DNA, 25 bp, Homo sapien
ccatgatgcctgtcaaggggcacag

SEQ ID NO: 920066 - DNA, 25 bp, Homo sapien
gcaagtcctgttggttgtaaccttc

SEQ ID NO: 920067 - DNA, 25 bp, Homo sapien
ttgcaagtcctgttggttgtaacct

SEQ ID NO: 920068 - DNA, 25 bp, Homo sapien
tcttcctcctttttatcttgtttca

SEQ ID NO: 920069 - DNA, 25 bp, Homo sapien
ctgttggttgtaaccttcccagcct

SEQ ID NO: 920070 - DNA, 25 bp, Homo sapien
ctggtgctaggacaggtgtttccgt

SEQ ID NO: 920071 - DNA, 25 bp, Homo sapien
tcgtatatttcggtgtgccaggagg

SEQ ID NO: 920072 - DNA, 25 bp, Homo sapien
ggaaatggtctgagttcgagtctag

SEQ ID NO: 920073 - DNA, 25 bp, Homo sapien
gcttcattggagtaaaggacaagta

SEQ ID NO: 920074 - DNA, 25 bp, Homo sapien
taggcattgggatgacttttagaca

SEQ ID NO: 920075 - DNA, 25 bp, Homo sapien
tcagtctcctgagtgccaccaattg

SEQ ID NO: 920076 - DNA, 25 bp, Homo sapien
tgccaccaattgtgtgccaccaagc

SEQ ID NO: 920077 - DNA, 25 bp, Homo sapien
caaccattcctggtctgtagttttg

SEQ ID NO: 920078 - DNA, 25 bp, Homo sapien
tgcagccaaaacctactgggctcat

SEQ ID NO: 920079 - DNA, 25 bp, Homo sapien
ccaggaacggagtgtgggtgccagt

SEQ ID NO: 920080 - DNA, 25 bp, Homo sapien
aggaggggagctagcaccacagccc

SEQ ID NO: 920081 - DNA, 25 bp, Homo sapien
aggtgatctgtggccgtagctggac

SEQ ID NO: 920082 - DNA, 25 bp, Homo sapien
gtagctggaccaggctaggtcttga

SEQ ID NO: 920083 - DNA, 25 bp, Homo sapien
aatttgtatgatgacatctaggtag

SEQ ID NO: 920084 - DNA, 25 bp, Homo sapien
gacgtcatagcctgtaatttgtatg

SEQ ID NO: 920085 - DNA, 25 bp, Homo sapien
gagaatgaggtggacgtcatagcct

SEQ ID NO: 920086 - DNA, 25 bp, Homo sapien
tgaggtggacgtcatagcctgtaat

SEQ ID NO: 920087 - DNA, 25 bp, Homo sapien
tggtgaagctggacactgccatgaa

SEQ ID NO: 920088 - DNA, 25 bp, Homo sapien
tgaagctggacactgccatgaagga

SEQ ID NO: 920089 - DNA, 25 bp, Homo sapien
ggtgaagctggacactgccatgaag

SEQ ID NO: 920090 - DNA, 25 bp, Homo sapien
ctggtgaagctggacactgccatga

SEQ ID NO: 920091 - DNA, 25 bp, Homo sapien
agggccgattctggagtgggactga

SEQ ID NO: 920092 - DNA, 25 bp, Homo sapien
cgattctggagtgggactgagcctt

SEQ ID NO: 920093 - DNA, 25 bp, Homo sapien
gagcctttgaaatactccagccacg

SEQ ID NO: 920094 - DNA, 25 bp, Homo sapien
agcctttgaaatactccagccacga

SEQ ID NO: 920095 - DNA, 25 bp, Homo sapien
ggcagaggagagcttcctgttgact

SEQ ID NO: 920096 - DNA, 25 bp, Homo sapien
gaggagagcttcctgttgacttgct

SEQ ID NO: 920097 - DNA, 25 bp, Homo sapien
tattgtgatttaggagactggcaga

SEQ ID NO: 920098 - DNA, 25 bp, Homo sapien
attgtgatttaggagactggcagag

SEQ ID NO: 920099 - DNA, 25 bp, Homo sapien
gcacagtcctgaagaggaaagccgg

SEQ ID NO: 920100 - DNA, 25 bp, Homo sapien
aaagccgggctgtgttgacctcgct

SEQ ID NO: 920101 - DNA, 25 bp, Homo sapien
cgttgtttcaggcacttcgggacta

SEQ ID NO: 920102 - DNA, 25 bp, Homo sapien
tgatcgcgtgcacttccttgccaaa

SEQ ID NO: 920103 - DNA, 25 bp, Homo sapien
ccggctttcctaagctgctgtggga

SEQ ID NO: 920104 - DNA, 25 bp, Homo sapien
gggagccaccggctttcctaagctg

SEQ ID NO: 920105 - DNA, 25 bp, Homo sapien
gaggtccaggcgctgtccattgtgc

SEQ ID NO: 920106 - DNA, 25 bp, Homo sapien
agggtctttcctggccatcgcgcct

SEQ ID NO: 920107 - DNA, 25 bp, Homo sapien
acattctccataatcgtttattatc

SEQ ID NO: 920108 - DNA, 25 bp, Homo sapien
ccacagggatggttgactctctgta

SEQ ID NO: 920109 - DNA, 25 bp, Homo sapien
acagggatggttgactctctgtaaa

SEQ ID NO: 920110 - DNA, 25 bp, Homo sapien
tccacagggatggttgactctctgt

SEQ ID NO: 920111 - DNA, 25 bp, Homo sapien
cacagggatggttgactctctgtaa

SEQ ID NO: 920112 - DNA, 25 bp, Homo sapien
tacatcactgatgtttggtccagtc

SEQ ID NO: 920113 - DNA, 25 bp, Homo sapien
tttctacatcactgatgtttggtcc

SEQ ID NO: 920114 - DNA, 25 bp, Homo sapien
ccagtttctacatcactgatgtttg

SEQ ID NO: 920115 - DNA, 25 bp, Homo sapien
tctacatcactgatgtttggtccag

SEQ ID NO: 920116 - DNA, 25 bp, Homo sapien
acatctggaactctatctgagttca

SEQ ID NO: 920117 - DNA, 25 bp, Homo sapien
catctggaactctatctgagttcat

SEQ ID NO: 920118 - DNA, 25 bp, Homo sapien
tctggaactctatctgagttcattt

SEQ ID NO: 920119 - DNA, 25 bp, Homo sapien
cacatctggaactctatctgagttc

SEQ ID NO: 920120 - DNA, 25 bp, Homo sapien
tgtatgtattactatggacatcctg

SEQ ID NO: 920121 - DNA, 25 bp, Homo sapien
attactatggacatcctgagagatc

SEQ ID NO: 920122 - DNA, 25 bp, Homo sapien
ccgtgttttatatttcggactatgc

SEQ ID NO: 920123 - DNA, 25 bp, Homo sapien
acataatcctggcatattggaacaa

SEQ ID NO: 920124 - DNA, 25 bp, Homo sapien
cttgttgaaggacagcaccattcat

SEQ ID NO: 920125 - DNA, 25 bp, Homo sapien
attcacaagccgttccttactcaga

SEQ ID NO: 920126 - DNA, 25 bp, Homo sapien
cattcacaagccgttccttactcag

SEQ ID NO: 920127 - DNA, 25 bp, Homo sapien
gcattcacaagccgttccttactca

SEQ ID NO: 920128 - DNA, 25 bp, Homo sapien
tgcattcacaagccgttccttactc

SEQ ID NO: 920129 - DNA, 25 bp, Homo sapien
ccgtatccaagttcctggtggctga

SEQ ID NO: 920130 - DNA, 25 bp, Homo sapien
ctaaagcacaccgtatccaagttcc

SEQ ID NO: 920131 - DNA, 25 bp, Homo sapien
taaagcacaccgtatccaagttcct

SEQ ID NO: 920132 - DNA, 25 bp, Homo sapien
tatccaagttcctggtggctgaaaa

SEQ ID NO: 920133 - DNA, 25 bp, Homo sapien
gaacaaaagtgagacttgttttgga

SEQ ID NO: 920134 - DNA, 25 bp, Homo sapien
acaaaagtgagacttgttttggaat

SEQ ID NO: 920135 - DNA, 25 bp, Homo sapien
caaaagtgagacttgttttggaata

SEQ ID NO: 920136 - DNA, 25 bp, Homo sapien
gattgggacttattgcaataccaca

SEQ ID NO: 920137 - DNA, 25 bp, Homo sapien
cagggctgcggtcagtcgattctgt

SEQ ID NO: 920138 - DNA, 25 bp, Homo sapien
gtcagtcgattctgtcatatactcc

SEQ ID NO: 920139 - DNA, 25 bp, Homo sapien
ttgggacttattgcaataccacact

SEQ ID NO: 920140 - DNA, 25 bp, Homo sapien
aggtggaggtaagcatagcctttgg

SEQ ID NO: 920141 - DNA, 25 bp, Homo sapien
tcaggtggaggtaagcatagccttt

SEQ ID NO: 920142 - DNA, 25 bp, Homo sapien
caggtggaggtaagcatagcctttg

SEQ ID NO: 920143 - DNA, 25 bp, Homo sapien
gatttcagaaaggtgtgtgcctggg

SEQ ID NO: 920144 - DNA, 25 bp, Homo sapien
aaaggtgtgtgcctggggcacccaa

SEQ ID NO: 920145 - DNA, 25 bp, Homo sapien
tgcctggggcacccaaaggcatgac

SEQ ID NO: 920146 - DNA, 25 bp, Homo sapien
aagatttcagaaaggtgtgtgcctg

SEQ ID NO: 920147 - DNA, 25 bp, Homo sapien
tctccttggcataggccttacaaca

SEQ ID NO: 920148 - DNA, 25 bp, Homo sapien
cctttctccttggcataggccttac

SEQ ID NO: 920149 - DNA, 25 bp, Homo sapien
cttcctttctccttggcataggcct

SEQ ID NO: 920150 - DNA, 25 bp, Homo sapien
tttctccttggcataggccttacaa

SEQ ID NO: 920151 - DNA, 25 bp, Homo sapien
gaatctatatgaagaaaccggcaaa

SEQ ID NO: 920152 - DNA, 25 bp, Homo sapien
tcagtgacatttaggctagcaccaa

SEQ ID NO: 920153 - DNA, 25 bp, Homo sapien
tccacattcaagtaaagaaggcttc

SEQ ID NO: 920154 - DNA, 25 bp, Homo sapien
caaatgtcaattactgtcctatata

SEQ ID NO: 920155 - DNA, 25 bp, Homo sapien
gctgcgtccgcactgtacagaactg

SEQ ID NO: 920156 - DNA, 25 bp, Homo sapien
caaaaggtgagcacacttcaaaaag

SEQ ID NO: 920157 - DNA, 25 bp, Homo sapien
gaaagtctgttacgtcaggtgcaga

SEQ ID NO: 920158 - DNA, 25 bp, Homo sapien
acgctgtgcctacgcccgtttcaga

SEQ ID NO: 920159 - DNA, 25 bp, Homo sapien
gcacctgcgttaattacggcaggca

SEQ ID NO: 920160 - DNA, 25 bp, Homo sapien
aggtcctgcacctgcgttaattacg

SEQ ID NO: 920161 - DNA, 25 bp, Homo sapien
ctgcgttaattacggcaggcaggtc

SEQ ID NO: 920162 - DNA, 25 bp, Homo sapien
gcgctcaggtcctgcacctgcgtta

SEQ ID NO: 920163 - DNA, 25 bp, Homo sapien
ggcagcactgcgcatgtagccaggg

SEQ ID NO: 920164 - DNA, 25 bp, Homo sapien
accttcacatgaggcagcaaacaac

SEQ ID NO: 920165 - DNA, 25 bp, Homo sapien
taggacactcacgaggaagcttccg

SEQ ID NO: 920166 - DNA, 25 bp, Homo sapien
cagcaaacaacggtttaggacactc

SEQ ID NO: 920167 - DNA, 25 bp, Homo sapien
cggaactgcactggaatcctgaaag

SEQ ID NO: 920168 - DNA, 25 bp, Homo sapien
tcctgaaagagctcggtgcagaacg

SEQ ID NO: 920169 - DNA, 25 bp, Homo sapien
tggcctctaccggttctgcgagaaa

SEQ ID NO: 920170 - DNA, 25 bp, Homo sapien
cacgacaagtcatgaagtcggcacg

SEQ ID NO: 920171 - DNA, 25 bp, Homo sapien
gagtagtgtcttagccgcttccggc

SEQ ID NO: 920172 - DNA, 25 bp, Homo sapien
tttcggccgttgttcgcagggctgc

SEQ ID NO: 920173 - DNA, 25 bp, Homo sapien
gcttccggccgttggtcgcaaggct

SEQ ID NO: 920174 - DNA, 25 bp, Homo sapien
catgctgggagaagtagtttcttca

SEQ ID NO: 920175 - DNA, 25 bp, Homo sapien
tccctcaaaagcgtcgcgcctcctc

SEQ ID NO: 920176 - DNA, 25 bp, Homo sapien
gctcggtttccctcaaaagcgtcgc

SEQ ID NO: 920177 - DNA, 25 bp, Homo sapien
gtttccctcaaaagcgtcgcgcctc

SEQ ID NO: 920178 - DNA, 25 bp, Homo sapien
tcggtttccctcaaaagcgtcgcgc

SEQ ID NO: 920179 - DNA, 25 bp, Homo sapien
cagagcgccagttcacccgcttttg

SEQ ID NO: 920180 - DNA, 25 bp, Homo sapien
cagttcacccgcttttgggagaact

SEQ ID NO: 920181 - DNA, 25 bp, Homo sapien
cccgcttttgggagaactctgccgc

SEQ ID NO: 920182 - DNA, 25 bp, Homo sapien
gagcgccagttcacccgcttttggg

SEQ ID NO: 920183 - DNA, 25 bp, Homo sapien
gggattacccatgggcttctggagc

SEQ ID NO: 920184 - DNA, 25 bp, Homo sapien
gtggtcctagaagggccgtcccatc

SEQ ID NO: 920185 - DNA, 25 bp, Homo sapien
ctcagggacagctcagtcaggtgac

SEQ ID NO: 920186 - DNA, 25 bp, Homo sapien
tttctgtgggagtcccttcatgctg

SEQ ID NO: 920187 - DNA, 25 bp, Homo sapien
ctgatactgaggacacccctacagg

SEQ ID NO: 920188 - DNA, 25 bp, Homo sapien
gaaggaagacttcgtcagcttttct

SEQ ID NO: 920189 - DNA, 25 bp, Homo sapien
tgtggcccacttgttctgatactga

SEQ ID NO: 920190 - DNA, 25 bp, Homo sapien
actgggttcctggagtcctcgaggg

SEQ ID NO: 920191 - DNA, 25 bp, Homo sapien
tcccacactgagctgaactgtgttc

SEQ ID NO: 920192 - DNA, 25 bp, Homo sapien
gtgcagggccatccactccatgctg

SEQ ID NO: 920193 - DNA, 25 bp, Homo sapien
cacactgagctgaactgtgttctgg

SEQ ID NO: 920194 - DNA, 25 bp, Homo sapien
cactgagctgaactgtgttctggct

SEQ ID NO: 920195 - DNA, 25 bp, Homo sapien
ctcccgaactgagggtagagaaaca

SEQ ID NO: 920196 - DNA, 25 bp, Homo sapien
gagtcacaaggcactggggaaaaac

SEQ ID NO: 920197 - DNA, 25 bp, Homo sapien
ggtagagaaacaaggccaacaccca

SEQ ID NO: 920198 - DNA, 25 bp, Homo sapien
tgagtcacaaggcactggggaaaaa

SEQ ID NO: 920199 - DNA, 25 bp, Homo sapien
tgggacctcagaccatgctgggcgc

SEQ ID NO: 920200 - DNA, 25 bp, Homo sapien
atcgaaatcggcgtccgttgcccac

SEQ ID NO: 920201 - DNA, 25 bp, Homo sapien
ggccaggcccgcgacatcgaaatcg

SEQ ID NO: 920202 - DNA, 25 bp, Homo sapien
gtggcccgaccgcgtccaagaaggc

SEQ ID NO: 920203 - DNA, 25 bp, Homo sapien
acagtgtggaagacggagtaagccc

SEQ ID NO: 920204 - DNA, 25 bp, Homo sapien
ggctcaaggccttctacaacggcat

SEQ ID NO: 920205 - DNA, 25 bp, Homo sapien
gcacaaatgcagaacacacgggact

SEQ ID NO: 920206 - DNA, 25 bp, Homo sapien
tctgccatgaggtaggaaagctgct

SEQ ID NO: 920207 - DNA, 25 bp, Homo sapien
gggctaacagaaattgcccacaagc

SEQ ID NO: 920208 - DNA, 25 bp, Homo sapien
aagggctaacagaaattgcccacaa

SEQ ID NO: 920209 - DNA, 25 bp, Homo sapien
ccagcaacagaatggtctgtgtggc

SEQ ID NO: 920210 - DNA, 25 bp, Homo sapien
agggctaacagaaattgcccacaag

SEQ ID NO: 920211 - DNA, 25 bp, Homo sapien
tcctgatgttgtcccttatgtaaga

SEQ ID NO: 920212 - DNA, 25 bp, Homo sapien
gcaggttattactgagaaacaaatt

SEQ ID NO: 920213 - DNA, 25 bp, Homo sapien
gaggtgctggagctaatggtgacag

SEQ ID NO: 920214 - DNA, 25 bp, Homo sapien
gcacgttgctattggtcacattaga

SEQ ID NO: 920215 - DNA, 25 bp, Homo sapien
gccctcatccctctatgcatgtaga

SEQ ID NO: 920216 - DNA, 25 bp, Homo sapien
ccctcatccctctatgcatgtagaa

SEQ ID NO: 920217 - DNA, 25 bp, Homo sapien
gagccctcatccctctatgcatgta

SEQ ID NO: 920218 - DNA, 25 bp, Homo sapien
agccctcatccctctatgcatgtag

SEQ ID NO: 920219 - DNA, 25 bp, Homo sapien
tcacagtgaggagcatcactaagtg

SEQ ID NO: 920220 - DNA, 25 bp, Homo sapien
gctcacagtgaggagcatcactaag

SEQ ID NO: 920221 - DNA, 25 bp, Homo sapien
ctcacagtgaggagcatcactaagt

SEQ ID NO: 920222 - DNA, 25 bp, Homo sapien
gtgagtctaataccggcttggaaaa

SEQ ID NO: 920223 - DNA, 25 bp, Homo sapien
aatagtatcataagtggaacaaggt

SEQ ID NO: 920224 - DNA, 25 bp, Homo sapien
atagtatcataagtggaacaaggtc

SEQ ID NO: 920225 - DNA, 25 bp, Homo sapien
gctgtgagtctaataccggcttgga

SEQ ID NO: 920226 - DNA, 25 bp, Homo sapien
caggtaccgcatggcttggggcagt

SEQ ID NO: 920227 - DNA, 25 bp, Homo sapien
cagacagcaggtaccgcatggcttg

SEQ ID NO: 920228 - DNA, 25 bp, Homo sapien
gaggcagtcagacagcaggtaccgc

SEQ ID NO: 920229 - DNA, 25 bp, Homo sapien
ggcagtcagacagcaggtaccgcat

SEQ ID NO: 920230 - DNA, 25 bp, Homo sapien
attcatgagtttttagagcacagct

SEQ ID NO: 920231 - DNA, 25 bp, Homo sapien
atgagtttttagagcacagctacac

SEQ ID NO: 920232 - DNA, 25 bp, Homo sapien
cattcatgagtttttagagcacagc

SEQ ID NO: 920233 - DNA, 25 bp, Homo sapien
tccttggtatcccactgattgtgca

SEQ ID NO: 920234 - DNA, 25 bp, Homo sapien
tctccttggtatcccactgattgtg

SEQ ID NO: 920235 - DNA, 25 bp, Homo sapien
ctccttggtatcccactgattgtgc

SEQ ID NO: 920236 - DNA, 25 bp, Homo sapien
ccatttctgctctggcctcggtgct

SEQ ID NO: 920237 - DNA, 25 bp, Homo sapien
ggaatgaacaggcccatttctgctc

SEQ ID NO: 920238 - DNA, 25 bp, Homo sapien
tgctgagttatttggttctggaacc

SEQ ID NO: 920239 - DNA, 25 bp, Homo sapien
caaatgtgaattctggactctggaa

SEQ ID NO: 920240 - DNA, 25 bp, Homo sapien
cacacatgagtggtggcttctacat

SEQ ID NO: 920241 - DNA, 25 bp, Homo sapien
tggtggcttctacatcaacactcac

SEQ ID NO: 920242 - DNA, 25 bp, Homo sapien
cacatgagtggtggcttctacatca

SEQ ID NO: 920243 - DNA, 25 bp, Homo sapien
agtggtggcttctacatcaacactc

SEQ ID NO: 920244 - DNA, 25 bp, Homo sapien
agtttcagacaagcccaggaaggtc

SEQ ID NO: 920245 - DNA, 25 bp, Homo sapien
tcccagtttcagacaagcccaggaa

SEQ ID NO: 920246 - DNA, 25 bp, Homo sapien
tcagacaagcccaggaaggtcagag

SEQ ID NO: 920247 - DNA, 25 bp, Homo sapien
aggaagagggatcttctcccagttt

SEQ ID NO: 920248 - DNA, 25 bp, Homo sapien
ttgatcctttccctagcaaggctgc

SEQ ID NO: 920249 - DNA, 25 bp, Homo sapien
tccaagatggatgtgggccctgaca

SEQ ID NO: 920250 - DNA, 25 bp, Homo sapien
gatcctttccctagcaaggctgcat

SEQ ID NO: 920251 - DNA, 25 bp, Homo sapien
ctttccctagcaaggctgcattggg

SEQ ID NO: 920252 - DNA, 25 bp, Homo sapien
gcctgtgccggatgttctgtaagta

SEQ ID NO: 920253 - DNA, 25 bp, Homo sapien
tgtgcacatggctgtctgcttcatt

SEQ ID NO: 920254 - DNA, 25 bp, Homo sapien
ttgtgcacatggctgtctgcttcat

SEQ ID NO: 920255 - DNA, 25 bp, Homo sapien
tgggcctgtgccggatgttctgtaa

SEQ ID NO: 920256 - DNA, 25 bp, Homo sapien
cagccttcagcacgatcgggagtgg

SEQ ID NO: 920257 - DNA, 25 bp, Homo sapien
gtctcgttggatccggagcacagcg

SEQ ID NO: 920258 - DNA, 25 bp, Homo sapien
caatgggagtctcgttggatccgga

SEQ ID NO: 920259 - DNA, 25 bp, Homo sapien
tggcagccttcagcacgatcgggag

SEQ ID NO: 920260 - DNA, 25 bp, Homo sapien
atgatgaaatcgaccgagtacacga

SEQ ID NO: 920261 - DNA, 25 bp, Homo sapien
tgaaatcgaccgagtacacgaccac

SEQ ID NO: 920262 - DNA, 25 bp, Homo sapien
gaccgagtacacgaccacaaagaaa

SEQ ID NO: 920263 - DNA, 25 bp, Homo sapien
catatgcccatagtgaggctgagga

SEQ ID NO: 920264 - DNA, 25 bp, Homo sapien
gagaggcaggtgctgtgaaggtacc

SEQ ID NO: 920265 - DNA, 25 bp, Homo sapien
caaaagaaccaccatgtatgcactt

SEQ ID NO: 920266 - DNA, 25 bp, Homo sapien
tcttctgatggctgagcaaaagaac

SEQ ID NO: 920267 - DNA, 25 bp, Homo sapien
tgtgaaggtaccaggatttcttctg

SEQ ID NO: 920268 - DNA, 25 bp, Homo sapien
tggtgttaacggttccacctctgcc

SEQ ID NO: 920269 - DNA, 25 bp, Homo sapien
catggaagtcactaaagagggaagt

SEQ ID NO: 920270 - DNA, 25 bp, Homo sapien
tacttgagtcacactgatggtgatg

SEQ ID NO: 920271 - DNA, 25 bp, Homo sapien
ggcatggaagtcactaaagagggaa

SEQ ID NO: 920272 - DNA, 25 bp, Homo sapien
ctctttgctccagaagggtaatcaa

SEQ ID NO: 920273 - DNA, 25 bp, Homo sapien
tgctccagaagggtaatcaagtctg

SEQ ID NO: 920274 - DNA, 25 bp, Homo sapien
cagaagggtaatcaagtctggcttg

SEQ ID NO: 920275 - DNA, 25 bp, Homo sapien
tttgctccagaagggtaatcaagtc

SEQ ID NO: 920276 - DNA, 25 bp, Homo sapien
tgaattgtatattgaagatatcctc

SEQ ID NO: 920277 - DNA, 25 bp, Homo sapien
tatttagtgtggaatgtgaattgta

SEQ ID NO: 920278 - DNA, 25 bp, Homo sapien
cagaaactcccagaaaatggaagaa

SEQ ID NO: 920279 - DNA, 25 bp, Homo sapien
tcatttgtgcaaagcagaaactccc

SEQ ID NO: 920280 - DNA, 25 bp, Homo sapien
agttctctaacatcgcatccctgtg

SEQ ID NO: 920281 - DNA, 25 bp, Homo sapien
catcgcatccctgtgcaaatgctgc

SEQ ID NO: 920282 - DNA, 25 bp, Homo sapien
ctaacatcgcatccctgtgcaaatg

SEQ ID NO: 920283 - DNA, 25 bp, Homo sapien
tctctaacatcgcatccctgtgcaa

SEQ ID NO: 920284 - DNA, 25 bp, Homo sapien
caaaatgtgagtttccgctttccaa

SEQ ID NO: 920285 - DNA, 25 bp, Homo sapien
tttccgctttccaacactcaggtgc

SEQ ID NO: 920286 - DNA, 25 bp, Homo sapien
ttctgctgcagcaataggaatatgg

SEQ ID NO: 920287 - DNA, 25 bp, Homo sapien
caataggaatatgggccaccctcac

SEQ ID NO: 920288 - DNA, 25 bp, Homo sapien
aactcatggacatctgaattccagt

SEQ ID NO: 920289 - DNA, 25 bp, Homo sapien
tgaattccagtaggtattggaagca

SEQ ID NO: 920290 - DNA, 25 bp, Homo sapien
catctgaattccagtaggtattgga

SEQ ID NO: 920291 - DNA, 25 bp, Homo sapien
tccagtaggtattggaagcaggcac

SEQ ID NO: 920292 - DNA, 25 bp, Homo sapien
tttggggacatacaaatatctgcat

SEQ ID NO: 920293 - DNA, 25 bp, Homo sapien
cagggactgcacaaactgactgctt

SEQ ID NO: 920294 - DNA, 25 bp, Homo sapien
attgcttttggggacatacaaatat

SEQ ID NO: 920295 - DNA, 25 bp, Homo sapien
ggactgcacaaactgactgctttgc

SEQ ID NO: 920296 - DNA, 25 bp, Homo sapien
gctattctcaattgtcctcacactg

SEQ ID NO: 920297 - DNA, 25 bp, Homo sapien
tcacactgactctgctcaacatagt

SEQ ID NO: 920298 - DNA, 25 bp, Homo sapien
tattgtgtcatcttctgctgagaag

SEQ ID NO: 920299 - DNA, 25 bp, Homo sapien
gtgactggaagtgatgtgtgcataa

SEQ ID NO: 920300 - DNA, 25 bp, Homo sapien
tccgaataatcacaaagaagttctc

SEQ ID NO: 920301 - DNA, 25 bp, Homo sapien
taagccaaaggggatggtgatgtaa

SEQ ID NO: 920302 - DNA, 25 bp, Homo sapien
taatctccgaataatcacaaagaag

SEQ ID NO: 920303 - DNA, 25 bp, Homo sapien
aaaaatctaatctccgaataatcac

SEQ ID NO: 920304 - DNA, 25 bp, Homo sapien
tagtatgacaacctgcattgcttta

SEQ ID NO: 920305 - DNA, 25 bp, Homo sapien
tattagtatgacaacctgcattgct

SEQ ID NO: 920306 - DNA, 25 bp, Homo sapien
ggtttattagtatgacaacctgcat

SEQ ID NO: 920307 - DNA, 25 bp, Homo sapien
agtatgacaacctgcattgctttaa

SEQ ID NO: 920308 - DNA, 25 bp, Homo sapien
aattctcatagataggcctagggcc

SEQ ID NO: 920309 - DNA, 25 bp, Homo sapien
taggagggtcatatcacctgggagc

SEQ ID NO: 920310 - DNA, 25 bp, Homo sapien
tatcttgtgacttatacctgggcca

SEQ ID NO: 920311 - DNA, 25 bp, Homo sapien
tacaaagagtgtcataacagggccg

SEQ ID NO: 920312 - DNA, 25 bp, Homo sapien
tgagctgagattgcatcattgcatt

SEQ ID NO: 920313 - DNA, 25 bp, Homo sapien
agcctgggcaacagagcaagactcc

SEQ ID NO: 920314 - DNA, 25 bp, Homo sapien
tctgggagatggaggttgcagtgag

SEQ ID NO: 920315 - DNA, 25 bp, Homo sapien
ggagaaccacttgaatctgggagat

SEQ ID NO: 920316 - DNA, 25 bp, Homo sapien
aaatcactcacatgttggacaaagg

SEQ ID NO: 920317 - DNA, 25 bp, Homo sapien
gagtcaaatcactcacatgttggac

SEQ ID NO: 920318 - DNA, 25 bp, Homo sapien
gattcatcattgtgcttataatttg

SEQ ID NO: 920319 - DNA, 25 bp, Homo sapien
gtcaaatcactcacatgttggacaa

SEQ ID NO: 920320 - DNA, 25 bp, Homo sapien
acctagatgctaggctaagtgatag

SEQ ID NO: 920321 - DNA, 25 bp, Homo sapien
gatgctaggctaagtgataggttcc

SEQ ID NO: 920322 - DNA, 25 bp, Homo sapien
taggctaagtgataggttccaacgc

SEQ ID NO: 920323 - DNA, 25 bp, Homo sapien
gctaagtgataggttccaacgcttc

SEQ ID NO: 920324 - DNA, 25 bp, Homo sapien
ctgcagattgtgttctgatagggaa

SEQ ID NO: 920325 - DNA, 25 bp, Homo sapien
gaaaccagatccacatatgagagta

SEQ ID NO: 920326 - DNA, 25 bp, Homo sapien
gattgtgttctgatagggaactcac

SEQ ID NO: 920327 - DNA, 25 bp, Homo sapien
gagtaacaaatccaacttgcaactg

SEQ ID NO: 920328 - DNA, 25 bp, Homo sapien
gagacccgggcatatttcatccctt

SEQ ID NO: 920329 - DNA, 25 bp, Homo sapien
agttcgagaccagacaaccagtctg

SEQ ID NO: 920330 - DNA, 25 bp, Homo sapien
caataaaagattacaagggcagaag

SEQ ID NO: 920331 - DNA, 25 bp, Homo sapien
tactgatgaggttccatgtcccact

SEQ ID NO: 920332 - DNA, 25 bp, Homo sapien
gagagagctggtcaccatccacgtc

SEQ ID NO: 920333 - DNA, 25 bp, Homo sapien
agagagctggtcaccatccacgtct

SEQ ID NO: 920334 - DNA, 25 bp, Homo sapien
gagctggtcaccatccacgtctttg

SEQ ID NO: 920335 - DNA, 25 bp, Homo sapien
gagagctggtcaccatccacgtctt

SEQ ID NO: 920336 - DNA, 25 bp, Homo sapien
caatcatcatgtttaggttgatttt

SEQ ID NO: 920337 - DNA, 25 bp, Homo sapien
tgagatgaggcccatggttacacgt

SEQ ID NO: 920338 - DNA, 25 bp, Homo sapien
tggttacacgtgtaaaatatcaaaa

SEQ ID NO: 920339 - DNA, 25 bp, Homo sapien
tgaggcccatggttacacgtgtaaa

SEQ ID NO: 920340 - DNA, 25 bp, Homo sapien
tatccctcatatccctctccaaact

SEQ ID NO: 920341 - DNA, 25 bp, Homo sapien
tcactccccatggagagaaaggcag

SEQ ID NO: 920342 - DNA, 25 bp, Homo sapien
tccagcccagatttatccctcatat

SEQ ID NO: 920343 - DNA, 25 bp, Homo sapien
aaactcactccccatggagagaaag

SEQ ID NO: 920344 - DNA, 25 bp, Homo sapien
tctctctctaatggctgtgccccaa

SEQ ID NO: 920345 - DNA, 25 bp, Homo sapien
aagagccgggagtcgttaagagact

SEQ ID NO: 920346 - DNA, 25 bp, Homo sapien
cgcatgcccggcgaggtgcgcagcg

SEQ ID NO: 920347 - DNA, 25 bp, Homo sapien
tgcagccaggcgaccaaagagccgg

SEQ ID NO: 920348 - DNA, 25 bp, Homo sapien
aaatgccggcttcttgggcggaagt

SEQ ID NO: 920349 - DNA, 25 bp, Homo sapien
tgaaatgccggcttcttgggcggaa

SEQ ID NO: 920350 - DNA, 25 bp, Homo sapien
ctgaaatgccggcttcttgggcgga

SEQ ID NO: 920351 - DNA, 25 bp, Homo sapien
atgccggcttcttgggcggaagttt

SEQ ID NO: 920352 - DNA, 25 bp, Homo sapien
ctgggtcaggcctctcgcagggatg

SEQ ID NO: 920353 - DNA, 25 bp, Homo sapien
ggtcaggcctctcgcagggatgctc

SEQ ID NO: 920354 - DNA, 25 bp, Homo sapien
tcaggcctctcgcagggatgctcct

SEQ ID NO: 920355 - DNA, 25 bp, Homo sapien
aggcctctcgcagggatgctcctgc

SEQ ID NO: 920356 - DNA, 25 bp, Homo sapien
attagttgttacttttgtaccgcat

SEQ ID NO: 920357 - DNA, 25 bp, Homo sapien
accgcatttattggtaagactgtcc

SEQ ID NO: 920358 - DNA, 25 bp, Homo sapien
gctgagattccacatgtattcattc

SEQ ID NO: 920359 - DNA, 25 bp, Homo sapien
tctttttctaatctatgaatcaacc

SEQ ID NO: 920360 - DNA, 25 bp, Homo sapien
gagccactccattaactggaggcag

SEQ ID NO: 920361 - DNA, 25 bp, Homo sapien
gaggcagacccaaaattgccccaca

SEQ ID NO: 920362 - DNA, 25 bp, Homo sapien
gtcttactgagccactccattaact

SEQ ID NO: 920363 - DNA, 25 bp, Homo sapien
tgaaggtgataattgtctgcagaca

SEQ ID NO: 920364 - DNA, 25 bp, Homo sapien
tgcctctgtgaactgaggcttcagg

SEQ ID NO: 920365 - DNA, 25 bp, Homo sapien
gaggcttcaggcctatgaatctatg

SEQ ID NO: 920366 - DNA, 25 bp, Homo sapien
tatgaatcttccctatgaatgttga

SEQ ID NO: 920367 - DNA, 25 bp, Homo sapien
tgttgaagactccacatcagccgcc

SEQ ID NO: 920368 - DNA, 25 bp, Homo sapien
ggtatcctggataactggtgtgagt

SEQ ID NO: 920369 - DNA, 25 bp, Homo sapien
taagctggtccaatgctcctgtcat

SEQ ID NO: 920370 - DNA, 25 bp, Homo sapien
ctggtatcctggataactggtgtga

SEQ ID NO: 920371 - DNA, 25 bp, Homo sapien
tgtgagtaagctggtccaatgctcc

SEQ ID NO: 920372 - DNA, 25 bp, Homo sapien
tgagacactccattaattggaagca

SEQ ID NO: 920373 - DNA, 25 bp, Homo sapien
aattggaagcagacccaaaattgct

SEQ ID NO: 920374 - DNA, 25 bp, Homo sapien
acactccattaattggaagcagacc

SEQ ID NO: 920375 - DNA, 25 bp, Homo sapien
attggaagcagacccaaaattgctt

SEQ ID NO: 920376 - DNA, 25 bp, Homo sapien
ggtgctagcgtgaaaactgcccaat

SEQ ID NO: 920377 - DNA, 25 bp, Homo sapien
taaatacaaatgtccctcaggcagg

SEQ ID NO: 920378 - DNA, 25 bp, Homo sapien
caatcaggtgcgcagctagagagga

SEQ ID NO: 920379 - DNA, 25 bp, Homo sapien
ggagaaatcgctgcctgaacatgct

SEQ ID NO: 920380 - DNA, 25 bp, Homo sapien
cttccagcttagctaaaagtctctg

SEQ ID NO: 920381 - DNA, 25 bp, Homo sapien
gcttagctaaaagtctctgcaggtg

SEQ ID NO: 920382 - DNA, 25 bp, Homo sapien
tgatactggtacacatcactgaaac

SEQ ID NO: 920383 - DNA, 25 bp, Homo sapien
ggaagaccctgtgatactggtacac

SEQ ID NO: 920384 - DNA, 25 bp, Homo sapien
tcctatggaaagtgaaggctctcat

SEQ ID NO: 920385 - DNA, 25 bp, Homo sapien
tgcatatcgcttcctatggaaagtg

SEQ ID NO: 920386 - DNA, 25 bp, Homo sapien
cgcttcctatggaaagtgaaggctc

SEQ ID NO: 920387 - DNA, 25 bp, Homo sapien
cttctctttgcatatcgcttcctat

SEQ ID NO: 920388 - DNA, 25 bp, Homo sapien
tgccgaaccctctcacgagacgaag

SEQ ID NO: 920389 - DNA, 25 bp, Homo sapien
tctcacgagacgaagggtgagtctg

SEQ ID NO: 920390 - DNA, 25 bp, Homo sapien
gctggagcagagtggtgtaatacta

SEQ ID NO: 920391 - DNA, 25 bp, Homo sapien
gcgccctacaggaagttaaaggtca

SEQ ID NO: 920392 - DNA, 25 bp, Homo sapien
aagatagccatagtaacaagtgctg

SEQ ID NO: 920393 - DNA, 25 bp, Homo sapien
caagtgctgtatgacttacggagga

SEQ ID NO: 920394 - DNA, 25 bp, Homo sapien
taagccgtattatgctgtagccgcc

SEQ ID NO: 920395 - DNA, 25 bp, Homo sapien
gtagtgtttgaagctctcgagagag

SEQ ID NO: 920396 - DNA, 25 bp, Homo sapien
ttgaaactagtaaggcgaggcccac

SEQ ID NO: 920397 - DNA, 25 bp, Homo sapien
tccccagaagtgatatggtatatgc

SEQ ID NO: 920398 - DNA, 25 bp, Homo sapien
gatcgataggttaatatccccagaa

SEQ ID NO: 920399 - DNA, 25 bp, Homo sapien
gggtaatgggtattatgaatgctag

SEQ ID NO: 920400 - DNA, 25 bp, Homo sapien
ttattttggcttaaactatctacca

SEQ ID NO: 920401 - DNA, 25 bp, Homo sapien
atgttctattataatctaatgagtc

SEQ ID NO: 920402 - DNA, 25 bp, Homo sapien
tgagtcagaatcatttattttggct

SEQ ID NO: 920403 - DNA, 25 bp, Homo sapien
ggtaaatatgttctattataatcta

SEQ ID NO: 920404 - DNA, 25 bp, Homo sapien
attgattggaagtcagtagtactct

SEQ ID NO: 920405 - DNA, 25 bp, Homo sapien
tcagatgtcaaaactaattgattgg

SEQ ID NO: 920406 - DNA, 25 bp, Homo sapien
cagtagtactctttatactaaaaga

SEQ ID NO: 920407 - DNA, 25 bp, Homo sapien
ggaagtcagtagtactctttatact

SEQ ID NO: 920408 - DNA, 25 bp, Homo sapien
gtgtgatttctgtcagaagaagtct

SEQ ID NO: 920409 - DNA, 25 bp, Homo sapien
ggtgtgatttctgtcagaagaagtc

SEQ ID NO: 920410 - DNA, 25 bp, Homo sapien
tgtccatagtagaggcctggtcatg

SEQ ID NO: 920411 - DNA, 25 bp, Homo sapien
aattaagattaagctgatggcaggc

SEQ ID NO: 920412 - DNA, 25 bp, Homo sapien
taaggcaaattggtttaagcgtcca

SEQ ID NO: 920413 - DNA, 25 bp, Homo sapien
gatggcaggcaagatagttcagaca

SEQ ID NO: 920414 - DNA, 25 bp, Homo sapien
atatagggcttaacctataactttg

SEQ ID NO: 920415 - DNA, 25 bp, Homo sapien
ttaagatatatagggcttaacctat

SEQ ID NO: 920416 - DNA, 25 bp, Homo sapien
gatatatagggcttaacctataact

SEQ ID NO: 920417 - DNA, 25 bp, Homo sapien
tagggcttaacctataactttgaca

SEQ ID NO: 920418 - DNA, 25 bp, Homo sapien
tgttagccggttccagtgctggcct

SEQ ID NO: 920419 - DNA, 25 bp, Homo sapien
tgctggcctctactatagtggatgc

SEQ ID NO: 920420 - DNA, 25 bp, Homo sapien
aaatagtatctcatgcggtgtatgc

SEQ ID NO: 920421 - DNA, 25 bp, Homo sapien
tactggataggctgcggaaatgctg

SEQ ID NO: 920422 - DNA, 25 bp, Homo sapien
agctttgaaggctcttggtcttact

SEQ ID NO: 920423 - DNA, 25 bp, Homo sapien
tgctaagagctttgaaggctcttgg

SEQ ID NO: 920424 - DNA, 25 bp, Homo sapien
ttaagtataatttacttgctaagag

SEQ ID NO: 920425 - DNA, 25 bp, Homo sapien
tagaaattaagtataatttacttgc

SEQ ID NO: 920426 - DNA, 25 bp, Homo sapien
tttttggggtatgggccagatagct

SEQ ID NO: 920427 - DNA, 25 bp, Homo sapien
acatttttggggtatgggccagata

SEQ ID NO: 920428 - DNA, 25 bp, Homo sapien
ttggggtatgggccagatagcttat

SEQ ID NO: 920429 - DNA, 25 bp, Homo sapien
taggatgggaagggtataaccaaca

SEQ ID NO: 920430 - DNA, 25 bp, Homo sapien
atttcaacctctattgtttactcta

SEQ ID NO: 920431 - DNA, 25 bp, Homo sapien
ttcaacctctattgtttactctatc

SEQ ID NO: 920432 - DNA, 25 bp, Homo sapien
gaggatttcaacctctattgtttac

SEQ ID NO: 920433 - DNA, 25 bp, Homo sapien
aataagaggatttcaacctctattg

SEQ ID NO: 920434 - DNA, 25 bp, Homo sapien
catagtttgaattggatgcccatcc

SEQ ID NO: 920435 - DNA, 25 bp, Homo sapien
catatgaaattgttcgggcgacagc

SEQ ID NO: 920436 - DNA, 25 bp, Homo sapien
caaaagaagggcgatagaaagggct

SEQ ID NO: 920437 - DNA, 25 bp, Homo sapien
gggcgacagcttgtaatgcaccgat

SEQ ID NO: 920438 - DNA, 25 bp, Homo sapien
tgaggctttccaagagaaggagaac

SEQ ID NO: 920439 - DNA, 25 bp, Homo sapien
gtcggaagagtctcatcaggaaatt

SEQ ID NO: 920440 - DNA, 25 bp, Homo sapien
ttctctggggagacgtaatagttga

SEQ ID NO: 920441 - DNA, 25 bp, Homo sapien
gcagggaagttgcacacaggagtcg

SEQ ID NO: 920442 - DNA, 25 bp, Homo sapien
tggagacaccttaggggccatcagg

SEQ ID NO: 920443 - DNA, 25 bp, Homo sapien
tataggagcaattcagtgcctcctc

SEQ ID NO: 920444 - DNA, 25 bp, Homo sapien
aagaaaatcccccattcctgttgct

SEQ ID NO: 920445 - DNA, 25 bp, Homo sapien
tcccttccctaaagttataggagca

SEQ ID NO: 920446 - DNA, 25 bp, Homo sapien
tgcctagacacactcttttcagtgg

SEQ ID NO: 920447 - DNA, 25 bp, Homo sapien
tgctgcctagacacactcttttcag

SEQ ID NO: 920448 - DNA, 25 bp, Homo sapien
gacacactcttttcagtggagtgaa

SEQ ID NO: 920449 - DNA, 25 bp, Homo sapien
tagacacactcttttcagtggagtg

SEQ ID NO: 920450 - DNA, 25 bp, Homo sapien
tgtacttagctatttaattaggttc

SEQ ID NO: 920451 - DNA, 25 bp, Homo sapien
gctatttaattaggttcttaagaca

SEQ ID NO: 920452 - DNA, 25 bp, Homo sapien
ctatttaattaggttcttaagacat

SEQ ID NO: 920453 - DNA, 25 bp, Homo sapien
tagctatttaattaggttcttaaga

SEQ ID NO: 920454 - DNA, 25 bp, Homo sapien
aattccattcgtcagggcaaacaca

SEQ ID NO: 920455 - DNA, 25 bp, Homo sapien
ggataaattccattcgtcagggcaa

SEQ ID NO: 920456 - DNA, 25 bp, Homo sapien
gataaattccattcgtcagggcaaa

SEQ ID NO: 920457 - DNA, 25 bp, Homo sapien
taaattccattcgtcagggcaaaca

SEQ ID NO: 920458 - DNA, 25 bp, Homo sapien
gagaaatagctttgacttttggtaa

SEQ ID NO: 920459 - DNA, 25 bp, Homo sapien
ctgagaaatagctttgacttttggt

SEQ ID NO: 920460 - DNA, 25 bp, Homo sapien
tgacttttggtaaaatttgtgagtc

SEQ ID NO: 920461 - DNA, 25 bp, Homo sapien
tgagaaatagctttgacttttggta

SEQ ID NO: 920462 - DNA, 25 bp, Homo sapien
gaagatgttgccttcctggtgtctg

SEQ ID NO: 920463 - DNA, 25 bp, Homo sapien
tgtcgaagatgttgccttcctggtg

SEQ ID NO: 920464 - DNA, 25 bp, Homo sapien
tctgtgtcgaagatgttgccttcct

SEQ ID NO: 920465 - DNA, 25 bp, Homo sapien
ttctgtgtcgaagatgttgccttcc

SEQ ID NO: 920466 - DNA, 25 bp, Homo sapien
cttgaagtaagcatcagtaagatgt

SEQ ID NO: 920467 - DNA, 25 bp, Homo sapien
taagcatcagtaagatgttttggga

SEQ ID NO: 920468 - DNA, 25 bp, Homo sapien
gaagtaagcatcagtaagatgtttt

SEQ ID NO: 920469 - DNA, 25 bp, Homo sapien
gcatcagtaagatgttttgggattt

SEQ ID NO: 920470 - DNA, 25 bp, Homo sapien
ttggttgaggtggcaatgacaaatt

SEQ ID NO: 920471 - DNA, 25 bp, Homo sapien
tatcgattttggttgaggtggcaat

SEQ ID NO: 920472 - DNA, 25 bp, Homo sapien
tggttgaggtggcaatgacaaattt

SEQ ID NO: 920473 - DNA, 25 bp, Homo sapien
ctgatatcgattttggttgaggtgg

SEQ ID NO: 920474 - DNA, 25 bp, Homo sapien
caggggtaatgctggcttgcagttt

SEQ ID NO: 920475 - DNA, 25 bp, Homo sapien
tcccaggggtaatgctggcttgcag

SEQ ID NO: 920476 - DNA, 25 bp, Homo sapien
tcagaatggtcccaggggtaatgct

SEQ ID NO: 920477 - DNA, 25 bp, Homo sapien
atggtcccaggggtaatgctggctt

SEQ ID NO: 920478 - DNA, 25 bp, Homo sapien
gaggtacatcttcggtaggatagta

SEQ ID NO: 920479 - DNA, 25 bp, Homo sapien
tacatcttcggtaggatagtatcta

SEQ ID NO: 920480 - DNA, 25 bp, Homo sapien
ggtacatcttcggtaggatagtatc

SEQ ID NO: 920481 - DNA, 25 bp, Homo sapien
tcgaggtacatcttcggtaggatag

SEQ ID NO: 920482 - DNA, 25 bp, Homo sapien
taactttaagattaccctcttgcac

SEQ ID NO: 920483 - DNA, 25 bp, Homo sapien
actttaagattaccctcttgcacct

SEQ ID NO: 920484 - DNA, 25 bp, Homo sapien
ctttaagattaccctcttgcacctt

SEQ ID NO: 920485 - DNA, 25 bp, Homo sapien
tttaagattaccctcttgcaccttg

SEQ ID NO: 920486 - DNA, 25 bp, Homo sapien
gcaaggtccctgaaagttatctttg

SEQ ID NO: 920487 - DNA, 25 bp, Homo sapien
tctgcttggagttaggcaaggtccc

SEQ ID NO: 920488 - DNA, 25 bp, Homo sapien
tctttgatcatgagggagcattcca

SEQ ID NO: 920489 - DNA, 25 bp, Homo sapien
gagcattccatgaaggatgatttga

SEQ ID NO: 920490 - DNA, 25 bp, Homo sapien
caaacttgtggacactgtcgatgac

SEQ ID NO: 920491 - DNA, 25 bp, Homo sapien
gtccaatgagtacataaccacgaag

SEQ ID NO: 920492 - DNA, 25 bp, Homo sapien
cagggctgaatacccataacagcat

SEQ ID NO: 920493 - DNA, 25 bp, Homo sapien
ccatgaaggcacttgagagcggcat

SEQ ID NO: 920494 - DNA, 25 bp, Homo sapien
ctgttgaaagacaaattgagggacc

SEQ ID NO: 920495 - DNA, 25 bp, Homo sapien
tgaaagacaaattgagggaccaaaa

SEQ ID NO: 920496 - DNA, 25 bp, Homo sapien
taaacccaggatatgttattttatg

SEQ ID NO: 920497 - DNA, 25 bp, Homo sapien
aaagagtaaacccaggatatgttat

SEQ ID NO: 920498 - DNA, 25 bp, Homo sapien
ctgtgactcaaacacgtctagagac

SEQ ID NO: 920499 - DNA, 25 bp, Homo sapien
ttctgtgactcaaacacgtctagag

SEQ ID NO: 920500 - DNA, 25 bp, Homo sapien
tctgtgactcaaacacgtctagaga

SEQ ID NO: 920501 - DNA, 25 bp, Homo sapien
tgtgactcaaacacgtctagagaca

SEQ ID NO: 920502 - DNA, 25 bp, Homo sapien
caaaaggccttttgaaagataacat

SEQ ID NO: 920503 - DNA, 25 bp, Homo sapien
aggccttttgaaagataacatgtga

SEQ ID NO: 920504 - DNA, 25 bp, Homo sapien
aaggccttttgaaagataacatgtg

SEQ ID NO: 920505 - DNA, 25 bp, Homo sapien
aaaaggccttttgaaagataacatg

SEQ ID NO: 920506 - DNA, 25 bp, Homo sapien
caccttgcagtagctctttatggtg

SEQ ID NO: 920507 - DNA, 25 bp, Homo sapien
agcaccttgcagtagctctttatgg

SEQ ID NO: 920508 - DNA, 25 bp, Homo sapien
agccagcgccgttcaccctccattt

SEQ ID NO: 920509 - DNA, 25 bp, Homo sapien
cttgcagtagctctttatggtgtca

SEQ ID NO: 920510 - DNA, 25 bp, Homo sapien
ctcctgagcaagactccccagatcc

SEQ ID NO: 920511 - DNA, 25 bp, Homo sapien
agctcctgagcaagactccccagat

SEQ ID NO: 920512 - DNA, 25 bp, Homo sapien
tgtccacttgtgctgctgtgcactg

SEQ ID NO: 920513 - DNA, 25 bp, Homo sapien
cagatccatccacatgcctgccttg

SEQ ID NO: 920514 - DNA, 25 bp, Homo sapien
ctgttgagctttggggaccgaccga

SEQ ID NO: 920515 - DNA, 25 bp, Homo sapien
aggtgagtcgctgcccctggttcta

SEQ ID NO: 920516 - DNA, 25 bp, Homo sapien
agggtgctgttgagctttggggacc

SEQ ID NO: 920517 - DNA, 25 bp, Homo sapien
tgctgttgagctttggggaccgacc

SEQ ID NO: 920518 - DNA, 25 bp, Homo sapien
tgggtcatatgttgatatcaggatt

SEQ ID NO: 920519 - DNA, 25 bp, Homo sapien
tgttgatatcaggattgagtaggat

SEQ ID NO: 920520 - DNA, 25 bp, Homo sapien
catatgttgatatcaggattgagta

SEQ ID NO: 920521 - DNA, 25 bp, Homo sapien
ggtcatatgttgatatcaggattga

SEQ ID NO: 920522 - DNA, 25 bp, Homo sapien
ggatcaccactgatgcctgcacaag

SEQ ID NO: 920523 - DNA, 25 bp, Homo sapien
ccactgatgcctgcacaagagagtc

SEQ ID NO: 920524 - DNA, 25 bp, Homo sapien
ctgggatcaccactgatgcctgcac

SEQ ID NO: 920525 - DNA, 25 bp, Homo sapien
actgatgcctgcacaagagagtcac

SEQ ID NO: 920526 - DNA, 25 bp, Homo sapien
gaaggagcgtcatgatacaagagaa

SEQ ID NO: 920527 - DNA, 25 bp, Homo sapien
tactgcaggacaaactgaaggacca

SEQ ID NO: 920528 - DNA, 25 bp, Homo sapien
tgagtcgtattggaagaaaccacag

SEQ ID NO: 920529 - DNA, 25 bp, Homo sapien
tgagcttgagatccagaaggagcgt

SEQ ID NO: 920530 - DNA, 25 bp, Homo sapien
ttccagagcgctgcgctggaacgga

SEQ ID NO: 920531 - DNA, 25 bp, Homo sapien
cctgtccctgggcgttcgcgcccct

SEQ ID NO: 920532 - DNA, 25 bp, Homo sapien
gggcccgagcggttccagagcgctg

SEQ ID NO: 920533 - DNA, 25 bp, Homo sapien
gcagccgggagcagctgtacgctcc

SEQ ID NO: 920534 - DNA, 25 bp, Homo sapien
cactgggacggctactgcccaaggt

SEQ ID NO: 920535 - DNA, 25 bp, Homo sapien
aggtacaggaggtggcccggtggct

SEQ ID NO: 920536 - DNA, 25 bp, Homo sapien
gagccctcgcccactgggacggcta

SEQ ID NO: 920537 - DNA, 25 bp, Homo sapien
tggggccgtggggagccctcgccca

SEQ ID NO: 920538 - DNA, 25 bp, Homo sapien
tgaccgagaagagtgagcgcatcac

SEQ ID NO: 920539 - DNA, 25 bp, Homo sapien
agctatttgaggcccgcgccctgag

SEQ ID NO: 920540 - DNA, 25 bp, Homo sapien
gagcgcatcacgcagctggagcaga

SEQ ID NO: 920541 - DNA, 25 bp, Homo sapien
tcggcgctcattaagcagctatttg

SEQ ID NO: 920542 - DNA, 25 bp, Homo sapien
ggcccgcattcttctgagagcccgg

SEQ ID NO: 920543 - DNA, 25 bp, Homo sapien
ctgagcatttcagctgtggcccgca

SEQ ID NO: 920544 - DNA, 25 bp, Homo sapien
cttccccagtgtcgagtccacagtg

SEQ ID NO: 920545 - DNA, 25 bp, Homo sapien
tccccagtgtcgagtccacagtgca

SEQ ID NO: 920546 - DNA, 25 bp, Homo sapien
tttcctgcaccccaacagtggaatc

SEQ ID NO: 920547 - DNA, 25 bp, Homo sapien
tggctgcggccgctgtggccaacac

SEQ ID NO: 920548 - DNA, 25 bp, Homo sapien
ggcacctcggcctgcgtcattgcgc

SEQ ID NO: 920549 - DNA, 25 bp, Homo sapien
tgcgtcattgcgctctgcctggctg

SEQ ID NO: 920550 - DNA, 25 bp, Homo sapien
ggcctgcgtcattgcgctctgcctg

SEQ ID NO: 920551 - DNA, 25 bp, Homo sapien
agcgggttgagggttcaaggacacg

SEQ ID NO: 920552 - DNA, 25 bp, Homo sapien
gggtgcctgggtggaaagcggtcac

SEQ ID NO: 920553 - DNA, 25 bp, Homo sapien
agcggtcaccaggtgtgagtgtcac

SEQ ID NO: 920554 - DNA, 25 bp, Homo sapien
ttcaaggacacggaacgggtgcctg

SEQ ID NO: 920555 - DNA, 25 bp, Homo sapien
tcctgaagatcgcagctggagccac

SEQ ID NO: 920556 - DNA, 25 bp, Homo sapien
ccacctgggcgcagcgtttgatgtg

SEQ ID NO: 920557 - DNA, 25 bp, Homo sapien
ccgcttcctgaagatcgcagctgga

SEQ ID NO: 920558 - DNA, 25 bp, Homo sapien
gagccacctgggcgcagcgtttgat

SEQ ID NO: 920559 - DNA, 25 bp, Homo sapien
tgtcaaggtcaggaagaacgtggtg

SEQ ID NO: 920560 - DNA, 25 bp, Homo sapien
tggtgggctaatagggatgctggca

SEQ ID NO: 920561 - DNA, 25 bp, Homo sapien
ggaagaacgtggtggctcttctaga

SEQ ID NO: 920562 - DNA, 25 bp, Homo sapien
tggtggctcttctagaagggtttgt

SEQ ID NO: 920563 - DNA, 25 bp, Homo sapien
gcccacttgggacagccattctagg

SEQ ID NO: 920564 - DNA, 25 bp, Homo sapien
ctgcccacttgggacagccattcta

SEQ ID NO: 920565 - DNA, 25 bp, Homo sapien
cccacttgggacagccattctaggg

SEQ ID NO: 920566 - DNA, 25 bp, Homo sapien
tgcccacttgggacagccattctag

SEQ ID NO: 920567 - DNA, 25 bp, Homo sapien
gggcaatggcccagccaacctgagt

SEQ ID NO: 920568 - DNA, 25 bp, Homo sapien
gtaatttccaagtgaatgagctggg

SEQ ID NO: 920569 - DNA, 25 bp, Homo sapien
gcccagccaacctgagtaatttcca

SEQ ID NO: 920570 - DNA, 25 bp, Homo sapien
tgagtaatttccaagtgaatgagct

SEQ ID NO: 920571 - DNA, 25 bp, Homo sapien
ggaagaggtcagtgcggttcgtgct

SEQ ID NO: 920572 - DNA, 25 bp, Homo sapien
gaggtcagtgcggttcgtgctccca

SEQ ID NO: 920573 - DNA, 25 bp, Homo sapien
aagaggtcagtgcggttcgtgctcc

SEQ ID NO: 920574 - DNA, 25 bp, Homo sapien
aggtcagtgcggttcgtgctcccat

SEQ ID NO: 920575 - DNA, 25 bp, Homo sapien
cacatagtttatgggctcattaata

SEQ ID NO: 920576 - DNA, 25 bp, Homo sapien
atctcctaggtgatgaacccagaga

SEQ ID NO: 920577 - DNA, 25 bp, Homo sapien
ccagctgggagtgtagagtcacatc

SEQ ID NO: 920578 - DNA, 25 bp, Homo sapien
gccagggagcagagtcatgtcacat

SEQ ID NO: 920579 - DNA, 25 bp, Homo sapien
tggatccagctaagagaacagattt

SEQ ID NO: 920580 - DNA, 25 bp, Homo sapien
catgttgggcaaaggcatatgtcac

SEQ ID NO: 920581 - DNA, 25 bp, Homo sapien
ggagtcaaatcaccacatgttgggc

SEQ ID NO: 920582 - DNA, 25 bp, Homo sapien
taatttggtcccaggtatatggcac

SEQ ID NO: 920583 - DNA, 25 bp, Homo sapien
tgcccatgtcttgactccaggtaaa

SEQ ID NO: 920584 - DNA, 25 bp, Homo sapien
tgggcctaggaaacagtcagatcac

SEQ ID NO: 920585 - DNA, 25 bp, Homo sapien
tcacgttacttaggtgggtggccca

SEQ ID NO: 920586 - DNA, 25 bp, Homo sapien
caatgctctttgtaggcaggtacca

SEQ ID NO: 920587 - DNA, 25 bp, Homo sapien
cagtttcacacgagtcctggcttca

SEQ ID NO: 920588 - DNA, 25 bp, Homo sapien
gattgtgttctgatagggaactcac

SEQ ID NO: 920589 - DNA, 25 bp, Homo sapien
attgtgttctgatagggaactcaca

SEQ ID NO: 920590 - DNA, 25 bp, Homo sapien
ctgcagattgtgttctgatagggaa

SEQ ID NO: 920591 - DNA, 25 bp, Homo sapien
cagattgtgttctgatagggaactc

SEQ ID NO: 920592 - DNA, 25 bp, Homo sapien
cagctgttagctaggccctgttatc

SEQ ID NO: 920593 - DNA, 25 bp, Homo sapien
tatcaactctctgtatcactgtagg

SEQ ID NO: 920594 - DNA, 25 bp, Homo sapien
taagaatgaagagcctgtaggctgg

SEQ ID NO: 920595 - DNA, 25 bp, Homo sapien
gctgggtctgcatatgagagtcaca

SEQ ID NO: 920596 - DNA, 25 bp, Homo sapien
agtcaaaatatttcccactggctgt

SEQ ID NO: 920597 - DNA, 25 bp, Homo sapien
ctgtggccctaagcctggctacaaa

SEQ ID NO: 920598 - DNA, 25 bp, Homo sapien
aagtcaaaatatttcccactggctg

SEQ ID NO: 920599 - DNA, 25 bp, Homo sapien
agcctggctacaaaagtcaaaatat

SEQ ID NO: 920600 - DNA, 25 bp, Homo sapien
aatttgtcacaatctccactgaggg

SEQ ID NO: 920601 - DNA, 25 bp, Homo sapien
cagaaatttgtcacaatctccactg

SEQ ID NO: 920602 - DNA, 25 bp, Homo sapien
gaaatttgtcacaatctccactgag

SEQ ID NO: 920603 - DNA, 25 bp, Homo sapien
tttgtcacaatctccactgagggca

SEQ ID NO: 920604 - DNA, 25 bp, Homo sapien
tgtctgggtccagctatgagagtca

SEQ ID NO: 920605 - DNA, 25 bp, Homo sapien
ccagatgcatgtatgtgagtcaaac

SEQ ID NO: 920606 - DNA, 25 bp, Homo sapien
ttcaaacagagtccccataagatag

SEQ ID NO: 920607 - DNA, 25 bp, Homo sapien
tgcctctgggcacgagattcagaac

SEQ ID NO: 920608 - DNA, 25 bp, Homo sapien
gtccacaaggcaaagtcaggatgtc

SEQ ID NO: 920609 - DNA, 25 bp, Homo sapien
ggatgtcactagtgggatctgccca

SEQ ID NO: 920610 - DNA, 25 bp, Homo sapien
ctgtggtcagatctgcatatgacag

SEQ ID NO: 920611 - DNA, 25 bp, Homo sapien
ggtcagatctgcatatgacagtcac

SEQ ID NO: 920612 - DNA, 25 bp, Homo sapien
tgtgtccctaagtctagccagaaga

SEQ ID NO: 920613 - DNA, 25 bp, Homo sapien
tgtccctaagtctagccagaagagt

SEQ ID NO: 920614 - DNA, 25 bp, Homo sapien
tccctaagtctagccagaagagtaa

SEQ ID NO: 920615 - DNA, 25 bp, Homo sapien
taagtctagccagaagagtaaaaaa

SEQ ID NO: 920616 - DNA, 25 bp, Homo sapien
tgtgcagtgccatagcaggaaagcc

SEQ ID NO: 920617 - DNA, 25 bp, Homo sapien
tctgggccaggaatatgtcaacatt

SEQ ID NO: 920618 - DNA, 25 bp, Homo sapien
agccacatcgcctgagtgctgggct

SEQ ID NO: 920619 - DNA, 25 bp, Homo sapien
gcttagtgagatgttacaacgcctt

SEQ ID NO: 920620 - DNA, 25 bp, Homo sapien
ccagaagacaccaaattgcaaggag

SEQ ID NO: 920621 - DNA, 25 bp, Homo sapien
accagaagacaccaaattgcaagga

SEQ ID NO: 920622 - DNA, 25 bp, Homo sapien
agctgccgtgagatggctgacagca

SEQ ID NO: 920623 - DNA, 25 bp, Homo sapien
gctgccgtgagatggctgacagcac

SEQ ID NO: 920624 - DNA, 25 bp, Homo sapien
gaggttaagagactacatctctcag

SEQ ID NO: 920625 - DNA, 25 bp, Homo sapien
tcagcatgtctagctaggcgcgcac

SEQ ID NO: 920626 - DNA, 25 bp, Homo sapien
ttctaaagctatgcccaaaccccga

SEQ ID NO: 920627 - DNA, 25 bp, Homo sapien
caacctagggactgcgagaggttaa

SEQ ID NO: 920628 - DNA, 25 bp, Homo sapien
ggctacgagcggttaagagactaca

SEQ ID NO: 920629 - DNA, 25 bp, Homo sapien
tctagagctgttctcccgtgcggag

SEQ ID NO: 920630 - DNA, 25 bp, Homo sapien
gtgatggcacccgtttggactccgc

SEQ ID NO: 920631 - DNA, 25 bp, Homo sapien
ggattgtaatactgtcgccttgcca

SEQ ID NO: 920632 - DNA, 25 bp, Homo sapien
tcaggcctctcgcagggatgcgcct

SEQ ID NO: 920633 - DNA, 25 bp, Homo sapien
ggtcaggcctctcgcagggatgcgc

SEQ ID NO: 920634 - DNA, 25 bp, Homo sapien
gggtcaggcctctcgcagggatgcg

SEQ ID NO: 920635 - DNA, 25 bp, Homo sapien
aggcctctcgcagggatgcgcctgc

SEQ ID NO: 920636 - DNA, 25 bp, Homo sapien
agcgatccagctggcaggacaggtt

SEQ ID NO: 920637 - DNA, 25 bp, Homo sapien
ctgggataagcgatccagctggcag

SEQ ID NO: 920638 - DNA, 25 bp, Homo sapien
atccagctggcaggacaggttgtag

SEQ ID NO: 920639 - DNA, 25 bp, Homo sapien
cgatccagctggcaggacaggttgt

SEQ ID NO: 920640 - DNA, 25 bp, Homo sapien
tcactgagccactccgttaactgga

SEQ ID NO: 920641 - DNA, 25 bp, Homo sapien
caggctgaaggtgataattgtctac

SEQ ID NO: 920642 - DNA, 25 bp, Homo sapien
ggcagacccaaaattgctccacagg

SEQ ID NO: 920643 - DNA, 25 bp, Homo sapien
gataattgtctacagccagctgaag

SEQ ID NO: 920644 - DNA, 25 bp, Homo sapien
cctggtggccctggcagtaatgcag

SEQ ID NO: 920645 - DNA, 25 bp, Homo sapien
gacccaagtcctgctttgtgcacat

SEQ ID NO: 920646 - DNA, 25 bp, Homo sapien
gccctggcagtaatgcagtatgaag

SEQ ID NO: 920647 - DNA, 25 bp, Homo sapien
tggtggccctggcagtaatgcagta

SEQ ID NO: 920648 - DNA, 25 bp, Homo sapien
gcctttttgctgctttagcctcatc

SEQ ID NO: 920649 - DNA, 25 bp, Homo sapien
tagggtggccaacttgggtgtcttc

SEQ ID NO: 920650 - DNA, 25 bp, Homo sapien
ttcttctctagggtggccaacttgg

SEQ ID NO: 920651 - DNA, 25 bp, Homo sapien
ttttgctgctttagcctcatctggg

SEQ ID NO: 920652 - DNA, 25 bp, Homo sapien
tgagacactccattaattggaagca

SEQ ID NO: 920653 - DNA, 25 bp, Homo sapien
gacactccattaattggaagcagac

SEQ ID NO: 920654 - DNA, 25 bp, Homo sapien
gagacactccattaattggaagcag

SEQ ID NO: 920655 - DNA, 25 bp, Homo sapien
agacactccattaattggaagcaga

SEQ ID NO: 920656 - DNA, 25 bp, Homo sapien
attgcttcacagactgaaggtgata

SEQ ID NO: 920657 - DNA, 25 bp, Homo sapien
gaaggtgataattgtctacagccag

SEQ ID NO: 920658 - DNA, 25 bp, Homo sapien
gactgaaggtgataattgtctacag

SEQ ID NO: 920659 - DNA, 25 bp, Homo sapien
gataattgtctacagccagctgaag

SEQ ID NO: 920660 - DNA, 25 bp, Homo sapien
cccagaatgtctttggatcctttgc

SEQ ID NO: 920661 - DNA, 25 bp, Homo sapien
cagctttctggggatgatccaagat

SEQ ID NO: 920662 - DNA, 25 bp, Homo sapien
tttcctggtccaagtattacagctt

SEQ ID NO: 920663 - DNA, 25 bp, Homo sapien
tgtctttggatcctttgcagggtga

SEQ ID NO: 920664 - DNA, 25 bp, Homo sapien
gcaaagatcttcttaaggattgagt

SEQ ID NO: 920665 - DNA, 25 bp, Homo sapien
tgagccacgctatagattttttagt

SEQ ID NO: 920666 - DNA, 25 bp, Homo sapien
tatgttacgtgatccttttatgaaa

SEQ ID NO: 920667 - DNA, 25 bp, Homo sapien
taaagaatggctgtagcaatgagcc

SEQ ID NO: 920668 - DNA, 25 bp, Homo sapien
gttatcctgaaatacgtatttcaag

SEQ ID NO: 920669 - DNA, 25 bp, Homo sapien
gatgaccttctcctggggtatctta

SEQ ID NO: 920670 - DNA, 25 bp, Homo sapien
atggatgttatcctgaaatacgtat

SEQ ID NO: 920671 - DNA, 25 bp, Homo sapien
gatgttatcctgaaatacgtatttc

SEQ ID NO: 920672 - DNA, 25 bp, Homo sapien
ttaatgacaatgtgtgaacttaatt

SEQ ID NO: 920673 - DNA, 25 bp, Homo sapien
tagaaggaaattgccttaccatttg

SEQ ID NO: 920674 - DNA, 25 bp, Homo sapien
ggaaattgccttaccatttgcaaat

SEQ ID NO: 920675 - DNA, 25 bp, Homo sapien
gaaggaaattgccttaccatttgca

SEQ ID NO: 920676 - DNA, 25 bp, Homo sapien
agcagattctgaacgtcttaaaatc

SEQ ID NO: 920677 - DNA, 25 bp, Homo sapien
gattctgaacgtcttaaaatctgtt

SEQ ID NO: 920678 - DNA, 25 bp, Homo sapien
gcagattctgaacgtcttaaaatct

SEQ ID NO: 920679 - DNA, 25 bp, Homo sapien
gaagcagattctgaacgtcttaaaa

SEQ ID NO: 920680 - DNA, 25 bp, Homo sapien
tcaggatggcaaccgccaatgcagc

SEQ ID NO: 920681 - DNA, 25 bp, Homo sapien
caggatggcaaccgccaatgcagcc

SEQ ID NO: 920682 - DNA, 25 bp, Homo sapien
atcaggatggcaaccgccaatgcag

SEQ ID NO: 920683 - DNA, 25 bp, Homo sapien
gcagtggcctggtaaaagggatgag

SEQ ID NO: 920684 - DNA, 25 bp, Homo sapien
gcactgtgcagtggcctggtaaaag

SEQ ID NO: 920685 - DNA, 25 bp, Homo sapien
gagcactgtgcagtggcctggtaaa

SEQ ID NO: 920686 - DNA, 25 bp, Homo sapien
gtgagcactgtgcagtggcctggta

SEQ ID NO: 920687 - DNA, 25 bp, Homo sapien
accttctcatgcatctcatgatgca

SEQ ID NO: 920688 - DNA, 25 bp, Homo sapien
cagtcgagctgtttgacttggacat

SEQ ID NO: 920689 - DNA, 25 bp, Homo sapien
agctgtttgacttggacatctttgc

SEQ ID NO: 920690 - DNA, 25 bp, Homo sapien
catgcatctcatgatgcacacttct

SEQ ID NO: 920691 - DNA, 25 bp, Homo sapien
ctttctgagttttcttcttctccat

SEQ ID NO: 920692 - DNA, 25 bp, Homo sapien
tctttctgagttttcttcttctcca

SEQ ID NO: 920693 - DNA, 25 bp, Homo sapien
cttctttctgagttttcttcttctc

SEQ ID NO: 920694 - DNA, 25 bp, Homo sapien
ttctttctgagttttcttcttctcc

SEQ ID NO: 920695 - DNA, 25 bp, Homo sapien
gcgcagaacgcactggccagcgggc

SEQ ID NO: 920696 - DNA, 25 bp, Homo sapien
agcgcagaacgcactggccagcggg

SEQ ID NO: 920697 - DNA, 25 bp, Homo sapien
ccagcgcagaacgcactggccagcg

SEQ ID NO: 920698 - DNA, 25 bp, Homo sapien
cagcgcagaacgcactggccagcgg

SEQ ID NO: 920699 - DNA, 25 bp, Homo sapien
aggagatcagatgagggttacagac

SEQ ID NO: 920700 - DNA, 25 bp, Homo sapien
gagatcagatgagggttacagacag

SEQ ID NO: 920701 - DNA, 25 bp, Homo sapien
tttatttgctcaaggcaggagatca

SEQ ID NO: 920702 - DNA, 25 bp, Homo sapien
ttgctcaaggcaggagatcagatga

SEQ ID NO: 920703 - DNA, 25 bp, Homo sapien
tctcacctagggaaaccagctttct

SEQ ID NO: 920704 - DNA, 25 bp, Homo sapien
aggaattccggggaaatgtcattct

SEQ ID NO: 920705 - DNA, 25 bp, Homo sapien
gaaatgtcattctcacctagggaaa

SEQ ID NO: 920706 - DNA, 25 bp, Homo sapien
gagcaaatagaaaccttagggtgta

SEQ ID NO: 920707 - DNA, 25 bp, Homo sapien
ttctatggccgcatccttcaatgtt

SEQ ID NO: 920708 - DNA, 25 bp, Homo sapien
gataattctatggccgcatccttca

SEQ ID NO: 920709 - DNA, 25 bp, Homo sapien
tatggccgcatccttcaatgttcgc

SEQ ID NO: 920710 - DNA, 25 bp, Homo sapien
gccgcatccttcaatgttcgcagtt

SEQ ID NO: 920711 - DNA, 25 bp, Homo sapien
gagagattaactgaacaaatctcac

SEQ ID NO: 920712 - DNA, 25 bp, Homo sapien
cttcagaatgtgtccttgaaggcat

SEQ ID NO: 920713 - DNA, 25 bp, Homo sapien
tgtagaattcagaaacaatgacctg

SEQ ID NO: 920714 - DNA, 25 bp, Homo sapien
caatgacctgctatataaagatttt

SEQ ID NO: 920715 - DNA, 25 bp, Homo sapien
taaagtgcagaaaatgttctctcct

SEQ ID NO: 920716 - DNA, 25 bp, Homo sapien
acaggcagaaggaccttaaagtgca

SEQ ID NO: 920717 - DNA, 25 bp, Homo sapien
ggcgagtccaaagttttctattata

SEQ ID NO: 920718 - DNA, 25 bp, Homo sapien
tgttgtgacattctggatgtactgg

SEQ ID NO: 920719 - DNA, 25 bp, Homo sapien
ccagcagctaacactggcgagtcca

SEQ ID NO: 920720 - DNA, 25 bp, Homo sapien
gcagctaacactggcgagtccaaag

SEQ ID NO: 920721 - DNA, 25 bp, Homo sapien
aaagggatggcacgtccaatgaacc

SEQ ID NO: 920722 - DNA, 25 bp, Homo sapien
ggcacgtccaatgaacctttggcag

SEQ ID NO: 920723 - DNA, 25 bp, Homo sapien
ttgttaaaaagggatggcacgtcca

SEQ ID NO: 920724 - DNA, 25 bp, Homo sapien
gatggcacgtccaatgaacctttgg

SEQ ID NO: 920725 - DNA, 25 bp, Homo sapien
ggcattgaccataaacttgtggaca

SEQ ID NO: 920726 - DNA, 25 bp, Homo sapien
ctgattagcaccataggactgacag

SEQ ID NO: 920727 - DNA, 25 bp, Homo sapien
tgattagcaccataggactgacagt

SEQ ID NO: 920728 - DNA, 25 bp, Homo sapien
gacagtggcataggcattgaccata

SEQ ID NO: 920729 - DNA, 25 bp, Homo sapien
accatgtaggcacttgagagcggca

SEQ ID NO: 920730 - DNA, 25 bp, Homo sapien
gagagcggcatgattcctacaagga

SEQ ID NO: 920731 - DNA, 25 bp, Homo sapien
tgtggaggatgagacaattaagtcc

SEQ ID NO: 920732 - DNA, 25 bp, Homo sapien
tcagaattatctgggtcacactgga

SEQ ID NO: 920733 - DNA, 25 bp, Homo sapien
aataaagccaggatattgtattttg

SEQ ID NO: 920734 - DNA, 25 bp, Homo sapien
ttgagggaccaaagaataataaagc

SEQ ID NO: 920735 - DNA, 25 bp, Homo sapien
attgagggaccaaagaataataaag

SEQ ID NO: 920736 - DNA, 25 bp, Homo sapien
aataataaagccaggatattgtatt

SEQ ID NO: 920737 - DNA, 25 bp, Homo sapien
tgcagatcaagaggcccctcattgc

SEQ ID NO: 920738 - DNA, 25 bp, Homo sapien
cctcattgccttgtatgtgtagaac

SEQ ID NO: 920739 - DNA, 25 bp, Homo sapien
agaggttgtgcagatcaagaggccc

SEQ ID NO: 920740 - DNA, 25 bp, Homo sapien
ggttgtgcagatcaagaggcccctc

SEQ ID NO: 920741 - DNA, 25 bp, Homo sapien
ctagcatcagtatgtgaacaaaggt

SEQ ID NO: 920742 - DNA, 25 bp, Homo sapien
agcatcagtatgtgaacaaaggtca

SEQ ID NO: 920743 - DNA, 25 bp, Homo sapien
gactagcatcagtatgtgaacaaag

SEQ ID NO: 920744 - DNA, 25 bp, Homo sapien
atgactagcatcagtatgtgaacaa

SEQ ID NO: 920745 - DNA, 25 bp, Homo sapien
gcctttttcaaagataacatatgaa

SEQ ID NO: 920746 - DNA, 25 bp, Homo sapien
tatgttggccgagattccaatgcca

SEQ ID NO: 920747 - DNA, 25 bp, Homo sapien
aaggcctttttcaaagataacatat

SEQ ID NO: 920748 - DNA, 25 bp, Homo sapien
gaagaagaaatatgttggccgagat

SEQ ID NO: 920749 - DNA, 25 bp, Homo sapien
cagacagtcacccagctgggttttt

SEQ ID NO: 920750 - DNA, 25 bp, Homo sapien
taataatgctgacagacagacagtc

SEQ ID NO: 920751 - DNA, 25 bp, Homo sapien
tgagctctcactgttaataatgctg

SEQ ID NO: 920752 - DNA, 25 bp, Homo sapien
ctgagtcttgagctctcactgttaa

SEQ ID NO: 920753 - DNA, 25 bp, Homo sapien
gaaaagattttttcaggatcttcat

SEQ ID NO: 920754 - DNA, 25 bp, Homo sapien
ctctggcggaaaagattttttcagg

SEQ ID NO: 920755 - DNA, 25 bp, Homo sapien
ggaaaagattttttcaggatcttca

SEQ ID NO: 920756 - DNA, 25 bp, Homo sapien
tggcggaaaagattttttcaggatc

SEQ ID NO: 920757 - DNA, 25 bp, Homo sapien
tttcccataagaagaaagttccaca

SEQ ID NO: 920758 - DNA, 25 bp, Homo sapien
tcccataagaagaaagttccacaga

SEQ ID NO: 920759 - DNA, 25 bp, Homo sapien
ttcccataagaagaaagttccacag

SEQ ID NO: 920760 - DNA, 25 bp, Homo sapien
tatttcccataagaagaaagttcca

SEQ ID NO: 920761 - DNA, 25 bp, Homo sapien
tgttttcacacctaacatgacataa

SEQ ID NO: 920762 - DNA, 25 bp, Homo sapien
agagataattcctacaaatgtgagg

SEQ ID NO: 920763 - DNA, 25 bp, Homo sapien
caaatgttattatgtggcaaaggtt

SEQ ID NO: 920764 - DNA, 25 bp, Homo sapien
taaccaatcttcaacccttattaga

SEQ ID NO: 920765 - DNA, 25 bp, Homo sapien
gactataaggctattgtcaccaaaa

SEQ ID NO: 920766 - DNA, 25 bp, Homo sapien
ggttgtcaccatgttactctctact

SEQ ID NO: 920767 - DNA, 25 bp, Homo sapien
ttaaagtcaccagcctgcaaaataa

SEQ ID NO: 920768 - DNA, 25 bp, Homo sapien
gccaggtttagccatgtgattgaaa

SEQ ID NO: 920769 - DNA, 25 bp, Homo sapien
aaaatatgggggaggtgtgtagcct

SEQ ID NO: 920770 - DNA, 25 bp, Homo sapien
cggcgggccagggtgactgcacctg

SEQ ID NO: 920771 - DNA, 25 bp, Homo sapien
aatatgggggaggtgtgtagccttt

SEQ ID NO: 920772 - DNA, 25 bp, Homo sapien
gcatttgtgtccggcgggccagggt

SEQ ID NO: 920773 - DNA, 25 bp, Homo sapien
tcacaatatctaaggtatggaagca

SEQ ID NO: 920774 - DNA, 25 bp, Homo sapien
cacaatatctaaggtatggaagcaa

SEQ ID NO: 920775 - DNA, 25 bp, Homo sapien
gtgtccatcaacaggttaataaata

SEQ ID NO: 920776 - DNA, 25 bp, Homo sapien
actcacaatatctaaggtatggaag

SEQ ID NO: 920777 - DNA, 25 bp, Homo sapien
tagaagcatagggtagaatgatgat

SEQ ID NO: 920778 - DNA, 25 bp, Homo sapien
gtagaatgatgattgtctggggctg

SEQ ID NO: 920779 - DNA, 25 bp, Homo sapien
tcatagaagcatagggtagaatgat

SEQ ID NO: 920780 - DNA, 25 bp, Homo sapien
agaatgatgattgtctggggctggg

SEQ ID NO: 920781 - DNA, 25 bp, Homo sapien
catacagtttcagtagtcgcctccc

SEQ ID NO: 920782 - DNA, 25 bp, Homo sapien
tatctcattatgcagaaagtagttt

SEQ ID NO: 920783 - DNA, 25 bp, Homo sapien
gctcctaaaagcagctgagttagaa

SEQ ID NO: 920784 - DNA, 25 bp, Homo sapien
aatctcatttagttgcatagctcct

SEQ ID NO: 920785 - DNA, 25 bp, Homo sapien
tgcaccacattgcacataaatgctt

SEQ ID NO: 920786 - DNA, 25 bp, Homo sapien
ccagtattcaccctgagtcactcag

SEQ ID NO: 920787 - DNA, 25 bp, Homo sapien
cacatgcacctattagggtcttaat

SEQ ID NO: 920788 - DNA, 25 bp, Homo sapien
ctttccacatgcacctattagggtc

SEQ ID NO: 920789 - DNA, 25 bp, Homo sapien
tatcttaggctatctcagatgagag

SEQ ID NO: 920790 - DNA, 25 bp, Homo sapien
gacgtaatcagtgttgtctcctctg

SEQ ID NO: 920791 - DNA, 25 bp, Homo sapien
tgaaacaggcttggaatcttgagga

SEQ ID NO: 920792 - DNA, 25 bp, Homo sapien
gcatggcccacctagaaatcactta

SEQ ID NO: 920793 - DNA, 25 bp, Homo sapien
tactcaagagtgttacctctgtgca

SEQ ID NO: 920794 - DNA, 25 bp, Homo sapien
cctgtggtttaatattggctctgct

SEQ ID NO: 920795 - DNA, 25 bp, Homo sapien
ggtcagtactcagtagaaattaggt

SEQ ID NO: 920796 - DNA, 25 bp, Homo sapien
tcatgcacagatataacaatgcaaa

SEQ ID NO: 920797 - DNA, 25 bp, Homo sapien
tcttctcagtcaactaaatgacttt

SEQ ID NO: 920798 - DNA, 25 bp, Homo sapien
cacttcagcccagaagacaagagca

SEQ ID NO: 920799 - DNA, 25 bp, Homo sapien
cttctcagtcaactaaatgactttt

SEQ ID NO: 920800 - DNA, 25 bp, Homo sapien
taaatgtgcacctcttccaaaaacc

SEQ ID NO: 920801 - DNA, 25 bp, Homo sapien
tcttgacttacaacaatatagttgt

SEQ ID NO: 920802 - DNA, 25 bp, Homo sapien
tcagcctagctcctctaaaatctaa

SEQ ID NO: 920803 - DNA, 25 bp, Homo sapien
ttaacaagcaaggtacactcctgta

SEQ ID NO: 920804 - DNA, 25 bp, Homo sapien
cctttaaaggaagcaaatagctcct

SEQ ID NO: 920805 - DNA, 25 bp, Homo sapien
aaaggcaggataattcacagtccct

SEQ ID NO: 920806 - DNA, 25 bp, Homo sapien
caaatagctcctgtaggacctggga

SEQ ID NO: 920807 - DNA, 25 bp, Homo sapien
cctgttaaatcttgttgcattgcta

SEQ ID NO: 920808 - DNA, 25 bp, Homo sapien
tggaaactcatctcacaacttatac

SEQ ID NO: 920809 - DNA, 25 bp, Homo sapien
cctattgaacaaataatggagggat

SEQ ID NO: 920810 - DNA, 25 bp, Homo sapien
tacatctgtcaaaggactaagatcc

SEQ ID NO: 920811 - DNA, 25 bp, Homo sapien
tatggaaacttgctcaacatctcta

SEQ ID NO: 920812 - DNA, 25 bp, Homo sapien
tacaaccctcctatgctccttatat

SEQ ID NO: 920813 - DNA, 25 bp, Homo sapien
tcataaaccttacattttaatgccc

SEQ ID NO: 920814 - DNA, 25 bp, Homo sapien
tctcctatatctgacacagcaacaa

SEQ ID NO: 920815 - DNA, 25 bp, Homo sapien
aattcatgttttctacgccgtagtt

SEQ ID NO: 920816 - DNA, 25 bp, Homo sapien
gagtattggttaagttttgtcacat

SEQ ID NO: 920817 - DNA, 25 bp, Homo sapien
aagtgtaacaatcattggaaggctt

SEQ ID NO: 920818 - DNA, 25 bp, Homo sapien
cttgtacaatctttctcaagtaaaa

SEQ ID NO: 920819 - DNA, 25 bp, Homo sapien
gtaacaatcattggaaggctttgtc

SEQ ID NO: 920820 - DNA, 25 bp, Homo sapien
attattgtcacatttttcaggtttg

SEQ ID NO: 920821 - DNA, 25 bp, Homo sapien
aaaattattgtcacatttttcaggt

SEQ ID NO: 920822 - DNA, 25 bp, Homo sapien
tcaaaattattgtcacatttttcag

SEQ ID NO: 920823 - DNA, 25 bp, Homo sapien
ttaggtgttatcaaaattattgtca

SEQ ID NO: 920824 - DNA, 25 bp, Homo sapien
gctctgagaaccagttaagaacttt

SEQ ID NO: 920825 - DNA, 25 bp, Homo sapien
tatgtcgagtaaggctggagcaccc

SEQ ID NO: 920826 - DNA, 25 bp, Homo sapien
tctttgaacaccttagactcatcca

SEQ ID NO: 920827 - DNA, 25 bp, Homo sapien
gttgcaggccagttaaaaacattgc

SEQ ID NO: 920828 - DNA, 25 bp, Homo sapien
tatattggcactgcaaattccctac

SEQ ID NO: 920829 - DNA, 25 bp, Homo sapien
gcaaatctgtcctacaaaatggaaa

SEQ ID NO: 920830 - DNA, 25 bp, Homo sapien
gaattccttaacattattataatgg

SEQ ID NO: 920831 - DNA, 25 bp, Homo sapien
tattgtatcctttagaggttttatg

SEQ ID NO: 920832 - DNA, 25 bp, Homo sapien
tctccttgatagaaaacctggtaaa

SEQ ID NO: 920833 - DNA, 25 bp, Homo sapien
ccatcctgctcaatgtaatttacag

SEQ ID NO: 920834 - DNA, 25 bp, Homo sapien
tacactagtagaacagaatgcggca

SEQ ID NO: 920835 - DNA, 25 bp, Homo sapien
aatacctcatacgaaattctccttg

SEQ ID NO: 920836 - DNA, 25 bp, Homo sapien
tcacctagtcaagattaaataacca

SEQ ID NO: 920837 - DNA, 25 bp, Homo sapien
gggtattgatatttagctttgcaag

SEQ ID NO: 920838 - DNA, 25 bp, Homo sapien
catttgcaacaaacctataccagaa

SEQ ID NO: 920839 - DNA, 25 bp, Homo sapien
cacagagatcgttatattggtagta

SEQ ID NO: 920840 - DNA, 25 bp, Homo sapien
tagcctggcaaagtggattatttct

SEQ ID NO: 920841 - DNA, 25 bp, Homo sapien
aatcccacatctttagggaggccaa

SEQ ID NO: 920842 - DNA, 25 bp, Homo sapien
cagttctacatgaagggctacatag

SEQ ID NO: 920843 - DNA, 25 bp, Homo sapien
gattcattatgactagcacagttct

SEQ ID NO: 920844 - DNA, 25 bp, Homo sapien
catcacaaaagccaaaacgcggcca

SEQ ID NO: 920845 - DNA, 25 bp, Homo sapien
gcaatcccacttatggatctacatc

SEQ ID NO: 920846 - DNA, 25 bp, Homo sapien
caaaaacacgttaattgttggtgca

SEQ ID NO: 920847 - DNA, 25 bp, Homo sapien
ccaaactatgcaacgcaggacctgg

SEQ ID NO: 920848 - DNA, 25 bp, Homo sapien
tgcagaccttgtcctttactgtggt

SEQ ID NO: 920849 - DNA, 25 bp, Homo sapien
gagccacagttcacggccagttctg

SEQ ID NO: 920850 - DNA, 25 bp, Homo sapien
aagcagttcgatgactcagttccag

SEQ ID NO: 920851 - DNA, 25 bp, Homo sapien
tgtggtttctgaagcagttcgatga

SEQ ID NO: 920852 - DNA, 25 bp, Homo sapien
gaactccctatcgaaattccagtgg

SEQ ID NO: 920853 - DNA, 25 bp, Homo sapien
tcccatgtcaagaactgactttctc

SEQ ID NO: 920854 - DNA, 25 bp, Homo sapien
cataaagaggactttggcttacagt

SEQ ID NO: 920855 - DNA, 25 bp, Homo sapien
gaaaagaaaccactaatcacacaca

SEQ ID NO: 920856 - DNA, 25 bp, Homo sapien
tgctccaaacaggttatcaggtgag

SEQ ID NO: 920857 - DNA, 25 bp, Homo sapien
cttgctccaaacaggttatcaggtg

SEQ ID NO: 920858 - DNA, 25 bp, Homo sapien
ctccaaacaggttatcaggtgaggc

SEQ ID NO: 920859 - DNA, 25 bp, Homo sapien
tatcaggtgaggcttagagacagca

SEQ ID NO: 920860 - DNA, 25 bp, Homo sapien
aacctttagggcatattaggaattg

SEQ ID NO: 920861 - DNA, 25 bp, Homo sapien
cctttagggcatattaggaattgtg

SEQ ID NO: 920862 - DNA, 25 bp, Homo sapien
gaattgtgtgttgaagttatcctca

SEQ ID NO: 920863 - DNA, 25 bp, Homo sapien
accacaagttatgcaaaaaaagaga

SEQ ID NO: 920864 - DNA, 25 bp, Homo sapien
tcactttcctatataaattccgttg

SEQ ID NO: 920865 - DNA, 25 bp, Homo sapien
tttcctatataaattccgttgtgca

SEQ ID NO: 920866 - DNA, 25 bp, Homo sapien
catcactttcctatataaattccgt

SEQ ID NO: 920867 - DNA, 25 bp, Homo sapien
actttcctatataaattccgttgtg

SEQ ID NO: 920868 - DNA, 25 bp, Homo sapien
aaaaaactgagacactggacgcagt

SEQ ID NO: 920869 - DNA, 25 bp, Homo sapien
aaaaactgagacactggacgcagtg

SEQ ID NO: 920870 - DNA, 25 bp, Homo sapien
cagatgtagttaaggttaagacgga

SEQ ID NO: 920871 - DNA, 25 bp, Homo sapien
gacccagctctttctagggagcctc

SEQ ID NO: 920872 - DNA, 25 bp, Homo sapien
gagtgtggacacatcaatttatggg

SEQ ID NO: 920873 - DNA, 25 bp, Homo sapien
tctgttatcagagctaatttcctgt

SEQ ID NO: 920874 - DNA, 25 bp, Homo sapien
ctatgtaacttcaccaattacctac

SEQ ID NO: 920875 - DNA, 25 bp, Homo sapien
gaatctatgtaacttcaccaattac

SEQ ID NO: 920876 - DNA, 25 bp, Homo sapien
gataacagggtatagactagaaata

SEQ ID NO: 920877 - DNA, 25 bp, Homo sapien
caagataacagggtatagactagaa

SEQ ID NO: 920878 - DNA, 25 bp, Homo sapien
aactacctgtgacaattactaaact

SEQ ID NO: 920879 - DNA, 25 bp, Homo sapien
tacctgtgacaattactaaactcag

SEQ ID NO: 920880 - DNA, 25 bp, Homo sapien
actacctgtgacaattactaaactc

SEQ ID NO: 920881 - DNA, 25 bp, Homo sapien
ctacctgtgacaattactaaactca

SEQ ID NO: 920882 - DNA, 25 bp, Homo sapien
cccaaggaaacggaagctgagttgg

SEQ ID NO: 920883 - DNA, 25 bp, Homo sapien
gctacactttgtacctcaggcagtc

SEQ ID NO: 920884 - DNA, 25 bp, Homo sapien
gctccctcgagaggctacactttgt

SEQ ID NO: 920885 - DNA, 25 bp, Homo sapien
ctcttttacaccattcgtaaatatt

SEQ ID NO: 920886 - DNA, 25 bp, Homo sapien
tcccaatacctgcagataacggagt

SEQ ID NO: 920887 - DNA, 25 bp, Homo sapien
gtaaagactagacctggagctcccg

SEQ ID NO: 920888 - DNA, 25 bp, Homo sapien
tgcagataacggagtcacagaggct

SEQ ID NO: 920889 - DNA, 25 bp, Homo sapien
gctcccgcagcagctagagacaaag

SEQ ID NO: 920890 - DNA, 25 bp, Homo sapien
ccaatttacgttgctcaatcacagg

SEQ ID NO: 920891 - DNA, 25 bp, Homo sapien
tttgcacttactcccagtcttttcc

SEQ ID NO: 920892 - DNA, 25 bp, Homo sapien
tccagatgcaatttccggcaatcag

SEQ ID NO: 920893 - DNA, 25 bp, Homo sapien
tcttagcacgcttcagattaggtgg

SEQ ID NO: 920894 - DNA, 25 bp, Homo sapien
ttctctcactcttggcctgaggccc

SEQ ID NO: 920895 - DNA, 25 bp, Homo sapien
cagggggaggcgagctccactgggt

SEQ ID NO: 920896 - DNA, 25 bp, Homo sapien
ccctgcagggggaggcgagctccac

SEQ ID NO: 920897 - DNA, 25 bp, Homo sapien
gcgagctccactgggttgcgcctac

SEQ ID NO: 920898 - DNA, 25 bp, Homo sapien
cagcccagggcggagaggagggcca

SEQ ID NO: 920899 - DNA, 25 bp, Homo sapien
ggctgagttctccagggatcctggg

SEQ ID NO: 920900 - DNA, 25 bp, Homo sapien
ctgagttctccagggatcctgggca

SEQ ID NO: 920901 - DNA, 25 bp, Homo sapien
ggcctcggggctgagttctccaggg

SEQ ID NO: 920902 - DNA, 25 bp, Homo sapien
tagttgccgtaatgccgggcgctca

SEQ ID NO: 920903 - DNA, 25 bp, Homo sapien
gagccgcatggaggcgctggacgct

SEQ ID NO: 920904 - DNA, 25 bp, Homo sapien
cgtatagttgccgtaatgccgggcg

SEQ ID NO: 920905 - DNA, 25 bp, Homo sapien
acacgtatagttgccgtaatgccgg

SEQ ID NO: 920906 - DNA, 25 bp, Homo sapien
atccgcgggggaaaccgccatggct

SEQ ID NO: 920907 - DNA, 25 bp, Homo sapien
gggaaaccgccatggcttcgcagcg

SEQ ID NO: 920908 - DNA, 25 bp, Homo sapien
accgccatggcttcgcagcgcagta

SEQ ID NO: 920909 - DNA, 25 bp, Homo sapien
ccatggcttcgcagcgcagtaggcg

SEQ ID NO: 920910 - DNA, 25 bp, Homo sapien
ccgtgatggtcggaggatagttgac

SEQ ID NO: 920911 - DNA, 25 bp, Homo sapien
gtccgtgatggtcggaggatagttg

SEQ ID NO: 920912 - DNA, 25 bp, Homo sapien
tccgtgatggtcggaggatagttga

SEQ ID NO: 920913 - DNA, 25 bp, Homo sapien
cgcggcggctgtcgggcgccgagtt

SEQ ID NO: 920914 - DNA, 25 bp, Homo sapien
ccccgttgtgagtcacgcactcata

SEQ ID NO: 920915 - DNA, 25 bp, Homo sapien
ccaggtgaccgtgggctctggccgc

SEQ ID NO: 920916 - DNA, 25 bp, Homo sapien
cgtggacaatgaggtagacctgagt

SEQ ID NO: 920917 - DNA, 25 bp, Homo sapien
aaggagcaggtgtagaggccctcgt

SEQ ID NO: 920918 - DNA, 25 bp, Homo sapien
gagcaggtgtagaggccctcgtcgc

SEQ ID NO: 920919 - DNA, 25 bp, Homo sapien
aggagcaggtgtagaggccctcgtc

SEQ ID NO: 920920 - DNA, 25 bp, Homo sapien
ggagcaggtgtagaggccctcgtcg

SEQ ID NO: 920921 - DNA, 25 bp, Homo sapien
tcctgcggtcgttgccggcgtacag

SEQ ID NO: 920922 - DNA, 25 bp, Homo sapien
ctggtcctgcggtcgttgccggcgt

SEQ ID NO: 920923 - DNA, 25 bp, Homo sapien
gtcctgcggtcgttgccggcgtaca

SEQ ID NO: 920924 - DNA, 25 bp, Homo sapien
gtccctggtcctgcggtcgttgccg

SEQ ID NO: 920925 - DNA, 25 bp, Homo sapien
agagcagcccccggctgatgacggc

SEQ ID NO: 920926 - DNA, 25 bp, Homo sapien
gggagagcagcccccggctgatgac

SEQ ID NO: 920927 - DNA, 25 bp, Homo sapien
ggcggcggcgagaagccggagccgg

SEQ ID NO: 920928 - DNA, 25 bp, Homo sapien
tgatgacggccaagccggccagggc

SEQ ID NO: 920929 - DNA, 25 bp, Homo sapien
ttatggagtgatgcgtccttagcca

SEQ ID NO: 920930 - DNA, 25 bp, Homo sapien
atggagtgatgcgtccttagccacc

SEQ ID NO: 920931 - DNA, 25 bp, Homo sapien
ggagtgatgcgtccttagccaccct

SEQ ID NO: 920932 - DNA, 25 bp, Homo sapien
ctttatggagtgatgcgtccttagc

SEQ ID NO: 920933 - DNA, 25 bp, Homo sapien
actgaggctgtcatgcgtggatcca

SEQ ID NO: 920934 - DNA, 25 bp, Homo sapien
tcactaagggtacacagtctgcagg

SEQ ID NO: 920935 - DNA, 25 bp, Homo sapien
gatattgtgactgttgcacacccag

SEQ ID NO: 920936 - DNA, 25 bp, Homo sapien
tgagaaataaacctctgcccagcct

SEQ ID NO: 920937 - DNA, 25 bp, Homo sapien
gaatggaactctgggtatctgggaa

SEQ ID NO: 920938 - DNA, 25 bp, Homo sapien
tttggaaagctaaccctttgaggca

SEQ ID NO: 920939 - DNA, 25 bp, Homo sapien
tcagccacctttcggttttctcctg

SEQ ID NO: 920940 - DNA, 25 bp, Homo sapien
gcattaagattgtgttcactcaacc

SEQ ID NO: 920941 - DNA, 25 bp, Homo sapien
cttcttgtgtggaacttcaacctat

SEQ ID NO: 920942 - DNA, 25 bp, Homo sapien
attcttcttgtgtggaacttcaacc

SEQ ID NO: 920943 - DNA, 25 bp, Homo sapien
atattcttcttgtgtggaacttcaa

SEQ ID NO: 920944 - DNA, 25 bp, Homo sapien
gttctgcctacccagccaaggcata

SEQ ID NO: 920945 - DNA, 25 bp, Homo sapien
gacaaacaatacaaatacgaagagg

SEQ ID NO: 920946 - DNA, 25 bp, Homo sapien
tacaaatacgaagagggttgtagta

SEQ ID NO: 920947 - DNA, 25 bp, Homo sapien
aaaagagtattcattgtgaggacaa

SEQ ID NO: 920948 - DNA, 25 bp, Homo sapien
tcattgtgaggacaaacaatacaaa

SEQ ID NO: 920949 - DNA, 25 bp, Homo sapien
ggtgtgggtgtgaccactccccatc

SEQ ID NO: 920950 - DNA, 25 bp, Homo sapien
tgcacgaagatttaaagggcacatt

SEQ ID NO: 920951 - DNA, 25 bp, Homo sapien
tgaaagaaataggtcccatagggaa

SEQ ID NO: 920952 - DNA, 25 bp, Homo sapien
ggatttggccataacatgagcactg

SEQ ID NO: 920953 - DNA, 25 bp, Homo sapien
ctaactgtgcatatatgactgggcc

SEQ ID NO: 920954 - DNA, 25 bp, Homo sapien
tttacaagaccttcaatgtcagaag

SEQ ID NO: 920955 - DNA, 25 bp, Homo sapien
tctttacaagaccttcaatgtcaga

SEQ ID NO: 920956 - DNA, 25 bp, Homo sapien
ctttacaagaccttcaatgtcagaa

SEQ ID NO: 920957 - DNA, 25 bp, Homo sapien
actctttacaagaccttcaatgtca

SEQ ID NO: 920958 - DNA, 25 bp, Homo sapien
ctgatgagcagagtgagacctagga

SEQ ID NO: 920959 - DNA, 25 bp, Homo sapien
ggaccacagcgcgtaactatgccca

SEQ ID NO: 920960 - DNA, 25 bp, Homo sapien
acagccagaatcaggctgatgagca

SEQ ID NO: 920961 - DNA, 25 bp, Homo sapien
gtgagacctaggaccacagcgcgta

SEQ ID NO: 920962 - DNA, 25 bp, Homo sapien
agtagtggcaaaatgacacggtggt

SEQ ID NO: 920963 - DNA, 25 bp, Homo sapien
tgacacggtggtgtcggccccctct

SEQ ID NO: 920964 - DNA, 25 bp, Homo sapien
atgacacggtggtgtcggccccctc

SEQ ID NO: 920965 - DNA, 25 bp, Homo sapien
ccttgggagtagtggcaaaatgaca

SEQ ID NO: 920966 - DNA, 25 bp, Homo sapien
tgtctggggctgcaatcactgcccc

SEQ ID NO: 920967 - DNA, 25 bp, Homo sapien
atcactgccccggctccagcgggcg

SEQ ID NO: 920968 - DNA, 25 bp, Homo sapien
tgtcaagagccccagcgccaccgcc

SEQ ID NO: 920969 - DNA, 25 bp, Homo sapien
accgccagcaccgaccacagccagc

SEQ ID NO: 920970 - DNA, 25 bp, Homo sapien
tactttgtgtccaaagggacagcct

SEQ ID NO: 920971 - DNA, 25 bp, Homo sapien
ttagcatgcaaatattatcatcttc

SEQ ID NO: 920972 - DNA, 25 bp, Homo sapien
gcttggttgcttacaatcatcatgg

SEQ ID NO: 920973 - DNA, 25 bp, Homo sapien
tcatcatggtcataaagacaaagtc

SEQ ID NO: 920974 - DNA, 25 bp, Homo sapien
attcacaagacagggccagactttg

SEQ ID NO: 920975 - DNA, 25 bp, Homo sapien
tggtctctgccttggattcacaaga

SEQ ID NO: 920976 - DNA, 25 bp, Homo sapien
tctgccttggattcacaagacaggg

SEQ ID NO: 920977 - DNA, 25 bp, Homo sapien
cttggattcacaagacagggccaga

SEQ ID NO: 920978 - DNA, 25 bp, Homo sapien
taagctttgcttttagagtggagcc

SEQ ID NO: 920979 - DNA, 25 bp, Homo sapien
gaggcttctggtgtcaacagaatcc

SEQ ID NO: 920980 - DNA, 25 bp, Homo sapien
tctgcaccatgagcgatgaatatag

SEQ ID NO: 920981 - DNA, 25 bp, Homo sapien
gagtggagccctttgccatgtccag

SEQ ID NO: 920982 - DNA, 25 bp, Homo sapien
gagtatcacatcctgatccacctgg

SEQ ID NO: 920983 - DNA, 25 bp, Homo sapien
tatcacatcctgatccacctggtgg

SEQ ID NO: 920984 - DNA, 25 bp, Homo sapien
tcacatcctgatccacctggtggat

SEQ ID NO: 920985 - DNA, 25 bp, Homo sapien
ggagtatcacatcctgatccacctg

SEQ ID NO: 920986 - DNA, 25 bp, Homo sapien
tgtagcccagaaagtcaccctgagt

SEQ ID NO: 920987 - DNA, 25 bp, Homo sapien
cagaaagtcaccctgagtctcctgc

SEQ ID NO: 920988 - DNA, 25 bp, Homo sapien
gtcaccctgagtctcctgcctggat

SEQ ID NO: 920989 - DNA, 25 bp, Homo sapien
ctgtagcccagaaagtcaccctgag

SEQ ID NO: 920990 - DNA, 25 bp, Homo sapien
gacatactcctgagcacatagtaca

SEQ ID NO: 920991 - DNA, 25 bp, Homo sapien
taaacattgcattaatgtatgtgca

SEQ ID NO: 920992 - DNA, 25 bp, Homo sapien
tgagcacatagtacattctgcataa

SEQ ID NO: 920993 - DNA, 25 bp, Homo sapien
aacattgcattaatgtatgtgcaca

SEQ ID NO: 920994 - DNA, 25 bp, Homo sapien
gaatgaactctggttatctgggaat

SEQ ID NO: 920995 - DNA, 25 bp, Homo sapien
ccaaagactcatcccctgatgctgt

SEQ ID NO: 920996 - DNA, 25 bp, Homo sapien
tggaatgaactctggttatctggga

SEQ ID NO: 920997 - DNA, 25 bp, Homo sapien
ctcatcccctgatgctgtattgtaa

SEQ ID NO: 920998 - DNA, 25 bp, Homo sapien
attagaaattagccatgaatggtga

SEQ ID NO: 920999 - DNA, 25 bp, Homo sapien
gaaattagccatgaatggtgatagg

SEQ ID NO: 921000 - DNA, 25 bp, Homo sapien
ttagaaattagccatgaatggtgat

SEQ ID NO: 921001 - DNA, 25 bp, Homo sapien
ttagccatgaatggtgataggcacc

SEQ ID NO: 921002 - DNA, 25 bp, Homo sapien
tgggaaggagataaacttaactata

SEQ ID NO: 921003 - DNA, 25 bp, Homo sapien
tagtgctagctagttattccagtac

SEQ ID NO: 921004 - DNA, 25 bp, Homo sapien
tgaagtcagcaagtttttaggagaa

SEQ ID NO: 921005 - DNA, 25 bp, Homo sapien
gctcagactgagtagctcaaagttc

SEQ ID NO: 921006 - DNA, 25 bp, Homo sapien
tacaggcgcccgccaacagggccgg

SEQ ID NO: 921007 - DNA, 25 bp, Homo sapien
caggcgcccgccaacagggccggct

SEQ ID NO: 921008 - DNA, 25 bp, Homo sapien
ggcgcccgccaacagggccggctaa

SEQ ID NO: 921009 - DNA, 25 bp, Homo sapien
gcgcccgccaacagggccggctaat

SEQ ID NO: 921010 - DNA, 25 bp, Homo sapien
ttaattcctataccttattgcacag

SEQ ID NO: 921011 - DNA, 25 bp, Homo sapien
taattcatactggcagaaactccca

SEQ ID NO: 921012 - DNA, 25 bp, Homo sapien
taattcctataccttattgcacagg

SEQ ID NO: 921013 - DNA, 25 bp, Homo sapien
tagtagtctaggagactgcctgtgt

SEQ ID NO: 921014 - DNA, 25 bp, Homo sapien
tgccatggctagtagtctaggagac

SEQ ID NO: 921015 - DNA, 25 bp, Homo sapien
catggctagtagtctaggagactgc

SEQ ID NO: 921016 - DNA, 25 bp, Homo sapien
tgctgccatggctagtagtctagga

SEQ ID NO: 921017 - DNA, 25 bp, Homo sapien
gccgtgtcctgagttgccgcacttg

SEQ ID NO: 921018 - DNA, 25 bp, Homo sapien
gctggccgtgtcctgagttgccgca

SEQ ID NO: 921019 - DNA, 25 bp, Homo sapien
tggccgtgtcctgagttgccgcact

SEQ ID NO: 921020 - DNA, 25 bp, Homo sapien
ggccgtgtcctgagttgccgcactt

SEQ ID NO: 921021 - DNA, 25 bp, Homo sapien
ggtgcaatctcgatgatcaggggtt

SEQ ID NO: 921022 - DNA, 25 bp, Homo sapien
caatctcgatgatcaggggtttgtc

SEQ ID NO: 921023 - DNA, 25 bp, Homo sapien
tgcaatctcgatgatcaggggtttg

SEQ ID NO: 921024 - DNA, 25 bp, Homo sapien
tggtgcaatctcgatgatcaggggt

SEQ ID NO: 921025 - DNA, 25 bp, Homo sapien
taaacagatcagaagcccgcctgtc

SEQ ID NO: 921026 - DNA, 25 bp, Homo sapien
ctcgtaggccagctctacatcttct

SEQ ID NO: 921027 - DNA, 25 bp, Homo sapien
cagctctacatcttcttgggtgacc

SEQ ID NO: 921028 - DNA, 25 bp, Homo sapien
gcctgtcctgttgagcctcgccatg

SEQ ID NO: 921029 - DNA, 25 bp, Homo sapien
tttggccgcccattacagacgtttc

SEQ ID NO: 921030 - DNA, 25 bp, Homo sapien
tggccgcccattacagacgtttctg

SEQ ID NO: 921031 - DNA, 25 bp, Homo sapien
acatgctatcctgcctgtcacgtaa

SEQ ID NO: 921032 - DNA, 25 bp, Homo sapien
aagagtcgtctacaattgggtaaat

SEQ ID NO: 921033 - DNA, 25 bp, Homo sapien
gccaagccttggcataaaggctccc

SEQ ID NO: 921034 - DNA, 25 bp, Homo sapien
gacaagtatccattccaatgccaag

SEQ ID NO: 921035 - DNA, 25 bp, Homo sapien
cttggaagtggttctgtaaagattc

SEQ ID NO: 921036 - DNA, 25 bp, Homo sapien
gtaaagattccagcaatttttgcag

SEQ ID NO: 921037 - DNA, 25 bp, Homo sapien
ggttaaaggactcccatgtagatat

SEQ ID NO: 921038 - DNA, 25 bp, Homo sapien
tagattcagtaagtatgtagccatg

SEQ ID NO: 921039 - DNA, 25 bp, Homo sapien
gagagtattctttaggtggcttcct

SEQ ID NO: 921040 - DNA, 25 bp, Homo sapien
gcccttataggtgcgtgtggacatc

SEQ ID NO: 921041 - DNA, 25 bp, Homo sapien
ctagggttttcaaggcaatacaaat

SEQ ID NO: 921042 - DNA, 25 bp, Homo sapien
taaaacgggctgcataacaccaagg

SEQ ID NO: 921043 - DNA, 25 bp, Homo sapien
caagtgaaaaccagatataagtgct

SEQ ID NO: 921044 - DNA, 25 bp, Homo sapien
gcatgagatggagtaaaacaagtct

SEQ ID NO: 921045 - DNA, 25 bp, Homo sapien
tattcagagttggtgactcataagt

SEQ ID NO: 921046 - DNA, 25 bp, Homo sapien
ttctggggatttcattctgggacgg

SEQ ID NO: 921047 - DNA, 25 bp, Homo sapien
ttcacgtcgtgaggcgggcactctt

SEQ ID NO: 921048 - DNA, 25 bp, Homo sapien
gtcgtgaggcgggcactcttccatc

SEQ ID NO: 921049 - DNA, 25 bp, Homo sapien
cacgtcgtgaggcgggcactcttcc

SEQ ID NO: 921050 - DNA, 25 bp, Homo sapien
tacagtctggtgaaatgtggtttgg

SEQ ID NO: 921051 - DNA, 25 bp, Homo sapien
tgaggatacagtctggtgaaatgtg

SEQ ID NO: 921052 - DNA, 25 bp, Homo sapien
tgtggtttgggtcccgcatcttcac

SEQ ID NO: 921053 - DNA, 25 bp, Homo sapien
gtgaaatgtggtttgggtcccgcat

SEQ ID NO: 921054 - DNA, 25 bp, Homo sapien
tcggtcaatcttcttgtgcgcctct

SEQ ID NO: 921055 - DNA, 25 bp, Homo sapien
ctctgtgtgcctccgctttggctgt

SEQ ID NO: 921056 - DNA, 25 bp, Homo sapien
tgttctttcgagtcggtcaatcttc

SEQ ID NO: 921057 - DNA, 25 bp, Homo sapien
agacccgcaggggtacaaatcactt

SEQ ID NO: 921058 - DNA, 25 bp, Homo sapien
taatacgggtgaggatatagtctgg

SEQ ID NO: 921059 - DNA, 25 bp, Homo sapien
tcatgggcctacagtttcctgggtc

SEQ ID NO: 921060 - DNA, 25 bp, Homo sapien
ggtgaacgactgatgctacctgggc

SEQ ID NO: 921061 - DNA, 25 bp, Homo sapien
tgtccacaacatagcccggttcgga

SEQ ID NO: 921062 - DNA, 25 bp, Homo sapien
ccactggtgcgcttgtttgagtggg

SEQ ID NO: 921063 - DNA, 25 bp, Homo sapien
ctggtgcgcttgtttgagtgggctg

SEQ ID NO: 921064 - DNA, 25 bp, Homo sapien
ggtgcgcttgtttgagtgggctgac

SEQ ID NO: 921065 - DNA, 25 bp, Homo sapien
cactggtgcgcttgtttgagtgggc

SEQ ID NO: 921066 - DNA, 25 bp, Homo sapien
ctgcgtgtttttcgttttcctcgtg

SEQ ID NO: 921067 - DNA, 25 bp, Homo sapien
ggctccgcttgggtggcggggctgc

SEQ ID NO: 921068 - DNA, 25 bp, Homo sapien
ctccgcttgggtggcggggctgcgt

SEQ ID NO: 921069 - DNA, 25 bp, Homo sapien
tctctttgtggctccgcttgggtgg

SEQ ID NO: 921070 - DNA, 25 bp, Homo sapien
atacaatctggtgtatctgactgga

SEQ ID NO: 921071 - DNA, 25 bp, Homo sapien
tgagcagcaataaggacggacacag

SEQ ID NO: 921072 - DNA, 25 bp, Homo sapien
gactggatgagatcccgaactttca

SEQ ID NO: 921073 - DNA, 25 bp, Homo sapien
tgtatctgactggatgagatcccga

SEQ ID NO: 921074 - DNA, 25 bp, Homo sapien
ggactccaacgtgcagtgaactgtt

SEQ ID NO: 921075 - DNA, 25 bp, Homo sapien
agaaaaaggaggactccaacgtgca

SEQ ID NO: 921076 - DNA, 25 bp, Homo sapien
cagatgttatagaaggtgcttccag

SEQ ID NO: 921077 - DNA, 25 bp, Homo sapien
tccccgcattcccttcattgtagaa

SEQ ID NO: 921078 - DNA, 25 bp, Homo sapien
aaaggatgtagctcacgcactggaa

SEQ ID NO: 921079 - DNA, 25 bp, Homo sapien
cgcactggaacgcttgttctttcga

SEQ ID NO: 921080 - DNA, 25 bp, Homo sapien
tttcgagtcggtcgaccttttgtgc

SEQ ID NO: 921081 - DNA, 25 bp, Homo sapien
tgtgcgcctctgtgtggcgccgctt

SEQ ID NO: 921082 - DNA, 25 bp, Homo sapien
tgagatacgcaggaatccaaatcac

SEQ ID NO: 921083 - DNA, 25 bp, Homo sapien
gagatacgcaggaatccaaatcacc

SEQ ID NO: 921084 - DNA, 25 bp, Homo sapien
gagtgagatacgcaggaatccaaat

SEQ ID NO: 921085 - DNA, 25 bp, Homo sapien
gatacgcaggaatccaaatcacctt

SEQ ID NO: 921086 - DNA, 25 bp, Homo sapien
cacaagctttgcacaccatagcccg

SEQ ID NO: 921087 - DNA, 25 bp, Homo sapien
gcacaagctttgcacaccatagccc

SEQ ID NO: 921088 - DNA, 25 bp, Homo sapien
gattgatgctgcgtgggctttagct

SEQ ID NO: 921089 - DNA, 25 bp, Homo sapien
gatgattgatgctgcgtgggcttta

SEQ ID NO: 921090 - DNA, 25 bp, Homo sapien
gtgggatggatgattgatgctgcgt

SEQ ID NO: 921091 - DNA, 25 bp, Homo sapien
gatggatgattgatgctgcgtgggc

SEQ ID NO: 921092 - DNA, 25 bp, Homo sapien
tccctcagtgtttgtcgcatgcagc

SEQ ID NO: 921093 - DNA, 25 bp, Homo sapien
ttattccgagatcaggccggctctg

SEQ ID NO: 921094 - DNA, 25 bp, Homo sapien
tccagcgggacacgaccacggagat

SEQ ID NO: 921095 - DNA, 25 bp, Homo sapien
cagaagaggccctatggtcgagact

SEQ ID NO: 921096 - DNA, 25 bp, Homo sapien
cacgcactggaacgcttgttctttt

SEQ ID NO: 921097 - DNA, 25 bp, Homo sapien
acgcactggaacgcttgttcttttg

SEQ ID NO: 921098 - DNA, 25 bp, Homo sapien
cgcactggaacgcttgttcttttga

SEQ ID NO: 921099 - DNA, 25 bp, Homo sapien
gcactggaacgcttgttcttttgag

SEQ ID NO: 921100 - DNA, 25 bp, Homo sapien
ctctgtgtggttccgcttgggctgc

SEQ ID NO: 921101 - DNA, 25 bp, Homo sapien
ctgtgtggttccgcttgggctgcgg

SEQ ID NO: 921102 - DNA, 25 bp, Homo sapien
ctctctgtgtggttccgcttgggct

SEQ ID NO: 921103 - DNA, 25 bp, Homo sapien
tctgtgtggttccgcttgggctgcg

SEQ ID NO: 921104 - DNA, 25 bp, Homo sapien
agtggggggactggctgagacacca

SEQ ID NO: 921105 - DNA, 25 bp, Homo sapien
gtgaagtggggggactggctgagac

SEQ ID NO: 921106 - DNA, 25 bp, Homo sapien
ctttccctgcaatggagccactctt

SEQ ID NO: 921107 - DNA, 25 bp, Homo sapien
aagaggagcacactacacccaagaa

SEQ ID NO: 921108 - DNA, 25 bp, Homo sapien
aataagaggagcacactacacccaa

SEQ ID NO: 921109 - DNA, 25 bp, Homo sapien
gaaataagaggagcacactacaccc

SEQ ID NO: 921110 - DNA, 25 bp, Homo sapien
gaggagcacactacacccaagaagg

SEQ ID NO: 921111 - DNA, 25 bp, Homo sapien
atttcattctggtcggagaggtccg

SEQ ID NO: 921112 - DNA, 25 bp, Homo sapien
cctgggccaaagcataggagtcctg

SEQ ID NO: 921113 - DNA, 25 bp, Homo sapien
gaagctttgcacaccgtagccggat

SEQ ID NO: 921114 - DNA, 25 bp, Homo sapien
tcgaaatccgttgccagcagagcag

SEQ ID NO: 921115 - DNA, 25 bp, Homo sapien
ccatcgtctcgggatttcattccgg

SEQ ID NO: 921116 - DNA, 25 bp, Homo sapien
tcacgtcgtgaggcgggcactcctc

SEQ ID NO: 921117 - DNA, 25 bp, Homo sapien
cacgtcgtgaggcgggcactcctcc

SEQ ID NO: 921118 - DNA, 25 bp, Homo sapien
acgtcgtgaggcgggcactcctcca

SEQ ID NO: 921119 - DNA, 25 bp, Homo sapien
cagatggggtgaggatgcaatctgg

SEQ ID NO: 921120 - DNA, 25 bp, Homo sapien
gggtgaggatgcaatctggtgaggt

SEQ ID NO: 921121 - DNA, 25 bp, Homo sapien
tggtgaggtgtggatggggtcccgc

SEQ ID NO: 921122 - DNA, 25 bp, Homo sapien
gtgaggtgtggatggggtcccgcac

SEQ ID NO: 921123 - DNA, 25 bp, Homo sapien
aaacaggtgcggacagatgatacag

SEQ ID NO: 921124 - DNA, 25 bp, Homo sapien
taaacaggtgcggacagatgataca

SEQ ID NO: 921125 - DNA, 25 bp, Homo sapien
aacaggtgcggacagatgatacaga

SEQ ID NO: 921126 - DNA, 25 bp, Homo sapien
aggccgtgagctcaagggccccgca

SEQ ID NO: 921127 - DNA, 25 bp, Homo sapien
ccagattgcccgtgggtgctgagaa

SEQ ID NO: 921128 - DNA, 25 bp, Homo sapien
agggccccgcaatcttccgctgaca

SEQ ID NO: 921129 - DNA, 25 bp, Homo sapien
aggtatgaatccatcacccggagac

SEQ ID NO: 921130 - DNA, 25 bp, Homo sapien
cacacagcctttttcgggaagggag

SEQ ID NO: 921131 - DNA, 25 bp, Homo sapien
gggagccgaccacggagacgcccca

SEQ ID NO: 921132 - DNA, 25 bp, Homo sapien
agccgaccacggagacgccccagga

SEQ ID NO: 921133 - DNA, 25 bp, Homo sapien
gagccgaccacggagacgccccagg

SEQ ID NO: 921134 - DNA, 25 bp, Homo sapien
cgaccacggagacgccccaggaggc

SEQ ID NO: 921135 - DNA, 25 bp, Homo sapien
aatggtagtcgcaggcagccctttt

SEQ ID NO: 921136 - DNA, 25 bp, Homo sapien
cgcaatggtagtcgcaggcagccct

SEQ ID NO: 921137 - DNA, 25 bp, Homo sapien
tttatagtcccgcaatggtagtcgc

SEQ ID NO: 921138 - DNA, 25 bp, Homo sapien
gtcccgcaatggtagtcgcaggcag

SEQ ID NO: 921139 - DNA, 25 bp, Homo sapien
gaacgccttcgttgcctggcgacta

SEQ ID NO: 921140 - DNA, 25 bp, Homo sapien
cacgaatgcgcatgtgccagtggcg

SEQ ID NO: 921141 - DNA, 25 bp, Homo sapien
gcggcgagcactggcttgcttcaca

SEQ ID NO: 921142 - DNA, 25 bp, Homo sapien
caccattgtccttgcttaggcgggc

SEQ ID NO: 921143 - DNA, 25 bp, Homo sapien
ctccgcgtcctgtattttttccgtg

SEQ ID NO: 921144 - DNA, 25 bp, Homo sapien
gcattcacttcgtcgcacaagccgt

SEQ ID NO: 921145 - DNA, 25 bp, Homo sapien
tcccggagccacatgaagtttgaat

SEQ ID NO: 921146 - DNA, 25 bp, Homo sapien
caatttcggctgtcattcccggagc

SEQ ID NO: 921147 - DNA, 25 bp, Homo sapien
ggaatagttggagcaaaccctgacc

SEQ ID NO: 921148 - DNA, 25 bp, Homo sapien
tattgtcgttcctgccttacccaga

SEQ ID NO: 921149 - DNA, 25 bp, Homo sapien
tgggcacccgtttcagtcttgcaat

SEQ ID NO: 921150 - DNA, 25 bp, Homo sapien
gaacatgggtttgactccagcacaa

SEQ ID NO: 921151 - DNA, 25 bp, Homo sapien
tgaaactctctctcaaccttatgtg

SEQ ID NO: 921152 - DNA, 25 bp, Homo sapien
gcgcccacctcacattctcgaatcg

SEQ ID NO: 921153 - DNA, 25 bp, Homo sapien
aaagagaagttcccagcgcccacct

SEQ ID NO: 921154 - DNA, 25 bp, Homo sapien
acctcacattctcgaatcgcctttt

SEQ ID NO: 921155 - DNA, 25 bp, Homo sapien
tctttcgggaatggagtccaaagag

SEQ ID NO: 921156 - DNA, 25 bp, Homo sapien
aagtttctccctcttggtggaccag

SEQ ID NO: 921157 - DNA, 25 bp, Homo sapien
gccttggctcgcgtgtcagtgtatg

SEQ ID NO: 921158 - DNA, 25 bp, Homo sapien
tcagtgtatgccaccgttgcctggt

SEQ ID NO: 921159 - DNA, 25 bp, Homo sapien
gacctttgtggacacgtgtcggcgt

SEQ ID NO: 921160 - DNA, 25 bp, Homo sapien
acgggatagtcccacgatcccagga

SEQ ID NO: 921161 - DNA, 25 bp, Homo sapien
ggatccacgggatagtcccacgatc

SEQ ID NO: 921162 - DNA, 25 bp, Homo sapien
tagtcccacgatcccaggagaaggc

SEQ ID NO: 921163 - DNA, 25 bp, Homo sapien
ggggatccacgggatagtcccacga

SEQ ID NO: 921164 - DNA, 25 bp, Homo sapien
gccacagtgccattggccaaggcag

SEQ ID NO: 921165 - DNA, 25 bp, Homo sapien
aagcttctaaagatgggtaaggcgg

SEQ ID NO: 921166 - DNA, 25 bp, Homo sapien
ccacagtgccattggccaaggcaga

SEQ ID NO: 921167 - DNA, 25 bp, Homo sapien
ttctaaagatgggtaaggcggtgct

SEQ ID NO: 921168 - DNA, 25 bp, Homo sapien
ggcagggcacatgctaacctgtctt

SEQ ID NO: 921169 - DNA, 25 bp, Homo sapien
cctgtcttctggtagtttggagtga

SEQ ID NO: 921170 - DNA, 25 bp, Homo sapien
atcatctccttccacgtgggtctcc

SEQ ID NO: 921171 - DNA, 25 bp, Homo sapien
tctcatctggcctcatgatcatctc

SEQ ID NO: 921172 - DNA, 25 bp, Homo sapien
agaggagggcgctccctcgtcagat

SEQ ID NO: 921173 - DNA, 25 bp, Homo sapien
gagggcgctccctcgtcagatgtcc

SEQ ID NO: 921174 - DNA, 25 bp, Homo sapien
tgtccctgtctctatgggggtcctt

SEQ ID NO: 921175 - DNA, 25 bp, Homo sapien
gccagaggagggcgctccctcgtca

SEQ ID NO: 921176 - DNA, 25 bp, Homo sapien
ccagggggaagcgggttatgaagat

SEQ ID NO: 921177 - DNA, 25 bp, Homo sapien
gggggaagcgggttatgaagatgag

SEQ ID NO: 921178 - DNA, 25 bp, Homo sapien
agggggaagcgggttatgaagatga

SEQ ID NO: 921179 - DNA, 25 bp, Homo sapien
cagggggaagcgggttatgaagatg

SEQ ID NO: 921180 - DNA, 25 bp, Homo sapien
aacccattcgttctttattatgatg

SEQ ID NO: 921181 - DNA, 25 bp, Homo sapien
aaacccattcgttctttattatgat

SEQ ID NO: 921182 - DNA, 25 bp, Homo sapien
ccacccagcaggagcggggcggcct

SEQ ID NO: 921183 - DNA, 25 bp, Homo sapien
agcggggcggcctggatctgttttc

SEQ ID NO: 921184 - DNA, 25 bp, Homo sapien
tccaccacccagcaggagcggggcg

SEQ ID NO: 921185 - DNA, 25 bp, Homo sapien
ggcggcctggatctgttttctgccc

SEQ ID NO: 921186 - DNA, 25 bp, Homo sapien
ggatgggagagtcccgttcacaccc

SEQ ID NO: 921187 - DNA, 25 bp, Homo sapien
cccgcagagccggatagaaacgctg

SEQ ID NO: 921188 - DNA, 25 bp, Homo sapien
tgccgggaagtgcactgtggaggcc

SEQ ID NO: 921189 - DNA, 25 bp, Homo sapien
ccgcgtcttcggcaaagtcttcggg

SEQ ID NO: 921190 - DNA, 25 bp, Homo sapien
tttgcggaaggcacagtccgggctc

SEQ ID NO: 921191 - DNA, 25 bp, Homo sapien
agcgcagccgttttgcggaaggcac

SEQ ID NO: 921192 - DNA, 25 bp, Homo sapien
agggatccgggcctcgttgcggagg

SEQ ID NO: 921193 - DNA, 25 bp, Homo sapien
tgagctgagctcacttgctggcggc

SEQ ID NO: 921194 - DNA, 25 bp, Homo sapien
ttcttctaggtcgccctggttcctg

SEQ ID NO: 921195 - DNA, 25 bp, Homo sapien
cttctaggtcgccctggttcctggc

SEQ ID NO: 921196 - DNA, 25 bp, Homo sapien
cgcggtcctctacggtctcctctga

SEQ ID NO: 921197 - DNA, 25 bp, Homo sapien
ggtgccacgcggtcctctacggtct

SEQ ID NO: 921198 - DNA, 25 bp, Homo sapien
atgcggtttgggagtgtagctggac

SEQ ID NO: 921199 - DNA, 25 bp, Homo sapien
gccccgcaaacgctcgggatgcggt

SEQ ID NO: 921200 - DNA, 25 bp, Homo sapien
agtgtagctggacaccgagcaccat

SEQ ID NO: 921201 - DNA, 25 bp, Homo sapien
gggtccccgcgctgttggaaagcag

SEQ ID NO: 921202 - DNA, 25 bp, Homo sapien
tccaggaccctctatctggtgaggc

SEQ ID NO: 921203 - DNA, 25 bp, Homo sapien
ttgtcgcctgctgcctctatgtcgg

SEQ ID NO: 921204 - DNA, 25 bp, Homo sapien
tctgcaatcatgagcagcactgagg

SEQ ID NO: 921205 - DNA, 25 bp, Homo sapien
tctatgtcggcttcttttgctggca

SEQ ID NO: 921206 - DNA, 25 bp, Homo sapien
tacccacaatcgctatgtctgctac

SEQ ID NO: 921207 - DNA, 25 bp, Homo sapien
ttctcccataggacagtctcaggta

SEQ ID NO: 921208 - DNA, 25 bp, Homo sapien
aactttatggagtgctgtttcctca

SEQ ID NO: 921209 - DNA, 25 bp, Homo sapien
tctgctacaatgtttagtgaatatc

SEQ ID NO: 921210 - DNA, 25 bp, Homo sapien
gatccagtgattgtttcacaagtca

SEQ ID NO: 921211 - DNA, 25 bp, Homo sapien
tgcagatccagtgattgtttcacaa

SEQ ID NO: 921212 - DNA, 25 bp, Homo sapien
tattttctattcttgcagatccagt

SEQ ID NO: 921213 - DNA, 25 bp, Homo sapien
cacccggccagcaacttattttcta

SEQ ID NO: 921214 - DNA, 25 bp, Homo sapien
cactgtgtggatttctatgtaggca

SEQ ID NO: 921215 - DNA, 25 bp, Homo sapien
tatgtaggcagaaccggccatgaac

SEQ ID NO: 921216 - DNA, 25 bp, Homo sapien
ccatgaactgtagctcagggagctg

SEQ ID NO: 921217 - DNA, 25 bp, Homo sapien
cagttgggtctatatatggtgggcc

SEQ ID NO: 921218 - DNA, 25 bp, Homo sapien
gatcaacttgctgcatcaaagatat

SEQ ID NO: 921219 - DNA, 25 bp, Homo sapien
gtgatcaacttgctgcatcaaagat

SEQ ID NO: 921220 - DNA, 25 bp, Homo sapien
tgtgatcaacttgctgcatcaaaga

SEQ ID NO: 921221 - DNA, 25 bp, Homo sapien
catgtgatcaacttgctgcatcaaa

SEQ ID NO: 921222 - DNA, 25 bp, Homo sapien
tatgagctggtcagggattacaaca

SEQ ID NO: 921223 - DNA, 25 bp, Homo sapien
ctctctctgctttgtactgaattca

SEQ ID NO: 921224 - DNA, 25 bp, Homo sapien
tctccccatgcagatgttctgtttt

SEQ ID NO: 921225 - DNA, 25 bp, Homo sapien
gcctggtactcatggtagagccata

SEQ ID NO: 921226 - DNA, 25 bp, Homo sapien
gtacattggcttttcccacagactg

SEQ ID NO: 921227 - DNA, 25 bp, Homo sapien
acattggcttttcccacagactgta

SEQ ID NO: 921228 - DNA, 25 bp, Homo sapien
ttggcttttcccacagactgtactg

SEQ ID NO: 921229 - DNA, 25 bp, Homo sapien
aaagtacattggcttttcccacaga

SEQ ID NO: 921230 - DNA, 25 bp, Homo sapien
cacatgggaaatgctgcggtggtaa

SEQ ID NO: 921231 - DNA, 25 bp, Homo sapien
cgtttggcacaagtttctcgggcag

SEQ ID NO: 921232 - DNA, 25 bp, Homo sapien
cagtttgaggagttaccgcagcttc

SEQ ID NO: 921233 - DNA, 25 bp, Homo sapien
cctgcacttctggtgggcgctggta

SEQ ID NO: 921234 - DNA, 25 bp, Homo sapien
cgggctccccgagccgagactgtgc

SEQ ID NO: 921235 - DNA, 25 bp, Homo sapien
accgccgcaggtgagctccgcccgg

SEQ ID NO: 921236 - DNA, 25 bp, Homo sapien
accacgcctggatccctgccgggct

SEQ ID NO: 921237 - DNA, 25 bp, Homo sapien
cacaagccagggaccctacgaccca

SEQ ID NO: 921238 - DNA, 25 bp, Homo sapien
aagtagtattatggttagtgctcag

SEQ ID NO: 921239 - DNA, 25 bp, Homo sapien
taagtgtaatgcctatgttatccag

SEQ ID NO: 921240 - DNA, 25 bp, Homo sapien
tccacagcaggtgtgcaacagactg

SEQ ID NO: 921241 - DNA, 25 bp, Homo sapien
tcagaagtgctatctctggagacat

SEQ ID NO: 921242 - DNA, 25 bp, Homo sapien
tgcaaatcatacgtgggacaaaggg

SEQ ID NO: 921243 - DNA, 25 bp, Homo sapien
tgagcaaagtgtagccatcacatag

SEQ ID NO: 921244 - DNA, 25 bp, Homo sapien
ggtgaccaccagacaccaaggtatt

SEQ ID NO: 921245 - DNA, 25 bp, Homo sapien
aaagctgcttcatggaatctgatac

SEQ ID NO: 921246 - DNA, 25 bp, Homo sapien
tttcagttgtctagtacattacttt

SEQ ID NO: 921247 - DNA, 25 bp, Homo sapien
gttgtctagtacattactttattaa

SEQ ID NO: 921248 - DNA, 25 bp, Homo sapien
cagttgtctagtacattactttatt

SEQ ID NO: 921249 - DNA, 25 bp, Homo sapien
ttttcagttgtctagtacattactt

SEQ ID NO: 921250 - DNA, 25 bp, Homo sapien
taactctatgtaaaccaatactaaa

SEQ ID NO: 921251 - DNA, 25 bp, Homo sapien
tttttagagtaatatatgggtatag

SEQ ID NO: 921252 - DNA, 25 bp, Homo sapien
tgggtatagttaactctatgtaaac

SEQ ID NO: 921253 - DNA, 25 bp, Homo sapien
taatatatgggtatagttaactcta

SEQ ID NO: 921254 - DNA, 25 bp, Homo sapien
attaatacctattcatatgcctgta

SEQ ID NO: 921255 - DNA, 25 bp, Homo sapien
gtgattaatacctattcatatgcct

SEQ ID NO: 921256 - DNA, 25 bp, Homo sapien
taatacctattcatatgcctgtatc

SEQ ID NO: 921257 - DNA, 25 bp, Homo sapien
gattaatacctattcatatgcctgt

SEQ ID NO: 921258 - DNA, 25 bp, Homo sapien
tacattgttactatcttttaccaac

SEQ ID NO: 921259 - DNA, 25 bp, Homo sapien
gatgttagtccactctgttattaaa

SEQ ID NO: 921260 - DNA, 25 bp, Homo sapien
tagtggcatgataatacttcactga

SEQ ID NO: 921261 - DNA, 25 bp, Homo sapien
taaagtcactggcaagagaaattat

SEQ ID NO: 921262 - DNA, 25 bp, Homo sapien
ctttcctgtgctataaggtgtgaaa

SEQ ID NO: 921263 - DNA, 25 bp, Homo sapien
tgttgatcaaagtttgagcactgct

SEQ ID NO: 921264 - DNA, 25 bp, Homo sapien
tgagatttagttacaagcattgcca

SEQ ID NO: 921265 - DNA, 25 bp, Homo sapien
atattttagtataaatcccctggtg

SEQ ID NO: 921266 - DNA, 25 bp, Homo sapien
gtaagggttgatgataggttagctt

SEQ ID NO: 921267 - DNA, 25 bp, Homo sapien
ttgagcatcgactgaaagttttgcc

SEQ ID NO: 921268 - DNA, 25 bp, Homo sapien
tttgagcatcgactgaaagttttgc

SEQ ID NO: 921269 - DNA, 25 bp, Homo sapien
ttttgagcatcgactgaaagttttg

SEQ ID NO: 921270 - DNA, 25 bp, Homo sapien
taataaggtttgatgatcaattaaa

SEQ ID NO: 921271 - DNA, 25 bp, Homo sapien
ttaataaggtttgatgatcaattaa

SEQ ID NO: 921272 - DNA, 25 bp, Homo sapien
aataaggtttgatgatcaattaaaa

SEQ ID NO: 921273 - DNA, 25 bp, Homo sapien
tgtagaaagggttgaagattggtta

SEQ ID NO: 921274 - DNA, 25 bp, Homo sapien
tcttttatgtgtagaaagggttgaa

SEQ ID NO: 921275 - DNA, 25 bp, Homo sapien
atcacatttgtgtaacttctctcca

SEQ ID NO: 921276 - DNA, 25 bp, Homo sapien
attcatcacatttgtgtaacttctc

SEQ ID NO: 921277 - DNA, 25 bp, Homo sapien
gttgagaaatggttagaagttttgc

SEQ ID NO: 921278 - DNA, 25 bp, Homo sapien
tatgtttagtaagggttgagaaatg

SEQ ID NO: 921279 - DNA, 25 bp, Homo sapien
gagaaatggttagaagttttgccac

SEQ ID NO: 921280 - DNA, 25 bp, Homo sapien
tagtaagggttgagaaatggttaga

SEQ ID NO: 921281 - DNA, 25 bp, Homo sapien
ttcaatgagttttgaggatcaggta

SEQ ID NO: 921282 - DNA, 25 bp, Homo sapien
ttttgaggatcaggtagaagctttg

SEQ ID NO: 921283 - DNA, 25 bp, Homo sapien
tgagttttgaggatcaggtagaagc

SEQ ID NO: 921284 - DNA, 25 bp, Homo sapien
caatgagttttgaggatcaggtaga

SEQ ID NO: 921285 - DNA, 25 bp, Homo sapien
tgtgtagtaagtgttgaagattggt

SEQ ID NO: 921286 - DNA, 25 bp, Homo sapien
tctcttatgtccaataagggttgaa

SEQ ID NO: 921287 - DNA, 25 bp, Homo sapien
tatcttatgtgtagtaagtgttgaa

SEQ ID NO: 921288 - DNA, 25 bp, Homo sapien
gaattctcttatgtccaataagggt

SEQ ID NO: 921289 - DNA, 25 bp, Homo sapien
gtactaagttttgaggataggtgga

SEQ ID NO: 921290 - DNA, 25 bp, Homo sapien
tgtactaagttttgaggataggtgg

SEQ ID NO: 921291 - DNA, 25 bp, Homo sapien
tactaagttttgaggataggtggaa

SEQ ID NO: 921292 - DNA, 25 bp, Homo sapien
catgtactaagttttgaggataggt

SEQ ID NO: 921293 - DNA, 25 bp, Homo sapien
tggtcagtaagatttgaaaattgtt

SEQ ID NO: 921294 - DNA, 25 bp, Homo sapien
gtcagtaagatttgaaaattgttta

SEQ ID NO: 921295 - DNA, 25 bp, Homo sapien
ttttatggtcagtaagatttgaaaa

SEQ ID NO: 921296 - DNA, 25 bp, Homo sapien
tatggtcagtaagatttgaaaattg

SEQ ID NO: 921297 - DNA, 25 bp, Homo sapien
aaattcactctagtttggattcttt

SEQ ID NO: 921298 - DNA, 25 bp, Homo sapien
gaaattcactctagtttggattctt

SEQ ID NO: 921299 - DNA, 25 bp, Homo sapien
tccactataatctcctttgtgctgt

SEQ ID NO: 921300 - DNA, 25 bp, Homo sapien
atattttgctcaaggtagttttcaa

SEQ ID NO: 921301 - DNA, 25 bp, Homo sapien
tgctcaaggtagttttcaaacattg

SEQ ID NO: 921302 - DNA, 25 bp, Homo sapien
ctgtttacactcaaccacactttta

SEQ ID NO: 921303 - DNA, 25 bp, Homo sapien
ttttagggcaacatagctctatcag

SEQ ID NO: 921304 - DNA, 25 bp, Homo sapien
caggatctctagctaagacaaatgg

SEQ ID NO: 921305 - DNA, 25 bp, Homo sapien
ccagaagggaactaactgtgtgaca

SEQ ID NO: 921306 - DNA, 25 bp, Homo sapien
tattaggtgctttggcggacactgg

SEQ ID NO: 921307 - DNA, 25 bp, Homo sapien
tccaaaatagccaaatcctgaaaag

SEQ ID NO: 921308 - DNA, 25 bp, Homo sapien
tatattggcactgcatatgccttac

SEQ ID NO: 921309 - DNA, 25 bp, Homo sapien
cacattttaagctgtggccttctcc

SEQ ID NO: 921310 - DNA, 25 bp, Homo sapien
tccttagagaattgaaaaacaatac

SEQ ID NO: 921311 - DNA, 25 bp, Homo sapien
ttagctaccatctcatgtctcttca

SEQ ID NO: 921312 - DNA, 25 bp, Homo sapien
ctaaatgtttagctaccatctcatg

SEQ ID NO: 921313 - DNA, 25 bp, Homo sapien
tgtttagctaccatctcatgtctct

SEQ ID NO: 921314 - DNA, 25 bp, Homo sapien
tagctaccatctcatgtctcttcat

SEQ ID NO: 921315 - DNA, 25 bp, Homo sapien
cttgctccagacaggtaatcaggtc

SEQ ID NO: 921316 - DNA, 25 bp, Homo sapien
aatcaggtctggcttagagacagca

SEQ ID NO: 921317 - DNA, 25 bp, Homo sapien
ttttccttgctccagacaggtaatc

SEQ ID NO: 921318 - DNA, 25 bp, Homo sapien
tccttgctccagacaggtaatcagg

SEQ ID NO: 921319 - DNA, 25 bp, Homo sapien
tctcacatcacatgcctatataaat

SEQ ID NO: 921320 - DNA, 25 bp, Homo sapien
gttctctcacatcacatgcctatat

SEQ ID NO: 921321 - DNA, 25 bp, Homo sapien
tgtagttctctcacatcacatgcct

SEQ ID NO: 921322 - DNA, 25 bp, Homo sapien
tggccacatccataaatgtcaatgg

SEQ ID NO: 921323 - DNA, 25 bp, Homo sapien
taaggcagatatacgcacagaaaac

SEQ ID NO: 921324 - DNA, 25 bp, Homo sapien
gaaatctgtccaagagctctttaac

SEQ ID NO: 921325 - DNA, 25 bp, Homo sapien
tgtaaaaagggatgacagctttcat

SEQ ID NO: 921326 - DNA, 25 bp, Homo sapien
caaacatctagtaggtgggtgagcc

SEQ ID NO: 921327 - DNA, 25 bp, Homo sapien
aaaggaatgcttatatgttgtggga

SEQ ID NO: 921328 - DNA, 25 bp, Homo sapien
tgcctattgttaaaaagtcaatgac

SEQ ID NO: 921329 - DNA, 25 bp, Homo sapien
tcaatgacagatgcgggctaggttg

SEQ ID NO: 921330 - DNA, 25 bp, Homo sapien
catccagtcagaatgcctattgtta

SEQ ID NO: 921331 - DNA, 25 bp, Homo sapien
tgtcgatatgcttgtggcccacaga

SEQ ID NO: 921332 - DNA, 25 bp, Homo sapien
tttttggcgcaaaacctgcgaggtg

SEQ ID NO: 921333 - DNA, 25 bp, Homo sapien
tggtagtccgtctgtccacaagagc

SEQ ID NO: 921334 - DNA, 25 bp, Homo sapien
tagatagacataggctcctgggcca

SEQ ID NO: 921335 - DNA, 25 bp, Homo sapien
gatgttccccgaccacgtagtgtgg

SEQ ID NO: 921336 - DNA, 25 bp, Homo sapien
tgttgtcatctcactggcaccttgg

SEQ ID NO: 921337 - DNA, 25 bp, Homo sapien
tggttccatcgtaggatcagctggg

SEQ ID NO: 921338 - DNA, 25 bp, Homo sapien
cccagcatggacagaaaaggctttt

SEQ ID NO: 921339 - DNA, 25 bp, Homo sapien
agccaatctcccctccgggttgaag

SEQ ID NO: 921340 - DNA, 25 bp, Homo sapien
tgaagtcctggaatcgtcctgtagc

SEQ ID NO: 921341 - DNA, 25 bp, Homo sapien
taggttccaatgcactgtcagggag

SEQ ID NO: 921342 - DNA, 25 bp, Homo sapien
caatggtgccttgggtcacgggtct

SEQ ID NO: 921343 - DNA, 25 bp, Homo sapien
cagcccagccgatgaacatccaaag

SEQ ID NO: 921344 - DNA, 25 bp, Homo sapien
aacatgaccctatcttacttaagca

SEQ ID NO: 921345 - DNA, 25 bp, Homo sapien
tacaacaggatttgcaacatgaccc

SEQ ID NO: 921346 - DNA, 25 bp, Homo sapien
ttttatttaggtgaccaccagccca

SEQ ID NO: 921347 - DNA, 25 bp, Homo sapien
tctggccaatcacagcactttcata

SEQ ID NO: 921348 - DNA, 25 bp, Homo sapien
ggccaatcacagcactttcataggc

SEQ ID NO: 921349 - DNA, 25 bp, Homo sapien
ctggccaatcacagcactttcatag

SEQ ID NO: 921350 - DNA, 25 bp, Homo sapien
tggccaatcacagcactttcatagg

SEQ ID NO: 921351 - DNA, 25 bp, Homo sapien
caaaggaagagtaccccaggagact

SEQ ID NO: 921352 - DNA, 25 bp, Homo sapien
tgtgtcttcgagaaatggaacccgg

SEQ ID NO: 921353 - DNA, 25 bp, Homo sapien
caaacccagggagctacggtgctca

SEQ ID NO: 921354 - DNA, 25 bp, Homo sapien
tcaggccacccaatcccttgagaga

SEQ ID NO: 921355 - DNA, 25 bp, Homo sapien
ggaatttccaccttgatcgtacaaa

SEQ ID NO: 921356 - DNA, 25 bp, Homo sapien
gagaccctgcttgagacagaagtga

SEQ ID NO: 921357 - DNA, 25 bp, Homo sapien
aatatttctgcggagacttccacaa

SEQ ID NO: 921358 - DNA, 25 bp, Homo sapien
ccagtcctagggttgctacttgcaa

SEQ ID NO: 921359 - DNA, 25 bp, Homo sapien
aggatgcccggggtccgagctgtca

SEQ ID NO: 921360 - DNA, 25 bp, Homo sapien
cccggccgccatcctatggctgaag

SEQ ID NO: 921361 - DNA, 25 bp, Homo sapien
ctcggggccgcggattttggagcca

SEQ ID NO: 921362 - DNA, 25 bp, Homo sapien
ggtccgagctgtcagcccggccgcc

SEQ ID NO: 921363 - DNA, 25 bp, Homo sapien
ctctctcgggatgtcggacccggca

SEQ ID NO: 921364 - DNA, 25 bp, Homo sapien
ccacttcccaccagttccaaccagc

SEQ ID NO: 921365 - DNA, 25 bp, Homo sapien
tcccaccagttccaaccagccccgc

SEQ ID NO: 921366 - DNA, 25 bp, Homo sapien
tcgggatgtcggacccggcactctc

SEQ ID NO: 921367 - DNA, 25 bp, Homo sapien
gaagctccggctgccgccagagaca

SEQ ID NO: 921368 - DNA, 25 bp, Homo sapien
acctgcaggtaacgaggccacagaa

SEQ ID NO: 921369 - DNA, 25 bp, Homo sapien
agcagtgaagactacaccagaagct

SEQ ID NO: 921370 - DNA, 25 bp, Homo sapien
ccaatacctgcaggtaacgaggcca

SEQ ID NO: 921371 - DNA, 25 bp, Homo sapien
ccggtagaggccctgtgaggtcaca

SEQ ID NO: 921372 - DNA, 25 bp, Homo sapien
agtgccggtagaggccctgtgaggt

SEQ ID NO: 921373 - DNA, 25 bp, Homo sapien
tgccggtagaggccctgtgaggtca

SEQ ID NO: 921374 - DNA, 25 bp, Homo sapien
ggtagaggccctgtgaggtcacact

SEQ ID NO: 921375 - DNA, 25 bp, Homo sapien
tctccatgtcatgccaatttttgta

SEQ ID NO: 921376 - DNA, 25 bp, Homo sapien
tcatcctttcacagggactatgctt

SEQ ID NO: 921377 - DNA, 25 bp, Homo sapien
cctttcacagggactatgcttatct

SEQ ID NO: 921378 - DNA, 25 bp, Homo sapien
ggactatgcttatcttctccatgtc

SEQ ID NO: 921379 - DNA, 25 bp, Homo sapien
ccacaggatcgcttgtaagaactgc

SEQ ID NO: 921380 - DNA, 25 bp, Homo sapien
agtgcccacaggatcgcttgtaaga

SEQ ID NO: 921381 - DNA, 25 bp, Homo sapien
gatcgcttgtaagaactgctccttc

SEQ ID NO: 921382 - DNA, 25 bp, Homo sapien
cactgacacttgtgcaccaaggtgc

SEQ ID NO: 921383 - DNA, 25 bp, Homo sapien
ggttcctgatgttcacaccatgctc

SEQ ID NO: 921384 - DNA, 25 bp, Homo sapien
tgaagtctggttcctgatgttcaca

SEQ ID NO: 921385 - DNA, 25 bp, Homo sapien
tccttctcaccagggtgcacgggca

SEQ ID NO: 921386 - DNA, 25 bp, Homo sapien
acaccatgctccttctcaccagggt

SEQ ID NO: 921387 - DNA, 25 bp, Homo sapien
cacggctggcgtttggctttgctga

SEQ ID NO: 921388 - DNA, 25 bp, Homo sapien
tgttcttgtcctcgcatagtgaagg

SEQ ID NO: 921389 - DNA, 25 bp, Homo sapien
caagataaggatgaatgtggtatgc

SEQ ID NO: 921390 - DNA, 25 bp, Homo sapien
tgatggctgcaatgtggactgtgga

SEQ ID NO: 921391 - DNA, 25 bp, Homo sapien
aaagctgcaaccagggaaacactga

SEQ ID NO: 921392 - DNA, 25 bp, Homo sapien
taataactatgtaagcccctatggc

SEQ ID NO: 921393 - DNA, 25 bp, Homo sapien
tatataaagcccctgaaaaattgaa

SEQ ID NO: 921394 - DNA, 25 bp, Homo sapien
cagtgagaaaaagcacatacatctg

SEQ ID NO: 921395 - DNA, 25 bp, Homo sapien
cttactgggacggtgacattagctg

SEQ ID NO: 921396 - DNA, 25 bp, Homo sapien
tgagaccagcggcagcgggcctctt

SEQ ID NO: 921397 - DNA, 25 bp, Homo sapien
gacattagctggcaaacacaaattt

SEQ ID NO: 921398 - DNA, 25 bp, Homo sapien
agaccagcggcagcgggcctcttgt

SEQ ID NO: 921399 - DNA, 25 bp, Homo sapien
ctcatttcacaagccctaagtgtct

SEQ ID NO: 921400 - DNA, 25 bp, Homo sapien
ttcacaagccctaagtgtcttaatc

SEQ ID NO: 921401 - DNA, 25 bp, Homo sapien
tcatttcacaagccctaagtgtctt

SEQ ID NO: 921402 - DNA, 25 bp, Homo sapien
atttcacaagccctaagtgtcttaa

SEQ ID NO: 921403 - DNA, 25 bp, Homo sapien
ctttagatttcatttgctgacttgg

SEQ ID NO: 921404 - DNA, 25 bp, Homo sapien
atctttagatttcatttgctgactt

SEQ ID NO: 921405 - DNA, 25 bp, Homo sapien
cttggggagagtggtttaaatggag

SEQ ID NO: 921406 - DNA, 25 bp, Homo sapien
ctgacttggggagagtggtttaaat

SEQ ID NO: 921407 - DNA, 25 bp, Homo sapien
tcagaattctggttttgaccttcag

SEQ ID NO: 921408 - DNA, 25 bp, Homo sapien
tgaccttcaggaaacattagttaaa

SEQ ID NO: 921409 - DNA, 25 bp, Homo sapien
tttaagcagaacattcagaatcagg

SEQ ID NO: 921410 - DNA, 25 bp, Homo sapien
tcagaatcaggtcagctcgtgggtg

SEQ ID NO: 921411 - DNA, 25 bp, Homo sapien
tttagccagattagagttgcagtgc

SEQ ID NO: 921412 - DNA, 25 bp, Homo sapien
gagtcatcggtgataagcaaagcca

SEQ ID NO: 921413 - DNA, 25 bp, Homo sapien
ccttttaggtgagcccgtggtagca

SEQ ID NO: 921414 - DNA, 25 bp, Homo sapien
gaagttgagtcgaattagggctcct

SEQ ID NO: 921415 - DNA, 25 bp, Homo sapien
gttgatgagatcatgcgagctggaa

SEQ ID NO: 921416 - DNA, 25 bp, Homo sapien
ttgatgagatcatgcgagctggaat

SEQ ID NO: 921417 - DNA, 25 bp, Homo sapien
tcttggttgatgagatcatgcgagc

SEQ ID NO: 921418 - DNA, 25 bp, Homo sapien
cattctcttggttgatgagatcatg

SEQ ID NO: 921419 - DNA, 25 bp, Homo sapien
actggcatctgtggaagttctgaaa

SEQ ID NO: 921420 - DNA, 25 bp, Homo sapien
acactggcatctgtggaagttctga

SEQ ID NO: 921421 - DNA, 25 bp, Homo sapien
ctggcatctgtggaagttctgaaat

SEQ ID NO: 921422 - DNA, 25 bp, Homo sapien
cactggcatctgtggaagttctgaa

SEQ ID NO: 921423 - DNA, 25 bp, Homo sapien
cagtgacctggagtgtgcaaataaa

SEQ ID NO: 921424 - DNA, 25 bp, Homo sapien
tatagttggtctatctctgcggtcc

SEQ ID NO: 921425 - DNA, 25 bp, Homo sapien
taagggctacggttatcaggtgaaa

SEQ ID NO: 921426 - DNA, 25 bp, Homo sapien
ctgtccaaaggttcaaaaagtagtg

SEQ ID NO: 921427 - DNA, 25 bp, Homo sapien
gagattcctgatgggaacaaattct

SEQ ID NO: 921428 - DNA, 25 bp, Homo sapien
ccactgccaggtgggagattcctga

SEQ ID NO: 921429 - DNA, 25 bp, Homo sapien
acaggctactagcatggtcccactg

SEQ ID NO: 921430 - DNA, 25 bp, Homo sapien
tgcaggaaatggacaggctactagc

SEQ ID NO: 921431 - DNA, 25 bp, Homo sapien
gtgtgcactataatgcccagcttat

SEQ ID NO: 921432 - DNA, 25 bp, Homo sapien
gtgcactataatgcccagcttattt

SEQ ID NO: 921433 - DNA, 25 bp, Homo sapien
cttattttgtgcttttgatagagac

SEQ ID NO: 921434 - DNA, 25 bp, Homo sapien
ctatgcctggccttgaaaatccatt

SEQ ID NO: 921435 - DNA, 25 bp, Homo sapien
caacggcagtcagaggtcaagctgg

SEQ ID NO: 921436 - DNA, 25 bp, Homo sapien
tgcccagcacgaatggcaccgggcg

SEQ ID NO: 921437 - DNA, 25 bp, Homo sapien
agttccaaaggctttaatgctattg

SEQ ID NO: 921438 - DNA, 25 bp, Homo sapien
taatgctattgcaacggcagtcaga

SEQ ID NO: 921439 - DNA, 25 bp, Homo sapien
tcagctgaggcgagtgcgcggccag

SEQ ID NO: 921440 - DNA, 25 bp, Homo sapien
gctgaggcgagtgcgcggccagggc

SEQ ID NO: 921441 - DNA, 25 bp, Homo sapien
gtgcgcggccagggctgcagctggc

SEQ ID NO: 921442 - DNA, 25 bp, Homo sapien
tgcgcggccagggctgcagctggcg

SEQ ID NO: 921443 - DNA, 25 bp, Homo sapien
ggccgcctgtggtcaccctcccgcg

SEQ ID NO: 921444 - DNA, 25 bp, Homo sapien
ggtggtcgtaaactcctcctcatag

SEQ ID NO: 921445 - DNA, 25 bp, Homo sapien
tccaggtggtcgtaaactcctcctc

SEQ ID NO: 921446 - DNA, 25 bp, Homo sapien
tggtcgtaaactcctcctcatagct

SEQ ID NO: 921447 - DNA, 25 bp, Homo sapien
tgagccaccatatgggctggaagct

SEQ ID NO: 921448 - DNA, 25 bp, Homo sapien
gcacatcaccatgccgacctttttt

SEQ ID NO: 921449 - DNA, 25 bp, Homo sapien
tttaacttttgatagagactgggtc

SEQ ID NO: 921450 - DNA, 25 bp, Homo sapien
aactcctgggtgcaaagaatcctct

SEQ ID NO: 921451 - DNA, 25 bp, Homo sapien
cccccacagccgcggctttctcccg

SEQ ID NO: 921452 - DNA, 25 bp, Homo sapien
cacagccgcggctttctcccgctgc

SEQ ID NO: 921453 - DNA, 25 bp, Homo sapien
cccacagccgcggctttctcccgct

SEQ ID NO: 921454 - DNA, 25 bp, Homo sapien
acagccgcggctttctcccgctgcg

SEQ ID NO: 921455 - DNA, 25 bp, Homo sapien
ctttgggatgtacaggaggatatat

SEQ ID NO: 921456 - DNA, 25 bp, Homo sapien
caggaggatatattatccttacaaa

SEQ ID NO: 921457 - DNA, 25 bp, Homo sapien
acctgtttgccgatgagcaagactc

SEQ ID NO: 921458 - DNA, 25 bp, Homo sapien
cacctgtttgccgatgagcaagact

SEQ ID NO: 921459 - DNA, 25 bp, Homo sapien
atatttgtggccatgcaagaaaaga

SEQ ID NO: 921460 - DNA, 25 bp, Homo sapien
tatatgacatccaattaccgacaga

SEQ ID NO: 921461 - DNA, 25 bp, Homo sapien
ggaacaccttaaggattcatggcat

SEQ ID NO: 921462 - DNA, 25 bp, Homo sapien
tatcttgagtcgtcatgaaactaac

SEQ ID NO: 921463 - DNA, 25 bp, Homo sapien
gcttactgaagcaagggaatttgga

SEQ ID NO: 921464 - DNA, 25 bp, Homo sapien
caggaagaaaatgggtaatgccgaa

SEQ ID NO: 921465 - DNA, 25 bp, Homo sapien
taatgccgaaggaacattggcctag

SEQ ID NO: 921466 - DNA, 25 bp, Homo sapien
gaatttggagtgagactttctcccg

SEQ ID NO: 921467 - DNA, 25 bp, Homo sapien
gcggcactgcgcgcggaggcgatgg

SEQ ID NO: 921468 - DNA, 25 bp, Homo sapien
cgggctgggctcgaggagcggcccg

SEQ ID NO: 921469 - DNA, 25 bp, Homo sapien
ggctgggctcgaggagcggcccgga

SEQ ID NO: 921470 - DNA, 25 bp, Homo sapien
ccgggctgggctcgaggagcggccc

SEQ ID NO: 921471 - DNA, 25 bp, Homo sapien
ctgggctcgaggagcggcccggaca

SEQ ID NO: 921472 - DNA, 25 bp, Homo sapien
atccttgagcccgcgtcgcgccctt

SEQ ID NO: 921473 - DNA, 25 bp, Homo sapien
ccttgagcccgcgtcgcgcccttgg

SEQ ID NO: 921474 - DNA, 25 bp, Homo sapien
catccttgagcccgcgtcgcgccct

SEQ ID NO: 921475 - DNA, 25 bp, Homo sapien
ttgagcccgcgtcgcgcccttggag

SEQ ID NO: 921476 - DNA, 25 bp, Homo sapien
ggggcgagtgcttggtgggaactgg

SEQ ID NO: 921477 - DNA, 25 bp, Homo sapien
ggcgagtgcttggtgggaactggga

SEQ ID NO: 921478 - DNA, 25 bp, Homo sapien
tttgtggggcgagtgcttggtggga

SEQ ID NO: 921479 - DNA, 25 bp, Homo sapien
ggcaggatttgtggggcgagtgctt

SEQ ID NO: 921480 - DNA, 25 bp, Homo sapien
gctgagtagctgagctatgttccaa

SEQ ID NO: 921481 - DNA, 25 bp, Homo sapien
taccaatgtcttgcagcagtgtctg

SEQ ID NO: 921482 - DNA, 25 bp, Homo sapien
tgctttgagccttaccttgctgacc

SEQ ID NO: 921483 - DNA, 25 bp, Homo sapien
cacaattaggtgctcggcaagtgtt

SEQ ID NO: 921484 - DNA, 25 bp, Homo sapien
gcgcccggcccacaagtgcttattt

SEQ ID NO: 921485 - DNA, 25 bp, Homo sapien
tctctctatttgcattaactcatcc

SEQ ID NO: 921486 - DNA, 25 bp, Homo sapien
caaagactttgtgaatgctgtggcc

SEQ ID NO: 921487 - DNA, 25 bp, Homo sapien
tggcccaggtactcttccaatctct

SEQ ID NO: 921488 - DNA, 25 bp, Homo sapien
agcatgtgtccagcgtgagcctccc

SEQ ID NO: 921489 - DNA, 25 bp, Homo sapien
cagaggcccatagcaactctcatgc

SEQ ID NO: 921490 - DNA, 25 bp, Homo sapien
catgtgtccagcgtgagcctcccga

SEQ ID NO: 921491 - DNA, 25 bp, Homo sapien
tctcatgccctggagtgtctcacca

SEQ ID NO: 921492 - DNA, 25 bp, Homo sapien
aacatactggttaagagggctgtgg

SEQ ID NO: 921493 - DNA, 25 bp, Homo sapien
tttgttcccataagttaaactgaga

SEQ ID NO: 921494 - DNA, 25 bp, Homo sapien
gcaaactgagtaacccttggacaag

SEQ ID NO: 921495 - DNA, 25 bp, Homo sapien
ctccaggggtttgaaagttatgcac

SEQ ID NO: 921496 - DNA, 25 bp, Homo sapien
ttaaatattctgtcattggagattg

SEQ ID NO: 921497 - DNA, 25 bp, Homo sapien
tgtcattggagattggtacatttct

SEQ ID NO: 921498 - DNA, 25 bp, Homo sapien
acatacacacgttcctgggagaagt

SEQ ID NO: 921499 - DNA, 25 bp, Homo sapien
tacacacgttcctgggagaagtgac

SEQ ID NO: 921500 - DNA, 25 bp, Homo sapien
ctctccacaggctctaataaagggg

SEQ ID NO: 921501 - DNA, 25 bp, Homo sapien
tcatgatctctccacaggctctaat

SEQ ID NO: 921502 - DNA, 25 bp, Homo sapien
catgatctctccacaggctctaata

SEQ ID NO: 921503 - DNA, 25 bp, Homo sapien
cacaggctctaataaagggggggag

SEQ ID NO: 921504 - DNA, 25 bp, Homo sapien
tggttacggttgctttcaggcaatg

SEQ ID NO: 921505 - DNA, 25 bp, Homo sapien
tacggttgctttcaggcaatggcac

SEQ ID NO: 921506 - DNA, 25 bp, Homo sapien
cagttgcctggagcgccctcgctct

SEQ ID NO: 921507 - DNA, 25 bp, Homo sapien
gttacggttgctttcaggcaatggc

SEQ ID NO: 921508 - DNA, 25 bp, Homo sapien
ttcctggctgactgcattctcatcc

SEQ ID NO: 921509 - DNA, 25 bp, Homo sapien
gttcctggctgactgcattctcatc

SEQ ID NO: 921510 - DNA, 25 bp, Homo sapien
tcctggctgactgcattctcatcct

SEQ ID NO: 921511 - DNA, 25 bp, Homo sapien
ttggtgtcgtcacccacgtggacag

SEQ ID NO: 921512 - DNA, 25 bp, Homo sapien
gatttcatacaagacgttggtgtcg

SEQ ID NO: 921513 - DNA, 25 bp, Homo sapien
caacagtgatttcatacaagacgtt

SEQ ID NO: 921514 - DNA, 25 bp, Homo sapien
caagacgttggtgtcgtcacccacg

SEQ ID NO: 921515 - DNA, 25 bp, Homo sapien
tgtggtcattgccttccttaatcat

SEQ ID NO: 921516 - DNA, 25 bp, Homo sapien
ctgtggtcattgccttccttaatca

SEQ ID NO: 921517 - DNA, 25 bp, Homo sapien
tgagcatgctgaggtacggcatgcc

SEQ ID NO: 921518 - DNA, 25 bp, Homo sapien
catgctgaggtacggcatgccgtcg

SEQ ID NO: 921519 - DNA, 25 bp, Homo sapien
tgaggtacggcatgccgtcggtgcc

SEQ ID NO: 921520 - DNA, 25 bp, Homo sapien
gaggtacggcatgccgtcggtgccc

SEQ ID NO: 921521 - DNA, 25 bp, Homo sapien
gcagccatgtatgtaggatgggcca

SEQ ID NO: 921522 - DNA, 25 bp, Homo sapien
ggacagcaatgtgtaggggcacaca

SEQ ID NO: 921523 - DNA, 25 bp, Homo sapien
tgtaggggcacacaatagctggaca

SEQ ID NO: 921524 - DNA, 25 bp, Homo sapien
cgcacagtggagctccacctcactg

SEQ ID NO: 921525 - DNA, 25 bp, Homo sapien
aggtcatgtctccaccaccaggctg

SEQ ID NO: 921526 - DNA, 25 bp, Homo sapien
cacactcgcccaggtccaaaggtca

SEQ ID NO: 921527 - DNA, 25 bp, Homo sapien
ctcgcccaggtccaaaggtcatgtc

SEQ ID NO: 921528 - DNA, 25 bp, Homo sapien
actcgcccaggtccaaaggtcatgt

SEQ ID NO: 921529 - DNA, 25 bp, Homo sapien
gatgcacttcatggacttccttgtg

SEQ ID NO: 921530 - DNA, 25 bp, Homo sapien
ttcatggacttccttgtggttctcc

SEQ ID NO: 921531 - DNA, 25 bp, Homo sapien
catggacttccttgtggttctccag

SEQ ID NO: 921532 - DNA, 25 bp, Homo sapien
cacttcatggacttccttgtggttc

SEQ ID NO: 921533 - DNA, 25 bp, Homo sapien
aatggagagtgttggattgctggtg

SEQ ID NO: 921534 - DNA, 25 bp, Homo sapien
agtgaatgggttcaacagctggcgt

SEQ ID NO: 921535 - DNA, 25 bp, Homo sapien
gcaaaagtgaatgggttcaacagct

SEQ ID NO: 921536 - DNA, 25 bp, Homo sapien
aaaagtgaatgggttcaacagctgg

SEQ ID NO: 921537 - DNA, 25 bp, Homo sapien
gagacacatccatccctcagaggag

SEQ ID NO: 921538 - DNA, 25 bp, Homo sapien
ggtgtctgcccactagaatctgagg

SEQ ID NO: 921539 - DNA, 25 bp, Homo sapien
tatttctggacctgagagaccacaa

SEQ ID NO: 921540 - DNA, 25 bp, Homo sapien
taggccaccctatgcagtgtttcag

SEQ ID NO: 921541 - DNA, 25 bp, Homo sapien
ccatgtctatttctttctacacaga

SEQ ID NO: 921542 - DNA, 25 bp, Homo sapien
gggtaaggtcacagaatctcaaggc

SEQ ID NO: 921543 - DNA, 25 bp, Homo sapien
ggacgggcaggagacagatgccttc

SEQ ID NO: 921544 - DNA, 25 bp, Homo sapien
gacgggcaggagacagatgccttcc

SEQ ID NO: 921545 - DNA, 25 bp, Homo sapien
gcaccgtgtgtacatgaaggtctca

SEQ ID NO: 921546 - DNA, 25 bp, Homo sapien
cgtttgttggcgtccacctctagaa

SEQ ID NO: 921547 - DNA, 25 bp, Homo sapien
cccacagtgagatggtgagctggct

SEQ ID NO: 921548 - DNA, 25 bp, Homo sapien
tctagaatgcccatcgggttgatta

SEQ ID NO: 921549 - DNA, 25 bp, Homo sapien
tgcagcacccgaagcggagctcaca

SEQ ID NO: 921550 - DNA, 25 bp, Homo sapien
gaagcggagctcacagaatacagag

SEQ ID NO: 921551 - DNA, 25 bp, Homo sapien
tcatccctcatagaagcggctctcc

SEQ ID NO: 921552 - DNA, 25 bp, Homo sapien
tcacagaatacagaggctgctatgc

SEQ ID NO: 921553 - DNA, 25 bp, Homo sapien
ggaagtcctcaggacacccctgcat

SEQ ID NO: 921554 - DNA, 25 bp, Homo sapien
aattccgtgaaacgcacactggatg

SEQ ID NO: 921555 - DNA, 25 bp, Homo sapien
tcaggacacccctgcatgaaggctg

SEQ ID NO: 921556 - DNA, 25 bp, Homo sapien
cagcgcaaggttgtggaggtctcaa

SEQ ID NO: 921557 - DNA, 25 bp, Homo sapien
taccatgtccaagccctgctcaaga

SEQ ID NO: 921558 - DNA, 25 bp, Homo sapien
tccacaggtaccatgtccaagccct

SEQ ID NO: 921559 - DNA, 25 bp, Homo sapien
gtccaagccctgctcaagagcctgg

SEQ ID NO: 921560 - DNA, 25 bp, Homo sapien
aggtaccatgtccaagccctgctca

SEQ ID NO: 921561 - DNA, 25 bp, Homo sapien
tgagaggggtgggaggtattggtgt

SEQ ID NO: 921562 - DNA, 25 bp, Homo sapien
ggggtgggaggtattggtgtcagga

SEQ ID NO: 921563 - DNA, 25 bp, Homo sapien
gaggggtgggaggtattggtgtcag

SEQ ID NO: 921564 - DNA, 25 bp, Homo sapien
agaggggtgggaggtattggtgtca

SEQ ID NO: 921565 - DNA, 25 bp, Homo sapien
ctatcactcaaacccgagcccacca

SEQ ID NO: 921566 - DNA, 25 bp, Homo sapien
gctgctcaaccacatcagcctgaac

SEQ ID NO: 921567 - DNA, 25 bp, Homo sapien
tgtaggcccatagcctatcactcaa

SEQ ID NO: 921568 - DNA, 25 bp, Homo sapien
ccactccttgtaggcccatagccta

SEQ ID NO: 921569 - DNA, 25 bp, Homo sapien
gggctcccatgacactgcgtgctca

SEQ ID NO: 921570 - DNA, 25 bp, Homo sapien
tcctgaacaggtgcatgcagactgg

SEQ ID NO: 921571 - DNA, 25 bp, Homo sapien
gaggatgtctacaccttgaggctga

SEQ ID NO: 921572 - DNA, 25 bp, Homo sapien
gaggaaaaccatcccattccaggtg

SEQ ID NO: 921573 - DNA, 25 bp, Homo sapien
aagcaatggggaccggccagtgtaa

SEQ ID NO: 921574 - DNA, 25 bp, Homo sapien
caatggggaccggccagtgtaaaag

SEQ ID NO: 921575 - DNA, 25 bp, Homo sapien
cagagaagcaatggggaccggccag

SEQ ID NO: 921576 - DNA, 25 bp, Homo sapien
agaagcaatggggaccggccagtgt

SEQ ID NO: 921577 - DNA, 25 bp, Homo sapien
tgtatcagcaaaggcctttgggcct

SEQ ID NO: 921578 - DNA, 25 bp, Homo sapien
ccttgaccatcccactacattatga

SEQ ID NO: 921579 - DNA, 25 bp, Homo sapien
cactacattatgagtgactgtgcca

SEQ ID NO: 921580 - DNA, 25 bp, Homo sapien
gtgtcgagcaccctctgggctgtat

SEQ ID NO: 921581 - DNA, 25 bp, Homo sapien
cacggtattggcaaggaggcattct

SEQ ID NO: 921582 - DNA, 25 bp, Homo sapien
cagggcctcacctcacacggtattg

SEQ ID NO: 921583 - DNA, 25 bp, Homo sapien
tgcctgacaagtactcatgggagct

SEQ ID NO: 921584 - DNA, 25 bp, Homo sapien
ccccgggcccatgtggaagatcgga

SEQ ID NO: 921585 - DNA, 25 bp, Homo sapien
tgctgcttcgccagcagccagctgt

SEQ ID NO: 921586 - DNA, 25 bp, Homo sapien
tgtcatataattgctcatagtagtc

SEQ ID NO: 921587 - DNA, 25 bp, Homo sapien
aattttggatccttgtgtgctcaat

SEQ ID NO: 921588 - DNA, 25 bp, Homo sapien
gtatttggttactgcttcaatctcc

SEQ ID NO: 921589 - DNA, 25 bp, Homo sapien
tataattaagctaacgttggaatta

SEQ ID NO: 921590 - DNA, 25 bp, Homo sapien
tagacattcgacacgatgcccagct

SEQ ID NO: 921591 - DNA, 25 bp, Homo sapien
cgatgcccagctagtatctaaattt

SEQ ID NO: 921592 - DNA, 25 bp, Homo sapien
tgggaatatagacattcgacacgat

SEQ ID NO: 921593 - DNA, 25 bp, Homo sapien
aatatagacattcgacacgatgccc

SEQ ID NO: 921594 - DNA, 25 bp, Homo sapien
tgttaagggcttccatccattccaa

SEQ ID NO: 921595 - DNA, 25 bp, Homo sapien
tcactgcataatggcatctttgtta

SEQ ID NO: 921596 - DNA, 25 bp, Homo sapien
gttgcattcttggataaaaacacct

SEQ ID NO: 921597 - DNA, 25 bp, Homo sapien
tattaaaccatgctcccttgttgca

SEQ ID NO: 921598 - DNA, 25 bp, Homo sapien
gagctgatcacaaacaagtgatatc

SEQ ID NO: 921599 - DNA, 25 bp, Homo sapien
gagtgagctgatcacaaacaagtga

SEQ ID NO: 921600 - DNA, 25 bp, Homo sapien
atcacaaacaagtgatatcacacct

SEQ ID NO: 921601 - DNA, 25 bp, Homo sapien
ccaagagtgagctgatcacaaacaa

SEQ ID NO: 921602 - DNA, 25 bp, Homo sapien
aattctggggaattaatgccatcct

SEQ ID NO: 921603 - DNA, 25 bp, Homo sapien
ccttaattctgttacgcatggagca

SEQ ID NO: 921604 - DNA, 25 bp, Homo sapien
taatgccatcctctttccgcatttc

SEQ ID NO: 921605 - DNA, 25 bp, Homo sapien
gggacctaaagagcatgtgttcccc

SEQ ID NO: 921606 - DNA, 25 bp, Homo sapien
tgccacattgttatacctaggattt

SEQ ID NO: 921607 - DNA, 25 bp, Homo sapien
tgaattagacataatgtagtcttct

SEQ ID NO: 921608 - DNA, 25 bp, Homo sapien
cagggttctgccgttgggttcacat

SEQ ID NO: 921609 - DNA, 25 bp, Homo sapien
cctgttacaagatgtgtagatgagt

SEQ ID NO: 921610 - DNA, 25 bp, Homo sapien
acatcctcttgtaactgctgtacca

SEQ ID NO: 921611 - DNA, 25 bp, Homo sapien
ttcatgtccacatcctcttgtaact

SEQ ID NO: 921612 - DNA, 25 bp, Homo sapien
ttaagaagcatctttcatgtccaca

SEQ ID NO: 921613 - DNA, 25 bp, Homo sapien
aagcatctttcatgtccacatcctc

SEQ ID NO: 921614 - DNA, 25 bp, Homo sapien
gcaagcctcagataagatggatgtt

SEQ ID NO: 921615 - DNA, 25 bp, Homo sapien
ctttgcctgcaagcctcagataaga

SEQ ID NO: 921616 - DNA, 25 bp, Homo sapien
gcctgcaagcctcagataagatgga

SEQ ID NO: 921617 - DNA, 25 bp, Homo sapien
ttgcctgcaagcctcagataagatg

SEQ ID NO: 921618 - DNA, 25 bp, Homo sapien
tttctgtttgatcatctctttaact

SEQ ID NO: 921619 - DNA, 25 bp, Homo sapien
actcactttattgcatcaatagttg

SEQ ID NO: 921620 - DNA, 25 bp, Homo sapien
tgtttgatcatctctttaactcact

SEQ ID NO: 921621 - DNA, 25 bp, Homo sapien
agctgctttctgagtggaatgcttt

SEQ ID NO: 921622 - DNA, 25 bp, Homo sapien
ttatgacatttagatttacgaaatc

SEQ ID NO: 921623 - DNA, 25 bp, Homo sapien
ccacctaattttgcgaggattgcac

SEQ ID NO: 921624 - DNA, 25 bp, Homo sapien
acctaattttgcgaggattgcactt

SEQ ID NO: 921625 - DNA, 25 bp, Homo sapien
ctaattttgcgaggattgcacttct

SEQ ID NO: 921626 - DNA, 25 bp, Homo sapien
cagaaataacatatctcgacatgca

SEQ ID NO: 921627 - DNA, 25 bp, Homo sapien
aacagaaataacatatctcgacatg

SEQ ID NO: 921628 - DNA, 25 bp, Homo sapien
acagaaataacatatctcgacatgc

SEQ ID NO: 921629 - DNA, 25 bp, Homo sapien
agaaataacatatctcgacatgcat

SEQ ID NO: 921630 - DNA, 25 bp, Homo sapien
aacactggaagtgatgactgtggag

SEQ ID NO: 921631 - DNA, 25 bp, Homo sapien
gagatctgaagacatagcgtttaat

SEQ ID NO: 921632 - DNA, 25 bp, Homo sapien
tctctatacttaaacactggaagtg

SEQ ID NO: 921633 - DNA, 25 bp, Homo sapien
tagcgtttaatctcctgtggcccca

SEQ ID NO: 921634 - DNA, 25 bp, Homo sapien
tagtactgtctggggcaagatacct

SEQ ID NO: 921635 - DNA, 25 bp, Homo sapien
gtactgtctggggcaagatacctac

SEQ ID NO: 921636 - DNA, 25 bp, Homo sapien
agtactgtctggggcaagataccta

SEQ ID NO: 921637 - DNA, 25 bp, Homo sapien
ggcaatgtcgctagagtgtctagta

SEQ ID NO: 921638 - DNA, 25 bp, Homo sapien
catggcaatgtcgctagagtgtcta

SEQ ID NO: 921639 - DNA, 25 bp, Homo sapien
cattttctctcgtagaataacctga

SEQ ID NO: 921640 - DNA, 25 bp, Homo sapien
caatgtcgctagagtgtctagtaaa

SEQ ID NO: 921641 - DNA, 25 bp, Homo sapien
ctttgaaaagcttaccccttgagat

SEQ ID NO: 921642 - DNA, 25 bp, Homo sapien
taccccttgagatattaagattgtc

SEQ ID NO: 921643 - DNA, 25 bp, Homo sapien
gagatattaagattgtcttcactca

SEQ ID NO: 921644 - DNA, 25 bp, Homo sapien
aaagcttaccccttgagatattaag

SEQ ID NO: 921645 - DNA, 25 bp, Homo sapien
ggcaaggcctttagctggtcctcag

SEQ ID NO: 921646 - DNA, 25 bp, Homo sapien
cataagagaaatcatatggaagata

SEQ ID NO: 921647 - DNA, 25 bp, Homo sapien
ctaaacataagagaaatcatatgga

SEQ ID NO: 921648 - DNA, 25 bp, Homo sapien
caaggcctttagctggtcctcagct

SEQ ID NO: 921649 - DNA, 25 bp, Homo sapien
tagcagcaatactgactacaggtgt

SEQ ID NO: 921650 - DNA, 25 bp, Homo sapien
ggaaaataacttcggcctagttgca

SEQ ID NO: 921651 - DNA, 25 bp, Homo sapien
tctcatgattccacacggtggaggt

SEQ ID NO: 921652 - DNA, 25 bp, Homo sapien
tagttgcaccaagactagcagcaat

SEQ ID NO: 921653 - DNA, 25 bp, Homo sapien
gttcaaatcttgaggatgccccttg

SEQ ID NO: 921654 - DNA, 25 bp, Homo sapien
caggaaccataattaagctcctctg

SEQ ID NO: 921655 - DNA, 25 bp, Homo sapien
ttggagagcatttaccacactcagc

SEQ ID NO: 921656 - DNA, 25 bp, Homo sapien
taagctcctctggttgcatgttcaa

SEQ ID NO: 921657 - DNA, 25 bp, Homo sapien
tttgtcttctcttgtccgtatggcc

SEQ ID NO: 921658 - DNA, 25 bp, Homo sapien
aactccagcaaagggttcgtgtttg

SEQ ID NO: 921659 - DNA, 25 bp, Homo sapien
tccgtatggccttgacatgcctggc

SEQ ID NO: 921660 - DNA, 25 bp, Homo sapien
atgcctggccacatcatgaagggtc

SEQ ID NO: 921661 - DNA, 25 bp, Homo sapien
acagcaatggcaatgaaggcttcca

SEQ ID NO: 921662 - DNA, 25 bp, Homo sapien
ctgcggcagcttaactagtctcaaa

SEQ ID NO: 921663 - DNA, 25 bp, Homo sapien
ggcagcttaactagtctcaaaccta

SEQ ID NO: 921664 - DNA, 25 bp, Homo sapien
gtctcaaacctaaagactcagccac

SEQ ID NO: 921665 - DNA, 25 bp, Homo sapien
acttcataggtttcgctaccactta

SEQ ID NO: 921666 - DNA, 25 bp, Homo sapien
tcaacttcataggtttcgctaccac

SEQ ID NO: 921667 - DNA, 25 bp, Homo sapien
taggtttcgctaccacttaagctga

SEQ ID NO: 921668 - DNA, 25 bp, Homo sapien
tcataggtttcgctaccacttaagc

SEQ ID NO: 921669 - DNA, 25 bp, Homo sapien
gaattctttcaaactgcagactagg

SEQ ID NO: 921670 - DNA, 25 bp, Homo sapien
ctacagatgtgaattctcgaattct

SEQ ID NO: 921671 - DNA, 25 bp, Homo sapien
tctgggcctgctgcgctagttagcc

SEQ ID NO: 921672 - DNA, 25 bp, Homo sapien
cttttggagtcatagaaccagactc

SEQ ID NO: 921673 - DNA, 25 bp, Homo sapien
gccaaattatgactcttaattggtg

SEQ ID NO: 921674 - DNA, 25 bp, Homo sapien
aattatgactcttaattggtgtttc

SEQ ID NO: 921675 - DNA, 25 bp, Homo sapien
cagccaaattatgactcttaattgg

SEQ ID NO: 921676 - DNA, 25 bp, Homo sapien
ttatgactcttaattggtgtttctt

SEQ ID NO: 921677 - DNA, 25 bp, Homo sapien
tgcagcagccacttgggctttctct

SEQ ID NO: 921678 - DNA, 25 bp, Homo sapien
agtcctttaaaccgatcttcagcac

SEQ ID NO: 921679 - DNA, 25 bp, Homo sapien
ccgatcttcagcacgatggcagagg

SEQ ID NO: 921680 - DNA, 25 bp, Homo sapien
tttgttgcagcagccacttgggctt

SEQ ID NO: 921681 - DNA, 25 bp, Homo sapien
tcatcatttgatcttttcatcattt

SEQ ID NO: 921682 - DNA, 25 bp, Homo sapien
ttcattaatcatttcacttcatttc

SEQ ID NO: 921683 - DNA, 25 bp, Homo sapien
tctcatcatttcataatttcatgat

SEQ ID NO: 921684 - DNA, 25 bp, Homo sapien
tttcatctcatcattgcatttcctc

SEQ ID NO: 921685 - DNA, 25 bp, Homo sapien
tcatctcatcaattcatagcatctt

SEQ ID NO: 921686 - DNA, 25 bp, Homo sapien
ttcacttcgtctcatcatctcatga

SEQ ID NO: 921687 - DNA, 25 bp, Homo sapien
catttcacttcgtctcatcatctca

SEQ ID NO: 921688 - DNA, 25 bp, Homo sapien
catctcatcaattcatagcatcttt

SEQ ID NO: 921689 - DNA, 25 bp, Homo sapien
agctgtccgcactgctgcagccccg

SEQ ID NO: 921690 - DNA, 25 bp, Homo sapien
ccgcgcaggctgccaatggagatgc

SEQ ID NO: 921691 - DNA, 25 bp, Homo sapien
cgcaggctgccaatggagatgccga

SEQ ID NO: 921692 - DNA, 25 bp, Homo sapien
atgccgatgagcttctggagctgtc

SEQ ID NO: 921693 - DNA, 25 bp, Homo sapien
cctgcgccaccctcagcggccgctg

SEQ ID NO: 921694 - DNA, 25 bp, Homo sapien
gggcccctgcgccaccctcagcggc

SEQ ID NO: 921695 - DNA, 25 bp, Homo sapien
gcccctgcgccaccctcagcggccg

SEQ ID NO: 921696 - DNA, 25 bp, Homo sapien
gccggggcccctgcgccaccctcag

SEQ ID NO: 921697 - DNA, 25 bp, Homo sapien
ggaatagctcagtagaataacacta

SEQ ID NO: 921698 - DNA, 25 bp, Homo sapien
gccttactctatacataataaactc

SEQ ID NO: 921699 - DNA, 25 bp, Homo sapien
caactttatggataatgggttttca

SEQ ID NO: 921700 - DNA, 25 bp, Homo sapien
cagaagggacaggatgaaattgtcc

SEQ ID NO: 921701 - DNA, 25 bp, Homo sapien
caaaggtacagtcaactacacaaaa

SEQ ID NO: 921702 - DNA, 25 bp, Homo sapien
aaactacaattcaaagagaaagcct

SEQ ID NO: 921703 - DNA, 25 bp, Homo sapien
tctctccaataagcatgccattaac

SEQ ID NO: 921704 - DNA, 25 bp, Homo sapien
cacaaaaaaagcttagtctcattaa

SEQ ID NO: 921705 - DNA, 25 bp, Homo sapien
gattgggagaccgctgacagctgca

SEQ ID NO: 921706 - DNA, 25 bp, Homo sapien
ttgggagaccgctgacagctgcaga

SEQ ID NO: 921707 - DNA, 25 bp, Homo sapien
attgggagaccgctgacagctgcag

SEQ ID NO: 921708 - DNA, 25 bp, Homo sapien
tccacaagctcctgactcaatcaag

SEQ ID NO: 921709 - DNA, 25 bp, Homo sapien
cacgctcatgtgcagtacgtttcct

SEQ ID NO: 921710 - DNA, 25 bp, Homo sapien
tgtaaagttccttggcacgctcatg

SEQ ID NO: 921711 - DNA, 25 bp, Homo sapien
tcaatcaagttcacagccccggtat

SEQ ID NO: 921712 - DNA, 25 bp, Homo sapien
acaattaccaattgtaggaggttca

SEQ ID NO: 921713 - DNA, 25 bp, Homo sapien
aattaccaattgtaggaggttcatg

SEQ ID NO: 921714 - DNA, 25 bp, Homo sapien
ttaccaattgtaggaggttcatgaa

SEQ ID NO: 921715 - DNA, 25 bp, Homo sapien
taccaattgtaggaggttcatgaag

SEQ ID NO: 921716 - DNA, 25 bp, Homo sapien
cttgtcaagggtctgctccaagaaa

SEQ ID NO: 921717 - DNA, 25 bp, Homo sapien
tcttgtcaagggtctgctccaagaa

SEQ ID NO: 921718 - DNA, 25 bp, Homo sapien
ttgtcaagggtctgctccaagaaat

SEQ ID NO: 921719 - DNA, 25 bp, Homo sapien
ttgagcctagcccaaagcaacagcc

SEQ ID NO: 921720 - DNA, 25 bp, Homo sapien
cagtagccccatctccctacgtagc

SEQ ID NO: 921721 - DNA, 25 bp, Homo sapien
cacaaaagcatttgagcctagccca

SEQ ID NO: 921722 - DNA, 25 bp, Homo sapien
atctccctacgtagccacagagctg

SEQ ID NO: 921723 - DNA, 25 bp, Homo sapien
ccaaacgcatcatcaactaagcgta

SEQ ID NO: 921724 - DNA, 25 bp, Homo sapien
tcaactaagcgtatttcttcattag

SEQ ID NO: 921725 - DNA, 25 bp, Homo sapien
catcatcaactaagcgtatttcttc

SEQ ID NO: 921726 - DNA, 25 bp, Homo sapien
cgcatcatcaactaagcgtatttct

SEQ ID NO: 921727 - DNA, 25 bp, Homo sapien
tagtcatcagagagtaatttacagg

SEQ ID NO: 921728 - DNA, 25 bp, Homo sapien
agtcatcagagagtaatttacaggc

SEQ ID NO: 921729 - DNA, 25 bp, Homo sapien
tgcagcactgcgcacttgttcatag

SEQ ID NO: 921730 - DNA, 25 bp, Homo sapien
ctgcgcacttgttcatagtcatcag

SEQ ID NO: 921731 - DNA, 25 bp, Homo sapien
atcacagactgacggcataaaaaca

SEQ ID NO: 921732 - DNA, 25 bp, Homo sapien
gaaggagaatcacagactgacggca

SEQ ID NO: 921733 - DNA, 25 bp, Homo sapien
ggagaatcacagactgacggcataa

SEQ ID NO: 921734 - DNA, 25 bp, Homo sapien
tggaaggagaatcacagactgacgg

SEQ ID NO: 921735 - DNA, 25 bp, Homo sapien
tgtgaaggatacaaaacgtcagcag

SEQ ID NO: 921736 - DNA, 25 bp, Homo sapien
gaatgtgaaggatacaaaacgtcag

SEQ ID NO: 921737 - DNA, 25 bp, Homo sapien
aatgtgaaggatacaaaacgtcagc

SEQ ID NO: 921738 - DNA, 25 bp, Homo sapien
tggaatgtgaaggatacaaaacgtc

SEQ ID NO: 921739 - DNA, 25 bp, Homo sapien
tcacttcatctcatttcataatttc

SEQ ID NO: 921740 - DNA, 25 bp, Homo sapien
tctcatgatttcatttcatctcatt

SEQ ID NO: 921741 - DNA, 25 bp, Homo sapien
catttcacttcatctcatttcataa

SEQ ID NO: 921742 - DNA, 25 bp, Homo sapien
cataatttcatctcatgatttcatt

SEQ ID NO: 921743 - DNA, 25 bp, Homo sapien
catttcatttcatcattccatttca

SEQ ID NO: 921744 - DNA, 25 bp, Homo sapien
tcatcatttcatttcatcattccat

SEQ ID NO: 921745 - DNA, 25 bp, Homo sapien
catcatttcatttcatcattccatt

SEQ ID NO: 921746 - DNA, 25 bp, Homo sapien
attccatttcatcatttcatcattt

SEQ ID NO: 921747 - DNA, 25 bp, Homo sapien
atcttttcatttcgtcattcatttc

SEQ ID NO: 921748 - DNA, 25 bp, Homo sapien
aggcaggctgacttcggcttcatta

SEQ ID NO: 921749 - DNA, 25 bp, Homo sapien
gacagtttgcttggttaaaacacac

SEQ ID NO: 921750 - DNA, 25 bp, Homo sapien
tcaagtgatacatccgtctccgcct

SEQ ID NO: 921751 - DNA, 25 bp, Homo sapien
tcttacaactatcctgaggttagaa

SEQ ID NO: 921752 - DNA, 25 bp, Homo sapien
aacagctgtcctgagagcacgtctc

SEQ ID NO: 921753 - DNA, 25 bp, Homo sapien
acgtctctacatctctacctgcatt

SEQ ID NO: 921754 - DNA, 25 bp, Homo sapien
ctgagagcacgtctctacatctcta

SEQ ID NO: 921755 - DNA, 25 bp, Homo sapien
ctgtcctgagagcacgtctctacat

SEQ ID NO: 921756 - DNA, 25 bp, Homo sapien
gggcccctgcgccaccctcagcggc

SEQ ID NO: 921757 - DNA, 25 bp, Homo sapien
gctgtccgcactgctgcagccccgg

SEQ ID NO: 921758 - DNA, 25 bp, Homo sapien
agctgtccgcactgctgcagccccg

SEQ ID NO: 921759 - DNA, 25 bp, Homo sapien
cctgcgccaccctcagcggccgctg

SEQ ID NO: 921760 - DNA, 25 bp, Homo sapien
cgggagagctggaccgggagcgccc

SEQ ID NO: 921761 - DNA, 25 bp, Homo sapien
atgcaggccacagcggccgaggcag

SEQ ID NO: 921762 - DNA, 25 bp, Homo sapien
gctcgggcgcctaggcaaggaaccc

SEQ ID NO: 921763 - DNA, 25 bp, Homo sapien
agctggcagcggagtctgccgctcc

SEQ ID NO: 921764 - DNA, 25 bp, Homo sapien
gaacagggcgaagggagttatatcc

SEQ ID NO: 921765 - DNA, 25 bp, Homo sapien
cgcacagggccgaagtaggacctga

SEQ ID NO: 921766 - DNA, 25 bp, Homo sapien
taggacctgaagaagaaataccctg

SEQ ID NO: 921767 - DNA, 25 bp, Homo sapien
gagaatataatactacccctaggga

SEQ ID NO: 921768 - DNA, 25 bp, Homo sapien
ttctatgtgacaggcgcagtggcca

SEQ ID NO: 921769 - DNA, 25 bp, Homo sapien
tatgcacatattgcgtcatagccca

SEQ ID NO: 921770 - DNA, 25 bp, Homo sapien
gactgcatcacctaccttgaagtat

SEQ ID NO: 921771 - DNA, 25 bp, Homo sapien
ggattatccagtgccttctatgtga

SEQ ID NO: 921772 - DNA, 25 bp, Homo sapien
cataaaagtggctccgacaaatgac

SEQ ID NO: 921773 - DNA, 25 bp, Homo sapien
tgtgccctcagcctgccagtacttt

SEQ ID NO: 921774 - DNA, 25 bp, Homo sapien
caaatgacactcctcagggtgctga

SEQ ID NO: 921775 - DNA, 25 bp, Homo sapien
ttttcacttccaaagctatcagcct

SEQ ID NO: 921776 - DNA, 25 bp, Homo sapien
ccgcagcgggcgaaaagccgcggca

SEQ ID NO: 921777 - DNA, 25 bp, Homo sapien
cgcagcgggcgaaaagccgcggcag

SEQ ID NO: 921778 - DNA, 25 bp, Homo sapien
gggcagaaagccgtggcagcggcgg

SEQ ID NO: 921779 - DNA, 25 bp, Homo sapien
gcagaaagccgtggcagcggcgggc

SEQ ID NO: 921780 - DNA, 25 bp, Homo sapien
aattatgactttaccatctagagtg

SEQ ID NO: 921781 - DNA, 25 bp, Homo sapien
tacctcctttttgatgttactggga

SEQ ID NO: 921782 - DNA, 25 bp, Homo sapien
taaagttacaaagccaacaatacat

SEQ ID NO: 921783 - DNA, 25 bp, Homo sapien
tctacatgtcaaatactcagcaata

SEQ ID NO: 921784 - DNA, 25 bp, Homo sapien
tagaggcccttgtttggaacaaagc

SEQ ID NO: 921785 - DNA, 25 bp, Homo sapien
catgttagtatgtaaagtgacccct

SEQ ID NO: 921786 - DNA, 25 bp, Homo sapien
cacttaggcacctttgtgcactgga

SEQ ID NO: 921787 - DNA, 25 bp, Homo sapien
gctgtgtttttacaatagaggccct

SEQ ID NO: 921788 - DNA, 25 bp, Homo sapien
caggaggatatattatccttacaaa

SEQ ID NO: 921789 - DNA, 25 bp, Homo sapien
acctgtttgccgatgagcaagactc

SEQ ID NO: 921790 - DNA, 25 bp, Homo sapien
cacctgtttgccgatgagcaagact

SEQ ID NO: 921791 - DNA, 25 bp, Homo sapien
ctttgggatgtacaggaggatatat

SEQ ID NO: 921792 - DNA, 25 bp, Homo sapien
gaatttggagtgagactttctcccg

SEQ ID NO: 921793 - DNA, 25 bp, Homo sapien
ggaacaccttaaggattcatggcat

SEQ ID NO: 921794 - DNA, 25 bp, Homo sapien
tatatgacatccaattaccgacaga

SEQ ID NO: 921795 - DNA, 25 bp, Homo sapien
taatgccgaaggaacattggcctag

SEQ ID NO: 921796 - DNA, 25 bp, Homo sapien
ccgctgtggcctgcatagggcggca

SEQ ID NO: 921797 - DNA, 25 bp, Homo sapien
ccctcctgcactcgctgatgcggca

SEQ ID NO: 921798 - DNA, 25 bp, Homo sapien
ctcctgcactcgctgatgcggcagc

SEQ ID NO: 921799 - DNA, 25 bp, Homo sapien
cctcctgcactcgctgatgcggcag

SEQ ID NO: 921800 - DNA, 25 bp, Homo sapien
tccctcctgcactcgctgatgcggc

SEQ ID NO: 921801 - DNA, 25 bp, Homo sapien
aatttccatctggtccggccctctc

SEQ ID NO: 921802 - DNA, 25 bp, Homo sapien
tttccatctggtccggccctctcat

SEQ ID NO: 921803 - DNA, 25 bp, Homo sapien
ccgaatttccatctggtccggccct

SEQ ID NO: 921804 - DNA, 25 bp, Homo sapien
gaatttccatctggtccggccctct

SEQ ID NO: 921805 - DNA, 25 bp, Homo sapien
aaaggcctgagggagaactgacttg

SEQ ID NO: 921806 - DNA, 25 bp, Homo sapien
accaaaggcctgagggagaactgac

SEQ ID NO: 921807 - DNA, 25 bp, Homo sapien
ccaaaggcctgagggagaactgact

SEQ ID NO: 921808 - DNA, 25 bp, Homo sapien
aaaccaaaggcctgagggagaactg

SEQ ID NO: 921809 - DNA, 25 bp, Homo sapien
gagtcccacacccttggttaagtca

SEQ ID NO: 921810 - DNA, 25 bp, Homo sapien
cattataccaccttgagtctggcct

SEQ ID NO: 921811 - DNA, 25 bp, Homo sapien
ttaaaggagaactgagttgggagtc

SEQ ID NO: 921812 - DNA, 25 bp, Homo sapien
ggagtcagacctggagtcccacacc

SEQ ID NO: 921813 - DNA, 25 bp, Homo sapien
cttttgtggggccttgtgtttgtct

SEQ ID NO: 921814 - DNA, 25 bp, Homo sapien
tcttaaaagttcatgcacatggcca

SEQ ID NO: 921815 - DNA, 25 bp, Homo sapien
tggacacggctgatctagtgtcttg

SEQ ID NO: 921816 - DNA, 25 bp, Homo sapien
gttggacacggctgatctagtgtct

SEQ ID NO: 921817 - DNA, 25 bp, Homo sapien
ggttggacacggctgatctagtgtc

SEQ ID NO: 921818 - DNA, 25 bp, Homo sapien
gacacggctgatctagtgtcttgtc

SEQ ID NO: 921819 - DNA, 25 bp, Homo sapien
gatgaaatgatgaagtgaaacaatg

SEQ ID NO: 921820 - DNA, 25 bp, Homo sapien
aaatgaaatgacgagattaaaaggt

SEQ ID NO: 921821 - DNA, 25 bp, Homo sapien
tgatgaaatgatgaagtgaaacaat

SEQ ID NO: 921822 - DNA, 25 bp, Homo sapien
tactggtaggaaagagcaccaacca

SEQ ID NO: 921823 - DNA, 25 bp, Homo sapien
taggaaagagcaccaaccacaacca

SEQ ID NO: 921824 - DNA, 25 bp, Homo sapien
tggtaggaaagagcaccaaccacaa

SEQ ID NO: 921825 - DNA, 25 bp, Homo sapien
ctggtactggtaggaaagagcacca

SEQ ID NO: 921826 - DNA, 25 bp, Homo sapien
ttttaggatgacagacataagccac

SEQ ID NO: 921827 - DNA, 25 bp, Homo sapien
gcaaaattcttctaagttaactgtg

SEQ ID NO: 921828 - DNA, 25 bp, Homo sapien
gctgcaaaattcttctaagttaact

SEQ ID NO: 921829 - DNA, 25 bp, Homo sapien
agagttttaggatgacagacataag

SEQ ID NO: 921830 - DNA, 25 bp, Homo sapien
tcatcttctgcatcaagcagctctg

SEQ ID NO: 921831 - DNA, 25 bp, Homo sapien
cagaatctaactgtcccccctgtat

SEQ ID NO: 921832 - DNA, 25 bp, Homo sapien
gcagctctgcttaacaattcagaat

SEQ ID NO: 921833 - DNA, 25 bp, Homo sapien
gtgcccggcctaggctcattctttc

SEQ ID NO: 921834 - DNA, 25 bp, Homo sapien
cagactaggtggaatatccaggaat

SEQ ID NO: 921835 - DNA, 25 bp, Homo sapien
tcacagagttgttgggaaagctaaa

SEQ ID NO: 921836 - DNA, 25 bp, Homo sapien
tacagaatgttacatggctcacaga

SEQ ID NO: 921837 - DNA, 25 bp, Homo sapien
gagccacacaatgagtgggccacca

SEQ ID NO: 921838 - DNA, 25 bp, Homo sapien
tgatagtcttgctaggcagtggccg

SEQ ID NO: 921839 - DNA, 25 bp, Homo sapien
ccaatttggtgatcagctgcagtgc

SEQ ID NO: 921840 - DNA, 25 bp, Homo sapien
tgaatgaggttgttggccctgagcc

SEQ ID NO: 921841 - DNA, 25 bp, Homo sapien
cagtgatagcatcagccaaaagggc

SEQ ID NO: 921842 - DNA, 25 bp, Homo sapien
tggaaactgtgctgggtcaccactg

SEQ ID NO: 921843 - DNA, 25 bp, Homo sapien
aaatactgtgcccaacaacctcaag

SEQ ID NO: 921844 - DNA, 25 bp, Homo sapien
aaaaggatatctcatttatcgagga

SEQ ID NO: 921845 - DNA, 25 bp, Homo sapien
taattgtgtatacccagctttttaa

SEQ ID NO: 921846 - DNA, 25 bp, Homo sapien
ccttaatctggtcaagctgatacct

SEQ ID NO: 921847 - DNA, 25 bp, Homo sapien
gggcagatagtctccacctagtaca

SEQ ID NO: 921848 - DNA, 25 bp, Homo sapien
tccccagaatttggatgtcaggatt

SEQ ID NO: 921849 - DNA, 25 bp, Homo sapien
gcaactatcctgcatgcaacccaaa

SEQ ID NO: 921850 - DNA, 25 bp, Homo sapien
catactaggtcagaaataacatcct

SEQ ID NO: 921851 - DNA, 25 bp, Homo sapien
agatattcatatgtggccgggtgcg

SEQ ID NO: 921852 - DNA, 25 bp, Homo sapien
tagctgtaagactttcagataactg

SEQ ID NO: 921853 - DNA, 25 bp, Homo sapien
taagagctcagtgtaattatagctg

SEQ ID NO: 921854 - DNA, 25 bp, Homo sapien
ctccaggggtttgaaagttatgcac

SEQ ID NO: 921855 - DNA, 25 bp, Homo sapien
aacatactggttaagagggctgtgg

SEQ ID NO: 921856 - DNA, 25 bp, Homo sapien
tttgttcccataagttaaactgaga

SEQ ID NO: 921857 - DNA, 25 bp, Homo sapien
gcaaactgagtaacccttggacaag

SEQ ID NO: 921858 - DNA, 25 bp, Homo sapien
gattccgctgttctcaactgttgag

SEQ ID NO: 921859 - DNA, 25 bp, Homo sapien
ttgttgattccgctgttctcaactg

SEQ ID NO: 921860 - DNA, 25 bp, Homo sapien
gaaaagtaggagatcttagtattag

SEQ ID NO: 921861 - DNA, 25 bp, Homo sapien
gatcttagtattagaggcctacttc

SEQ ID NO: 921862 - DNA, 25 bp, Homo sapien
tgtctgtcggcaaaatagtagcaaa

SEQ ID NO: 921863 - DNA, 25 bp, Homo sapien
tctcaagtactgtgaggccaagtaa

SEQ ID NO: 921864 - DNA, 25 bp, Homo sapien
cattagtaggctataccgctatgga

SEQ ID NO: 921865 - DNA, 25 bp, Homo sapien
ggtatgtttcttggagcccttacag

SEQ ID NO: 921866 - DNA, 25 bp, Homo sapien
taggagtcaagggagtgaccagact

SEQ ID NO: 921867 - DNA, 25 bp, Homo sapien
taatgctgtctagcaaactgtacca

SEQ ID NO: 921868 - DNA, 25 bp, Homo sapien
ttgcaacgctaccttcaccagcagg

SEQ ID NO: 921869 - DNA, 25 bp, Homo sapien
accagacttctggtatgctggcaga

SEQ ID NO: 921870 - DNA, 25 bp, Homo sapien
aattcagacagtgcagttaagcccc

SEQ ID NO: 921871 - DNA, 25 bp, Homo sapien
catgcacaggatgggtcatctccta

SEQ ID NO: 921872 - DNA, 25 bp, Homo sapien
tatggtgacaataaaggaacgggcc

SEQ ID NO: 921873 - DNA, 25 bp, Homo sapien
gattctacaactgacaaataggagg

SEQ ID NO: 921874 - DNA, 25 bp, Homo sapien
aaactcactgccccatcgtgggaca

SEQ ID NO: 921875 - DNA, 25 bp, Homo sapien
cgtgggacaggtccagtgctttgaa

SEQ ID NO: 921876 - DNA, 25 bp, Homo sapien
gtagagggacgggaaactcactgcc

SEQ ID NO: 921877 - DNA, 25 bp, Homo sapien
aaagtgccatccagtccagtcacca

SEQ ID NO: 921878 - DNA, 25 bp, Homo sapien
ggatatttgccctttgttggatgag

SEQ ID NO: 921879 - DNA, 25 bp, Homo sapien
aacccatgagcgtggaatgttgttc

SEQ ID NO: 921880 - DNA, 25 bp, Homo sapien
cagtggtttgcagttctccttaaca

SEQ ID NO: 921881 - DNA, 25 bp, Homo sapien
tccaacccatgagcgtggaatgttg

SEQ ID NO: 921882 - DNA, 25 bp, Homo sapien
tacacacgttcctgggagaagtgac

SEQ ID NO: 921883 - DNA, 25 bp, Homo sapien
ttaaatattctgtcattggagattg

SEQ ID NO: 921884 - DNA, 25 bp, Homo sapien
tgtcattggagattggtacatttct

SEQ ID NO: 921885 - DNA, 25 bp, Homo sapien
acatacacacgttcctgggagaagt

SEQ ID NO: 921886 - DNA, 25 bp, Homo sapien
tcggagaatacattcatgatctctc

SEQ ID NO: 921887 - DNA, 25 bp, Homo sapien
ataaacatatcggagaatacattca

SEQ ID NO: 921888 - DNA, 25 bp, Homo sapien
tgaaaataaacatatcggagaatac

SEQ ID NO: 921889 - DNA, 25 bp, Homo sapien
atacattcatgatctctccacaggt

SEQ ID NO: 921890 - DNA, 25 bp, Homo sapien
acagttgcctggagcgccctctctc

SEQ ID NO: 921891 - DNA, 25 bp, Homo sapien
tacggttgctttcaggcgatggcac

SEQ ID NO: 921892 - DNA, 25 bp, Homo sapien
ggacttctacttgctttagccatat

SEQ ID NO: 921893 - DNA, 25 bp, Homo sapien
ctccaggtgtgtctggacttctact

SEQ ID NO: 921894 - DNA, 25 bp, Homo sapien
taccccacgtactgtagaatctaag

SEQ ID NO: 921895 - DNA, 25 bp, Homo sapien
tgcattgcctaatatgactggaccc

SEQ ID NO: 921896 - DNA, 25 bp, Homo sapien
gacagagcctctgtgctataggcct

SEQ ID NO: 921897 - DNA, 25 bp, Homo sapien
catggttcctgtggtcgtgtccaag

SEQ ID NO: 921898 - DNA, 25 bp, Homo sapien
gttcctggctgactgcgttctccat

SEQ ID NO: 921899 - DNA, 25 bp, Homo sapien
ctccagtgagcttttccaacatgcc

SEQ ID NO: 921900 - DNA, 25 bp, Homo sapien
tactccgcatctctctgggcactta

SEQ ID NO: 921901 - DNA, 25 bp, Homo sapien
gtggtcattgccttccttaatcatg

SEQ ID NO: 921902 - DNA, 25 bp, Homo sapien
gccttccttaatcatggttcataat

SEQ ID NO: 921903 - DNA, 25 bp, Homo sapien
tctgcaactggacagccaagcatca

SEQ ID NO: 921904 - DNA, 25 bp, Homo sapien
tgggaaagcacacactcagctgcac

SEQ ID NO: 921905 - DNA, 25 bp, Homo sapien
catgaacaggctggatctcttgcat

SEQ ID NO: 921906 - DNA, 25 bp, Homo sapien
tcctgacattgttcccctgggcaag

SEQ ID NO: 921907 - DNA, 25 bp, Homo sapien
gggaggctgagtatcacgaggtcag

SEQ ID NO: 921908 - DNA, 25 bp, Homo sapien
aaaggcacattgtggctgcagcttc

SEQ ID NO: 921909 - DNA, 25 bp, Homo sapien
ggcacattgtggctgcagcttccag

SEQ ID NO: 921910 - DNA, 25 bp, Homo sapien
taaaagccaagaggtcaagccgggc

SEQ ID NO: 921911 - DNA, 25 bp, Homo sapien
ctttctccgtgctagatttctagga

SEQ ID NO: 921912 - DNA, 25 bp, Homo sapien
ctagatttctaggaggccacactct

SEQ ID NO: 921913 - DNA, 25 bp, Homo sapien
tctccgtgctagatttctaggaggc

SEQ ID NO: 921914 - DNA, 25 bp, Homo sapien
cgtgctagatttctaggaggccaca

SEQ ID NO: 921915 - DNA, 25 bp, Homo sapien
aaagtgcctccgtaaactggagaca

SEQ ID NO: 921916 - DNA, 25 bp, Homo sapien
ttctgatcagttctgaaagtgcctc

SEQ ID NO: 921917 - DNA, 25 bp, Homo sapien
tctgaaagtgcctccgtaaactgga

SEQ ID NO: 921918 - DNA, 25 bp, Homo sapien
tcagttctgaaagtgcctccgtaaa

SEQ ID NO: 921919 - DNA, 25 bp, Homo sapien
aagttacacgcgaagaggcagatgc

SEQ ID NO: 921920 - DNA, 25 bp, Homo sapien
gaactgcagcaatatttgaccgaat

SEQ ID NO: 921921 - DNA, 25 bp, Homo sapien
gcagatgcagatcctaggaaacaca

SEQ ID NO: 921922 - DNA, 25 bp, Homo sapien
ggcctacagctatctttataatgga

SEQ ID NO: 921923 - DNA, 25 bp, Homo sapien
agagagagagacagccagtcgcgcc

SEQ ID NO: 921924 - DNA, 25 bp, Homo sapien
gctagacatgctggctcacgactgt

SEQ ID NO: 921925 - DNA, 25 bp, Homo sapien
gagacagccagtcgcgcctgtaatc

SEQ ID NO: 921926 - DNA, 25 bp, Homo sapien
aataccaaaaaaggctagacatgct

SEQ ID NO: 921927 - DNA, 25 bp, Homo sapien
ctcattgcaacctccacctcctggg

SEQ ID NO: 921928 - DNA, 25 bp, Homo sapien
ctacaggcgcccgccgccatgtcca

SEQ ID NO: 921929 - DNA, 25 bp, Homo sapien
ttgcaacctccacctcctgggttca

SEQ ID NO: 921930 - DNA, 25 bp, Homo sapien
cattgcaacctccacctcctgggtt

SEQ ID NO: 921931 - DNA, 25 bp, Homo sapien
tcagcttgggcaatggagtgggacc

SEQ ID NO: 921932 - DNA, 25 bp, Homo sapien
ttcagcttgggcaatggagtgggac

SEQ ID NO: 921933 - DNA, 25 bp, Homo sapien
cttcagcttgggcaatggagtggga

SEQ ID NO: 921934 - DNA, 25 bp, Homo sapien
gaataaagtatgagccagtgatttt

SEQ ID NO: 921935 - DNA, 25 bp, Homo sapien
aatgaataaagtatgagccagtgat

SEQ ID NO: 921936 - DNA, 25 bp, Homo sapien
aaagtatgagccagtgattttttgt

SEQ ID NO: 921937 - DNA, 25 bp, Homo sapien
taaagtatgagccagtgattttttg

SEQ ID NO: 921938 - DNA, 25 bp, Homo sapien
tcagactagcctgtgtgtccccacg

SEQ ID NO: 921939 - DNA, 25 bp, Homo sapien
atgaaagtcgtgaaagcagcaaggg

SEQ ID NO: 921940 - DNA, 25 bp, Homo sapien
gcacagggtccagaaagctccaatg

SEQ ID NO: 921941 - DNA, 25 bp, Homo sapien
ctacagcaccgtcaagcacagggtc

SEQ ID NO: 921942 - DNA, 25 bp, Homo sapien
aggagcaaaccgcgcgagtaggggc

SEQ ID NO: 921943 - DNA, 25 bp, Homo sapien
gagcaaaccgcgcgagtaggggcag

SEQ ID NO: 921944 - DNA, 25 bp, Homo sapien
gcaaaccgcgcgagtaggggcagga

SEQ ID NO: 921945 - DNA, 25 bp, Homo sapien
ctgaggagcaaaccgcgcgagtagg

SEQ ID NO: 921946 - DNA, 25 bp, Homo sapien
tgcatcctgagatcccgggtccgca

SEQ ID NO: 921947 - DNA, 25 bp, Homo sapien
gcgcggggcataagccctgcctgca

SEQ ID NO: 921948 - DNA, 25 bp, Homo sapien
ggtccgcaaacttgggccccactga

SEQ ID NO: 921949 - DNA, 25 bp, Homo sapien
actgagcagcaacgccagaacccag

SEQ ID NO: 921950 - DNA, 25 bp, Homo sapien
tgggcgcgccgacttttccggaaga

SEQ ID NO: 921951 - DNA, 25 bp, Homo sapien
aggaacagggtactccagtgcgcca

SEQ ID NO: 921952 - DNA, 25 bp, Homo sapien
tccatggagaaaaaagcggctctag

SEQ ID NO: 921953 - DNA, 25 bp, Homo sapien
ggcccaaagggaccataaagatgta

SEQ ID NO: 921954 - DNA, 25 bp, Homo sapien
taaagtcttagggatggagaatatg

SEQ ID NO: 921955 - DNA, 25 bp, Homo sapien
tgtctcatctccatctccaactgga

SEQ ID NO: 921956 - DNA, 25 bp, Homo sapien
gcaatttctctgttatgtctcatct

SEQ ID NO: 921957 - DNA, 25 bp, Homo sapien
ttattgaagggagtatgcgttttac

SEQ ID NO: 921958 - DNA, 25 bp, Homo sapien
cctaatcattggagagctgctgaaa

SEQ ID NO: 921959 - DNA, 25 bp, Homo sapien
tagagccctacacttgcctaaagag

SEQ ID NO: 921960 - DNA, 25 bp, Homo sapien
aaggtagcaacagcccaggatgata

SEQ ID NO: 921961 - DNA, 25 bp, Homo sapien
tataactggtgatggtacgacttcc

SEQ ID NO: 921962 - DNA, 25 bp, Homo sapien
gagtatccctccaagaattgtctga

SEQ ID NO: 921963 - DNA, 25 bp, Homo sapien
gatgtgttaatactagcggaggcca

SEQ ID NO: 921964 - DNA, 25 bp, Homo sapien
gtgagcttggacaggttatggaacc

SEQ ID NO: 921965 - DNA, 25 bp, Homo sapien
gacatgattcggagtggtttgcaca

SEQ ID NO: 921966 - DNA, 25 bp, Homo sapien
ccatgcctggccattaaagagctct

SEQ ID NO: 921967 - DNA, 25 bp, Homo sapien
caccatgcccgttgaattgtttcgt

SEQ ID NO: 921968 - DNA, 25 bp, Homo sapien
tgcctggccattaaagagctcttgt

SEQ ID NO: 921969 - DNA, 25 bp, Homo sapien
gatcgtggttcattgcaacttctac

SEQ ID NO: 921970 - DNA, 25 bp, Homo sapien
ctaatactgatctgttgaaagagct

SEQ ID NO: 921971 - DNA, 25 bp, Homo sapien
tctcctatttgatatgttagtcgct

SEQ ID NO: 921972 - DNA, 25 bp, Homo sapien
cagtgaagccattctggttggacca

SEQ ID NO: 921973 - DNA, 25 bp, Homo sapien
tgtattgtggctttcacatgcagta

SEQ ID NO: 921974 - DNA, 25 bp, Homo sapien
tcccaaggtgtgtatgccttaaaca

SEQ ID NO: 921975 - DNA, 25 bp, Homo sapien
gagaacctgtagcttaatatttgca

SEQ ID NO: 921976 - DNA, 25 bp, Homo sapien
ggaggcctgaatagctgacgtttca

SEQ ID NO: 921977 - DNA, 25 bp, Homo sapien
gatgtgttgctcgttattcccaagg

SEQ ID NO: 921978 - DNA, 25 bp, Homo sapien
tagtacatgtgagttgaagccagga

SEQ ID NO: 921979 - DNA, 25 bp, Homo sapien
tgacaccagtactattagggaagtc

SEQ ID NO: 921980 - DNA, 25 bp, Homo sapien
ggtgtggacctgaacacaggtaaga

SEQ ID NO: 921981 - DNA, 25 bp, Homo sapien
tggtggtagatggttcagattaatg

SEQ ID NO: 921982 - DNA, 25 bp, Homo sapien
gagacagataacaggtacatccatg

SEQ ID NO: 921983 - DNA, 25 bp, Homo sapien
catccatgcagtatgtgcaagacct

SEQ ID NO: 921984 - DNA, 25 bp, Homo sapien
gatagcaaataatgccagaagaggg

SEQ ID NO: 921985 - DNA, 25 bp, Homo sapien
tgacagccctgatcttaggcccctg

SEQ ID NO: 921986 - DNA, 25 bp, Homo sapien
ccttttaggtgagcccgtggtagca

SEQ ID NO: 921987 - DNA, 25 bp, Homo sapien
ttgccttttaggtgagcccgtggta

SEQ ID NO: 921988 - DNA, 25 bp, Homo sapien
aagcaggcattatgggataacgatt

SEQ ID NO: 921989 - DNA, 25 bp, Homo sapien
acgattgtgtaaagaaacagcttct

SEQ ID NO: 921990 - DNA, 25 bp, Homo sapien
cctaatcatctgagctatctaattt

SEQ ID NO: 921991 - DNA, 25 bp, Homo sapien
aatttaattggatgttaacgtgtgc

SEQ ID NO: 921992 - DNA, 25 bp, Homo sapien
gaagttgagtcgaattagggctcct

SEQ ID NO: 921993 - DNA, 25 bp, Homo sapien
taacgtgtgcagcttagttggaagt

SEQ ID NO: 921994 - DNA, 25 bp, Homo sapien
cattctcttggttgatgagatcatg

SEQ ID NO: 921995 - DNA, 25 bp, Homo sapien
tctcttggttgatgagatcatgcga

SEQ ID NO: 921996 - DNA, 25 bp, Homo sapien
ttctcttggttgatgagatcatgcg

SEQ ID NO: 921997 - DNA, 25 bp, Homo sapien
ctcttggttgatgagatcatgcgag

SEQ ID NO: 921998 - DNA, 25 bp, Homo sapien
ggttgaattgaagcttcctctgtat

SEQ ID NO: 921999 - DNA, 25 bp, Homo sapien
agactctgcaaagtgatcctgaaga

SEQ ID NO: 922000 - DNA, 25 bp, Homo sapien
gtccaagcttcaaatgagtttcaag

SEQ ID NO: 922001 - DNA, 25 bp, Homo sapien
tgagtttcaagggaattttcccatg

SEQ ID NO: 922002 - DNA, 25 bp, Homo sapien
taagggctacggttatcaggtgaaa

SEQ ID NO: 922003 - DNA, 25 bp, Homo sapien
cagtgacctggagtgtgcaaataaa

SEQ ID NO: 922004 - DNA, 25 bp, Homo sapien
tatagttggtctatctctgcggtcc

SEQ ID NO: 922005 - DNA, 25 bp, Homo sapien
ctgtccaaaggttcaaaaagtagtg

SEQ ID NO: 922006 - DNA, 25 bp, Homo sapien
tggctcaagctaggtcactgaaccg

SEQ ID NO: 922007 - DNA, 25 bp, Homo sapien
catgggttgttcatcaccgctgctg

SEQ ID NO: 922008 - DNA, 25 bp, Homo sapien
ctcctggttggtgcgtggctcaagc

SEQ ID NO: 922009 - DNA, 25 bp, Homo sapien
gtgcctcaccgccttgtgctttcaa

SEQ ID NO: 922010 - DNA, 25 bp, Homo sapien
cctgctcctgtggaatcgcactctc

SEQ ID NO: 922011 - DNA, 25 bp, Homo sapien
gccaccttaaagagctgccagtttg

SEQ ID NO: 922012 - DNA, 25 bp, Homo sapien
ccccgtctcctggagccattttgaa

SEQ ID NO: 922013 - DNA, 25 bp, Homo sapien
tgaagtgggtccagacataacccat

SEQ ID NO: 922014 - DNA, 25 bp, Homo sapien
gacagtgaaaccctatgctatcgac

SEQ ID NO: 922015 - DNA, 25 bp, Homo sapien
catcatgagtattgcatacgatcca

SEQ ID NO: 922016 - DNA, 25 bp, Homo sapien
tcttccaggaggaatgaaggccctc

SEQ ID NO: 922017 - DNA, 25 bp, Homo sapien
ggtttcccatcaaactaagtggcag

SEQ ID NO: 922018 - DNA, 25 bp, Homo sapien
ctggctggtacttgctcaggccatt

SEQ ID NO: 922019 - DNA, 25 bp, Homo sapien
tggtacttgctcaggccattgagga

SEQ ID NO: 922020 - DNA, 25 bp, Homo sapien
ggctggtacttgctcaggccattga

SEQ ID NO: 922021 - DNA, 25 bp, Homo sapien
ggtacttgctcaggccattgaggag

SEQ ID NO: 922022 - DNA, 25 bp, Homo sapien
ataggtaagtgccatgacactcggg

SEQ ID NO: 922023 - DNA, 25 bp, Homo sapien
aggtaagtgccatgacactcgggga

SEQ ID NO: 922024 - DNA, 25 bp, Homo sapien
taggtaagtgccatgacactcgggg

SEQ ID NO: 922025 - DNA, 25 bp, Homo sapien
ggtaagtgccatgacactcggggaa

SEQ ID NO: 922026 - DNA, 25 bp, Homo sapien
tttacttgactgtcgctatcggtag

SEQ ID NO: 922027 - DNA, 25 bp, Homo sapien
taaactcgtagaatgcttcactaat

SEQ ID NO: 922028 - DNA, 25 bp, Homo sapien
tgacatcagttgtgtaaattcttcg

SEQ ID NO: 922029 - DNA, 25 bp, Homo sapien
tcgctatcggtagttggcttctctg

SEQ ID NO: 922030 - DNA, 25 bp, Homo sapien
ttttccattgatggaaagaaacata

SEQ ID NO: 922031 - DNA, 25 bp, Homo sapien
tcagggtcaccaattgacaacccag

SEQ ID NO: 922032 - DNA, 25 bp, Homo sapien
gacaacccagtgttagactactgtc

SEQ ID NO: 922033 - DNA, 25 bp, Homo sapien
gactactgtctctaatttccataat

SEQ ID NO: 922034 - DNA, 25 bp, Homo sapien
tgtcatgccaccttttgtatatgtg

SEQ ID NO: 922035 - DNA, 25 bp, Homo sapien
tcatgccaccttttgtatatgtgct

SEQ ID NO: 922036 - DNA, 25 bp, Homo sapien
tccatgtcatgccaccttttgtata

SEQ ID NO: 922037 - DNA, 25 bp, Homo sapien
catgtcatgccaccttttgtatatg

SEQ ID NO: 922038 - DNA, 25 bp, Homo sapien
ccacaggatcgcttgtaagaactgc

SEQ ID NO: 922039 - DNA, 25 bp, Homo sapien
agtgcccacaggatcgcttgtaaga

SEQ ID NO: 922040 - DNA, 25 bp, Homo sapien
gatcgcttgtaagaactgctccttc

SEQ ID NO: 922041 - DNA, 25 bp, Homo sapien
cactgacacttgtgcaccaaggtgc

SEQ ID NO: 922042 - DNA, 25 bp, Homo sapien
ggttcctgatgttcacgccatgctc

SEQ ID NO: 922043 - DNA, 25 bp, Homo sapien
tgaagtctggttcctgatgttcacg

SEQ ID NO: 922044 - DNA, 25 bp, Homo sapien
tccttctcaccagggtgcacgggca

SEQ ID NO: 922045 - DNA, 25 bp, Homo sapien
acgccatgctccttctcaccagggt

SEQ ID NO: 922046 - DNA, 25 bp, Homo sapien
attctcatttcgcaagccctgtgtc

SEQ ID NO: 922047 - DNA, 25 bp, Homo sapien
tctcatttcgcaagccctgtgtctt

SEQ ID NO: 922048 - DNA, 25 bp, Homo sapien
atttcgcaagccctgtgtcttaatc

SEQ ID NO: 922049 - DNA, 25 bp, Homo sapien
tcatttcgcaagccctgtgtcttaa

SEQ ID NO: 922050 - DNA, 25 bp, Homo sapien
tatggcctccctcagtgatactaga

SEQ ID NO: 922051 - DNA, 25 bp, Homo sapien
agatcctaattgtgctatggcctcc

SEQ ID NO: 922052 - DNA, 25 bp, Homo sapien
taaatgaggttagtatgccacctgc

SEQ ID NO: 922053 - DNA, 25 bp, Homo sapien
tatactttatgacacactggcacag

SEQ ID NO: 922054 - DNA, 25 bp, Homo sapien
tatctattactagctagtggctggc

SEQ ID NO: 922055 - DNA, 25 bp, Homo sapien
agagctaccttggtcataaatcagg

SEQ ID NO: 922056 - DNA, 25 bp, Homo sapien
tggtcccaggactatgcaggtttcc

SEQ ID NO: 922057 - DNA, 25 bp, Homo sapien
tacaatagggttttccagaggccgc

SEQ ID NO: 922058 - DNA, 25 bp, Homo sapien
gaataacctcatgaagcatctgcat

SEQ ID NO: 922059 - DNA, 25 bp, Homo sapien
tcagctggctcaatcgcatgtcagt

SEQ ID NO: 922060 - DNA, 25 bp, Homo sapien
tgagggctccaaggaagctttactg

SEQ ID NO: 922061 - DNA, 25 bp, Homo sapien
tcagtgcgtgtaacatcccgtgttt

SEQ ID NO: 922062 - DNA, 25 bp, Homo sapien
tcgtggctcgtaccctttgaaactg

SEQ ID NO: 922063 - DNA, 25 bp, Homo sapien
gtttgtcgtggctcgtaccctttga

SEQ ID NO: 922064 - DNA, 25 bp, Homo sapien
ctaggtttgtcgtggctcgtaccct

SEQ ID NO: 922065 - DNA, 25 bp, Homo sapien
gactaggtttgtcgtggctcgtacc

SEQ ID NO: 922066 - DNA, 25 bp, Homo sapien
taatctgtaattctcccttcgtctc

SEQ ID NO: 922067 - DNA, 25 bp, Homo sapien
atctgtaattctcccttcgtctctc

SEQ ID NO: 922068 - DNA, 25 bp, Homo sapien
ctttaatctgtaattctcccttcgt

SEQ ID NO: 922069 - DNA, 25 bp, Homo sapien
tttaatctgtaattctcccttcgtc

SEQ ID NO: 922070 - DNA, 25 bp, Homo sapien
tggtggcattaaacaggacaccgaa

SEQ ID NO: 922071 - DNA, 25 bp, Homo sapien
aggaaagtccaggttgcagcaagac

SEQ ID NO: 922072 - DNA, 25 bp, Homo sapien
ttctcaaagactgggtgcccatgtg

SEQ ID NO: 922073 - DNA, 25 bp, Homo sapien
ggacaccgaagaacatcacgtaaga

SEQ ID NO: 922074 - DNA, 25 bp, Homo sapien
tcatcgggagaatagcaacaggtag

SEQ ID NO: 922075 - DNA, 25 bp, Homo sapien
tggatttgtaaccttcagggctgac

SEQ ID NO: 922076 - DNA, 25 bp, Homo sapien
caacaggtagacacatctcaaggct

SEQ ID NO: 922077 - DNA, 25 bp, Homo sapien
tcaaggctaaatctgctcatgtcgc

SEQ ID NO: 922078 - DNA, 25 bp, Homo sapien
tagaaagtactgattggccatctgg

SEQ ID NO: 922079 - DNA, 25 bp, Homo sapien
caatggctgttggagtatgtatgta

SEQ ID NO: 922080 - DNA, 25 bp, Homo sapien
cattctgaagtagttaaagaactct

SEQ ID NO: 922081 - DNA, 25 bp, Homo sapien
gtatgtactgttcttgcattctgaa

SEQ ID NO: 922082 - DNA, 25 bp, Homo sapien
gctacacaaacacggtggccctagg

SEQ ID NO: 922083 - DNA, 25 bp, Homo sapien
tatgtagaaactggcacacagaccc

SEQ ID NO: 922084 - DNA, 25 bp, Homo sapien
tctactcactccctgtcgaggctgg

SEQ ID NO: 922085 - DNA, 25 bp, Homo sapien
aggctggcctggtttgctacacaaa

SEQ ID NO: 922086 - DNA, 25 bp, Homo sapien
aaccagctgctctgaacgtggtggg

SEQ ID NO: 922087 - DNA, 25 bp, Homo sapien
tcaaaagtccacacacagttaaagc

SEQ ID NO: 922088 - DNA, 25 bp, Homo sapien
gggtgttggagcagcagtttctcaa

SEQ ID NO: 922089 - DNA, 25 bp, Homo sapien
tgcagacgccctcgggaaccagctg

SEQ ID NO: 922090 - DNA, 25 bp, Homo sapien
aacagcacgacgcacagaaatgatt

SEQ ID NO: 922091 - DNA, 25 bp, Homo sapien
acagcacgacgcacagaaatgattt

SEQ ID NO: 922092 - DNA, 25 bp, Homo sapien
aaaacagcacgacgcacagaaatga

SEQ ID NO: 922093 - DNA, 25 bp, Homo sapien
gaaaacagcacgacgcacagaaatg

SEQ ID NO: 922094 - DNA, 25 bp, Homo sapien
tcatgccaactctttatttccataa

SEQ ID NO: 922095 - DNA, 25 bp, Homo sapien
catgccaactctttatttccataat

SEQ ID NO: 922096 - DNA, 25 bp, Homo sapien
ttcatgccaactctttatttccata

SEQ ID NO: 922097 - DNA, 25 bp, Homo sapien
tggtctgccgtgaacagtccaggag

SEQ ID NO: 922098 - DNA, 25 bp, Homo sapien
ttagtgttccctgctagaatagatg

SEQ ID NO: 922099 - DNA, 25 bp, Homo sapien
tgctagaatagatgaccacaaaacc

SEQ ID NO: 922100 - DNA, 25 bp, Homo sapien
acccaggccagaaacgttctggtct

SEQ ID NO: 922101 - DNA, 25 bp, Homo sapien
gggacacgcaggtggtatcagtctt

SEQ ID NO: 922102 - DNA, 25 bp, Homo sapien
gaagggacacgcaggtggtatcagt

SEQ ID NO: 922103 - DNA, 25 bp, Homo sapien
gaggaagggacacgcaggtggtatc

SEQ ID NO: 922104 - DNA, 25 bp, Homo sapien
gacacgcaggtggtatcagtcttgc

SEQ ID NO: 922105 - DNA, 25 bp, Homo sapien
tttccaaacattgtgacttggctac

SEQ ID NO: 922106 - DNA, 25 bp, Homo sapien
cattgtgacttggctactgagtggg

SEQ ID NO: 922107 - DNA, 25 bp, Homo sapien
tccaaacattgtgacttggctactg

SEQ ID NO: 922108 - DNA, 25 bp, Homo sapien
tgttttccaaacattgtgacttggc

SEQ ID NO: 922109 - DNA, 25 bp, Homo sapien
ccagtatctctctcgcaaaaggaac

SEQ ID NO: 922110 - DNA, 25 bp, Homo sapien
tgccgagtgaagatcccctttttat

SEQ ID NO: 922111 - DNA, 25 bp, Homo sapien
ttttggttgtctctgccgagtgaag

SEQ ID NO: 922112 - DNA, 25 bp, Homo sapien
aaggaacgctgcactttttggttgt

SEQ ID NO: 922113 - DNA, 25 bp, Homo sapien
ctgtgctctcaggacattctctgtc

SEQ ID NO: 922114 - DNA, 25 bp, Homo sapien
cactggtggtcattaggcctgagct

SEQ ID NO: 922115 - DNA, 25 bp, Homo sapien
gctggcaacgacctgtcagggctgt

SEQ ID NO: 922116 - DNA, 25 bp, Homo sapien
ttctctgtccccagtaagaccacca

SEQ ID NO: 922117 - DNA, 25 bp, Homo sapien
gtaagtaatgtattataattcccac

SEQ ID NO: 922118 - DNA, 25 bp, Homo sapien
aactgctatcttcagtttatggtaa

SEQ ID NO: 922119 - DNA, 25 bp, Homo sapien
tgtattataattcccaccattacca

SEQ ID NO: 922120 - DNA, 25 bp, Homo sapien
ctttccctgtaagtaatgtattata

SEQ ID NO: 922121 - DNA, 25 bp, Homo sapien
ttcgcaagtaatatacaacagactg

SEQ ID NO: 922122 - DNA, 25 bp, Homo sapien
ttttcgcaagtaatatacaacagac

SEQ ID NO: 922123 - DNA, 25 bp, Homo sapien
tgcttttcgcaagtaatatacaaca

SEQ ID NO: 922124 - DNA, 25 bp, Homo sapien
gcttttcgcaagtaatatacaacag

SEQ ID NO: 922125 - DNA, 25 bp, Homo sapien
catgatgaggtcccgtttttcgttc

SEQ ID NO: 922126 - DNA, 25 bp, Homo sapien
atccatgatgaggtcccgtttttcg

SEQ ID NO: 922127 - DNA, 25 bp, Homo sapien
tccatgatgaggtcccgtttttcgt

SEQ ID NO: 922128 - DNA, 25 bp, Homo sapien
ccatgatgaggtcccgtttttcgtt

SEQ ID NO: 922129 - DNA, 25 bp, Homo sapien
tattcttacaattgaaatggccaga

SEQ ID NO: 922130 - DNA, 25 bp, Homo sapien
aaatggccagaattggaaaggcaac

SEQ ID NO: 922131 - DNA, 25 bp, Homo sapien
tccaatattcttacaattgaaatgg

SEQ ID NO: 922132 - DNA, 25 bp, Homo sapien
caatattcttacaattgaaatggcc

SEQ ID NO: 922133 - DNA, 25 bp, Homo sapien
cgggtacgttatcccatgagccaaa

SEQ ID NO: 922134 - DNA, 25 bp, Homo sapien
ggacgggtacgttatcccatgagcc

SEQ ID NO: 922135 - DNA, 25 bp, Homo sapien
tacgttatcccatgagccaaactgc

SEQ ID NO: 922136 - DNA, 25 bp, Homo sapien
gttatcccatgagccaaactgccac

SEQ ID NO: 922137 - DNA, 25 bp, Homo sapien
ggcaaaattccaaatgagctctcca

SEQ ID NO: 922138 - DNA, 25 bp, Homo sapien
agcagacttttctggtactcttcag

SEQ ID NO: 922139 - DNA, 25 bp, Homo sapien
tttctggtactcttcagtgaacatc

SEQ ID NO: 922140 - DNA, 25 bp, Homo sapien
gacttttctggtactcttcagtgaa

SEQ ID NO: 922141 - DNA, 25 bp, Homo sapien
tggctgttggcggtgagggaacgtg

SEQ ID NO: 922142 - DNA, 25 bp, Homo sapien
gctgttggcggtgagggaacgtgga

SEQ ID NO: 922143 - DNA, 25 bp, Homo sapien
ctgttggcggtgagggaacgtggac

SEQ ID NO: 922144 - DNA, 25 bp, Homo sapien
tgttggcggtgagggaacgtggacg

SEQ ID NO: 922145 - DNA, 25 bp, Homo sapien
gtttctgctccatactcgctctgaa

SEQ ID NO: 922146 - DNA, 25 bp, Homo sapien
aaaccctgcaatcgtttctgctcca

SEQ ID NO: 922147 - DNA, 25 bp, Homo sapien
gatacttcttataccagttctcaaa

SEQ ID NO: 922148 - DNA, 25 bp, Homo sapien
tctgatacttcttataccagttctc

SEQ ID NO: 922149 - DNA, 25 bp, Homo sapien
tggctgttcccatgaccaggcttca

SEQ ID NO: 922150 - DNA, 25 bp, Homo sapien
gaccaggcttcaggacaagcccagg

SEQ ID NO: 922151 - DNA, 25 bp, Homo sapien
ttcctggctgttcccatgaccaggc

SEQ ID NO: 922152 - DNA, 25 bp, Homo sapien
gttcccatgaccaggcttcaggaca

SEQ ID NO: 922153 - DNA, 25 bp, Homo sapien
ttagagttgctcacaaaggtcacag

SEQ ID NO: 922154 - DNA, 25 bp, Homo sapien
gctgcatagttagagttgctcacaa

SEQ ID NO: 922155 - DNA, 25 bp, Homo sapien
tagttagagttgctcacaaaggtca

SEQ ID NO: 922156 - DNA, 25 bp, Homo sapien
ttgtctgctgcatagttagagttgc

SEQ ID NO: 922157 - DNA, 25 bp, Homo sapien
aagaaacaggttccatcagtccagg

SEQ ID NO: 922158 - DNA, 25 bp, Homo sapien
ttccaccgccagaacacaacacggg

SEQ ID NO: 922159 - DNA, 25 bp, Homo sapien
cagtccaggaatggctcagacaccc

SEQ ID NO: 922160 - DNA, 25 bp, Homo sapien
tcttccaccgccagaacacaacacg

SEQ ID NO: 922161 - DNA, 25 bp, Homo sapien
attctaggtgggacgcaggctcgtt

SEQ ID NO: 922162 - DNA, 25 bp, Homo sapien
gtagccagcagattctaggtgggac

SEQ ID NO: 922163 - DNA, 25 bp, Homo sapien
tggttcttgtccctacgcaccactt

SEQ ID NO: 922164 - DNA, 25 bp, Homo sapien
ccagcagattctaggtgggacgcag

SEQ ID NO: 922165 - DNA, 25 bp, Homo sapien
cagagggtcacggtgacgcccccgg

SEQ ID NO: 922166 - DNA, 25 bp, Homo sapien
tagtggctggtacggaaagcgttgg

SEQ ID NO: 922167 - DNA, 25 bp, Homo sapien
ggtacggaaagcgttggcaccaagc

SEQ ID NO: 922168 - DNA, 25 bp, Homo sapien
gcatcacttcctctgcataggggta

SEQ ID NO: 922169 - DNA, 25 bp, Homo sapien
ggcccacgccgggacactcatcgat

SEQ ID NO: 922170 - DNA, 25 bp, Homo sapien
gatagcagagccaagtgacccctgt

SEQ ID NO: 922171 - DNA, 25 bp, Homo sapien
cacagggaaggcgaaagtggagggt

SEQ ID NO: 922172 - DNA, 25 bp, Homo sapien
tgtccctgtcgaagctgcacttcct

SEQ ID NO: 922173 - DNA, 25 bp, Homo sapien
tgacccctgtccctgtcgaagctgc

SEQ ID NO: 922174 - DNA, 25 bp, Homo sapien
gacacaggccccagtgacgtctgtg

SEQ ID NO: 922175 - DNA, 25 bp, Homo sapien
tggtgacagccacagtgcggatccc

SEQ ID NO: 922176 - DNA, 25 bp, Homo sapien
agtgtgtagaagtcagacacaggcc

SEQ ID NO: 922177 - DNA, 25 bp, Homo sapien
cctcatgcttgttgacaccgtggaa

SEQ ID NO: 922178 - DNA, 25 bp, Homo sapien
ccctttgacaagacaaggtggctca

SEQ ID NO: 922179 - DNA, 25 bp, Homo sapien
ttccctttgacaagacaaggtggct

SEQ ID NO: 922180 - DNA, 25 bp, Homo sapien
ccttcaaaacatggccttccctttg

SEQ ID NO: 922181 - DNA, 25 bp, Homo sapien
gggcctgtaagcagagatgcagcaa

SEQ ID NO: 922182 - DNA, 25 bp, Homo sapien
cagataggcagggcgttcgtgcatc

SEQ ID NO: 922183 - DNA, 25 bp, Homo sapien
tggcaccttaagttggccctgggtc

SEQ ID NO: 922184 - DNA, 25 bp, Homo sapien
gctgacacctggcaccttaagttgg

SEQ ID NO: 922185 - DNA, 25 bp, Homo sapien
gaacaggttactgcccttgacagag

SEQ ID NO: 922186 - DNA, 25 bp, Homo sapien
caccatgcttggcgaatttttatat

SEQ ID NO: 922187 - DNA, 25 bp, Homo sapien
caagtacctgggattatagacgtgc

SEQ ID NO: 922188 - DNA, 25 bp, Homo sapien
attatagacgtgcaccaccatgctt

SEQ ID NO: 922189 - DNA, 25 bp, Homo sapien
ccatgcttggcgaatttttatattt

SEQ ID NO: 922190 - DNA, 25 bp, Homo sapien
aagtgatccttataccagggcctcc

SEQ ID NO: 922191 - DNA, 25 bp, Homo sapien
agtgatccttataccagggcctcct

SEQ ID NO: 922192 - DNA, 25 bp, Homo sapien
gtgatccttataccagggcctcctt

SEQ ID NO: 922193 - DNA, 25 bp, Homo sapien
tgatccttataccagggcctccttg

SEQ ID NO: 922194 - DNA, 25 bp, Homo sapien
cacacaggctgaattttagcttcat

SEQ ID NO: 922195 - DNA, 25 bp, Homo sapien
gagtagcaccatagagaagggacag

SEQ ID NO: 922196 - DNA, 25 bp, Homo sapien
gggagcccgtatccgctcacacagg

SEQ ID NO: 922197 - DNA, 25 bp, Homo sapien
tcttctcctagcgaggtcaaccaca

SEQ ID NO: 922198 - DNA, 25 bp, Homo sapien
tgtagagatgctgggagcacctttt

SEQ ID NO: 922199 - DNA, 25 bp, Homo sapien
ctgtgagggtgtagagatgctggga

SEQ ID NO: 922200 - DNA, 25 bp, Homo sapien
tgggagcacctttttcctgggagag

SEQ ID NO: 922201 - DNA, 25 bp, Homo sapien
gagggtgtagagatgctgggagcac

SEQ ID NO: 922202 - DNA, 25 bp, Homo sapien
tgagaggatcctaccagaagccctc

SEQ ID NO: 922203 - DNA, 25 bp, Homo sapien
ggccccgctgagaggatcctaccag

SEQ ID NO: 922204 - DNA, 25 bp, Homo sapien
gctgagaggatcctaccagaagccc

SEQ ID NO: 922205 - DNA, 25 bp, Homo sapien
cccgctgagaggatcctaccagaag

SEQ ID NO: 922206 - DNA, 25 bp, Homo sapien
tcttgctccacgctggtggtgacgg

SEQ ID NO: 922207 - DNA, 25 bp, Homo sapien
tgtcttgctccacgctggtggtgac

SEQ ID NO: 922208 - DNA, 25 bp, Homo sapien
ttgctccacgctggtggtgacggtg

SEQ ID NO: 922209 - DNA, 25 bp, Homo sapien
cttgctccacgctggtggtgacggt

SEQ ID NO: 922210 - DNA, 25 bp, Homo sapien
gatggcgatagtgattcggagccgg

SEQ ID NO: 922211 - DNA, 25 bp, Homo sapien
ttggaggtgtcagtcaggtattgga

SEQ ID NO: 922212 - DNA, 25 bp, Homo sapien
cagtcaggtattggatggtccctgg

SEQ ID NO: 922213 - DNA, 25 bp, Homo sapien
gcgatagtgattcggagccgggagg

SEQ ID NO: 922214 - DNA, 25 bp, Homo sapien
ccaggttgctgatgtcggcctcgaa

SEQ ID NO: 922215 - DNA, 25 bp, Homo sapien
tggaccaggttgctgatgtcggcct

SEQ ID NO: 922216 - DNA, 25 bp, Homo sapien
ctggaccaggttgctgatgtcggcc

SEQ ID NO: 922217 - DNA, 25 bp, Homo sapien
gaccaggttgctgatgtcggcctcg

SEQ ID NO: 922218 - DNA, 25 bp, Homo sapien
gccgcagacgccagtcctggctgat

SEQ ID NO: 922219 - DNA, 25 bp, Homo sapien
cacccagccgacaaaatgccgcaga

SEQ ID NO: 922220 - DNA, 25 bp, Homo sapien
cagacgccagtcctggctgatgtca

SEQ ID NO: 922221 - DNA, 25 bp, Homo sapien
cgcagacgccagtcctggctgatgt

SEQ ID NO: 922222 - DNA, 25 bp, Homo sapien
gaggcaagaaggttcagacctgtga

SEQ ID NO: 922223 - DNA, 25 bp, Homo sapien
gccagaggcaagaaggttcagacct

SEQ ID NO: 922224 - DNA, 25 bp, Homo sapien
gcaagaaggttcagacctgtgacta

SEQ ID NO: 922225 - DNA, 25 bp, Homo sapien
aagaaggttcagacctgtgactaag

SEQ ID NO: 922226 - DNA, 25 bp, Homo sapien
gctcagaagttaggctggcgccact

SEQ ID NO: 922227 - DNA, 25 bp, Homo sapien
gaaggatactgcacagactcagcct

SEQ ID NO: 922228 - DNA, 25 bp, Homo sapien
tgggaaacaggtgcaaacccagtct

SEQ ID NO: 922229 - DNA, 25 bp, Homo sapien
tttcaccctgttatgttggccagcc

SEQ ID NO: 922230 - DNA, 25 bp, Homo sapien
cccagctcggagacgcccaggggaa

SEQ ID NO: 922231 - DNA, 25 bp, Homo sapien
cgggccccagctcggagacgcccag

SEQ ID NO: 922232 - DNA, 25 bp, Homo sapien
ctgcgggccccagctcggagacgcc

SEQ ID NO: 922233 - DNA, 25 bp, Homo sapien
ccccagctcggagacgcccagggga

SEQ ID NO: 922234 - DNA, 25 bp, Homo sapien
cagcgcgcagccccacaacaacggc

SEQ ID NO: 922235 - DNA, 25 bp, Homo sapien
agcgcgcagccccacaacaacggcc

SEQ ID NO: 922236 - DNA, 25 bp, Homo sapien
cgcgcagccccacaacaacggcccg

SEQ ID NO: 922237 - DNA, 25 bp, Homo sapien
gcgcgcagccccacaacaacggccc

SEQ ID NO: 922238 - DNA, 25 bp, Homo sapien
cagggatgcacgtccttgggatgcg

SEQ ID NO: 922239 - DNA, 25 bp, Homo sapien
gccgataagggcgaggtctgctccc

SEQ ID NO: 922240 - DNA, 25 bp, Homo sapien
ccaggtgcactttgggaacccgagg

SEQ ID NO: 922241 - DNA, 25 bp, Homo sapien
tctggagccctgaccttaacccagg

SEQ ID NO: 922242 - DNA, 25 bp, Homo sapien
gaccataaagtcattcgcagggtgc

SEQ ID NO: 922243 - DNA, 25 bp, Homo sapien
ggtttcatagattggcatccttcca

SEQ ID NO: 922244 - DNA, 25 bp, Homo sapien
ggagaaaccgcatctccatatttag

SEQ ID NO: 922245 - DNA, 25 bp, Homo sapien
tcgcctgaaccagagattgcagtga

SEQ ID NO: 922246 - DNA, 25 bp, Homo sapien
tgcagcagcgaagagtgatcataaa

SEQ ID NO: 922247 - DNA, 25 bp, Homo sapien
gaataatcaggcatagaccagtgct

SEQ ID NO: 922248 - DNA, 25 bp, Homo sapien
tcctgcctgggatgagtagggctaa

SEQ ID NO: 922249 - DNA, 25 bp, Homo sapien
taaaattcaaactcttcggcatggc

SEQ ID NO: 922250 - DNA, 25 bp, Homo sapien
ccggcacgtagcgtcagtgcacaca

SEQ ID NO: 922251 - DNA, 25 bp, Homo sapien
ctgggtgtcatagctcggcctgtaa

SEQ ID NO: 922252 - DNA, 25 bp, Homo sapien
aaggtgtgtccattgctgcaggtaa

SEQ ID NO: 922253 - DNA, 25 bp, Homo sapien
ttgaaatgtataactgaaggctggg

SEQ ID NO: 922254 - DNA, 25 bp, Homo sapien
gactgcccaaattaaggacaggaaa

SEQ ID NO: 922255 - DNA, 25 bp, Homo sapien
agtaagtataattagctgcagctgt

SEQ ID NO: 922256 - DNA, 25 bp, Homo sapien
tccgcttttttggtggatgacagct

SEQ ID NO: 922257 - DNA, 25 bp, Homo sapien
ttctttagtggaccccaggtcggca

SEQ ID NO: 922258 - DNA, 25 bp, Homo sapien
gatgaattccttttcgagatgaaga

SEQ ID NO: 922259 - DNA, 25 bp, Homo sapien
caaaatcatcttgtttggtcatctc

SEQ ID NO: 922260 - DNA, 25 bp, Homo sapien
tgcctctgccctgaaagcacttaac

SEQ ID NO: 922261 - DNA, 25 bp, Homo sapien
gaaatacaggtacagtgcctctgcc

SEQ ID NO: 922262 - DNA, 25 bp, Homo sapien
caccctctgggtgagcaagagtaag

SEQ ID NO: 922263 - DNA, 25 bp, Homo sapien
tctgggacaagatcgaaagggccct

SEQ ID NO: 922264 - DNA, 25 bp, Homo sapien
tgctggcagcgattctggaagaccc

SEQ ID NO: 922265 - DNA, 25 bp, Homo sapien
gagtaaggttatgaagttggccagc

SEQ ID NO: 922266 - DNA, 25 bp, Homo sapien
tagttcgtggattgtaccacctgtg

SEQ ID NO: 922267 - DNA, 25 bp, Homo sapien
tgtgcctgatgtaacaccaaatggg

SEQ ID NO: 922268 - DNA, 25 bp, Homo sapien
cggtgcccggctatgttatgtgtat

SEQ ID NO: 922269 - DNA, 25 bp, Homo sapien
tacagaagatacacatggaagattt

SEQ ID NO: 922270 - DNA, 25 bp, Homo sapien
cattgctgtgagaaattctctgaca

SEQ ID NO: 922271 - DNA, 25 bp, Homo sapien
gaaattctctgacaatctcaggact

SEQ ID NO: 922272 - DNA, 25 bp, Homo sapien
tggtcaacttgtggcttttcattgc

SEQ ID NO: 922273 - DNA, 25 bp, Homo sapien
acttgtggcttttcattgctgtgag

SEQ ID NO: 922274 - DNA, 25 bp, Homo sapien
gcctgcacagtgtttttgatatgta

SEQ ID NO: 922275 - DNA, 25 bp, Homo sapien
tggtgcctgcacagtgtttttgata

SEQ ID NO: 922276 - DNA, 25 bp, Homo sapien
ctggtgcctgcacagtgtttttgat

SEQ ID NO: 922277 - DNA, 25 bp, Homo sapien
gtgcctgcacagtgtttttgatatg

SEQ ID NO: 922278 - DNA, 25 bp, Homo sapien
agcctgaagcaacacagcaaaatct

SEQ ID NO: 922279 - DNA, 25 bp, Homo sapien
ctgaagcaacacagcaaaatctagt

SEQ ID NO: 922280 - DNA, 25 bp, Homo sapien
tgaaaccagcctgaagcaacacagc

SEQ ID NO: 922281 - DNA, 25 bp, Homo sapien
ttgaaaccagcctgaagcaacacag

SEQ ID NO: 922282 - DNA, 25 bp, Homo sapien
ataggtgatagtgttcaagttctgt

SEQ ID NO: 922283 - DNA, 25 bp, Homo sapien
tttcagatcagttagtaaatgaaac

SEQ ID NO: 922284 - DNA, 25 bp, Homo sapien
ctttcagatcagttagtaaatgaaa

SEQ ID NO: 922285 - DNA, 25 bp, Homo sapien
ttcagatcagttagtaaatgaaaca

SEQ ID NO: 922286 - DNA, 25 bp, Homo sapien
tcagatcagttagtaaatgaaacac

SEQ ID NO: 922287 - DNA, 25 bp, Homo sapien
agttactgagaagcgcagaatcgac

SEQ ID NO: 922288 - DNA, 25 bp, Homo sapien
tactgagaagcgcagaatcgacatc

SEQ ID NO: 922289 - DNA, 25 bp, Homo sapien
tgagaagcgcagaatcgacatcctt

SEQ ID NO: 922290 - DNA, 25 bp, Homo sapien
cacgtagttactgagaagcgcagaa

SEQ ID NO: 922291 - DNA, 25 bp, Homo sapien
gcctgggtgataagagcgaaacgcc

SEQ ID NO: 922292 - DNA, 25 bp, Homo sapien
cctgggtgataagagcgaaacgccg

SEQ ID NO: 922293 - DNA, 25 bp, Homo sapien
ctgggtgataagagcgaaacgccgt

SEQ ID NO: 922294 - DNA, 25 bp, Homo sapien
agctcttcggagtgagggctcccca

SEQ ID NO: 922295 - DNA, 25 bp, Homo sapien
gcagctcttcggagtgagggctccc

SEQ ID NO: 922296 - DNA, 25 bp, Homo sapien
ggcctttacagcctgctaagtcccg

SEQ ID NO: 922297 - DNA, 25 bp, Homo sapien
cagcctgctaagtcccgggtcggat

SEQ ID NO: 922298 - DNA, 25 bp, Homo sapien
tcagaggtccaactgttaggctcct

SEQ ID NO: 922299 - DNA, 25 bp, Homo sapien
gtccaactgttaggctcctcgcgta

SEQ ID NO: 922300 - DNA, 25 bp, Homo sapien
cggctctcagaggtccaactgttag

SEQ ID NO: 922301 - DNA, 25 bp, Homo sapien
tctcagaggtccaactgttaggctc

SEQ ID NO: 922302 - DNA, 25 bp, Homo sapien
aaagggacgcgtccagactagagtc

SEQ ID NO: 922303 - DNA, 25 bp, Homo sapien
tgaggtccagactcgtcgcctctgg

SEQ ID NO: 922304 - DNA, 25 bp, Homo sapien
tggacttccatgaggtccagactcg

SEQ ID NO: 922305 - DNA, 25 bp, Homo sapien
caaaagggacgcgtccagactagag

SEQ ID NO: 922306 - DNA, 25 bp, Homo sapien
gacaaggaacttcacactctacagc

SEQ ID NO: 922307 - DNA, 25 bp, Homo sapien
cagcagacaaggaacttcacactct

SEQ ID NO: 922308 - DNA, 25 bp, Homo sapien
gcagacaaggaacttcacactctac

SEQ ID NO: 922309 - DNA, 25 bp, Homo sapien
aaggaacttcacactctacagctct

SEQ ID NO: 922310 - DNA, 25 bp, Homo sapien
cgcacgccaaggtgcaagccaggag

SEQ ID NO: 922311 - DNA, 25 bp, Homo sapien
agctccgcacgccaaggtgcaagcc

SEQ ID NO: 922312 - DNA, 25 bp, Homo sapien
gccagctccgcacgccaaggtgcaa

SEQ ID NO: 922313 - DNA, 25 bp, Homo sapien
gtcgccaacagcgccaaagtgccag

SEQ ID NO: 922314 - DNA, 25 bp, Homo sapien
tgatcctagaaacgtacaaccaaaa

SEQ ID NO: 922315 - DNA, 25 bp, Homo sapien
ttattgcaatgggttgaaaacacaa

SEQ ID NO: 922316 - DNA, 25 bp, Homo sapien
gaaaaggcataagcggccctgatcc

SEQ ID NO: 922317 - DNA, 25 bp, Homo sapien
caggctttaaagtgacaaacgagtt

SEQ ID NO: 922318 - DNA, 25 bp, Homo sapien
aatctaggaggtgcattagcaaaac

SEQ ID NO: 922319 - DNA, 25 bp, Homo sapien
ctaggaggtgcattagcaaaaccac

SEQ ID NO: 922320 - DNA, 25 bp, Homo sapien
tctaggaggtgcattagcaaaacca

SEQ ID NO: 922321 - DNA, 25 bp, Homo sapien
gaaatctaggaggtgcattagcaaa

SEQ ID NO: 922322 - DNA, 25 bp, Homo sapien
tggtaatttcaataactcgcagtcc

SEQ ID NO: 922323 - DNA, 25 bp, Homo sapien
cataaatggtaatttcaataactcg

SEQ ID NO: 922324 - DNA, 25 bp, Homo sapien
taaatggtaatttcaataactcgca

SEQ ID NO: 922325 - DNA, 25 bp, Homo sapien
cctctgccttcataaatggtaattt

SEQ ID NO: 922326 - DNA, 25 bp, Homo sapien
atgaacacctttctggactctggtg

SEQ ID NO: 922327 - DNA, 25 bp, Homo sapien
accttcgagatatgattggccacca

SEQ ID NO: 922328 - DNA, 25 bp, Homo sapien
gaacacctttctggactctggtgcc

SEQ ID NO: 922329 - DNA, 25 bp, Homo sapien
tatgattggccaccaagcttctctg

SEQ ID NO: 922330 - DNA, 25 bp, Homo sapien
catatgtgaaatccctagcacaggg

SEQ ID NO: 922331 - DNA, 25 bp, Homo sapien
ggtggctaaccacaacaatactgat

SEQ ID NO: 922332 - DNA, 25 bp, Homo sapien
tgcccacctcataaaaggccgtaat

SEQ ID NO: 922333 - DNA, 25 bp, Homo sapien
tgaaataggggtaatattgcccacc

SEQ ID NO: 922334 - DNA, 25 bp, Homo sapien
gacataattttatcgcatacttaag

SEQ ID NO: 922335 - DNA, 25 bp, Homo sapien
cggcctgtacattgtttttatagac

SEQ ID NO: 922336 - DNA, 25 bp, Homo sapien
taagagactacagaggcgggtggat

SEQ ID NO: 922337 - DNA, 25 bp, Homo sapien
cccggcctgtacattgtttttatag

SEQ ID NO: 922338 - DNA, 25 bp, Homo sapien
tattgattgttgtcgagtgagagca

SEQ ID NO: 922339 - DNA, 25 bp, Homo sapien
gcttgtttattggtagagagaaaac

SEQ ID NO: 922340 - DNA, 25 bp, Homo sapien
gtttgattatcaaccaacttgtcat

SEQ ID NO: 922341 - DNA, 25 bp, Homo sapien
cttctgtattgattgttgtcgagtg

SEQ ID NO: 922342 - DNA, 25 bp, Homo sapien
tgagttgcagatacagttgaccctt

SEQ ID NO: 922343 - DNA, 25 bp, Homo sapien
tcatggatctccttatacgcagatt

SEQ ID NO: 922344 - DNA, 25 bp, Homo sapien
tcaacaggaggcgtgacctttggaa

SEQ ID NO: 922345 - DNA, 25 bp, Homo sapien
gaacaacacgagcttgaacttcatg

SEQ ID NO: 922346 - DNA, 25 bp, Homo sapien
tcgctcctgagattgttaaattgat

SEQ ID NO: 922347 - DNA, 25 bp, Homo sapien
tctcagtaactacgaggtaaattgg

SEQ ID NO: 922348 - DNA, 25 bp, Homo sapien
tcctctctgatagtttgcccttcgc

SEQ ID NO: 922349 - DNA, 25 bp, Homo sapien
ctacgaggtaaattggattgttaca

SEQ ID NO: 922350 - DNA, 25 bp, Homo sapien
ctttctgaatagtagaaattaagaa

SEQ ID NO: 922351 - DNA, 25 bp, Homo sapien
aatagtagaaattaagaaatgtaga

SEQ ID NO: 922352 - DNA, 25 bp, Homo sapien
tagtagaaattaagaaatgtagaat

SEQ ID NO: 922353 - DNA, 25 bp, Homo sapien
tctgaatagtagaaattaagaaatg

SEQ ID NO: 922354 - DNA, 25 bp, Homo sapien
tggtgggccatgtcctaattagttt

SEQ ID NO: 922355 - DNA, 25 bp, Homo sapien
agtgaccgcggacccctctgtgctt

SEQ ID NO: 922356 - DNA, 25 bp, Homo sapien
ctgcttccctgggaacttactaagg

SEQ ID NO: 922357 - DNA, 25 bp, Homo sapien
gggaaaatgcttgtgtcgcctttgg

SEQ ID NO: 922358 - DNA, 25 bp, Homo sapien
ggaaagtatagttgccccaggcatg

SEQ ID NO: 922359 - DNA, 25 bp, Homo sapien
aaattggcgctcttattttcaatgc

SEQ ID NO: 922360 - DNA, 25 bp, Homo sapien
ggttgttgccttaggtcctgcgaat

SEQ ID NO: 922361 - DNA, 25 bp, Homo sapien
cctgcgaatattgctgaaaatcgga

SEQ ID NO: 922362 - DNA, 25 bp, Homo sapien
ctgcccgtccatccatcccagtccc

SEQ ID NO: 922363 - DNA, 25 bp, Homo sapien
catcccagtccccaggcatcttaac

SEQ ID NO: 922364 - DNA, 25 bp, Homo sapien
ctcctgcccgtccatccatcccagt

SEQ ID NO: 922365 - DNA, 25 bp, Homo sapien
atccatcccagtccccaggcatctt

SEQ ID NO: 922366 - DNA, 25 bp, Homo sapien
taaatctgtctagcgtattgagaat

SEQ ID NO: 922367 - DNA, 25 bp, Homo sapien
tacatgtgccaatctgtctcattgt

SEQ ID NO: 922368 - DNA, 25 bp, Homo sapien
tagtgggagctgttgatttatttct

SEQ ID NO: 922369 - DNA, 25 bp, Homo sapien
tatttctcagggcatacatgtgcca

SEQ ID NO: 922370 - DNA, 25 bp, Homo sapien
tcttgatggatttagggttaaccta

SEQ ID NO: 922371 - DNA, 25 bp, Homo sapien
ggccaggctagtcgtaatgtctctt

SEQ ID NO: 922372 - DNA, 25 bp, Homo sapien
cactgaatatgttaggtggtttttc

SEQ ID NO: 922373 - DNA, 25 bp, Homo sapien
aagagttaatattgtcatcgataca

SEQ ID NO: 922374 - DNA, 25 bp, Homo sapien
ccactacctcactgatgccataatg

SEQ ID NO: 922375 - DNA, 25 bp, Homo sapien
cactgatgccataatgtttaaccat

SEQ ID NO: 922376 - DNA, 25 bp, Homo sapien
cactgcacccatcctagattgctta

SEQ ID NO: 922377 - DNA, 25 bp, Homo sapien
aagaattccaggaaataagccaggt

SEQ ID NO: 922378 - DNA, 25 bp, Homo sapien
tcagtggctgtgttcgtagaaccgg

SEQ ID NO: 922379 - DNA, 25 bp, Homo sapien
gctgtgttcgtagaaccggaagacc

SEQ ID NO: 922380 - DNA, 25 bp, Homo sapien
cggaagacccatgttgtccttgcac

SEQ ID NO: 922381 - DNA, 25 bp, Homo sapien
tcgtagaaccggaagacccatgttg

SEQ ID NO: 922382 - DNA, 25 bp, Homo sapien
ctggaagggccagaacatgggcagg

SEQ ID NO: 922383 - DNA, 25 bp, Homo sapien
aagggccagaacatgggcagggtgg

SEQ ID NO: 922384 - DNA, 25 bp, Homo sapien
tggaagggccagaacatgggcaggg

SEQ ID NO: 922385 - DNA, 25 bp, Homo sapien
gccagaacatgggcagggtggggtc

SEQ ID NO: 922386 - DNA, 25 bp, Homo sapien
gcaccaatgccacatgtgtatctgg

SEQ ID NO: 922387 - DNA, 25 bp, Homo sapien
gccacatgtgtatctggaactcaac

SEQ ID NO: 922388 - DNA, 25 bp, Homo sapien
tggaactcaacctcacagctattgc

SEQ ID NO: 922389 - DNA, 25 bp, Homo sapien
tgtatctggaactcaacctcacagc

SEQ ID NO: 922390 - DNA, 25 bp, Homo sapien
gatggactccacatagagcctgctt

SEQ ID NO: 922391 - DNA, 25 bp, Homo sapien
actccacatagagcctgctttttca

SEQ ID NO: 922392 - DNA, 25 bp, Homo sapien
gactccacatagagcctgctttttc

SEQ ID NO: 922393 - DNA, 25 bp, Homo sapien
gatggatggactccacatagagcct

SEQ ID NO: 922394 - DNA, 25 bp, Homo sapien
tcacaagagtcgtagagatgggtcc

SEQ ID NO: 922395 - DNA, 25 bp, Homo sapien
gtagagatgggtccctgcctatcgg

SEQ ID NO: 922396 - DNA, 25 bp, Homo sapien
ggtccctgcctatcggaattgtctt

SEQ ID NO: 922397 - DNA, 25 bp, Homo sapien
aattgtctttcgtggtgtgatgtga

SEQ ID NO: 922398 - DNA, 25 bp, Homo sapien
acatttcctgaatctggggtctgca

SEQ ID NO: 922399 - DNA, 25 bp, Homo sapien
ccctatggagcagtggacatttcct

SEQ ID NO: 922400 - DNA, 25 bp, Homo sapien
taagtaaaactagaggatgctttgc

SEQ ID NO: 922401 - DNA, 25 bp, Homo sapien
gtctgggtttccctatggagcagtg

SEQ ID NO: 922402 - DNA, 25 bp, Homo sapien
ccaaaaaagtagaaacagatgtcca

SEQ ID NO: 922403 - DNA, 25 bp, Homo sapien
catagcagcatcatgtataatagcc

SEQ ID NO: 922404 - DNA, 25 bp, Homo sapien
tgttcatagcagcatcatgtataat

SEQ ID NO: 922405 - DNA, 25 bp, Homo sapien
aataaaagatgatgtccagccaggc

SEQ ID NO: 922406 - DNA, 25 bp, Homo sapien
caggctggagctatggtgtgattat

SEQ ID NO: 922407 - DNA, 25 bp, Homo sapien
ccatgcctgattaattttttgtttg

SEQ ID NO: 922408 - DNA, 25 bp, Homo sapien
gctggagctatggtgtgattatggc

SEQ ID NO: 922409 - DNA, 25 bp, Homo sapien
tcactgtagcctcaacctcccaggc

SEQ ID NO: 922410 - DNA, 25 bp, Homo sapien
cacacttgccttctgaggattcagg

SEQ ID NO: 922411 - DNA, 25 bp, Homo sapien
ctttacctgttagatgaggccttcc

SEQ ID NO: 922412 - DNA, 25 bp, Homo sapien
tctgctcggtagcaggctggacaca

SEQ ID NO: 922413 - DNA, 25 bp, Homo sapien
tctttggtcatagtgtacctgcagc

SEQ ID NO: 922414 - DNA, 25 bp, Homo sapien
atttttggtagagccccatgttggc

SEQ ID NO: 922415 - DNA, 25 bp, Homo sapien
tttttggtagagccccatgttggcc

SEQ ID NO: 922416 - DNA, 25 bp, Homo sapien
taaacaagggatacaagtgacagag

SEQ ID NO: 922417 - DNA, 25 bp, Homo sapien
cttagctggagaggaggaattgaat

SEQ ID NO: 922418 - DNA, 25 bp, Homo sapien
aagtgactgagacatcttagctgga

SEQ ID NO: 922419 - DNA, 25 bp, Homo sapien
cagagagctgatgaaacattgcatt

SEQ ID NO: 922420 - DNA, 25 bp, Homo sapien
tctaacaggtttcccggtgatgcta

SEQ ID NO: 922421 - DNA, 25 bp, Homo sapien
tgggataggcccaagaacttgcgct

SEQ ID NO: 922422 - DNA, 25 bp, Homo sapien
catcaagggaattatggttggtacc

SEQ ID NO: 922423 - DNA, 25 bp, Homo sapien
taagcctagttcagagtattttgcc

SEQ ID NO: 922424 - DNA, 25 bp, Homo sapien
gatacagctacagttggaagaccag

SEQ ID NO: 922425 - DNA, 25 bp, Homo sapien
caaagtaggactcagtgtgggatcc

SEQ ID NO: 922426 - DNA, 25 bp, Homo sapien
cagagaagtgctaggaaactgcctc

SEQ ID NO: 922427 - DNA, 25 bp, Homo sapien
tgactgaaacctgcagctctagaga

SEQ ID NO: 922428 - DNA, 25 bp, Homo sapien
gccatgcacctccacggaaatacct

SEQ ID NO: 922429 - DNA, 25 bp, Homo sapien
gctgcagttttgttatcctgcaccc

SEQ ID NO: 922430 - DNA, 25 bp, Homo sapien
ctgttcactttccagggccatgcac

SEQ ID NO: 922431 - DNA, 25 bp, Homo sapien
tgttatcctgcaccctgttcacttt

SEQ ID NO: 922432 - DNA, 25 bp, Homo sapien
aaaccctactgtcttacttatggct

SEQ ID NO: 922433 - DNA, 25 bp, Homo sapien
caatgccaccttgccgtaaaccagg

SEQ ID NO: 922434 - DNA, 25 bp, Homo sapien
gacctgtcattctgtttcatcgata

SEQ ID NO: 922435 - DNA, 25 bp, Homo sapien
tatctatccttgtgccaaaacccta

SEQ ID NO: 922436 - DNA, 25 bp, Homo sapien
ttccctgtaacgtcttctctcactg

SEQ ID NO: 922437 - DNA, 25 bp, Homo sapien
tttccctgtaacgtcttctctcact

SEQ ID NO: 922438 - DNA, 25 bp, Homo sapien
ccctgtaacgtcttctctcactgac

SEQ ID NO: 922439 - DNA, 25 bp, Homo sapien
tccctgtaacgtcttctctcactga

SEQ ID NO: 922440 - DNA, 25 bp, Homo sapien
gacaggttctaggattcaggtttcc

SEQ ID NO: 922441 - DNA, 25 bp, Homo sapien
ttgaatgtgacttgcggtgcgttga

SEQ ID NO: 922442 - DNA, 25 bp, Homo sapien
tggtccgtcatgtcaaaatcccaga

SEQ ID NO: 922443 - DNA, 25 bp, Homo sapien
gaatgttagtcttatgccctgtggg

SEQ ID NO: 922444 - DNA, 25 bp, Homo sapien
ttgtaggatggaccgcatcagcagt

SEQ ID NO: 922445 - DNA, 25 bp, Homo sapien
tcatttctttaccagcgtgttgtag

SEQ ID NO: 922446 - DNA, 25 bp, Homo sapien
gcgtgttgtaggatggaccgcatca

SEQ ID NO: 922447 - DNA, 25 bp, Homo sapien
catttctttaccagcgtgttgtagg

SEQ ID NO: 922448 - DNA, 25 bp, Homo sapien
caaccgcctggcttgtctaggcctg

SEQ ID NO: 922449 - DNA, 25 bp, Homo sapien
gcttgtctaggcctgtagctgggaa

SEQ ID NO: 922450 - DNA, 25 bp, Homo sapien
tccccaaccgcctggcttgtctagg

SEQ ID NO: 922451 - DNA, 25 bp, Homo sapien
tggcccctgatctgcaggaacctcc

SEQ ID NO: 922452 - DNA, 25 bp, Homo sapien
gccaagcttggtggagcgtctgcac

SEQ ID NO: 922453 - DNA, 25 bp, Homo sapien
gaggtgtccgcacagctttgggcct

SEQ ID NO: 922454 - DNA, 25 bp, Homo sapien
ttttcagcagaagggaaattcctag

SEQ ID NO: 922455 - DNA, 25 bp, Homo sapien
cacattctgtttgttcgccctagga

SEQ ID NO: 922456 - DNA, 25 bp, Homo sapien
taatgttttgtagaacacgtgtgcc

SEQ ID NO: 922457 - DNA, 25 bp, Homo sapien
tgggatcctgtaagcagacttgggc

SEQ ID NO: 922458 - DNA, 25 bp, Homo sapien
cctgcagtaaggagcccagaaggaa

SEQ ID NO: 922459 - DNA, 25 bp, Homo sapien
ttgggcagtctccttttgaaatagg

SEQ ID NO: 922460 - DNA, 25 bp, Homo sapien
cattgcctattggtcgttgggtagg

SEQ ID NO: 922461 - DNA, 25 bp, Homo sapien
catgggctgtgtattatggggtcac

SEQ ID NO: 922462 - DNA, 25 bp, Homo sapien
taagaacaggcaacacgagctattt

SEQ ID NO: 922463 - DNA, 25 bp, Homo sapien
tcttcccggacattgcctattggtc

SEQ ID NO: 922464 - DNA, 25 bp, Homo sapien
tgtagacgtccactgctaaagggct

SEQ ID NO: 922465 - DNA, 25 bp, Homo sapien
gacacatggcctgagagcctgtgat

SEQ ID NO: 922466 - DNA, 25 bp, Homo sapien
ttggaactgccactatgtagacgtc

SEQ ID NO: 922467 - DNA, 25 bp, Homo sapien
gcccaagctcctagactaagtgaca

SEQ ID NO: 922468 - DNA, 25 bp, Homo sapien
tgagcagaatataaagagagacagg

SEQ ID NO: 922469 - DNA, 25 bp, Homo sapien
gcagaatataaagagagacaggtca

SEQ ID NO: 922470 - DNA, 25 bp, Homo sapien
agcagaatataaagagagacaggtc

SEQ ID NO: 922471 - DNA, 25 bp, Homo sapien
cttgagcagaatataaagagagaca

SEQ ID NO: 922472 - DNA, 25 bp, Homo sapien
cactggcactgagtgtcagaattaa

SEQ ID NO: 922473 - DNA, 25 bp, Homo sapien
actggcactgagtgtcagaattaag

SEQ ID NO: 922474 - DNA, 25 bp, Homo sapien
agggcttacactggcactgagtgtc

SEQ ID NO: 922475 - DNA, 25 bp, Homo sapien
actttgggccacatcgaggaaggca

SEQ ID NO: 922476 - DNA, 25 bp, Homo sapien
gatgggcgtgaagagacaatcctga

SEQ ID NO: 922477 - DNA, 25 bp, Homo sapien
caatcatcaggcaaaagcgaggcct

SEQ ID NO: 922478 - DNA, 25 bp, Homo sapien
gaagacgtaaaagctgtatcccgaa

SEQ ID NO: 922479 - DNA, 25 bp, Homo sapien
gccgcggccgggcacgagatgagcc

SEQ ID NO: 922480 - DNA, 25 bp, Homo sapien
gcttgtggcgcctgccggcaggcag

SEQ ID NO: 922481 - DNA, 25 bp, Homo sapien
cctagagaagccttcgggacgcagg

SEQ ID NO: 922482 - DNA, 25 bp, Homo sapien
aggccgacgtgaggccgcagctggg

SEQ ID NO: 922483 - DNA, 25 bp, Homo sapien
gagaggccgacgggaaccagttctg

SEQ ID NO: 922484 - DNA, 25 bp, Homo sapien
agaggccgacgggaaccagttctgg

SEQ ID NO: 922485 - DNA, 25 bp, Homo sapien
cagggccgccggaaagccgaaggtg

SEQ ID NO: 922486 - DNA, 25 bp, Homo sapien
gaagctatggttgttcgggcatcca

SEQ ID NO: 922487 - DNA, 25 bp, Homo sapien
gagcggccgccaacaggcaagaact

SEQ ID NO: 922488 - DNA, 25 bp, Homo sapien
tggagcggccgccaacaggcaagaa

SEQ ID NO: 922489 - DNA, 25 bp, Homo sapien
ccactgtgcgggagaagctatggtt

SEQ ID NO: 922490 - DNA, 25 bp, Homo sapien
gaggctgcgaaaatttaaattcttg

SEQ ID NO: 922491 - DNA, 25 bp, Homo sapien
cagtagcctggcctatagaggctgc

SEQ ID NO: 922492 - DNA, 25 bp, Homo sapien
cgaggcttatttcaggacgatttgg

SEQ ID NO: 922493 - DNA, 25 bp, Homo sapien
cagaagccattatcaggaggcagta

SEQ ID NO: 922494 - DNA, 25 bp, Homo sapien
taacatctaggcctggagggtccac

SEQ ID NO: 922495 - DNA, 25 bp, Homo sapien
gaggcatcccctgatcctaaagagg

SEQ ID NO: 922496 - DNA, 25 bp, Homo sapien
cctaaagaggccagtgtgagtgatc

SEQ ID NO: 922497 - DNA, 25 bp, Homo sapien
tgtcaggccagatcgtcgcttggag

SEQ ID NO: 922498 - DNA, 25 bp, Homo sapien
gatggacctaaacagaccattgcga

SEQ ID NO: 922499 - DNA, 25 bp, Homo sapien
taaacagaccattgcgattcagcac

SEQ ID NO: 922500 - DNA, 25 bp, Homo sapien
accattgcgattcagcacctgggcc

SEQ ID NO: 922501 - DNA, 25 bp, Homo sapien
ggcatgagatggacctaaacagacc

SEQ ID NO: 922502 - DNA, 25 bp, Homo sapien
taacaggctgtaacgtggactggga

SEQ ID NO: 922503 - DNA, 25 bp, Homo sapien
gactgggaaagcaactgtgaggcaa

SEQ ID NO: 922504 - DNA, 25 bp, Homo sapien
gagcttgtcctaaactgtccagtgt

SEQ ID NO: 922505 - DNA, 25 bp, Homo sapien
tttggtctgtcaaggccgtcgggta

SEQ ID NO: 922506 - DNA, 25 bp, Homo sapien
tctgggcctggaacgcttgacttga

SEQ ID NO: 922507 - DNA, 25 bp, Homo sapien
ttcaccttgcgaagccgaactgagg

SEQ ID NO: 922508 - DNA, 25 bp, Homo sapien
gagttggacctgtatacaccgccag

SEQ ID NO: 922509 - DNA, 25 bp, Homo sapien
gctggtcctgtcaaagccgctggga

SEQ ID NO: 922510 - DNA, 25 bp, Homo sapien
cctggagaagcctccgtgaggtaag

SEQ ID NO: 922511 - DNA, 25 bp, Homo sapien
aagacagggagaaacgacctggaga

SEQ ID NO: 922512 - DNA, 25 bp, Homo sapien
cctccgtgaggtaagagcttggcct

SEQ ID NO: 922513 - DNA, 25 bp, Homo sapien
aggtccctcagagcccgatgagctg

SEQ ID NO: 922514 - DNA, 25 bp, Homo sapien
tgcccaagtacatccagaaggaccc

SEQ ID NO: 922515 - DNA, 25 bp, Homo sapien
gaggaattttcatgccgacagtggc

SEQ ID NO: 922516 - DNA, 25 bp, Homo sapien
tctataggccaacgggagacaggaa

SEQ ID NO: 922517 - DNA, 25 bp, Homo sapien
gccaggagtggctcacttgaagata

SEQ ID NO: 922518 - DNA, 25 bp, Homo sapien
tatggcactatagtcaagcctgggt

SEQ ID NO: 922519 - DNA, 25 bp, Homo sapien
tataacaggggaacagcatgagaga

SEQ ID NO: 922520 - DNA, 25 bp, Homo sapien
taggactagccaaagtaaggcatgg

SEQ ID NO: 922521 - DNA, 25 bp, Homo sapien
gtgagtcatgattatggcactatag

SEQ ID NO: 922522 - DNA, 25 bp, Homo sapien
agcacgtacagtctcagccacctgg

SEQ ID NO: 922523 - DNA, 25 bp, Homo sapien
attgtggcaagcacgtacagtctca

SEQ ID NO: 922524 - DNA, 25 bp, Homo sapien
tgtggcaagcacgtacagtctcagc

SEQ ID NO: 922525 - DNA, 25 bp, Homo sapien
caagcacgtacagtctcagccacct

SEQ ID NO: 922526 - DNA, 25 bp, Homo sapien
caaatcaaccatctttacagttctg

SEQ ID NO: 922527 - DNA, 25 bp, Homo sapien
tggctaaaaacaccacaaatcaacc

SEQ ID NO: 922528 - DNA, 25 bp, Homo sapien
actgcactgagccattttttaaatt

SEQ ID NO: 922529 - DNA, 25 bp, Homo sapien
gtggctgcaacaaactttcctacat

SEQ ID NO: 922530 - DNA, 25 bp, Homo sapien
tcattgtgattcacctaaggtcaag

SEQ ID NO: 922531 - DNA, 25 bp, Homo sapien
ttttcaaagtcagaagtgaagcatc

SEQ ID NO: 922532 - DNA, 25 bp, Homo sapien
ttataaagatcattgtgattcacct

SEQ ID NO: 922533 - DNA, 25 bp, Homo sapien
tttcaaagtcagaagtgaagcatct

SEQ ID NO: 922534 - DNA, 25 bp, Homo sapien
gtaactggaattagtaactgcacac

SEQ ID NO: 922535 - DNA, 25 bp, Homo sapien
cgcactcggttaatttatttactga

SEQ ID NO: 922536 - DNA, 25 bp, Homo sapien
caccaccgcactcggttaatttatt

SEQ ID NO: 922537 - DNA, 25 bp, Homo sapien
ggagtctagttctgtagtaactgga

SEQ ID NO: 922538 - DNA, 25 bp, Homo sapien
gataactgtggcacctacctgtgat

SEQ ID NO: 922539 - DNA, 25 bp, Homo sapien
ccagaagtacttcctattgcatttg

SEQ ID NO: 922540 - DNA, 25 bp, Homo sapien
aaatgtgccgtctttatcgtccagg

SEQ ID NO: 922541 - DNA, 25 bp, Homo sapien
ctggtctccctacttgagcagctca

SEQ ID NO: 922542 - DNA, 25 bp, Homo sapien
actcagtcttggttgagcgtggtgg

SEQ ID NO: 922543 - DNA, 25 bp, Homo sapien
gaaactcagtcttggttgagcgtgg

SEQ ID NO: 922544 - DNA, 25 bp, Homo sapien
aactcagtcttggttgagcgtggtg

SEQ ID NO: 922545 - DNA, 25 bp, Homo sapien
aaactcagtcttggttgagcgtggt

SEQ ID NO: 922546 - DNA, 25 bp, Homo sapien
ggccctgcggatggagacccctact

SEQ ID NO: 922547 - DNA, 25 bp, Homo sapien
actccagtgcattcgaaagtatcca

SEQ ID NO: 922548 - DNA, 25 bp, Homo sapien
ggaagtggaggtagccgtgaacaga

SEQ ID NO: 922549 - DNA, 25 bp, Homo sapien
tagccgtgaacagagatcgtgccac

SEQ ID NO: 922550 - DNA, 25 bp, Homo sapien
gtctacttctatccacacagacccg

SEQ ID NO: 922551 - DNA, 25 bp, Homo sapien
tatccacacagacccggcaaccatc

SEQ ID NO: 922552 - DNA, 25 bp, Homo sapien
tttccagcaattggatttcttttta

SEQ ID NO: 922553 - DNA, 25 bp, Homo sapien
ttctatccacacagacccggcaacc

SEQ ID NO: 922554 - DNA, 25 bp, Homo sapien
ccagcactgggaaacttgcgtttat

SEQ ID NO: 922555 - DNA, 25 bp, Homo sapien
cactgggaaacttgcgtttatccat

SEQ ID NO: 922556 - DNA, 25 bp, Homo sapien
tgtccatccattttctgtattccag

SEQ ID NO: 922557 - DNA, 25 bp, Homo sapien
gcactgggaaacttgcgtttatcca

SEQ ID NO: 922558 - DNA, 25 bp, Homo sapien
ttgataaaaggtcatttaaattcca

SEQ ID NO: 922559 - DNA, 25 bp, Homo sapien
tgataaaaggtcatttaaattccac

SEQ ID NO: 922560 - DNA, 25 bp, Homo sapien
ggaccagcaagcttgttcacagcct

SEQ ID NO: 922561 - DNA, 25 bp, Homo sapien
ctgccttaaaaaccagggagttctg

SEQ ID NO: 922562 - DNA, 25 bp, Homo sapien
cacattgcagttgtggagaccttac

SEQ ID NO: 922563 - DNA, 25 bp, Homo sapien
tacgaccctgacctatgtagggaac

SEQ ID NO: 922564 - DNA, 25 bp, Homo sapien
agctgtatctctggctctcgtttcc

SEQ ID NO: 922565 - DNA, 25 bp, Homo sapien
ttacattttgtatcccgcacagttc

SEQ ID NO: 922566 - DNA, 25 bp, Homo sapien
cggagatgctctattccagccttct

SEQ ID NO: 922567 - DNA, 25 bp, Homo sapien
aaagtacagcctttccacaagcaac

SEQ ID NO: 922568 - DNA, 25 bp, Homo sapien
cagcagggcgctttgtgtttgagaa

SEQ ID NO: 922569 - DNA, 25 bp, Homo sapien
tgctcttgaagtctagccgctcctg

SEQ ID NO: 922570 - DNA, 25 bp, Homo sapien
ggacttacaacatagcaggctgcta

SEQ ID NO: 922571 - DNA, 25 bp, Homo sapien
ggtcaggcaacctacaggagggaat

SEQ ID NO: 922572 - DNA, 25 bp, Homo sapien
tagcttgaacgtttgtctcttccaa

SEQ ID NO: 922573 - DNA, 25 bp, Homo sapien
gcatcagtgtaccatcatacttggc

SEQ ID NO: 922574 - DNA, 25 bp, Homo sapien
tgatatagcttgaacgtttgtctct

SEQ ID NO: 922575 - DNA, 25 bp, Homo sapien
cacaggcatgcatcagtgtaccatc

SEQ ID NO: 922576 - DNA, 25 bp, Homo sapien
gagcacatgacaatagtacagactg

SEQ ID NO: 922577 - DNA, 25 bp, Homo sapien
catgacaatagtacagactgggact

SEQ ID NO: 922578 - DNA, 25 bp, Homo sapien
gatgagcacatgacaatagtacaga

SEQ ID NO: 922579 - DNA, 25 bp, Homo sapien
gcacatgacaatagtacagactggg

SEQ ID NO: 922580 - DNA, 25 bp, Homo sapien
cgaagtgagcaagcctaataggaag

SEQ ID NO: 922581 - DNA, 25 bp, Homo sapien
aggcaatgggcagtcaccagcaggt

SEQ ID NO: 922582 - DNA, 25 bp, Homo sapien
cttcagtgaacaggccgaagtgagc

SEQ ID NO: 922583 - DNA, 25 bp, Homo sapien
ccagtgtaaaagagaatagggccgg

SEQ ID NO: 922584 - DNA, 25 bp, Homo sapien
gttgtcccagctaccccagagtctg

SEQ ID NO: 922585 - DNA, 25 bp, Homo sapien
ccaagatcaaaccactgtgctccag

SEQ ID NO: 922586 - DNA, 25 bp, Homo sapien
cagagtctgaggcagaaggatagct

SEQ ID NO: 922587 - DNA, 25 bp, Homo sapien
gccaagatcaaaccactgtgctcca

SEQ ID NO: 922588 - DNA, 25 bp, Homo sapien
ggacagagcaagatagatcccttgc

SEQ ID NO: 922589 - DNA, 25 bp, Homo sapien
agattctcctaaggacagagcaaga

SEQ ID NO: 922590 - DNA, 25 bp, Homo sapien
gaagcttcgctcacccacccttact

SEQ ID NO: 922591 - DNA, 25 bp, Homo sapien
cagagcaagatagatcccttgcatg

SEQ ID NO: 922592 - DNA, 25 bp, Homo sapien
tatactctctgcgtatgccagatga

SEQ ID NO: 922593 - DNA, 25 bp, Homo sapien
attgcaccactaaacaccagtactg

SEQ ID NO: 922594 - DNA, 25 bp, Homo sapien
gatccccacaagctttcataggaga

SEQ ID NO: 922595 - DNA, 25 bp, Homo sapien
ggtattaagttgctcaaagatcccc

SEQ ID NO: 922596 - DNA, 25 bp, Homo sapien
ggaaccttttcattactctcagggc

SEQ ID NO: 922597 - DNA, 25 bp, Homo sapien
tcattactctcagggcttcgtggtc

SEQ ID NO: 922598 - DNA, 25 bp, Homo sapien
ctctcagggcttcgtggtcttttta

SEQ ID NO: 922599 - DNA, 25 bp, Homo sapien
tcagggcttcgtggtctttttagaa

SEQ ID NO: 922600 - DNA, 25 bp, Homo sapien
tattttattagccactccaggaggt

SEQ ID NO: 922601 - DNA, 25 bp, Homo sapien
cactccaggaggtaactaggaaata

SEQ ID NO: 922602 - DNA, 25 bp, Homo sapien
agccactccaggaggtaactaggaa

SEQ ID NO: 922603 - DNA, 25 bp, Homo sapien
tttattagccactccaggaggtaac

SEQ ID NO: 922604 - DNA, 25 bp, Homo sapien
ggttttttcctaaagctgatcacag

SEQ ID NO: 922605 - DNA, 25 bp, Homo sapien
gctgatcacagagtcatcctgtaat

SEQ ID NO: 922606 - DNA, 25 bp, Homo sapien
tgtaatgtcacaataattcctatca

SEQ ID NO: 922607 - DNA, 25 bp, Homo sapien
acggttgtgatatgaccagggtttt

SEQ ID NO: 922608 - DNA, 25 bp, Homo sapien
tttttaccaacagacttgatgttat

SEQ ID NO: 922609 - DNA, 25 bp, Homo sapien
ttttaccaacagacttgatgttatt

SEQ ID NO: 922610 - DNA, 25 bp, Homo sapien
ttaccaacagacttgatgttattac

SEQ ID NO: 922611 - DNA, 25 bp, Homo sapien
accaacagacttgatgttattactc

SEQ ID NO: 922612 - DNA, 25 bp, Homo sapien
aaccttctaaacatacaggaactcg

SEQ ID NO: 922613 - DNA, 25 bp, Homo sapien
tggcaaaccttctaaacatacagga

SEQ ID NO: 922614 - DNA, 25 bp, Homo sapien
caaaccttctaaacatacaggaact

SEQ ID NO: 922615 - DNA, 25 bp, Homo sapien
ctggcaaaccttctaaacatacagg

SEQ ID NO: 922616 - DNA, 25 bp, Homo sapien
tgcctctgcctctaaggatcagggc

SEQ ID NO: 922617 - DNA, 25 bp, Homo sapien
agaatctaagtcagaatgcagcaca

SEQ ID NO: 922618 - DNA, 25 bp, Homo sapien
tgtttttgatggcagaatctaagtc

SEQ ID NO: 922619 - DNA, 25 bp, Homo sapien
tctgcctctaaggatcagggcattc

SEQ ID NO: 922620 - DNA, 25 bp, Homo sapien
tccaggcactgtaccgtcactgtga

SEQ ID NO: 922621 - DNA, 25 bp, Homo sapien
gcggttaccaagctccactctaagg

SEQ ID NO: 922622 - DNA, 25 bp, Homo sapien
ggtgctgtgacatcgccgaagacac

SEQ ID NO: 922623 - DNA, 25 bp, Homo sapien
tgcgcccaatcggaactcgaggcgg

SEQ ID NO: 922624 - DNA, 25 bp, Homo sapien
gaaagagtctcactcaggccagcat

SEQ ID NO: 922625 - DNA, 25 bp, Homo sapien
tccatttcacaactgagggctctga

SEQ ID NO: 922626 - DNA, 25 bp, Homo sapien
gatgatggctgcagcttaaccagaa

SEQ ID NO: 922627 - DNA, 25 bp, Homo sapien
tgagatttgttcagggccaatgagc

SEQ ID NO: 922628 - DNA, 25 bp, Homo sapien
agctaacaaactgtccagttatatt

SEQ ID NO: 922629 - DNA, 25 bp, Homo sapien
tcctagttaactccactcagaacat

SEQ ID NO: 922630 - DNA, 25 bp, Homo sapien
ggaagacatcctagttaactccact

SEQ ID NO: 922631 - DNA, 25 bp, Homo sapien
aacaaactgtccagttatatttctc

SEQ ID NO: 922632 - DNA, 25 bp, Homo sapien
agttaactggacaataaactaggca

SEQ ID NO: 922633 - DNA, 25 bp, Homo sapien
aggtcactaaagttaactggacaat

SEQ ID NO: 922634 - DNA, 25 bp, Homo sapien
taactggacaataaactaggcagac

SEQ ID NO: 922635 - DNA, 25 bp, Homo sapien
ctggacaataaactaggcagacatt

SEQ ID NO: 922636 - DNA, 25 bp, Homo sapien
gaatctgtactcaaactgcacatgc

SEQ ID NO: 922637 - DNA, 25 bp, Homo sapien
aatctgtactcaaactgcacatgca

SEQ ID NO: 922638 - DNA, 25 bp, Homo sapien
gaattgaaggcatagtgtttggtgt

SEQ ID NO: 922639 - DNA, 25 bp, Homo sapien
caactgaattgaaggcatagtgttt

SEQ ID NO: 922640 - DNA, 25 bp, Homo sapien
ctgaattgaaggcatagtgtttggt

SEQ ID NO: 922641 - DNA, 25 bp, Homo sapien
gatggccagcaggaggctgacgaga

SEQ ID NO: 922642 - DNA, 25 bp, Homo sapien
ctgggaggcatcagcggaggaagag

SEQ ID NO: 922643 - DNA, 25 bp, Homo sapien
ggcatcagcggaggaagagaaaagt

SEQ ID NO: 922644 - DNA, 25 bp, Homo sapien
tgggaggcatcagcggaggaagaga

SEQ ID NO: 922645 - DNA, 25 bp, Homo sapien
gaggcatcagcggaggaagagaaaa

SEQ ID NO: 922646 - DNA, 25 bp, Homo sapien
ctgtgattgccttcaacaccgtatc

SEQ ID NO: 922647 - DNA, 25 bp, Homo sapien
gattgccttcaacaccgtatcagac

SEQ ID NO: 922648 - DNA, 25 bp, Homo sapien
tgattgccttcaacaccgtatcaga

SEQ ID NO: 922649 - DNA, 25 bp, Homo sapien
ttgccttcaacaccgtatcagacac

SEQ ID NO: 922650 - DNA, 25 bp, Homo sapien
tcttagaacaactcatcagctcagc

SEQ ID NO: 922651 - DNA, 25 bp, Homo sapien
taccagccccttgtctggaacctgg

SEQ ID NO: 922652 - DNA, 25 bp, Homo sapien
tctggaacctgggactccgagtccc

SEQ ID NO: 922653 - DNA, 25 bp, Homo sapien
tacagatctagcaagtaccagcccc

SEQ ID NO: 922654 - DNA, 25 bp, Homo sapien
tggagtacacagtgctggggttcac

SEQ ID NO: 922655 - DNA, 25 bp, Homo sapien
ctggagtacacagtgctggggttca

SEQ ID NO: 922656 - DNA, 25 bp, Homo sapien
agatggataggtgaggtcaccacat

SEQ ID NO: 922657 - DNA, 25 bp, Homo sapien
atggataggtgaggtcaccacattc

SEQ ID NO: 922658 - DNA, 25 bp, Homo sapien
gagatggataggtgaggtcaccaca

SEQ ID NO: 922659 - DNA, 25 bp, Homo sapien
gatggataggtgaggtcaccacatt

SEQ ID NO: 922660 - DNA, 25 bp, Homo sapien
cctcttttgaatggcaagatctttc

SEQ ID NO: 922661 - DNA, 25 bp, Homo sapien
tcttttgaatggcaagatctttcat

SEQ ID NO: 922662 - DNA, 25 bp, Homo sapien
ttttgaatggcaagatctttcatct

SEQ ID NO: 922663 - DNA, 25 bp, Homo sapien
tgatcctcttttgaatggcaagatc

SEQ ID NO: 922664 - DNA, 25 bp, Homo sapien
acagaacacatatttatagagatga

SEQ ID NO: 922665 - DNA, 25 bp, Homo sapien
ggacagaacacatatttatagagat

SEQ ID NO: 922666 - DNA, 25 bp, Homo sapien
ctggacagaacacatatttatagag

SEQ ID NO: 922667 - DNA, 25 bp, Homo sapien
acacatatttatagagatgagtcat

SEQ ID NO: 922668 - DNA, 25 bp, Homo sapien
tatcttctcaactcattctggaggc

SEQ ID NO: 922669 - DNA, 25 bp, Homo sapien
atcttctcaactcattctggaggca

SEQ ID NO: 922670 - DNA, 25 bp, Homo sapien
ttatcttctcaactcattctggagg

SEQ ID NO: 922671 - DNA, 25 bp, Homo sapien
cagcagtcgaccatctggcttaact

SEQ ID NO: 922672 - DNA, 25 bp, Homo sapien
acgccaagcaccgatacatcctgtg

SEQ ID NO: 922673 - DNA, 25 bp, Homo sapien
gaagcctgcagcagtcgaccatctg

SEQ ID NO: 922674 - DNA, 25 bp, Homo sapien
caagcaccgatacatcctgtggaag

SEQ ID NO: 922675 - DNA, 25 bp, Homo sapien
atggccaagcactcaagcacacatg

SEQ ID NO: 922676 - DNA, 25 bp, Homo sapien
tggccaagcactcaagcacacatgt

SEQ ID NO: 922677 - DNA, 25 bp, Homo sapien
cataacggtggaacttggctctgac

SEQ ID NO: 922678 - DNA, 25 bp, Homo sapien
ctctgacagggttcagcttggtggt

SEQ ID NO: 922679 - DNA, 25 bp, Homo sapien
tgcacataacggtggaacttggctc

SEQ ID NO: 922680 - DNA, 25 bp, Homo sapien
tcatgcacataacggtggaacttgg

SEQ ID NO: 922681 - DNA, 25 bp, Homo sapien
ttctccaaaacatctgcaacctcta

SEQ ID NO: 922682 - DNA, 25 bp, Homo sapien
caaaacatctgcaacctctaacgag

SEQ ID NO: 922683 - DNA, 25 bp, Homo sapien
caacctctaacgagtccttgcagaa

SEQ ID NO: 922684 - DNA, 25 bp, Homo sapien
taacgagtccttgcagaagccctga

SEQ ID NO: 922685 - DNA, 25 bp, Homo sapien
cttgtccatagagggagtatctgtc

SEQ ID NO: 922686 - DNA, 25 bp, Homo sapien
caatgcttgcttatcttcttccaca

SEQ ID NO: 922687 - DNA, 25 bp, Homo sapien
ccttcagttgctcttctaacttgac

SEQ ID NO: 922688 - DNA, 25 bp, Homo sapien
tcctcttccaactgctggcaactgt

SEQ ID NO: 922689 - DNA, 25 bp, Homo sapien
ctgcgtgcggaacagagaaggcctg

SEQ ID NO: 922690 - DNA, 25 bp, Homo sapien
gggatactgtgtggcaccagcctca

SEQ ID NO: 922691 - DNA, 25 bp, Homo sapien
tgccaacaccgggatactgtgtggc

SEQ ID NO: 922692 - DNA, 25 bp, Homo sapien
aacaccgggatactgtgtggcacca

SEQ ID NO: 922693 - DNA, 25 bp, Homo sapien
aattctatgaactccttagacactc

SEQ ID NO: 922694 - DNA, 25 bp, Homo sapien
tatgaactccttagacactctatcc

SEQ ID NO: 922695 - DNA, 25 bp, Homo sapien
gagaaattctatgaactccttagac

SEQ ID NO: 922696 - DNA, 25 bp, Homo sapien
tctatgaactccttagacactctat

SEQ ID NO: 922697 - DNA, 25 bp, Homo sapien
taactacacctcagtaagccagaga

SEQ ID NO: 922698 - DNA, 25 bp, Homo sapien
ggaccatattatcaagaacacagag

SEQ ID NO: 922699 - DNA, 25 bp, Homo sapien
ttttggctagggctcaaatggcaag

SEQ ID NO: 922700 - DNA, 25 bp, Homo sapien
tcaacccctattaagaggccacaag

SEQ ID NO: 922701 - DNA, 25 bp, Homo sapien
tgagcctctgaacctggcctgtctc

SEQ ID NO: 922702 - DNA, 25 bp, Homo sapien
ccaggcgggagtacaccggcgcatt

SEQ ID NO: 922703 - DNA, 25 bp, Homo sapien
ggcgggagtacaccggcgcattctc

SEQ ID NO: 922704 - DNA, 25 bp, Homo sapien
ggagtacaccggcgcattctcggct

SEQ ID NO: 922705 - DNA, 25 bp, Homo sapien
tctggaagcacacatgacatctatc

SEQ ID NO: 922706 - DNA, 25 bp, Homo sapien
gccaggtatcttgttgaatgccatt

SEQ ID NO: 922707 - DNA, 25 bp, Homo sapien
tctcaaagtgtcatgtctggaagca

SEQ ID NO: 922708 - DNA, 25 bp, Homo sapien
cacttctgaagaacacaggccaggt

SEQ ID NO: 922709 - DNA, 25 bp, Homo sapien
tccgcctcccggattgaaacgagtc

SEQ ID NO: 922710 - DNA, 25 bp, Homo sapien
ctagttaaattaacacacggattat

SEQ ID NO: 922711 - DNA, 25 bp, Homo sapien
gatcatgttcgtaacttgtttcctg

SEQ ID NO: 922712 - DNA, 25 bp, Homo sapien
ttagcacccagataaactttacctg

SEQ ID NO: 922713 - DNA, 25 bp, Homo sapien
tacagaggcttttgggacacaggtt

SEQ ID NO: 922714 - DNA, 25 bp, Homo sapien
tagtatcatgcacactgtacagagg

SEQ ID NO: 922715 - DNA, 25 bp, Homo sapien
cactgcacccaactcgagaatggtt

SEQ ID NO: 922716 - DNA, 25 bp, Homo sapien
caaactcatcgttcaaccttgggta

SEQ ID NO: 922717 - DNA, 25 bp, Homo sapien
gacagcatcagtgttggttcccagt

SEQ ID NO: 922718 - DNA, 25 bp, Homo sapien
ttttcagagaccgaggcctaaccac

SEQ ID NO: 922719 - DNA, 25 bp, Homo sapien
tctgacaagctatgaacagtgaggg

SEQ ID NO: 922720 - DNA, 25 bp, Homo sapien
gtctctcaaataagctctcgggcag

SEQ ID NO: 922721 - DNA, 25 bp, Homo sapien
acttggagaatgtgagggattgggc

SEQ ID NO: 922722 - DNA, 25 bp, Homo sapien
cttggagaatgtgagggattgggcc

SEQ ID NO: 922723 - DNA, 25 bp, Homo sapien
gaggtgctaagtctgagtatggaat

SEQ ID NO: 922724 - DNA, 25 bp, Homo sapien
tctgtgggtaaggtccagcaatcac

SEQ ID NO: 922725 - DNA, 25 bp, Homo sapien
taaaatcagagactctgtgggtaag

SEQ ID NO: 922726 - DNA, 25 bp, Homo sapien
ggtccagcaatcactgctttcacaa

SEQ ID NO: 922727 - DNA, 25 bp, Homo sapien
tttttgaaacaggatctgctactga

SEQ ID NO: 922728 - DNA, 25 bp, Homo sapien
ttttgaaacaggatctgctactgac

SEQ ID NO: 922729 - DNA, 25 bp, Homo sapien
tctgtttttgaaacaggatctgcta

SEQ ID NO: 922730 - DNA, 25 bp, Homo sapien
tgtttttgaaacaggatctgctact

SEQ ID NO: 922731 - DNA, 25 bp, Homo sapien
aggcatgcagtggaaaccctgagga

SEQ ID NO: 922732 - DNA, 25 bp, Homo sapien
atcaggcatgcagtggaaaccctga

SEQ ID NO: 922733 - DNA, 25 bp, Homo sapien
gcatgcagtggaaaccctgaggaga

SEQ ID NO: 922734 - DNA, 25 bp, Homo sapien
catgcagtggaaaccctgaggagat

SEQ ID NO: 922735 - DNA, 25 bp, Homo sapien
attttctctttgatgaccacagtca

SEQ ID NO: 922736 - DNA, 25 bp, Homo sapien
aaaattttctctttgatgaccacag

SEQ ID NO: 922737 - DNA, 25 bp, Homo sapien
taaaattttctctttgatgaccaca

SEQ ID NO: 922738 - DNA, 25 bp, Homo sapien
tggctaaaattttctctttgatgac

SEQ ID NO: 922739 - DNA, 25 bp, Homo sapien
cacttggagcagaaaccctgccagt

SEQ ID NO: 922740 - DNA, 25 bp, Homo sapien
ccttctgcctagctttgtggtactc

SEQ ID NO: 922741 - DNA, 25 bp, Homo sapien
gaaaccctgccagtcagggttgccg

SEQ ID NO: 922742 - DNA, 25 bp, Homo sapien
gccagtcagggttgccgtagtaacc

SEQ ID NO: 922743 - DNA, 25 bp, Homo sapien
tgcacaggaggtccgactgatgcac

SEQ ID NO: 922744 - DNA, 25 bp, Homo sapien
ttgcacaggaggtccgactgatgca

SEQ ID NO: 922745 - DNA, 25 bp, Homo sapien
cacaggaggtccgactgatgcacat

SEQ ID NO: 922746 - DNA, 25 bp, Homo sapien
cttgcacaggaggtccgactgatgc

SEQ ID NO: 922747 - DNA, 25 bp, Homo sapien
tgagaatgacttctggctgacagcc

SEQ ID NO: 922748 - DNA, 25 bp, Homo sapien
gatgcttaattctgacctcctgagg

SEQ ID NO: 922749 - DNA, 25 bp, Homo sapien
ccagcaaagaaatgaggacctcaga

SEQ ID NO: 922750 - DNA, 25 bp, Homo sapien
ggagcctgcttggacctctaatcta

SEQ ID NO: 922751 - DNA, 25 bp, Homo sapien
ctgttccaatgtgaggaatgctatg

SEQ ID NO: 922752 - DNA, 25 bp, Homo sapien
acatgctgttccaatgtgaggaatg

SEQ ID NO: 922753 - DNA, 25 bp, Homo sapien
ttaaactgctatcctttccacttcc

SEQ ID NO: 922754 - DNA, 25 bp, Homo sapien
tgctgttccaatgtgaggaatgcta

SEQ ID NO: 922755 - DNA, 25 bp, Homo sapien
ccagattggacatcagagctacaga

SEQ ID NO: 922756 - DNA, 25 bp, Homo sapien
gattggacatcagagctacagacag

SEQ ID NO: 922757 - DNA, 25 bp, Homo sapien
attggacatcagagctacagacagc

SEQ ID NO: 922758 - DNA, 25 bp, Homo sapien
ggacatcagagctacagacagcata

SEQ ID NO: 922759 - DNA, 25 bp, Homo sapien
cgtgtaatataagaaatatgactgt

SEQ ID NO: 922760 - DNA, 25 bp, Homo sapien
aaatatgactgtatatctggaaggc

SEQ ID NO: 922761 - DNA, 25 bp, Homo sapien
agaaatatgactgtatatctggaag

SEQ ID NO: 922762 - DNA, 25 bp, Homo sapien
taagaaatatgactgtatatctgga

SEQ ID NO: 922763 - DNA, 25 bp, Homo sapien
tttagaacatcggttgcaaagctgt

SEQ ID NO: 922764 - DNA, 25 bp, Homo sapien
gcaggagccaatgcactcagctcag

SEQ ID NO: 922765 - DNA, 25 bp, Homo sapien
catcggttgcaaagctgtttagatc

SEQ ID NO: 922766 - DNA, 25 bp, Homo sapien
gctgtttagatctttcaaaaacatc

SEQ ID NO: 922767 - DNA, 25 bp, Homo sapien
ggctgcaccgaatgttcctcctttc

SEQ ID NO: 922768 - DNA, 25 bp, Homo sapien
tttggaaactgccaaaggacactca

SEQ ID NO: 922769 - DNA, 25 bp, Homo sapien
gaaactgccaaaggacactcagagg

SEQ ID NO: 922770 - DNA, 25 bp, Homo sapien
caggcaagcataaatatgcagaaga

SEQ ID NO: 922771 - DNA, 25 bp, Homo sapien
acaggcaagcataaatatgcagaag

SEQ ID NO: 922772 - DNA, 25 bp, Homo sapien
ggactgccggacatctcgcagactt

SEQ ID NO: 922773 - DNA, 25 bp, Homo sapien
tctcgcagacttcgggcagcgatcg

SEQ ID NO: 922774 - DNA, 25 bp, Homo sapien
catcgatgcacaccgggcaccgagt

SEQ ID NO: 922775 - DNA, 25 bp, Homo sapien
gtgccaagaccgacaggcggcatcg

SEQ ID NO: 922776 - DNA, 25 bp, Homo sapien
gatgtggaaccaaacccgtaacatc

SEQ ID NO: 922777 - DNA, 25 bp, Homo sapien
tgatgtggaaccaaacccgtaacat

SEQ ID NO: 922778 - DNA, 25 bp, Homo sapien
ataaatacagccattataatactca

SEQ ID NO: 922779 - DNA, 25 bp, Homo sapien
cttccccactcacaggataattttc

SEQ ID NO: 922780 - DNA, 25 bp, Homo sapien
aatacagccattataatactcatgt

SEQ ID NO: 922781 - DNA, 25 bp, Homo sapien
tccagttcctgtagctttttataaa

SEQ ID NO: 922782 - DNA, 25 bp, Homo sapien
ccataggctgaagagctgcctctgc

SEQ ID NO: 922783 - DNA, 25 bp, Homo sapien
cccataggctgaagagctgcctctg

SEQ ID NO: 922784 - DNA, 25 bp, Homo sapien
cataggctgaagagctgcctctgca

SEQ ID NO: 922785 - DNA, 25 bp, Homo sapien
ataggctgaagagctgcctctgcat

SEQ ID NO: 922786 - DNA, 25 bp, Homo sapien
tgttcgatggcagaatccaagtcag

SEQ ID NO: 922787 - DNA, 25 bp, Homo sapien
cattctgtgttcgatggcagaatcc

SEQ ID NO: 922788 - DNA, 25 bp, Homo sapien
ctgtgttcgatggcagaatccaagt

SEQ ID NO: 922789 - DNA, 25 bp, Homo sapien
attctgtgttcgatggcagaatcca

SEQ ID NO: 922790 - DNA, 25 bp, Homo sapien
agtaacgtcagttgtattataagaa

SEQ ID NO: 922791 - DNA, 25 bp, Homo sapien
gtaacgtcagttgtattataagaag

SEQ ID NO: 922792 - DNA, 25 bp, Homo sapien
taacgtcagttgtattataagaagt

SEQ ID NO: 922793 - DNA, 25 bp, Homo sapien
aacgtcagttgtattataagaagtt

SEQ ID NO: 922794 - DNA, 25 bp, Homo sapien
cttcatgtgttgaattcataagatc

SEQ ID NO: 922795 - DNA, 25 bp, Homo sapien
atcttcatgtgttgaattcataaga

SEQ ID NO: 922796 - DNA, 25 bp, Homo sapien
tcatgtgttgaattcataagatcat

SEQ ID NO: 922797 - DNA, 25 bp, Homo sapien
catgtgttgaattcataagatcatg

SEQ ID NO: 922798 - DNA, 25 bp, Homo sapien
caagagtaaaaactccgtcacacaa

SEQ ID NO: 922799 - DNA, 25 bp, Homo sapien
cttcacatcttaaattcataacttc

SEQ ID NO: 922800 - DNA, 25 bp, Homo sapien
gctgtaaatcttcacatcttaaatt

SEQ ID NO: 922801 - DNA, 25 bp, Homo sapien
aatcttcacatcttaaattcataac

SEQ ID NO: 922802 - DNA, 25 bp, Homo sapien
cacatcttaaattcataacttcatg

SEQ ID NO: 922803 - DNA, 25 bp, Homo sapien
gagcatgtgccctcaaaagtggtaa

SEQ ID NO: 922804 - DNA, 25 bp, Homo sapien
tgtcacataaggtgcttcatggagc

SEQ ID NO: 922805 - DNA, 25 bp, Homo sapien
gcaacccacaggtctttgaagcata

SEQ ID NO: 922806 - DNA, 25 bp, Homo sapien
gatgcttgagcccaactacaccttc

SEQ ID NO: 922807 - DNA, 25 bp, Homo sapien
gccaggaattctgtaagtagatagc

SEQ ID NO: 922808 - DNA, 25 bp, Homo sapien
tccaagtaatatcctctcaaggcca

SEQ ID NO: 922809 - DNA, 25 bp, Homo sapien
tttccaagtaatatcctctcaaggc

SEQ ID NO: 922810 - DNA, 25 bp, Homo sapien
cctttccaagtaatatcctctcaag

SEQ ID NO: 922811 - DNA, 25 bp, Homo sapien
acatatagtactaaatggaagaggt

SEQ ID NO: 922812 - DNA, 25 bp, Homo sapien
aataaagagaaatatcctattgctt

SEQ ID NO: 922813 - DNA, 25 bp, Homo sapien
catatagtactaaatggaagaggta

SEQ ID NO: 922814 - DNA, 25 bp, Homo sapien
gaaatatcctattgctttaaggcaa

SEQ ID NO: 922815 - DNA, 25 bp, Homo sapien
aggccagccgggcctacatggaaaa

SEQ ID NO: 922816 - DNA, 25 bp, Homo sapien
gccagccgggcctacatggaaaaac

SEQ ID NO: 922817 - DNA, 25 bp, Homo sapien
ccgggcctacatggaaaaactcttg

SEQ ID NO: 922818 - DNA, 25 bp, Homo sapien
gcctacatggaaaaactcttgtctc

SEQ ID NO: 922819 - DNA, 25 bp, Homo sapien
ctgtgtaaatgctcatgaacaaact

SEQ ID NO: 922820 - DNA, 25 bp, Homo sapien
tttacatagatcagcaataagatta

SEQ ID NO: 922821 - DNA, 25 bp, Homo sapien
cagcaataagattattccatttctc

SEQ ID NO: 922822 - DNA, 25 bp, Homo sapien
tttccagtttagacacactgtattt

SEQ ID NO: 922823 - DNA, 25 bp, Homo sapien
tcaccaagttcgaacccctagctag

SEQ ID NO: 922824 - DNA, 25 bp, Homo sapien
caggagcatagcatacctagctaat

SEQ ID NO: 922825 - DNA, 25 bp, Homo sapien
gaacccctagctagttttcagagga

SEQ ID NO: 922826 - DNA, 25 bp, Homo sapien
acaggagcatagcatacctagctaa

SEQ ID NO: 922827 - DNA, 25 bp, Homo sapien
ggtttacctccgtctcgcaggatgg

SEQ ID NO: 922828 - DNA, 25 bp, Homo sapien
tactgatcggaatgcctcgagcaca

SEQ ID NO: 922829 - DNA, 25 bp, Homo sapien
ggccagccctatttatttcagccta

SEQ ID NO: 922830 - DNA, 25 bp, Homo sapien
tatttcagcctatacattttgcact

SEQ ID NO: 922831 - DNA, 25 bp, Homo sapien
ccagcaacacacagaacatggcggg

SEQ ID NO: 922832 - DNA, 25 bp, Homo sapien
cacacagaacatggcggggaagtcg

SEQ ID NO: 922833 - DNA, 25 bp, Homo sapien
gcaacacacagaacatggcggggaa

SEQ ID NO: 922834 - DNA, 25 bp, Homo sapien
gccagcaacacacagaacatggcgg

SEQ ID NO: 922835 - DNA, 25 bp, Homo sapien
ggaactgctgatccgggtggtctta

SEQ ID NO: 922836 - DNA, 25 bp, Homo sapien
aggacgcttccaggagagacaaaag

SEQ ID NO: 922837 - DNA, 25 bp, Homo sapien
tccgctgccagcaatggatgcacca

SEQ ID NO: 922838 - DNA, 25 bp, Homo sapien
tggtaccgaccgtcttaagtagaca

SEQ ID NO: 922839 - DNA, 25 bp, Homo sapien
agactccctttgacgttgacaaaag

SEQ ID NO: 922840 - DNA, 25 bp, Homo sapien
cagccgcgggttgggtgtgaaggaa

SEQ ID NO: 922841 - DNA, 25 bp, Homo sapien
gcagacagatatacatcccctgata

SEQ ID NO: 922842 - DNA, 25 bp, Homo sapien
gtgcgcgaagtgtgcagacagatat

SEQ ID NO: 922843 - DNA, 25 bp, Homo sapien
atgttcttcgtgtcggtggcgtacg

SEQ ID NO: 922844 - DNA, 25 bp, Homo sapien
tacgtgaagtgggagtcgatgatct

SEQ ID NO: 922845 - DNA, 25 bp, Homo sapien
tgttcttcgtgtcggtggcgtacgt

SEQ ID NO: 922846 - DNA, 25 bp, Homo sapien
ggtggcgtacgtgaagtgggagtcg

SEQ ID NO: 922847 - DNA, 25 bp, Homo sapien
ccaccatgtgtgagtacaggatatt

SEQ ID NO: 922848 - DNA, 25 bp, Homo sapien
gtccaccatgtgtgagtacaggata

SEQ ID NO: 922849 - DNA, 25 bp, Homo sapien
ccatgtgtgagtacaggatattgtc

SEQ ID NO: 922850 - DNA, 25 bp, Homo sapien
catgtgtgagtacaggatattgtcc

SEQ ID NO: 922851 - DNA, 25 bp, Homo sapien
agggcgacgagaaacgggatggacg

SEQ ID NO: 922852 - DNA, 25 bp, Homo sapien
caacatccgccatcctgaagatgat

SEQ ID NO: 922853 - DNA, 25 bp, Homo sapien
ttcctctgcgccgaccgctgtcccc

SEQ ID NO: 922854 - DNA, 25 bp, Homo sapien
cgagaaacgggatggacgtcaggtt

SEQ ID NO: 922855 - DNA, 25 bp, Homo sapien
ctccaggtcgaaagacgccggtggt

SEQ ID NO: 922856 - DNA, 25 bp, Homo sapien
gtcgaaagacgccggtggtgggcac

SEQ ID NO: 922857 - DNA, 25 bp, Homo sapien
tccaggtcgaaagacgccggtggtg

SEQ ID NO: 922858 - DNA, 25 bp, Homo sapien
caggtcgaaagacgccggtggtggg

SEQ ID NO: 922859 - DNA, 25 bp, Homo sapien
aggtagctcgaggtggcgatgcagt

SEQ ID NO: 922860 - DNA, 25 bp, Homo sapien
gtagctcgaggtggcgatgcagtct

SEQ ID NO: 922861 - DNA, 25 bp, Homo sapien
tagctcgaggtggcgatgcagtcta

SEQ ID NO: 922862 - DNA, 25 bp, Homo sapien
agctcgaggtggcgatgcagtctac

SEQ ID NO: 922863 - DNA, 25 bp, Homo sapien
gatggcgctgacgtaccgatgctca

SEQ ID NO: 922864 - DNA, 25 bp, Homo sapien
gctgacgtaccgatgctcaaaggtg

SEQ ID NO: 922865 - DNA, 25 bp, Homo sapien
ggtcgtagcactcgtggatgccggg

SEQ ID NO: 922866 - DNA, 25 bp, Homo sapien
ggcgctgacgtaccgatgctcaaag

SEQ ID NO: 922867 - DNA, 25 bp, Homo sapien
atgttctggtagacgagcttggtga

SEQ ID NO: 922868 - DNA, 25 bp, Homo sapien
tgttctggtagacgagcttggtgaa

SEQ ID NO: 922869 - DNA, 25 bp, Homo sapien
tctggtagacgagcttggtgaagcc

SEQ ID NO: 922870 - DNA, 25 bp, Homo sapien
ttctggtagacgagcttggtgaagc

SEQ ID NO: 922871 - DNA, 25 bp, Homo sapien
ggcgttgatccgcttggactccttc

SEQ ID NO: 922872 - DNA, 25 bp, Homo sapien
atctcggcgttgatccgcttggact

SEQ ID NO: 922873 - DNA, 25 bp, Homo sapien
tcggcgttgatccgcttggactcct

SEQ ID NO: 922874 - DNA, 25 bp, Homo sapien
tctcggcgttgatccgcttggactc

SEQ ID NO: 922875 - DNA, 25 bp, Homo sapien
atcgctcaggcaacacgccatcatg

SEQ ID NO: 922876 - DNA, 25 bp, Homo sapien
tttggccgaagccgcctcggtcgcc

SEQ ID NO: 922877 - DNA, 25 bp, Homo sapien
ctttggccgaagccgcctcggtcgc

SEQ ID NO: 922878 - DNA, 25 bp, Homo sapien
ttttcattaagggagcaagcaattt

SEQ ID NO: 922879 - DNA, 25 bp, Homo sapien
tccaagaagtagatttctttcagct

SEQ ID NO: 922880 - DNA, 25 bp, Homo sapien
aaatccaagaagtagatttctttca

SEQ ID NO: 922881 - DNA, 25 bp, Homo sapien
cattaagggagcaagcaattttctc

SEQ ID NO: 922882 - DNA, 25 bp, Homo sapien
tcacctgtacagcttaaatgctgaa

SEQ ID NO: 922883 - DNA, 25 bp, Homo sapien
gatgcttaacattatgctaggacag

SEQ ID NO: 922884 - DNA, 25 bp, Homo sapien
aaacacattgggaacgatgcttaac

SEQ ID NO: 922885 - DNA, 25 bp, Homo sapien
tctagaagtggagttagtgtgccaa

SEQ ID NO: 922886 - DNA, 25 bp, Homo sapien
ttgctgtatacctttaatgaggtcc

SEQ ID NO: 922887 - DNA, 25 bp, Homo sapien
gctgtatacctttaatgaggtcccc

SEQ ID NO: 922888 - DNA, 25 bp, Homo sapien
tgtatacctttaatgaggtcccctc

SEQ ID NO: 922889 - DNA, 25 bp, Homo sapien
tgctgtatacctttaatgaggtccc

SEQ ID NO: 922890 - DNA, 25 bp, Homo sapien
tatttaaagaccttggcgcgatctc

SEQ ID NO: 922891 - DNA, 25 bp, Homo sapien
cagataagaaatggacctgggatgg

SEQ ID NO: 922892 - DNA, 25 bp, Homo sapien
ggtgcttgggactcatctccccagg

SEQ ID NO: 922893 - DNA, 25 bp, Homo sapien
gattttgaccgcctctagtatagga

SEQ ID NO: 922894 - DNA, 25 bp, Homo sapien
tcatcaagaggtaaggcctgaccag

SEQ ID NO: 922895 - DNA, 25 bp, Homo sapien
gacccaactgcttcgggatcgccaa

SEQ ID NO: 922896 - DNA, 25 bp, Homo sapien
gaaggccctcaaaaggacaggcagc

SEQ ID NO: 922897 - DNA, 25 bp, Homo sapien
tggcatctcggaacccatcaaggtg

SEQ ID NO: 922898 - DNA, 25 bp, Homo sapien
gaacatgttgcgtttttgccagtga

SEQ ID NO: 922899 - DNA, 25 bp, Homo sapien
acatgttgcgtttttgccagtgagg

SEQ ID NO: 922900 - DNA, 25 bp, Homo sapien
tctttgaacatgttgcgtttttgcc

SEQ ID NO: 922901 - DNA, 25 bp, Homo sapien
ttctccaggctggcgtgttggtgtc

SEQ ID NO: 922902 - DNA, 25 bp, Homo sapien
tattaaaaggaagactgagccggca

SEQ ID NO: 922903 - DNA, 25 bp, Homo sapien
gaaatgcagccacatgcccggtgtg

SEQ ID NO: 922904 - DNA, 25 bp, Homo sapien
cccggtgtgtctgggcatattaaaa

SEQ ID NO: 922905 - DNA, 25 bp, Homo sapien
caagagttgtgatcctgcagtagaa

SEQ ID NO: 922906 - DNA, 25 bp, Homo sapien
aatacagaatggacctgagtctgca

SEQ ID NO: 922907 - DNA, 25 bp, Homo sapien
ttttgtcctcgtttgcaaatacaga

SEQ ID NO: 922908 - DNA, 25 bp, Homo sapien
ttaggcaccctaacatggtgaaagg

SEQ ID NO: 922909 - DNA, 25 bp, Homo sapien
tgtatttttaggcaccctaacatgg

SEQ ID NO: 922910 - DNA, 25 bp, Homo sapien
cacaccacagagagactgagcatga

SEQ ID NO: 922911 - DNA, 25 bp, Homo sapien
ttctgtgaggcccacccagtagaca

SEQ ID NO: 922912 - DNA, 25 bp, Homo sapien
gaaaccgagtggtgaagagatgact

SEQ ID NO: 922913 - DNA, 25 bp, Homo sapien
cagggagacaaaccctgttaagaat

SEQ ID NO: 922914 - DNA, 25 bp, Homo sapien
cgcctggctgagattgtgctttttt

SEQ ID NO: 922915 - DNA, 25 bp, Homo sapien
caaaagagatgactcaggccagacg

SEQ ID NO: 922916 - DNA, 25 bp, Homo sapien
caatgagccatgattccagcgtgca

SEQ ID NO: 922917 - DNA, 25 bp, Homo sapien
gtcattaaattgcaagagccccact

SEQ ID NO: 922918 - DNA, 25 bp, Homo sapien
attaaaatctagaggccctgcctgc

SEQ ID NO: 922919 - DNA, 25 bp, Homo sapien
gggtcaatttcaggcctcaggtcaa

SEQ ID NO: 922920 - DNA, 25 bp, Homo sapien
ccctgagggctgaacaccattggta

SEQ ID NO: 922921 - DNA, 25 bp, Homo sapien
tagctggtagctctatactgcccaa

SEQ ID NO: 922922 - DNA, 25 bp, Homo sapien
tgccaaagacagatcaccttttaga

SEQ ID NO: 922923 - DNA, 25 bp, Homo sapien
agaaaaggagcaccctgcttagaaa

SEQ ID NO: 922924 - DNA, 25 bp, Homo sapien
gcagcaagcaacaggatgggtggaa

SEQ ID NO: 922925 - DNA, 25 bp, Homo sapien
tcttcagcagattcagtagagaggg

SEQ ID NO: 922926 - DNA, 25 bp, Homo sapien
ttgctgaaggctcttgcaagatcct

SEQ ID NO: 922927 - DNA, 25 bp, Homo sapien
cacacagcctcttagcctgtgaggc

SEQ ID NO: 922928 - DNA, 25 bp, Homo sapien
aggagaggagatcaaggcaagcatg

SEQ ID NO: 922929 - DNA, 25 bp, Homo sapien
acagctagtgttccctaggccaagg

SEQ ID NO: 922930 - DNA, 25 bp, Homo sapien
cctcttagcctgtgaggcgggtgct

SEQ ID NO: 922931 - DNA, 25 bp, Homo sapien
tggactgcaaagctagtgacttgag

SEQ ID NO: 922932 - DNA, 25 bp, Homo sapien
ctggactgcaaagctagtgacttga

SEQ ID NO: 922933 - DNA, 25 bp, Homo sapien
cctggactgcaaagctagtgacttg

SEQ ID NO: 922934 - DNA, 25 bp, Homo sapien
catcagagaaaagggcgactgtgca

SEQ ID NO: 922935 - DNA, 25 bp, Homo sapien
ggttttcaaacctcagaagcaacag

SEQ ID NO: 922936 - DNA, 25 bp, Homo sapien
aatcaggagcattgaggcagcggtt

SEQ ID NO: 922937 - DNA, 25 bp, Homo sapien
gattggagaaggcaaaactagggca

SEQ ID NO: 922938 - DNA, 25 bp, Homo sapien
aaggacaggagagccccgcctgttt

SEQ ID NO: 922939 - DNA, 25 bp, Homo sapien
ggcctcttcatgtagggcttgctgc

SEQ ID NO: 922940 - DNA, 25 bp, Homo sapien
aagaggcctcttcatgtagggcttg

SEQ ID NO: 922941 - DNA, 25 bp, Homo sapien
accaaagaggcctcttcatgtaggg

SEQ ID NO: 922942 - DNA, 25 bp, Homo sapien
ggcttcagtttccctacttgtgaaa

SEQ ID NO: 922943 - DNA, 25 bp, Homo sapien
tttccctacttgtgaaataggaaga

SEQ ID NO: 922944 - DNA, 25 bp, Homo sapien
ctacttgtgaaataggaagaggctg

SEQ ID NO: 922945 - DNA, 25 bp, Homo sapien
cagtttccctacttgtgaaatagga

SEQ ID NO: 922946 - DNA, 25 bp, Homo sapien
tctctgagtcaccaagtgcccatga

SEQ ID NO: 922947 - DNA, 25 bp, Homo sapien
agccactgagcaccgccccgtttta

SEQ ID NO: 922948 - DNA, 25 bp, Homo sapien
ctgagcaccgccccgttttaaggat

SEQ ID NO: 922949 - DNA, 25 bp, Homo sapien
tgcccatgaggggtcgggcattttt

SEQ ID NO: 922950 - DNA, 25 bp, Homo sapien
tatcttacatactcacaatagtatc

SEQ ID NO: 922951 - DNA, 25 bp, Homo sapien
atcttacatactcacaatagtatca

SEQ ID NO: 922952 - DNA, 25 bp, Homo sapien
attatcttacatactcacaatagta

SEQ ID NO: 922953 - DNA, 25 bp, Homo sapien
ttatcttacatactcacaatagtat

SEQ ID NO: 922954 - DNA, 25 bp, Homo sapien
gagtctctatatgttgctcaaggct

SEQ ID NO: 922955 - DNA, 25 bp, Homo sapien
taaagacctctaactaggcagggag

SEQ ID NO: 922956 - DNA, 25 bp, Homo sapien
tgcaatcgctgcagccatgaactct

SEQ ID NO: 922957 - DNA, 25 bp, Homo sapien
tattatcccacgcttctgctacaga

SEQ ID NO: 922958 - DNA, 25 bp, Homo sapien
ccctgctgtgaatggtcgtaattac

SEQ ID NO: 922959 - DNA, 25 bp, Homo sapien
tatgcaggaattcaagcaggagctc

SEQ ID NO: 922960 - DNA, 25 bp, Homo sapien
ttccatacaccacacagcattaggg

SEQ ID NO: 922961 - DNA, 25 bp, Homo sapien
ggtgcactcacagttcccagaagag

SEQ ID NO: 922962 - DNA, 25 bp, Homo sapien
gattgccttcctgtctaatgagcca

SEQ ID NO: 922963 - DNA, 25 bp, Homo sapien
agacagggtctagctcagttgccca

SEQ ID NO: 922964 - DNA, 25 bp, Homo sapien
acagggtctagctcagttgcccagg

SEQ ID NO: 922965 - DNA, 25 bp, Homo sapien
taatttgtttgttgttagtttgaga

SEQ ID NO: 922966 - DNA, 25 bp, Homo sapien
tgagacagggtctagctcagttgcc

SEQ ID NO: 922967 - DNA, 25 bp, Homo sapien
aaaagagactcaagctgcaataggg

SEQ ID NO: 922968 - DNA, 25 bp, Homo sapien
aaaaagagactcaagctgcaatagg

SEQ ID NO: 922969 - DNA, 25 bp, Homo sapien
agagactcaagctgcaatagggtct

SEQ ID NO: 922970 - DNA, 25 bp, Homo sapien
aagagactcaagctgcaatagggtc

SEQ ID NO: 922971 - DNA, 25 bp, Homo sapien
aaggctattgaatgactcagttccc

SEQ ID NO: 922972 - DNA, 25 bp, Homo sapien
gaagccacccgggagataggtgacc

SEQ ID NO: 922973 - DNA, 25 bp, Homo sapien
gctgtgaatttacatgaccagggtg

SEQ ID NO: 922974 - DNA, 25 bp, Homo sapien
tacgtatttgtcttgggtggacaga

SEQ ID NO: 922975 - DNA, 25 bp, Homo sapien
ccttctttctatagctactgtcggg

SEQ ID NO: 922976 - DNA, 25 bp, Homo sapien
taagccttctttctatagctactgt

SEQ ID NO: 922977 - DNA, 25 bp, Homo sapien
tctatagctactgtcggggaggccg

SEQ ID NO: 922978 - DNA, 25 bp, Homo sapien
actaagccttctttctatagctact

SEQ ID NO: 922979 - DNA, 25 bp, Homo sapien
ctccaacaccgttgtctgcatggga

SEQ ID NO: 922980 - DNA, 25 bp, Homo sapien
cacatcccactgctgaaaggaaggg

SEQ ID NO: 922981 - DNA, 25 bp, Homo sapien
gagatggaacgtgccgttgcttccc

SEQ ID NO: 922982 - DNA, 25 bp, Homo sapien
tggtctttgggcccaagactccaac

SEQ ID NO: 922983 - DNA, 25 bp, Homo sapien
tgttccaacgactcatcagtctgct

SEQ ID NO: 922984 - DNA, 25 bp, Homo sapien
cagatagggtctgcagactccaagc

SEQ ID NO: 922985 - DNA, 25 bp, Homo sapien
gcagtaagtcatgacggcaccacta

SEQ ID NO: 922986 - DNA, 25 bp, Homo sapien
gaggccaagcgacccagatagggtc

SEQ ID NO: 922987 - DNA, 25 bp, Homo sapien
aatgtcaggccttgagagcccattc

SEQ ID NO: 922988 - DNA, 25 bp, Homo sapien
caatgtcaggccttgagagcccatt

SEQ ID NO: 922989 - DNA, 25 bp, Homo sapien
atgtcaggccttgagagcccattca

SEQ ID NO: 922990 - DNA, 25 bp, Homo sapien
aacacgtacgacatccactggctgg

SEQ ID NO: 922991 - DNA, 25 bp, Homo sapien
acatggtcatcattagccagctgca

SEQ ID NO: 922992 - DNA, 25 bp, Homo sapien
gaagatcctgaaggcccgaaagcat

SEQ ID NO: 922993 - DNA, 25 bp, Homo sapien
ggcccgaaagcatgtccacatggtc

SEQ ID NO: 922994 - DNA, 25 bp, Homo sapien
tccagacccaggtgtactacaatag

SEQ ID NO: 922995 - DNA, 25 bp, Homo sapien
ctgggatccagacccaggtgtacta

SEQ ID NO: 922996 - DNA, 25 bp, Homo sapien
gacccaggtgtactacaatagttcc

SEQ ID NO: 922997 - DNA, 25 bp, Homo sapien
ggtgtactacaatagttcctgcctc

SEQ ID NO: 922998 - DNA, 25 bp, Homo sapien
tataattccatagtctcagtgatta

SEQ ID NO: 922999 - DNA, 25 bp, Homo sapien
catagtctcagtgattacctttttt

SEQ ID NO: 923000 - DNA, 25 bp, Homo sapien
tccatagtctcagtgattacctttt

SEQ ID NO: 923001 - DNA, 25 bp, Homo sapien
aattccatagtctcagtgattacct

SEQ ID NO: 923002 - DNA, 25 bp, Homo sapien
agccactgtgctgacctgcatgttt

SEQ ID NO: 923003 - DNA, 25 bp, Homo sapien
gggatcacatgtgcctgcccccaca

SEQ ID NO: 923004 - DNA, 25 bp, Homo sapien
cactgtgctgacctgcatgtttttt

SEQ ID NO: 923005 - DNA, 25 bp, Homo sapien
tgggatcacatgtgcctgcccccac

SEQ ID NO: 923006 - DNA, 25 bp, Homo sapien
ggtgggcatgcaatagatggcttac

SEQ ID NO: 923007 - DNA, 25 bp, Homo sapien
tgaaaaaaatatagcccctctccac

SEQ ID NO: 923008 - DNA, 25 bp, Homo sapien
aacaaggacaggtatccccaagagg

SEQ ID NO: 923009 - DNA, 25 bp, Homo sapien
aatagatggcttaccaccttgaaaa

SEQ ID NO: 923010 - DNA, 25 bp, Homo sapien
atcaggcaagatcaggcgcattcag

SEQ ID NO: 923011 - DNA, 25 bp, Homo sapien
cctgcttcccttctgagatcaggca

SEQ ID NO: 923012 - DNA, 25 bp, Homo sapien
caggcaagatcaggcgcattcaggg

SEQ ID NO: 923013 - DNA, 25 bp, Homo sapien
gcttcccttctgagatcaggcaaga

SEQ ID NO: 923014 - DNA, 25 bp, Homo sapien
ggtggcatagcccagctagaagcca

SEQ ID NO: 923015 - DNA, 25 bp, Homo sapien
gaccctaggccctgactcctgtcag

SEQ ID NO: 923016 - DNA, 25 bp, Homo sapien
ggcatagcccagctagaagccacct

SEQ ID NO: 923017 - DNA, 25 bp, Homo sapien
aagagctgatcacaaacctgggcca

SEQ ID NO: 923018 - DNA, 25 bp, Homo sapien
aaatgtgccagctaaaaaggtgtac

SEQ ID NO: 923019 - DNA, 25 bp, Homo sapien
tgtgccagctaaaaaggtgtacatt

SEQ ID NO: 923020 - DNA, 25 bp, Homo sapien
cagctaaaaaggtgtacattcttca

SEQ ID NO: 923021 - DNA, 25 bp, Homo sapien
tgccagctaaaaaggtgtacattct

SEQ ID NO: 923022 - DNA, 25 bp, Homo sapien
ttatgttaacatttgtttctcattc

SEQ ID NO: 923023 - DNA, 25 bp, Homo sapien
tgttaacatttgtttctcattccac

SEQ ID NO: 923024 - DNA, 25 bp, Homo sapien
taactgagattttattatgttaaca

SEQ ID NO: 923025 - DNA, 25 bp, Homo sapien
tatttttaactgagattttattatg

SEQ ID NO: 923026 - DNA, 25 bp, Homo sapien
cagccaagctctgagcacttagaat

SEQ ID NO: 923027 - DNA, 25 bp, Homo sapien
ttcagccaagctctgagcacttaga

SEQ ID NO: 923028 - DNA, 25 bp, Homo sapien
tcttcagccaagctctgagcactta

SEQ ID NO: 923029 - DNA, 25 bp, Homo sapien
atcatcttcagccaagctctgagca

SEQ ID NO: 923030 - DNA, 25 bp, Homo sapien
aaagcatctggaacactagtggtgg

SEQ ID NO: 923031 - DNA, 25 bp, Homo sapien
tctaattgttgggagcttagtcaaa

SEQ ID NO: 923032 - DNA, 25 bp, Homo sapien
tgggagcttagtcaaaagcatctgg

SEQ ID NO: 923033 - DNA, 25 bp, Homo sapien
tagtcaaaagcatctggaacactag

SEQ ID NO: 923034 - DNA, 25 bp, Homo sapien
tggtctacgcccttctcatattcac

SEQ ID NO: 923035 - DNA, 25 bp, Homo sapien
cacacagcaattccgtttgtcagat

SEQ ID NO: 923036 - DNA, 25 bp, Homo sapien
tttgtcagatggtctacgcccttct

SEQ ID NO: 923037 - DNA, 25 bp, Homo sapien
gcctgcagtaactgctgtggctgtc

SEQ ID NO: 923038 - DNA, 25 bp, Homo sapien
taaaaagggccccagcgctcattct

SEQ ID NO: 923039 - DNA, 25 bp, Homo sapien
aaaagggccccagcgctcattcttt

SEQ ID NO: 923040 - DNA, 25 bp, Homo sapien
ccaataaaaagggccccagcgctca

SEQ ID NO: 923041 - DNA, 25 bp, Homo sapien
ttcttccatctcaaagcctgttctt

SEQ ID NO: 923042 - DNA, 25 bp, Homo sapien
aagcattcacctgtcatgggcctga

SEQ ID NO: 923043 - DNA, 25 bp, Homo sapien
tgaaaaagccctgccaagtgaagga

SEQ ID NO: 923044 - DNA, 25 bp, Homo sapien
cggagtgtctgtacggcctggtcct

SEQ ID NO: 923045 - DNA, 25 bp, Homo sapien
gatgcaaagtgagcttcctcagccg

SEQ ID NO: 923046 - DNA, 25 bp, Homo sapien
gattggtgaaatagtagccatcctc

SEQ ID NO: 923047 - DNA, 25 bp, Homo sapien
cagattggtgaaatagtagccatcc

SEQ ID NO: 923048 - DNA, 25 bp, Homo sapien
atcctctccagtcatcagtcggctt

SEQ ID NO: 923049 - DNA, 25 bp, Homo sapien
ccagtcatcagtcggcttggattgc

SEQ ID NO: 923050 - DNA, 25 bp, Homo sapien
gctgacgccagctcgttctaggtga

SEQ ID NO: 923051 - DNA, 25 bp, Homo sapien
tgacgccagctcgttctaggtgatc

SEQ ID NO: 923052 - DNA, 25 bp, Homo sapien
tgctgacgccagctcgttctaggtg

SEQ ID NO: 923053 - DNA, 25 bp, Homo sapien
cgccagctcgttctaggtgatcttg

SEQ ID NO: 923054 - DNA, 25 bp, Homo sapien
tgcaggccagcttgtctcgaggcac

SEQ ID NO: 923055 - DNA, 25 bp, Homo sapien
gatgcaggccagcttgtctcgaggc

SEQ ID NO: 923056 - DNA, 25 bp, Homo sapien
aggccagcttgtctcgaggcacacg

SEQ ID NO: 923057 - DNA, 25 bp, Homo sapien
ggccagcttgtctcgaggcacacgc

SEQ ID NO: 923058 - DNA, 25 bp, Homo sapien
agaaaagacagtatttcccatgaga

SEQ ID NO: 923059 - DNA, 25 bp, Homo sapien
tctttgtactggatgcgagaataca

SEQ ID NO: 923060 - DNA, 25 bp, Homo sapien
taatcacaacgtaagctgcctctga

SEQ ID NO: 923061 - DNA, 25 bp, Homo sapien
tcaatttgcataccgctttttagaa

SEQ ID NO: 923062 - DNA, 25 bp, Homo sapien
ttagaaatgtggctactacaaaaag

SEQ ID NO: 923063 - DNA, 25 bp, Homo sapien
catggctgagcggggccacgtgcct

SEQ ID NO: 923064 - DNA, 25 bp, Homo sapien
tggctgagcggggccacgtgcctcc

SEQ ID NO: 923065 - DNA, 25 bp, Homo sapien
atggctgagcggggccacgtgcctc

SEQ ID NO: 923066 - DNA, 25 bp, Homo sapien
gcgggtggacgctgggaccgagccc

SEQ ID NO: 923067 - DNA, 25 bp, Homo sapien
tggccaacgagccacagacagtcct

SEQ ID NO: 923068 - DNA, 25 bp, Homo sapien
aagcgcggacgcaggttcattggcc

SEQ ID NO: 923069 - DNA, 25 bp, Homo sapien
ttcgagcgctttgtggccgacctgc

SEQ ID NO: 923070 - DNA, 25 bp, Homo sapien
gcctggcgtttacgctggccaacga

SEQ ID NO: 923071 - DNA, 25 bp, Homo sapien
cagcggctgcaaccagtgcaggacc

SEQ ID NO: 923072 - DNA, 25 bp, Homo sapien
agagccagcgccgactttgggcctg

SEQ ID NO: 923073 - DNA, 25 bp, Homo sapien
atcaccagcggcgtggactgcggcc

SEQ ID NO: 923074 - DNA, 25 bp, Homo sapien
gtgcaggaccgccagtgccgcctgg

SEQ ID NO: 923075 - DNA, 25 bp, Homo sapien
ggcagcagcagactatccttatgct

SEQ ID NO: 923076 - DNA, 25 bp, Homo sapien
tgaaggagcagaaccgacgcctcac

SEQ ID NO: 923077 - DNA, 25 bp, Homo sapien
gaagtcggcgctcataatgaagcag

SEQ ID NO: 923078 - DNA, 25 bp, Homo sapien
tcatctagcccgtttgggctgggcg

SEQ ID NO: 923079 - DNA, 25 bp, Homo sapien
gatgaacttctaatttgctacatta

SEQ ID NO: 923080 - DNA, 25 bp, Homo sapien
taattctttagatgaacttctaatt

SEQ ID NO: 923081 - DNA, 25 bp, Homo sapien
acgccccaccaccatcaaactgtct

SEQ ID NO: 923082 - DNA, 25 bp, Homo sapien
caccaccatcaaactgtcttttaat

SEQ ID NO: 923083 - DNA, 25 bp, Homo sapien
cttgccatgttgctatatttgtact

SEQ ID NO: 923084 - DNA, 25 bp, Homo sapien
tgccatgttgctatatttgtacttt

SEQ ID NO: 923085 - DNA, 25 bp, Homo sapien
tcttgccatgttgctatatttgtac

SEQ ID NO: 923086 - DNA, 25 bp, Homo sapien
ccatgttgctatatttgtactttta

SEQ ID NO: 923087 - DNA, 25 bp, Homo sapien
gatgctcgcgagaaagattgttacc

SEQ ID NO: 923088 - DNA, 25 bp, Homo sapien
tataagtgagtaccattgcaccagc

SEQ ID NO: 923089 - DNA, 25 bp, Homo sapien
tctgcggtgtgaacccaagtagatc

SEQ ID NO: 923090 - DNA, 25 bp, Homo sapien
gaccagatctttctagcgatgctcg

SEQ ID NO: 923091 - DNA, 25 bp, Homo sapien
tatacactgcagtgcccaaatctgt

SEQ ID NO: 923092 - DNA, 25 bp, Homo sapien
ttgcctaggagggaatgtagtagct

SEQ ID NO: 923093 - DNA, 25 bp, Homo sapien
tgttcacagacgtaactgtagctca

SEQ ID NO: 923094 - DNA, 25 bp, Homo sapien
tctaactttaacatgggtgacagca

SEQ ID NO: 923095 - DNA, 25 bp, Homo sapien
cagtatctgtgaaaccgtgggaggt

SEQ ID NO: 923096 - DNA, 25 bp, Homo sapien
gcaaataaggtaactctcaggcccc

SEQ ID NO: 923097 - DNA, 25 bp, Homo sapien
caataaggatccctaagtccaaggt

SEQ ID NO: 923098 - DNA, 25 bp, Homo sapien
tatcccataggaacagatactcagg

SEQ ID NO: 923099 - DNA, 25 bp, Homo sapien
cagggaatatatcttgaggtcatca

SEQ ID NO: 923100 - DNA, 25 bp, Homo sapien
tcctcttgaaaaatgaaacgctaac

SEQ ID NO: 923101 - DNA, 25 bp, Homo sapien
catctcaccagggaatatatcttga

SEQ ID NO: 923102 - DNA, 25 bp, Homo sapien
gctaacatttcaagtgtgccaggca

SEQ ID NO: 923103 - DNA, 25 bp, Homo sapien
gaaccgttaaggtacatatgctcat

SEQ ID NO: 923104 - DNA, 25 bp, Homo sapien
ttgcatctccgaaaacaaaccaacc

SEQ ID NO: 923105 - DNA, 25 bp, Homo sapien
tagacagtgtctaaggaacgcacat

SEQ ID NO: 923106 - DNA, 25 bp, Homo sapien
gaaatccgtcattttcagcagctag

SEQ ID NO: 923107 - DNA, 25 bp, Homo sapien
gacttggccagtggaaacccctcca

SEQ ID NO: 923108 - DNA, 25 bp, Homo sapien
tggatcttctgaaatgtccccaaaa

SEQ ID NO: 923109 - DNA, 25 bp, Homo sapien
tcaaatttatcccagacttggccag

SEQ ID NO: 923110 - DNA, 25 bp, Homo sapien
caatgggatgatctcagatcgccgc

SEQ ID NO: 923111 - DNA, 25 bp, Homo sapien
tatccatgtcttaaagagaagtatg

SEQ ID NO: 923112 - DNA, 25 bp, Homo sapien
tccatgtcttaaagagaagtatgtt

SEQ ID NO: 923113 - DNA, 25 bp, Homo sapien
gtatccatgtcttaaagagaagtat

SEQ ID NO: 923114 - DNA, 25 bp, Homo sapien
catgtcttaaagagaagtatgtttt

SEQ ID NO: 923115 - DNA, 25 bp, Homo sapien
ggcagaaaatctctcagatgacctt

SEQ ID NO: 923116 - DNA, 25 bp, Homo sapien
agctatgaacaatgagggtatgata

SEQ ID NO: 923117 - DNA, 25 bp, Homo sapien
gaccttcaaggctagaaattgccat

SEQ ID NO: 923118 - DNA, 25 bp, Homo sapien
tttctgacaagctatgaacaatgag

SEQ ID NO: 923119 - DNA, 25 bp, Homo sapien
ccttctttgatccgaccctggaaga

SEQ ID NO: 923120 - DNA, 25 bp, Homo sapien
acttggagaatgtgagggattgggc

SEQ ID NO: 923121 - DNA, 25 bp, Homo sapien
cttggagaatgtgagggattgggcc

SEQ ID NO: 923122 - DNA, 25 bp, Homo sapien
aaatcagtctgaggtctcacatagc

SEQ ID NO: 923123 - DNA, 25 bp, Homo sapien
tccaagatttctctatacctgaagg

SEQ ID NO: 923124 - DNA, 25 bp, Homo sapien
gatggacggctcttcatgcactaca

SEQ ID NO: 923125 - DNA, 25 bp, Homo sapien
tcaaatgggatcctctcatgctcat

SEQ ID NO: 923126 - DNA, 25 bp, Homo sapien
gatgctggatacacaggaaggctcc

SEQ ID NO: 923127 - DNA, 25 bp, Homo sapien
cactgggcgtgtgatgaactgtgat

SEQ ID NO: 923128 - DNA, 25 bp, Homo sapien
gattgctgagcccactattctggat

SEQ ID NO: 923129 - DNA, 25 bp, Homo sapien
aacaagctgaatgtagccagagcac

SEQ ID NO: 923130 - DNA, 25 bp, Homo sapien
tggtcaagttgtaggcagcatagga

SEQ ID NO: 923131 - DNA, 25 bp, Homo sapien
gctaacttggtaaatagtgatgcca

SEQ ID NO: 923132 - DNA, 25 bp, Homo sapien
aaaatgttcagaatgcggagaataa

SEQ ID NO: 923133 - DNA, 25 bp, Homo sapien
tgtaataattcccaaacacaggcgg

SEQ ID NO: 923134 - DNA, 25 bp, Homo sapien
cagataccagcaaagaagtcaactc

SEQ ID NO: 923135 - DNA, 25 bp, Homo sapien
gtgagtccagactgtaccatgtacc

SEQ ID NO: 923136 - DNA, 25 bp, Homo sapien
gcatgaggcatgcagtcggaagcct

SEQ ID NO: 923137 - DNA, 25 bp, Homo sapien
gaagcctgaggagatcattcacgtt

SEQ ID NO: 923138 - DNA, 25 bp, Homo sapien
aatcttcaccaggaaatatgcctgt

SEQ ID NO: 923139 - DNA, 25 bp, Homo sapien
tgttcattaaaggttgactgagaag

SEQ ID NO: 923140 - DNA, 25 bp, Homo sapien
actgaaagctgttcattaaaggttg

SEQ ID NO: 923141 - DNA, 25 bp, Homo sapien
tcttcaccaggaaatatgcctgtct

SEQ ID NO: 923142 - DNA, 25 bp, Homo sapien
ggctttgtgctactcttccctccag

SEQ ID NO: 923143 - DNA, 25 bp, Homo sapien
gtactcctgaatctgcttctgcctg

SEQ ID NO: 923144 - DNA, 25 bp, Homo sapien
gttccaccagctcccagtactcctg

SEQ ID NO: 923145 - DNA, 25 bp, Homo sapien
ttctgcctggctttgtgctactctt

SEQ ID NO: 923146 - DNA, 25 bp, Homo sapien
ctgccaggtagggttgccacagtaa

SEQ ID NO: 923147 - DNA, 25 bp, Homo sapien
tgccaggtagggttgccacagtaac

SEQ ID NO: 923148 - DNA, 25 bp, Homo sapien
cctgccaggtagggttgccacagta

SEQ ID NO: 923149 - DNA, 25 bp, Homo sapien
tccacatgaattcctcggcgttcag

SEQ ID NO: 923150 - DNA, 25 bp, Homo sapien
ccacatgaattcctcggcgttcaga

SEQ ID NO: 923151 - DNA, 25 bp, Homo sapien
cacatgaattcctcggcgttcagac

SEQ ID NO: 923152 - DNA, 25 bp, Homo sapien
gatccacatgaattcctcggcgttc

SEQ ID NO: 923153 - DNA, 25 bp, Homo sapien
tatcttcaagccgtaagagagggaa

SEQ ID NO: 923154 - DNA, 25 bp, Homo sapien
catttgcagtttttgacgtggtggc

SEQ ID NO: 923155 - DNA, 25 bp, Homo sapien
gacataccaacagccaataatcacg

SEQ ID NO: 923156 - DNA, 25 bp, Homo sapien
caacaacttcgatgaatctcagagg

SEQ ID NO: 923157 - DNA, 25 bp, Homo sapien
aggaagtcaacagatgttggtgtct

SEQ ID NO: 923158 - DNA, 25 bp, Homo sapien
taacacatgtaaagacctggatgct

SEQ ID NO: 923159 - DNA, 25 bp, Homo sapien
gcatgatcacacgagagaataccta

SEQ ID NO: 923160 - DNA, 25 bp, Homo sapien
tacacgctatccaactttacaaggg

SEQ ID NO: 923161 - DNA, 25 bp, Homo sapien
tccaggttaagagtggcgaaggcaa

SEQ ID NO: 923162 - DNA, 25 bp, Homo sapien
agtatgcctgtaatattttacagca

SEQ ID NO: 923163 - DNA, 25 bp, Homo sapien
gtgatgtggaaccaaacccataaca

SEQ ID NO: 923164 - DNA, 25 bp, Homo sapien
cagtgatgtggaaccaaacccataa

SEQ ID NO: 923165 - DNA, 25 bp, Homo sapien
tgcagtgatgtggaaccaaacccat

SEQ ID NO: 923166 - DNA, 25 bp, Homo sapien
ttgagacttcagtgactcgtgatcg

SEQ ID NO: 923167 - DNA, 25 bp, Homo sapien
gacttcagtgactcgtgatcgtgtc

SEQ ID NO: 923168 - DNA, 25 bp, Homo sapien
gagacttcagtgactcgtgatcgtg

SEQ ID NO: 923169 - DNA, 25 bp, Homo sapien
tgagacttcagtgactcgtgatcgt

SEQ ID NO: 923170 - DNA, 25 bp, Homo sapien
ccgctcgcccgcgtcgttcgggtag

SEQ ID NO: 923171 - DNA, 25 bp, Homo sapien
ctccaccggcgtccaaagccccgct

SEQ ID NO: 923172 - DNA, 25 bp, Homo sapien
cgcgtcgttcgggtaggtctcgact

SEQ ID NO: 923173 - DNA, 25 bp, Homo sapien
taggtctcgactccgcggtccgcta

SEQ ID NO: 923174 - DNA, 25 bp, Homo sapien
cagccatacgtgctttattgacaac

SEQ ID NO: 923175 - DNA, 25 bp, Homo sapien
gccatacgtgctttattgacaacgc

SEQ ID NO: 923176 - DNA, 25 bp, Homo sapien
tgacaacgcgcacctcaggccttga

SEQ ID NO: 923177 - DNA, 25 bp, Homo sapien
ttattgacaacgcgcacctcaggcc

SEQ ID NO: 923178 - DNA, 25 bp, Homo sapien
tcggacgactaggatcttagggagc

SEQ ID NO: 923179 - DNA, 25 bp, Homo sapien
ttcggacgactaggatcttagggag

SEQ ID NO: 923180 - DNA, 25 bp, Homo sapien
tttcggacgactaggatcttaggga

SEQ ID NO: 923181 - DNA, 25 bp, Homo sapien
attttcggacgactaggatcttagg

SEQ ID NO: 923182 - DNA, 25 bp, Homo sapien
cttcttcccgcgaagatctggagcc

SEQ ID NO: 923183 - DNA, 25 bp, Homo sapien
gatctggagccttgatcttggccat

SEQ ID NO: 923184 - DNA, 25 bp, Homo sapien
aagatctggagccttgatcttggcc

SEQ ID NO: 923185 - DNA, 25 bp, Homo sapien
tcttcccgcgaagatctggagcctt

SEQ ID NO: 923186 - DNA, 25 bp, Homo sapien
tccatccatatactgtctataagag

SEQ ID NO: 923187 - DNA, 25 bp, Homo sapien
atccatatactgtctataagagact

SEQ ID NO: 923188 - DNA, 25 bp, Homo sapien
gatccatccatatactgtctataag

SEQ ID NO: 923189 - DNA, 25 bp, Homo sapien
catccatatactgtctataagagac

SEQ ID NO: 923190 - DNA, 25 bp, Homo sapien
caccgcgcccagcaagtaaaatttc

SEQ ID NO: 923191 - DNA, 25 bp, Homo sapien
accgcgcccagcaagtaaaatttct

SEQ ID NO: 923192 - DNA, 25 bp, Homo sapien
gccaccgcgcccagcaagtaaaatt

SEQ ID NO: 923193 - DNA, 25 bp, Homo sapien
cgcgcccagcaagtaaaatttcttt

SEQ ID NO: 923194 - DNA, 25 bp, Homo sapien
ttcctccggtgaagagccaaaggcc

SEQ ID NO: 923195 - DNA, 25 bp, Homo sapien
ctcggatccgcgaagggctgaaact

SEQ ID NO: 923196 - DNA, 25 bp, Homo sapien
gaagtgacgtttgcacggcttgcgt

SEQ ID NO: 923197 - DNA, 25 bp, Homo sapien
acaacggagaccagacctactgcag

SEQ ID NO: 923198 - DNA, 25 bp, Homo sapien
ggacaagcccttgaaggcctgacgc

SEQ ID NO: 923199 - DNA, 25 bp, Homo sapien
acaagcccttgaaggcctgacgcgg

SEQ ID NO: 923200 - DNA, 25 bp, Homo sapien
cagcgcccggacaagcccttgaagg

SEQ ID NO: 923201 - DNA, 25 bp, Homo sapien
cccggacaagcccttgaaggcctga

SEQ ID NO: 923202 - DNA, 25 bp, Homo sapien
catgacctctctggaacgcgcctag

SEQ ID NO: 923203 - DNA, 25 bp, Homo sapien
agaccacagctcttggccgcgacag

SEQ ID NO: 923204 - DNA, 25 bp, Homo sapien
aacgcgcctagctgggacgctcgga

SEQ ID NO: 923205 - DNA, 25 bp, Homo sapien
accacagctcttggccgcgacaggg

SEQ ID NO: 923206 - DNA, 25 bp, Homo sapien
gtgggcgcccgtggactcgttttgc

SEQ ID NO: 923207 - DNA, 25 bp, Homo sapien
ggcggtgtctcagcgcgggtgacca

SEQ ID NO: 923208 - DNA, 25 bp, Homo sapien
tccttgcggttgggaaatgtgtcgt

SEQ ID NO: 923209 - DNA, 25 bp, Homo sapien
ctaggtcataggcagctggcggtgt

SEQ ID NO: 923210 - DNA, 25 bp, Homo sapien
gcctggagggtcgttattaaagtga

SEQ ID NO: 923211 - DNA, 25 bp, Homo sapien
tgtggttaaaatgggtctctctggc

SEQ ID NO: 923212 - DNA, 25 bp, Homo sapien
aggcatcagctactgagcctggagg

SEQ ID NO: 923213 - DNA, 25 bp, Homo sapien
ctttaatctgatggtgacagaacca

SEQ ID NO: 923214 - DNA, 25 bp, Homo sapien
gcgacagagcaaaactccttctcac

SEQ ID NO: 923215 - DNA, 25 bp, Homo sapien
cgacagagcaaaactccttctcaca

SEQ ID NO: 923216 - DNA, 25 bp, Homo sapien
gacagagcaaaactccttctcacaa

SEQ ID NO: 923217 - DNA, 25 bp, Homo sapien
acagagcaaaactccttctcacaaa

SEQ ID NO: 923218 - DNA, 25 bp, Homo sapien
tcacccgaggagtcccaaaatgcag

SEQ ID NO: 923219 - DNA, 25 bp, Homo sapien
ttcatatcacccgaggagtcccaaa

SEQ ID NO: 923220 - DNA, 25 bp, Homo sapien
tatcacccgaggagtcccaaaatgc

SEQ ID NO: 923221 - DNA, 25 bp, Homo sapien
ctgccttcatatcacccgaggagtc

SEQ ID NO: 923222 - DNA, 25 bp, Homo sapien
tgaggatcatggcccggcctgagaa

SEQ ID NO: 923223 - DNA, 25 bp, Homo sapien
gaggatcatggcccggcctgagaac

SEQ ID NO: 923224 - DNA, 25 bp, Homo sapien
gaattcttagcagcgatctccaggg

SEQ ID NO: 923225 - DNA, 25 bp, Homo sapien
catcttggatggagaaacctcggca

SEQ ID NO: 923226 - DNA, 25 bp, Homo sapien
tgggtgcatccaactccaagcctgt

SEQ ID NO: 923227 - DNA, 25 bp, Homo sapien
catttgtggaccctggaggcttgcg

SEQ ID NO: 923228 - DNA, 25 bp, Homo sapien
tgtgtgtttgcataagctgttccct

SEQ ID NO: 923229 - DNA, 25 bp, Homo sapien
tgacatagtacctagaagaggagat

SEQ ID NO: 923230 - DNA, 25 bp, Homo sapien
tggtcccttctcatactttaggtct

SEQ ID NO: 923231 - DNA, 25 bp, Homo sapien
tcagctgggagcttacttaaacttt

SEQ ID NO: 923232 - DNA, 25 bp, Homo sapien
ttaagagctctcgatatatcctgga

SEQ ID NO: 923233 - DNA, 25 bp, Homo sapien
taaggatccagcatagacgaaaact

SEQ ID NO: 923234 - DNA, 25 bp, Homo sapien
taaaagattcagatcggaaaggaag

SEQ ID NO: 923235 - DNA, 25 bp, Homo sapien
tatgtgtagaaaaccgtaaggatcc

SEQ ID NO: 923236 - DNA, 25 bp, Homo sapien
tggacctacgcagttcggacctgtg

SEQ ID NO: 923237 - DNA, 25 bp, Homo sapien
tttgttccaggatgcccacatatac

SEQ ID NO: 923238 - DNA, 25 bp, Homo sapien
tagaatcatctgtcggtatacacag

SEQ ID NO: 923239 - DNA, 25 bp, Homo sapien
gcttataaaaagttagccctccaca

SEQ ID NO: 923240 - DNA, 25 bp, Homo sapien
tggtaaccacgttttcattcctgag

SEQ ID NO: 923241 - DNA, 25 bp, Homo sapien
caagaaagtactcacgtggcatgat

SEQ ID NO: 923242 - DNA, 25 bp, Homo sapien
gctggcaagcatggacaaaggaaat

SEQ ID NO: 923243 - DNA, 25 bp, Homo sapien
gacattgtaataactgctggcaagc

SEQ ID NO: 923244 - DNA, 25 bp, Homo sapien
ctttgtgacactggttaattatttc

SEQ ID NO: 923245 - DNA, 25 bp, Homo sapien
cataaagaaagtaaacagtatccaa

SEQ ID NO: 923246 - DNA, 25 bp, Homo sapien
ataaagaaagtaaacagtatccaat

SEQ ID NO: 923247 - DNA, 25 bp, Homo sapien
gtgacactggttaattatttcactt

SEQ ID NO: 923248 - DNA, 25 bp, Homo sapien
cccagctaattacttctgtcttgta

SEQ ID NO: 923249 - DNA, 25 bp, Homo sapien
tctgtaaggatgtctgacccagcta

SEQ ID NO: 923250 - DNA, 25 bp, Homo sapien
ttgaagtgaatgtatactcatttcc

SEQ ID NO: 923251 - DNA, 25 bp, Homo sapien
tttgtaaacaggaattctgcactca

SEQ ID NO: 923252 - DNA, 25 bp, Homo sapien
ctgcctcggccccccagtaggtggg

SEQ ID NO: 923253 - DNA, 25 bp, Homo sapien
tgcctcggccccccagtaggtggga

SEQ ID NO: 923254 - DNA, 25 bp, Homo sapien
ttacaggcatgcaccaccatgcctt

SEQ ID NO: 923255 - DNA, 25 bp, Homo sapien
gagagagcagaaggatcaggcacat

SEQ ID NO: 923256 - DNA, 25 bp, Homo sapien
tgccacgggaatgggaaagatcctg

SEQ ID NO: 923257 - DNA, 25 bp, Homo sapien
ggagcttcaccaaggaggagtcttt

SEQ ID NO: 923258 - DNA, 25 bp, Homo sapien
gaaggaaggttcattacaggcagca

SEQ ID NO: 923259 - DNA, 25 bp, Homo sapien
ggtatcatatctagaaaatcattgc

SEQ ID NO: 923260 - DNA, 25 bp, Homo sapien
gtatcatatctagaaaatcattgcc

SEQ ID NO: 923261 - DNA, 25 bp, Homo sapien
ttggtatcatatctagaaaatcatt

SEQ ID NO: 923262 - DNA, 25 bp, Homo sapien
tggtatcatatctagaaaatcattg

SEQ ID NO: 923263 - DNA, 25 bp, Homo sapien
gactaggtcgtacgataggtatgta

SEQ ID NO: 923264 - DNA, 25 bp, Homo sapien
gaatgaagtgactaggtcgtacgat

SEQ ID NO: 923265 - DNA, 25 bp, Homo sapien
tacctaggaatgaagtgactaggtc

SEQ ID NO: 923266 - DNA, 25 bp, Homo sapien
gaagtgactaggtcgtacgataggt

SEQ ID NO: 923267 - DNA, 25 bp, Homo sapien
ttttcggtgcatataggcttacaaa

SEQ ID NO: 923268 - DNA, 25 bp, Homo sapien
ggtgcatataggcttacaaatgtta

SEQ ID NO: 923269 - DNA, 25 bp, Homo sapien
aggctctgtttttcggtgcatatag

SEQ ID NO: 923270 - DNA, 25 bp, Homo sapien
tgtttttcggtgcatataggcttac

SEQ ID NO: 923271 - DNA, 25 bp, Homo sapien
tatcaagtagtcagcagccacgtga

SEQ ID NO: 923272 - DNA, 25 bp, Homo sapien
tgaaagttcttttgcactagcccac

SEQ ID NO: 923273 - DNA, 25 bp, Homo sapien
tgctaagtattaccccattgattgg

SEQ ID NO: 923274 - DNA, 25 bp, Homo sapien
cgtgactggtaccttctacattgca

SEQ ID NO: 923275 - DNA, 25 bp, Homo sapien
gcatttgttcatataccatacctgt

SEQ ID NO: 923276 - DNA, 25 bp, Homo sapien
caagtcttttgttgggtatatgttc

SEQ ID NO: 923277 - DNA, 25 bp, Homo sapien
ctaatgaccaatgatataaagcatt

SEQ ID NO: 923278 - DNA, 25 bp, Homo sapien
tcctattttgcctgagcaagttggg

SEQ ID NO: 923279 - DNA, 25 bp, Homo sapien
tggtggctctaagaattacagtatg

SEQ ID NO: 923280 - DNA, 25 bp, Homo sapien
ctctttgtgtagtgttctttagtgg

SEQ ID NO: 923281 - DNA, 25 bp, Homo sapien
cactgcatgtggctgctctctgttt

SEQ ID NO: 923282 - DNA, 25 bp, Homo sapien
tatttgactattgcttagtattcaa

SEQ ID NO: 923283 - DNA, 25 bp, Homo sapien
gaatttccatatgctagctcaaaca

SEQ ID NO: 923284 - DNA, 25 bp, Homo sapien
ggagatatgaaataagctactagaa

SEQ ID NO: 923285 - DNA, 25 bp, Homo sapien
catgatcatctgtatagaaagtccc

SEQ ID NO: 923286 - DNA, 25 bp, Homo sapien
tagcagaaccaagtgtcaattgaat

SEQ ID NO: 923287 - DNA, 25 bp, Homo sapien
ctatggtccaggcacaactcccaca

SEQ ID NO: 923288 - DNA, 25 bp, Homo sapien
tatggtccaggcacaactcccacac

SEQ ID NO: 923289 - DNA, 25 bp, Homo sapien
gtccataagcgagccctgggtccat

SEQ ID NO: 923290 - DNA, 25 bp, Homo sapien
ggagcaccgtccataagcgagccct

SEQ ID NO: 923291 - DNA, 25 bp, Homo sapien
ctggcgtctggacacggagcctcat

SEQ ID NO: 923292 - DNA, 25 bp, Homo sapien
catgccagctgcagctagccatggg

SEQ ID NO: 923293 - DNA, 25 bp, Homo sapien
caccacccaccaagaggtgaggaga

SEQ ID NO: 923294 - DNA, 25 bp, Homo sapien
catgccccaaaccacagagtccggg

SEQ ID NO: 923295 - DNA, 25 bp, Homo sapien
ttctccactccatacttttgaggta

SEQ ID NO: 923296 - DNA, 25 bp, Homo sapien
tctccactccatacttttgaggtat

SEQ ID NO: 923297 - DNA, 25 bp, Homo sapien
atgccccaaaccacagagtccgggg

SEQ ID NO: 923298 - DNA, 25 bp, Homo sapien
ttacatgggaatcacgtaaagaatc

SEQ ID NO: 923299 - DNA, 25 bp, Homo sapien
catgggaatcacgtaaagaatcagg

SEQ ID NO: 923300 - DNA, 25 bp, Homo sapien
gaatcacgtaaagaatcaggtaaac

SEQ ID NO: 923301 - DNA, 25 bp, Homo sapien
cgtaaagaatcaggtaaacaggatt

SEQ ID NO: 923302 - DNA, 25 bp, Homo sapien
taatttatttcacttctggatgtcg

SEQ ID NO: 923303 - DNA, 25 bp, Homo sapien
ctgggcctcctaaagattcagctgc

SEQ ID NO: 923304 - DNA, 25 bp, Homo sapien
tatttcacttctggatgtcggttat

SEQ ID NO: 923305 - DNA, 25 bp, Homo sapien
cacttctggatgtcggttatgtttt

SEQ ID NO: 923306 - DNA, 25 bp, Homo sapien
taggatccgcgaaggactgaaacag

SEQ ID NO: 923307 - DNA, 25 bp, Homo sapien
ggagtcgccgcggagccagcgtcgc

SEQ ID NO: 923308 - DNA, 25 bp, Homo sapien
agccccaggagtcgccgcggagcca

SEQ ID NO: 923309 - DNA, 25 bp, Homo sapien
aacagagtttctgaagcgtccctcg

SEQ ID NO: 923310 - DNA, 25 bp, Homo sapien
ttgcgcgtcggaagccggaagcagg

SEQ ID NO: 923311 - DNA, 25 bp, Homo sapien
tgttgcgcgtcggaagccggaagca

SEQ ID NO: 923312 - DNA, 25 bp, Homo sapien
gcgcgtcggaagccggaagcaggga

SEQ ID NO: 923313 - DNA, 25 bp, Homo sapien
ctgttgcgcgtcggaagccggaagc

SEQ ID NO: 923314 - DNA, 25 bp, Homo sapien
tctccggggctccccagcgccccac

SEQ ID NO: 923315 - DNA, 25 bp, Homo sapien
ttctccggggctccccagcgcccca

SEQ ID NO: 923316 - DNA, 25 bp, Homo sapien
tccatttgctcttgggcgtcagggc

SEQ ID NO: 923317 - DNA, 25 bp, Homo sapien
aagtgacgtttacgcgccgcgcgta

SEQ ID NO: 923318 - DNA, 25 bp, Homo sapien
ccgcgcgtaacgtgcgttcgctggc

SEQ ID NO: 923319 - DNA, 25 bp, Homo sapien
gcgagcggtggtttggacgccggcg

SEQ ID NO: 923320 - DNA, 25 bp, Homo sapien
gttgcgcgtcggtgcctcccgctgt

SEQ ID NO: 923321 - DNA, 25 bp, Homo sapien
cagacgctagttgccgggatctcca

SEQ ID NO: 923322 - DNA, 25 bp, Homo sapien
gctcccttaatcctcagagtgcggc

SEQ ID NO: 923323 - DNA, 25 bp, Homo sapien
tggcagggcggtcggtccgtgccat

SEQ ID NO: 923324 - DNA, 25 bp, Homo sapien
caacctccccggaaagcgctggtat

SEQ ID NO: 923325 - DNA, 25 bp, Homo sapien
aaagcgctggtatgggacgctcgga

SEQ ID NO: 923326 - DNA, 25 bp, Homo sapien
ggcgcggggacttgatcccacgtca

SEQ ID NO: 923327 - DNA, 25 bp, Homo sapien
tccgaagcagcgtctgtggtcgcac

SEQ ID NO: 923328 - DNA, 25 bp, Homo sapien
gggcagaagtgtcccggagttggga

SEQ ID NO: 923329 - DNA, 25 bp, Homo sapien
ctagggggcagaagtgtcccggagt

SEQ ID NO: 923330 - DNA, 25 bp, Homo sapien
gcagaagtgtcccggagttgggagg

SEQ ID NO: 923331 - DNA, 25 bp, Homo sapien
agggggcagaagtgtcccggagttg

SEQ ID NO: 923332 - DNA, 25 bp, Homo sapien
actgctgttaaagagtgtgttccgg

SEQ ID NO: 923333 - DNA, 25 bp, Homo sapien
cgtgagccattgcgcggctttaact

SEQ ID NO: 923334 - DNA, 25 bp, Homo sapien
cattgcgcggctttaactgctgtta

SEQ ID NO: 923335 - DNA, 25 bp, Homo sapien
ttttttcgacatgggatctcacagt

SEQ ID NO: 923336 - DNA, 25 bp, Homo sapien
tcttggtaggtgatatcaggccttc

SEQ ID NO: 923337 - DNA, 25 bp, Homo sapien
tggtaggtgatatcaggccttcagg

SEQ ID NO: 923338 - DNA, 25 bp, Homo sapien
gctcttggtaggtgatatcaggcct

SEQ ID NO: 923339 - DNA, 25 bp, Homo sapien
cttggtaggtgatatcaggccttca

SEQ ID NO: 923340 - DNA, 25 bp, Homo sapien
ggtggcatgacccagtgtatgtctg

SEQ ID NO: 923341 - DNA, 25 bp, Homo sapien
tggcatgacccagtgtatgtctgac

SEQ ID NO: 923342 - DNA, 25 bp, Homo sapien
gtggcatgacccagtgtatgtctga

SEQ ID NO: 923343 - DNA, 25 bp, Homo sapien
tacccaaggttgcacaatgagtttg

SEQ ID NO: 923344 - DNA, 25 bp, Homo sapien
cccaaaagcctctgtacagtgtgca

SEQ ID NO: 923345 - DNA, 25 bp, Homo sapien
tgcagtggcttctacctacctataa

SEQ ID NO: 923346 - DNA, 25 bp, Homo sapien
tccaatgtgtatacttcagaagccc

SEQ ID NO: 923347 - DNA, 25 bp, Homo sapien
taaaatagagaaatacggctggcac

SEQ ID NO: 923348 - DNA, 25 bp, Homo sapien
aatagagaaatacggctggcacagg

SEQ ID NO: 923349 - DNA, 25 bp, Homo sapien
cataatccgtgtgttaatttagtaa

SEQ ID NO: 923350 - DNA, 25 bp, Homo sapien
aatcataatccgtgtgttaatttag

SEQ ID NO: 923351 - DNA, 25 bp, Homo sapien
gattttgatcgctacatgtctggcc

SEQ ID NO: 923352 - DNA, 25 bp, Homo sapien
ctcctgatgcttgcttaggcgtcaa

SEQ ID NO: 923353 - DNA, 25 bp, Homo sapien
gtctttgaatctaagtcaggaggat

SEQ ID NO: 923354 - DNA, 25 bp, Homo sapien
tgagaagctagacgcccagtctttg

SEQ ID NO: 923355 - DNA, 25 bp, Homo sapien
tagtcgatggaagactttaaactat

SEQ ID NO: 923356 - DNA, 25 bp, Homo sapien
tgtagtcgatggaagactttaaact

SEQ ID NO: 923357 - DNA, 25 bp, Homo sapien
tttaatgtagtcgatggaagacttt

SEQ ID NO: 923358 - DNA, 25 bp, Homo sapien
taatgtagtcgatggaagactttaa

SEQ ID NO: 923359 - DNA, 25 bp, Homo sapien
cagtgagaaggagcaggcactgggc

SEQ ID NO: 923360 - DNA, 25 bp, Homo sapien
tcagtgagaaggagcaggcactggg

SEQ ID NO: 923361 - DNA, 25 bp, Homo sapien
tatttaggaggcttgacagctacct

SEQ ID NO: 923362 - DNA, 25 bp, Homo sapien
tcaggacatttcaacctcgggacta

SEQ ID NO: 923363 - DNA, 25 bp, Homo sapien
ccagggcaccgttctagaacaacgt

SEQ ID NO: 923364 - DNA, 25 bp, Homo sapien
ttgtgaaatcgtgcatgaggcccca

SEQ ID NO: 923365 - DNA, 25 bp, Homo sapien
taagtcagcatcaatacaacggccg

SEQ ID NO: 923366 - DNA, 25 bp, Homo sapien
taggtgtgaatccagatatgcggtc

SEQ ID NO: 923367 - DNA, 25 bp, Homo sapien
tggttcccaagctcgcacagaaggt

SEQ ID NO: 923368 - DNA, 25 bp, Homo sapien
ttatagaataacctgggcccaagtg

SEQ ID NO: 923369 - DNA, 25 bp, Homo sapien
gtctcttcaggctctcgcccaccag

SEQ ID NO: 923370 - DNA, 25 bp, Homo sapien
tctcgcccaccagagggtccctgga

SEQ ID NO: 923371 - DNA, 25 bp, Homo sapien
accagagggtccctggaatccctct

SEQ ID NO: 923372 - DNA, 25 bp, Homo sapien
tcttcaggctctcgcccaccagagg

SEQ ID NO: 923373 - DNA, 25 bp, Homo sapien
cagggcagggggagagaaaccaagt

SEQ ID NO: 923374 - DNA, 25 bp, Homo sapien
gcagggcagggggagagaaaccaag

SEQ ID NO: 923375 - DNA, 25 bp, Homo sapien
cagggggagagaaaccaagtgagga

SEQ ID NO: 923376 - DNA, 25 bp, Homo sapien
gggcagggggagagaaaccaagtga

SEQ ID NO: 923377 - DNA, 25 bp, Homo sapien
ctctttgactccctcagtgagcagc

SEQ ID NO: 923378 - DNA, 25 bp, Homo sapien
ggctctttgactccctcagtgagca

SEQ ID NO: 923379 - DNA, 25 bp, Homo sapien
tctttgactccctcagtgagcagct

SEQ ID NO: 923380 - DNA, 25 bp, Homo sapien
gggctctttgactccctcagtgagc

SEQ ID NO: 923381 - DNA, 25 bp, Homo sapien
tggaaaacacaagtggggccatcac

SEQ ID NO: 923382 - DNA, 25 bp, Homo sapien
ggaaaacacaagtggggccatcaca

SEQ ID NO: 923383 - DNA, 25 bp, Homo sapien
ctggaaaacacaagtggggccatca

SEQ ID NO: 923384 - DNA, 25 bp, Homo sapien
gctgatgggacattcccattctgca

SEQ ID NO: 923385 - DNA, 25 bp, Homo sapien
ctgaacactgctctcctgagactgt

SEQ ID NO: 923386 - DNA, 25 bp, Homo sapien
tgatgggacattcccattctgcatc

SEQ ID NO: 923387 - DNA, 25 bp, Homo sapien
actgaacactgctctcctgagactg

SEQ ID NO: 923388 - DNA, 25 bp, Homo sapien
tgcagccaaacccatctaacacctt

SEQ ID NO: 923389 - DNA, 25 bp, Homo sapien
aactgcagccaaacccatctaacac

SEQ ID NO: 923390 - DNA, 25 bp, Homo sapien
actgcagccaaacccatctaacacc

SEQ ID NO: 923391 - DNA, 25 bp, Homo sapien
gcagccaaacccatctaacaccttg

SEQ ID NO: 923392 - DNA, 25 bp, Homo sapien
gagcttggcgatcccgaagcagttg

SEQ ID NO: 923393 - DNA, 25 bp, Homo sapien
tcctccgggtgcatcagaaacttgg

SEQ ID NO: 923394 - DNA, 25 bp, Homo sapien
cagctcctccgggtgcatcagaaac

SEQ ID NO: 923395 - DNA, 25 bp, Homo sapien
gctcctccgggtgcatcagaaactt

SEQ ID NO: 923396 - DNA, 25 bp, Homo sapien
acaaacagctcctccgggtgcatca

SEQ ID NO: 923397 - DNA, 25 bp, Homo sapien
cttgactggttccaagatgccaatg

SEQ ID NO: 923398 - DNA, 25 bp, Homo sapien
tgactggttccaagatgccaatggc

SEQ ID NO: 923399 - DNA, 25 bp, Homo sapien
ttgactggttccaagatgccaatgg

SEQ ID NO: 923400 - DNA, 25 bp, Homo sapien
acacgctggtgtggcccaacaccac

SEQ ID NO: 923401 - DNA, 25 bp, Homo sapien
ataagcaaccccacacgctggtgtg

SEQ ID NO: 923402 - DNA, 25 bp, Homo sapien
cataagcaaccccacacgctggtgt

SEQ ID NO: 923403 - DNA, 25 bp, Homo sapien
cccacacgctggtgtggcccaacac

SEQ ID NO: 923404 - DNA, 25 bp, Homo sapien
atcatctgttgaagagcagctccac

SEQ ID NO: 923405 - DNA, 25 bp, Homo sapien
catatcatctgttgaagagcagctc

SEQ ID NO: 923406 - DNA, 25 bp, Homo sapien
atatcatctgttgaagagcagctcc

SEQ ID NO: 923407 - DNA, 25 bp, Homo sapien
tatcatctgttgaagagcagctcca

SEQ ID NO: 923408 - DNA, 25 bp, Homo sapien
cttccgcaggggctggatcacgtca

SEQ ID NO: 923409 - DNA, 25 bp, Homo sapien
ggctggatcacgtcaccttgactgt

SEQ ID NO: 923410 - DNA, 25 bp, Homo sapien
caggggctggatcacgtcaccttga

SEQ ID NO: 923411 - DNA, 25 bp, Homo sapien
ggggctggatcacgtcaccttgact

SEQ ID NO: 923412 - DNA, 25 bp, Homo sapien
aggcaaaaggcagtctgttgaggct

SEQ ID NO: 923413 - DNA, 25 bp, Homo sapien
aaggcaaaaggcagtctgttgaggc

SEQ ID NO: 923414 - DNA, 25 bp, Homo sapien
ttcctgctctgctggtaccaagatt

SEQ ID NO: 923415 - DNA, 25 bp, Homo sapien
tgctctgctggtaccaagattggcc

SEQ ID NO: 923416 - DNA, 25 bp, Homo sapien
cctgctctgctggtaccaagattgg

SEQ ID NO: 923417 - DNA, 25 bp, Homo sapien
gctgatgttcctgctctgctggtac

SEQ ID NO: 923418 - DNA, 25 bp, Homo sapien
tgggattacgcagtcttcagtcttc

SEQ ID NO: 923419 - DNA, 25 bp, Homo sapien
gagtagatgggactaaacataggtc

SEQ ID NO: 923420 - DNA, 25 bp, Homo sapien
aacataggtcccaccgtgcctgtct

SEQ ID NO: 923421 - DNA, 25 bp, Homo sapien
ggactaaacataggtcccaccgtgc

SEQ ID NO: 923422 - DNA, 25 bp, Homo sapien
ccacaatcagaatcctcagatggca

SEQ ID NO: 923423 - DNA, 25 bp, Homo sapien
gaacgtcagagctaagaacactggt

SEQ ID NO: 923424 - DNA, 25 bp, Homo sapien
agcctctcaggcttatgcctttttc

SEQ ID NO: 923425 - DNA, 25 bp, Homo sapien
tgacagtcaccccatactgaggctc

SEQ ID NO: 923426 - DNA, 25 bp, Homo sapien
ccaaatctacgctctcctctgaaga

SEQ ID NO: 923427 - DNA, 25 bp, Homo sapien
gcctcagaatccatggagagaaaca

SEQ ID NO: 923428 - DNA, 25 bp, Homo sapien
cctcaggaggcttatgttacggtcc

SEQ ID NO: 923429 - DNA, 25 bp, Homo sapien
accctcaggaggcttatgttacggt

SEQ ID NO: 923430 - DNA, 25 bp, Homo sapien
ccctcaggaggcttatgttacggtc

SEQ ID NO: 923431 - DNA, 25 bp, Homo sapien
gcagggggtggtcagatgtccgtcg

SEQ ID NO: 923432 - DNA, 25 bp, Homo sapien
gggtggtcagatgtccgtcgcttac

SEQ ID NO: 923433 - DNA, 25 bp, Homo sapien
gggggtggtcagatgtccgtcgctt

SEQ ID NO: 923434 - DNA, 25 bp, Homo sapien
cagggggtggtcagatgtccgtcgc

SEQ ID NO: 923435 - DNA, 25 bp, Homo sapien
ttgggacagtgaccgcaatgatgtc

SEQ ID NO: 923436 - DNA, 25 bp, Homo sapien
ccgcaatgatgtccagatcctctgg

SEQ ID NO: 923437 - DNA, 25 bp, Homo sapien
gatcctctggctcaattttgattgg

SEQ ID NO: 923438 - DNA, 25 bp, Homo sapien
tttgattggcttcagccaacccagc

SEQ ID NO: 923439 - DNA, 25 bp, Homo sapien
cacagtcttcagacatgccgccctt

SEQ ID NO: 923440 - DNA, 25 bp, Homo sapien
tggcccacagtcttcagacatgccg

SEQ ID NO: 923441 - DNA, 25 bp, Homo sapien
gtcttcagacatgccgcccttgtct

SEQ ID NO: 923442 - DNA, 25 bp, Homo sapien
acagtcttcagacatgccgcccttg

SEQ ID NO: 923443 - DNA, 25 bp, Homo sapien
agagagattccccgtgccctgtctc

SEQ ID NO: 923444 - DNA, 25 bp, Homo sapien
gctcactgtcctggggtgagcatct

SEQ ID NO: 923445 - DNA, 25 bp, Homo sapien
gggagagagattccccgtgccctgt

SEQ ID NO: 923446 - DNA, 25 bp, Homo sapien
ctcactgtcctggggtgagcatctg

SEQ ID NO: 923447 - DNA, 25 bp, Homo sapien
cgtatcttgtgttgaagagcagctc

SEQ ID NO: 923448 - DNA, 25 bp, Homo sapien
ggccggatcacgtcaccttgactgt

SEQ ID NO: 923449 - DNA, 25 bp, Homo sapien
ggggccggatcacgtcaccttgact

SEQ ID NO: 923450 - DNA, 25 bp, Homo sapien
caggggccggatcacgtcaccttga

SEQ ID NO: 923451 - DNA, 25 bp, Homo sapien
aggcaaaaggcagtctgttgaggct

SEQ ID NO: 923452 - DNA, 25 bp, Homo sapien
aaggcaaaaggcagtctgttgaggc

SEQ ID NO: 923453 - DNA, 25 bp, Homo sapien
tctcctcaggccgtgggtcctcact

SEQ ID NO: 923454 - DNA, 25 bp, Homo sapien
tcaggccgtgggtcctcactcaggc

SEQ ID NO: 923455 - DNA, 25 bp, Homo sapien
acgggcctctcctcaggccgtgggt

SEQ ID NO: 923456 - DNA, 25 bp, Homo sapien
ctccacgggcctctcctcaggccgt

SEQ ID NO: 923457 - DNA, 25 bp, Homo sapien
atttcctcagaggttggtgacgggt

SEQ ID NO: 923458 - DNA, 25 bp, Homo sapien
tcagaatcctccgatggcaggtgcc

SEQ ID NO: 923459 - DNA, 25 bp, Homo sapien
agcatctccatcccacaatcagaat

SEQ ID NO: 923460 - DNA, 25 bp, Homo sapien
ccacaatcagaatcctccgatggca

SEQ ID NO: 923461 - DNA, 25 bp, Homo sapien
gacaaaactccaaatgacatgggtg

SEQ ID NO: 923462 - DNA, 25 bp, Homo sapien
gtcttcacacatgctgcccttgtct

SEQ ID NO: 923463 - DNA, 25 bp, Homo sapien
tggcccgcagtcttcacacatgctg

SEQ ID NO: 923464 - DNA, 25 bp, Homo sapien
ctggcccgcagtcttcacacatgct

SEQ ID NO: 923465 - DNA, 25 bp, Homo sapien
ttcacacatgctgcccttgtctgac

SEQ ID NO: 923466 - DNA, 25 bp, Homo sapien
gattccctgtgctttatctccaggg

SEQ ID NO: 923467 - DNA, 25 bp, Homo sapien
ctggcttggcacagtaggggtttga

SEQ ID NO: 923468 - DNA, 25 bp, Homo sapien
gctcactgtcctggggtgaaccatc

SEQ ID NO: 923469 - DNA, 25 bp, Homo sapien
gcggtcgccacagcagaaggcatcc

SEQ ID NO: 923470 - DNA, 25 bp, Homo sapien
tgcagtggccattaaggagcttctg

SEQ ID NO: 923471 - DNA, 25 bp, Homo sapien
gccggcttgcagtggccattaagga

SEQ ID NO: 923472 - DNA, 25 bp, Homo sapien
gagctagccggcttgcagtggccat

SEQ ID NO: 923473 - DNA, 25 bp, Homo sapien
tgcagccggagctagccggcttgca

SEQ ID NO: 923474 - DNA, 25 bp, Homo sapien
gccaggcgacaaccgcttggtgtgc

SEQ ID NO: 923475 - DNA, 25 bp, Homo sapien
gtttgtgcccgccaggcgacaaccg

SEQ ID NO: 923476 - DNA, 25 bp, Homo sapien
cttctgtttgtgcccgccaggcgac

SEQ ID NO: 923477 - DNA, 25 bp, Homo sapien
ccgccaggcgacaaccgcttggtgt

SEQ ID NO: 923478 - DNA, 25 bp, Homo sapien
gcgccggtagtagtagcacaggcag

SEQ ID NO: 923479 - DNA, 25 bp, Homo sapien
cggtagtagtagcacaggcagtggg

SEQ ID NO: 923480 - DNA, 25 bp, Homo sapien
cgccggtagtagtagcacaggcagt

SEQ ID NO: 923481 - DNA, 25 bp, Homo sapien
ccggtagtagtagcacaggcagtgg

SEQ ID NO: 923482 - DNA, 25 bp, Homo sapien
cgccgggtcggagcctgcgaacact

SEQ ID NO: 923483 - DNA, 25 bp, Homo sapien
tgcgaacactgaccggccggctgtg

SEQ ID NO: 923484 - DNA, 25 bp, Homo sapien
tgcgcatgcgcgcttctggacgacc

SEQ ID NO: 923485 - DNA, 25 bp, Homo sapien
atgcgcgcttctggacgacccggca

SEQ ID NO: 923486 - DNA, 25 bp, Homo sapien
tgaatccctcggatttgagagtgag

SEQ ID NO: 923487 - DNA, 25 bp, Homo sapien
gagtttgaggcccattccttcctgc

SEQ ID NO: 923488 - DNA, 25 bp, Homo sapien
tgcatttgggtacaggccccagcgg

SEQ ID NO: 923489 - DNA, 25 bp, Homo sapien
ccttgcatcgtttcagggggctgac

SEQ ID NO: 923490 - DNA, 25 bp, Homo sapien
gtttctcctgggtaggcctctgcca

SEQ ID NO: 923491 - DNA, 25 bp, Homo sapien
ggtttctcctgggtaggcctctgcc

SEQ ID NO: 923492 - DNA, 25 bp, Homo sapien
tttctcctgggtaggcctctgccat

SEQ ID NO: 923493 - DNA, 25 bp, Homo sapien
tgggtttctcctgggtaggcctctg

SEQ ID NO: 923494 - DNA, 25 bp, Homo sapien
gcttcaggaggtaggtcttcagtct

SEQ ID NO: 923495 - DNA, 25 bp, Homo sapien
tagacgggtatcgtagtgggcacct

SEQ ID NO: 923496 - DNA, 25 bp, Homo sapien
tagaagattatgtgcaggctggccg

SEQ ID NO: 923497 - DNA, 25 bp, Homo sapien
tacttcgctgaatattgcctagtga

SEQ ID NO: 923498 - DNA, 25 bp, Homo sapien
ctagtctcatactcccaacctaaga

SEQ ID NO: 923499 - DNA, 25 bp, Homo sapien
ccacacccggatatttttaatagag

SEQ ID NO: 923500 - DNA, 25 bp, Homo sapien
catgcgctgccacacccggatattt

SEQ ID NO: 923501 - DNA, 25 bp, Homo sapien
ggctagtctcatactcccaacctaa

SEQ ID NO: 923502 - DNA, 25 bp, Homo sapien
acaaagccctgctggctgacttttt

SEQ ID NO: 923503 - DNA, 25 bp, Homo sapien
agccctgctggctgactttttcctc

SEQ ID NO: 923504 - DNA, 25 bp, Homo sapien
atttttcacaaagccctgctggctg

SEQ ID NO: 923505 - DNA, 25 bp, Homo sapien
cctgctggctgactttttcctccca

SEQ ID NO: 923506 - DNA, 25 bp, Homo sapien
tgtagtacagtagtgctgacagcgc

SEQ ID NO: 923507 - DNA, 25 bp, Homo sapien
gcagatcatgcctgtcctgtttact

SEQ ID NO: 923508 - DNA, 25 bp, Homo sapien
tgctgacagcgcagatcatgcctgt

SEQ ID NO: 923509 - DNA, 25 bp, Homo sapien
gcctgtcctgtttacttctcaagca

SEQ ID NO: 923510 - DNA, 25 bp, Homo sapien
ctggaagggccgcaagctgtcctga

SEQ ID NO: 923511 - DNA, 25 bp, Homo sapien
gaatccatggcaataaactgttctc

SEQ ID NO: 923512 - DNA, 25 bp, Homo sapien
ttttggccatgtagcatgcattgtg

SEQ ID NO: 923513 - DNA, 25 bp, Homo sapien
cattgtgacacttaagggcgcagga

SEQ ID NO: 923514 - DNA, 25 bp, Homo sapien
gttcccatgaccctggggccctcat

SEQ ID NO: 923515 - DNA, 25 bp, Homo sapien
ctttgctgtccactttccccgtggc

SEQ ID NO: 923516 - DNA, 25 bp, Homo sapien
tttgctgtccactttccccgtggct

SEQ ID NO: 923517 - DNA, 25 bp, Homo sapien
atcgtgtcacttgccgagattatgt

SEQ ID NO: 923518 - DNA, 25 bp, Homo sapien
cgtgtcacttgccgagattatgttg

SEQ ID NO: 923519 - DNA, 25 bp, Homo sapien
gtaggagaggcagatcgtgtcactt

SEQ ID NO: 923520 - DNA, 25 bp, Homo sapien
aggagaggcagatcgtgtcacttgc

SEQ ID NO: 923521 - DNA, 25 bp, Homo sapien
gctgtatggagtggatttcggtcat

SEQ ID NO: 923522 - DNA, 25 bp, Homo sapien
tgctgtatggagtggatttcggtca

SEQ ID NO: 923523 - DNA, 25 bp, Homo sapien
cttccagtagcgtctacaagtttgg

SEQ ID NO: 923524 - DNA, 25 bp, Homo sapien
caggcccagctttgcgtcctttcaa

SEQ ID NO: 923525 - DNA, 25 bp, Homo sapien
gtcctttcaagagtcctgcctcaca

SEQ ID NO: 923526 - DNA, 25 bp, Homo sapien
gaacttcctcatgtttacctcacca

SEQ ID NO: 923527 - DNA, 25 bp, Homo sapien
acgcgccgccacgagtgagcccagc

SEQ ID NO: 923528 - DNA, 25 bp, Homo sapien
gcgggagcccggttggcgtctggtc

SEQ ID NO: 923529 - DNA, 25 bp, Homo sapien
cgagtgagcccagcgcgaccgcggg

SEQ ID NO: 923530 - DNA, 25 bp, Homo sapien
tggcgtctggtcttcgcgtcggccc

SEQ ID NO: 923531 - DNA, 25 bp, Homo sapien
tggagatggcgggacttcccacgtc

SEQ ID NO: 923532 - DNA, 25 bp, Homo sapien
taattcggatttggcacgggaaaca

SEQ ID NO: 923533 - DNA, 25 bp, Homo sapien
cgtttcttctccgtttggcagtgaa

SEQ ID NO: 923534 - DNA, 25 bp, Homo sapien
cgtctggagccgaggcctggataat

SEQ ID NO: 923535 - DNA, 25 bp, Homo sapien
tcagaaaggtgggagggagagactc

SEQ ID NO: 923536 - DNA, 25 bp, Homo sapien
agaaaggtgggagggagagactcac

SEQ ID NO: 923537 - DNA, 25 bp, Homo sapien
cagaaaggtgggagggagagactca

SEQ ID NO: 923538 - DNA, 25 bp, Homo sapien
ctcagaaaggtgggagggagagact

SEQ ID NO: 923539 - DNA, 25 bp, Homo sapien
gtacgtccacaaagttaaatggcat

SEQ ID NO: 923540 - DNA, 25 bp, Homo sapien
aatggcatagtggtgttccctgtgt

SEQ ID NO: 923541 - DNA, 25 bp, Homo sapien
cggaatggggtggattctttcttca

SEQ ID NO: 923542 - DNA, 25 bp, Homo sapien
aagcttggtaaatatccggaatggg

SEQ ID NO: 923543 - DNA, 25 bp, Homo sapien
gagtgatcgcaaggtaatctagagg

SEQ ID NO: 923544 - DNA, 25 bp, Homo sapien
gaggagtgatcgcaaggtaatctag

SEQ ID NO: 923545 - DNA, 25 bp, Homo sapien
tgatcgcaaggtaatctagaggcat

SEQ ID NO: 923546 - DNA, 25 bp, Homo sapien
taaaatgaggagtgatcgcaaggta

SEQ ID NO: 923547 - DNA, 25 bp, Homo sapien
gaattttgtcccgagaaggtgagcg

SEQ ID NO: 923548 - DNA, 25 bp, Homo sapien
aatcttcggctagagagtgaggcct

SEQ ID NO: 923549 - DNA, 25 bp, Homo sapien
tccgtgtgaacaagaaatagtgctg

SEQ ID NO: 923550 - DNA, 25 bp, Homo sapien
gacacaagtgaatgactcaggccac

SEQ ID NO: 923551 - DNA, 25 bp, Homo sapien
caaggtcacaggagcattgcgtcgc

SEQ ID NO: 923552 - DNA, 25 bp, Homo sapien
taatgcacgtgctttgccctgggta

SEQ ID NO: 923553 - DNA, 25 bp, Homo sapien
gagaaccataatccttgcctgctga

SEQ ID NO: 923554 - DNA, 25 bp, Homo sapien
cctggatctagctggtcacgacgat

SEQ ID NO: 923555 - DNA, 25 bp, Homo sapien
tacgagttgcttacacgatgcatgg

SEQ ID NO: 923556 - DNA, 25 bp, Homo sapien
tacagaaacgcagagtcaatcaggt

SEQ ID NO: 923557 - DNA, 25 bp, Homo sapien
gactttgagacccttaagagacaag

SEQ ID NO: 923558 - DNA, 25 bp, Homo sapien
gaagtgccaaaaatgcctggacaga

SEQ ID NO: 923559 - DNA, 25 bp, Homo sapien
cacctgccatgtctgttgcgttttc

SEQ ID NO: 923560 - DNA, 25 bp, Homo sapien
gtgtttcttgtcgtgaggcacctgc

SEQ ID NO: 923561 - DNA, 25 bp, Homo sapien
tgtatgacttgaatcagttttgatt

SEQ ID NO: 923562 - DNA, 25 bp, Homo sapien
ttgcgttttcctcggcagcgtgtag

SEQ ID NO: 923563 - DNA, 25 bp, Homo sapien
ttcctgggttttcacccttcctgca

SEQ ID NO: 923564 - DNA, 25 bp, Homo sapien
cctgggttttcacccttcctgcagg

SEQ ID NO: 923565 - DNA, 25 bp, Homo sapien
tgggttttcacccttcctgcaggca

SEQ ID NO: 923566 - DNA, 25 bp, Homo sapien
tcagcttcctgggttttcacccttc

SEQ ID NO: 923567 - DNA, 25 bp, Homo sapien
ctgagggccagtgggtccatttcac

SEQ ID NO: 923568 - DNA, 25 bp, Homo sapien
ggtcagtagctgatctgttatggca

SEQ ID NO: 923569 - DNA, 25 bp, Homo sapien
ttcacttccagattaattttccgtg

SEQ ID NO: 923570 - DNA, 25 bp, Homo sapien
catctgaatttatttgctccgcgtc

SEQ ID NO: 923571 - DNA, 25 bp, Homo sapien
tccgtgtttgaagtatgtgcatatg

SEQ ID NO: 923572 - DNA, 25 bp, Homo sapien
taagtggagactaggagtcctgtag

SEQ ID NO: 923573 - DNA, 25 bp, Homo sapien
cattgctaagtggagactaggagtc

SEQ ID NO: 923574 - DNA, 25 bp, Homo sapien
tcctgtagggacgtgtctccccatc

SEQ ID NO: 923575 - DNA, 25 bp, Homo sapien
gtgccctgggtcattgctaagtgga

SEQ ID NO: 923576 - DNA, 25 bp, Homo sapien
gacgctcctccaaagacagtccaag

SEQ ID NO: 923577 - DNA, 25 bp, Homo sapien
cctccaaagacagtccaagaaggga

SEQ ID NO: 923578 - DNA, 25 bp, Homo sapien
cgctcctccaaagacagtccaagaa

SEQ ID NO: 923579 - DNA, 25 bp, Homo sapien
gggagacgctcctccaaagacagtc

SEQ ID NO: 923580 - DNA, 25 bp, Homo sapien
ctgcagtttcgagcccccattggta

SEQ ID NO: 923581 - DNA, 25 bp, Homo sapien
cagctgcagtttcgagcccccattg

SEQ ID NO: 923582 - DNA, 25 bp, Homo sapien
gtttcgagcccccattggtaatgcc

SEQ ID NO: 923583 - DNA, 25 bp, Homo sapien
gagcccccattggtaatgccagtac

SEQ ID NO: 923584 - DNA, 25 bp, Homo sapien
tagggcaggggagtgaggtcgtggc

SEQ ID NO: 923585 - DNA, 25 bp, Homo sapien
agggcaggggagtgaggtcgtggct

SEQ ID NO: 923586 - DNA, 25 bp, Homo sapien
ggcaggggagtgaggtcgtggctgc

SEQ ID NO: 923587 - DNA, 25 bp, Homo sapien
gttagggcaggggagtgaggtcgtg

SEQ ID NO: 923588 - DNA, 25 bp, Homo sapien
ggctgatttgctacgagacagagga

SEQ ID NO: 923589 - DNA, 25 bp, Homo sapien
ctcaggatatctcgctgaatccagg

SEQ ID NO: 923590 - DNA, 25 bp, Homo sapien
cttggtatctgtatccttgtagaga

SEQ ID NO: 923591 - DNA, 25 bp, Homo sapien
ggtgggcagccaaagttacttgtag

SEQ ID NO: 923592 - DNA, 25 bp, Homo sapien
ctgggctgaagtcttacgtacgttt

SEQ ID NO: 923593 - DNA, 25 bp, Homo sapien
aatctgcggcagatcttgctgggct

SEQ ID NO: 923594 - DNA, 25 bp, Homo sapien
gtttgagaaaatctgcggcagatct

SEQ ID NO: 923595 - DNA, 25 bp, Homo sapien
ttacgtacgtttgatctctcggcat

SEQ ID NO: 923596 - DNA, 25 bp, Homo sapien
tggtggattacagacagctcccaaa

SEQ ID NO: 923597 - DNA, 25 bp, Homo sapien
gagttcagtcgcttggtggattaca

SEQ ID NO: 923598 - DNA, 25 bp, Homo sapien
cagtggatgagttcagtcgcttggt

SEQ ID NO: 923599 - DNA, 25 bp, Homo sapien
tcgcttggtggattacagacagctc

SEQ ID NO: 923600 - DNA, 25 bp, Homo sapien
tgttgcacatattttctcctagcca

SEQ ID NO: 923601 - DNA, 25 bp, Homo sapien
gttgcacatattttctcctagccat

SEQ ID NO: 923602 - DNA, 25 bp, Homo sapien
ctgttgcacatattttctcctagcc

SEQ ID NO: 923603 - DNA, 25 bp, Homo sapien
tacatacaattttagctatattaat

SEQ ID NO: 923604 - DNA, 25 bp, Homo sapien
ttattgattacatacaattttagct

SEQ ID NO: 923605 - DNA, 25 bp, Homo sapien
catacaattttagctatattaatat

SEQ ID NO: 923606 - DNA, 25 bp, Homo sapien
taagagtggttttattgattacata

SEQ ID NO: 923607 - DNA, 25 bp, Homo sapien
ccaagaataatctaagttatggcag

SEQ ID NO: 923608 - DNA, 25 bp, Homo sapien
agaataatctaagttatggcagcat

SEQ ID NO: 923609 - DNA, 25 bp, Homo sapien
aaccaagaataatctaagttatggc

SEQ ID NO: 923610 - DNA, 25 bp, Homo sapien
caagaataatctaagttatggcagc

SEQ ID NO: 923611 - DNA, 25 bp, Homo sapien
catgaaacagtgccgtcggaaacgg

SEQ ID NO: 923612 - DNA, 25 bp, Homo sapien
cagtgccgtcggaaacggaaacact

SEQ ID NO: 923613 - DNA, 25 bp, Homo sapien
gttcaatgaaaggtaagtccggcac

SEQ ID NO: 923614 - DNA, 25 bp, Homo sapien
caatgaaaggtaagtccggcacaat

SEQ ID NO: 923615 - DNA, 25 bp, Homo sapien
tctttcagattgagtacttccaaag

SEQ ID NO: 923616 - DNA, 25 bp, Homo sapien
agctcatcaatttctcggaagcagc

SEQ ID NO: 923617 - DNA, 25 bp, Homo sapien
cagattgagtacttccaaagaacct

SEQ ID NO: 923618 - DNA, 25 bp, Homo sapien
ttttattagctcatcaatttctcgg

SEQ ID NO: 923619 - DNA, 25 bp, Homo sapien
caatatttaggtaacatgaagcaaa

SEQ ID NO: 923620 - DNA, 25 bp, Homo sapien
atacaatatttaggtaacatgaagc

SEQ ID NO: 923621 - DNA, 25 bp, Homo sapien
tatttaggtaacatgaagcaaagaa

SEQ ID NO: 923622 - DNA, 25 bp, Homo sapien
tagagaatacaatatttaggtaaca

SEQ ID NO: 923623 - DNA, 25 bp, Homo sapien
atttctaactgttggccataatctt

SEQ ID NO: 923624 - DNA, 25 bp, Homo sapien
ctttctatgaccttgatcagtggct

SEQ ID NO: 923625 - DNA, 25 bp, Homo sapien
gaccttgatcagtggcttgagcttt

SEQ ID NO: 923626 - DNA, 25 bp, Homo sapien
gcctcatgtgagcacgttctatctt

SEQ ID NO: 923627 - DNA, 25 bp, Homo sapien
aggatcacggtgtatggtctctttg

SEQ ID NO: 923628 - DNA, 25 bp, Homo sapien
aatagtggatgtccttcatggctct

SEQ ID NO: 923629 - DNA, 25 bp, Homo sapien
tctcaataaggatcacggtgtatgg

SEQ ID NO: 923630 - DNA, 25 bp, Homo sapien
agtggatgtccttcatggctctctc

SEQ ID NO: 923631 - DNA, 25 bp, Homo sapien
tgttccaaacgcactgatgagatct

SEQ ID NO: 923632 - DNA, 25 bp, Homo sapien
caaacgcactgatgagatcttcctt

SEQ ID NO: 923633 - DNA, 25 bp, Homo sapien
tggtcatctgttccaaacgcactga

SEQ ID NO: 923634 - DNA, 25 bp, Homo sapien
catctgttccaaacgcactgatgag

SEQ ID NO: 923635 - DNA, 25 bp, Homo sapien
cagaacttcatcgaggtctttttcc

SEQ ID NO: 923636 - DNA, 25 bp, Homo sapien
ggtctgcagaacttcatcgaggtct

SEQ ID NO: 923637 - DNA, 25 bp, Homo sapien
gagtgggtctgcagaacttcatcga

SEQ ID NO: 923638 - DNA, 25 bp, Homo sapien
aacatttacaaacactgagtgggtc

SEQ ID NO: 923639 - DNA, 25 bp, Homo sapien
ggctactgagatctatgacaccaga

SEQ ID NO: 923640 - DNA, 25 bp, Homo sapien
tattcgtaagactaggttctcagcc

SEQ ID NO: 923641 - DNA, 25 bp, Homo sapien
ggctgcagcttttatgacaccaaca

SEQ ID NO: 923642 - DNA, 25 bp, Homo sapien
cactttaaactgctagggctactga

SEQ ID NO: 923643 - DNA, 25 bp, Homo sapien
ccacattggttaggcggatctggtt

SEQ ID NO: 923644 - DNA, 25 bp, Homo sapien
ttcatccgtaccacggccacattgg

SEQ ID NO: 923645 - DNA, 25 bp, Homo sapien
cgtaccacggccacattggttaggc

SEQ ID NO: 923646 - DNA, 25 bp, Homo sapien
gctccgccagccgacgaccttgttt

SEQ ID NO: 923647 - DNA, 25 bp, Homo sapien
aaagacccagaagccggcgaaccag

SEQ ID NO: 923648 - DNA, 25 bp, Homo sapien
agaagccggcgaaccagggctgacc

SEQ ID NO: 923649 - DNA, 25 bp, Homo sapien
tgttcaaagacccagaagccggcga

SEQ ID NO: 923650 - DNA, 25 bp, Homo sapien
accagggctgacccgcgccgtccag

SEQ ID NO: 923651 - DNA, 25 bp, Homo sapien
gtgtctggcaggcttacttactgcg

SEQ ID NO: 923652 - DNA, 25 bp, Homo sapien
ggcagccgtcacagtgtgtctggca

SEQ ID NO: 923653 - DNA, 25 bp, Homo sapien
tacttactgcgcaggcgtcaggtgg

SEQ ID NO: 923654 - DNA, 25 bp, Homo sapien
gaaaagtgagcgatgacgcctgcgt

SEQ ID NO: 923655 - DNA, 25 bp, Homo sapien
ggcactcggtacgccgctaacgcgg

SEQ ID NO: 923656 - DNA, 25 bp, Homo sapien
aggcactcggtacgccgctaacgcg

SEQ ID NO: 923657 - DNA, 25 bp, Homo sapien
gcactcggtacgccgctaacgcggc

SEQ ID NO: 923658 - DNA, 25 bp, Homo sapien
aatcaggaccggcctggcagtgtca

SEQ ID NO: 923659 - DNA, 25 bp, Homo sapien
tccaggtccgagatcctagtctcct

SEQ ID NO: 923660 - DNA, 25 bp, Homo sapien
caggtccgagatcctagtctcctgt

SEQ ID NO: 923661 - DNA, 25 bp, Homo sapien
ccgagatcctagtctcctgtcggct

SEQ ID NO: 923662 - DNA, 25 bp, Homo sapien
ggtccgagatcctagtctcctgtcg

SEQ ID NO: 923663 - DNA, 25 bp, Homo sapien
atgggtaagggcactcggcgggcaa

SEQ ID NO: 923664 - DNA, 25 bp, Homo sapien
ggtaagggcactcggcgggcaagga

SEQ ID NO: 923665 - DNA, 25 bp, Homo sapien
tgaggaggatgggtaagggcactcg

SEQ ID NO: 923666 - DNA, 25 bp, Homo sapien
gaggatgggtaagggcactcggcgg

SEQ ID NO: 923667 - DNA, 25 bp, Homo sapien
ttatcattagcccacaagactgccc

SEQ ID NO: 923668 - DNA, 25 bp, Homo sapien
ctattcgagctcacttccaacattg

SEQ ID NO: 923669 - DNA, 25 bp, Homo sapien
tttctataccagttctcatgcttac

SEQ ID NO: 923670 - DNA, 25 bp, Homo sapien
tatcagtccttgaggcctgctgcag

SEQ ID NO: 923671 - DNA, 25 bp, Homo sapien
tatgaaaaccctggtgaaagtagtg

SEQ ID NO: 923672 - DNA, 25 bp, Homo sapien
cctggcctacctacagattaattta

SEQ ID NO: 923673 - DNA, 25 bp, Homo sapien
tgaatggcatcaaagtggactcgaa

SEQ ID NO: 923674 - DNA, 25 bp, Homo sapien
tagtgatgagaaggatgagccacca

SEQ ID NO: 923675 - DNA, 25 bp, Homo sapien
gcccggctggctgatatggacttaa

SEQ ID NO: 923676 - DNA, 25 bp, Homo sapien
cttttttgccggaatgactcacaga

SEQ ID NO: 923677 - DNA, 25 bp, Homo sapien
tgttctgacatcgatctctggcacc

SEQ ID NO: 923678 - DNA, 25 bp, Homo sapien
gatacctgctggaagtctcacggct

SEQ ID NO: 923679 - DNA, 25 bp, Homo sapien
ctttaatgctgtcgcgctgcatcga

SEQ ID NO: 923680 - DNA, 25 bp, Homo sapien
aaagtctgagcaccagactgggctc

SEQ ID NO: 923681 - DNA, 25 bp, Homo sapien
catcgacaactcacacactttggtg

SEQ ID NO: 923682 - DNA, 25 bp, Homo sapien
tggcaacttataatgagtctaaaag

SEQ ID NO: 923683 - DNA, 25 bp, Homo sapien
tctttcacatcttctgtttggttcc

SEQ ID NO: 923684 - DNA, 25 bp, Homo sapien
tacttagacaagataattccaaatt

SEQ ID NO: 923685 - DNA, 25 bp, Homo sapien
caaattgatttgtcttccacttcac

SEQ ID NO: 923686 - DNA, 25 bp, Homo sapien
agttattattctttcacatcttctg

SEQ ID NO: 923687 - DNA, 25 bp, Homo sapien
tatatacaagccctgggggtagcgg

SEQ ID NO: 923688 - DNA, 25 bp, Homo sapien
atttataatctatatacaagccctg

SEQ ID NO: 923689 - DNA, 25 bp, Homo sapien
ttataatctatatacaagccctggg

SEQ ID NO: 923690 - DNA, 25 bp, Homo sapien
aatctatatacaagccctgggggta

SEQ ID NO: 923691 - DNA, 25 bp, Homo sapien
gtggcggccctgtccattcccaagg

SEQ ID NO: 923692 - DNA, 25 bp, Homo sapien
tcgaggtggcggccctgtccattcc

SEQ ID NO: 923693 - DNA, 25 bp, Homo sapien
ccaaggcttaggtatccagtgcagg

SEQ ID NO: 923694 - DNA, 25 bp, Homo sapien
tgccttttgggagggcccttctcga

SEQ ID NO: 923695 - DNA, 25 bp, Homo sapien
cggaagactccactgcaggtggaag

SEQ ID NO: 923696 - DNA, 25 bp, Homo sapien
tgctggtaaaggtcgaagcgctggg

SEQ ID NO: 923697 - DNA, 25 bp, Homo sapien
cgctgggtgcggaagactccactgc

SEQ ID NO: 923698 - DNA, 25 bp, Homo sapien
ggtggaaggcgtggccttgagacag

SEQ ID NO: 923699 - DNA, 25 bp, Homo sapien
tccttgaatgcgtgaagctataaag

SEQ ID NO: 923700 - DNA, 25 bp, Homo sapien
cggggtttgtccgagatgacggtgc

SEQ ID NO: 923701 - DNA, 25 bp, Homo sapien
tatcagaagcctgtactgcttctgt

SEQ ID NO: 923702 - DNA, 25 bp, Homo sapien
ttctgcagccgcaggcatacccctg

SEQ ID NO: 923703 - DNA, 25 bp, Homo sapien
catttggtagatgttatcgagtctc

SEQ ID NO: 923704 - DNA, 25 bp, Homo sapien
gatgttcgtactagccttgattgcc

SEQ ID NO: 923705 - DNA, 25 bp, Homo sapien
cctgcagagggattgtggaatacga

SEQ ID NO: 923706 - DNA, 25 bp, Homo sapien
tactaaacctgactgggaaatgagg

SEQ ID NO: 923707 - DNA, 25 bp, Homo sapien
cagtcttttagtgaggctgtacccc

SEQ ID NO: 923708 - DNA, 25 bp, Homo sapien
ctcacaaaagtgtagggcccctaat

SEQ ID NO: 923709 - DNA, 25 bp, Homo sapien
tcttacatggaaggccggtgctggc

SEQ ID NO: 923710 - DNA, 25 bp, Homo sapien
taaatcgtttctcctgggagcagac

SEQ ID NO: 923711 - DNA, 25 bp, Homo sapien
gaaactatatgggttctatttgatt

SEQ ID NO: 923712 - DNA, 25 bp, Homo sapien
ttagtgcatctgggaaatgaagata

SEQ ID NO: 923713 - DNA, 25 bp, Homo sapien
gatgtgggtccataagaaactcata

SEQ ID NO: 923714 - DNA, 25 bp, Homo sapien
ttctatttgatttatggcagtgtga

SEQ ID NO: 923715 - DNA, 25 bp, Homo sapien
tcctcttgaaactctctcctttggg

SEQ ID NO: 923716 - DNA, 25 bp, Homo sapien
gggttttagaagattttgctctcat

SEQ ID NO: 923717 - DNA, 25 bp, Homo sapien
atcagtttcctcttgaaactctctc

SEQ ID NO: 923718 - DNA, 25 bp, Homo sapien
ttagaagattttgctctcattgttt

SEQ ID NO: 923719 - DNA, 25 bp, Homo sapien
gaactcaacgtgctgcttacacata

SEQ ID NO: 923720 - DNA, 25 bp, Homo sapien
tcaacgtgctgcttacacatattca

SEQ ID NO: 923721 - DNA, 25 bp, Homo sapien
aacgtgctgcttacacatattcaca

SEQ ID NO: 923722 - DNA, 25 bp, Homo sapien
ttgaactcaacgtgctgcttacaca

SEQ ID NO: 923723 - DNA, 25 bp, Homo sapien
cctggcccatttaacgactttctga

SEQ ID NO: 923724 - DNA, 25 bp, Homo sapien
caataaacttgtattttggaacagt

SEQ ID NO: 923725 - DNA, 25 bp, Homo sapien
ttgtctgtgattataaacagttgag

SEQ ID NO: 923726 - DNA, 25 bp, Homo sapien
gaacagttttatgatggtagatacc

SEQ ID NO: 923727 - DNA, 25 bp, Homo sapien
aagcgcctctagtcaaccatcttga

SEQ ID NO: 923728 - DNA, 25 bp, Homo sapien
ctcttttcgaggtgtggttatctac

SEQ ID NO: 923729 - DNA, 25 bp, Homo sapien
tgtgtcttagacattctcagtcact

SEQ ID NO: 923730 - DNA, 25 bp, Homo sapien
gaggaggtgagtaccaagcgcctct

SEQ ID NO: 923731 - DNA, 25 bp, Homo sapien
ttcttgtgatgaaatcgtgcttatg

SEQ ID NO: 923732 - DNA, 25 bp, Homo sapien
ttgtagaatgtcccttgattaggat

SEQ ID NO: 923733 - DNA, 25 bp, Homo sapien
tcagacttcccttgtctttgatacc

SEQ ID NO: 923734 - DNA, 25 bp, Homo sapien
taggcttctctaggcgggacagttt

SEQ ID NO: 923735 - DNA, 25 bp, Homo sapien
tcttctgtgtgcatcttgcacctct

SEQ ID NO: 923736 - DNA, 25 bp, Homo sapien
cacctctcagctttcttgcgctcat

SEQ ID NO: 923737 - DNA, 25 bp, Homo sapien
tcacattctgctgccagtgctccga

SEQ ID NO: 923738 - DNA, 25 bp, Homo sapien
ccagtgctccgagcctcttctgtgt

SEQ ID NO: 923739 - DNA, 25 bp, Homo sapien
caacatcccgaatttggctgattga

SEQ ID NO: 923740 - DNA, 25 bp, Homo sapien
ttggctgattgaatccttttggtat

SEQ ID NO: 923741 - DNA, 25 bp, Homo sapien
tagaatttgcaacatcccgaatttg

SEQ ID NO: 923742 - DNA, 25 bp, Homo sapien
gaaggtgggtcatttgtcattagaa

SEQ ID NO: 923743 - DNA, 25 bp, Homo sapien
gcaagtcgactaataaagagacact

SEQ ID NO: 923744 - DNA, 25 bp, Homo sapien
tgcaagtcgactaataaagagacac

SEQ ID NO: 923745 - DNA, 25 bp, Homo sapien
tattgcaagtcgactaataaagaga

SEQ ID NO: 923746 - DNA, 25 bp, Homo sapien
ttgcaagtcgactaataaagagaca

SEQ ID NO: 923747 - DNA, 25 bp, Homo sapien
gattagagggctttaatcttggccc

SEQ ID NO: 923748 - DNA, 25 bp, Homo sapien
cactaccacttgttaactaggtgac

SEQ ID NO: 923749 - DNA, 25 bp, Homo sapien
gggacacagtgctcagacatgaaga

SEQ ID NO: 923750 - DNA, 25 bp, Homo sapien
gcacctggctcatagcatgattcag

SEQ ID NO: 923751 - DNA, 25 bp, Homo sapien
gggctaacagaaaacgacaaatatc

SEQ ID NO: 923752 - DNA, 25 bp, Homo sapien
tacgggaactgccattcaaggtgag

SEQ ID NO: 923753 - DNA, 25 bp, Homo sapien
tcctgccttcaagaatgggctaaca

SEQ ID NO: 923754 - DNA, 25 bp, Homo sapien
cttacatggtgttagacgagagaaa

SEQ ID NO: 923755 - DNA, 25 bp, Homo sapien
tgtagtatctttatctcattttggt

SEQ ID NO: 923756 - DNA, 25 bp, Homo sapien
cagtcttccctacctggaataagtc

SEQ ID NO: 923757 - DNA, 25 bp, Homo sapien
tgttgaaccagtcttccctacctgg

SEQ ID NO: 923758 - DNA, 25 bp, Homo sapien
ttgattttacatctgtgtttatggc

SEQ ID NO: 923759 - DNA, 25 bp, Homo sapien
gatgctgtagctattctccttgtgc

SEQ ID NO: 923760 - DNA, 25 bp, Homo sapien
tgaccgatatggagggatttacttc

SEQ ID NO: 923761 - DNA, 25 bp, Homo sapien
ccttgtgcttacaatggacatcgca

SEQ ID NO: 923762 - DNA, 25 bp, Homo sapien
tttgatattagtagagccgctcctg

SEQ ID NO: 923763 - DNA, 25 bp, Homo sapien
gaaaacaaaacatagaggctgggtg

SEQ ID NO: 923764 - DNA, 25 bp, Homo sapien
atagaaaacaaaacatagaggctgg

SEQ ID NO: 923765 - DNA, 25 bp, Homo sapien
aaaacaaaacatagaggctgggtgt

SEQ ID NO: 923766 - DNA, 25 bp, Homo sapien
gcctggctaaatggcaaacccccat

SEQ ID NO: 923767 - DNA, 25 bp, Homo sapien
gatttcccgtatagatgagtctctg

SEQ ID NO: 923768 - DNA, 25 bp, Homo sapien
caagggaaaccgatgggaagtcagt

SEQ ID NO: 923769 - DNA, 25 bp, Homo sapien
gatagtaggcttttcagtgcactca

SEQ ID NO: 923770 - DNA, 25 bp, Homo sapien
gggccagccgaatgatacaagtttt

SEQ ID NO: 923771 - DNA, 25 bp, Homo sapien
tttactgtgtaccatggaagatgag

SEQ ID NO: 923772 - DNA, 25 bp, Homo sapien
ctttactgtgtaccatggaagatga

SEQ ID NO: 923773 - DNA, 25 bp, Homo sapien
ggacagttcactctctaccacctag

SEQ ID NO: 923774 - DNA, 25 bp, Homo sapien
ataatgtgcctcagacggtgtgtct

SEQ ID NO: 923775 - DNA, 25 bp, Homo sapien
tattgcctcgcagactttcagatgc

SEQ ID NO: 923776 - DNA, 25 bp, Homo sapien
tgttatcctgggatcaccagctctg

SEQ ID NO: 923777 - DNA, 25 bp, Homo sapien
cttgggctggtcagtagggtcttct

SEQ ID NO: 923778 - DNA, 25 bp, Homo sapien
ggctggtcagtagggtcttctcatt

SEQ ID NO: 923779 - DNA, 25 bp, Homo sapien
tggtcagtagggtcttctcattttc

SEQ ID NO: 923780 - DNA, 25 bp, Homo sapien
tgggctggtcagtagggtcttctca

SEQ ID NO: 923781 - DNA, 25 bp, Homo sapien
ttcaggatcataggaatcaattctg

SEQ ID NO: 923782 - DNA, 25 bp, Homo sapien
tttacattcaggatcataggaatca

SEQ ID NO: 923783 - DNA, 25 bp, Homo sapien
agagatgcagatttgatactcagac

SEQ ID NO: 923784 - DNA, 25 bp, Homo sapien
caagagatgcagatttgatactcag

SEQ ID NO: 923785 - DNA, 25 bp, Homo sapien
gaagctctcctgtgattgtagcgca

SEQ ID NO: 923786 - DNA, 25 bp, Homo sapien
aacttgacttgtcttccgggcccag

SEQ ID NO: 923787 - DNA, 25 bp, Homo sapien
tctaaaaaggattccacgaggtgct

SEQ ID NO: 923788 - DNA, 25 bp, Homo sapien
gatattgtatccacgttaggccaga

SEQ ID NO: 923789 - DNA, 25 bp, Homo sapien
taacttgtaagacctgccagaatgc

SEQ ID NO: 923790 - DNA, 25 bp, Homo sapien
gccagaatgctagtcccgagagtgt

SEQ ID NO: 923791 - DNA, 25 bp, Homo sapien
taccctgagctaaacgtgtctgtgc

SEQ ID NO: 923792 - DNA, 25 bp, Homo sapien
tctcatatcatgaccagacggcggg

SEQ ID NO: 923793 - DNA, 25 bp, Homo sapien
gatggttagccaaaaatgttctatc

SEQ ID NO: 923794 - DNA, 25 bp, Homo sapien
gatgccagaagagaggatgaaatag

SEQ ID NO: 923795 - DNA, 25 bp, Homo sapien
aatgagatcagttccaaaacggcag

SEQ ID NO: 923796 - DNA, 25 bp, Homo sapien
tgttctaagaaggtgatctgttggc

SEQ ID NO: 923797 - DNA, 25 bp, Homo sapien
cactgcgcccgaccagaacaccaga

SEQ ID NO: 923798 - DNA, 25 bp, Homo sapien
gaccagaacaccagacattaacttg

SEQ ID NO: 923799 - DNA, 25 bp, Homo sapien
gacattaacttgcatccagatgaag

SEQ ID NO: 923800 - DNA, 25 bp, Homo sapien
atgaagaaataaagagcagaggtaa

SEQ ID NO: 923801 - DNA, 25 bp, Homo sapien
tgttttaaaggacagctgcctaaag

SEQ ID NO: 923802 - DNA, 25 bp, Homo sapien
tgactcttgactgccactattgaaa

SEQ ID NO: 923803 - DNA, 25 bp, Homo sapien
taatccccaggctaaccactaagag

SEQ ID NO: 923804 - DNA, 25 bp, Homo sapien
taataatagcacaagggagtgagga

SEQ ID NO: 923805 - DNA, 25 bp, Homo sapien
gaatcttatggtatgcgaattttat

SEQ ID NO: 923806 - DNA, 25 bp, Homo sapien
tcttatggtatgcgaattttatctc

SEQ ID NO: 923807 - DNA, 25 bp, Homo sapien
aatcttatggtatgcgaattttatc

SEQ ID NO: 923808 - DNA, 25 bp, Homo sapien
gctccccttactgttgtatacttta

SEQ ID NO: 923809 - DNA, 25 bp, Homo sapien
cagtctctgggtgattgtcattgga

SEQ ID NO: 923810 - DNA, 25 bp, Homo sapien
gataattcaagtcattcaacagatg

SEQ ID NO: 923811 - DNA, 25 bp, Homo sapien
caaatacaagtgatggtaagagcca

SEQ ID NO: 923812 - DNA, 25 bp, Homo sapien
tgctggtgcctaagagaagaattct

SEQ ID NO: 923813 - DNA, 25 bp, Homo sapien
taagttataatcgaagcctggagga

SEQ ID NO: 923814 - DNA, 25 bp, Homo sapien
tatcctgtggctaatgccttggctg

SEQ ID NO: 923815 - DNA, 25 bp, Homo sapien
ggtggatgacagtgccatcttccag

SEQ ID NO: 923816 - DNA, 25 bp, Homo sapien
cagatgcctctgacaattagatggg

SEQ ID NO: 923817 - DNA, 25 bp, Homo sapien
caaagccaaaaatccgtgtggcctt

SEQ ID NO: 923818 - DNA, 25 bp, Homo sapien
tgttatcgctagagtgggtttgtta

SEQ ID NO: 923819 - DNA, 25 bp, Homo sapien
caaaaatccgtgtggccttccaaga

SEQ ID NO: 923820 - DNA, 25 bp, Homo sapien
tgttgttatcgctagagtgggtttg

SEQ ID NO: 923821 - DNA, 25 bp, Homo sapien
tccttaacctgtcatggccctgaga

SEQ ID NO: 923822 - DNA, 25 bp, Homo sapien
acttgggtcagctgctatagctgcc

SEQ ID NO: 923823 - DNA, 25 bp, Homo sapien
cccttttgtgggatacactcactca

SEQ ID NO: 923824 - DNA, 25 bp, Homo sapien
gtctggatgtgtgcaggacccacgc

SEQ ID NO: 923825 - DNA, 25 bp, Homo sapien
gctcctaagcgctgatgtgtcaatg

SEQ ID NO: 923826 - DNA, 25 bp, Homo sapien
tcagtcggttgtgagagttcaggtc

SEQ ID NO: 923827 - DNA, 25 bp, Homo sapien
tgtgaatcgggtacacggacctaaa

SEQ ID NO: 923828 - DNA, 25 bp, Homo sapien
ttctacaatgctgagacctgccgcc

SEQ ID NO: 923829 - DNA, 25 bp, Homo sapien
caaacttcttctttcgatttctgtg

SEQ ID NO: 923830 - DNA, 25 bp, Homo sapien
ctgggtgacagcgagattctgtctc

SEQ ID NO: 923831 - DNA, 25 bp, Homo sapien
agtgagccgagattatacccctgca

SEQ ID NO: 923832 - DNA, 25 bp, Homo sapien
ccgagattatacccctgcactccag

SEQ ID NO: 923833 - DNA, 25 bp, Homo sapien
cctgggtgacagcgagattctgtct

SEQ ID NO: 923834 - DNA, 25 bp, Homo sapien
ggagaggagtaacgtaagtaagaca

SEQ ID NO: 923835 - DNA, 25 bp, Homo sapien
tgttggcaagaagttcatttacctt

SEQ ID NO: 923836 - DNA, 25 bp, Homo sapien
gatttaggtacatatcaaaggcaca

SEQ ID NO: 923837 - DNA, 25 bp, Homo sapien
aaaatcctgggttgtaatgttggca

SEQ ID NO: 923838 - DNA, 25 bp, Homo sapien
atatttctgcagcatacctacagcc

SEQ ID NO: 923839 - DNA, 25 bp, Homo sapien
gatatttctgcagcatacctacagc

SEQ ID NO: 923840 - DNA, 25 bp, Homo sapien
tatttctgcagcatacctacagcca

SEQ ID NO: 923841 - DNA, 25 bp, Homo sapien
gaatatgcaaaccaggcttgaagat

SEQ ID NO: 923842 - DNA, 25 bp, Homo sapien
ttacgatgggcacggcctcagtgta

SEQ ID NO: 923843 - DNA, 25 bp, Homo sapien
tagtgtgtctagacaagatggccgg

SEQ ID NO: 923844 - DNA, 25 bp, Homo sapien
tgacaacgtatcaacatcatttacg

SEQ ID NO: 923845 - DNA, 25 bp, Homo sapien
gactagagtttcttagccgaactgg

SEQ ID NO: 923846 - DNA, 25 bp, Homo sapien
ggcttaggtaatccatggattccct

SEQ ID NO: 923847 - DNA, 25 bp, Homo sapien
gtctcttggactcaaaattgcctta

SEQ ID NO: 923848 - DNA, 25 bp, Homo sapien
tcaaaatgtctcttggactcaaaat

SEQ ID NO: 923849 - DNA, 25 bp, Homo sapien
tcagtattcctgggatctcttgtac

SEQ ID NO: 923850 - DNA, 25 bp, Homo sapien
gagtgttgctcgtgctccctgagca

SEQ ID NO: 923851 - DNA, 25 bp, Homo sapien
aggccttcaacaggctgcttggtag

SEQ ID NO: 923852 - DNA, 25 bp, Homo sapien
ctgcttggtaggaggacaccccaga

SEQ ID NO: 923853 - DNA, 25 bp, Homo sapien
ccccgcataggtccttttgctggaa

SEQ ID NO: 923854 - DNA, 25 bp, Homo sapien
agacacagtctagctctgctcccca

SEQ ID NO: 923855 - DNA, 25 bp, Homo sapien
gtgagacacagtctagctctgctcc

SEQ ID NO: 923856 - DNA, 25 bp, Homo sapien
ttgtgagacacagtctagctctgct

SEQ ID NO: 923857 - DNA, 25 bp, Homo sapien
acacagtctagctctgctccccagg

SEQ ID NO: 923858 - DNA, 25 bp, Homo sapien
cccctgcctctcctatgggtccttt

SEQ ID NO: 923859 - DNA, 25 bp, Homo sapien
ccctgcctctcctatgggtcctttg

SEQ ID NO: 923860 - DNA, 25 bp, Homo sapien
gcccctgcctctcctatgggtcctt

SEQ ID NO: 923861 - DNA, 25 bp, Homo sapien
tggtcatagtgtatttcagccgggc

SEQ ID NO: 923862 - DNA, 25 bp, Homo sapien
gctatggtcatagtgtatttcagcc

SEQ ID NO: 923863 - DNA, 25 bp, Homo sapien
tagtgtatttcagccgggccggcct

SEQ ID NO: 923864 - DNA, 25 bp, Homo sapien
cctggctatggtcatagtgtatttc

SEQ ID NO: 923865 - DNA, 25 bp, Homo sapien
aagagaggattatactatcatagac

SEQ ID NO: 923866 - DNA, 25 bp, Homo sapien
aaaagagaggattatactatcatag

SEQ ID NO: 923867 - DNA, 25 bp, Homo sapien
gagaggattatactatcatagactg

SEQ ID NO: 923868 - DNA, 25 bp, Homo sapien
gaggattatactatcatagactgtt

SEQ ID NO: 923869 - DNA, 25 bp, Homo sapien
cctgaggtcatcggcctgagagaag

SEQ ID NO: 923870 - DNA, 25 bp, Homo sapien
aggcttatgacccagagcactgggt

SEQ ID NO: 923871 - DNA, 25 bp, Homo sapien
ctgagagaaggtacatctgcatcct

SEQ ID NO: 923872 - DNA, 25 bp, Homo sapien
tccagatccaggcttatgacccaga

SEQ ID NO: 923873 - DNA, 25 bp, Homo sapien
ccatttgtgcagatcatctagaaga

SEQ ID NO: 923874 - DNA, 25 bp, Homo sapien
atttgtgcagatcatctagaagaac

SEQ ID NO: 923875 - DNA, 25 bp, Homo sapien
tttgtgcagatcatctagaagaacc

SEQ ID NO: 923876 - DNA, 25 bp, Homo sapien
catttgtgcagatcatctagaagaa

SEQ ID NO: 923877 - DNA, 25 bp, Homo sapien
gctatgtagtagttcccctaaattc

SEQ ID NO: 923878 - DNA, 25 bp, Homo sapien
tatagctatgtagtagttcccctaa

SEQ ID NO: 923879 - DNA, 25 bp, Homo sapien
tagctatgtagtagttcccctaaat

SEQ ID NO: 923880 - DNA, 25 bp, Homo sapien
ctatgtagtagttcccctaaattct

SEQ ID NO: 923881 - DNA, 25 bp, Homo sapien
gctctggacctaagagaggacaagg

SEQ ID NO: 923882 - DNA, 25 bp, Homo sapien
acctgagctctggacctaagagagg

SEQ ID NO: 923883 - DNA, 25 bp, Homo sapien
tctggacctaagagaggacaaggcc

SEQ ID NO: 923884 - DNA, 25 bp, Homo sapien
tgagctctggacctaagagaggaca

SEQ ID NO: 923885 - DNA, 25 bp, Homo sapien
ccagaagggccattagtcttgtttt

SEQ ID NO: 923886 - DNA, 25 bp, Homo sapien
accagaagggccattagtcttgttt

SEQ ID NO: 923887 - DNA, 25 bp, Homo sapien
aaccagaagggccattagtcttgtt

SEQ ID NO: 923888 - DNA, 25 bp, Homo sapien
actgacaatcacggcagaaggcgaa

SEQ ID NO: 923889 - DNA, 25 bp, Homo sapien
aactgacaatcacggcagaaggcga

SEQ ID NO: 923890 - DNA, 25 bp, Homo sapien
tgacaatcacggcagaaggcgaagg

SEQ ID NO: 923891 - DNA, 25 bp, Homo sapien
aaactgacaatcacggcagaaggcg

SEQ ID NO: 923892 - DNA, 25 bp, Homo sapien
accatgtcaagggtagttcaaccgc

SEQ ID NO: 923893 - DNA, 25 bp, Homo sapien
ttcaaccgctgagattgattgattg

SEQ ID NO: 923894 - DNA, 25 bp, Homo sapien
ggtgtggatacagagctgaaccatg

SEQ ID NO: 923895 - DNA, 25 bp, Homo sapien
tacagagctgaaccatgtcaagggt

SEQ ID NO: 923896 - DNA, 25 bp, Homo sapien
gcacccggccaacaacggagattta

SEQ ID NO: 923897 - DNA, 25 bp, Homo sapien
cacccggccaacaacggagatttag

SEQ ID NO: 923898 - DNA, 25 bp, Homo sapien
cggccaacaacggagatttagaagg

SEQ ID NO: 923899 - DNA, 25 bp, Homo sapien
ccggccaacaacggagatttagaag

SEQ ID NO: 923900 - DNA, 25 bp, Homo sapien
gtttgtcctccaggctccaacactt

SEQ ID NO: 923901 - DNA, 25 bp, Homo sapien
tgtaactgcatcagaccaaatctgg

SEQ ID NO: 923902 - DNA, 25 bp, Homo sapien
cagcctttcaagctactccaggtga

SEQ ID NO: 923903 - DNA, 25 bp, Homo sapien
tccaggtgaccccagaactcatttg

SEQ ID NO: 923904 - DNA, 25 bp, Homo sapien
agcatgtctcaatagattatggtaa

SEQ ID NO: 923905 - DNA, 25 bp, Homo sapien
ttgctcatgtgcattaaccaatact

SEQ ID NO: 923906 - DNA, 25 bp, Homo sapien
ctcccagtctgaaatacagtggcac

SEQ ID NO: 923907 - DNA, 25 bp, Homo sapien
tatgttgcccagtcctaataaacac

SEQ ID NO: 923908 - DNA, 25 bp, Homo sapien
ctttgaaattccttatggtgcacag

SEQ ID NO: 923909 - DNA, 25 bp, Homo sapien
tgcacaggtagtgtagaaaataact

SEQ ID NO: 923910 - DNA, 25 bp, Homo sapien
aattccttatggtgcacaggtagtg

SEQ ID NO: 923911 - DNA, 25 bp, Homo sapien
ccttatggtgcacaggtagtgtaga

SEQ ID NO: 923912 - DNA, 25 bp, Homo sapien
aaccttcgccgatgcgtggcaggta

SEQ ID NO: 923913 - DNA, 25 bp, Homo sapien
agtcgagtcccaaccttcgccgatg

SEQ ID NO: 923914 - DNA, 25 bp, Homo sapien
atcgtgatcaaacaccagtcgagtc

SEQ ID NO: 923915 - DNA, 25 bp, Homo sapien
tcgccgatgcgtggcaggtagaaat

SEQ ID NO: 923916 - DNA, 25 bp, Homo sapien
ctgaaagccgaaagtttcaacctca

SEQ ID NO: 923917 - DNA, 25 bp, Homo sapien
tcaacctcagttaggttggcaaact

SEQ ID NO: 923918 - DNA, 25 bp, Homo sapien
acctcagttaggttggcaaactctt

SEQ ID NO: 923919 - DNA, 25 bp, Homo sapien
tgaaagccgaaagtttcaacctcag

SEQ ID NO: 923920 - DNA, 25 bp, Homo sapien
tcaatgagatccactccatagtcct

SEQ ID NO: 923921 - DNA, 25 bp, Homo sapien
gtctgaaacttcaatgagatccact

SEQ ID NO: 923922 - DNA, 25 bp, Homo sapien
gagatccactccatagtccttaagc

SEQ ID NO: 923923 - DNA, 25 bp, Homo sapien
gaaacttcaatgagatccactccat

SEQ ID NO: 923924 - DNA, 25 bp, Homo sapien
caattagtggttaacaccgttgcac

SEQ ID NO: 923925 - DNA, 25 bp, Homo sapien
tagtggttaacaccgttgcactttg

SEQ ID NO: 923926 - DNA, 25 bp, Homo sapien
gatcaattagtggttaacaccgttg

SEQ ID NO: 923927 - DNA, 25 bp, Homo sapien
gtgatcaattagtggttaacaccgt

SEQ ID NO: 923928 - DNA, 25 bp, Homo sapien
cttccgatcgataggtttgatggcc

SEQ ID NO: 923929 - DNA, 25 bp, Homo sapien
tctactaactccttcaccgcagtgc

SEQ ID NO: 923930 - DNA, 25 bp, Homo sapien
aatctgatggactgacttccgatcg

SEQ ID NO: 923931 - DNA, 25 bp, Homo sapien
ctgttttctactaactccttcaccg

SEQ ID NO: 923932 - DNA, 25 bp, Homo sapien
gcctgcctcggccttaaggcgcaac

SEQ ID NO: 923933 - DNA, 25 bp, Homo sapien
ggccttaaggcgcaaccaaggagca

SEQ ID NO: 923934 - DNA, 25 bp, Homo sapien
gcaaccaaggagcactggatggctg

SEQ ID NO: 923935 - DNA, 25 bp, Homo sapien
aaagaccccgaaggagcctgcctcg

SEQ ID NO: 923936 - DNA, 25 bp, Homo sapien
cagcagggtcacaagggagatgtcc

SEQ ID NO: 923937 - DNA, 25 bp, Homo sapien
tattagctccgtcaaaggtcgagtc

SEQ ID NO: 923938 - DNA, 25 bp, Homo sapien
caggtaaaaccttatcacgggcgcg

SEQ ID NO: 923939 - DNA, 25 bp, Homo sapien
tgtaccggctctctaacgtgcaagg

SEQ ID NO: 923940 - DNA, 25 bp, Homo sapien
agcctcggcatgtacacccatgacc

SEQ ID NO: 923941 - DNA, 25 bp, Homo sapien
tagcctcggcatgtacacccatgac

SEQ ID NO: 923942 - DNA, 25 bp, Homo sapien
atagcctcggcatgtacacccatga

SEQ ID NO: 923943 - DNA, 25 bp, Homo sapien
gtaattttcagcctggttgtgtgag

SEQ ID NO: 923944 - DNA, 25 bp, Homo sapien
ccatttctgtgtaattttcagcctg

SEQ ID NO: 923945 - DNA, 25 bp, Homo sapien
ttctgtgtaattttcagcctggttg

SEQ ID NO: 923946 - DNA, 25 bp, Homo sapien
attttcagcctggttgtgtgaggtg

SEQ ID NO: 923947 - DNA, 25 bp, Homo sapien
tgacctccctggtaagagttgccct

SEQ ID NO: 923948 - DNA, 25 bp, Homo sapien
tctgcacgaagatatcaatcagcgt

SEQ ID NO: 923949 - DNA, 25 bp, Homo sapien
gcgtcagtatgaggctgaaagaaac

SEQ ID NO: 923950 - DNA, 25 bp, Homo sapien
caaagctatgaaactgatgacctcc

SEQ ID NO: 923951 - DNA, 25 bp, Homo sapien
gttatagtagtaacatcaggctggg

SEQ ID NO: 923952 - DNA, 25 bp, Homo sapien
tatgggcatggttcgtggtacccca

SEQ ID NO: 923953 - DNA, 25 bp, Homo sapien
tatgtctcaaggaatgaatagggag

SEQ ID NO: 923954 - DNA, 25 bp, Homo sapien
ttggtagggtagtcagaacacagac

SEQ ID NO: 923955 - DNA, 25 bp, Homo sapien
gactatgtgtcattaaaaatttact

SEQ ID NO: 923956 - DNA, 25 bp, Homo sapien
aatgtacacttacctctccagaagg

SEQ ID NO: 923957 - DNA, 25 bp, Homo sapien
acagatcaatgtacacttacctctc

SEQ ID NO: 923958 - DNA, 25 bp, Homo sapien
gctgaaaggtgtgtagtgactatgt

SEQ ID NO: 923959 - DNA, 25 bp, Homo sapien
ttctaaatgggtcagagtaaagctt

SEQ ID NO: 923960 - DNA, 25 bp, Homo sapien
cagagtaaagctttggctgatacat

SEQ ID NO: 923961 - DNA, 25 bp, Homo sapien
catcttcacgtacaaaggctatttc

SEQ ID NO: 923962 - DNA, 25 bp, Homo sapien
tacaactatgcgttcatcttcacgt

SEQ ID NO: 923963 - DNA, 25 bp, Homo sapien
caacacttcatatgacacataatag

SEQ ID NO: 923964 - DNA, 25 bp, Homo sapien
tctcaacacttcatatgacacataa

SEQ ID NO: 923965 - DNA, 25 bp, Homo sapien
gactcatctgttgggggaaacctag

SEQ ID NO: 923966 - DNA, 25 bp, Homo sapien
gtattctcaacacttcatatgacac

SEQ ID NO: 923967 - DNA, 25 bp, Homo sapien
gacaaatactaatttgaggtggtgg

SEQ ID NO: 923968 - DNA, 25 bp, Homo sapien
cacttaaaagtagacaaatactaat

SEQ ID NO: 923969 - DNA, 25 bp, Homo sapien
tagacaaatactaatttgaggtggt

SEQ ID NO: 923970 - DNA, 25 bp, Homo sapien
aaagtagacaaatactaatttgagg

SEQ ID NO: 923971 - DNA, 25 bp, Homo sapien
agaagttacagtccatgtgtctgaa

SEQ ID NO: 923972 - DNA, 25 bp, Homo sapien
catgcagatatcagagatttgtagg

SEQ ID NO: 923973 - DNA, 25 bp, Homo sapien
gattccttcaatggagacccatgtt

SEQ ID NO: 923974 - DNA, 25 bp, Homo sapien
gtttctgagcaaaagtaggccctct

SEQ ID NO: 923975 - DNA, 25 bp, Homo sapien
ggttggctacttaactgaagatacc

SEQ ID NO: 923976 - DNA, 25 bp, Homo sapien
aaaacagatctgacaatatgaaagt

SEQ ID NO: 923977 - DNA, 25 bp, Homo sapien
tcaaataaggctcggtttaggagca

SEQ ID NO: 923978 - DNA, 25 bp, Homo sapien
ggctcggtttaggagcagtctaata

SEQ ID NO: 923979 - DNA, 25 bp, Homo sapien
taccatttatgcttagcaaggagcc

SEQ ID NO: 923980 - DNA, 25 bp, Homo sapien
catttatgcttagcaaggagccatg

SEQ ID NO: 923981 - DNA, 25 bp, Homo sapien
ctaccatttatgcttagcaaggagc

SEQ ID NO: 923982 - DNA, 25 bp, Homo sapien
accatttatgcttagcaaggagcca

SEQ ID NO: 923983 - DNA, 25 bp, Homo sapien
gatgccattcaggtctatgttttta

SEQ ID NO: 923984 - DNA, 25 bp, Homo sapien
ctggatgatgccattcaggtctatg

SEQ ID NO: 923985 - DNA, 25 bp, Homo sapien
tatgtttttatctgaaaatggtgcc

SEQ ID NO: 923986 - DNA, 25 bp, Homo sapien
tcaggtctatgtttttatctgaaaa

SEQ ID NO: 923987 - DNA, 25 bp, Homo sapien
tggagaaacgaggcttggtgagtgg

SEQ ID NO: 923988 - DNA, 25 bp, Homo sapien
gtggagaaacgaggcttggtgagtg

SEQ ID NO: 923989 - DNA, 25 bp, Homo sapien
tgtggagaaacgaggcttggtgagt

SEQ ID NO: 923990 - DNA, 25 bp, Homo sapien
agggtttggacaacaaagccctcag

SEQ ID NO: 923991 - DNA, 25 bp, Homo sapien
tatgccaactccctcaatgtatggg

SEQ ID NO: 923992 - DNA, 25 bp, Homo sapien
tgtaaattcttgtctaccatgcagc

SEQ ID NO: 923993 - DNA, 25 bp, Homo sapien
tgtgcctgagttgtagacttagtct

SEQ ID NO: 923994 - DNA, 25 bp, Homo sapien
catgcagctatgtttgtcctttcta

SEQ ID NO: 923995 - DNA, 25 bp, Homo sapien
ggtggtgacctttatgtagatacag

SEQ ID NO: 923996 - DNA, 25 bp, Homo sapien
tacccgaggtccctgtacttgaatg

SEQ ID NO: 923997 - DNA, 25 bp, Homo sapien
tccagggaaggcactagtggctcat

SEQ ID NO: 923998 - DNA, 25 bp, Homo sapien
caatgatcacgtggaagttgtttaa

SEQ ID NO: 923999 - DNA, 25 bp, Homo sapien
gggctcgatggtctttgccgacttg

SEQ ID NO: 924000 - DNA, 25 bp, Homo sapien
tcactgtattgcagcagatccttgg

SEQ ID NO: 924001 - DNA, 25 bp, Homo sapien
tgaggaaataggtcactgtattgca

SEQ ID NO: 924002 - DNA, 25 bp, Homo sapien
ccggctgtcctctccatagggggct

SEQ ID NO: 924003 - DNA, 25 bp, Homo sapien
ccctctctccctggcatgatcctgg

SEQ ID NO: 924004 - DNA, 25 bp, Homo sapien
cctctctccctggcatgatcctggc

SEQ ID NO: 924005 - DNA, 25 bp, Homo sapien
atcctggccttccagtcacatccca

SEQ ID NO: 924006 - DNA, 25 bp, Homo sapien
tggcagccgtgattcctgaactgat

SEQ ID NO: 924007 - DNA, 25 bp, Homo sapien
tgggagcagtccattagccatgagt

SEQ ID NO: 924008 - DNA, 25 bp, Homo sapien
gcatggctctgcttgcatggaccaa

SEQ ID NO: 924009 - DNA, 25 bp, Homo sapien
tgagttgccgatctgcatctgcacc

SEQ ID NO: 924010 - DNA, 25 bp, Homo sapien
caggggacgatcagggtacagaggg

SEQ ID NO: 924011 - DNA, 25 bp, Homo sapien
gaaggcaggggacgatcagggtaca

SEQ ID NO: 924012 - DNA, 25 bp, Homo sapien
gggacgatcagggtacagagggcac

SEQ ID NO: 924013 - DNA, 25 bp, Homo sapien
ggcaggggacgatcagggtacagag

SEQ ID NO: 924014 - DNA, 25 bp, Homo sapien
cctgggattccctggcattttggga

SEQ ID NO: 924015 - DNA, 25 bp, Homo sapien
gacaccctctttattagcacgttgc

SEQ ID NO: 924016 - DNA, 25 bp, Homo sapien
ccacggcagacaccctctttattag

SEQ ID NO: 924017 - DNA, 25 bp, Homo sapien
tattagcacgttgctgtgggctggt

SEQ ID NO: 924018 - DNA, 25 bp, Homo sapien
caaattggatgggttaatgaagaag

SEQ ID NO: 924019 - DNA, 25 bp, Homo sapien
ctgccacacaggttctattccaagt

SEQ ID NO: 924020 - DNA, 25 bp, Homo sapien
ttctcagtgcaaattggatgggtta

SEQ ID NO: 924021 - DNA, 25 bp, Homo sapien
gccacacaggttctattccaagtct

SEQ ID NO: 924022 - DNA, 25 bp, Homo sapien
actctcacaacagacaccggaatca

SEQ ID NO: 924023 - DNA, 25 bp, Homo sapien
agacaccggaatcacaaatgtcagg

SEQ ID NO: 924024 - DNA, 25 bp, Homo sapien
caacagacaccggaatcacaaatgt

SEQ ID NO: 924025 - DNA, 25 bp, Homo sapien
agcacccactctcacaacagacacc

SEQ ID NO: 924026 - DNA, 25 bp, Homo sapien
tggactggaaaatcactcatgggcc

SEQ ID NO: 924027 - DNA, 25 bp, Homo sapien
gaaaagatagatgcgcttaggccgg

SEQ ID NO: 924028 - DNA, 25 bp, Homo sapien
caatgctgctagaaaatcggccggg

SEQ ID NO: 924029 - DNA, 25 bp, Homo sapien
gaattatggatcacgatgggccctt

SEQ ID NO: 924030 - DNA, 25 bp, Homo sapien
tcgttgatcaaatatggtccctgga

SEQ ID NO: 924031 - DNA, 25 bp, Homo sapien
caaatcggaaaacgtgccttgtcag

SEQ ID NO: 924032 - DNA, 25 bp, Homo sapien
gccttgtcagtataccccaggtatg

SEQ ID NO: 924033 - DNA, 25 bp, Homo sapien
cccaggtatggagttttcgttgatc

SEQ ID NO: 924034 - DNA, 25 bp, Homo sapien
aggcagtgcacacccaaagagcgag

SEQ ID NO: 924035 - DNA, 25 bp, Homo sapien
aaaggcagtgcacacccaaagagcg

SEQ ID NO: 924036 - DNA, 25 bp, Homo sapien
tcttatctggccctccaagtcccca

SEQ ID NO: 924037 - DNA, 25 bp, Homo sapien
tattgcaacgagtgaaaaaacaaaa

SEQ ID NO: 924038 - DNA, 25 bp, Homo sapien
agggccacctttcagcctgaggaca

SEQ ID NO: 924039 - DNA, 25 bp, Homo sapien
tccttgagttgtaggttgaacccaa

SEQ ID NO: 924040 - DNA, 25 bp, Homo sapien
cacatttctagggaacggttctggg

SEQ ID NO: 924041 - DNA, 25 bp, Homo sapien
ttgaacccaaggtagtgcgggcctg

SEQ ID NO: 924042 - DNA, 25 bp, Homo sapien
tgcatctgcacagctcatttcccac

SEQ ID NO: 924043 - DNA, 25 bp, Homo sapien
tcacactgggttgtgcatctgcaca

SEQ ID NO: 924044 - DNA, 25 bp, Homo sapien
gcatctgcacagctcatttcccacc

SEQ ID NO: 924045 - DNA, 25 bp, Homo sapien
ctctcacactgggttgtgcatctgc

SEQ ID NO: 924046 - DNA, 25 bp, Homo sapien
cactctagtcctagtgctggtggca

SEQ ID NO: 924047 - DNA, 25 bp, Homo sapien
tctattgcaacttctaaactgtcca

SEQ ID NO: 924048 - DNA, 25 bp, Homo sapien
taatctggcaagctgagtaatcccc

SEQ ID NO: 924049 - DNA, 25 bp, Homo sapien
agatctggtggtccctttctggtaa

SEQ ID NO: 924050 - DNA, 25 bp, Homo sapien
tggtaactgccaactcgatgacatg

SEQ ID NO: 924051 - DNA, 25 bp, Homo sapien
tccgccgtgcgctcggtggtaactg

SEQ ID NO: 924052 - DNA, 25 bp, Homo sapien
ggaacacgcgaaacaacagctgatg

SEQ ID NO: 924053 - DNA, 25 bp, Homo sapien
taaactttagcggtgacattgatcc

SEQ ID NO: 924054 - DNA, 25 bp, Homo sapien
gacaggagcctgggatcatggtgat

SEQ ID NO: 924055 - DNA, 25 bp, Homo sapien
caggagcctgggatcatggtgatgt

SEQ ID NO: 924056 - DNA, 25 bp, Homo sapien
gcctgggatcatggtgatgtcttct

SEQ ID NO: 924057 - DNA, 25 bp, Homo sapien
gagcctgggatcatggtgatgtctt

SEQ ID NO: 924058 - DNA, 25 bp, Homo sapien
gcacaatgcattgttctcctggagt

SEQ ID NO: 924059 - DNA, 25 bp, Homo sapien
gagatggtccacatcccggggtctg

SEQ ID NO: 924060 - DNA, 25 bp, Homo sapien
gctctggctttctggtataccacgc

SEQ ID NO: 924061 - DNA, 25 bp, Homo sapien
tggctttctggtataccacgccctt

SEQ ID NO: 924062 - DNA, 25 bp, Homo sapien
ttgttagcaaaatacaaatatttca

SEQ ID NO: 924063 - DNA, 25 bp, Homo sapien
tttgttagcaaaatacaaatatttc

SEQ ID NO: 924064 - DNA, 25 bp, Homo sapien
tgttagcaaaatacaaatatttcat

SEQ ID NO: 924065 - DNA, 25 bp, Homo sapien
tctggagtcagacacactactgttg

SEQ ID NO: 924066 - DNA, 25 bp, Homo sapien
gacacactactgttgcaccatgagg

SEQ ID NO: 924067 - DNA, 25 bp, Homo sapien
tgacccctacgtgatttgaacatac

SEQ ID NO: 924068 - DNA, 25 bp, Homo sapien
cctacgtgatttgaacatacaacct

SEQ ID NO: 924069 - DNA, 25 bp, Homo sapien
cattctcgattccacccaagggtct

SEQ ID NO: 924070 - DNA, 25 bp, Homo sapien
gagcacccaagataagcaccctttg

SEQ ID NO: 924071 - DNA, 25 bp, Homo sapien
gcagttgaactaaggctctgcagtc

SEQ ID NO: 924072 - DNA, 25 bp, Homo sapien
cagggactgtgtctagacattctcg

SEQ ID NO: 924073 - DNA, 25 bp, Homo sapien
tgtggcttctccatcaatagctggc

SEQ ID NO: 924074 - DNA, 25 bp, Homo sapien
acctactgggcatagaggctccgca

SEQ ID NO: 924075 - DNA, 25 bp, Homo sapien
gggatacatccccacggagacctac

SEQ ID NO: 924076 - DNA, 25 bp, Homo sapien
gccacgttgcctgggatacatcccc

SEQ ID NO: 924077 - DNA, 25 bp, Homo sapien
gtgagggttgcagaacaccccctat

SEQ ID NO: 924078 - DNA, 25 bp, Homo sapien
ggtgagggttgcagaacacccccta

SEQ ID NO: 924079 - DNA, 25 bp, Homo sapien
tgagggttgcagaacaccccctatt

SEQ ID NO: 924080 - DNA, 25 bp, Homo sapien
taatgttttttgaagcccagccaac

SEQ ID NO: 924081 - DNA, 25 bp, Homo sapien
gcaaggaaggcaataaggtatctgg

SEQ ID NO: 924082 - DNA, 25 bp, Homo sapien
tttttgaagcccagccaacactctc

SEQ ID NO: 924083 - DNA, 25 bp, Homo sapien
ctgaggatgtccatcaaggagaaga

SEQ ID NO: 924084 - DNA, 25 bp, Homo sapien
agctgtgtgcagatcctagtgggat

SEQ ID NO: 924085 - DNA, 25 bp, Homo sapien
cagtgcaggcgtctctgtcattgga

SEQ ID NO: 924086 - DNA, 25 bp, Homo sapien
gatgctcctgttttccgtgccagcg

SEQ ID NO: 924087 - DNA, 25 bp, Homo sapien
tgcccatggattccggcagatgctc

SEQ ID NO: 924088 - DNA, 25 bp, Homo sapien
tactcctcggctatttgtcttccct

SEQ ID NO: 924089 - DNA, 25 bp, Homo sapien
cagtctgcaggttgaacaaagaact

SEQ ID NO: 924090 - DNA, 25 bp, Homo sapien
tgctctttccatggagtcaccagtc

SEQ ID NO: 924091 - DNA, 25 bp, Homo sapien
tctgtctggggccccacatgctctt

SEQ ID NO: 924092 - DNA, 25 bp, Homo sapien
catgtaagaccccaacacagcagaa

SEQ ID NO: 924093 - DNA, 25 bp, Homo sapien
tggcatgtaagaccccaacacagca

SEQ ID NO: 924094 - DNA, 25 bp, Homo sapien
tccaattggcatgtaagaccccaac

SEQ ID NO: 924095 - DNA, 25 bp, Homo sapien
tccagtccaattggcatgtaagacc

SEQ ID NO: 924096 - DNA, 25 bp, Homo sapien
ctgctggattcagagcacagccgct

SEQ ID NO: 924097 - DNA, 25 bp, Homo sapien
atctctgcttagcacagccagggcc

SEQ ID NO: 924098 - DNA, 25 bp, Homo sapien
ctggattcagagcacagccgctcct

SEQ ID NO: 924099 - DNA, 25 bp, Homo sapien
ggaaatctctgcttagcacagccag

SEQ ID NO: 924100 - DNA, 25 bp, Homo sapien
caggaaagcccgtgagctcctcatc

SEQ ID NO: 924101 - DNA, 25 bp, Homo sapien
tggtcctcatcacgatttctccagg

SEQ ID NO: 924102 - DNA, 25 bp, Homo sapien
tcctcatcacgatttctccaggaaa

SEQ ID NO: 924103 - DNA, 25 bp, Homo sapien
tctccaggaaagcccgtgagctcct

SEQ ID NO: 924104 - DNA, 25 bp, Homo sapien
tgtacttcccgattctgccgcaaaa

SEQ ID NO: 924105 - DNA, 25 bp, Homo sapien
cttcccgattctgccgcaaaaatgt

SEQ ID NO: 924106 - DNA, 25 bp, Homo sapien
catctctccattgtacttcccgatt

SEQ ID NO: 924107 - DNA, 25 bp, Homo sapien
tccattgtacttcccgattctgccg

SEQ ID NO: 924108 - DNA, 25 bp, Homo sapien
cctggtgccggtcaccctgtctgag

SEQ ID NO: 924109 - DNA, 25 bp, Homo sapien
agagcctgaggactggtcaataccc

SEQ ID NO: 924110 - DNA, 25 bp, Homo sapien
gactggtcaataccctggtgccggt

SEQ ID NO: 924111 - DNA, 25 bp, Homo sapien
gtgccggtcaccctgtctgaggtct

SEQ ID NO: 924112 - DNA, 25 bp, Homo sapien
cttgcttctgggctgtggctgtgct

SEQ ID NO: 924113 - DNA, 25 bp, Homo sapien
aggaggtgggggcttgcttctgggc

SEQ ID NO: 924114 - DNA, 25 bp, Homo sapien
gtgggggcttgcttctgggctgtgg

SEQ ID NO: 924115 - DNA, 25 bp, Homo sapien
gaggtgggggcttgcttctgggctg

SEQ ID NO: 924116 - DNA, 25 bp, Homo sapien
gctgggcctccaagcagtggaccaa

SEQ ID NO: 924117 - DNA, 25 bp, Homo sapien
gaattccgagctgtccagaatgtct

SEQ ID NO: 924118 - DNA, 25 bp, Homo sapien
ctggaattccgagctgtccagaatg

SEQ ID NO: 924119 - DNA, 25 bp, Homo sapien
caagcagtggaccaagcatggtcca

SEQ ID NO: 924120 - DNA, 25 bp, Homo sapien
aatcggacctgtttctcagtgatcc

SEQ ID NO: 924121 - DNA, 25 bp, Homo sapien
agtgatccagaagtgagccccgcag

SEQ ID NO: 924122 - DNA, 25 bp, Homo sapien
gccgcatgtcaatgaggcagctcca

SEQ ID NO: 924123 - DNA, 25 bp, Homo sapien
cctttgagctgaacccagtgaccac

SEQ ID NO: 924124 - DNA, 25 bp, Homo sapien
ctctgcagactcctgcgctgcagtg

SEQ ID NO: 924125 - DNA, 25 bp, Homo sapien
aaatgccaaaagcagattgactgcc

SEQ ID NO: 924126 - DNA, 25 bp, Homo sapien
gccaaaagcagattgactgcctcca

SEQ ID NO: 924127 - DNA, 25 bp, Homo sapien
acagagactctgactcacaattgtt

SEQ ID NO: 924128 - DNA, 25 bp, Homo sapien
ggattttccggatgaccagcagttc

SEQ ID NO: 924129 - DNA, 25 bp, Homo sapien
tcctccgcgggtgtggataagaagc

SEQ ID NO: 924130 - DNA, 25 bp, Homo sapien
taatcatcttgtggtctggcaacct

SEQ ID NO: 924131 - DNA, 25 bp, Homo sapien
tgaacagtgacgtctcattctgggc

SEQ ID NO: 924132 - DNA, 25 bp, Homo sapien
cttgggaatcagagaccacagacag

SEQ ID NO: 924133 - DNA, 25 bp, Homo sapien
tcagagaccacagacagccttcaca

SEQ ID NO: 924134 - DNA, 25 bp, Homo sapien
agagaccacagacagccttcacaaa

SEQ ID NO: 924135 - DNA, 25 bp, Homo sapien
agaccacagacagccttcacaaacc

SEQ ID NO: 924136 - DNA, 25 bp, Homo sapien
aacaggatatgagctggagtccact

SEQ ID NO: 924137 - DNA, 25 bp, Homo sapien
caacaggatatgagctggagtccac

SEQ ID NO: 924138 - DNA, 25 bp, Homo sapien
aagagtttgtggaaggttcaggaag

SEQ ID NO: 924139 - DNA, 25 bp, Homo sapien
aggaagagtttgtggaaggttcagg

SEQ ID NO: 924140 - DNA, 25 bp, Homo sapien
gggcttctgtacattgctgctctcc

SEQ ID NO: 924141 - DNA, 25 bp, Homo sapien
ctgtacattgctgctctccagacat

SEQ ID NO: 924142 - DNA, 25 bp, Homo sapien
cctgggaggtgccatgagcttttca

SEQ ID NO: 924143 - DNA, 25 bp, Homo sapien
ttcatcttgcttttgtggggctggg

SEQ ID NO: 924144 - DNA, 25 bp, Homo sapien
gagaaacactggctatagaacaatt

SEQ ID NO: 924145 - DNA, 25 bp, Homo sapien
aaatgcatttcccacgaggacagga

SEQ ID NO: 924146 - DNA, 25 bp, Homo sapien
ttgtcaatgtaatgaagccaggagc

SEQ ID NO: 924147 - DNA, 25 bp, Homo sapien
gaacatctctggtattcaaatgcaa

SEQ ID NO: 924148 - DNA, 25 bp, Homo sapien
gggcacttcagaccagagctgggct

SEQ ID NO: 924149 - DNA, 25 bp, Homo sapien
agctgggcttccctaacttctggcc

SEQ ID NO: 924150 - DNA, 25 bp, Homo sapien
ggcacttcagaccagagctgggctt

SEQ ID NO: 924151 - DNA, 25 bp, Homo sapien
tgggcttccctaacttctggcccac

SEQ ID NO: 924152 - DNA, 25 bp, Homo sapien
ctctcattgtgggccccacggctcc

SEQ ID NO: 924153 - DNA, 25 bp, Homo sapien
tctctcattgtgggccccacggctc

SEQ ID NO: 924154 - DNA, 25 bp, Homo sapien
tctcattgtgggccccacggctccc

SEQ ID NO: 924155 - DNA, 25 bp, Homo sapien
tcattgtgggccccacggctccctt

SEQ ID NO: 924156 - DNA, 25 bp, Homo sapien
ggcttttgcagtcaggtggcccact

SEQ ID NO: 924157 - DNA, 25 bp, Homo sapien
ttttgcagtcaggtggcccactagc

SEQ ID NO: 924158 - DNA, 25 bp, Homo sapien
tgagctgagggacctgggtcacgtg

SEQ ID NO: 924159 - DNA, 25 bp, Homo sapien
ttgcagtcaggtggcccactagcca

SEQ ID NO: 924160 - DNA, 25 bp, Homo sapien
atgccattgtctggattccggatag

SEQ ID NO: 924161 - DNA, 25 bp, Homo sapien
gtcacagatgactctgttaaaagag

SEQ ID NO: 924162 - DNA, 25 bp, Homo sapien
agaggcagctatgccattgtctgga

SEQ ID NO: 924163 - DNA, 25 bp, Homo sapien
cacagatgactctgttaaaagaggc

SEQ ID NO: 924164 - DNA, 25 bp, Homo sapien
tggaggagttgaactgagctgttcc

SEQ ID NO: 924165 - DNA, 25 bp, Homo sapien
atagggctggaatcatcagcagagc

SEQ ID NO: 924166 - DNA, 25 bp, Homo sapien
tcaagttccacgttgtatgggacag

SEQ ID NO: 924167 - DNA, 25 bp, Homo sapien
tgaatagaaatagtccaaaggatag

SEQ ID NO: 924168 - DNA, 25 bp, Homo sapien
cacctattgtgtcgagtaatgaggc

SEQ ID NO: 924169 - DNA, 25 bp, Homo sapien
catcccgggagattatgcagtctgc

SEQ ID NO: 924170 - DNA, 25 bp, Homo sapien
tcttgtctgacttgagcatcccggg

SEQ ID NO: 924171 - DNA, 25 bp, Homo sapien
cactaagcgtgcaatctggtgcctt

SEQ ID NO: 924172 - DNA, 25 bp, Homo sapien
atagaatatttacccaggtcccagg

SEQ ID NO: 924173 - DNA, 25 bp, Homo sapien
aatagaatatttacccaggtcccag

SEQ ID NO: 924174 - DNA, 25 bp, Homo sapien
tttgtgggtctctgactccacaaat

SEQ ID NO: 924175 - DNA, 25 bp, Homo sapien
ccataaagacccctccagctttgtg

SEQ ID NO: 924176 - DNA, 25 bp, Homo sapien
tgggtctctgactccacaaatactc

SEQ ID NO: 924177 - DNA, 25 bp, Homo sapien
ataaagacccctccagctttgtggg

SEQ ID NO: 924178 - DNA, 25 bp, Homo sapien
ggcttctcgctaacaattcaggatt

SEQ ID NO: 924179 - DNA, 25 bp, Homo sapien
tgccaggcttctcgctaacaattca

SEQ ID NO: 924180 - DNA, 25 bp, Homo sapien
ttcaggattccaaggacagccgctg

SEQ ID NO: 924181 - DNA, 25 bp, Homo sapien
aattcaggattccaaggacagccgc

SEQ ID NO: 924182 - DNA, 25 bp, Homo sapien
aaaggagatagcacaactctagttt

SEQ ID NO: 924183 - DNA, 25 bp, Homo sapien
gagatagcacaactctagttttatg

SEQ ID NO: 924184 - DNA, 25 bp, Homo sapien
aggagatagcacaactctagtttta

SEQ ID NO: 924185 - DNA, 25 bp, Homo sapien
gatagcacaactctagttttatgtg

SEQ ID NO: 924186 - DNA, 25 bp, Homo sapien
ggtatctgtgctcagctcacaaaaa

SEQ ID NO: 924187 - DNA, 25 bp, Homo sapien
ctactttcagcaaagtgcttactgg

SEQ ID NO: 924188 - DNA, 25 bp, Homo sapien
ctgcggttgagcactggtatctgtg

SEQ ID NO: 924189 - DNA, 25 bp, Homo sapien
caggacttcgactcaactgcggttg

SEQ ID NO: 924190 - DNA, 25 bp, Homo sapien
aaatgcgtaggctttgaaccatccg

SEQ ID NO: 924191 - DNA, 25 bp, Homo sapien
cacttgaggtggaaaatgcgtaggc

SEQ ID NO: 924192 - DNA, 25 bp, Homo sapien
tatttctcaggccacttgaggtgga

SEQ ID NO: 924193 - DNA, 25 bp, Homo sapien
gaggagagctttcgcagctgtcagc

SEQ ID NO: 924194 - DNA, 25 bp, Homo sapien
acagtcacgatcagattcatagtga

SEQ ID NO: 924195 - DNA, 25 bp, Homo sapien
agtcacgatcagattcatagtgacc

SEQ ID NO: 924196 - DNA, 25 bp, Homo sapien
cagtcacgatcagattcatagtgac

SEQ ID NO: 924197 - DNA, 25 bp, Homo sapien
gtctctccagatttggttatgcgtg

SEQ ID NO: 924198 - DNA, 25 bp, Homo sapien
gtcatggaaaccttgtggatgccga

SEQ ID NO: 924199 - DNA, 25 bp, Homo sapien
tatgcgtggacaagagaagttgtca

SEQ ID NO: 924200 - DNA, 25 bp, Homo sapien
aaccttgtggatgccgatgagccag

SEQ ID NO: 924201 - DNA, 25 bp, Homo sapien
gaagtactaggtcattttatcctca

SEQ ID NO: 924202 - DNA, 25 bp, Homo sapien
gaagaaatggagacatggttgatta

SEQ ID NO: 924203 - DNA, 25 bp, Homo sapien
ccaaatccatgcgacagatgaagaa

SEQ ID NO: 924204 - DNA, 25 bp, Homo sapien
gtagataccgtattaccaaatccat

SEQ ID NO: 924205 - DNA, 25 bp, Homo sapien
gttgctatatttggcctaaagaaat

SEQ ID NO: 924206 - DNA, 25 bp, Homo sapien
gaaatgcctttcaatcaggactgtg

SEQ ID NO: 924207 - DNA, 25 bp, Homo sapien
ttcccatctgagttggcagtcagat

SEQ ID NO: 924208 - DNA, 25 bp, Homo sapien
gcagtcagatggaaatctgttgcta

SEQ ID NO: 924209 - DNA, 25 bp, Homo sapien
tgcatttctctatcccccctgtttt

SEQ ID NO: 924210 - DNA, 25 bp, Homo sapien
catttccactgagttgttgtgggct

SEQ ID NO: 924211 - DNA, 25 bp, Homo sapien
tcatttccactgagttgttgtgggc

SEQ ID NO: 924212 - DNA, 25 bp, Homo sapien
gtgggctgcatttctctatcccccc

SEQ ID NO: 924213 - DNA, 25 bp, Homo sapien
cagtcgttgaccaagggaaggcgct

SEQ ID NO: 924214 - DNA, 25 bp, Homo sapien
taccactagggacactactccaggc

SEQ ID NO: 924215 - DNA, 25 bp, Homo sapien
agtgcccgttggaacagcccacatc

SEQ ID NO: 924216 - DNA, 25 bp, Homo sapien
gctctgtgcacctcacaacttgtga

SEQ ID NO: 924217 - DNA, 25 bp, Homo sapien
gaaatatcgtgtacaaagaggtgac

SEQ ID NO: 924218 - DNA, 25 bp, Homo sapien
ttgggaatccctgcacagactagtg

SEQ ID NO: 924219 - DNA, 25 bp, Homo sapien
cacagagcgaggcaagaaatatcgt

SEQ ID NO: 924220 - DNA, 25 bp, Homo sapien
gaagtaagtggtatgcacagagcga

SEQ ID NO: 924221 - DNA, 25 bp, Homo sapien
tgaatcagcaccagaagtaagtagg

SEQ ID NO: 924222 - DNA, 25 bp, Homo sapien
gatgaactggtcaaacctcagactg

SEQ ID NO: 924223 - DNA, 25 bp, Homo sapien
taagtaggactagaacacaggattc

SEQ ID NO: 924224 - DNA, 25 bp, Homo sapien
caggattcctaattctgagcccaga

SEQ ID NO: 924225 - DNA, 25 bp, Homo sapien
agtgccttgtccattgggcccagcc

SEQ ID NO: 924226 - DNA, 25 bp, Homo sapien
tcaagcagcatgtagcatgccaggt

SEQ ID NO: 924227 - DNA, 25 bp, Homo sapien
agcatgtagcatgccaggtctccag

SEQ ID NO: 924228 - DNA, 25 bp, Homo sapien
gccttgtccattgggcccagccagg

SEQ ID NO: 924229 - DNA, 25 bp, Homo sapien
gagctttgggcctctctcaatccca

SEQ ID NO: 924230 - DNA, 25 bp, Homo sapien
ccatgggctcacaacagaccagaag

SEQ ID NO: 924231 - DNA, 25 bp, Homo sapien
tcactcgtaggccaagtctgtctct

SEQ ID NO: 924232 - DNA, 25 bp, Homo sapien
cagctttgttggcagattggtgcta

SEQ ID NO: 924233 - DNA, 25 bp, Homo sapien
ctcgtctgtgcttctcttccctggt

SEQ ID NO: 924234 - DNA, 25 bp, Homo sapien
cgtctgtgcttctcttccctggtac

SEQ ID NO: 924235 - DNA, 25 bp, Homo sapien
tcgtctgtgcttctcttccctggta

SEQ ID NO: 924236 - DNA, 25 bp, Homo sapien
tttgacgtccctgtaaagtgctcca

SEQ ID NO: 924237 - DNA, 25 bp, Homo sapien
tggtaccaggtagcaattgtgctct

SEQ ID NO: 924238 - DNA, 25 bp, Homo sapien
tcttatgattagaggcacggagact

SEQ ID NO: 924239 - DNA, 25 bp, Homo sapien
aggcacggagactacccctgggctt

SEQ ID NO: 924240 - DNA, 25 bp, Homo sapien
tctaatgggtgaaactgaacaccac

SEQ ID NO: 924241 - DNA, 25 bp, Homo sapien
tgagcattgattggttgaggctgcc

SEQ ID NO: 924242 - DNA, 25 bp, Homo sapien
tacccgctctgcttaagggatgcac

SEQ ID NO: 924243 - DNA, 25 bp, Homo sapien
ggatgcacgttgtagggagctctaa

SEQ ID NO: 924244 - DNA, 25 bp, Homo sapien
gggacaacgtggctgaccattgcga

SEQ ID NO: 924245 - DNA, 25 bp, Homo sapien
taaactctggggacaacgtggctga

SEQ ID NO: 924246 - DNA, 25 bp, Homo sapien
cattgcgattccagacccaaggttg

SEQ ID NO: 924247 - DNA, 25 bp, Homo sapien
cgtggctgaccattgcgattccaga

SEQ ID NO: 924248 - DNA, 25 bp, Homo sapien
tccatgggaacctgggatggcagcc

SEQ ID NO: 924249 - DNA, 25 bp, Homo sapien
tgggaacctgggatggcagccctct

SEQ ID NO: 924250 - DNA, 25 bp, Homo sapien
gggatgtgtcccctgatctaaaggg

SEQ ID NO: 924251 - DNA, 25 bp, Homo sapien
tgagaccgggtcaccattgcagtgg

SEQ ID NO: 924252 - DNA, 25 bp, Homo sapien
cttccatatggggatgagctgtatt

SEQ ID NO: 924253 - DNA, 25 bp, Homo sapien
aagaaatggagcacgtagccgtcaa

SEQ ID NO: 924254 - DNA, 25 bp, Homo sapien
gctctgtgattctgttactccaaga

SEQ ID NO: 924255 - DNA, 25 bp, Homo sapien
gagcacgtagccgtcaaatcctctt

SEQ ID NO: 924256 - DNA, 25 bp, Homo sapien
cctcctgtctgaggtcctctttctt

SEQ ID NO: 924257 - DNA, 25 bp, Homo sapien
ttttcctcctgtctgaggtcctctt

SEQ ID NO: 924258 - DNA, 25 bp, Homo sapien
tcctgtctgaggtcctctttcttca

SEQ ID NO: 924259 - DNA, 25 bp, Homo sapien
ctcctgtctgaggtcctctttcttc

SEQ ID NO: 924260 - DNA, 25 bp, Homo sapien
gagtgggatagatagcctggggtag

SEQ ID NO: 924261 - DNA, 25 bp, Homo sapien
tagggagtgggatagatagcctggg

SEQ ID NO: 924262 - DNA, 25 bp, Homo sapien
gtgggatagatagcctggggtagga

SEQ ID NO: 924263 - DNA, 25 bp, Homo sapien
gggatagatagcctggggtaggacg

SEQ ID NO: 924264 - DNA, 25 bp, Homo sapien
tgggctgtgttcaatgcaagagtgt

SEQ ID NO: 924265 - DNA, 25 bp, Homo sapien
aagtgtgggctgtgttcaatgcaag

SEQ ID NO: 924266 - DNA, 25 bp, Homo sapien
ggctgtgttcaatgcaagagtgtgc

SEQ ID NO: 924267 - DNA, 25 bp, Homo sapien
tgtgggctgtgttcaatgcaagagt

SEQ ID NO: 924268 - DNA, 25 bp, Homo sapien
cagagagaactgctgccggggacgg

SEQ ID NO: 924269 - DNA, 25 bp, Homo sapien
atggcgctgcctctccgcacggtga

SEQ ID NO: 924270 - DNA, 25 bp, Homo sapien
cagggaatgtgttctgggcaggtga

SEQ ID NO: 924271 - DNA, 25 bp, Homo sapien
tctgggcaggtgatggcgctgcctc

SEQ ID NO: 924272 - DNA, 25 bp, Homo sapien
caggtctaaccgtggaagctggcac

SEQ ID NO: 924273 - DNA, 25 bp, Homo sapien
aggtctaaccgtggaagctggcact

SEQ ID NO: 924274 - DNA, 25 bp, Homo sapien
tcttgtaagggatgaagctctccgt

SEQ ID NO: 924275 - DNA, 25 bp, Homo sapien
gctgtcttgtaagggatgaagctct

SEQ ID NO: 924276 - DNA, 25 bp, Homo sapien
agggatgaagctctccgtggaatcc

SEQ ID NO: 924277 - DNA, 25 bp, Homo sapien
tggccacccataaggcccttggaca

SEQ ID NO: 924278 - DNA, 25 bp, Homo sapien
tactggaccgaaaagcaaaacagat

SEQ ID NO: 924279 - DNA, 25 bp, Homo sapien
gatgaggctctaaaggctccaccac

SEQ ID NO: 924280 - DNA, 25 bp, Homo sapien
aaaacagatcatccgggcatttgct

SEQ ID NO: 924281 - DNA, 25 bp, Homo sapien
catttgttccctgccggtccttggg

SEQ ID NO: 924282 - DNA, 25 bp, Homo sapien
cacatttctattgccacggagatgc

SEQ ID NO: 924283 - DNA, 25 bp, Homo sapien
tcgtgtaccacaactcgggagggag

SEQ ID NO: 924284 - DNA, 25 bp, Homo sapien
gacttgtactcagctagctgcgagg

SEQ ID NO: 924285 - DNA, 25 bp, Homo sapien
ggaggaggaaccgaacacatttcta

SEQ ID NO: 924286 - DNA, 25 bp, Homo sapien
gcagcttgcttggtctcctttgaga

SEQ ID NO: 924287 - DNA, 25 bp, Homo sapien
cattagttcatgagagagctggctt

SEQ ID NO: 924288 - DNA, 25 bp, Homo sapien
gtggagacctcatgatggcttggca

SEQ ID NO: 924289 - DNA, 25 bp, Homo sapien
gaaaccaggttgtacggatcactta

SEQ ID NO: 924290 - DNA, 25 bp, Homo sapien
tcagctccaactttcctctccccac

SEQ ID NO: 924291 - DNA, 25 bp, Homo sapien
gcacctacgccatcaatccagcttt

SEQ ID NO: 924292 - DNA, 25 bp, Homo sapien
tcatctcagcacctacgccatcaat

SEQ ID NO: 924293 - DNA, 25 bp, Homo sapien
gaccctgagggttccggatgttctc

SEQ ID NO: 924294 - DNA, 25 bp, Homo sapien
ctacgccatcaatccagctttctct

SEQ ID NO: 924295 - DNA, 25 bp, Homo sapien
ccttccctggagggttgcatcccac

SEQ ID NO: 924296 - DNA, 25 bp, Homo sapien
tcccacagtcaatgagcattccagt

SEQ ID NO: 924297 - DNA, 25 bp, Homo sapien
gtcaatgagcattccagtcttcagg

SEQ ID NO: 924298 - DNA, 25 bp, Homo sapien
ggttgcatcccacagtcaatgagca

SEQ ID NO: 924299 - DNA, 25 bp, Homo sapien
gtctgacgataatcttggatcctct

SEQ ID NO: 924300 - DNA, 25 bp, Homo sapien
gacgataatcttggatcctcttgct

SEQ ID NO: 924301 - DNA, 25 bp, Homo sapien
tgggtctgacgataatcttggatcc

SEQ ID NO: 924302 - DNA, 25 bp, Homo sapien
gataatcttggatcctcttgctttc

SEQ ID NO: 924303 - DNA, 25 bp, Homo sapien
caaggctgtgtccaggcctgaagca

SEQ ID NO: 924304 - DNA, 25 bp, Homo sapien
gctcttaggcctagcacagatgcca

SEQ ID NO: 924305 - DNA, 25 bp, Homo sapien
tgtggtacgatgtgttctgcctgca

SEQ ID NO: 924306 - DNA, 25 bp, Homo sapien
caagggtcttccaggctaactctag

SEQ ID NO: 924307 - DNA, 25 bp, Homo sapien
gagctctgtgataccacagaggcat

SEQ ID NO: 924308 - DNA, 25 bp, Homo sapien
caccggagctctgtgataccacaga

SEQ ID NO: 924309 - DNA, 25 bp, Homo sapien
accggagctctgtgataccacagag

SEQ ID NO: 924310 - DNA, 25 bp, Homo sapien
cggagctctgtgataccacagaggc

SEQ ID NO: 924311 - DNA, 25 bp, Homo sapien
cagggagcagtcacttcctgtccca

SEQ ID NO: 924312 - DNA, 25 bp, Homo sapien
tggagggtgtcagccaatagtggag

SEQ ID NO: 924313 - DNA, 25 bp, Homo sapien
cagccaatagtggaggagtcctgca

SEQ ID NO: 924314 - DNA, 25 bp, Homo sapien
gtgtcagccaatagtggaggagtcc

SEQ ID NO: 924315 - DNA, 25 bp, Homo sapien
tagtggaggagtcctgcatggcatc

SEQ ID NO: 924316 - DNA, 25 bp, Homo sapien
ctgggcaccgatgtgatgcttgttt

SEQ ID NO: 924317 - DNA, 25 bp, Homo sapien
cctgggcaccgatgtgatgcttgtt

SEQ ID NO: 924318 - DNA, 25 bp, Homo sapien
ggctccatcatctcacgatccagag

SEQ ID NO: 924319 - DNA, 25 bp, Homo sapien
ccatcatctcacgatccagagcctt

SEQ ID NO: 924320 - DNA, 25 bp, Homo sapien
ctccatcatctcacgatccagagcc

SEQ ID NO: 924321 - DNA, 25 bp, Homo sapien
ggggctccatcatctcacgatccag

SEQ ID NO: 924322 - DNA, 25 bp, Homo sapien
ctggtgagaagtccgggatatgctt

SEQ ID NO: 924323 - DNA, 25 bp, Homo sapien
gctggtgagaagtccgggatatgct

SEQ ID NO: 924324 - DNA, 25 bp, Homo sapien
tgagaagtccgggatatgcttcact

SEQ ID NO: 924325 - DNA, 25 bp, Homo sapien
ggtgagaagtccgggatatgcttca

SEQ ID NO: 924326 - DNA, 25 bp, Homo sapien
tcacataggtctacagaggaaagaa

SEQ ID NO: 924327 - DNA, 25 bp, Homo sapien
cacataggtctacagaggaaagaac

SEQ ID NO: 924328 - DNA, 25 bp, Homo sapien
tacttattcagactctctgcgccca

SEQ ID NO: 924329 - DNA, 25 bp, Homo sapien
gccgtgtcaaaatgactaatacaaa

SEQ ID NO: 924330 - DNA, 25 bp, Homo sapien
tctttatagccgtgtcaaaatgact

SEQ ID NO: 924331 - DNA, 25 bp, Homo sapien
tctgcgcccatcaattctaaattat

SEQ ID NO: 924332 - DNA, 25 bp, Homo sapien
ggacccaggagatgtcgcatttgct

SEQ ID NO: 924333 - DNA, 25 bp, Homo sapien
tgatagggcagggtgaaaactactg

SEQ ID NO: 924334 - DNA, 25 bp, Homo sapien
tggtacctttggatttgcagacaac

SEQ ID NO: 924335 - DNA, 25 bp, Homo sapien
caagattggagcacccctagggctt

SEQ ID NO: 924336 - DNA, 25 bp, Homo sapien
caatcatactgggaagagatcagct

SEQ ID NO: 924337 - DNA, 25 bp, Homo sapien
gaagagatcagctctatggcaagaa

SEQ ID NO: 924338 - DNA, 25 bp, Homo sapien
gaatcagaaagcagaccccggattt

SEQ ID NO: 924339 - DNA, 25 bp, Homo sapien
atcagaaagcagaccccggatttga

SEQ ID NO: 924340 - DNA, 25 bp, Homo sapien
gctctcccggcccttacagggtaga

SEQ ID NO: 924341 - DNA, 25 bp, Homo sapien
tgggcagcgtggatctgctctcccg

SEQ ID NO: 924342 - DNA, 25 bp, Homo sapien
ggttttcctcagtccctatccttgc

SEQ ID NO: 924343 - DNA, 25 bp, Homo sapien
tggtgctcagtcagatacacaccta

SEQ ID NO: 924344 - DNA, 25 bp, Homo sapien
ccacctcccaagttcaagtaattct

SEQ ID NO: 924345 - DNA, 25 bp, Homo sapien
acctcccaagttcaagtaattctgc

SEQ ID NO: 924346 - DNA, 25 bp, Homo sapien
ctcccaagttcaagtaattctgctt

SEQ ID NO: 924347 - DNA, 25 bp, Homo sapien
tccacctcccaagttcaagtaattc

SEQ ID NO: 924348 - DNA, 25 bp, Homo sapien
aagcagatggcccatgccattcatg

SEQ ID NO: 924349 - DNA, 25 bp, Homo sapien
tgtagtaataaagtcattgagtggg

SEQ ID NO: 924350 - DNA, 25 bp, Homo sapien
actatatcagtgactgtagtaataa

SEQ ID NO: 924351 - DNA, 25 bp, Homo sapien
gagcaatccaacctcatgatctaac

SEQ ID NO: 924352 - DNA, 25 bp, Homo sapien
ccaggtgttcttcatgcttctcgta

SEQ ID NO: 924353 - DNA, 25 bp, Homo sapien
aactctatctggatgttgggatttg

SEQ ID NO: 924354 - DNA, 25 bp, Homo sapien
ttaatgacaacgtgcctaggcgaag

SEQ ID NO: 924355 - DNA, 25 bp, Homo sapien
gcaaggctggggaaaatttcctcta

SEQ ID NO: 924356 - DNA, 25 bp, Homo sapien
gacagatggaaattatcgatttcct

SEQ ID NO: 924357 - DNA, 25 bp, Homo sapien
gcagcaaccataaaatggttgccca

SEQ ID NO: 924358 - DNA, 25 bp, Homo sapien
gaatgccttaatcgtctgggaacac

SEQ ID NO: 924359 - DNA, 25 bp, Homo sapien
gatggattattcgtgcctcccctta

SEQ ID NO: 924360 - DNA, 25 bp, Homo sapien
tctgcaggtgtaacctttcctcagc

SEQ ID NO: 924361 - DNA, 25 bp, Homo sapien
ctgcaggtgtaacctttcctcagct

SEQ ID NO: 924362 - DNA, 25 bp, Homo sapien
ctcccccaagttcagctttatttgg

SEQ ID NO: 924363 - DNA, 25 bp, Homo sapien
tgttgaggaaggtctcatcttcatc

SEQ ID NO: 924364 - DNA, 25 bp, Homo sapien
cctcccccaagttcagctttatttg

SEQ ID NO: 924365 - DNA, 25 bp, Homo sapien
aacttctgccgctgagtttttgatt

SEQ ID NO: 924366 - DNA, 25 bp, Homo sapien
ttctaacttctgccgctgagttttt

SEQ ID NO: 924367 - DNA, 25 bp, Homo sapien
gggatgtgttttttagccctggcgc

SEQ ID NO: 924368 - DNA, 25 bp, Homo sapien
gatgtgttttttagccctggcgctt

SEQ ID NO: 924369 - DNA, 25 bp, Homo sapien
taagtgacaacactagtaaatgttg

SEQ ID NO: 924370 - DNA, 25 bp, Homo sapien
cagccgtcaaactcacacgtggaag

SEQ ID NO: 924371 - DNA, 25 bp, Homo sapien
gaaataatggtatcacagccgtcaa

SEQ ID NO: 924372 - DNA, 25 bp, Homo sapien
caaactcacacgtggaagttctcat

SEQ ID NO: 924373 - DNA, 25 bp, Homo sapien
cttggagcgctaactgaccatacat

SEQ ID NO: 924374 - DNA, 25 bp, Homo sapien
ccaaggcttggctcatccatcggag

SEQ ID NO: 924375 - DNA, 25 bp, Homo sapien
catccatcggagctgagtgtgttct

SEQ ID NO: 924376 - DNA, 25 bp, Homo sapien
gagcagtgtcttaaccaaggcttgg

SEQ ID NO: 924377 - DNA, 25 bp, Homo sapien
ttaatgtattaaggtctccagcctg

SEQ ID NO: 924378 - DNA, 25 bp, Homo sapien
gcagatggcctttgaacttaaactg

SEQ ID NO: 924379 - DNA, 25 bp, Homo sapien
tgtaacctagctgggcctcatccaa

SEQ ID NO: 924380 - DNA, 25 bp, Homo sapien
taaaacaaaggatctctcccaggca

SEQ ID NO: 924381 - DNA, 25 bp, Homo sapien
tccaaacgaaggctttcactgcggg

SEQ ID NO: 924382 - DNA, 25 bp, Homo sapien
ctcagagactccaggtaagcatgct

SEQ ID NO: 924383 - DNA, 25 bp, Homo sapien
aattcaagcctttggctctgactgg

SEQ ID NO: 924384 - DNA, 25 bp, Homo sapien
agcatgcttggacagtgactggcaa

SEQ ID NO: 924385 - DNA, 25 bp, Homo sapien
ccgtgtcccttgtaacatggcagaa

SEQ ID NO: 924386 - DNA, 25 bp, Homo sapien
cattggtgcgtcctgcacgtccgtg

SEQ ID NO: 924387 - DNA, 25 bp, Homo sapien
cacaacaagcatggtgctgatttca

SEQ ID NO: 924388 - DNA, 25 bp, Homo sapien
tctgtttgggctttccaggagaaac

SEQ ID NO: 924389 - DNA, 25 bp, Homo sapien
tgcatgaggcacagatagacaccaa

SEQ ID NO: 924390 - DNA, 25 bp, Homo sapien
caccaactctgtgctggcaccaggc

SEQ ID NO: 924391 - DNA, 25 bp, Homo sapien
gcatgaggcacagatagacaccaac

SEQ ID NO: 924392 - DNA, 25 bp, Homo sapien
gcacagatttagacctccattaata

SEQ ID NO: 924393 - DNA, 25 bp, Homo sapien
acaggagaggtttgctacagcccaa

SEQ ID NO: 924394 - DNA, 25 bp, Homo sapien
tagcaggagattttcccctccgaag

SEQ ID NO: 924395 - DNA, 25 bp, Homo sapien
taatatttgaaacacactctgcaca

SEQ ID NO: 924396 - DNA, 25 bp, Homo sapien
tgcatagaactgaacccttaaatct

SEQ ID NO: 924397 - DNA, 25 bp, Homo sapien
agcttcagcatttatgttgctccca

SEQ ID NO: 924398 - DNA, 25 bp, Homo sapien
cattgaattgatcctactctggaca

SEQ ID NO: 924399 - DNA, 25 bp, Homo sapien
gctgacacccattgaattgatccta

SEQ ID NO: 924400 - DNA, 25 bp, Homo sapien
tctaaattatagaggtgcttctttt

SEQ ID NO: 924401 - DNA, 25 bp, Homo sapien
ttctaaattatagaggtgcttcttt

SEQ ID NO: 924402 - DNA, 25 bp, Homo sapien
gccattgtcatctgcaagaatgatg

SEQ ID NO: 924403 - DNA, 25 bp, Homo sapien
attgtcatctgcaagaatgatgtca

SEQ ID NO: 924404 - DNA, 25 bp, Homo sapien
catcatcttcgcagcaccatcttga

SEQ ID NO: 924405 - DNA, 25 bp, Homo sapien
catcttgatacactcggtgttatgg

SEQ ID NO: 924406 - DNA, 25 bp, Homo sapien
tatttttgctggcttcatggtggcc

SEQ ID NO: 924407 - DNA, 25 bp, Homo sapien
tatctttgaaagtaacatggatatt

SEQ ID NO: 924408 - DNA, 25 bp, Homo sapien
tcttgcttcatgtgactgatattgc

SEQ ID NO: 924409 - DNA, 25 bp, Homo sapien
gactgatattgctctgggcatctga

SEQ ID NO: 924410 - DNA, 25 bp, Homo sapien
gggcattttacatctccacctctct

SEQ ID NO: 924411 - DNA, 25 bp, Homo sapien
agggtggtggtctcaagccctgctc

SEQ ID NO: 924412 - DNA, 25 bp, Homo sapien
accagtgtgaccgacagcgagttct

SEQ ID NO: 924413 - DNA, 25 bp, Homo sapien
cactgcctgacaccagtgtgaccga

SEQ ID NO: 924414 - DNA, 25 bp, Homo sapien
tctgacaactcgacctctgagttgc

SEQ ID NO: 924415 - DNA, 25 bp, Homo sapien
tgaccgacagcgagttctgacaact

SEQ ID NO: 924416 - DNA, 25 bp, Homo sapien
gtaggaagccacacgtctggacggc

SEQ ID NO: 924417 - DNA, 25 bp, Homo sapien
ctggtgcccggatgtaggaagccac

SEQ ID NO: 924418 - DNA, 25 bp, Homo sapien
gtgcccggatgtaggaagccacacg

SEQ ID NO: 924419 - DNA, 25 bp, Homo sapien
ccggatgtaggaagccacacgtctg

SEQ ID NO: 924420 - DNA, 25 bp, Homo sapien
ctgtaccactgagcatctcctgggt

SEQ ID NO: 924421 - DNA, 25 bp, Homo sapien
gctgtaccactgagcatctcctggg

SEQ ID NO: 924422 - DNA, 25 bp, Homo sapien
taaatgggacctgaatgaggaggat

SEQ ID NO: 924423 - DNA, 25 bp, Homo sapien
tgttgtaggcgtctgccctgagatg

SEQ ID NO: 924424 - DNA, 25 bp, Homo sapien
acctgctctctgagcgctgttgtag

SEQ ID NO: 924425 - DNA, 25 bp, Homo sapien
tgtggcctggtatcccattccatgt

SEQ ID NO: 924426 - DNA, 25 bp, Homo sapien
atttcatcttccaaaaattgtgcac

SEQ ID NO: 924427 - DNA, 25 bp, Homo sapien
catcttccaaaaattgtgcactgac

SEQ ID NO: 924428 - DNA, 25 bp, Homo sapien
ttcatcttccaaaaattgtgcactg

SEQ ID NO: 924429 - DNA, 25 bp, Homo sapien
tcaaaacatttcatcttccaaaaat

SEQ ID NO: 924430 - DNA, 25 bp, Homo sapien
caagttccccagactgtttgaagct

SEQ ID NO: 924431 - DNA, 25 bp, Homo sapien
gaagacctacattatattgcagctc

SEQ ID NO: 924432 - DNA, 25 bp, Homo sapien
cgcagtgtttgcaatgcttctcaga

SEQ ID NO: 924433 - DNA, 25 bp, Homo sapien
taagcttactgaggacagggttcca

SEQ ID NO: 924434 - DNA, 25 bp, Homo sapien
tgcatactccatacaacagatggct

SEQ ID NO: 924435 - DNA, 25 bp, Homo sapien
cagatggctcgtaaaacccaggaac

SEQ ID NO: 924436 - DNA, 25 bp, Homo sapien
ttaaactctatcggcttcctcctct

SEQ ID NO: 924437 - DNA, 25 bp, Homo sapien
tccccagagaaagtaccgctgcata

SEQ ID NO: 924438 - DNA, 25 bp, Homo sapien
tggtgacccttggtggactgccact

SEQ ID NO: 924439 - DNA, 25 bp, Homo sapien
tgttgactcgtaattcttgccccac

SEQ ID NO: 924440 - DNA, 25 bp, Homo sapien
tctgtctccgtttgaacatcaggct

SEQ ID NO: 924441 - DNA, 25 bp, Homo sapien
caatttctgctcttcgtgtacagca

SEQ ID NO: 924442 - DNA, 25 bp, Homo sapien
ctgaaatgaccacgggtaatttggc

SEQ ID NO: 924443 - DNA, 25 bp, Homo sapien
tcttgaacatgacactgttgtaaag

SEQ ID NO: 924444 - DNA, 25 bp, Homo sapien
ttctgaaatgaccacgggtaatttg

SEQ ID NO: 924445 - DNA, 25 bp, Homo sapien
aatttggcatttatgaatcttgaac

SEQ ID NO: 924446 - DNA, 25 bp, Homo sapien
tgggtggactattccaagagcccca

SEQ ID NO: 924447 - DNA, 25 bp, Homo sapien
tagaagtgatgggatgaagaaatct

SEQ ID NO: 924448 - DNA, 25 bp, Homo sapien
ctccgtagaagtgatgggatgaaga

SEQ ID NO: 924449 - DNA, 25 bp, Homo sapien
aagtgatgggatgaagaaatctgca

SEQ ID NO: 924450 - DNA, 25 bp, Homo sapien
tccgtagaagtgatgggatgaagaa

SEQ ID NO: 924451 - DNA, 25 bp, Homo sapien
caaaaaccaagagctgcttccaaga

SEQ ID NO: 924452 - DNA, 25 bp, Homo sapien
aaaccaagagctgcttccaagactt

SEQ ID NO: 924453 - DNA, 25 bp, Homo sapien
caagagctgcttccaagacttcctt

SEQ ID NO: 924454 - DNA, 25 bp, Homo sapien
gagctgcttccaagacttccttcat

SEQ ID NO: 924455 - DNA, 25 bp, Homo sapien
tcaaacagaacggattgtcctgtgc

SEQ ID NO: 924456 - DNA, 25 bp, Homo sapien
aacagaacggattgtcctgtgcacg

SEQ ID NO: 924457 - DNA, 25 bp, Homo sapien
agaacggattgtcctgtgcacgcag

SEQ ID NO: 924458 - DNA, 25 bp, Homo sapien
acgcagccccgagccatggcagagg

SEQ ID NO: 924459 - DNA, 25 bp, Homo sapien
caggtgtgtgagtcgttccttcctt

SEQ ID NO: 924460 - DNA, 25 bp, Homo sapien
tttgtgcctgacatgagcagccacg

SEQ ID NO: 924461 - DNA, 25 bp, Homo sapien
ccaaagccgactctggaagatgtag

SEQ ID NO: 924462 - DNA, 25 bp, Homo sapien
tacagaaatgaggtcgacacaagtt

SEQ ID NO: 924463 - DNA, 25 bp, Homo sapien
gatccgatgtctgctctatctcctg

SEQ ID NO: 924464 - DNA, 25 bp, Homo sapien
tcctcttcttgaaggagttttgctt

SEQ ID NO: 924465 - DNA, 25 bp, Homo sapien
gattccctgggatccgatgtctgct

SEQ ID NO: 924466 - DNA, 25 bp, Homo sapien
tccctgggatccgatgtctgctcta

SEQ ID NO: 924467 - DNA, 25 bp, Homo sapien
ttgccaccgttcacaggtaagtgtg

SEQ ID NO: 924468 - DNA, 25 bp, Homo sapien
tttgccaccgttcacaggtaagtgt

SEQ ID NO: 924469 - DNA, 25 bp, Homo sapien
gccaccgttcacaggtaagtgtggg

SEQ ID NO: 924470 - DNA, 25 bp, Homo sapien
cctttgccaccgttcacaggtaagt

SEQ ID NO: 924471 - DNA, 25 bp, Homo sapien
aattggtgccaaacaagctcacctc

SEQ ID NO: 924472 - DNA, 25 bp, Homo sapien
tcctgtcattagtcacataattggt

SEQ ID NO: 924473 - DNA, 25 bp, Homo sapien
cctgtcattagtcacataattggtg

SEQ ID NO: 924474 - DNA, 25 bp, Homo sapien
acaggtctcagtcttagtggtcgct

SEQ ID NO: 924475 - DNA, 25 bp, Homo sapien
ttgagctagagccacgctttgcgcc

SEQ ID NO: 924476 - DNA, 25 bp, Homo sapien
acgctttgcgcctcctttttgtcct

SEQ ID NO: 924477 - DNA, 25 bp, Homo sapien
tagtggtcgctgtactgttcactcc

SEQ ID NO: 924478 - DNA, 25 bp, Homo sapien
gaagctcctaagctccccacatcct

SEQ ID NO: 924479 - DNA, 25 bp, Homo sapien
gaaaaggaagctcctaagctcccca

SEQ ID NO: 924480 - DNA, 25 bp, Homo sapien
aaggaagctcctaagctccccacat

SEQ ID NO: 924481 - DNA, 25 bp, Homo sapien
tgaaaaggaagctcctaagctcccc

SEQ ID NO: 924482 - DNA, 25 bp, Homo sapien
cctctgagggaacatgtggaagcca

SEQ ID NO: 924483 - DNA, 25 bp, Homo sapien
tttgcttgagatggaaccttagtgc

SEQ ID NO: 924484 - DNA, 25 bp, Homo sapien
aatgcacatcatgagtgcagtttgc

SEQ ID NO: 924485 - DNA, 25 bp, Homo sapien
gcccttcttcctgtaggctacatca

SEQ ID NO: 924486 - DNA, 25 bp, Homo sapien
gtcagtgtgcatatctctggattta

SEQ ID NO: 924487 - DNA, 25 bp, Homo sapien
tcctttgctgatatcatattcctat

SEQ ID NO: 924488 - DNA, 25 bp, Homo sapien
cacagaagaaactctgtcagtgtgc

SEQ ID NO: 924489 - DNA, 25 bp, Homo sapien
tcatattcctatcagcatgattaac

SEQ ID NO: 924490 - DNA, 25 bp, Homo sapien
taaagagccattggtgggtcccgtc

SEQ ID NO: 924491 - DNA, 25 bp, Homo sapien
taaaatgtcgcatagaacagcaaac

SEQ ID NO: 924492 - DNA, 25 bp, Homo sapien
acagcaaacagtgggaaaacaggca

SEQ ID NO: 924493 - DNA, 25 bp, Homo sapien
ctgcatatttaacaaccccttggat

SEQ ID NO: 924494 - DNA, 25 bp, Homo sapien
ttttgcacagtttgcgtccccggca

SEQ ID NO: 924495 - DNA, 25 bp, Homo sapien
tctgtccgagaggataggatctgtc

SEQ ID NO: 924496 - DNA, 25 bp, Homo sapien
ggtcagcaacttcagcggcaagtag

SEQ ID NO: 924497 - DNA, 25 bp, Homo sapien
tgtaaccatgggcatccacgtttag

SEQ ID NO: 924498 - DNA, 25 bp, Homo sapien
caaagcaacagacacccttctgtac

SEQ ID NO: 924499 - DNA, 25 bp, Homo sapien
ctgaataaatcagtggagatctcaa

SEQ ID NO: 924500 - DNA, 25 bp, Homo sapien
tgtactccaggcactgaataaatca

SEQ ID NO: 924501 - DNA, 25 bp, Homo sapien
gagatatggaccgagagtgtttctg

SEQ ID NO: 924502 - DNA, 25 bp, Homo sapien
tagacagaatgctaggctaaggcag

SEQ ID NO: 924503 - DNA, 25 bp, Homo sapien
gctaaggcaggcaaggctaagttat

SEQ ID NO: 924504 - DNA, 25 bp, Homo sapien
taggtccagcgtactgaatgcactt

SEQ ID NO: 924505 - DNA, 25 bp, Homo sapien
tgggcctcacgtaagaaaacacctg

SEQ ID NO: 924506 - DNA, 25 bp, Homo sapien
tttgcagaattgattcctgatgagg

SEQ ID NO: 924507 - DNA, 25 bp, Homo sapien
ttagcaggcagtgacatgaggaagg

SEQ ID NO: 924508 - DNA, 25 bp, Homo sapien
tgacaaagggtgtccagcgttcagg

SEQ ID NO: 924509 - DNA, 25 bp, Homo sapien
tggaggtcccacactgaaccatggg

SEQ ID NO: 924510 - DNA, 25 bp, Homo sapien
ttgaaggcagggttgtaccaagagg

SEQ ID NO: 924511 - DNA, 25 bp, Homo sapien
caccaggcaatgctggacaacctgc

SEQ ID NO: 924512 - DNA, 25 bp, Homo sapien
gcaatgctggacaacctgcttgctt

SEQ ID NO: 924513 - DNA, 25 bp, Homo sapien
cagggttgtaccaagagggacagca

SEQ ID NO: 924514 - DNA, 25 bp, Homo sapien
gaaagaattgatcacctagggcagg

SEQ ID NO: 924515 - DNA, 25 bp, Homo sapien
gagaatatcatcctgccaagcctga

SEQ ID NO: 924516 - DNA, 25 bp, Homo sapien
ggtctgctcaacactacactcctag

SEQ ID NO: 924517 - DNA, 25 bp, Homo sapien
aaatgtcacattaatcgggcagaga

SEQ ID NO: 924518 - DNA, 25 bp, Homo sapien
aagaacatcccccattacctgtggc

SEQ ID NO: 924519 - DNA, 25 bp, Homo sapien
tctctcacatggagagaagttaggg

SEQ ID NO: 924520 - DNA, 25 bp, Homo sapien
cccattacctgtggctggaaaattg

SEQ ID NO: 924521 - DNA, 25 bp, Homo sapien
tggaaaattggcatccttgaccctt

SEQ ID NO: 924522 - DNA, 25 bp, Homo sapien
tgagagtaatcccttccatagtcgt

SEQ ID NO: 924523 - DNA, 25 bp, Homo sapien
cttagtcaataggtcaatggcttcc

SEQ ID NO: 924524 - DNA, 25 bp, Homo sapien
ccatagtcgtcttgagagtagtgcc

SEQ ID NO: 924525 - DNA, 25 bp, Homo sapien
aatggcttccttagtcaccttgaga

SEQ ID NO: 924526 - DNA, 25 bp, Homo sapien
ccctgggcagaagttgatcagcagt

SEQ ID NO: 924527 - DNA, 25 bp, Homo sapien
atagccatcagactcagtgtgttcc

SEQ ID NO: 924528 - DNA, 25 bp, Homo sapien
tcattatagccatcagactcagtgt

SEQ ID NO: 924529 - DNA, 25 bp, Homo sapien
tgccctgggcagaagttgatcagca

SEQ ID NO: 924530 - DNA, 25 bp, Homo sapien
agagagatcctctctggttccaaag

SEQ ID NO: 924531 - DNA, 25 bp, Homo sapien
gaaaccgtatgcatggaagtctcca

SEQ ID NO: 924532 - DNA, 25 bp, Homo sapien
gtttcctaactgcttctgatgcctc

SEQ ID NO: 924533 - DNA, 25 bp, Homo sapien
gcttgttcagaaggatggatctaac

SEQ ID NO: 924534 - DNA, 25 bp, Homo sapien
gcagggagttaaatccaggccaatg

SEQ ID NO: 924535 - DNA, 25 bp, Homo sapien
caataccatctgctcgggcaaaggg

SEQ ID NO: 924536 - DNA, 25 bp, Homo sapien
gattcagtggattgggcaagaaatt

SEQ ID NO: 924537 - DNA, 25 bp, Homo sapien
taattctcaaatagcccaggtttac

SEQ ID NO: 924538 - DNA, 25 bp, Homo sapien
aatatatttctgaactgttgatggg

SEQ ID NO: 924539 - DNA, 25 bp, Homo sapien
cttttaaggcagcttatgaaatata

SEQ ID NO: 924540 - DNA, 25 bp, Homo sapien
gatgggggtccctggcttctggcac

SEQ ID NO: 924541 - DNA, 25 bp, Homo sapien
tttaaggcagcttatgaaatatatt

SEQ ID NO: 924542 - DNA, 25 bp, Homo sapien
ttgtgtatggataaaagatgaggag

SEQ ID NO: 924543 - DNA, 25 bp, Homo sapien
tttctataggaatctctgctgtgtt

SEQ ID NO: 924544 - DNA, 25 bp, Homo sapien
tctataggaatctctgctgtgttct

SEQ ID NO: 924545 - DNA, 25 bp, Homo sapien
actctccacacttcaggttgtgtat

SEQ ID NO: 924546 - DNA, 25 bp, Homo sapien
aaacttgcacctaggatttgtccag

SEQ ID NO: 924547 - DNA, 25 bp, Homo sapien
tgcacctaggatttgtccagtgttt

SEQ ID NO: 924548 - DNA, 25 bp, Homo sapien
gagctggaaaaacttgcacctagga

SEQ ID NO: 924549 - DNA, 25 bp, Homo sapien
tggaaaaacttgcacctaggatttg

SEQ ID NO: 924550 - DNA, 25 bp, Homo sapien
ttgattgccgccacattgtgttcaa

SEQ ID NO: 924551 - DNA, 25 bp, Homo sapien
aagggcagagaaagtcattaaattc

SEQ ID NO: 924552 - DNA, 25 bp, Homo sapien
cagaagggcagagaaagtcattaaa

SEQ ID NO: 924553 - DNA, 25 bp, Homo sapien
agtcattaaattcaacatgcatcat

SEQ ID NO: 924554 - DNA, 25 bp, Homo sapien
aaagtcattaaattcaacatgcatc

SEQ ID NO: 924555 - DNA, 25 bp, Homo sapien
ctattgatgcactcgggaagtaggg

SEQ ID NO: 924556 - DNA, 25 bp, Homo sapien
tggagggactttgccacttggccgt

SEQ ID NO: 924557 - DNA, 25 bp, Homo sapien
cactaagggaggagcatgattcatc

SEQ ID NO: 924558 - DNA, 25 bp, Homo sapien
tctttgactcctcaacacttggagg

SEQ ID NO: 924559 - DNA, 25 bp, Homo sapien
catcaggtggattagtttgaaagca

SEQ ID NO: 924560 - DNA, 25 bp, Homo sapien
cgtcctgcatccacctattgtctat

SEQ ID NO: 924561 - DNA, 25 bp, Homo sapien
tgtctattgttaagtgtcctgtgtg

SEQ ID NO: 924562 - DNA, 25 bp, Homo sapien
tgtgtgctgcgtttctggacccctc

SEQ ID NO: 924563 - DNA, 25 bp, Homo sapien
gtgctgcgtttctggacccctccat

SEQ ID NO: 924564 - DNA, 25 bp, Homo sapien
cacatttagctagcggccaggtgtt

SEQ ID NO: 924565 - DNA, 25 bp, Homo sapien
tagctagcggccaggtgttaggtct

SEQ ID NO: 924566 - DNA, 25 bp, Homo sapien
cttgcatcacatttagctagcggcc

SEQ ID NO: 924567 - DNA, 25 bp, Homo sapien
ggtttaaaattaggtcttgcatcac

SEQ ID NO: 924568 - DNA, 25 bp, Homo sapien
ctctgtgtttagctcctgatgctgc

SEQ ID NO: 924569 - DNA, 25 bp, Homo sapien
gattgaacggttttgcagtcagtca

SEQ ID NO: 924570 - DNA, 25 bp, Homo sapien
aaggctcttcttgattgaacggttt

SEQ ID NO: 924571 - DNA, 25 bp, Homo sapien
tcagtcactacaagaatcagagaag

SEQ ID NO: 924572 - DNA, 25 bp, Homo sapien
caaaagccaatccatccatctgtgc

SEQ ID NO: 924573 - DNA, 25 bp, Homo sapien
atccaaaagccaatccatccatctg

SEQ ID NO: 924574 - DNA, 25 bp, Homo sapien
ccatctgtgcattcaggcttaatac

SEQ ID NO: 924575 - DNA, 25 bp, Homo sapien
tactgatgacgctccatctccattt

SEQ ID NO: 924576 - DNA, 25 bp, Homo sapien
tagtaaatattgcaccgggccaggc

SEQ ID NO: 924577 - DNA, 25 bp, Homo sapien
ttgggtactatcctcactgcatggg

SEQ ID NO: 924578 - DNA, 25 bp, Homo sapien
gggagctaaacatcgcgtacacaag

SEQ ID NO: 924579 - DNA, 25 bp, Homo sapien
tgggaccagtagacactggtgacta

SEQ ID NO: 924580 - DNA, 25 bp, Homo sapien
cagagtatggactggtgcactcgca

SEQ ID NO: 924581 - DNA, 25 bp, Homo sapien
acagagtatggactggtgcactcgc

SEQ ID NO: 924582 - DNA, 25 bp, Homo sapien
tatggactggtgcactcgcaaacct

SEQ ID NO: 924583 - DNA, 25 bp, Homo sapien
gagtatggactggtgcactcgcaaa

SEQ ID NO: 924584 - DNA, 25 bp, Homo sapien
agaatggaacctccagaaactggtt

SEQ ID NO: 924585 - DNA, 25 bp, Homo sapien
atcccataacctctatgaccttctc

SEQ ID NO: 924586 - DNA, 25 bp, Homo sapien
gaaagaatggaacctccagaaactg

SEQ ID NO: 924587 - DNA, 25 bp, Homo sapien
aatcccataacctctatgaccttct

SEQ ID NO: 924588 - DNA, 25 bp, Homo sapien
tggtcttgacttttctggcaggaat

SEQ ID NO: 924589 - DNA, 25 bp, Homo sapien
ccactgccttgggaattttctgtcc

SEQ ID NO: 924590 - DNA, 25 bp, Homo sapien
gcctgtaaaccttcttcccatggat

SEQ ID NO: 924591 - DNA, 25 bp, Homo sapien
ctctttcttgcaggaaaaagcttcc

SEQ ID NO: 924592 - DNA, 25 bp, Homo sapien
agttcatccattaccattttgccag

SEQ ID NO: 924593 - DNA, 25 bp, Homo sapien
gtccaggaaccaaatagccgtctct

SEQ ID NO: 924594 - DNA, 25 bp, Homo sapien
tctagatccacattgagttcatcca

SEQ ID NO: 924595 - DNA, 25 bp, Homo sapien
gccagattggtcttgtcttagtgaa

SEQ ID NO: 924596 - DNA, 25 bp, Homo sapien
gagtcgttacaacgggcaaagacat

SEQ ID NO: 924597 - DNA, 25 bp, Homo sapien
gactcagagtcgttacaacgggcaa

SEQ ID NO: 924598 - DNA, 25 bp, Homo sapien
acatcagactcagagtcgttacaac

SEQ ID NO: 924599 - DNA, 25 bp, Homo sapien
tcagactcagagtcgttacaacggg

SEQ ID NO: 924600 - DNA, 25 bp, Homo sapien
taaaactgacatatcctgtaggatc

SEQ ID NO: 924601 - DNA, 25 bp, Homo sapien
ttttgccagcaatacatataccttg

SEQ ID NO: 924602 - DNA, 25 bp, Homo sapien
gcctttttagtcttagctaccactc

SEQ ID NO: 924603 - DNA, 25 bp, Homo sapien
ggccttgaatatccgcctctcctga

SEQ ID NO: 924604 - DNA, 25 bp, Homo sapien
gaatgttgcttctagtaaatgaggg

SEQ ID NO: 924605 - DNA, 25 bp, Homo sapien
ggaatgttgcttctagtaaatgagg

SEQ ID NO: 924606 - DNA, 25 bp, Homo sapien
tggcttgataagtacccccagccat

SEQ ID NO: 924607 - DNA, 25 bp, Homo sapien
gccagtgatggcttgataagtaccc

SEQ ID NO: 924608 - DNA, 25 bp, Homo sapien
cttgttctctttccagtcttggaga

SEQ ID NO: 924609 - DNA, 25 bp, Homo sapien
tgttggccaattgtgtcttcctttc

SEQ ID NO: 924610 - DNA, 25 bp, Homo sapien
gttggccaattgtgtcttcctttcc

SEQ ID NO: 924611 - DNA, 25 bp, Homo sapien
tcttgttggccaattgtgtcttcct

SEQ ID NO: 924612 - DNA, 25 bp, Homo sapien
atgttctgactcccatgcagaattc

SEQ ID NO: 924613 - DNA, 25 bp, Homo sapien
tgttctgactcccatgcagaattct

SEQ ID NO: 924614 - DNA, 25 bp, Homo sapien
ctgttgcccagtaaaatcaggtctt

SEQ ID NO: 924615 - DNA, 25 bp, Homo sapien
gctctgttgcccagtaaaatcaggt

SEQ ID NO: 924616 - DNA, 25 bp, Homo sapien
aatcctgcgttcttcatgttcaatg

SEQ ID NO: 924617 - DNA, 25 bp, Homo sapien
tcacgacgtgccaataaatcctgcg

SEQ ID NO: 924618 - DNA, 25 bp, Homo sapien
caaactcaacactgcagtagaagcg

SEQ ID NO: 924619 - DNA, 25 bp, Homo sapien
gaagcgtgggctttacggttatcac

SEQ ID NO: 924620 - DNA, 25 bp, Homo sapien
cagatggacttccctgcatgcctcc

SEQ ID NO: 924621 - DNA, 25 bp, Homo sapien
gctgtgatagtttctagccttccct

SEQ ID NO: 924622 - DNA, 25 bp, Homo sapien
ccagatggacttccctgcatgcctc

SEQ ID NO: 924623 - DNA, 25 bp, Homo sapien
agatggacttccctgcatgcctcca

SEQ ID NO: 924624 - DNA, 25 bp, Homo sapien
taagtggagcttgtgcatccagcat

SEQ ID NO: 924625 - DNA, 25 bp, Homo sapien
cctcattctgttcataagtggagct

SEQ ID NO: 924626 - DNA, 25 bp, Homo sapien
gagcttgtgcatccagcatttgcca

SEQ ID NO: 924627 - DNA, 25 bp, Homo sapien
ttgcctagccccgtcctcattctgt

SEQ ID NO: 924628 - DNA, 25 bp, Homo sapien
ttcttgcacctatgttcctgtcctc

SEQ ID NO: 924629 - DNA, 25 bp, Homo sapien
tgttcctgtcctccatagacctgtg

SEQ ID NO: 924630 - DNA, 25 bp, Homo sapien
tccaggcgtccttcttgcacctatg

SEQ ID NO: 924631 - DNA, 25 bp, Homo sapien
tagacctgtgtccaccagtctctca

SEQ ID NO: 924632 - DNA, 25 bp, Homo sapien
ttcaaggccagcaaactcaattagc

SEQ ID NO: 924633 - DNA, 25 bp, Homo sapien
tcaaggccagcaaactcaattagct

SEQ ID NO: 924634 - DNA, 25 bp, Homo sapien
gaaggagtctaatttcaccaccacc

SEQ ID NO: 924635 - DNA, 25 bp, Homo sapien
gacaccaagaaggagtctaatttca

SEQ ID NO: 924636 - DNA, 25 bp, Homo sapien
caagaaggagtctaatttcaccacc

SEQ ID NO: 924637 - DNA, 25 bp, Homo sapien
tatttagtgagcatacaatgattaa

SEQ ID NO: 924638 - DNA, 25 bp, Homo sapien
tcttgcccttcaagtaaaggcccaa

SEQ ID NO: 924639 - DNA, 25 bp, Homo sapien
ggcccaaaactacagccagctgtct

SEQ ID NO: 924640 - DNA, 25 bp, Homo sapien
ccagagtaaagtgggaacatcctca

SEQ ID NO: 924641 - DNA, 25 bp, Homo sapien
tgataccacggactctgccattgtg

SEQ ID NO: 924642 - DNA, 25 bp, Homo sapien
ggtatgcatagagcaaggccatagc

SEQ ID NO: 924643 - DNA, 25 bp, Homo sapien
gcaatagcaagagctggagcttgag

SEQ ID NO: 924644 - DNA, 25 bp, Homo sapien
gccatagcaatagcaagagctggag

SEQ ID NO: 924645 - DNA, 25 bp, Homo sapien
gggacccaggccctacggtatgcat

SEQ ID NO: 924646 - DNA, 25 bp, Homo sapien
ggtctatatagagggtctggagacc

SEQ ID NO: 924647 - DNA, 25 bp, Homo sapien
gacccagccccatgagcttattaat

SEQ ID NO: 924648 - DNA, 25 bp, Homo sapien
gtttctggtctatatagagggtctg

SEQ ID NO: 924649 - DNA, 25 bp, Homo sapien
tattaatgaccttctcggtgtctcc

SEQ ID NO: 924650 - DNA, 25 bp, Homo sapien
tcctcgaggcatatctgcaggcagg

SEQ ID NO: 924651 - DNA, 25 bp, Homo sapien
gagtcaccctttcacagcctttaaa

SEQ ID NO: 924652 - DNA, 25 bp, Homo sapien
ggttctgttcctcgaggcatatctg

SEQ ID NO: 924653 - DNA, 25 bp, Homo sapien
gaggcatatctgcaggcaggccttt

SEQ ID NO: 924654 - DNA, 25 bp, Homo sapien
ttagaggtcctacccctccatgttc

SEQ ID NO: 924655 - DNA, 25 bp, Homo sapien
gatggtgaaggcactagctttccag

SEQ ID NO: 924656 - DNA, 25 bp, Homo sapien
tggtgaaggcactagctttccagga

SEQ ID NO: 924657 - DNA, 25 bp, Homo sapien
gtgaaggcactagctttccaggact

SEQ ID NO: 924658 - DNA, 25 bp, Homo sapien
cttggggaaaccatcatacattctc

SEQ ID NO: 924659 - DNA, 25 bp, Homo sapien
ttggggaaaccatcatacattctct

SEQ ID NO: 924660 - DNA, 25 bp, Homo sapien
gcttggggaaaccatcatacattct

SEQ ID NO: 924661 - DNA, 25 bp, Homo sapien
taagccatattataccatagtcgcc

SEQ ID NO: 924662 - DNA, 25 bp, Homo sapien
caatgcatgctaatcgtataaggtt

SEQ ID NO: 924663 - DNA, 25 bp, Homo sapien
caagtactattgatccattgatagg

SEQ ID NO: 924664 - DNA, 25 bp, Homo sapien
tattggatcaggaggctaatagctc

SEQ ID NO: 924665 - DNA, 25 bp, Homo sapien
gaggaagggaccctactagcgtata

SEQ ID NO: 924666 - DNA, 25 bp, Homo sapien
aaacaagtgtaacaagtagaggaag

SEQ ID NO: 924667 - DNA, 25 bp, Homo sapien
tagaggaagggaccctactagcgta

SEQ ID NO: 924668 - DNA, 25 bp, Homo sapien
caagtgtaacaagtagaggaaggga

SEQ ID NO: 924669 - DNA, 25 bp, Homo sapien
gtctgtaacatatctaagcatgcgt

SEQ ID NO: 924670 - DNA, 25 bp, Homo sapien
tggtgttgcactcttagagcctgag

SEQ ID NO: 924671 - DNA, 25 bp, Homo sapien
cttcatcataggtgagtctgtaaca

SEQ ID NO: 924672 - DNA, 25 bp, Homo sapien
cagacatgtaaatttggtggttgct

SEQ ID NO: 924673 - DNA, 25 bp, Homo sapien
tctgggacaggatgatctatagggc

SEQ ID NO: 924674 - DNA, 25 bp, Homo sapien
gaaggaattgagactttgctgggct

SEQ ID NO: 924675 - DNA, 25 bp, Homo sapien
ggccttgttcatccagatagcgatt

SEQ ID NO: 924676 - DNA, 25 bp, Homo sapien
cattatgctgtagatctctgggaca

SEQ ID NO: 924677 - DNA, 25 bp, Homo sapien
ttgacgctgttttctctacgaagaa

SEQ ID NO: 924678 - DNA, 25 bp, Homo sapien
ttgcttgacgctgttttctctacga

SEQ ID NO: 924679 - DNA, 25 bp, Homo sapien
tttccttgcttgacgctgttttctc

SEQ ID NO: 924680 - DNA, 25 bp, Homo sapien
gcttgacgctgttttctctacgaag

SEQ ID NO: 924681 - DNA, 25 bp, Homo sapien
ccctgggaacctgaacttctcagtt

SEQ ID NO: 924682 - DNA, 25 bp, Homo sapien
cctgaacttctcagttctctccttt

SEQ ID NO: 924683 - DNA, 25 bp, Homo sapien
tcctttttctgcctgggtccagcat

SEQ ID NO: 924684 - DNA, 25 bp, Homo sapien
caagtccctgggaacctgaacttct

SEQ ID NO: 924685 - DNA, 25 bp, Homo sapien
ggatgacattggcaatcaggctctg

SEQ ID NO: 924686 - DNA, 25 bp, Homo sapien
cattggcaatcaggctctgacagca

SEQ ID NO: 924687 - DNA, 25 bp, Homo sapien
tagcatcaggatcatttctcggcat

SEQ ID NO: 924688 - DNA, 25 bp, Homo sapien
tctgagtcatccatgagccaaatag

SEQ ID NO: 924689 - DNA, 25 bp, Homo sapien
tgtggcccagatttccaagctgtcg

SEQ ID NO: 924690 - DNA, 25 bp, Homo sapien
caagctgtcgagctccaagtgccaa

SEQ ID NO: 924691 - DNA, 25 bp, Homo sapien
caggattcgttgtggagaagctgtc

SEQ ID NO: 924692 - DNA, 25 bp, Homo sapien
agaagctgtccttgtaatcccggga

SEQ ID NO: 924693 - DNA, 25 bp, Homo sapien
gggatctgtcgtgctgaatcgcccc

SEQ ID NO: 924694 - DNA, 25 bp, Homo sapien
gagtgagtgctgcaacaatattcct

SEQ ID NO: 924695 - DNA, 25 bp, Homo sapien
tattcctacaaaggggatctgtcgt

SEQ ID NO: 924696 - DNA, 25 bp, Homo sapien
gggccagagtgagtgctgcaacaat

SEQ ID NO: 924697 - DNA, 25 bp, Homo sapien
ttgtgaatggagtcagactcgtaac

SEQ ID NO: 924698 - DNA, 25 bp, Homo sapien
tcagactcgtaacccaagatactgg

SEQ ID NO: 924699 - DNA, 25 bp, Homo sapien
ggagtcagactcgtaacccaagata

SEQ ID NO: 924700 - DNA, 25 bp, Homo sapien
tcgtaacccaagatactggagggaa

SEQ ID NO: 924701 - DNA, 25 bp, Homo sapien
gagcagctgtgggtcatcttgggtc

SEQ ID NO: 924702 - DNA, 25 bp, Homo sapien
cttgggattggccagcaaagggtct

SEQ ID NO: 924703 - DNA, 25 bp, Homo sapien
ccaagcacagggaagacgagtgttt

SEQ ID NO: 924704 - DNA, 25 bp, Homo sapien
cttttcaataaggctgtcccaaggg

SEQ ID NO: 924705 - DNA, 25 bp, Homo sapien
tttccttgtgggctgggatcttgct

SEQ ID NO: 924706 - DNA, 25 bp, Homo sapien
ttgtgggctgggatcttgctcatgg

SEQ ID NO: 924707 - DNA, 25 bp, Homo sapien
gtgggctgggatcttgctcatggca

SEQ ID NO: 924708 - DNA, 25 bp, Homo sapien
tccttgtgggctgggatcttgctca

SEQ ID NO: 924709 - DNA, 25 bp, Homo sapien
gagaaaagccgagagattgttcact

SEQ ID NO: 924710 - DNA, 25 bp, Homo sapien
caggttcgtttcttaagctcttatc

SEQ ID NO: 924711 - DNA, 25 bp, Homo sapien
ttcactttcttaacaggagctgctt

SEQ ID NO: 924712 - DNA, 25 bp, Homo sapien
cttgggcacactcataggatggaga

SEQ ID NO: 924713 - DNA, 25 bp, Homo sapien
tgagatggatcccaagacagatggc

SEQ ID NO: 924714 - DNA, 25 bp, Homo sapien
tcagaagtgagatggatcccaagac

SEQ ID NO: 924715 - DNA, 25 bp, Homo sapien
gcagtgactattttaagccccagag

SEQ ID NO: 924716 - DNA, 25 bp, Homo sapien
tccaaaataactcagtccagcaggg

SEQ ID NO: 924717 - DNA, 25 bp, Homo sapien
tctgtgctcctcagcagtgacatct

SEQ ID NO: 924718 - DNA, 25 bp, Homo sapien
cctcctccaccttgatcagcagttt

SEQ ID NO: 924719 - DNA, 25 bp, Homo sapien
tccaccttgatcagcagtttcttct

SEQ ID NO: 924720 - DNA, 25 bp, Homo sapien
tgggccaggctgtcaaggctctctc

SEQ ID NO: 924721 - DNA, 25 bp, Homo sapien
tgccatgggccaggctgtcaaggct

SEQ ID NO: 924722 - DNA, 25 bp, Homo sapien
tactacagccagaagaacaatgaga

SEQ ID NO: 924723 - DNA, 25 bp, Homo sapien
ctactacagccagaagaacaatgag

SEQ ID NO: 924724 - DNA, 25 bp, Homo sapien
tacagccagaagaacaatgagaatc

SEQ ID NO: 924725 - DNA, 25 bp, Homo sapien
ctacagccagaagaacaatgagaat

SEQ ID NO: 924726 - DNA, 25 bp, Homo sapien
gaaccactgacaaaagcacaatgga

SEQ ID NO: 924727 - DNA, 25 bp, Homo sapien
aaccactgacaaaagcacaatggag

SEQ ID NO: 924728 - DNA, 25 bp, Homo sapien
gtcatattgtaggatatctgcacag

SEQ ID NO: 924729 - DNA, 25 bp, Homo sapien
ggagtcatattgtaggatatctgca

SEQ ID NO: 924730 - DNA, 25 bp, Homo sapien
ggtttctcaaaatcaggcaacgttg

SEQ ID NO: 924731 - DNA, 25 bp, Homo sapien
gtaggacggttaggtaagcccatga

SEQ ID NO: 924732 - DNA, 25 bp, Homo sapien
cccatgaaggcataaatacctggca

SEQ ID NO: 924733 - DNA, 25 bp, Homo sapien
cttgccaagggctgaaaactcaggc

SEQ ID NO: 924734 - DNA, 25 bp, Homo sapien
cccactgacatcaaaaagaatcttt

SEQ ID NO: 924735 - DNA, 25 bp, Homo sapien
ccactgacatcaaaaagaatctttc

SEQ ID NO: 924736 - DNA, 25 bp, Homo sapien
gctttcaaatgccagggtccttttc

SEQ ID NO: 924737 - DNA, 25 bp, Homo sapien
tcagttctggttgctttcaaatgcc

SEQ ID NO: 924738 - DNA, 25 bp, Homo sapien
ccttttcctggattcaacctgcagg

SEQ ID NO: 924739 - DNA, 25 bp, Homo sapien
ttttcctggattcaacctgcaggct

SEQ ID NO: 924740 - DNA, 25 bp, Homo sapien
tagtcacatttggatcagtagaagg

SEQ ID NO: 924741 - DNA, 25 bp, Homo sapien
gatcagtagaaggagagagggccct

SEQ ID NO: 924742 - DNA, 25 bp, Homo sapien
caaatcttgagggatttagtcacat

SEQ ID NO: 924743 - DNA, 25 bp, Homo sapien
ggccctgcagttgggtacagcatgt

SEQ ID NO: 924744 - DNA, 25 bp, Homo sapien
tgcctccaagatcctttgcctgcat

SEQ ID NO: 924745 - DNA, 25 bp, Homo sapien
gagcctttgccttgtaagttagcca

SEQ ID NO: 924746 - DNA, 25 bp, Homo sapien
ccacctttggcaccctgagaaaagc

SEQ ID NO: 924747 - DNA, 25 bp, Homo sapien
gctgggtcagttgatcagacccacc

SEQ ID NO: 924748 - DNA, 25 bp, Homo sapien
ttgacctgtttatatgctgctaatg

SEQ ID NO: 924749 - DNA, 25 bp, Homo sapien
tgttgacctgtttatatgctgctaa

SEQ ID NO: 924750 - DNA, 25 bp, Homo sapien
gtttatatgctgctaatgtggccat

SEQ ID NO: 924751 - DNA, 25 bp, Homo sapien
cctgtttatatgctgctaatgtggc

SEQ ID NO: 924752 - DNA, 25 bp, Homo sapien
catgatcaataatcagaataggacc

SEQ ID NO: 924753 - DNA, 25 bp, Homo sapien
tgatcaataatcagaataggaccca

SEQ ID NO: 924754 - DNA, 25 bp, Homo sapien
gatcaataatcagaataggacccat

SEQ ID NO: 924755 - DNA, 25 bp, Homo sapien
aacatgatcaataatcagaatagga

SEQ ID NO: 924756 - DNA, 25 bp, Homo sapien
actcagtggtctctcgcctggacaa

SEQ ID NO: 924757 - DNA, 25 bp, Homo sapien
cctggaggcatagagggtggacttc

SEQ ID NO: 924758 - DNA, 25 bp, Homo sapien
gatgaggccacatgtaactcagtgg

SEQ ID NO: 924759 - DNA, 25 bp, Homo sapien
ttaggtagctgcagtagcttcttca

SEQ ID NO: 924760 - DNA, 25 bp, Homo sapien
gaggaacacactgccctgacctcat

SEQ ID NO: 924761 - DNA, 25 bp, Homo sapien
tgttgacaggcttgcaggacagcag

SEQ ID NO: 924762 - DNA, 25 bp, Homo sapien
taagggctgccttttgaggcccacg

SEQ ID NO: 924763 - DNA, 25 bp, Homo sapien
cccacgcagagccaggtaataggtt

SEQ ID NO: 924764 - DNA, 25 bp, Homo sapien
tgcctgggagctccgccattccatc

SEQ ID NO: 924765 - DNA, 25 bp, Homo sapien
gggagctccgccattccatcagctg

SEQ ID NO: 924766 - DNA, 25 bp, Homo sapien
tgatataaaggttaacggaagacca

SEQ ID NO: 924767 - DNA, 25 bp, Homo sapien
cctgggagctccgccattccatcag

SEQ ID NO: 924768 - DNA, 25 bp, Homo sapien
caaagtaagcctgaactggttgtca

SEQ ID NO: 924769 - DNA, 25 bp, Homo sapien
gatttggagatccccaggataacag

SEQ ID NO: 924770 - DNA, 25 bp, Homo sapien
aactggttgtcaggagccattggat

SEQ ID NO: 924771 - DNA, 25 bp, Homo sapien
catgaacacaaagtaagcctgaact

SEQ ID NO: 924772 - DNA, 25 bp, Homo sapien
gacaggattgcagaaccgaaaccag

SEQ ID NO: 924773 - DNA, 25 bp, Homo sapien
gaaccgaaaccagcattcaagttcc

SEQ ID NO: 924774 - DNA, 25 bp, Homo sapien
ctgagatgggctaccagtctggaca

SEQ ID NO: 924775 - DNA, 25 bp, Homo sapien
ctgctcatagctggtggtctgagat

SEQ ID NO: 924776 - DNA, 25 bp, Homo sapien
tgcccatctgcatcatggctgtgtt

SEQ ID NO: 924777 - DNA, 25 bp, Homo sapien
tgctgaacgggtctcgctgacacaa

SEQ ID NO: 924778 - DNA, 25 bp, Homo sapien
ggcaaaagccactcatataattcct

SEQ ID NO: 924779 - DNA, 25 bp, Homo sapien
taattccttatgtgctgctgaacgg

SEQ ID NO: 924780 - DNA, 25 bp, Homo sapien
taggtggaggatactcttgctgaac

SEQ ID NO: 924781 - DNA, 25 bp, Homo sapien
caatgggccacgtggattccactcc

SEQ ID NO: 924782 - DNA, 25 bp, Homo sapien
tccactccacggaagatttattcgt

SEQ ID NO: 924783 - DNA, 25 bp, Homo sapien
cagctgtaatctgggtcactgaccc

SEQ ID NO: 924784 - DNA, 25 bp, Homo sapien
gaaaatgccgatgtagaacaagagc

SEQ ID NO: 924785 - DNA, 25 bp, Homo sapien
gtcagtcaaaagcacccagcagcct

SEQ ID NO: 924786 - DNA, 25 bp, Homo sapien
gcactgtgcgcggtttagctcctgt

SEQ ID NO: 924787 - DNA, 25 bp, Homo sapien
gaacaagagcatcccgttcaccttg

SEQ ID NO: 924788 - DNA, 25 bp, Homo sapien
ttgtggtcttaagggcactctgctg

SEQ ID NO: 924789 - DNA, 25 bp, Homo sapien
gtggtcttaagggcactctgctgac

SEQ ID NO: 924790 - DNA, 25 bp, Homo sapien
tgtggtcttaagggcactctgctga

SEQ ID NO: 924791 - DNA, 25 bp, Homo sapien
tttcttagctcctatgcagcgtacc

SEQ ID NO: 924792 - DNA, 25 bp, Homo sapien
cttcctgtgcaactaattttccacc

SEQ ID NO: 924793 - DNA, 25 bp, Homo sapien
gacccttcctgtgcaactaattttc

SEQ ID NO: 924794 - DNA, 25 bp, Homo sapien
ttcttagctcctatgcagcgtaccc

SEQ ID NO: 924795 - DNA, 25 bp, Homo sapien
tgagtgtcggaacccatgattgcag

SEQ ID NO: 924796 - DNA, 25 bp, Homo sapien
gaacccatgattgcaggtccctgtc

SEQ ID NO: 924797 - DNA, 25 bp, Homo sapien
agaataagatgagtgtcggaaccca

SEQ ID NO: 924798 - DNA, 25 bp, Homo sapien
tccttccgctgacccggaagaataa

SEQ ID NO: 924799 - DNA, 25 bp, Homo sapien
tgagtctcagtgtatgaaaaacagc

SEQ ID NO: 924800 - DNA, 25 bp, Homo sapien
tgcagttacttttgagcctggagtg

SEQ ID NO: 924801 - DNA, 25 bp, Homo sapien
acaggtcctggaaatgagctatccc

SEQ ID NO: 924802 - DNA, 25 bp, Homo sapien
gagatacatggcttcgaagtcgttc

SEQ ID NO: 924803 - DNA, 25 bp, Homo sapien
ctgaagatcaagattcagggaacag

SEQ ID NO: 924804 - DNA, 25 bp, Homo sapien
gctgaagatcaagattcagggaaca

SEQ ID NO: 924805 - DNA, 25 bp, Homo sapien
ctgttggtctgctcttttcaggaag

SEQ ID NO: 924806 - DNA, 25 bp, Homo sapien
tacatgtcaagtagagcggcctcag

SEQ ID NO: 924807 - DNA, 25 bp, Homo sapien
taggtaagcccgtcagttcatggta

SEQ ID NO: 924808 - DNA, 25 bp, Homo sapien
aagaaaggtctctatagcacagtag

SEQ ID NO: 924809 - DNA, 25 bp, Homo sapien
gaaacccaagctaatgaacacagat

SEQ ID NO: 924810 - DNA, 25 bp, Homo sapien
gattggttctgtggcatcctcaagc

SEQ ID NO: 924811 - DNA, 25 bp, Homo sapien
gagcaaaactctgtgcgtgagtctg

SEQ ID NO: 924812 - DNA, 25 bp, Homo sapien
ctcaagcaaggttaaagccagatgc

SEQ ID NO: 924813 - DNA, 25 bp, Homo sapien
tttcggatgattgcaaagctgttgt

SEQ ID NO: 924814 - DNA, 25 bp, Homo sapien
tccaccctagggcatacaagacagt

SEQ ID NO: 924815 - DNA, 25 bp, Homo sapien
tattagcccttgaatcatcatctgg

SEQ ID NO: 924816 - DNA, 25 bp, Homo sapien
tcatttgctgggtgctaaggttaca

SEQ ID NO: 924817 - DNA, 25 bp, Homo sapien
aagttgcttatcgttctagcccagg

SEQ ID NO: 924818 - DNA, 25 bp, Homo sapien
tctttgaatggagttcttcactctg

SEQ ID NO: 924819 - DNA, 25 bp, Homo sapien
tcactctgtgaagtggaacttcttt

SEQ ID NO: 924820 - DNA, 25 bp, Homo sapien
tctttctgtggtcctaaactttcca

SEQ ID NO: 924821 - DNA, 25 bp, Homo sapien
tccacactgcaatttcaaaggcatg

SEQ ID NO: 924822 - DNA, 25 bp, Homo sapien
tagcatcctgatgtccctcctgagc

SEQ ID NO: 924823 - DNA, 25 bp, Homo sapien
tgagtcctgctactcatttgtagca

SEQ ID NO: 924824 - DNA, 25 bp, Homo sapien
ggcttctgagtcctgctactcattt

SEQ ID NO: 924825 - DNA, 25 bp, Homo sapien
tactcatttgtagcatcctgatgtc

SEQ ID NO: 924826 - DNA, 25 bp, Homo sapien
acttggagttcagtattgttgtggc

SEQ ID NO: 924827 - DNA, 25 bp, Homo sapien
agcagactcacagtccccaaaggaa

SEQ ID NO: 924828 - DNA, 25 bp, Homo sapien
ggctccagttgtagtagttcattaa

SEQ ID NO: 924829 - DNA, 25 bp, Homo sapien
gtattgttgtggcaggtgcaaagca

SEQ ID NO: 924830 - DNA, 25 bp, Homo sapien
gttatagtctccacgtctcttttcc

SEQ ID NO: 924831 - DNA, 25 bp, Homo sapien
gtgatgaactccatacactcagttt

SEQ ID NO: 924832 - DNA, 25 bp, Homo sapien
ctccatacactcagtttcatgtttg

SEQ ID NO: 924833 - DNA, 25 bp, Homo sapien
ttgttatagtctccacgtctctttt

SEQ ID NO: 924834 - DNA, 25 bp, Homo sapien
attttcatcaacagcaactccagcc

SEQ ID NO: 924835 - DNA, 25 bp, Homo sapien
ttgagcatccacaccataagttaga

SEQ ID NO: 924836 - DNA, 25 bp, Homo sapien
acagcaactccagccacttgagcat

SEQ ID NO: 924837 - DNA, 25 bp, Homo sapien
ttagaaaatcaacccggaggctctc

SEQ ID NO: 924838 - DNA, 25 bp, Homo sapien
ctacagtgagcttcctaaagtgcac

SEQ ID NO: 924839 - DNA, 25 bp, Homo sapien
tgtaatctggcttggaattctggct

SEQ ID NO: 924840 - DNA, 25 bp, Homo sapien
ggctcttgtccaccataatctctct

SEQ ID NO: 924841 - DNA, 25 bp, Homo sapien
cacatctgatcacagccttctagcg

SEQ ID NO: 924842 - DNA, 25 bp, Homo sapien
ccctttgtacacagacgtctactcc

SEQ ID NO: 924843 - DNA, 25 bp, Homo sapien
tttgtacacagacgtctactcccct

SEQ ID NO: 924844 - DNA, 25 bp, Homo sapien
acacagacgtctactcccctctccc

SEQ ID NO: 924845 - DNA, 25 bp, Homo sapien
cacagacgtctactcccctctccct

SEQ ID NO: 924846 - DNA, 25 bp, Homo sapien
caacatcagtaaagtgaacatccat

SEQ ID NO: 924847 - DNA, 25 bp, Homo sapien
tgacaacatcagtaaagtgaacatc

SEQ ID NO: 924848 - DNA, 25 bp, Homo sapien
ttgttgctgacaacatcagtaaagt

SEQ ID NO: 924849 - DNA, 25 bp, Homo sapien
tgctgacaacatcagtaaagtgaac

SEQ ID NO: 924850 - DNA, 25 bp, Homo sapien
aatgcccaatatgtccaggccatct

SEQ ID NO: 924851 - DNA, 25 bp, Homo sapien
atgatcaagggactcccttgccgat

SEQ ID NO: 924852 - DNA, 25 bp, Homo sapien
gatcaagggactcccttgccgatgg

SEQ ID NO: 924853 - DNA, 25 bp, Homo sapien
ttccaaatgcccaatatgtccaggc

SEQ ID NO: 924854 - DNA, 25 bp, Homo sapien
gcgatccacagacggccgggtagca

SEQ ID NO: 924855 - DNA, 25 bp, Homo sapien
tgtgggcaaggctctccaagttcaa

SEQ ID NO: 924856 - DNA, 25 bp, Homo sapien
ccgggtagcaaatggagatggcagc

SEQ ID NO: 924857 - DNA, 25 bp, Homo sapien
gcccttcagatctgatacagaccag

SEQ ID NO: 924858 - DNA, 25 bp, Homo sapien
gagcatgcctacttggacttccaca

SEQ ID NO: 924859 - DNA, 25 bp, Homo sapien
tcctcactcttgagcaataccatca

SEQ ID NO: 924860 - DNA, 25 bp, Homo sapien
catgcctacttggacttccacagaa

SEQ ID NO: 924861 - DNA, 25 bp, Homo sapien
ccccgagcatgcctacttggacttc

SEQ ID NO: 924862 - DNA, 25 bp, Homo sapien
tgggcccccagggagctgactgaca

SEQ ID NO: 924863 - DNA, 25 bp, Homo sapien
aaggcttgactgaaatctcttctct

SEQ ID NO: 924864 - DNA, 25 bp, Homo sapien
cccagggagctgactgacattcccc

SEQ ID NO: 924865 - DNA, 25 bp, Homo sapien
gaaggcttgactgaaatctcttctc

SEQ ID NO: 924866 - DNA, 25 bp, Homo sapien
tatcgaattggaacaagctttattg

SEQ ID NO: 924867 - DNA, 25 bp, Homo sapien
tatgaacatgttgctcttggtcatg

SEQ ID NO: 924868 - DNA, 25 bp, Homo sapien
gccgacggtagacacgcatgtttat

SEQ ID NO: 924869 - DNA, 25 bp, Homo sapien
gatgttcgagaacaaagccgacggt

SEQ ID NO: 924870 - DNA, 25 bp, Homo sapien
agagggtcggtggttacattctcca

SEQ ID NO: 924871 - DNA, 25 bp, Homo sapien
aatccaagagggtcggtggttacat

SEQ ID NO: 924872 - DNA, 25 bp, Homo sapien
ggtggttacattctccatttgttcc

SEQ ID NO: 924873 - DNA, 25 bp, Homo sapien
ggtcggtggttacattctccatttg

SEQ ID NO: 924874 - DNA, 25 bp, Homo sapien
ccggcacctgtcaaagctctgggca

SEQ ID NO: 924875 - DNA, 25 bp, Homo sapien
ggcacctgtcaaagctctgggcacc

SEQ ID NO: 924876 - DNA, 25 bp, Homo sapien
ggggcacgttgtcagcagcccagct

SEQ ID NO: 924877 - DNA, 25 bp, Homo sapien
ccccggcacctgtcaaagctctggg

SEQ ID NO: 924878 - DNA, 25 bp, Homo sapien
aaatcacaatgagcttgcctgtgcc

SEQ ID NO: 924879 - DNA, 25 bp, Homo sapien
tgtctttaggtgtcgattatcccaa

SEQ ID NO: 924880 - DNA, 25 bp, Homo sapien
caaacgtaagagcttaaaattctag

SEQ ID NO: 924881 - DNA, 25 bp, Homo sapien
tgctaatttctcctgcgttccctca

SEQ ID NO: 924882 - DNA, 25 bp, Homo sapien
taatgccaaggagcatacggagggc

SEQ ID NO: 924883 - DNA, 25 bp, Homo sapien
ggacatggctcttacaggactgaga

SEQ ID NO: 924884 - DNA, 25 bp, Homo sapien
gagtaagattcgagtgtaagcaccc

SEQ ID NO: 924885 - DNA, 25 bp, Homo sapien
gactcagaataagcatcagacttgg

SEQ ID NO: 924886 - DNA, 25 bp, Homo sapien
gtaccaaccagactgatcctgctta

SEQ ID NO: 924887 - DNA, 25 bp, Homo sapien
aggtaccaaccagactgatcctgct

SEQ ID NO: 924888 - DNA, 25 bp, Homo sapien
ccaggtaccaaccagactgatcctg

SEQ ID NO: 924889 - DNA, 25 bp, Homo sapien
ggtaccaaccagactgatcctgctt

SEQ ID NO: 924890 - DNA, 25 bp, Homo sapien
gctgaaatgctcttcaaactccttt

SEQ ID NO: 924891 - DNA, 25 bp, Homo sapien
acgggcagggctaggtgctgaaatg

SEQ ID NO: 924892 - DNA, 25 bp, Homo sapien
ctgtgtcgtggtccacagggcccac

SEQ ID NO: 924893 - DNA, 25 bp, Homo sapien
tcgtggtccacagggcccacgggca

SEQ ID NO: 924894 - DNA, 25 bp, Homo sapien
gagaagtgctgcttgcagctatggc

SEQ ID NO: 924895 - DNA, 25 bp, Homo sapien
gaagtgctgcttgcagctatggctc

SEQ ID NO: 924896 - DNA, 25 bp, Homo sapien
taagagctgaggatagagtgtgaca

SEQ ID NO: 924897 - DNA, 25 bp, Homo sapien
tttgccttgctgataccactaagtg

SEQ ID NO: 924898 - DNA, 25 bp, Homo sapien
gatgtgtgttactggaacaagagcc

SEQ ID NO: 924899 - DNA, 25 bp, Homo sapien
tcggtttgccattccctctggagaa

SEQ ID NO: 924900 - DNA, 25 bp, Homo sapien
aatcagatgtgtgttactggaacaa

SEQ ID NO: 924901 - DNA, 25 bp, Homo sapien
ggttcggtttgccattccctctgga

SEQ ID NO: 924902 - DNA, 25 bp, Homo sapien
ggtgacttctaaaatggtgagcaac

SEQ ID NO: 924903 - DNA, 25 bp, Homo sapien
caccaagttcttagaggtgacttct

SEQ ID NO: 924904 - DNA, 25 bp, Homo sapien
gaagctcgactttcagtctgctaag

SEQ ID NO: 924905 - DNA, 25 bp, Homo sapien
ttggcagccacaaagcgaagctcga

SEQ ID NO: 924906 - DNA, 25 bp, Homo sapien
cttttccttatgccaacaccatact

SEQ ID NO: 924907 - DNA, 25 bp, Homo sapien
actgaaccacaaaggcttccaaagg

SEQ ID NO: 924908 - DNA, 25 bp, Homo sapien
aacaccatactgaaccacaaaggct

SEQ ID NO: 924909 - DNA, 25 bp, Homo sapien
ccatactgaaccacaaaggcttcca

SEQ ID NO: 924910 - DNA, 25 bp, Homo sapien
caccatgctgaaccttaataagagc

SEQ ID NO: 924911 - DNA, 25 bp, Homo sapien
ccatgctgaaccttaataagagctt

SEQ ID NO: 924912 - DNA, 25 bp, Homo sapien
catgctgaaccttaataagagcttc

SEQ ID NO: 924913 - DNA, 25 bp, Homo sapien
aacaccatgctgaaccttaataaga

SEQ ID NO: 924914 - DNA, 25 bp, Homo sapien
ttccccatgcaaacaccacgttgaa

SEQ ID NO: 924915 - DNA, 25 bp, Homo sapien
tccccatgcaaacaccacgttgaag

SEQ ID NO: 924916 - DNA, 25 bp, Homo sapien
aaacaccacgttgaagcttaagagc

SEQ ID NO: 924917 - DNA, 25 bp, Homo sapien
tgcaaacaccacgttgaagcttaag

SEQ ID NO: 924918 - DNA, 25 bp, Homo sapien
aaagaggcaaagaactgtgaccttg

SEQ ID NO: 924919 - DNA, 25 bp, Homo sapien
ccaacaccacgctgaaccttaagag

SEQ ID NO: 924920 - DNA, 25 bp, Homo sapien
aagaggcaaagaactgtgaccttga

SEQ ID NO: 924921 - DNA, 25 bp, Homo sapien
cttcacagcattggacctgagccag

SEQ ID NO: 924922 - DNA, 25 bp, Homo sapien
gtctcttgtatctggtacctcttca

SEQ ID NO: 924923 - DNA, 25 bp, Homo sapien
cctgagccagacgtgatgagtacct

SEQ ID NO: 924924 - DNA, 25 bp, Homo sapien
tgagtaccttgtcctctaagtggct

SEQ ID NO: 924925 - DNA, 25 bp, Homo sapien
tggcaggttgccagcgctgccacgt

SEQ ID NO: 924926 - DNA, 25 bp, Homo sapien
taaacagttatgagtgaggaacaca

SEQ ID NO: 924927 - DNA, 25 bp, Homo sapien
gagtcccctatcacgcgtcactgag

SEQ ID NO: 924928 - DNA, 25 bp, Homo sapien
ccagagctggcaggttgccagcgct

SEQ ID NO: 924929 - DNA, 25 bp, Homo sapien
gataggagagggctattgaaggcag

SEQ ID NO: 924930 - DNA, 25 bp, Homo sapien
tgagaccgagatgaatacgatgagg

SEQ ID NO: 924931 - DNA, 25 bp, Homo sapien
gatgaatacgatgaggggacccctc

SEQ ID NO: 924932 - DNA, 25 bp, Homo sapien
ggtgcccatgagaccgagatgaata

SEQ ID NO: 924933 - DNA, 25 bp, Homo sapien
gaagctagaagtacaaccaggttga

SEQ ID NO: 924934 - DNA, 25 bp, Homo sapien
gttgatcccaggaacctccaagcag

SEQ ID NO: 924935 - DNA, 25 bp, Homo sapien
tttccatacccaaggctgaagctag

SEQ ID NO: 924936 - DNA, 25 bp, Homo sapien
gcaacaaagtgaataactcctgctt

SEQ ID NO: 924937 - DNA, 25 bp, Homo sapien
ttttgctgaggcactaacagacacc

SEQ ID NO: 924938 - DNA, 25 bp, Homo sapien
tctgaaccccgtatctgacagtgac

SEQ ID NO: 924939 - DNA, 25 bp, Homo sapien
aaggaagatccgatccagggccaga

SEQ ID NO: 924940 - DNA, 25 bp, Homo sapien
caaatgcaaaatcgagaagcaggtc

SEQ ID NO: 924941 - DNA, 25 bp, Homo sapien
tgtctaaaacgctgtgcagcccaaa

SEQ ID NO: 924942 - DNA, 25 bp, Homo sapien
cttgatgtctaaaacgctgtgcagc

SEQ ID NO: 924943 - DNA, 25 bp, Homo sapien
tgtgcagcccaaaccgaacctggct

SEQ ID NO: 924944 - DNA, 25 bp, Homo sapien
aaccgaacctggctgcccttgtgtg

SEQ ID NO: 924945 - DNA, 25 bp, Homo sapien
caatggccatgactgcaaggtagga

SEQ ID NO: 924946 - DNA, 25 bp, Homo sapien
caaggtaggaacagggtgagaacca

SEQ ID NO: 924947 - DNA, 25 bp, Homo sapien
gacgatgacacagcaatggccatga

SEQ ID NO: 924948 - DNA, 25 bp, Homo sapien
caggccagggcagacgatgacacag

SEQ ID NO: 924949 - DNA, 25 bp, Homo sapien
ttgggctgactgcagcaagcaatta

SEQ ID NO: 924950 - DNA, 25 bp, Homo sapien
cttgggctgactgcagcaagcaatt

SEQ ID NO: 924951 - DNA, 25 bp, Homo sapien
tgggctgactgcagcaagcaattac

SEQ ID NO: 924952 - DNA, 25 bp, Homo sapien
gctgggctcagaacagcggcaacca

SEQ ID NO: 924953 - DNA, 25 bp, Homo sapien
ctgctgggctcagaacagcggcaac

SEQ ID NO: 924954 - DNA, 25 bp, Homo sapien
ctgggctcagaacagcggcaaccac

SEQ ID NO: 924955 - DNA, 25 bp, Homo sapien
tgctgggctcagaacagcggcaacc

SEQ ID NO: 924956 - DNA, 25 bp, Homo sapien
tgaaataatcttcactgactttcat

SEQ ID NO: 924957 - DNA, 25 bp, Homo sapien
ggtgaaataatcttcactgactttc

SEQ ID NO: 924958 - DNA, 25 bp, Homo sapien
gtgaaataatcttcactgactttca

SEQ ID NO: 924959 - DNA, 25 bp, Homo sapien
cataagaacagtatcgtttcagagt

SEQ ID NO: 924960 - DNA, 25 bp, Homo sapien
cagagtaataactctccacatttca

SEQ ID NO: 924961 - DNA, 25 bp, Homo sapien
ttagtcataagaacagtatcgtttc

SEQ ID NO: 924962 - DNA, 25 bp, Homo sapien
gaacagtatcgtttcagagtaataa

SEQ ID NO: 924963 - DNA, 25 bp, Homo sapien
actggcacgccggaaatcaagctga

SEQ ID NO: 924964 - DNA, 25 bp, Homo sapien
taaactgatggcttagactcgacag

SEQ ID NO: 924965 - DNA, 25 bp, Homo sapien
cagaggccacgtcagctggacttaa

SEQ ID NO: 924966 - DNA, 25 bp, Homo sapien
cacagtgactgtgaccaggaacaga

SEQ ID NO: 924967 - DNA, 25 bp, Homo sapien
cgctttgagctctggacgcttcgtt

SEQ ID NO: 924968 - DNA, 25 bp, Homo sapien
cgcttcgtttacgaaatgctgggca

SEQ ID NO: 924969 - DNA, 25 bp, Homo sapien
tctggacgcttcgtttacgaaatgc

SEQ ID NO: 924970 - DNA, 25 bp, Homo sapien
gagctctggacgcttcgtttacgaa

SEQ ID NO: 924971 - DNA, 25 bp, Homo sapien
tggccaccagttaccgcttctcctt

SEQ ID NO: 924972 - DNA, 25 bp, Homo sapien
ccttcttgaacaaagctcattattt

SEQ ID NO: 924973 - DNA, 25 bp, Homo sapien
caccagttaccgcttctccttcttg

SEQ ID NO: 924974 - DNA, 25 bp, Homo sapien
ctccttcttgaacaaagctcattat

SEQ ID NO: 924975 - DNA, 25 bp, Homo sapien
tcacttgacttgttgtacaacccag

SEQ ID NO: 924976 - DNA, 25 bp, Homo sapien
caccagggttattgcatccctcgaa

SEQ ID NO: 924977 - DNA, 25 bp, Homo sapien
cactgtaacttctatccttagcacc

SEQ ID NO: 924978 - DNA, 25 bp, Homo sapien
gcagagaatcaaactataaagctgc

SEQ ID NO: 924979 - DNA, 25 bp, Homo sapien
ttctctccatgtcaggcacagccaa

SEQ ID NO: 924980 - DNA, 25 bp, Homo sapien
tctctccatgtcaggcacagccaaa

SEQ ID NO: 924981 - DNA, 25 bp, Homo sapien
tctccatgtcaggcacagccaaatc

SEQ ID NO: 924982 - DNA, 25 bp, Homo sapien
attctctccatgtcaggcacagcca

SEQ ID NO: 924983 - DNA, 25 bp, Homo sapien
atcactggcagaccccactacatcc

SEQ ID NO: 924984 - DNA, 25 bp, Homo sapien
actacatcccagattctagaagaaa

SEQ ID NO: 924985 - DNA, 25 bp, Homo sapien
ccactacatcccagattctagaaga

SEQ ID NO: 924986 - DNA, 25 bp, Homo sapien
ttcatcactggcagaccccactaca

SEQ ID NO: 924987 - DNA, 25 bp, Homo sapien
cattaagtgtcgtggttcacaagct

SEQ ID NO: 924988 - DNA, 25 bp, Homo sapien
tcttctgcaaacaatgctccggtat

SEQ ID NO: 924989 - DNA, 25 bp, Homo sapien
gcgcccatcatcaggaagtgccgcg

SEQ ID NO: 924990 - DNA, 25 bp, Homo sapien
ttcacaagctgtgtacctgcactct

SEQ ID NO: 924991 - DNA, 25 bp, Homo sapien
gtcaacgatgagctgaactctgaac

SEQ ID NO: 924992 - DNA, 25 bp, Homo sapien
tgtcaacgatgagctgaactctgaa

SEQ ID NO: 924993 - DNA, 25 bp, Homo sapien
caatgtcaacgatgagctgaactct

SEQ ID NO: 924994 - DNA, 25 bp, Homo sapien
aatgtcaacgatgagctgaactctg

SEQ ID NO: 924995 - DNA, 25 bp, Homo sapien
ttgtcctgggcacccgtggtctgaa

SEQ ID NO: 924996 - DNA, 25 bp, Homo sapien
ccaccagcaacgagggcttggggaa

SEQ ID NO: 924997 - DNA, 25 bp, Homo sapien
gtccccaccagcaacgagggcttgg

SEQ ID NO: 924998 - DNA, 25 bp, Homo sapien
ggtctgaactggagtgtccccacca

SEQ ID NO: 924999 - DNA, 25 bp, Homo sapien
tattctagaatcatgccaaaggtca

SEQ ID NO: 925000 - DNA, 25 bp, Homo sapien
tcctgccaaggtcaaagtggaaatt

SEQ ID NO: 925001 - DNA, 25 bp, Homo sapien
aaggtcattaacaaagaaggacagc

SEQ ID NO: 925002 - DNA, 25 bp, Homo sapien
ggacagcattgacacttccttcctg

SEQ ID NO: 925003 - DNA, 25 bp, Homo sapien
cgctgaatacttggagagataagtt

SEQ ID NO: 925004 - DNA, 25 bp, Homo sapien
tctgggttctcgctgaatacttgga

SEQ ID NO: 925005 - DNA, 25 bp, Homo sapien
ggttctcgctgaatacttggagaga

SEQ ID NO: 925006 - DNA, 25 bp, Homo sapien
gaacatctgggttctcgctgaatac

SEQ ID NO: 925007 - DNA, 25 bp, Homo sapien
aaattaccagccagattgagcctca

SEQ ID NO: 925008 - DNA, 25 bp, Homo sapien
ttgaattcagacaaattaccagcca

SEQ ID NO: 925009 - DNA, 25 bp, Homo sapien
gaaggattgaattcagacaaattac

SEQ ID NO: 925010 - DNA, 25 bp, Homo sapien
caaattaccagccagattgagcctc

SEQ ID NO: 925011 - DNA, 25 bp, Homo sapien
gttggtgcgcacaggacattcatat

SEQ ID NO: 925012 - DNA, 25 bp, Homo sapien
cattcatatgctcagaggacattgg

SEQ ID NO: 925013 - DNA, 25 bp, Homo sapien
gacacgaccacgatggttggtgcgc

SEQ ID NO: 925014 - DNA, 25 bp, Homo sapien
tctgtaagcgttcgatctggtgtgg

SEQ ID NO: 925015 - DNA, 25 bp, Homo sapien
ccatgacagggcagcacggatggac

SEQ ID NO: 925016 - DNA, 25 bp, Homo sapien
cggtcagcctgagaaaaaggcatct

SEQ ID NO: 925017 - DNA, 25 bp, Homo sapien
gacaaactagggcatggactgatgg

SEQ ID NO: 925018 - DNA, 25 bp, Homo sapien
gctgttggcttccaccccatgacag

SEQ ID NO: 925019 - DNA, 25 bp, Homo sapien
gctgctcttcctgttaagtcaagca

SEQ ID NO: 925020 - DNA, 25 bp, Homo sapien
acttgttccccaaactcattggcct

SEQ ID NO: 925021 - DNA, 25 bp, Homo sapien
cctgttaagtcaagcacatagctct

SEQ ID NO: 925022 - DNA, 25 bp, Homo sapien
ggccttttgattgcctctgtatgga

SEQ ID NO: 925023 - DNA, 25 bp, Homo sapien
ggagtctgcttcttttgtccattcc

SEQ ID NO: 925024 - DNA, 25 bp, Homo sapien
catacttcagtggtcccctaggcat

SEQ ID NO: 925025 - DNA, 25 bp, Homo sapien
tagcaccaccatgggctctggcttc

SEQ ID NO: 925026 - DNA, 25 bp, Homo sapien
tgtccattccacacatacttcagtg

SEQ ID NO: 925027 - DNA, 25 bp, Homo sapien
taatttcctggaacggatgtacctg

SEQ ID NO: 925028 - DNA, 25 bp, Homo sapien
taaactttgaagcagaataggactt

SEQ ID NO: 925029 - DNA, 25 bp, Homo sapien
gaagcagaataggacttaagcaaag

SEQ ID NO: 925030 - DNA, 25 bp, Homo sapien
cggatgtacctgagttaaactttga

SEQ ID NO: 925031 - DNA, 25 bp, Homo sapien
tccaggcatgcagacatcatgctgg

SEQ ID NO: 925032 - DNA, 25 bp, Homo sapien
tccagagctcgggtgacctctgctc

SEQ ID NO: 925033 - DNA, 25 bp, Homo sapien
agagctcgggtgacctctgctctaa

SEQ ID NO: 925034 - DNA, 25 bp, Homo sapien
ctccagagctcgggtgacctctgct

SEQ ID NO: 925035 - DNA, 25 bp, Homo sapien
ttgccacatccttgagcactgtcag

SEQ ID NO: 925036 - DNA, 25 bp, Homo sapien
tgccacatccttgagcactgtcaga

SEQ ID NO: 925037 - DNA, 25 bp, Homo sapien
gtgggctgtgattgccacatccttg

SEQ ID NO: 925038 - DNA, 25 bp, Homo sapien
gccaccgcggcaagactctgaaatt

SEQ ID NO: 925039 - DNA, 25 bp, Homo sapien
ttgatgcttgcacagggactcactg

SEQ ID NO: 925040 - DNA, 25 bp, Homo sapien
ttaatgacatcctcacctccacgag

SEQ ID NO: 925041 - DNA, 25 bp, Homo sapien
actggcatcacctggtcgtctggga

SEQ ID NO: 925042 - DNA, 25 bp, Homo sapien
tcagaggagcctgcccaatagttgc

SEQ ID NO: 925043 - DNA, 25 bp, Homo sapien
gaaagactcccattggatcagagga

SEQ ID NO: 925044 - DNA, 25 bp, Homo sapien
cagagctctctgataaatagggaaa

SEQ ID NO: 925045 - DNA, 25 bp, Homo sapien
tgctttctcctgtccgttcagctga

SEQ ID NO: 925046 - DNA, 25 bp, Homo sapien
aactgtatttggaggctcagttcca

SEQ ID NO: 925047 - DNA, 25 bp, Homo sapien
agcatcttgaaagctccagatcctg

SEQ ID NO: 925048 - DNA, 25 bp, Homo sapien
gccagcatcttgaaagctccagatc

SEQ ID NO: 925049 - DNA, 25 bp, Homo sapien
acgcagccagcatcttgaaagctcc

SEQ ID NO: 925050 - DNA, 25 bp, Homo sapien
cctccgcacgcagccagcatcttga

SEQ ID NO: 925051 - DNA, 25 bp, Homo sapien
tcccacagaacattcgtttgccagc

SEQ ID NO: 925052 - DNA, 25 bp, Homo sapien
tagtacaccttccttgcgacatctc

SEQ ID NO: 925053 - DNA, 25 bp, Homo sapien
acatctcttctactcgccatggctt

SEQ ID NO: 925054 - DNA, 25 bp, Homo sapien
tgccagcgtcccattttagaacact

SEQ ID NO: 925055 - DNA, 25 bp, Homo sapien
tccagtagaggtggaaacttaggcc

SEQ ID NO: 925056 - DNA, 25 bp, Homo sapien
catagtgcgtggagtagtcaggacc

SEQ ID NO: 925057 - DNA, 25 bp, Homo sapien
tagccttgggaccatcagcaacacc

SEQ ID NO: 925058 - DNA, 25 bp, Homo sapien
gaaacttaggcccatgacttcatag

SEQ ID NO: 925059 - DNA, 25 bp, Homo sapien
ttcccggagagacttttgactgtaa

SEQ ID NO: 925060 - DNA, 25 bp, Homo sapien
atggttgcagacattctgaaagggt

SEQ ID NO: 925061 - DNA, 25 bp, Homo sapien
aaacaggtttcctccatggttgcag

SEQ ID NO: 925062 - DNA, 25 bp, Homo sapien
tagagcttcccggagagacttttga

SEQ ID NO: 925063 - DNA, 25 bp, Homo sapien
aaggacagtggatactggacctggt

SEQ ID NO: 925064 - DNA, 25 bp, Homo sapien
tctgaaaatcctcatctgtagtgac

SEQ ID NO: 925065 - DNA, 25 bp, Homo sapien
gactcatcaagaattgggcaaggaa

SEQ ID NO: 925066 - DNA, 25 bp, Homo sapien
ggagaccattgggactcatcaagaa

SEQ ID NO: 925067 - DNA, 25 bp, Homo sapien
ggatgagagagtcagcacaggtatt

SEQ ID NO: 925068 - DNA, 25 bp, Homo sapien
tcccaaaggttagcagtggtggcct

SEQ ID NO: 925069 - DNA, 25 bp, Homo sapien
catgcagctccggcttctgtgtaag

SEQ ID NO: 925070 - DNA, 25 bp, Homo sapien
acccaagctgtgttggccgcctgct

SEQ ID NO: 925071 - DNA, 25 bp, Homo sapien
tgtgtaagccccagtgtgagctccc

SEQ ID NO: 925072 - DNA, 25 bp, Homo sapien
gcacagaacaagaacttaacacaag

SEQ ID NO: 925073 - DNA, 25 bp, Homo sapien
acaagaacttaacacaagcatcctt

SEQ ID NO: 925074 - DNA, 25 bp, Homo sapien
gaacaagaacttaacacaagcatcc

SEQ ID NO: 925075 - DNA, 25 bp, Homo sapien
cagaacaagaacttaacacaagcat

SEQ ID NO: 925076 - DNA, 25 bp, Homo sapien
tcttgagtttgccaaaccaacgcag

SEQ ID NO: 925077 - DNA, 25 bp, Homo sapien
tttgccaaaccaacgcagagctgct

SEQ ID NO: 925078 - DNA, 25 bp, Homo sapien
cattgcctcttgagtttgccaaacc

SEQ ID NO: 925079 - DNA, 25 bp, Homo sapien
caaaccaacgcagagctgctacggg

SEQ ID NO: 925080 - DNA, 25 bp, Homo sapien
tccatccaatatttagctactttcc

SEQ ID NO: 925081 - DNA, 25 bp, Homo sapien
catccaatatttagctactttccca

SEQ ID NO: 925082 - DNA, 25 bp, Homo sapien
gctgtccatatgctgacacttgatc

SEQ ID NO: 925083 - DNA, 25 bp, Homo sapien
atccaatatttagctactttcccag

SEQ ID NO: 925084 - DNA, 25 bp, Homo sapien
acccacaacacccaaggccgactca

SEQ ID NO: 925085 - DNA, 25 bp, Homo sapien
tgaagctttcccagatatccctcat

SEQ ID NO: 925086 - DNA, 25 bp, Homo sapien
gtttctgcaaagcacccaaggccaa

SEQ ID NO: 925087 - DNA, 25 bp, Homo sapien
caaggccgactcacagttctatctg

SEQ ID NO: 925088 - DNA, 25 bp, Homo sapien
ccactgggatttgattggcattaca

SEQ ID NO: 925089 - DNA, 25 bp, Homo sapien
tgaaattaggtagggcaagtcctcc

SEQ ID NO: 925090 - DNA, 25 bp, Homo sapien
gaatttatagatcagcttgggaaga

SEQ ID NO: 925091 - DNA, 25 bp, Homo sapien
aaatcttgacatactgagtcctcca

SEQ ID NO: 925092 - DNA, 25 bp, Homo sapien
tcatgattatcagtaagatgcaggg

SEQ ID NO: 925093 - DNA, 25 bp, Homo sapien
gcacagtctgttgagagctttcacc

SEQ ID NO: 925094 - DNA, 25 bp, Homo sapien
ccgaaatccagtccagagcaaagca

SEQ ID NO: 925095 - DNA, 25 bp, Homo sapien
aaacggccctggctgctcaacaaaa

SEQ ID NO: 925096 - DNA, 25 bp, Homo sapien
ggcagacctgtaggagtcgttgtca

SEQ ID NO: 925097 - DNA, 25 bp, Homo sapien
taccttccagagtcatatggtgcgg

SEQ ID NO: 925098 - DNA, 25 bp, Homo sapien
tccaaggaacatgatcgacgtagac

SEQ ID NO: 925099 - DNA, 25 bp, Homo sapien
acagcagtatgggtggtaccttcca

SEQ ID NO: 925100 - DNA, 25 bp, Homo sapien
tgtcagcattgagttgccccattgg

SEQ ID NO: 925101 - DNA, 25 bp, Homo sapien
gagagggacggccatatctacaata

SEQ ID NO: 925102 - DNA, 25 bp, Homo sapien
gctggactagtacttccagtgagtg

SEQ ID NO: 925103 - DNA, 25 bp, Homo sapien
gccccattggtaatttgtactcagg

SEQ ID NO: 925104 - DNA, 25 bp, Homo sapien
aaaagacatcgcgaaggcccacggc

SEQ ID NO: 925105 - DNA, 25 bp, Homo sapien
aaattcagtgaaatgcgggtaaacg

SEQ ID NO: 925106 - DNA, 25 bp, Homo sapien
attcagtgaaatgcgggtaaacggc

SEQ ID NO: 925107 - DNA, 25 bp, Homo sapien
cccacggcgggtgttgacgtgatgt

SEQ ID NO: 925108 - DNA, 25 bp, Homo sapien
tgatatcagtatcctcaaagcccac

SEQ ID NO: 925109 - DNA, 25 bp, Homo sapien
ggttcatccacgtcacaatactttt

SEQ ID NO: 925110 - DNA, 25 bp, Homo sapien
aatggcagcatccttcatcatgaag

SEQ ID NO: 925111 - DNA, 25 bp, Homo sapien
taacatgggcctgtaccttctcagc

SEQ ID NO: 925112 - DNA, 25 bp, Homo sapien
cagagtactaccacgtggagtcaaa

SEQ ID NO: 925113 - DNA, 25 bp, Homo sapien
gttttgtcagtaggccatttccaaa

SEQ ID NO: 925114 - DNA, 25 bp, Homo sapien
ttttgaccttctccattgtgacaag

SEQ ID NO: 925115 - DNA, 25 bp, Homo sapien
caaaggtatctattatcaagtctga

SEQ ID NO: 925116 - DNA, 25 bp, Homo sapien
cagggactcggtatgttaccaggct

SEQ ID NO: 925117 - DNA, 25 bp, Homo sapien
tttagttatgttctattcctatgag

SEQ ID NO: 925118 - DNA, 25 bp, Homo sapien
aagacagggactcggtatgttacca

SEQ ID NO: 925119 - DNA, 25 bp, Homo sapien
gtaaagacagggactcggtatgtta

SEQ ID NO: 925120 - DNA, 25 bp, Homo sapien
catctgggttgacaaattgaatacc

SEQ ID NO: 925121 - DNA, 25 bp, Homo sapien
aacaagttcggggaccgtatcatct

SEQ ID NO: 925122 - DNA, 25 bp, Homo sapien
aattgaataccagggatgaagttct

SEQ ID NO: 925123 - DNA, 25 bp, Homo sapien
ttcggggaccgtatcatctgggttg

SEQ ID NO: 925124 - DNA, 25 bp, Homo sapien
cacacacattgcagccgtaggtttc

SEQ ID NO: 925125 - DNA, 25 bp, Homo sapien
ccaagagcggttgtccacacacatt

SEQ ID NO: 925126 - DNA, 25 bp, Homo sapien
gcttgcttcacacgtgagatttcca

SEQ ID NO: 925127 - DNA, 25 bp, Homo sapien
catggttcctcagtgcttgcttcac

SEQ ID NO: 925128 - DNA, 25 bp, Homo sapien
ccgcagaccatgtctgacattgcct

SEQ ID NO: 925129 - DNA, 25 bp, Homo sapien
tgacattgccttcgctgaccttttc

SEQ ID NO: 925130 - DNA, 25 bp, Homo sapien
tgaccttttcaatattgccccagcg

SEQ ID NO: 925131 - DNA, 25 bp, Homo sapien
accagagcccttgtagagcaaccgc

SEQ ID NO: 925132 - DNA, 25 bp, Homo sapien
catagtcattggcagaggagactct

SEQ ID NO: 925133 - DNA, 25 bp, Homo sapien
gcacatagtcattggcagaggagac

SEQ ID NO: 925134 - DNA, 25 bp, Homo sapien
tagtcattggcagaggagactctgg

SEQ ID NO: 925135 - DNA, 25 bp, Homo sapien
cagcacatagtcattggcagaggag

SEQ ID NO: 925136 - DNA, 25 bp, Homo sapien
tacagaggaagatggttctcgaccc

SEQ ID NO: 925137 - DNA, 25 bp, Homo sapien
gaggacttaatcccagcaagtggca

SEQ ID NO: 925138 - DNA, 25 bp, Homo sapien
aatacttggcaggagaaccgaggca

SEQ ID NO: 925139 - DNA, 25 bp, Homo sapien
cagatagcaggtcgatggcagcaca

SEQ ID NO: 925140 - DNA, 25 bp, Homo sapien
tgggagaacaacatgcctcaggaag

SEQ ID NO: 925141 - DNA, 25 bp, Homo sapien
gcatgcggtatgagaggcaagacca

SEQ ID NO: 925142 - DNA, 25 bp, Homo sapien
gagaagagacttaacacagccttgc

SEQ ID NO: 925143 - DNA, 25 bp, Homo sapien
acagaggccacatacacgagaagag

SEQ ID NO: 925144 - DNA, 25 bp, Homo sapien
gacgtggaaagaaaagccggcaaca

SEQ ID NO: 925145 - DNA, 25 bp, Homo sapien
cattcccagcagagcgatgagaaca

SEQ ID NO: 925146 - DNA, 25 bp, Homo sapien
ccaagggtgttagcacagaagtcag

SEQ ID NO: 925147 - DNA, 25 bp, Homo sapien
tcagagaagtaagagccaagggtgt

SEQ ID NO: 925148 - DNA, 25 bp, Homo sapien
caatgagatgttaagtggcccagat

SEQ ID NO: 925149 - DNA, 25 bp, Homo sapien
gatgttcaaagcgtcccaggctgta

SEQ ID NO: 925150 - DNA, 25 bp, Homo sapien
gagctatgccccagtatccaagggc

SEQ ID NO: 925151 - DNA, 25 bp, Homo sapien
gactgagatctcaagacggctcttc

SEQ ID NO: 925152 - DNA, 25 bp, Homo sapien
tctactgtggctgaagttaagccgc

SEQ ID NO: 925153 - DNA, 25 bp, Homo sapien
cattgtaaatgtcacctcctgttct

SEQ ID NO: 925154 - DNA, 25 bp, Homo sapien
tcctttctggagggccgacatttca

SEQ ID NO: 925155 - DNA, 25 bp, Homo sapien
aagttaagccgcctagactgcttct

SEQ ID NO: 925156 - DNA, 25 bp, Homo sapien
actggatggatagaaacctttccct

SEQ ID NO: 925157 - DNA, 25 bp, Homo sapien
gagtggggaatttgtctctccttgt

SEQ ID NO: 925158 - DNA, 25 bp, Homo sapien
ctttccctgtgaggaccggcgagtg

SEQ ID NO: 925159 - DNA, 25 bp, Homo sapien
atatcctcactggatggatagaaac

SEQ ID NO: 925160 - DNA, 25 bp, Homo sapien
ggactgagctcttagctaagtcatc

SEQ ID NO: 925161 - DNA, 25 bp, Homo sapien
gagctcttagctaagtcatcattac

SEQ ID NO: 925162 - DNA, 25 bp, Homo sapien
tcttagctaagtcatcattacccat

SEQ ID NO: 925163 - DNA, 25 bp, Homo sapien
gactgagctcttagctaagtcatca

SEQ ID NO: 925164 - DNA, 25 bp, Homo sapien
catgactacagcatcaatgaaagga

SEQ ID NO: 925165 - DNA, 25 bp, Homo sapien
caccttgagcagataagttaacctc

SEQ ID NO: 925166 - DNA, 25 bp, Homo sapien
catttatatgctgacaccaagtgct

SEQ ID NO: 925167 - DNA, 25 bp, Homo sapien
tggctcttcttaacagcctcaggaa

SEQ ID NO: 925168 - DNA, 25 bp, Homo sapien
caggagcggtgttccatcccgttta

SEQ ID NO: 925169 - DNA, 25 bp, Homo sapien
aggagcggtgttccatcccgtttat

SEQ ID NO: 925170 - DNA, 25 bp, Homo sapien
ttcataatctactaaggcagcaaca

SEQ ID NO: 925171 - DNA, 25 bp, Homo sapien
ttcaatggcctttgtggtcaatggg

SEQ ID NO: 925172 - DNA, 25 bp, Homo sapien
caatgggagaattctgtattcataa

SEQ ID NO: 925173 - DNA, 25 bp, Homo sapien
tgtattcataatctactaaggcagc

SEQ ID NO: 925174 - DNA, 25 bp, Homo sapien
aggctgccccaggaggtgaagagct

SEQ ID NO: 925175 - DNA, 25 bp, Homo sapien
aggaggtgaagagctgaaaggagct

SEQ ID NO: 925176 - DNA, 25 bp, Homo sapien
ccccaggaggtgaagagctgaaagg

SEQ ID NO: 925177 - DNA, 25 bp, Homo sapien
ctgccccaggaggtgaagagctgaa

SEQ ID NO: 925178 - DNA, 25 bp, Homo sapien
gagtacagggagcctggggaagcct

SEQ ID NO: 925179 - DNA, 25 bp, Homo sapien
atgcatgaagggtcctgagtacagg

SEQ ID NO: 925180 - DNA, 25 bp, Homo sapien
cctgagtacagggagcctggggaag

SEQ ID NO: 925181 - DNA, 25 bp, Homo sapien
catgcatgaagggtcctgagtacag

SEQ ID NO: 925182 - DNA, 25 bp, Homo sapien
ttttccaacattcaatcggaacctg

SEQ ID NO: 925183 - DNA, 25 bp, Homo sapien
tctggagtccgggagtaggatgcac

SEQ ID NO: 925184 - DNA, 25 bp, Homo sapien
cggaacctgccattctcaaaaaata

SEQ ID NO: 925185 - DNA, 25 bp, Homo sapien
cccaagtagatggactggacggtct

SEQ ID NO: 925186 - DNA, 25 bp, Homo sapien
caggaacaccggaagaacttgtgga

SEQ ID NO: 925187 - DNA, 25 bp, Homo sapien
ggtgctgctttgctcttaactgttc

SEQ ID NO: 925188 - DNA, 25 bp, Homo sapien
aacttgtggatgagacagagcttca

SEQ ID NO: 925189 - DNA, 25 bp, Homo sapien
cagagcttcacccttgcttggtgct

SEQ ID NO: 925190 - DNA, 25 bp, Homo sapien
cacagccaccctctatttgatcccc

SEQ ID NO: 925191 - DNA, 25 bp, Homo sapien
ttctgctctctacggcaagccttgc

SEQ ID NO: 925192 - DNA, 25 bp, Homo sapien
tatttctgctctctacggcaagcct

SEQ ID NO: 925193 - DNA, 25 bp, Homo sapien
tgctctctacggcaagccttgctgg

SEQ ID NO: 925194 - DNA, 25 bp, Homo sapien
tactcacgcaagaagggagacgcac

SEQ ID NO: 925195 - DNA, 25 bp, Homo sapien
acaaatacagcccagtactcacgca

SEQ ID NO: 925196 - DNA, 25 bp, Homo sapien
tgattttagaagatgccaaggcaaa

SEQ ID NO: 925197 - DNA, 25 bp, Homo sapien
cctccagttagtggaaattgttgct

SEQ ID NO: 925198 - DNA, 25 bp, Homo sapien
ctccatggtcaacaggtggtctatg

SEQ ID NO: 925199 - DNA, 25 bp, Homo sapien
ccaggatcccaagggcatggtcatc

SEQ ID NO: 925200 - DNA, 25 bp, Homo sapien
tccatggtcaacaggtggtctatgg

SEQ ID NO: 925201 - DNA, 25 bp, Homo sapien
tgctccaggatcccaagggcatggt

SEQ ID NO: 925202 - DNA, 25 bp, Homo sapien
gtggacaatgatagcacccagacag

SEQ ID NO: 925203 - DNA, 25 bp, Homo sapien
cttatcctagaggatgcagtctggg

SEQ ID NO: 925204 - DNA, 25 bp, Homo sapien
tcctcacttaggtgcttatcctaga

SEQ ID NO: 925205 - DNA, 25 bp, Homo sapien
acaatgatagcacccagacagagcc

SEQ ID NO: 925206 - DNA, 25 bp, Homo sapien
agctgtcaggaaagcgcccctgtta

SEQ ID NO: 925207 - DNA, 25 bp, Homo sapien
ccaccattatcaaaacagctgtcag

SEQ ID NO: 925208 - DNA, 25 bp, Homo sapien
tgcacgtctgcatgggaggcgtaat

SEQ ID NO: 925209 - DNA, 25 bp, Homo sapien
tattaaatgtcgctctgcacgtctg

SEQ ID NO: 925210 - DNA, 25 bp, Homo sapien
ggagtgaagtgctgtgatctgggct

SEQ ID NO: 925211 - DNA, 25 bp, Homo sapien
gagatgggagtttcgctctttcgcc

SEQ ID NO: 925212 - DNA, 25 bp, Homo sapien
ctggagtgaagtgctgtgatctggg

SEQ ID NO: 925213 - DNA, 25 bp, Homo sapien
ttacaagcacccatcaccatgcccg

SEQ ID NO: 925214 - DNA, 25 bp, Homo sapien
tctcctgccgcccatgacttttaaa

SEQ ID NO: 925215 - DNA, 25 bp, Homo sapien
tggaattaccaatctggaaggaagc

SEQ ID NO: 925216 - DNA, 25 bp, Homo sapien
gattctaatgtccagccatgatgga

SEQ ID NO: 925217 - DNA, 25 bp, Homo sapien
gcccatgacttttaaagctccccaa

SEQ ID NO: 925218 - DNA, 25 bp, Homo sapien
gaaaacagcataagagagacacgga

SEQ ID NO: 925219 - DNA, 25 bp, Homo sapien
ggactcgggacattccattgggaaa

SEQ ID NO: 925220 - DNA, 25 bp, Homo sapien
tatagcccctactttagaagtgagg

SEQ ID NO: 925221 - DNA, 25 bp, Homo sapien
gcccgggtctcaagtgtggaatcca

SEQ ID NO: 925222 - DNA, 25 bp, Homo sapien
gataccaggattctaaaagccttca

SEQ ID NO: 925223 - DNA, 25 bp, Homo sapien
acatgataccaggattctaaaagcc

SEQ ID NO: 925224 - DNA, 25 bp, Homo sapien
tgataccaggattctaaaagccttc

SEQ ID NO: 925225 - DNA, 25 bp, Homo sapien
catgataccaggattctaaaagcct

SEQ ID NO: 925226 - DNA, 25 bp, Homo sapien
gaagagagttctacaaaatactgat

SEQ ID NO: 925227 - DNA, 25 bp, Homo sapien
cattacagcatgaagagagttctac

SEQ ID NO: 925228 - DNA, 25 bp, Homo sapien
cagtcttcattacagcatgaagaga

SEQ ID NO: 925229 - DNA, 25 bp, Homo sapien
gcatgaagagagttctacaaaatac

SEQ ID NO: 925230 - DNA, 25 bp, Homo sapien
gccactggaaatataagactctcca

SEQ ID NO: 925231 - DNA, 25 bp, Homo sapien
ctttgccactagcacacagcttgtg

SEQ ID NO: 925232 - DNA, 25 bp, Homo sapien
agttagactcctgtagaatggccca

SEQ ID NO: 925233 - DNA, 25 bp, Homo sapien
cagaggctgctattaccaagggtac

SEQ ID NO: 925234 - DNA, 25 bp, Homo sapien
aagggcttcttgagagatatttacc

SEQ ID NO: 925235 - DNA, 25 bp, Homo sapien
gcacacactgcagaagggcttcttg

SEQ ID NO: 925236 - DNA, 25 bp, Homo sapien
cacactgcagaagggcttcttgaga

SEQ ID NO: 925237 - DNA, 25 bp, Homo sapien
agacagcacacactgcagaagggct

SEQ ID NO: 925238 - DNA, 25 bp, Homo sapien
gattgcgttttgtgccctgtctctc

SEQ ID NO: 925239 - DNA, 25 bp, Homo sapien
aatgatatctctggacaaagctgtg

SEQ ID NO: 925240 - DNA, 25 bp, Homo sapien
ctgccttggcctaggtgattgcgtt

SEQ ID NO: 925241 - DNA, 25 bp, Homo sapien
tggctgacccaatgtctgtcaagga

SEQ ID NO: 925242 - DNA, 25 bp, Homo sapien
aaggcctgatttccgtagccgggca

SEQ ID NO: 925243 - DNA, 25 bp, Homo sapien
ccatttgtgggtcgtttgtgctcac

SEQ ID NO: 925244 - DNA, 25 bp, Homo sapien
cactaatgaggattggttgtcaccg

SEQ ID NO: 925245 - DNA, 25 bp, Homo sapien
tatttctgcatggaattccaagcga

SEQ ID NO: 925246 - DNA, 25 bp, Homo sapien
tctctgtttccccagttagtaagtc

SEQ ID NO: 925247 - DNA, 25 bp, Homo sapien
cctctctgtttccccagttagtaag

SEQ ID NO: 925248 - DNA, 25 bp, Homo sapien
tctgtttccccagttagtaagtctc

SEQ ID NO: 925249 - DNA, 25 bp, Homo sapien
ttccccagttagtaagtctcctgta

SEQ ID NO: 925250 - DNA, 25 bp, Homo sapien
cctttggttgacagaccgtggttgg

SEQ ID NO: 925251 - DNA, 25 bp, Homo sapien
agcgggtggactcaggaagtttcct

SEQ ID NO: 925252 - DNA, 25 bp, Homo sapien
gccgcctgatgggtttagcctttgg

SEQ ID NO: 925253 - DNA, 25 bp, Homo sapien
aaggcagcaatggcctggagtcctg

SEQ ID NO: 925254 - DNA, 25 bp, Homo sapien
aaatggatagctctggttgtgcttg

SEQ ID NO: 925255 - DNA, 25 bp, Homo sapien
ctaaatggatagctctggttgtgct

SEQ ID NO: 925256 - DNA, 25 bp, Homo sapien
tggatagctctggttgtgcttgtct

SEQ ID NO: 925257 - DNA, 25 bp, Homo sapien
tagctctggttgtgcttgtcttctc

SEQ ID NO: 925258 - DNA, 25 bp, Homo sapien
ggaagcatcaaatgtagtggtccgg

SEQ ID NO: 925259 - DNA, 25 bp, Homo sapien
gcatcaaatgtagtggtccggagga

SEQ ID NO: 925260 - DNA, 25 bp, Homo sapien
aagcatcaaatgtagtggtccggag

SEQ ID NO: 925261 - DNA, 25 bp, Homo sapien
catcaaatgtagtggtccggaggag

SEQ ID NO: 925262 - DNA, 25 bp, Homo sapien
caagctggcagtttgcctgaaacct

SEQ ID NO: 925263 - DNA, 25 bp, Homo sapien
aaataccaggtctctcactctcagg

SEQ ID NO: 925264 - DNA, 25 bp, Homo sapien
catgtgtcggagctgaaattggaag

SEQ ID NO: 925265 - DNA, 25 bp, Homo sapien
tctctctccagatgtcaagctggca

SEQ ID NO: 925266 - DNA, 25 bp, Homo sapien
aagtccactaggcatgtgcttactc

SEQ ID NO: 925267 - DNA, 25 bp, Homo sapien
gacacgtccacatcagaggtgacgt

SEQ ID NO: 925268 - DNA, 25 bp, Homo sapien
ctcagagagtatgttaagcacacat

SEQ ID NO: 925269 - DNA, 25 bp, Homo sapien
cagttggtcttggtgccctaagtcc

SEQ ID NO: 925270 - DNA, 25 bp, Homo sapien
ggtaggtaccattgtccccatctta

SEQ ID NO: 925271 - DNA, 25 bp, Homo sapien
taaggagcttgccaagctcacagag

SEQ ID NO: 925272 - DNA, 25 bp, Homo sapien
ttatttacaccaaatcaattctcaa

SEQ ID NO: 925273 - DNA, 25 bp, Homo sapien
ctgtaggaggtggaagccggaattc

SEQ ID NO: 925274 - DNA, 25 bp, Homo sapien
gttcatgatttgaatctttacagat

SEQ ID NO: 925275 - DNA, 25 bp, Homo sapien
cccctagtgcccataaaaagctgtg

SEQ ID NO: 925276 - DNA, 25 bp, Homo sapien
tgtggtgtttcagttcatgatttga

SEQ ID NO: 925277 - DNA, 25 bp, Homo sapien
tacagataattagttggcagaacga

SEQ ID NO: 925278 - DNA, 25 bp, Homo sapien
tacccagaggacttcttaacccaca

SEQ ID NO: 925279 - DNA, 25 bp, Homo sapien
ggtagggcctgagaattcacatttt

SEQ ID NO: 925280 - DNA, 25 bp, Homo sapien
catgcatttgaattacccagaggac

SEQ ID NO: 925281 - DNA, 25 bp, Homo sapien
gattgttaagctctaccccaagagt

SEQ ID NO: 925282 - DNA, 25 bp, Homo sapien
ctttggcagggagagtgtatttagt

SEQ ID NO: 925283 - DNA, 25 bp, Homo sapien
tgtcatcgctaacagatgatccttg

SEQ ID NO: 925284 - DNA, 25 bp, Homo sapien
tgtgtctggtgtggcaagatgttcc

SEQ ID NO: 925285 - DNA, 25 bp, Homo sapien
gagtgtatttagtttggctcctgag

SEQ ID NO: 925286 - DNA, 25 bp, Homo sapien
aaacagcagctgcagagtcaacata

SEQ ID NO: 925287 - DNA, 25 bp, Homo sapien
taaacagcagctgcagagtcaacat

SEQ ID NO: 925288 - DNA, 25 bp, Homo sapien
ctaaacagcagctgcagagtcaaca

SEQ ID NO: 925289 - DNA, 25 bp, Homo sapien
aacagcagctgcagagtcaacatac

SEQ ID NO: 925290 - DNA, 25 bp, Homo sapien
tctccaagctctgggggcgacttct

SEQ ID NO: 925291 - DNA, 25 bp, Homo sapien
tgctcagccacttgctttgaagtcc

SEQ ID NO: 925292 - DNA, 25 bp, Homo sapien
gggggcgacttctcttgctgctcag

SEQ ID NO: 925293 - DNA, 25 bp, Homo sapien
tttgaagtccaaatgagaaggcatc

SEQ ID NO: 925294 - DNA, 25 bp, Homo sapien
tcctccactcagtgggcactcattg

SEQ ID NO: 925295 - DNA, 25 bp, Homo sapien
ttgtccctactaactgctccaagga

SEQ ID NO: 925296 - DNA, 25 bp, Homo sapien
tgggcactcattggcacccaagtat

SEQ ID NO: 925297 - DNA, 25 bp, Homo sapien
tgggcattcgagattctcaactatc

SEQ ID NO: 925298 - DNA, 25 bp, Homo sapien
cctcttaaggtcttattgacagtca

SEQ ID NO: 925299 - DNA, 25 bp, Homo sapien
gaacaccaagatcttgcctctttgg

SEQ ID NO: 925300 - DNA, 25 bp, Homo sapien
gcctctttggcaagccacctcttaa

SEQ ID NO: 925301 - DNA, 25 bp, Homo sapien
acactggacgtgaacaccaagatct

SEQ ID NO: 925302 - DNA, 25 bp, Homo sapien
acagttttcacaagattgcatagca

SEQ ID NO: 925303 - DNA, 25 bp, Homo sapien
cagaagacatgagcatattgtcttc

SEQ ID NO: 925304 - DNA, 25 bp, Homo sapien
gaaagcctctgtgtgattggaatta

SEQ ID NO: 925305 - DNA, 25 bp, Homo sapien
caattcgaagtgttggtgtcaaaac

SEQ ID NO: 925306 - DNA, 25 bp, Homo sapien
ataaaggtaaactgacagtgctttc

SEQ ID NO: 925307 - DNA, 25 bp, Homo sapien
gaagcacactaattcaagtggtctt

SEQ ID NO: 925308 - DNA, 25 bp, Homo sapien
gctagtgcctttgaggttagaccca

SEQ ID NO: 925309 - DNA, 25 bp, Homo sapien
aagtggtctttcagagctagtgcct

SEQ ID NO: 925310 - DNA, 25 bp, Homo sapien
gcacactgaacaagttacctgggta

SEQ ID NO: 925311 - DNA, 25 bp, Homo sapien
ggtgcacaacactttgccctgctaa

SEQ ID NO: 925312 - DNA, 25 bp, Homo sapien
acctggctaaagacttatactgcat

SEQ ID NO: 925313 - DNA, 25 bp, Homo sapien
gaacaatatgtacagaaaggtccct

SEQ ID NO: 925314 - DNA, 25 bp, Homo sapien
tactgcattggttgttaataacaca

SEQ ID NO: 925315 - DNA, 25 bp, Homo sapien
catcgcacctgggtaaattttgcat

SEQ ID NO: 925316 - DNA, 25 bp, Homo sapien
cgcacatcatcgcacctgggtaaat

SEQ ID NO: 925317 - DNA, 25 bp, Homo sapien
cactctggtggattggtggattttc

SEQ ID NO: 925318 - DNA, 25 bp, Homo sapien
acagacgcacatcatcgcacctggg

SEQ ID NO: 925319 - DNA, 25 bp, Homo sapien
tgggggttggaaatagcacagtagg

SEQ ID NO: 925320 - DNA, 25 bp, Homo sapien
atgattaatgttactacaggtagac

SEQ ID NO: 925321 - DNA, 25 bp, Homo sapien
tacaggtagacctagaattgttggg

SEQ ID NO: 925322 - DNA, 25 bp, Homo sapien
aagaggcgaataaattttcgttcat

SEQ ID NO: 925323 - DNA, 25 bp, Homo sapien
ttcactatagagggggcttagatct

SEQ ID NO: 925324 - DNA, 25 bp, Homo sapien
tagagggggcttagatctcctcagt

SEQ ID NO: 925325 - DNA, 25 bp, Homo sapien
ctatagagggggcttagatctcctc

SEQ ID NO: 925326 - DNA, 25 bp, Homo sapien
aaggttggtgctagattagctttac

SEQ ID NO: 925327 - DNA, 25 bp, Homo sapien
tagtttgtgagtgcaggacgtcttc

SEQ ID NO: 925328 - DNA, 25 bp, Homo sapien
taagtctgttgttggagtcatgtaa

SEQ ID NO: 925329 - DNA, 25 bp, Homo sapien
aaatggtttgatttaagcgtccagg

SEQ ID NO: 925330 - DNA, 25 bp, Homo sapien
taaaggcctggtcttgtagcagtta

SEQ ID NO: 925331 - DNA, 25 bp, Homo sapien
cagtgagggacgggctattaatttc

SEQ ID NO: 925332 - DNA, 25 bp, Homo sapien
acagtgagggacgggctattaattt

SEQ ID NO: 925333 - DNA, 25 bp, Homo sapien
agtgagggacgggctattaatttca

SEQ ID NO: 925334 - DNA, 25 bp, Homo sapien
tcaagtatagaatacgaagacaggg

SEQ ID NO: 925335 - DNA, 25 bp, Homo sapien
gcatcttggagacctagctgaaata

SEQ ID NO: 925336 - DNA, 25 bp, Homo sapien
ggataatggtgggtaaaatagctca

SEQ ID NO: 925337 - DNA, 25 bp, Homo sapien
tatatagggccagggaactaatgag

SEQ ID NO: 925338 - DNA, 25 bp, Homo sapien
caccatgcagggtagctagtcagct

SEQ ID NO: 925339 - DNA, 25 bp, Homo sapien
cagatgtgaagtatgcccgtgtgtc

SEQ ID NO: 925340 - DNA, 25 bp, Homo sapien
tatggtgggctcatatgataaaccc

SEQ ID NO: 925341 - DNA, 25 bp, Homo sapien
catcgaggtataccggagaggccaa

SEQ ID NO: 925342 - DNA, 25 bp, Homo sapien
tctaccattgaggatgcaagcagaa

SEQ ID NO: 925343 - DNA, 25 bp, Homo sapien
cggatcaaacgaaaggaggtgtctg

SEQ ID NO: 925344 - DNA, 25 bp, Homo sapien
taagatagaagagacatctgccagg

SEQ ID NO: 925345 - DNA, 25 bp, Homo sapien
catgctctaggttccctgctaaagg

SEQ ID NO: 925346 - DNA, 25 bp, Homo sapien
tattcggagaaacaccatatcgggc

SEQ ID NO: 925347 - DNA, 25 bp, Homo sapien
tatcaagggaactagccagttgccg

SEQ ID NO: 925348 - DNA, 25 bp, Homo sapien
cctggctggctaggtactgcttgaa

SEQ ID NO: 925349 - DNA, 25 bp, Homo sapien
gataacaaatgcgtgggcggtaaca

SEQ ID NO: 925350 - DNA, 25 bp, Homo sapien
tgaaggctcttggtctcatgtaacc

SEQ ID NO: 925351 - DNA, 25 bp, Homo sapien
gctttgaaggctcttggtctcatgt

SEQ ID NO: 925352 - DNA, 25 bp, Homo sapien
ttgaaggctcttggtctcatgtaac

SEQ ID NO: 925353 - DNA, 25 bp, Homo sapien
aaggctcttggtctcatgtaaccta

SEQ ID NO: 925354 - DNA, 25 bp, Homo sapien
cttgaatgatagctcatttaggcaa

SEQ ID NO: 925355 - DNA, 25 bp, Homo sapien
aattaggcatatatagaagtatagg

SEQ ID NO: 925356 - DNA, 25 bp, Homo sapien
taggttgagtaaagctataatagct

SEQ ID NO: 925357 - DNA, 25 bp, Homo sapien
catttaggcaaaaatcctgttaatg

SEQ ID NO: 925358 - DNA, 25 bp, Homo sapien
ttgaggtccatgagcagcctcttca

SEQ ID NO: 925359 - DNA, 25 bp, Homo sapien
cttgaggtccatgagcagcctcttc

SEQ ID NO: 925360 - DNA, 25 bp, Homo sapien
tgaggtccatgagcagcctcttcat

SEQ ID NO: 925361 - DNA, 25 bp, Homo sapien
gcttattgtacacctaccatgtgca

SEQ ID NO: 925362 - DNA, 25 bp, Homo sapien
gattcctctgcagtgaggaaacaga

SEQ ID NO: 925363 - DNA, 25 bp, Homo sapien
tggaaatgttaacataaccagggtc

SEQ ID NO: 925364 - DNA, 25 bp, Homo sapien
gcagaattagaaggtttatccccag

SEQ ID NO: 925365 - DNA, 25 bp, Homo sapien
accacactcagccaatttttatttt

SEQ ID NO: 925366 - DNA, 25 bp, Homo sapien
ccacactcagccaatttttattttt

SEQ ID NO: 925367 - DNA, 25 bp, Homo sapien
gacaagcctagcactatctgtgagc

SEQ ID NO: 925368 - DNA, 25 bp, Homo sapien
tagattgcccaaaggcttaacgagg

SEQ ID NO: 925369 - DNA, 25 bp, Homo sapien
tccaggtactgctctcgaaagcaag

SEQ ID NO: 925370 - DNA, 25 bp, Homo sapien
tagccagcccgaagataaacaagta

SEQ ID NO: 925371 - DNA, 25 bp, Homo sapien
tggcccctggacctcggcccttctg

SEQ ID NO: 925372 - DNA, 25 bp, Homo sapien
tcaggagatgctgcatttcaagact

SEQ ID NO: 925373 - DNA, 25 bp, Homo sapien
gatgctgcatttcaagacttatgaa

SEQ ID NO: 925374 - DNA, 25 bp, Homo sapien
catttcaagacttatgaacttcttc

SEQ ID NO: 925375 - DNA, 25 bp, Homo sapien
cctggaagccatattggaataaaac

SEQ ID NO: 925376 - DNA, 25 bp, Homo sapien
tggaagccatattggaataaaactc

SEQ ID NO: 925377 - DNA, 25 bp, Homo sapien
gaataaaactctcacgtctggaacc

SEQ ID NO: 925378 - DNA, 25 bp, Homo sapien
taaaactctcacgtctggaaccagt

SEQ ID NO: 925379 - DNA, 25 bp, Homo sapien
gaaatcgtgagcctgttgacagcca

SEQ ID NO: 925380 - DNA, 25 bp, Homo sapien
cagaaatcgtgagcctgttgacagc

SEQ ID NO: 925381 - DNA, 25 bp, Homo sapien
taagcagaaatcgtgagcctgttga

SEQ ID NO: 925382 - DNA, 25 bp, Homo sapien
ctaagcagaaatcgtgagcctgttg

SEQ ID NO: 925383 - DNA, 25 bp, Homo sapien
gaggccacataagctggagaaacag

SEQ ID NO: 925384 - DNA, 25 bp, Homo sapien
ccatggctttggaggccacataagc

SEQ ID NO: 925385 - DNA, 25 bp, Homo sapien
ggagaaacagccacgcacagtgcca

SEQ ID NO: 925386 - DNA, 25 bp, Homo sapien
gccacgcacagtgccacggagaact

SEQ ID NO: 925387 - DNA, 25 bp, Homo sapien
ctgcaatggagaatggtacagtttg

SEQ ID NO: 925388 - DNA, 25 bp, Homo sapien
aaaatatggactttataaatctatg

SEQ ID NO: 925389 - DNA, 25 bp, Homo sapien
ggccatgcaaatttccactgtactg

SEQ ID NO: 925390 - DNA, 25 bp, Homo sapien
tttccactgtactgttgcaacttca

SEQ ID NO: 925391 - DNA, 25 bp, Homo sapien
gatgcaagggccatgcaaatttcca

SEQ ID NO: 925392 - DNA, 25 bp, Homo sapien
cattgtcacgggcttgtgaaggaca

SEQ ID NO: 925393 - DNA, 25 bp, Homo sapien
gaaacatagctgatccaagttgagc

SEQ ID NO: 925394 - DNA, 25 bp, Homo sapien
tatggctccaataaaggaagtgaca

SEQ ID NO: 925395 - DNA, 25 bp, Homo sapien
caagttcagcggaggatataaatcc

SEQ ID NO: 925396 - DNA, 25 bp, Homo sapien
actaattaaatcgagagaagtcacc

SEQ ID NO: 925397 - DNA, 25 bp, Homo sapien
tccgagggggattatcacagaaggt

SEQ ID NO: 925398 - DNA, 25 bp, Homo sapien
taaatcgagagaagtcaccagagag

SEQ ID NO: 925399 - DNA, 25 bp, Homo sapien
tcacagaaggtcagactaattaaat

SEQ ID NO: 925400 - DNA, 25 bp, Homo sapien
gctgtgcccgcagactcctaaaggg

SEQ ID NO: 925401 - DNA, 25 bp, Homo sapien
taaagggcatgggtctcatatcagc

SEQ ID NO: 925402 - DNA, 25 bp, Homo sapien
cgcagactcctaaagggcatgggtc

SEQ ID NO: 925403 - DNA, 25 bp, Homo sapien
gcatgggtctcatatcagcctcctt

SEQ ID NO: 925404 - DNA, 25 bp, Homo sapien
ctctgtctgtaccatccctctcccc

SEQ ID NO: 925405 - DNA, 25 bp, Homo sapien
cagcttctgatgtccccatgtccat

SEQ ID NO: 925406 - DNA, 25 bp, Homo sapien
cttctgatgtccccatgtccatatc

SEQ ID NO: 925407 - DNA, 25 bp, Homo sapien
tctgatgtccccatgtccatatcct

SEQ ID NO: 925408 - DNA, 25 bp, Homo sapien
cttggcgaagcaggtccacgcctgt

SEQ ID NO: 925409 - DNA, 25 bp, Homo sapien
actctcccgctttctgcttggcgaa

SEQ ID NO: 925410 - DNA, 25 bp, Homo sapien
gctctgcgtgacatcacgtcactct

SEQ ID NO: 925411 - DNA, 25 bp, Homo sapien
ccagcaggaccaagctctgcgtgac

SEQ ID NO: 925412 - DNA, 25 bp, Homo sapien
ggcagatgtgaacaaggacagtgct

SEQ ID NO: 925413 - DNA, 25 bp, Homo sapien
tctaagctgagctaaccacactgct

SEQ ID NO: 925414 - DNA, 25 bp, Homo sapien
gctggttcctcgtgcctatgagcag

SEQ ID NO: 925415 - DNA, 25 bp, Homo sapien
tatgagcagtgcctgaatgagccct

SEQ ID NO: 925416 - DNA, 25 bp, Homo sapien
ctgggcttcttagtgcttttgtgca

SEQ ID NO: 925417 - DNA, 25 bp, Homo sapien
tgggcttcttagtgcttttgtgcaa

SEQ ID NO: 925418 - DNA, 25 bp, Homo sapien
caacaaaccgctcaggggtccccat

SEQ ID NO: 925419 - DNA, 25 bp, Homo sapien
ggcagccccaacaaaccgctcaggg

SEQ ID NO: 925420 - DNA, 25 bp, Homo sapien
aggcggcagccccaacaaaccgctc

SEQ ID NO: 925421 - DNA, 25 bp, Homo sapien
gcggcagccccaacaaaccgctcag

SEQ ID NO: 925422 - DNA, 25 bp, Homo sapien
tgctcctcccagcagtgttcaatcc

SEQ ID NO: 925423 - DNA, 25 bp, Homo sapien
gcagccaaaaggctaaggacccggc

SEQ ID NO: 925424 - DNA, 25 bp, Homo sapien
gcatcggcttctcggagcctgttca

SEQ ID NO: 925425 - DNA, 25 bp, Homo sapien
tcccagcagtgttcaatccctgcag

SEQ ID NO: 925426 - DNA, 25 bp, Homo sapien
aacaaaactgctctgcaccggcaaa

SEQ ID NO: 925427 - DNA, 25 bp, Homo sapien
tcagtaggtctgaccaacaaaactg

SEQ ID NO: 925428 - DNA, 25 bp, Homo sapien
gaacgtggccttgctgtaacaagaa

SEQ ID NO: 925429 - DNA, 25 bp, Homo sapien
caaatcagtaggaggagacgtgttc

SEQ ID NO: 925430 - DNA, 25 bp, Homo sapien
cttaactccctgcttctggtgtcca

SEQ ID NO: 925431 - DNA, 25 bp, Homo sapien
ccctgcttctggtgtccagcccctc

SEQ ID NO: 925432 - DNA, 25 bp, Homo sapien
ctggtgtccagcccctctgtattcc

SEQ ID NO: 925433 - DNA, 25 bp, Homo sapien
ggtgtccagcccctctgtattcccc

SEQ ID NO: 925434 - DNA, 25 bp, Homo sapien
cgccaggagctcatagattaataca

SEQ ID NO: 925435 - DNA, 25 bp, Homo sapien
acaatctgtcctcgtccgccaggag

SEQ ID NO: 925436 - DNA, 25 bp, Homo sapien
tgtcatcagcgtcgttatcatcgtc

SEQ ID NO: 925437 - DNA, 25 bp, Homo sapien
ttttaacatgctaggaggacactcc

SEQ ID NO: 925438 - DNA, 25 bp, Homo sapien
accttgttcagtttcctcactttgc

SEQ ID NO: 925439 - DNA, 25 bp, Homo sapien
tcaccttgttcagtttcctcacttt

SEQ ID NO: 925440 - DNA, 25 bp, Homo sapien
tccctcaccttgttcagtttcctca

SEQ ID NO: 925441 - DNA, 25 bp, Homo sapien
cttgttcagtttcctcactttgcat

SEQ ID NO: 925442 - DNA, 25 bp, Homo sapien
gaaacctctttatcaccagggtaga

SEQ ID NO: 925443 - DNA, 25 bp, Homo sapien
tctttatcaccagggtagacccatg

SEQ ID NO: 925444 - DNA, 25 bp, Homo sapien
gagacttggaggacaactgaaacct

SEQ ID NO: 925445 - DNA, 25 bp, Homo sapien
aactgaaacctctttatcaccaggg

SEQ ID NO: 925446 - DNA, 25 bp, Homo sapien
cagtaactgcttgtgaacaatcaat

SEQ ID NO: 925447 - DNA, 25 bp, Homo sapien
gcgcctgccaccactcccatataat

SEQ ID NO: 925448 - DNA, 25 bp, Homo sapien
ggcgcctgccaccactcccatataa

SEQ ID NO: 925449 - DNA, 25 bp, Homo sapien
cgcctgccaccactcccatataatt

SEQ ID NO: 925450 - DNA, 25 bp, Homo sapien
caggcgcctgccaccactcccatat

SEQ ID NO: 925451 - DNA, 25 bp, Homo sapien
gacttgaagacagtcctctaactct

SEQ ID NO: 925452 - DNA, 25 bp, Homo sapien
gggaagttgactgaacatcctgtct

SEQ ID NO: 925453 - DNA, 25 bp, Homo sapien
gaaaagtgatattagcagtaagact

SEQ ID NO: 925454 - DNA, 25 bp, Homo sapien
aactcttgaagattttgttgggaag

SEQ ID NO: 925455 - DNA, 25 bp, Homo sapien
gtgaaccatgaacgctgagtctcag

SEQ ID NO: 925456 - DNA, 25 bp, Homo sapien
tctcagagcctaacgtttcttttcg

SEQ ID NO: 925457 - DNA, 25 bp, Homo sapien
cacagtgaaccatgaacgctgagtc

SEQ ID NO: 925458 - DNA, 25 bp, Homo sapien
cgctgagtctcagagcctaacgttt

SEQ ID NO: 925459 - DNA, 25 bp, Homo sapien
ttgtattccagccattgtcattcat

SEQ ID NO: 925460 - DNA, 25 bp, Homo sapien
cttgtattccagccattgtcattca

SEQ ID NO: 925461 - DNA, 25 bp, Homo sapien
atcaggtgatgggaccatcgcctga

SEQ ID NO: 925462 - DNA, 25 bp, Homo sapien
caggtgatgggaccatcgcctgaag

SEQ ID NO: 925463 - DNA, 25 bp, Homo sapien
gtgatgggaccatcgcctgaagcat

SEQ ID NO: 925464 - DNA, 25 bp, Homo sapien
ggtgatgggaccatcgcctgaagca

SEQ ID NO: 925465 - DNA, 25 bp, Homo sapien
gatgttgtgccgatcccagtaagga

SEQ ID NO: 925466 - DNA, 25 bp, Homo sapien
taggcttgacattatggatggagga

SEQ ID NO: 925467 - DNA, 25 bp, Homo sapien
agctctgggcaaaagggctgatgtt

SEQ ID NO: 925468 - DNA, 25 bp, Homo sapien
gaaatgtttccagcagcgatcatac

SEQ ID NO: 925469 - DNA, 25 bp, Homo sapien
tcagctctctctcaagggtaaccac

SEQ ID NO: 925470 - DNA, 25 bp, Homo sapien
aatggagtcccgcaattgtacatct

SEQ ID NO: 925471 - DNA, 25 bp, Homo sapien
gatgcatatatcaatagtacagctc

SEQ ID NO: 925472 - DNA, 25 bp, Homo sapien
gaagccgattggtgttctctcctag

SEQ ID NO: 925473 - DNA, 25 bp, Homo sapien
cctggaatcttatctaagacaactt

SEQ ID NO: 925474 - DNA, 25 bp, Homo sapien
ccccaaagttgttgaaaggtgactg

SEQ ID NO: 925475 - DNA, 25 bp, Homo sapien
gctactctagaaagtcactaatata

SEQ ID NO: 925476 - DNA, 25 bp, Homo sapien
tgactgtaattgcatcgttagttct

SEQ ID NO: 925477 - DNA, 25 bp, Homo sapien
tagaagttaacacaggtacgctccg

SEQ ID NO: 925478 - DNA, 25 bp, Homo sapien
tccgtactgaggcactgttttagct

SEQ ID NO: 925479 - DNA, 25 bp, Homo sapien
catctgttgagaaggccgtggatag

SEQ ID NO: 925480 - DNA, 25 bp, Homo sapien
gatttcagcagctgccggaaacagc

SEQ ID NO: 925481 - DNA, 25 bp, Homo sapien
tacaactttttatgagcatcagcca

SEQ ID NO: 925482 - DNA, 25 bp, Homo sapien
cagggactgcggtttgccggtctaa

SEQ ID NO: 925483 - DNA, 25 bp, Homo sapien
catcagccacattgcggcgggagga

SEQ ID NO: 925484 - DNA, 25 bp, Homo sapien
tttgttgatcgattctcggctgcag

SEQ ID NO: 925485 - DNA, 25 bp, Homo sapien
gcgcaggtagccaagggaaaacacc

SEQ ID NO: 925486 - DNA, 25 bp, Homo sapien
ttccaactctgccagttggtgctcc

SEQ ID NO: 925487 - DNA, 25 bp, Homo sapien
gggtcgctcgtccacgcactgtggt

SEQ ID NO: 925488 - DNA, 25 bp, Homo sapien
ccactgcgcccaggcggagcaaagg

SEQ ID NO: 925489 - DNA, 25 bp, Homo sapien
tcggcagaagaggacatcattgatg

SEQ ID NO: 925490 - DNA, 25 bp, Homo sapien
tcgtcgtcgggctccgacaaggaag

SEQ ID NO: 925491 - DNA, 25 bp, Homo sapien
gaagcggagagagtccacctcggca

SEQ ID NO: 925492 - DNA, 25 bp, Homo sapien
agaggacatcattgatggatttgcc

SEQ ID NO: 925493 - DNA, 25 bp, Homo sapien
gaccagctttgtcacttttgaagcg

SEQ ID NO: 925494 - DNA, 25 bp, Homo sapien
ggggttcgggcatcacaacaatgcg

SEQ ID NO: 925495 - DNA, 25 bp, Homo sapien
gttcgggcatcacaacaatgcgccc

SEQ ID NO: 925496 - DNA, 25 bp, Homo sapien
aaggggttcgggcatcacaacaatg

SEQ ID NO: 925497 - DNA, 25 bp, Homo sapien
gaaagaaaggggttcgggcatcaca

SEQ ID NO: 925498 - DNA, 25 bp, Homo sapien
cattttccttccagccaactggctc

SEQ ID NO: 925499 - DNA, 25 bp, Homo sapien
aatgcacattttccttccagccaac

SEQ ID NO: 925500 - DNA, 25 bp, Homo sapien
ttttcaaatgcacattttccttcca

SEQ ID NO: 925501 - DNA, 25 bp, Homo sapien
ctgcagcgttgattttcaaatgcac

SEQ ID NO: 925502 - DNA, 25 bp, Homo sapien
tcagtgtgatgatactagcccaatt

SEQ ID NO: 925503 - DNA, 25 bp, Homo sapien
ctgcccttcagccaatgttttatcc

SEQ ID NO: 925504 - DNA, 25 bp, Homo sapien
gcccttcagccaatgttttatcctc

SEQ ID NO: 925505 - DNA, 25 bp, Homo sapien
tgtgatgatactagcccaattctga

SEQ ID NO: 925506 - DNA, 25 bp, Homo sapien
ttatcaactatagtactcctcctct

SEQ ID NO: 925507 - DNA, 25 bp, Homo sapien
gcactaggggaatcttgctgtgaaa

SEQ ID NO: 925508 - DNA, 25 bp, Homo sapien
gtaaattggatcaaatgcactaggg

SEQ ID NO: 925509 - DNA, 25 bp, Homo sapien
gggaatcttgctgtgaaaaatatga

SEQ ID NO: 925510 - DNA, 25 bp, Homo sapien
ttttgaagtgttgactgtgacacta

SEQ ID NO: 925511 - DNA, 25 bp, Homo sapien
gagtcacacataccttcacaggaag

SEQ ID NO: 925512 - DNA, 25 bp, Homo sapien
gggatgcagggttacatttagaaaa

SEQ ID NO: 925513 - DNA, 25 bp, Homo sapien
tgcagggttacatttagaaaacctg

SEQ ID NO: 925514 - DNA, 25 bp, Homo sapien
aaacctggagtcacacataccttca

SEQ ID NO: 925515 - DNA, 25 bp, Homo sapien
ggggctggttctcttcagcacccaa

SEQ ID NO: 925516 - DNA, 25 bp, Homo sapien
ggctggttctcttcagcacccaagc

SEQ ID NO: 925517 - DNA, 25 bp, Homo sapien
gggctggttctcttcagcacccaag

SEQ ID NO: 925518 - DNA, 25 bp, Homo sapien
ttaggtagcactatgaatggaatga

SEQ ID NO: 925519 - DNA, 25 bp, Homo sapien
gaacttaacgcctgctctgctgtgt

SEQ ID NO: 925520 - DNA, 25 bp, Homo sapien
tgtgggcagaacctagaacttaacg

SEQ ID NO: 925521 - DNA, 25 bp, Homo sapien
taagggacctttgtaacatctactc

SEQ ID NO: 925522 - DNA, 25 bp, Homo sapien
gcatgtggtctaccctgtctttaaa

SEQ ID NO: 925523 - DNA, 25 bp, Homo sapien
ttggatatggctgaaatgaaagctg

SEQ ID NO: 925524 - DNA, 25 bp, Homo sapien
tgtggcagtgcttagagaattgtct

SEQ ID NO: 925525 - DNA, 25 bp, Homo sapien
ggcacctaaaggcttccgtcttgct

SEQ ID NO: 925526 - DNA, 25 bp, Homo sapien
ttgttagcttgaaacctgttgtgcc

SEQ ID NO: 925527 - DNA, 25 bp, Homo sapien
tcttacagtcttagagatctgggag

SEQ ID NO: 925528 - DNA, 25 bp, Homo sapien
ttggtcaaacgcctcacctcttggg

SEQ ID NO: 925529 - DNA, 25 bp, Homo sapien
tcttgggcctcagttaccttgtagt

SEQ ID NO: 925530 - DNA, 25 bp, Homo sapien
cccaggtggcggatggttacatccc

SEQ ID NO: 925531 - DNA, 25 bp, Homo sapien
cagaactgccagtgttaggtgctca

SEQ ID NO: 925532 - DNA, 25 bp, Homo sapien
cgttatggtggcctgagctaagaca

SEQ ID NO: 925533 - DNA, 25 bp, Homo sapien
cacaaaggttgccagatagcaggga

SEQ ID NO: 925534 - DNA, 25 bp, Homo sapien
gaagaagctccctgatattgagtga

SEQ ID NO: 925535 - DNA, 25 bp, Homo sapien
ttgggacttccagtgctgttgtgga

SEQ ID NO: 925536 - DNA, 25 bp, Homo sapien
cttgggacttccagtgctgttgtgg

SEQ ID NO: 925537 - DNA, 25 bp, Homo sapien
ctgttgtggagtggggacttccttc

SEQ ID NO: 925538 - DNA, 25 bp, Homo sapien
tgtggagtggggacttccttcttca

SEQ ID NO: 925539 - DNA, 25 bp, Homo sapien
agtcaaaggctcacactggtgttca

SEQ ID NO: 925540 - DNA, 25 bp, Homo sapien
ttagatttccatgagtcgtgcagcc

SEQ ID NO: 925541 - DNA, 25 bp, Homo sapien
tcatggagaagtcaaaggctcacac

SEQ ID NO: 925542 - DNA, 25 bp, Homo sapien
gatgaatgggaggatctaagtctgt

SEQ ID NO: 925543 - DNA, 25 bp, Homo sapien
gtggagaatggattttgccggaggt

SEQ ID NO: 925544 - DNA, 25 bp, Homo sapien
ttcctggcagatcagtggagaatgg

SEQ ID NO: 925545 - DNA, 25 bp, Homo sapien
cagtggagaatggattttgccggag

SEQ ID NO: 925546 - DNA, 25 bp, Homo sapien
taccacctgggttgtgcttgcttcc

SEQ ID NO: 925547 - DNA, 25 bp, Homo sapien
tgtgttagtgagaagttgatctgga

SEQ ID NO: 925548 - DNA, 25 bp, Homo sapien
gttagtgagaagttgatctggaaaa

SEQ ID NO: 925549 - DNA, 25 bp, Homo sapien
tgagaagttgatctggaaaagatgc

SEQ ID NO: 925550 - DNA, 25 bp, Homo sapien
tagtgagaagttgatctggaaaaga

SEQ ID NO: 925551 - DNA, 25 bp, Homo sapien
tctaagccgtgatatgtctgtattg

SEQ ID NO: 925552 - DNA, 25 bp, Homo sapien
ctaagccgtgatatgtctgtattgg

SEQ ID NO: 925553 - DNA, 25 bp, Homo sapien
ttctaagccgtgatatgtctgtatt

SEQ ID NO: 925554 - DNA, 25 bp, Homo sapien
taagccgtgatatgtctgtattgga

SEQ ID NO: 925555 - DNA, 25 bp, Homo sapien
gagaaggtagaacctgcttggatcc

SEQ ID NO: 925556 - DNA, 25 bp, Homo sapien
gactgacatcatttcgcagaccggg

SEQ ID NO: 925557 - DNA, 25 bp, Homo sapien
gcttggatcccagtctgtgcatacc

SEQ ID NO: 925558 - DNA, 25 bp, Homo sapien
catacctaaggagttgagttggcaa

SEQ ID NO: 925559 - DNA, 25 bp, Homo sapien
agacacggcgtgagccattcatgga

SEQ ID NO: 925560 - DNA, 25 bp, Homo sapien
catggagacagatttacgctctgtg

SEQ ID NO: 925561 - DNA, 25 bp, Homo sapien
tctcaacttttgttcttgtggaagg

SEQ ID NO: 925562 - DNA, 25 bp, Homo sapien
tagcacacaatagcacacaaaacga

SEQ ID NO: 925563 - DNA, 25 bp, Homo sapien
gagagattgtgactggccaaggcca

SEQ ID NO: 925564 - DNA, 25 bp, Homo sapien
aatgtttggcattcgtagtttctct

SEQ ID NO: 925565 - DNA, 25 bp, Homo sapien
gaattgaccagtgtgtcagtgtctt

SEQ ID NO: 925566 - DNA, 25 bp, Homo sapien
cctggagttacagaagaattgacca

SEQ ID NO: 925567 - DNA, 25 bp, Homo sapien
tcttggctgaactgatttatgagac

SEQ ID NO: 925568 - DNA, 25 bp, Homo sapien
ccaagttaagtgatcttggctgaac

SEQ ID NO: 925569 - DNA, 25 bp, Homo sapien
gaactgatttatgagacagcttcaa

SEQ ID NO: 925570 - DNA, 25 bp, Homo sapien
tttgtaacaagaccaagttaagtga

SEQ ID NO: 925571 - DNA, 25 bp, Homo sapien
gcatgccgcttttccttcacttctt

SEQ ID NO: 925572 - DNA, 25 bp, Homo sapien
agcatgccgcttttccttcacttct

SEQ ID NO: 925573 - DNA, 25 bp, Homo sapien
ggaactttctgtagtggatcagcat

SEQ ID NO: 925574 - DNA, 25 bp, Homo sapien
tttctgtagtggatcagcatgccgc

SEQ ID NO: 925575 - DNA, 25 bp, Homo sapien
gatgtcataggctgcctctttattc

SEQ ID NO: 925576 - DNA, 25 bp, Homo sapien
ctgagtggcagcctgtctaccattt

SEQ ID NO: 925577 - DNA, 25 bp, Homo sapien
aatgttattatctgtgagcctgggg

SEQ ID NO: 925578 - DNA, 25 bp, Homo sapien
gcagcctgtctaccatttaatgtta

SEQ ID NO: 925579 - DNA, 25 bp, Homo sapien
cagaggaagctgtttgctctcatct

SEQ ID NO: 925580 - DNA, 25 bp, Homo sapien
gaagtacgaatattaatacagtcca

SEQ ID NO: 925581 - DNA, 25 bp, Homo sapien
tggtcagggtggaagtacgaatatt

SEQ ID NO: 925582 - DNA, 25 bp, Homo sapien
gtaggctaggtatgaaaatagcagc

SEQ ID NO: 925583 - DNA, 25 bp, Homo sapien
cagagacttcatgttgtccatagga

SEQ ID NO: 925584 - DNA, 25 bp, Homo sapien
tcttgggaggtcacaacgtcctggc

SEQ ID NO: 925585 - DNA, 25 bp, Homo sapien
tagaatgtgaaaatagtaacctggc

SEQ ID NO: 925586 - DNA, 25 bp, Homo sapien
tgtttacagtgctatcacagtggtc

SEQ ID NO: 925587 - DNA, 25 bp, Homo sapien
ttcatggatgatcgaaagaaaaacc

SEQ ID NO: 925588 - DNA, 25 bp, Homo sapien
catggatgatcgaaagaaaaacctt

SEQ ID NO: 925589 - DNA, 25 bp, Homo sapien
tagaaagaagacgacactggtaact

SEQ ID NO: 925590 - DNA, 25 bp, Homo sapien
aatgactaatagaaagaagacgaca

SEQ ID NO: 925591 - DNA, 25 bp, Homo sapien
taacttctcaccctgtgttgaaaaa

SEQ ID NO: 925592 - DNA, 25 bp, Homo sapien
aacttctcaccctgtgttgaaaaag

SEQ ID NO: 925593 - DNA, 25 bp, Homo sapien
gtaacttctcaccctgtgttgaaaa

SEQ ID NO: 925594 - DNA, 25 bp, Homo sapien
acttctcaccctgtgttgaaaaagg

SEQ ID NO: 925595 - DNA, 25 bp, Homo sapien
cgttttaacccataagagtgctgtc

SEQ ID NO: 925596 - DNA, 25 bp, Homo sapien
tcgcatagtttggatacgttttaac

SEQ ID NO: 925597 - DNA, 25 bp, Homo sapien
gatacgttttaacccataagagtgc

SEQ ID NO: 925598 - DNA, 25 bp, Homo sapien
ctggccattcgcatagtttggatac

SEQ ID NO: 925599 - DNA, 25 bp, Homo sapien
ccacccgtctgagtgcacacttgtg

SEQ ID NO: 925600 - DNA, 25 bp, Homo sapien
aaccacccgtctgagtgcacacttg

SEQ ID NO: 925601 - DNA, 25 bp, Homo sapien
ttctgaaaccacccgtctgagtgca

SEQ ID NO: 925602 - DNA, 25 bp, Homo sapien
tgaaaccacccgtctgagtgcacac

SEQ ID NO: 925603 - DNA, 25 bp, Homo sapien
gaggaagatctcattgtcagggctg

SEQ ID NO: 925604 - DNA, 25 bp, Homo sapien
caatggcagatacagttctcagtgg

SEQ ID NO: 925605 - DNA, 25 bp, Homo sapien
tgtgccttaacaccagaacggtatg

SEQ ID NO: 925606 - DNA, 25 bp, Homo sapien
tctcagtggtgtgctttgcgtgtcg

SEQ ID NO: 925607 - DNA, 25 bp, Homo sapien
catttggctataaactattaggata

SEQ ID NO: 925608 - DNA, 25 bp, Homo sapien
ggctaattccttcatttggctataa

SEQ ID NO: 925609 - DNA, 25 bp, Homo sapien
ggctataaactattaggatatgagc

SEQ ID NO: 925610 - DNA, 25 bp, Homo sapien
ataaactattaggatatgagcagac

SEQ ID NO: 925611 - DNA, 25 bp, Homo sapien
gagacatagtacttcccattcagca

SEQ ID NO: 925612 - DNA, 25 bp, Homo sapien
gaccatgttggtggctcttgaaaca

SEQ ID NO: 925613 - DNA, 25 bp, Homo sapien
tatttcataggccactggagtgctg

SEQ ID NO: 925614 - DNA, 25 bp, Homo sapien
tgagtggttaaagagctgactgacc

SEQ ID NO: 925615 - DNA, 25 bp, Homo sapien
tagagatcagaggttatggagcagc

SEQ ID NO: 925616 - DNA, 25 bp, Homo sapien
ggctctggctgacaaagcattcctg

SEQ ID NO: 925617 - DNA, 25 bp, Homo sapien
tacagagggcagttagagttcatcc

SEQ ID NO: 925618 - DNA, 25 bp, Homo sapien
ggcatttgccactagctctctgggt

SEQ ID NO: 925619 - DNA, 25 bp, Homo sapien
gaatgtgtcttgtgcgagtggtggg

SEQ ID NO: 925620 - DNA, 25 bp, Homo sapien
gtcttgtgcgagtggtgggtggttt

SEQ ID NO: 925621 - DNA, 25 bp, Homo sapien
tgtgtcttgtgcgagtggtgggtgg

SEQ ID NO: 925622 - DNA, 25 bp, Homo sapien
tatgaatgtgtcttgtgcgagtggt

SEQ ID NO: 925623 - DNA, 25 bp, Homo sapien
gctctctggatcagcacttttccag

SEQ ID NO: 925624 - DNA, 25 bp, Homo sapien
tagcatcaggattcaaggttacaga

SEQ ID NO: 925625 - DNA, 25 bp, Homo sapien
tatccacagtactgctgttgtcttg

SEQ ID NO: 925626 - DNA, 25 bp, Homo sapien
cacttttaacggcacagaaagcaaa

SEQ ID NO: 925627 - DNA, 25 bp, Homo sapien
ctttgtgatatttgtcatgagtatt

SEQ ID NO: 925628 - DNA, 25 bp, Homo sapien
cctggcaatatgtaaccctttgtaa

SEQ ID NO: 925629 - DNA, 25 bp, Homo sapien
gtaagttgtctggtttggtctcgaa

SEQ ID NO: 925630 - DNA, 25 bp, Homo sapien
cttcctaagtaagttgtctggtttg

SEQ ID NO: 925631 - DNA, 25 bp, Homo sapien
tcactggaacagagtcaggagacat

SEQ ID NO: 925632 - DNA, 25 bp, Homo sapien
ttctaaaactgcgtgaacacaaagg

SEQ ID NO: 925633 - DNA, 25 bp, Homo sapien
acagcttgtgtatactcagttggca

SEQ ID NO: 925634 - DNA, 25 bp, Homo sapien
tggtgcctgacccatagcaaatgct

SEQ ID NO: 925635 - DNA, 25 bp, Homo sapien
tttgcattaatctccaaatgtaggt

SEQ ID NO: 925636 - DNA, 25 bp, Homo sapien
taatctccaaatgtaggttaatacc

SEQ ID NO: 925637 - DNA, 25 bp, Homo sapien
gcattaatctccaaatgtaggttaa

SEQ ID NO: 925638 - DNA, 25 bp, Homo sapien
tctgaatccgtctttgtcttaataa

SEQ ID NO: 925639 - DNA, 25 bp, Homo sapien
ttttctcagtggagtttggatcact

SEQ ID NO: 925640 - DNA, 25 bp, Homo sapien
tattggattcatactatggctgcag

SEQ ID NO: 925641 - DNA, 25 bp, Homo sapien
ggctgcagaagtctgggctttacac

SEQ ID NO: 925642 - DNA, 25 bp, Homo sapien
cattaggttgctaccaagctggata

SEQ ID NO: 925643 - DNA, 25 bp, Homo sapien
gcattgagagaacatcctaactggg

SEQ ID NO: 925644 - DNA, 25 bp, Homo sapien
ggtattgtcaatagctaaactgctc

SEQ ID NO: 925645 - DNA, 25 bp, Homo sapien
cctaactgggtatattctgccaaat

SEQ ID NO: 925646 - DNA, 25 bp, Homo sapien
taaactgctcattgacagtgcattg

SEQ ID NO: 925647 - DNA, 25 bp, Homo sapien
tgcattctcctaatcagatatcctg

SEQ ID NO: 925648 - DNA, 25 bp, Homo sapien
gatgagggctgctattaatggcttc

SEQ ID NO: 925649 - DNA, 25 bp, Homo sapien
tcttttggtaatcagtgtggaggaa

SEQ ID NO: 925650 - DNA, 25 bp, Homo sapien
tgcagttattagtgtgaatgcaaga

SEQ ID NO: 925651 - DNA, 25 bp, Homo sapien
gatgtgggtacacacatctgggatt

SEQ ID NO: 925652 - DNA, 25 bp, Homo sapien
gactggcatgttgaatcttgggtat

SEQ ID NO: 925653 - DNA, 25 bp, Homo sapien
cagccaggctcctgatgtgggtaca

SEQ ID NO: 925654 - DNA, 25 bp, Homo sapien
ggatttaagggcatgactggcatgt

SEQ ID NO: 925655 - DNA, 25 bp, Homo sapien
tggagcagatgccagtatgttccat

SEQ ID NO: 925656 - DNA, 25 bp, Homo sapien
tgtcacctggtaatatttacagatg

SEQ ID NO: 925657 - DNA, 25 bp, Homo sapien
gtcacctggtaatatttacagatgg

SEQ ID NO: 925658 - DNA, 25 bp, Homo sapien
ctttgtcacctggtaatatttacag

SEQ ID NO: 925659 - DNA, 25 bp, Homo sapien
ctgcaggtctgttgagttttatgca

SEQ ID NO: 925660 - DNA, 25 bp, Homo sapien
tgacgagactcaaatttaagcactg

SEQ ID NO: 925661 - DNA, 25 bp, Homo sapien
ttaagcactgctggtgtagtagtac

SEQ ID NO: 925662 - DNA, 25 bp, Homo sapien
ttctcgttctgttgatgacgagact

SEQ ID NO: 925663 - DNA, 25 bp, Homo sapien
tacatgaccatggttggtttctgtc

SEQ ID NO: 925664 - DNA, 25 bp, Homo sapien
cctttgcctcaactgtgacatcccc

SEQ ID NO: 925665 - DNA, 25 bp, Homo sapien
tcttgctgcctactgtgtggttttg

SEQ ID NO: 925666 - DNA, 25 bp, Homo sapien
tgtgacatcccctcgaagtgacctt

SEQ ID NO: 925667 - DNA, 25 bp, Homo sapien
tcgaagtgacctttatgaaggcaga

SEQ ID NO: 925668 - DNA, 25 bp, Homo sapien
tttgtagcgttggtgcgtggaacat

SEQ ID NO: 925669 - DNA, 25 bp, Homo sapien
tgtttgtagcgttggtgcgtggaac

SEQ ID NO: 925670 - DNA, 25 bp, Homo sapien
gtttgtagcgttggtgcgtggaaca

SEQ ID NO: 925671 - DNA, 25 bp, Homo sapien
ctgtttgtagcgttggtgcgtggaa

SEQ ID NO: 925672 - DNA, 25 bp, Homo sapien
ctgttagtgtgtttgctgtataaat

SEQ ID NO: 925673 - DNA, 25 bp, Homo sapien
ataaatgtaacatccactaactttg

SEQ ID NO: 925674 - DNA, 25 bp, Homo sapien
ttagtgtgtttgctgtataaatgta

SEQ ID NO: 925675 - DNA, 25 bp, Homo sapien
gtataaatgtaacatccactaactt

SEQ ID NO: 925676 - DNA, 25 bp, Homo sapien
gacaccgacgtctgttgtttttcat

SEQ ID NO: 925677 - DNA, 25 bp, Homo sapien
ggacaccgacgtctgttgtttttca

SEQ ID NO: 925678 - DNA, 25 bp, Homo sapien
tgtgattggaattgaaacatacagc

SEQ ID NO: 925679 - DNA, 25 bp, Homo sapien
cttgttattaaggtagtgactggct

SEQ ID NO: 925680 - DNA, 25 bp, Homo sapien
catcatcaagctcggggatacaagc

SEQ ID NO: 925681 - DNA, 25 bp, Homo sapien
caccttcatcatcaagctcggggat

SEQ ID NO: 925682 - DNA, 25 bp, Homo sapien
aatatagagcccattccaccataca

SEQ ID NO: 925683 - DNA, 25 bp, Homo sapien
gtgtgaaatcataatatagagccca

SEQ ID NO: 925684 - DNA, 25 bp, Homo sapien
gagcaattttccctatagctttagc

SEQ ID NO: 925685 - DNA, 25 bp, Homo sapien
ttccattgacctactttcaagagca

SEQ ID NO: 925686 - DNA, 25 bp, Homo sapien
cattgacctactttcaagagcaatt

SEQ ID NO: 925687 - DNA, 25 bp, Homo sapien
ttttccctatagctttagcaggtaa

SEQ ID NO: 925688 - DNA, 25 bp, Homo sapien
tagttccgtgtggcaaagggtgaag

SEQ ID NO: 925689 - DNA, 25 bp, Homo sapien
ctagttccgtgtggcaaagggtgaa

SEQ ID NO: 925690 - DNA, 25 bp, Homo sapien
gggtgaaggtgtcttagaggactcc

SEQ ID NO: 925691 - DNA, 25 bp, Homo sapien
agaggactccttggtcaagaagagt

SEQ ID NO: 925692 - DNA, 25 bp, Homo sapien
gccgctgctgtttgttgtgctcaca

SEQ ID NO: 925693 - DNA, 25 bp, Homo sapien
tccatggctattagggaaggacttc

SEQ ID NO: 925694 - DNA, 25 bp, Homo sapien
gacactggccatttgagtagatgct

SEQ ID NO: 925695 - DNA, 25 bp, Homo sapien
gaaatagcagaatgccttgccctcc

SEQ ID NO: 925696 - DNA, 25 bp, Homo sapien
gttttgcccgtctgccatttgcctt

SEQ ID NO: 925697 - DNA, 25 bp, Homo sapien
gtttgttttgcccgtctgccatttg

SEQ ID NO: 925698 - DNA, 25 bp, Homo sapien
ttgttttgcccgtctgccatttgcc

SEQ ID NO: 925699 - DNA, 25 bp, Homo sapien
tggtttgttttgcccgtctgccatt

SEQ ID NO: 925700 - DNA, 25 bp, Homo sapien
cagtttaacctgaagggcacttggt

SEQ ID NO: 925701 - DNA, 25 bp, Homo sapien
tcctctggtattgtttgaatacagt

SEQ ID NO: 925702 - DNA, 25 bp, Homo sapien
tgtttgaatacagtttaacctgaag

SEQ ID NO: 925703 - DNA, 25 bp, Homo sapien
acctgaagggcacttggtttttgtg

SEQ ID NO: 925704 - DNA, 25 bp, Homo sapien
agcagcagcttaggatcaacattag

SEQ ID NO: 925705 - DNA, 25 bp, Homo sapien
taggatcaacattagcagacctcat

SEQ ID NO: 925706 - DNA, 25 bp, Homo sapien
ctttcttggcctataggagtgttgt

SEQ ID NO: 925707 - DNA, 25 bp, Homo sapien
gcctataggagtgttgtcagaacca

SEQ ID NO: 925708 - DNA, 25 bp, Homo sapien
tagcctctagcctctggatgttttt

SEQ ID NO: 925709 - DNA, 25 bp, Homo sapien
tcttcagcaatccatagacagtggg

SEQ ID NO: 925710 - DNA, 25 bp, Homo sapien
tctgtggtgggctgacgatagcctc

SEQ ID NO: 925711 - DNA, 25 bp, Homo sapien
aacattcaaggtttctgtggtgggc

SEQ ID NO: 925712 - DNA, 25 bp, Homo sapien
ctataatgatgttggattgctttgc

SEQ ID NO: 925713 - DNA, 25 bp, Homo sapien
gtttgcttctctataatgatgttgg

SEQ ID NO: 925714 - DNA, 25 bp, Homo sapien
gcttctctataatgatgttggattg

SEQ ID NO: 925715 - DNA, 25 bp, Homo sapien
taatgatgttggattgctttgctgg

SEQ ID NO: 925716 - DNA, 25 bp, Homo sapien
tgggtatctagaagtaaatgaatgc

SEQ ID NO: 925717 - DNA, 25 bp, Homo sapien
ttttttcaggtttgcgcttaggcac

SEQ ID NO: 925718 - DNA, 25 bp, Homo sapien
gaatgctatcatggcactatactag

SEQ ID NO: 925719 - DNA, 25 bp, Homo sapien
tgtggatgaggtcacttggaagtaa

SEQ ID NO: 925720 - DNA, 25 bp, Homo sapien
tcagtgcatatagcccaagcaggag

SEQ ID NO: 925721 - DNA, 25 bp, Homo sapien
tctgaccagctgctctcagtgcata

SEQ ID NO: 925722 - DNA, 25 bp, Homo sapien
gcagatgagccccactctaatgtag

SEQ ID NO: 925723 - DNA, 25 bp, Homo sapien
taatgtagcctgtggtatctgacca

SEQ ID NO: 925724 - DNA, 25 bp, Homo sapien
ttcttctgtatagactttgctgtac

SEQ ID NO: 925725 - DNA, 25 bp, Homo sapien
cctttcttctgtatagactttgctg

SEQ ID NO: 925726 - DNA, 25 bp, Homo sapien
ttcctttcttctgtatagactttgc

SEQ ID NO: 925727 - DNA, 25 bp, Homo sapien
ctttcttctgtatagactttgctgt

SEQ ID NO: 925728 - DNA, 25 bp, Homo sapien
ccaggtccatgggacttgaaaatcc

SEQ ID NO: 925729 - DNA, 25 bp, Homo sapien
ttccatcaagcttttccgcaaacca

SEQ ID NO: 925730 - DNA, 25 bp, Homo sapien
tgatacctttcccaggtccatggga

SEQ ID NO: 925731 - DNA, 25 bp, Homo sapien
tgcaataagtgatacctttcccagg

SEQ ID NO: 925732 - DNA, 25 bp, Homo sapien
gctccatcctgtctagtctcagaag

SEQ ID NO: 925733 - DNA, 25 bp, Homo sapien
tctccaaaccgtaggtaagctcttc

SEQ ID NO: 925734 - DNA, 25 bp, Homo sapien
gaaggttggcttcacacaggttgct

SEQ ID NO: 925735 - DNA, 25 bp, Homo sapien
taggacggagctgaaacacatgcgg

SEQ ID NO: 925736 - DNA, 25 bp, Homo sapien
gaagtaggccttgagttggacctga

SEQ ID NO: 925737 - DNA, 25 bp, Homo sapien
tgcagtgttctgtctgagcaccaca

SEQ ID NO: 925738 - DNA, 25 bp, Homo sapien
tactttgtgtataacctctttgagg

SEQ ID NO: 925739 - DNA, 25 bp, Homo sapien
gagagtatgtctggctaagggaacc

SEQ ID NO: 925740 - DNA, 25 bp, Homo sapien
tagccgagtggatagccataaacat

SEQ ID NO: 925741 - DNA, 25 bp, Homo sapien
gctggcgataaagaagagagagtaa

SEQ ID NO: 925742 - DNA, 25 bp, Homo sapien
ctcttttatagtcctctttgctttg

SEQ ID NO: 925743 - DNA, 25 bp, Homo sapien
gaactctccgaagcattgatttgtt

SEQ ID NO: 925744 - DNA, 25 bp, Homo sapien
gaagacgcccagcttcggaatgctt

SEQ ID NO: 925745 - DNA, 25 bp, Homo sapien
cagtggtccgtaagggagcaggtcc

SEQ ID NO: 925746 - DNA, 25 bp, Homo sapien
cttggttaagatcagcagaggcttg

SEQ ID NO: 925747 - DNA, 25 bp, Homo sapien
tacacttttattgttccaggaggag

SEQ ID NO: 925748 - DNA, 25 bp, Homo sapien
tgtctctcctatgtccactgtaagc

SEQ ID NO: 925749 - DNA, 25 bp, Homo sapien
cctggaaggacccaggttgtctctc

SEQ ID NO: 925750 - DNA, 25 bp, Homo sapien
ggaagcaccagtgcttcttggactc

SEQ ID NO: 925751 - DNA, 25 bp, Homo sapien
ctgccagtcttggtggggaagcacc

SEQ ID NO: 925752 - DNA, 25 bp, Homo sapien
cccagatgtctcagttttaaagagc

SEQ ID NO: 925753 - DNA, 25 bp, Homo sapien
ttaaagagcacctacactaagtggc

SEQ ID NO: 925754 - DNA, 25 bp, Homo sapien
tcccttaggatattgagagagtgag

SEQ ID NO: 925755 - DNA, 25 bp, Homo sapien
gagggcttccaattgcaccctaatt

SEQ ID NO: 925756 - DNA, 25 bp, Homo sapien
gaaaaacctacaagcatactcttag

SEQ ID NO: 925757 - DNA, 25 bp, Homo sapien
tttataccttctatccctaacaaca

SEQ ID NO: 925758 - DNA, 25 bp, Homo sapien
ctcagaaaaacctacaagcatactc

SEQ ID NO: 925759 - DNA, 25 bp, Homo sapien
cagaaaaacctacaagcatactctt

SEQ ID NO: 925760 - DNA, 25 bp, Homo sapien
cttgttctcgtcttataaattatgt

SEQ ID NO: 925761 - DNA, 25 bp, Homo sapien
ttgttctcgtcttataaattatgtt

SEQ ID NO: 925762 - DNA, 25 bp, Homo sapien
tcttgttctcgtcttataaattatg

SEQ ID NO: 925763 - DNA, 25 bp, Homo sapien
tgttctcgtcttataaattatgttc

SEQ ID NO: 925764 - DNA, 25 bp, Homo sapien
aggcagtgctgatgtagtcagcaca

SEQ ID NO: 925765 - DNA, 25 bp, Homo sapien
tgggcagccacttgaggtaacaata

SEQ ID NO: 925766 - DNA, 25 bp, Homo sapien
gctgatgtagtcagcacaactcctg

SEQ ID NO: 925767 - DNA, 25 bp, Homo sapien
cagccacttgaggtaacaataatga

SEQ ID NO: 925768 - DNA, 25 bp, Homo sapien
gttggcatactaagtggaggctcac

SEQ ID NO: 925769 - DNA, 25 bp, Homo sapien
gcattgtttactggttggcatacta

SEQ ID NO: 925770 - DNA, 25 bp, Homo sapien
ttcaaataataaaaggggccacagc

SEQ ID NO: 925771 - DNA, 25 bp, Homo sapien
gcagccatgatgcttgcagaacagt

SEQ ID NO: 925772 - DNA, 25 bp, Homo sapien
tttataatggtgcttacgttttcca

SEQ ID NO: 925773 - DNA, 25 bp, Homo sapien
ttataatggtgcttacgttttccat

SEQ ID NO: 925774 - DNA, 25 bp, Homo sapien
ttaggagtaattgtaccagtgttcc

SEQ ID NO: 925775 - DNA, 25 bp, Homo sapien
ccctctgctagcttggaagatgaag

SEQ ID NO: 925776 - DNA, 25 bp, Homo sapien
ttgggaattaggcagtttaggagta

SEQ ID NO: 925777 - DNA, 25 bp, Homo sapien
gtaccagtgttcccctctgctagct

SEQ ID NO: 925778 - DNA, 25 bp, Homo sapien
taccatcttttggtgtaagcagcag

SEQ ID NO: 925779 - DNA, 25 bp, Homo sapien
cgtggagaagatatagttggtacca

SEQ ID NO: 925780 - DNA, 25 bp, Homo sapien
tcatccctgaggcacgtagtgaaga

SEQ ID NO: 925781 - DNA, 25 bp, Homo sapien
gcaggacatcaccagagtcatggca

SEQ ID NO: 925782 - DNA, 25 bp, Homo sapien
cagaattgtggtgggcatgtgattt

SEQ ID NO: 925783 - DNA, 25 bp, Homo sapien
tagcattcactaccacagtgaacac

SEQ ID NO: 925784 - DNA, 25 bp, Homo sapien
ggtgataagctcttcattagcattc

SEQ ID NO: 925785 - DNA, 25 bp, Homo sapien
catacagaattgtggtgggcatgtg

SEQ ID NO: 925786 - DNA, 25 bp, Homo sapien
aagccattcatcttagggcagaatt

SEQ ID NO: 925787 - DNA, 25 bp, Homo sapien
agccattcatcttagggcagaattt

SEQ ID NO: 925788 - DNA, 25 bp, Homo sapien
gccattcatcttagggcagaatttc

SEQ ID NO: 925789 - DNA, 25 bp, Homo sapien
cttgctggtaaggatggcttatgtg

SEQ ID NO: 925790 - DNA, 25 bp, Homo sapien
tatggtgggagatttgtagttgaca

SEQ ID NO: 925791 - DNA, 25 bp, Homo sapien
tgtaaactgtagacaccaaaagtgt

SEQ ID NO: 925792 - DNA, 25 bp, Homo sapien
aaatctttatacaagttgatctggg

SEQ ID NO: 925793 - DNA, 25 bp, Homo sapien
tcacagcaatcttgtatccacacaa

SEQ ID NO: 925794 - DNA, 25 bp, Homo sapien
acagcaatcttgtatccacacaagt

SEQ ID NO: 925795 - DNA, 25 bp, Homo sapien
cacagcaatcttgtatccacacaag

SEQ ID NO: 925796 - DNA, 25 bp, Homo sapien
tgctgacatcttgtagtgttctctg

SEQ ID NO: 925797 - DNA, 25 bp, Homo sapien
tctgtgagtttatcgtaggacttca

SEQ ID NO: 925798 - DNA, 25 bp, Homo sapien
ctgtgtgaggttcttatgtaaaatc

SEQ ID NO: 925799 - DNA, 25 bp, Homo sapien
ctctgtgagtttatcgtaggacttc

SEQ ID NO: 925800 - DNA, 25 bp, Homo sapien
cccttagcaagacaaatgcagccac

SEQ ID NO: 925801 - DNA, 25 bp, Homo sapien
tgacagatgctgtcgttgccacccc

SEQ ID NO: 925802 - DNA, 25 bp, Homo sapien
tgttcaatctcgtcttgacagatgc

SEQ ID NO: 925803 - DNA, 25 bp, Homo sapien
ggccccaaactgatgtgcgtgtgta

SEQ ID NO: 925804 - DNA, 25 bp, Homo sapien
cagataagagtgttaagagattaag

SEQ ID NO: 925805 - DNA, 25 bp, Homo sapien
tgaagccttttcctgccgtcggaaa

SEQ ID NO: 925806 - DNA, 25 bp, Homo sapien
ctctaaatctgttttggcaaggttg

SEQ ID NO: 925807 - DNA, 25 bp, Homo sapien
gaatggtgtggcttagctgcctcta

SEQ ID NO: 925808 - DNA, 25 bp, Homo sapien
tctctgggggtatgtgagtatggac

SEQ ID NO: 925809 - DNA, 25 bp, Homo sapien
tatgtgagtatggacctcttccaca

SEQ ID NO: 925810 - DNA, 25 bp, Homo sapien
ggtatgtgagtatggacctcttcca

SEQ ID NO: 925811 - DNA, 25 bp, Homo sapien
ggggtatgtgagtatggacctcttc

SEQ ID NO: 925812 - DNA, 25 bp, Homo sapien
tgtgttgtggtgaagcccctacctc

SEQ ID NO: 925813 - DNA, 25 bp, Homo sapien
ccgtgatgccagctgttagtttgag

SEQ ID NO: 925814 - DNA, 25 bp, Homo sapien
tctctgaagagaagaccgtgatgcc

SEQ ID NO: 925815 - DNA, 25 bp, Homo sapien
gaggcagagtgcactagagaaatct

SEQ ID NO: 925816 - DNA, 25 bp, Homo sapien
taagctgcattgtggtagcaagtca

SEQ ID NO: 925817 - DNA, 25 bp, Homo sapien
tccatccatggagtaagctgcattg

SEQ ID NO: 925818 - DNA, 25 bp, Homo sapien
tgcaagagttttgctaggatgcagg

SEQ ID NO: 925819 - DNA, 25 bp, Homo sapien
aggtctgagggagactgtccagcat

SEQ ID NO: 925820 - DNA, 25 bp, Homo sapien
tggtgggcactcgtttgatactaga

SEQ ID NO: 925821 - DNA, 25 bp, Homo sapien
ccagcagtgcttgttgtcgttacag

SEQ ID NO: 925822 - DNA, 25 bp, Homo sapien
gtcgttacagatgctccgtacaaaa

SEQ ID NO: 925823 - DNA, 25 bp, Homo sapien
cagaagtgtttgagtgttaccagca

SEQ ID NO: 925824 - DNA, 25 bp, Homo sapien
aataagtactcttgatggcagctgc

SEQ ID NO: 925825 - DNA, 25 bp, Homo sapien
ccttctattctcagcaacaataagt

SEQ ID NO: 925826 - DNA, 25 bp, Homo sapien
atttagcctagattctggcagaatg

SEQ ID NO: 925827 - DNA, 25 bp, Homo sapien
tagcctagattctggcagaatggaa

SEQ ID NO: 925828 - DNA, 25 bp, Homo sapien
tttatagaggcggttctcatcctca

SEQ ID NO: 925829 - DNA, 25 bp, Homo sapien
caactcttcttccttacaagatggc

SEQ ID NO: 925830 - DNA, 25 bp, Homo sapien
ttcttccttacaagatggcttggta

SEQ ID NO: 925831 - DNA, 25 bp, Homo sapien
tatagaggcggttctcatcctcaac

SEQ ID NO: 925832 - DNA, 25 bp, Homo sapien
ttctatccttttggtgatagttcca

SEQ ID NO: 925833 - DNA, 25 bp, Homo sapien
tttctatccttttggtgatagttcc

SEQ ID NO: 925834 - DNA, 25 bp, Homo sapien
tccagtgaaggatttgtaggtccac

SEQ ID NO: 925835 - DNA, 25 bp, Homo sapien
gtgaaggatttgtaggtccacatct

SEQ ID NO: 925836 - DNA, 25 bp, Homo sapien
aggaaagcctgatgtgcctccagtg

SEQ ID NO: 925837 - DNA, 25 bp, Homo sapien
gaaagcctgatgtgcctccagtgaa

SEQ ID NO: 925838 - DNA, 25 bp, Homo sapien
tgtttgacatctttttggttccaca

SEQ ID NO: 925839 - DNA, 25 bp, Homo sapien
tgacatctttttggttccacatcca

SEQ ID NO: 925840 - DNA, 25 bp, Homo sapien
gctgtttgacatctttttggttcca

SEQ ID NO: 925841 - DNA, 25 bp, Homo sapien
gggctgtttgacatctttttggttc

SEQ ID NO: 925842 - DNA, 25 bp, Homo sapien
gtctgccactgagggtagtctgctt

SEQ ID NO: 925843 - DNA, 25 bp, Homo sapien
gaattgccgctgctggccttctgga

SEQ ID NO: 925844 - DNA, 25 bp, Homo sapien
gcatggaagccaggagcattttagg

SEQ ID NO: 925845 - DNA, 25 bp, Homo sapien
ccatagaattccaggtggtgagtca

SEQ ID NO: 925846 - DNA, 25 bp, Homo sapien
tttctactcagattagcagatggca

SEQ ID NO: 925847 - DNA, 25 bp, Homo sapien
ggcaccagttttgggccatggtctc

SEQ ID NO: 925848 - DNA, 25 bp, Homo sapien
tggtaatgactgactgtatgcccat

SEQ ID NO: 925849 - DNA, 25 bp, Homo sapien
tagcagatggcaccagttttgggcc

SEQ ID NO: 925850 - DNA, 25 bp, Homo sapien
cgtagggccttgcttataatgctga

SEQ ID NO: 925851 - DNA, 25 bp, Homo sapien
gaacagcttccatgggtgacctggt

SEQ ID NO: 925852 - DNA, 25 bp, Homo sapien
ctaaatggaattctctaggaagcac

SEQ ID NO: 925853 - DNA, 25 bp, Homo sapien
tcttatggaacgttgattgaacagc

SEQ ID NO: 925854 - DNA, 25 bp, Homo sapien
tgggagttgctcttgatattcttgt

SEQ ID NO: 925855 - DNA, 25 bp, Homo sapien
gatttctctgtacattgaatccagg

SEQ ID NO: 925856 - DNA, 25 bp, Homo sapien
gatattcttgttcgtatccctaggt

SEQ ID NO: 925857 - DNA, 25 bp, Homo sapien
cctaggttttcgcaaagcagaatta

SEQ ID NO: 925858 - DNA, 25 bp, Homo sapien
tgtgttggggctagacgaagtttcc

SEQ ID NO: 925859 - DNA, 25 bp, Homo sapien
catgcgacctttcagcccttgctgt

SEQ ID NO: 925860 - DNA, 25 bp, Homo sapien
gcctcaatcttttcactgtcatgtg

SEQ ID NO: 925861 - DNA, 25 bp, Homo sapien
tgagcttcagggtggccatgcgacc

SEQ ID NO: 925862 - DNA, 25 bp, Homo sapien
catgcctgtaggcaggataacaggt

SEQ ID NO: 925863 - DNA, 25 bp, Homo sapien
gtagacatgcacacctcttcaaatg

SEQ ID NO: 925864 - DNA, 25 bp, Homo sapien
cccagaatactcatctggtacactg

SEQ ID NO: 925865 - DNA, 25 bp, Homo sapien
caggatgtttgagaatactgtcccc

SEQ ID NO: 925866 - DNA, 25 bp, Homo sapien
ctaaaaagggtcaatgatgaaagaa

SEQ ID NO: 925867 - DNA, 25 bp, Homo sapien
taaaaagggtcaatgatgaaagaag

SEQ ID NO: 925868 - DNA, 25 bp, Homo sapien
ccttcttctggtgtcgtcacttcta

SEQ ID NO: 925869 - DNA, 25 bp, Homo sapien
taatgattgtatccagcatcttgtc

SEQ ID NO: 925870 - DNA, 25 bp, Homo sapien
gaaataatgagattggccctgtggc

SEQ ID NO: 925871 - DNA, 25 bp, Homo sapien
ggcaaagtacttggcataacaccag

SEQ ID NO: 925872 - DNA, 25 bp, Homo sapien
aacaccagtctcacagaatgcagtt

SEQ ID NO: 925873 - DNA, 25 bp, Homo sapien
tataagctgtgtcacattaggcaag

SEQ ID NO: 925874 - DNA, 25 bp, Homo sapien
ttaatattgtttctatcataggaga

SEQ ID NO: 925875 - DNA, 25 bp, Homo sapien
tctatcataggagaagccttggttt

SEQ ID NO: 925876 - DNA, 25 bp, Homo sapien
gtttctatcataggagaagccttgg

SEQ ID NO: 925877 - DNA, 25 bp, Homo sapien
tttctatcataggagaagccttggt

SEQ ID NO: 925878 - DNA, 25 bp, Homo sapien
ttcttctccacagtcctttggtcct

SEQ ID NO: 925879 - DNA, 25 bp, Homo sapien
gggattctagctgcttcttcactgc

SEQ ID NO: 925880 - DNA, 25 bp, Homo sapien
ttctccacagtcctttggtccttga

SEQ ID NO: 925881 - DNA, 25 bp, Homo sapien
tctctgccccactgggattctagct

SEQ ID NO: 925882 - DNA, 25 bp, Homo sapien
cagagaccttcagatagcagatgtg

SEQ ID NO: 925883 - DNA, 25 bp, Homo sapien
cagaaataacagctatccagagacc

SEQ ID NO: 925884 - DNA, 25 bp, Homo sapien
aagagcagaaataacagctatccag

SEQ ID NO: 925885 - DNA, 25 bp, Homo sapien
ttcagatagcagatgtgccttgggc

SEQ ID NO: 925886 - DNA, 25 bp, Homo sapien
caagagtgttcattgtaagtaacac

SEQ ID NO: 925887 - DNA, 25 bp, Homo sapien
gatgtagagggacaaaggatgcaaa

SEQ ID NO: 925888 - DNA, 25 bp, Homo sapien
aaactgtaatctaattctgtaaaca

SEQ ID NO: 925889 - DNA, 25 bp, Homo sapien
attgtaagtaacactttcttgccat

SEQ ID NO: 925890 - DNA, 25 bp, Homo sapien
caggtgagtgtggaaatggactgcg

SEQ ID NO: 925891 - DNA, 25 bp, Homo sapien
gcaatgtggagcttacttgcagcat

SEQ ID NO: 925892 - DNA, 25 bp, Homo sapien
cattgacagagtggttttgacaggt

SEQ ID NO: 925893 - DNA, 25 bp, Homo sapien
ttgagaacccgtaggctctggcagc

SEQ ID NO: 925894 - DNA, 25 bp, Homo sapien
ggtacatcgtactgtggctggcaca

SEQ ID NO: 925895 - DNA, 25 bp, Homo sapien
taaaggatgcgctgatttggacaca

SEQ ID NO: 925896 - DNA, 25 bp, Homo sapien
cacatagattggaggaggtacatcg

SEQ ID NO: 925897 - DNA, 25 bp, Homo sapien
ggtgccatctgagtagggccttaaa

SEQ ID NO: 925898 - DNA, 25 bp, Homo sapien
ttgtctgtcctctgtcaagggctcg

SEQ ID NO: 925899 - DNA, 25 bp, Homo sapien
tcagcatctgtgcttcgcaggccac

SEQ ID NO: 925900 - DNA, 25 bp, Homo sapien
ttatccttttagtgagtcccgcttg

SEQ ID NO: 925901 - DNA, 25 bp, Homo sapien
caagggctcgtgtacaccatgctga

SEQ ID NO: 925902 - DNA, 25 bp, Homo sapien
gaaatctgttcaatcccaccacctt

SEQ ID NO: 925903 - DNA, 25 bp, Homo sapien
cactagctattcctgtgaaccccaa

SEQ ID NO: 925904 - DNA, 25 bp, Homo sapien
ccctcccctagatacattttggtga

SEQ ID NO: 925905 - DNA, 25 bp, Homo sapien
aatcactcttggaaatctgttcaat

SEQ ID NO: 925906 - DNA, 25 bp, Homo sapien
agtgagactactaacttctgggaaa

SEQ ID NO: 925907 - DNA, 25 bp, Homo sapien
aataattcctcagaaggcttgaggc

SEQ ID NO: 925908 - DNA, 25 bp, Homo sapien
caaatttgtatagcactctggagtg

SEQ ID NO: 925909 - DNA, 25 bp, Homo sapien
cgaagtcaatgcacagtcaggaggc

SEQ ID NO: 925910 - DNA, 25 bp, Homo sapien
tttctggtattctgggcctcccaat

SEQ ID NO: 925911 - DNA, 25 bp, Homo sapien
caccaggtctttcagaaagctgtgg

SEQ ID NO: 925912 - DNA, 25 bp, Homo sapien
tgggcctcccaatagccatttgtgc

SEQ ID NO: 925913 - DNA, 25 bp, Homo sapien
ctgtggttctcagcagcaattttag

SEQ ID NO: 925914 - DNA, 25 bp, Homo sapien
ctcttcctcagtagctgcttctctg

SEQ ID NO: 925915 - DNA, 25 bp, Homo sapien
ctcctcttcctcagtagctgcttct

SEQ ID NO: 925916 - DNA, 25 bp, Homo sapien
cttcctcagtagctgcttctctgta

SEQ ID NO: 925917 - DNA, 25 bp, Homo sapien
tcctcttcctcagtagctgcttctc

SEQ ID NO: 925918 - DNA, 25 bp, Homo sapien
cctcctttcttattatagctgatca

SEQ ID NO: 925919 - DNA, 25 bp, Homo sapien
gcccctcctttcttattatagctga

SEQ ID NO: 925920 - DNA, 25 bp, Homo sapien
cttccctccgtgatccctgccagcc

SEQ ID NO: 925921 - DNA, 25 bp, Homo sapien
tgccagcccctcctttcttattata

SEQ ID NO: 925922 - DNA, 25 bp, Homo sapien
gcttccgtgctgtgtaggcaccttc

SEQ ID NO: 925923 - DNA, 25 bp, Homo sapien
cttccgtgctgtgtaggcaccttct

SEQ ID NO: 925924 - DNA, 25 bp, Homo sapien
tgcttccgtgctgtgtaggcacctt

SEQ ID NO: 925925 - DNA, 25 bp, Homo sapien
ttccgtgctgtgtaggcaccttctc

SEQ ID NO: 925926 - DNA, 25 bp, Homo sapien
catttctgagttagtacggagattc

SEQ ID NO: 925927 - DNA, 25 bp, Homo sapien
tcttggcagatgaaggataagtgct

SEQ ID NO: 925928 - DNA, 25 bp, Homo sapien
cctgtggtaatcatctgagcacgta

SEQ ID NO: 925929 - DNA, 25 bp, Homo sapien
gaagttctgtctacatctttccaat

SEQ ID NO: 925930 - DNA, 25 bp, Homo sapien
caatacactggcagcaaaatcctag

SEQ ID NO: 925931 - DNA, 25 bp, Homo sapien
atccatatactggaagtcctgccaa

SEQ ID NO: 925932 - DNA, 25 bp, Homo sapien
tgcagacatgagcttaagagagtgt

SEQ ID NO: 925933 - DNA, 25 bp, Homo sapien
ttattgagactggacaaccccagag

SEQ ID NO: 925934 - DNA, 25 bp, Homo sapien
gcccagtggtttgataaaataacag

SEQ ID NO: 925935 - DNA, 25 bp, Homo sapien
tattatgagcagtctcagtagctct

SEQ ID NO: 925936 - DNA, 25 bp, Homo sapien
tttaagtcattagaagcccagtggt

SEQ ID NO: 925937 - DNA, 25 bp, Homo sapien
ggaaacagacaatttattatgagca

SEQ ID NO: 925938 - DNA, 25 bp, Homo sapien
ggaactaagaagcagaccactaact

SEQ ID NO: 925939 - DNA, 25 bp, Homo sapien
gcctttagctcaagccaggacagaa

SEQ ID NO: 925940 - DNA, 25 bp, Homo sapien
cagtgaaagtgccagtggagaatcc

SEQ ID NO: 925941 - DNA, 25 bp, Homo sapien
tggctgttcactcttgacaaggatc

SEQ ID NO: 925942 - DNA, 25 bp, Homo sapien
gatgcgtgtctgtttagtctcagtg

SEQ ID NO: 925943 - DNA, 25 bp, Homo sapien
cagtgcagggcgaaatgccatcatt

SEQ ID NO: 925944 - DNA, 25 bp, Homo sapien
ccctttgcggccacaaaactgagta

SEQ ID NO: 925945 - DNA, 25 bp, Homo sapien
ccagggcattgaatgtcagcaagtc

SEQ ID NO: 925946 - DNA, 25 bp, Homo sapien
tgggaacaggctacttcgtaagtct

SEQ ID NO: 925947 - DNA, 25 bp, Homo sapien
taaatagcacgttagcatctctgag

SEQ ID NO: 925948 - DNA, 25 bp, Homo sapien
ggaacgtgttaaaaaccattgctga

SEQ ID NO: 925949 - DNA, 25 bp, Homo sapien
tgctttattgcagagttcagctcct

SEQ ID NO: 925950 - DNA, 25 bp, Homo sapien
agatacatcaacttggtgctgacgg

SEQ ID NO: 925951 - DNA, 25 bp, Homo sapien
tggtgctgacggcagctccatccaa

SEQ ID NO: 925952 - DNA, 25 bp, Homo sapien
tcagaagtacagatacatcaacttg

SEQ ID NO: 925953 - DNA, 25 bp, Homo sapien
gtgctgacggcagctccatccaaag

SEQ ID NO: 925954 - DNA, 25 bp, Homo sapien
gattgtctccatccataacttcatc

SEQ ID NO: 925955 - DNA, 25 bp, Homo sapien
tctccatccataacttcatctagcc

SEQ ID NO: 925956 - DNA, 25 bp, Homo sapien
tgtctccatccataacttcatctag

SEQ ID NO: 925957 - DNA, 25 bp, Homo sapien
cggattgtctccatccataacttca

SEQ ID NO: 925958 - DNA, 25 bp, Homo sapien
tatgagttacattttgggtgtattc

SEQ ID NO: 925959 - DNA, 25 bp, Homo sapien
agcctggacctctggtgcacgtgat

SEQ ID NO: 925960 - DNA, 25 bp, Homo sapien
tccatgcagtccatggatcagaact

SEQ ID NO: 925961 - DNA, 25 bp, Homo sapien
taagacgtccatgggatgagcaaag

SEQ ID NO: 925962 - DNA, 25 bp, Homo sapien
caggaaactcttgataaacagcttt

SEQ ID NO: 925963 - DNA, 25 bp, Homo sapien
gcttttgccgtagcatcaacctgca

SEQ ID NO: 925964 - DNA, 25 bp, Homo sapien
tctctgaacattgatgattccgcag

SEQ ID NO: 925965 - DNA, 25 bp, Homo sapien
ggaccacagcatactttcaggaaac

SEQ ID NO: 925966 - DNA, 25 bp, Homo sapien
attttcataaactgcgaggcaacat

SEQ ID NO: 925967 - DNA, 25 bp, Homo sapien
ttttcataaactgcgaggcaacatc

SEQ ID NO: 925968 - DNA, 25 bp, Homo sapien
tttcataaactgcgaggcaacatcc

SEQ ID NO: 925969 - DNA, 25 bp, Homo sapien
ttcataaactgcgaggcaacatcca

SEQ ID NO: 925970 - DNA, 25 bp, Homo sapien
gaagttgttagtgcttatgccaggt

SEQ ID NO: 925971 - DNA, 25 bp, Homo sapien
tatgccaggtagctggaagacatct

SEQ ID NO: 925972 - DNA, 25 bp, Homo sapien
cggagtcactagtcttcttttggaa

SEQ ID NO: 925973 - DNA, 25 bp, Homo sapien
gcaatcgttgcctctgccagaatga

SEQ ID NO: 925974 - DNA, 25 bp, Homo sapien
gtaagatccgggcttgaaaggccaa

SEQ ID NO: 925975 - DNA, 25 bp, Homo sapien
agctaggaagggctaggaggctaca

SEQ ID NO: 925976 - DNA, 25 bp, Homo sapien
gatccgggcttgaaaggccaagttc

SEQ ID NO: 925977 - DNA, 25 bp, Homo sapien
taggaggctacagaggttaaaagtg

SEQ ID NO: 925978 - DNA, 25 bp, Homo sapien
ttattacgtgtttgctatctctccc

SEQ ID NO: 925979 - DNA, 25 bp, Homo sapien
tccttgaaggacagtgatgatgctt

SEQ ID NO: 925980 - DNA, 25 bp, Homo sapien
tattggccagagttagagtggtcac

SEQ ID NO: 925981 - DNA, 25 bp, Homo sapien
gagtggtcacattaattctaggcaa

SEQ ID NO: 925982 - DNA, 25 bp, Homo sapien
ttggatatggctctggaagatggca

SEQ ID NO: 925983 - DNA, 25 bp, Homo sapien
gctctggaagatggcagaaacgcca

SEQ ID NO: 925984 - DNA, 25 bp, Homo sapien
ccacttggatatggctctggaagat

SEQ ID NO: 925985 - DNA, 25 bp, Homo sapien
aaatctccacttggatatggctctg

SEQ ID NO: 925986 - DNA, 25 bp, Homo sapien
catgtggaggatgtatgtgcttttg

SEQ ID NO: 925987 - DNA, 25 bp, Homo sapien
ccaaaggttgatcatgtggaggatg

SEQ ID NO: 925988 - DNA, 25 bp, Homo sapien
tcctgattgtcatacagagtgagat

SEQ ID NO: 925989 - DNA, 25 bp, Homo sapien
gagatcattgtccaaaggttgatca

SEQ ID NO: 925990 - DNA, 25 bp, Homo sapien
ttgtcacctgggactcgagtgctgc

SEQ ID NO: 925991 - DNA, 25 bp, Homo sapien
gatccaaaattgagcacaagcccca

SEQ ID NO: 925992 - DNA, 25 bp, Homo sapien
gccccatctggtaagagtgattaga

SEQ ID NO: 925993 - DNA, 25 bp, Homo sapien
aaatctgagcagatcttgtcacctg

SEQ ID NO: 925994 - DNA, 25 bp, Homo sapien
gggaaagtacggcataagcacatga

SEQ ID NO: 925995 - DNA, 25 bp, Homo sapien
attgccgatcgggaaagtacggcat

SEQ ID NO: 925996 - DNA, 25 bp, Homo sapien
agtacggcataagcacatgaatatt

SEQ ID NO: 925997 - DNA, 25 bp, Homo sapien
gatcgggaaagtacggcataagcac

SEQ ID NO: 925998 - DNA, 25 bp, Homo sapien
gcttcattgaggatgcttagggcat

SEQ ID NO: 925999 - DNA, 25 bp, Homo sapien
ttgagaggcctgagttgcttgagca

SEQ ID NO: 926000 - DNA, 25 bp, Homo sapien
gaagtttgccagaggtcctattttc

SEQ ID NO: 926001 - DNA, 25 bp, Homo sapien
taaaccagtgcctgccgactttgag

SEQ ID NO: 926002 - DNA, 25 bp, Homo sapien
cattcagcattactattcttgccta

SEQ ID NO: 926003 - DNA, 25 bp, Homo sapien
tgcaaaacccgtaggccgcctactg

SEQ ID NO: 926004 - DNA, 25 bp, Homo sapien
tagtaaaggtcacagcagtagttgc

SEQ ID NO: 926005 - DNA, 25 bp, Homo sapien
ttcttctctaaagtagtaaaggtca

SEQ ID NO: 926006 - DNA, 25 bp, Homo sapien
gaactagggagtgaaatcttatctt

SEQ ID NO: 926007 - DNA, 25 bp, Homo sapien
cagggctgctttgttatggtgtttc

SEQ ID NO: 926008 - DNA, 25 bp, Homo sapien
tgtaggacgctaatgatgtggtctc

SEQ ID NO: 926009 - DNA, 25 bp, Homo sapien
gacttaagtgtactggaactaggga

SEQ ID NO: 926010 - DNA, 25 bp, Homo sapien
agtacgagtccctgaagatgaatcc

SEQ ID NO: 926011 - DNA, 25 bp, Homo sapien
tacacagagcactgataatgagctg

SEQ ID NO: 926012 - DNA, 25 bp, Homo sapien
gagtaatctagtacgagtccctgaa

SEQ ID NO: 926013 - DNA, 25 bp, Homo sapien
taatgagctgcgagtaatctagtac

SEQ ID NO: 926014 - DNA, 25 bp, Homo sapien
catggggccattccgctctgctccc

SEQ ID NO: 926015 - DNA, 25 bp, Homo sapien
tctgctcccttcctccttgatgttt

SEQ ID NO: 926016 - DNA, 25 bp, Homo sapien
cttcatggggccattccgctctgct

SEQ ID NO: 926017 - DNA, 25 bp, Homo sapien
gggccattccgctctgctcccttcc

SEQ ID NO: 926018 - DNA, 25 bp, Homo sapien
cgcatttttagggacaacttgccct

SEQ ID NO: 926019 - DNA, 25 bp, Homo sapien
ggctcgcatttttagggacaacttg

SEQ ID NO: 926020 - DNA, 25 bp, Homo sapien
ttctgccagttgggttcatttatct

SEQ ID NO: 926021 - DNA, 25 bp, Homo sapien
gtgatcttagggctcgcatttttag

SEQ ID NO: 926022 - DNA, 25 bp, Homo sapien
aatgctgacaccagatgcagtctgc

SEQ ID NO: 926023 - DNA, 25 bp, Homo sapien
cctgaatgctgacaccagatgcagt

SEQ ID NO: 926024 - DNA, 25 bp, Homo sapien
agtctgcatggacattagtcccagg

SEQ ID NO: 926025 - DNA, 25 bp, Homo sapien
tgaatgctgacaccagatgcagtct

SEQ ID NO: 926026 - DNA, 25 bp, Homo sapien
caggacaaggagattataggaagca

SEQ ID NO: 926027 - DNA, 25 bp, Homo sapien
ataggaagcaatgctgactcttgtt

SEQ ID NO: 926028 - DNA, 25 bp, Homo sapien
gacacgataataggacatgaatggg

SEQ ID NO: 926029 - DNA, 25 bp, Homo sapien
gtagattcacaatgtgctgacacga

SEQ ID NO: 926030 - DNA, 25 bp, Homo sapien
aggcagacagctccatggcctgaat

SEQ ID NO: 926031 - DNA, 25 bp, Homo sapien
agctccatggcctgaatttcgttag

SEQ ID NO: 926032 - DNA, 25 bp, Homo sapien
gaggcagacagctccatggcctgaa

SEQ ID NO: 926033 - DNA, 25 bp, Homo sapien
agacagctccatggcctgaatttcg

SEQ ID NO: 926034 - DNA, 25 bp, Homo sapien
tatgaatgatcctctgtcatgcact

SEQ ID NO: 926035 - DNA, 25 bp, Homo sapien
cagataaactgacactgctgtcaaa

SEQ ID NO: 926036 - DNA, 25 bp, Homo sapien
tctaatatggtaaatgggagtctta

SEQ ID NO: 926037 - DNA, 25 bp, Homo sapien
gctgagacctctgatgaaccttcta

SEQ ID NO: 926038 - DNA, 25 bp, Homo sapien
gcttaaacccagacttattgccttg

SEQ ID NO: 926039 - DNA, 25 bp, Homo sapien
gtgaaatctgaggaaacgctgctta

SEQ ID NO: 926040 - DNA, 25 bp, Homo sapien
tgactttgaaatgtattggcctcat

SEQ ID NO: 926041 - DNA, 25 bp, Homo sapien
tctgaggaaacgctgcttaaaccca

SEQ ID NO: 926042 - DNA, 25 bp, Homo sapien
aaactgtgtgcctttgactaaatcg

SEQ ID NO: 926043 - DNA, 25 bp, Homo sapien
tagtgcttctggatagtaaactgtg

SEQ ID NO: 926044 - DNA, 25 bp, Homo sapien
ttagtgcttctggatagtaaactgt

SEQ ID NO: 926045 - DNA, 25 bp, Homo sapien
gcctttgactaaatcgactaggagt

SEQ ID NO: 926046 - DNA, 25 bp, Homo sapien
tgaggaatagtcctactttttgcca

SEQ ID NO: 926047 - DNA, 25 bp, Homo sapien
ttgaggaatagtcctactttttgcc

SEQ ID NO: 926048 - DNA, 25 bp, Homo sapien
gaggaatagtcctactttttgccat

SEQ ID NO: 926049 - DNA, 25 bp, Homo sapien
gcttgaggaatagtcctactttttg

SEQ ID NO: 926050 - DNA, 25 bp, Homo sapien
ggcaattagtatgtctgtcctcctc

SEQ ID NO: 926051 - DNA, 25 bp, Homo sapien
tggcaattagtatgtctgtcctcct

SEQ ID NO: 926052 - DNA, 25 bp, Homo sapien
gcaattagtatgtctgtcctcctct

SEQ ID NO: 926053 - DNA, 25 bp, Homo sapien
gaacgaggctactccagtgggacaa

SEQ ID NO: 926054 - DNA, 25 bp, Homo sapien
tttggaaagttcagatgtactggac

SEQ ID NO: 926055 - DNA, 25 bp, Homo sapien
attgatgcagaacccgaacgaggct

SEQ ID NO: 926056 - DNA, 25 bp, Homo sapien
gtactggactccctgcagaaatgaa

SEQ ID NO: 926057 - DNA, 25 bp, Homo sapien
ctgttgagaagatttatacaagtca

SEQ ID NO: 926058 - DNA, 25 bp, Homo sapien
cagaagatgtactgttgagaagatt

SEQ ID NO: 926059 - DNA, 25 bp, Homo sapien
cttggttcagaagatgtactgttga

SEQ ID NO: 926060 - DNA, 25 bp, Homo sapien
ttcagaagatgtactgttgagaaga

SEQ ID NO: 926061 - DNA, 25 bp, Homo sapien
ggcagttctgtgtcaaaattgcttt

SEQ ID NO: 926062 - DNA, 25 bp, Homo sapien
agtggcagttctgtgtcaaaattgc

SEQ ID NO: 926063 - DNA, 25 bp, Homo sapien
taggctttgcacagattaggttatt

SEQ ID NO: 926064 - DNA, 25 bp, Homo sapien
cacagattaggttattggaaagtat

SEQ ID NO: 926065 - DNA, 25 bp, Homo sapien
gagagtaagtgggtgcgtgcatgcg

SEQ ID NO: 926066 - DNA, 25 bp, Homo sapien
taagcacttctcatcatgtccgagg

SEQ ID NO: 926067 - DNA, 25 bp, Homo sapien
gcatgcgtgctgcaagtatctgcat

SEQ ID NO: 926068 - DNA, 25 bp, Homo sapien
catcatgtccgaggagagagtaagt

SEQ ID NO: 926069 - DNA, 25 bp, Homo sapien
ttaactgccctggatccgaattgcc

SEQ ID NO: 926070 - DNA, 25 bp, Homo sapien
gcagtgtcggcatcaatagggatca

SEQ ID NO: 926071 - DNA, 25 bp, Homo sapien
tgtgactcaaagtatcccagtggag

SEQ ID NO: 926072 - DNA, 25 bp, Homo sapien
cagttctgggttgaatgtcttgtga

SEQ ID NO: 926073 - DNA, 25 bp, Homo sapien
ggcatcgcctttcgggtctataggg

SEQ ID NO: 926074 - DNA, 25 bp, Homo sapien
agtgaaatggggcatcgcctttcgg

SEQ ID NO: 926075 - DNA, 25 bp, Homo sapien
tctataggggtgcactgagcagtcc

SEQ ID NO: 926076 - DNA, 25 bp, Homo sapien
gaaatggggcatcgcctttcgggtc

SEQ ID NO: 926077 - DNA, 25 bp, Homo sapien
tgagcagcatgttaattaccactgc

SEQ ID NO: 926078 - DNA, 25 bp, Homo sapien
aaaagactaaccaggtgagcagcat

SEQ ID NO: 926079 - DNA, 25 bp, Homo sapien
gttcaaaaagactaaccaggtgagc

SEQ ID NO: 926080 - DNA, 25 bp, Homo sapien
caggtgagcagcatgttaattacca

SEQ ID NO: 926081 - DNA, 25 bp, Homo sapien
tgtagacacaagaaggcacacttgc

SEQ ID NO: 926082 - DNA, 25 bp, Homo sapien
cgtaccgcaggcaagaaaacattga

SEQ ID NO: 926083 - DNA, 25 bp, Homo sapien
catgtgatacttcgtaatgcaggtc

SEQ ID NO: 926084 - DNA, 25 bp, Homo sapien
aaggcacacttgctcgtttccctgg

SEQ ID NO: 926085 - DNA, 25 bp, Homo sapien
aggtcacactggaaacagttgctgc

SEQ ID NO: 926086 - DNA, 25 bp, Homo sapien
aataagctgagggatttgcgagttg

SEQ ID NO: 926087 - DNA, 25 bp, Homo sapien
atgctgccaaatgtatccactgaag

SEQ ID NO: 926088 - DNA, 25 bp, Homo sapien
tgtatccactgaagataatgatccc

SEQ ID NO: 926089 - DNA, 25 bp, Homo sapien
tccactgaagataatgatcccattt

SEQ ID NO: 926090 - DNA, 25 bp, Homo sapien
gagaggctgtgcgttgatggttcca

SEQ ID NO: 926091 - DNA, 25 bp, Homo sapien
agtgcagttggaccaggctcttgtc

SEQ ID NO: 926092 - DNA, 25 bp, Homo sapien
ccagctgagtgaccacaggcagtaa

SEQ ID NO: 926093 - DNA, 25 bp, Homo sapien
caggcagtaaacaccttacaatagc

SEQ ID NO: 926094 - DNA, 25 bp, Homo sapien
ttctgcaagggaattgctatctgac

SEQ ID NO: 926095 - DNA, 25 bp, Homo sapien
ccctttctgcaagggaattgctatc

SEQ ID NO: 926096 - DNA, 25 bp, Homo sapien
atcatagtcctggatgttagtcacc

SEQ ID NO: 926097 - DNA, 25 bp, Homo sapien
ggatgttagtcaccctttctgcaag

SEQ ID NO: 926098 - DNA, 25 bp, Homo sapien
ttgcatattgcatgtggacaagttc

SEQ ID NO: 926099 - DNA, 25 bp, Homo sapien
cttgcatattgcatgtggacaagtt

SEQ ID NO: 926100 - DNA, 25 bp, Homo sapien
gcatattgcatgtggacaagttcag

SEQ ID NO: 926101 - DNA, 25 bp, Homo sapien
tgcatattgcatgtggacaagttca

SEQ ID NO: 926102 - DNA, 25 bp, Homo sapien
taaccagccaacagctagtgtcagg

SEQ ID NO: 926103 - DNA, 25 bp, Homo sapien
tctgctccccgaagtagtgggccct

SEQ ID NO: 926104 - DNA, 25 bp, Homo sapien
tatggagatagacctgctaaccagc

SEQ ID NO: 926105 - DNA, 25 bp, Homo sapien
gaactgcacatttctagctcctggg

SEQ ID NO: 926106 - DNA, 25 bp, Homo sapien
tgtggtattggctaccgatttaaaa

SEQ ID NO: 926107 - DNA, 25 bp, Homo sapien
ttcattgactgtggtattggctacc

SEQ ID NO: 926108 - DNA, 25 bp, Homo sapien
tcttcagcttactaaacctctttca

SEQ ID NO: 926109 - DNA, 25 bp, Homo sapien
ttggtgtcttctgtctcggtcttac

SEQ ID NO: 926110 - DNA, 25 bp, Homo sapien
gctgagacttaaaggatgaagggtg

SEQ ID NO: 926111 - DNA, 25 bp, Homo sapien
tgagacttaaaggatgaagggtgac

SEQ ID NO: 926112 - DNA, 25 bp, Homo sapien
gagacttaaaggatgaagggtgaca

SEQ ID NO: 926113 - DNA, 25 bp, Homo sapien
tttgtaaattaatgccattgatctg

SEQ ID NO: 926114 - DNA, 25 bp, Homo sapien
gcattattaacggaccgcagcataa

SEQ ID NO: 926115 - DNA, 25 bp, Homo sapien
ttatcctgcattattaacggaccgc

SEQ ID NO: 926116 - DNA, 25 bp, Homo sapien
attaacggaccgcagcataaaaggc

SEQ ID NO: 926117 - DNA, 25 bp, Homo sapien
ggaccgcagcataaaaggcacaaag

SEQ ID NO: 926118 - DNA, 25 bp, Homo sapien
tatttgcaaggtaaagtcaagagaa

SEQ ID NO: 926119 - DNA, 25 bp, Homo sapien
atttgcaaggtaaagtcaagagaac

SEQ ID NO: 926120 - DNA, 25 bp, Homo sapien
ctatttgcaaggtaaagtcaagaga

SEQ ID NO: 926121 - DNA, 25 bp, Homo sapien
ctgtcaggggagatgtaatgccagc

SEQ ID NO: 926122 - DNA, 25 bp, Homo sapien
tcactgtcaggggagatgtaatgcc

SEQ ID NO: 926123 - DNA, 25 bp, Homo sapien
tcctctcaatcacttgagtcttttc

SEQ ID NO: 926124 - DNA, 25 bp, Homo sapien
tatcccatcggatttttcctctcaa

SEQ ID NO: 926125 - DNA, 25 bp, Homo sapien
ttccagagagtgcctctcagttcca

SEQ ID NO: 926126 - DNA, 25 bp, Homo sapien
ccagagagtgcctctcagttccagt

SEQ ID NO: 926127 - DNA, 25 bp, Homo sapien
gcgaccccctcaaatgtcttccaga

SEQ ID NO: 926128 - DNA, 25 bp, Homo sapien
ggcgaccccctcaaatgtcttccag

SEQ ID NO: 926129 - DNA, 25 bp, Homo sapien
gaccactgtaattgctttacatctg

SEQ ID NO: 926130 - DNA, 25 bp, Homo sapien
tacatctgtacaaaggttccttgta

SEQ ID NO: 926131 - DNA, 25 bp, Homo sapien
ccctgggaccactgtaattgcttta

SEQ ID NO: 926132 - DNA, 25 bp, Homo sapien
ccttgtaatcgggctttctgccttc

SEQ ID NO: 926133 - DNA, 25 bp, Homo sapien
gggctgaacaagtaccagacactac

SEQ ID NO: 926134 - DNA, 25 bp, Homo sapien
tagggctgaacaagtaccagacact

SEQ ID NO: 926135 - DNA, 25 bp, Homo sapien
ttagggctgaacaagtaccagacac

SEQ ID NO: 926136 - DNA, 25 bp, Homo sapien
ctttagggctgaacaagtaccagac

SEQ ID NO: 926137 - DNA, 25 bp, Homo sapien
acatataaggccttaaggttggtca

SEQ ID NO: 926138 - DNA, 25 bp, Homo sapien
gaaaggtgaaagacatataaggcct

SEQ ID NO: 926139 - DNA, 25 bp, Homo sapien
tgaaagacatataaggccttaaggt

SEQ ID NO: 926140 - DNA, 25 bp, Homo sapien
cttaaggttggtcagtttgagatct

SEQ ID NO: 926141 - DNA, 25 bp, Homo sapien
taccctaatataaagcctggctttg

SEQ ID NO: 926142 - DNA, 25 bp, Homo sapien
cgtaagtagatgaggcaagaactcc

SEQ ID NO: 926143 - DNA, 25 bp, Homo sapien
tgcgtgcacacagaccgtaagtaga

SEQ ID NO: 926144 - DNA, 25 bp, Homo sapien
catagacccagtagaaaggctgcag

SEQ ID NO: 926145 - DNA, 25 bp, Homo sapien
gataggatcgcacagtttctggttg

SEQ ID NO: 926146 - DNA, 25 bp, Homo sapien
tggtgagcttgtagtcagaagccct

SEQ ID NO: 926147 - DNA, 25 bp, Homo sapien
tccttgataatccaggataggatcg

SEQ ID NO: 926148 - DNA, 25 bp, Homo sapien
taggagtgccccgatgctccctgca

SEQ ID NO: 926149 - DNA, 25 bp, Homo sapien
atggtgaaccagcctcatttactgg

SEQ ID NO: 926150 - DNA, 25 bp, Homo sapien
cagggacaacgcctagtctgaactg

SEQ ID NO: 926151 - DNA, 25 bp, Homo sapien
tgaacttggagaaactgtcgaatcc

SEQ ID NO: 926152 - DNA, 25 bp, Homo sapien
cagaaatgggtaaatatcaaattgt

SEQ ID NO: 926153 - DNA, 25 bp, Homo sapien
tgaactggcgaccatgggctttttc

SEQ ID NO: 926154 - DNA, 25 bp, Homo sapien
taataaagtccttgaaccgagtgtg

SEQ ID NO: 926155 - DNA, 25 bp, Homo sapien
tagtgggtaaagtctggcacagccc

SEQ ID NO: 926156 - DNA, 25 bp, Homo sapien
gcttggtatcactagccttgctggc

SEQ ID NO: 926157 - DNA, 25 bp, Homo sapien
ggtgccagcaccttggagatatagt

SEQ ID NO: 926158 - DNA, 25 bp, Homo sapien
aagggtagtattgattttgctggtc

SEQ ID NO: 926159 - DNA, 25 bp, Homo sapien
accagttgccacaggcaaccgactg

SEQ ID NO: 926160 - DNA, 25 bp, Homo sapien
aggcaaccgactgctcccgacagga

SEQ ID NO: 926161 - DNA, 25 bp, Homo sapien
ccccaaggacatgcatcctctggct

SEQ ID NO: 926162 - DNA, 25 bp, Homo sapien
gcaagccacttgttaggcatctttg

SEQ ID NO: 926163 - DNA, 25 bp, Homo sapien
tcccctttctgtgctcatcctccac

SEQ ID NO: 926164 - DNA, 25 bp, Homo sapien
ggatggggcatatcagctcctcctg

SEQ ID NO: 926165 - DNA, 25 bp, Homo sapien
gaaacttttccaggtgacacttctg

SEQ ID NO: 926166 - DNA, 25 bp, Homo sapien
taagagatctatctgggactttgtc

SEQ ID NO: 926167 - DNA, 25 bp, Homo sapien
tacagtacaccgtcaatagagattg

SEQ ID NO: 926168 - DNA, 25 bp, Homo sapien
tttattcctgtctatatctctctgg

SEQ ID NO: 926169 - DNA, 25 bp, Homo sapien
taagactcgagtgtaaaatccatca

SEQ ID NO: 926170 - DNA, 25 bp, Homo sapien
gatagttgtatgtgcctgcttgttg

SEQ ID NO: 926171 - DNA, 25 bp, Homo sapien
agcaatatggctcatcatctttcta

SEQ ID NO: 926172 - DNA, 25 bp, Homo sapien
atcttgatagttgtatgtgcctgct

SEQ ID NO: 926173 - DNA, 25 bp, Homo sapien
ttgttgttgtatattgctacagcaa

SEQ ID NO: 926174 - DNA, 25 bp, Homo sapien
tcttccccatcttgcagagcccaac

SEQ ID NO: 926175 - DNA, 25 bp, Homo sapien
tgctggaaaacacagccctgtccca

SEQ ID NO: 926176 - DNA, 25 bp, Homo sapien
tgtcccacccgcctgcacacacaag

SEQ ID NO: 926177 - DNA, 25 bp, Homo sapien
cctgcacacacaagccctcttcccc

SEQ ID NO: 926178 - DNA, 25 bp, Homo sapien
cgtggcaatggcagtcatccttcat

SEQ ID NO: 926179 - DNA, 25 bp, Homo sapien
gaagcacagcgaggcaatttccagg

SEQ ID NO: 926180 - DNA, 25 bp, Homo sapien
gcagtcatccttcatactgtcccag

SEQ ID NO: 926181 - DNA, 25 bp, Homo sapien
gcgaggcaatttccaggcgtaaccc

SEQ ID NO: 926182 - DNA, 25 bp, Homo sapien
tttcagcctgagatggtatggcagg

SEQ ID NO: 926183 - DNA, 25 bp, Homo sapien
cagtggagtgtggttcagaagcttt

SEQ ID NO: 926184 - DNA, 25 bp, Homo sapien
catcccatagaagcctttgagcctg

SEQ ID NO: 926185 - DNA, 25 bp, Homo sapien
tgtgcattatctgaactgggaagga

SEQ ID NO: 926186 - DNA, 25 bp, Homo sapien
tttcctccaaatagagaaactcaat

SEQ ID NO: 926187 - DNA, 25 bp, Homo sapien
ttcctccaaatagagaaactcaatc

SEQ ID NO: 926188 - DNA, 25 bp, Homo sapien
ggaaagcttccatatggaagaagga

SEQ ID NO: 926189 - DNA, 25 bp, Homo sapien
aaccaacagttaaggtacagccagt

SEQ ID NO: 926190 - DNA, 25 bp, Homo sapien
gccctggaaagcttccatatggaag

SEQ ID NO: 926191 - DNA, 25 bp, Homo sapien
accaacagttaaggtacagccagtg

SEQ ID NO: 926192 - DNA, 25 bp, Homo sapien
tgtttgtctgggtggttgtttctgt

SEQ ID NO: 926193 - DNA, 25 bp, Homo sapien
gagtctttaaacacgtcctgagcag

SEQ ID NO: 926194 - DNA, 25 bp, Homo sapien
tgttttcgtgtagcatagtattgag

SEQ ID NO: 926195 - DNA, 25 bp, Homo sapien
cacttcgttgagagggaatgatggt

SEQ ID NO: 926196 - DNA, 25 bp, Homo sapien
acctctgttcatgctaccctgatca

SEQ ID NO: 926197 - DNA, 25 bp, Homo sapien
cacctctgttcatgctaccctgatc

SEQ ID NO: 926198 - DNA, 25 bp, Homo sapien
gatcatgtaatctattcatattcat

SEQ ID NO: 926199 - DNA, 25 bp, Homo sapien
gatacgaaataactgttccagcaag

SEQ ID NO: 926200 - DNA, 25 bp, Homo sapien
caatgataaatggatttgagatacg

SEQ ID NO: 926201 - DNA, 25 bp, Homo sapien
tattcaatgattgccactctgtgct

SEQ ID NO: 926202 - DNA, 25 bp, Homo sapien
cctcaatgtcattgtatgtgatata

SEQ ID NO: 926203 - DNA, 25 bp, Homo sapien
atcgcctctaccctgccatggtggg

SEQ ID NO: 926204 - DNA, 25 bp, Homo sapien
ctagaggggcatcgcctctaccctg

SEQ ID NO: 926205 - DNA, 25 bp, Homo sapien
gctcacttgtgtgattgagcacctt

SEQ ID NO: 926206 - DNA, 25 bp, Homo sapien
tgattgagcaccttgctggactgac

SEQ ID NO: 926207 - DNA, 25 bp, Homo sapien
atgacagtgaaagtacacactggaa

SEQ ID NO: 926208 - DNA, 25 bp, Homo sapien
gacagtgaaagtacacactggaaag

SEQ ID NO: 926209 - DNA, 25 bp, Homo sapien
aaagtgacctatggaagggtacgct

SEQ ID NO: 926210 - DNA, 25 bp, Homo sapien
ctgtgctgtgacatggtaatgggct

SEQ ID NO: 926211 - DNA, 25 bp, Homo sapien
tacatagttgtttataggcgagtcc

SEQ ID NO: 926212 - DNA, 25 bp, Homo sapien
cactctgagcttgagtagatttcag

SEQ ID NO: 926213 - DNA, 25 bp, Homo sapien
tccaagagtggcaatggcaagaagg

SEQ ID NO: 926214 - DNA, 25 bp, Homo sapien
ttcagggtaataaagcggatacata

SEQ ID NO: 926215 - DNA, 25 bp, Homo sapien
cagttaagactgttaggcttcccct

SEQ ID NO: 926216 - DNA, 25 bp, Homo sapien
tcatgtgttgcttggaggattcgca

SEQ ID NO: 926217 - DNA, 25 bp, Homo sapien
gacttctgctctgtcggagcctggg

SEQ ID NO: 926218 - DNA, 25 bp, Homo sapien
gtgaagaaacctcttgcctgtgccc

SEQ ID NO: 926219 - DNA, 25 bp, Homo sapien
tgtttggtaatgaccattacttgat

SEQ ID NO: 926220 - DNA, 25 bp, Homo sapien
ttgtttggtaatgaccattacttga

SEQ ID NO: 926221 - DNA, 25 bp, Homo sapien
gcatgattctgtgttcccacagaaa

SEQ ID NO: 926222 - DNA, 25 bp, Homo sapien
cagaaacatcaaggttgagtgcatg

SEQ ID NO: 926223 - DNA, 25 bp, Homo sapien
catgattctgtgttcccacagaaaa

SEQ ID NO: 926224 - DNA, 25 bp, Homo sapien
ctgaagggaaagttgtaaagccaag

SEQ ID NO: 926225 - DNA, 25 bp, Homo sapien
tgctttccttaaggaaactggaatg

SEQ ID NO: 926226 - DNA, 25 bp, Homo sapien
agcagcagccaggtcgccgctctga

SEQ ID NO: 926227 - DNA, 25 bp, Homo sapien
tatagcctgagatcctattgctttc

SEQ ID NO: 926228 - DNA, 25 bp, Homo sapien
ccaggtcgccgctctgagaggtctg

SEQ ID NO: 926229 - DNA, 25 bp, Homo sapien
cagcatgaggccatatagctttgga

SEQ ID NO: 926230 - DNA, 25 bp, Homo sapien
atatagctttggatataggaaacgc

SEQ ID NO: 926231 - DNA, 25 bp, Homo sapien
gccatatagctttggatataggaaa

SEQ ID NO: 926232 - DNA, 25 bp, Homo sapien
ctgtgggagtaagacagcatgaggc

SEQ ID NO: 926233 - DNA, 25 bp, Homo sapien
atggagcctcttgtgtgatgcatac

SEQ ID NO: 926234 - DNA, 25 bp, Homo sapien
ttgaacttccaaccccaagagctct

SEQ ID NO: 926235 - DNA, 25 bp, Homo sapien
tttacactgtttgctaaaatggagc

SEQ ID NO: 926236 - DNA, 25 bp, Homo sapien
ctaaaatggagcctcttgtgtgatg

SEQ ID NO: 926237 - DNA, 25 bp, Homo sapien
gcctgccagtgtgcccctcaaagaa

SEQ ID NO: 926238 - DNA, 25 bp, Homo sapien
ctaatgtgtgcttcaggataagggc

SEQ ID NO: 926239 - DNA, 25 bp, Homo sapien
cagtgtgcccctcaaagaatgtggg

SEQ ID NO: 926240 - DNA, 25 bp, Homo sapien
gataagggcaccatgggtcccctgc

SEQ ID NO: 926241 - DNA, 25 bp, Homo sapien
ttatttccactgtgcttgtggtggg

SEQ ID NO: 926242 - DNA, 25 bp, Homo sapien
tgtgcttgtggtggggcctggacca

SEQ ID NO: 926243 - DNA, 25 bp, Homo sapien
ttccactgtgcttgtggtggggcct

SEQ ID NO: 926244 - DNA, 25 bp, Homo sapien
ctgtgcttgtggtggggcctggacc

SEQ ID NO: 926245 - DNA, 25 bp, Homo sapien
ggccctggctcattcgtctgattgg

SEQ ID NO: 926246 - DNA, 25 bp, Homo sapien
tcatcttgggtgctacaggtggcaa

SEQ ID NO: 926247 - DNA, 25 bp, Homo sapien
ggagagtgaagatgcccgcagcatc

SEQ ID NO: 926248 - DNA, 25 bp, Homo sapien
gattgttagcaagccaaatatgacc

SEQ ID NO: 926249 - DNA, 25 bp, Homo sapien
tccctgcagcgacttcctgcagttt

SEQ ID NO: 926250 - DNA, 25 bp, Homo sapien
cagcgacttcctgcagtttgacttt

SEQ ID NO: 926251 - DNA, 25 bp, Homo sapien
tggagtgtgaagtgtgacttgcttg

SEQ ID NO: 926252 - DNA, 25 bp, Homo sapien
ttgcctccctgcagcgacttcctgc

SEQ ID NO: 926253 - DNA, 25 bp, Homo sapien
cctgaagtctgtgcgaagtgccaca

SEQ ID NO: 926254 - DNA, 25 bp, Homo sapien
tctgtgcgaagtgccacaggaggtc

SEQ ID NO: 926255 - DNA, 25 bp, Homo sapien
ttctctctgattcccctgaagtctg

SEQ ID NO: 926256 - DNA, 25 bp, Homo sapien
ggaagtagtggaagcggaccgtgtc

SEQ ID NO: 926257 - DNA, 25 bp, Homo sapien
gtgtttcagcctgcgaacttcctgg

SEQ ID NO: 926258 - DNA, 25 bp, Homo sapien
ctagtagtctgtgtcagcaataaaa

SEQ ID NO: 926259 - DNA, 25 bp, Homo sapien
tcctggatatctttacggggaatca

SEQ ID NO: 926260 - DNA, 25 bp, Homo sapien
aaaagccatggggatctgacccgcg

SEQ ID NO: 926261 - DNA, 25 bp, Homo sapien
ccgactccagactcatccagtttct

SEQ ID NO: 926262 - DNA, 25 bp, Homo sapien
gggagaccctcagtcaggtccagat

SEQ ID NO: 926263 - DNA, 25 bp, Homo sapien
gccgactccagactcatccagtttc

SEQ ID NO: 926264 - DNA, 25 bp, Homo sapien
tgggagaccctcagtcaggtccaga

SEQ ID NO: 926265 - DNA, 25 bp, Homo sapien
gggaagaattgctgtgactgtccac

SEQ ID NO: 926266 - DNA, 25 bp, Homo sapien
tcactgatggtctacagctgctgcc

SEQ ID NO: 926267 - DNA, 25 bp, Homo sapien
gatctgtgagcgtggttctgaccct

SEQ ID NO: 926268 - DNA, 25 bp, Homo sapien
gactgtccacagcaatagagatgag

SEQ ID NO: 926269 - DNA, 25 bp, Homo sapien
tccagcatagagaagggctcttcac

SEQ ID NO: 926270 - DNA, 25 bp, Homo sapien
cagcatagagaagggctcttcaccc

SEQ ID NO: 926271 - DNA, 25 bp, Homo sapien
caccctccagcatagagaagggctc

SEQ ID NO: 926272 - DNA, 25 bp, Homo sapien
cctccagcatagagaagggctcttc

SEQ ID NO: 926273 - DNA, 25 bp, Homo sapien
cagatggattttccgttcaccagca

SEQ ID NO: 926274 - DNA, 25 bp, Homo sapien
cagacgttactgatgatgcattgaa

SEQ ID NO: 926275 - DNA, 25 bp, Homo sapien
gagtccacagtgtcaacctcaagcc

SEQ ID NO: 926276 - DNA, 25 bp, Homo sapien
acgagtagcctagacaccgtggagc

SEQ ID NO: 926277 - DNA, 25 bp, Homo sapien
ttcagtaagacacatcaagcatttc

SEQ ID NO: 926278 - DNA, 25 bp, Homo sapien
gttcagtaagacacatcaagcattt

SEQ ID NO: 926279 - DNA, 25 bp, Homo sapien
gaccatttgtctcacataaggcccc

SEQ ID NO: 926280 - DNA, 25 bp, Homo sapien
ggcacggggatttactgcgaccatt

SEQ ID NO: 926281 - DNA, 25 bp, Homo sapien
gaggacaaagctgtaagggcacggg

SEQ ID NO: 926282 - DNA, 25 bp, Homo sapien
gtggcttcctcgtcttattagcccc

SEQ ID NO: 926283 - DNA, 25 bp, Homo sapien
tcttgactctgaatagagtgcttat

SEQ ID NO: 926284 - DNA, 25 bp, Homo sapien
tccgtgaatcctaaacgaagcttca

SEQ ID NO: 926285 - DNA, 25 bp, Homo sapien
caacgtctccgtgaatcctaaacga

SEQ ID NO: 926286 - DNA, 25 bp, Homo sapien
agtgcttatcccaacgtctccgtga

SEQ ID NO: 926287 - DNA, 25 bp, Homo sapien
tgaggagcatcgtttatgcagcccc

SEQ ID NO: 926288 - DNA, 25 bp, Homo sapien
agtgaggagcatcgtttatgcagcc

SEQ ID NO: 926289 - DNA, 25 bp, Homo sapien
gaggagcatcgtttatgcagcccca

SEQ ID NO: 926290 - DNA, 25 bp, Homo sapien
agagtgaggagcatcgtttatgcag

SEQ ID NO: 926291 - DNA, 25 bp, Homo sapien
cagagtagtacttggggatttgttt

SEQ ID NO: 926292 - DNA, 25 bp, Homo sapien
gaactctgggcttgggccatttcca

SEQ ID NO: 926293 - DNA, 25 bp, Homo sapien
cctcgggcccattctgaactctggg

SEQ ID NO: 926294 - DNA, 25 bp, Homo sapien
tccactcttagaagtcagcttttcc

SEQ ID NO: 926295 - DNA, 25 bp, Homo sapien
attcatggcagaagaagcttgccaa

SEQ ID NO: 926296 - DNA, 25 bp, Homo sapien
tcatggcagaagaagcttgccaaag

SEQ ID NO: 926297 - DNA, 25 bp, Homo sapien
catggcagaagaagcttgccaaagc

SEQ ID NO: 926298 - DNA, 25 bp, Homo sapien
atattcatggcagaagaagcttgcc

SEQ ID NO: 926299 - DNA, 25 bp, Homo sapien
tattccagacccagacaacatcaag

SEQ ID NO: 926300 - DNA, 25 bp, Homo sapien
caagtcagtatcagcctgccatggc

SEQ ID NO: 926301 - DNA, 25 bp, Homo sapien
ctggtcacaggaccggcacctgtca

SEQ ID NO: 926302 - DNA, 25 bp, Homo sapien
catgggccagtttcatccactggtc

SEQ ID NO: 926303 - DNA, 25 bp, Homo sapien
aatagccattgagcgaatccagcca

SEQ ID NO: 926304 - DNA, 25 bp, Homo sapien
taatgaattggagggtttcaccttc

SEQ ID NO: 926305 - DNA, 25 bp, Homo sapien
ctaagttgagacctgagggtctcat

SEQ ID NO: 926306 - DNA, 25 bp, Homo sapien
ttgtatacttaatgaattggagggt

SEQ ID NO: 926307 - DNA, 25 bp, Homo sapien
ggcgttgtctagaatcttcttgccc

SEQ ID NO: 926308 - DNA, 25 bp, Homo sapien
tctgtccaaggcgttgtctagaatc

SEQ ID NO: 926309 - DNA, 25 bp, Homo sapien
ccactgcaagtattccccttatctg

SEQ ID NO: 926310 - DNA, 25 bp, Homo sapien
aagtattccccttatctgtccaagg

SEQ ID NO: 926311 - DNA, 25 bp, Homo sapien
aaatatctcgggcaagttaaatgag

SEQ ID NO: 926312 - DNA, 25 bp, Homo sapien
tctagaactgtgagtccttgtggaa

SEQ ID NO: 926313 - DNA, 25 bp, Homo sapien
tggcccgaattgatacctcccaaag

SEQ ID NO: 926314 - DNA, 25 bp, Homo sapien
tagcagtgtcactagctgaatgtgg

SEQ ID NO: 926315 - DNA, 25 bp, Homo sapien
cagccaggctgctttccctgtcaat

SEQ ID NO: 926316 - DNA, 25 bp, Homo sapien
gccaggctgctttccctgtcaatag

SEQ ID NO: 926317 - DNA, 25 bp, Homo sapien
ttccctgtcaatagcattctcattc

SEQ ID NO: 926318 - DNA, 25 bp, Homo sapien
ctgctttccctgtcaatagcattct

SEQ ID NO: 926319 - DNA, 25 bp, Homo sapien
catactgaaataggagatggcctgc

SEQ ID NO: 926320 - DNA, 25 bp, Homo sapien
gaacacactatcgacagcaaatgga

SEQ ID NO: 926321 - DNA, 25 bp, Homo sapien
aggctgccagttgtccccacttgtg

SEQ ID NO: 926322 - DNA, 25 bp, Homo sapien
tcttggctccgtattaatggcacac

SEQ ID NO: 926323 - DNA, 25 bp, Homo sapien
acagttgcaagtgctccccagggtg

SEQ ID NO: 926324 - DNA, 25 bp, Homo sapien
tgggcatttagggtagactcctccc

SEQ ID NO: 926325 - DNA, 25 bp, Homo sapien
cactgggtgcagctagtcggttatt

SEQ ID NO: 926326 - DNA, 25 bp, Homo sapien
cgaggtagcagcacccataggtgtg

SEQ ID NO: 926327 - DNA, 25 bp, Homo sapien
ttccattgcctcagatccttcttct

SEQ ID NO: 926328 - DNA, 25 bp, Homo sapien
cgcatattgaaatccttccattgcc

SEQ ID NO: 926329 - DNA, 25 bp, Homo sapien
tattgaaatccttccattgcctcag

SEQ ID NO: 926330 - DNA, 25 bp, Homo sapien
ttccgcatattgaaatccttccatt

SEQ ID NO: 926331 - DNA, 25 bp, Homo sapien
ttttgccaagggatgttgaaggctg

SEQ ID NO: 926332 - DNA, 25 bp, Homo sapien
cccagatcactgtgggaagacccca

SEQ ID NO: 926333 - DNA, 25 bp, Homo sapien
tgcatcctacatccctagagttgtg

SEQ ID NO: 926334 - DNA, 25 bp, Homo sapien
tctaggtcttaggtcccccagatca

SEQ ID NO: 926335 - DNA, 25 bp, Homo sapien
ctcctgtgagccattccagaatagg

SEQ ID NO: 926336 - DNA, 25 bp, Homo sapien
aggagcctggtgtggccatttctcc

SEQ ID NO: 926337 - DNA, 25 bp, Homo sapien
cattccagaatagggtgtggggccc

SEQ ID NO: 926338 - DNA, 25 bp, Homo sapien
tgagccattccagaatagggtgtgg

SEQ ID NO: 926339 - DNA, 25 bp, Homo sapien
ggaaaacatcgaaacatccatactg

SEQ ID NO: 926340 - DNA, 25 bp, Homo sapien
caaggaaggaggtaacgcttcaagt

SEQ ID NO: 926341 - DNA, 25 bp, Homo sapien
acatccatactgtcagctgacatga

SEQ ID NO: 926342 - DNA, 25 bp, Homo sapien
aacgcttcaagtggcccttctgcct

SEQ ID NO: 926343 - DNA, 25 bp, Homo sapien
tgaaatgattaagatttcggaggtt

SEQ ID NO: 926344 - DNA, 25 bp, Homo sapien
ttcagtttccggcatggtactgcca

SEQ ID NO: 926345 - DNA, 25 bp, Homo sapien
caggatttaggcaggaatctgccat

SEQ ID NO: 926346 - DNA, 25 bp, Homo sapien
cattttcagtttccggcatggtact

SEQ ID NO: 926347 - DNA, 25 bp, Homo sapien
tgtccttcacgctgctggcatatcc

SEQ ID NO: 926348 - DNA, 25 bp, Homo sapien
atatcctgcaaatgtcatggcttca

SEQ ID NO: 926349 - DNA, 25 bp, Homo sapien
cttcacgctgctggcatatcctgca

SEQ ID NO: 926350 - DNA, 25 bp, Homo sapien
tgcaaatgtcatggcttcagtgccc

SEQ ID NO: 926351 - DNA, 25 bp, Homo sapien
catactgtctcagaccaaccccatc

SEQ ID NO: 926352 - DNA, 25 bp, Homo sapien
tactgtctcagaccaaccccatcac

SEQ ID NO: 926353 - DNA, 25 bp, Homo sapien
tccatactgtctcagaccaacccca

SEQ ID NO: 926354 - DNA, 25 bp, Homo sapien
atccatactgtctcagaccaacccc

SEQ ID NO: 926355 - DNA, 25 bp, Homo sapien
tcttccttctctccaacatgatttt

SEQ ID NO: 926356 - DNA, 25 bp, Homo sapien
cttcttccttctctccaacatgatt

SEQ ID NO: 926357 - DNA, 25 bp, Homo sapien
ttcttccttctctccaacatgattt

SEQ ID NO: 926358 - DNA, 25 bp, Homo sapien
cattctcgcagcaaatacagtgcct

SEQ ID NO: 926359 - DNA, 25 bp, Homo sapien
aaatacagtgcctcgtcttgaccag

SEQ ID NO: 926360 - DNA, 25 bp, Homo sapien
gcagcaaatacagtgcctcgtcttg

SEQ ID NO: 926361 - DNA, 25 bp, Homo sapien
gtgcctcgtcttgaccagtgaagat

SEQ ID NO: 926362 - DNA, 25 bp, Homo sapien
aatcaagcggtggtctactgagagc

SEQ ID NO: 926363 - DNA, 25 bp, Homo sapien
taagcagaaatcaagcggtggtcta

SEQ ID NO: 926364 - DNA, 25 bp, Homo sapien
gtgggaaggtaacacagctctctcc

SEQ ID NO: 926365 - DNA, 25 bp, Homo sapien
taacccttaagtgagaagtagcgtg

SEQ ID NO: 926366 - DNA, 25 bp, Homo sapien
gctctctggtcatagttactatgtt

SEQ ID NO: 926367 - DNA, 25 bp, Homo sapien
tcatagttactatgttgttgtttgc

SEQ ID NO: 926368 - DNA, 25 bp, Homo sapien
atagttactatgttgttgtttgcca

SEQ ID NO: 926369 - DNA, 25 bp, Homo sapien
ttgctctctggtcatagttactatg

SEQ ID NO: 926370 - DNA, 25 bp, Homo sapien
ctccttggtgcaggagcagtcaagc

SEQ ID NO: 926371 - DNA, 25 bp, Homo sapien
ttcaccccagctaccattgtagctg

SEQ ID NO: 926372 - DNA, 25 bp, Homo sapien
tgaaagtccattgtgcctgctcagg

SEQ ID NO: 926373 - DNA, 25 bp, Homo sapien
agctgccctaccattgtgtgcagcc

SEQ ID NO: 926374 - DNA, 25 bp, Homo sapien
atctgtcacctgttcacttggaggc

SEQ ID NO: 926375 - DNA, 25 bp, Homo sapien
ctgtcacctgttcacttggaggcat

SEQ ID NO: 926376 - DNA, 25 bp, Homo sapien
tctgtcacctgttcacttggaggca

SEQ ID NO: 926377 - DNA, 25 bp, Homo sapien
aggaatcctcatagtctgttgcagt

SEQ ID NO: 926378 - DNA, 25 bp, Homo sapien
ctcattcacccttctgtggatgagc

SEQ ID NO: 926379 - DNA, 25 bp, Homo sapien
tccagtgcactgagaatgttaacct

SEQ ID NO: 926380 - DNA, 25 bp, Homo sapien
tgagaatgttaacctcattcaccct

SEQ ID NO: 926381 - DNA, 25 bp, Homo sapien
gtgcactgagaatgttaacctcatt

SEQ ID NO: 926382 - DNA, 25 bp, Homo sapien
gaattccacaagtattcttcctggc

SEQ ID NO: 926383 - DNA, 25 bp, Homo sapien
ggatggcgttcccaccttcactctt

SEQ ID NO: 926384 - DNA, 25 bp, Homo sapien
tgctgactgtcaatatcaccttttg

SEQ ID NO: 926385 - DNA, 25 bp, Homo sapien
gctgagaggcaacgataggatgact

SEQ ID NO: 926386 - DNA, 25 bp, Homo sapien
gagttctgacagcacctactgtgca

SEQ ID NO: 926387 - DNA, 25 bp, Homo sapien
ggagttctgacagcacctactgtgc

SEQ ID NO: 926388 - DNA, 25 bp, Homo sapien
gtgcacagggcctgattctgaatgg

SEQ ID NO: 926389 - DNA, 25 bp, Homo sapien
tttaggaacaaatcgccactcatgc

SEQ ID NO: 926390 - DNA, 25 bp, Homo sapien
ctccagcccctgaacagatactctg

SEQ ID NO: 926391 - DNA, 25 bp, Homo sapien
gatactctgcgtaaaatttaggaac

SEQ ID NO: 926392 - DNA, 25 bp, Homo sapien
ggaacaaatcgccactcatgctgcc

SEQ ID NO: 926393 - DNA, 25 bp, Homo sapien
agaaaagaccaaactgtttcaactg

SEQ ID NO: 926394 - DNA, 25 bp, Homo sapien
gcaagaaaagaccaaactgtttcaa

SEQ ID NO: 926395 - DNA, 25 bp, Homo sapien
aactgtttcaactgtcccagctctt

SEQ ID NO: 926396 - DNA, 25 bp, Homo sapien
agaccaaactgtttcaactgtccca

SEQ ID NO: 926397 - DNA, 25 bp, Homo sapien
cccttccatgaaggggcacctagag

SEQ ID NO: 926398 - DNA, 25 bp, Homo sapien
tccatgaaggggcacctagagcact

SEQ ID NO: 926399 - DNA, 25 bp, Homo sapien
tgaaggggcacctagagcactgaca

SEQ ID NO: 926400 - DNA, 25 bp, Homo sapien
ggacccttccatgaaggggcaccta

SEQ ID NO: 926401 - DNA, 25 bp, Homo sapien
agcaggcacagtgactggtccccat

SEQ ID NO: 926402 - DNA, 25 bp, Homo sapien
aggcacagtgactggtccccatgaa

SEQ ID NO: 926403 - DNA, 25 bp, Homo sapien
acagtgactggtccccatgaaggtg

SEQ ID NO: 926404 - DNA, 25 bp, Homo sapien
gcacagtgactggtccccatgaagg

SEQ ID NO: 926405 - DNA, 25 bp, Homo sapien
ggagttgctgggtaatcgttccgct

SEQ ID NO: 926406 - DNA, 25 bp, Homo sapien
aaacaggcccctgccgctttaagtg

SEQ ID NO: 926407 - DNA, 25 bp, Homo sapien
cctgccgctttaagtggagttgctg

SEQ ID NO: 926408 - DNA, 25 bp, Homo sapien
cgctcggttgcataaccagaaaggg

SEQ ID NO: 926409 - DNA, 25 bp, Homo sapien
tgctgagctgtgtttataacttctc

SEQ ID NO: 926410 - DNA, 25 bp, Homo sapien
tgatagtctcacccctccacagtga

SEQ ID NO: 926411 - DNA, 25 bp, Homo sapien
tcaaagagagggatccgagtggtcc

SEQ ID NO: 926412 - DNA, 25 bp, Homo sapien
aagactccattttcattgacccata

SEQ ID NO: 926413 - DNA, 25 bp, Homo sapien
tgaaagccagtctgacttcatcctg

SEQ ID NO: 926414 - DNA, 25 bp, Homo sapien
tttcactcttgcaaccctgaaacag

SEQ ID NO: 926415 - DNA, 25 bp, Homo sapien
actcttgcaaccctgaaacagtgga

SEQ ID NO: 926416 - DNA, 25 bp, Homo sapien
acggtttcactcttgcaaccctgaa

SEQ ID NO: 926417 - DNA, 25 bp, Homo sapien
tcccagcatcattgacattccagga

SEQ ID NO: 926418 - DNA, 25 bp, Homo sapien
ccctgcgctgtagcgtggctgcctg

SEQ ID NO: 926419 - DNA, 25 bp, Homo sapien
atggggtaggtgtgcttgtcccagc

SEQ ID NO: 926420 - DNA, 25 bp, Homo sapien
aggctgcttcctgccggtcctcccc

SEQ ID NO: 926421 - DNA, 25 bp, Homo sapien
tttcaaggtcaaacatctagttggt

SEQ ID NO: 926422 - DNA, 25 bp, Homo sapien
tatcattaaaagaacgcagtgtggt

SEQ ID NO: 926423 - DNA, 25 bp, Homo sapien
tctttgctcttatcgaagaaaggaa

SEQ ID NO: 926424 - DNA, 25 bp, Homo sapien
tggtagtagaggtaatgagttgttt

SEQ ID NO: 926425 - DNA, 25 bp, Homo sapien
ttgcgctcagagcactttacaacac

SEQ ID NO: 926426 - DNA, 25 bp, Homo sapien
agagaggagactctagtcctctggg

SEQ ID NO: 926427 - DNA, 25 bp, Homo sapien
ctgtggctttctgcggggctgctgg

SEQ ID NO: 926428 - DNA, 25 bp, Homo sapien
tgctggtgttttcttgcgctcagag

SEQ ID NO: 926429 - DNA, 25 bp, Homo sapien
catcccagcctcccggagtattggg

SEQ ID NO: 926430 - DNA, 25 bp, Homo sapien
gaggaacataccaccatgcgggcta

SEQ ID NO: 926431 - DNA, 25 bp, Homo sapien
caggctgttcctgaatccttgggct

SEQ ID NO: 926432 - DNA, 25 bp, Homo sapien
atcaacccccctggacttgagcaac

SEQ ID NO: 926433 - DNA, 25 bp, Homo sapien
caaaacacagttccgctgttgcctt

SEQ ID NO: 926434 - DNA, 25 bp, Homo sapien
tattagaacaatggcggaagaggca

SEQ ID NO: 926435 - DNA, 25 bp, Homo sapien
aatgaaaggttattcactccctctg

SEQ ID NO: 926436 - DNA, 25 bp, Homo sapien
caaatagtgctgtacagatcatgac

SEQ ID NO: 926437 - DNA, 25 bp, Homo sapien
ttcccaggaggctcacggactgcct

SEQ ID NO: 926438 - DNA, 25 bp, Homo sapien
gctggtactgcagttggcacggctc

SEQ ID NO: 926439 - DNA, 25 bp, Homo sapien
tagaaacaaacctctaggcttccca

SEQ ID NO: 926440 - DNA, 25 bp, Homo sapien
ggctgtgagcagataatcccccatt

SEQ ID NO: 926441 - DNA, 25 bp, Homo sapien
gaaaatcttgtgattgagctgttga

SEQ ID NO: 926442 - DNA, 25 bp, Homo sapien
taaccccgatttgtgctctctgtcg

SEQ ID NO: 926443 - DNA, 25 bp, Homo sapien
tttgagagtgcttttgcagcctggg

SEQ ID NO: 926444 - DNA, 25 bp, Homo sapien
agtgaaacgagtgggtcatttgaga

SEQ ID NO: 926445 - DNA, 25 bp, Homo sapien
cactgtccagaattttaagggctta

SEQ ID NO: 926446 - DNA, 25 bp, Homo sapien
tgtcactgtccagaattttaagggc

SEQ ID NO: 926447 - DNA, 25 bp, Homo sapien
ctaagtacagagtgtcactgtccag

SEQ ID NO: 926448 - DNA, 25 bp, Homo sapien
taagtacagagtgtcactgtccaga

SEQ ID NO: 926449 - DNA, 25 bp, Homo sapien
tacaacacggatggaaatttgagcc

SEQ ID NO: 926450 - DNA, 25 bp, Homo sapien
tgaaattgtacaacaggcagaagct

SEQ ID NO: 926451 - DNA, 25 bp, Homo sapien
gaaagttgtgtccttccagaaccac

SEQ ID NO: 926452 - DNA, 25 bp, Homo sapien
ccagaaccacggtttctcagtgcag

SEQ ID NO: 926453 - DNA, 25 bp, Homo sapien
acctgactgtgagctgttgtaatag

SEQ ID NO: 926454 - DNA, 25 bp, Homo sapien
cacctgactgtgagctgttgtaata

SEQ ID NO: 926455 - DNA, 25 bp, Homo sapien
acacctgactgtgagctgttgtaat

SEQ ID NO: 926456 - DNA, 25 bp, Homo sapien
ttttatatccgcacagattaaaagc

SEQ ID NO: 926457 - DNA, 25 bp, Homo sapien
gcttggttccattttgtgctctcct

SEQ ID NO: 926458 - DNA, 25 bp, Homo sapien
ctgtcgcttggttccattttgtgct

SEQ ID NO: 926459 - DNA, 25 bp, Homo sapien
tttttatatccgcacagattaaaag

SEQ ID NO: 926460 - DNA, 25 bp, Homo sapien
tattggactctagggatgctcacga

SEQ ID NO: 926461 - DNA, 25 bp, Homo sapien
tcttagcctgggtctggcgcatcag

SEQ ID NO: 926462 - DNA, 25 bp, Homo sapien
tcagagccagttgacagcttcagag

SEQ ID NO: 926463 - DNA, 25 bp, Homo sapien
agagagtgcttccttgtcagcctca

SEQ ID NO: 926464 - DNA, 25 bp, Homo sapien
gaacaattggctggctacattgagg

SEQ ID NO: 926465 - DNA, 25 bp, Homo sapien
gagatggcacatctgccttgggtga

SEQ ID NO: 926466 - DNA, 25 bp, Homo sapien
ttacgaacgctggatgaagaacaat

SEQ ID NO: 926467 - DNA, 25 bp, Homo sapien
cccaggctctaggtcggtgacatca

SEQ ID NO: 926468 - DNA, 25 bp, Homo sapien
tgactgctgcgctggtcccgtgaga

SEQ ID NO: 926469 - DNA, 25 bp, Homo sapien
ttaacacgtctggtgactgctgcgc

SEQ ID NO: 926470 - DNA, 25 bp, Homo sapien
gttgagagaacaaggcattaacacg

SEQ ID NO: 926471 - DNA, 25 bp, Homo sapien
caaggcattaacacgtctggtgact

SEQ ID NO: 926472 - DNA, 25 bp, Homo sapien
gagaaattctccagcggagcgtgta

SEQ ID NO: 926473 - DNA, 25 bp, Homo sapien
gagcacacagctcctttcgtaaagt

SEQ ID NO: 926474 - DNA, 25 bp, Homo sapien
gagcgtgtagccgtaccctggttta

SEQ ID NO: 926475 - DNA, 25 bp, Homo sapien
tggtgtaggaacctgagcacacagc

SEQ ID NO: 926476 - DNA, 25 bp, Homo sapien
cagaaatgggccacaattcaaagtg

SEQ ID NO: 926477 - DNA, 25 bp, Homo sapien
gaaatgggccacaattcaaagtgtt

SEQ ID NO: 926478 - DNA, 25 bp, Homo sapien
ttctgatgaactgccgttctccagc

SEQ ID NO: 926479 - DNA, 25 bp, Homo sapien
aatgggccacaattcaaagtgttct

SEQ ID NO: 926480 - DNA, 25 bp, Homo sapien
cagcagcctggctcatcactgaggt

SEQ ID NO: 926481 - DNA, 25 bp, Homo sapien
cctcctcgggctgttccactccaca

SEQ ID NO: 926482 - DNA, 25 bp, Homo sapien
ggctcatcactgaggttgagtccat

SEQ ID NO: 926483 - DNA, 25 bp, Homo sapien
cagtttcctcctcgggctgttccac

SEQ ID NO: 926484 - DNA, 25 bp, Homo sapien
cctcctatgttcttgggagatctct

SEQ ID NO: 926485 - DNA, 25 bp, Homo sapien
tgcctcctatgttcttgggagatct

SEQ ID NO: 926486 - DNA, 25 bp, Homo sapien
gcctcctatgttcttgggagatctc

SEQ ID NO: 926487 - DNA, 25 bp, Homo sapien
ttgaaagaaaaccactctggtattg

SEQ ID NO: 926488 - DNA, 25 bp, Homo sapien
cagtaattgccttttacgaagagca

SEQ ID NO: 926489 - DNA, 25 bp, Homo sapien
taaagcaacctttattttatggcaa

SEQ ID NO: 926490 - DNA, 25 bp, Homo sapien
atttgaagcctgtgtttattgccca

SEQ ID NO: 926491 - DNA, 25 bp, Homo sapien
tgaagaagataaagcggcccggctg

SEQ ID NO: 926492 - DNA, 25 bp, Homo sapien
ttaatgaagaagataaagcggcccg

SEQ ID NO: 926493 - DNA, 25 bp, Homo sapien
aatgaagaagataaagcggcccggc

SEQ ID NO: 926494 - DNA, 25 bp, Homo sapien
taaagcggcccggctggtgtcccac

SEQ ID NO: 926495 - DNA, 25 bp, Homo sapien
gccagctcccacaaaagcacgatta

SEQ ID NO: 926496 - DNA, 25 bp, Homo sapien
gggtcctcagagacaaactgtgttc

SEQ ID NO: 926497 - DNA, 25 bp, Homo sapien
ggctcggcgcagtaagttcagatta

SEQ ID NO: 926498 - DNA, 25 bp, Homo sapien
tgctcagtctgtcagaatgggctgc

SEQ ID NO: 926499 - DNA, 25 bp, Homo sapien
ctgtgtgcgtgtcgggcatgctgct

SEQ ID NO: 926500 - DNA, 25 bp, Homo sapien
ctgcactgctgtgtgcgtgtcgggc

SEQ ID NO: 926501 - DNA, 25 bp, Homo sapien
gggctggcgactggcggcggggaag

SEQ ID NO: 926502 - DNA, 25 bp, Homo sapien
actgctgtgtgcgtgtcgggcatgc

SEQ ID NO: 926503 - DNA, 25 bp, Homo sapien
tggtggctcgaaacacccctcctgc

SEQ ID NO: 926504 - DNA, 25 bp, Homo sapien
aggagcagtaggcaaagccctctac

SEQ ID NO: 926505 - DNA, 25 bp, Homo sapien
gcagttcacaggctggacctttaag

SEQ ID NO: 926506 - DNA, 25 bp, Homo sapien
tcacaggctggacctttaaggttcc

SEQ ID NO: 926507 - DNA, 25 bp, Homo sapien
ttgctcaccaagtacttactaagct

SEQ ID NO: 926508 - DNA, 25 bp, Homo sapien
catttgctcaccaagtacttactaa

SEQ ID NO: 926509 - DNA, 25 bp, Homo sapien
tccatttgctcaccaagtacttact

SEQ ID NO: 926510 - DNA, 25 bp, Homo sapien
ccatccatttgctcaccaagtactt

SEQ ID NO: 926511 - DNA, 25 bp, Homo sapien
gaagagcattgtttatcaggtactg

SEQ ID NO: 926512 - DNA, 25 bp, Homo sapien
ccatctctaggtggcctggcagtgg

SEQ ID NO: 926513 - DNA, 25 bp, Homo sapien
ggactgcaggacctgtgcatgctgt

SEQ ID NO: 926514 - DNA, 25 bp, Homo sapien
tcaggtactgtcagaggactattcc

SEQ ID NO: 926515 - DNA, 25 bp, Homo sapien
cacacctgtccagaaagtgcttttt

SEQ ID NO: 926516 - DNA, 25 bp, Homo sapien
cttccagtattttgcatgtaagatg

SEQ ID NO: 926517 - DNA, 25 bp, Homo sapien
tccaggcaaacgtgatccttatgtg

SEQ ID NO: 926518 - DNA, 25 bp, Homo sapien
gatggcattgttatgtttatcgaac

SEQ ID NO: 926519 - DNA, 25 bp, Homo sapien
tgggcggggattgaaagacggcttg

SEQ ID NO: 926520 - DNA, 25 bp, Homo sapien
cttgtgggcggggattgaaagacgg

SEQ ID NO: 926521 - DNA, 25 bp, Homo sapien
tcccttggctaggagtgtgggccta

SEQ ID NO: 926522 - DNA, 25 bp, Homo sapien
cagtggtgcttgtgggcggggattg

SEQ ID NO: 926523 - DNA, 25 bp, Homo sapien
gaaagctcagctttccgttgctaga

SEQ ID NO: 926524 - DNA, 25 bp, Homo sapien
gccgtcatcccttcttgcccatatt

SEQ ID NO: 926525 - DNA, 25 bp, Homo sapien
tgatgtgggccgtagcactgctacc

SEQ ID NO: 926526 - DNA, 25 bp, Homo sapien
ccactggtcacaatgacagtttgtt

SEQ ID NO: 926527 - DNA, 25 bp, Homo sapien
tcccccgttccacatggcagccagt

SEQ ID NO: 926528 - DNA, 25 bp, Homo sapien
ttctgatctcccccgttccacatgg

SEQ ID NO: 926529 - DNA, 25 bp, Homo sapien
ccccgttccacatggcagccagtgt

SEQ ID NO: 926530 - DNA, 25 bp, Homo sapien
gatctcccccgttccacatggcagc

SEQ ID NO: 926531 - DNA, 25 bp, Homo sapien
tgcctctgcccgttgatggcactga

SEQ ID NO: 926532 - DNA, 25 bp, Homo sapien
tccacttgccaggtgaaggagtccc

SEQ ID NO: 926533 - DNA, 25 bp, Homo sapien
gaaggagtccctgcattcatcaggc

SEQ ID NO: 926534 - DNA, 25 bp, Homo sapien
tcatagaagcttcagtcatttccac

SEQ ID NO: 926535 - DNA, 25 bp, Homo sapien
atcaagtctcccagagcagttacag

SEQ ID NO: 926536 - DNA, 25 bp, Homo sapien
aaatcatcaagtctcccagagcagt

SEQ ID NO: 926537 - DNA, 25 bp, Homo sapien
atcatcaagtctcccagagcagtta

SEQ ID NO: 926538 - DNA, 25 bp, Homo sapien
caaatcatcaagtctcccagagcag

SEQ ID NO: 926539 - DNA, 25 bp, Homo sapien
aacaatctgatcagaggagggcctt

SEQ ID NO: 926540 - DNA, 25 bp, Homo sapien
gctgttgaacaatctgatcagagga

SEQ ID NO: 926541 - DNA, 25 bp, Homo sapien
tgaacaatctgatcagaggagggcc

SEQ ID NO: 926542 - DNA, 25 bp, Homo sapien
tgttgaacaatctgatcagaggagg

SEQ ID NO: 926543 - DNA, 25 bp, Homo sapien
catgttggagaatgcgttctggtcc

SEQ ID NO: 926544 - DNA, 25 bp, Homo sapien
cccctgagctgatataaaggagccc

SEQ ID NO: 926545 - DNA, 25 bp, Homo sapien
tcagcagctgattggatccgctcac

SEQ ID NO: 926546 - DNA, 25 bp, Homo sapien
tgctcagtcttggacattctcccag

SEQ ID NO: 926547 - DNA, 25 bp, Homo sapien
ttcaggaaatgtcaccccatggcct

SEQ ID NO: 926548 - DNA, 25 bp, Homo sapien
cctgatgtagtggtaggagactgga

SEQ ID NO: 926549 - DNA, 25 bp, Homo sapien
ccaagagtatccattcaggaaatgt

SEQ ID NO: 926550 - DNA, 25 bp, Homo sapien
caccccatggcctgatgtagtggta

SEQ ID NO: 926551 - DNA, 25 bp, Homo sapien
tgccgctgcaccacttcaaaagcag

SEQ ID NO: 926552 - DNA, 25 bp, Homo sapien
taacgcgatcccgcggcacctggta

SEQ ID NO: 926553 - DNA, 25 bp, Homo sapien
ctgataatggcaacctggccttctc

SEQ ID NO: 926554 - DNA, 25 bp, Homo sapien
cctggtagccactgataatggcaac

SEQ ID NO: 926555 - DNA, 25 bp, Homo sapien
ttttacctctccttgaagctgaagc

SEQ ID NO: 926556 - DNA, 25 bp, Homo sapien
ctgcttttacctctccttgaagctg

SEQ ID NO: 926557 - DNA, 25 bp, Homo sapien
ctctccttgaagctgaagctccttc

SEQ ID NO: 926558 - DNA, 25 bp, Homo sapien
tctccttgaagctgaagctccttct

SEQ ID NO: 926559 - DNA, 25 bp, Homo sapien
cgtggacactgtccaggtgtagtcc

SEQ ID NO: 926560 - DNA, 25 bp, Homo sapien
gtgttttcttttcacgccacgacat

SEQ ID NO: 926561 - DNA, 25 bp, Homo sapien
aagacatttgcaacttatctgcaaa

SEQ ID NO: 926562 - DNA, 25 bp, Homo sapien
cttccccagcgcagtaaacgtggac

SEQ ID NO: 926563 - DNA, 25 bp, Homo sapien
aagtctctatattcccctgaaagcc

SEQ ID NO: 926564 - DNA, 25 bp, Homo sapien
catctcgtcccaagcaaagtctcta

SEQ ID NO: 926565 - DNA, 25 bp, Homo sapien
tcctcacggtcttctaaattcatct

SEQ ID NO: 926566 - DNA, 25 bp, Homo sapien
cgtggctaggctttcctcacggtct

SEQ ID NO: 926567 - DNA, 25 bp, Homo sapien
tgtgggttgaccacgaagctcagag

SEQ ID NO: 926568 - DNA, 25 bp, Homo sapien
taaagcaagtaagtgccttaggctc

SEQ ID NO: 926569 - DNA, 25 bp, Homo sapien
gaaataaggcatacagcggaagtgt

SEQ ID NO: 926570 - DNA, 25 bp, Homo sapien
gaagaggctaacactgccgaacgta

SEQ ID NO: 926571 - DNA, 25 bp, Homo sapien
tcggattggcaaccatgaggaaagc

SEQ ID NO: 926572 - DNA, 25 bp, Homo sapien
cttatatgctaatactcggattggc

SEQ ID NO: 926573 - DNA, 25 bp, Homo sapien
tgtggtttttcgaagcacagggacc

SEQ ID NO: 926574 - DNA, 25 bp, Homo sapien
aaacctggcccaatcagagtcttat

SEQ ID NO: 926575 - DNA, 25 bp, Homo sapien
gagattattcatcccaactggtgtg

SEQ ID NO: 926576 - DNA, 25 bp, Homo sapien
ggtcggttctctaatctgcctacag

SEQ ID NO: 926577 - DNA, 25 bp, Homo sapien
tgctcatgtgatccggtccaggtcg

SEQ ID NO: 926578 - DNA, 25 bp, Homo sapien
tcataactagttgggactggacctg

SEQ ID NO: 926579 - DNA, 25 bp, Homo sapien
tttcttagagtgttccagggagggc

SEQ ID NO: 926580 - DNA, 25 bp, Homo sapien
gaagatccacactcgcttccctgtg

SEQ ID NO: 926581 - DNA, 25 bp, Homo sapien
gatgttaagttgacatccgtgcccc

SEQ ID NO: 926582 - DNA, 25 bp, Homo sapien
ctctcacccgagtggcggatgttaa

SEQ ID NO: 926583 - DNA, 25 bp, Homo sapien
ccaacaagaattcctgcaagtcaat

SEQ ID NO: 926584 - DNA, 25 bp, Homo sapien
cgaaactaagggaattctacgacat

SEQ ID NO: 926585 - DNA, 25 bp, Homo sapien
gaccatcaggatgcttaataataag

SEQ ID NO: 926586 - DNA, 25 bp, Homo sapien
cccagcaagtgtatgattccccaaa

SEQ ID NO: 926587 - DNA, 25 bp, Homo sapien
ttctaacattgccacttagtgcatc

SEQ ID NO: 926588 - DNA, 25 bp, Homo sapien
tggttgtttctaacattgccactta

SEQ ID NO: 926589 - DNA, 25 bp, Homo sapien
acgcgatcagttcaccagcagttcc

SEQ ID NO: 926590 - DNA, 25 bp, Homo sapien
ctagagaactggaaaacgcgatcag

SEQ ID NO: 926591 - DNA, 25 bp, Homo sapien
agcaattgcagagactcccttccca

SEQ ID NO: 926592 - DNA, 25 bp, Homo sapien
cagcaattgcagagactcccttccc

SEQ ID NO: 926593 - DNA, 25 bp, Homo sapien
gcaattgcagagactcccttcccac

SEQ ID NO: 926594 - DNA, 25 bp, Homo sapien
ccagaagctgcacccatgcccggga

SEQ ID NO: 926595 - DNA, 25 bp, Homo sapien
agaagctgcacccatgcccgggagc

SEQ ID NO: 926596 - DNA, 25 bp, Homo sapien
cctcccagaagctgcacccatgccc

SEQ ID NO: 926597 - DNA, 25 bp, Homo sapien
tcccagaagctgcacccatgcccgg

SEQ ID NO: 926598 - DNA, 25 bp, Homo sapien
tttatacatgggtgcaatgacagcc

SEQ ID NO: 926599 - DNA, 25 bp, Homo sapien
ggctacagctcttaatttatacatg

SEQ ID NO: 926600 - DNA, 25 bp, Homo sapien
gctcttaatttatacatgggtgcaa

SEQ ID NO: 926601 - DNA, 25 bp, Homo sapien
taatttatacatgggtgcaatgaca

SEQ ID NO: 926602 - DNA, 25 bp, Homo sapien
acattgtgttctacgccgatccgtc

SEQ ID NO: 926603 - DNA, 25 bp, Homo sapien
gttctacgccgatccgtcctttcag

SEQ ID NO: 926604 - DNA, 25 bp, Homo sapien
agctcatgcagacattttgtataca

SEQ ID NO: 926605 - DNA, 25 bp, Homo sapien
gccgatccgtcctttcagctcatgc

SEQ ID NO: 926606 - DNA, 25 bp, Homo sapien
ctgtccaggttctgaccctgtctgg

SEQ ID NO: 926607 - DNA, 25 bp, Homo sapien
cacccttattaggagacccaagcta

SEQ ID NO: 926608 - DNA, 25 bp, Homo sapien
ggtcctctataaagatgtcgttccc

SEQ ID NO: 926609 - DNA, 25 bp, Homo sapien
gggattctttgcagtaggtcctcta

SEQ ID NO: 926610 - DNA, 25 bp, Homo sapien
caagctgcaggtgtggaattaaaac

SEQ ID NO: 926611 - DNA, 25 bp, Homo sapien
acttcaaagaggcaaggagtggcca

SEQ ID NO: 926612 - DNA, 25 bp, Homo sapien
ggatgatagacgtaactgctgccca

SEQ ID NO: 926613 - DNA, 25 bp, Homo sapien
gaagtatgccatacagcaagcaccc

SEQ ID NO: 926614 - DNA, 25 bp, Homo sapien
cgagagctgcgagcgtctggaggag

SEQ ID NO: 926615 - DNA, 25 bp, Homo sapien
cgccgaggaagtcccgctccgagag

SEQ ID NO: 926616 - DNA, 25 bp, Homo sapien
cggccgccgatggagttcacttgag

SEQ ID NO: 926617 - DNA, 25 bp, Homo sapien
aggaggcgcgctcggcgcagtcggg

SEQ ID NO: 926618 - DNA, 25 bp, Homo sapien
cgggagaaagaactcgcgcttaagt

SEQ ID NO: 926619 - DNA, 25 bp, Homo sapien
aactcgcgcttaagtttccaggagg

SEQ ID NO: 926620 - DNA, 25 bp, Homo sapien
gagatctgggctcgggttcggcagc

SEQ ID NO: 926621 - DNA, 25 bp, Homo sapien
ttcggcagcgggagaaagaactcgc

SEQ ID NO: 926622 - DNA, 25 bp, Homo sapien
cattgcagtcgtcatcttttgggtg

SEQ ID NO: 926623 - DNA, 25 bp, Homo sapien
agccagagccccattgcagtcgtca

SEQ ID NO: 926624 - DNA, 25 bp, Homo sapien
aatgttttcacggtcagccagagcc

SEQ ID NO: 926625 - DNA, 25 bp, Homo sapien
ggatccagaatgttttcacggtcag

SEQ ID NO: 926626 - DNA, 25 bp, Homo sapien
gcctgaaagtcaggtctcctatctt

SEQ ID NO: 926627 - DNA, 25 bp, Homo sapien
tctgtttttactccgggtagtggca

SEQ ID NO: 926628 - DNA, 25 bp, Homo sapien
gtagtggcagtgtttacaggatgaa

SEQ ID NO: 926629 - DNA, 25 bp, Homo sapien
ccttcaaggaactgtcagcttcatg

SEQ ID NO: 926630 - DNA, 25 bp, Homo sapien
tggagcctttaggttagtgaagcct

SEQ ID NO: 926631 - DNA, 25 bp, Homo sapien
ttccggtggaacacagatgaggttg

SEQ ID NO: 926632 - DNA, 25 bp, Homo sapien
agatgaggttggagcctttaggtta

SEQ ID NO: 926633 - DNA, 25 bp, Homo sapien
gggttggttttgcactgagaatttc

SEQ ID NO: 926634 - DNA, 25 bp, Homo sapien
gaatcatcctttgagcgttcttgga

SEQ ID NO: 926635 - DNA, 25 bp, Homo sapien
tgtactgttagtgtgaaaccaccag

SEQ ID NO: 926636 - DNA, 25 bp, Homo sapien
cactggaattgtgaaccgggtggaa

SEQ ID NO: 926637 - DNA, 25 bp, Homo sapien
catgttgcatgaaagtgtctcccga

SEQ ID NO: 926638 - DNA, 25 bp, Homo sapien
gaggaggcgtagattacagtgtaac

SEQ ID NO: 926639 - DNA, 25 bp, Homo sapien
tggaggaggcgtagattacagtgta

SEQ ID NO: 926640 - DNA, 25 bp, Homo sapien
ggaggaggcgtagattacagtgtaa

SEQ ID NO: 926641 - DNA, 25 bp, Homo sapien
gattgattcccactcgagtaatccg

SEQ ID NO: 926642 - DNA, 25 bp, Homo sapien
gaacctctggtggaacgagtgcaac

SEQ ID NO: 926643 - DNA, 25 bp, Homo sapien
gagtaatccgctccgtgcatttcgg

SEQ ID NO: 926644 - DNA, 25 bp, Homo sapien
tgaattatgaatccagtgactgtac

SEQ ID NO: 926645 - DNA, 25 bp, Homo sapien
cgaacaagcctctcagcatgaactg

SEQ ID NO: 926646 - DNA, 25 bp, Homo sapien
tattctgccactggtatggcttggg

SEQ ID NO: 926647 - DNA, 25 bp, Homo sapien
ttctgcatcaagtcactgggtctct

SEQ ID NO: 926648 - DNA, 25 bp, Homo sapien
tgcagtaacaaaatagctcagagtc

SEQ ID NO: 926649 - DNA, 25 bp, Homo sapien
ttctccaggatgtcaaccattatcc

SEQ ID NO: 926650 - DNA, 25 bp, Homo sapien
aaggtcccggaggttctcatccagg

SEQ ID NO: 926651 - DNA, 25 bp, Homo sapien
tctccaggatgtcaaccattatccc

SEQ ID NO: 926652 - DNA, 25 bp, Homo sapien
aacataaggtcccggaggttctcat

SEQ ID NO: 926653 - DNA, 25 bp, Homo sapien
tctctgttcatagctgggaaaggtt

SEQ ID NO: 926654 - DNA, 25 bp, Homo sapien
ttctctgttcatagctgggaaaggt

SEQ ID NO: 926655 - DNA, 25 bp, Homo sapien
cagctcctccgcaggacctcttggg

SEQ ID NO: 926656 - DNA, 25 bp, Homo sapien
acttgtgaacaggaataagcctctc

SEQ ID NO: 926657 - DNA, 25 bp, Homo sapien
gcattcaaaagcagtagtgcctcgt

SEQ ID NO: 926658 - DNA, 25 bp, Homo sapien
ggacttcagtcctgaacttgtgaac

SEQ ID NO: 926659 - DNA, 25 bp, Homo sapien
cctcgtagccgataccaggacttca

SEQ ID NO: 926660 - DNA, 25 bp, Homo sapien
attccacttgtctggactgtgctcc

SEQ ID NO: 926661 - DNA, 25 bp, Homo sapien
ggaaaattccacttgtctggactgt

SEQ ID NO: 926662 - DNA, 25 bp, Homo sapien
aattccacttgtctggactgtgctc

SEQ ID NO: 926663 - DNA, 25 bp, Homo sapien
aaaattccacttgtctggactgtgc

SEQ ID NO: 926664 - DNA, 25 bp, Homo sapien
tgagggaagacagctttacacctcc

SEQ ID NO: 926665 - DNA, 25 bp, Homo sapien
caggttgagggaagacagctttaca

SEQ ID NO: 926666 - DNA, 25 bp, Homo sapien
tcaggctcatgcctgatttgtgcct

SEQ ID NO: 926667 - DNA, 25 bp, Homo sapien
tcatgcctgatttgtgccttctttc

SEQ ID NO: 926668 - DNA, 25 bp, Homo sapien
caggtgctgcatcaccaatgccggc

SEQ ID NO: 926669 - DNA, 25 bp, Homo sapien
gaccttgggccaatgttatgctgta

SEQ ID NO: 926670 - DNA, 25 bp, Homo sapien
tgctcaaccgcttctgaaagacaaa

SEQ ID NO: 926671 - DNA, 25 bp, Homo sapien
gaaagacaaactgttccatcgagtt

SEQ ID NO: 926672 - DNA, 25 bp, Homo sapien
aagccctcgccagcctcttcttgtc

SEQ ID NO: 926673 - DNA, 25 bp, Homo sapien
ctctgggtgccagtcagcctcaggg

SEQ ID NO: 926674 - DNA, 25 bp, Homo sapien
cagtcagcctcaggggcggtgctgc

SEQ ID NO: 926675 - DNA, 25 bp, Homo sapien
ttgtccgttgctgatctttggctct

SEQ ID NO: 926676 - DNA, 25 bp, Homo sapien
tgctctgttacacccagcgccacct

SEQ ID NO: 926677 - DNA, 25 bp, Homo sapien
cactcacttcccgagtgctctgtta

SEQ ID NO: 926678 - DNA, 25 bp, Homo sapien
cagtgaacatccagccatgtcattt

SEQ ID NO: 926679 - DNA, 25 bp, Homo sapien
acagtgaacatccagccatgtcatt

SEQ ID NO: 926680 - DNA, 25 bp, Homo sapien
ctcaactcagaaggcctcttcctct

SEQ ID NO: 926681 - DNA, 25 bp, Homo sapien
cctcttgctcaagagggtgctgctg

SEQ ID NO: 926682 - DNA, 25 bp, Homo sapien
tcctcaactcagaaggcctcttcct

SEQ ID NO: 926683 - DNA, 25 bp, Homo sapien
cctcaactcagaaggcctcttcctc

SEQ ID NO: 926684 - DNA, 25 bp, Homo sapien
ttctttcagctctggttccctctaa

SEQ ID NO: 926685 - DNA, 25 bp, Homo sapien
tccctctaaaaaggtcctgttctca

SEQ ID NO: 926686 - DNA, 25 bp, Homo sapien
tcctggccaccagacttcttccacc

SEQ ID NO: 926687 - DNA, 25 bp, Homo sapien
aaaggtcctgttctcatcctggcca

SEQ ID NO: 926688 - DNA, 25 bp, Homo sapien
ggacactgagatgttgtacatagct

SEQ ID NO: 926689 - DNA, 25 bp, Homo sapien
catagctttgcttgtagcagttcat

SEQ ID NO: 926690 - DNA, 25 bp, Homo sapien
tggacactgagatgttgtacatagc

SEQ ID NO: 926691 - DNA, 25 bp, Homo sapien
tacatagctttgcttgtagcagttc

SEQ ID NO: 926692 - DNA, 25 bp, Homo sapien
catacctccgaaagttagctgtgat

SEQ ID NO: 926693 - DNA, 25 bp, Homo sapien
gcactttctgcataatctcatacca

SEQ ID NO: 926694 - DNA, 25 bp, Homo sapien
ggattcaatgaagaccacacctttt

SEQ ID NO: 926695 - DNA, 25 bp, Homo sapien
tcatgatgcttcagtattcatctgc

SEQ ID NO: 926696 - DNA, 25 bp, Homo sapien
tgagagtccaaaatctggtttggct

SEQ ID NO: 926697 - DNA, 25 bp, Homo sapien
tctggtttggctctgccgttagcac

SEQ ID NO: 926698 - DNA, 25 bp, Homo sapien
gctctgccgttagcacatttgcctg

SEQ ID NO: 926699 - DNA, 25 bp, Homo sapien
gagagtccaaaatctggtttggctc

SEQ ID NO: 926700 - DNA, 25 bp, Homo sapien
tctgctcttgagaacagccatttac

SEQ ID NO: 926701 - DNA, 25 bp, Homo sapien
gctgctctgctcttgagaacagcca

SEQ ID NO: 926702 - DNA, 25 bp, Homo sapien
tgctcttgagaacagccatttacaa

SEQ ID NO: 926703 - DNA, 25 bp, Homo sapien
tagagctgctctgctcttgagaaca

SEQ ID NO: 926704 - DNA, 25 bp, Homo sapien
cttggagctcccgtgccgatggtta

SEQ ID NO: 926705 - DNA, 25 bp, Homo sapien
ggttaaaggtaccatggctgggcca

SEQ ID NO: 926706 - DNA, 25 bp, Homo sapien
taatagcctggcctgtaccagatgc

SEQ ID NO: 926707 - DNA, 25 bp, Homo sapien
ccccaaagactggtaatagcctggc

SEQ ID NO: 926708 - DNA, 25 bp, Homo sapien
tctgttccccatgtagttgttcccc

SEQ ID NO: 926709 - DNA, 25 bp, Homo sapien
tacgttaggctgaagtctgttcccc

SEQ ID NO: 926710 - DNA, 25 bp, Homo sapien
gttggacaacagcagtattcccggc

SEQ ID NO: 926711 - DNA, 25 bp, Homo sapien
tcatccactaccaaggaagcatggc

SEQ ID NO: 926712 - DNA, 25 bp, Homo sapien
acttggattggtgttgcctttgacg

SEQ ID NO: 926713 - DNA, 25 bp, Homo sapien
gagacagccaacacttggattggtg

SEQ ID NO: 926714 - DNA, 25 bp, Homo sapien
aacacttggattggtgttgcctttg

SEQ ID NO: 926715 - DNA, 25 bp, Homo sapien
cagccaacacttggattggtgttgc

SEQ ID NO: 926716 - DNA, 25 bp, Homo sapien
gggtagctcctaatctggtgaacat

SEQ ID NO: 926717 - DNA, 25 bp, Homo sapien
gaatctgcatagagccggactggga

SEQ ID NO: 926718 - DNA, 25 bp, Homo sapien
tgggaacagtgcctcaaacaggagc

SEQ ID NO: 926719 - DNA, 25 bp, Homo sapien
tttctgcatggtccagtgaatctgc

SEQ ID NO: 926720 - DNA, 25 bp, Homo sapien
ttagctgtcagtgtgagaagagtcc

SEQ ID NO: 926721 - DNA, 25 bp, Homo sapien
tgccattgtaccaagcataaaaatc

SEQ ID NO: 926722 - DNA, 25 bp, Homo sapien
cataaaaatcctgaattagctgtca

SEQ ID NO: 926723 - DNA, 25 bp, Homo sapien
gtttctgccattgtaccaagcataa

SEQ ID NO: 926724 - DNA, 25 bp, Homo sapien
tcagaaagtgtgctcgtacagggag

SEQ ID NO: 926725 - DNA, 25 bp, Homo sapien
tctgcagtagcgatgggaaagtttg

SEQ ID NO: 926726 - DNA, 25 bp, Homo sapien
gaagcagcagtttcggtttgctctg

SEQ ID NO: 926727 - DNA, 25 bp, Homo sapien
tgagctgtctcgacaccaagatgcc

SEQ ID NO: 926728 - DNA, 25 bp, Homo sapien
ccttactgtgatcttcctcaaacgc

SEQ ID NO: 926729 - DNA, 25 bp, Homo sapien
tgatcttcctcaaacgctctctggc

SEQ ID NO: 926730 - DNA, 25 bp, Homo sapien
ggttgcatttgcctacaattttttc

SEQ ID NO: 926731 - DNA, 25 bp, Homo sapien
atgttgtcccgattgcaaggttgca

SEQ ID NO: 926732 - DNA, 25 bp, Homo sapien
tctgaaggaaaaggcgtcatcgtct

SEQ ID NO: 926733 - DNA, 25 bp, Homo sapien
ggaaaaggcgtcatcgtctccctct

SEQ ID NO: 926734 - DNA, 25 bp, Homo sapien
cctccacaggaaggcagtccgatgt

SEQ ID NO: 926735 - DNA, 25 bp, Homo sapien
cacaggaaggcagtccgatgtcctt

SEQ ID NO: 926736 - DNA, 25 bp, Homo sapien
caggtggggtggtcgcctcccattt

SEQ ID NO: 926737 - DNA, 25 bp, Homo sapien
aaccccatcggctgcaaacagggcc

SEQ ID NO: 926738 - DNA, 25 bp, Homo sapien
cggcaggtggggtggtcgcctccca

SEQ ID NO: 926739 - DNA, 25 bp, Homo sapien
tctccctcatttccctcgccaaccc

SEQ ID NO: 926740 - DNA, 25 bp, Homo sapien
ccgagggtacgtgcaaagtcaggct

SEQ ID NO: 926741 - DNA, 25 bp, Homo sapien
tcaggcttggtctcaggtaacacca

SEQ ID NO: 926742 - DNA, 25 bp, Homo sapien
gcatcttccttagctcctttgagcg

SEQ ID NO: 926743 - DNA, 25 bp, Homo sapien
ctatcgatgtcgctgctcggcctgg

SEQ ID NO: 926744 - DNA, 25 bp, Homo sapien
catggcaacatttgttaagtagggc

SEQ ID NO: 926745 - DNA, 25 bp, Homo sapien
gcaacatttgttaagtagggcttcc

SEQ ID NO: 926746 - DNA, 25 bp, Homo sapien
tgttaagtagggcttcccactctac

SEQ ID NO: 926747 - DNA, 25 bp, Homo sapien
catttgttaagtagggcttcccact

SEQ ID NO: 926748 - DNA, 25 bp, Homo sapien
caggcttttgccgtcttgtccttgg

SEQ ID NO: 926749 - DNA, 25 bp, Homo sapien
gcttttgccgtcttgtccttggtaa

SEQ ID NO: 926750 - DNA, 25 bp, Homo sapien
gagtgggattcaggcttttgccgtc

SEQ ID NO: 926751 - DNA, 25 bp, Homo sapien
gattcaggcttttgccgtcttgtcc

SEQ ID NO: 926752 - DNA, 25 bp, Homo sapien
tggtcagtgccagggattggaatac

SEQ ID NO: 926753 - DNA, 25 bp, Homo sapien
gtcagtgccagggattggaatacag

SEQ ID NO: 926754 - DNA, 25 bp, Homo sapien
ggtcagtgccagggattggaataca

SEQ ID NO: 926755 - DNA, 25 bp, Homo sapien
caggagccacgttctggctagttac

SEQ ID NO: 926756 - DNA, 25 bp, Homo sapien
tgcaggagccacgttctggctagtt

SEQ ID NO: 926757 - DNA, 25 bp, Homo sapien
ttgcaggagccacgttctggctagt

SEQ ID NO: 926758 - DNA, 25 bp, Homo sapien
gcaggagccacgttctggctagtta

SEQ ID NO: 926759 - DNA, 25 bp, Homo sapien
tgtctatattttcatcatagggatg

SEQ ID NO: 926760 - DNA, 25 bp, Homo sapien
tatattttcatcatagggatgaaca

SEQ ID NO: 926761 - DNA, 25 bp, Homo sapien
ttcatcatagggatgaacatattcc

SEQ ID NO: 926762 - DNA, 25 bp, Homo sapien
ctcgctgtccaaagacgatttttcc

SEQ ID NO: 926763 - DNA, 25 bp, Homo sapien
gcccgtggcattcgtggaattgaaa

SEQ ID NO: 926764 - DNA, 25 bp, Homo sapien
gttacatttcatcttgcccgtggca

SEQ ID NO: 926765 - DNA, 25 bp, Homo sapien
cacagaaagtttactcaagtgcgga

SEQ ID NO: 926766 - DNA, 25 bp, Homo sapien
tggaagtgtgcagagccaccactgt

SEQ ID NO: 926767 - DNA, 25 bp, Homo sapien
aataactgacggatgtaaggtgcac

SEQ ID NO: 926768 - DNA, 25 bp, Homo sapien
tgttttgcaaattggaccccaggct

SEQ ID NO: 926769 - DNA, 25 bp, Homo sapien
tcagtgaacacagtcggctaaagct

SEQ ID NO: 926770 - DNA, 25 bp, Homo sapien
gatgtgacgcactgtattccagctg

SEQ ID NO: 926771 - DNA, 25 bp, Homo sapien
gaacccagcccgtgtaagaacagaa

SEQ ID NO: 926772 - DNA, 25 bp, Homo sapien
gaagccatacctgtacaagaccggg

SEQ ID NO: 926773 - DNA, 25 bp, Homo sapien
tgaaaagaaacacctcgaacccagc

SEQ ID NO: 926774 - DNA, 25 bp, Homo sapien
tcagcatgttctcatcggcggagcc

SEQ ID NO: 926775 - DNA, 25 bp, Homo sapien
agtcggtccggttgcagacatccgc

SEQ ID NO: 926776 - DNA, 25 bp, Homo sapien
tctgggtagctgctgaatgggaatc

SEQ ID NO: 926777 - DNA, 25 bp, Homo sapien
gacatccgctaatctgggcagagca

SEQ ID NO: 926778 - DNA, 25 bp, Homo sapien
gaaaagtcagtccagggcgagaaaa

SEQ ID NO: 926779 - DNA, 25 bp, Homo sapien
cacatgcttcctggcagcgtcttat

SEQ ID NO: 926780 - DNA, 25 bp, Homo sapien
gcatctgtctgcagagtatctttta

SEQ ID NO: 926781 - DNA, 25 bp, Homo sapien
caagtgagttgctattccacatgct

SEQ ID NO: 926782 - DNA, 25 bp, Homo sapien
tcctggcagcgtcttatcagcatct

SEQ ID NO: 926783 - DNA, 25 bp, Homo sapien
gcaggggcctgtgtttgatgctcca

SEQ ID NO: 926784 - DNA, 25 bp, Homo sapien
tgttctgcggttctgcacctctcta

SEQ ID NO: 926785 - DNA, 25 bp, Homo sapien
cactcagcgcttcctgttctgcggt

SEQ ID NO: 926786 - DNA, 25 bp, Homo sapien
cagcgcttcctgttctgcggttctg

SEQ ID NO: 926787 - DNA, 25 bp, Homo sapien
gccattcccggtcgacggtcctcca

SEQ ID NO: 926788 - DNA, 25 bp, Homo sapien
ctgggctgaacacctctagtgccca

SEQ ID NO: 926789 - DNA, 25 bp, Homo sapien
tctcccacacgccattcccggtcga

SEQ ID NO: 926790 - DNA, 25 bp, Homo sapien
aacacctctagtgcccagagatctg

SEQ ID NO: 926791 - DNA, 25 bp, Homo sapien
gatggagtgacacttcatttcaaaa

SEQ ID NO: 926792 - DNA, 25 bp, Homo sapien
aaatacagtatacttactcctgcaa

SEQ ID NO: 926793 - DNA, 25 bp, Homo sapien
atggagtgacacttcatttcaaaag

SEQ ID NO: 926794 - DNA, 25 bp, Homo sapien
tgatggagtgacacttcatttcaaa

SEQ ID NO: 926795 - DNA, 25 bp, Homo sapien
aaaaccactccggatgtgccacctt

SEQ ID NO: 926796 - DNA, 25 bp, Homo sapien
aaaaaccactccggatgtgccacct

SEQ ID NO: 926797 - DNA, 25 bp, Homo sapien
gaaaaaaccactccggatgtgccac

SEQ ID NO: 926798 - DNA, 25 bp, Homo sapien
ggaaaaaaccactccggatgtgcca

SEQ ID NO: 926799 - DNA, 25 bp, Homo sapien
aatgcatgggctgttcaagttgacg

SEQ ID NO: 926800 - DNA, 25 bp, Homo sapien
gaaagtcacagaacagcgacaggcg

SEQ ID NO: 926801 - DNA, 25 bp, Homo sapien
gtggagtgttcctagcgaccagcgc

SEQ ID NO: 926802 - DNA, 25 bp, Homo sapien
ggttggtccccggtctcagattcta

SEQ ID NO: 926803 - DNA, 25 bp, Homo sapien
caccatctgcttcacaaggccagga

SEQ ID NO: 926804 - DNA, 25 bp, Homo sapien
ttcaccatctgcttcacaaggccag

SEQ ID NO: 926805 - DNA, 25 bp, Homo sapien
tctgcttcacaaggccaggaagcca

SEQ ID NO: 926806 - DNA, 25 bp, Homo sapien
tccaagttctactcccctcccttca

SEQ ID NO: 926807 - DNA, 25 bp, Homo sapien
atggtccctccttcccatctccccg

SEQ ID NO: 926808 - DNA, 25 bp, Homo sapien
tggtccctccttcccatctccccga

SEQ ID NO: 926809 - DNA, 25 bp, Homo sapien
tatggtccctccttcccatctcccc

SEQ ID NO: 926810 - DNA, 25 bp, Homo sapien
gattttatggttggaatcagggtac

SEQ ID NO: 926811 - DNA, 25 bp, Homo sapien
tcaggataatcagacaagtcttcaa

SEQ ID NO: 926812 - DNA, 25 bp, Homo sapien
tgtttaatggttgcacagagaagac

SEQ ID NO: 926813 - DNA, 25 bp, Homo sapien
cagggtactttgacctctggaagga

SEQ ID NO: 926814 - DNA, 25 bp, Homo sapien
cttattcgtttctagctttcttgca

SEQ ID NO: 926815 - DNA, 25 bp, Homo sapien
gttgtcagagaaagaagcctgcacc

SEQ ID NO: 926816 - DNA, 25 bp, Homo sapien
ttcttgcattgttgtcagagaaaga

SEQ ID NO: 926817 - DNA, 25 bp, Homo sapien
agctttcttgcattgttgtcagaga

SEQ ID NO: 926818 - DNA, 25 bp, Homo sapien
gcatttctaataaactccccagtga

SEQ ID NO: 926819 - DNA, 25 bp, Homo sapien
gaaaattgtgttgagcacatgctga

SEQ ID NO: 926820 - DNA, 25 bp, Homo sapien
tcaatcgatgctcgcaccgaaatct

SEQ ID NO: 926821 - DNA, 25 bp, Homo sapien
gctgcaggttctcagcccagatttt

SEQ ID NO: 926822 - DNA, 25 bp, Homo sapien
tcacaaggcagtcaaagagaattta

SEQ ID NO: 926823 - DNA, 25 bp, Homo sapien
gtccaggtgagaggcagtcttccag

SEQ ID NO: 926824 - DNA, 25 bp, Homo sapien
cacaaggcagtcaaagagaatttaa

SEQ ID NO: 926825 - DNA, 25 bp, Homo sapien
aggtgagaggcagtcttccagaagt

SEQ ID NO: 926826 - DNA, 25 bp, Homo sapien
caacactacatggaaaggcgcacag

SEQ ID NO: 926827 - DNA, 25 bp, Homo sapien
gggccaatgtattccatgcaggcaa

SEQ ID NO: 926828 - DNA, 25 bp, Homo sapien
cgcacagatgagaaggagtatgact

SEQ ID NO: 926829 - DNA, 25 bp, Homo sapien
aatgctcacataaccctggccaaag

SEQ ID NO: 926830 - DNA, 25 bp, Homo sapien
gaacagacctgactcctgagcatgg

SEQ ID NO: 926831 - DNA, 25 bp, Homo sapien
agaacagacctgactcctgagcatg

SEQ ID NO: 926832 - DNA, 25 bp, Homo sapien
taagaacagacctgactcctgagca

SEQ ID NO: 926833 - DNA, 25 bp, Homo sapien
gtaagaacagacctgactcctgagc

SEQ ID NO: 926834 - DNA, 25 bp, Homo sapien
cagagccagtcctggtatttttata

SEQ ID NO: 926835 - DNA, 25 bp, Homo sapien
gccagtcagagccagtcctggtatt

SEQ ID NO: 926836 - DNA, 25 bp, Homo sapien
agtcagagccagtcctggtattttt

SEQ ID NO: 926837 - DNA, 25 bp, Homo sapien
ccagtcagagccagtcctggtattt

SEQ ID NO: 926838 - DNA, 25 bp, Homo sapien
agacacaaaatgagacacctgcttt

SEQ ID NO: 926839 - DNA, 25 bp, Homo sapien
gacacaaaatgagacacctgctttt

SEQ ID NO: 926840 - DNA, 25 bp, Homo sapien
tccagcttcaaagacacaaaatgag

SEQ ID NO: 926841 - DNA, 25 bp, Homo sapien
ctccagcttcaaagacacaaaatga

SEQ ID NO: 926842 - DNA, 25 bp, Homo sapien
ccagtgacagaatgggcttttgcac

SEQ ID NO: 926843 - DNA, 25 bp, Homo sapien
ggcaccagtgacagaatgggctttt

SEQ ID NO: 926844 - DNA, 25 bp, Homo sapien
ttttgcactagtgggggcaatggca

SEQ ID NO: 926845 - DNA, 25 bp, Homo sapien
tgggcttttgcactagtgggggcaa

SEQ ID NO: 926846 - DNA, 25 bp, Homo sapien
cttcccgccatgctctccttcccac

SEQ ID NO: 926847 - DNA, 25 bp, Homo sapien
caccatggtagccagcatctgttct

SEQ ID NO: 926848 - DNA, 25 bp, Homo sapien
ctgttcttgcaagtgcccggattct

SEQ ID NO: 926849 - DNA, 25 bp, Homo sapien
caagtgcccggattcttttatctgt

SEQ ID NO: 926850 - DNA, 25 bp, Homo sapien
tagtgcctttgtcaggcatatttga

SEQ ID NO: 926851 - DNA, 25 bp, Homo sapien
tttgtcaggcatatttgaggcaagg

SEQ ID NO: 926852 - DNA, 25 bp, Homo sapien
cctttgtcaggcatatttgaggcaa

SEQ ID NO: 926853 - DNA, 25 bp, Homo sapien
gggcttagtgcctttgtcaggcata

SEQ ID NO: 926854 - DNA, 25 bp, Homo sapien
tccccccaagtagaggtctgctgct

SEQ ID NO: 926855 - DNA, 25 bp, Homo sapien
gaggactttagtgacctctgctttt

SEQ ID NO: 926856 - DNA, 25 bp, Homo sapien
catccccccaagtagaggtctgctg

SEQ ID NO: 926857 - DNA, 25 bp, Homo sapien
tgggagggttgaggactttagtgac

SEQ ID NO: 926858 - DNA, 25 bp, Homo sapien
ggagctgaccgctgcacaggatggt

SEQ ID NO: 926859 - DNA, 25 bp, Homo sapien
ttttttccccgctgagatgctgggt

SEQ ID NO: 926860 - DNA, 25 bp, Homo sapien
tgggtgcatgggaagaagccggcag

SEQ ID NO: 926861 - DNA, 25 bp, Homo sapien
aagaagccggcaggaagagtaagtt

SEQ ID NO: 926862 - DNA, 25 bp, Homo sapien
tctagtaggtgtatctcatcatggt

SEQ ID NO: 926863 - DNA, 25 bp, Homo sapien
gaaattgccagacaaattccagact

SEQ ID NO: 926864 - DNA, 25 bp, Homo sapien
tatttccctaatagtcataaggtga

SEQ ID NO: 926865 - DNA, 25 bp, Homo sapien
gtttcttagtgttgagtcttgagga

SEQ ID NO: 926866 - DNA, 25 bp, Homo sapien
ctagaggcgcccgccgccacacctg

SEQ ID NO: 926867 - DNA, 25 bp, Homo sapien
actagaggcgcccgccgccacacct

SEQ ID NO: 926868 - DNA, 25 bp, Homo sapien
cagggttttaccatgttagccagga

SEQ ID NO: 926869 - DNA, 25 bp, Homo sapien
cacacctggctaatttttaaaatat

SEQ ID NO: 926870 - DNA, 25 bp, Homo sapien
tgcccagcatgcacagatggaatgg

SEQ ID NO: 926871 - DNA, 25 bp, Homo sapien
gatggaatgggaacaactgcaatga

SEQ ID NO: 926872 - DNA, 25 bp, Homo sapien
ccacttcgtgcacggagcggactgc

SEQ ID NO: 926873 - DNA, 25 bp, Homo sapien
ctgtgacgcctgtccccacttcgtg

SEQ ID NO: 926874 - DNA, 25 bp, Homo sapien
actggacctcgcccaaacatagctg

SEQ ID NO: 926875 - DNA, 25 bp, Homo sapien
tagctgccccgtcagcttctgttca

SEQ ID NO: 926876 - DNA, 25 bp, Homo sapien
ttccttgggaccctctatgtgtggg

SEQ ID NO: 926877 - DNA, 25 bp, Homo sapien
ggaaatgtagaactgcccccacatg

SEQ ID NO: 926878 - DNA, 25 bp, Homo sapien
tgacaacaagctggcgatactcgat

SEQ ID NO: 926879 - DNA, 25 bp, Homo sapien
tctggggtggtttgctgtgcactac

SEQ ID NO: 926880 - DNA, 25 bp, Homo sapien
tgtgcactacccaacgatgtggact

SEQ ID NO: 926881 - DNA, 25 bp, Homo sapien
gctggcgatactcgatgtactcctg

SEQ ID NO: 926882 - DNA, 25 bp, Homo sapien
ggagagggtgcttcctcattccagg

SEQ ID NO: 926883 - DNA, 25 bp, Homo sapien
gggagagggtgcttcctcattccag

SEQ ID NO: 926884 - DNA, 25 bp, Homo sapien
ttccagggattcctgggcccctctg

SEQ ID NO: 926885 - DNA, 25 bp, Homo sapien
tcctcattccagggattcctgggcc

SEQ ID NO: 926886 - DNA, 25 bp, Homo sapien
gcagccagatgtttttgtgaacaac

SEQ ID NO: 926887 - DNA, 25 bp, Homo sapien
ccaaagtagctcttgcatggcagcc

SEQ ID NO: 926888 - DNA, 25 bp, Homo sapien
gtgaacaacttgtccacaatagggt

SEQ ID NO: 926889 - DNA, 25 bp, Homo sapien
aaagtagctcttgcatggcagccag

SEQ ID NO: 926890 - DNA, 25 bp, Homo sapien
cgctaaagggatattgagcccgcca

SEQ ID NO: 926891 - DNA, 25 bp, Homo sapien
tcccatggtaaaagtgagaaccctg

SEQ ID NO: 926892 - DNA, 25 bp, Homo sapien
gccactaggagccacagggataata

SEQ ID NO: 926893 - DNA, 25 bp, Homo sapien
ttgcctcttgtgcacgtctccacag

SEQ ID NO: 926894 - DNA, 25 bp, Homo sapien
tgatgctgcggtgcacaggcagcca

SEQ ID NO: 926895 - DNA, 25 bp, Homo sapien
tgcatccctgccaatgctcatcttt

SEQ ID NO: 926896 - DNA, 25 bp, Homo sapien
gaacgaggccccattgtgatgctgc

SEQ ID NO: 926897 - DNA, 25 bp, Homo sapien
gaatatgaatcaggccatccctggc

SEQ ID NO: 926898 - DNA, 25 bp, Homo sapien
ctccttcaaattgattgtgtacccc

SEQ ID NO: 926899 - DNA, 25 bp, Homo sapien
ttctccttcaaattgattgtgtacc

SEQ ID NO: 926900 - DNA, 25 bp, Homo sapien
tccttcaaattgattgtgtaccccc

SEQ ID NO: 926901 - DNA, 25 bp, Homo sapien
tctccttcaaattgattgtgtaccc

SEQ ID NO: 926902 - DNA, 25 bp, Homo sapien
tgaaggaccaaaataatttctccca

SEQ ID NO: 926903 - DNA, 25 bp, Homo sapien
ggtggattcagttcaaaggagttta

SEQ ID NO: 926904 - DNA, 25 bp, Homo sapien
cagatttgcacatgaggctggctgc

SEQ ID NO: 926905 - DNA, 25 bp, Homo sapien
gctggctgctctaggtggattcagt

SEQ ID NO: 926906 - DNA, 25 bp, Homo sapien
gaaggcaccggtgagccctcttgcc

SEQ ID NO: 926907 - DNA, 25 bp, Homo sapien
tgctgatgccctcgggcaagaaggc

SEQ ID NO: 926908 - DNA, 25 bp, Homo sapien
agccatgagggcttgactcggtcaa

SEQ ID NO: 926909 - DNA, 25 bp, Homo sapien
ctcttgcccctgcaaagtggtggct

SEQ ID NO: 926910 - DNA, 25 bp, Homo sapien
gagtgtctaacatccaaacgactag

SEQ ID NO: 926911 - DNA, 25 bp, Homo sapien
aacgatcggcaaatcggcttagcag

SEQ ID NO: 926912 - DNA, 25 bp, Homo sapien
ggcaaacaccacattggccctctgt

SEQ ID NO: 926913 - DNA, 25 bp, Homo sapien
ggccctctgtgtaaccaacgatcgg

SEQ ID NO: 926914 - DNA, 25 bp, Homo sapien
ggactttgacacaagcccaaacagg

SEQ ID NO: 926915 - DNA, 25 bp, Homo sapien
ctgtaagacagaggctccgtagtca

SEQ ID NO: 926916 - DNA, 25 bp, Homo sapien
gatgtcaacatccacaagctgcgtt

SEQ ID NO: 926917 - DNA, 25 bp, Homo sapien
gcatcacttgctggtcaaaggcttt

SEQ ID NO: 926918 - DNA, 25 bp, Homo sapien
cttccaagcaaggtggtttgagcag

SEQ ID NO: 926919 - DNA, 25 bp, Homo sapien
aggtggtttgagcagaaagacatcc

SEQ ID NO: 926920 - DNA, 25 bp, Homo sapien
caaggtggtttgagcagaaagacat

SEQ ID NO: 926921 - DNA, 25 bp, Homo sapien
tccaagcaaggtggtttgagcagaa

SEQ ID NO: 926922 - DNA, 25 bp, Homo sapien
catcattgcccaaagcatcttgttg

SEQ ID NO: 926923 - DNA, 25 bp, Homo sapien
atcttgttgaccctgacccttcgtc

SEQ ID NO: 926924 - DNA, 25 bp, Homo sapien
cttcgtccctttacaactatgtcca

SEQ ID NO: 926925 - DNA, 25 bp, Homo sapien
cttctgtgattctacttctaacatc

SEQ ID NO: 926926 - DNA, 25 bp, Homo sapien
tgcaagcctaaggtaaaaggagagc

SEQ ID NO: 926927 - DNA, 25 bp, Homo sapien
gctgcaagcctaaggtaaaaggaga

SEQ ID NO: 926928 - DNA, 25 bp, Homo sapien
ctgcaagcctaaggtaaaaggagag

SEQ ID NO: 926929 - DNA, 25 bp, Homo sapien
tggctctgtgattgttgatatgacg

SEQ ID NO: 926930 - DNA, 25 bp, Homo sapien
gacggtctccatatcaacgcaaggc

SEQ ID NO: 926931 - DNA, 25 bp, Homo sapien
catgaagccttgaactggctctgtg

SEQ ID NO: 926932 - DNA, 25 bp, Homo sapien
tccagactaggagcctcatgaagcc

SEQ ID NO: 926933 - DNA, 25 bp, Homo sapien
tcagagttgctcatgcattcgggag

SEQ ID NO: 926934 - DNA, 25 bp, Homo sapien
tcatgcattcgggagaaattggaca

SEQ ID NO: 926935 - DNA, 25 bp, Homo sapien
ttggacagggccccatttacattat

SEQ ID NO: 926936 - DNA, 25 bp, Homo sapien
cattcgggagaaattggacagggcc

SEQ ID NO: 926937 - DNA, 25 bp, Homo sapien
tgtgcctataccatgaggcacatgc

SEQ ID NO: 926938 - DNA, 25 bp, Homo sapien
gttaactttccagagtaagcaggag

SEQ ID NO: 926939 - DNA, 25 bp, Homo sapien
catgctacacttctgactgagtgag

SEQ ID NO: 926940 - DNA, 25 bp, Homo sapien
gcagcttgaagcagatgggctttcc

SEQ ID NO: 926941 - DNA, 25 bp, Homo sapien
cattactatggctgtgcaagtgctg

SEQ ID NO: 926942 - DNA, 25 bp, Homo sapien
ccatccagtccatgtatttggcggc

SEQ ID NO: 926943 - DNA, 25 bp, Homo sapien
caagtgctggtaatgccgttgtcca

SEQ ID NO: 926944 - DNA, 25 bp, Homo sapien
tatttggcggccattactatggctg

SEQ ID NO: 926945 - DNA, 25 bp, Homo sapien
taattgagacttgagcgtgactgcg

SEQ ID NO: 926946 - DNA, 25 bp, Homo sapien
taaaatttgaacagagcagcgggtg

SEQ ID NO: 926947 - DNA, 25 bp, Homo sapien
tcgctgctggaggacatcgtgtacc

SEQ ID NO: 926948 - DNA, 25 bp, Homo sapien
gttgaacttgatcgcggtagccggc

SEQ ID NO: 926949 - DNA, 25 bp, Homo sapien
cagaggtggtctggtgttatatttc

SEQ ID NO: 926950 - DNA, 25 bp, Homo sapien
aggtggtctggtgttatatttcttc

SEQ ID NO: 926951 - DNA, 25 bp, Homo sapien
gcccacagatgctggacggtaccac

SEQ ID NO: 926952 - DNA, 25 bp, Homo sapien
agatgctggacggtaccaccatttc

SEQ ID NO: 926953 - DNA, 25 bp, Homo sapien
aaccagtgtattaaaaggacactca

SEQ ID NO: 926954 - DNA, 25 bp, Homo sapien
accagtgtattaaaaggacactcag

SEQ ID NO: 926955 - DNA, 25 bp, Homo sapien
atctgtggcatccaccagcaacccc

SEQ ID NO: 926956 - DNA, 25 bp, Homo sapien
caacccccgagggtggatgagctta

SEQ ID NO: 926957 - DNA, 25 bp, Homo sapien
ataggatgcaagctcaggtcttagc

SEQ ID NO: 926958 - DNA, 25 bp, Homo sapien
tgagcttattcctggggaacgtccc

SEQ ID NO: 926959 - DNA, 25 bp, Homo sapien
tcctgggtgtgggattgagtcttgc

SEQ ID NO: 926960 - DNA, 25 bp, Homo sapien
ctcctttgcgaagttggtactcact

SEQ ID NO: 926961 - DNA, 25 bp, Homo sapien
ggtgtgggattgagtcttgctcggt

SEQ ID NO: 926962 - DNA, 25 bp, Homo sapien
tttgcgaagttggtactcactgcct

SEQ ID NO: 926963 - DNA, 25 bp, Homo sapien
tcttcttcatttgggcgactgtcag

SEQ ID NO: 926964 - DNA, 25 bp, Homo sapien
tatgattgcacatccattgtgtttg

SEQ ID NO: 926965 - DNA, 25 bp, Homo sapien
tctgccccgtgtccttcctatgatt

SEQ ID NO: 926966 - DNA, 25 bp, Homo sapien
tcatttgggcgactgtcagcaagcc

SEQ ID NO: 926967 - DNA, 25 bp, Homo sapien
cagaggccatgaccgcacattggca

SEQ ID NO: 926968 - DNA, 25 bp, Homo sapien
gccatgaccgcacattggcactggg

SEQ ID NO: 926969 - DNA, 25 bp, Homo sapien
ggagttcctctaagcagaggccatg

SEQ ID NO: 926970 - DNA, 25 bp, Homo sapien
tctgcacatggttaggccggcctgg

SEQ ID NO: 926971 - DNA, 25 bp, Homo sapien
cactcagtttggattcgtgtctcca

SEQ ID NO: 926972 - DNA, 25 bp, Homo sapien
gacactcagtttggattcgtgtctc

SEQ ID NO: 926973 - DNA, 25 bp, Homo sapien
actcagtttggattcgtgtctccat

SEQ ID NO: 926974 - DNA, 25 bp, Homo sapien
ctgacactcagtttggattcgtgtc

SEQ ID NO: 926975 - DNA, 25 bp, Homo sapien
tctccatggagtgcgctgttgctgg

SEQ ID NO: 926976 - DNA, 25 bp, Homo sapien
taaaaggacagagcttcgagcaggg

SEQ ID NO: 926977 - DNA, 25 bp, Homo sapien
cgagcaggggcagatgtaatatgca

SEQ ID NO: 926978 - DNA, 25 bp, Homo sapien
tggtgtctcttctggagcatgtagg

SEQ ID NO: 926979 - DNA, 25 bp, Homo sapien
tttttctcctagtcttgtctactgg

SEQ ID NO: 926980 - DNA, 25 bp, Homo sapien
gatccagttgcacaaagtcatgaga

SEQ ID NO: 926981 - DNA, 25 bp, Homo sapien
gctccaggccgtgtaggagtatttt

SEQ ID NO: 926982 - DNA, 25 bp, Homo sapien
atgtcctgtggacgctgctggccca

SEQ ID NO: 926983 - DNA, 25 bp, Homo sapien
ggagctcagagtcttgtttctgaag

SEQ ID NO: 926984 - DNA, 25 bp, Homo sapien
ttcacaagcagacgaggaggctttc

SEQ ID NO: 926985 - DNA, 25 bp, Homo sapien
gtttctgaagtctctcaggtaacat

SEQ ID NO: 926986 - DNA, 25 bp, Homo sapien
gcatgttctgccacaaattcttcac

SEQ ID NO: 926987 - DNA, 25 bp, Homo sapien
tcatacatttcttcccagtgtagct

SEQ ID NO: 926988 - DNA, 25 bp, Homo sapien
gtactaggcagctgatggctttgct

SEQ ID NO: 926989 - DNA, 25 bp, Homo sapien
gatggctttgctgtcttcatacatt

SEQ ID NO: 926990 - DNA, 25 bp, Homo sapien
ctggtactaggcagctgatggcttt

SEQ ID NO: 926991 - DNA, 25 bp, Homo sapien
gctatttggacacacaattgctgtc

SEQ ID NO: 926992 - DNA, 25 bp, Homo sapien
agaaggaatcactcctgagcagagc

SEQ ID NO: 926993 - DNA, 25 bp, Homo sapien
actgatcttggcctggtgtgctatt

SEQ ID NO: 926994 - DNA, 25 bp, Homo sapien
aggaatcactcctgagcagagccca

SEQ ID NO: 926995 - DNA, 25 bp, Homo sapien
tcctagaagctgatcctgagtccct

SEQ ID NO: 926996 - DNA, 25 bp, Homo sapien
tgggagaggctcctagaagctgatc

SEQ ID NO: 926997 - DNA, 25 bp, Homo sapien
ctcctcccagatttcacttccagtt

SEQ ID NO: 926998 - DNA, 25 bp, Homo sapien
atttcaggcttggacttagcaggtg

SEQ ID NO: 926999 - DNA, 25 bp, Homo sapien
gaagcttttcatagcctcttggtgg

SEQ ID NO: 927000 - DNA, 25 bp, Homo sapien
tgaaaatcaattccttccaaggaag

SEQ ID NO: 927001 - DNA, 25 bp, Homo sapien
cacgttatcatgttggcttgaaagc

SEQ ID NO: 927002 - DNA, 25 bp, Homo sapien
ggtgatgacaagaaggtttcctctg

SEQ ID NO: 927003 - DNA, 25 bp, Homo sapien
tattgatattcttagtggaggagcc

SEQ ID NO: 927004 - DNA, 25 bp, Homo sapien
ttggttaccagagtccagttccgga

SEQ ID NO: 927005 - DNA, 25 bp, Homo sapien
taaaccccagtgtaaccttgattga

SEQ ID NO: 927006 - DNA, 25 bp, Homo sapien
tcttttcgggaatgaatgccaagtg

SEQ ID NO: 927007 - DNA, 25 bp, Homo sapien
gggcagcgttctcaaacattttggg

SEQ ID NO: 927008 - DNA, 25 bp, Homo sapien
agacacccttgttcgtcctggagta

SEQ ID NO: 927009 - DNA, 25 bp, Homo sapien
cacatcaggagagataagcacttcc

SEQ ID NO: 927010 - DNA, 25 bp, Homo sapien
tgtcatgtcacctgtaaatgtcgga

SEQ ID NO: 927011 - DNA, 25 bp, Homo sapien
gtagccaattggaattccactcggc

SEQ ID NO: 927012 - DNA, 25 bp, Homo sapien
cttctgttcgtgttgcctgtctgca

SEQ ID NO: 927013 - DNA, 25 bp, Homo sapien
gggtcctgggcatgaattaacatct

SEQ ID NO: 927014 - DNA, 25 bp, Homo sapien
gaattaacatctccctccgtagcca

SEQ ID NO: 927015 - DNA, 25 bp, Homo sapien
ccctgctatggactgaccataaggg

SEQ ID NO: 927016 - DNA, 25 bp, Homo sapien
cctgctatggactgaccataaggga

SEQ ID NO: 927017 - DNA, 25 bp, Homo sapien
tctccctgctatggactgaccataa

SEQ ID NO: 927018 - DNA, 25 bp, Homo sapien
tccctgctatggactgaccataagg

SEQ ID NO: 927019 - DNA, 25 bp, Homo sapien
gttctgaaacaacatctggagctgc

SEQ ID NO: 927020 - DNA, 25 bp, Homo sapien
tatatccgtcctggtcaaagccagc

SEQ ID NO: 927021 - DNA, 25 bp, Homo sapien
ctacatgtaggtgtaaaccacgtgg

SEQ ID NO: 927022 - DNA, 25 bp, Homo sapien
gccagcaaaccacgagaacaccttt

SEQ ID NO: 927023 - DNA, 25 bp, Homo sapien
atttgatttgatggcatacagcatg

SEQ ID NO: 927024 - DNA, 25 bp, Homo sapien
tttgatttgatggcatacagcatga

SEQ ID NO: 927025 - DNA, 25 bp, Homo sapien
tgatttgatttgatggcatacagca

SEQ ID NO: 927026 - DNA, 25 bp, Homo sapien
gatttgatttgatggcatacagcat

SEQ ID NO: 927027 - DNA, 25 bp, Homo sapien
tttcgtcagcctcagtccatttgga

SEQ ID NO: 927028 - DNA, 25 bp, Homo sapien
caggccactgcgacttgggagttgc

SEQ ID NO: 927029 - DNA, 25 bp, Homo sapien
gtgagaccaagatggccccgtctgg

SEQ ID NO: 927030 - DNA, 25 bp, Homo sapien
tctggacccagactcatgttttgga

SEQ ID NO: 927031 - DNA, 25 bp, Homo sapien
agctgcagagtggatctcaggcatt

SEQ ID NO: 927032 - DNA, 25 bp, Homo sapien
cagagtggatctcaggcattgccca

SEQ ID NO: 927033 - DNA, 25 bp, Homo sapien
aaaaaagccaagagcggcagcctgt

SEQ ID NO: 927034 - DNA, 25 bp, Homo sapien
ctccgtggccggaagggtaataatg

SEQ ID NO: 927035 - DNA, 25 bp, Homo sapien
tggtgctgagcatgtgttaggcaga

SEQ ID NO: 927036 - DNA, 25 bp, Homo sapien
ggtgctgagcatgtgttaggcagag

SEQ ID NO: 927037 - DNA, 25 bp, Homo sapien
atggtgctgagcatgtgttaggcag

SEQ ID NO: 927038 - DNA, 25 bp, Homo sapien
tgtggcttttgtcccatgttcacag

SEQ ID NO: 927039 - DNA, 25 bp, Homo sapien
cttgtggcttttgtcccatgttcac

SEQ ID NO: 927040 - DNA, 25 bp, Homo sapien
ttgtggcttttgtcccatgttcaca

SEQ ID NO: 927041 - DNA, 25 bp, Homo sapien
tggcttttgtcccatgttcacagga

SEQ ID NO: 927042 - DNA, 25 bp, Homo sapien
ggctgtgtgctgatgcaaccgaaca

SEQ ID NO: 927043 - DNA, 25 bp, Homo sapien
ctcctggatcgcaggatgcaacctc

SEQ ID NO: 927044 - DNA, 25 bp, Homo sapien
tgctgccaaacactcctggatcgca

SEQ ID NO: 927045 - DNA, 25 bp, Homo sapien
aaaactgcacctgctctaatagctg

SEQ ID NO: 927046 - DNA, 25 bp, Homo sapien
tttcttggctcctggataataagtg

SEQ ID NO: 927047 - DNA, 25 bp, Homo sapien
cctggataataagtggttgaaataa

SEQ ID NO: 927048 - DNA, 25 bp, Homo sapien
gctcctggataataagtggttgaaa

SEQ ID NO: 927049 - DNA, 25 bp, Homo sapien
ttggctcctggataataagtggttg

SEQ ID NO: 927050 - DNA, 25 bp, Homo sapien
gggcttttctaaccccacacatgat

SEQ ID NO: 927051 - DNA, 25 bp, Homo sapien
tcgacaataatatgactgaagtctg

SEQ ID NO: 927052 - DNA, 25 bp, Homo sapien
cacacatgatctataccaagtggga

SEQ ID NO: 927053 - DNA, 25 bp, Homo sapien
gcctttgtcattgtcgacaataata

SEQ ID NO: 927054 - DNA, 25 bp, Homo sapien
tgtgggggccgtgctaagagagtgt

SEQ ID NO: 927055 - DNA, 25 bp, Homo sapien
ctgtgggggccgtgctaagagagtg

SEQ ID NO: 927056 - DNA, 25 bp, Homo sapien
gtgggggccgtgctaagagagtgtg

SEQ ID NO: 927057 - DNA, 25 bp, Homo sapien
cacaggtatggagtagtctatgctc

SEQ ID NO: 927058 - DNA, 25 bp, Homo sapien
ggcacaggtatggagtagtctatgc

SEQ ID NO: 927059 - DNA, 25 bp, Homo sapien
gcctgtcatccacgggtgtaaagaa

SEQ ID NO: 927060 - DNA, 25 bp, Homo sapien
tccacgggtgtaaagaagggcacag

SEQ ID NO: 927061 - DNA, 25 bp, Homo sapien
gtgatgccagaagcctaagtttgtc

SEQ ID NO: 927062 - DNA, 25 bp, Homo sapien
gaattatgttgcaagtgggtaaccg

SEQ ID NO: 927063 - DNA, 25 bp, Homo sapien
gatctgctgcagaacgaaccaacag

SEQ ID NO: 927064 - DNA, 25 bp, Homo sapien
taagtttgtcttgtatggatcccgt

SEQ ID NO: 927065 - DNA, 25 bp, Homo sapien
gatgagtgcattcttgggatcacct

SEQ ID NO: 927066 - DNA, 25 bp, Homo sapien
cctgaaatagggaagaaattgatgt

SEQ ID NO: 927067 - DNA, 25 bp, Homo sapien
tccatcttcataggcgagagcaggg

SEQ ID NO: 927068 - DNA, 25 bp, Homo sapien
gcactcataggtccatcttcatagg

SEQ ID NO: 927069 - DNA, 25 bp, Homo sapien
taattgccatttgatacagaacaga

SEQ ID NO: 927070 - DNA, 25 bp, Homo sapien
agaagagcttagctttggtttaagc

SEQ ID NO: 927071 - DNA, 25 bp, Homo sapien
gccatttgatacagaacagaagagc

SEQ ID NO: 927072 - DNA, 25 bp, Homo sapien
aagagtaattgccatttgatacaga

SEQ ID NO: 927073 - DNA, 25 bp, Homo sapien
cacgtggctccctgggcctgttcat

SEQ ID NO: 927074 - DNA, 25 bp, Homo sapien
tggccacgtggctccctgggcctgt

SEQ ID NO: 927075 - DNA, 25 bp, Homo sapien
acgtggctccctgggcctgttcatc

SEQ ID NO: 927076 - DNA, 25 bp, Homo sapien
tggctccctgggcctgttcatccat

SEQ ID NO: 927077 - DNA, 25 bp, Homo sapien
aggggcccaatgtcagtgcagtgac

SEQ ID NO: 927078 - DNA, 25 bp, Homo sapien
caggggcccaatgtcagtgcagtga

SEQ ID NO: 927079 - DNA, 25 bp, Homo sapien
tcaggggcccaatgtcagtgcagtg

SEQ ID NO: 927080 - DNA, 25 bp, Homo sapien
tttctgctttgatgcgtgtgttcat

SEQ ID NO: 927081 - DNA, 25 bp, Homo sapien
cagaactgggtcagggcagcacaca

SEQ ID NO: 927082 - DNA, 25 bp, Homo sapien
cttgcgtttagctgggttcctgggc

SEQ ID NO: 927083 - DNA, 25 bp, Homo sapien
atctggaaatccagagggtcccaga

SEQ ID NO: 927084 - DNA, 25 bp, Homo sapien
gttattagaaagaggccacactgag

SEQ ID NO: 927085 - DNA, 25 bp, Homo sapien
ccaattctgggaagtctgaaggctc

SEQ ID NO: 927086 - DNA, 25 bp, Homo sapien
ccatttcatccaattctgggaagtc

SEQ ID NO: 927087 - DNA, 25 bp, Homo sapien
cgggtcagaggggagtttgttgcat

SEQ ID NO: 927088 - DNA, 25 bp, Homo sapien
atccaattctgggaagtctgaaggc

SEQ ID NO: 927089 - DNA, 25 bp, Homo sapien
gcattggattgcagctcggtgggag

SEQ ID NO: 927090 - DNA, 25 bp, Homo sapien
cagggtgtgatctcacccgtgttgc

SEQ ID NO: 927091 - DNA, 25 bp, Homo sapien
tctcacccgtgttgccaagggtcat

SEQ ID NO: 927092 - DNA, 25 bp, Homo sapien
cacacccagactgttcggtttccat

SEQ ID NO: 927093 - DNA, 25 bp, Homo sapien
tcaatccaggatgagatgagcagcg

SEQ ID NO: 927094 - DNA, 25 bp, Homo sapien
tgggggatcccagttcatgcttctc

SEQ ID NO: 927095 - DNA, 25 bp, Homo sapien
ctcagtgaagagtgatgtcatggac

SEQ ID NO: 927096 - DNA, 25 bp, Homo sapien
aaaaacctaaggcctgagtcacatt

SEQ ID NO: 927097 - DNA, 25 bp, Homo sapien
cagaaagaagagtgatacagggatt

SEQ ID NO: 927098 - DNA, 25 bp, Homo sapien
gtttccacgtccattccctgaagct

SEQ ID NO: 927099 - DNA, 25 bp, Homo sapien
ggagagtgaccctgataccagaaag

SEQ ID NO: 927100 - DNA, 25 bp, Homo sapien
tacagggattgtttccacgtccatt

SEQ ID NO: 927101 - DNA, 25 bp, Homo sapien
ttacatgcttttgggagaattggtg

SEQ ID NO: 927102 - DNA, 25 bp, Homo sapien
ctctttagcccctccgattaggaat

SEQ ID NO: 927103 - DNA, 25 bp, Homo sapien
tctttagcccctccgattaggaata

SEQ ID NO: 927104 - DNA, 25 bp, Homo sapien
ggtgaaggttcgtgtcccactctgt

SEQ ID NO: 927105 - DNA, 25 bp, Homo sapien
ggtcattcagccgtccaatcgtatc

SEQ ID NO: 927106 - DNA, 25 bp, Homo sapien
ggcagcagctttttagaaccatcag

SEQ ID NO: 927107 - DNA, 25 bp, Homo sapien
gactttctgggttggatagtgtcca

SEQ ID NO: 927108 - DNA, 25 bp, Homo sapien
tcacgcaagtgagcagtcaagggca

SEQ ID NO: 927109 - DNA, 25 bp, Homo sapien
gtaaacctggaatgttgctcactgt

SEQ ID NO: 927110 - DNA, 25 bp, Homo sapien
ccccaggagtacattgaaattggcc

SEQ ID NO: 927111 - DNA, 25 bp, Homo sapien
catactggattctaagaggtggctc

SEQ ID NO: 927112 - DNA, 25 bp, Homo sapien
gctcactgttaagcttatggctgca

SEQ ID NO: 927113 - DNA, 25 bp, Homo sapien
tgctggttatctgtaaacccataag

SEQ ID NO: 927114 - DNA, 25 bp, Homo sapien
tatttctaaaagaataatgctggtt

SEQ ID NO: 927115 - DNA, 25 bp, Homo sapien
ataagtttccgctgtaaccctggag

SEQ ID NO: 927116 - DNA, 25 bp, Homo sapien
ggagaaaatcatgtcctcatttgta

SEQ ID NO: 927117 - DNA, 25 bp, Homo sapien
caagatgtcgtgcaaaaatgagtcg

SEQ ID NO: 927118 - DNA, 25 bp, Homo sapien
tgaacttaaccacagacatcggcag

SEQ ID NO: 927119 - DNA, 25 bp, Homo sapien
catcgagccttcatagcttgggctg

SEQ ID NO: 927120 - DNA, 25 bp, Homo sapien
tgagcggtgatcaaccgtgtggccc

SEQ ID NO: 927121 - DNA, 25 bp, Homo sapien
tctgaacctccattctcatgtgctt

SEQ ID NO: 927122 - DNA, 25 bp, Homo sapien
gtctgaacctccattctcatgtgct

SEQ ID NO: 927123 - DNA, 25 bp, Homo sapien
tcccacggatgcctcgtgtaccaca

SEQ ID NO: 927124 - DNA, 25 bp, Homo sapien
cccacggatgcctcgtgtaccacat

SEQ ID NO: 927125 - DNA, 25 bp, Homo sapien
gctactgttcaaagggcgactcagg

SEQ ID NO: 927126 - DNA, 25 bp, Homo sapien
tgtgcacaggcctaagggaacgcat

SEQ ID NO: 927127 - DNA, 25 bp, Homo sapien
cagagtgcttggttcgctggcttcc

SEQ ID NO: 927128 - DNA, 25 bp, Homo sapien
ccccgtgagtcgtgaaggaaacatg

SEQ ID NO: 927129 - DNA, 25 bp, Homo sapien
cagccgccagtttggcggctttctc

SEQ ID NO: 927130 - DNA, 25 bp, Homo sapien
actctagtgagaccagcagccaatg

SEQ ID NO: 927131 - DNA, 25 bp, Homo sapien
cagccaatgccagccgccagtttgg

SEQ ID NO: 927132 - DNA, 25 bp, Homo sapien
cattccctttgattgagacctttct

SEQ ID NO: 927133 - DNA, 25 bp, Homo sapien
cctccaccaatatcctgctgggcct

SEQ ID NO: 927134 - DNA, 25 bp, Homo sapien
tcgttgtatggggtgggattcccaa

SEQ ID NO: 927135 - DNA, 25 bp, Homo sapien
ctcttctgtgaggtcgttgtatggg

SEQ ID NO: 927136 - DNA, 25 bp, Homo sapien
aaggcaacataccattttgccaggt

SEQ ID NO: 927137 - DNA, 25 bp, Homo sapien
ccttataggcttctgagtatctttg

SEQ ID NO: 927138 - DNA, 25 bp, Homo sapien
ttgtaaaaccactgccgtaatctta

SEQ ID NO: 927139 - DNA, 25 bp, Homo sapien
tctagctgggtgttagcctgaggat

SEQ ID NO: 927140 - DNA, 25 bp, Homo sapien
tggattccttcatgtctcttgtaaa

SEQ ID NO: 927141 - DNA, 25 bp, Homo sapien
ccaaatcccaagcgctggccatggg

SEQ ID NO: 927142 - DNA, 25 bp, Homo sapien
tatgggaccaaaaaacatataggtg

SEQ ID NO: 927143 - DNA, 25 bp, Homo sapien
tggaaaccccaaatcccaagcgctg

SEQ ID NO: 927144 - DNA, 25 bp, Homo sapien
tgggaccaaaaaacatataggtgga

SEQ ID NO: 927145 - DNA, 25 bp, Homo sapien
gggaaggggacagtctggaccactg

SEQ ID NO: 927146 - DNA, 25 bp, Homo sapien
aggggacagtctggaccactggcat

SEQ ID NO: 927147 - DNA, 25 bp, Homo sapien
cttgacatgtgtgcaggggaggtgg

SEQ ID NO: 927148 - DNA, 25 bp, Homo sapien
gtgggaaggggacagtctggaccac

SEQ ID NO: 927149 - DNA, 25 bp, Homo sapien
tgacgttgcagggtaacaactttta

SEQ ID NO: 927150 - DNA, 25 bp, Homo sapien
tctctgctgacgttgcagggtaaca

SEQ ID NO: 927151 - DNA, 25 bp, Homo sapien
catttctctgctgacgttgcagggt

SEQ ID NO: 927152 - DNA, 25 bp, Homo sapien
tttggtaatacgtttctcatttctc

SEQ ID NO: 927153 - DNA, 25 bp, Homo sapien
tgagataattgcactgcagtaaccg

SEQ ID NO: 927154 - DNA, 25 bp, Homo sapien
tcaaaggtggtccaactgcagctgt

SEQ ID NO: 927155 - DNA, 25 bp, Homo sapien
gatgaagagagattatgactgttga

SEQ ID NO: 927156 - DNA, 25 bp, Homo sapien
tgcagtaaccgaaacgaggtggtcc

SEQ ID NO: 927157 - DNA, 25 bp, Homo sapien
tgaggtgtgacaccgcaatctggtg

SEQ ID NO: 927158 - DNA, 25 bp, Homo sapien
gaggctcttgaagtggtgacaggaa

SEQ ID NO: 927159 - DNA, 25 bp, Homo sapien
ggttgcagtgacaaggttctgatga

SEQ ID NO: 927160 - DNA, 25 bp, Homo sapien
agggcagtgcgttcattcgggttcc

SEQ ID NO: 927161 - DNA, 25 bp, Homo sapien
agaatcccacagtttccgtcccatg

SEQ ID NO: 927162 - DNA, 25 bp, Homo sapien
ttccgtcccatgttgccttccagag

SEQ ID NO: 927163 - DNA, 25 bp, Homo sapien
gaatcccacagtttccgtcccatgt

SEQ ID NO: 927164 - DNA, 25 bp, Homo sapien
cacagtttccgtcccatgttgcctt

SEQ ID NO: 927165 - DNA, 25 bp, Homo sapien
gaagagtgcctctgtactcagtaga

SEQ ID NO: 927166 - DNA, 25 bp, Homo sapien
tcttgaccatgcaagtctaattcag

SEQ ID NO: 927167 - DNA, 25 bp, Homo sapien
taattcagtgagatctatccattca

SEQ ID NO: 927168 - DNA, 25 bp, Homo sapien
tctatccattcagatccagcctgga

SEQ ID NO: 927169 - DNA, 25 bp, Homo sapien
tccagcttagcccatctattacagc

SEQ ID NO: 927170 - DNA, 25 bp, Homo sapien
gctgttgtagatacttcgtttgaca

SEQ ID NO: 927171 - DNA, 25 bp, Homo sapien
gcccatctattacagctgttgtaga

SEQ ID NO: 927172 - DNA, 25 bp, Homo sapien
tagatacttcgtttgacacttagca

SEQ ID NO: 927173 - DNA, 25 bp, Homo sapien
ccccaggtgtaaggagctcaagtac

SEQ ID NO: 927174 - DNA, 25 bp, Homo sapien
cattctggtggatgacaacagcgac

SEQ ID NO: 927175 - DNA, 25 bp, Homo sapien
tgaacgaggccctgtcggtgatcct

SEQ ID NO: 927176 - DNA, 25 bp, Homo sapien
tcatattcatcttcgtgaacgaggc

SEQ ID NO: 927177 - DNA, 25 bp, Homo sapien
tgaagccaggtagcactaagaaaag

SEQ ID NO: 927178 - DNA, 25 bp, Homo sapien
tctctgaactgggtgggatgtttcc

SEQ ID NO: 927179 - DNA, 25 bp, Homo sapien
tcaacaagggagtgcatgatgaagc

SEQ ID NO: 927180 - DNA, 25 bp, Homo sapien
gcctggctggtggttgaaactcagt

SEQ ID NO: 927181 - DNA, 25 bp, Homo sapien
gggtgtatcgctcctcctggtgccc

SEQ ID NO: 927182 - DNA, 25 bp, Homo sapien
gattctccccgatcttctttttgca

SEQ ID NO: 927183 - DNA, 25 bp, Homo sapien
tattgtcacgcagcttccttgatgg

SEQ ID NO: 927184 - DNA, 25 bp, Homo sapien
caagtccagcgagcattttgctgcc

SEQ ID NO: 927185 - DNA, 25 bp, Homo sapien
ctttgtttgggtgaccaggatggag

SEQ ID NO: 927186 - DNA, 25 bp, Homo sapien
tgcacagaggtatcacagtcataat

SEQ ID NO: 927187 - DNA, 25 bp, Homo sapien
cagtcataatacttgacacactcca

SEQ ID NO: 927188 - DNA, 25 bp, Homo sapien
aggaattcgggtgcacagaggtatc

SEQ ID NO: 927189 - DNA, 25 bp, Homo sapien
tccccagggctttacatttcttgtg

SEQ ID NO: 927190 - DNA, 25 bp, Homo sapien
ccaagcaccagcgtgtaaccctgtt

SEQ ID NO: 927191 - DNA, 25 bp, Homo sapien
gaagagattcgccagcttctgagca

SEQ ID NO: 927192 - DNA, 25 bp, Homo sapien
agaaaactcgaggaagaagtgacca

SEQ ID NO: 927193 - DNA, 25 bp, Homo sapien
tgatcaacggaccattctcagcttg

SEQ ID NO: 927194 - DNA, 25 bp, Homo sapien
ctaatgctcttaggctgtctcagat

SEQ ID NO: 927195 - DNA, 25 bp, Homo sapien
tcctggaagtccctcttgagatgtc

SEQ ID NO: 927196 - DNA, 25 bp, Homo sapien
gaatttgggctcttgcaccccacct

SEQ ID NO: 927197 - DNA, 25 bp, Homo sapien
cagggctcaacgaatatgtaacttc

SEQ ID NO: 927198 - DNA, 25 bp, Homo sapien
cgtggccgtccacagctgactgctg

SEQ ID NO: 927199 - DNA, 25 bp, Homo sapien
cgaatatgtaacttcacagatgagg

SEQ ID NO: 927200 - DNA, 25 bp, Homo sapien
ggacaagtgattcttcagtgacttc

SEQ ID NO: 927201 - DNA, 25 bp, Homo sapien
tccatgttgctagtctcaggctccc

SEQ ID NO: 927202 - DNA, 25 bp, Homo sapien
ggtccgtggacaggatcaagactcc

SEQ ID NO: 927203 - DNA, 25 bp, Homo sapien
tcaagactccaaaaaccttggtgct

SEQ ID NO: 927204 - DNA, 25 bp, Homo sapien
cacgggtttgaatgccagttgataa

SEQ ID NO: 927205 - DNA, 25 bp, Homo sapien
tgctgagctaccagcttcgtcccag

SEQ ID NO: 927206 - DNA, 25 bp, Homo sapien
ctctgagggcctgagacttatgcat

SEQ ID NO: 927207 - DNA, 25 bp, Homo sapien
ctgagctaccagcttcgtcccagaa

SEQ ID NO: 927208 - DNA, 25 bp, Homo sapien
gctgctgagctaccagcttcgtccc

SEQ ID NO: 927209 - DNA, 25 bp, Homo sapien
gtgtttgcgatggtgtctggtgcta

SEQ ID NO: 927210 - DNA, 25 bp, Homo sapien
cttcttcttgtagagtataatgcat

SEQ ID NO: 927211 - DNA, 25 bp, Homo sapien
tttcagatcccacagggtaggggga

SEQ ID NO: 927212 - DNA, 25 bp, Homo sapien
cctctgcaatgggtgttggtgcaag

SEQ ID NO: 927213 - DNA, 25 bp, Homo sapien
agggtggatctcgtggtgttaccac

SEQ ID NO: 927214 - DNA, 25 bp, Homo sapien
gtgttaccacatcaccggcatctct

SEQ ID NO: 927215 - DNA, 25 bp, Homo sapien
tattcctgtgaaatggtggcacgtc

SEQ ID NO: 927216 - DNA, 25 bp, Homo sapien
ttcctgtgaaatggtggcacgtctt

SEQ ID NO: 927217 - DNA, 25 bp, Homo sapien
gtgaaatggtggcacgtcttcttct

SEQ ID NO: 927218 - DNA, 25 bp, Homo sapien
aatggtggcacgtcttcttctgtga

SEQ ID NO: 927219 - DNA, 25 bp, Homo sapien
agttatctggatgttcttgactggg

SEQ ID NO: 927220 - DNA, 25 bp, Homo sapien
tgggccccagttcaccttcatattg

SEQ ID NO: 927221 - DNA, 25 bp, Homo sapien
gggccccagttcaccttcatattga

SEQ ID NO: 927222 - DNA, 25 bp, Homo sapien
gtgatgttgccccagttatctggat

SEQ ID NO: 927223 - DNA, 25 bp, Homo sapien
gtattggtgaggtcactagccacag

SEQ ID NO: 927224 - DNA, 25 bp, Homo sapien
tagccacaggttgaaccaaaggaag

SEQ ID NO: 927225 - DNA, 25 bp, Homo sapien
tattggtgaggtcactagccacagg

SEQ ID NO: 927226 - DNA, 25 bp, Homo sapien
tcactagccacaggttgaaccaaag

SEQ ID NO: 927227 - DNA, 25 bp, Homo sapien
tctccgcacagacatcgtccagtga

SEQ ID NO: 927228 - DNA, 25 bp, Homo sapien
gacatagaaatgatctccgccttcc

SEQ ID NO: 927229 - DNA, 25 bp, Homo sapien
acagagacccctctccgcacagaca

SEQ ID NO: 927230 - DNA, 25 bp, Homo sapien
cagacatcgtccagtgacatagaaa

SEQ ID NO: 927231 - DNA, 25 bp, Homo sapien
tcctccggagccatttctaatccac

SEQ ID NO: 927232 - DNA, 25 bp, Homo sapien
ctccggagccatttctaatccacat

SEQ ID NO: 927233 - DNA, 25 bp, Homo sapien
ctgctcctccggagccatttctaat

SEQ ID NO: 927234 - DNA, 25 bp, Homo sapien
tgctcctccggagccatttctaatc

SEQ ID NO: 927235 - DNA, 25 bp, Homo sapien
ctagagaagtgagcacacgcagcac

SEQ ID NO: 927236 - DNA, 25 bp, Homo sapien
tcggggtgttactggagctgctatc

SEQ ID NO: 927237 - DNA, 25 bp, Homo sapien
ccatgggtggttagcagactctcgg

SEQ ID NO: 927238 - DNA, 25 bp, Homo sapien
agctgctatcattgtgggtgtagga

SEQ ID NO: 927239 - DNA, 25 bp, Homo sapien
agatgattgcaggtcctcgccggca

SEQ ID NO: 927240 - DNA, 25 bp, Homo sapien
ctgaggaacccaggtgctccaagtc

SEQ ID NO: 927241 - DNA, 25 bp, Homo sapien
gaggaacccaggtgctccaagtccc

SEQ ID NO: 927242 - DNA, 25 bp, Homo sapien
caagtccccagccttcatgcccggg

SEQ ID NO: 927243 - DNA, 25 bp, Homo sapien
tccaagtccccagccttcatgcccg

SEQ ID NO: 927244 - DNA, 25 bp, Homo sapien
ctggttttgcagtttgcttagagtc

SEQ ID NO: 927245 - DNA, 25 bp, Homo sapien
tggagcttcagaagttcccaggaag

SEQ ID NO: 927246 - DNA, 25 bp, Homo sapien
tctggagcttcagaagttcccagga

SEQ ID NO: 927247 - DNA, 25 bp, Homo sapien
gggccgctggttttgcagtttgctt

SEQ ID NO: 927248 - DNA, 25 bp, Homo sapien
tcttctcattcaggggtctcttttg

SEQ ID NO: 927249 - DNA, 25 bp, Homo sapien
cattcttctcattcaggggtctctt

SEQ ID NO: 927250 - DNA, 25 bp, Homo sapien
tctcattcaggggtctcttttgcat

SEQ ID NO: 927251 - DNA, 25 bp, Homo sapien
ctccattcttctcattcaggggtct

SEQ ID NO: 927252 - DNA, 25 bp, Homo sapien
ccctgggaagtggcccactttggct

SEQ ID NO: 927253 - DNA, 25 bp, Homo sapien
ctgtgccccagttattctggtaatg

SEQ ID NO: 927254 - DNA, 25 bp, Homo sapien
gtgccccagttattctggtaatgaa

SEQ ID NO: 927255 - DNA, 25 bp, Homo sapien
tactgccctaggcattgttccctct

SEQ ID NO: 927256 - DNA, 25 bp, Homo sapien
gccttccttgagatgtaggcactga

SEQ ID NO: 927257 - DNA, 25 bp, Homo sapien
ggtaaatgaaccctattgagctcat

SEQ ID NO: 927258 - DNA, 25 bp, Homo sapien
ggatctactattgtaaatctctacc

SEQ ID NO: 927259 - DNA, 25 bp, Homo sapien
gcactgagtcctgatggatctacta

SEQ ID NO: 927260 - DNA, 25 bp, Homo sapien
ttcttattttctactgagtctgtac

SEQ ID NO: 927261 - DNA, 25 bp, Homo sapien
ttttctactgagtctgtacatttcc

SEQ ID NO: 927262 - DNA, 25 bp, Homo sapien
tctgtacatttcctgtttcccttgg

SEQ ID NO: 927263 - DNA, 25 bp, Homo sapien
gagtctgtacatttcctgtttccct

SEQ ID NO: 927264 - DNA, 25 bp, Homo sapien
gcaggaagacgccctttccttcatc

SEQ ID NO: 927265 - DNA, 25 bp, Homo sapien
tcccagcaggaagacgccctttcct

SEQ ID NO: 927266 - DNA, 25 bp, Homo sapien
ccagcaggaagacgccctttccttc

SEQ ID NO: 927267 - DNA, 25 bp, Homo sapien
cagcaggaagacgccctttccttca

SEQ ID NO: 927268 - DNA, 25 bp, Homo sapien
tgtaatctctccacagtccattcgt

SEQ ID NO: 927269 - DNA, 25 bp, Homo sapien
gctgtaatctctccacagtccattc

SEQ ID NO: 927270 - DNA, 25 bp, Homo sapien
aatctctccacagtccattcgtctg

SEQ ID NO: 927271 - DNA, 25 bp, Homo sapien
taatctctccacagtccattcgtct

SEQ ID NO: 927272 - DNA, 25 bp, Homo sapien
tatcttaggattgagttgctggtga

SEQ ID NO: 927273 - DNA, 25 bp, Homo sapien
tcttaggattgagttgctggtgaga

SEQ ID NO: 927274 - DNA, 25 bp, Homo sapien
tgattatcttaggattgagttgctg

SEQ ID NO: 927275 - DNA, 25 bp, Homo sapien
gattatcttaggattgagttgctgg

SEQ ID NO: 927276 - DNA, 25 bp, Homo sapien
gcaataggttgcctgaatccaagcc

SEQ ID NO: 927277 - DNA, 25 bp, Homo sapien
tgttccatgatgtgacccaggttca

SEQ ID NO: 927278 - DNA, 25 bp, Homo sapien
gatctggcacatgcagccctttgtt

SEQ ID NO: 927279 - DNA, 25 bp, Homo sapien
gcattttcatccgtcttagcacctg

SEQ ID NO: 927280 - DNA, 25 bp, Homo sapien
aaggcagcctggctcagagacccag

SEQ ID NO: 927281 - DNA, 25 bp, Homo sapien
agacccagaccctagacacagccat

SEQ ID NO: 927282 - DNA, 25 bp, Homo sapien
ttttctccaggcacagccaaggcag

SEQ ID NO: 927283 - DNA, 25 bp, Homo sapien
ctcagagacccagaccctagacaca

SEQ ID NO: 927284 - DNA, 25 bp, Homo sapien
gcactaaagggtaatctcattgaac

SEQ ID NO: 927285 - DNA, 25 bp, Homo sapien
tgtagggcatttagtaattctcact

SEQ ID NO: 927286 - DNA, 25 bp, Homo sapien
caacagggagaaattggcaagtttc

SEQ ID NO: 927287 - DNA, 25 bp, Homo sapien
ggctggctagggtttgcatatcaga

SEQ ID NO: 927288 - DNA, 25 bp, Homo sapien
gaacactttaagctctgctatgaac

SEQ ID NO: 927289 - DNA, 25 bp, Homo sapien
ttttagcagctaccaatgatcactg

SEQ ID NO: 927290 - DNA, 25 bp, Homo sapien
gaacttcctagtgctgacattggga

SEQ ID NO: 927291 - DNA, 25 bp, Homo sapien
gatgttaggattcaacagcaggttc

SEQ ID NO: 927292 - DNA, 25 bp, Homo sapien
tcaaggttcttgcacgtggtaccca

SEQ ID NO: 927293 - DNA, 25 bp, Homo sapien
tcttatctcttcgtgggccagatac

SEQ ID NO: 927294 - DNA, 25 bp, Homo sapien
tacccagtagtctgattagactgtc

SEQ ID NO: 927295 - DNA, 25 bp, Homo sapien
gtgggccagatacccaccttcatca

SEQ ID NO: 927296 - DNA, 25 bp, Homo sapien
cttttatctatttccccggcattgg

SEQ ID NO: 927297 - DNA, 25 bp, Homo sapien
acagccttgatgtctataccaaagg

SEQ ID NO: 927298 - DNA, 25 bp, Homo sapien
ccggcattggttcgtttattctgaa

SEQ ID NO: 927299 - DNA, 25 bp, Homo sapien
ccaaaggatgtgccttttatctatt

SEQ ID NO: 927300 - DNA, 25 bp, Homo sapien
gattatggattcagaatgagtgagc

SEQ ID NO: 927301 - DNA, 25 bp, Homo sapien
tgtggattatggattcagaatgagt

SEQ ID NO: 927302 - DNA, 25 bp, Homo sapien
ctgtgtggattatggattcagaatg

SEQ ID NO: 927303 - DNA, 25 bp, Homo sapien
tatggattcagaatgagtgagcatt

SEQ ID NO: 927304 - DNA, 25 bp, Homo sapien
tgaggactgaggtcaccaacgttcc

SEQ ID NO: 927305 - DNA, 25 bp, Homo sapien
atgaggactgaggtcaccaacgttc

SEQ ID NO: 927306 - DNA, 25 bp, Homo sapien
gtaagccgtgaaggcttgaagaaga

SEQ ID NO: 927307 - DNA, 25 bp, Homo sapien
cctttttgtaagccgtgaaggcttg

SEQ ID NO: 927308 - DNA, 25 bp, Homo sapien
aagttggtgccatctcttggttgaa

SEQ ID NO: 927309 - DNA, 25 bp, Homo sapien
acaatttgggtgcaagttggtgcca

SEQ ID NO: 927310 - DNA, 25 bp, Homo sapien
ccagccacaatttgggtgcaagttg

SEQ ID NO: 927311 - DNA, 25 bp, Homo sapien
catctcttggttgaagcaatcggca

SEQ ID NO: 927312 - DNA, 25 bp, Homo sapien
tcataacatggagagtcaagaactc

SEQ ID NO: 927313 - DNA, 25 bp, Homo sapien
tccaaattatggatgctcagcctgt

SEQ ID NO: 927314 - DNA, 25 bp, Homo sapien
gagcaggttgggtatctctaatcca

SEQ ID NO: 927315 - DNA, 25 bp, Homo sapien
tcagatctggatcactcactacaag

SEQ ID NO: 927316 - DNA, 25 bp, Homo sapien
taatgaccacagtgcatgcccagtg

SEQ ID NO: 927317 - DNA, 25 bp, Homo sapien
taaagtgcagacttaggctgaggca

SEQ ID NO: 927318 - DNA, 25 bp, Homo sapien
cacagcagggcataccttcaagaca

SEQ ID NO: 927319 - DNA, 25 bp, Homo sapien
agacatctgctattccaggagcctc

SEQ ID NO: 927320 - DNA, 25 bp, Homo sapien
tgtgctggctgatatccacaccaca

SEQ ID NO: 927321 - DNA, 25 bp, Homo sapien
cacctgtctgttacaccatctccct

SEQ ID NO: 927322 - DNA, 25 bp, Homo sapien
tcctgccacctgtctgttacaccat

SEQ ID NO: 927323 - DNA, 25 bp, Homo sapien
cacagccaacatatggctcctccat

SEQ ID NO: 927324 - DNA, 25 bp, Homo sapien
gatgacagaagttgcagccagatca

SEQ ID NO: 927325 - DNA, 25 bp, Homo sapien
tcaggagggatgcacgtggaggggt

SEQ ID NO: 927326 - DNA, 25 bp, Homo sapien
gcgatcaatgggatgacagaagttg

SEQ ID NO: 927327 - DNA, 25 bp, Homo sapien
ttgaccaagcatgcagtttcaggag

SEQ ID NO: 927328 - DNA, 25 bp, Homo sapien
gctgcttcattactcacctggatgg

SEQ ID NO: 927329 - DNA, 25 bp, Homo sapien
tccggagtgtgtgacgatgctgacc

SEQ ID NO: 927330 - DNA, 25 bp, Homo sapien
cctgtgtgggattcgcagtgtctca

SEQ ID NO: 927331 - DNA, 25 bp, Homo sapien
tgtcactggccggaaggatgtgtct

SEQ ID NO: 927332 - DNA, 25 bp, Homo sapien
agaatctggcactggcccctggaaa

SEQ ID NO: 927333 - DNA, 25 bp, Homo sapien
gaaggcacagtgacaaagcaaagga

SEQ ID NO: 927334 - DNA, 25 bp, Homo sapien
tgaggttctaatcggtaaccagccg

SEQ ID NO: 927335 - DNA, 25 bp, Homo sapien
tctggagagtttgcgtgaggttcta

SEQ ID NO: 927336 - DNA, 25 bp, Homo sapien
caatatcacatagtctgtacctggc

SEQ ID NO: 927337 - DNA, 25 bp, Homo sapien
ccagcaagcttatgggcaggtgcta

SEQ ID NO: 927338 - DNA, 25 bp, Homo sapien
tgggaacactgaaactcagggagat

SEQ ID NO: 927339 - DNA, 25 bp, Homo sapien
ggtttgggtttcagacctcagtcta

SEQ ID NO: 927340 - DNA, 25 bp, Homo sapien
ttaaggtatacagcgacagcaagct

SEQ ID NO: 927341 - DNA, 25 bp, Homo sapien
taggctgcccaaggctaggtctggc

SEQ ID NO: 927342 - DNA, 25 bp, Homo sapien
gacagcaagctgtgaagcggcctag

SEQ ID NO: 927343 - DNA, 25 bp, Homo sapien
aggtctggccgggtgtttggagcac

SEQ ID NO: 927344 - DNA, 25 bp, Homo sapien
gaagccgggctctgaagaccgatgc

SEQ ID NO: 927345 - DNA, 25 bp, Homo sapien
aggtgtctgctccttggacgtcccg

SEQ ID NO: 927346 - DNA, 25 bp, Homo sapien
cgtcccgcgcgggagctcagctggg

SEQ ID NO: 927347 - DNA, 25 bp, Homo sapien
ctgaagaccgatgctctagcgcccc

SEQ ID NO: 927348 - DNA, 25 bp, Homo sapien
ttgctagggcacagcaagatgtcag

SEQ ID NO: 927349 - DNA, 25 bp, Homo sapien
cttgctagggcacagcaagatgtca

SEQ ID NO: 927350 - DNA, 25 bp, Homo sapien
ggctgccacacgtcggcataggaca

SEQ ID NO: 927351 - DNA, 25 bp, Homo sapien
gctgccacacgtcggcataggacat

SEQ ID NO: 927352 - DNA, 25 bp, Homo sapien
ttctttcccgccttctccaaatctg

SEQ ID NO: 927353 - DNA, 25 bp, Homo sapien
gccctctctgtttcagcttctactt

SEQ ID NO: 927354 - DNA, 25 bp, Homo sapien
tctgcaaggaacctattttcccact

SEQ ID NO: 927355 - DNA, 25 bp, Homo sapien
aaatctgtcctccacaattccctag

SEQ ID NO: 927356 - DNA, 25 bp, Homo sapien
ttgtgttcaaaaaggagctcccagt

SEQ ID NO: 927357 - DNA, 25 bp, Homo sapien
caatctaggtctttcccagggagaa

SEQ ID NO: 927358 - DNA, 25 bp, Homo sapien
tgtttccaaagtaggccagcgatcc

SEQ ID NO: 927359 - DNA, 25 bp, Homo sapien
tgggtgggccacatcaaaagcaggc

SEQ ID NO: 927360 - DNA, 25 bp, Homo sapien
taaggaatgccgctagctcagggcc

SEQ ID NO: 927361 - DNA, 25 bp, Homo sapien
tctggacttaaaccgagtacgaggc

SEQ ID NO: 927362 - DNA, 25 bp, Homo sapien
tcactgggagcaagaagaaggtcac

SEQ ID NO: 927363 - DNA, 25 bp, Homo sapien
agatcagtcacgtgggacccaagca

SEQ ID NO: 927364 - DNA, 25 bp, Homo sapien
aaaggcagtaagaacggaagcggtg

SEQ ID NO: 927365 - DNA, 25 bp, Homo sapien
aatggctttcccctcatgccttggg

SEQ ID NO: 927366 - DNA, 25 bp, Homo sapien
agcctcttggaactgagggttgacc

SEQ ID NO: 927367 - DNA, 25 bp, Homo sapien
ttggaactgagggttgacctcagca

SEQ ID NO: 927368 - DNA, 25 bp, Homo sapien
gatggctgctggaattccgagatga

SEQ ID NO: 927369 - DNA, 25 bp, Homo sapien
tcaccattatacctggatggctgct

SEQ ID NO: 927370 - DNA, 25 bp, Homo sapien
gctctctcaccattatacctggatg

SEQ ID NO: 927371 - DNA, 25 bp, Homo sapien
gttatgactgatggttgaagcaata

SEQ ID NO: 927372 - DNA, 25 bp, Homo sapien
gagatgaagctgaagtgcaacccca

SEQ ID NO: 927373 - DNA, 25 bp, Homo sapien
aatcctggcgatttattgcattaga

SEQ ID NO: 927374 - DNA, 25 bp, Homo sapien
gcactgaagacagccctttagtgtc

SEQ ID NO: 927375 - DNA, 25 bp, Homo sapien
tttagtgtccctgccaaggagatga

SEQ ID NO: 927376 - DNA, 25 bp, Homo sapien
gaggaagagtctgcccgcacggcat

SEQ ID NO: 927377 - DNA, 25 bp, Homo sapien
catagtccataggtccgtgtctgct

SEQ ID NO: 927378 - DNA, 25 bp, Homo sapien
tgaacggttccatcgtccgcatcca

SEQ ID NO: 927379 - DNA, 25 bp, Homo sapien
cgcacggcatgcacatgcgcggtga

SEQ ID NO: 927380 - DNA, 25 bp, Homo sapien
caaaggcgcatatgaggctcttccg

SEQ ID NO: 927381 - DNA, 25 bp, Homo sapien
tgtctgttctgcttctgggaatgca

SEQ ID NO: 927382 - DNA, 25 bp, Homo sapien
tcttccggacgcaggtctgtctgtt

SEQ ID NO: 927383 - DNA, 25 bp, Homo sapien
gagtatctggttggctgcaatcagc

SEQ ID NO: 927384 - DNA, 25 bp, Homo sapien
ttttcttgggttttgctaatcacca

SEQ ID NO: 927385 - DNA, 25 bp, Homo sapien
tttcttgggttttgctaatcaccat

SEQ ID NO: 927386 - DNA, 25 bp, Homo sapien
cagttgtgcacggttccccagatag

SEQ ID NO: 927387 - DNA, 25 bp, Homo sapien
tcctgcagttgtgcacggttcccca

SEQ ID NO: 927388 - DNA, 25 bp, Homo sapien
gggaaactgagtggatgtcagaatg

SEQ ID NO: 927389 - DNA, 25 bp, Homo sapien
cggttccccagatagcttagaggag

SEQ ID NO: 927390 - DNA, 25 bp, Homo sapien
gaccaggtgtcatacccaaagattg

SEQ ID NO: 927391 - DNA, 25 bp, Homo sapien
ggagctcctttttggatgaagacag

SEQ ID NO: 927392 - DNA, 25 bp, Homo sapien
caaagattgttctgcagtaggcacc

SEQ ID NO: 927393 - DNA, 25 bp, Homo sapien
catctggtggaacttagtccctgac

SEQ ID NO: 927394 - DNA, 25 bp, Homo sapien
aatgagagcagcaggaaagaaattc

SEQ ID NO: 927395 - DNA, 25 bp, Homo sapien
ctaatgagagcagcaggaaagaaat

SEQ ID NO: 927396 - DNA, 25 bp, Homo sapien
ctgtttgctctaatgagagcagcag

SEQ ID NO: 927397 - DNA, 25 bp, Homo sapien
gtttgctctaatgagagcagcagga

SEQ ID NO: 927398 - DNA, 25 bp, Homo sapien
ctcagagagccttgagagaaaagac

SEQ ID NO: 927399 - DNA, 25 bp, Homo sapien
cacgcagacctcagagagccttgag

SEQ ID NO: 927400 - DNA, 25 bp, Homo sapien
cagacctcagagagccttgagagaa

SEQ ID NO: 927401 - DNA, 25 bp, Homo sapien
tcacacgcagacctcagagagcctt

SEQ ID NO: 927402 - DNA, 25 bp, Homo sapien
ccttcaaactctgtttggcagttcc

SEQ ID NO: 927403 - DNA, 25 bp, Homo sapien
tccttcaaactctgtttggcagttc

SEQ ID NO: 927404 - DNA, 25 bp, Homo sapien
cttcaaactctgtttggcagttccc

SEQ ID NO: 927405 - DNA, 25 bp, Homo sapien
tctcggaaggcatgatagagaatgt

SEQ ID NO: 927406 - DNA, 25 bp, Homo sapien
gaatgtgcttcaactcttccagagt

SEQ ID NO: 927407 - DNA, 25 bp, Homo sapien
cggaaggcatgatagagaatgtgct

SEQ ID NO: 927408 - DNA, 25 bp, Homo sapien
gtggtctcggaaggcatgatagaga

SEQ ID NO: 927409 - DNA, 25 bp, Homo sapien
caggcagatattgaatccgagtcca

SEQ ID NO: 927410 - DNA, 25 bp, Homo sapien
cagatattgaatccgagtccagtgg

SEQ ID NO: 927411 - DNA, 25 bp, Homo sapien
ggacaggcagatattgaatccgagt

SEQ ID NO: 927412 - DNA, 25 bp, Homo sapien
gaggacaggcagatattgaatccga

SEQ ID NO: 927413 - DNA, 25 bp, Homo sapien
tttgactgcacgtgggtcagtgccc

SEQ ID NO: 927414 - DNA, 25 bp, Homo sapien
caagctttggccaatcaactgagag

SEQ ID NO: 927415 - DNA, 25 bp, Homo sapien
tcccacaaaggacgcgggatctgag

SEQ ID NO: 927416 - DNA, 25 bp, Homo sapien
gaatgacctaggaattcaacctgag

SEQ ID NO: 927417 - DNA, 25 bp, Homo sapien
ttattgggaatgactctgccagata

SEQ ID NO: 927418 - DNA, 25 bp, Homo sapien
caaggaccatgagtagcatattgaa

SEQ ID NO: 927419 - DNA, 25 bp, Homo sapien
gaggctattctgtagtgcaaaaaga

SEQ ID NO: 927420 - DNA, 25 bp, Homo sapien
gaagccaggatgtcttggcaccacc

SEQ ID NO: 927421 - DNA, 25 bp, Homo sapien
tcctgcccagatttgtgagcgagtc

SEQ ID NO: 927422 - DNA, 25 bp, Homo sapien
gactcatactgggacctgcacagct

SEQ ID NO: 927423 - DNA, 25 bp, Homo sapien
gataagatgaaatgccaggctgcca

SEQ ID NO: 927424 - DNA, 25 bp, Homo sapien
gagcgagtccaatctcatgtcaact

SEQ ID NO: 927425 - DNA, 25 bp, Homo sapien
tgtgactcagacatcgtggttgact

SEQ ID NO: 927426 - DNA, 25 bp, Homo sapien
gactcagacatcgtggttgactttg

SEQ ID NO: 927427 - DNA, 25 bp, Homo sapien
cagacatcgtggttgactttgaaaa

SEQ ID NO: 927428 - DNA, 25 bp, Homo sapien
atgtgactcagacatcgtggttgac

SEQ ID NO: 927429 - DNA, 25 bp, Homo sapien
gctagggtgtccccagtctctgctc

SEQ ID NO: 927430 - DNA, 25 bp, Homo sapien
ggctagggtgtccccagtctctgct

SEQ ID NO: 927431 - DNA, 25 bp, Homo sapien
ctagggtgtccccagtctctgctcc

SEQ ID NO: 927432 - DNA, 25 bp, Homo sapien
ctccggcggcaaatctgagaaggga

SEQ ID NO: 927433 - DNA, 25 bp, Homo sapien
tggtccccacctaggctgtctgatg

SEQ ID NO: 927434 - DNA, 25 bp, Homo sapien
gacagcttgtctgggagctaagccc

SEQ ID NO: 927435 - DNA, 25 bp, Homo sapien
tgggctgtcggcatgccaagtgtct

SEQ ID NO: 927436 - DNA, 25 bp, Homo sapien
gttcccagatgccaaggtgactgct

SEQ ID NO: 927437 - DNA, 25 bp, Homo sapien
tgacttttgtagatatgggcactta

SEQ ID NO: 927438 - DNA, 25 bp, Homo sapien
gactgctgaaaacccttcaatgact

SEQ ID NO: 927439 - DNA, 25 bp, Homo sapien
tgattctgtatgcagggactgtgac

SEQ ID NO: 927440 - DNA, 25 bp, Homo sapien
caataaatggtagccttcgttagca

SEQ ID NO: 927441 - DNA, 25 bp, Homo sapien
taaaggtaaagagtcagggaagcat

SEQ ID NO: 927442 - DNA, 25 bp, Homo sapien
tcacagaatgatagcctagagctct

SEQ ID NO: 927443 - DNA, 25 bp, Homo sapien
gcactgtttgaccatgactatttca

SEQ ID NO: 927444 - DNA, 25 bp, Homo sapien
tgccccattggaaccacagactgtt

SEQ ID NO: 927445 - DNA, 25 bp, Homo sapien
ccatgaataggcgagaaagtccgaa

SEQ ID NO: 927446 - DNA, 25 bp, Homo sapien
gtcaaatgtcagcatgcatcaggat

SEQ ID NO: 927447 - DNA, 25 bp, Homo sapien
gccattttgccatagtggtagtcaa

SEQ ID NO: 927448 - DNA, 25 bp, Homo sapien
gaaattcacaggagtcttgcaaacc

SEQ ID NO: 927449 - DNA, 25 bp, Homo sapien
agtcttgcaaaccttgctgtacagc

SEQ ID NO: 927450 - DNA, 25 bp, Homo sapien
aaattcacaggagtcttgcaaacct

SEQ ID NO: 927451 - DNA, 25 bp, Homo sapien
ggcgaacatctcctttgaaagcttc

SEQ ID NO: 927452 - DNA, 25 bp, Homo sapien
ccaagttggaataggctggcctgaa

SEQ ID NO: 927453 - DNA, 25 bp, Homo sapien
cagggtccttaggacagctcaaagt

SEQ ID NO: 927454 - DNA, 25 bp, Homo sapien
attgttaaatccagcagggtcctta

SEQ ID NO: 927455 - DNA, 25 bp, Homo sapien
ccttcagtgtccaatgcttcagcca

SEQ ID NO: 927456 - DNA, 25 bp, Homo sapien
ctggaagggattttcggcagatcct

SEQ ID NO: 927457 - DNA, 25 bp, Homo sapien
ggattttcggcagatcctgcctttc

SEQ ID NO: 927458 - DNA, 25 bp, Homo sapien
tcccttcagtgtccaatgcttcagc

SEQ ID NO: 927459 - DNA, 25 bp, Homo sapien
ggcaagacggatacagttctgctca

SEQ ID NO: 927460 - DNA, 25 bp, Homo sapien
tgctaagggaaaattctgaacggag

SEQ ID NO: 927461 - DNA, 25 bp, Homo sapien
ggaaccatgagctgcatcgtagagg

SEQ ID NO: 927462 - DNA, 25 bp, Homo sapien
tagagggtgagtgagattttgctaa

SEQ ID NO: 927463 - DNA, 25 bp, Homo sapien
cccagatgaggagggacgtgatttg

SEQ ID NO: 927464 - DNA, 25 bp, Homo sapien
gggcaccaagcctcatacataatac

SEQ ID NO: 927465 - DNA, 25 bp, Homo sapien
cataaactcgacaattgagggctga

SEQ ID NO: 927466 - DNA, 25 bp, Homo sapien
tatctgactatctgtgactacataa

SEQ ID NO: 927467 - DNA, 25 bp, Homo sapien
tcagaaaccttggttaggagccagg

SEQ ID NO: 927468 - DNA, 25 bp, Homo sapien
caggcagaaagcttggacgggctca

SEQ ID NO: 927469 - DNA, 25 bp, Homo sapien
tctggcatccagacagagttagggc

SEQ ID NO: 927470 - DNA, 25 bp, Homo sapien
tagatattgatccagagactccgaa

SEQ ID NO: 927471 - DNA, 25 bp, Homo sapien
agatcagtcatgttcacagtggtac

SEQ ID NO: 927472 - DNA, 25 bp, Homo sapien
tctgccaggaatgagactgtctgca

SEQ ID NO: 927473 - DNA, 25 bp, Homo sapien
ggccaggtgcggtgtttcaatccca

SEQ ID NO: 927474 - DNA, 25 bp, Homo sapien
cattaaaaggcatccctctaggcca

SEQ ID NO: 927475 - DNA, 25 bp, Homo sapien
aaaatgggaggtctttctgccagga

SEQ ID NO: 927476 - DNA, 25 bp, Homo sapien
aggaccaccccaggatgtgagtgag

SEQ ID NO: 927477 - DNA, 25 bp, Homo sapien
atctctatcaaatcactgatctgtt

SEQ ID NO: 927478 - DNA, 25 bp, Homo sapien
tgcccaaaccaacagatgcggctgc

SEQ ID NO: 927479 - DNA, 25 bp, Homo sapien
aacagttgctagctgaagtatgaaa

SEQ ID NO: 927480 - DNA, 25 bp, Homo sapien
tcttctcctttatatactgtcaagg

SEQ ID NO: 927481 - DNA, 25 bp, Homo sapien
tcctttatatactgtcaaggctttg

SEQ ID NO: 927482 - DNA, 25 bp, Homo sapien
gagaaaagccaattttctgctttaa

SEQ ID NO: 927483 - DNA, 25 bp, Homo sapien
gttttccgcattctaaggtgctttc

SEQ ID NO: 927484 - DNA, 25 bp, Homo sapien
ccccaaccgagatagtatagactgg

SEQ ID NO: 927485 - DNA, 25 bp, Homo sapien
accgagatagtatagactgggccat

SEQ ID NO: 927486 - DNA, 25 bp, Homo sapien
ggtgatctcagagccggcagtttca

SEQ ID NO: 927487 - DNA, 25 bp, Homo sapien
actgaaagcccccaaccgagatagt

SEQ ID NO: 927488 - DNA, 25 bp, Homo sapien
tatcgcagccgaagacatggtctgg

SEQ ID NO: 927489 - DNA, 25 bp, Homo sapien
gaagtaatcaagcagccactctcgg

SEQ ID NO: 927490 - DNA, 25 bp, Homo sapien
gtctggatgctgaagtaatcaagca

SEQ ID NO: 927491 - DNA, 25 bp, Homo sapien
ggctttgatggacaattcactttca

SEQ ID NO: 927492 - DNA, 25 bp, Homo sapien
ttggagatcgcaaacacaggattgg

SEQ ID NO: 927493 - DNA, 25 bp, Homo sapien
gttctttcttggagatcgcaaacac

SEQ ID NO: 927494 - DNA, 25 bp, Homo sapien
tgaagtttggacaagttgtccagaa

SEQ ID NO: 927495 - DNA, 25 bp, Homo sapien
caagttgtccagaagtgtgttctgt

SEQ ID NO: 927496 - DNA, 25 bp, Homo sapien
aataccaataccgagtccatgctgc

SEQ ID NO: 927497 - DNA, 25 bp, Homo sapien
caaataccaataccgagtccatgct

SEQ ID NO: 927498 - DNA, 25 bp, Homo sapien
taacaaataccaataccgagtccat

SEQ ID NO: 927499 - DNA, 25 bp, Homo sapien
ctgtaacaaataccaataccgagtc

SEQ ID NO: 927500 - DNA, 25 bp, Homo sapien
catttgctaccgtttgaatggacat

SEQ ID NO: 927501 - DNA, 25 bp, Homo sapien
tctgcatttgctaccgtttgaatgg

SEQ ID NO: 927502 - DNA, 25 bp, Homo sapien
gccctctgcatttgctaccgtttga

SEQ ID NO: 927503 - DNA, 25 bp, Homo sapien
atttgagccctctgcatttgctacc

SEQ ID NO: 927504 - DNA, 25 bp, Homo sapien
aaaagacagagtttctaggcagtgg

SEQ ID NO: 927505 - DNA, 25 bp, Homo sapien
gatacaatgtactgtccgagaaaag

SEQ ID NO: 927506 - DNA, 25 bp, Homo sapien
taatcctgcgagaaaacagtaccct

SEQ ID NO: 927507 - DNA, 25 bp, Homo sapien
gactcaactgatcctgaactcttgg

SEQ ID NO: 927508 - DNA, 25 bp, Homo sapien
gagaagggaagtgctccttattcac

SEQ ID NO: 927509 - DNA, 25 bp, Homo sapien
ttaggcaataaagctcgtgacattt

SEQ ID NO: 927510 - DNA, 25 bp, Homo sapien
tttgacaaggcccagttactgccaa

SEQ ID NO: 927511 - DNA, 25 bp, Homo sapien
ggctcaagtcatcaccatcccagcg

SEQ ID NO: 927512 - DNA, 25 bp, Homo sapien
tgtgcaggttcactcggcattccca

SEQ ID NO: 927513 - DNA, 25 bp, Homo sapien
tgaacacctagattccaagcctgtg

SEQ ID NO: 927514 - DNA, 25 bp, Homo sapien
aaaccactttgatcagcaccaggga

SEQ ID NO: 927515 - DNA, 25 bp, Homo sapien
aattgagagccaatttcaggctggc

SEQ ID NO: 927516 - DNA, 25 bp, Homo sapien
ctggtaaatagggagtaatgagtgt

SEQ ID NO: 927517 - DNA, 25 bp, Homo sapien
gtaaatagggagtaatgagtgtgtc

SEQ ID NO: 927518 - DNA, 25 bp, Homo sapien
aatagggagtaatgagtgtgtctgc

SEQ ID NO: 927519 - DNA, 25 bp, Homo sapien
atagggagtaatgagtgtgtctgct

SEQ ID NO: 927520 - DNA, 25 bp, Homo sapien
gcgtgcaatacttccacacaggcag

SEQ ID NO: 927521 - DNA, 25 bp, Homo sapien
atttggccaaaggtgtatcctcttt

SEQ ID NO: 927522 - DNA, 25 bp, Homo sapien
gcagaaagaacagacctaaagtggg

SEQ ID NO: 927523 - DNA, 25 bp, Homo sapien
cgcaagtgataaatgatgtcagaca

SEQ ID NO: 927524 - DNA, 25 bp, Homo sapien
cattaagtgggcaggtattggcaag

SEQ ID NO: 927525 - DNA, 25 bp, Homo sapien
ctgggcagaaagcagtagactatag

SEQ ID NO: 927526 - DNA, 25 bp, Homo sapien
aagcagtagactatagtgacaatct

SEQ ID NO: 927527 - DNA, 25 bp, Homo sapien
atctggatgaattgacaagcattaa

SEQ ID NO: 927528 - DNA, 25 bp, Homo sapien
tggcctacggctctgtagctccgag

SEQ ID NO: 927529 - DNA, 25 bp, Homo sapien
aaactttctggcactctgggaagga

SEQ ID NO: 927530 - DNA, 25 bp, Homo sapien
tagctccgaggttggactggtgcaa

SEQ ID NO: 927531 - DNA, 25 bp, Homo sapien
aattccgctcggattagcaattagg

SEQ ID NO: 927532 - DNA, 25 bp, Homo sapien
gaaggcccctgagatgttttgctct

SEQ ID NO: 927533 - DNA, 25 bp, Homo sapien
aaggcccctgagatgttttgctctc

SEQ ID NO: 927534 - DNA, 25 bp, Homo sapien
ggcccctgagatgttttgctctctg

SEQ ID NO: 927535 - DNA, 25 bp, Homo sapien
gcccctgagatgttttgctctctgt

SEQ ID NO: 927536 - DNA, 25 bp, Homo sapien
agcacattactgtttacactacaca

SEQ ID NO: 927537 - DNA, 25 bp, Homo sapien
gcacattactgtttacactacacac

SEQ ID NO: 927538 - DNA, 25 bp, Homo sapien
caagagcattggagccgtggtcaga

SEQ ID NO: 927539 - DNA, 25 bp, Homo sapien
tctcttggctgcaccgttgaacctc

SEQ ID NO: 927540 - DNA, 25 bp, Homo sapien
tctgcgctgtgggtcaagagcattg

SEQ ID NO: 927541 - DNA, 25 bp, Homo sapien
tgaacctctgaactctgcgctgtgg

SEQ ID NO: 927542 - DNA, 25 bp, Homo sapien
gaccccaagaggtccccatcagctt

SEQ ID NO: 927543 - DNA, 25 bp, Homo sapien
tgaccccaagaggtccccatcagct

SEQ ID NO: 927544 - DNA, 25 bp, Homo sapien
acttctgatagcatccatcctaatc

SEQ ID NO: 927545 - DNA, 25 bp, Homo sapien
ttctgatagcatccatcctaatcat

SEQ ID NO: 927546 - DNA, 25 bp, Homo sapien
tacttctgatagcatccatcctaat

SEQ ID NO: 927547 - DNA, 25 bp, Homo sapien
ctacttctgatagcatccatcctaa

SEQ ID NO: 927548 - DNA, 25 bp, Homo sapien
ttccacacttggtaagatccctgtg

SEQ ID NO: 927549 - DNA, 25 bp, Homo sapien
gtcagtctagcaggccttgatatag

SEQ ID NO: 927550 - DNA, 25 bp, Homo sapien
gattccgacaatgtcctcacctcag

SEQ ID NO: 927551 - DNA, 25 bp, Homo sapien
gaatgaaggcttgctgtcagtctag

SEQ ID NO: 927552 - DNA, 25 bp, Homo sapien
caagccaatgctgtagaagttttaa

SEQ ID NO: 927553 - DNA, 25 bp, Homo sapien
cccaagcactgggaacctgaactct

SEQ ID NO: 927554 - DNA, 25 bp, Homo sapien
actgggaacctgaactcttttccag

SEQ ID NO: 927555 - DNA, 25 bp, Homo sapien
agaaacaagccaatgctgtagaagt

SEQ ID NO: 927556 - DNA, 25 bp, Homo sapien
gtcgtaaaattctgagctgggtgag

SEQ ID NO: 927557 - DNA, 25 bp, Homo sapien
ctagtcgtaaaattctgagctgggt

SEQ ID NO: 927558 - DNA, 25 bp, Homo sapien
agtcgtaaaattctgagctgggtga

SEQ ID NO: 927559 - DNA, 25 bp, Homo sapien
tagtcgtaaaattctgagctgggtg

SEQ ID NO: 927560 - DNA, 25 bp, Homo sapien
caaggcccatcatcagagtggacct

SEQ ID NO: 927561 - DNA, 25 bp, Homo sapien
gcctaggtgacggaatgaaacccta

SEQ ID NO: 927562 - DNA, 25 bp, Homo sapien
gaagaatgcttagaactcacaaggc

SEQ ID NO: 927563 - DNA, 25 bp, Homo sapien
tgagctatggttgcatcactaccct

SEQ ID NO: 927564 - DNA, 25 bp, Homo sapien
tactgtcaaacttagtctgaaaaaa

SEQ ID NO: 927565 - DNA, 25 bp, Homo sapien
gagatcttcacgtgccaaatagaag

SEQ ID NO: 927566 - DNA, 25 bp, Homo sapien
acatttactgtcaaacttagtctga

SEQ ID NO: 927567 - DNA, 25 bp, Homo sapien
agaagagatcttcacgtgccaaata

SEQ ID NO: 927568 - DNA, 25 bp, Homo sapien
ggccaagaatggtcatgaattcatc

SEQ ID NO: 927569 - DNA, 25 bp, Homo sapien
aaaccatcgcgaccttctgaagaca

SEQ ID NO: 927570 - DNA, 25 bp, Homo sapien
ctgccagaatatgctgtctatcgtg

SEQ ID NO: 927571 - DNA, 25 bp, Homo sapien
tgttcccaagaaaaccatcgcgacc

SEQ ID NO: 927572 - DNA, 25 bp, Homo sapien
gctgaacttgacctaccgtacctga

SEQ ID NO: 927573 - DNA, 25 bp, Homo sapien
tgacctcaatcaatgaagaagagct

SEQ ID NO: 927574 - DNA, 25 bp, Homo sapien
taacatggttatacctcacccctgc

SEQ ID NO: 927575 - DNA, 25 bp, Homo sapien
ccttttactccgaattgcccagttg

SEQ ID NO: 927576 - DNA, 25 bp, Homo sapien
tgcagttctgagtttaattccccaa

SEQ ID NO: 927577 - DNA, 25 bp, Homo sapien
ttctgagtttaattccccaagacca

SEQ ID NO: 927578 - DNA, 25 bp, Homo sapien
tctgagtttaattccccaagaccaa

SEQ ID NO: 927579 - DNA, 25 bp, Homo sapien
ttctatgcagttctgagtttaattc

SEQ ID NO: 927580 - DNA, 25 bp, Homo sapien
gcctaatcctttaatgtcaacctct

SEQ ID NO: 927581 - DNA, 25 bp, Homo sapien
taggttaattcccaatatggttgta

SEQ ID NO: 927582 - DNA, 25 bp, Homo sapien
aagttgataggttaattcccaatat

SEQ ID NO: 927583 - DNA, 25 bp, Homo sapien
taatcctttaatgtcaacctcttaa

SEQ ID NO: 927584 - DNA, 25 bp, Homo sapien
ccacacctggcgcaaatctcatctt

SEQ ID NO: 927585 - DNA, 25 bp, Homo sapien
taaacatttcgacctagagcaggaa

SEQ ID NO: 927586 - DNA, 25 bp, Homo sapien
tgtttaactctgtgcagtgcaaggg

SEQ ID NO: 927587 - DNA, 25 bp, Homo sapien
taaggatatcttgctaggccaacac

SEQ ID NO: 927588 - DNA, 25 bp, Homo sapien
gaggccctaatatagatcttgcagc

SEQ ID NO: 927589 - DNA, 25 bp, Homo sapien
caatgactgcagaataatcttgact

SEQ ID NO: 927590 - DNA, 25 bp, Homo sapien
tggatgcaatgactgcagaataatc

SEQ ID NO: 927591 - DNA, 25 bp, Homo sapien
ttgagaatatggatgcaatgactgc

SEQ ID NO: 927592 - DNA, 25 bp, Homo sapien
gaatatggatgcaatgactgcagaa

SEQ ID NO: 927593 - DNA, 25 bp, Homo sapien
acttctcacggaagtctccatgcaa

SEQ ID NO: 927594 - DNA, 25 bp, Homo sapien
caacttctcacggaagtctccatgc

SEQ ID NO: 927595 - DNA, 25 bp, Homo sapien
gctcaacttctcacggaagtctcca

SEQ ID NO: 927596 - DNA, 25 bp, Homo sapien
tgctcaacttctcacggaagtctcc

SEQ ID NO: 927597 - DNA, 25 bp, Homo sapien
tggtggtctctgcaggcactactag

SEQ ID NO: 927598 - DNA, 25 bp, Homo sapien
tggctccagtgaagcggatggagaa

SEQ ID NO: 927599 - DNA, 25 bp, Homo sapien
ctctgcaggcactactagaaagcac

SEQ ID NO: 927600 - DNA, 25 bp, Homo sapien
gatggagaaataaagctggtggtct

SEQ ID NO: 927601 - DNA, 25 bp, Homo sapien
agggtaggaagagtcgtgaacagca

SEQ ID NO: 927602 - DNA, 25 bp, Homo sapien
gggtaggaagagtcgtgaacagcat

SEQ ID NO: 927603 - DNA, 25 bp, Homo sapien
aagggtaggaagagtcgtgaacagc

SEQ ID NO: 927604 - DNA, 25 bp, Homo sapien
aggcacccagacaaccagctcctga

SEQ ID NO: 927605 - DNA, 25 bp, Homo sapien
tgtgcttggattactaggaagtctg

SEQ ID NO: 927606 - DNA, 25 bp, Homo sapien
accagctcctgactatgtgtgcttg

SEQ ID NO: 927607 - DNA, 25 bp, Homo sapien
cctgactatgtgtgcttggattact

SEQ ID NO: 927608 - DNA, 25 bp, Homo sapien
tatggtagatcgcaaaaaatcaact

SEQ ID NO: 927609 - DNA, 25 bp, Homo sapien
tcactccgaaatggaaaacactctc

SEQ ID NO: 927610 - DNA, 25 bp, Homo sapien
aatagtaaacattgaagcagagccc

SEQ ID NO: 927611 - DNA, 25 bp, Homo sapien
ctagattattaaccatacacacaga

SEQ ID NO: 927612 - DNA, 25 bp, Homo sapien
gattcaggcttgggggtgatggtct

SEQ ID NO: 927613 - DNA, 25 bp, Homo sapien
ggattcaggcttgggggtgatggtc

SEQ ID NO: 927614 - DNA, 25 bp, Homo sapien
cgaagaaaatctgctctatagcccg

SEQ ID NO: 927615 - DNA, 25 bp, Homo sapien
tcactgactactgaccacccgaaga

SEQ ID NO: 927616 - DNA, 25 bp, Homo sapien
gaccacccgaagaaaatctgctcta

SEQ ID NO: 927617 - DNA, 25 bp, Homo sapien
tctatagcccgtgtctcctgctcct

SEQ ID NO: 927618 - DNA, 25 bp, Homo sapien
ctgggcagcggcacttggtatgctt

SEQ ID NO: 927619 - DNA, 25 bp, Homo sapien
gcacttggtatgcttgggccccagg

SEQ ID NO: 927620 - DNA, 25 bp, Homo sapien
cagcggcacttggtatgcttgggcc

SEQ ID NO: 927621 - DNA, 25 bp, Homo sapien
gcggcacttggtatgcttgggcccc

SEQ ID NO: 927622 - DNA, 25 bp, Homo sapien
ccttcccaagaacaacatctgtccc

SEQ ID NO: 927623 - DNA, 25 bp, Homo sapien
ggagtgtcccttcccaagaacaaca

SEQ ID NO: 927624 - DNA, 25 bp, Homo sapien
caggagtgtcccttcccaagaacaa

SEQ ID NO: 927625 - DNA, 25 bp, Homo sapien
caagaacaacatctgtccccaaact

SEQ ID NO: 927626 - DNA, 25 bp, Homo sapien
taaacttacaaatctccaggcactg

SEQ ID NO: 927627 - DNA, 25 bp, Homo sapien
ttgtaaacttacaaatctccaggca

SEQ ID NO: 927628 - DNA, 25 bp, Homo sapien
tcttcaccaacactagtggctttgt

SEQ ID NO: 927629 - DNA, 25 bp, Homo sapien
ggctttgtgaattatatcgtttgta

SEQ ID NO: 927630 - DNA, 25 bp, Homo sapien
tgggtcaccgtgaaatagttgatga

SEQ ID NO: 927631 - DNA, 25 bp, Homo sapien
caccgtgaaatagttgatgacttgg

SEQ ID NO: 927632 - DNA, 25 bp, Homo sapien
tgatgggtcaccgtgaaatagttga

SEQ ID NO: 927633 - DNA, 25 bp, Homo sapien
ggtcaccgtgaaatagttgatgact

SEQ ID NO: 927634 - DNA, 25 bp, Homo sapien
tacagcagagagtgtctaggtggtt

SEQ ID NO: 927635 - DNA, 25 bp, Homo sapien
tatgaaggggcgtagtacttgctta

SEQ ID NO: 927636 - DNA, 25 bp, Homo sapien
agcagtcatggcatatgaaggggcg

SEQ ID NO: 927637 - DNA, 25 bp, Homo sapien
catggcatatgaaggggcgtagtac

SEQ ID NO: 927638 - DNA, 25 bp, Homo sapien
tgcagcctcttgctggtgaactttt

SEQ ID NO: 927639 - DNA, 25 bp, Homo sapien
cacttatatttgtccatgtctggac

SEQ ID NO: 927640 - DNA, 25 bp, Homo sapien
ctgcagcctcttgctggtgaacttt

SEQ ID NO: 927641 - DNA, 25 bp, Homo sapien
cctccttccacttatatttgtccat

SEQ ID NO: 927642 - DNA, 25 bp, Homo sapien
tgtaacttgtagatctgtgtgacat

SEQ ID NO: 927643 - DNA, 25 bp, Homo sapien
tcaacaatgtaacttgtagatctgt

SEQ ID NO: 927644 - DNA, 25 bp, Homo sapien
aatgtaacttgtagatctgtgtgac

SEQ ID NO: 927645 - DNA, 25 bp, Homo sapien
acaatgtaacttgtagatctgtgtg

SEQ ID NO: 927646 - DNA, 25 bp, Homo sapien
gctccacctcgcttggcatgtaccc

SEQ ID NO: 927647 - DNA, 25 bp, Homo sapien
atgtccaagcgctgcatgatgatgg

SEQ ID NO: 927648 - DNA, 25 bp, Homo sapien
agatgaagccgttcccatcccggtc

SEQ ID NO: 927649 - DNA, 25 bp, Homo sapien
cagaacccgaaaggcctctcggatt

SEQ ID NO: 927650 - DNA, 25 bp, Homo sapien
ggaaggagcgtggagccactactca

SEQ ID NO: 927651 - DNA, 25 bp, Homo sapien
cctggaaggagcgtggagccactac

SEQ ID NO: 927652 - DNA, 25 bp, Homo sapien
actcagcttgaggtcatggcacact

SEQ ID NO: 927653 - DNA, 25 bp, Homo sapien
ggagccactactcagcttgaggtca

SEQ ID NO: 927654 - DNA, 25 bp, Homo sapien
ccatccttgggaactagggaccaca

SEQ ID NO: 927655 - DNA, 25 bp, Homo sapien
tccataataggcacctcgggagagt

SEQ ID NO: 927656 - DNA, 25 bp, Homo sapien
aacccacggagacattggaacaggc

SEQ ID NO: 927657 - DNA, 25 bp, Homo sapien
taaagtctctggtgcgccagggcta

SEQ ID NO: 927658 - DNA, 25 bp, Homo sapien
tgggccacagaaatgctctctgcaa

SEQ ID NO: 927659 - DNA, 25 bp, Homo sapien
tctttgtgggccacagaaatgctct

SEQ ID NO: 927660 - DNA, 25 bp, Homo sapien
ctccaagatgtctttgtgggccaca

SEQ ID NO: 927661 - DNA, 25 bp, Homo sapien
tgctctctgcaatggtgataggaac

SEQ ID NO: 927662 - DNA, 25 bp, Homo sapien
cagtctctgcaagcatatggagtcg

SEQ ID NO: 927663 - DNA, 25 bp, Homo sapien
tcgtctgaaaggactccagtctctg

SEQ ID NO: 927664 - DNA, 25 bp, Homo sapien
tatggagtcgcccagaatcaaagtt

SEQ ID NO: 927665 - DNA, 25 bp, Homo sapien
tatgaaaagacacgtggcaacacgc

SEQ ID NO: 927666 - DNA, 25 bp, Homo sapien
gagatcctctttttttagctcccat

SEQ ID NO: 927667 - DNA, 25 bp, Homo sapien
cttccttacctctggtaaccagcaa

SEQ ID NO: 927668 - DNA, 25 bp, Homo sapien
tacctctggtaaccagcaacctact

SEQ ID NO: 927669 - DNA, 25 bp, Homo sapien
ggtaaccagcaacctactctctatt

SEQ ID NO: 927670 - DNA, 25 bp, Homo sapien
gccatacctccaagttagctgcaag

SEQ ID NO: 927671 - DNA, 25 bp, Homo sapien
caaaagggcacagctagcactagcg

SEQ ID NO: 927672 - DNA, 25 bp, Homo sapien
gaatctagtgtcgaacaggactcct

SEQ ID NO: 927673 - DNA, 25 bp, Homo sapien
gagaaagtgcccgaggtagtcaagt

SEQ ID NO: 927674 - DNA, 25 bp, Homo sapien
caattttgacttctgctgctaaaat

SEQ ID NO: 927675 - DNA, 25 bp, Homo sapien
ggttccataattttgcaattttgac

SEQ ID NO: 927676 - DNA, 25 bp, Homo sapien
ttgacttctgctgctaaaatttctt

SEQ ID NO: 927677 - DNA, 25 bp, Homo sapien
cactcattggttgatgggcttttag

SEQ ID NO: 927678 - DNA, 25 bp, Homo sapien
tcttggtgtactaagcacccatggg

SEQ ID NO: 927679 - DNA, 25 bp, Homo sapien
tacagcacgaggagataagtactat

SEQ ID NO: 927680 - DNA, 25 bp, Homo sapien
cacccatgggtcatcaaggatggcg

SEQ ID NO: 927681 - DNA, 25 bp, Homo sapien
aaagccagcagaccattacagcacg

SEQ ID NO: 927682 - DNA, 25 bp, Homo sapien
gacagagtaagacaccaccaaaaac

SEQ ID NO: 927683 - DNA, 25 bp, Homo sapien
cctgggtgacaatgtgaggacctgt

SEQ ID NO: 927684 - DNA, 25 bp, Homo sapien
acaatgtgaggacctgtctcaaaga

SEQ ID NO: 927685 - DNA, 25 bp, Homo sapien
gaatcattggaaccctgagatggag

SEQ ID NO: 927686 - DNA, 25 bp, Homo sapien
agcctgaaccactaacaattcgcat

SEQ ID NO: 927687 - DNA, 25 bp, Homo sapien
tgggctttggtggttagaatgattt

SEQ ID NO: 927688 - DNA, 25 bp, Homo sapien
gatcgatgacatgggaactactggt

SEQ ID NO: 927689 - DNA, 25 bp, Homo sapien
gaatgcgttgcatgccaagtactgc

SEQ ID NO: 927690 - DNA, 25 bp, Homo sapien
tcggttgagcccatctgtcctagtg

SEQ ID NO: 927691 - DNA, 25 bp, Homo sapien
ggatgccaggattactaccaagaca

SEQ ID NO: 927692 - DNA, 25 bp, Homo sapien
tacatctttgctactagaggctctc

SEQ ID NO: 927693 - DNA, 25 bp, Homo sapien
gcataggatggtggccaaaagcaga

SEQ ID NO: 927694 - DNA, 25 bp, Homo sapien
tttcagtaatggcagagtagctctt

SEQ ID NO: 927695 - DNA, 25 bp, Homo sapien
catggaggcaaatctaggaactgaa

SEQ ID NO: 927696 - DNA, 25 bp, Homo sapien
tgagccctagaatgccgctggtctc

SEQ ID NO: 927697 - DNA, 25 bp, Homo sapien
gatcaagtgtgtcatgctctgaaaa

SEQ ID NO: 927698 - DNA, 25 bp, Homo sapien
tcagccttgcacaacgcagtgtgtc

SEQ ID NO: 927699 - DNA, 25 bp, Homo sapien
taggaagagcaatgtgttaccagac

SEQ ID NO: 927700 - DNA, 25 bp, Homo sapien
taatgtatcaaatttccatgtgaaa

SEQ ID NO: 927701 - DNA, 25 bp, Homo sapien
caactatacacagttcgttgttgcc

SEQ ID NO: 927702 - DNA, 25 bp, Homo sapien
tcaatgaccatattgcattccagtc

SEQ ID NO: 927703 - DNA, 25 bp, Homo sapien
tgttgcctttgttcataatgtatca

SEQ ID NO: 927704 - DNA, 25 bp, Homo sapien
gcaaatgtagttttaataagtcacc

SEQ ID NO: 927705 - DNA, 25 bp, Homo sapien
aatctctgtgaaactccagtataac

SEQ ID NO: 927706 - DNA, 25 bp, Homo sapien
tcacatagatgggtagctgcaaatg

SEQ ID NO: 927707 - DNA, 25 bp, Homo sapien
gatcatgacagttgcctcttataca

SEQ ID NO: 927708 - DNA, 25 bp, Homo sapien
cccgaagccctcgtttctgacggtg

SEQ ID NO: 927709 - DNA, 25 bp, Homo sapien
cctcgtttctgacggtggtctccct

SEQ ID NO: 927710 - DNA, 25 bp, Homo sapien
gcttcccatcacctatccccttttg

SEQ ID NO: 927711 - DNA, 25 bp, Homo sapien
gtttctgacggtggtctcccttctc

SEQ ID NO: 927712 - DNA, 25 bp, Homo sapien
aagggctctagtctctgctgtagga

SEQ ID NO: 927713 - DNA, 25 bp, Homo sapien
ctaaatggacaagagggttcctgga

SEQ ID NO: 927714 - DNA, 25 bp, Homo sapien
tgctgtaggacgtggctaaatggac

SEQ ID NO: 927715 - DNA, 25 bp, Homo sapien
ccacggaccaaggtgcaggcattgt

SEQ ID NO: 927716 - DNA, 25 bp, Homo sapien
cactggaggagggaaaatacaaagg

SEQ ID NO: 927717 - DNA, 25 bp, Homo sapien
gagcttaatctgaaattgaggtgga

SEQ ID NO: 927718 - DNA, 25 bp, Homo sapien
tgcttagggtgagctacaggctcct

SEQ ID NO: 927719 - DNA, 25 bp, Homo sapien
gttaaagcagttggcactgggacac

SEQ ID NO: 927720 - DNA, 25 bp, Homo sapien
tctctgattgttgatgaaaaagttt

SEQ ID NO: 927721 - DNA, 25 bp, Homo sapien
cacaagggactgtttttcgtcacta

SEQ ID NO: 927722 - DNA, 25 bp, Homo sapien
tttactgtttgacttcttgatacaa

SEQ ID NO: 927723 - DNA, 25 bp, Homo sapien
ttgacttcttgatacaataaagatc

SEQ ID NO: 927724 - DNA, 25 bp, Homo sapien
ggacggagatccagaatcccactgc

SEQ ID NO: 927725 - DNA, 25 bp, Homo sapien
caatcagcaaatcttggtaagtcca

SEQ ID NO: 927726 - DNA, 25 bp, Homo sapien
acacgttcaatactgagctcctgga

SEQ ID NO: 927727 - DNA, 25 bp, Homo sapien
gctaataagtattggactcaacacg

SEQ ID NO: 927728 - DNA, 25 bp, Homo sapien
catactgaggatcttcaaaatctgg

SEQ ID NO: 927729 - DNA, 25 bp, Homo sapien
ctggcaagaggcttcggcagcagct

SEQ ID NO: 927730 - DNA, 25 bp, Homo sapien
gaaagagtggcacctctgaagggat

SEQ ID NO: 927731 - DNA, 25 bp, Homo sapien
aacttgcatactgaggatcttcaaa

SEQ ID NO: 927732 - DNA, 25 bp, Homo sapien
cattattatgttcccgtgtacccaa

SEQ ID NO: 927733 - DNA, 25 bp, Homo sapien
ggctttgatggaaccatcacccaaa

SEQ ID NO: 927734 - DNA, 25 bp, Homo sapien
ggttctatccctcaggacaattcaa

SEQ ID NO: 927735 - DNA, 25 bp, Homo sapien
gttaacacagtactactcaaatagg

SEQ ID NO: 927736 - DNA, 25 bp, Homo sapien
aaccaggaagtttttgagtcatttg

SEQ ID NO: 927737 - DNA, 25 bp, Homo sapien
taatatggcaatacaggtctggatg

SEQ ID NO: 927738 - DNA, 25 bp, Homo sapien
catttagctccagattacaagtggg

SEQ ID NO: 927739 - DNA, 25 bp, Homo sapien
tccatccatgtacctgctaattttt

SEQ ID NO: 927740 - DNA, 25 bp, Homo sapien
taggtaacgacatgggtaccaaggc

SEQ ID NO: 927741 - DNA, 25 bp, Homo sapien
taaggtgtgaacaacagtgccagat

SEQ ID NO: 927742 - DNA, 25 bp, Homo sapien
gccagatgctgcagaaagtcctgaa

SEQ ID NO: 927743 - DNA, 25 bp, Homo sapien
taccaaggcagtgatggactgcaaa

SEQ ID NO: 927744 - DNA, 25 bp, Homo sapien
tagccagctgttcgctgtcactgcc

SEQ ID NO: 927745 - DNA, 25 bp, Homo sapien
aacaagccggcggtcacatggtgga

SEQ ID NO: 927746 - DNA, 25 bp, Homo sapien
tcctccacggagatattagccagct

SEQ ID NO: 927747 - DNA, 25 bp, Homo sapien
tcactgccagcagagagcgatcggt

SEQ ID NO: 927748 - DNA, 25 bp, Homo sapien
tctgcagctttggattcactacaca

SEQ ID NO: 927749 - DNA, 25 bp, Homo sapien
gcagctttggattcactacacaaat

SEQ ID NO: 927750 - DNA, 25 bp, Homo sapien
tgtctgcagctttggattcactaca

SEQ ID NO: 927751 - DNA, 25 bp, Homo sapien
ggttgtctgcagctttggattcact

SEQ ID NO: 927752 - DNA, 25 bp, Homo sapien
gaactgcggaggattgcaaaccttc

SEQ ID NO: 927753 - DNA, 25 bp, Homo sapien
tgcaccagcttcacaaggatgccgg

SEQ ID NO: 927754 - DNA, 25 bp, Homo sapien
gccaggacagacatgtgcctcccat

SEQ ID NO: 927755 - DNA, 25 bp, Homo sapien
gtaattagatgaacgctcctgctgg

SEQ ID NO: 927756 - DNA, 25 bp, Homo sapien
tgccaagtacttagaaagcagcact

SEQ ID NO: 927757 - DNA, 25 bp, Homo sapien
gatcttctaggacataatgcacaca

SEQ ID NO: 927758 - DNA, 25 bp, Homo sapien
taacctagcaggttaagagcatggc

SEQ ID NO: 927759 - DNA, 25 bp, Homo sapien
cataagctgtaagtatgctgcctca

SEQ ID NO: 927760 - DNA, 25 bp, Homo sapien
gcgggcagcgctcagcctctcgctc

SEQ ID NO: 927761 - DNA, 25 bp, Homo sapien
gggcggtgcggaatggatgcgccga

SEQ ID NO: 927762 - DNA, 25 bp, Homo sapien
tgcggaatggatgcgccgagcgggc

SEQ ID NO: 927763 - DNA, 25 bp, Homo sapien
agccgaggcgcctccgcacagcgcg

SEQ ID NO: 927764 - DNA, 25 bp, Homo sapien
gcgcgccgggacctgcacgagcccc

SEQ ID NO: 927765 - DNA, 25 bp, Homo sapien
cccctcgtcgactcggagcgcgatc

SEQ ID NO: 927766 - DNA, 25 bp, Homo sapien
agccgcgtccccgtgccggcatcct

SEQ ID NO: 927767 - DNA, 25 bp, Homo sapien
ggagcgcgatctgggcgcgtgcctc

SEQ ID NO: 927768 - DNA, 25 bp, Homo sapien
ccgcgcgggttcagcccatgtgcgc

SEQ ID NO: 927769 - DNA, 25 bp, Homo sapien
gttcagcccatgtgcgcggctgcct

SEQ ID NO: 927770 - DNA, 25 bp, Homo sapien
ggagttgcgcgccctagaaactcca

SEQ ID NO: 927771 - DNA, 25 bp, Homo sapien
aggccccgctggagttgcgcgccct

SEQ ID NO: 927772 - DNA, 25 bp, Homo sapien
cctgaccccaacttcggagagagaa

SEQ ID NO: 927773 - DNA, 25 bp, Homo sapien
gaactggcactgtgatccccgtcaa

SEQ ID NO: 927774 - DNA, 25 bp, Homo sapien
gagagaagaaaagcgcaatttgtga

SEQ ID NO: 927775 - DNA, 25 bp, Homo sapien
aatttgtgaattcccctcaagccca

SEQ ID NO: 927776 - DNA, 25 bp, Homo sapien
ggaagaaatcgtactcatcctcttg

SEQ ID NO: 927777 - DNA, 25 bp, Homo sapien
cgagcagctcatatacatttaccat

SEQ ID NO: 927778 - DNA, 25 bp, Homo sapien
ggtgtctgccccgagcagctcatat

SEQ ID NO: 927779 - DNA, 25 bp, Homo sapien
tcgggccagcatccatttcctggtg

SEQ ID NO: 927780 - DNA, 25 bp, Homo sapien
tgaagcagacttctaatgagcagaa

SEQ ID NO: 927781 - DNA, 25 bp, Homo sapien
atgagcagaatcctggttccgtgtt

SEQ ID NO: 927782 - DNA, 25 bp, Homo sapien
aaatgaagcagacttctaatgagca

SEQ ID NO: 927783 - DNA, 25 bp, Homo sapien
cctggttccgtgtttgcccaggcac

SEQ ID NO: 927784 - DNA, 25 bp, Homo sapien
tccttgggaggtgagtgaatgtctg

SEQ ID NO: 927785 - DNA, 25 bp, Homo sapien
tttccttgggaggtgagtgaatgtc

SEQ ID NO: 927786 - DNA, 25 bp, Homo sapien
tttttccttgggaggtgagtgaatg

SEQ ID NO: 927787 - DNA, 25 bp, Homo sapien
aagtgtgtgcatattctctccaata

SEQ ID NO: 927788 - DNA, 25 bp, Homo sapien
ctggtgacttggtagcagccacata

SEQ ID NO: 927789 - DNA, 25 bp, Homo sapien
tcaattaggaatgcaagccacaagg

SEQ ID NO: 927790 - DNA, 25 bp, Homo sapien
caccgtggaattagcaatgcccgac

SEQ ID NO: 927791 - DNA, 25 bp, Homo sapien
tcccaaccgcagaggctggtgactt

SEQ ID NO: 927792 - DNA, 25 bp, Homo sapien
tgaggcaacaagaggtgagaatgtt

SEQ ID NO: 927793 - DNA, 25 bp, Homo sapien
taagaatgaataagctgctagggaa

SEQ ID NO: 927794 - DNA, 25 bp, Homo sapien
tcaaagtcaagaggatagaaggtca

SEQ ID NO: 927795 - DNA, 25 bp, Homo sapien
cccagtatgatcaggacttgcagca

SEQ ID NO: 927796 - DNA, 25 bp, Homo sapien
ccttttagggccgatgagttcggca

SEQ ID NO: 927797 - DNA, 25 bp, Homo sapien
gaagtaggaccattggccagagaag

SEQ ID NO: 927798 - DNA, 25 bp, Homo sapien
gctcctggatgatgcatccttttag

SEQ ID NO: 927799 - DNA, 25 bp, Homo sapien
gatgagttcggcaccactgaagtcc

SEQ ID NO: 927800 - DNA, 25 bp, Homo sapien
caggaggcaatgcactctgagagat

SEQ ID NO: 927801 - DNA, 25 bp, Homo sapien
gaagggcaggaggcaatgcactctg

SEQ ID NO: 927802 - DNA, 25 bp, Homo sapien
tctgagagataacattactgctgaa

SEQ ID NO: 927803 - DNA, 25 bp, Homo sapien
ctgagagataacattactgctgaac

SEQ ID NO: 927804 - DNA, 25 bp, Homo sapien
tgatgggctgtgttctcactcccct

SEQ ID NO: 927805 - DNA, 25 bp, Homo sapien
ccacccgatcccctgctttttggct

SEQ ID NO: 927806 - DNA, 25 bp, Homo sapien
agaacacgttcctgatgggctgtgt

SEQ ID NO: 927807 - DNA, 25 bp, Homo sapien
gagccaagaccttgaccacagatct

SEQ ID NO: 927808 - DNA, 25 bp, Homo sapien
taaagctggagatcccattctgaac

SEQ ID NO: 927809 - DNA, 25 bp, Homo sapien
gctaaagctggagatcccattctga

SEQ ID NO: 927810 - DNA, 25 bp, Homo sapien
agctggagatcccattctgaacagc

SEQ ID NO: 927811 - DNA, 25 bp, Homo sapien
tggctaaagctggagatcccattct

SEQ ID NO: 927812 - DNA, 25 bp, Homo sapien
ctgagggctgccaaacaatctaggt

SEQ ID NO: 927813 - DNA, 25 bp, Homo sapien
gggctgccaaacaatctaggtcctt

SEQ ID NO: 927814 - DNA, 25 bp, Homo sapien
caaacaatctaggtccttgggtttg

SEQ ID NO: 927815 - DNA, 25 bp, Homo sapien
tgccaaacaatctaggtccttgggt

SEQ ID NO: 927816 - DNA, 25 bp, Homo sapien
aagctcatcaaaggaacgtcagcga

SEQ ID NO: 927817 - DNA, 25 bp, Homo sapien
tcaaaggaacgtcagcgaaggcact

SEQ ID NO: 927818 - DNA, 25 bp, Homo sapien
tctcagagagagttagaagctcatc

SEQ ID NO: 927819 - DNA, 25 bp, Homo sapien
cccctctccgggttgctctggcagc

SEQ ID NO: 927820 - DNA, 25 bp, Homo sapien
gcgcggacccagagtaagcagtaag

SEQ ID NO: 927821 - DNA, 25 bp, Homo sapien
taaagatggcgcgtccggagtcgtc

SEQ ID NO: 927822 - DNA, 25 bp, Homo sapien
cttcaagaacgaagacgcagaccgc

SEQ ID NO: 927823 - DNA, 25 bp, Homo sapien
tgagctttaaaggtggcgcggaccc

SEQ ID NO: 927824 - DNA, 25 bp, Homo sapien
aagcggatagcaccccagcgagctt

SEQ ID NO: 927825 - DNA, 25 bp, Homo sapien
acacaaactcaagcggatagcaccc

SEQ ID NO: 927826 - DNA, 25 bp, Homo sapien
aaactcaagcggatagcaccccagc

SEQ ID NO: 927827 - DNA, 25 bp, Homo sapien
aaaaacacaaactcaagcggatagc

SEQ ID NO: 927828 - DNA, 25 bp, Homo sapien
tcatagcattgatcactgtgaggaa

SEQ ID NO: 927829 - DNA, 25 bp, Homo sapien
catttgaagtgaccctccacagaca

SEQ ID NO: 927830 - DNA, 25 bp, Homo sapien
tgatattccgtccagggtgctcctg

SEQ ID NO: 927831 - DNA, 25 bp, Homo sapien
tctcaatgactgttgcgtggtccag

SEQ ID NO: 927832 - DNA, 25 bp, Homo sapien
actatgcccagtcacatatgacttt

SEQ ID NO: 927833 - DNA, 25 bp, Homo sapien
gcccagtcacatatgacttttgaat

SEQ ID NO: 927834 - DNA, 25 bp, Homo sapien
tgcccagtcacatatgacttttgaa

SEQ ID NO: 927835 - DNA, 25 bp, Homo sapien
ttttgtactgatcttgctcctctgt

SEQ ID NO: 927836 - DNA, 25 bp, Homo sapien
aataataccatagaatcttatgacc

SEQ ID NO: 927837 - DNA, 25 bp, Homo sapien
aataataataccatagaatcttatg

SEQ ID NO: 927838 - DNA, 25 bp, Homo sapien
catagaatcttatgacctttatttc

SEQ ID NO: 927839 - DNA, 25 bp, Homo sapien
catagccacctctgttgggactcag

SEQ ID NO: 927840 - DNA, 25 bp, Homo sapien
gccaatctcacgtgggttcctccaa

SEQ ID NO: 927841 - DNA, 25 bp, Homo sapien
tggtaaaggatcaatgctcagtgcg

SEQ ID NO: 927842 - DNA, 25 bp, Homo sapien
gcatccaggtgcgtaggacacagtt

SEQ ID NO: 927843 - DNA, 25 bp, Homo sapien
tcttggcagacagacaaataatgca

SEQ ID NO: 927844 - DNA, 25 bp, Homo sapien
taccttgactaaaagtgaaagctct

SEQ ID NO: 927845 - DNA, 25 bp, Homo sapien
tcatctcttagggataatgggccct

SEQ ID NO: 927846 - DNA, 25 bp, Homo sapien
gctgagcaattgtagggcttgcctc

SEQ ID NO: 927847 - DNA, 25 bp, Homo sapien
ctctgagattattcatgatcgttca

SEQ ID NO: 927848 - DNA, 25 bp, Homo sapien
ggctaagaagccatctgaaatctat

SEQ ID NO: 927849 - DNA, 25 bp, Homo sapien
ctagtcatgtttagaagttaagggc

SEQ ID NO: 927850 - DNA, 25 bp, Homo sapien
cctttctattctatgagtgcacctg

SEQ ID NO: 927851 - DNA, 25 bp, Homo sapien
ttacttaatggcctgcacatgaagc

SEQ ID NO: 927852 - DNA, 25 bp, Homo sapien
acttaatggcctgcacatgaagcat

SEQ ID NO: 927853 - DNA, 25 bp, Homo sapien
taatggcctgcacatgaagcattcg

SEQ ID NO: 927854 - DNA, 25 bp, Homo sapien
ttaatggcctgcacatgaagcattc

SEQ ID NO: 927855 - DNA, 25 bp, Homo sapien
gtgggtatccgggaggtgacatccc

SEQ ID NO: 927856 - DNA, 25 bp, Homo sapien
gctttcatgagtgaggtgggtatcc

SEQ ID NO: 927857 - DNA, 25 bp, Homo sapien
tccccaatgatcaacactgtctgca

SEQ ID NO: 927858 - DNA, 25 bp, Homo sapien
ctggatgccatcagggaggtctgca

SEQ ID NO: 927859 - DNA, 25 bp, Homo sapien
gcaggtgcacaggtgataagaatgt

SEQ ID NO: 927860 - DNA, 25 bp, Homo sapien
tcagcctctgtatctgaggcacaca

SEQ ID NO: 927861 - DNA, 25 bp, Homo sapien
ggcgcgtgccgtcgtgcctgggtaa

SEQ ID NO: 927862 - DNA, 25 bp, Homo sapien
cttttctatggagctagccagggac

SEQ ID NO: 927863 - DNA, 25 bp, Homo sapien
tcctgtataagagcccatctgtggg

SEQ ID NO: 927864 - DNA, 25 bp, Homo sapien
cagcctccgaggtgctttccaacaa

SEQ ID NO: 927865 - DNA, 25 bp, Homo sapien
ctgcttcactgacttggaccacctg

SEQ ID NO: 927866 - DNA, 25 bp, Homo sapien
tctgtgggctccttagcataagctc

SEQ ID NO: 927867 - DNA, 25 bp, Homo sapien
tttagatccgatgcaattttgggaa

SEQ ID NO: 927868 - DNA, 25 bp, Homo sapien
ccgatgcaattttgggaagggttag

SEQ ID NO: 927869 - DNA, 25 bp, Homo sapien
agttttagatccgatgcaattttgg

SEQ ID NO: 927870 - DNA, 25 bp, Homo sapien
agatccgatgcaattttgggaaggg

SEQ ID NO: 927871 - DNA, 25 bp, Homo sapien
gcaccaaataatgcccagtgaggag

SEQ ID NO: 927872 - DNA, 25 bp, Homo sapien
catataatcctttgcgctgaacgtt

SEQ ID NO: 927873 - DNA, 25 bp, Homo sapien
gctgaacgtttttgatccaccacta

SEQ ID NO: 927874 - DNA, 25 bp, Homo sapien
gcggttataatcgatccatgtccac

SEQ ID NO: 927875 - DNA, 25 bp, Homo sapien
cgatcctgaatgtaaagtctgagta

SEQ ID NO: 927876 - DNA, 25 bp, Homo sapien
gagctgtggtcctctcacgtgacgc

SEQ ID NO: 927877 - DNA, 25 bp, Homo sapien
actgtgccgacagcagaattgattc

SEQ ID NO: 927878 - DNA, 25 bp, Homo sapien
gtgacgcccaagctgttccctctgt

SEQ ID NO: 927879 - DNA, 25 bp, Homo sapien
ctttttagtagttctagacagaaag

SEQ ID NO: 927880 - DNA, 25 bp, Homo sapien
tagtagttctagacagaaaggagaa

SEQ ID NO: 927881 - DNA, 25 bp, Homo sapien
atatattcgttgaaataattctgga

SEQ ID NO: 927882 - DNA, 25 bp, Homo sapien
gaagagaggatatattcgttgaaat

SEQ ID NO: 927883 - DNA, 25 bp, Homo sapien
tgtagctacaactgtatagtttctt

SEQ ID NO: 927884 - DNA, 25 bp, Homo sapien
ttgttcttgccggttgtagctacaa

SEQ ID NO: 927885 - DNA, 25 bp, Homo sapien
caaaatttgttcttgccggttgtag

SEQ ID NO: 927886 - DNA, 25 bp, Homo sapien
tcttgccggttgtagctacaactgt

SEQ ID NO: 927887 - DNA, 25 bp, Homo sapien
gggatctgatgagatctgattagga

SEQ ID NO: 927888 - DNA, 25 bp, Homo sapien
gtaacactgcaacagcagccataca

SEQ ID NO: 927889 - DNA, 25 bp, Homo sapien
tctgatgagatctgattaggattag

SEQ ID NO: 927890 - DNA, 25 bp, Homo sapien
catgtaagtgtcaggaaattctttc

SEQ ID NO: 927891 - DNA, 25 bp, Homo sapien
tcttgactcctactaccagggcggt

SEQ ID NO: 927892 - DNA, 25 bp, Homo sapien
ttcactaggagatgcgaaccccaac

SEQ ID NO: 927893 - DNA, 25 bp, Homo sapien
gagtcccaagtaaaggctgctctct

SEQ ID NO: 927894 - DNA, 25 bp, Homo sapien
cctggttataacgaggcacccctct

SEQ ID NO: 927895 - DNA, 25 bp, Homo sapien
caaacaaagcctcagatacctgtgg

SEQ ID NO: 927896 - DNA, 25 bp, Homo sapien
gaatgaatcaatctaaagttaggac

SEQ ID NO: 927897 - DNA, 25 bp, Homo sapien
aataaatggttcaacagaatggaag

SEQ ID NO: 927898 - DNA, 25 bp, Homo sapien
acaaagcctcagatacctgtgggac

SEQ ID NO: 927899 - DNA, 25 bp, Homo sapien
ttcttcctgacgtcaccgagtcaac

SEQ ID NO: 927900 - DNA, 25 bp, Homo sapien
gatatctatatctttgctggaattt

SEQ ID NO: 927901 - DNA, 25 bp, Homo sapien
gttcacatgcaatttcatattcggg

SEQ ID NO: 927902 - DNA, 25 bp, Homo sapien
tctgtgtgctatcaggaggcaatta

SEQ ID NO: 927903 - DNA, 25 bp, Homo sapien
actgtaccacttcctcatgccaggg

SEQ ID NO: 927904 - DNA, 25 bp, Homo sapien
gaggcaattagagtgttcgtgttca

SEQ ID NO: 927905 - DNA, 25 bp, Homo sapien
taggcctggagctcgtccacgttcc

SEQ ID NO: 927906 - DNA, 25 bp, Homo sapien
gtccacgttccatgctttcacgagc

SEQ ID NO: 927907 - DNA, 25 bp, Homo sapien
acgagctgcgcgtaggcctggagct

SEQ ID NO: 927908 - DNA, 25 bp, Homo sapien
cccagggacacgagctgcgcgtagg

SEQ ID NO: 927909 - DNA, 25 bp, Homo sapien
ccttctgaaagagtatggtggccat

SEQ ID NO: 927910 - DNA, 25 bp, Homo sapien
cattgaatctataagccagtgttgc

SEQ ID NO: 927911 - DNA, 25 bp, Homo sapien
tttgaattccaatgcgcagcacggc

SEQ ID NO: 927912 - DNA, 25 bp, Homo sapien
ggtgccaacgttgaaaaatcctaca

SEQ ID NO: 927913 - DNA, 25 bp, Homo sapien
agcctgggcaacagagtgagactcc

SEQ ID NO: 927914 - DNA, 25 bp, Homo sapien
agtgagctgagattgggccgctgta

SEQ ID NO: 927915 - DNA, 25 bp, Homo sapien
cctgggcaacagagtgagactccat

SEQ ID NO: 927916 - DNA, 25 bp, Homo sapien
agctgagattgggccgctgtactcc

SEQ ID NO: 927917 - DNA, 25 bp, Homo sapien
acttggatgtccgaggatactgaca

SEQ ID NO: 927918 - DNA, 25 bp, Homo sapien
gatgtccgaggatactgacaaaagt

SEQ ID NO: 927919 - DNA, 25 bp, Homo sapien
gtaatgttcctgcacacaaaatcta

SEQ ID NO: 927920 - DNA, 25 bp, Homo sapien
tgacttggatgtccgaggatactga

SEQ ID NO: 927921 - DNA, 25 bp, Homo sapien
taagggagtcctatatctggaagtg

SEQ ID NO: 927922 - DNA, 25 bp, Homo sapien
caaagtcgttaaatgggccaggagc

SEQ ID NO: 927923 - DNA, 25 bp, Homo sapien
tggaagtaaccatcacaaagtcgtt

SEQ ID NO: 927924 - DNA, 25 bp, Homo sapien
cactagactgactgtacaagaaatg

SEQ ID NO: 927925 - DNA, 25 bp, Homo sapien
tgtaagaggcaagttgaggtcaaaa

SEQ ID NO: 927926 - DNA, 25 bp, Homo sapien
agttgaggtcaaaatacggaaacag

SEQ ID NO: 927927 - DNA, 25 bp, Homo sapien
tctagcctcggtgaccgaaggagac

SEQ ID NO: 927928 - DNA, 25 bp, Homo sapien
caaaaaactggtgaatatgtgtaag

SEQ ID NO: 927929 - DNA, 25 bp, Homo sapien
gagtttcttatggacccacatcaga

SEQ ID NO: 927930 - DNA, 25 bp, Homo sapien
tctaaaactggtagagaaaaagcta

SEQ ID NO: 927931 - DNA, 25 bp, Homo sapien
tgccataaatcaaatagaacccata

SEQ ID NO: 927932 - DNA, 25 bp, Homo sapien
aaagctaacaaactctaagagctgc

SEQ ID NO: 927933 - DNA, 25 bp, Homo sapien
ggtggcggcacgatgacttctttgt

SEQ ID NO: 927934 - DNA, 25 bp, Homo sapien
tctgtttgtggcaatgggtcaccat

SEQ ID NO: 927935 - DNA, 25 bp, Homo sapien
aatgtcagttcaaaccacccgggtg

SEQ ID NO: 927936 - DNA, 25 bp, Homo sapien
gaaaatccatgatctatgtgaccta

SEQ ID NO: 927937 - DNA, 25 bp, Homo sapien
aagtaccttgcagacataaaaaaga

SEQ ID NO: 927938 - DNA, 25 bp, Homo sapien
aaagtaccttgcagacataaaaaag

SEQ ID NO: 927939 - DNA, 25 bp, Homo sapien
gaaacggatttctagccttagaata

SEQ ID NO: 927940 - DNA, 25 bp, Homo sapien
gatttctagccttagaataaaaaga

SEQ ID NO: 927941 - DNA, 25 bp, Homo sapien
ttctatacttgtccttagaaacgga

SEQ ID NO: 927942 - DNA, 25 bp, Homo sapien
ttagaaacggatttctagccttaga

SEQ ID NO: 927943 - DNA, 25 bp, Homo sapien
ttcatgatccgcctgcctcagcctc

SEQ ID NO: 927944 - DNA, 25 bp, Homo sapien
tgggacaacaggcgcgcatcatcac

SEQ ID NO: 927945 - DNA, 25 bp, Homo sapien
gggacaacaggcgcgcatcatcacg

SEQ ID NO: 927946 - DNA, 25 bp, Homo sapien
cttcatgatccgcctgcctcagcct

SEQ ID NO: 927947 - DNA, 25 bp, Homo sapien
cacctattgtctctagctacttggg

SEQ ID NO: 927948 - DNA, 25 bp, Homo sapien
cagtggcggacacctattgtctcta

SEQ ID NO: 927949 - DNA, 25 bp, Homo sapien
ggcggacacctattgtctctagcta

SEQ ID NO: 927950 - DNA, 25 bp, Homo sapien
ggcgcagtggcggacacctattgtc

SEQ ID NO: 927951 - DNA, 25 bp, Homo sapien
ccgggattccagaagtgagccaccg

SEQ ID NO: 927952 - DNA, 25 bp, Homo sapien
cggccgtctgtttttttagatggag

SEQ ID NO: 927953 - DNA, 25 bp, Homo sapien
gtgccgggattccagaagtgagcca

SEQ ID NO: 927954 - DNA, 25 bp, Homo sapien
aaagtgccgggattccagaagtgag

SEQ ID NO: 927955 - DNA, 25 bp, Homo sapien
cagggatgttgggataacccgacca

SEQ ID NO: 927956 - DNA, 25 bp, Homo sapien
gaagttacaaggcacactaaaaggc

SEQ ID NO: 927957 - DNA, 25 bp, Homo sapien
agtgagagcagttccttttacccag

SEQ ID NO: 927958 - DNA, 25 bp, Homo sapien
caggctctgacacggcagggatgtt

SEQ ID NO: 927959 - DNA, 25 bp, Homo sapien
aaccatgaaacggagacgagctcat

SEQ ID NO: 927960 - DNA, 25 bp, Homo sapien
accatgaaacggagacgagctcatc

SEQ ID NO: 927961 - DNA, 25 bp, Homo sapien
agaaccatgaaacggagacgagctc

SEQ ID NO: 927962 - DNA, 25 bp, Homo sapien
tcagaaccatgaaacggagacgagc

SEQ ID NO: 927963 - DNA, 25 bp, Homo sapien
atgtcaggtcagagtatcctaacat

SEQ ID NO: 927964 - DNA, 25 bp, Homo sapien
gatgtcaggtcagagtatcctaaca

SEQ ID NO: 927965 - DNA, 25 bp, Homo sapien
gtgggcggtcgattttcttcaggct

SEQ ID NO: 927966 - DNA, 25 bp, Homo sapien
gactgccaaggcttttaaactgtca

SEQ ID NO: 927967 - DNA, 25 bp, Homo sapien
caggctgtctttggtactggcatcc

SEQ ID NO: 927968 - DNA, 25 bp, Homo sapien
ccacactgacatacagctgagtaac

SEQ ID NO: 927969 - DNA, 25 bp, Homo sapien
ctctttgatatcctggttatttaac

SEQ ID NO: 927970 - DNA, 25 bp, Homo sapien
caactacaaagaatgcactttgtga

SEQ ID NO: 927971 - DNA, 25 bp, Homo sapien
ttgatatcctggttatttaacagtg

SEQ ID NO: 927972 - DNA, 25 bp, Homo sapien
gaatttcccaaattctagtttgtga

SEQ ID NO: 927973 - DNA, 25 bp, Homo sapien
cccaggcaggcagtttgcaactctg

SEQ ID NO: 927974 - DNA, 25 bp, Homo sapien
cccacagccctgatcgtgtgagtgg

SEQ ID NO: 927975 - DNA, 25 bp, Homo sapien
tctgccttggttttcgctgcctgct

SEQ ID NO: 927976 - DNA, 25 bp, Homo sapien
caaagtcccctatgacatctcatgg

SEQ ID NO: 927977 - DNA, 25 bp, Homo sapien
ttaccgtcattccttcttcaaagcg

SEQ ID NO: 927978 - DNA, 25 bp, Homo sapien
aaagcgttctgctttgacgcccggt

SEQ ID NO: 927979 - DNA, 25 bp, Homo sapien
ggtacattattggttctcccacgag

SEQ ID NO: 927980 - DNA, 25 bp, Homo sapien
agggacaatgcacagtgctttaccg

SEQ ID NO: 927981 - DNA, 25 bp, Homo sapien
ctggagaatacagtgagaaggaccc

SEQ ID NO: 927982 - DNA, 25 bp, Homo sapien
ggagaatacagtgagaaggacccag

SEQ ID NO: 927983 - DNA, 25 bp, Homo sapien
tggagaatacagtgagaaggaccca

SEQ ID NO: 927984 - DNA, 25 bp, Homo sapien
gaactgaaaaatcaattcaattatt

SEQ ID NO: 927985 - DNA, 25 bp, Homo sapien
aactgaaaaatcaattcaattatta

SEQ ID NO: 927986 - DNA, 25 bp, Homo sapien
tttttttagacaaggtctgcctctg

SEQ ID NO: 927987 - DNA, 25 bp, Homo sapien
ttttagacaaggtctgcctctgtca

SEQ ID NO: 927988 - DNA, 25 bp, Homo sapien
gggatcattccttccgtcttatgca

SEQ ID NO: 927989 - DNA, 25 bp, Homo sapien
tgctttgctaacctgaagagcatca

SEQ ID NO: 927990 - DNA, 25 bp, Homo sapien
tcttatgcctacgtgctgacccgtc

SEQ ID NO: 927991 - DNA, 25 bp, Homo sapien
tttaaattagctgaagcgcggtagc

SEQ ID NO: 927992 - DNA, 25 bp, Homo sapien
actgcttaatcatgttctgatggtt

SEQ ID NO: 927993 - DNA, 25 bp, Homo sapien
ttaaactgcttaatcatgttctgat

SEQ ID NO: 927994 - DNA, 25 bp, Homo sapien
tgcttaatcatgttctgatggtttt

SEQ ID NO: 927995 - DNA, 25 bp, Homo sapien
taaactgcttaatcatgttctgatg

SEQ ID NO: 927996 - DNA, 25 bp, Homo sapien
ctaccgccattcagtgcccacaggg

SEQ ID NO: 927997 - DNA, 25 bp, Homo sapien
taccgccattcagtgcccacagggt

SEQ ID NO: 927998 - DNA, 25 bp, Homo sapien
acatttattagcacacgccaagctc

SEQ ID NO: 927999 - DNA, 25 bp, Homo sapien
tttattagcacacgccaagctcggg

SEQ ID NO: 928000 - DNA, 25 bp, Homo sapien
ggtggtttccatgcagcgatggctc

SEQ ID NO: 928001 - DNA, 25 bp, Homo sapien
caagctcggggtggtttccatgcag

SEQ ID NO: 928002 - DNA, 25 bp, Homo sapien
gagctgcatcctacagatatgttta

SEQ ID NO: 928003 - DNA, 25 bp, Homo sapien
gctgcatcctacagatatgtttaat

SEQ ID NO: 928004 - DNA, 25 bp, Homo sapien
catcctacagatatgtttaattctc

SEQ ID NO: 928005 - DNA, 25 bp, Homo sapien
cttgagctgcatcctacagatatgt

SEQ ID NO: 928006 - DNA, 25 bp, Homo sapien
gtgtgcgtcagcacacccagctgat

SEQ ID NO: 928007 - DNA, 25 bp, Homo sapien
gggatcacaggtgtgcgtcagcaca

SEQ ID NO: 928008 - DNA, 25 bp, Homo sapien
tcacaggtgtgcgtcagcacaccca

SEQ ID NO: 928009 - DNA, 25 bp, Homo sapien
ggtgtgcgtcagcacacccagctga

SEQ ID NO: 928010 - DNA, 25 bp, Homo sapien
tttacgaattacaacagctccatgg

SEQ ID NO: 928011 - DNA, 25 bp, Homo sapien
tcaaaaagacctgcaactatggagt

SEQ ID NO: 928012 - DNA, 25 bp, Homo sapien
tttaggcatgccaggtttcccagga

SEQ ID NO: 928013 - DNA, 25 bp, Homo sapien
gagatgaaactcactgcttatggca

SEQ ID NO: 928014 - DNA, 25 bp, Homo sapien
gtgtgcctgaagactctacaaaatg

SEQ ID NO: 928015 - DNA, 25 bp, Homo sapien
tacaggataaatgatcagtcatgct

SEQ ID NO: 928016 - DNA, 25 bp, Homo sapien
aaacataactacagggccaggcgca

SEQ ID NO: 928017 - DNA, 25 bp, Homo sapien
catgaggagagttatcttgtgtgcc

SEQ ID NO: 928018 - DNA, 25 bp, Homo sapien
ctatggcagtgaaaaaagaaactga

SEQ ID NO: 928019 - DNA, 25 bp, Homo sapien
tatggcagtgaaaaaagaaactgaa

SEQ ID NO: 928020 - DNA, 25 bp, Homo sapien
tgaaaaaagaaactgaatttgtcat

SEQ ID NO: 928021 - DNA, 25 bp, Homo sapien
gcagtgaaaaaagaaactgaatttg

SEQ ID NO: 928022 - DNA, 25 bp, Homo sapien
aaatgggcacaataaattcattggg

SEQ ID NO: 928023 - DNA, 25 bp, Homo sapien
gaaatgggcacaataaattcattgg

SEQ ID NO: 928024 - DNA, 25 bp, Homo sapien
ggcaaaactaagtaacagtaatagc

SEQ ID NO: 928025 - DNA, 25 bp, Homo sapien
caaaactaagtaacagtaatagcaa

SEQ ID NO: 928026 - DNA, 25 bp, Homo sapien
gagtggctcccaatcaactgataac

SEQ ID NO: 928027 - DNA, 25 bp, Homo sapien
cagggaacacaaagttggactgatc

SEQ ID NO: 928028 - DNA, 25 bp, Homo sapien
taaattattgcagtcaaccaaccca

SEQ ID NO: 928029 - DNA, 25 bp, Homo sapien
tggactgatccaaagcgtcatatca

SEQ ID NO: 928030 - DNA, 25 bp, Homo sapien
tgtatctaataatatagactcaaaa

SEQ ID NO: 928031 - DNA, 25 bp, Homo sapien
ttagtaagggcttctcggagagcag

SEQ ID NO: 928032 - DNA, 25 bp, Homo sapien
tttagtaagggcttctcggagagca

SEQ ID NO: 928033 - DNA, 25 bp, Homo sapien
gaacaaaccagacttctcttcctgc

SEQ ID NO: 928034 - DNA, 25 bp, Homo sapien
tcctgaacaaaccagacttctcttc

SEQ ID NO: 928035 - DNA, 25 bp, Homo sapien
catgttcctgaacaaaccagacttc

SEQ ID NO: 928036 - DNA, 25 bp, Homo sapien
tccccatgttcctgaacaaaccaga

SEQ ID NO: 928037 - DNA, 25 bp, Homo sapien
ggccataataggattccgaagaaac

SEQ ID NO: 928038 - DNA, 25 bp, Homo sapien
tagggccataataggattccgaaga

SEQ ID NO: 928039 - DNA, 25 bp, Homo sapien
gtatagggccataataggattccga

SEQ ID NO: 928040 - DNA, 25 bp, Homo sapien
tatagggccataataggattccgaa

SEQ ID NO: 928041 - DNA, 25 bp, Homo sapien
cttgacccattggtcaagtagagca

SEQ ID NO: 928042 - DNA, 25 bp, Homo sapien
tcttgacccattggtcaagtagagc

SEQ ID NO: 928043 - DNA, 25 bp, Homo sapien
ttgacccattggtcaagtagagcag

SEQ ID NO: 928044 - DNA, 25 bp, Homo sapien
tttgcccaaatcttcaacatcaaca

SEQ ID NO: 928045 - DNA, 25 bp, Homo sapien
gaatttaggctctgatggtcctcac

SEQ ID NO: 928046 - DNA, 25 bp, Homo sapien
gatggtcctcaccaccaaactcttc

SEQ ID NO: 928047 - DNA, 25 bp, Homo sapien
tgcccaaatcttcaacatcaacaat

SEQ ID NO: 928048 - DNA, 25 bp, Homo sapien
ttctggaaagcatctagcacgatat

SEQ ID NO: 928049 - DNA, 25 bp, Homo sapien
tgcccggcctaaagaagagattctg

SEQ ID NO: 928050 - DNA, 25 bp, Homo sapien
acgatatggcttaattcctaaggcc

SEQ ID NO: 928051 - DNA, 25 bp, Homo sapien
gtgcccggcctaaagaagagattct

SEQ ID NO: 928052 - DNA, 25 bp, Homo sapien
tgtgatgcaattcgtcctgctcttg

SEQ ID NO: 928053 - DNA, 25 bp, Homo sapien
ctgtgatgcaattcgtcctgctctt

SEQ ID NO: 928054 - DNA, 25 bp, Homo sapien
gtgatgcaattcgtcctgctcttga

SEQ ID NO: 928055 - DNA, 25 bp, Homo sapien
cagtgtatgtcgcaaccaggaagac

SEQ ID NO: 928056 - DNA, 25 bp, Homo sapien
tgccaaatcgaaaatcaatggatgc

SEQ ID NO: 928057 - DNA, 25 bp, Homo sapien
gtggctagcataggcagaatttccc

SEQ ID NO: 928058 - DNA, 25 bp, Homo sapien
ccttcaggtaagttttgccaaatcg

SEQ ID NO: 928059 - DNA, 25 bp, Homo sapien
tcacaggaggtcaggtgcgaaattt

SEQ ID NO: 928060 - DNA, 25 bp, Homo sapien
tcgactgcgttttgaccttgaccca

SEQ ID NO: 928061 - DNA, 25 bp, Homo sapien
ccaatttgcggttcagggattctca

SEQ ID NO: 928062 - DNA, 25 bp, Homo sapien
gatatttaaccactaagacagggcc

SEQ ID NO: 928063 - DNA, 25 bp, Homo sapien
cacaggcagatccagggacgtaact

SEQ ID NO: 928064 - DNA, 25 bp, Homo sapien
atcagatgatcatctggatcatatt

SEQ ID NO: 928065 - DNA, 25 bp, Homo sapien
ttagattaataatggccacaggcag

SEQ ID NO: 928066 - DNA, 25 bp, Homo sapien
ccagggacgtaactgcttcagcaag

SEQ ID NO: 928067 - DNA, 25 bp, Homo sapien
gctgttccagtctgagaaccataaa

SEQ ID NO: 928068 - DNA, 25 bp, Homo sapien
gtaaaacctgtttatccataatgat

SEQ ID NO: 928069 - DNA, 25 bp, Homo sapien
atccaaaggctaatgctaacagcaa

SEQ ID NO: 928070 - DNA, 25 bp, Homo sapien
aggtcccatgtatccgcagaaggat

SEQ ID NO: 928071 - DNA, 25 bp, Homo sapien
ggacacaaatccaaaggctaatgct

SEQ ID NO: 928072 - DNA, 25 bp, Homo sapien
tggagagcccaaaggttcgcactgg

SEQ ID NO: 928073 - DNA, 25 bp, Homo sapien
aaggttcgcactggtactgcgagac

SEQ ID NO: 928074 - DNA, 25 bp, Homo sapien
acctggagagcccaaaggttcgcac

SEQ ID NO: 928075 - DNA, 25 bp, Homo sapien
gagcccaaaggttcgcactggtact

SEQ ID NO: 928076 - DNA, 25 bp, Homo sapien
tgagctggttaacccctccttaagc

SEQ ID NO: 928077 - DNA, 25 bp, Homo sapien
aagtggatgctaaatttagtgcaga

SEQ ID NO: 928078 - DNA, 25 bp, Homo sapien
actcccaggaagtggatgctaaatt

SEQ ID NO: 928079 - DNA, 25 bp, Homo sapien
ctgagctggttaacccctccttaag

SEQ ID NO: 928080 - DNA, 25 bp, Homo sapien
gttcctgctgaaaatccacatctcc

SEQ ID NO: 928081 - DNA, 25 bp, Homo sapien
ccacatctcccctgggtccggtgtt

SEQ ID NO: 928082 - DNA, 25 bp, Homo sapien
atctgcacaaatggttcctctcctt

SEQ ID NO: 928083 - DNA, 25 bp, Homo sapien
tcttcctggtgtctgccattagcat

SEQ ID NO: 928084 - DNA, 25 bp, Homo sapien
ccacacccagtgctctgggtcataa

SEQ ID NO: 928085 - DNA, 25 bp, Homo sapien
gggtcttcccatacaggaagtagaa

SEQ ID NO: 928086 - DNA, 25 bp, Homo sapien
agaagaactggaaccgaagtttctg

SEQ ID NO: 928087 - DNA, 25 bp, Homo sapien
agtttctggaacaggactatctgag

SEQ ID NO: 928088 - DNA, 25 bp, Homo sapien
tgcgagagcgggtcttcccatacag

SEQ ID NO: 928089 - DNA, 25 bp, Homo sapien
caagagaggcctccggctgaggtca

SEQ ID NO: 928090 - DNA, 25 bp, Homo sapien
gcaccaccaagagaggcctccggct

SEQ ID NO: 928091 - DNA, 25 bp, Homo sapien
accaccaagagaggcctccggctga

SEQ ID NO: 928092 - DNA, 25 bp, Homo sapien
accaagagaggcctccggctgaggt

SEQ ID NO: 928093 - DNA, 25 bp, Homo sapien
gaccgtccctagctcaggactggca

SEQ ID NO: 928094 - DNA, 25 bp, Homo sapien
aagggaccgtccctagctcaggact

SEQ ID NO: 928095 - DNA, 25 bp, Homo sapien
aggtaagggaccgtccctagctcag

SEQ ID NO: 928096 - DNA, 25 bp, Homo sapien
gggaccgtccctagctcaggactgg

SEQ ID NO: 928097 - DNA, 25 bp, Homo sapien
tgcagagagccacgccttcctcagg

SEQ ID NO: 928098 - DNA, 25 bp, Homo sapien
agagagccacgccttcctcaggagg

SEQ ID NO: 928099 - DNA, 25 bp, Homo sapien
ctgcagagagccacgccttcctcag

SEQ ID NO: 928100 - DNA, 25 bp, Homo sapien
gagccacgccttcctcaggagggct

SEQ ID NO: 928101 - DNA, 25 bp, Homo sapien
tgaatgcattggtattgccaggagg

SEQ ID NO: 928102 - DNA, 25 bp, Homo sapien
agaaatgaatgcattggtattgcca

SEQ ID NO: 928103 - DNA, 25 bp, Homo sapien
aaatgaatgcattggtattgccagg

SEQ ID NO: 928104 - DNA, 25 bp, Homo sapien
caggaggggaggccggcccggctga

SEQ ID NO: 928105 - DNA, 25 bp, Homo sapien
gaaggtcggatgcaaatccgagaag

SEQ ID NO: 928106 - DNA, 25 bp, Homo sapien
aaggtcggatgcaaatccgagaagc

SEQ ID NO: 928107 - DNA, 25 bp, Homo sapien
gtgtgccaggcagagaactgtccga

SEQ ID NO: 928108 - DNA, 25 bp, Homo sapien
tgtcaggagggtcttttgtgtgcca

SEQ ID NO: 928109 - DNA, 25 bp, Homo sapien
ggtgtgtctaggtcggctggtgtca

SEQ ID NO: 928110 - DNA, 25 bp, Homo sapien
gccaggcagagaactgtccgaagag

SEQ ID NO: 928111 - DNA, 25 bp, Homo sapien
gacctttgtcccaggccaggaatct

SEQ ID NO: 928112 - DNA, 25 bp, Homo sapien
cttgtccgacaccctcagacctttg

SEQ ID NO: 928113 - DNA, 25 bp, Homo sapien
gccaggaatcttttaatgacaggat

SEQ ID NO: 928114 - DNA, 25 bp, Homo sapien
ttgtccgacaccctcagacctttgt

SEQ ID NO: 928115 - DNA, 25 bp, Homo sapien
ctcaggggcgagcaccttccgtggc

SEQ ID NO: 928116 - DNA, 25 bp, Homo sapien
ggctcaggggcgagcaccttccgtg

SEQ ID NO: 928117 - DNA, 25 bp, Homo sapien
gctcaggggcgagcaccttccgtgg

SEQ ID NO: 928118 - DNA, 25 bp, Homo sapien
caaaaggacctatgcggggggctgg

SEQ ID NO: 928119 - DNA, 25 bp, Homo sapien
gcaaaaggacctatgcggggggctg

SEQ ID NO: 928120 - DNA, 25 bp, Homo sapien
tgactgttgaagtccttgtggtgct

SEQ ID NO: 928121 - DNA, 25 bp, Homo sapien
cagggaggatgggtgacactcgctg

SEQ ID NO: 928122 - DNA, 25 bp, Homo sapien
agctgactgttgaagtccttgtggt

SEQ ID NO: 928123 - DNA, 25 bp, Homo sapien
caagctgactgttgaagtccttgtg

SEQ ID NO: 928124 - DNA, 25 bp, Homo sapien
ctacccaggtctcctcaggctcagg

SEQ ID NO: 928125 - DNA, 25 bp, Homo sapien
caggtctcctcaggctcaggggcga

SEQ ID NO: 928126 - DNA, 25 bp, Homo sapien
ggtctcctcaggctcaggggcgagc

SEQ ID NO: 928127 - DNA, 25 bp, Homo sapien
tctcctcaggctcaggggcgagctc

SEQ ID NO: 928128 - DNA, 25 bp, Homo sapien
gtctggaatgcaacagcgtggtctc

SEQ ID NO: 928129 - DNA, 25 bp, Homo sapien
gacagtgtctctcacccagtctgga

SEQ ID NO: 928130 - DNA, 25 bp, Homo sapien
tctggaatgcaacagcgtggtctcg

SEQ ID NO: 928131 - DNA, 25 bp, Homo sapien
ccagtctggaatgcaacagcgtggt

SEQ ID NO: 928132 - DNA, 25 bp, Homo sapien
gactgatctctacactacagcttcc

SEQ ID NO: 928133 - DNA, 25 bp, Homo sapien
gctcagtggttgcttcagtgaaggg

SEQ ID NO: 928134 - DNA, 25 bp, Homo sapien
gaagggactgatctctacactacag

SEQ ID NO: 928135 - DNA, 25 bp, Homo sapien
agtgaagggactgatctctacacta

SEQ ID NO: 928136 - DNA, 25 bp, Homo sapien
cacctcagccttaaagtgtcttcca

SEQ ID NO: 928137 - DNA, 25 bp, Homo sapien
tcaatgcctgtcattcctttcattc

SEQ ID NO: 928138 - DNA, 25 bp, Homo sapien
tttatttcacttcgctaaaatatat

SEQ ID NO: 928139 - DNA, 25 bp, Homo sapien
tcagccttaaagtgtcttccagctt

SEQ ID NO: 928140 - DNA, 25 bp, Homo sapien
ttttatatatccacaacagcatgcg

SEQ ID NO: 928141 - DNA, 25 bp, Homo sapien
gaaaagactacctcatccagaaatg

SEQ ID NO: 928142 - DNA, 25 bp, Homo sapien
tgggcaacgagcaacaggccatctc

SEQ ID NO: 928143 - DNA, 25 bp, Homo sapien
cctctgcctgaaagtagttgccaag

SEQ ID NO: 928144 - DNA, 25 bp, Homo sapien
tcagtgactatctacccagaatggg

SEQ ID NO: 928145 - DNA, 25 bp, Homo sapien
gtgtaaatgagtgcaaaatcctgtt

SEQ ID NO: 928146 - DNA, 25 bp, Homo sapien
tatccacaacggcatgagttctgtt

SEQ ID NO: 928147 - DNA, 25 bp, Homo sapien
tgttccacatccataccaagacttg

SEQ ID NO: 928148 - DNA, 25 bp, Homo sapien
aaaagcctataaccatgaccagtca

SEQ ID NO: 928149 - DNA, 25 bp, Homo sapien
gagggactcacaaccgctagtagcg

SEQ ID NO: 928150 - DNA, 25 bp, Homo sapien
taccatgcaaatcatagggtggtgc

SEQ ID NO: 928151 - DNA, 25 bp, Homo sapien
gagccacgcggaaaacctcaagagt

SEQ ID NO: 928152 - DNA, 25 bp, Homo sapien
tccaaaccagttgggtctcgggcgc

SEQ ID NO: 928153 - DNA, 25 bp, Homo sapien
ggcaggcggcattttccaaaccagt

SEQ ID NO: 928154 - DNA, 25 bp, Homo sapien
aaccagttgggtctcgggcgctgcc

SEQ ID NO: 928155 - DNA, 25 bp, Homo sapien
gcaggcggcattttccaaaccagtt

SEQ ID NO: 928156 - DNA, 25 bp, Homo sapien
gatgttagaaaacctaaattaatga

SEQ ID NO: 928157 - DNA, 25 bp, Homo sapien
tggaggctacatcacccaaagtaga

SEQ ID NO: 928158 - DNA, 25 bp, Homo sapien
tgccgtttctgtcccacttaactga

SEQ ID NO: 928159 - DNA, 25 bp, Homo sapien
ccacttaactgacctcactggaggc

SEQ ID NO: 928160 - DNA, 25 bp, Homo sapien
ataccccaggcccaagcgccttgct

SEQ ID NO: 928161 - DNA, 25 bp, Homo sapien
cgcccaacctctttgggagaagtat

SEQ ID NO: 928162 - DNA, 25 bp, Homo sapien
aggcccaagcgccttgctgccacgc

SEQ ID NO: 928163 - DNA, 25 bp, Homo sapien
ggagaagtatgaatgcgtgtgtcta

SEQ ID NO: 928164 - DNA, 25 bp, Homo sapien
gagtgaacctcaagcctaaatacct

SEQ ID NO: 928165 - DNA, 25 bp, Homo sapien
gttatgcctgtgcaaagaagaggct

SEQ ID NO: 928166 - DNA, 25 bp, Homo sapien
gaagaggctcaaatgctgtccccgg

SEQ ID NO: 928167 - DNA, 25 bp, Homo sapien
caagcttggttcattgaggtggtta

SEQ ID NO: 928168 - DNA, 25 bp, Homo sapien
aggtagaccctcctagtgtcagtac

SEQ ID NO: 928169 - DNA, 25 bp, Homo sapien
tagaccctcctagtgtcagtacctg

SEQ ID NO: 928170 - DNA, 25 bp, Homo sapien
gtagaccctcctagtgtcagtacct

SEQ ID NO: 928171 - DNA, 25 bp, Homo sapien
gaccctcctagtgtcagtacctgag

SEQ ID NO: 928172 - DNA, 25 bp, Homo sapien
cgcaggcaggacagccggtccggga

SEQ ID NO: 928173 - DNA, 25 bp, Homo sapien
ttccgcaggcaggacagccggtccg

SEQ ID NO: 928174 - DNA, 25 bp, Homo sapien
caggcaggacagccggtccgggaac

SEQ ID NO: 928175 - DNA, 25 bp, Homo sapien
cagttccgcaggcaggacagccggt

SEQ ID NO: 928176 - DNA, 25 bp, Homo sapien
tcattcctgttgagtctagttggaa

SEQ ID NO: 928177 - DNA, 25 bp, Homo sapien
ttttagtatgaatgtgagatttttc

SEQ ID NO: 928178 - DNA, 25 bp, Homo sapien
tttctcctgcttgtgacattaagaa

SEQ ID NO: 928179 - DNA, 25 bp, Homo sapien
gggactttccattacaaatagagac

SEQ ID NO: 928180 - DNA, 25 bp, Homo sapien
tacgttctgcattttatttctgcag

SEQ ID NO: 928181 - DNA, 25 bp, Homo sapien
cgttctgcattttatttctgcaggc

SEQ ID NO: 928182 - DNA, 25 bp, Homo sapien
cattttatttctgcaggcaacactt

SEQ ID NO: 928183 - DNA, 25 bp, Homo sapien
tatttctgcaggcaacacttttgct

SEQ ID NO: 928184 - DNA, 25 bp, Homo sapien
gaacacagcccgaggaagggaccca

SEQ ID NO: 928185 - DNA, 25 bp, Homo sapien
acacagcccgaggaagggacccaat

SEQ ID NO: 928186 - DNA, 25 bp, Homo sapien
cacagcccgaggaagggacccaata

SEQ ID NO: 928187 - DNA, 25 bp, Homo sapien
aaaacgcaaactgctgcctgcggtg

SEQ ID NO: 928188 - DNA, 25 bp, Homo sapien
cggtgagggcccagggtcttccacg

SEQ ID NO: 928189 - DNA, 25 bp, Homo sapien
ttccacggagaggacaggcatcttc

SEQ ID NO: 928190 - DNA, 25 bp, Homo sapien
tcaaaacgcaaactgctgcctgcgg

SEQ ID NO: 928191 - DNA, 25 bp, Homo sapien
ctatgtgcaaggcggtgtgcaagca

SEQ ID NO: 928192 - DNA, 25 bp, Homo sapien
atgtgcaaggcggtgtgcaagcacc

SEQ ID NO: 928193 - DNA, 25 bp, Homo sapien
ggtgctgatgctttggcctgtgagg

SEQ ID NO: 928194 - DNA, 25 bp, Homo sapien
aaggcggtgtgcaagcaccggctgc

SEQ ID NO: 928195 - DNA, 25 bp, Homo sapien
tagagaaatgtagatgttagatgtg

SEQ ID NO: 928196 - DNA, 25 bp, Homo sapien
gaaatgtagatgttagatgtgccag

SEQ ID NO: 928197 - DNA, 25 bp, Homo sapien
gatgtgccagtaccatcctgcgcct

SEQ ID NO: 928198 - DNA, 25 bp, Homo sapien
atgtagatgttagatgtgccagtac

SEQ ID NO: 928199 - DNA, 25 bp, Homo sapien
aacgaagaagccaccgctaagcgtg

SEQ ID NO: 928200 - DNA, 25 bp, Homo sapien
agccaccgctaagcgtggtcttggg

SEQ ID NO: 928201 - DNA, 25 bp, Homo sapien
aagaagccaccgctaagcgtggtct

SEQ ID NO: 928202 - DNA, 25 bp, Homo sapien
agcaacgaagaagccaccgctaagc

SEQ ID NO: 928203 - DNA, 25 bp, Homo sapien
gcaagagaaacagccccaatgctgg

SEQ ID NO: 928204 - DNA, 25 bp, Homo sapien
aagagaaacagccccaatgctgggt

SEQ ID NO: 928205 - DNA, 25 bp, Homo sapien
ctgcaagagaaacagccccaatgct

SEQ ID NO: 928206 - DNA, 25 bp, Homo sapien
gagaaacagccccaatgctgggtaa

SEQ ID NO: 928207 - DNA, 25 bp, Homo sapien
gcccgggttctgctgcagcgcatct

SEQ ID NO: 928208 - DNA, 25 bp, Homo sapien
cgcccgggttctgctgcagcgcatc

SEQ ID NO: 928209 - DNA, 25 bp, Homo sapien
gggaagggaaagtgagcgcgtggca

SEQ ID NO: 928210 - DNA, 25 bp, Homo sapien
ggaagggaaagtgagcgcgtggcac

SEQ ID NO: 928211 - DNA, 25 bp, Homo sapien
ccgggctcctccagctgtctgctcg

SEQ ID NO: 928212 - DNA, 25 bp, Homo sapien
gctcctccagctgtctgctcggcat

SEQ ID NO: 928213 - DNA, 25 bp, Homo sapien
ggctaggtgtccctgccccgggctc

SEQ ID NO: 928214 - DNA, 25 bp, Homo sapien
gggctcctccagctgtctgctcggc

SEQ ID NO: 928215 - DNA, 25 bp, Homo sapien
gtgtcagaactaagaccaaaacaga

SEQ ID NO: 928216 - DNA, 25 bp, Homo sapien
ccaggtctaagctgctgtggacctc

SEQ ID NO: 928217 - DNA, 25 bp, Homo sapien
gaaaagcgtgtctcggttacacagc

SEQ ID NO: 928218 - DNA, 25 bp, Homo sapien
taagaccaaaacagatgactccagg

SEQ ID NO: 928219 - DNA, 25 bp, Homo sapien
tccagcaggacatagtggacctcac

SEQ ID NO: 928220 - DNA, 25 bp, Homo sapien
gcaggacatagtggacctcacgata

SEQ ID NO: 928221 - DNA, 25 bp, Homo sapien
gacctcacgatagcgcggatctaag

SEQ ID NO: 928222 - DNA, 25 bp, Homo sapien
tagtggacctcacgatagcgcggat

SEQ ID NO: 928223 - DNA, 25 bp, Homo sapien
gttaagccaggacacacaatattga

SEQ ID NO: 928224 - DNA, 25 bp, Homo sapien
agaacatgcaggttaagccaggaca

SEQ ID NO: 928225 - DNA, 25 bp, Homo sapien
ggtctctgccccaagggctaaggga

SEQ ID NO: 928226 - DNA, 25 bp, Homo sapien
tagcttggggcaaataccgtgaact

SEQ ID NO: 928227 - DNA, 25 bp, Homo sapien
cagaagagcagccaagtgactggtc

SEQ ID NO: 928228 - DNA, 25 bp, Homo sapien
tcagaagagcagccaagtgactggt

SEQ ID NO: 928229 - DNA, 25 bp, Homo sapien
agaagagcagccaagtgactggtct

SEQ ID NO: 928230 - DNA, 25 bp, Homo sapien
tggcacaggcatccatgacatggga

SEQ ID NO: 928231 - DNA, 25 bp, Homo sapien
cacaggcatccatgacatgggagcc

SEQ ID NO: 928232 - DNA, 25 bp, Homo sapien
ggtggcacaggcatccatgacatgg

SEQ ID NO: 928233 - DNA, 25 bp, Homo sapien
ctggcgggggtccagcagcatggct

SEQ ID NO: 928234 - DNA, 25 bp, Homo sapien
cgggtaaacagagaccccaggctag

SEQ ID NO: 928235 - DNA, 25 bp, Homo sapien
ccttcccgtgcctacacattcttcc

SEQ ID NO: 928236 - DNA, 25 bp, Homo sapien
gcccttcccgtgcctacacattctt

SEQ ID NO: 928237 - DNA, 25 bp, Homo sapien
ttcccgtgcctacacattcttccct

SEQ ID NO: 928238 - DNA, 25 bp, Homo sapien
agaatgaggtgtccggcccggtaca

SEQ ID NO: 928239 - DNA, 25 bp, Homo sapien
tgtctgggcgggaaacaccagcagc

SEQ ID NO: 928240 - DNA, 25 bp, Homo sapien
tgggtgttcatgcagatctgtctgg

SEQ ID NO: 928241 - DNA, 25 bp, Homo sapien
tccggcccggtacagtgggtgttca

SEQ ID NO: 928242 - DNA, 25 bp, Homo sapien
tccccttgagggctcgtaagtcatc

SEQ ID NO: 928243 - DNA, 25 bp, Homo sapien
cttgagggctcgtaagtcatcgagg

SEQ ID NO: 928244 - DNA, 25 bp, Homo sapien
cccttgagggctcgtaagtcatcga

SEQ ID NO: 928245 - DNA, 25 bp, Homo sapien
tccaggagaaaatgcttccccttga

SEQ ID NO: 928246 - DNA, 25 bp, Homo sapien
tgccagggaagaaccattcattcat

SEQ ID NO: 928247 - DNA, 25 bp, Homo sapien
ctgccagggaagaaccattcattca

SEQ ID NO: 928248 - DNA, 25 bp, Homo sapien
cagaaatctatcgaagtggcagagc

SEQ ID NO: 928249 - DNA, 25 bp, Homo sapien
tcaacagggtgataagggaatccgg

SEQ ID NO: 928250 - DNA, 25 bp, Homo sapien
tgccaggccctatttcaacggtcca

SEQ ID NO: 928251 - DNA, 25 bp, Homo sapien
tggaattcaaacacaagcagccgtt

SEQ ID NO: 928252 - DNA, 25 bp, Homo sapien
gtgcacgtagcactgtggcagatgg

SEQ ID NO: 928253 - DNA, 25 bp, Homo sapien
tggtgcacgtagcactgtggcagat

SEQ ID NO: 928254 - DNA, 25 bp, Homo sapien
gctggtgcacgtagcactgtggcag

SEQ ID NO: 928255 - DNA, 25 bp, Homo sapien
gcacgtagcactgtggcagatggac

SEQ ID NO: 928256 - DNA, 25 bp, Homo sapien
caagaaaggacttagcatggccggg

SEQ ID NO: 928257 - DNA, 25 bp, Homo sapien
gagggacagcacaatggagccaaga

SEQ ID NO: 928258 - DNA, 25 bp, Homo sapien
catgcctgcaatcctgtagggaaaa

SEQ ID NO: 928259 - DNA, 25 bp, Homo sapien
caattggttggctgagatgctgtta

SEQ ID NO: 928260 - DNA, 25 bp, Homo sapien
ccttgttatgctttactccacagat

SEQ ID NO: 928261 - DNA, 25 bp, Homo sapien
tccttggtatgctaagtgccagtct

SEQ ID NO: 928262 - DNA, 25 bp, Homo sapien
ggtccttggtatgctaagtgccagt

SEQ ID NO: 928263 - DNA, 25 bp, Homo sapien
tactccacagatgtttgggcggagg

SEQ ID NO: 928264 - DNA, 25 bp, Homo sapien
gatgagatatcccacagatgtggag

SEQ ID NO: 928265 - DNA, 25 bp, Homo sapien
tgatgagatatcccacagatgtgga

SEQ ID NO: 928266 - DNA, 25 bp, Homo sapien
ggccaccccttcataatcccagctg

SEQ ID NO: 928267 - DNA, 25 bp, Homo sapien
ctgatgagatatcccacagatgtgg

SEQ ID NO: 928268 - DNA, 25 bp, Homo sapien
aagcacctaggatgactcggtttct

SEQ ID NO: 928269 - DNA, 25 bp, Homo sapien
caaatgggtggaaaacggtgacatc

SEQ ID NO: 928270 - DNA, 25 bp, Homo sapien
tgctcaaggtggaggagtaaatgat

SEQ ID NO: 928271 - DNA, 25 bp, Homo sapien
gggaaggaagcacctaggatgactc

SEQ ID NO: 928272 - DNA, 25 bp, Homo sapien
acacctccctagatgaggacagcca

SEQ ID NO: 928273 - DNA, 25 bp, Homo sapien
ccagacacctccctagatgaggaca

SEQ ID NO: 928274 - DNA, 25 bp, Homo sapien
ggacagccagggctctaagctctca

SEQ ID NO: 928275 - DNA, 25 bp, Homo sapien
gacagccagggctctaagctctcac

SEQ ID NO: 928276 - DNA, 25 bp, Homo sapien
gaagcccgaccctgataggagaaac

SEQ ID NO: 928277 - DNA, 25 bp, Homo sapien
tgagagtgttcacacgcacaaatcg

SEQ ID NO: 928278 - DNA, 25 bp, Homo sapien
cggagcaggtcttgagagtgttcac

SEQ ID NO: 928279 - DNA, 25 bp, Homo sapien
tgttcacacgcacaaatcgaggcag

SEQ ID NO: 928280 - DNA, 25 bp, Homo sapien
ccaggcctggatcccacttccaaca

SEQ ID NO: 928281 - DNA, 25 bp, Homo sapien
ctggaccaggcctggatcccacttc

SEQ ID NO: 928282 - DNA, 25 bp, Homo sapien
cctggatcccacttccaacaggtcc

SEQ ID NO: 928283 - DNA, 25 bp, Homo sapien
gaccaggcctggatcccacttccaa

SEQ ID NO: 928284 - DNA, 25 bp, Homo sapien
aacacctcgcctggtgccgtcccaa

SEQ ID NO: 928285 - DNA, 25 bp, Homo sapien
actcaacacctcgcctggtgccgtc

SEQ ID NO: 928286 - DNA, 25 bp, Homo sapien
gaaccttgagccgagccaactcaac

SEQ ID NO: 928287 - DNA, 25 bp, Homo sapien
tcatgccagctcacaccccgaagaa

SEQ ID NO: 928288 - DNA, 25 bp, Homo sapien
gacagaaacgccctaagcaagaagt

SEQ ID NO: 928289 - DNA, 25 bp, Homo sapien
taactctaatagagcccgggcactg

SEQ ID NO: 928290 - DNA, 25 bp, Homo sapien
gatcacctgactagatggttacaga

SEQ ID NO: 928291 - DNA, 25 bp, Homo sapien
ccacagatgttcaccagtagacctc

SEQ ID NO: 928292 - DNA, 25 bp, Homo sapien
atttaatccttcaaaacactcgaag

SEQ ID NO: 928293 - DNA, 25 bp, Homo sapien
taatccttcaaaacactcgaagtta

SEQ ID NO: 928294 - DNA, 25 bp, Homo sapien
ccagtcccgccgtgcacggcagcgg

SEQ ID NO: 928295 - DNA, 25 bp, Homo sapien
gacaaagcgctgaccgtcggggttc

SEQ ID NO: 928296 - DNA, 25 bp, Homo sapien
ccagatgacaaagcgctgaccgtcg

SEQ ID NO: 928297 - DNA, 25 bp, Homo sapien
agcgctgaccgtcggggttcacttc

SEQ ID NO: 928298 - DNA, 25 bp, Homo sapien
accagatgacaaagcgctgaccgtc

SEQ ID NO: 928299 - DNA, 25 bp, Homo sapien
gctgcagcttcttcgcactgaggag

SEQ ID NO: 928300 - DNA, 25 bp, Homo sapien
cggctgcagcttcttcgcactgagg

SEQ ID NO: 928301 - DNA, 25 bp, Homo sapien
agcttcttcgcactgaggaggccgg

SEQ ID NO: 928302 - DNA, 25 bp, Homo sapien
cagcttcttcgcactgaggaggccg

SEQ ID NO: 928303 - DNA, 25 bp, Homo sapien
gtttcgcacaccagcgcgtacagct

SEQ ID NO: 928304 - DNA, 25 bp, Homo sapien
gcggagtagcgctgcgtttcgcaca

SEQ ID NO: 928305 - DNA, 25 bp, Homo sapien
gcatccagcacggcggagtagcgct

SEQ ID NO: 928306 - DNA, 25 bp, Homo sapien
ccagcgcgtacagctgcttcacgtt

SEQ ID NO: 928307 - DNA, 25 bp, Homo sapien
ctggaagttgctggagtacaccagc

SEQ ID NO: 928308 - DNA, 25 bp, Homo sapien
tggaagttgctggagtacaccagcc

SEQ ID NO: 928309 - DNA, 25 bp, Homo sapien
gaagttgctggagtacaccagcccc

SEQ ID NO: 928310 - DNA, 25 bp, Homo sapien
gttgctggagtacaccagccccttg

SEQ ID NO: 928311 - DNA, 25 bp, Homo sapien
ggacatgcccttgacgtccaggcgg

SEQ ID NO: 928312 - DNA, 25 bp, Homo sapien
ctgaatggctggagcgctactggat

SEQ ID NO: 928313 - DNA, 25 bp, Homo sapien
ccacaggataaatctcagggatggg

SEQ ID NO: 928314 - DNA, 25 bp, Homo sapien
agtaggaagatcatgagcgcggttt

SEQ ID NO: 928315 - DNA, 25 bp, Homo sapien
gacgggggtgttactacattggcca

SEQ ID NO: 928316 - DNA, 25 bp, Homo sapien
gttaagctgaatggaggaaccagtg

SEQ ID NO: 928317 - DNA, 25 bp, Homo sapien
cacctgtctgcgagacccttgaagg

SEQ ID NO: 928318 - DNA, 25 bp, Homo sapien
gtgactttcctctatcttccccagg

SEQ ID NO: 928319 - DNA, 25 bp, Homo sapien
gaactcgcggcggatcacccagctg

SEQ ID NO: 928320 - DNA, 25 bp, Homo sapien
ggcggatcacccagctgaagacatc

SEQ ID NO: 928321 - DNA, 25 bp, Homo sapien
tcgcggcggatcacccagctgaaga

SEQ ID NO: 928322 - DNA, 25 bp, Homo sapien
agcacacactcggcttgggccagcc

SEQ ID NO: 928323 - DNA, 25 bp, Homo sapien
ggagtcacgcccatgctttcagctg

SEQ ID NO: 928324 - DNA, 25 bp, Homo sapien
caacttggagccagtcctaacgaca

SEQ ID NO: 928325 - DNA, 25 bp, Homo sapien
gacaactgggttgaattcccctgag

SEQ ID NO: 928326 - DNA, 25 bp, Homo sapien
tgagaactgagctctacaggaaagt

SEQ ID NO: 928327 - DNA, 25 bp, Homo sapien
caccagtttggcgatgagctcatcc

SEQ ID NO: 928328 - DNA, 25 bp, Homo sapien
tcaccagtttggcgatgagctcatc

SEQ ID NO: 928329 - DNA, 25 bp, Homo sapien
ttcaccagtttggcgatgagctcat

SEQ ID NO: 928330 - DNA, 25 bp, Homo sapien
gaatttttggcttggatcgtgccca

SEQ ID NO: 928331 - DNA, 25 bp, Homo sapien
cacttgctggcataaacggacagag

SEQ ID NO: 928332 - DNA, 25 bp, Homo sapien
cttcccaggcataagagggtctcga

SEQ ID NO: 928333 - DNA, 25 bp, Homo sapien
tgttcaagaatagtctgggcgcagt

SEQ ID NO: 928334 - DNA, 25 bp, Homo sapien
gctgagcgggttccggtggtgcacg

SEQ ID NO: 928335 - DNA, 25 bp, Homo sapien
ggtccttctcgcagaaaaggctgag

SEQ ID NO: 928336 - DNA, 25 bp, Homo sapien
ggtggtgcacgcagaccttgggctc

SEQ ID NO: 928337 - DNA, 25 bp, Homo sapien
agacggtggagacgggcgtgaccgg

SEQ ID NO: 928338 - DNA, 25 bp, Homo sapien
cactgtagcattagggactccttga

SEQ ID NO: 928339 - DNA, 25 bp, Homo sapien
agcgcaccttggtgtccaggtggta

SEQ ID NO: 928340 - DNA, 25 bp, Homo sapien
taggagtggccgcactgtagcatta

SEQ ID NO: 928341 - DNA, 25 bp, Homo sapien
aaccaggcagcccttgcagtaggag

SEQ ID NO: 928342 - DNA, 25 bp, Homo sapien
tttcttcttcccagcagggaacagc

SEQ ID NO: 928343 - DNA, 25 bp, Homo sapien
gaacagcaggcacagagtcagaagt

SEQ ID NO: 928344 - DNA, 25 bp, Homo sapien
ctagcttctcaggatccactgggcc

SEQ ID NO: 928345 - DNA, 25 bp, Homo sapien
atccactgggcctcccactatggcc

SEQ ID NO: 928346 - DNA, 25 bp, Homo sapien
tgtatatacgtgcactctcaagagc

SEQ ID NO: 928347 - DNA, 25 bp, Homo sapien
tgaaagttggctgtagcctacgcct

SEQ ID NO: 928348 - DNA, 25 bp, Homo sapien
catgctctgcgtgctcgttaggtgc

SEQ ID NO: 928349 - DNA, 25 bp, Homo sapien
caagagcaagatgtacagtgtttcc

SEQ ID NO: 928350 - DNA, 25 bp, Homo sapien
tgccccgcgagctccaattacgtgc

SEQ ID NO: 928351 - DNA, 25 bp, Homo sapien
catcgtgctctctgtcgctccagtt

SEQ ID NO: 928352 - DNA, 25 bp, Homo sapien
ctgtcgctccagttagatgccccat

SEQ ID NO: 928353 - DNA, 25 bp, Homo sapien
tgtaagtgccccatcgtgctctctg

SEQ ID NO: 928354 - DNA, 25 bp, Homo sapien
cctgcaagtgcccaatgtgccctgt

SEQ ID NO: 928355 - DNA, 25 bp, Homo sapien
tgttttgtgcgctccgattacgggc

SEQ ID NO: 928356 - DNA, 25 bp, Homo sapien
tgtgccctgtgtggtcccgttacgt

SEQ ID NO: 928357 - DNA, 25 bp, Homo sapien
ggtcccgttacgtgtcccatcatgt

SEQ ID NO: 928358 - DNA, 25 bp, Homo sapien
gtagttccagagctcgcgagggcca

SEQ ID NO: 928359 - DNA, 25 bp, Homo sapien
gcggcggttggaacgaaacgatgag

SEQ ID NO: 928360 - DNA, 25 bp, Homo sapien
ttggaacgaaacgatgagtgcctcc

SEQ ID NO: 928361 - DNA, 25 bp, Homo sapien
tagttccagagctcgcgagggccag

SEQ ID NO: 928362 - DNA, 25 bp, Homo sapien
catcagtccctgtacgagcggttaa

SEQ ID NO: 928363 - DNA, 25 bp, Homo sapien
tgaaggacgtcatccgagaaggagc

SEQ ID NO: 928364 - DNA, 25 bp, Homo sapien
tggagacctagtggcgcctgatgct

SEQ ID NO: 928365 - DNA, 25 bp, Homo sapien
tgatgcttcggtgctaggtacgccc

SEQ ID NO: 928366 - DNA, 25 bp, Homo sapien
gttcaagtgatccttgtgcctcagc

SEQ ID NO: 928367 - DNA, 25 bp, Homo sapien
tggagtcttgctctgtcacccaggc

SEQ ID NO: 928368 - DNA, 25 bp, Homo sapien
atagtttctttttcttttggagatg

SEQ ID NO: 928369 - DNA, 25 bp, Homo sapien
cgggttcaagtgatccttgtgcctc

SEQ ID NO: 928370 - DNA, 25 bp, Homo sapien
ctagaaacctcgaggcgactgtgct

SEQ ID NO: 928371 - DNA, 25 bp, Homo sapien
aattgtcacgccttgtgccttccgc

SEQ ID NO: 928372 - DNA, 25 bp, Homo sapien
ttgctctttacatcccaaatcccat

SEQ ID NO: 928373 - DNA, 25 bp, Homo sapien
gccttccgcctctcaaatattcaga

SEQ ID NO: 928374 - DNA, 25 bp, Homo sapien
aagacagcgtcttgataggttgccc

SEQ ID NO: 928375 - DNA, 25 bp, Homo sapien
catctgcaggcactgttggaaccag

SEQ ID NO: 928376 - DNA, 25 bp, Homo sapien
cagtacccaaggatgatgtcccagc

SEQ ID NO: 928377 - DNA, 25 bp, Homo sapien
cagttgttgcgccatggtgcctagc

SEQ ID NO: 928378 - DNA, 25 bp, Homo sapien
tgtttgcaaaaggccttgacggtga

SEQ ID NO: 928379 - DNA, 25 bp, Homo sapien
tgacggtgaaggtcgggattgtccc

SEQ ID NO: 928380 - DNA, 25 bp, Homo sapien
caaccccgggatgaatgaatgggct

SEQ ID NO: 928381 - DNA, 25 bp, Homo sapien
ctttttggaaattggggtcagcagg

SEQ ID NO: 928382 - DNA, 25 bp, Homo sapien
taaatagcctgcgacagtgtccaga

SEQ ID NO: 928383 - DNA, 25 bp, Homo sapien
cagaggagcgttacacctgagggaa

SEQ ID NO: 928384 - DNA, 25 bp, Homo sapien
caagtaagattatccccgcagaagg

SEQ ID NO: 928385 - DNA, 25 bp, Homo sapien
cacagtggctgtttggagagttctc

SEQ ID NO: 928386 - DNA, 25 bp, Homo sapien
tggacttctggtgtgagcaatatag

SEQ ID NO: 928387 - DNA, 25 bp, Homo sapien
tttgatagcctgaaaaccatcctac

SEQ ID NO: 928388 - DNA, 25 bp, Homo sapien
cccggcctgttattgtttgttgaca

SEQ ID NO: 928389 - DNA, 25 bp, Homo sapien
tcctactctaaacgtcttggttaca

SEQ ID NO: 928390 - DNA, 25 bp, Homo sapien
aggcaaggactgaggtgaatccata

SEQ ID NO: 928391 - DNA, 25 bp, Homo sapien
tctaaaacttgcctcggtccctcac

SEQ ID NO: 928392 - DNA, 25 bp, Homo sapien
tgcctcatgccccttggtggaattc

SEQ ID NO: 928393 - DNA, 25 bp, Homo sapien
catatggattcaccaccactaacac

SEQ ID NO: 928394 - DNA, 25 bp, Homo sapien
atgcattcacgagtggcaggtgtct

SEQ ID NO: 928395 - DNA, 25 bp, Homo sapien
gatgcattcacgagtggcaggtgtc

SEQ ID NO: 928396 - DNA, 25 bp, Homo sapien
tcatagacactcgaagcttccaggg

SEQ ID NO: 928397 - DNA, 25 bp, Homo sapien
ggccgggaaaggtccctcatagaca

SEQ ID NO: 928398 - DNA, 25 bp, Homo sapien
acaagggcgattttcagggcaggca

SEQ ID NO: 928399 - DNA, 25 bp, Homo sapien
ggttcatctgattgtacccgtcagc

SEQ ID NO: 928400 - DNA, 25 bp, Homo sapien
ccagctgaactaactgatttttcaa

SEQ ID NO: 928401 - DNA, 25 bp, Homo sapien
ctgcacccagctgaactaactgatt

SEQ ID NO: 928402 - DNA, 25 bp, Homo sapien
aattgctccctgcacaatggcagaa

SEQ ID NO: 928403 - DNA, 25 bp, Homo sapien
gctccctgcacaatggcagaaattc

SEQ ID NO: 928404 - DNA, 25 bp, Homo sapien
ttgcacttcgaagccatgcccttcg

SEQ ID NO: 928405 - DNA, 25 bp, Homo sapien
atgcccttcgccttgtcagcctgga

SEQ ID NO: 928406 - DNA, 25 bp, Homo sapien
gcgaagggaagacgcctaatgattc

SEQ ID NO: 928407 - DNA, 25 bp, Homo sapien
tcagcctggagaagactgcgatttg

SEQ ID NO: 928408 - DNA, 25 bp, Homo sapien
aaagagacaattgtggatttctgac

SEQ ID NO: 928409 - DNA, 25 bp, Homo sapien
tgacattcaaatgtacaatttcgcc

SEQ ID NO: 928410 - DNA, 25 bp, Homo sapien
gaatggacttaacaccaatacctcc

SEQ ID NO: 928411 - DNA, 25 bp, Homo sapien
aatttcgcctccttgataaagaatg

SEQ ID NO: 928412 - DNA, 25 bp, Homo sapien
gagccactgtgacctgcctatttat

SEQ ID NO: 928413 - DNA, 25 bp, Homo sapien
ggcctcctacagcactgggactaga

SEQ ID NO: 928414 - DNA, 25 bp, Homo sapien
ctgtgacctgcctatttatttaatt

SEQ ID NO: 928415 - DNA, 25 bp, Homo sapien
ctcctacagcactgggactagaggc

SEQ ID NO: 928416 - DNA, 25 bp, Homo sapien
gtcgttgtgatcaattaactgtaac

SEQ ID NO: 928417 - DNA, 25 bp, Homo sapien
cgttgtgatcaattaactgtaacca

SEQ ID NO: 928418 - DNA, 25 bp, Homo sapien
taagtcgttgtgatcaattaactgt

SEQ ID NO: 928419 - DNA, 25 bp, Homo sapien
tgtaagtcgttgtgatcaattaact

SEQ ID NO: 928420 - DNA, 25 bp, Homo sapien
cctgctatgggtgtctccatctggg

SEQ ID NO: 928421 - DNA, 25 bp, Homo sapien
aggaagagattggatccggcgccct

SEQ ID NO: 928422 - DNA, 25 bp, Homo sapien
ccatcgagttcattatgaggaagga

SEQ ID NO: 928423 - DNA, 25 bp, Homo sapien
gatccggcgccctgctatgggtgtc

SEQ ID NO: 928424 - DNA, 25 bp, Homo sapien
tctcccaaagtactcagattacggg

SEQ ID NO: 928425 - DNA, 25 bp, Homo sapien
tcccaaagtactcagattacgggcc

SEQ ID NO: 928426 - DNA, 25 bp, Homo sapien
ccaaagtactcagattacgggcctg

SEQ ID NO: 928427 - DNA, 25 bp, Homo sapien
aaagtactcagattacgggcctgag

SEQ ID NO: 928428 - DNA, 25 bp, Homo sapien
tcattgcaaaggatgactgcaaaag

SEQ ID NO: 928429 - DNA, 25 bp, Homo sapien
gactaaactgctgcactctagactg

SEQ ID NO: 928430 - DNA, 25 bp, Homo sapien
agtttacaggcatatattatcattg

SEQ ID NO: 928431 - DNA, 25 bp, Homo sapien
taataacgataaactagctaggcat

SEQ ID NO: 928432 - DNA, 25 bp, Homo sapien
ccaaatgcattttcacgtccctgtt

SEQ ID NO: 928433 - DNA, 25 bp, Homo sapien
gtccctgttttgagagccatccctg

SEQ ID NO: 928434 - DNA, 25 bp, Homo sapien
ccgcgcctggctgaacaagttattg

SEQ ID NO: 928435 - DNA, 25 bp, Homo sapien
ggccacctcattgtataacgtccag

SEQ ID NO: 928436 - DNA, 25 bp, Homo sapien
catcaaagactgatgtcacttggca

SEQ ID NO: 928437 - DNA, 25 bp, Homo sapien
acccatggcatcactcttctgctgc

SEQ ID NO: 928438 - DNA, 25 bp, Homo sapien
cacccccacccatggcatcactctt

SEQ ID NO: 928439 - DNA, 25 bp, Homo sapien
tcatcaaagactgatgtcacttggc

SEQ ID NO: 928440 - DNA, 25 bp, Homo sapien
agacactgcttttccctaattgacc

SEQ ID NO: 928441 - DNA, 25 bp, Homo sapien
gtgagaaatcgctcaaggctgccag

SEQ ID NO: 928442 - DNA, 25 bp, Homo sapien
taattgacccgtttggtcctcacat

SEQ ID NO: 928443 - DNA, 25 bp, Homo sapien
tcctcacattaaccatattttacag

SEQ ID NO: 928444 - DNA, 25 bp, Homo sapien
cagtctcgctgcattacccaacctg

SEQ ID NO: 928445 - DNA, 25 bp, Homo sapien
tggtgttttgctaagttgcccacac

SEQ ID NO: 928446 - DNA, 25 bp, Homo sapien
ttgtttttgctttggaatggtctgg

SEQ ID NO: 928447 - DNA, 25 bp, Homo sapien
gctaagttgcccacactgatctcaa

SEQ ID NO: 928448 - DNA, 25 bp, Homo sapien
ttgctttggaatggtctggaactcc

SEQ ID NO: 928449 - DNA, 25 bp, Homo sapien
gatacatatgccatttaagggaagc

SEQ ID NO: 928450 - DNA, 25 bp, Homo sapien
aaagagtgaaagatacatatgccat

SEQ ID NO: 928451 - DNA, 25 bp, Homo sapien
gagggaatgaaaccagattggccac

SEQ ID NO: 928452 - DNA, 25 bp, Homo sapien
gcaccaagcccaggttgagctttta

SEQ ID NO: 928453 - DNA, 25 bp, Homo sapien
aaaactgcacaaaacagaagtgttc

SEQ ID NO: 928454 - DNA, 25 bp, Homo sapien
cagagaaaactgcacaaaacagaag

SEQ ID NO: 928455 - DNA, 25 bp, Homo sapien
gagaaaactgcacaaaacagaagtg

SEQ ID NO: 928456 - DNA, 25 bp, Homo sapien
tataacagagaaaactgcacaaaac

SEQ ID NO: 928457 - DNA, 25 bp, Homo sapien
tgagtggctggaaggcgaagggagg

SEQ ID NO: 928458 - DNA, 25 bp, Homo sapien
gagtttgaggctgtgccaccacacg

SEQ ID NO: 928459 - DNA, 25 bp, Homo sapien
ggctggaaggcgaagggaggatcgc

SEQ ID NO: 928460 - DNA, 25 bp, Homo sapien
cctgagtggctggaaggcgaaggga

SEQ ID NO: 928461 - DNA, 25 bp, Homo sapien
tattctgaaataagagcgggatgct

SEQ ID NO: 928462 - DNA, 25 bp, Homo sapien
tttcggtgagctgagaactgccact

SEQ ID NO: 928463 - DNA, 25 bp, Homo sapien
tttgcataaatgagcagcatgtgtc

SEQ ID NO: 928464 - DNA, 25 bp, Homo sapien
aatatggtagtcaaggccgggcacg

SEQ ID NO: 928465 - DNA, 25 bp, Homo sapien
tgcatgaggcgagattgcctcattg

SEQ ID NO: 928466 - DNA, 25 bp, Homo sapien
ggttgcatgaggcgagattgcctca

SEQ ID NO: 928467 - DNA, 25 bp, Homo sapien
gttgcatgaggcgagattgcctcat

SEQ ID NO: 928468 - DNA, 25 bp, Homo sapien
gcatgaggcgagattgcctcattgc

SEQ ID NO: 928469 - DNA, 25 bp, Homo sapien
ttagaggcgtgtgacaccacgcccg

SEQ ID NO: 928470 - DNA, 25 bp, Homo sapien
attagaggcgtgtgacaccacgccc

SEQ ID NO: 928471 - DNA, 25 bp, Homo sapien
gattagaggcgtgtgacaccacgcc

SEQ ID NO: 928472 - DNA, 25 bp, Homo sapien
ggattagaggcgtgtgacaccacgc

SEQ ID NO: 928473 - DNA, 25 bp, Homo sapien
gtattataggattgagccaccaagc

SEQ ID NO: 928474 - DNA, 25 bp, Homo sapien
ccaccaagcccggcccgaatataat

SEQ ID NO: 928475 - DNA, 25 bp, Homo sapien
caccaagcccggcccgaatataatt

SEQ ID NO: 928476 - DNA, 25 bp, Homo sapien
aaggtgctggtattataggattgag

SEQ ID NO: 928477 - DNA, 25 bp, Homo sapien
aagtctaaatgaggacaacggaggc

SEQ ID NO: 928478 - DNA, 25 bp, Homo sapien
gaaagtctaaatgaggacaacggag

SEQ ID NO: 928479 - DNA, 25 bp, Homo sapien
tctaaatgaggacaacggaggctgg

SEQ ID NO: 928480 - DNA, 25 bp, Homo sapien
gtctaaatgaggacaacggaggctg

SEQ ID NO: 928481 - DNA, 25 bp, Homo sapien
caaggccagtaccttcatgtcatga

SEQ ID NO: 928482 - DNA, 25 bp, Homo sapien
ggcttccaatggcaactcgagacgt

SEQ ID NO: 928483 - DNA, 25 bp, Homo sapien
gattagccaccttccaactccaagt

SEQ ID NO: 928484 - DNA, 25 bp, Homo sapien
ggttcgctgtgaactgacagtaact

SEQ ID NO: 928485 - DNA, 25 bp, Homo sapien
ttgtacaagtgaagcaagcaatctc

SEQ ID NO: 928486 - DNA, 25 bp, Homo sapien
cttgtacaagtgaagcaagcaatct

SEQ ID NO: 928487 - DNA, 25 bp, Homo sapien
caccctaggaggtggaaggtccctg

SEQ ID NO: 928488 - DNA, 25 bp, Homo sapien
tgtctactaagtaagcagcgtggtc

SEQ ID NO: 928489 - DNA, 25 bp, Homo sapien
ggttactgattaaatatcgctctcc

SEQ ID NO: 928490 - DNA, 25 bp, Homo sapien
atcgctctccttcctacagtgtaca

SEQ ID NO: 928491 - DNA, 25 bp, Homo sapien
ccagcccacttgtaggtcctatgca

SEQ ID NO: 928492 - DNA, 25 bp, Homo sapien
gatggcatgttaaaataccctagga

SEQ ID NO: 928493 - DNA, 25 bp, Homo sapien
gggctctggcgttgctctcttccac

SEQ ID NO: 928494 - DNA, 25 bp, Homo sapien
tctccacaaagaaggacagcagaag

SEQ ID NO: 928495 - DNA, 25 bp, Homo sapien
gcacctgggctctggcgttgctctc

SEQ ID NO: 928496 - DNA, 25 bp, Homo sapien
gctggaagaaagtcctctgggcacc

SEQ ID NO: 928497 - DNA, 25 bp, Homo sapien
ttatctcgcactcagggtagaaaag

SEQ ID NO: 928498 - DNA, 25 bp, Homo sapien
cgttcttatctcgcactcagggtag

SEQ ID NO: 928499 - DNA, 25 bp, Homo sapien
gttcttatctcgcactcagggtaga

SEQ ID NO: 928500 - DNA, 25 bp, Homo sapien
tcttatctcgcactcagggtagaaa

SEQ ID NO: 928501 - DNA, 25 bp, Homo sapien
ggggaggccttaagtagggcagcag

SEQ ID NO: 928502 - DNA, 25 bp, Homo sapien
aggccttaagtagggcagcagcaca

SEQ ID NO: 928503 - DNA, 25 bp, Homo sapien
gaggccttaagtagggcagcagcac

SEQ ID NO: 928504 - DNA, 25 bp, Homo sapien
gaaaaggaggtgcagagctaaggaa

SEQ ID NO: 928505 - DNA, 25 bp, Homo sapien
ccagtacagaaattcacccacagca

SEQ ID NO: 928506 - DNA, 25 bp, Homo sapien
tctcacagtccacgtccatcagcac

SEQ ID NO: 928507 - DNA, 25 bp, Homo sapien
atggggtagacgctctcacagtcca

SEQ ID NO: 928508 - DNA, 25 bp, Homo sapien
cgtccatcagcaccccttccatgtt

SEQ ID NO: 928509 - DNA, 25 bp, Homo sapien
acaatggggtagacgctctcacagt

SEQ ID NO: 928510 - DNA, 25 bp, Homo sapien
tgacctcagtcaacctgcacagatg

SEQ ID NO: 928511 - DNA, 25 bp, Homo sapien
tactgcaactcaggaatgacctcag

SEQ ID NO: 928512 - DNA, 25 bp, Homo sapien
aaaactcctaaatggagagtggaag

SEQ ID NO: 928513 - DNA, 25 bp, Homo sapien
gaagacagaaatattaccctctcaa

SEQ ID NO: 928514 - DNA, 25 bp, Homo sapien
ccactgccacactgtactctctgtc

SEQ ID NO: 928515 - DNA, 25 bp, Homo sapien
cagagccttcacgcacttcacgcgg

SEQ ID NO: 928516 - DNA, 25 bp, Homo sapien
tcagagccttcacgcacttcacgcg

SEQ ID NO: 928517 - DNA, 25 bp, Homo sapien
agagccttcacgcacttcacgcgga

SEQ ID NO: 928518 - DNA, 25 bp, Homo sapien
tgaggaaagacgtgctgtagctttg

SEQ ID NO: 928519 - DNA, 25 bp, Homo sapien
gtagctttgcatccaacacccaatt

SEQ ID NO: 928520 - DNA, 25 bp, Homo sapien
cagatagcacggatctcaggaagga

SEQ ID NO: 928521 - DNA, 25 bp, Homo sapien
tattttaaatagctgtcggtgagga

SEQ ID NO: 928522 - DNA, 25 bp, Homo sapien
accaactcaatactaggccataagg

SEQ ID NO: 928523 - DNA, 25 bp, Homo sapien
aatgattgtaccaactcaatactag

SEQ ID NO: 928524 - DNA, 25 bp, Homo sapien
ggccataaggctaagtctccataaa

SEQ ID NO: 928525 - DNA, 25 bp, Homo sapien
taagaaatccagaggaaagcaagca

SEQ ID NO: 928526 - DNA, 25 bp, Homo sapien
tcacttttggcagctttcgcagcat

SEQ ID NO: 928527 - DNA, 25 bp, Homo sapien
catgtcacttttggcagctttcgca

SEQ ID NO: 928528 - DNA, 25 bp, Homo sapien
tgcatgtcacttttggcagctttcg

SEQ ID NO: 928529 - DNA, 25 bp, Homo sapien
tgtcacttttggcagctttcgcagc

SEQ ID NO: 928530 - DNA, 25 bp, Homo sapien
gctggtggctctgactgtttccggc

SEQ ID NO: 928531 - DNA, 25 bp, Homo sapien
tggtggctctgactgtttccggcta

SEQ ID NO: 928532 - DNA, 25 bp, Homo sapien
gtggctctgactgtttccggctatg

SEQ ID NO: 928533 - DNA, 25 bp, Homo sapien
ctggtggctctgactgtttccggct

SEQ ID NO: 928534 - DNA, 25 bp, Homo sapien
ttgaagctgtcctcaaatcattttc

SEQ ID NO: 928535 - DNA, 25 bp, Homo sapien
aaaatatatgctgtatgcttaccta

SEQ ID NO: 928536 - DNA, 25 bp, Homo sapien
gcttacctatatcaaaactatgttg

SEQ ID NO: 928537 - DNA, 25 bp, Homo sapien
gaattactgagttacattctcattg

SEQ ID NO: 928538 - DNA, 25 bp, Homo sapien
aactatgttgtttaggtgccgggca

SEQ ID NO: 928539 - DNA, 25 bp, Homo sapien
cgccgctcctgccgtgcatgttggg

SEQ ID NO: 928540 - DNA, 25 bp, Homo sapien
agccagtacatgcaggtgggctcca

SEQ ID NO: 928541 - DNA, 25 bp, Homo sapien
gggagccagtacatgcaggtgggct

SEQ ID NO: 928542 - DNA, 25 bp, Homo sapien
ccgccgctcctgccgtgcatgttgg

SEQ ID NO: 928543 - DNA, 25 bp, Homo sapien
ccttctgaccctgctgcgggcgttc

SEQ ID NO: 928544 - DNA, 25 bp, Homo sapien
ttctgaccctgctgcgggcgttcgg

SEQ ID NO: 928545 - DNA, 25 bp, Homo sapien
cctcccttctgaccctgctgcgggc

SEQ ID NO: 928546 - DNA, 25 bp, Homo sapien
tcccttctgaccctgctgcgggcgt

SEQ ID NO: 928547 - DNA, 25 bp, Homo sapien
gttacttaaacatatgcagctaaaa

SEQ ID NO: 928548 - DNA, 25 bp, Homo sapien
tacttgtaaagcgtttggtgctaat

SEQ ID NO: 928549 - DNA, 25 bp, Homo sapien
ccttggatgtgagatctcatgcact

SEQ ID NO: 928550 - DNA, 25 bp, Homo sapien
tccatgttctcagcggttatccttg

SEQ ID NO: 928551 - DNA, 25 bp, Homo sapien
tggtctgatgcagttacagatttac

SEQ ID NO: 928552 - DNA, 25 bp, Homo sapien
tgtatcgacttcatgctgaccaggg

SEQ ID NO: 928553 - DNA, 25 bp, Homo sapien
cctcattcttgagggattagggatg

SEQ ID NO: 928554 - DNA, 25 bp, Homo sapien
tacagatttacaaaccgcgtcccac

SEQ ID NO: 928555 - DNA, 25 bp, Homo sapien
ttcaaacatacactaaatatcaaat

SEQ ID NO: 928556 - DNA, 25 bp, Homo sapien
ccttggaggacaacgtgatcactgt

SEQ ID NO: 928557 - DNA, 25 bp, Homo sapien
tgtattcagctctgtcaagaatggt

SEQ ID NO: 928558 - DNA, 25 bp, Homo sapien
gatcactgtattcagctctgtcaag

SEQ ID NO: 928559 - DNA, 25 bp, Homo sapien
ctgtcaagaatggtccaggttcttc

SEQ ID NO: 928560 - DNA, 25 bp, Homo sapien
cttctctcaggccgatgacctcagg

SEQ ID NO: 928561 - DNA, 25 bp, Homo sapien
ccacacccagtgctctgggtcataa

SEQ ID NO: 928562 - DNA, 25 bp, Homo sapien
cgggtctcctcgtacaggaagtaga

SEQ ID NO: 928563 - DNA, 25 bp, Homo sapien
agggtatatgagagcgggtctcctc

SEQ ID NO: 928564 - DNA, 25 bp, Homo sapien
agagcgggtctcctcgtacaggaag

SEQ ID NO: 928565 - DNA, 25 bp, Homo sapien
atatgagagcgggtctcctcgtaca

SEQ ID NO: 928566 - DNA, 25 bp, Homo sapien
ccaccaggagagacctccggctgag

SEQ ID NO: 928567 - DNA, 25 bp, Homo sapien
aggacagaaatcaggttgctgctca

SEQ ID NO: 928568 - DNA, 25 bp, Homo sapien
caggagagacctccggctgaggtca

SEQ ID NO: 928569 - DNA, 25 bp, Homo sapien
ctgaggacagaaatcaggttgctgc

SEQ ID NO: 928570 - DNA, 25 bp, Homo sapien
gcccggctgaaatacgctatgacca

SEQ ID NO: 928571 - DNA, 25 bp, Homo sapien
aggccggcccggctgaaatacgcta

SEQ ID NO: 928572 - DNA, 25 bp, Homo sapien
ccggcccggctgaaatacgctatga

SEQ ID NO: 928573 - DNA, 25 bp, Homo sapien
ggaggccggcccggctgaaatacgc

SEQ ID NO: 928574 - DNA, 25 bp, Homo sapien
gaaggtcggatgcaaatccgagaag

SEQ ID NO: 928575 - DNA, 25 bp, Homo sapien
aaggtcggatgcaaatccgagaagc

SEQ ID NO: 928576 - DNA, 25 bp, Homo sapien
caggagtcttttaatgacaggatcc

SEQ ID NO: 928577 - DNA, 25 bp, Homo sapien
gtcccaggccaggagtcttttaatg

SEQ ID NO: 928578 - DNA, 25 bp, Homo sapien
ttgtccgacaccctcagatctttgt

SEQ ID NO: 928579 - DNA, 25 bp, Homo sapien
ggccaggagtcttttaatgacagga

SEQ ID NO: 928580 - DNA, 25 bp, Homo sapien
gtgagaatctacaggatgtagagct

SEQ ID NO: 928581 - DNA, 25 bp, Homo sapien
tgtgagaatctacaggatgtagagc

SEQ ID NO: 928582 - DNA, 25 bp, Homo sapien
tgagaatctacaggatgtagagctg

SEQ ID NO: 928583 - DNA, 25 bp, Homo sapien
cattggaaaagtgtggttattggaa

SEQ ID NO: 928584 - DNA, 25 bp, Homo sapien
cccattggaaaagtgtggttattgg

SEQ ID NO: 928585 - DNA, 25 bp, Homo sapien
tcccattggaaaagtgtggttattg

SEQ ID NO: 928586 - DNA, 25 bp, Homo sapien
ccattggaaaagtgtggttattgga

SEQ ID NO: 928587 - DNA, 25 bp, Homo sapien
cctgttgaaggcctcgtagtactca

SEQ ID NO: 928588 - DNA, 25 bp, Homo sapien
tactcagggagcacgagcgacactc

SEQ ID NO: 928589 - DNA, 25 bp, Homo sapien
gcgacactcgccgtcgcttcgcctt

SEQ ID NO: 928590 - DNA, 25 bp, Homo sapien
gcttcgccttcatcttgaggccaca

SEQ ID NO: 928591 - DNA, 25 bp, Homo sapien
gattcatccaaacattctctcttcc

SEQ ID NO: 928592 - DNA, 25 bp, Homo sapien
atcagattcatccaaacattctctc

SEQ ID NO: 928593 - DNA, 25 bp, Homo sapien
ccttctctggctcatcatcagattc

SEQ ID NO: 928594 - DNA, 25 bp, Homo sapien
cagattcatccaaacattctctctt

SEQ ID NO: 928595 - DNA, 25 bp, Homo sapien
ccgctgggggctccgctcttcctgg

SEQ ID NO: 928596 - DNA, 25 bp, Homo sapien
tcttcctggggctgcggttgatggc

SEQ ID NO: 928597 - DNA, 25 bp, Homo sapien
ggtgctccgctgggggctccgctct

SEQ ID NO: 928598 - DNA, 25 bp, Homo sapien
cctggggctgcggttgatggctcat

SEQ ID NO: 928599 - DNA, 25 bp, Homo sapien
gtccaactgaactcccaggtgccga

SEQ ID NO: 928600 - DNA, 25 bp, Homo sapien
tgtccaactgaactcccaggtgccg

SEQ ID NO: 928601 - DNA, 25 bp, Homo sapien
caactgaactcccaggtgccgacag

SEQ ID NO: 928602 - DNA, 25 bp, Homo sapien
actgaactcccaggtgccgacagag

SEQ ID NO: 928603 - DNA, 25 bp, Homo sapien
tagggtaagcagaaacgatgaaacc

SEQ ID NO: 928604 - DNA, 25 bp, Homo sapien
aaaagtagggtaagcagaaacgatg

SEQ ID NO: 928605 - DNA, 25 bp, Homo sapien
gggatcaggatgggaaagaaaagta

SEQ ID NO: 928606 - DNA, 25 bp, Homo sapien
ggtaagcagaaacgatgaaacctta

SEQ ID NO: 928607 - DNA, 25 bp, Homo sapien
aacgggctgcggctctcctaggagt

SEQ ID NO: 928608 - DNA, 25 bp, Homo sapien
cacatggcttcctaacgggctgcgg

SEQ ID NO: 928609 - DNA, 25 bp, Homo sapien
cacaaactgaatgcggaaggaaatc

SEQ ID NO: 928610 - DNA, 25 bp, Homo sapien
agtctctcgctcatgggaaaggcac

SEQ ID NO: 928611 - DNA, 25 bp, Homo sapien
ttctgaaacagcctccaatccgtgc

SEQ ID NO: 928612 - DNA, 25 bp, Homo sapien
tgggaataagtcaacctgcagcgga

SEQ ID NO: 928613 - DNA, 25 bp, Homo sapien
ctgaggtgaggcctgatttagctcc

SEQ ID NO: 928614 - DNA, 25 bp, Homo sapien
aagttcagcccaagtttcagcccag

SEQ ID NO: 928615 - DNA, 25 bp, Homo sapien
tccatgttctcagcggttatccttg

SEQ ID NO: 928616 - DNA, 25 bp, Homo sapien
gttacttaaacatatgcagctaaaa

SEQ ID NO: 928617 - DNA, 25 bp, Homo sapien
tacttgtaaagcgtttggtgctaat

SEQ ID NO: 928618 - DNA, 25 bp, Homo sapien
ccttggatgtgagatctcatgcact

SEQ ID NO: 928619 - DNA, 25 bp, Homo sapien
tggtctgatgcagttacagatttac

SEQ ID NO: 928620 - DNA, 25 bp, Homo sapien
cctcattcttgagggattagggatg

SEQ ID NO: 928621 - DNA, 25 bp, Homo sapien
tgtatcgacttcatgctgaccaggg

SEQ ID NO: 928622 - DNA, 25 bp, Homo sapien
tacagatttacaaaccgcgtcccac

SEQ ID NO: 928623 - DNA, 25 bp, Homo sapien
aaagagtgctcgcttcaggagcaca

SEQ ID NO: 928624 - DNA, 25 bp, Homo sapien
tagaagagattattatggaagtatc

SEQ ID NO: 928625 - DNA, 25 bp, Homo sapien
tcagtcacaaacctaaacagcaaat

SEQ ID NO: 928626 - DNA, 25 bp, Homo sapien
agataaaaagagtgctcgcttcagg

SEQ ID NO: 928627 - DNA, 25 bp, Homo sapien
cttctctcaggccgatgacctcagg

SEQ ID NO: 928628 - DNA, 25 bp, Homo sapien
ccacacccagtgctctgggtcataa

SEQ ID NO: 928629 - DNA, 25 bp, Homo sapien
cgggtctcctcgtacaggaagtaga

SEQ ID NO: 928630 - DNA, 25 bp, Homo sapien
atatgagagcgggtctcctcgtaca

SEQ ID NO: 928631 - DNA, 25 bp, Homo sapien
agagcgggtctcctcgtacaggaag

SEQ ID NO: 928632 - DNA, 25 bp, Homo sapien
agggtatatgagagcgggtctcctc

SEQ ID NO: 928633 - DNA, 25 bp, Homo sapien
caggagagacctccggctgaggtca

SEQ ID NO: 928634 - DNA, 25 bp, Homo sapien
aggacagaaatcaggttgctgctca

SEQ ID NO: 928635 - DNA, 25 bp, Homo sapien
ccaccaggagagacctccggctgag

SEQ ID NO: 928636 - DNA, 25 bp, Homo sapien
ctgaggacagaaatcaggttgctgc

SEQ ID NO: 928637 - DNA, 25 bp, Homo sapien
aggccggcccggctgaaatacgcta

SEQ ID NO: 928638 - DNA, 25 bp, Homo sapien
gcccggctgaaatacgctatgacca

SEQ ID NO: 928639 - DNA, 25 bp, Homo sapien
ggaggccggcccggctgaaatacgc

SEQ ID NO: 928640 - DNA, 25 bp, Homo sapien
ccggcccggctgaaatacgctatga

SEQ ID NO: 928641 - DNA, 25 bp, Homo sapien
gaaggtcggatgcaaatccgagaag

SEQ ID NO: 928642 - DNA, 25 bp, Homo sapien
aaggtcggatgcaaatccgagaagc

SEQ ID NO: 928643 - DNA, 25 bp, Homo sapien
gtcccaggccaggagtcttttaatg

SEQ ID NO: 928644 - DNA, 25 bp, Homo sapien
cccaggccaggagtcttttaatgac

SEQ ID NO: 928645 - DNA, 25 bp, Homo sapien
ttgtccgacaccctcagatctttgt

SEQ ID NO: 928646 - DNA, 25 bp, Homo sapien
ggccaggagtcttttaatgacagga

SEQ ID NO: 928647 - DNA, 25 bp, Homo sapien
tgtgagaatctacaggatgtagagc

SEQ ID NO: 928648 - DNA, 25 bp, Homo sapien
gtgagaatctacaggatgtagagct

SEQ ID NO: 928649 - DNA, 25 bp, Homo sapien
tgagaatctacaggatgtagagctg

SEQ ID NO: 928650 - DNA, 25 bp, Homo sapien
cccattggaaaagtgtggttattgg

SEQ ID NO: 928651 - DNA, 25 bp, Homo sapien
cattggaaaagtgtggttattggaa

SEQ ID NO: 928652 - DNA, 25 bp, Homo sapien
tcccattggaaaagtgtggttattg

SEQ ID NO: 928653 - DNA, 25 bp, Homo sapien
ccattggaaaagtgtggttattgga

SEQ ID NO: 928654 - DNA, 25 bp, Homo sapien
cctgttgaaggcctcgtagtactca

SEQ ID NO: 928655 - DNA, 25 bp, Homo sapien
gcttcgccttcatcttgaggccaca

SEQ ID NO: 928656 - DNA, 25 bp, Homo sapien
gcgacactcgccgtcgcttcgcctt

SEQ ID NO: 928657 - DNA, 25 bp, Homo sapien
tactcagggagcacgagcgacactc

SEQ ID NO: 928658 - DNA, 25 bp, Homo sapien
ccttctctggctcatcatcagattc

SEQ ID NO: 928659 - DNA, 25 bp, Homo sapien
ctccttctctggctcatcatcagat

SEQ ID NO: 928660 - DNA, 25 bp, Homo sapien
tcagattcatccaaacattccctct

SEQ ID NO: 928661 - DNA, 25 bp, Homo sapien
catcagattcatccaaacattccct

SEQ ID NO: 928662 - DNA, 25 bp, Homo sapien
ccgctgggggctccgctcttcctgg

SEQ ID NO: 928663 - DNA, 25 bp, Homo sapien
tcttcctggggctgcggttgatggc

SEQ ID NO: 928664 - DNA, 25 bp, Homo sapien
ggtgctccgctgggggctccgctct

SEQ ID NO: 928665 - DNA, 25 bp, Homo sapien
cctggggctgcggttgatggctcat

SEQ ID NO: 928666 - DNA, 25 bp, Homo sapien
atctcaccaaacctagtctctgttc

SEQ ID NO: 928667 - DNA, 25 bp, Homo sapien
cccatctcaccaaacctagtctctg

SEQ ID NO: 928668 - DNA, 25 bp, Homo sapien
aaatctgtcccatctcaccaaacct

SEQ ID NO: 928669 - DNA, 25 bp, Homo sapien
tcaccaaacctagtctctgttctgt

SEQ ID NO: 928670 - DNA, 25 bp, Homo sapien
tgggtcatggggtgtgggtgagtcc

SEQ ID NO: 928671 - DNA, 25 bp, Homo sapien
ggtcatggggtgtgggtgagtccat

SEQ ID NO: 928672 - DNA, 25 bp, Homo sapien
gggtcatggggtgtgggtgagtcca

SEQ ID NO: 928673 - DNA, 25 bp, Homo sapien
tttcaccatgtggtccaggctaatc

SEQ ID NO: 928674 - DNA, 25 bp, Homo sapien
tcaccatgtggtccaggctaatctc

SEQ ID NO: 928675 - DNA, 25 bp, Homo sapien
accatgtggtccaggctaatctcga

SEQ ID NO: 928676 - DNA, 25 bp, Homo sapien
ggtttcaccatgtggtccaggctaa

SEQ ID NO: 928677 - DNA, 25 bp, Homo sapien
gacctggagcacaaggggaaactgg

SEQ ID NO: 928678 - DNA, 25 bp, Homo sapien
acctggagcacaaggggaaactggg

SEQ ID NO: 928679 - DNA, 25 bp, Homo sapien
ttcctggcccaggtgagacattcgg

SEQ ID NO: 928680 - DNA, 25 bp, Homo sapien
gcaactgatgaaataggaactctgg

SEQ ID NO: 928681 - DNA, 25 bp, Homo sapien
tcgggcagatggcattgtctctgct

SEQ ID NO: 928682 - DNA, 25 bp, Homo sapien
gccttttgctctgctatcgggcaga

SEQ ID NO: 928683 - DNA, 25 bp, Homo sapien
tgactaacacccctttcttggcagc

SEQ ID NO: 928684 - DNA, 25 bp, Homo sapien
ggtttctgggatgacttgcacttaa

SEQ ID NO: 928685 - DNA, 25 bp, Homo sapien
ctggctcaagcaggatagaagtgac

SEQ ID NO: 928686 - DNA, 25 bp, Homo sapien
tgctcacacttggactggtgcagga

SEQ ID NO: 928687 - DNA, 25 bp, Homo sapien
gagtctggcagaatgcataccttta

SEQ ID NO: 928688 - DNA, 25 bp, Homo sapien
aaaattgcacactgccctattgtag

SEQ ID NO: 928689 - DNA, 25 bp, Homo sapien
cacaatcaagatataaaagggttcc

SEQ ID NO: 928690 - DNA, 25 bp, Homo sapien
tacctttaggtagacatcatcacaa

SEQ ID NO: 928691 - DNA, 25 bp, Homo sapien
tctgctatgtttccttcgggaagta

SEQ ID NO: 928692 - DNA, 25 bp, Homo sapien
taaggtagaggtggtcaaggttctc

SEQ ID NO: 928693 - DNA, 25 bp, Homo sapien
cagccataagccactgtgttggact

SEQ ID NO: 928694 - DNA, 25 bp, Homo sapien
caaaacatggttaacaggatagagc

SEQ ID NO: 928695 - DNA, 25 bp, Homo sapien
actccgaagggagtgactcaactcc

SEQ ID NO: 928696 - DNA, 25 bp, Homo sapien
tagtcaaattcagaggcccagcaaa

SEQ ID NO: 928697 - DNA, 25 bp, Homo sapien
cagcaaagttgttcccatgggtcag

SEQ ID NO: 928698 - DNA, 25 bp, Homo sapien
gtgacctaactctgcactccgaagg

SEQ ID NO: 928699 - DNA, 25 bp, Homo sapien
tattttacctaggaggaaaagagca

SEQ ID NO: 928700 - DNA, 25 bp, Homo sapien
taaacagtgtgttcaggccgggtgt

SEQ ID NO: 928701 - DNA, 25 bp, Homo sapien
caacctatgagtcaggaactcttat

SEQ ID NO: 928702 - DNA, 25 bp, Homo sapien
tcagtttttgttgcaacctatgagt

SEQ ID NO: 928703 - DNA, 25 bp, Homo sapien
gtgaacccccatctccgctatacaa

SEQ ID NO: 928704 - DNA, 25 bp, Homo sapien
cctgataagaaaatgaagctgtggg

SEQ ID NO: 928705 - DNA, 25 bp, Homo sapien
taagaaaatgaagctgtgggccagg

SEQ ID NO: 928706 - DNA, 25 bp, Homo sapien
tgataagaaaatgaagctgtgggcc

SEQ ID NO: 928707 - DNA, 25 bp, Homo sapien
cctaggcaacattgcgaaaaataca

SEQ ID NO: 928708 - DNA, 25 bp, Homo sapien
ggcaacattgcgaaaaatacaaata

SEQ ID NO: 928709 - DNA, 25 bp, Homo sapien
ggtgatggagcaagattccgactca

SEQ ID NO: 928710 - DNA, 25 bp, Homo sapien
ggcacgagaatcgctgaaccaaggg

SEQ ID NO: 928711 - DNA, 25 bp, Homo sapien
tattgttccctacatacctctgtgc

SEQ ID NO: 928712 - DNA, 25 bp, Homo sapien
tcctcaagagctaatgatagcgcta

SEQ ID NO: 928713 - DNA, 25 bp, Homo sapien
taaattcctattcagtcctcaagag

SEQ ID NO: 928714 - DNA, 25 bp, Homo sapien
tgatagcatgctgaaaccttcctga

SEQ ID NO: 928715 - DNA, 25 bp, Homo sapien
gaagggctggtctagcagggtacct

SEQ ID NO: 928716 - DNA, 25 bp, Homo sapien
ggtggcactagatcttagagctttt

SEQ ID NO: 928717 - DNA, 25 bp, Homo sapien
aacgccgggtgcctacctgtaggag

SEQ ID NO: 928718 - DNA, 25 bp, Homo sapien
cctgtaggaggtggcactagatctt

SEQ ID NO: 928719 - DNA, 25 bp, Homo sapien
tcccgggcttgagtgatctgctacc

SEQ ID NO: 928720 - DNA, 25 bp, Homo sapien
cctcccgggcttgagtgatctgcta

SEQ ID NO: 928721 - DNA, 25 bp, Homo sapien
ttgagtgatctgctaccagagctgt

SEQ ID NO: 928722 - DNA, 25 bp, Homo sapien
cgggcttgagtgatctgctaccaga

SEQ ID NO: 928723 - DNA, 25 bp, Homo sapien
gcttaacacgattgaattgcacact

SEQ ID NO: 928724 - DNA, 25 bp, Homo sapien
tgctgtccgtattgaaaatgtgctt

SEQ ID NO: 928725 - DNA, 25 bp, Homo sapien
tatgaaatacctggtgtagccggag

SEQ ID NO: 928726 - DNA, 25 bp, Homo sapien
tactgcatgagatcccacttgtatg

SEQ ID NO: 928727 - DNA, 25 bp, Homo sapien
gaaatcaaggcccggtgcggtggct

SEQ ID NO: 928728 - DNA, 25 bp, Homo sapien
tataatcccagcactttgggaggtg

SEQ ID NO: 928729 - DNA, 25 bp, Homo sapien
gcctataatcccagcactttgggag

SEQ ID NO: 928730 - DNA, 25 bp, Homo sapien
cacgcctataatcccagcactttgg

SEQ ID NO: 928731 - DNA, 25 bp, Homo sapien
gcccgtcagtccaaattagcctggt

SEQ ID NO: 928732 - DNA, 25 bp, Homo sapien
tgatagcacccacgttatagggctg

SEQ ID NO: 928733 - DNA, 25 bp, Homo sapien
tgacctgcttatgtgattcccatgg

SEQ ID NO: 928734 - DNA, 25 bp, Homo sapien
gcttgagtgaggcacacttgacctg

SEQ ID NO: 928735 - DNA, 25 bp, Homo sapien
tctcagtagaaattgggacctgcca

SEQ ID NO: 928736 - DNA, 25 bp, Homo sapien
ttcagtaggccatgaatacttgggt

SEQ ID NO: 928737 - DNA, 25 bp, Homo sapien
gactcagactttgcgttcagtaggc

SEQ ID NO: 928738 - DNA, 25 bp, Homo sapien
gaagttagtaccatcgtcgggctgg

SEQ ID NO: 928739 - DNA, 25 bp, Homo sapien
taagatggttcttccagtaatgacc

SEQ ID NO: 928740 - DNA, 25 bp, Homo sapien
ccaggaggtgactgtaactgtaaga

SEQ ID NO: 928741 - DNA, 25 bp, Homo sapien
caaggaaaaagcctgctaaagctca

SEQ ID NO: 928742 - DNA, 25 bp, Homo sapien
aaatagctttaaagccctgctcacc

SEQ ID NO: 928743 - DNA, 25 bp, Homo sapien
gagtgaaggtcagtcagtgtgccaa

SEQ ID NO: 928744 - DNA, 25 bp, Homo sapien
cacagcaccttgtggacatgagtga

SEQ ID NO: 928745 - DNA, 25 bp, Homo sapien
tgggtgtgccctaaaatacttctcc

SEQ ID NO: 928746 - DNA, 25 bp, Homo sapien
taatcatgctcacgactactaaggt

SEQ ID NO: 928747 - DNA, 25 bp, Homo sapien
tcctgtagtggagaagataaaagtc

SEQ ID NO: 928748 - DNA, 25 bp, Homo sapien
tctgtagcagggtaacaaaattatc

SEQ ID NO: 928749 - DNA, 25 bp, Homo sapien
tggtcaagcaatcaaagtactggtg

SEQ ID NO: 928750 - DNA, 25 bp, Homo sapien
taactcataggttaacctcagcatg

SEQ ID NO: 928751 - DNA, 25 bp, Homo sapien
tgagctggcgatgaactccgtggcc

SEQ ID NO: 928752 - DNA, 25 bp, Homo sapien
gcttgtgggcttgatcaggccgtca

SEQ ID NO: 928753 - DNA, 25 bp, Homo sapien
gagggccggtacagtgtcctccatg

SEQ ID NO: 928754 - DNA, 25 bp, Homo sapien
gaagctgaataacgtctctaggtct

SEQ ID NO: 928755 - DNA, 25 bp, Homo sapien
tagtcgtttctggaatcaaaacaat

SEQ ID NO: 928756 - DNA, 25 bp, Homo sapien
ccactgtagtcgtttctggaatcaa

SEQ ID NO: 928757 - DNA, 25 bp, Homo sapien
ctgtagtcgtttctggaatcaaaac

SEQ ID NO: 928758 - DNA, 25 bp, Homo sapien
tcgtttctggaatcaaaacaataaa

SEQ ID NO: 928759 - DNA, 25 bp, Homo sapien
tacggaatcggccaatatctctgtg

SEQ ID NO: 928760 - DNA, 25 bp, Homo sapien
taaaatggcttaccagtcatgggaa

SEQ ID NO: 928761 - DNA, 25 bp, Homo sapien
aagtcagggtcttttgtccacaaca

SEQ ID NO: 928762 - DNA, 25 bp, Homo sapien
tactggctactgtaacacttcttgg

SEQ ID NO: 928763 - DNA, 25 bp, Homo sapien
tcagctgttcgaaccccgacccaga

SEQ ID NO: 928764 - DNA, 25 bp, Homo sapien
ttcaagccacgagggagagagtttt

SEQ ID NO: 928765 - DNA, 25 bp, Homo sapien
ccttcaagccacgagggagagagtt

SEQ ID NO: 928766 - DNA, 25 bp, Homo sapien
ttcccttcaagccacgagggagaga

SEQ ID NO: 928767 - DNA, 25 bp, Homo sapien
tgattgtgtttgacactgggagatg

SEQ ID NO: 928768 - DNA, 25 bp, Homo sapien
aaactgctttttaagctgcactctt

SEQ ID NO: 928769 - DNA, 25 bp, Homo sapien
tgcactcttgtatatgtttaaaact

SEQ ID NO: 928770 - DNA, 25 bp, Homo sapien
agggctgaattagctctggagtcag

SEQ ID NO: 928771 - DNA, 25 bp, Homo sapien
gactccatcacaagaaaaaaagaac

SEQ ID NO: 928772 - DNA, 25 bp, Homo sapien
tcgggaggctgaggcaggatagtcg

SEQ ID NO: 928773 - DNA, 25 bp, Homo sapien
aataaaacagttagctgggcatgat

SEQ ID NO: 928774 - DNA, 25 bp, Homo sapien
ggcgggtgcctgtaatcccagctac

SEQ ID NO: 928775 - DNA, 25 bp, Homo sapien
gacctgttactaccccaagctgtgt

SEQ ID NO: 928776 - DNA, 25 bp, Homo sapien
tagctcgatgacactaaggccccaa

SEQ ID NO: 928777 - DNA, 25 bp, Homo sapien
gattttttatgtactcagcagagcc

SEQ ID NO: 928778 - DNA, 25 bp, Homo sapien
gagcagtagcttgagacccgaagtc

SEQ ID NO: 928779 - DNA, 25 bp, Homo sapien
aggggtcgccgtggccggcattatt

SEQ ID NO: 928780 - DNA, 25 bp, Homo sapien
ttaggaacgctgttctagccggccc

SEQ ID NO: 928781 - DNA, 25 bp, Homo sapien
taggaacgctgttctagccggcccc

SEQ ID NO: 928782 - DNA, 25 bp, Homo sapien
gggtcgccgtggccggcattatttc

SEQ ID NO: 928783 - DNA, 25 bp, Homo sapien
taaggatgcaacctctgacgttctg

SEQ ID NO: 928784 - DNA, 25 bp, Homo sapien
taggctctgtgacggcatagttttc

SEQ ID NO: 928785 - DNA, 25 bp, Homo sapien
gacgttctgcgccttcctaggagag

SEQ ID NO: 928786 - DNA, 25 bp, Homo sapien
gagatttcacaagcaatgcgagttg

SEQ ID NO: 928787 - DNA, 25 bp, Homo sapien
gctcggcgtaggtgggacgcagacc

SEQ ID NO: 928788 - DNA, 25 bp, Homo sapien
gggacagcgccacttgcggtgtttc

SEQ ID NO: 928789 - DNA, 25 bp, Homo sapien
gtgtttctcagaccgctgctgccca

SEQ ID NO: 928790 - DNA, 25 bp, Homo sapien
ttgctctctcggctgttttcatggt

SEQ ID NO: 928791 - DNA, 25 bp, Homo sapien
gtgggcttgaccattcgggggcaga

SEQ ID NO: 928792 - DNA, 25 bp, Homo sapien
cttgaccattcgggggcagataatt

SEQ ID NO: 928793 - DNA, 25 bp, Homo sapien
ggcttgaccattcgggggcagataa

SEQ ID NO: 928794 - DNA, 25 bp, Homo sapien
tgaccattcgggggcagataattgt

SEQ ID NO: 928795 - DNA, 25 bp, Homo sapien
cttctggaaggtcgctgctcatctt

SEQ ID NO: 928796 - DNA, 25 bp, Homo sapien
ccagtttctggacttggatgtgttt

SEQ ID NO: 928797 - DNA, 25 bp, Homo sapien
tggaaggtcgctgctcatcttccta

SEQ ID NO: 928798 - DNA, 25 bp, Homo sapien
tcgctgctcatcttcctaaatggaa

SEQ ID NO: 928799 - DNA, 25 bp, Homo sapien
ctagctctagctgcatccaaaggac

SEQ ID NO: 928800 - DNA, 25 bp, Homo sapien
cacaggctgagaaggtctagctcta

SEQ ID NO: 928801 - DNA, 25 bp, Homo sapien
cctgttgaactcctgtcccgattga

SEQ ID NO: 928802 - DNA, 25 bp, Homo sapien
tgtcccgattgacactaaaactgtc

SEQ ID NO: 928803 - DNA, 25 bp, Homo sapien
tggataaacagcagtcactgcaggt

SEQ ID NO: 928804 - DNA, 25 bp, Homo sapien
ggataaacagcagtcactgcaggtc

SEQ ID NO: 928805 - DNA, 25 bp, Homo sapien
ataaacagcagtcactgcaggtctc

SEQ ID NO: 928806 - DNA, 25 bp, Homo sapien
gataaacagcagtcactgcaggtct

SEQ ID NO: 928807 - DNA, 25 bp, Homo sapien
tctggcccgcggaagatgagcttca

SEQ ID NO: 928808 - DNA, 25 bp, Homo sapien
aggaagctgtggcaagtgttgacac

SEQ ID NO: 928809 - DNA, 25 bp, Homo sapien
ctgtggcaagtgttgacaccacagc

SEQ ID NO: 928810 - DNA, 25 bp, Homo sapien
tttttctggcccgcggaagatgagc

SEQ ID NO: 928811 - DNA, 25 bp, Homo sapien
ctttaatctggatcagtcttttttc

SEQ ID NO: 928812 - DNA, 25 bp, Homo sapien
cagggttttgccattgattctggat

SEQ ID NO: 928813 - DNA, 25 bp, Homo sapien
tttaaccttctttaatctggatcag

SEQ ID NO: 928814 - DNA, 25 bp, Homo sapien
cagtcaaggatcaatgtcatagcct

SEQ ID NO: 928815 - DNA, 25 bp, Homo sapien
atcctcccaccagccaagaattggg

SEQ ID NO: 928816 - DNA, 25 bp, Homo sapien
tgcatacctgcagccgggcccgggg

SEQ ID NO: 928817 - DNA, 25 bp, Homo sapien
tttctcagccttttagacacacact

SEQ ID NO: 928818 - DNA, 25 bp, Homo sapien
ccccatcctgtgtctctgataatct

SEQ ID NO: 928819 - DNA, 25 bp, Homo sapien
aaatctctttagcacgagcccgcga

SEQ ID NO: 928820 - DNA, 25 bp, Homo sapien
gtacaggaggctaccatactggctg

SEQ ID NO: 928821 - DNA, 25 bp, Homo sapien
gactgagccacttaatctccgtgta

SEQ ID NO: 928822 - DNA, 25 bp, Homo sapien
tccctctggatgacatgaaggagtc

SEQ ID NO: 928823 - DNA, 25 bp, Homo sapien
tgccaggtggaactccttttgcttc

SEQ ID NO: 928824 - DNA, 25 bp, Homo sapien
ctctgctgtgccaggtggaactcct

SEQ ID NO: 928825 - DNA, 25 bp, Homo sapien
cactggaagggttctaggggcctct

SEQ ID NO: 928826 - DNA, 25 bp, Homo sapien
tgctgtgccaggtggaactcctttt

SEQ ID NO: 928827 - DNA, 25 bp, Homo sapien
attactgagctcaagccctggaagc

SEQ ID NO: 928828 - DNA, 25 bp, Homo sapien
ttactgagctcaagccctggaagcg

SEQ ID NO: 928829 - DNA, 25 bp, Homo sapien
cattactgagctcaagccctggaag

SEQ ID NO: 928830 - DNA, 25 bp, Homo sapien
actgagctcaagccctggaagcggc

SEQ ID NO: 928831 - DNA, 25 bp, Homo sapien
gaatttgataaactcagctgcctcc

SEQ ID NO: 928832 - DNA, 25 bp, Homo sapien
ctgatgactgtgaatttgataaact

SEQ ID NO: 928833 - DNA, 25 bp, Homo sapien
gataaactcagctgcctccaagatc

SEQ ID NO: 928834 - DNA, 25 bp, Homo sapien
tgactgtgaatttgataaactcagc

SEQ ID NO: 928835 - DNA, 25 bp, Homo sapien
gatttccagatagccggggtccttg

SEQ ID NO: 928836 - DNA, 25 bp, Homo sapien
actgatttccagatagccggggtcc

SEQ ID NO: 928837 - DNA, 25 bp, Homo sapien
tgatttccagatagccggggtcctt

SEQ ID NO: 928838 - DNA, 25 bp, Homo sapien
gaactgatttccagatagccggggt

SEQ ID NO: 928839 - DNA, 25 bp, Homo sapien
acccccggggcatgccatcaatcac

SEQ ID NO: 928840 - DNA, 25 bp, Homo sapien
cacccccggggcatgccatcaatca

SEQ ID NO: 928841 - DNA, 25 bp, Homo sapien
atgtgatcttcctgtagggaacttt

SEQ ID NO: 928842 - DNA, 25 bp, Homo sapien
acagggaaatccacgccaattgctt

SEQ ID NO: 928843 - DNA, 25 bp, Homo sapien
tgtagggaactttcacagggaaatc

SEQ ID NO: 928844 - DNA, 25 bp, Homo sapien
cacacagccagggttgaatgtgatc

SEQ ID NO: 928845 - DNA, 25 bp, Homo sapien
ttcggctaaagaggtcattaacttg

SEQ ID NO: 928846 - DNA, 25 bp, Homo sapien
tcggctaaagaggtcattaacttgt

SEQ ID NO: 928847 - DNA, 25 bp, Homo sapien
gcagaatttgtaacactggatgaat

SEQ ID NO: 928848 - DNA, 25 bp, Homo sapien
ctgctgcagaatttgtaacactgga

SEQ ID NO: 928849 - DNA, 25 bp, Homo sapien
cacttgaacgatgttaagatcttca

SEQ ID NO: 928850 - DNA, 25 bp, Homo sapien
aacagtcacttgaacgatgttaaga

SEQ ID NO: 928851 - DNA, 25 bp, Homo sapien
tcgattttcacctcggcttcagggt

SEQ ID NO: 928852 - DNA, 25 bp, Homo sapien
ttttcacctcggcttcagggtcctc

SEQ ID NO: 928853 - DNA, 25 bp, Homo sapien
ttcgattttcacctcggcttcaggg

SEQ ID NO: 928854 - DNA, 25 bp, Homo sapien
gattttcacctcggcttcagggtcc

SEQ ID NO: 928855 - DNA, 25 bp, Homo sapien
ttccattggtaattccatttctatt

SEQ ID NO: 928856 - DNA, 25 bp, Homo sapien
tccattggtaattccatttctatta

SEQ ID NO: 928857 - DNA, 25 bp, Homo sapien
cttccattggtaattccatttctat

SEQ ID NO: 928858 - DNA, 25 bp, Homo sapien
ccattggtaattccatttctattac

SEQ ID NO: 928859 - DNA, 25 bp, Homo sapien
atattgatagtaattaggatcttct

SEQ ID NO: 928860 - DNA, 25 bp, Homo sapien
cttgattctaaaagcatcttggtac

SEQ ID NO: 928861 - DNA, 25 bp, Homo sapien
attctaaaagcatcttggtacccac

SEQ ID NO: 928862 - DNA, 25 bp, Homo sapien
tgattctaaaagcatcttggtaccc

SEQ ID NO: 928863 - DNA, 25 bp, Homo sapien
atacttgattctaaaagcatcttgg

SEQ ID NO: 928864 - DNA, 25 bp, Homo sapien
cagaatcttccatgggttcagtttt

SEQ ID NO: 928865 - DNA, 25 bp, Homo sapien
ggatctctccgcatctgttaccatc

SEQ ID NO: 928866 - DNA, 25 bp, Homo sapien
cgcatctgttaccatcccagggcca

SEQ ID NO: 928867 - DNA, 25 bp, Homo sapien
ctttcacttggtgatactatggatc

SEQ ID NO: 928868 - DNA, 25 bp, Homo sapien
gatactatggatctctccgcatctg

SEQ ID NO: 928869 - DNA, 25 bp, Homo sapien
agaggaatgaaaaaacacacaccag

SEQ ID NO: 928870 - DNA, 25 bp, Homo sapien
ctgtagaggaatgaaaaaacacaca

SEQ ID NO: 928871 - DNA, 25 bp, Homo sapien
gtagaggaatgaaaaaacacacacc

SEQ ID NO: 928872 - DNA, 25 bp, Homo sapien
aggaatgaaaaaacacacaccagcc

SEQ ID NO: 928873 - DNA, 25 bp, Homo sapien
ctgactctctggtcctaggaagggt

SEQ ID NO: 928874 - DNA, 25 bp, Homo sapien
gctgactctctggtcctaggaaggg

SEQ ID NO: 928875 - DNA, 25 bp, Homo sapien
ccagctgactctctggtcctaggaa

SEQ ID NO: 928876 - DNA, 25 bp, Homo sapien
cagctgactctctggtcctaggaag

SEQ ID NO: 928877 - DNA, 25 bp, Homo sapien
cccctgcactaccacagccgactgg

SEQ ID NO: 928878 - DNA, 25 bp, Homo sapien
acagccgactggtctcgcagcatct

SEQ ID NO: 928879 - DNA, 25 bp, Homo sapien
ggaagcccctgcactaccacagccg

SEQ ID NO: 928880 - DNA, 25 bp, Homo sapien
gccgactggtctcgcagcatcttct

SEQ ID NO: 928881 - DNA, 25 bp, Homo sapien
gacctgcatcccgttcacagggcag

SEQ ID NO: 928882 - DNA, 25 bp, Homo sapien
tgccttcctgagtatttccgtttcg

SEQ ID NO: 928883 - DNA, 25 bp, Homo sapien
gtttcgcccgagtggacctgcatcc

SEQ ID NO: 928884 - DNA, 25 bp, Homo sapien
tgagtatttccgtttcgcccgagtg

SEQ ID NO: 928885 - DNA, 25 bp, Homo sapien
agcacaccgtggcatattgaaggct

SEQ ID NO: 928886 - DNA, 25 bp, Homo sapien
tgcagcacaccgtggcatattgaag

SEQ ID NO: 928887 - DNA, 25 bp, Homo sapien
acaccgtggcatattgaaggctctg

SEQ ID NO: 928888 - DNA, 25 bp, Homo sapien
cacaccgtggcatattgaaggctct

SEQ ID NO: 928889 - DNA, 25 bp, Homo sapien
ccgctgaggacctagtataaaataa

SEQ ID NO: 928890 - DNA, 25 bp, Homo sapien
cttggactctgcagtgttaagcagt

SEQ ID NO: 928891 - DNA, 25 bp, Homo sapien
taataaaccagagtaccgctgagga

SEQ ID NO: 928892 - DNA, 25 bp, Homo sapien
gataatttgttctatgtccttgaaa

SEQ ID NO: 928893 - DNA, 25 bp, Homo sapien
tacactgcgatgcaggccacttctg

SEQ ID NO: 928894 - DNA, 25 bp, Homo sapien
tctttctgaaaatccgtcctggcat

SEQ ID NO: 928895 - DNA, 25 bp, Homo sapien
aaaagcgcatcctctctcggttccg

SEQ ID NO: 928896 - DNA, 25 bp, Homo sapien
aacacgtctgtttcgtacactgcga

SEQ ID NO: 928897 - DNA, 25 bp, Homo sapien
ctgaaacagaaacaaaaagcgatgt

SEQ ID NO: 928898 - DNA, 25 bp, Homo sapien
aacagaaacaaaaagcgatgtatta

SEQ ID NO: 928899 - DNA, 25 bp, Homo sapien
acagaaacaaaaagcgatgtattat

SEQ ID NO: 928900 - DNA, 25 bp, Homo sapien
gaaacagaaacaaaaagcgatgtat

SEQ ID NO: 928901 - DNA, 25 bp, Homo sapien
tacaggcgtgcactgccatacccga

SEQ ID NO: 928902 - DNA, 25 bp, Homo sapien
ggcgtgcactgccatacccgactaa

SEQ ID NO: 928903 - DNA, 25 bp, Homo sapien
gcgtgcactgccatacccgactaat

SEQ ID NO: 928904 - DNA, 25 bp, Homo sapien
caggcgtgcactgccatacccgact

SEQ ID NO: 928905 - DNA, 25 bp, Homo sapien
ccagcctagtctcaaattcctaagc

SEQ ID NO: 928906 - DNA, 25 bp, Homo sapien
gcccagcctagtctcaaattcctaa

SEQ ID NO: 928907 - DNA, 25 bp, Homo sapien
caaattcctaagctcaagggatcca

SEQ ID NO: 928908 - DNA, 25 bp, Homo sapien
gcctagtctcaaattcctaagctca

SEQ ID NO: 928909 - DNA, 25 bp, Homo sapien
cgcctggaccacattgcatgcattt

SEQ ID NO: 928910 - DNA, 25 bp, Homo sapien
accacgcctggaccacattgcatgc

SEQ ID NO: 928911 - DNA, 25 bp, Homo sapien
cacgcctggaccacattgcatgcat

SEQ ID NO: 928912 - DNA, 25 bp, Homo sapien
cctggaccacattgcatgcatttta

SEQ ID NO: 928913 - DNA, 25 bp, Homo sapien
ggggtggctgccgggcggagaggct

SEQ ID NO: 928914 - DNA, 25 bp, Homo sapien
acttctcagacggggtggttgccag

SEQ ID NO: 928915 - DNA, 25 bp, Homo sapien
ttctcagacggggtggttgccaggc

SEQ ID NO: 928916 - DNA, 25 bp, Homo sapien
atggggtggctgccgggcggagagg

SEQ ID NO: 928917 - DNA, 25 bp, Homo sapien
cgaggttggcgggatcactcgcggt

SEQ ID NO: 928918 - DNA, 25 bp, Homo sapien
cgtctccaccaaaaccagtcaggca

SEQ ID NO: 928919 - DNA, 25 bp, Homo sapien
gaggttggcgggatcactcgcggtt

SEQ ID NO: 928920 - DNA, 25 bp, Homo sapien
ggccgaggttggcgggatcactcgc

SEQ ID NO: 928921 - DNA, 25 bp, Homo sapien
taagaagattgaccatttggtgccc

SEQ ID NO: 928922 - DNA, 25 bp, Homo sapien
tcccatcacgatcaaactagttttg

SEQ ID NO: 928923 - DNA, 25 bp, Homo sapien
tggacctggcttcttccactcaaca

SEQ ID NO: 928924 - DNA, 25 bp, Homo sapien
ggtgcccatagctattgctcttgca

SEQ ID NO: 928925 - DNA, 25 bp, Homo sapien
taagcggaaagttcagctgctgcct

SEQ ID NO: 928926 - DNA, 25 bp, Homo sapien
ctgggcagcgtaagcggaaagttca

SEQ ID NO: 928927 - DNA, 25 bp, Homo sapien
cagctctgggcagcgtaagcggaaa

SEQ ID NO: 928928 - DNA, 25 bp, Homo sapien
cagcgtaagcggaaagttcagctgc

SEQ ID NO: 928929 - DNA, 25 bp, Homo sapien
ttcaagcagacaactactcccgcca

SEQ ID NO: 928930 - DNA, 25 bp, Homo sapien
ttccagcctgtctttagcagcatgg

SEQ ID NO: 928931 - DNA, 25 bp, Homo sapien
tctgctgtggctcccatcacctctg

SEQ ID NO: 928932 - DNA, 25 bp, Homo sapien
tccacagactctgcttcgaagcctg

SEQ ID NO: 928933 - DNA, 25 bp, Homo sapien
tctcctttggggcatcctcagcacc

SEQ ID NO: 928934 - DNA, 25 bp, Homo sapien
acacccctgcgcctggagtgggcac

SEQ ID NO: 928935 - DNA, 25 bp, Homo sapien
gcatcctcagcacccgcccaaggct

SEQ ID NO: 928936 - DNA, 25 bp, Homo sapien
agcacccgcccaaggctttgttggt

SEQ ID NO: 928937 - DNA, 25 bp, Homo sapien
tgagttgtatgagtggcggcatgtt

SEQ ID NO: 928938 - DNA, 25 bp, Homo sapien
tctgtgtattgctctttgaatcgag

SEQ ID NO: 928939 - DNA, 25 bp, Homo sapien
ctttgaatcgagtttggaggaagag

SEQ ID NO: 928940 - DNA, 25 bp, Homo sapien
catgttggtagtgccggacttcctg

SEQ ID NO: 928941 - DNA, 25 bp, Homo sapien
caagcttggttcattgaggtggtta

SEQ ID NO: 928942 - DNA, 25 bp, Homo sapien
gagtgaacctcaagcctaaatacct

SEQ ID NO: 928943 - DNA, 25 bp, Homo sapien
gttatgcctgtgcaaagaagaggct

SEQ ID NO: 928944 - DNA, 25 bp, Homo sapien
gaagaggctcaaatgctgtccccgg

SEQ ID NO: 928945 - DNA, 25 bp, Homo sapien
cagttccgcaggcaggacagccggt

SEQ ID NO: 928946 - DNA, 25 bp, Homo sapien
agtgtggatgtgtacagtacacgca

SEQ ID NO: 928947 - DNA, 25 bp, Homo sapien
tgagtgtggatgtgtacagtacacg

SEQ ID NO: 928948 - DNA, 25 bp, Homo sapien
ccgggaaccctgagtgagtgtgagt

SEQ ID NO: 928949 - DNA, 25 bp, Homo sapien
tttctcctgcttgtgacattaagaa

SEQ ID NO: 928950 - DNA, 25 bp, Homo sapien
ttttagtatgaatgtgagatttttc

SEQ ID NO: 928951 - DNA, 25 bp, Homo sapien
tcattcctgttgagtctagttggaa

SEQ ID NO: 928952 - DNA, 25 bp, Homo sapien
gggactttccattacaaatagagac

SEQ ID NO: 928953 - DNA, 25 bp, Homo sapien
tttgctcaccagcaagaacacagcc

SEQ ID NO: 928954 - DNA, 25 bp, Homo sapien
ggtgctgatgctttggcctgtgagg

SEQ ID NO: 928955 - DNA, 25 bp, Homo sapien
aaggcggtgtgcaagcaccggctgc

SEQ ID NO: 928956 - DNA, 25 bp, Homo sapien
atgtgcaaggcggtgtgcaagcacc

SEQ ID NO: 928957 - DNA, 25 bp, Homo sapien
ctatgtgcaaggcggtgtgcaagca

SEQ ID NO: 928958 - DNA, 25 bp, Homo sapien
gtgtagatgttagatgtgccggtgc

SEQ ID NO: 928959 - DNA, 25 bp, Homo sapien
ttagatgtgccggtgccatcctgcg

SEQ ID NO: 928960 - DNA, 25 bp, Homo sapien
gatgttagatgtgccggtgccatcc

SEQ ID NO: 928961 - DNA, 25 bp, Homo sapien
ctagagaagtgtagatgttagatgt

SEQ ID NO: 928962 - DNA, 25 bp, Homo sapien
cccgttcaattacagcaacgaagaa

SEQ ID NO: 928963 - DNA, 25 bp, Homo sapien
cggaggcagtgctcggcacccggga

SEQ ID NO: 928964 - DNA, 25 bp, Homo sapien
ctcgacccgttcaattacagcaacg

SEQ ID NO: 928965 - DNA, 25 bp, Homo sapien
tcggcacccgggaacgtgctcaggc

SEQ ID NO: 928966 - DNA, 25 bp, Homo sapien
ccactccccacgaccctggcgcccg

SEQ ID NO: 928967 - DNA, 25 bp, Homo sapien
cccacgaccctggcgcccgccctgt

SEQ ID NO: 928968 - DNA, 25 bp, Homo sapien
cacgaccctggcgcccgccctgtac

SEQ ID NO: 928969 - DNA, 25 bp, Homo sapien
gcagctcaccccgtcccccactccc

SEQ ID NO: 928970 - DNA, 25 bp, Homo sapien
tagacgagccgctgcagggaaggga

SEQ ID NO: 928971 - DNA, 25 bp, Homo sapien
gtagacgagccgctgcagggaaggg

SEQ ID NO: 928972 - DNA, 25 bp, Homo sapien
gcccgggttctgctgcagcgcatct

SEQ ID NO: 928973 - DNA, 25 bp, Homo sapien
ggaagggaaagtgagcgcgtggcac

SEQ ID NO: 928974 - DNA, 25 bp, Homo sapien
ggcatgcagacgcaccgggctaggt

SEQ ID NO: 928975 - DNA, 25 bp, Homo sapien
cagggcatgcagacgcaccgggcta

SEQ ID NO: 928976 - DNA, 25 bp, Homo sapien
tgccagggcatgcagacgcaccggg

SEQ ID NO: 928977 - DNA, 25 bp, Homo sapien
catgcagacgcaccgggctaggtgt

SEQ ID NO: 928978 - DNA, 25 bp, Homo sapien
gatgtagtggacctcatggtagcgt

SEQ ID NO: 928979 - DNA, 25 bp, Homo sapien
agcaggatgtagtggacctcatggt

SEQ ID NO: 928980 - DNA, 25 bp, Homo sapien
gacctcatggtagcgtggatccgag

SEQ ID NO: 928981 - DNA, 25 bp, Homo sapien
gttcacagcaagagacgccagcccg

SEQ ID NO: 928982 - DNA, 25 bp, Homo sapien
cacacaatattgaaacggcctacgt

SEQ ID NO: 928983 - DNA, 25 bp, Homo sapien
gggcaaataccgtgaactgctttgg

SEQ ID NO: 928984 - DNA, 25 bp, Homo sapien
ctaagggcctgtcacagccaaccag

SEQ ID NO: 928985 - DNA, 25 bp, Homo sapien
gctttggtgcagcaagaaagactta

SEQ ID NO: 928986 - DNA, 25 bp, Homo sapien
tcagaagagcagccaagtgactggt

SEQ ID NO: 928987 - DNA, 25 bp, Homo sapien
agaagagcagccaagtgactggtct

SEQ ID NO: 928988 - DNA, 25 bp, Homo sapien
cagaagagcagccaagtgactggtc

SEQ ID NO: 928989 - DNA, 25 bp, Homo sapien
tccggcccggtacagtgggtgttca

SEQ ID NO: 928990 - DNA, 25 bp, Homo sapien
agaatgaggtgtccggcccggtaca

SEQ ID NO: 928991 - DNA, 25 bp, Homo sapien
tgggtgttcatgcagatctgtctgg

SEQ ID NO: 928992 - DNA, 25 bp, Homo sapien
tgtctgggcgggaaacaccagcagc

SEQ ID NO: 928993 - DNA, 25 bp, Homo sapien
aatcaactacatcatcggagcaggt

SEQ ID NO: 928994 - DNA, 25 bp, Homo sapien
taatcaactacatcatcggagcagg

SEQ ID NO: 928995 - DNA, 25 bp, Homo sapien
atcaactacatcatcggagcaggtc

SEQ ID NO: 928996 - DNA, 25 bp, Homo sapien
aataatcaactacatcatcggagca

SEQ ID NO: 928997 - DNA, 25 bp, Homo sapien
ctcattccggctcacaccccgatga

SEQ ID NO: 928998 - DNA, 25 bp, Homo sapien
cctcattccggctcacaccccgatg

SEQ ID NO: 928999 - DNA, 25 bp, Homo sapien
cattccggctcacaccccgatgaac

SEQ ID NO: 929000 - DNA, 25 bp, Homo sapien
tcattccggctcacaccccgatgaa

SEQ ID NO: 929001 - DNA, 25 bp, Homo sapien
agccttgagcctcgcctggtgccgg

SEQ ID NO: 929002 - DNA, 25 bp, Homo sapien
ccttgagcctcgcctggtgccggcc

SEQ ID NO: 929003 - DNA, 25 bp, Homo sapien
tcagccttgagcctcgcctggtgcc

SEQ ID NO: 929004 - DNA, 25 bp, Homo sapien
agccgagccaactcagccttgagcc

SEQ ID NO: 929005 - DNA, 25 bp, Homo sapien
taactctaatggagccccggcaatg

SEQ ID NO: 929006 - DNA, 25 bp, Homo sapien
cccggcaatggaatggctaaacaga

SEQ ID NO: 929007 - DNA, 25 bp, Homo sapien
aaaatgccctaagcatgaagcatga

SEQ ID NO: 929008 - DNA, 25 bp, Homo sapien
tgacaagatacaggtgggatacctt

SEQ ID NO: 929009 - DNA, 25 bp, Homo sapien
ttcttctccgcacggaggaggccgg

SEQ ID NO: 929010 - DNA, 25 bp, Homo sapien
cttcttctccgcacggaggaggccg

SEQ ID NO: 929011 - DNA, 25 bp, Homo sapien
tcttctccgcacggaggaggccggc

SEQ ID NO: 929012 - DNA, 25 bp, Homo sapien
gttgctggagtacaccaaccccttg

SEQ ID NO: 929013 - DNA, 25 bp, Homo sapien
ggaagttgctggagtacaccaaccc

SEQ ID NO: 929014 - DNA, 25 bp, Homo sapien
ctggaagttgctggagtacaccaac

SEQ ID NO: 929015 - DNA, 25 bp, Homo sapien
caaccccttgatagagccctggcgg

SEQ ID NO: 929016 - DNA, 25 bp, Homo sapien
cgccggccaacacgcctgcagctgc

SEQ ID NO: 929017 - DNA, 25 bp, Homo sapien
cacgccggccaacacgcctgcagct

SEQ ID NO: 929018 - DNA, 25 bp, Homo sapien
ctccacgccggccaacacgcctgca

SEQ ID NO: 929019 - DNA, 25 bp, Homo sapien
ctgcagctgcagcatacagccccat

SEQ ID NO: 929020 - DNA, 25 bp, Homo sapien
ctttacggctctgtggcaaaacgca

SEQ ID NO: 929021 - DNA, 25 bp, Homo sapien
tttacggctctgtggcaaaacgcac

SEQ ID NO: 929022 - DNA, 25 bp, Homo sapien
aagtgccggtcgaagtcgccctgca

SEQ ID NO: 929023 - DNA, 25 bp, Homo sapien
tgccggtcgaagtcgccctgcaagg

SEQ ID NO: 929024 - DNA, 25 bp, Homo sapien
gccctgcaaggcgtgtgtgtgatcg

SEQ ID NO: 929025 - DNA, 25 bp, Homo sapien
cggaagtgccggtcgaagtcgccct

SEQ ID NO: 929026 - DNA, 25 bp, Homo sapien
tgaagaccttcctaaacagtgacga

SEQ ID NO: 929027 - DNA, 25 bp, Homo sapien
gggactatttctgccctcggaagcg

SEQ ID NO: 929028 - DNA, 25 bp, Homo sapien
tgacgatatcacctcaggcgggacc

SEQ ID NO: 929029 - DNA, 25 bp, Homo sapien
tatcattacatgttccagggacaca

SEQ ID NO: 929030 - DNA, 25 bp, Homo sapien
tgctcggggctgagggggccaggcc

SEQ ID NO: 929031 - DNA, 25 bp, Homo sapien
ctacagcttggtgggctgctcgggg

SEQ ID NO: 929032 - DNA, 25 bp, Homo sapien
ggccaggcccgctgggcgggggcag

SEQ ID NO: 929033 - DNA, 25 bp, Homo sapien
gctgagggggccaggcccgctgggc

SEQ ID NO: 929034 - DNA, 25 bp, Homo sapien
gcatcgaagaaggtgagttcgccct

SEQ ID NO: 929035 - DNA, 25 bp, Homo sapien
tcatagtgcaggtagagcccgatgc

SEQ ID NO: 929036 - DNA, 25 bp, Homo sapien
tagagcttgccctggaagtcggcct

SEQ ID NO: 929037 - DNA, 25 bp, Homo sapien
caggtgctgtagtcgaagcgctcag

SEQ ID NO: 929038 - DNA, 25 bp, Homo sapien
tctctagccccagggtctagaaggg

SEQ ID NO: 929039 - DNA, 25 bp, Homo sapien
tagaaggggccagtacagggctgct

SEQ ID NO: 929040 - DNA, 25 bp, Homo sapien
tcatctctctagccccagggtctag

SEQ ID NO: 929041 - DNA, 25 bp, Homo sapien
ttcctcatctctctagccccagggt

SEQ ID NO: 929042 - DNA, 25 bp, Homo sapien
tgaatgaatgaagttttacataagg

SEQ ID NO: 929043 - DNA, 25 bp, Homo sapien
gaatgaatgaatgaagttttacata

SEQ ID NO: 929044 - DNA, 25 bp, Homo sapien
atgaatgaatgaagttttacataag

SEQ ID NO: 929045 - DNA, 25 bp, Homo sapien
aatgaatgaatgaagttttacataa

SEQ ID NO: 929046 - DNA, 25 bp, Homo sapien
aatggtcctgctcggtcagggtgca

SEQ ID NO: 929047 - DNA, 25 bp, Homo sapien
tcagggtgcagtggcggacagccat

SEQ ID NO: 929048 - DNA, 25 bp, Homo sapien
tttgtgcaatggtcctgctcggtca

SEQ ID NO: 929049 - DNA, 25 bp, Homo sapien
tgcaatggtcctgctcggtcagggt

SEQ ID NO: 929050 - DNA, 25 bp, Homo sapien
agactgttggccctgactgagaaga

SEQ ID NO: 929051 - DNA, 25 bp, Homo sapien
tggcccagaagtacagaccaggggc

SEQ ID NO: 929052 - DNA, 25 bp, Homo sapien
cactaagaggccacctgtccttgga

SEQ ID NO: 929053 - DNA, 25 bp, Homo sapien
cagaagtacagaccaggggcaaagc

SEQ ID NO: 929054 - DNA, 25 bp, Homo sapien
aacaaatgtgatgagatccgccatc

SEQ ID NO: 929055 - DNA, 25 bp, Homo sapien
atgtgatgagatccgccatcactgg

SEQ ID NO: 929056 - DNA, 25 bp, Homo sapien
acaacaaatgtgatgagatccgcca

SEQ ID NO: 929057 - DNA, 25 bp, Homo sapien
caaatgtgatgagatccgccatcac

SEQ ID NO: 929058 - DNA, 25 bp, Homo sapien
gccttttccacacggtcagcttgat

SEQ ID NO: 929059 - DNA, 25 bp, Homo sapien
tgaatgcgccttctaagggccgggc

SEQ ID NO: 929060 - DNA, 25 bp, Homo sapien
gagatggggctgaatgcgccttcta

SEQ ID NO: 929061 - DNA, 25 bp, Homo sapien
ctggcaaaactttccggaagagcct

SEQ ID NO: 929062 - DNA, 25 bp, Homo sapien
tctatgtttgcccagccagatccac

SEQ ID NO: 929063 - DNA, 25 bp, Homo sapien
gccagatccacagtgcaggactgca

SEQ ID NO: 929064 - DNA, 25 bp, Homo sapien
gagagtgaggtatcacgtggcccac

SEQ ID NO: 929065 - DNA, 25 bp, Homo sapien
tatagtggtgcttctagagtgcagg

SEQ ID NO: 929066 - DNA, 25 bp, Homo sapien
gcatgagctaccctcctctagtatt

SEQ ID NO: 929067 - DNA, 25 bp, Homo sapien
taggtacccacagttcaccatctgc

SEQ ID NO: 929068 - DNA, 25 bp, Homo sapien
gagctaccctcctctagtatttctg

SEQ ID NO: 929069 - DNA, 25 bp, Homo sapien
ttctgctgttctaggtacccacagt

SEQ ID NO: 929070 - DNA, 25 bp, Homo sapien
cttgtggtggtcctcattgccgaac

SEQ ID NO: 929071 - DNA, 25 bp, Homo sapien
aacttgtggtggtcctcattgccga

SEQ ID NO: 929072 - DNA, 25 bp, Homo sapien
tgaacttgtggtggtcctcattgcc

SEQ ID NO: 929073 - DNA, 25 bp, Homo sapien
ccggatgaacttgtggtggtcctca

SEQ ID NO: 929074 - DNA, 25 bp, Homo sapien
ctcctggaactcgcggcggatcacc

SEQ ID NO: 929075 - DNA, 25 bp, Homo sapien
agcacacactcggcttgggccagcc

SEQ ID NO: 929076 - DNA, 25 bp, Homo sapien
ctggaactcgcggcggatcacccag

SEQ ID NO: 929077 - DNA, 25 bp, Homo sapien
gtgtgaccccctatcccctccaggc

SEQ ID NO: 929078 - DNA, 25 bp, Homo sapien
caccagtttggcgatgagctcatcc

SEQ ID NO: 929079 - DNA, 25 bp, Homo sapien
tcaccagtttggcgatgagctcatc

SEQ ID NO: 929080 - DNA, 25 bp, Homo sapien
ttcaccagtttggcgatgagctcat

SEQ ID NO: 929081 - DNA, 25 bp, Homo sapien
ctcacacgggcctgggttaaacctg

SEQ ID NO: 929082 - DNA, 25 bp, Homo sapien
gagagagtcactaaacgttacagct

SEQ ID NO: 929083 - DNA, 25 bp, Homo sapien
cgttacagctaccagaagtcaccat

SEQ ID NO: 929084 - DNA, 25 bp, Homo sapien
acttcccaggcataagagggtctca

SEQ ID NO: 929085 - DNA, 25 bp, Homo sapien
agctggagtcaaccttcccgtccct

SEQ ID NO: 929086 - DNA, 25 bp, Homo sapien
atctctcactgtccttttgcctcac

SEQ ID NO: 929087 - DNA, 25 bp, Homo sapien
ccaggcctttgtcccagttcccatc

SEQ ID NO: 929088 - DNA, 25 bp, Homo sapien
tcatcactggcttaaaaccctccag

SEQ ID NO: 929089 - DNA, 25 bp, Homo sapien
agctgcagggaaatcgaggatagct

SEQ ID NO: 929090 - DNA, 25 bp, Homo sapien
caggtgatggcaccagagagcacag

SEQ ID NO: 929091 - DNA, 25 bp, Homo sapien
ggaaatcgaggatagctggatcctt

SEQ ID NO: 929092 - DNA, 25 bp, Homo sapien
gatagctggatccttttggtgccag

SEQ ID NO: 929093 - DNA, 25 bp, Homo sapien
ggtggtgcacgcagaccttgggctc

SEQ ID NO: 929094 - DNA, 25 bp, Homo sapien
agacggtggagacgggcgtgaccgg

SEQ ID NO: 929095 - DNA, 25 bp, Homo sapien
ggtccttctcgcagaaaaggctgag

SEQ ID NO: 929096 - DNA, 25 bp, Homo sapien
gctgagcgggttccggtggtgcacg

SEQ ID NO: 929097 - DNA, 25 bp, Homo sapien
gccagcatcactggctttccttctt

SEQ ID NO: 929098 - DNA, 25 bp, Homo sapien
ctggcttctcacaatccgctgggcc

SEQ ID NO: 929099 - DNA, 25 bp, Homo sapien
aatccgctgggcctcccactacagc

SEQ ID NO: 929100 - DNA, 25 bp, Homo sapien
ccactacagcctcaagccagcatca

SEQ ID NO: 929101 - DNA, 25 bp, Homo sapien
gtgtctcatcatgccccacgcgctc

SEQ ID NO: 929102 - DNA, 25 bp, Homo sapien
acgcgctcccactgtgcgccccacc

SEQ ID NO: 929103 - DNA, 25 bp, Homo sapien
tcgccatgtgtctcatcatgcccca

SEQ ID NO: 929104 - DNA, 25 bp, Homo sapien
ccatgtgtctcatcatgccccacgc

SEQ ID NO: 929105 - DNA, 25 bp, Homo sapien
tgccccgcgagctccaattacgtgc

SEQ ID NO: 929106 - DNA, 25 bp, Homo sapien
ctgtcgctccagttagatgccccat

SEQ ID NO: 929107 - DNA, 25 bp, Homo sapien
catcgtgctctctgtcgctccagtt

SEQ ID NO: 929108 - DNA, 25 bp, Homo sapien
tgtaagtgccccatcgtgctctctg

SEQ ID NO: 929109 - DNA, 25 bp, Homo sapien
aggggccatgcgatcttctccctgt

SEQ ID NO: 929110 - DNA, 25 bp, Homo sapien
gccatgcgatcttctccctgtcttt

SEQ ID NO: 929111 - DNA, 25 bp, Homo sapien
gggccatgcgatcttctccctgtct

SEQ ID NO: 929112 - DNA, 25 bp, Homo sapien
aaaatatatgaaatgctttatgaat

SEQ ID NO: 929113 - DNA, 25 bp, Homo sapien
ctgtattcaggtggtgcgtgacccc

SEQ ID NO: 929114 - DNA, 25 bp, Homo sapien
gggaaagaggatcttaacagactaa

SEQ ID NO: 929115 - DNA, 25 bp, Homo sapien
cgaagcggccatgcacttttatcct

SEQ ID NO: 929116 - DNA, 25 bp, Homo sapien
gagtattgagccctgctacttggcc

SEQ ID NO: 929117 - DNA, 25 bp, Homo sapien
ggacttatttctccttgagccacgg

SEQ ID NO: 929118 - DNA, 25 bp, Homo sapien
gccattgtctttgtcgatctccgga

SEQ ID NO: 929119 - DNA, 25 bp, Homo sapien
tggagtcggctgtggacctttgtct

SEQ ID NO: 929120 - DNA, 25 bp, Homo sapien
cctggttcgtaggaatggattcagc

SEQ ID NO: 929121 - DNA, 25 bp, Homo sapien
aacaggctcgccaaacttgggttgg

SEQ ID NO: 929122 - DNA, 25 bp, Homo sapien
catgtgggctctcacattgaggtgg

SEQ ID NO: 929123 - DNA, 25 bp, Homo sapien
cttcatgtgggctctcacattgagg

SEQ ID NO: 929124 - DNA, 25 bp, Homo sapien
gctgcagtcgcggtctgttcctgaa

SEQ ID NO: 929125 - DNA, 25 bp, Homo sapien
gggcacatggagtgaacaaagtcat

SEQ ID NO: 929126 - DNA, 25 bp, Homo sapien
caccatccaggttggtggtggcccc

SEQ ID NO: 929127 - DNA, 25 bp, Homo sapien
caggctgccgttctgaagacagtca

SEQ ID NO: 929128 - DNA, 25 bp, Homo sapien
tttgtggccctcagatccgatgaca

SEQ ID NO: 929129 - DNA, 25 bp, Homo sapien
gagcccctgggcacccgtgatccgc

SEQ ID NO: 929130 - DNA, 25 bp, Homo sapien
gcctccgagcccctgggcacccgtg

SEQ ID NO: 929131 - DNA, 25 bp, Homo sapien
ctgggcgggcttcccggaggcggcg

SEQ ID NO: 929132 - DNA, 25 bp, Homo sapien
ctgggcacccgtgatccgccagggc

SEQ ID NO: 929133 - DNA, 25 bp, Homo sapien
ggtagatagcatgcaaaattggcca

SEQ ID NO: 929134 - DNA, 25 bp, Homo sapien
aacaccacattgaccatagctgaag

SEQ ID NO: 929135 - DNA, 25 bp, Homo sapien
gagatttagtatactagaagacaga

SEQ ID NO: 929136 - DNA, 25 bp, Homo sapien
catttgagtgcatggttaaacacca

SEQ ID NO: 929137 - DNA, 25 bp, Homo sapien
ccaggtgagtttaagcagatcctcc

SEQ ID NO: 929138 - DNA, 25 bp, Homo sapien
ctggtctggatggattattttagca

SEQ ID NO: 929139 - DNA, 25 bp, Homo sapien
ttggatatgccccagtcgccctgag

SEQ ID NO: 929140 - DNA, 25 bp, Homo sapien
tagcatagtctattccaccctcttc

SEQ ID NO: 929141 - DNA, 25 bp, Homo sapien
aggaacacactcagcacaagaagac

SEQ ID NO: 929142 - DNA, 25 bp, Homo sapien
cctctaccctcagcgcccagggcat

SEQ ID NO: 929143 - DNA, 25 bp, Homo sapien
aggacgagagcctctaccctcagcg

SEQ ID NO: 929144 - DNA, 25 bp, Homo sapien
ctgccaggacgagagcctctaccct

SEQ ID NO: 929145 - DNA, 25 bp, Homo sapien
ctgcagcctctgccaggacgagagc

SEQ ID NO: 929146 - DNA, 25 bp, Homo sapien
tgatcaattaactgtaaccaccgct

SEQ ID NO: 929147 - DNA, 25 bp, Homo sapien
tgtgatcaattaactgtaaccaccg

SEQ ID NO: 929148 - DNA, 25 bp, Homo sapien
atcaattaactgtaaccaccgctgc

SEQ ID NO: 929149 - DNA, 25 bp, Homo sapien
gtaaccaccgctgcattcgggccag

SEQ ID NO: 929150 - DNA, 25 bp, Homo sapien
catcaaagactgatgtcacctggca

SEQ ID NO: 929151 - DNA, 25 bp, Homo sapien
tcatcaaagactgatgtcacctggc

SEQ ID NO: 929152 - DNA, 25 bp, Homo sapien
tcaaagactgatgtcacctggcatg

SEQ ID NO: 929153 - DNA, 25 bp, Homo sapien
atcaaagactgatgtcacctggcat

SEQ ID NO: 929154 - DNA, 25 bp, Homo sapien
cctgacaattatgatggtcatgtct

SEQ ID NO: 929155 - DNA, 25 bp, Homo sapien
aataaacaccgatgcaaccctcact

SEQ ID NO: 929156 - DNA, 25 bp, Homo sapien
tggacctggcttcttccactcaaca

SEQ ID NO: 929157 - DNA, 25 bp, Homo sapien
ttgcccagcccctagaacgtgttat

SEQ ID NO: 929158 - DNA, 25 bp, Homo sapien
ggcagaggtttccatgagctgagaa

SEQ ID NO: 929159 - DNA, 25 bp, Homo sapien
tttcccaatgtaaccataaatatca

SEQ ID NO: 929160 - DNA, 25 bp, Homo sapien
catgtatattaatagattcatcttt

SEQ ID NO: 929161 - DNA, 25 bp, Homo sapien
ttcatcttttcccaatgtaaccata

SEQ ID NO: 929162 - DNA, 25 bp, Homo sapien
aaatgtcttcatgtatattaataga

SEQ ID NO: 929163 - DNA, 25 bp, Homo sapien
cactataaggctcccaccgtggtct

SEQ ID NO: 929164 - DNA, 25 bp, Homo sapien
ttgcacatgactaagacggacccct

SEQ ID NO: 929165 - DNA, 25 bp, Homo sapien
accgtggcggtcttcatgctcaaaa

SEQ ID NO: 929166 - DNA, 25 bp, Homo sapien
tcaaggtcaggcaagtgagcaccgg

SEQ ID NO: 929167 - DNA, 25 bp, Homo sapien
aggtgtcactgaagtgggaacacag

SEQ ID NO: 929168 - DNA, 25 bp, Homo sapien
ctgaagtgggaacacaggattctca

SEQ ID NO: 929169 - DNA, 25 bp, Homo sapien
acacaggattctcactatgaacaag

SEQ ID NO: 929170 - DNA, 25 bp, Homo sapien
caggattctcactatgaacaagaac

SEQ ID NO: 929171 - DNA, 25 bp, Homo sapien
ctggagcaatcctcgtcgtccttgg

SEQ ID NO: 929172 - DNA, 25 bp, Homo sapien
ggactttaaataggtacagaagagc

SEQ ID NO: 929173 - DNA, 25 bp, Homo sapien
gagcttgggtgctcaaaatttccaa

SEQ ID NO: 929174 - DNA, 25 bp, Homo sapien
caactccatgcctatagaagggacg

SEQ ID NO: 929175 - DNA, 25 bp, Homo sapien
accccccaccgacactgaccactgg

SEQ ID NO: 929176 - DNA, 25 bp, Homo sapien
tcccaccccccaccgacactgacca

SEQ ID NO: 929177 - DNA, 25 bp, Homo sapien
caccccccaccgacactgaccactg

SEQ ID NO: 929178 - DNA, 25 bp, Homo sapien
ccaccccccaccgacactgaccact

SEQ ID NO: 929179 - DNA, 25 bp, Homo sapien
ggccagatccatcaaagtaaaggtt

SEQ ID NO: 929180 - DNA, 25 bp, Homo sapien
gactccagtctctaagtgaagtgcc

SEQ ID NO: 929181 - DNA, 25 bp, Homo sapien
tccaacccaactgctctagaggaga

SEQ ID NO: 929182 - DNA, 25 bp, Homo sapien
cctaagagcttgactggtatgtggg

SEQ ID NO: 929183 - DNA, 25 bp, Homo sapien
tggctccaggacacgtccctttact

SEQ ID NO: 929184 - DNA, 25 bp, Homo sapien
gctccaggacacgtccctttactct

SEQ ID NO: 929185 - DNA, 25 bp, Homo sapien
aatggctccaggacacgtcccttta

SEQ ID NO: 929186 - DNA, 25 bp, Homo sapien
tccaggacacgtccctttactctgc

SEQ ID NO: 929187 - DNA, 25 bp, Homo sapien
agaaaagctagaccctcggactcct

SEQ ID NO: 929188 - DNA, 25 bp, Homo sapien
tgttggcctgattaccccgatcctg

SEQ ID NO: 929189 - DNA, 25 bp, Homo sapien
acagcataagcttgggatgacaggc

SEQ ID NO: 929190 - DNA, 25 bp, Homo sapien
ctctcagaagggagggttatggccc

SEQ ID NO: 929191 - DNA, 25 bp, Homo sapien
tcttctgtcttcgtcccctggactg

SEQ ID NO: 929192 - DNA, 25 bp, Homo sapien
ctggactgtccaacggcctctggct

SEQ ID NO: 929193 - DNA, 25 bp, Homo sapien
tacttcttctgtcttcgtcccctgg

SEQ ID NO: 929194 - DNA, 25 bp, Homo sapien
tgtcttcgtcccctggactgtccaa

SEQ ID NO: 929195 - DNA, 25 bp, Homo sapien
cagagccactagacactgttctgtc

SEQ ID NO: 929196 - DNA, 25 bp, Homo sapien
tcatcttcagcaagcctatcaggaa

SEQ ID NO: 929197 - DNA, 25 bp, Homo sapien
gcttcctgcggacatatgggtggcc

SEQ ID NO: 929198 - DNA, 25 bp, Homo sapien
caggaaggtgtttatgcaacagagc

SEQ ID NO: 929199 - DNA, 25 bp, Homo sapien
ctcagcattggtaaacacttgcttc

SEQ ID NO: 929200 - DNA, 25 bp, Homo sapien
agagcggtagctcccacaggaacat

SEQ ID NO: 929201 - DNA, 25 bp, Homo sapien
gccacggcagttgtaaacctcagca

SEQ ID NO: 929202 - DNA, 25 bp, Homo sapien
cacatcatagtagtcctcggcctca

SEQ ID NO: 929203 - DNA, 25 bp, Homo sapien
agtgcccctgccactgagacacgtc

SEQ ID NO: 929204 - DNA, 25 bp, Homo sapien
gaaccaaatggagaatctgcacagc

SEQ ID NO: 929205 - DNA, 25 bp, Homo sapien
gcagtgcccctgccactgagacacg

SEQ ID NO: 929206 - DNA, 25 bp, Homo sapien
accaaatggagaatctgcacagcct

SEQ ID NO: 929207 - DNA, 25 bp, Homo sapien
ggtacttcacgatcttgtggaggat

SEQ ID NO: 929208 - DNA, 25 bp, Homo sapien
agggccagctgaagcggtacttcac

SEQ ID NO: 929209 - DNA, 25 bp, Homo sapien
gggagctccgcttggtctgaagcac

SEQ ID NO: 929210 - DNA, 25 bp, Homo sapien
tgtggaggatctcttcacacttctg

SEQ ID NO: 929211 - DNA, 25 bp, Homo sapien
gactcaacagtaagtgaggctccag

SEQ ID NO: 929212 - DNA, 25 bp, Homo sapien
ggtaatgtccctcccataacaactg

SEQ ID NO: 929213 - DNA, 25 bp, Homo sapien
tccttaataagttgcaggctgcccg

SEQ ID NO: 929214 - DNA, 25 bp, Homo sapien
taactagtttgcaggctacagcagg

SEQ ID NO: 929215 - DNA, 25 bp, Homo sapien
ggatgacgctgtgcttgccccggat

SEQ ID NO: 929216 - DNA, 25 bp, Homo sapien
agtgtggcttcttacccgggcgccg

SEQ ID NO: 929217 - DNA, 25 bp, Homo sapien
ctgagacctcctggtagagtgtggc

SEQ ID NO: 929218 - DNA, 25 bp, Homo sapien
ccccggatggtctttcgaggtctca

SEQ ID NO: 929219 - DNA, 25 bp, Homo sapien
aacaatgccatgaggatttagctcc

SEQ ID NO: 929220 - DNA, 25 bp, Homo sapien
acaatgccatgaggatttagctcca

SEQ ID NO: 929221 - DNA, 25 bp, Homo sapien
gaaacaatgccatgaggatttagct

SEQ ID NO: 929222 - DNA, 25 bp, Homo sapien
aaacaatgccatgaggatttagctc

SEQ ID NO: 929223 - DNA, 25 bp, Homo sapien
gggagatgacactggacacagaggt

SEQ ID NO: 929224 - DNA, 25 bp, Homo sapien
ggagtggggagatgacactggacac

SEQ ID NO: 929225 - DNA, 25 bp, Homo sapien
ggggagtggggagatgacactggac

SEQ ID NO: 929226 - DNA, 25 bp, Homo sapien
agtggggagatgacactggacacag

SEQ ID NO: 929227 - DNA, 25 bp, Homo sapien
atcgcaaaccagccacctcataatc

SEQ ID NO: 929228 - DNA, 25 bp, Homo sapien
tcgcaaaccagccacctcataatct

SEQ ID NO: 929229 - DNA, 25 bp, Homo sapien
gcaaaccagccacctcataatcttc

SEQ ID NO: 929230 - DNA, 25 bp, Homo sapien
aaaccagccacctcataatcttctt

SEQ ID NO: 929231 - DNA, 25 bp, Homo sapien
cctcagaagcagactcttcagtata

SEQ ID NO: 929232 - DNA, 25 bp, Homo sapien
agaagcagactcttcagtatagttc

SEQ ID NO: 929233 - DNA, 25 bp, Homo sapien
ctgtcctcagaagcagactcttcag

SEQ ID NO: 929234 - DNA, 25 bp, Homo sapien
tgtcctcagaagcagactcttcagt

SEQ ID NO: 929235 - DNA, 25 bp, Homo sapien
ctgccacgggagttgcgcctggcag

SEQ ID NO: 929236 - DNA, 25 bp, Homo sapien
gcgcctggcagtagcgggctggcaa

SEQ ID NO: 929237 - DNA, 25 bp, Homo sapien
gccacgggagttgcgcctggcagta

SEQ ID NO: 929238 - DNA, 25 bp, Homo sapien
ggagttgcgcctggcagtagcgggc

SEQ ID NO: 929239 - DNA, 25 bp, Homo sapien
agagggccggcctcagacaaaacag

SEQ ID NO: 929240 - DNA, 25 bp, Homo sapien
catctggtacttcatagagggccgg

SEQ ID NO: 929241 - DNA, 25 bp, Homo sapien
cacaagatcaatttgtcatcctcac

SEQ ID NO: 929242 - DNA, 25 bp, Homo sapien
tggaaggctttattacactcatcac

SEQ ID NO: 929243 - DNA, 25 bp, Homo sapien
agcagcacgtgcatcctggagaaag

SEQ ID NO: 929244 - DNA, 25 bp, Homo sapien
gagcttcccggattgctgtcttcca

SEQ ID NO: 929245 - DNA, 25 bp, Homo sapien
ggacatatcccacttgatacaggca

SEQ ID NO: 929246 - DNA, 25 bp, Homo sapien
gatacaggcatcaagcatcccaagc

SEQ ID NO: 929247 - DNA, 25 bp, Homo sapien
aacaccaccaatccaataccacagc

SEQ ID NO: 929248 - DNA, 25 bp, Homo sapien
caccaccaatccaataccacagctg

SEQ ID NO: 929249 - DNA, 25 bp, Homo sapien
ccaccaatccaataccacagctgga

SEQ ID NO: 929250 - DNA, 25 bp, Homo sapien
accaatccaataccacagctggatt

SEQ ID NO: 929251 - DNA, 25 bp, Homo sapien
caaagaagtccttgtgaagtaatga

SEQ ID NO: 929252 - DNA, 25 bp, Homo sapien
tctcctaaaggaaaacagccagtta

SEQ ID NO: 929253 - DNA, 25 bp, Homo sapien
gcccgaagcaaagaagtccttgtga

SEQ ID NO: 929254 - DNA, 25 bp, Homo sapien
tgaagtaatgaatctcctaaaggaa

SEQ ID NO: 929255 - DNA, 25 bp, Homo sapien
gtgtgcgccaccacgcctggctaat

SEQ ID NO: 929256 - DNA, 25 bp, Homo sapien
tctctgctcactgtagcatcagcct

SEQ ID NO: 929257 - DNA, 25 bp, Homo sapien
ctagtagctgagaatacaggtgtgc

SEQ ID NO: 929258 - DNA, 25 bp, Homo sapien
cctgagttcaagcaattctcctgcc

SEQ ID NO: 929259 - DNA, 25 bp, Homo sapien
tatcagcagagaactagagagttgc

SEQ ID NO: 929260 - DNA, 25 bp, Homo sapien
gagagttgcttagtgtggtaaaaac

SEQ ID NO: 929261 - DNA, 25 bp, Homo sapien
aaacccatgtatttggtgtcagaag

SEQ ID NO: 929262 - DNA, 25 bp, Homo sapien
caatgtatagatggtacaggtggca

SEQ ID NO: 929263 - DNA, 25 bp, Homo sapien
tctcttttgcttgggagccatgaag

SEQ ID NO: 929264 - DNA, 25 bp, Homo sapien
tgcttgggagccatgaagccttgga

SEQ ID NO: 929265 - DNA, 25 bp, Homo sapien
atttctttatgacactggcctgaag

SEQ ID NO: 929266 - DNA, 25 bp, Homo sapien
tgaagggcaatcacacactcaccaa

SEQ ID NO: 929267 - DNA, 25 bp, Homo sapien
tgatctctttttaagcttcacatct

SEQ ID NO: 929268 - DNA, 25 bp, Homo sapien
aaaatgacaacctaacgtcagcaag

SEQ ID NO: 929269 - DNA, 25 bp, Homo sapien
caagatataggcctgaatttggcac

SEQ ID NO: 929270 - DNA, 25 bp, Homo sapien
ccccaggaaatgtaccaagaattca

SEQ ID NO: 929271 - DNA, 25 bp, Homo sapien
tttggcacaaagtaggcaattaatg

SEQ ID NO: 929272 - DNA, 25 bp, Homo sapien
tatgtctagaattatgtggacttat

SEQ ID NO: 929273 - DNA, 25 bp, Homo sapien
tattaatatgtctagaattatgtgg

SEQ ID NO: 929274 - DNA, 25 bp, Homo sapien
tgaggaatttgaaaagacccacaaa

SEQ ID NO: 929275 - DNA, 25 bp, Homo sapien
caaaacatcatagtgcatgaggaat

SEQ ID NO: 929276 - DNA, 25 bp, Homo sapien
gcttccgtgctagatgaatagagtg

SEQ ID NO: 929277 - DNA, 25 bp, Homo sapien
gcaacttcaatgagatcactacgaa

SEQ ID NO: 929278 - DNA, 25 bp, Homo sapien
ttagacccaaatttggcttccgtgc

SEQ ID NO: 929279 - DNA, 25 bp, Homo sapien
gaagtttaaaagctcctggttgcca

SEQ ID NO: 929280 - DNA, 25 bp, Homo sapien
tccatcagttgatagtcattgccgt

SEQ ID NO: 929281 - DNA, 25 bp, Homo sapien
cgcacaaggcctggatatatactaa

SEQ ID NO: 929282 - DNA, 25 bp, Homo sapien
gatagaatacttctggacacccacc

SEQ ID NO: 929283 - DNA, 25 bp, Homo sapien
gaaaataccaggcaatatgaacaca

SEQ ID NO: 929284 - DNA, 25 bp, Homo sapien
catccagctccttttgactatcaca

SEQ ID NO: 929285 - DNA, 25 bp, Homo sapien
ctctagtctctctttaagttgactt

SEQ ID NO: 929286 - DNA, 25 bp, Homo sapien
tagcaactcatccagctccttttga

SEQ ID NO: 929287 - DNA, 25 bp, Homo sapien
caactcatccagctccttttgacta

SEQ ID NO: 929288 - DNA, 25 bp, Homo sapien
ctgtaggggcaaaagagacctgata

SEQ ID NO: 929289 - DNA, 25 bp, Homo sapien
tgtaggggcaaaagagacctgataa

SEQ ID NO: 929290 - DNA, 25 bp, Homo sapien
gtaggggcaaaagagacctgataac

SEQ ID NO: 929291 - DNA, 25 bp, Homo sapien
taggggcaaaagagacctgataact

SEQ ID NO: 929292 - DNA, 25 bp, Homo sapien
ggttgtctctacagcaacttctgtt

SEQ ID NO: 929293 - DNA, 25 bp, Homo sapien
gttgtctctacagcaacttctgttg

SEQ ID NO: 929294 - DNA, 25 bp, Homo sapien
atgcttgcatttttacctaagtttg

SEQ ID NO: 929295 - DNA, 25 bp, Homo sapien
tgcatttttacctaagtttgctttc

SEQ ID NO: 929296 - DNA, 25 bp, Homo sapien
tctggcaggatttagagacatactt

SEQ ID NO: 929297 - DNA, 25 bp, Homo sapien
gggagctcccgaataacctataatg

SEQ ID NO: 929298 - DNA, 25 bp, Homo sapien
cctagtggttctcgaaagggagcac

SEQ ID NO: 929299 - DNA, 25 bp, Homo sapien
tgctgcctgccacatgtatctggca

SEQ ID NO: 929300 - DNA, 25 bp, Homo sapien
gtcaatgctgtcatgtacccagcct

SEQ ID NO: 929301 - DNA, 25 bp, Homo sapien
aggacagtaatcctcatcaccagag

SEQ ID NO: 929302 - DNA, 25 bp, Homo sapien
tgcgaggacagtaatcctcatcacc

SEQ ID NO: 929303 - DNA, 25 bp, Homo sapien
tgcagtgatggttgaatcggtagtc

SEQ ID NO: 929304 - DNA, 25 bp, Homo sapien
tcatgtaagcttcctacttgtggta

SEQ ID NO: 929305 - DNA, 25 bp, Homo sapien
gattacatttcacctatcaccatca

SEQ ID NO: 929306 - DNA, 25 bp, Homo sapien
tatatgcaagggcaggaatatgtct

SEQ ID NO: 929307 - DNA, 25 bp, Homo sapien
ccagccctaatttgtgtaactacta

SEQ ID NO: 929308 - DNA, 25 bp, Homo sapien
gtgcttccgtattcgttcttcttca

SEQ ID NO: 929309 - DNA, 25 bp, Homo sapien
ctgctttgtgcttccgtattcgttc

SEQ ID NO: 929310 - DNA, 25 bp, Homo sapien
aggagtcctgcgcatgactagtttg

SEQ ID NO: 929311 - DNA, 25 bp, Homo sapien
ctattatggtttcgatctgtgccaa

SEQ ID NO: 929312 - DNA, 25 bp, Homo sapien
cagcactaatcatgtcttcagcttc

SEQ ID NO: 929313 - DNA, 25 bp, Homo sapien
tcccgttccttcttagcttgaatgg

SEQ ID NO: 929314 - DNA, 25 bp, Homo sapien
ttagcttgaatggcaagcaaccttc

SEQ ID NO: 929315 - DNA, 25 bp, Homo sapien
gcttctgtatctacttggggctcaa

SEQ ID NO: 929316 - DNA, 25 bp, Homo sapien
tctttccgtttctgtttctctgctc

SEQ ID NO: 929317 - DNA, 25 bp, Homo sapien
tgtttctctgctctcttcttatcat

SEQ ID NO: 929318 - DNA, 25 bp, Homo sapien
tggcttccatttctttccgtttctg

SEQ ID NO: 929319 - DNA, 25 bp, Homo sapien
atttctttccgtttctgtttctctg

SEQ ID NO: 929320 - DNA, 25 bp, Homo sapien
tctgcagacatctgctgtctggtct

SEQ ID NO: 929321 - DNA, 25 bp, Homo sapien
gcagacatctgctgtctggtctcca

SEQ ID NO: 929322 - DNA, 25 bp, Homo sapien
atctgctgtctggtctccatgtggt

SEQ ID NO: 929323 - DNA, 25 bp, Homo sapien
gacatctgctgtctggtctccatgt

SEQ ID NO: 929324 - DNA, 25 bp, Homo sapien
catgaggatccggtggcacagtgct

SEQ ID NO: 929325 - DNA, 25 bp, Homo sapien
tgagtatgtcatgaggatccggtgg

SEQ ID NO: 929326 - DNA, 25 bp, Homo sapien
tatgtcatgaggatccggtggcaca

SEQ ID NO: 929327 - DNA, 25 bp, Homo sapien
gctgtcaagatctgtagcttctcct

SEQ ID NO: 929328 - DNA, 25 bp, Homo sapien
tcaaaaaattcagaggtctccagct

SEQ ID NO: 929329 - DNA, 25 bp, Homo sapien
gaatctttattgtcatctgtgtctg

SEQ ID NO: 929330 - DNA, 25 bp, Homo sapien
atctgcgcaagcagagccgcaccag

SEQ ID NO: 929331 - DNA, 25 bp, Homo sapien
aacatcagatctgcgcaagcagagc

SEQ ID NO: 929332 - DNA, 25 bp, Homo sapien
agctgaatctttattgtcatctgtg

SEQ ID NO: 929333 - DNA, 25 bp, Homo sapien
gagtcaaggggatttccgacagctt

SEQ ID NO: 929334 - DNA, 25 bp, Homo sapien
gaatgcagagtcaaggggatttccg

SEQ ID NO: 929335 - DNA, 25 bp, Homo sapien
atgcagagtcaaggggatttccgac

SEQ ID NO: 929336 - DNA, 25 bp, Homo sapien
cagagtcaaggggatttccgacagc

SEQ ID NO: 929337 - DNA, 25 bp, Homo sapien
tgtacgtgacaccataacttaggat

SEQ ID NO: 929338 - DNA, 25 bp, Homo sapien
tcttctgggagacgagctctatctt

SEQ ID NO: 929339 - DNA, 25 bp, Homo sapien
tgtaagaggatgaccaacaccctgt

SEQ ID NO: 929340 - DNA, 25 bp, Homo sapien
aaacagcgtgttgggcagcccttca

SEQ ID NO: 929341 - DNA, 25 bp, Homo sapien
taccagctcgtaatgcattatgccg

SEQ ID NO: 929342 - DNA, 25 bp, Homo sapien
tatctccttatttggtgggcgctct

SEQ ID NO: 929343 - DNA, 25 bp, Homo sapien
tctgtacgaatcaagctgtctgctg

SEQ ID NO: 929344 - DNA, 25 bp, Homo sapien
aattcatcttctacgacccaaggtg

SEQ ID NO: 929345 - DNA, 25 bp, Homo sapien
taggaagttttcgtggcgatctacg

SEQ ID NO: 929346 - DNA, 25 bp, Homo sapien
atgaagtaggaagttttcgtggcga

SEQ ID NO: 929347 - DNA, 25 bp, Homo sapien
agttttcgtggcgatctacgtgctc

SEQ ID NO: 929348 - DNA, 25 bp, Homo sapien
tcgtggcgatctacgtgctctgtca

SEQ ID NO: 929349 - DNA, 25 bp, Homo sapien
tcctgagcaatctgactggagttct

SEQ ID NO: 929350 - DNA, 25 bp, Homo sapien
ggtcctgagcaatctgactggagtt

SEQ ID NO: 929351 - DNA, 25 bp, Homo sapien
gatggtcctgagcaatctgactgga

SEQ ID NO: 929352 - DNA, 25 bp, Homo sapien
tggtcctgagcaatctgactggagt

SEQ ID NO: 929353 - DNA, 25 bp, Homo sapien
tccctaggaggatggttacagttac

SEQ ID NO: 929354 - DNA, 25 bp, Homo sapien
cagttcatagggagcatgagcagaa

SEQ ID NO: 929355 - DNA, 25 bp, Homo sapien
ccatgcacggccaatttttattatt

SEQ ID NO: 929356 - DNA, 25 bp, Homo sapien
ggctctatgcttaaataggctgacc

SEQ ID NO: 929357 - DNA, 25 bp, Homo sapien
ctcgaagtcacactcttctcccaca

SEQ ID NO: 929358 - DNA, 25 bp, Homo sapien
cttctcccacagcatatttggtcat

SEQ ID NO: 929359 - DNA, 25 bp, Homo sapien
ctcttctcccacagcatatttggtc

SEQ ID NO: 929360 - DNA, 25 bp, Homo sapien
acactcttctcccacagcatatttg

SEQ ID NO: 929361 - DNA, 25 bp, Homo sapien
ctctaaggaggctgtgttatggtga

SEQ ID NO: 929362 - DNA, 25 bp, Homo sapien
gcagtatctactaacttctctaagg

SEQ ID NO: 929363 - DNA, 25 bp, Homo sapien
taaggaggctgtgttatggtgaacc

SEQ ID NO: 929364 - DNA, 25 bp, Homo sapien
tctactaacttctctaaggaggctg

SEQ ID NO: 929365 - DNA, 25 bp, Homo sapien
cttctcataccaggcaggaaactcc

SEQ ID NO: 929366 - DNA, 25 bp, Homo sapien
ttccagaacaagcttctcataccag

SEQ ID NO: 929367 - DNA, 25 bp, Homo sapien
gaacaagcttctcataccaggcagg

SEQ ID NO: 929368 - DNA, 25 bp, Homo sapien
caagcttctcataccaggcaggaaa

SEQ ID NO: 929369 - DNA, 25 bp, Homo sapien
agctgactgcttccagtactcttgc

SEQ ID NO: 929370 - DNA, 25 bp, Homo sapien
actgtacctttccaagcgggcttca

SEQ ID NO: 929371 - DNA, 25 bp, Homo sapien
tgcacgtccaaatgcgctcactgta

SEQ ID NO: 929372 - DNA, 25 bp, Homo sapien
cccaggcttccttgtgtgttagctg

SEQ ID NO: 929373 - DNA, 25 bp, Homo sapien
tatggccaaaagattggctaccctg

SEQ ID NO: 929374 - DNA, 25 bp, Homo sapien
ggtagtgtaaatatggcaactttcc

SEQ ID NO: 929375 - DNA, 25 bp, Homo sapien
gatcatttactagccgtttagacag

SEQ ID NO: 929376 - DNA, 25 bp, Homo sapien
tagacagtcttcgtgagggagacga

SEQ ID NO: 929377 - DNA, 25 bp, Homo sapien
gggtggtgctaatatctaagtgatt

SEQ ID NO: 929378 - DNA, 25 bp, Homo sapien
caagaacaaacccacaggtaatcca

SEQ ID NO: 929379 - DNA, 25 bp, Homo sapien
tgctcattgtggatctttccccaga

SEQ ID NO: 929380 - DNA, 25 bp, Homo sapien
tatgatcagcaaaaacgcaaacaag

SEQ ID NO: 929381 - DNA, 25 bp, Homo sapien
cacacttgtgtagagccagattaac

SEQ ID NO: 929382 - DNA, 25 bp, Homo sapien
caagatctagtgtcctgcctgtggg

SEQ ID NO: 929383 - DNA, 25 bp, Homo sapien
taccacctcgtctgtgaacagctgc

SEQ ID NO: 929384 - DNA, 25 bp, Homo sapien
taatgatgctacaaaggtcgtgaac

SEQ ID NO: 929385 - DNA, 25 bp, Homo sapien
gggtgcggaaggcctcctgagtgtg

SEQ ID NO: 929386 - DNA, 25 bp, Homo sapien
tcctctccgggcaacggcttcacca

SEQ ID NO: 929387 - DNA, 25 bp, Homo sapien
tcccgggtgcggaaggcctcctgag

SEQ ID NO: 929388 - DNA, 25 bp, Homo sapien
ccgggtgcggaaggcctcctgagtg

SEQ ID NO: 929389 - DNA, 25 bp, Homo sapien
gcggtggggactggcggctgctggg

SEQ ID NO: 929390 - DNA, 25 bp, Homo sapien
ggactggcggctgctggggccggcc

SEQ ID NO: 929391 - DNA, 25 bp, Homo sapien
ggcggcggtggggactggcggctgc

SEQ ID NO: 929392 - DNA, 25 bp, Homo sapien
ggctgctggggccggccccgcggcg

SEQ ID NO: 929393 - DNA, 25 bp, Homo sapien
agcggaacgccacggcgcagagctc

SEQ ID NO: 929394 - DNA, 25 bp, Homo sapien
ccgcgcgacagtcatggagcggaac

SEQ ID NO: 929395 - DNA, 25 bp, Homo sapien
ttattgaaaaatggcgggagattcc

SEQ ID NO: 929396 - DNA, 25 bp, Homo sapien
gcagcaccggaggaaattattgaaa

SEQ ID NO: 929397 - DNA, 25 bp, Homo sapien
aggtcaagccggagaagcccctcgc

SEQ ID NO: 929398 - DNA, 25 bp, Homo sapien
aaaggtcacgttatgtaagcgcccg

SEQ ID NO: 929399 - DNA, 25 bp, Homo sapien
gagaggacgagaactcaaagaggtc

SEQ ID NO: 929400 - DNA, 25 bp, Homo sapien
cctccgacggcagagttaaaagtgg

SEQ ID NO: 929401 - DNA, 25 bp, Homo sapien
gcggccaggggctttgtctttcctc

SEQ ID NO: 929402 - DNA, 25 bp, Homo sapien
cttaaaggcgccgtgctcggccacg

SEQ ID NO: 929403 - DNA, 25 bp, Homo sapien
gacggcgacaccgacatccgggcac

SEQ ID NO: 929404 - DNA, 25 bp, Homo sapien
accactgtccgtgtggtgcgccgga

SEQ ID NO: 929405 - DNA, 25 bp, Homo sapien
gcgcgacctctgctcaccacgacct

SEQ ID NO: 929406 - DNA, 25 bp, Homo sapien
atggcgcgacctctgctcaccacga

SEQ ID NO: 929407 - DNA, 25 bp, Homo sapien
gccatggcgcgacctctgctcacca

SEQ ID NO: 929408 - DNA, 25 bp, Homo sapien
tgccatggcgcgacctctgctcacc

SEQ ID NO: 929409 - DNA, 25 bp, Homo sapien
gaaagtccgggagtctacagtctcc

SEQ ID NO: 929410 - DNA, 25 bp, Homo sapien
caagaaatctagacggactctctgc

SEQ ID NO: 929411 - DNA, 25 bp, Homo sapien
gatgggtactgttgtcagaacctca

SEQ ID NO: 929412 - DNA, 25 bp, Homo sapien
caagttcaagtaacctgaggcacgc

SEQ ID NO: 929413 - DNA, 25 bp, Homo sapien
ggaagatgatgctacagccccaagt

SEQ ID NO: 929414 - DNA, 25 bp, Homo sapien
gacatgagcgctcctcttctcggga

SEQ ID NO: 929415 - DNA, 25 bp, Homo sapien
cgcggccagaaccagaatgcaataa

SEQ ID NO: 929416 - DNA, 25 bp, Homo sapien
tctcgggagcaagtagacacaggtg

SEQ ID NO: 929417 - DNA, 25 bp, Homo sapien
tagctttctgacgccgtctgcggca

SEQ ID NO: 929418 - DNA, 25 bp, Homo sapien
ctagctttctgacgccgtctgcggc

SEQ ID NO: 929419 - DNA, 25 bp, Homo sapien
agctttctgacgccgtctgcggcac

SEQ ID NO: 929420 - DNA, 25 bp, Homo sapien
gggcggggcacctgagtcttcctct

SEQ ID NO: 929421 - DNA, 25 bp, Homo sapien
tggtccacacagaagcgcttcaggg

SEQ ID NO: 929422 - DNA, 25 bp, Homo sapien
aggggcggggcacctgagtcttcct

SEQ ID NO: 929423 - DNA, 25 bp, Homo sapien
tgtgggttggtccacacagaagcgc

SEQ ID NO: 929424 - DNA, 25 bp, Homo sapien
ctctagtggaactggttcttccttg

SEQ ID NO: 929425 - DNA, 25 bp, Homo sapien
ctgtgtctctagtggaactggttct

SEQ ID NO: 929426 - DNA, 25 bp, Homo sapien
tgtctctagtggaactggttcttcc

SEQ ID NO: 929427 - DNA, 25 bp, Homo sapien
gtgtctctagtggaactggttcttc

SEQ ID NO: 929428 - DNA, 25 bp, Homo sapien
ttcatcagcaacttccgaggagggc

SEQ ID NO: 929429 - DNA, 25 bp, Homo sapien
tgagggtaggaggttcatcagcaac

SEQ ID NO: 929430 - DNA, 25 bp, Homo sapien
catcagcaacttccgaggagggcag

SEQ ID NO: 929431 - DNA, 25 bp, Homo sapien
ggttcatcagcaacttccgaggagg

SEQ ID NO: 929432 - DNA, 25 bp, Homo sapien
gaaaaggcagtagggtcggcctgag

SEQ ID NO: 929433 - DNA, 25 bp, Homo sapien
aaaaggcagtagggtcggcctgagg

SEQ ID NO: 929434 - DNA, 25 bp, Homo sapien
aaaggcagtagggtcggcctgaggg

SEQ ID NO: 929435 - DNA, 25 bp, Homo sapien
gctgggctcagggactcactctgct

SEQ ID NO: 929436 - DNA, 25 bp, Homo sapien
cgtcagacacggaactctggttgct

SEQ ID NO: 929437 - DNA, 25 bp, Homo sapien
tcatccgtgcggaagtcggaggtgt

SEQ ID NO: 929438 - DNA, 25 bp, Homo sapien
gctgtccaccttaagctgatagacg

SEQ ID NO: 929439 - DNA, 25 bp, Homo sapien
cttaagagttaccaggccgaggcca

SEQ ID NO: 929440 - DNA, 25 bp, Homo sapien
cggactgacggattagcacctggga

SEQ ID NO: 929441 - DNA, 25 bp, Homo sapien
tgcccggcctacacgacatagattc

SEQ ID NO: 929442 - DNA, 25 bp, Homo sapien
gtataataatcattgtgcccggcct

SEQ ID NO: 929443 - DNA, 25 bp, Homo sapien
gggaggtcaaggctgggggactgct

SEQ ID NO: 929444 - DNA, 25 bp, Homo sapien
gaggtcaaggctgggggactgcttg

SEQ ID NO: 929445 - DNA, 25 bp, Homo sapien
tcaaggctgggggactgcttgaggc

SEQ ID NO: 929446 - DNA, 25 bp, Homo sapien
caggagttcacaaccagcctggaca

SEQ ID NO: 929447 - DNA, 25 bp, Homo sapien
tctcgggctgctgaactgttcgatt

SEQ ID NO: 929448 - DNA, 25 bp, Homo sapien
gaaagccattaggttctcgggctgc

SEQ ID NO: 929449 - DNA, 25 bp, Homo sapien
taggttctcgggctgctgaactgtt

SEQ ID NO: 929450 - DNA, 25 bp, Homo sapien
gctgaactgttcgattttgactttt

SEQ ID NO: 929451 - DNA, 25 bp, Homo sapien
cagcaggaatactgtgaatcataag

SEQ ID NO: 929452 - DNA, 25 bp, Homo sapien
aaaaacgacagcagcgtgagaatcc

SEQ ID NO: 929453 - DNA, 25 bp, Homo sapien
gagaatccaaggacccaaggaagaa

SEQ ID NO: 929454 - DNA, 25 bp, Homo sapien
gaacagaatcctggacaagcaactt

SEQ ID NO: 929455 - DNA, 25 bp, Homo sapien
caggcaccctgataaacagaacagt

SEQ ID NO: 929456 - DNA, 25 bp, Homo sapien
agattggaggaacacaggcaccctg

SEQ ID NO: 929457 - DNA, 25 bp, Homo sapien
cagagattggaggaacacaggcacc

SEQ ID NO: 929458 - DNA, 25 bp, Homo sapien
cacaggcaccctgataaacagaaca

SEQ ID NO: 929459 - DNA, 25 bp, Homo sapien
cttaaatatcctcagggacgtgtca

SEQ ID NO: 929460 - DNA, 25 bp, Homo sapien
ctcagggacgtgtcacccacagtca

SEQ ID NO: 929461 - DNA, 25 bp, Homo sapien
aatatcctcagggacgtgtcaccca

SEQ ID NO: 929462 - DNA, 25 bp, Homo sapien
atcctcagggacgtgtcacccacag

SEQ ID NO: 929463 - DNA, 25 bp, Homo sapien
tccagggctactcgctattatcaag

SEQ ID NO: 929464 - DNA, 25 bp, Homo sapien
aacttcaacgcctgaatacgcagag

SEQ ID NO: 929465 - DNA, 25 bp, Homo sapien
gcctggcgggctgacaccactccag

SEQ ID NO: 929466 - DNA, 25 bp, Homo sapien
cgcctgaatacgcagagcgctcagc

SEQ ID NO: 929467 - DNA, 25 bp, Homo sapien
tccgcactttctcgatggccgccat

SEQ ID NO: 929468 - DNA, 25 bp, Homo sapien
gcactttctcgatggccgccatcac

SEQ ID NO: 929469 - DNA, 25 bp, Homo sapien
atttccgcactttctcgatggccgc

SEQ ID NO: 929470 - DNA, 25 bp, Homo sapien
catttccgcactttctcgatggccg

SEQ ID NO: 929471 - DNA, 25 bp, Homo sapien
cttgatgtcgtccttggcccggctg

SEQ ID NO: 929472 - DNA, 25 bp, Homo sapien
ggctgcgggtctccgcccggaccga

SEQ ID NO: 929473 - DNA, 25 bp, Homo sapien
cttcttgatgtcgtccttggcccgg

SEQ ID NO: 929474 - DNA, 25 bp, Homo sapien
gctgcgggtctccgcccggaccgac

SEQ ID NO: 929475 - DNA, 25 bp, Homo sapien
gccggtgggcaacctggttctcttc

SEQ ID NO: 929476 - DNA, 25 bp, Homo sapien
tgcttgtggtcagggcgaggtgcga

SEQ ID NO: 929477 - DNA, 25 bp, Homo sapien
gagagtttggaggtcggctccctgc

SEQ ID NO: 929478 - DNA, 25 bp, Homo sapien
ccctgctctggccagcgtgttagga

SEQ ID NO: 929479 - DNA, 25 bp, Homo sapien
aatcctcccacgtgaggtttcttgt

SEQ ID NO: 929480 - DNA, 25 bp, Homo sapien
caaatcctcccacgtgaggtttctt

SEQ ID NO: 929481 - DNA, 25 bp, Homo sapien
ccttctcgtccacagcccagcgctc

SEQ ID NO: 929482 - DNA, 25 bp, Homo sapien
tccaaatcctcccacgtgaggtttc

SEQ ID NO: 929483 - DNA, 25 bp, Homo sapien
taaagagttggttttcctcatgcgc

SEQ ID NO: 929484 - DNA, 25 bp, Homo sapien
caaaccccaggaaagtagccaggag

SEQ ID NO: 929485 - DNA, 25 bp, Homo sapien
catggtttaaacgactgcaagcccc

SEQ ID NO: 929486 - DNA, 25 bp, Homo sapien
tcatgcgcccgagtgttggatgcag

SEQ ID NO: 929487 - DNA, 25 bp, Homo sapien
cattccagtgggttcaacagtgagc

SEQ ID NO: 929488 - DNA, 25 bp, Homo sapien
tacacaacgggagtaatgccagagc

SEQ ID NO: 929489 - DNA, 25 bp, Homo sapien
tacggtgcccatctgacattcatag

SEQ ID NO: 929490 - DNA, 25 bp, Homo sapien
tactgggaggtctgtggcttgcccc

SEQ ID NO: 929491 - DNA, 25 bp, Homo sapien
aaagtaatgaggcaacagaggaagc

SEQ ID NO: 929492 - DNA, 25 bp, Homo sapien
gatccattaggaagccatattatag

SEQ ID NO: 929493 - DNA, 25 bp, Homo sapien
ttaactagggaataatgtgatctgg

SEQ ID NO: 929494 - DNA, 25 bp, Homo sapien
ccatattatagtggcccactaggtg

SEQ ID NO: 929495 - DNA, 25 bp, Homo sapien
aagctggagagaagcaacagcctca

SEQ ID NO: 929496 - DNA, 25 bp, Homo sapien
gcttgttccaacattgagaggtcag

SEQ ID NO: 929497 - DNA, 25 bp, Homo sapien
cacatggagtgtaaccaaaagaacg

SEQ ID NO: 929498 - DNA, 25 bp, Homo sapien
tcaaggataactccacggttgtggc

SEQ ID NO: 929499 - DNA, 25 bp, Homo sapien
cagctcatatttatttgggcacaga

SEQ ID NO: 929500 - DNA, 25 bp, Homo sapien
ccagctcatatttatttgggcacag

SEQ ID NO: 929501 - DNA, 25 bp, Homo sapien
ccccagctcatatttatttgggcac

SEQ ID NO: 929502 - DNA, 25 bp, Homo sapien
atccccagctcatatttatttgggc

SEQ ID NO: 929503 - DNA, 25 bp, Homo sapien
cttgatgaactgaaaagaggtctcc

SEQ ID NO: 929504 - DNA, 25 bp, Homo sapien
aaaactgctgcttagtactcaggtg

SEQ ID NO: 929505 - DNA, 25 bp, Homo sapien
tggccactagtcagggaggagtcac

SEQ ID NO: 929506 - DNA, 25 bp, Homo sapien
gtctcccatccttgcaaaactgctg

SEQ ID NO: 929507 - DNA, 25 bp, Homo sapien
caatcctctgcgccgggccctccca

SEQ ID NO: 929508 - DNA, 25 bp, Homo sapien
tcaatcctctgcgccgggccctccc

SEQ ID NO: 929509 - DNA, 25 bp, Homo sapien
ttcttcagggcacccaggctcttca

SEQ ID NO: 929510 - DNA, 25 bp, Homo sapien
cttcttcagggcacccaggctcttc

SEQ ID NO: 929511 - DNA, 25 bp, Homo sapien
cttcagggcacccaggctcttcagg

SEQ ID NO: 929512 - DNA, 25 bp, Homo sapien
tcagggcacccaggctcttcagggt

SEQ ID NO: 929513 - DNA, 25 bp, Homo sapien
ttggaggcccgcttcaggtggccct

SEQ ID NO: 929514 - DNA, 25 bp, Homo sapien
gttggaggcccgcttcaggtggccc

SEQ ID NO: 929515 - DNA, 25 bp, Homo sapien
tggcgggtgctctcgttggaggccc

SEQ ID NO: 929516 - DNA, 25 bp, Homo sapien
gcctctggcgggtgctctcgttgga

SEQ ID NO: 929517 - DNA, 25 bp, Homo sapien
gatgaatactactgccactggccaa

SEQ ID NO: 929518 - DNA, 25 bp, Homo sapien
gcggccagtgatgtcaaaggacaag

SEQ ID NO: 929519 - DNA, 25 bp, Homo sapien
ccccgccgggtattgtagagatgaa

SEQ ID NO: 929520 - DNA, 25 bp, Homo sapien
tggcgatacactcgccatggacccg

SEQ ID NO: 929521 - DNA, 25 bp, Homo sapien
tgtcttcagcaagtaggggtcctgc

SEQ ID NO: 929522 - DNA, 25 bp, Homo sapien
cttcagcaagtaggggtcctgcttc

SEQ ID NO: 929523 - DNA, 25 bp, Homo sapien
cctgtcttcagcaagtaggggtcct

SEQ ID NO: 929524 - DNA, 25 bp, Homo sapien
tcttcagcaagtaggggtcctgctt

SEQ ID NO: 929525 - DNA, 25 bp, Homo sapien
cagccgcggagtggccctttagttc

SEQ ID NO: 929526 - DNA, 25 bp, Homo sapien
ccgtgagtcgttggagaaagcaaac

SEQ ID NO: 929527 - DNA, 25 bp, Homo sapien
ctttagttcgaaggctcgcaccacc

SEQ ID NO: 929528 - DNA, 25 bp, Homo sapien
aagcaaacgagtgcacagccgcgga

SEQ ID NO: 929529 - DNA, 25 bp, Homo sapien
gccatacaacccagaagcctttaaa

SEQ ID NO: 929530 - DNA, 25 bp, Homo sapien
tgccatacaacccagaagcctttaa

SEQ ID NO: 929531 - DNA, 25 bp, Homo sapien
ctgccatacaacccagaagccttta

SEQ ID NO: 929532 - DNA, 25 bp, Homo sapien
tatgtatgtgacctcagtttatctt

SEQ ID NO: 929533 - DNA, 25 bp, Homo sapien
agatatgtaacatccccgcccaaag

SEQ ID NO: 929534 - DNA, 25 bp, Homo sapien
tcttctagccttgttctaagatatg

SEQ ID NO: 929535 - DNA, 25 bp, Homo sapien
tgggcgagggtgaaaccgtctcaac

SEQ ID NO: 929536 - DNA, 25 bp, Homo sapien
tacagcagcgtgtgtgttgttcatc

SEQ ID NO: 929537 - DNA, 25 bp, Homo sapien
agatacagcagcgtgtgtgttgttc

SEQ ID NO: 929538 - DNA, 25 bp, Homo sapien
tagacagcacttgacccttcaggct

SEQ ID NO: 929539 - DNA, 25 bp, Homo sapien
atctggttggtgttgatggtagaca

SEQ ID NO: 929540 - DNA, 25 bp, Homo sapien
ctggaggcagtcatgataaacttcc

SEQ ID NO: 929541 - DNA, 25 bp, Homo sapien
gagcagaactttcaggcagcattaa

SEQ ID NO: 929542 - DNA, 25 bp, Homo sapien
gcagcattaactcattgaggaaata

SEQ ID NO: 929543 - DNA, 25 bp, Homo sapien
tccctagggacctggtgtggcccag

SEQ ID NO: 929544 - DNA, 25 bp, Homo sapien
tgttcctctcaggttgagcagaact

SEQ ID NO: 929545 - DNA, 25 bp, Homo sapien
cttgaagacacggagggtgtccccg

SEQ ID NO: 929546 - DNA, 25 bp, Homo sapien
gatgacaggcgccttgtgcttttta

SEQ ID NO: 929547 - DNA, 25 bp, Homo sapien
gcaatgccaatgtcgatgacaggcg

SEQ ID NO: 929548 - DNA, 25 bp, Homo sapien
catcctcccgcttggtcatcttgaa

SEQ ID NO: 929549 - DNA, 25 bp, Homo sapien
caaagcagatatgggaaggccaaag

SEQ ID NO: 929550 - DNA, 25 bp, Homo sapien
tggatgctctttctggcaccccaag

SEQ ID NO: 929551 - DNA, 25 bp, Homo sapien
caggcagcgcgcaaactatgtggat

SEQ ID NO: 929552 - DNA, 25 bp, Homo sapien
caggccaaggtatttccaggtagga

SEQ ID NO: 929553 - DNA, 25 bp, Homo sapien
gctccagatgcggatggtgcgatca

SEQ ID NO: 929554 - DNA, 25 bp, Homo sapien
tgcacaggtagccaggtatttgcca

SEQ ID NO: 929555 - DNA, 25 bp, Homo sapien
tgcaagatatgttcccgctgtggct

SEQ ID NO: 929556 - DNA, 25 bp, Homo sapien
tggctctcatgctgcggtgctctcg

SEQ ID NO: 929557 - DNA, 25 bp, Homo sapien
tgaggcttctccttccgaatccgct

SEQ ID NO: 929558 - DNA, 25 bp, Homo sapien
ccgaatccgctgatattgtttctgc

SEQ ID NO: 929559 - DNA, 25 bp, Homo sapien
aagttgtgttgttgaggcttctcct

SEQ ID NO: 929560 - DNA, 25 bp, Homo sapien
tgggtgaagttgtgttgttgaggct

SEQ ID NO: 929561 - DNA, 25 bp, Homo sapien
tgttctccagttactcactgataag

SEQ ID NO: 929562 - DNA, 25 bp, Homo sapien
tcactgataagcatttactgcccac

SEQ ID NO: 929563 - DNA, 25 bp, Homo sapien
ctataaggaagggccatgttgttct

SEQ ID NO: 929564 - DNA, 25 bp, Homo sapien
ggccatgttgttctccagttactca

SEQ ID NO: 929565 - DNA, 25 bp, Homo sapien
caggcattgagtggaacagcaggag

SEQ ID NO: 929566 - DNA, 25 bp, Homo sapien
gagaatgagtgtgatatgggcaaaa

SEQ ID NO: 929567 - DNA, 25 bp, Homo sapien
tgagtgtgatatgggcaaaaacaga

SEQ ID NO: 929568 - DNA, 25 bp, Homo sapien
caggagattaaccagatatggccct

SEQ ID NO: 929569 - DNA, 25 bp, Homo sapien
tactactgactgactactgaggagg

SEQ ID NO: 929570 - DNA, 25 bp, Homo sapien
tccctatgtagggagtaatgtgcac

SEQ ID NO: 929571 - DNA, 25 bp, Homo sapien
cacagagcaccttcatgtagagtgg

SEQ ID NO: 929572 - DNA, 25 bp, Homo sapien
ccagtggagtgtggatccttggcca

SEQ ID NO: 929573 - DNA, 25 bp, Homo sapien
aaagaactcggggatgagaagtcaa

SEQ ID NO: 929574 - DNA, 25 bp, Homo sapien
agaagtcaacatctgttgagtcctg

SEQ ID NO: 929575 - DNA, 25 bp, Homo sapien
atgagaagtcaacatctgttgagtc

SEQ ID NO: 929576 - DNA, 25 bp, Homo sapien
gaactcggggatgagaagtcaacat

SEQ ID NO: 929577 - DNA, 25 bp, Homo sapien
cagatgctccccaattccaacagga

SEQ ID NO: 929578 - DNA, 25 bp, Homo sapien
gcagatgctccccaattccaacagg

SEQ ID NO: 929579 - DNA, 25 bp, Homo sapien
cttaattgagtcacaaagctggcat

SEQ ID NO: 929580 - DNA, 25 bp, Homo sapien
tgtaaaagatacttaattgagtcac

SEQ ID NO: 929581 - DNA, 25 bp, Homo sapien
aaaagaccccaaagcctatcacagg

SEQ ID NO: 929582 - DNA, 25 bp, Homo sapien
agagtttacggtgctctcctggcca

SEQ ID NO: 929583 - DNA, 25 bp, Homo sapien
tttttccgagatcgcggccacggag

SEQ ID NO: 929584 - DNA, 25 bp, Homo sapien
gcccagtaaatgctgctgcacatca

SEQ ID NO: 929585 - DNA, 25 bp, Homo sapien
aactgaggcccatggagtcgccggg

SEQ ID NO: 929586 - DNA, 25 bp, Homo sapien
caccagccgcgggcccaaaccgcag

SEQ ID NO: 929587 - DNA, 25 bp, Homo sapien
tgaggcccatggagtcgccgggccc

SEQ ID NO: 929588 - DNA, 25 bp, Homo sapien
ccaccagccgcgggcccaaaccgca

SEQ ID NO: 929589 - DNA, 25 bp, Homo sapien
cgcagccacccccgcgctaccgccg

SEQ ID NO: 929590 - DNA, 25 bp, Homo sapien
gcgcagccacccccgcgctaccgcc

SEQ ID NO: 929591 - DNA, 25 bp, Homo sapien
ccagcagcccaagcaacaccgacag

SEQ ID NO: 929592 - DNA, 25 bp, Homo sapien
gcccaagcaacaccgacagccccat

SEQ ID NO: 929593 - DNA, 25 bp, Homo sapien
gcagcccaagcaacaccgacagccc

SEQ ID NO: 929594 - DNA, 25 bp, Homo sapien
agcagcccaagcaacaccgacagcc

SEQ ID NO: 929595 - DNA, 25 bp, Homo sapien
agctccgacatctgcgagagctcca

SEQ ID NO: 929596 - DNA, 25 bp, Homo sapien
gagctccgacatctgcgagagctcc

SEQ ID NO: 929597 - DNA, 25 bp, Homo sapien
gctccgacatctgcgagagctccat

SEQ ID NO: 929598 - DNA, 25 bp, Homo sapien
actgccacctcagctagtgagtacg

SEQ ID NO: 929599 - DNA, 25 bp, Homo sapien
tcagctagtgagtacgcgggcgccc

SEQ ID NO: 929600 - DNA, 25 bp, Homo sapien
cacctcagctagtgagtacgcgggc

SEQ ID NO: 929601 - DNA, 25 bp, Homo sapien
tgggcctggccgttagagcgcctgg

SEQ ID NO: 929602 - DNA, 25 bp, Homo sapien
acagtttttgcttttattggtcaag

SEQ ID NO: 929603 - DNA, 25 bp, Homo sapien
gacagtttttgcttttattggtcaa

SEQ ID NO: 929604 - DNA, 25 bp, Homo sapien
cagtttttgcttttattggtcaaga

SEQ ID NO: 929605 - DNA, 25 bp, Homo sapien
gagtcacccaaggtcacggtgctgg

SEQ ID NO: 929606 - DNA, 25 bp, Homo sapien
aggaacagaggtctgtgccccacct

SEQ ID NO: 929607 - DNA, 25 bp, Homo sapien
cccagagatgatccctggagcccgt

SEQ ID NO: 929608 - DNA, 25 bp, Homo sapien
cattttgcagattgaaacacagcgg

SEQ ID NO: 929609 - DNA, 25 bp, Homo sapien
tactggtagatgtgcccagctggcg

SEQ ID NO: 929610 - DNA, 25 bp, Homo sapien
gcccgggtcggtcaggatactggta

SEQ ID NO: 929611 - DNA, 25 bp, Homo sapien
gatgcggcccgggtcggtcaggata

SEQ ID NO: 929612 - DNA, 25 bp, Homo sapien
cgtgtggcttgctcagggatgcggc

SEQ ID NO: 929613 - DNA, 25 bp, Homo sapien
caaccctaggctgtgttgatggcaa

SEQ ID NO: 929614 - DNA, 25 bp, Homo sapien
gaggtattagttggcaagactgtca

SEQ ID NO: 929615 - DNA, 25 bp, Homo sapien
gcaagctggatgtgggatctaagca

SEQ ID NO: 929616 - DNA, 25 bp, Homo sapien
ggccctacccttggatgtggaacca

SEQ ID NO: 929617 - DNA, 25 bp, Homo sapien
agggtgtgcacacttgccgtggaca

SEQ ID NO: 929618 - DNA, 25 bp, Homo sapien
caggccagtgaggtctggcggaggg

SEQ ID NO: 929619 - DNA, 25 bp, Homo sapien
tgaaggactcaaacagaggccggat

SEQ ID NO: 929620 - DNA, 25 bp, Homo sapien
ggagagcgggcagagagcagtactg

SEQ ID NO: 929621 - DNA, 25 bp, Homo sapien
ctggtccccccacaccacgtggagc

SEQ ID NO: 929622 - DNA, 25 bp, Homo sapien
ctgtggtccagctggtccccccaca

SEQ ID NO: 929623 - DNA, 25 bp, Homo sapien
tggtccagctggtccccccacacca

SEQ ID NO: 929624 - DNA, 25 bp, Homo sapien
cagctggtccccccacaccacgtgg

SEQ ID NO: 929625 - DNA, 25 bp, Homo sapien
gagccagatcagggagtggattcca

SEQ ID NO: 929626 - DNA, 25 bp, Homo sapien
ccagatcagggagtggattccaagt

SEQ ID NO: 929627 - DNA, 25 bp, Homo sapien
gccagatcagggagtggattccaag

SEQ ID NO: 929628 - DNA, 25 bp, Homo sapien
cagatcagggagtggattccaagtc

SEQ ID NO: 929629 - DNA, 25 bp, Homo sapien
cctgcagccccccagccatgggctt

SEQ ID NO: 929630 - DNA, 25 bp, Homo sapien
cagccccccagccatgggcttgagg

SEQ ID NO: 929631 - DNA, 25 bp, Homo sapien
gccccccagccatgggcttgaggga

SEQ ID NO: 929632 - DNA, 25 bp, Homo sapien
tgcagccccccagccatgggcttga

SEQ ID NO: 929633 - DNA, 25 bp, Homo sapien
tacgggttcggacgtagtcatcaaa

SEQ ID NO: 929634 - DNA, 25 bp, Homo sapien
aacgctggtgtgtgatgggtacccc

SEQ ID NO: 929635 - DNA, 25 bp, Homo sapien
agtcatcaaacatgtctcgcatctg

SEQ ID NO: 929636 - DNA, 25 bp, Homo sapien
tgtctcgcatctggtcaaaacgctg

SEQ ID NO: 929637 - DNA, 25 bp, Homo sapien
ttaatggcggcattgagctcctcaa

SEQ ID NO: 929638 - DNA, 25 bp, Homo sapien
gctcctcaatctcatcccgcagctg

SEQ ID NO: 929639 - DNA, 25 bp, Homo sapien
cctcctcctgcaagcccgcacgctc

SEQ ID NO: 929640 - DNA, 25 bp, Homo sapien
aatggcggcattgagctcctcaatc

SEQ ID NO: 929641 - DNA, 25 bp, Homo sapien
gcataaggatgtactcagctgtctt

SEQ ID NO: 929642 - DNA, 25 bp, Homo sapien
actcagctgtcttctgcagcgtggt

SEQ ID NO: 929643 - DNA, 25 bp, Homo sapien
tctgcagcgtggtagctttgctcac

SEQ ID NO: 929644 - DNA, 25 bp, Homo sapien
tgtcaaaccccagcttgatgttgaa

SEQ ID NO: 929645 - DNA, 25 bp, Homo sapien
ccgcttctgctccgcggagatgtgt

SEQ ID NO: 929646 - DNA, 25 bp, Homo sapien
gtgtgctcacgagcccatgaagggt

SEQ ID NO: 929647 - DNA, 25 bp, Homo sapien
cggagatgtgtgtgatacgccggtt

SEQ ID NO: 929648 - DNA, 25 bp, Homo sapien
ctcggggagcagagagttgggtgag

SEQ ID NO: 929649 - DNA, 25 bp, Homo sapien
tcggggagcagagagttgggtgagc

SEQ ID NO: 929650 - DNA, 25 bp, Homo sapien
atcttggggtgggggatggtgccca

SEQ ID NO: 929651 - DNA, 25 bp, Homo sapien
cgatcttggggtgggggatggtgcc

SEQ ID NO: 929652 - DNA, 25 bp, Homo sapien
gatcttggggtgggggatggtgccc

SEQ ID NO: 929653 - DNA, 25 bp, Homo sapien
tcttggggtgggggatggtgcccac

SEQ ID NO: 929654 - DNA, 25 bp, Homo sapien
cttgttgctgtctggacggccccgg

SEQ ID NO: 929655 - DNA, 25 bp, Homo sapien
ttgctgtctggacggccccggctga

SEQ ID NO: 929656 - DNA, 25 bp, Homo sapien
gccccggctgaggatgggttgcggg

SEQ ID NO: 929657 - DNA, 25 bp, Homo sapien
tgggttgcgggggagagacacggac

SEQ ID NO: 929658 - DNA, 25 bp, Homo sapien
tggcatggagctgaggtcccctgac

SEQ ID NO: 929659 - DNA, 25 bp, Homo sapien
gtcccctgacagccgccgttcactg

SEQ ID NO: 929660 - DNA, 25 bp, Homo sapien
gcatggagctgaggtcccctgacag

SEQ ID NO: 929661 - DNA, 25 bp, Homo sapien
cctggcatggagctgaggtcccctg

SEQ ID NO: 929662 - DNA, 25 bp, Homo sapien
agacccacagaaagaccgacccagg

SEQ ID NO: 929663 - DNA, 25 bp, Homo sapien
ggtccccattgcccccttcctctca

SEQ ID NO: 929664 - DNA, 25 bp, Homo sapien
ctgtggtagggacagacagacccac

SEQ ID NO: 929665 - DNA, 25 bp, Homo sapien
cattgcccccttcctctcatctggc

SEQ ID NO: 929666 - DNA, 25 bp, Homo sapien
gagagccgctccgctttggggacaa

SEQ ID NO: 929667 - DNA, 25 bp, Homo sapien
gaaggggccaatgtggccgggcctg

SEQ ID NO: 929668 - DNA, 25 bp, Homo sapien
ggtgagagccgctccgctttgggga

SEQ ID NO: 929669 - DNA, 25 bp, Homo sapien
aggggccaatgtggccgggcctgga

SEQ ID NO: 929670 - DNA, 25 bp, Homo sapien
tggggtggagaagggcggagagtcg

SEQ ID NO: 929671 - DNA, 25 bp, Homo sapien
gtcgggttgaaggccgtgggcacag

SEQ ID NO: 929672 - DNA, 25 bp, Homo sapien
cgggttgaaggccgtgggcacagcc

SEQ ID NO: 929673 - DNA, 25 bp, Homo sapien
ccaccgcccagtgcccgagatctta

SEQ ID NO: 929674 - DNA, 25 bp, Homo sapien
gagggtgctggatacaagtggtggc

SEQ ID NO: 929675 - DNA, 25 bp, Homo sapien
gaggagggtgctggatacaagtggt

SEQ ID NO: 929676 - DNA, 25 bp, Homo sapien
tacaagtggtggctccagggcttgc

SEQ ID NO: 929677 - DNA, 25 bp, Homo sapien
gtgctggatacaagtggtggctcca

SEQ ID NO: 929678 - DNA, 25 bp, Homo sapien
gtgcacgggcagaaccgtgaggcta

SEQ ID NO: 929679 - DNA, 25 bp, Homo sapien
ctgtgcacgggcagaaccgtgaggc

SEQ ID NO: 929680 - DNA, 25 bp, Homo sapien
tgtgcacgggcagaaccgtgaggct

SEQ ID NO: 929681 - DNA, 25 bp, Homo sapien
gaggcaggggttgttgctccccgca

SEQ ID NO: 929682 - DNA, 25 bp, Homo sapien
ggctggctttctgtcccctagggga

SEQ ID NO: 929683 - DNA, 25 bp, Homo sapien
agcaggcagcggagacactcctggg

SEQ ID NO: 929684 - DNA, 25 bp, Homo sapien
taccccaagggtagaagctctatgg

SEQ ID NO: 929685 - DNA, 25 bp, Homo sapien
aatcagaactcaggaaggcgctgga

SEQ ID NO: 929686 - DNA, 25 bp, Homo sapien
tccactaacttgtccaccaatccat

SEQ ID NO: 929687 - DNA, 25 bp, Homo sapien
aacttgtccaccaatccatccacca

SEQ ID NO: 929688 - DNA, 25 bp, Homo sapien
gcggagcatcaatcttcctgcccgt

SEQ ID NO: 929689 - DNA, 25 bp, Homo sapien
gcaggaacagcggagcatcaatctt

SEQ ID NO: 929690 - DNA, 25 bp, Homo sapien
ctgctgaagagggagtcaaccacgg

SEQ ID NO: 929691 - DNA, 25 bp, Homo sapien
tcatggccgaggaagccgggggcac

SEQ ID NO: 929692 - DNA, 25 bp, Homo sapien
tgtgtccagagaggtgggtcatggc

SEQ ID NO: 929693 - DNA, 25 bp, Homo sapien
gcagacggctgtgtccagagaggtg

SEQ ID NO: 929694 - DNA, 25 bp, Homo sapien
gctgtgggaggcgggagttggtaaa

SEQ ID NO: 929695 - DNA, 25 bp, Homo sapien
tgtgggaggcgggagttggtaaaga

SEQ ID NO: 929696 - DNA, 25 bp, Homo sapien
agtttgaaggcatgggcggctgtgg

SEQ ID NO: 929697 - DNA, 25 bp, Homo sapien
aagtttgaaggcatgggcggctgtg

SEQ ID NO: 929698 - DNA, 25 bp, Homo sapien
gatcatgtcagcattgccgacgtag

SEQ ID NO: 929699 - DNA, 25 bp, Homo sapien
cggctggatcatgtcagcattgccg

SEQ ID NO: 929700 - DNA, 25 bp, Homo sapien
agtggcgtcaggtccggctggatca

SEQ ID NO: 929701 - DNA, 25 bp, Homo sapien
gctgcagtggcgtcaggtccggctg

SEQ ID NO: 929702 - DNA, 25 bp, Homo sapien
gacaaaaagcaattgaggtccagga

SEQ ID NO: 929703 - DNA, 25 bp, Homo sapien
acaaaaagcaattgaggtccaggag

SEQ ID NO: 929704 - DNA, 25 bp, Homo sapien
tgcaggggcgaagggccggactgag

SEQ ID NO: 929705 - DNA, 25 bp, Homo sapien
aagggccggactgagtcatggtgaa

SEQ ID NO: 929706 - DNA, 25 bp, Homo sapien
gatagaccaggatgcagatacaggg

SEQ ID NO: 929707 - DNA, 25 bp, Homo sapien
gcttgctgcttgaaaggccaagatc

SEQ ID NO: 929708 - DNA, 25 bp, Homo sapien
tccctagtggacctagcttgctgct

SEQ ID NO: 929709 - DNA, 25 bp, Homo sapien
gagggtctgtctgttcacacctctg

SEQ ID NO: 929710 - DNA, 25 bp, Homo sapien
ccaggaggtcatcttccctgctggg

SEQ ID NO: 929711 - DNA, 25 bp, Homo sapien
ctgcttaggggccaggaggtcatct

SEQ ID NO: 929712 - DNA, 25 bp, Homo sapien
catcttccctgctgggcttacggag

SEQ ID NO: 929713 - DNA, 25 bp, Homo sapien
tgcttaggggccaggaggtcatctt

SEQ ID NO: 929714 - DNA, 25 bp, Homo sapien
ggacacacagagttggacaccggat

SEQ ID NO: 929715 - DNA, 25 bp, Homo sapien
cagagttggacaccggatcccttgc

SEQ ID NO: 929716 - DNA, 25 bp, Homo sapien
acacacagagttggacaccggatcc

SEQ ID NO: 929717 - DNA, 25 bp, Homo sapien
acacagagttggacaccggatccct

SEQ ID NO: 929718 - DNA, 25 bp, Homo sapien
ccctaggtaaggaggccgctaggag

SEQ ID NO: 929719 - DNA, 25 bp, Homo sapien
ctgtcggcccgggactgaatggagg

SEQ ID NO: 929720 - DNA, 25 bp, Homo sapien
ttccagggatcttccgaggcgggcg

SEQ ID NO: 929721 - DNA, 25 bp, Homo sapien
ctaggagacgctgtggccacacggt

SEQ ID NO: 929722 - DNA, 25 bp, Homo sapien
tagatgcgccacttgtggtattccc

SEQ ID NO: 929723 - DNA, 25 bp, Homo sapien
tgtagtagatgcgccacttgtggta

SEQ ID NO: 929724 - DNA, 25 bp, Homo sapien
cgccacttgtggtattcccgcatca

SEQ ID NO: 929725 - DNA, 25 bp, Homo sapien
cacttgtggtattcccgcatcacca

SEQ ID NO: 929726 - DNA, 25 bp, Homo sapien
gatgcgccgcttccagtagttcccc

SEQ ID NO: 929727 - DNA, 25 bp, Homo sapien
ctcgatgcgccgcttccagtagttc

SEQ ID NO: 929728 - DNA, 25 bp, Homo sapien
cgatgcgccgcttccagtagttccc

SEQ ID NO: 929729 - DNA, 25 bp, Homo sapien
tcgatgcgccgcttccagtagttcc

SEQ ID NO: 929730 - DNA, 25 bp, Homo sapien
tccggcttccggtgcgcatcagcct

SEQ ID NO: 929731 - DNA, 25 bp, Homo sapien
ctccggcttccggtgcgcatcagcc

SEQ ID NO: 929732 - DNA, 25 bp, Homo sapien
cggcttccggtgcgcatcagcctca

SEQ ID NO: 929733 - DNA, 25 bp, Homo sapien
ccggcttccggtgcgcatcagcctc

SEQ ID NO: 929734 - DNA, 25 bp, Homo sapien
tggcgttgttcaggcggatcttgtc

SEQ ID NO: 929735 - DNA, 25 bp, Homo sapien
caggccctccagatggcgttgttca

SEQ ID NO: 929736 - DNA, 25 bp, Homo sapien
cctccagatggcgttgttcaggcgg

SEQ ID NO: 929737 - DNA, 25 bp, Homo sapien
gttcaggcggatcttgtctctgcag

SEQ ID NO: 929738 - DNA, 25 bp, Homo sapien
accatgaagtgaccgctgtggatga

SEQ ID NO: 929739 - DNA, 25 bp, Homo sapien
tgcgccggagactcgggtcctccga

SEQ ID NO: 929740 - DNA, 25 bp, Homo sapien
tcgctgtgcggcgacgacaccatga

SEQ ID NO: 929741 - DNA, 25 bp, Homo sapien
ctgtaggccaggctcaagcactcga

SEQ ID NO: 929742 - DNA, 25 bp, Homo sapien
ggctgtcgccgccgcaaccgcctgg

SEQ ID NO: 929743 - DNA, 25 bp, Homo sapien
cgccgcaaccgcctggtccctgctc

SEQ ID NO: 929744 - DNA, 25 bp, Homo sapien
gcaaccgcctggtccctgctccgcg

SEQ ID NO: 929745 - DNA, 25 bp, Homo sapien
cctggtccctgctccgcgcagcgcg

SEQ ID NO: 929746 - DNA, 25 bp, Homo sapien
tatagccagcagtttacagcctctg

SEQ ID NO: 929747 - DNA, 25 bp, Homo sapien
gagccacttgtaatgggaccacagg

SEQ ID NO: 929748 - DNA, 25 bp, Homo sapien
taactgtggtgtgaatacctggctg

SEQ ID NO: 929749 - DNA, 25 bp, Homo sapien
tcatggtccatggagatgcaagaca

SEQ ID NO: 929750 - DNA, 25 bp, Homo sapien
agagtagcccatggacaactgccag

SEQ ID NO: 929751 - DNA, 25 bp, Homo sapien
ttctgttatgagtttgcaacaagat

SEQ ID NO: 929752 - DNA, 25 bp, Homo sapien
tatgagtttgcaacaagataaacac

SEQ ID NO: 929753 - DNA, 25 bp, Homo sapien
gctccagtgggcaccgaggtatctg

SEQ ID NO: 929754 - DNA, 25 bp, Homo sapien
gacccatcaaatttacttctaggaa

SEQ ID NO: 929755 - DNA, 25 bp, Homo sapien
gactttcccttagtgctctgggctg

SEQ ID NO: 929756 - DNA, 25 bp, Homo sapien
ggaagaactcggtggcacaatgtta

SEQ ID NO: 929757 - DNA, 25 bp, Homo sapien
aatgtaggtactctttgacccatca

SEQ ID NO: 929758 - DNA, 25 bp, Homo sapien
cgcgcccggcgccttctccgcgcgg

SEQ ID NO: 929759 - DNA, 25 bp, Homo sapien
ctcacctggaatccgctcgacctgc

SEQ ID NO: 929760 - DNA, 25 bp, Homo sapien
gggcgctgcggggatgcttgggacc

SEQ ID NO: 929761 - DNA, 25 bp, Homo sapien
tgatgacgcgggggctccacgccct

SEQ ID NO: 929762 - DNA, 25 bp, Homo sapien
ctgacctcaaatgattcacccacct

SEQ ID NO: 929763 - DNA, 25 bp, Homo sapien
gtctcaaacttctgacctcaaatga

SEQ ID NO: 929764 - DNA, 25 bp, Homo sapien
cggctaatttttgttggtcaggttg

SEQ ID NO: 929765 - DNA, 25 bp, Homo sapien
cttctgacctcaaatgattcaccca

SEQ ID NO: 929766 - DNA, 25 bp, Homo sapien
caaggccgccaggagtgttttacat

SEQ ID NO: 929767 - DNA, 25 bp, Homo sapien
tagggtgatggaccagccccgttaa

SEQ ID NO: 929768 - DNA, 25 bp, Homo sapien
tgggccatacccaggaaagaccatt

SEQ ID NO: 929769 - DNA, 25 bp, Homo sapien
ctaggagccaggtgatcaggcctcg

SEQ ID NO: 929770 - DNA, 25 bp, Homo sapien
ggaccctagccttaagagacactgg

SEQ ID NO: 929771 - DNA, 25 bp, Homo sapien
caaggtcttgagatccaggctcagc

SEQ ID NO: 929772 - DNA, 25 bp, Homo sapien
gcatgtttggcctacgcaaggtctt

SEQ ID NO: 929773 - DNA, 25 bp, Homo sapien
catagcgacgctgtgacttcaggac

SEQ ID NO: 929774 - DNA, 25 bp, Homo sapien
ttttcaagaggccaagtaggaccag

SEQ ID NO: 929775 - DNA, 25 bp, Homo sapien
cagcgagtgttccagaagttgacca

SEQ ID NO: 929776 - DNA, 25 bp, Homo sapien
ttacaaacccacatcgaaaggaggc

SEQ ID NO: 929777 - DNA, 25 bp, Homo sapien
tatcaatggccaagggttcagaggc

SEQ ID NO: 929778 - DNA, 25 bp, Homo sapien
gctccagttgttccccgtagtgggc

SEQ ID NO: 929779 - DNA, 25 bp, Homo sapien
gaccgatactcctgccgtttgcgaa

SEQ ID NO: 929780 - DNA, 25 bp, Homo sapien
tggtagaaggcgtcaaagttgaaca

SEQ ID NO: 929781 - DNA, 25 bp, Homo sapien
gtgtctcgggtatcctcccagcgga

SEQ ID NO: 929782 - DNA, 25 bp, Homo sapien
tcatacttgcgacggagggtggcac

SEQ ID NO: 929783 - DNA, 25 bp, Homo sapien
gagtaggccgcgatcatacttgcga

SEQ ID NO: 929784 - DNA, 25 bp, Homo sapien
gtcctcgtcgctgagtaggccgcga

SEQ ID NO: 929785 - DNA, 25 bp, Homo sapien
cgagaaccgtcgtgggtccgagagg

SEQ ID NO: 929786 - DNA, 25 bp, Homo sapien
cggagttgcggtccgggtggtagag

SEQ ID NO: 929787 - DNA, 25 bp, Homo sapien
tgggagatgcgcgtgaagcgctcgg

SEQ ID NO: 929788 - DNA, 25 bp, Homo sapien
gatgcgcgtgaagcgctcggcggcc

SEQ ID NO: 929789 - DNA, 25 bp, Homo sapien
cggcctccgcgctcccggagttgcg

SEQ ID NO: 929790 - DNA, 25 bp, Homo sapien
tgcgcgaatacgagcagtcgccctg

SEQ ID NO: 929791 - DNA, 25 bp, Homo sapien
tgggaataagtcctcgctcctaggc

SEQ ID NO: 929792 - DNA, 25 bp, Homo sapien
gggacgccgagcagatcatacagcg

SEQ ID NO: 929793 - DNA, 25 bp, Homo sapien
taagccgccttgatttgggcctgcg

SEQ ID NO: 929794 - DNA, 25 bp, Homo sapien
aattgattcggcaggcggtgcaaga

SEQ ID NO: 929795 - DNA, 25 bp, Homo sapien
ttcggcaggcggtgcaagagaaacc

SEQ ID NO: 929796 - DNA, 25 bp, Homo sapien
gttgaattgattcggcaggcggtgc

SEQ ID NO: 929797 - DNA, 25 bp, Homo sapien
attcggcaggcggtgcaagagaaac

SEQ ID NO: 929798 - DNA, 25 bp, Homo sapien
aggcgtgagaatggcgtcccgcggc

SEQ ID NO: 929799 - DNA, 25 bp, Homo sapien
tattactaagcggtcgccgggctga

SEQ ID NO: 929800 - DNA, 25 bp, Homo sapien
gctgatgacataaaaaccgggtgcc

SEQ ID NO: 929801 - DNA, 25 bp, Homo sapien
gcaggcgccagtcgcaggtgtgctg

SEQ ID NO: 929802 - DNA, 25 bp, Homo sapien
gatactttgtggtttttccgtgctc

SEQ ID NO: 929803 - DNA, 25 bp, Homo sapien
ttcagtaaatggttactggccgggc

SEQ ID NO: 929804 - DNA, 25 bp, Homo sapien
cgtgctctctcactgagagactagc

SEQ ID NO: 929805 - DNA, 25 bp, Homo sapien
gagagactagccctatttcagtaaa

SEQ ID NO: 929806 - DNA, 25 bp, Homo sapien
ttgactggctattgggaagccatgc

SEQ ID NO: 929807 - DNA, 25 bp, Homo sapien
gatccttctagatgagagaaactat

SEQ ID NO: 929808 - DNA, 25 bp, Homo sapien
gcattgttgatccttctagatgaga

SEQ ID NO: 929809 - DNA, 25 bp, Homo sapien
gccatgcgtggctcacattctgttt

SEQ ID NO: 929810 - DNA, 25 bp, Homo sapien
gttctggaaaggcacttgcctctgc

SEQ ID NO: 929811 - DNA, 25 bp, Homo sapien
cacgcggttctggaaaggcacttgc

SEQ ID NO: 929812 - DNA, 25 bp, Homo sapien
caccacgcggttctggaaaggcact

SEQ ID NO: 929813 - DNA, 25 bp, Homo sapien
ttctatattgttcagctgacaaagt

SEQ ID NO: 929814 - DNA, 25 bp, Homo sapien
gctggctgccgaatactgcatctgg

SEQ ID NO: 929815 - DNA, 25 bp, Homo sapien
aggacccgatggactttgcccctag

SEQ ID NO: 929816 - DNA, 25 bp, Homo sapien
tcacagagatcatgcacacgacacg

SEQ ID NO: 929817 - DNA, 25 bp, Homo sapien
gaaggcaacacggacagtggtcaca

SEQ ID NO: 929818 - DNA, 25 bp, Homo sapien
aacagtggaggcgatgacgatgccc

SEQ ID NO: 929819 - DNA, 25 bp, Homo sapien
ccccaacagtggaggcgatgacgat

SEQ ID NO: 929820 - DNA, 25 bp, Homo sapien
ctaggcgaagatgcccccaacagtg

SEQ ID NO: 929821 - DNA, 25 bp, Homo sapien
ggcgatgacgatgcccaggatcaca

SEQ ID NO: 929822 - DNA, 25 bp, Homo sapien
tgggtgctggggcatggccttgggc

SEQ ID NO: 929823 - DNA, 25 bp, Homo sapien
gagggatgtgggatggttgggggtc

SEQ ID NO: 929824 - DNA, 25 bp, Homo sapien
ggtccctaatgggtgctggggcatg

SEQ ID NO: 929825 - DNA, 25 bp, Homo sapien
gatgtgggatggttgggggtcccta

SEQ ID NO: 929826 - DNA, 25 bp, Homo sapien
gctctggtacttgacggccttcttg

SEQ ID NO: 929827 - DNA, 25 bp, Homo sapien
ttggtgtcagacacggccctctcca

SEQ ID NO: 929828 - DNA, 25 bp, Homo sapien
ccggcgcgccttgctctggtacttg

SEQ ID NO: 929829 - DNA, 25 bp, Homo sapien
ccttgctctggtacttgacggcctt

SEQ ID NO: 929830 - DNA, 25 bp, Homo sapien
gtgttccacattgtactcgatcctg

SEQ ID NO: 929831 - DNA, 25 bp, Homo sapien
accgcgtgttccacattgtactcga

SEQ ID NO: 929832 - DNA, 25 bp, Homo sapien
gcgtgttccacattgtactcgatcc

SEQ ID NO: 929833 - DNA, 25 bp, Homo sapien
ctaccgcgtgttccacattgtactc

SEQ ID NO: 929834 - DNA, 25 bp, Homo sapien
ctcggggcaggacttcaggaaagca

SEQ ID NO: 929835 - DNA, 25 bp, Homo sapien
gctcggggcaggacttcaggaaagc

SEQ ID NO: 929836 - DNA, 25 bp, Homo sapien
gtatgctggagtctggtcctgccct

SEQ ID NO: 929837 - DNA, 25 bp, Homo sapien
cagtctttaagaacttgaagtcagg

SEQ ID NO: 929838 - DNA, 25 bp, Homo sapien
ggttggggaccatgcagagaacact

SEQ ID NO: 929839 - DNA, 25 bp, Homo sapien
actgtcagagatgtggcagtgccag

SEQ ID NO: 929840 - DNA, 25 bp, Homo sapien
ttttgagccctgtgatctggtccca

SEQ ID NO: 929841 - DNA, 25 bp, Homo sapien
tgtttctcaccagatggcggcagcg

SEQ ID NO: 929842 - DNA, 25 bp, Homo sapien
caagtccatcggttgccttcactgg

SEQ ID NO: 929843 - DNA, 25 bp, Homo sapien
taacacattccaacctggctgggtg

SEQ ID NO: 929844 - DNA, 25 bp, Homo sapien
tgtgccgcgtctcaatctcgctcag

SEQ ID NO: 929845 - DNA, 25 bp, Homo sapien
ctcagagcctgcttcgagatgctgg

SEQ ID NO: 929846 - DNA, 25 bp, Homo sapien
catgtccatgaacatgtcgtgtagc

SEQ ID NO: 929847 - DNA, 25 bp, Homo sapien
gcctgcttcgagatgctggagtcca

SEQ ID NO: 929848 - DNA, 25 bp, Homo sapien
gagcagggggctgggacccagaggc

SEQ ID NO: 929849 - DNA, 25 bp, Homo sapien
cagggggctgggacccagaggcttg

SEQ ID NO: 929850 - DNA, 25 bp, Homo sapien
gtgggagcagggggctgggacccag

SEQ ID NO: 929851 - DNA, 25 bp, Homo sapien
ggtgggagcagggggctgggaccca

SEQ ID NO: 929852 - DNA, 25 bp, Homo sapien
ccagaggcaaagatggcggggttcc

SEQ ID NO: 929853 - DNA, 25 bp, Homo sapien
cagaggcaaagatggcggggttccc

SEQ ID NO: 929854 - DNA, 25 bp, Homo sapien
cccagaggcaaagatggcggggttc

SEQ ID NO: 929855 - DNA, 25 bp, Homo sapien
gaggcaaagatggcggggttcccac

SEQ ID NO: 929856 - DNA, 25 bp, Homo sapien
ccagctcctcactggtcgtggtcct

SEQ ID NO: 929857 - DNA, 25 bp, Homo sapien
atgcggcctttgcagcgctcgcggt

SEQ ID NO: 929858 - DNA, 25 bp, Homo sapien
gacatgacctccacaaactttctgg

SEQ ID NO: 929859 - DNA, 25 bp, Homo sapien
tagtcggactgcgtggcgttgtact

SEQ ID NO: 929860 - DNA, 25 bp, Homo sapien
ctttgcagcgctcgcggtagtcgga

SEQ ID NO: 929861 - DNA, 25 bp, Homo sapien
gatggaggtgcaggggtcaggccct

SEQ ID NO: 929862 - DNA, 25 bp, Homo sapien
ctgggggcccgagatggaggtgcag

SEQ ID NO: 929863 - DNA, 25 bp, Homo sapien
atggaggtgcaggggtcaggccctg

SEQ ID NO: 929864 - DNA, 25 bp, Homo sapien
ccagagactcaggtgcccgcccatc

SEQ ID NO: 929865 - DNA, 25 bp, Homo sapien
tcttccggatcctcaggtcagcgga

SEQ ID NO: 929866 - DNA, 25 bp, Homo sapien
tcttgctcgatggactgctcgatgc

SEQ ID NO: 929867 - DNA, 25 bp, Homo sapien
ctgtgtcttccggatcctcaggtca

SEQ ID NO: 929868 - DNA, 25 bp, Homo sapien
gaggagcggttcaggccttcctctt

SEQ ID NO: 929869 - DNA, 25 bp, Homo sapien
gctaagtcataaccaggccccttca

SEQ ID NO: 929870 - DNA, 25 bp, Homo sapien
cttggaacgaactttgtttgctgtc

SEQ ID NO: 929871 - DNA, 25 bp, Homo sapien
aacttggaacgaactttgtttgctg

SEQ ID NO: 929872 - DNA, 25 bp, Homo sapien
ttctttatgtcggacatgagttctt

SEQ ID NO: 929873 - DNA, 25 bp, Homo sapien
tttatgtcggacatgagttcttcca

SEQ ID NO: 929874 - DNA, 25 bp, Homo sapien
gacttgatgcttgctggagttgaag

SEQ ID NO: 929875 - DNA, 25 bp, Homo sapien
ttgtgctgtcttcggaggagcctcc

SEQ ID NO: 929876 - DNA, 25 bp, Homo sapien
aagtaattgtggagcagctggcgat

SEQ ID NO: 929877 - DNA, 25 bp, Homo sapien
ttggcgccgggaacagtgacttgat

SEQ ID NO: 929878 - DNA, 25 bp, Homo sapien
gaaccatctccctaaagctggcaga

SEQ ID NO: 929879 - DNA, 25 bp, Homo sapien
gaaattggacgagggtggtgacata

SEQ ID NO: 929880 - DNA, 25 bp, Homo sapien
gtggcccttgttccaactagaacca

SEQ ID NO: 929881 - DNA, 25 bp, Homo sapien
ggccctggccgtggcaggtagctgg

SEQ ID NO: 929882 - DNA, 25 bp, Homo sapien
ccctctgcttgcccctggggctggg

SEQ ID NO: 929883 - DNA, 25 bp, Homo sapien
tctgcttgcccctggggctggggtt

SEQ ID NO: 929884 - DNA, 25 bp, Homo sapien
cccctctgcttgcccctggggctgg

SEQ ID NO: 929885 - DNA, 25 bp, Homo sapien
tgcttgcccctggggctggggtttg

SEQ ID NO: 929886 - DNA, 25 bp, Homo sapien
caggatggcactgtgcttccgcttc

SEQ ID NO: 929887 - DNA, 25 bp, Homo sapien
tgccaggatggcactgtgcttccgc

SEQ ID NO: 929888 - DNA, 25 bp, Homo sapien
ggatggcactgtgcttccgcttcac

SEQ ID NO: 929889 - DNA, 25 bp, Homo sapien
gatggcactgtgcttccgcttcacc

SEQ ID NO: 929890 - DNA, 25 bp, Homo sapien
agcggtctcggtccacggtgacagc

SEQ ID NO: 929891 - DNA, 25 bp, Homo sapien
ggtctcggtccacggtgacagcgac

SEQ ID NO: 929892 - DNA, 25 bp, Homo sapien
ctcggtccacggtgacagcgacatc

SEQ ID NO: 929893 - DNA, 25 bp, Homo sapien
gaagcggtctcggtccacggtgaca

SEQ ID NO: 929894 - DNA, 25 bp, Homo sapien
cataagtggacgtatgtacaggacc

SEQ ID NO: 929895 - DNA, 25 bp, Homo sapien
taagtggacgtatgtacaggaccca

SEQ ID NO: 929896 - DNA, 25 bp, Homo sapien
tgcacacataagtggacgtatgtac

SEQ ID NO: 929897 - DNA, 25 bp, Homo sapien
tgtgcggggttgtgcacacataagt

SEQ ID NO: 929898 - DNA, 25 bp, Homo sapien
ctgggcccagcaggcacaaggggac

SEQ ID NO: 929899 - DNA, 25 bp, Homo sapien
gcccagcaggcacaaggggacagtc

SEQ ID NO: 929900 - DNA, 25 bp, Homo sapien
gggcccagcaggcacaaggggacag

SEQ ID NO: 929901 - DNA, 25 bp, Homo sapien
ccagcaggcacaaggggacagtcat

SEQ ID NO: 929902 - DNA, 25 bp, Homo sapien
tgggaggagagatgcccgcatcctc

SEQ ID NO: 929903 - DNA, 25 bp, Homo sapien
gcacgcaggtcaagtctaccctgga

SEQ ID NO: 929904 - DNA, 25 bp, Homo sapien
gatgggcgaagtgggcctttcctcc

SEQ ID NO: 929905 - DNA, 25 bp, Homo sapien
tctgaggcatggtcaaaccagccac

SEQ ID NO: 929906 - DNA, 25 bp, Homo sapien
cttgttcttccacacgccattcaca

SEQ ID NO: 929907 - DNA, 25 bp, Homo sapien
ttgttcttccacacgccattcacat

SEQ ID NO: 929908 - DNA, 25 bp, Homo sapien
tgttcttccacacgccattcacatt

SEQ ID NO: 929909 - DNA, 25 bp, Homo sapien
gttcttccacacgccattcacattc

SEQ ID NO: 929910 - DNA, 25 bp, Homo sapien
tctcctcctattcaaatccagctcc

SEQ ID NO: 929911 - DNA, 25 bp, Homo sapien
tccttgctacgtcttcagcctcctg

SEQ ID NO: 929912 - DNA, 25 bp, Homo sapien
ctccctccttgctacgtcttcagcc

SEQ ID NO: 929913 - DNA, 25 bp, Homo sapien
ttccaggattgtgctgctccaactc

SEQ ID NO: 929914 - DNA, 25 bp, Homo sapien
gcgggcagtggatccctactgcgac

SEQ ID NO: 929915 - DNA, 25 bp, Homo sapien
acccgacgatcaggtttccgcagcg

SEQ ID NO: 929916 - DNA, 25 bp, Homo sapien
tgtctacaccaaggaggttcccacc

SEQ ID NO: 929917 - DNA, 25 bp, Homo sapien
gatccctactgcgaccaagcagagg

SEQ ID NO: 929918 - DNA, 25 bp, Homo sapien
gcggagctcctgggttcggtccttc

SEQ ID NO: 929919 - DNA, 25 bp, Homo sapien
cggagctcctgggttcggtccttca

SEQ ID NO: 929920 - DNA, 25 bp, Homo sapien
tgcggagctcctgggttcggtcctt

SEQ ID NO: 929921 - DNA, 25 bp, Homo sapien
ggagctcctgggttcggtccttcat

SEQ ID NO: 929922 - DNA, 25 bp, Homo sapien
tcccgggagtggcagcggcgccggc

SEQ ID NO: 929923 - DNA, 25 bp, Homo sapien
cggcgccggctgcagccgtgtgagc

SEQ ID NO: 929924 - DNA, 25 bp, Homo sapien
gctcccgggagtggcagcggcgccg

SEQ ID NO: 929925 - DNA, 25 bp, Homo sapien
ggctgcagccgtgtgagccccgcat

SEQ ID NO: 929926 - DNA, 25 bp, Homo sapien
gacagagtcttcctctgccgcctag

SEQ ID NO: 929927 - DNA, 25 bp, Homo sapien
cagagtcttcctctgccgcctaggc

SEQ ID NO: 929928 - DNA, 25 bp, Homo sapien
gagacagagtcttcctctgccgcct

SEQ ID NO: 929929 - DNA, 25 bp, Homo sapien
tgagacagagtcttcctctgccgcc

SEQ ID NO: 929930 - DNA, 25 bp, Homo sapien
gctatctgcactacaggcatactgc

SEQ ID NO: 929931 - DNA, 25 bp, Homo sapien
gcatactgcactacaacccggaact

SEQ ID NO: 929932 - DNA, 25 bp, Homo sapien
tctttaggcagcttggtaatcccct

SEQ ID NO: 929933 - DNA, 25 bp, Homo sapien
ccaaattggtggtgaacttagtgca

SEQ ID NO: 929934 - DNA, 25 bp, Homo sapien
tcacgccaccggctcatgccactgg

SEQ ID NO: 929935 - DNA, 25 bp, Homo sapien
tgtggctcacgccaccggctcatgc

SEQ ID NO: 929936 - DNA, 25 bp, Homo sapien
gctgtggctcacgccaccggctcat

SEQ ID NO: 929937 - DNA, 25 bp, Homo sapien
tggctcacgccaccggctcatgcca

SEQ ID NO: 929938 - DNA, 25 bp, Homo sapien
tgaggtctgaccacccctgtaaaac

SEQ ID NO: 929939 - DNA, 25 bp, Homo sapien
tgtaaaacctcgtgcccacacagtg

SEQ ID NO: 929940 - DNA, 25 bp, Homo sapien
ctgtaaaacctcgtgcccacacagt

SEQ ID NO: 929941 - DNA, 25 bp, Homo sapien
ttaaagcctgaggtctgaccacccc

SEQ ID NO: 929942 - DNA, 25 bp, Homo sapien
acttgaagcctggggttttgtgcct

SEQ ID NO: 929943 - DNA, 25 bp, Homo sapien
cttgaagcctggggttttgtgcctc

SEQ ID NO: 929944 - DNA, 25 bp, Homo sapien
ttgaagcctggggttttgtgcctcc

SEQ ID NO: 929945 - DNA, 25 bp, Homo sapien
tgaagcctggggttttgtgcctcct

SEQ ID NO: 929946 - DNA, 25 bp, Homo sapien
gcgttcggcaccgtctgcatctggg

SEQ ID NO: 929947 - DNA, 25 bp, Homo sapien
tcctgtgggcggtcagcgtggatcc

SEQ ID NO: 929948 - DNA, 25 bp, Homo sapien
ggaagcctcggatggcagctatgaa

SEQ ID NO: 929949 - DNA, 25 bp, Homo sapien
gaagagccgcataatctcagggtgg

SEQ ID NO: 929950 - DNA, 25 bp, Homo sapien
agcgacggccatcaaaaacgggtga

SEQ ID NO: 929951 - DNA, 25 bp, Homo sapien
cctgggcgagtaaagcatgcccctc

SEQ ID NO: 929952 - DNA, 25 bp, Homo sapien
agagagctgtgtgagcccatatgcc

SEQ ID NO: 929953 - DNA, 25 bp, Homo sapien
cccggtggtatttctggcctctcag

SEQ ID NO: 929954 - DNA, 25 bp, Homo sapien
aagatcttgtctaggtgctgggtca

SEQ ID NO: 929955 - DNA, 25 bp, Homo sapien
tgcacgaactgggagtttccaccaa

SEQ ID NO: 929956 - DNA, 25 bp, Homo sapien
tacctctaccaggttagtgagcagg

SEQ ID NO: 929957 - DNA, 25 bp, Homo sapien
tccaccaaggagaaagagtgttggc

SEQ ID NO: 929958 - DNA, 25 bp, Homo sapien
catccggggcaccttgggtgtatca

SEQ ID NO: 929959 - DNA, 25 bp, Homo sapien
gtctgggggtgccactcttcccttg

SEQ ID NO: 929960 - DNA, 25 bp, Homo sapien
ttgacaggtcctggtctacaatacc

SEQ ID NO: 929961 - DNA, 25 bp, Homo sapien
gtcctggtctacaataccatccggg

SEQ ID NO: 929962 - DNA, 25 bp, Homo sapien
ctggatgacagaactgagctgttca

SEQ ID NO: 929963 - DNA, 25 bp, Homo sapien
tgagctgttcatccgccagttttcg

SEQ ID NO: 929964 - DNA, 25 bp, Homo sapien
ggcagctcatctgcgatgttgatgg

SEQ ID NO: 929965 - DNA, 25 bp, Homo sapien
tccgccagttttcgggcacgggagc

SEQ ID NO: 929966 - DNA, 25 bp, Homo sapien
tgccacataggttgcaaagtgggag

SEQ ID NO: 929967 - DNA, 25 bp, Homo sapien
gatatctacagcaatgagacgttcc

SEQ ID NO: 929968 - DNA, 25 bp, Homo sapien
ggctgccacataggttgcaaagtgg

SEQ ID NO: 929969 - DNA, 25 bp, Homo sapien
tacagcaatgagacgttccaccagc

SEQ ID NO: 929970 - DNA, 25 bp, Homo sapien
ggagagaaccgaactgggaccagtc

SEQ ID NO: 929971 - DNA, 25 bp, Homo sapien
tcttaggcagacatagggagtctca

SEQ ID NO: 929972 - DNA, 25 bp, Homo sapien
tccaacgatcatgtgagtcccaggt

SEQ ID NO: 929973 - DNA, 25 bp, Homo sapien
gggccctcagggtatatactgaatg

SEQ ID NO: 929974 - DNA, 25 bp, Homo sapien
ctgtggccaacgacgacgcagggca

SEQ ID NO: 929975 - DNA, 25 bp, Homo sapien
tgtggccaacgacgacgcagggcac

SEQ ID NO: 929976 - DNA, 25 bp, Homo sapien
catgctgtggccaacgacgacgcag

SEQ ID NO: 929977 - DNA, 25 bp, Homo sapien
tgctgtggccaacgacgacgcaggg

SEQ ID NO: 929978 - DNA, 25 bp, Homo sapien
atgatctcgtagctcatgtctgggc

SEQ ID NO: 929979 - DNA, 25 bp, Homo sapien
tgatctcgtagctcatgtctgggct

SEQ ID NO: 929980 - DNA, 25 bp, Homo sapien
ggtgagacggggctgcgttgatatc

SEQ ID NO: 929981 - DNA, 25 bp, Homo sapien
tgagacggggctgcgttgatatccc

SEQ ID NO: 929982 - DNA, 25 bp, Homo sapien
agacggggctgcgttgatatcccca

SEQ ID NO: 929983 - DNA, 25 bp, Homo sapien
acggggctgcgttgatatccccatt

SEQ ID NO: 929984 - DNA, 25 bp, Homo sapien
ggtgtggagagcctggggatacacc

SEQ ID NO: 929985 - DNA, 25 bp, Homo sapien
cttgtagggacagcaggtcaaaggt

SEQ ID NO: 929986 - DNA, 25 bp, Homo sapien
ggtcaaaggtgtggagagcctgggg

SEQ ID NO: 929987 - DNA, 25 bp, Homo sapien
aaggtgtggagagcctggggataca

SEQ ID NO: 929988 - DNA, 25 bp, Homo sapien
ttgtgaccacgtctctgaagggctg

SEQ ID NO: 929989 - DNA, 25 bp, Homo sapien
ggcaatctcggagaatgccaggaag

SEQ ID NO: 929990 - DNA, 25 bp, Homo sapien
tttccaacagtaggagcacagaaga

SEQ ID NO: 929991 - DNA, 25 bp, Homo sapien
agcaggccccagggttgtgaccacg

SEQ ID NO: 929992 - DNA, 25 bp, Homo sapien
gtgaacaagcaggccccttcatgga

SEQ ID NO: 929993 - DNA, 25 bp, Homo sapien
caggccccttcatggaaagggtgca

SEQ ID NO: 929994 - DNA, 25 bp, Homo sapien
ggaaagggtgcaggcgcctaggcat

SEQ ID NO: 929995 - DNA, 25 bp, Homo sapien
gtgcaggcgcctaggcatgggccag

SEQ ID NO: 929996 - DNA, 25 bp, Homo sapien
cagccccaaaggagccccgcccact

SEQ ID NO: 929997 - DNA, 25 bp, Homo sapien
aagtgagcgtgagaagcgggacccc

SEQ ID NO: 929998 - DNA, 25 bp, Homo sapien
gtgagggatctggaagtgagcgtga

SEQ ID NO: 929999 - DNA, 25 bp, Homo sapien
ggagccccgcccactcgaaagctca

SEQ ID NO: 930000 - DNA, 25 bp, Homo sapien
ttggcgatggagttgaagttagttt

SEQ ID NO: 930001 - DNA, 25 bp, Homo sapien
ttttgctgccgaagagcccgtgcaa

SEQ ID NO: 930002 - DNA, 25 bp, Homo sapien
agcccgtgcaaaaagacgacggccg

SEQ ID NO: 930003 - DNA, 25 bp, Homo sapien
gagttgaagttagttttgctgccga

SEQ ID NO: 930004 - DNA, 25 bp, Homo sapien
gaggacagaggatggcctcccgccc

SEQ ID NO: 930005 - DNA, 25 bp, Homo sapien
tgacaggcccaaagggaggagatgg

SEQ ID NO: 930006 - DNA, 25 bp, Homo sapien
ctcccgcccggtgcccttgactgac

SEQ ID NO: 930007 - DNA, 25 bp, Homo sapien
gtcagagtctgagccggcggagacg

SEQ ID NO: 930008 - DNA, 25 bp, Homo sapien
aggctcgggtccagcggagcatgct

SEQ ID NO: 930009 - DNA, 25 bp, Homo sapien
ttgcaagctgttggccggctcgcat

SEQ ID NO: 930010 - DNA, 25 bp, Homo sapien
ggccgagtccctcacgcgggagcct

SEQ ID NO: 930011 - DNA, 25 bp, Homo sapien
gcaccctcgcgaagctagggccgtg

SEQ ID NO: 930012 - DNA, 25 bp, Homo sapien
catcgcgggattctccgcccttggt

SEQ ID NO: 930013 - DNA, 25 bp, Homo sapien
tacgccattacgtaatccccgcagg

SEQ ID NO: 930014 - DNA, 25 bp, Homo sapien
ctaggctgggcaacccgcggtgctt

SEQ ID NO: 930015 - DNA, 25 bp, Homo sapien
tacgtatccccgagaacagtccggc

SEQ ID NO: 930016 - DNA, 25 bp, Homo sapien
gctgcttgttttgtggccggtcgcc

SEQ ID NO: 930017 - DNA, 25 bp, Homo sapien
aggctgcttgttttgtggccggtcg

SEQ ID NO: 930018 - DNA, 25 bp, Homo sapien
tgcttgttttgtggccggtcgccat

SEQ ID NO: 930019 - DNA, 25 bp, Homo sapien
ctgcttgttttgtggccggtcgcca

SEQ ID NO: 930020 - DNA, 25 bp, Homo sapien
atgctgtacaactccctgcaggctc

SEQ ID NO: 930021 - DNA, 25 bp, Homo sapien
ctgttgacacaggatgatggatgtc

SEQ ID NO: 930022 - DNA, 25 bp, Homo sapien
tgccaggccggcaggaccataagca

SEQ ID NO: 930023 - DNA, 25 bp, Homo sapien
atgatggatgtcttgtcattgctgc

SEQ ID NO: 930024 - DNA, 25 bp, Homo sapien
gagccataatcatgtcattgtgctc

SEQ ID NO: 930025 - DNA, 25 bp, Homo sapien
aaaagaaatgatgggaggttgggtg

SEQ ID NO: 930026 - DNA, 25 bp, Homo sapien
acaaaaaagaaatgatgggaggttg

SEQ ID NO: 930027 - DNA, 25 bp, Homo sapien
ccataatcatgtcattgtgctccag

SEQ ID NO: 930028 - DNA, 25 bp, Homo sapien
tggtaaatgaataaccctgcccctg

SEQ ID NO: 930029 - DNA, 25 bp, Homo sapien
gcctcacagtgtagccaggagggat

SEQ ID NO: 930030 - DNA, 25 bp, Homo sapien
gtggaggcagatgcaaccccttggt

SEQ ID NO: 930031 - DNA, 25 bp, Homo sapien
taagccccttcattgtctaaggcga

SEQ ID NO: 930032 - DNA, 25 bp, Homo sapien
ggtccctgcccagcgcgagcatggg

SEQ ID NO: 930033 - DNA, 25 bp, Homo sapien
tccgaggcaaggctgcacgctggat

SEQ ID NO: 930034 - DNA, 25 bp, Homo sapien
tgaggtttcacagtccatgcaggtt

SEQ ID NO: 930035 - DNA, 25 bp, Homo sapien
tggtcaagtattggcggtcacccag

SEQ ID NO: 930036 - DNA, 25 bp, Homo sapien
agcgcggcgcggagtagacgacctt

SEQ ID NO: 930037 - DNA, 25 bp, Homo sapien
ggccgtgtacttcttctcgcgtggg

SEQ ID NO: 930038 - DNA, 25 bp, Homo sapien
tccttgcggtcgtagcctgtgccca

SEQ ID NO: 930039 - DNA, 25 bp, Homo sapien
ccttggtggccgtgtacttcttctc

SEQ ID NO: 930040 - DNA, 25 bp, Homo sapien
gtagaagtcccggataatggtgttg

SEQ ID NO: 930041 - DNA, 25 bp, Homo sapien
gataatggtgttggccgaccaggac

SEQ ID NO: 930042 - DNA, 25 bp, Homo sapien
ccgaccaggacaccggcacgagggt

SEQ ID NO: 930043 - DNA, 25 bp, Homo sapien
cgagggtgagcagggcggcgagaag

SEQ ID NO: 930044 - DNA, 25 bp, Homo sapien
cccagatgttctgcgacgtgatgat

SEQ ID NO: 930045 - DNA, 25 bp, Homo sapien
ctgccacgatggtgatcttggcctt

SEQ ID NO: 930046 - DNA, 25 bp, Homo sapien
tggccttggccgtgtcgtcctgcac

SEQ ID NO: 930047 - DNA, 25 bp, Homo sapien
ggcaacgcgcagcacacgatggtgc

SEQ ID NO: 930048 - DNA, 25 bp, Homo sapien
aggcccgctccaccgggtggctccg

SEQ ID NO: 930049 - DNA, 25 bp, Homo sapien
gcgtcttagctaagtgcccagcgct

SEQ ID NO: 930050 - DNA, 25 bp, Homo sapien
ctaacggctcggctccatacgctct

SEQ ID NO: 930051 - DNA, 25 bp, Homo sapien
acggacggacggactgactcaccga

SEQ ID NO: 930052 - DNA, 25 bp, Homo sapien
ggccggtgcgtcttagctaagtgcc

SEQ ID NO: 930053 - DNA, 25 bp, Homo sapien
ctaaagtggggagacagtgttgggg

SEQ ID NO: 930054 - DNA, 25 bp, Homo sapien
gtggacaggaaatttcctcttagag

SEQ ID NO: 930055 - DNA, 25 bp, Homo sapien
tcgtggacaggaaatttcctcttag

SEQ ID NO: 930056 - DNA, 25 bp, Homo sapien
tgctcgtggacaggaaatttcctct

SEQ ID NO: 930057 - DNA, 25 bp, Homo sapien
tactcctggggccatagctgctccc

SEQ ID NO: 930058 - DNA, 25 bp, Homo sapien
cctggggccatagctgctcccccaa

SEQ ID NO: 930059 - DNA, 25 bp, Homo sapien
gggccatagctgctcccccaagggt

SEQ ID NO: 930060 - DNA, 25 bp, Homo sapien
tggggccatagctgctcccccaagg

SEQ ID NO: 930061 - DNA, 25 bp, Homo sapien
tcttgccttttgaccttcccaggga

SEQ ID NO: 930062 - DNA, 25 bp, Homo sapien
gtccaggaatcaggcagccatcacc

SEQ ID NO: 930063 - DNA, 25 bp, Homo sapien
ttttgaccttcccagggacctggca

SEQ ID NO: 930064 - DNA, 25 bp, Homo sapien
tgtgccgtccgcaaacacccaaggg

SEQ ID NO: 930065 - DNA, 25 bp, Homo sapien
tgtgtctccacacccttatcacagc

SEQ ID NO: 930066 - DNA, 25 bp, Homo sapien
ttgctgtgtctccacacccttatca

SEQ ID NO: 930067 - DNA, 25 bp, Homo sapien
cacccttatcacagccctgcgtcat

SEQ ID NO: 930068 - DNA, 25 bp, Homo sapien
gtctccacacccttatcacagccct

SEQ ID NO: 930069 - DNA, 25 bp, Homo sapien
gacataaactgaaatcgatgcaccg

SEQ ID NO: 930070 - DNA, 25 bp, Homo sapien
tctaagtcctgtcccctgtgtaagc

SEQ ID NO: 930071 - DNA, 25 bp, Homo sapien
gatttacaggtgtatgcgaccatgc

SEQ ID NO: 930072 - DNA, 25 bp, Homo sapien
catccttgccaccagaagtgccaga

SEQ ID NO: 930073 - DNA, 25 bp, Homo sapien
caagacttctacaatccgctggtgg

SEQ ID NO: 930074 - DNA, 25 bp, Homo sapien
gcaagtgtaccaactgcctggagga

SEQ ID NO: 930075 - DNA, 25 bp, Homo sapien
ccttatggtgatagtgccggtgtcc

SEQ ID NO: 930076 - DNA, 25 bp, Homo sapien
tgctgccagcaactacgtgtaaggt

SEQ ID NO: 930077 - DNA, 25 bp, Homo sapien
ccctggagactgatcccctctgagt

SEQ ID NO: 930078 - DNA, 25 bp, Homo sapien
tccaaggacactaatgagcctggga

SEQ ID NO: 930079 - DNA, 25 bp, Homo sapien
ggcctcaggactctctgcctcaccc

SEQ ID NO: 930080 - DNA, 25 bp, Homo sapien
gaagagctattcatcactgtaatta

SEQ ID NO: 930081 - DNA, 25 bp, Homo sapien
ggaccactgtgttttggccgggaca

SEQ ID NO: 930082 - DNA, 25 bp, Homo sapien
caggaccactgtgttttggccggga

SEQ ID NO: 930083 - DNA, 25 bp, Homo sapien
ccactgtgttttggccgggacataa

SEQ ID NO: 930084 - DNA, 25 bp, Homo sapien
gggcaggaccactgtgttttggccg

SEQ ID NO: 930085 - DNA, 25 bp, Homo sapien
tcgaaacgggcctccaaggtatcac

SEQ ID NO: 930086 - DNA, 25 bp, Homo sapien
atccagggaattgtgaaaaattgga

SEQ ID NO: 930087 - DNA, 25 bp, Homo sapien
cagggaattgtgaaaaattggagct

SEQ ID NO: 930088 - DNA, 25 bp, Homo sapien
ctggggaacatagtggcaccatctc

SEQ ID NO: 930089 - DNA, 25 bp, Homo sapien
tctttgctgagtcaccctacaggtc

SEQ ID NO: 930090 - DNA, 25 bp, Homo sapien
tggatcctgctcgtcctgaaagccc

SEQ ID NO: 930091 - DNA, 25 bp, Homo sapien
ccagctccgaggtatgggccacctg

SEQ ID NO: 930092 - DNA, 25 bp, Homo sapien
tatcaccttgtccactgtatatggg

SEQ ID NO: 930093 - DNA, 25 bp, Homo sapien
cacgcccagagctcggcattctgat

SEQ ID NO: 930094 - DNA, 25 bp, Homo sapien
tcaagccacgcccagagctcggcat

SEQ ID NO: 930095 - DNA, 25 bp, Homo sapien
agccttcaagccacgcccagagctc

SEQ ID NO: 930096 - DNA, 25 bp, Homo sapien
ggcagccttcaagccacgcccagag

SEQ ID NO: 930097 - DNA, 25 bp, Homo sapien
ggcccagacctacagcttgggattt

SEQ ID NO: 930098 - DNA, 25 bp, Homo sapien
tctgccctgctactgttgtgcaaag

SEQ ID NO: 930099 - DNA, 25 bp, Homo sapien
ccttgagtctctgccctgctactgt

SEQ ID NO: 930100 - DNA, 25 bp, Homo sapien
ccaggcccagacctacagcttggga

SEQ ID NO: 930101 - DNA, 25 bp, Homo sapien
cattttcttgtcagtaagttagagg

SEQ ID NO: 930102 - DNA, 25 bp, Homo sapien
cagtaagttagaggtgagcggaccc

SEQ ID NO: 930103 - DNA, 25 bp, Homo sapien
aagttagaggtgagcggacccagca

SEQ ID NO: 930104 - DNA, 25 bp, Homo sapien
tcattttcttgtcagtaagttagag

SEQ ID NO: 930105 - DNA, 25 bp, Homo sapien
aaatagctggcatgcacccacggca

SEQ ID NO: 930106 - DNA, 25 bp, Homo sapien
agctggcatgcacccacggcacctg

SEQ ID NO: 930107 - DNA, 25 bp, Homo sapien
caaatagctggcatgcacccacggc

SEQ ID NO: 930108 - DNA, 25 bp, Homo sapien
atagctggcatgcacccacggcacc

SEQ ID NO: 930109 - DNA, 25 bp, Homo sapien
tcatttaataggcagggcatttctg

SEQ ID NO: 930110 - DNA, 25 bp, Homo sapien
agctcatttaataggcagggcattt

SEQ ID NO: 930111 - DNA, 25 bp, Homo sapien
cccagctaaggccacatggagtcag

SEQ ID NO: 930112 - DNA, 25 bp, Homo sapien
ggcccagcagatgggcccagctaag

SEQ ID NO: 930113 - DNA, 25 bp, Homo sapien
tagacaatgccggagatgaagccat

SEQ ID NO: 930114 - DNA, 25 bp, Homo sapien
tcacttcctcaacctgggtcgcctt

SEQ ID NO: 930115 - DNA, 25 bp, Homo sapien
tcgccttccactttcggtacaggta

SEQ ID NO: 930116 - DNA, 25 bp, Homo sapien
cttccactttcggtacaggtagaca

SEQ ID NO: 930117 - DNA, 25 bp, Homo sapien
cagcggtccacaggcggtccacagg

SEQ ID NO: 930118 - DNA, 25 bp, Homo sapien
ctccagctcggaggtagccagctcc

SEQ ID NO: 930119 - DNA, 25 bp, Homo sapien
ggaggtagccagctcccagcggtcc

SEQ ID NO: 930120 - DNA, 25 bp, Homo sapien
gtccacaggcggtccacaggccagg

SEQ ID NO: 930121 - DNA, 25 bp, Homo sapien
tggtcctggtggtcagacacaccag

SEQ ID NO: 930122 - DNA, 25 bp, Homo sapien
acgagttggtcctggtggtcagaca

SEQ ID NO: 930123 - DNA, 25 bp, Homo sapien
ccagagcctccttgtattgaaggtt

SEQ ID NO: 930124 - DNA, 25 bp, Homo sapien
tattgaaggttggacgagttggtcc

SEQ ID NO: 930125 - DNA, 25 bp, Homo sapien
tgaatggccttgtcacctcaggtcc

SEQ ID NO: 930126 - DNA, 25 bp, Homo sapien
tgaagtgccctacagtaagtgccgg

SEQ ID NO: 930127 - DNA, 25 bp, Homo sapien
tgggctttggatcttgggctatccc

SEQ ID NO: 930128 - DNA, 25 bp, Homo sapien
attatctaacatcacaggaaggctg

SEQ ID NO: 930129 - DNA, 25 bp, Homo sapien
gctgcttcacccagtagaaagttcc

SEQ ID NO: 930130 - DNA, 25 bp, Homo sapien
gcccaacttcgacctttccagctga

SEQ ID NO: 930131 - DNA, 25 bp, Homo sapien
cacaggttgggctaggaagtccgat

SEQ ID NO: 930132 - DNA, 25 bp, Homo sapien
tgtcttcttgggcccaacttcgacc

SEQ ID NO: 930133 - DNA, 25 bp, Homo sapien
ccagtgggttggagatcaaggccca

SEQ ID NO: 930134 - DNA, 25 bp, Homo sapien
ggttggagatcaaggcccagagggc

SEQ ID NO: 930135 - DNA, 25 bp, Homo sapien
cccagtgggttggagatcaaggccc

SEQ ID NO: 930136 - DNA, 25 bp, Homo sapien
gtgggttggagatcaaggcccagag

SEQ ID NO: 930137 - DNA, 25 bp, Homo sapien
gagcagaacaaagcgctgagcaaga

SEQ ID NO: 930138 - DNA, 25 bp, Homo sapien
agagcagaacaaagcgctgagcaag

SEQ ID NO: 930139 - DNA, 25 bp, Homo sapien
gcaatgtgcaaagtttacaaacggt

SEQ ID NO: 930140 - DNA, 25 bp, Homo sapien
tgtgcaaagtttacaaacggtgctc

SEQ ID NO: 930141 - DNA, 25 bp, Homo sapien
ggcagcgcaatgtgcaaagtttaca

SEQ ID NO: 930142 - DNA, 25 bp, Homo sapien
gtttacaaacggtgctcacagctct

SEQ ID NO: 930143 - DNA, 25 bp, Homo sapien
gtgacatgtagctcaggtatcgcat

SEQ ID NO: 930144 - DNA, 25 bp, Homo sapien
tcaggtatcgcattgcagggcacct

SEQ ID NO: 930145 - DNA, 25 bp, Homo sapien
cgactatcagcaccgcgtcgaaggt

SEQ ID NO: 930146 - DNA, 25 bp, Homo sapien
tgagggcaccgactatcagcaccgc

SEQ ID NO: 930147 - DNA, 25 bp, Homo sapien
aggcgctgatagaggccgggggcct

SEQ ID NO: 930148 - DNA, 25 bp, Homo sapien
ggctgaggcgctgatagaggccggg

SEQ ID NO: 930149 - DNA, 25 bp, Homo sapien
tgaggcgctgatagaggccgggggc

SEQ ID NO: 930150 - DNA, 25 bp, Homo sapien
gaggctgaggcgctgatagaggccg

SEQ ID NO: 930151 - DNA, 25 bp, Homo sapien
gtgaggcagtccactgcgaggcggg

SEQ ID NO: 930152 - DNA, 25 bp, Homo sapien
cggggcgcacggtacagcagggtgg

SEQ ID NO: 930153 - DNA, 25 bp, Homo sapien
gtgtgaggcagtccactgcgaggcg

SEQ ID NO: 930154 - DNA, 25 bp, Homo sapien
cgaggcggggcgcacggtacagcag

SEQ ID NO: 930155 - DNA, 25 bp, Homo sapien
gccgcccccgggtgcaaggctgatt

SEQ ID NO: 930156 - DNA, 25 bp, Homo sapien
ggcaggactgtagggttcttagcca

SEQ ID NO: 930157 - DNA, 25 bp, Homo sapien
ggttcttagccaggcctcacttcgt

SEQ ID NO: 930158 - DNA, 25 bp, Homo sapien
ccaaagggcttaggattacggcttg

SEQ ID NO: 930159 - DNA, 25 bp, Homo sapien
caggtcggggatgccatgcgcggcc

SEQ ID NO: 930160 - DNA, 25 bp, Homo sapien
atgcgcggccctgacccgcgcccgc

SEQ ID NO: 930161 - DNA, 25 bp, Homo sapien
ggagcccagcggtcatagaaatgga

SEQ ID NO: 930162 - DNA, 25 bp, Homo sapien
cccagcggtcatagaaatggagctt

SEQ ID NO: 930163 - DNA, 25 bp, Homo sapien
atccagcgcgcctcgggcgtgtggg

SEQ ID NO: 930164 - DNA, 25 bp, Homo sapien
caatccagcgcgcctcgggcgtgtg

SEQ ID NO: 930165 - DNA, 25 bp, Homo sapien
cctcgggcgtgtgggcaacaggact

SEQ ID NO: 930166 - DNA, 25 bp, Homo sapien
cgcgcctcgggcgtgtgggcaacag

SEQ ID NO: 930167 - DNA, 25 bp, Homo sapien
tccttggccgtgttgggctcagacg

SEQ ID NO: 930168 - DNA, 25 bp, Homo sapien
cacttgattcctgttccaagatctg

SEQ ID NO: 930169 - DNA, 25 bp, Homo sapien
caggagccaggtaaaggcagtgggt

SEQ ID NO: 930170 - DNA, 25 bp, Homo sapien
ggaagctttgctctaagacctcctt

SEQ ID NO: 930171 - DNA, 25 bp, Homo sapien
actgcttccgactgggcaggcagct

SEQ ID NO: 930172 - DNA, 25 bp, Homo sapien
gacctggagggtgtgtcagaagtcc

SEQ ID NO: 930173 - DNA, 25 bp, Homo sapien
gtcatgtctgcacggcctgatgttg

SEQ ID NO: 930174 - DNA, 25 bp, Homo sapien
ggccatctggacagatctgtttttg

SEQ ID NO: 930175 - DNA, 25 bp, Homo sapien
gagacagaatgagcagaaagcaccc

SEQ ID NO: 930176 - DNA, 25 bp, Homo sapien
ggaccatcctgatggaccttcccat

SEQ ID NO: 930177 - DNA, 25 bp, Homo sapien
catcatccttggaccatcctgatgg

SEQ ID NO: 930178 - DNA, 25 bp, Homo sapien
agaaagcaccctggggccgttggca

SEQ ID NO: 930179 - DNA, 25 bp, Homo sapien
ggaagctgacatgtcccaaaggtcg

SEQ ID NO: 930180 - DNA, 25 bp, Homo sapien
ctggaatgcccggaggtcatcctct

SEQ ID NO: 930181 - DNA, 25 bp, Homo sapien
catcctctgggagtgtccacatatt

SEQ ID NO: 930182 - DNA, 25 bp, Homo sapien
tcccaaaggtcgatgcactggaatg

SEQ ID NO: 930183 - DNA, 25 bp, Homo sapien
cctcgtactctcctccgactctctt

SEQ ID NO: 930184 - DNA, 25 bp, Homo sapien
gtggggacctcgtactctcctccga

SEQ ID NO: 930185 - DNA, 25 bp, Homo sapien
tactctcctccgactctctttcctg

SEQ ID NO: 930186 - DNA, 25 bp, Homo sapien
ggacctcgtactctcctccgactct

SEQ ID NO: 930187 - DNA, 25 bp, Homo sapien
gaacacagtccctcggctccttcat

SEQ ID NO: 930188 - DNA, 25 bp, Homo sapien
agaggtgacggcaggaacacagtcc

SEQ ID NO: 930189 - DNA, 25 bp, Homo sapien
acggcaggaacacagtccctcggct

SEQ ID NO: 930190 - DNA, 25 bp, Homo sapien
tgtcacttttggagaggtgacggca

SEQ ID NO: 930191 - DNA, 25 bp, Homo sapien
ccacttggccagcttctgcgtgttt

SEQ ID NO: 930192 - DNA, 25 bp, Homo sapien
tggtgggggccctcgatcaacactt

SEQ ID NO: 930193 - DNA, 25 bp, Homo sapien
ttggccagcttctgcgtgtttggca

SEQ ID NO: 930194 - DNA, 25 bp, Homo sapien
acttccatcccgtaagtactgccgg

SEQ ID NO: 930195 - DNA, 25 bp, Homo sapien
ccccactccctgaccgtctcctcaa

SEQ ID NO: 930196 - DNA, 25 bp, Homo sapien
cactccctgaccgtctcctcaacct

SEQ ID NO: 930197 - DNA, 25 bp, Homo sapien
gaccgtctcctcaacctctccgttg

SEQ ID NO: 930198 - DNA, 25 bp, Homo sapien
tccctgaccgtctcctcaacctctc

SEQ ID NO: 930199 - DNA, 25 bp, Homo sapien
tctggttctacttggatgtaagttt

SEQ ID NO: 930200 - DNA, 25 bp, Homo sapien
acttggatgtaagtttcctgtggga

SEQ ID NO: 930201 - DNA, 25 bp, Homo sapien
gttctacttggatgtaagtttcctg

SEQ ID NO: 930202 - DNA, 25 bp, Homo sapien
ctataaaaagctcttgggcactgtt

SEQ ID NO: 930203 - DNA, 25 bp, Homo sapien
gtctgaggggaggtctgtacgtctt

SEQ ID NO: 930204 - DNA, 25 bp, Homo sapien
aggtctgtacgtcttgctgggagca

SEQ ID NO: 930205 - DNA, 25 bp, Homo sapien
gtacgtcttgctgggagcaggccca

SEQ ID NO: 930206 - DNA, 25 bp, Homo sapien
agcgggggtcccagacaggtgtcca

SEQ ID NO: 930207 - DNA, 25 bp, Homo sapien
ccaggaagccggttgccagacatga

SEQ ID NO: 930208 - DNA, 25 bp, Homo sapien
gttgccagacatgagggccctggaa

SEQ ID NO: 930209 - DNA, 25 bp, Homo sapien
aaacacacaaccaggggacaccaga

SEQ ID NO: 930210 - DNA, 25 bp, Homo sapien
aagccggttgccagacatgagggcc

SEQ ID NO: 930211 - DNA, 25 bp, Homo sapien
gatctcatcatggaattcccaacct

SEQ ID NO: 930212 - DNA, 25 bp, Homo sapien
tcaatgtgtaaattggcaggagaca

SEQ ID NO: 930213 - DNA, 25 bp, Homo sapien
tgtcctcacatcgtagaaagagagt

SEQ ID NO: 930214 - DNA, 25 bp, Homo sapien
ccaaaggtctcatctctggatacca

SEQ ID NO: 930215 - DNA, 25 bp, Homo sapien
tgtataatggcatgtgtccaccgtt

SEQ ID NO: 930216 - DNA, 25 bp, Homo sapien
ccagagttcatacttgacaccataa

SEQ ID NO: 930217 - DNA, 25 bp, Homo sapien
cccaagttcacagtttccataggct

SEQ ID NO: 930218 - DNA, 25 bp, Homo sapien
cataggcttcactctaggtgttata

SEQ ID NO: 930219 - DNA, 25 bp, Homo sapien
gcagcgagtcgggaaggccggccca

SEQ ID NO: 930220 - DNA, 25 bp, Homo sapien
cagcgagtcgggaaggccggcccat

SEQ ID NO: 930221 - DNA, 25 bp, Homo sapien
tgggcagcgagtcgggaaggccggc

SEQ ID NO: 930222 - DNA, 25 bp, Homo sapien
gggcagcgagtcgggaaggccggcc

SEQ ID NO: 930223 - DNA, 25 bp, Homo sapien
cacaagtcatcatgagccgggctca

SEQ ID NO: 930224 - DNA, 25 bp, Homo sapien
cgggctcagaggacacggtagacct

SEQ ID NO: 930225 - DNA, 25 bp, Homo sapien
gcaagagctcaaacagagggaagcc

SEQ ID NO: 930226 - DNA, 25 bp, Homo sapien
ggcgcacgcttgtaaattacccctg

SEQ ID NO: 930227 - DNA, 25 bp, Homo sapien
caaggcctcggagcattgagagaca

SEQ ID NO: 930228 - DNA, 25 bp, Homo sapien
tagtagatggataagctgggccacc

SEQ ID NO: 930229 - DNA, 25 bp, Homo sapien
tggacaccgattagcctcccaagga

SEQ ID NO: 930230 - DNA, 25 bp, Homo sapien
taagccaggtaagacccaaggcctc

SEQ ID NO: 930231 - DNA, 25 bp, Homo sapien
cagccaggcgcttggattacaaact

SEQ ID NO: 930232 - DNA, 25 bp, Homo sapien
tggtattcctgtgcccgtgcagtgg

SEQ ID NO: 930233 - DNA, 25 bp, Homo sapien
aacttggctgcatcttcggaacaca

SEQ ID NO: 930234 - DNA, 25 bp, Homo sapien
cagtgagttcttggctagcatggct

SEQ ID NO: 930235 - DNA, 25 bp, Homo sapien
aaaaaattgtatgcgatcctcccac

SEQ ID NO: 930236 - DNA, 25 bp, Homo sapien
gtgtctggcctacaaaaatcttaca

SEQ ID NO: 930237 - DNA, 25 bp, Homo sapien
tacagttgcacagctaaatggtggc

SEQ ID NO: 930238 - DNA, 25 bp, Homo sapien
tgaggttcccagagcttaagtaact

SEQ ID NO: 930239 - DNA, 25 bp, Homo sapien
ttagttcctggtgtcggcgtggctc

SEQ ID NO: 930240 - DNA, 25 bp, Homo sapien
aaagttatgaactcctgagcctgca

SEQ ID NO: 930241 - DNA, 25 bp, Homo sapien
cacagcaaatctatgccagggccga

SEQ ID NO: 930242 - DNA, 25 bp, Homo sapien
cccagcaagggaaagtaactgatcc

SEQ ID NO: 930243 - DNA, 25 bp, Homo sapien
ctggagttggtgtggctcctggcgt

SEQ ID NO: 930244 - DNA, 25 bp, Homo sapien
cgttggcgtggctcccggcattggc

SEQ ID NO: 930245 - DNA, 25 bp, Homo sapien
gctcctggcgttggcgtggctcccg

SEQ ID NO: 930246 - DNA, 25 bp, Homo sapien
ggtgtggctcctggcgttggcgtgg

SEQ ID NO: 930247 - DNA, 25 bp, Homo sapien
tcggaaaatcctggcttcctcagcg

SEQ ID NO: 930248 - DNA, 25 bp, Homo sapien
ggaaaatcctggcttcctcagcgcc

SEQ ID NO: 930249 - DNA, 25 bp, Homo sapien
aaaatcctggcttcctcagcgccga

SEQ ID NO: 930250 - DNA, 25 bp, Homo sapien
ctcggaaaatcctggcttcctcagc

SEQ ID NO: 930251 - DNA, 25 bp, Homo sapien
tccaggggaacttggtgctacacgc

SEQ ID NO: 930252 - DNA, 25 bp, Homo sapien
aagatggtgcagacacttcctgggc

SEQ ID NO: 930253 - DNA, 25 bp, Homo sapien
gctacacgctggtgctcttatcttc

SEQ ID NO: 930254 - DNA, 25 bp, Homo sapien
cctacctggggctcctctaaagatg

SEQ ID NO: 930255 - DNA, 25 bp, Homo sapien
gttggtacccaagcacctgaagcct

SEQ ID NO: 930256 - DNA, 25 bp, Homo sapien
atcaacctggttgacctgtcatggc

SEQ ID NO: 930257 - DNA, 25 bp, Homo sapien
gaagcctcaaagctggattcgctct

SEQ ID NO: 930258 - DNA, 25 bp, Homo sapien
aatataactctggatgaaacacacc

SEQ ID NO: 930259 - DNA, 25 bp, Homo sapien
acaggcgtgcaccattatgcatgcc

SEQ ID NO: 930260 - DNA, 25 bp, Homo sapien
acctccgcctttgggcttaagtgat

SEQ ID NO: 930261 - DNA, 25 bp, Homo sapien
ggcgtgcaccattatgcatgcctaa

SEQ ID NO: 930262 - DNA, 25 bp, Homo sapien
cgtgcaccattatgcatgcctaatt

SEQ ID NO: 930263 - DNA, 25 bp, Homo sapien
gctctgagtccctccgcgtagtctg

SEQ ID NO: 930264 - DNA, 25 bp, Homo sapien
agcgcaaggacctgggtcgctctga

SEQ ID NO: 930265 - DNA, 25 bp, Homo sapien
tagtctgccggccacaccgcatctt

SEQ ID NO: 930266 - DNA, 25 bp, Homo sapien
catcttccggccgtcggacctcatc

SEQ ID NO: 930267 - DNA, 25 bp, Homo sapien
ctgatccggttcgacgaggagaccc

SEQ ID NO: 930268 - DNA, 25 bp, Homo sapien
agctgatccggttcgacgaggagac

SEQ ID NO: 930269 - DNA, 25 bp, Homo sapien
gatccggttcgacgaggagacccag

SEQ ID NO: 930270 - DNA, 25 bp, Homo sapien
tgaaggagctgatccggttcgacga

SEQ ID NO: 930271 - DNA, 25 bp, Homo sapien
aataacagagatctgtgttggctta

SEQ ID NO: 930272 - DNA, 25 bp, Homo sapien
taacagagatctgtgttggcttaca

SEQ ID NO: 930273 - DNA, 25 bp, Homo sapien
cagagatctgtgttggcttacacct

SEQ ID NO: 930274 - DNA, 25 bp, Homo sapien
aaaaaataacagagatctgtgttgg

SEQ ID NO: 930275 - DNA, 25 bp, Homo sapien
ttattttttcatacggctgcagcag

SEQ ID NO: 930276 - DNA, 25 bp, Homo sapien
ctggaaaacaatcccaacaggcccg

SEQ ID NO: 930277 - DNA, 25 bp, Homo sapien
ctccggcagtgagaggataggcaca

SEQ ID NO: 930278 - DNA, 25 bp, Homo sapien
cagtgcactttgaacctggaaaaca

SEQ ID NO: 930279 - DNA, 25 bp, Homo sapien
tgagtcactgttcccggtccagctg

SEQ ID NO: 930280 - DNA, 25 bp, Homo sapien
ttatgtctatatgtgaactggggag

SEQ ID NO: 930281 - DNA, 25 bp, Homo sapien
gtccagctgaggattttgacaggga

SEQ ID NO: 930282 - DNA, 25 bp, Homo sapien
tagctggtgggcatgggcgcctgcc

SEQ ID NO: 930283 - DNA, 25 bp, Homo sapien
tattattaatacatcgtagctgtcc

SEQ ID NO: 930284 - DNA, 25 bp, Homo sapien
catatttatagggtgcatgtgaaat

SEQ ID NO: 930285 - DNA, 25 bp, Homo sapien
ctgtccatatttatagggtgcatgt

SEQ ID NO: 930286 - DNA, 25 bp, Homo sapien
aatacatcgtagctgtccatattta

SEQ ID NO: 930287 - DNA, 25 bp, Homo sapien
gatgtctggatcttaggcagagaaa

SEQ ID NO: 930288 - DNA, 25 bp, Homo sapien
gggggatgtctggatcttaggcaga

SEQ ID NO: 930289 - DNA, 25 bp, Homo sapien
tgtctggatcttaggcagagaaagt

SEQ ID NO: 930290 - DNA, 25 bp, Homo sapien
cagagaaagtaacttcaacttcatc

SEQ ID NO: 930291 - DNA, 25 bp, Homo sapien
taaatggaggagctcaccaccatcc

SEQ ID NO: 930292 - DNA, 25 bp, Homo sapien
aataaataaatggaggagctcacca

SEQ ID NO: 930293 - DNA, 25 bp, Homo sapien
taaataaatggaggagctcaccacc

SEQ ID NO: 930294 - DNA, 25 bp, Homo sapien
tgggcaacattatgagaccatcccc

SEQ ID NO: 930295 - DNA, 25 bp, Homo sapien
acctacgacgatcgggcctacagca

SEQ ID NO: 930296 - DNA, 25 bp, Homo sapien
gagacggcaaatggcggacttcgac

SEQ ID NO: 930297 - DNA, 25 bp, Homo sapien
gacttcgacacctacgacgatcggg

SEQ ID NO: 930298 - DNA, 25 bp, Homo sapien
cctggttcctctcggagcggagacg

SEQ ID NO: 930299 - DNA, 25 bp, Homo sapien
ggaaccttcagatagcagtagagga

SEQ ID NO: 930300 - DNA, 25 bp, Homo sapien
ggactgttcccatgtgcagggttca

SEQ ID NO: 930301 - DNA, 25 bp, Homo sapien
gcagctgtctaggtctgcggccaca

SEQ ID NO: 930302 - DNA, 25 bp, Homo sapien
tcagttcagagccaaaatgggtcta

SEQ ID NO: 930303 - DNA, 25 bp, Homo sapien
cattatgtggtgtaatcaaacccga

SEQ ID NO: 930304 - DNA, 25 bp, Homo sapien
gttacaaggcctcagcaatccacag

SEQ ID NO: 930305 - DNA, 25 bp, Homo sapien
tgcatctaaactgctgggcaatcca

SEQ ID NO: 930306 - DNA, 25 bp, Homo sapien
caaacccgatgctttcagatgacct

SEQ ID NO: 930307 - DNA, 25 bp, Homo sapien
gatggccgcaagcattgggcttctg

SEQ ID NO: 930308 - DNA, 25 bp, Homo sapien
gtttttcctctctccgataattctg

SEQ ID NO: 930309 - DNA, 25 bp, Homo sapien
tctctccgataattctgctgatggc

SEQ ID NO: 930310 - DNA, 25 bp, Homo sapien
tgctgatggccgcaagcattgggct

SEQ ID NO: 930311 - DNA, 25 bp, Homo sapien
gaaacgtggtcctgaatccagtgca

SEQ ID NO: 930312 - DNA, 25 bp, Homo sapien
cgtggtcctgaatccagtgcacttg

SEQ ID NO: 930313 - DNA, 25 bp, Homo sapien
ggaaggaaacgtggtcctgaatcca

SEQ ID NO: 930314 - DNA, 25 bp, Homo sapien
ggtcctgaatccagtgcacttggca

SEQ ID NO: 930315 - DNA, 25 bp, Homo sapien
cttgggcaggtgtgcgggctcagga

SEQ ID NO: 930316 - DNA, 25 bp, Homo sapien
tcagcttgggcaggtgtgcgggctc

SEQ ID NO: 930317 - DNA, 25 bp, Homo sapien
caggatggggcggccgtggtgagga

SEQ ID NO: 930318 - DNA, 25 bp, Homo sapien
tggcatcagcttgggcaggtgtgcg

SEQ ID NO: 930319 - DNA, 25 bp, Homo sapien
ttccccgaagccagctcttggcaat

SEQ ID NO: 930320 - DNA, 25 bp, Homo sapien
tggcaatcgttgttcatatgaaaac

SEQ ID NO: 930321 - DNA, 25 bp, Homo sapien
tcagaacctggatgggagagtgaaa

SEQ ID NO: 930322 - DNA, 25 bp, Homo sapien
gcagaaccgtggtctgtggcagccc

SEQ ID NO: 930323 - DNA, 25 bp, Homo sapien
cagttcttggaaacccactcgagag

SEQ ID NO: 930324 - DNA, 25 bp, Homo sapien
tagttgcaacagttcttggaaaccc

SEQ ID NO: 930325 - DNA, 25 bp, Homo sapien
ccagggtctgttcctagttgcaaca

SEQ ID NO: 930326 - DNA, 25 bp, Homo sapien
ggaaacccactcgagagggccacgc

SEQ ID NO: 930327 - DNA, 25 bp, Homo sapien
ggcaacaccaggagccaacatgagc

SEQ ID NO: 930328 - DNA, 25 bp, Homo sapien
catgagctcggggactgaactgctg

SEQ ID NO: 930329 - DNA, 25 bp, Homo sapien
gagccaacatgagctcggggactga

SEQ ID NO: 930330 - DNA, 25 bp, Homo sapien
ccaacatgagctcggggactgaact

SEQ ID NO: 930331 - DNA, 25 bp, Homo sapien
tgagtgtgtgcttttttaaggaatt

SEQ ID NO: 930332 - DNA, 25 bp, Homo sapien
tgaggccatgtcagggatgggtctg

SEQ ID NO: 930333 - DNA, 25 bp, Homo sapien
catcgtcactcctggctgaaataat

SEQ ID NO: 930334 - DNA, 25 bp, Homo sapien
taccccaagtcattgctgggtccct

SEQ ID NO: 930335 - DNA, 25 bp, Homo sapien
cccgcaggaagcagacacgggtcgg

SEQ ID NO: 930336 - DNA, 25 bp, Homo sapien
caaaggtaggtaggctcctggagaa

SEQ ID NO: 930337 - DNA, 25 bp, Homo sapien
tcaggcccaattctcgcctcctccc

SEQ ID NO: 930338 - DNA, 25 bp, Homo sapien
aggaagcagacacgggtcggaggaa

SEQ ID NO: 930339 - DNA, 25 bp, Homo sapien
gagaaaacagatagggctggacaca

SEQ ID NO: 930340 - DNA, 25 bp, Homo sapien
gacacagcggtcatgcctataaatc

SEQ ID NO: 930341 - DNA, 25 bp, Homo sapien
tgaccccttagaacttgcattctgg

SEQ ID NO: 930342 - DNA, 25 bp, Homo sapien
tgctacgggcaagtcctgctctagg

SEQ ID NO: 930343 - DNA, 25 bp, Homo sapien
aaacaaacaaaatgggccaggcgtg

SEQ ID NO: 930344 - DNA, 25 bp, Homo sapien
gccaggcgtggtggctcacgcctgt

SEQ ID NO: 930345 - DNA, 25 bp, Homo sapien
tgtctcaaaaacacaaaaacaaaca

SEQ ID NO: 930346 - DNA, 25 bp, Homo sapien
acaaacaaacaaaatgggccaggcg

SEQ ID NO: 930347 - DNA, 25 bp, Homo sapien
aaagcagtgattatcctgtgtctcc

SEQ ID NO: 930348 - DNA, 25 bp, Homo sapien
tgtgactgtctcatgggaagagctg

SEQ ID NO: 930349 - DNA, 25 bp, Homo sapien
ggaaatgtcacttgctacagacaat

SEQ ID NO: 930350 - DNA, 25 bp, Homo sapien
gaccttgagtcagaaatgttgccag

SEQ ID NO: 930351 - DNA, 25 bp, Homo sapien
acagatcagagaccgccctcagctt

SEQ ID NO: 930352 - DNA, 25 bp, Homo sapien
catcaatggggtggaggccaaactc

SEQ ID NO: 930353 - DNA, 25 bp, Homo sapien
ttattagctaaaatgtcaacccaca

SEQ ID NO: 930354 - DNA, 25 bp, Homo sapien
aaactcaaacacttgcggggcacag

SEQ ID NO: 930355 - DNA, 25 bp, Homo sapien
tagggcacctgtaagtcagtcagtg

SEQ ID NO: 930356 - DNA, 25 bp, Homo sapien
cactggagtttaaaggacagtcatg

SEQ ID NO: 930357 - DNA, 25 bp, Homo sapien
gtacctcagaatagggcacctgtaa

SEQ ID NO: 930358 - DNA, 25 bp, Homo sapien
cctggccagccactggagtttaaag

SEQ ID NO: 930359 - DNA, 25 bp, Homo sapien
ccgctattttcatgtgagtgtatcc

SEQ ID NO: 930360 - DNA, 25 bp, Homo sapien
tccttccgctattttcatgtgagtg

SEQ ID NO: 930361 - DNA, 25 bp, Homo sapien
ttttcatgtgagtgtatccaatttc

SEQ ID NO: 930362 - DNA, 25 bp, Homo sapien
gagttcactccttccgctattttca

SEQ ID NO: 930363 - DNA, 25 bp, Homo sapien
ttaaaaggatgctgatagttctttc

SEQ ID NO: 930364 - DNA, 25 bp, Homo sapien
taaaaggatgctgatagttctttca

SEQ ID NO: 930365 - DNA, 25 bp, Homo sapien
gatgctgatagttctttcaaagaaa

SEQ ID NO: 930366 - DNA, 25 bp, Homo sapien
aaggatgctgatagttctttcaaag

SEQ ID NO: 930367 - DNA, 25 bp, Homo sapien
gtggctaggttgaggatcctccgga

SEQ ID NO: 930368 - DNA, 25 bp, Homo sapien
agcactccatgtggtggctaggttg

SEQ ID NO: 930369 - DNA, 25 bp, Homo sapien
gagcactccatgtggtggctaggtt

SEQ ID NO: 930370 - DNA, 25 bp, Homo sapien
ggctaggttgaggatcctccggaat

SEQ ID NO: 930371 - DNA, 25 bp, Homo sapien
tagcccagatgccacaagtgagcaa

SEQ ID NO: 930372 - DNA, 25 bp, Homo sapien
cttgataaactccagtttcaggtat

SEQ ID NO: 930373 - DNA, 25 bp, Homo sapien
tctcctctgcccaagaagtgagcgg

SEQ ID NO: 930374 - DNA, 25 bp, Homo sapien
cccaagaagtgagcggttcctctgc

SEQ ID NO: 930375 - DNA, 25 bp, Homo sapien
agaagtgagcggttcctctgccagg

SEQ ID NO: 930376 - DNA, 25 bp, Homo sapien
tctgcccaagaagtgagcggttcct

SEQ ID NO: 930377 - DNA, 25 bp, Homo sapien
ttgtaggcttcgtcaatgttggcat

SEQ ID NO: 930378 - DNA, 25 bp, Homo sapien
cttgtaggcttcgtcaatgttggca

SEQ ID NO: 930379 - DNA, 25 bp, Homo sapien
tggatcatctcctttaccagcagtg

SEQ ID NO: 930380 - DNA, 25 bp, Homo sapien
tgtaggcttcgtcaatgttggcatt

SEQ ID NO: 930381 - DNA, 25 bp, Homo sapien
cttgaacacgttctcactgttaatg

SEQ ID NO: 930382 - DNA, 25 bp, Homo sapien
acacgttctcactgttaatgaagcc

SEQ ID NO: 930383 - DNA, 25 bp, Homo sapien
aagccaaatcctgagaaggtggact

SEQ ID NO: 930384 - DNA, 25 bp, Homo sapien
aggtggactgcaggttgttcagcgc

SEQ ID NO: 930385 - DNA, 25 bp, Homo sapien
ttggagtccgagctagacagcccac

SEQ ID NO: 930386 - DNA, 25 bp, Homo sapien
agtccgagctagacagcccactgtc

SEQ ID NO: 930387 - DNA, 25 bp, Homo sapien
cctctcttcttggagtccgagctag

SEQ ID NO: 930388 - DNA, 25 bp, Homo sapien
tggagtccgagctagacagcccact

SEQ ID NO: 930389 - DNA, 25 bp, Homo sapien
ttctaggccgtcatcagtgtagggt

SEQ ID NO: 930390 - DNA, 25 bp, Homo sapien
tttgtgtaccggaggactgcacagc

SEQ ID NO: 930391 - DNA, 25 bp, Homo sapien
cttctcgataacattcatcagcctg

SEQ ID NO: 930392 - DNA, 25 bp, Homo sapien
gaggatctgggcgtcggtcagcttt

SEQ ID NO: 930393 - DNA, 25 bp, Homo sapien
gtaatgcgctcgtcggcaacagcgg

SEQ ID NO: 930394 - DNA, 25 bp, Homo sapien
catatttggtaatgcgctcgtcggc

SEQ ID NO: 930395 - DNA, 25 bp, Homo sapien
tgggtgccatatttggtaatgcgct

SEQ ID NO: 930396 - DNA, 25 bp, Homo sapien
agccatgactttgtgggtgccatat

SEQ ID NO: 930397 - DNA, 25 bp, Homo sapien
tagatttccatggttctcctcaagg

SEQ ID NO: 930398 - DNA, 25 bp, Homo sapien
cgaagcgagtggttttagagtagat

SEQ ID NO: 930399 - DNA, 25 bp, Homo sapien
cattacaagcaagggcgaagcgagt

SEQ ID NO: 930400 - DNA, 25 bp, Homo sapien
cgatgatcttatccgaagcattaca

SEQ ID NO: 930401 - DNA, 25 bp, Homo sapien
gaatgatgatcttatgtcggccttt

SEQ ID NO: 930402 - DNA, 25 bp, Homo sapien
catccagaatgatgatcttatgtcg

SEQ ID NO: 930403 - DNA, 25 bp, Homo sapien
gatgatcttatgtcggcctttggga

SEQ ID NO: 930404 - DNA, 25 bp, Homo sapien
tatgtcggcctttgggaagagtgac

SEQ ID NO: 930405 - DNA, 25 bp, Homo sapien
ctgtcatttgaagcattgagttcca

SEQ ID NO: 930406 - DNA, 25 bp, Homo sapien
tcatttgaagcattgagttccaaca

SEQ ID NO: 930407 - DNA, 25 bp, Homo sapien
aatgcttgtggtcttgccggttcct

SEQ ID NO: 930408 - DNA, 25 bp, Homo sapien
tgcttgtggtcttgccggttcctgg

SEQ ID NO: 930409 - DNA, 25 bp, Homo sapien
agctcttgagttatgttcactgctg

SEQ ID NO: 930410 - DNA, 25 bp, Homo sapien
caggtagctcttgagttatgttcac

SEQ ID NO: 930411 - DNA, 25 bp, Homo sapien
agatctccagtaaagacttcaaacc

SEQ ID NO: 930412 - DNA, 25 bp, Homo sapien
tctccagtaaagacttcaaaccacc

SEQ ID NO: 930413 - DNA, 25 bp, Homo sapien
ggcacatttccttcccttgcaaaga

SEQ ID NO: 930414 - DNA, 25 bp, Homo sapien
cgcaatgatgatgttgggcacattt

SEQ ID NO: 930415 - DNA, 25 bp, Homo sapien
gcacatttccttcccttgcaaagac

SEQ ID NO: 930416 - DNA, 25 bp, Homo sapien
aatgatgatgttgggcacatttcct

SEQ ID NO: 930417 - DNA, 25 bp, Homo sapien
ctacggcgaaaatgatcattaaaac

SEQ ID NO: 930418 - DNA, 25 bp, Homo sapien
cggcgaaaatgatcattaaaaccgg

SEQ ID NO: 930419 - DNA, 25 bp, Homo sapien
ccggttaaaacttgcttctggatga

SEQ ID NO: 930420 - DNA, 25 bp, Homo sapien
accggttaaaacttgcttctggatg

SEQ ID NO: 930421 - DNA, 25 bp, Homo sapien
acggtgtcttcattcccgacaattt

SEQ ID NO: 930422 - DNA, 25 bp, Homo sapien
cattcccgacaatttcattcagctt

SEQ ID NO: 930423 - DNA, 25 bp, Homo sapien
ctctagcctgctcacggtgtcttca

SEQ ID NO: 930424 - DNA, 25 bp, Homo sapien
tctagcctgctcacggtgtcttcat

SEQ ID NO: 930425 - DNA, 25 bp, Homo sapien
aattgattgaaccagggagatgcag

SEQ ID NO: 930426 - DNA, 25 bp, Homo sapien
agggagatgcaggttgtagtgagca

SEQ ID NO: 930427 - DNA, 25 bp, Homo sapien
cagggagatgcaggttgtagtgagc

SEQ ID NO: 930428 - DNA, 25 bp, Homo sapien
gcagaattgattgaaccagggagat

SEQ ID NO: 930429 - DNA, 25 bp, Homo sapien
cacggcagttcgtagtggccggcgc

SEQ ID NO: 930430 - DNA, 25 bp, Homo sapien
cctcgcccgcgccaccacagacggc

SEQ ID NO: 930431 - DNA, 25 bp, Homo sapien
acggcagttcgtagtggccggcgct

SEQ ID NO: 930432 - DNA, 25 bp, Homo sapien
gcagttcgtagtggccggcgctgcc

SEQ ID NO: 930433 - DNA, 25 bp, Homo sapien
tctcgcgcctcctcttcccgccacc

SEQ ID NO: 930434 - DNA, 25 bp, Homo sapien
taaggtctgttgaccgcaggctgtt

SEQ ID NO: 930435 - DNA, 25 bp, Homo sapien
ggtaaggtctgttgaccgcaggctg

SEQ ID NO: 930436 - DNA, 25 bp, Homo sapien
aagctccactcaccagcggccaggt

SEQ ID NO: 930437 - DNA, 25 bp, Homo sapien
ctctttgaagctccactcaccagcg

SEQ ID NO: 930438 - DNA, 25 bp, Homo sapien
ttcccaatgaccagagacatctttg

SEQ ID NO: 930439 - DNA, 25 bp, Homo sapien
gatgtgggcgaaccctggacgcccc

SEQ ID NO: 930440 - DNA, 25 bp, Homo sapien
aaacgcgatgtaagcaccaccaggt

SEQ ID NO: 930441 - DNA, 25 bp, Homo sapien
gctggaggatgcgtttcaccaaacg

SEQ ID NO: 930442 - DNA, 25 bp, Homo sapien
ctatcgcggggatccccggcgccag

SEQ ID NO: 930443 - DNA, 25 bp, Homo sapien
atccccggcgccaggagggggtgca

SEQ ID NO: 930444 - DNA, 25 bp, Homo sapien
gatccccggcgccaggagggggtgc

SEQ ID NO: 930445 - DNA, 25 bp, Homo sapien
cgcggggatccccggcgccaggagg

SEQ ID NO: 930446 - DNA, 25 bp, Homo sapien
agtgtgtcccccaacgtctgagacc

SEQ ID NO: 930447 - DNA, 25 bp, Homo sapien
agagcttgggccgagcgggtgccca

SEQ ID NO: 930448 - DNA, 25 bp, Homo sapien
gcaccacgtgtgtgcttcagaagcc

SEQ ID NO: 930449 - DNA, 25 bp, Homo sapien
cactcttgcgcgatgcctgagggag

SEQ ID NO: 930450 - DNA, 25 bp, Homo sapien
tcctggtgtaagctcaagagagcct

SEQ ID NO: 930451 - DNA, 25 bp, Homo sapien
cggaatcctggtgtaagctcaagag

SEQ ID NO: 930452 - DNA, 25 bp, Homo sapien
gctgatcagcagtgggtcgcctttc

SEQ ID NO: 930453 - DNA, 25 bp, Homo sapien
agagatgcatctgtacagctgcgga

SEQ ID NO: 930454 - DNA, 25 bp, Homo sapien
agagccctgcactgtgtaaacctgg

SEQ ID NO: 930455 - DNA, 25 bp, Homo sapien
ggctccctcgtacctctactgctgg

SEQ ID NO: 930456 - DNA, 25 bp, Homo sapien
gctgtccccactatctggatggccg

SEQ ID NO: 930457 - DNA, 25 bp, Homo sapien
tctcagggcagctcgggatttatcc

SEQ ID NO: 930458 - DNA, 25 bp, Homo sapien
cagagaagactgaccaagtatgggt

SEQ ID NO: 930459 - DNA, 25 bp, Homo sapien
gactgaccaagtatgggtggagaca

SEQ ID NO: 930460 - DNA, 25 bp, Homo sapien
agcagtacagacagccgggcaccct

SEQ ID NO: 930461 - DNA, 25 bp, Homo sapien
ctggcagagaagactgaccaagtat

SEQ ID NO: 930462 - DNA, 25 bp, Homo sapien
ctgtccagcccaggcactgtgccat

SEQ ID NO: 930463 - DNA, 25 bp, Homo sapien
gttccctgtccagcccaggcactgt

SEQ ID NO: 930464 - DNA, 25 bp, Homo sapien
ttccctgtccagcccaggcactgtg

SEQ ID NO: 930465 - DNA, 25 bp, Homo sapien
ccctgtccagcccaggcactgtgcc

SEQ ID NO: 930466 - DNA, 25 bp, Homo sapien
ttctgaggacgaagggagcagcctt

SEQ ID NO: 930467 - DNA, 25 bp, Homo sapien
cgttggaatgttggatttagcagcc

SEQ ID NO: 930468 - DNA, 25 bp, Homo sapien
cagtccggctccctcattgaacaag

SEQ ID NO: 930469 - DNA, 25 bp, Homo sapien
gaaatgctgacccagcctaaccaag

SEQ ID NO: 930470 - DNA, 25 bp, Homo sapien
aagcgaagtatcacgtgcagttgcc

SEQ ID NO: 930471 - DNA, 25 bp, Homo sapien
tgaaaatgtctcagcgtgcatggaa

SEQ ID NO: 930472 - DNA, 25 bp, Homo sapien
tgttgaaacaactggtccctgggcc

SEQ ID NO: 930473 - DNA, 25 bp, Homo sapien
tgcagttgccatgggctcgtggctt

SEQ ID NO: 930474 - DNA, 25 bp, Homo sapien
tggggacaaggacagctgagcaggc

SEQ ID NO: 930475 - DNA, 25 bp, Homo sapien
gcctgggcccggacagctggggaca

SEQ ID NO: 930476 - DNA, 25 bp, Homo sapien
gcaggcagcttctcaccaagaatag

SEQ ID NO: 930477 - DNA, 25 bp, Homo sapien
tgagggtccgcctgggcccggacag

SEQ ID NO: 930478 - DNA, 25 bp, Homo sapien
tcctggtgacgggtgtccaagaagc

SEQ ID NO: 930479 - DNA, 25 bp, Homo sapien
tattaacagccgtctagaagcgatg

SEQ ID NO: 930480 - DNA, 25 bp, Homo sapien
ttagtctactaacagccagaggtcc

SEQ ID NO: 930481 - DNA, 25 bp, Homo sapien
gctttagtggcctaacccagggtca

SEQ ID NO: 930482 - DNA, 25 bp, Homo sapien
gctatccttgtctactaacaaggaa

SEQ ID NO: 930483 - DNA, 25 bp, Homo sapien
gaaagctatccttgtctactaacaa

SEQ ID NO: 930484 - DNA, 25 bp, Homo sapien
aagctatccttgtctactaacaagg

SEQ ID NO: 930485 - DNA, 25 bp, Homo sapien
aaagaaagctatccttgtctactaa

SEQ ID NO: 930486 - DNA, 25 bp, Homo sapien
actcaggcccggtaaggatgctggt

SEQ ID NO: 930487 - DNA, 25 bp, Homo sapien
tatcaatgagcacccgggctcctcg

SEQ ID NO: 930488 - DNA, 25 bp, Homo sapien
ttactcaggcccggtaaggatgctg

SEQ ID NO: 930489 - DNA, 25 bp, Homo sapien
caggcccggtaaggatgctggtggc

SEQ ID NO: 930490 - DNA, 25 bp, Homo sapien
cgctccccagatggcacaaccatcc

SEQ ID NO: 930491 - DNA, 25 bp, Homo sapien
gctccccagatggcacaaccatccc

SEQ ID NO: 930492 - DNA, 25 bp, Homo sapien
acgctccccagatggcacaaccatc

SEQ ID NO: 930493 - DNA, 25 bp, Homo sapien
aaaagctttaccaggcctcagttct

SEQ ID NO: 930494 - DNA, 25 bp, Homo sapien
caaagctgggagaccccgccacggg

SEQ ID NO: 930495 - DNA, 25 bp, Homo sapien
ttcaaagctgggagaccccgccacg

SEQ ID NO: 930496 - DNA, 25 bp, Homo sapien
cacgggggcggttgtggacttgagg

SEQ ID NO: 930497 - DNA, 25 bp, Homo sapien
gccacgggggcggttgtggacttga

SEQ ID NO: 930498 - DNA, 25 bp, Homo sapien
tccagagacttgattctgttcttct

SEQ ID NO: 930499 - DNA, 25 bp, Homo sapien
ctccagagacttgattctgttcttc

SEQ ID NO: 930500 - DNA, 25 bp, Homo sapien
taggagcgtggtgatgcttttcagg

SEQ ID NO: 930501 - DNA, 25 bp, Homo sapien
gggtaggagcgtggtgatgcttttc

SEQ ID NO: 930502 - DNA, 25 bp, Homo sapien
aaatgcagaattggggtcagcctgg

SEQ ID NO: 930503 - DNA, 25 bp, Homo sapien
gtcagcctggttgggatgacaacca

SEQ ID NO: 930504 - DNA, 25 bp, Homo sapien
agcaaatgcagaattggggtcagcc

SEQ ID NO: 930505 - DNA, 25 bp, Homo sapien
tgcagaattggggtcagcctggttg

SEQ ID NO: 930506 - DNA, 25 bp, Homo sapien
catccgtgttgttctgagaaggcat

SEQ ID NO: 930507 - DNA, 25 bp, Homo sapien
ggcctgatgttcctcatccgtgttg

SEQ ID NO: 930508 - DNA, 25 bp, Homo sapien
tccgtccagccttttcccgacaaga

SEQ ID NO: 930509 - DNA, 25 bp, Homo sapien
tttcccgacaagaaaaggcctgatg

SEQ ID NO: 930510 - DNA, 25 bp, Homo sapien
tgctcctagtacctgatgcacagcc

SEQ ID NO: 930511 - DNA, 25 bp, Homo sapien
ctaaatcccgtcctccacgtggagg

SEQ ID NO: 930512 - DNA, 25 bp, Homo sapien
ccttggaaggcagcatgaatccctg

SEQ ID NO: 930513 - DNA, 25 bp, Homo sapien
tgcacagcccgagctgagaggagac

SEQ ID NO: 930514 - DNA, 25 bp, Homo sapien
tgcacacttttcattgagaacaaag

SEQ ID NO: 930515 - DNA, 25 bp, Homo sapien
ttacgggtgcgagccactgtttctg

SEQ ID NO: 930516 - DNA, 25 bp, Homo sapien
cactaaactacccaggtaaccagca

SEQ ID NO: 930517 - DNA, 25 bp, Homo sapien
acaccttgataactgttcacacact

SEQ ID NO: 930518 - DNA, 25 bp, Homo sapien
aattagcagggagctactcgggagg

SEQ ID NO: 930519 - DNA, 25 bp, Homo sapien
tggcgcaatcatgtagtcccaggta

SEQ ID NO: 930520 - DNA, 25 bp, Homo sapien
ggtatggtggcgcaatcatgtagtc

SEQ ID NO: 930521 - DNA, 25 bp, Homo sapien
ggcgcaatcatgtagtcccaggtac

SEQ ID NO: 930522 - DNA, 25 bp, Homo sapien
ctatctaagaactaaccagacccga

SEQ ID NO: 930523 - DNA, 25 bp, Homo sapien
tgcagtctcctatctaagaactaac

SEQ ID NO: 930524 - DNA, 25 bp, Homo sapien
tctttcagggtggtggggccgtaga

SEQ ID NO: 930525 - DNA, 25 bp, Homo sapien
gtctcctatctaagaactaaccaga

SEQ ID NO: 930526 - DNA, 25 bp, Homo sapien
ccacgcctggcccagcatctgtcat

SEQ ID NO: 930527 - DNA, 25 bp, Homo sapien
gcctggcccagcatctgtcattttt

SEQ ID NO: 930528 - DNA, 25 bp, Homo sapien
ctggcccagcatctgtcattttttg

SEQ ID NO: 930529 - DNA, 25 bp, Homo sapien
cgcctggcccagcatctgtcatttt

SEQ ID NO: 930530 - DNA, 25 bp, Homo sapien
gtcagatttaaaaccattgcaggag

SEQ ID NO: 930531 - DNA, 25 bp, Homo sapien
tccaggccttgttatgtgtagcagg

SEQ ID NO: 930532 - DNA, 25 bp, Homo sapien
gctaggacagtctcagagcatttcc

SEQ ID NO: 930533 - DNA, 25 bp, Homo sapien
ggacagccccagaatctgactgcag

SEQ ID NO: 930534 - DNA, 25 bp, Homo sapien
ggttctagctgtcctgtagggccac

SEQ ID NO: 930535 - DNA, 25 bp, Homo sapien
cagctttgcgacatccttgtggtgg

SEQ ID NO: 930536 - DNA, 25 bp, Homo sapien
tagggccacattggtcctgggtgca

SEQ ID NO: 930537 - DNA, 25 bp, Homo sapien
tttagttggtatgacccgagctcag

SEQ ID NO: 930538 - DNA, 25 bp, Homo sapien
tttgaacccaaaggatggacatttg

SEQ ID NO: 930539 - DNA, 25 bp, Homo sapien
gaggcgtctgggctcctgttcccat

SEQ ID NO: 930540 - DNA, 25 bp, Homo sapien
gagtgtctgcgttttgggctgctga

SEQ ID NO: 930541 - DNA, 25 bp, Homo sapien
tttctcttccttgcgagtgtctgcg

SEQ ID NO: 930542 - DNA, 25 bp, Homo sapien
acagggggtcctacaagcccggatg

SEQ ID NO: 930543 - DNA, 25 bp, Homo sapien
gcattcttgctccaggcacgtggaa

SEQ ID NO: 930544 - DNA, 25 bp, Homo sapien
tccccaagtgcacccacctgggctg

SEQ ID NO: 930545 - DNA, 25 bp, Homo sapien
aggtgctcctagcagacgtgggcct

SEQ ID NO: 930546 - DNA, 25 bp, Homo sapien
cccagcaggaaattagaatagaacc

SEQ ID NO: 930547 - DNA, 25 bp, Homo sapien
gaatagaaccaaaaacgccagtcat

SEQ ID NO: 930548 - DNA, 25 bp, Homo sapien
tgttttcacgctgagagaccccact

SEQ ID NO: 930549 - DNA, 25 bp, Homo sapien
gagcgaggctgacaatgactcctgt

SEQ ID NO: 930550 - DNA, 25 bp, Homo sapien
gccaggccgagtcagtgcacctgct

SEQ ID NO: 930551 - DNA, 25 bp, Homo sapien
gactaagcttgaatgtggccccaga

SEQ ID NO: 930552 - DNA, 25 bp, Homo sapien
gagtgggttcctaaccgcagaagga

SEQ ID NO: 930553 - DNA, 25 bp, Homo sapien
tctggttgacctcagtgaataggcg

SEQ ID NO: 930554 - DNA, 25 bp, Homo sapien
tgtaggcaccctaacacaatgaaag

SEQ ID NO: 930555 - DNA, 25 bp, Homo sapien
tgtatttgtaggcaccctaacacaa

SEQ ID NO: 930556 - DNA, 25 bp, Homo sapien
ccgcattcagccgcctttctttttg

SEQ ID NO: 930557 - DNA, 25 bp, Homo sapien
ccctaacacaatgaaagtccaggct

SEQ ID NO: 930558 - DNA, 25 bp, Homo sapien
gggtgattggttgcaccagcctctg

SEQ ID NO: 930559 - DNA, 25 bp, Homo sapien
cctaatgcctgagagtagacggagg

SEQ ID NO: 930560 - DNA, 25 bp, Homo sapien
tagacggaggtgctaagcaacaggt

SEQ ID NO: 930561 - DNA, 25 bp, Homo sapien
gtggaaagtccgcaggtgaagccca

SEQ ID NO: 930562 - DNA, 25 bp, Homo sapien
aagagttgagagtggaatggctgca

SEQ ID NO: 930563 - DNA, 25 bp, Homo sapien
agagttgagagtggaatggctgcag

SEQ ID NO: 930564 - DNA, 25 bp, Homo sapien
agaccagccacataacaagactgca

SEQ ID NO: 930565 - DNA, 25 bp, Homo sapien
ccagccacataacaagactgcatct

SEQ ID NO: 930566 - DNA, 25 bp, Homo sapien
accagccacataacaagactgcatc

SEQ ID NO: 930567 - DNA, 25 bp, Homo sapien
gaccagccacataacaagactgcat

SEQ ID NO: 930568 - DNA, 25 bp, Homo sapien
gcctcttagacgcttagcctgtgag

SEQ ID NO: 930569 - DNA, 25 bp, Homo sapien
cttagacgcttagcctgtgaggtgg

SEQ ID NO: 930570 - DNA, 25 bp, Homo sapien
gagaagaggtcaaggtacgtgtggg

SEQ ID NO: 930571 - DNA, 25 bp, Homo sapien
acacagcctcttagacgcttagcct

SEQ ID NO: 930572 - DNA, 25 bp, Homo sapien
caagagagccctgccggttttggag

SEQ ID NO: 930573 - DNA, 25 bp, Homo sapien
tgccactcactagagaggccgcttc

SEQ ID NO: 930574 - DNA, 25 bp, Homo sapien
gtgactccagcaagtcaggcttgcc

SEQ ID NO: 930575 - DNA, 25 bp, Homo sapien
ccgcttcctatagggcttgctgcag

SEQ ID NO: 930576 - DNA, 25 bp, Homo sapien
gcgggccgtgcctgaagacagatca

SEQ ID NO: 930577 - DNA, 25 bp, Homo sapien
cccgtgttgggtcacaggagaagac

SEQ ID NO: 930578 - DNA, 25 bp, Homo sapien
tactccacgagatagggacacggga

SEQ ID NO: 930579 - DNA, 25 bp, Homo sapien
cctagtcctgaaaggaaggcccgtg

SEQ ID NO: 930580 - DNA, 25 bp, Homo sapien
tgcttcagttctgagatcaggcaag

SEQ ID NO: 930581 - DNA, 25 bp, Homo sapien
ttcagttctgagatcaggcaagatc

SEQ ID NO: 930582 - DNA, 25 bp, Homo sapien
ggcccgaccctgcttcagttctgag

SEQ ID NO: 930583 - DNA, 25 bp, Homo sapien
cctgcttcagttctgagatcaggca

SEQ ID NO: 930584 - DNA, 25 bp, Homo sapien
aaaataaataaataggctgggtgtg

SEQ ID NO: 930585 - DNA, 25 bp, Homo sapien
catttgagcccaaggggattgaggc

SEQ ID NO: 930586 - DNA, 25 bp, Homo sapien
aaataaataaataggctgggtgtgg

SEQ ID NO: 930587 - DNA, 25 bp, Homo sapien
gatcatttgagcccaaggggattga

SEQ ID NO: 930588 - DNA, 25 bp, Homo sapien
cagaggtagtgtccaggaagacccc

SEQ ID NO: 930589 - DNA, 25 bp, Homo sapien
ggaaacgcagctcaggtggcctgcc

SEQ ID NO: 930590 - DNA, 25 bp, Homo sapien
tcttttggatcgtggccgcagctgt

SEQ ID NO: 930591 - DNA, 25 bp, Homo sapien
acagggtcaggaaacgcagctcagg

SEQ ID NO: 930592 - DNA, 25 bp, Homo sapien
cctcataagccgggccaaggcaatt

SEQ ID NO: 930593 - DNA, 25 bp, Homo sapien
aaggcctcataagccgggccaaggc

SEQ ID NO: 930594 - DNA, 25 bp, Homo sapien
tggaaggcctcataagccgggccaa

SEQ ID NO: 930595 - DNA, 25 bp, Homo sapien
tcataagccgggccaaggcaatttc

SEQ ID NO: 930596 - DNA, 25 bp, Homo sapien
tgcactcagcgcctagaaggcagaa

SEQ ID NO: 930597 - DNA, 25 bp, Homo sapien
gacactctggaaatagggcgcataa

SEQ ID NO: 930598 - DNA, 25 bp, Homo sapien
tattgtgctttgaatcagagttggc

SEQ ID NO: 930599 - DNA, 25 bp, Homo sapien
ggcagaagccatctatgaccgtggg

SEQ ID NO: 930600 - DNA, 25 bp, Homo sapien
aggcatccaggagaccggcagggcc

SEQ ID NO: 930601 - DNA, 25 bp, Homo sapien
gcatccaggagaccggcagggccct

SEQ ID NO: 930602 - DNA, 25 bp, Homo sapien
ttagcctaatgcagcaggcatccag

SEQ ID NO: 930603 - DNA, 25 bp, Homo sapien
agcaggcatccaggagaccggcagg

SEQ ID NO: 930604 - DNA, 25 bp, Homo sapien
agatggtggctggatcccatcttac

SEQ ID NO: 930605 - DNA, 25 bp, Homo sapien
caggcgtgtgcccagtaacaaacaa

SEQ ID NO: 930606 - DNA, 25 bp, Homo sapien
tgtgcccagtaacaaacaaaaccat

SEQ ID NO: 930607 - DNA, 25 bp, Homo sapien
aggagccaggcgtgtgcccagtaac

SEQ ID NO: 930608 - DNA, 25 bp, Homo sapien
gcacacaggagccaggcgtgtgccc

SEQ ID NO: 930609 - DNA, 25 bp, Homo sapien
tgatccatgtcttcttggtcagcag

SEQ ID NO: 930610 - DNA, 25 bp, Homo sapien
gcttgcacatgatccatgtcttctt

SEQ ID NO: 930611 - DNA, 25 bp, Homo sapien
catgatccatgtcttcttggtcagc

SEQ ID NO: 930612 - DNA, 25 bp, Homo sapien
gcagctctttgctgctcagagcctt

SEQ ID NO: 930613 - DNA, 25 bp, Homo sapien
tcagcacagatgttcatcactgggc

SEQ ID NO: 930614 - DNA, 25 bp, Homo sapien
tcaaatagaggcaatatctaaatgt

SEQ ID NO: 930615 - DNA, 25 bp, Homo sapien
aaaggacacattgatcagcacagat

SEQ ID NO: 930616 - DNA, 25 bp, Homo sapien
gaggcaatatctaaatgttccacag

SEQ ID NO: 930617 - DNA, 25 bp, Homo sapien
gaacaccatgtgaaggcgcatgttt

SEQ ID NO: 930618 - DNA, 25 bp, Homo sapien
caccagaccctaggacagaggcatg

SEQ ID NO: 930619 - DNA, 25 bp, Homo sapien
ggagcaatgcatctaccagctgacg

SEQ ID NO: 930620 - DNA, 25 bp, Homo sapien
tgctgacatgttcacttttgggctc

SEQ ID NO: 930621 - DNA, 25 bp, Homo sapien
ctttattagagactttgccccgccg

SEQ ID NO: 930622 - DNA, 25 bp, Homo sapien
ccattgcgagcgggggcctttatta

SEQ ID NO: 930623 - DNA, 25 bp, Homo sapien
ttggcagtggccgaaacgaggcgat

SEQ ID NO: 930624 - DNA, 25 bp, Homo sapien
ccgccgcgcgcggtgtggggccttg

SEQ ID NO: 930625 - DNA, 25 bp, Homo sapien
cctccgaaagtgctgggccaccgca

SEQ ID NO: 930626 - DNA, 25 bp, Homo sapien
tggcctccgaaagtgctgggccacc

SEQ ID NO: 930627 - DNA, 25 bp, Homo sapien
tccgaaagtgctgggccaccgcacc

SEQ ID NO: 930628 - DNA, 25 bp, Homo sapien
ggcctccgaaagtgctgggccaccg

SEQ ID NO: 930629 - DNA, 25 bp, Homo sapien
tggaatgtaggatattatcaagttc

SEQ ID NO: 930630 - DNA, 25 bp, Homo sapien
ttgttttgtagcatggcaaagccca

SEQ ID NO: 930631 - DNA, 25 bp, Homo sapien
taggatattatcaagttcatctgtg

SEQ ID NO: 930632 - DNA, 25 bp, Homo sapien
tggagtctttgttttgtagcatggc

SEQ ID NO: 930633 - DNA, 25 bp, Homo sapien
gccaatctaaagtgcagtggtgtga

SEQ ID NO: 930634 - DNA, 25 bp, Homo sapien
cccaccaccacacccagctaatttt

SEQ ID NO: 930635 - DNA, 25 bp, Homo sapien
ccaccaccacacccagctaattttt

SEQ ID NO: 930636 - DNA, 25 bp, Homo sapien
tgtgatctcagctcactgcaacctc

SEQ ID NO: 930637 - DNA, 25 bp, Homo sapien
tggatctccaacaggaaactcgagg

SEQ ID NO: 930638 - DNA, 25 bp, Homo sapien
gaagaatggatcagaacagcaagga

SEQ ID NO: 930639 - DNA, 25 bp, Homo sapien
gaaatagcaacaggccaattgagtt

SEQ ID NO: 930640 - DNA, 25 bp, Homo sapien
tacagtagccaaccagaatcggaga

SEQ ID NO: 930641 - DNA, 25 bp, Homo sapien
gagaattactcttgtcctgaaggca

SEQ ID NO: 930642 - DNA, 25 bp, Homo sapien
tcttactgaaaacaaccaacactgt

SEQ ID NO: 930643 - DNA, 25 bp, Homo sapien
tatgggaactcaattgacagaagtg

SEQ ID NO: 930644 - DNA, 25 bp, Homo sapien
gaaggcaaacatttcaccacttgac

SEQ ID NO: 930645 - DNA, 25 bp, Homo sapien
caacagaaatagtcctgcaaaaact

SEQ ID NO: 930646 - DNA, 25 bp, Homo sapien
catagaagggaataagaaccatgca

SEQ ID NO: 930647 - DNA, 25 bp, Homo sapien
ttagtgaaatggaaggtaagccaga

SEQ ID NO: 930648 - DNA, 25 bp, Homo sapien
catgcataagggtaagaaccactgg

SEQ ID NO: 930649 - DNA, 25 bp, Homo sapien
ccagggttgctgtgcttattataca

SEQ ID NO: 930650 - DNA, 25 bp, Homo sapien
gatgcttcctaagctggcgtcacct

SEQ ID NO: 930651 - DNA, 25 bp, Homo sapien
tcttttactgggagacctctgagtt

SEQ ID NO: 930652 - DNA, 25 bp, Homo sapien
tatggacgaggcaactgagtacagc

SEQ ID NO: 930653 - DNA, 25 bp, Homo sapien
tgcaaatgacgacttgccctgccgg

SEQ ID NO: 930654 - DNA, 25 bp, Homo sapien
gtggaaggtacagtccacaaagagg

SEQ ID NO: 930655 - DNA, 25 bp, Homo sapien
cattggttacctggtgtacatcctt

SEQ ID NO: 930656 - DNA, 25 bp, Homo sapien
taaatacagtagtggcctgcaagca

SEQ ID NO: 930657 - DNA, 25 bp, Homo sapien
gaatactcgggtgttgtcagtaaat

SEQ ID NO: 930658 - DNA, 25 bp, Homo sapien
ttactgacatttttaggcataacag

SEQ ID NO: 930659 - DNA, 25 bp, Homo sapien
aagatttactgacatttttaggcat

SEQ ID NO: 930660 - DNA, 25 bp, Homo sapien
gttaaggaatactcgggtgttgtca

SEQ ID NO: 930661 - DNA, 25 bp, Homo sapien
tgggcaagtcaaatacttagtttct

SEQ ID NO: 930662 - DNA, 25 bp, Homo sapien
aatgtccaccctccccgttgaagat

SEQ ID NO: 930663 - DNA, 25 bp, Homo sapien
catggcccaagttgcaatgtccacc

SEQ ID NO: 930664 - DNA, 25 bp, Homo sapien
cagctttggctgtgggttcaggaca

SEQ ID NO: 930665 - DNA, 25 bp, Homo sapien
gctgtggtatgttctcggccccatc

SEQ ID NO: 930666 - DNA, 25 bp, Homo sapien
gacatacaacactatacctggctat

SEQ ID NO: 930667 - DNA, 25 bp, Homo sapien
gcagacatacaacactatacctggc

SEQ ID NO: 930668 - DNA, 25 bp, Homo sapien
agtgctgtggtatgttctcggcccc

SEQ ID NO: 930669 - DNA, 25 bp, Homo sapien
tgaatggattagcaataaccttact

SEQ ID NO: 930670 - DNA, 25 bp, Homo sapien
aaaaacagttgaggactatttctgc

SEQ ID NO: 930671 - DNA, 25 bp, Homo sapien
caacccaggcaaatcggatgagtgt

SEQ ID NO: 930672 - DNA, 25 bp, Homo sapien
gattcgaaaatcatataacacacat

SEQ ID NO: 930673 - DNA, 25 bp, Homo sapien
gacaatagtgcaagaaaccaaccat

SEQ ID NO: 930674 - DNA, 25 bp, Homo sapien
gagaatatgccaggatgggaccatc

SEQ ID NO: 930675 - DNA, 25 bp, Homo sapien
cattttggcccttcggatcagtttc

SEQ ID NO: 930676 - DNA, 25 bp, Homo sapien
taagccacaataagctagcgatgat

SEQ ID NO: 930677 - DNA, 25 bp, Homo sapien
tttaaacaccccgagaactatgatc

SEQ ID NO: 930678 - DNA, 25 bp, Homo sapien
gaatgatgttcatccgcttttcatc

SEQ ID NO: 930679 - DNA, 25 bp, Homo sapien
aagatgctgcgagaccagtcggctg

SEQ ID NO: 930680 - DNA, 25 bp, Homo sapien
cagtggtacctgtaccatatgagaa

SEQ ID NO: 930681 - DNA, 25 bp, Homo sapien
cacctttgggtattgggaataatgt

SEQ ID NO: 930682 - DNA, 25 bp, Homo sapien
tcttggatatttacgtaggagtgca

SEQ ID NO: 930683 - DNA, 25 bp, Homo sapien
tactgtctgttgatccagtcatcag

SEQ ID NO: 930684 - DNA, 25 bp, Homo sapien
tacagtgaacatacttgagcaaggt

SEQ ID NO: 930685 - DNA, 25 bp, Homo sapien
ctggcccgataagtcttaatatgct

SEQ ID NO: 930686 - DNA, 25 bp, Homo sapien
ggcccgataagtcttaatatgctac

SEQ ID NO: 930687 - DNA, 25 bp, Homo sapien
ccgataagtcttaatatgctactct

SEQ ID NO: 930688 - DNA, 25 bp, Homo sapien
gcccgataagtcttaatatgctact

SEQ ID NO: 930689 - DNA, 25 bp, Homo sapien
gattcaagtgattcaggtgagcgcc

SEQ ID NO: 930690 - DNA, 25 bp, Homo sapien
cggattcaagtgattcaggtgagcg

SEQ ID NO: 930691 - DNA, 25 bp, Homo sapien
ttcaagtgattcaggtgagcgccac

SEQ ID NO: 930692 - DNA, 25 bp, Homo sapien
tcaagtgattcaggtgagcgccacc

SEQ ID NO: 930693 - DNA, 25 bp, Homo sapien
tattcacacgggacactccttagtg

SEQ ID NO: 930694 - DNA, 25 bp, Homo sapien
catacgccatcacgcacgactaatt

SEQ ID NO: 930695 - DNA, 25 bp, Homo sapien
tcctagaaccgtggcacccagatgt

SEQ ID NO: 930696 - DNA, 25 bp, Homo sapien
agtgttatcctgtgtcctagtgcca

SEQ ID NO: 930697 - DNA, 25 bp, Homo sapien
gagtgaagcttacacagtggtacac

SEQ ID NO: 930698 - DNA, 25 bp, Homo sapien
tcctccctccaagaaacaacgtgta

SEQ ID NO: 930699 - DNA, 25 bp, Homo sapien
ccttcctgatggtgatgtgctttac

SEQ ID NO: 930700 - DNA, 25 bp, Homo sapien
aaagcatagtatcagtctgcccagg

SEQ ID NO: 930701 - DNA, 25 bp, Homo sapien
aaatggctcatgaacctgaagctta

SEQ ID NO: 930702 - DNA, 25 bp, Homo sapien
taactgttttggatggagtaataaa

SEQ ID NO: 930703 - DNA, 25 bp, Homo sapien
ttttggatggagtaataaatctctt

SEQ ID NO: 930704 - DNA, 25 bp, Homo sapien
gaagcttatgtcagccttttgaact

SEQ ID NO: 930705 - DNA, 25 bp, Homo sapien
gatccatgggatggagctccacagg

SEQ ID NO: 930706 - DNA, 25 bp, Homo sapien
gatacttaggagaccttaacctata

SEQ ID NO: 930707 - DNA, 25 bp, Homo sapien
ttggatttggactgagatccatggg

SEQ ID NO: 930708 - DNA, 25 bp, Homo sapien
tcagtttatgtcactcaatgaatag

SEQ ID NO: 930709 - DNA, 25 bp, Homo sapien
caagcaagggtgctggtgtccagtc

SEQ ID NO: 930710 - DNA, 25 bp, Homo sapien
tctatagaagtgacccagtgctgcc

SEQ ID NO: 930711 - DNA, 25 bp, Homo sapien
tgccccgggcaacatcgtatattag

SEQ ID NO: 930712 - DNA, 25 bp, Homo sapien
tctccagttgattagcacggccagc

SEQ ID NO: 930713 - DNA, 25 bp, Homo sapien
tttatgagaagcaccctcgtagtct

SEQ ID NO: 930714 - DNA, 25 bp, Homo sapien
ctctccagagatacaacatagtcca

SEQ ID NO: 930715 - DNA, 25 bp, Homo sapien
ctcgtagtctagtggagttacacac

SEQ ID NO: 930716 - DNA, 25 bp, Homo sapien
gtccaatcaaataacatcctctgag

SEQ ID NO: 930717 - DNA, 25 bp, Homo sapien
aaaatagctttaaagccctgctcac

SEQ ID NO: 930718 - DNA, 25 bp, Homo sapien
tgctaaagctcacaatacagaaata

SEQ ID NO: 930719 - DNA, 25 bp, Homo sapien
aactattgatactcaaaatagcttt

SEQ ID NO: 930720 - DNA, 25 bp, Homo sapien
taacaaggaaaaagcctgctaaagc

SEQ ID NO: 930721 - DNA, 25 bp, Homo sapien
tccaccgtctaagagaccaaaggcc

SEQ ID NO: 930722 - DNA, 25 bp, Homo sapien
accaaaggccaatgagctaccgcag

SEQ ID NO: 930723 - DNA, 25 bp, Homo sapien
ccggaacccgccaatgctgggaagc

SEQ ID NO: 930724 - DNA, 25 bp, Homo sapien
tcaagatgatgattattctccaccg

SEQ ID NO: 930725 - DNA, 25 bp, Homo sapien
cacagcaccttgtggacatgagtga

SEQ ID NO: 930726 - DNA, 25 bp, Homo sapien
tgggtgtgccctaaaatacttctcc

SEQ ID NO: 930727 - DNA, 25 bp, Homo sapien
gagtgaaggtcagtcagtgtgccaa

SEQ ID NO: 930728 - DNA, 25 bp, Homo sapien
taatcatgctcacgactactaaggt

SEQ ID NO: 930729 - DNA, 25 bp, Homo sapien
taactcataggttaacctcagcatg

SEQ ID NO: 930730 - DNA, 25 bp, Homo sapien
tcctgtagtggagaagataaaagtc

SEQ ID NO: 930731 - DNA, 25 bp, Homo sapien
tctgtagcagggtaacaaaattatc

SEQ ID NO: 930732 - DNA, 25 bp, Homo sapien
tggtcaagcaatcaaagtactggtg

SEQ ID NO: 930733 - DNA, 25 bp, Homo sapien
gcttgtgggcttgatcaggccgtca

SEQ ID NO: 930734 - DNA, 25 bp, Homo sapien
gaagctgaataacgtctctaggtct

SEQ ID NO: 930735 - DNA, 25 bp, Homo sapien
tgagctggcgatgaactccgtggcc

SEQ ID NO: 930736 - DNA, 25 bp, Homo sapien
gagggccggtacagtgtcctccatg

SEQ ID NO: 930737 - DNA, 25 bp, Homo sapien
catccgtgcaaggaaaatagtgaca

SEQ ID NO: 930738 - DNA, 25 bp, Homo sapien
aatagtgacaatcgcctccgcggag

SEQ ID NO: 930739 - DNA, 25 bp, Homo sapien
cgtggctgtaagtccttgatggcaa

SEQ ID NO: 930740 - DNA, 25 bp, Homo sapien
tgcagtccgggtactgtccattgcc

SEQ ID NO: 930741 - DNA, 25 bp, Homo sapien
tcagctgttcgaaccccgacccaga

SEQ ID NO: 930742 - DNA, 25 bp, Homo sapien
ttcccttcaagccacgagggagaga

SEQ ID NO: 930743 - DNA, 25 bp, Homo sapien
ccttcaagccacgagggagagagtt

SEQ ID NO: 930744 - DNA, 25 bp, Homo sapien
ttcaagccacgagggagagagtttt

SEQ ID NO: 930745 - DNA, 25 bp, Homo sapien
gagttcaaatccgatgccacttggg

SEQ ID NO: 930746 - DNA, 25 bp, Homo sapien
tagaaccatacctcgcatgtagtag

SEQ ID NO: 930747 - DNA, 25 bp, Homo sapien
gaattgttcctattggtgagtcagt

SEQ ID NO: 930748 - DNA, 25 bp, Homo sapien
gttaaaggaatagcccgtagagcca

SEQ ID NO: 930749 - DNA, 25 bp, Homo sapien
tgcactcttgtatatgtttaaaact

SEQ ID NO: 930750 - DNA, 25 bp, Homo sapien
aaactgctttttaagctgcactctt

SEQ ID NO: 930751 - DNA, 25 bp, Homo sapien
agggctgaattagctctggagtcag

SEQ ID NO: 930752 - DNA, 25 bp, Homo sapien
tgattgtgtttgacactgggagatg

SEQ ID NO: 930753 - DNA, 25 bp, Homo sapien
tacattacacgttgcctggtgctcc

SEQ ID NO: 930754 - DNA, 25 bp, Homo sapien
aaagtctatatgagaccgggcacgg

SEQ ID NO: 930755 - DNA, 25 bp, Homo sapien
tcccaactagagaggtttgctcagc

SEQ ID NO: 930756 - DNA, 25 bp, Homo sapien
gcacttggcatgagctaaatcctgt

SEQ ID NO: 930757 - DNA, 25 bp, Homo sapien
tgtcaacctctgtcttagggcgcct

SEQ ID NO: 930758 - DNA, 25 bp, Homo sapien
cagccatttgttagccaggtcactc

SEQ ID NO: 930759 - DNA, 25 bp, Homo sapien
caggcttcgggtcagacggattcaa

SEQ ID NO: 930760 - DNA, 25 bp, Homo sapien
tagaaaaaccttagctaggcacagt

SEQ ID NO: 930761 - DNA, 25 bp, Homo sapien
gaagattctacagggagattctcct

SEQ ID NO: 930762 - DNA, 25 bp, Homo sapien
tacgcgtagctaatgtgatctcccc

SEQ ID NO: 930763 - DNA, 25 bp, Homo sapien
gagtcaacgttgtcctcctcattgg

SEQ ID NO: 930764 - DNA, 25 bp, Homo sapien
gagccttcccggatatttaagctag

SEQ ID NO: 930765 - DNA, 25 bp, Homo sapien
aggggtcgccgtggccggcattatt

SEQ ID NO: 930766 - DNA, 25 bp, Homo sapien
ttaggaacgctgttctagccggccc

SEQ ID NO: 930767 - DNA, 25 bp, Homo sapien
taggaacgctgttctagccggcccc

SEQ ID NO: 930768 - DNA, 25 bp, Homo sapien
gggtcgccgtggccggcattatttc

SEQ ID NO: 930769 - DNA, 25 bp, Homo sapien
gagatttcacaagcaatgcgagttg

SEQ ID NO: 930770 - DNA, 25 bp, Homo sapien
taaggatgcaacctctgacgttctg

SEQ ID NO: 930771 - DNA, 25 bp, Homo sapien
taggctctgtgacggcatagttttc

SEQ ID NO: 930772 - DNA, 25 bp, Homo sapien
gacgttctgcgccttcctaggagag

SEQ ID NO: 930773 - DNA, 25 bp, Homo sapien
gctcggcgtaggtgggacgcagacc

SEQ ID NO: 930774 - DNA, 25 bp, Homo sapien
ttgctctctcggctgttttcatggt

SEQ ID NO: 930775 - DNA, 25 bp, Homo sapien
gggacagcgccacttgcggtgtttc

SEQ ID NO: 930776 - DNA, 25 bp, Homo sapien
gtgtttctcagaccgctgctgccca

SEQ ID NO: 930777 - DNA, 25 bp, Homo sapien
cttgaccattcgggggcagataatt

SEQ ID NO: 930778 - DNA, 25 bp, Homo sapien
gtgggcttgaccattcgggggcaga

SEQ ID NO: 930779 - DNA, 25 bp, Homo sapien
ggcttgaccattcgggggcagataa

SEQ ID NO: 930780 - DNA, 25 bp, Homo sapien
tgaccattcgggggcagataattgt

SEQ ID NO: 930781 - DNA, 25 bp, Homo sapien
tcgctgctcatcttcctaaatggaa

SEQ ID NO: 930782 - DNA, 25 bp, Homo sapien
ccagtttctggacttggatgtgttt

SEQ ID NO: 930783 - DNA, 25 bp, Homo sapien
cttctggaaggtcgctgctcatctt

SEQ ID NO: 930784 - DNA, 25 bp, Homo sapien
tggaaggtcgctgctcatcttccta

SEQ ID NO: 930785 - DNA, 25 bp, Homo sapien
ctagctctagctgcatccaaaggac

SEQ ID NO: 930786 - DNA, 25 bp, Homo sapien
cacaggctgagaaggtctagctcta

SEQ ID NO: 930787 - DNA, 25 bp, Homo sapien
tgtcccgattgacactaaaactgtc

SEQ ID NO: 930788 - DNA, 25 bp, Homo sapien
cctgttgaactcctgtcccgattga

SEQ ID NO: 930789 - DNA, 25 bp, Homo sapien
ataaacagcagtcactgcaggtctc

SEQ ID NO: 930790 - DNA, 25 bp, Homo sapien
tggataaacagcagtcactgcaggt

SEQ ID NO: 930791 - DNA, 25 bp, Homo sapien
ggataaacagcagtcactgcaggtc

SEQ ID NO: 930792 - DNA, 25 bp, Homo sapien
gataaacagcagtcactgcaggtct

SEQ ID NO: 930793 - DNA, 25 bp, Homo sapien
ctgtggcaagtgttgacaccacagc

SEQ ID NO: 930794 - DNA, 25 bp, Homo sapien
aggaagctgtggcaagtgttgacac

SEQ ID NO: 930795 - DNA, 25 bp, Homo sapien
tttttctggcccgcggaagatgagc

SEQ ID NO: 930796 - DNA, 25 bp, Homo sapien
tctggcccgcggaagatgagcttca

SEQ ID NO: 930797 - DNA, 25 bp, Homo sapien
atcctcccaccagccaagaattggg

SEQ ID NO: 930798 - DNA, 25 bp, Homo sapien
tttctcagccttttagacacacact

SEQ ID NO: 930799 - DNA, 25 bp, Homo sapien
tgcatacctgcagccgggcccgggg

SEQ ID NO: 930800 - DNA, 25 bp, Homo sapien
ccccatcctgtgtctctgataatct

SEQ ID NO: 930801 - DNA, 25 bp, Homo sapien
aaggtgcaaagtgaagctgccagtc

SEQ ID NO: 930802 - DNA, 25 bp, Homo sapien
ggagagctgtcccacatttgcggaa

SEQ ID NO: 930803 - DNA, 25 bp, Homo sapien
ccctagcattgaagccagcctgtag

SEQ ID NO: 930804 - DNA, 25 bp, Homo sapien
taacttgtcacgaaggccacgagtg

SEQ ID NO: 930805 - DNA, 25 bp, Homo sapien
gatttttaatgaatagtgaggcaca

SEQ ID NO: 930806 - DNA, 25 bp, Homo sapien
aagaactcattttgtcagctgggca

SEQ ID NO: 930807 - DNA, 25 bp, Homo sapien
aggcacacaatgtaatataaacaag

SEQ ID NO: 930808 - DNA, 25 bp, Homo sapien
gggactagaagactccagcctttcc

SEQ ID NO: 930809 - DNA, 25 bp, Homo sapien
tgttcaaagcgttcagatgcatcgt

SEQ ID NO: 930810 - DNA, 25 bp, Homo sapien
tcttcaggaccgtgttgcattgcag

SEQ ID NO: 930811 - DNA, 25 bp, Homo sapien
gattttgtacccgtcatgggcaccg

SEQ ID NO: 930812 - DNA, 25 bp, Homo sapien
agttttgctaggaacgcccggatca

SEQ ID NO: 930813 - DNA, 25 bp, Homo sapien
gagacatgttggaatattctgtact

SEQ ID NO: 930814 - DNA, 25 bp, Homo sapien
acggccctcctggtctatcttgcgt

SEQ ID NO: 930815 - DNA, 25 bp, Homo sapien
atatgagacatgttggaatattctg

SEQ ID NO: 930816 - DNA, 25 bp, Homo sapien
cacacggccctcctggtctatcttg

SEQ ID NO: 930817 - DNA, 25 bp, Homo sapien
caaaagtacatgagccaaacaaaag

SEQ ID NO: 930818 - DNA, 25 bp, Homo sapien
ccgtgccaggcctcatccttatttt

SEQ ID NO: 930819 - DNA, 25 bp, Homo sapien
gacacctttgatgaggttcagcatg

SEQ ID NO: 930820 - DNA, 25 bp, Homo sapien
tgcttgttatgtccagtttaaacag

SEQ ID NO: 930821 - DNA, 25 bp, Homo sapien
gtattgcaattatggttctctgctg

SEQ ID NO: 930822 - DNA, 25 bp, Homo sapien
ggctggagtatagtattgcaattat

SEQ ID NO: 930823 - DNA, 25 bp, Homo sapien
tgcaattatggttctctgctgtctc

SEQ ID NO: 930824 - DNA, 25 bp, Homo sapien
ctggagtatagtattgcaattatgg

SEQ ID NO: 930825 - DNA, 25 bp, Homo sapien
tgtgccaggtggaaccccttttgct

SEQ ID NO: 930826 - DNA, 25 bp, Homo sapien
tgctgtgccaggtggaacccctttt

SEQ ID NO: 930827 - DNA, 25 bp, Homo sapien
tgccaggtggaaccccttttgcttc

SEQ ID NO: 930828 - DNA, 25 bp, Homo sapien
cactggaagggttctaggggcctct

SEQ ID NO: 930829 - DNA, 25 bp, Homo sapien
ccaacattgccggaacgttcttctc

SEQ ID NO: 930830 - DNA, 25 bp, Homo sapien
aacattgccggaacgttcttctcac

SEQ ID NO: 930831 - DNA, 25 bp, Homo sapien
tggcccaacattgccggaacgttct

SEQ ID NO: 930832 - DNA, 25 bp, Homo sapien
ccatggcccaacattgccggaacgt

SEQ ID NO: 930833 - DNA, 25 bp, Homo sapien
ttactgagctcaagccctggaagcg

SEQ ID NO: 930834 - DNA, 25 bp, Homo sapien
attactgagctcaagccctggaagc

SEQ ID NO: 930835 - DNA, 25 bp, Homo sapien
actgagctcaagccctggaagcggc

SEQ ID NO: 930836 - DNA, 25 bp, Homo sapien
cattactgagctcaagccctggaag

SEQ ID NO: 930837 - DNA, 25 bp, Homo sapien
atgcccggcctatttatttatgttt

SEQ ID NO: 930838 - DNA, 25 bp, Homo sapien
caggttaagtgattctcacgcctca

SEQ ID NO: 930839 - DNA, 25 bp, Homo sapien
tgagatggaggctcattctgctgcc

SEQ ID NO: 930840 - DNA, 25 bp, Homo sapien
tatgttttgagatggaggctcattc

SEQ ID NO: 930841 - DNA, 25 bp, Homo sapien
cctcatggaactgatttccagatag

SEQ ID NO: 930842 - DNA, 25 bp, Homo sapien
cctcctcatggaactgatttccaga

SEQ ID NO: 930843 - DNA, 25 bp, Homo sapien
tcctcatggaactgatttccagata

SEQ ID NO: 930844 - DNA, 25 bp, Homo sapien
ctcctcatggaactgatttccagat

SEQ ID NO: 930845 - DNA, 25 bp, Homo sapien
tttaggtatatgaattctggatata

SEQ ID NO: 930846 - DNA, 25 bp, Homo sapien
ttaggtatatgaattctggatataa

SEQ ID NO: 930847 - DNA, 25 bp, Homo sapien
tcggctaaagaggtcattaacttgt

SEQ ID NO: 930848 - DNA, 25 bp, Homo sapien
ttcggctaaagaggtcattaacttg

SEQ ID NO: 930849 - DNA, 25 bp, Homo sapien
aactatgtaattagattctcttgta

SEQ ID NO: 930850 - DNA, 25 bp, Homo sapien
attctcttgtatctttccagatata

SEQ ID NO: 930851 - DNA, 25 bp, Homo sapien
tagattctcttgtatctttccagat

SEQ ID NO: 930852 - DNA, 25 bp, Homo sapien
taattagattctcttgtatctttcc

SEQ ID NO: 930853 - DNA, 25 bp, Homo sapien
ctgctgcagaatttgtaacactgga

SEQ ID NO: 930854 - DNA, 25 bp, Homo sapien
gcagaatttgtaacactggatgaat

SEQ ID NO: 930855 - DNA, 25 bp, Homo sapien
cacttgaacgatgttaagatcttca

SEQ ID NO: 930856 - DNA, 25 bp, Homo sapien
aacagtcacttgaacgatgttaaga

SEQ ID NO: 930857 - DNA, 25 bp, Homo sapien
gcatcctcgacctcccacggtcaag

SEQ ID NO: 930858 - DNA, 25 bp, Homo sapien
gtcatgctggttgagaactcctgac

SEQ ID NO: 930859 - DNA, 25 bp, Homo sapien
gttggtcatgctggttgagaactcc

SEQ ID NO: 930860 - DNA, 25 bp, Homo sapien
ttgagactgagtctatcacccaggc

SEQ ID NO: 930861 - DNA, 25 bp, Homo sapien
tcgattttcacctcggcttcagggt

SEQ ID NO: 930862 - DNA, 25 bp, Homo sapien
ttttcacctcggcttcagggtcctc

SEQ ID NO: 930863 - DNA, 25 bp, Homo sapien
ttcgattttcacctcggcttcaggg

SEQ ID NO: 930864 - DNA, 25 bp, Homo sapien
gattttcacctcggcttcagggtcc

SEQ ID NO: 930865 - DNA, 25 bp, Homo sapien
tccattggtaattccatttctatta

SEQ ID NO: 930866 - DNA, 25 bp, Homo sapien
ccattggtaattccatttctattac

SEQ ID NO: 930867 - DNA, 25 bp, Homo sapien
ttccattggtaattccatttctatt

SEQ ID NO: 930868 - DNA, 25 bp, Homo sapien
acaggtgtgtgccaccatgcccggc

SEQ ID NO: 930869 - DNA, 25 bp, Homo sapien
tacaggtgtgtgccaccatgcccgg

SEQ ID NO: 930870 - DNA, 25 bp, Homo sapien
ttgacctcccagactcaagcgatct

SEQ ID NO: 930871 - DNA, 25 bp, Homo sapien
tgacctcccagactcaagcgatctt

SEQ ID NO: 930872 - DNA, 25 bp, Homo sapien
atattgatagtaattaggatcttct

SEQ ID NO: 930873 - DNA, 25 bp, Homo sapien
aatctgattttcagctggggacagt

SEQ ID NO: 930874 - DNA, 25 bp, Homo sapien
tctgttggtataaggacagtgaagc

SEQ ID NO: 930875 - DNA, 25 bp, Homo sapien
tataaggacagtgaagctaaacatt

SEQ ID NO: 930876 - DNA, 25 bp, Homo sapien
ttaacagctctgttggtataaggac

SEQ ID NO: 930877 - DNA, 25 bp, Homo sapien
gcgtgaacctttcaacttttaatgc

SEQ ID NO: 930878 - DNA, 25 bp, Homo sapien
agccactagacccagccaggtcttt

SEQ ID NO: 930879 - DNA, 25 bp, Homo sapien
ttattctttgaagccagggtctcgc

SEQ ID NO: 930880 - DNA, 25 bp, Homo sapien
taagtgcgtgctacgatgtctggct

SEQ ID NO: 930881 - DNA, 25 bp, Homo sapien
agttacagtcgtgagcccgcacacc

SEQ ID NO: 930882 - DNA, 25 bp, Homo sapien
gttggagttacagtcgtgagcccgc

SEQ ID NO: 930883 - DNA, 25 bp, Homo sapien
ggagttacagtcgtgagcccgcaca

SEQ ID NO: 930884 - DNA, 25 bp, Homo sapien
cccgcacaccctgccaaggcttgtt

SEQ ID NO: 930885 - DNA, 25 bp, Homo sapien
aagaaaggtgtcaaatgataacctg

SEQ ID NO: 930886 - DNA, 25 bp, Homo sapien
ggtgtcaaatgataacctgctagat

SEQ ID NO: 930887 - DNA, 25 bp, Homo sapien
tgtcaaatgataacctgctagatac

SEQ ID NO: 930888 - DNA, 25 bp, Homo sapien
aatgataacctgctagatacttggt

SEQ ID NO: 930889 - DNA, 25 bp, Homo sapien
tccaccgtgcgcagccttgtttgtt

SEQ ID NO: 930890 - DNA, 25 bp, Homo sapien
gtgatccaccgtgcgcagccttgtt

SEQ ID NO: 930891 - DNA, 25 bp, Homo sapien
ccaccgtgcgcagccttgtttgttt

SEQ ID NO: 930892 - DNA, 25 bp, Homo sapien
gatccaccgtgcgcagccttgtttg

SEQ ID NO: 930893 - DNA, 25 bp, Homo sapien
accacgcttggccgatacttgattc

SEQ ID NO: 930894 - DNA, 25 bp, Homo sapien
taccacgcttggccgatacttgatt

SEQ ID NO: 930895 - DNA, 25 bp, Homo sapien
ctaccacgcttggccgatacttgat

SEQ ID NO: 930896 - DNA, 25 bp, Homo sapien
tcagttttcacattgatggggccgc

SEQ ID NO: 930897 - DNA, 25 bp, Homo sapien
cagttttcacattgatggggccgca

SEQ ID NO: 930898 - DNA, 25 bp, Homo sapien
agaatcttccatgggttcagttttc

SEQ ID NO: 930899 - DNA, 25 bp, Homo sapien
tccatgggttcagttttcacattga

SEQ ID NO: 930900 - DNA, 25 bp, Homo sapien
ttggtgatactatggatctctccgc

SEQ ID NO: 930901 - DNA, 25 bp, Homo sapien
ggatctctccgcatctgttaccatc

SEQ ID NO: 930902 - DNA, 25 bp, Homo sapien
gatactatggatctctccgcatctg

SEQ ID NO: 930903 - DNA, 25 bp, Homo sapien
ttcacttggtgatactatggatctc

SEQ ID NO: 930904 - DNA, 25 bp, Homo sapien
tgatctgtggtttcgcggtcctcgg

SEQ ID NO: 930905 - DNA, 25 bp, Homo sapien
gccaacgtggaaaagtcatcgagag

SEQ ID NO: 930906 - DNA, 25 bp, Homo sapien
aactcccagatcgaagccaacgtgg

SEQ ID NO: 930907 - DNA, 25 bp, Homo sapien
cgtgatgaagtgtcgtgccgtcccg

SEQ ID NO: 930908 - DNA, 25 bp, Homo sapien
gtttcctaggcacatgtgtgccaca

SEQ ID NO: 930909 - DNA, 25 bp, Homo sapien
tttaatgaagaagaagtggttcagc

SEQ ID NO: 930910 - DNA, 25 bp, Homo sapien
aaagggggggatacatctgcagaat

SEQ ID NO: 930911 - DNA, 25 bp, Homo sapien
aatggcttgctgcacctattggccc

SEQ ID NO: 930912 - DNA, 25 bp, Homo sapien
agctgactctctggtcctaggaagg

SEQ ID NO: 930913 - DNA, 25 bp, Homo sapien
gctgactctctggtcctaggaaggg

SEQ ID NO: 930914 - DNA, 25 bp, Homo sapien
cagctgactctctggtcctaggaag

SEQ ID NO: 930915 - DNA, 25 bp, Homo sapien
tacccagcacggaccaatgaaaaaa

SEQ ID NO: 930916 - DNA, 25 bp, Homo sapien
aaaagcatgacacatctgaacagtc

SEQ ID NO: 930917 - DNA, 25 bp, Homo sapien
cagtcagctctgaaacgcagcaggc

SEQ ID NO: 930918 - DNA, 25 bp, Homo sapien
caggcgggatgcacgagtgaattaa

SEQ ID NO: 930919 - DNA, 25 bp, Homo sapien
acagccgactggtctcgcagcatct

SEQ ID NO: 930920 - DNA, 25 bp, Homo sapien
cccctgcactaccacagccgactgg

SEQ ID NO: 930921 - DNA, 25 bp, Homo sapien
ggaagcccctgcactaccacagccg

SEQ ID NO: 930922 - DNA, 25 bp, Homo sapien
gccgactggtctcgcagcatcttct

SEQ ID NO: 930923 - DNA, 25 bp, Homo sapien
gcccagcctgttatctagcttttta

SEQ ID NO: 930924 - DNA, 25 bp, Homo sapien
gtgcccagcctgttatctagctttt

SEQ ID NO: 930925 - DNA, 25 bp, Homo sapien
tagctttttaaaacactgcaaagga

SEQ ID NO: 930926 - DNA, 25 bp, Homo sapien
cccaagtagctggtgtgagtcaccg

SEQ ID NO: 930927 - DNA, 25 bp, Homo sapien
ggccttgatgcagggctctctaaaa

SEQ ID NO: 930928 - DNA, 25 bp, Homo sapien
gaagaaagagtgatcaatacagaag

SEQ ID NO: 930929 - DNA, 25 bp, Homo sapien
ccacatcatcttctataagaacact

SEQ ID NO: 930930 - DNA, 25 bp, Homo sapien
tgtctttagcaatacactggccttg

SEQ ID NO: 930931 - DNA, 25 bp, Homo sapien
tgagtatttccgtttcgcccgagtg

SEQ ID NO: 930932 - DNA, 25 bp, Homo sapien
tgccttcctgagtatttccgtttcg

SEQ ID NO: 930933 - DNA, 25 bp, Homo sapien
gacctgcatcccgttcacagggcag

SEQ ID NO: 930934 - DNA, 25 bp, Homo sapien
gtttcgcccgagtggacctgcatcc

SEQ ID NO: 930935 - DNA, 25 bp, Homo sapien
taagcatttgtgctgtacacttccg

SEQ ID NO: 930936 - DNA, 25 bp, Homo sapien
gatgattggcattaggtcagtttct

SEQ ID NO: 930937 - DNA, 25 bp, Homo sapien
cattaggtcagtttctaagcatttg

SEQ ID NO: 930938 - DNA, 25 bp, Homo sapien
tatgataaacaggttaatgaactat

SEQ ID NO: 930939 - DNA, 25 bp, Homo sapien
aaccacatagtaatttgaacacaga

SEQ ID NO: 930940 - DNA, 25 bp, Homo sapien
tttgctatacagttgaaacgtggca

SEQ ID NO: 930941 - DNA, 25 bp, Homo sapien
taggaagactatacccctgaaccca

SEQ ID NO: 930942 - DNA, 25 bp, Homo sapien
tcagtctagtcagaagagagaaacc

SEQ ID NO: 930943 - DNA, 25 bp, Homo sapien
tctttgtcccgtcatctggtgatgg

SEQ ID NO: 930944 - DNA, 25 bp, Homo sapien
tagtatcccatagtgtacgtaccac

SEQ ID NO: 930945 - DNA, 25 bp, Homo sapien
gatggatgcttagcttgatttgcac

SEQ ID NO: 930946 - DNA, 25 bp, Homo sapien
tgataaacgttcaaggcaggtgtct

SEQ ID NO: 930947 - DNA, 25 bp, Homo sapien
actcactggaatgagtgccacactg

SEQ ID NO: 930948 - DNA, 25 bp, Homo sapien
tctgggacttcgataagacttgctg

SEQ ID NO: 930949 - DNA, 25 bp, Homo sapien
aatgctgttggtcatcacaggcagg

SEQ ID NO: 930950 - DNA, 25 bp, Homo sapien
tgccacactgggtatcccaaatgct

SEQ ID NO: 930951 - DNA, 25 bp, Homo sapien
ttattctaataaaccagagtaccgc

SEQ ID NO: 930952 - DNA, 25 bp, Homo sapien
ccgctgaggacctagtataaaataa

SEQ ID NO: 930953 - DNA, 25 bp, Homo sapien
gataatttgttctatgtccttgaaa

SEQ ID NO: 930954 - DNA, 25 bp, Homo sapien
taataaaccagagtaccgctgagga

SEQ ID NO: 930955 - DNA, 25 bp, Homo sapien
gttaggatcgtttctaggagaatgc

SEQ ID NO: 930956 - DNA, 25 bp, Homo sapien
ttatttggtaagctgaatccaagaa

SEQ ID NO: 930957 - DNA, 25 bp, Homo sapien
gaagatgtgttaggatcgtttctag

SEQ ID NO: 930958 - DNA, 25 bp, Homo sapien
tttatttggtaagctgaatccaaga

SEQ ID NO: 930959 - DNA, 25 bp, Homo sapien
tccttttgagattgggaatacaaag

SEQ ID NO: 930960 - DNA, 25 bp, Homo sapien
gaagtcttgcctgcgatccttttga

SEQ ID NO: 930961 - DNA, 25 bp, Homo sapien
cctgcgatccttttgagattgggaa

SEQ ID NO: 930962 - DNA, 25 bp, Homo sapien
tgtggaagtcttgcctgcgatcctt

SEQ ID NO: 930963 - DNA, 25 bp, Homo sapien
tacactgcgatgcaggccacttctg

SEQ ID NO: 930964 - DNA, 25 bp, Homo sapien
tctttctgaaaatccgtcctggcat

SEQ ID NO: 930965 - DNA, 25 bp, Homo sapien
aacacgtctgtttcgtacactgcga

SEQ ID NO: 930966 - DNA, 25 bp, Homo sapien
aaaagcgcatcctctctcggttccg

SEQ ID NO: 930967 - DNA, 25 bp, Homo sapien
agggcagacacgaggaatgtcacca

SEQ ID NO: 930968 - DNA, 25 bp, Homo sapien
ctgaggaggactcttcttcaacagg

SEQ ID NO: 930969 - DNA, 25 bp, Homo sapien
gcagggtggacactgctacctgggc

SEQ ID NO: 930970 - DNA, 25 bp, Homo sapien
ggtctctgaggaggactcttcttca

SEQ ID NO: 930971 - DNA, 25 bp, Homo sapien
tggcctcccgaagccctgtgattac

SEQ ID NO: 930972 - DNA, 25 bp, Homo sapien
cactgagcctggtcagcttttttat

SEQ ID NO: 930973 - DNA, 25 bp, Homo sapien
ttccccctcatccacactgggatta

SEQ ID NO: 930974 - DNA, 25 bp, Homo sapien
tttctaagagtcagagtctcacaat

SEQ ID NO: 930975 - DNA, 25 bp, Homo sapien
ggtcaaaacaatcatgcaatccatt

SEQ ID NO: 930976 - DNA, 25 bp, Homo sapien
gtcaaaacaatcatgcaatccattt

SEQ ID NO: 930977 - DNA, 25 bp, Homo sapien
tcaaaacaatcatgcaatccatttc

SEQ ID NO: 930978 - DNA, 25 bp, Homo sapien
ggcgtcaactatgctaccagtaatc

SEQ ID NO: 930979 - DNA, 25 bp, Homo sapien
caagctctgatgtcaaaagtctgct

SEQ ID NO: 930980 - DNA, 25 bp, Homo sapien
tggcccctgtgaattctgacatata

SEQ ID NO: 930981 - DNA, 25 bp, Homo sapien
caggatgataccacgtggaattcaa

SEQ ID NO: 930982 - DNA, 25 bp, Homo sapien
aatactggaattataggaatgagac

SEQ ID NO: 930983 - DNA, 25 bp, Homo sapien
cagcctgggactcccaagcttaagt

SEQ ID NO: 930984 - DNA, 25 bp, Homo sapien
cagtctctcaaaatactggaattat

SEQ ID NO: 930985 - DNA, 25 bp, Homo sapien
cccagacctgggacttgttttctgt

SEQ ID NO: 930986 - DNA, 25 bp, Homo sapien
tcttcttgtaatgatgtgagaatct

SEQ ID NO: 930987 - DNA, 25 bp, Homo sapien
gcagtgcctgttccatcttaactaa

SEQ ID NO: 930988 - DNA, 25 bp, Homo sapien
tgtgagaatctatgcctgaatctgt

SEQ ID NO: 930989 - DNA, 25 bp, Homo sapien
gctttctggcgcaacatgttgctgt

SEQ ID NO: 930990 - DNA, 25 bp, Homo sapien
gtccacggaagtcacacagcctatg

SEQ ID NO: 930991 - DNA, 25 bp, Homo sapien
gattgatcccaactgcaagccggtg

SEQ ID NO: 930992 - DNA, 25 bp, Homo sapien
ggtgacttgaacacatacactggga

SEQ ID NO: 930993 - DNA, 25 bp, Homo sapien
gagtcttcaattgcagccgtgagca

SEQ ID NO: 930994 - DNA, 25 bp, Homo sapien
aacaaatgtccgcacaaaaacgtgt

SEQ ID NO: 930995 - DNA, 25 bp, Homo sapien
aattacccaaatagccatcaatgga

SEQ ID NO: 930996 - DNA, 25 bp, Homo sapien
ccaaatagccatcaatggatggaaa

SEQ ID NO: 930997 - DNA, 25 bp, Homo sapien
tccgcacaaaaacgtgtacaccaat

SEQ ID NO: 930998 - DNA, 25 bp, Homo sapien
tttacaatggatctcaacgaagctg

SEQ ID NO: 930999 - DNA, 25 bp, Homo sapien
tcctcgggtgctgaaagcgttctgc

SEQ ID NO: 931000 - DNA, 25 bp, Homo sapien
ggagaatacagccttgcgagccttt

SEQ ID NO: 931001 - DNA, 25 bp, Homo sapien
tgggcctctaggcaacgcgtgacgt

SEQ ID NO: 931002 - DNA, 25 bp, Homo sapien
cgggcggagcgtggcatcacgcaca

SEQ ID NO: 931003 - DNA, 25 bp, Homo sapien
gacgggcggagcgtggcatcacgca

SEQ ID NO: 931004 - DNA, 25 bp, Homo sapien
ggcggagcgtggcatcacgcacacc

SEQ ID NO: 931005 - DNA, 25 bp, Homo sapien
gcacacccccgctcggccaatcagg

SEQ ID NO: 931006 - DNA, 25 bp, Homo sapien
tggcggcgtcggcggcgtcggcggc

SEQ ID NO: 931007 - DNA, 25 bp, Homo sapien
cggcgtcggcggcgtcggcggcggg

SEQ ID NO: 931008 - DNA, 25 bp, Homo sapien
ttaatggcggcgtcggcggcgtcgg

SEQ ID NO: 931009 - DNA, 25 bp, Homo sapien
aatggcggcgtcggcggcgtcggcg

SEQ ID NO: 931010 - DNA, 25 bp, Homo sapien
agcgccccaagtgggagtcgccgtt

SEQ ID NO: 931011 - DNA, 25 bp, Homo sapien
gaatccaatttagccgcgctgtgca

SEQ ID NO: 931012 - DNA, 25 bp, Homo sapien
ccgtttccggtgctgtcgaatccaa

SEQ ID NO: 931013 - DNA, 25 bp, Homo sapien
tggaaggcagcctcgactcgtgtgt

SEQ ID NO: 931014 - DNA, 25 bp, Homo sapien
atcgctgattgtgggatggattgct

SEQ ID NO: 931015 - DNA, 25 bp, Homo sapien
gattgctggcggggcctttctcacc

SEQ ID NO: 931016 - DNA, 25 bp, Homo sapien
ggacaccgcccccagacgtgcatgc

SEQ ID NO: 931017 - DNA, 25 bp, Homo sapien
ccgcccccagacgtgcatgcagttg

SEQ ID NO: 931018 - DNA, 25 bp, Homo sapien
aagaagaacatgtctcacgctcccc

SEQ ID NO: 931019 - DNA, 25 bp, Homo sapien
tcagattcctccggcagctctaact

SEQ ID NO: 931020 - DNA, 25 bp, Homo sapien
ctcaagccagaagccttggaagcat

SEQ ID NO: 931021 - DNA, 25 bp, Homo sapien
gaatgaataggcatcccaagaagaa

SEQ ID NO: 931022 - DNA, 25 bp, Homo sapien
aaagaatcttgtaaagtgtaactca

SEQ ID NO: 931023 - DNA, 25 bp, Homo sapien
tccacgacgaagtgacaaagaccag

SEQ ID NO: 931024 - DNA, 25 bp, Homo sapien
taatttacgcttctgtccacgacga

SEQ ID NO: 931025 - DNA, 25 bp, Homo sapien
gtagactcctaatttgtctccctaa

SEQ ID NO: 931026 - DNA, 25 bp, Homo sapien
gaaaatcagtgagcccaaagctgct

SEQ ID NO: 931027 - DNA, 25 bp, Homo sapien
tttggagaccaaataacacacttct

SEQ ID NO: 931028 - DNA, 25 bp, Homo sapien
catcagaattggtgagatgccgcac

SEQ ID NO: 931029 - DNA, 25 bp, Homo sapien
gatgccgcacagaacacctatatta

SEQ ID NO: 931030 - DNA, 25 bp, Homo sapien
ggctggaatacagtggcaccatcat

SEQ ID NO: 931031 - DNA, 25 bp, Homo sapien
gctgagactatagatgtgtgccacc

SEQ ID NO: 931032 - DNA, 25 bp, Homo sapien
agacaaagtattgttctgtcaccca

SEQ ID NO: 931033 - DNA, 25 bp, Homo sapien
cagcctcaatttcccaggttcaagt

SEQ ID NO: 931034 - DNA, 25 bp, Homo sapien
cacgctgggccagtagataccacat

SEQ ID NO: 931035 - DNA, 25 bp, Homo sapien
agtagataccacatttctgaacagg

SEQ ID NO: 931036 - DNA, 25 bp, Homo sapien
agataccacatttctgaacaggaag

SEQ ID NO: 931037 - DNA, 25 bp, Homo sapien
accacgctgggccagtagataccac

SEQ ID NO: 931038 - DNA, 25 bp, Homo sapien
tcataaaagtcaactctaaacctga

SEQ ID NO: 931039 - DNA, 25 bp, Homo sapien
aatattaataagtatgctgcctggc

SEQ ID NO: 931040 - DNA, 25 bp, Homo sapien
aagcccttactagccaataaattat

SEQ ID NO: 931041 - DNA, 25 bp, Homo sapien
agttgcagccattgaaacctcgtca

SEQ ID NO: 931042 - DNA, 25 bp, Homo sapien
tcttaaattttgtatacagacaagg

SEQ ID NO: 931043 - DNA, 25 bp, Homo sapien
taattcttaaattttgtatacagac

SEQ ID NO: 931044 - DNA, 25 bp, Homo sapien
accacaggtgggctccaacatgcca

SEQ ID NO: 931045 - DNA, 25 bp, Homo sapien
ccacaggtgggctccaacatgccag

SEQ ID NO: 931046 - DNA, 25 bp, Homo sapien
tatcaactcaagtgcagccaaattc

SEQ ID NO: 931047 - DNA, 25 bp, Homo sapien
taaatgaataaataggccgggcacg

SEQ ID NO: 931048 - DNA, 25 bp, Homo sapien
tttatcaactcaagtgcagccaaat

SEQ ID NO: 931049 - DNA, 25 bp, Homo sapien
ctctaaaaaatgagtaaataaatga

SEQ ID NO: 931050 - DNA, 25 bp, Homo sapien
gagttggggaccagtcatggccacc

SEQ ID NO: 931051 - DNA, 25 bp, Homo sapien
ggagttggggaccagtcatggccac

SEQ ID NO: 931052 - DNA, 25 bp, Homo sapien
aaatgatcagaaaccataaataggc

SEQ ID NO: 931053 - DNA, 25 bp, Homo sapien
tgtgcccacctgtacacttctttta

SEQ ID NO: 931054 - DNA, 25 bp, Homo sapien
aaaaatgatcagaaaccataaatag

SEQ ID NO: 931055 - DNA, 25 bp, Homo sapien
actgtgcccacctgtacacttcttt

SEQ ID NO: 931056 - DNA, 25 bp, Homo sapien
gactaaactgctgcactctagactg

SEQ ID NO: 931057 - DNA, 25 bp, Homo sapien
agtttacaggcatatattatcattg

SEQ ID NO: 931058 - DNA, 25 bp, Homo sapien
tcattgcaaaggatgactgcaaaag

SEQ ID NO: 931059 - DNA, 25 bp, Homo sapien
taataacgataaactagctaggcat

SEQ ID NO: 931060 - DNA, 25 bp, Homo sapien
gacgggagcctagggaattgtcatc

SEQ ID NO: 931061 - DNA, 25 bp, Homo sapien
ggagccttttccgtctctcagcggc

SEQ ID NO: 931062 - DNA, 25 bp, Homo sapien
ccaggcaggaaatgggccaattcca

SEQ ID NO: 931063 - DNA, 25 bp, Homo sapien
ctacattgtgctcgggcggtggctc

SEQ ID NO: 931064 - DNA, 25 bp, Homo sapien
gatacatatgccatttaagggaagc

SEQ ID NO: 931065 - DNA, 25 bp, Homo sapien
gacgcagtctcgctgcattacccaa

SEQ ID NO: 931066 - DNA, 25 bp, Homo sapien
gagggaatgaaaccagattggccac

SEQ ID NO: 931067 - DNA, 25 bp, Homo sapien
gcaccaagcccaggttgagctttta

SEQ ID NO: 931068 - DNA, 25 bp, Homo sapien
cagagaaaactgcacaaaacagaag

SEQ ID NO: 931069 - DNA, 25 bp, Homo sapien
aaaactgcacaaaacagaagtgttc

SEQ ID NO: 931070 - DNA, 25 bp, Homo sapien
tataacagagaaaactgcacaaaac

SEQ ID NO: 931071 - DNA, 25 bp, Homo sapien
gagaaaactgcacaaaacagaagtg

SEQ ID NO: 931072 - DNA, 25 bp, Homo sapien
taagaagattgaccatttggtgccc

SEQ ID NO: 931073 - DNA, 25 bp, Homo sapien
ttgcccagcccctagaacgtgttat

SEQ ID NO: 931074 - DNA, 25 bp, Homo sapien
tattctgaaataagagcgggatgct

SEQ ID NO: 931075 - DNA, 25 bp, Homo sapien
ggtgcccatagctattgctcttgca

SEQ ID NO: 931076 - DNA, 25 bp, Homo sapien
gaggtttcggtgagctgagaactgc

SEQ ID NO: 931077 - DNA, 25 bp, Homo sapien
cctgtctctccgaaaaaaatacata

SEQ ID NO: 931078 - DNA, 25 bp, Homo sapien
tttcggtgagctgagaactgccact

SEQ ID NO: 931079 - DNA, 25 bp, Homo sapien
ggtttcggtgagctgagaactgcca

SEQ ID NO: 931080 - DNA, 25 bp, Homo sapien
cgggacagtggctccccacactttg

SEQ ID NO: 931081 - DNA, 25 bp, Homo sapien
tctaaaagtaataatatgccgggac

SEQ ID NO: 931082 - DNA, 25 bp, Homo sapien
aagtaataatatgccgggacagtgg

SEQ ID NO: 931083 - DNA, 25 bp, Homo sapien
taaaagtaataatatgccgggacag

SEQ ID NO: 931084 - DNA, 25 bp, Homo sapien
ccaccaagcccggcccgaatataat

SEQ ID NO: 931085 - DNA, 25 bp, Homo sapien
gtattataggattgagccaccaagc

SEQ ID NO: 931086 - DNA, 25 bp, Homo sapien
caccaagcccggcccgaatataatt

SEQ ID NO: 931087 - DNA, 25 bp, Homo sapien
aaggtgctggtattataggattgag

SEQ ID NO: 931088 - DNA, 25 bp, Homo sapien
agtcaaaagtgcctataacccagga

SEQ ID NO: 931089 - DNA, 25 bp, Homo sapien
cccaggaaagtctaaatgaggacaa

SEQ ID NO: 931090 - DNA, 25 bp, Homo sapien
ggcacctatgatcacagcttctcag

SEQ ID NO: 931091 - DNA, 25 bp, Homo sapien
tctaaatgaggacaacggaggctgg

SEQ ID NO: 931092 - DNA, 25 bp, Homo sapien
gagacgttagtttactccagagtca

SEQ ID NO: 931093 - DNA, 25 bp, Homo sapien
taaccttgtccccaccagaatattc

SEQ ID NO: 931094 - DNA, 25 bp, Homo sapien
ggcttccaatggcaactcgagacgt

SEQ ID NO: 931095 - DNA, 25 bp, Homo sapien
caaggccagtaccttcatgtcatga

SEQ ID NO: 931096 - DNA, 25 bp, Homo sapien
aaaaattgtctaacatgctgggcgc

SEQ ID NO: 931097 - DNA, 25 bp, Homo sapien
gagaggatgaattaaaaattgtcta

SEQ ID NO: 931098 - DNA, 25 bp, Homo sapien
ttaaaaattgtctaacatgctgggc

SEQ ID NO: 931099 - DNA, 25 bp, Homo sapien
aaattgtctaacatgctgggcgcag

SEQ ID NO: 931100 - DNA, 25 bp, Homo sapien
gattagccaccttccaactccaagt

SEQ ID NO: 931101 - DNA, 25 bp, Homo sapien
tcaaagattagccaccttccaactc

SEQ ID NO: 931102 - DNA, 25 bp, Homo sapien
aaaaacatagaatcaaagattagcc

SEQ ID NO: 931103 - DNA, 25 bp, Homo sapien
tcaaaaacatagaatcaaagattag

SEQ ID NO: 931104 - DNA, 25 bp, Homo sapien
ttgtacaagtgaagcaagcaatctc

SEQ ID NO: 931105 - DNA, 25 bp, Homo sapien
cttgtacaagtgaagcaagcaatct

SEQ ID NO: 931106 - DNA, 25 bp, Homo sapien
caccctaggaggtggaaggtccctg

SEQ ID NO: 931107 - DNA, 25 bp, Homo sapien
tgtctactaagtaagcagcgtggtc

SEQ ID NO: 931108 - DNA, 25 bp, Homo sapien
ggttactgattaaatatcgctctcc

SEQ ID NO: 931109 - DNA, 25 bp, Homo sapien
ctgattaaatatcgctctccttcct

SEQ ID NO: 931110 - DNA, 25 bp, Homo sapien
catgttaaaataccctaggaagtgg

SEQ ID NO: 931111 - DNA, 25 bp, Homo sapien
gggatttagtgatggcatgttaaaa

SEQ ID NO: 931112 - DNA, 25 bp, Homo sapien
cacttgtaggtcctatgcacaacag

SEQ ID NO: 931113 - DNA, 25 bp, Homo sapien
ttgtaggtcctatgcacaacagcca

SEQ ID NO: 931114 - DNA, 25 bp, Homo sapien
ccagcccacttgtaggtcctatgca

SEQ ID NO: 931115 - DNA, 25 bp, Homo sapien
caaccccagcccacttgtaggtcct

SEQ ID NO: 931116 - DNA, 25 bp, Homo sapien
aagctggaagaaagtcctctgggcg

SEQ ID NO: 931117 - DNA, 25 bp, Homo sapien
tggaagaaagtcctctgggcgcctg

SEQ ID NO: 931118 - DNA, 25 bp, Homo sapien
tctccacaaagaaggacagcagaag

SEQ ID NO: 931119 - DNA, 25 bp, Homo sapien
tgggctctggcgttgctctcttcca

SEQ ID NO: 931120 - DNA, 25 bp, Homo sapien
tcttatctcgcactcagggtagaaa

SEQ ID NO: 931121 - DNA, 25 bp, Homo sapien
ttatctcgcactcagggtagaaaag

SEQ ID NO: 931122 - DNA, 25 bp, Homo sapien
gttcttatctcgcactcagggtaga

SEQ ID NO: 931123 - DNA, 25 bp, Homo sapien
cgttcttatctcgcactcagggtag

SEQ ID NO: 931124 - DNA, 25 bp, Homo sapien
ggggaggccttaagtagggcagcag

SEQ ID NO: 931125 - DNA, 25 bp, Homo sapien
gaggccttaagtagggcagcagcac

SEQ ID NO: 931126 - DNA, 25 bp, Homo sapien
aggccttaagtagggcagcagcaca

SEQ ID NO: 931127 - DNA, 25 bp, Homo sapien
gaaaaggaggtgcagagctaaggaa

SEQ ID NO: 931128 - DNA, 25 bp, Homo sapien
ccagtacagaaattcacccacagca

SEQ ID NO: 931129 - DNA, 25 bp, Homo sapien
acgtccatcagcaccccttccatgt

SEQ ID NO: 931130 - DNA, 25 bp, Homo sapien
agtccacgtccatcagcaccccttc

SEQ ID NO: 931131 - DNA, 25 bp, Homo sapien
cgtccatcagcaccccttccatgtt

SEQ ID NO: 931132 - DNA, 25 bp, Homo sapien
ccacgtccatcagcaccccttccat

SEQ ID NO: 931133 - DNA, 25 bp, Homo sapien
aatagggacattgtcttctggcaca

SEQ ID NO: 931134 - DNA, 25 bp, Homo sapien
aaagcagaaagagtgtgtgaatagg

SEQ ID NO: 931135 - DNA, 25 bp, Homo sapien
gtgtgaatagggacattgtcttctg

SEQ ID NO: 931136 - DNA, 25 bp, Homo sapien
tagggacattgtcttctggcacaat

SEQ ID NO: 931137 - DNA, 25 bp, Homo sapien
tcagctgtgacaggtggagggagat

SEQ ID NO: 931138 - DNA, 25 bp, Homo sapien
gcaaaggtctgagacactggcctcc

SEQ ID NO: 931139 - DNA, 25 bp, Homo sapien
tgacaggtggagggagatgaccctg

SEQ ID NO: 931140 - DNA, 25 bp, Homo sapien
gatgaccctggaagggcaaaggtct

SEQ ID NO: 931141 - DNA, 25 bp, Homo sapien
tcagtaatctgacggcctccactgc

SEQ ID NO: 931142 - DNA, 25 bp, Homo sapien
tccacgatcatggaaaccatccagt

SEQ ID NO: 931143 - DNA, 25 bp, Homo sapien
cactgtactctctgtccacgatcat

SEQ ID NO: 931144 - DNA, 25 bp, Homo sapien
tgccacactgtactctctgtccacg

SEQ ID NO: 931145 - DNA, 25 bp, Homo sapien
cagagccttcacgcacttcacgcgg

SEQ ID NO: 931146 - DNA, 25 bp, Homo sapien
agagccttcacgcacttcacgcgga

SEQ ID NO: 931147 - DNA, 25 bp, Homo sapien
tcagagccttcacgcacttcacgcg

SEQ ID NO: 931148 - DNA, 25 bp, Homo sapien
gagaatggaaataagaccaaccaca

SEQ ID NO: 931149 - DNA, 25 bp, Homo sapien
tctccgatccctcattctagcttgg

SEQ ID NO: 931150 - DNA, 25 bp, Homo sapien
ttgggtgtcccctctactgaggact

SEQ ID NO: 931151 - DNA, 25 bp, Homo sapien
aaggatcacagcagtactcatgatg

SEQ ID NO: 931152 - DNA, 25 bp, Homo sapien
gtagctttgcatccaacacccaatt

SEQ ID NO: 931153 - DNA, 25 bp, Homo sapien
cagatagcacggatctcaggaagga

SEQ ID NO: 931154 - DNA, 25 bp, Homo sapien
tgaggaaagacgtgctgtagctttg

SEQ ID NO: 931155 - DNA, 25 bp, Homo sapien
tattttaaatagctgtcggtgagga

SEQ ID NO: 931156 - DNA, 25 bp, Homo sapien
ctagagatctgggtgatatctcatt

SEQ ID NO: 931157 - DNA, 25 bp, Homo sapien
tcactcctgtgatacctttaagaaa

SEQ ID NO: 931158 - DNA, 25 bp, Homo sapien
tttaagaaaagaaacgctctctcga

SEQ ID NO: 931159 - DNA, 25 bp, Homo sapien
gaaaagaaacgctctctcgaagccg

SEQ ID NO: 931160 - DNA, 25 bp, Homo sapien
gtcacttttggcagctttcgcagca

SEQ ID NO: 931161 - DNA, 25 bp, Homo sapien
tcacttttggcagctttcgcagcat

SEQ ID NO: 931162 - DNA, 25 bp, Homo sapien
cgcttgggaccctttctttggatat

SEQ ID NO: 931163 - DNA, 25 bp, Homo sapien
cgatgtaccgcttgggaccctttct

SEQ ID NO: 931164 - DNA, 25 bp, Homo sapien
tgtttccggctatgacgatgtaccg

SEQ ID NO: 931165 - DNA, 25 bp, Homo sapien
ggctatgacgatgtaccgcttggga

SEQ ID NO: 931166 - DNA, 25 bp, Homo sapien
ttgaagctgtcctcaaatcattttc

SEQ ID NO: 931167 - DNA, 25 bp, Homo sapien
acaaacaaaaaacctgaccatattg

SEQ ID NO: 931168 - DNA, 25 bp, Homo sapien
tgggagttcaaggcgggcggatcgc

SEQ ID NO: 931169 - DNA, 25 bp, Homo sapien
caaaaaacctgaccatattgtttag

SEQ ID NO: 931170 - DNA, 25 bp, Homo sapien
aggtgcagtggacagtgcctgtaat

SEQ ID NO: 931171 - DNA, 25 bp, Homo sapien
ccgccgctcctgccgtgcatgttgg

SEQ ID NO: 931172 - DNA, 25 bp, Homo sapien
gggagccagtacatgcaggtgggct

SEQ ID NO: 931173 - DNA, 25 bp, Homo sapien
agccagtacatgcaggtgggctcca

SEQ ID NO: 931174 - DNA, 25 bp, Homo sapien
cgccgctcctgccgtgcatgttggg

SEQ ID NO: 931175 - DNA, 25 bp, Homo sapien
ccttctgaccctgctgcgggcgttc

SEQ ID NO: 931176 - DNA, 25 bp, Homo sapien
ttctgaccctgctgcgggcgttcgg

SEQ ID NO: 931177 - DNA, 25 bp, Homo sapien
cctcccttctgaccctgctgcgggc

SEQ ID NO: 931178 - DNA, 25 bp, Homo sapien
tcccttctgaccctgctgcgggcgt

SEQ ID NO: 931179 - DNA, 25 bp, Homo sapien
tccatgttctcagcggttatccttg

SEQ ID NO: 931180 - DNA, 25 bp, Homo sapien
ccttggatgtgagatctcatgcact

SEQ ID NO: 931181 - DNA, 25 bp, Homo sapien
gttacttaaacatatgcagctaaaa

SEQ ID NO: 931182 - DNA, 25 bp, Homo sapien
tacttgtaaagcgtttggtgctaat

SEQ ID NO: 931183 - DNA, 25 bp, Homo sapien
tgtatcgacttcatgctgaccaggg

SEQ ID NO: 931184 - DNA, 25 bp, Homo sapien
cctcattcttgagggattagggatg

SEQ ID NO: 931185 - DNA, 25 bp, Homo sapien
tacagatttacaaaccgcgtcccac

SEQ ID NO: 931186 - DNA, 25 bp, Homo sapien
tggtctgatgcagttacagatttac

SEQ ID NO: 931187 - DNA, 25 bp, Homo sapien
tagaagagattattatggaagtatc

SEQ ID NO: 931188 - DNA, 25 bp, Homo sapien
taatagatacaaagattgaaaggta

SEQ ID NO: 931189 - DNA, 25 bp, Homo sapien
tcagtcacaaacctaaacagcaaat

SEQ ID NO: 931190 - DNA, 25 bp, Homo sapien
agataaaaagagtgctcgcttcagg

SEQ ID NO: 931191 - DNA, 25 bp, Homo sapien
cttctctcaggccgatgacctcagg

SEQ ID NO: 931192 - DNA, 25 bp, Homo sapien
aggtgggcgcgatctcgcgcccaca

SEQ ID NO: 931193 - DNA, 25 bp, Homo sapien
ctaggaaaggtgggcgcgatctcgc

SEQ ID NO: 931194 - DNA, 25 bp, Homo sapien
taggaaaggtgggcgcgatctcgcg

SEQ ID NO: 931195 - DNA, 25 bp, Homo sapien
gaaaggtgggcgcgatctcgcgccc

SEQ ID NO: 931196 - DNA, 25 bp, Homo sapien
cagtgctctgggtcataagcctgga

SEQ ID NO: 931197 - DNA, 25 bp, Homo sapien
agtgctctgggtcataagcctggat

SEQ ID NO: 931198 - DNA, 25 bp, Homo sapien
ccagtgctctgggtcataagcctgg

SEQ ID NO: 931199 - DNA, 25 bp, Homo sapien
cgggtctcctcgtacaggaagtaga

SEQ ID NO: 931200 - DNA, 25 bp, Homo sapien
agggtatatgagagcgggtctcctc

SEQ ID NO: 931201 - DNA, 25 bp, Homo sapien
agagcgggtctcctcgtacaggaag

SEQ ID NO: 931202 - DNA, 25 bp, Homo sapien
atatgagagcgggtctcctcgtaca

SEQ ID NO: 931203 - DNA, 25 bp, Homo sapien
aggacagaaatcaggttgctgctca

SEQ ID NO: 931204 - DNA, 25 bp, Homo sapien
caggagagacctccggctgaggtca

SEQ ID NO: 931205 - DNA, 25 bp, Homo sapien
ccaccaggagagacctccggctgag

SEQ ID NO: 931206 - DNA, 25 bp, Homo sapien
ctgaggacagaaatcaggttgctgc

SEQ ID NO: 931207 - DNA, 25 bp, Homo sapien
aggccggcccggctgaaatacgcta

SEQ ID NO: 931208 - DNA, 25 bp, Homo sapien
ggaggccggcccggctgaaatacgc

SEQ ID NO: 931209 - DNA, 25 bp, Homo sapien
gcccggctgaaatacgctatgacca

SEQ ID NO: 931210 - DNA, 25 bp, Homo sapien
ccggcccggctgaaatacgctatga

SEQ ID NO: 931211 - DNA, 25 bp, Homo sapien
aaggtcggatgcaaatccgagaagc

SEQ ID NO: 931212 - DNA, 25 bp, Homo sapien
gaaggtcggatgcaaatccgagaag

SEQ ID NO: 931213 - DNA, 25 bp, Homo sapien
caggagtcttttaatgacaggatcc

SEQ ID NO: 931214 - DNA, 25 bp, Homo sapien
gtcccaggccaggagtcttttaatg

SEQ ID NO: 931215 - DNA, 25 bp, Homo sapien
ttgtccgacaccctcagatctttgt

SEQ ID NO: 931216 - DNA, 25 bp, Homo sapien
ggccaggagtcttttaatgacagga

SEQ ID NO: 931217 - DNA, 25 bp, Homo sapien
gtgtgcctcccgggggaaagtctca

SEQ ID NO: 931218 - DNA, 25 bp, Homo sapien
tgtgcctcccgggggaaagtctcag

SEQ ID NO: 931219 - DNA, 25 bp, Homo sapien
tgtgagaatctacaggatgtagagc

SEQ ID NO: 931220 - DNA, 25 bp, Homo sapien
tgagaatctacaggatgtagagctg

SEQ ID NO: 931221 - DNA, 25 bp, Homo sapien
ccattggaaaagtgtggttattgga

SEQ ID NO: 931222 - DNA, 25 bp, Homo sapien
cccattggaaaagtgtggttattgg

SEQ ID NO: 931223 - DNA, 25 bp, Homo sapien
tcccattggaaaagtgtggttattg

SEQ ID NO: 931224 - DNA, 25 bp, Homo sapien
cattggaaaagtgtggttattggaa

SEQ ID NO: 931225 - DNA, 25 bp, Homo sapien
ctccttctctggctcatcatcagat

SEQ ID NO: 931226 - DNA, 25 bp, Homo sapien
catcagattcatccaaacattccct

SEQ ID NO: 931227 - DNA, 25 bp, Homo sapien
ccttctctggctcatcatcagattc

SEQ ID NO: 931228 - DNA, 25 bp, Homo sapien
tcagattcatccaaacattccctct

SEQ ID NO: 931229 - DNA, 25 bp, Homo sapien
gaggtgctccgctgggggctctgct

SEQ ID NO: 931230 - DNA, 25 bp, Homo sapien
cttcctggggctgcggttgatggct

SEQ ID NO: 931231 - DNA, 25 bp, Homo sapien
tgctcttcctggggctgcggttgat

SEQ ID NO: 931232 - DNA, 25 bp, Homo sapien
cctggggctgcggttgatggctcat

SEQ ID NO: 931233 - DNA, 25 bp, Homo sapien
tctgtccttgatcttcttctggaca

SEQ ID NO: 931234 - DNA, 25 bp, Homo sapien
tctgttctgtccttgatcttcttct

SEQ ID NO: 931235 - DNA, 25 bp, Homo sapien
ctcaccaaacctagtctctgttctg

SEQ ID NO: 931236 - DNA, 25 bp, Homo sapien
tcaccaaacctagtctctgttctgt

SEQ ID NO: 931237 - DNA, 25 bp, Homo sapien
tcatgccaacctggcaaccagtttg

SEQ ID NO: 931238 - DNA, 25 bp, Homo sapien
aaaaaacacatgtaactgccaggct

SEQ ID NO: 931239 - DNA, 25 bp, Homo sapien
aacacatgtaactgccaggctgatc

SEQ ID NO: 931240 - DNA, 25 bp, Homo sapien
atcctgggtgaatggtatctcctgc

SEQ ID NO: 931241 - DNA, 25 bp, Homo sapien
aagcttgaagcgtgttggggtctcc

SEQ ID NO: 931242 - DNA, 25 bp, Homo sapien
ctcttctctgtacatgcccgtttca

SEQ ID NO: 931243 - DNA, 25 bp, Homo sapien
agcttgaagcgtgttggggtctcct

SEQ ID NO: 931244 - DNA, 25 bp, Homo sapien
tagggtaagcagaaacgatgaaacc

SEQ ID NO: 931245 - DNA, 25 bp, Homo sapien
aaaagtagggtaagcagaaacgatg

SEQ ID NO: 931246 - DNA, 25 bp, Homo sapien
gggatcaggatgggaaagaaaagta

SEQ ID NO: 931247 - DNA, 25 bp, Homo sapien
ggtaagcagaaacgatgaaacctta

SEQ ID NO: 931248 - DNA, 25 bp, Homo sapien
tggtctggtcatgctgccatctctg

SEQ ID NO: 931249 - DNA, 25 bp, Homo sapien
ccatctctgcggttctctgcggagt

SEQ ID NO: 931250 - DNA, 25 bp, Homo sapien
tctgcggagtcgtggtttctgtacc

SEQ ID NO: 931251 - DNA, 25 bp, Homo sapien
tctgtaccttgaagagaacttcccc

SEQ ID NO: 931252 - DNA, 25 bp, Homo sapien
gcgtgctgccaggatagtagcaggt

SEQ ID NO: 931253 - DNA, 25 bp, Homo sapien
ttgggaaggtggctgcgtgctgcca

SEQ ID NO: 931254 - DNA, 25 bp, Homo sapien
tcatcggtgcctctgttgggaaggt

SEQ ID NO: 931255 - DNA, 25 bp, Homo sapien
tgccaggatagtagcaggtgagtgg

SEQ ID NO: 931256 - DNA, 25 bp, Homo sapien
tgacctcaaaattatacccttgaac

SEQ ID NO: 931257 - DNA, 25 bp, Homo sapien
ccttgaacttgcaggttctccacag

SEQ ID NO: 931258 - DNA, 25 bp, Homo sapien
aacttgcaggttctccacagtttct

SEQ ID NO: 931259 - DNA, 25 bp, Homo sapien
caaaattatacccttgaacttgcag

SEQ ID NO: 931260 - DNA, 25 bp, Homo sapien
tcaccatgtggtccaggctaatctc

SEQ ID NO: 931261 - DNA, 25 bp, Homo sapien
accatgtggtccaggctaatctcga

SEQ ID NO: 931262 - DNA, 25 bp, Homo sapien
tttcaccatgtggtccaggctaatc

SEQ ID NO: 931263 - DNA, 25 bp, Homo sapien
ggtttcaccatgtggtccaggctaa

SEQ ID NO: 931264 - DNA, 25 bp, Homo sapien
acctggagcacaaggggaaactggg

SEQ ID NO: 931265 - DNA, 25 bp, Homo sapien
gacctggagcacaaggggaaactgg

SEQ ID NO: 931266 - DNA, 25 bp, Homo sapien
agcatctgtagctcttgcctgagcc

SEQ ID NO: 931267 - DNA, 25 bp, Homo sapien
agacattcggtcatgagcatctgta

SEQ ID NO: 931268 - DNA, 25 bp, Homo sapien
gacattcggtcatgagcatctgtag

SEQ ID NO: 931269 - DNA, 25 bp, Homo sapien
attcggtcatgagcatctgtagctc

SEQ ID NO: 931270 - DNA, 25 bp, Homo sapien
ggtacagacaagattctgcagacag

SEQ ID NO: 931271 - DNA, 25 bp, Homo sapien
gacttgaaattggtgttcagccctg

SEQ ID NO: 931272 - DNA, 25 bp, Homo sapien
tagaagcatagtgttcatcacagct

SEQ ID NO: 931273 - DNA, 25 bp, Homo sapien
gctcaggactgaggtagaagcatag

SEQ ID NO: 931274 - DNA, 25 bp, Homo sapien
tcttcctccgtcaaccaggctgaat

SEQ ID NO: 931275 - DNA, 25 bp, Homo sapien
aaaaaacatatgcacgactagttat

SEQ ID NO: 931276 - DNA, 25 bp, Homo sapien
ccgtcaaccaggctgaatagagtgc

SEQ ID NO: 931277 - DNA, 25 bp, Homo sapien
gcacgactagttattccaatatcat

SEQ ID NO: 931278 - DNA, 25 bp, Homo sapien
caacctatgagtcaggaactcttat

SEQ ID NO: 931279 - DNA, 25 bp, Homo sapien
taaacagtgtgttcaggccgggtgt

SEQ ID NO: 931280 - DNA, 25 bp, Homo sapien
tattttacctaggaggaaaagagca

SEQ ID NO: 931281 - DNA, 25 bp, Homo sapien
tcagtttttgttgcaacctatgagt

SEQ ID NO: 931282 - DNA, 25 bp, Homo sapien
cctaggcaacattgcgaaaaataca

SEQ ID NO: 931283 - DNA, 25 bp, Homo sapien
ggtgatggagcaagattccgactca

SEQ ID NO: 931284 - DNA, 25 bp, Homo sapien
gcatggtggcttattggcttatgcc

SEQ ID NO: 931285 - DNA, 25 bp, Homo sapien
ggcacgagaatcgctgaaccaaggg

SEQ ID NO: 931286 - DNA, 25 bp, Homo sapien
tcaggtgatccactggcctcgacct

SEQ ID NO: 931287 - DNA, 25 bp, Homo sapien
ctaatttggtgtggagacggggctt

SEQ ID NO: 931288 - DNA, 25 bp, Homo sapien
caggtgatccactggcctcgacctc

SEQ ID NO: 931289 - DNA, 25 bp, Homo sapien
cacctggctaatttggtgtggagac

SEQ ID NO: 931290 - DNA, 25 bp, Homo sapien
cctgtaggaggtggcactagatctt

SEQ ID NO: 931291 - DNA, 25 bp, Homo sapien
ggtggcactagatcttagagctttt

SEQ ID NO: 931292 - DNA, 25 bp, Homo sapien
gaagggctggtctagcagggtacct

SEQ ID NO: 931293 - DNA, 25 bp, Homo sapien
aacgccgggtgcctacctgtaggag

SEQ ID NO: 931294 - DNA, 25 bp, Homo sapien
cgggcttgagtgatctgctaccaga

SEQ ID NO: 931295 - DNA, 25 bp, Homo sapien
tcccgggcttgagtgatctgctacc

SEQ ID NO: 931296 - DNA, 25 bp, Homo sapien
ttgagtgatctgctaccagagctgt

SEQ ID NO: 931297 - DNA, 25 bp, Homo sapien
cctcccgggcttgagtgatctgcta

SEQ ID NO: 931298 - DNA, 25 bp, Homo sapien
gaaatcttgcaaacgagccatggtg

SEQ ID NO: 931299 - DNA, 25 bp, Homo sapien
caggcacagggaatgagaccatcat

SEQ ID NO: 931300 - DNA, 25 bp, Homo sapien
caagtatgcagtaagcatgggccca

SEQ ID NO: 931301 - DNA, 25 bp, Homo sapien
tgccccaggcttggataacttaaag

SEQ ID NO: 931302 - DNA, 25 bp, Homo sapien
tagggcggctcaaatgctcattgct

SEQ ID NO: 931303 - DNA, 25 bp, Homo sapien
tcctgtggcgggtgcaaattggtat

SEQ ID NO: 931304 - DNA, 25 bp, Homo sapien
cgcctggaggctgaaagagtaagtt

SEQ ID NO: 931305 - DNA, 25 bp, Homo sapien
gtaagttgtctgcagggaacaagcc

SEQ ID NO: 931306 - DNA, 25 bp, Homo sapien
gcttaacacgattgaattgcacact

SEQ ID NO: 931307 - DNA, 25 bp, Homo sapien
tactgcatgagatcccacttgtatg

SEQ ID NO: 931308 - DNA, 25 bp, Homo sapien
tgctgtccgtattgaaaatgtgctt

SEQ ID NO: 931309 - DNA, 25 bp, Homo sapien
tatgaaatacctggtgtagccggag

SEQ ID NO: 931310 - DNA, 25 bp, Homo sapien
aatccttgtgggtgttgaaggccca

SEQ ID NO: 931311 - DNA, 25 bp, Homo sapien
gggatttcgtaacattgctcaggct

SEQ ID NO: 931312 - DNA, 25 bp, Homo sapien
gccctggaagcccaccagaaggaga

SEQ ID NO: 931313 - DNA, 25 bp, Homo sapien
tagtcctgacaaagtgttccctgct

SEQ ID NO: 931314 - DNA, 25 bp, Homo sapien
acgtgtatgggcgtgacggcctcca

SEQ ID NO: 931315 - DNA, 25 bp, Homo sapien
tactgtgtgcgcagtccgtggacac

SEQ ID NO: 931316 - DNA, 25 bp, Homo sapien
ttccttcccgccgtgcaagtgtgtc

SEQ ID NO: 931317 - DNA, 25 bp, Homo sapien
gacttcctaggacgtatctattgta

SEQ ID NO: 931318 - DNA, 25 bp, Homo sapien
taaagcttggtttatcttctcggcg

SEQ ID NO: 931319 - DNA, 25 bp, Homo sapien
tgggtggcactttttacgcaggcag

SEQ ID NO: 931320 - DNA, 25 bp, Homo sapien
tacgattattacagaagccgatggg

SEQ ID NO: 931321 - DNA, 25 bp, Homo sapien
tcaaagagcctgtgacatgggacgt

SEQ ID NO: 931322 - DNA, 25 bp, Homo sapien
agaggagtgggcctgttgtcttggc

SEQ ID NO: 931323 - DNA, 25 bp, Homo sapien
gagtgggcctgttgtcttggcgctg

SEQ ID NO: 931324 - DNA, 25 bp, Homo sapien
tgggcctgttgtcttggcgctggcg

SEQ ID NO: 931325 - DNA, 25 bp, Homo sapien
gcctgttgtcttggcgctggcggat

SEQ ID NO: 931326 - DNA, 25 bp, Homo sapien
gctcctggagtgtgtgtcttggccc

SEQ ID NO: 931327 - DNA, 25 bp, Homo sapien
tgcactcagagtaccagtgggagct

SEQ ID NO: 931328 - DNA, 25 bp, Homo sapien
ctgataagttctgcctcgtcgtggg

SEQ ID NO: 931329 - DNA, 25 bp, Homo sapien
gaaaagctcagatagtctcaacccc

SEQ ID NO: 931330 - DNA, 25 bp, Homo sapien
cgtagccagggtgacatttgttcag

SEQ ID NO: 931331 - DNA, 25 bp, Homo sapien
agccagggtgacatttgttcagcag

SEQ ID NO: 931332 - DNA, 25 bp, Homo sapien
tagccagggtgacatttgttcagca

SEQ ID NO: 931333 - DNA, 25 bp, Homo sapien
agcgtagccagggtgacatttgttc

SEQ ID NO: 931334 - DNA, 25 bp, Homo sapien
ccctttctgagcctagagatctgga

SEQ ID NO: 931335 - DNA, 25 bp, Homo sapien
ggccacattttccagggataccctg

SEQ ID NO: 931336 - DNA, 25 bp, Homo sapien
ccagggcactatttggtgatcttca

SEQ ID NO: 931337 - DNA, 25 bp, Homo sapien
gcccctgttaaagcccagggcacta

SEQ ID NO: 931338 - DNA, 25 bp, Homo sapien
ccattcaaaggaggccgggctcggt

SEQ ID NO: 931339 - DNA, 25 bp, Homo sapien
ctggtgggggcccattcaaaggagg

SEQ ID NO: 931340 - DNA, 25 bp, Homo sapien
gttaggcctggtgggggcccattca

SEQ ID NO: 931341 - DNA, 25 bp, Homo sapien
ggcccattcaaaggaggccgggctc

SEQ ID NO: 931342 - DNA, 25 bp, Homo sapien
ccagagcaagagattcaagggccca

SEQ ID NO: 931343 - DNA, 25 bp, Homo sapien
cacttctaagtgaggcctggctgta

SEQ ID NO: 931344 - DNA, 25 bp, Homo sapien
tgtcttcacaatatggcgctcggct

SEQ ID NO: 931345 - DNA, 25 bp, Homo sapien
tcagtagcagtcttgttgtcaggcc

SEQ ID NO: 931346 - DNA, 25 bp, Homo sapien
ggagctgataacagtcccaagccct

SEQ ID NO: 931347 - DNA, 25 bp, Homo sapien
ccctctaaaagagtagggagctgat

SEQ ID NO: 931348 - DNA, 25 bp, Homo sapien
gagcagagttccctctaaaagagta

SEQ ID NO: 931349 - DNA, 25 bp, Homo sapien
gacagtctaggaagagttgagcaga

SEQ ID NO: 931350 - DNA, 25 bp, Homo sapien
agcccccaccatcgtagtgggggca

SEQ ID NO: 931351 - DNA, 25 bp, Homo sapien
cccccaccatcgtagtgggggcagg

SEQ ID NO: 931352 - DNA, 25 bp, Homo sapien
cagagcccccaccatcgtagtgggg

SEQ ID NO: 931353 - DNA, 25 bp, Homo sapien
agagcccccaccatcgtagtggggg

SEQ ID NO: 931354 - DNA, 25 bp, Homo sapien
ctggcgtgcccgggtcaccagcagc

SEQ ID NO: 931355 - DNA, 25 bp, Homo sapien
agcagcagcggcgttccatcgctcc

SEQ ID NO: 931356 - DNA, 25 bp, Homo sapien
cgttccatcgctcccaagatctggg

SEQ ID NO: 931357 - DNA, 25 bp, Homo sapien
agcggcgttccatcgctcccaagat

SEQ ID NO: 931358 - DNA, 25 bp, Homo sapien
gtctcgggtagctgcatagtgtccc

SEQ ID NO: 931359 - DNA, 25 bp, Homo sapien
aattcggaacccttggttggtgcag

SEQ ID NO: 931360 - DNA, 25 bp, Homo sapien
atgaattcggaacccttggttggtg

SEQ ID NO: 931361 - DNA, 25 bp, Homo sapien
agcaggagcgtctcgggtagctgca

SEQ ID NO: 931362 - DNA, 25 bp, Homo sapien
tttgtcatgcagagcacagtcagcg

SEQ ID NO: 931363 - DNA, 25 bp, Homo sapien
ggagacgggagcttgcaaacactga

SEQ ID NO: 931364 - DNA, 25 bp, Homo sapien
cattcacgtgctcactaaagcgaga

SEQ ID NO: 931365 - DNA, 25 bp, Homo sapien
gatgatcaagcctagcaaccgagct

SEQ ID NO: 931366 - DNA, 25 bp, Homo sapien
tctccagagaccctccatcccccat

SEQ ID NO: 931367 - DNA, 25 bp, Homo sapien
ttctccagagaccctccatccccca

SEQ ID NO: 931368 - DNA, 25 bp, Homo sapien
cttctccagagaccctccatccccc

SEQ ID NO: 931369 - DNA, 25 bp, Homo sapien
ggcaagtcacgctactaaatcaaac

SEQ ID NO: 931370 - DNA, 25 bp, Homo sapien
ttattccaagacagatttgtaaaag

SEQ ID NO: 931371 - DNA, 25 bp, Homo sapien
gaaaggcaagtcacgctactaaatc

SEQ ID NO: 931372 - DNA, 25 bp, Homo sapien
agggaaaggcaagtcacgctactaa

SEQ ID NO: 931373 - DNA, 25 bp, Homo sapien
cttagcctcgattctcttcctgagg

SEQ ID NO: 931374 - DNA, 25 bp, Homo sapien
gccctcggcgcagaggaacttagcc

SEQ ID NO: 931375 - DNA, 25 bp, Homo sapien
ccttggcggatatgctcggggccct

SEQ ID NO: 931376 - DNA, 25 bp, Homo sapien
gcagaggaacttagcctcgattctc

SEQ ID NO: 931377 - DNA, 25 bp, Homo sapien
caggccacggtgcttctagtgtccc

SEQ ID NO: 931378 - DNA, 25 bp, Homo sapien
gacagctccagatggaatcccaggc

SEQ ID NO: 931379 - DNA, 25 bp, Homo sapien
acaaaccaagagactgccatgacag

SEQ ID NO: 931380 - DNA, 25 bp, Homo sapien
gcctgaatgaaaaccgagggccgaa

SEQ ID NO: 931381 - DNA, 25 bp, Homo sapien
caagctaagctttcctaagacgggc

SEQ ID NO: 931382 - DNA, 25 bp, Homo sapien
tgccatccaagctgagttccgcagg

SEQ ID NO: 931383 - DNA, 25 bp, Homo sapien
caccgtcgcatgttacttggagaga

SEQ ID NO: 931384 - DNA, 25 bp, Homo sapien
gcttctcaggcgagacgtgacacca

SEQ ID NO: 931385 - DNA, 25 bp, Homo sapien
taagggattcaggacagagcgtcac

SEQ ID NO: 931386 - DNA, 25 bp, Homo sapien
tgatcctcctggtaggtacccgcta

SEQ ID NO: 931387 - DNA, 25 bp, Homo sapien
cagctggagagggaccttgccctga

SEQ ID NO: 931388 - DNA, 25 bp, Homo sapien
acgcgctggcctctgccaaggagtg

SEQ ID NO: 931389 - DNA, 25 bp, Homo sapien
gtggtccacgccacatgccacgtcc

SEQ ID NO: 931390 - DNA, 25 bp, Homo sapien
tggtccacgccacatgccacgtcca

SEQ ID NO: 931391 - DNA, 25 bp, Homo sapien
ggtccacgccacatgccacgtccac

SEQ ID NO: 931392 - DNA, 25 bp, Homo sapien
aggcaggctgcgtcccaagtcacga

SEQ ID NO: 931393 - DNA, 25 bp, Homo sapien
aagtcacgaccaccaagcaggggca

SEQ ID NO: 931394 - DNA, 25 bp, Homo sapien
tcacaggcaggctgcgtcccaagtc

SEQ ID NO: 931395 - DNA, 25 bp, Homo sapien
ctcaaagacccttgccaggagccct

SEQ ID NO: 931396 - DNA, 25 bp, Homo sapien
ctgcctggcttggccggaagacccc

SEQ ID NO: 931397 - DNA, 25 bp, Homo sapien
tggcttggccggaagacccctgcca

SEQ ID NO: 931398 - DNA, 25 bp, Homo sapien
ctggcttggccggaagacccctgcc

SEQ ID NO: 931399 - DNA, 25 bp, Homo sapien
gcctggcttggccggaagacccctg

SEQ ID NO: 931400 - DNA, 25 bp, Homo sapien
atccgaattcgaccaccctcccctg

SEQ ID NO: 931401 - DNA, 25 bp, Homo sapien
cagatccgaattcgaccaccctccc

SEQ ID NO: 931402 - DNA, 25 bp, Homo sapien
tcacagtctgtggagtttaccgagc

SEQ ID NO: 931403 - DNA, 25 bp, Homo sapien
gcacgtcgatgcagaaagcctgaga

SEQ ID NO: 931404 - DNA, 25 bp, Homo sapien
gagctttgcacctacgccaggagac

SEQ ID NO: 931405 - DNA, 25 bp, Homo sapien
gagggaaaccgcctaatccagatgg

SEQ ID NO: 931406 - DNA, 25 bp, Homo sapien
tttcccgggacagtgcgcttcctca

SEQ ID NO: 931407 - DNA, 25 bp, Homo sapien
caaagcaaaggaagccacgatggtc

SEQ ID NO: 931408 - DNA, 25 bp, Homo sapien
gagggctctggccattcaagcccaa

SEQ ID NO: 931409 - DNA, 25 bp, Homo sapien
cgggacagtgcgcttcctcacggct

SEQ ID NO: 931410 - DNA, 25 bp, Homo sapien
tgtgagaaccacctaggtgggtaca

SEQ ID NO: 931411 - DNA, 25 bp, Homo sapien
ttgtgagaaccacctaggtgggtac

SEQ ID NO: 931412 - DNA, 25 bp, Homo sapien
tgagaaccacctaggtgggtacata

SEQ ID NO: 931413 - DNA, 25 bp, Homo sapien
gagaaccacctaggtgggtacatac

SEQ ID NO: 931414 - DNA, 25 bp, Homo sapien
agttccaacattttgtgaggccaag

SEQ ID NO: 931415 - DNA, 25 bp, Homo sapien
gttccaacattttgtgaggccaagg

SEQ ID NO: 931416 - DNA, 25 bp, Homo sapien
aggtgggaagaccacttgaggcaga

SEQ ID NO: 931417 - DNA, 25 bp, Homo sapien
tgggaagaccacttgaggcagaagt

SEQ ID NO: 931418 - DNA, 25 bp, Homo sapien
cacgggtatctcatgggtgtcacca

SEQ ID NO: 931419 - DNA, 25 bp, Homo sapien
catgcagatgcaccacgggtatctc

SEQ ID NO: 931420 - DNA, 25 bp, Homo sapien
catgccgcgctgcaggagtgcagcc

SEQ ID NO: 931421 - DNA, 25 bp, Homo sapien
caccacagagtgtgcaatgacatag

SEQ ID NO: 931422 - DNA, 25 bp, Homo sapien
ctgcagtgacgtcaggtgactctac

SEQ ID NO: 931423 - DNA, 25 bp, Homo sapien
caggtgactctactcttagcatcca

SEQ ID NO: 931424 - DNA, 25 bp, Homo sapien
tagcatccattctcaagacctcccc

SEQ ID NO: 931425 - DNA, 25 bp, Homo sapien
ctgcacgcgaggtgtctgcagtgac

SEQ ID NO: 931426 - DNA, 25 bp, Homo sapien
tactggtcctccaggcgaccgattc

SEQ ID NO: 931427 - DNA, 25 bp, Homo sapien
gttcttgccccatacaaacagctct

SEQ ID NO: 931428 - DNA, 25 bp, Homo sapien
catgggaaatactggtcctccaggc

SEQ ID NO: 931429 - DNA, 25 bp, Homo sapien
ttcccaggcaccctcggatgttctt

SEQ ID NO: 931430 - DNA, 25 bp, Homo sapien
cacgggacagtctgacaaatcggcc

SEQ ID NO: 931431 - DNA, 25 bp, Homo sapien
catatcctgggtcagatcagggtct

SEQ ID NO: 931432 - DNA, 25 bp, Homo sapien
accctgcagggtaagcggatattct

SEQ ID NO: 931433 - DNA, 25 bp, Homo sapien
tctgtggctttgtaatctggcaggc

SEQ ID NO: 931434 - DNA, 25 bp, Homo sapien
ttgaactccgtcaagccaaagagag

SEQ ID NO: 931435 - DNA, 25 bp, Homo sapien
tccatagccccagacaaaaacatgt

SEQ ID NO: 931436 - DNA, 25 bp, Homo sapien
tccacatcggatgcgggaaacctgg

SEQ ID NO: 931437 - DNA, 25 bp, Homo sapien
ggaatcatttcagggacggcacttt

SEQ ID NO: 931438 - DNA, 25 bp, Homo sapien
cagtggtgccagatatttcatcgtt

SEQ ID NO: 931439 - DNA, 25 bp, Homo sapien
ctccactccagaggtttgctctagg

SEQ ID NO: 931440 - DNA, 25 bp, Homo sapien
gaatgaagtagttcgctctccactc

SEQ ID NO: 931441 - DNA, 25 bp, Homo sapien
actccagaggtttgctctaggatga

SEQ ID NO: 931442 - DNA, 25 bp, Homo sapien
gcttcccaatgagccaccggaaaga

SEQ ID NO: 931443 - DNA, 25 bp, Homo sapien
acagcttcccaatgagccaccggaa

SEQ ID NO: 931444 - DNA, 25 bp, Homo sapien
cagcttcccaatgagccaccggaaa

SEQ ID NO: 931445 - DNA, 25 bp, Homo sapien
ctacagcttcccaatgagccaccgg

SEQ ID NO: 931446 - DNA, 25 bp, Homo sapien
tgcagcctgtcgcaccttccccact

SEQ ID NO: 931447 - DNA, 25 bp, Homo sapien
accgcatgcagcctgtcgcaccttc

SEQ ID NO: 931448 - DNA, 25 bp, Homo sapien
cactcctgagaagtgtaagcagcgg

SEQ ID NO: 931449 - DNA, 25 bp, Homo sapien
gtttaacactgcacagcccgtgcca

SEQ ID NO: 931450 - DNA, 25 bp, Homo sapien
gtaacagggagagccgtacttctcc

SEQ ID NO: 931451 - DNA, 25 bp, Homo sapien
gggagagccgtacttctccccaaca

SEQ ID NO: 931452 - DNA, 25 bp, Homo sapien
acagggagagccgtacttctcccca

SEQ ID NO: 931453 - DNA, 25 bp, Homo sapien
tggtaacagggagagccgtacttct

SEQ ID NO: 931454 - DNA, 25 bp, Homo sapien
ttggataacgttcactcccgccagg

SEQ ID NO: 931455 - DNA, 25 bp, Homo sapien
gccaggcagcaatcaccgtaggtgg

SEQ ID NO: 931456 - DNA, 25 bp, Homo sapien
caatcaccgtaggtggcaacttgga

SEQ ID NO: 931457 - DNA, 25 bp, Homo sapien
gcgagctggtgatattgtagtgacc

SEQ ID NO: 931458 - DNA, 25 bp, Homo sapien
gaacagactatgatcctgaccacag

SEQ ID NO: 931459 - DNA, 25 bp, Homo sapien
gaatagacttctcctttatccgtca

SEQ ID NO: 931460 - DNA, 25 bp, Homo sapien
gactatgatcctgaccacaggcgac

SEQ ID NO: 931461 - DNA, 25 bp, Homo sapien
cctttatccgtcaggaacagactat

SEQ ID NO: 931462 - DNA, 25 bp, Homo sapien
gccatcgaagtcctgcatcctgtgg

SEQ ID NO: 931463 - DNA, 25 bp, Homo sapien
ggaccacctggccatcgaagtcctg

SEQ ID NO: 931464 - DNA, 25 bp, Homo sapien
acctggccatcgaagtcctgcatcc

SEQ ID NO: 931465 - DNA, 25 bp, Homo sapien
tggccatcgaagtcctgcatcctgt

SEQ ID NO: 931466 - DNA, 25 bp, Homo sapien
ttcattttcgaccacctttcttcca

SEQ ID NO: 931467 - DNA, 25 bp, Homo sapien
cataagaattgtttcccatgctgaa

SEQ ID NO: 931468 - DNA, 25 bp, Homo sapien
cattgcccataagaattgtttccca

SEQ ID NO: 931469 - DNA, 25 bp, Homo sapien
tccacattgcccataagaattgttt

SEQ ID NO: 931470 - DNA, 25 bp, Homo sapien
aacacaagagagtgagctcggccgc

SEQ ID NO: 931471 - DNA, 25 bp, Homo sapien
gagggctccaacacatactcgtagc

SEQ ID NO: 931472 - DNA, 25 bp, Homo sapien
tgcagcacccgtgtctcctgaggtc

SEQ ID NO: 931473 - DNA, 25 bp, Homo sapien
tccttccctgtcagtcaacacaaga

SEQ ID NO: 931474 - DNA, 25 bp, Homo sapien
tatctttccggctcctgtgaaatcc

SEQ ID NO: 931475 - DNA, 25 bp, Homo sapien
cccagactttcgtaacatccgcagt

SEQ ID NO: 931476 - DNA, 25 bp, Homo sapien
cagtgtgaatccatagccgcaagca

SEQ ID NO: 931477 - DNA, 25 bp, Homo sapien
tccgcagtcttagaggacagcagtg

SEQ ID NO: 931478 - DNA, 25 bp, Homo sapien
ttcttgaagagagccgaacaggtcg

SEQ ID NO: 931479 - DNA, 25 bp, Homo sapien
ttgcagccagctcgagggtcgtcct

SEQ ID NO: 931480 - DNA, 25 bp, Homo sapien
gtcgtcctgccggaagtctgtccac

SEQ ID NO: 931481 - DNA, 25 bp, Homo sapien
gtgctaagcgaatgacacgacccgg

SEQ ID NO: 931482 - DNA, 25 bp, Homo sapien
ttggtccagctccaggcgatagggc

SEQ ID NO: 931483 - DNA, 25 bp, Homo sapien
gtccagctccaggcgatagggcacg

SEQ ID NO: 931484 - DNA, 25 bp, Homo sapien
cttttggtccagctccaggcgatag

SEQ ID NO: 931485 - DNA, 25 bp, Homo sapien
ccagctccaggcgatagggcacggg

SEQ ID NO: 931486 - DNA, 25 bp, Homo sapien
ctggatcctgcggcgcggtcgggcg

SEQ ID NO: 931487 - DNA, 25 bp, Homo sapien
gctcgcccacgtactggaccacggg

SEQ ID NO: 931488 - DNA, 25 bp, Homo sapien
cggcttctgccgcttcgcgccggct

SEQ ID NO: 931489 - DNA, 25 bp, Homo sapien
aagccccacacgaagacgcgatcgg

SEQ ID NO: 931490 - DNA, 25 bp, Homo sapien
acgtactggaccacgggcacctccg

SEQ ID NO: 931491 - DNA, 25 bp, Homo sapien
ctggccgccgtccagtgccctcgcc

SEQ ID NO: 931492 - DNA, 25 bp, Homo sapien
cgagccccagccaccaacgccacca

SEQ ID NO: 931493 - DNA, 25 bp, Homo sapien
cttaacaccagtcctcgccggaaga

SEQ ID NO: 931494 - DNA, 25 bp, Homo sapien
gcgtgacccttaacaccagtcctcg

SEQ ID NO: 931495 - DNA, 25 bp, Homo sapien
cgccggaagaggctacggccacttt

SEQ ID NO: 931496 - DNA, 25 bp, Homo sapien
cagtcctcgccggaagaggctacgg

SEQ ID NO: 931497 - DNA, 25 bp, Homo sapien
ttgaaggcaaaggcgctgacggcag

SEQ ID NO: 931498 - DNA, 25 bp, Homo sapien
gttgaaggcaaaggcgctgacggca

SEQ ID NO: 931499 - DNA, 25 bp, Homo sapien
gtctccgctccggtctgctcccacg

SEQ ID NO: 931500 - DNA, 25 bp, Homo sapien
cgagctggagtggacgattccctgc

SEQ ID NO: 931501 - DNA, 25 bp, Homo sapien
cgtcctccagcgacagcgagctgga

SEQ ID NO: 931502 - DNA, 25 bp, Homo sapien
ttgctgcagccgtctccgctccggt

SEQ ID NO: 931503 - DNA, 25 bp, Homo sapien
accttgtctgtatacaaaatttaag

SEQ ID NO: 931504 - DNA, 25 bp, Homo sapien
agaccttgtctgtatacaaaattta

SEQ ID NO: 931505 - DNA, 25 bp, Homo sapien
acataacaagaccttgtctgtatac

SEQ ID NO: 931506 - DNA, 25 bp, Homo sapien
aacaagaccttgtctgtatacaaaa

SEQ ID NO: 931507 - DNA, 25 bp, Homo sapien
aaacctcatgtaggttttatctata

SEQ ID NO: 931508 - DNA, 25 bp, Homo sapien
cctcatgtaggttttatctatagaa

SEQ ID NO: 931509 - DNA, 25 bp, Homo sapien
agaagttcaatttggaggccgggcg

SEQ ID NO: 931510 - DNA, 25 bp, Homo sapien
tgtaggttttatctatagaagttca

SEQ ID NO: 931511 - DNA, 25 bp, Homo sapien
cagttggagattgctcacggctgca

SEQ ID NO: 931512 - DNA, 25 bp, Homo sapien
tgtgatgaaatctcgcgctgtgcag

SEQ ID NO: 931513 - DNA, 25 bp, Homo sapien
cagttgggatcaatcttcagtggcg

SEQ ID NO: 931514 - DNA, 25 bp, Homo sapien
ccatttggagaggaaggcgtcatag

SEQ ID NO: 931515 - DNA, 25 bp, Homo sapien
caaggtgtgtggatgacttgaggtc

SEQ ID NO: 931516 - DNA, 25 bp, Homo sapien
aaaaatagaaacattagctggacgt

SEQ ID NO: 931517 - DNA, 25 bp, Homo sapien
aaatagaaacattagctggacgtgg

SEQ ID NO: 931518 - DNA, 25 bp, Homo sapien
gccaaggtgtgtggatgacttgagg

SEQ ID NO: 931519 - DNA, 25 bp, Homo sapien
ccttgtggcctcataccctttggag

SEQ ID NO: 931520 - DNA, 25 bp, Homo sapien
cccatggtgatgaggttctagaagc

SEQ ID NO: 931521 - DNA, 25 bp, Homo sapien
cagccagggccagatttaaagggca

SEQ ID NO: 931522 - DNA, 25 bp, Homo sapien
tggcctggcgccgtggtttacagct

SEQ ID NO: 931523 - DNA, 25 bp, Homo sapien
ccacaactgggcctcaactgtgctg

SEQ ID NO: 931524 - DNA, 25 bp, Homo sapien
aagaatgaagggttgagggtacatg

SEQ ID NO: 931525 - DNA, 25 bp, Homo sapien
acaactgggcctcaactgtgctgtg

SEQ ID NO: 931526 - DNA, 25 bp, Homo sapien
aatgaagggttgagggtacatgagg

SEQ ID NO: 931527 - DNA, 25 bp, Homo sapien
tgtacactcgaacacacttatacga

SEQ ID NO: 931528 - DNA, 25 bp, Homo sapien
catgagccgctgtacatggcctaca

SEQ ID NO: 931529 - DNA, 25 bp, Homo sapien
ggttctgtggccgtcacccttgtca

SEQ ID NO: 931530 - DNA, 25 bp, Homo sapien
accttgattacctgcagggtggcca

SEQ ID NO: 931531 - DNA, 25 bp, Homo sapien
tgttcttggccaagaccagggcaac

SEQ ID NO: 931532 - DNA, 25 bp, Homo sapien
cggtcagcaggaatccggaagttcc

SEQ ID NO: 931533 - DNA, 25 bp, Homo sapien
tccgccagagtccaagcaggtggtt

SEQ ID NO: 931534 - DNA, 25 bp, Homo sapien
tatcccagctatgaggtcactccta

SEQ ID NO: 931535 - DNA, 25 bp, Homo sapien
tttattgagggtggcgggagccgcg

SEQ ID NO: 931536 - DNA, 25 bp, Homo sapien
caagcaacatttattgagggtggcg

SEQ ID NO: 931537 - DNA, 25 bp, Homo sapien
caacatttattgagggtggcgggag

SEQ ID NO: 931538 - DNA, 25 bp, Homo sapien
catttattgagggtggcgggagccg

SEQ ID NO: 931539 - DNA, 25 bp, Homo sapien
acgctagctggggactgcgctccag

SEQ ID NO: 931540 - DNA, 25 bp, Homo sapien
gccctcggcgtccagacgccaggct

SEQ ID NO: 931541 - DNA, 25 bp, Homo sapien
gcgtccagacgccaggctctataga

SEQ ID NO: 931542 - DNA, 25 bp, Homo sapien
ggcacggggcggcaagggccgagac

SEQ ID NO: 931543 - DNA, 25 bp, Homo sapien
gttcaggatgaggtcggcgctcggc

SEQ ID NO: 931544 - DNA, 25 bp, Homo sapien
tgctctcgctgcagcggttcaggat

SEQ ID NO: 931545 - DNA, 25 bp, Homo sapien
agacgccagcttccgcttggtgctc

SEQ ID NO: 931546 - DNA, 25 bp, Homo sapien
ggtttagagcgctgcgtctgccgct

SEQ ID NO: 931547 - DNA, 25 bp, Homo sapien
ctggcggcgtcgctgctgcagaaaa

SEQ ID NO: 931548 - DNA, 25 bp, Homo sapien
gccgcgcctggcggcgtcgctgctg

SEQ ID NO: 931549 - DNA, 25 bp, Homo sapien
ggcgtcgctgctgcagaaaacggac

SEQ ID NO: 931550 - DNA, 25 bp, Homo sapien
ggctctgcggtcccggccgcgcctg

SEQ ID NO: 931551 - DNA, 25 bp, Homo sapien
gcggcgataggcgtcctggctgagg

SEQ ID NO: 931552 - DNA, 25 bp, Homo sapien
gttgcggcgataggcgtcctggctg

SEQ ID NO: 931553 - DNA, 25 bp, Homo sapien
gcgataggcgtcctggctgaggcgc

SEQ ID NO: 931554 - DNA, 25 bp, Homo sapien
gctgttgcggcgataggcgtcctgg

SEQ ID NO: 931555 - DNA, 25 bp, Homo sapien
tagtctgcacgaccccggcgggaca

SEQ ID NO: 931556 - DNA, 25 bp, Homo sapien
cccagggactcagatgggcacccct

SEQ ID NO: 931557 - DNA, 25 bp, Homo sapien
agtagggggccggtagtctgcacga

SEQ ID NO: 931558 - DNA, 25 bp, Homo sapien
gggcgtcgtcaaagcccgagggcgc

SEQ ID NO: 931559 - DNA, 25 bp, Homo sapien
ggcgccccccgcttgatctggcgtt

SEQ ID NO: 931560 - DNA, 25 bp, Homo sapien
gttgggcctgggacacgtcttgccc

SEQ ID NO: 931561 - DNA, 25 bp, Homo sapien
ccccgcttgatctggcgttgggcct

SEQ ID NO: 931562 - DNA, 25 bp, Homo sapien
ggcgttgggcctgggacacgtcttg

SEQ ID NO: 931563 - DNA, 25 bp, Homo sapien
gaggttgcaaacaaccggacacctg

SEQ ID NO: 931564 - DNA, 25 bp, Homo sapien
acaggctgagaggttgcaaacaacc

SEQ ID NO: 931565 - DNA, 25 bp, Homo sapien
caattggggttagcacaggctgaga

SEQ ID NO: 931566 - DNA, 25 bp, Homo sapien
ggctctctctgaacaattggggtta

SEQ ID NO: 931567 - DNA, 25 bp, Homo sapien
cagcaatccttccacagtctaggca

SEQ ID NO: 931568 - DNA, 25 bp, Homo sapien
cctggtctgtgcaactgagaccctt

SEQ ID NO: 931569 - DNA, 25 bp, Homo sapien
aactgagacccttccagcaatcctt

SEQ ID NO: 931570 - DNA, 25 bp, Homo sapien
tgtgcaactgagacccttccagcaa

SEQ ID NO: 931571 - DNA, 25 bp, Homo sapien
tgccttctgtctcctacgaaccttt

SEQ ID NO: 931572 - DNA, 25 bp, Homo sapien
ttctgtctcctacgaacctttgcct

SEQ ID NO: 931573 - DNA, 25 bp, Homo sapien
tctgtctcctacgaacctttgccta

SEQ ID NO: 931574 - DNA, 25 bp, Homo sapien
ccttctgtctcctacgaacctttgc

SEQ ID NO: 931575 - DNA, 25 bp, Homo sapien
tgcaggtatgcatgttgtggtccca

SEQ ID NO: 931576 - DNA, 25 bp, Homo sapien
taagactagtcttggcaccatagtg

SEQ ID NO: 931577 - DNA, 25 bp, Homo sapien
taagataagcttgcggcagggcgcc

SEQ ID NO: 931578 - DNA, 25 bp, Homo sapien
tagggctctgaagacgccagcaaag

SEQ ID NO: 931579 - DNA, 25 bp, Homo sapien
gagacactgcacctgactgcaagaa

SEQ ID NO: 931580 - DNA, 25 bp, Homo sapien
ggtcttgaacttgtagccttgagtg

SEQ ID NO: 931581 - DNA, 25 bp, Homo sapien
gtcttgaacttgtagccttgagtga

SEQ ID NO: 931582 - DNA, 25 bp, Homo sapien
ctgcacctgactgcaagaaagcttt

SEQ ID NO: 931583 - DNA, 25 bp, Homo sapien
cctccacagcagtgtaggccttgat

SEQ ID NO: 931584 - DNA, 25 bp, Homo sapien
acagcttcaccctcgagcagggaca

SEQ ID NO: 931585 - DNA, 25 bp, Homo sapien
gccttgatggcgacgtatggctcac

SEQ ID NO: 931586 - DNA, 25 bp, Homo sapien
tcaacagcttcaccctcgagcaggg

SEQ ID NO: 931587 - DNA, 25 bp, Homo sapien
tcagggtcttccgtctcgtcaggac

SEQ ID NO: 931588 - DNA, 25 bp, Homo sapien
gggtcttccgtctcgtcaggactgt

SEQ ID NO: 931589 - DNA, 25 bp, Homo sapien
ggctcagggtcttccgtctcgtcag

SEQ ID NO: 931590 - DNA, 25 bp, Homo sapien
tccgtctcgtcaggactgtccaggg

SEQ ID NO: 931591 - DNA, 25 bp, Homo sapien
atccagacagaacacgcagacatgc

SEQ ID NO: 931592 - DNA, 25 bp, Homo sapien
atacccatccagacagaacacgcag

SEQ ID NO: 931593 - DNA, 25 bp, Homo sapien
gtcccatacccatccagacagaaca

SEQ ID NO: 931594 - DNA, 25 bp, Homo sapien
gaggacatttagggcccctaacaga

SEQ ID NO: 931595 - DNA, 25 bp, Homo sapien
caatggcgcggtacgtctgcaggat

SEQ ID NO: 931596 - DNA, 25 bp, Homo sapien
ggcgcggtacgtctgcaggatgatg

SEQ ID NO: 931597 - DNA, 25 bp, Homo sapien
ggcaatggcgcggtacgtctgcagg

SEQ ID NO: 931598 - DNA, 25 bp, Homo sapien
cccgtggacagagccatctcggagc

SEQ ID NO: 931599 - DNA, 25 bp, Homo sapien
catagcgttctccaggcttcggcct

SEQ ID NO: 931600 - DNA, 25 bp, Homo sapien
tcactacagccctagactcctaggc

SEQ ID NO: 931601 - DNA, 25 bp, Homo sapien
tgatgaagttagtgagcctttccca

SEQ ID NO: 931602 - DNA, 25 bp, Homo sapien
acaaggtcttgggacaatgcccagg

SEQ ID NO: 931603 - DNA, 25 bp, Homo sapien
tgtcgcggtactcttgccatctttg

SEQ ID NO: 931604 - DNA, 25 bp, Homo sapien
tctttgggcatcaagtatgtctctg

SEQ ID NO: 931605 - DNA, 25 bp, Homo sapien
gccatctttgggcatcaagtatgtc

SEQ ID NO: 931606 - DNA, 25 bp, Homo sapien
ctgtcgcggtactcttgccatcttt

SEQ ID NO: 931607 - DNA, 25 bp, Homo sapien
atctgctcgggcagcccaagggagg

SEQ ID NO: 931608 - DNA, 25 bp, Homo sapien
ggaaaatgctcttgcgggctcccag

SEQ ID NO: 931609 - DNA, 25 bp, Homo sapien
cactgggtagacctgcagaagaact

SEQ ID NO: 931610 - DNA, 25 bp, Homo sapien
agaagaggcactgggtagacctgca

SEQ ID NO: 931611 - DNA, 25 bp, Homo sapien
tcatcagggcgcaccttgaagaagt

SEQ ID NO: 931612 - DNA, 25 bp, Homo sapien
ctcggcggcccgctgcccgtcaaac

SEQ ID NO: 931613 - DNA, 25 bp, Homo sapien
gacagcgggagatcttggtgggcag

SEQ ID NO: 931614 - DNA, 25 bp, Homo sapien
cgctgcccgtcaaaccacttgggag

SEQ ID NO: 931615 - DNA, 25 bp, Homo sapien
gattgatcgcccctgcctcaatagg

SEQ ID NO: 931616 - DNA, 25 bp, Homo sapien
gcccctgcctcaatagggaacattt

SEQ ID NO: 931617 - DNA, 25 bp, Homo sapien
gcctcaatagggaacatttctttta

SEQ ID NO: 931618 - DNA, 25 bp, Homo sapien
ctgttctctggattgatcgcccctg

SEQ ID NO: 931619 - DNA, 25 bp, Homo sapien
tcgtagatctcggtgaagcgccggt

SEQ ID NO: 931620 - DNA, 25 bp, Homo sapien
gatctcggtgaagcgccggtagacc

SEQ ID NO: 931621 - DNA, 25 bp, Homo sapien
gtgaagcgccggtagaccaccttct

SEQ ID NO: 931622 - DNA, 25 bp, Homo sapien
atggaactcgtagatctcggtgaag

SEQ ID NO: 931623 - DNA, 25 bp, Homo sapien
cagagtcgggggaccccattcagcc

SEQ ID NO: 931624 - DNA, 25 bp, Homo sapien
gccagagtcgggggaccccattcag

SEQ ID NO: 931625 - DNA, 25 bp, Homo sapien
ccagagtcgggggaccccattcagc

SEQ ID NO: 931626 - DNA, 25 bp, Homo sapien
gattggggtgaggaccatctttgca

SEQ ID NO: 931627 - DNA, 25 bp, Homo sapien
cagaggattggggtgaggaccatct

SEQ ID NO: 931628 - DNA, 25 bp, Homo sapien
gaggaagcccagaggattggggtga

SEQ ID NO: 931629 - DNA, 25 bp, Homo sapien
agcccagaggattggggtgaggacc

SEQ ID NO: 931630 - DNA, 25 bp, Homo sapien
actctggcctgggcaacagatcaag

SEQ ID NO: 931631 - DNA, 25 bp, Homo sapien
cctggaaggcggaggttgcagtgag

SEQ ID NO: 931632 - DNA, 25 bp, Homo sapien
ggagaaccagttgaacctggaaggc

SEQ ID NO: 931633 - DNA, 25 bp, Homo sapien
ctggcctgggcaacagatcaagact

SEQ ID NO: 931634 - DNA, 25 bp, Homo sapien
tggctgggtacgaagcgcttctcaa

SEQ ID NO: 931635 - DNA, 25 bp, Homo sapien
agcagggcgatgtgacggatgaagg

SEQ ID NO: 931636 - DNA, 25 bp, Homo sapien
cgatgtgacggatgaaggtgtcccc

SEQ ID NO: 931637 - DNA, 25 bp, Homo sapien
gctgggtacgaagcgcttctcaaag

SEQ ID NO: 931638 - DNA, 25 bp, Homo sapien
cacttccaggctgcgccttaaatgc

SEQ ID NO: 931639 - DNA, 25 bp, Homo sapien
gcacttccaggctgcgccttaaatg

SEQ ID NO: 931640 - DNA, 25 bp, Homo sapien
ggcacttccaggctgcgccttaaat

SEQ ID NO: 931641 - DNA, 25 bp, Homo sapien
cagggtcagctcgtggtccggacct

SEQ ID NO: 931642 - DNA, 25 bp, Homo sapien
ctgagtccagggtcagctcgtggtc

SEQ ID NO: 931643 - DNA, 25 bp, Homo sapien
tcagctcgtggtccggacctgatct

SEQ ID NO: 931644 - DNA, 25 bp, Homo sapien
tgcctgagtccagggtcagctcgtg

SEQ ID NO: 931645 - DNA, 25 bp, Homo sapien
tatgtagcctgaggaacgagcaacc

SEQ ID NO: 931646 - DNA, 25 bp, Homo sapien
gaagcggatgccacagcaagccctg

SEQ ID NO: 931647 - DNA, 25 bp, Homo sapien
cctgaggaacgagcaaccttgagcc

SEQ ID NO: 931648 - DNA, 25 bp, Homo sapien
gctttatgtagcctgaggaacgagc

SEQ ID NO: 931649 - DNA, 25 bp, Homo sapien
tgtttgcggtcatccccctggactc

SEQ ID NO: 931650 - DNA, 25 bp, Homo sapien
cctgtttgcggtcatccccctggac

SEQ ID NO: 931651 - DNA, 25 bp, Homo sapien
tggatccaggcaggatctgaactcc

SEQ ID NO: 931652 - DNA, 25 bp, Homo sapien
cgtggatccaggcaggatctgaact

SEQ ID NO: 931653 - DNA, 25 bp, Homo sapien
gggacagcggcctccaggtcacctc

SEQ ID NO: 931654 - DNA, 25 bp, Homo sapien
taaggacagggacagcggcctccag

SEQ ID NO: 931655 - DNA, 25 bp, Homo sapien
ctaaggacagggacagcggcctcca

SEQ ID NO: 931656 - DNA, 25 bp, Homo sapien
acagggacagcggcctccaggtcac

SEQ ID NO: 931657 - DNA, 25 bp, Homo sapien
gcacctcagggttacaagaagaact

SEQ ID NO: 931658 - DNA, 25 bp, Homo sapien
gaaaactatgccgtcacagagccta

SEQ ID NO: 931659 - DNA, 25 bp, Homo sapien
ttagtgtcatcgagctagccccaat

SEQ ID NO: 931660 - DNA, 25 bp, Homo sapien
gaactaggaaataatgccggccacg

SEQ ID NO: 931661 - DNA, 25 bp, Homo sapien
ggaaccatgagagatagcttaggaa

SEQ ID NO: 931662 - DNA, 25 bp, Homo sapien
taaggagagccgtgaacaaaggatc

SEQ ID NO: 931663 - DNA, 25 bp, Homo sapien
tgcagaagctgagatgttccagtag

SEQ ID NO: 931664 - DNA, 25 bp, Homo sapien
caggaatttttcttcactgcagaag

SEQ ID NO: 931665 - DNA, 25 bp, Homo sapien
ttccagacccacagtcactctgctc

SEQ ID NO: 931666 - DNA, 25 bp, Homo sapien
cataaaaaatctggtgagattcatt

SEQ ID NO: 931667 - DNA, 25 bp, Homo sapien
tcccaagtacaccagccattccaga

SEQ ID NO: 931668 - DNA, 25 bp, Homo sapien
aaatcctgatagtacattcccaagt

SEQ ID NO: 931669 - DNA, 25 bp, Homo sapien
aagctcttctcaaccactgatactt

SEQ ID NO: 931670 - DNA, 25 bp, Homo sapien
gctcttctcaaccactgatacttta

SEQ ID NO: 931671 - DNA, 25 bp, Homo sapien
acagcttggggtagtaacaggtccg

SEQ ID NO: 931672 - DNA, 25 bp, Homo sapien
tcttctcaaccactgatactttaag

SEQ ID NO: 931673 - DNA, 25 bp, Homo sapien
gggagatcacattagctacgcgtat

SEQ ID NO: 931674 - DNA, 25 bp, Homo sapien
ccaatgaggaggacaacgttgactc

SEQ ID NO: 931675 - DNA, 25 bp, Homo sapien
tagcttaaatatccgggaaggctcc

SEQ ID NO: 931676 - DNA, 25 bp, Homo sapien
ttcagaagcactcataaagcgggat

SEQ ID NO: 931677 - DNA, 25 bp, Homo sapien
ttgatctgagagcttccatcagtct

SEQ ID NO: 931678 - DNA, 25 bp, Homo sapien
gggtctggttcttgcttgatctgag

SEQ ID NO: 931679 - DNA, 25 bp, Homo sapien
tgatctgagagcttccatcagtctc

SEQ ID NO: 931680 - DNA, 25 bp, Homo sapien
gtggggtctggttcttgcttgatct

SEQ ID NO: 931681 - DNA, 25 bp, Homo sapien
taagaaggacaagacaccaaacatc

SEQ ID NO: 931682 - DNA, 25 bp, Homo sapien
gacctgctcagtgataaatccattc

SEQ ID NO: 931683 - DNA, 25 bp, Homo sapien
catcaaaagagcttcagagagacat

SEQ ID NO: 931684 - DNA, 25 bp, Homo sapien
tctggcttacatgcatttaaaggac

SEQ ID NO: 931685 - DNA, 25 bp, Homo sapien
ttgtcctgataaaaaagtcttggct

SEQ ID NO: 931686 - DNA, 25 bp, Homo sapien
taacctgcaaatccaattcacccag

SEQ ID NO: 931687 - DNA, 25 bp, Homo sapien
gcaaatccaattcacccagaagaaa

SEQ ID NO: 931688 - DNA, 25 bp, Homo sapien
tagtttaaatgcacaatcctttgtc

SEQ ID NO: 931689 - DNA, 25 bp, Homo sapien
gaacttccaactggcttggttcagc

SEQ ID NO: 931690 - DNA, 25 bp, Homo sapien
tgtggctggaacttccaactggctt

SEQ ID NO: 931691 - DNA, 25 bp, Homo sapien
ctggaacttccaactggcttggttc

SEQ ID NO: 931692 - DNA, 25 bp, Homo sapien
ttccaactggcttggttcagctgat

SEQ ID NO: 931693 - DNA, 25 bp, Homo sapien
acagagactgatttccacattgttc

SEQ ID NO: 931694 - DNA, 25 bp, Homo sapien
tgagatggagcacacgattatccaa

SEQ ID NO: 931695 - DNA, 25 bp, Homo sapien
tgtggtcctaagttcacatatacaa

SEQ ID NO: 931696 - DNA, 25 bp, Homo sapien
tcttgagatggagcacacgattatc

SEQ ID NO: 931697 - DNA, 25 bp, Homo sapien
tttcaaatgtggtcctaagttcaca

SEQ ID NO: 931698 - DNA, 25 bp, Homo sapien
ccttctgactcactctgatcaacca

SEQ ID NO: 931699 - DNA, 25 bp, Homo sapien
ggccttctgactcactctgatcaac

SEQ ID NO: 931700 - DNA, 25 bp, Homo sapien
tctgactcactctgatcaaccagct

SEQ ID NO: 931701 - DNA, 25 bp, Homo sapien
ttgtatcacggggccttctgactca

SEQ ID NO: 931702 - DNA, 25 bp, Homo sapien
aataatgtaaggatgtgttgttccc

SEQ ID NO: 931703 - DNA, 25 bp, Homo sapien
aatgtaaggatgtgttgttcccttg

SEQ ID NO: 931704 - DNA, 25 bp, Homo sapien
taaggatgtgttgttcccttggaaa

SEQ ID NO: 931705 - DNA, 25 bp, Homo sapien
taaataatgtaaggatgtgttgttc

SEQ ID NO: 931706 - DNA, 25 bp, Homo sapien
taccgcacaagaacaggaacaaaag

SEQ ID NO: 931707 - DNA, 25 bp, Homo sapien
cagaagcaggcacattgtgacttac

SEQ ID NO: 931708 - DNA, 25 bp, Homo sapien
ggacatttgttcactcgctcagcaa

SEQ ID NO: 931709 - DNA, 25 bp, Homo sapien
cactcgcaaaattaagtttggctca

SEQ ID NO: 931710 - DNA, 25 bp, Homo sapien
ttattaatcacaagtcctggaaatg

SEQ ID NO: 931711 - DNA, 25 bp, Homo sapien
gttattaatcacaagtcctggaaat

SEQ ID NO: 931712 - DNA, 25 bp, Homo sapien
ggttattaatcacaagtcctggaaa

SEQ ID NO: 931713 - DNA, 25 bp, Homo sapien
tgaccgtgggtgaagtggaaccaaa

SEQ ID NO: 931714 - DNA, 25 bp, Homo sapien
gattgcacagcataggaagccggat

SEQ ID NO: 931715 - DNA, 25 bp, Homo sapien
caggtgggcatctcttacggtgaca

SEQ ID NO: 931716 - DNA, 25 bp, Homo sapien
gaggttgaatccgtctgacccgaag

SEQ ID NO: 931717 - DNA, 25 bp, Homo sapien
tgataaactcggcagagtctaagat

SEQ ID NO: 931718 - DNA, 25 bp, Homo sapien
atttgataaactcggcagagtctaa

SEQ ID NO: 931719 - DNA, 25 bp, Homo sapien
tttgataaactcggcagagtctaag

SEQ ID NO: 931720 - DNA, 25 bp, Homo sapien
ataaactcggcagagtctaagatcc

SEQ ID NO: 931721 - DNA, 25 bp, Homo sapien
ctttcgagagtctttcattatcatc

SEQ ID NO: 931722 - DNA, 25 bp, Homo sapien
ttctcttagctgtctagctttttca

SEQ ID NO: 931723 - DNA, 25 bp, Homo sapien
tttcaactttcgagagtctttcatt

SEQ ID NO: 931724 - DNA, 25 bp, Homo sapien
ttccgactaaagaggtcattcactt

SEQ ID NO: 931725 - DNA, 25 bp, Homo sapien
cctgaatgatgttaaggtcttcaac

SEQ ID NO: 931726 - DNA, 25 bp, Homo sapien
taaggtcttcaacacctgatgcagt

SEQ ID NO: 931727 - DNA, 25 bp, Homo sapien
gcagtagtattaacattgggtgatg

SEQ ID NO: 931728 - DNA, 25 bp, Homo sapien
ctggaattgtcacctgaatgatgtt

SEQ ID NO: 931729 - DNA, 25 bp, Homo sapien
cttaatcgccgtctcaaacatttcg

SEQ ID NO: 931730 - DNA, 25 bp, Homo sapien
gtgctctccttaatcgccgtctcaa

SEQ ID NO: 931731 - DNA, 25 bp, Homo sapien
aatcgccgtctcaaacatttcgggc

SEQ ID NO: 931732 - DNA, 25 bp, Homo sapien
tccttaatcgccgtctcaaacattt

SEQ ID NO: 931733 - DNA, 25 bp, Homo sapien
catatacaagagtgcagcttaaaaa

SEQ ID NO: 931734 - DNA, 25 bp, Homo sapien
aaacacaaacccacatacccatctc

SEQ ID NO: 931735 - DNA, 25 bp, Homo sapien
tgactccagagctaattcagccctg

SEQ ID NO: 931736 - DNA, 25 bp, Homo sapien
acccatctcccagtgtcaaacacaa

SEQ ID NO: 931737 - DNA, 25 bp, Homo sapien
gatggtcttcggaatggcacaccct

SEQ ID NO: 931738 - DNA, 25 bp, Homo sapien
aatgatgaacttaattttggctttg

SEQ ID NO: 931739 - DNA, 25 bp, Homo sapien
tccagcctcggaatgccaaaagtcg

SEQ ID NO: 931740 - DNA, 25 bp, Homo sapien
gaaagactcaaataacgcgaacggc

SEQ ID NO: 931741 - DNA, 25 bp, Homo sapien
caaaacagccgcgtacacgaaacag

SEQ ID NO: 931742 - DNA, 25 bp, Homo sapien
gaaaaacccacacgttgccaatgac

SEQ ID NO: 931743 - DNA, 25 bp, Homo sapien
cagaacatgggcgaaatgacgccat

SEQ ID NO: 931744 - DNA, 25 bp, Homo sapien
tgacgccattcaatcccgaaaaacc

SEQ ID NO: 931745 - DNA, 25 bp, Homo sapien
ctgcgtggcagtaagaaggtttcaa

SEQ ID NO: 931746 - DNA, 25 bp, Homo sapien
cagtaagaaggtttcaaaatagact

SEQ ID NO: 931747 - DNA, 25 bp, Homo sapien
tgcgtggcagtaagaaggtttcaaa

SEQ ID NO: 931748 - DNA, 25 bp, Homo sapien
tggcagtaagaaggtttcaaaatag

SEQ ID NO: 931749 - DNA, 25 bp, Homo sapien
cacatttctcattgaagagattttc

SEQ ID NO: 931750 - DNA, 25 bp, Homo sapien
tttaggtccgtgattttggcattcc

SEQ ID NO: 931751 - DNA, 25 bp, Homo sapien
caactttctgttttaggtccgtgat

SEQ ID NO: 931752 - DNA, 25 bp, Homo sapien
acatttctcattgaagagattttca

SEQ ID NO: 931753 - DNA, 25 bp, Homo sapien
tgggtcggggttcgaacagctgagg

SEQ ID NO: 931754 - DNA, 25 bp, Homo sapien
tagtctgggtcggggttcgaacagc

SEQ ID NO: 931755 - DNA, 25 bp, Homo sapien
tctgggtcggggttcgaacagctga

SEQ ID NO: 931756 - DNA, 25 bp, Homo sapien
tcggggttcgaacagctgaggtttg

SEQ ID NO: 931757 - DNA, 25 bp, Homo sapien
aaagctagtttggttaacgtcatct

SEQ ID NO: 931758 - DNA, 25 bp, Homo sapien
taaacacatagctagtgaactgaca

SEQ ID NO: 931759 - DNA, 25 bp, Homo sapien
gaaacataccgaggactggccctta

SEQ ID NO: 931760 - DNA, 25 bp, Homo sapien
gatgtgatccatgttatctgttttc

SEQ ID NO: 931761 - DNA, 25 bp, Homo sapien
ctcccaggacttcgtggtcttttgg

SEQ ID NO: 931762 - DNA, 25 bp, Homo sapien
cctttgaattactcccaggacttcg

SEQ ID NO: 931763 - DNA, 25 bp, Homo sapien
gaattactcccaggacttcgtggtc

SEQ ID NO: 931764 - DNA, 25 bp, Homo sapien
actcccaggacttcgtggtcttttg

SEQ ID NO: 931765 - DNA, 25 bp, Homo sapien
ctttagtgtttattttactagccat

SEQ ID NO: 931766 - DNA, 25 bp, Homo sapien
cccaggaggcaagtaggaaataact

SEQ ID NO: 931767 - DNA, 25 bp, Homo sapien
gaggcaagtaggaaataactagttc

SEQ ID NO: 931768 - DNA, 25 bp, Homo sapien
ccaggaggcaagtaggaaataacta

SEQ ID NO: 931769 - DNA, 25 bp, Homo sapien
caagtaggaaataactagttcaggt

SEQ ID NO: 931770 - DNA, 25 bp, Homo sapien
gccttccacatacaagaactccggg

SEQ ID NO: 931771 - DNA, 25 bp, Homo sapien
aagccttccacatacaagaactccg

SEQ ID NO: 931772 - DNA, 25 bp, Homo sapien
ctctggcaagccttccacatacaag

SEQ ID NO: 931773 - DNA, 25 bp, Homo sapien
cacatacaagaactccgggtttgat

SEQ ID NO: 931774 - DNA, 25 bp, Homo sapien
agcctcctcagaatcgttctcaaga

SEQ ID NO: 931775 - DNA, 25 bp, Homo sapien
ccttctccatgacagacacacccaa

SEQ ID NO: 931776 - DNA, 25 bp, Homo sapien
tctccatgacagacacacccaatca

SEQ ID NO: 931777 - DNA, 25 bp, Homo sapien
gcctcctcagaatcgttctcaagac

SEQ ID NO: 931778 - DNA, 25 bp, Homo sapien
cgtagcttggtaattctgacattcc

SEQ ID NO: 931779 - DNA, 25 bp, Homo sapien
tcttccacttgcttccgtagcttgg

SEQ ID NO: 931780 - DNA, 25 bp, Homo sapien
cttccgtagcttggtaattctgaca

SEQ ID NO: 931781 - DNA, 25 bp, Homo sapien
tccgtagcttggtaattctgacatt

SEQ ID NO: 931782 - DNA, 25 bp, Homo sapien
catgttatttatcagtgctgttgca

SEQ ID NO: 931783 - DNA, 25 bp, Homo sapien
ccatgttatttatcagtgctgttgc

SEQ ID NO: 931784 - DNA, 25 bp, Homo sapien
attttgctagaaagtactcttgttt

SEQ ID NO: 931785 - DNA, 25 bp, Homo sapien
agaaagtactcttgtttgcagtgat

SEQ ID NO: 931786 - DNA, 25 bp, Homo sapien
ttgcttgaccaaatcaaaagcatgc

SEQ ID NO: 931787 - DNA, 25 bp, Homo sapien
accagtactttgattgcttgaccaa

SEQ ID NO: 931788 - DNA, 25 bp, Homo sapien
tgattgcttgaccaaatcaaaagca

SEQ ID NO: 931789 - DNA, 25 bp, Homo sapien
ttcaccagtactttgattgcttgac

SEQ ID NO: 931790 - DNA, 25 bp, Homo sapien
tcagtggtactgtgagtcagaagtt

SEQ ID NO: 931791 - DNA, 25 bp, Homo sapien
gtaacttcagtggtactgtgagtca

SEQ ID NO: 931792 - DNA, 25 bp, Homo sapien
agtaacttcagtggtactgtgagtc

SEQ ID NO: 931793 - DNA, 25 bp, Homo sapien
ggtactgtgagtcagaagttctggt

SEQ ID NO: 931794 - DNA, 25 bp, Homo sapien
tcgggtgtgcctcaaatttttggta

SEQ ID NO: 931795 - DNA, 25 bp, Homo sapien
cacgtacagatcattcgggtgtgcc

SEQ ID NO: 931796 - DNA, 25 bp, Homo sapien
cagatcattcgggtgtgcctcaaat

SEQ ID NO: 931797 - DNA, 25 bp, Homo sapien
cttccacgtacagatcattcgggtg

SEQ ID NO: 931798 - DNA, 25 bp, Homo sapien
gctactaactgttcaggaccgtaat

SEQ ID NO: 931799 - DNA, 25 bp, Homo sapien
catcatggacaatagaggacacaac

SEQ ID NO: 931800 - DNA, 25 bp, Homo sapien
tacactttcatctgcgtggcaacca

SEQ ID NO: 931801 - DNA, 25 bp, Homo sapien
cagatttgggcagatttaagtgtcc

SEQ ID NO: 931802 - DNA, 25 bp, Homo sapien
gctgatccaccatctttcttaattt

SEQ ID NO: 931803 - DNA, 25 bp, Homo sapien
ttttttgcagaaaagctgatccacc

SEQ ID NO: 931804 - DNA, 25 bp, Homo sapien
taatttagtgattctggcataccat

SEQ ID NO: 931805 - DNA, 25 bp, Homo sapien
ttcttaatttagtgattctggcata

SEQ ID NO: 931806 - DNA, 25 bp, Homo sapien
aatcttcacgtgttgaactcagaag

SEQ ID NO: 931807 - DNA, 25 bp, Homo sapien
tcttcacgtgttgaactcagaagct

SEQ ID NO: 931808 - DNA, 25 bp, Homo sapien
gtaaatcttcacgtgttgaactcag

SEQ ID NO: 931809 - DNA, 25 bp, Homo sapien
ttcacgtgttgaactcagaagctca

SEQ ID NO: 931810 - DNA, 25 bp, Homo sapien
caataatcactaggtaatattcagc

SEQ ID NO: 931811 - DNA, 25 bp, Homo sapien
tcaataatcactaggtaatattcag

SEQ ID NO: 931812 - DNA, 25 bp, Homo sapien
taaatactcaataatcactaggtaa

SEQ ID NO: 931813 - DNA, 25 bp, Homo sapien
tactcaataatcactaggtaatatt

SEQ ID NO: 931814 - DNA, 25 bp, Homo sapien
gcttgagcacaactaaatctttttt

SEQ ID NO: 931815 - DNA, 25 bp, Homo sapien
taataacgactagtacatatttaac

SEQ ID NO: 931816 - DNA, 25 bp, Homo sapien
catttagtcagtaaggctggttttg

SEQ ID NO: 931817 - DNA, 25 bp, Homo sapien
tctggatgcttgagcacaactaaat

SEQ ID NO: 931818 - DNA, 25 bp, Homo sapien
tagatggccttctaaaaggaattcc

SEQ ID NO: 931819 - DNA, 25 bp, Homo sapien
tggccttctaaaaggaattccttca

SEQ ID NO: 931820 - DNA, 25 bp, Homo sapien
aattccgtaagtagatggccttcta

SEQ ID NO: 931821 - DNA, 25 bp, Homo sapien
ttcaggaagtccttctacataaaga

SEQ ID NO: 931822 - DNA, 25 bp, Homo sapien
tagaaaagagggtacgggatcgtca

SEQ ID NO: 931823 - DNA, 25 bp, Homo sapien
acgtagatcagtgatgcgagcattc

SEQ ID NO: 931824 - DNA, 25 bp, Homo sapien
atcagtgatgcgagcattccatttc

SEQ ID NO: 931825 - DNA, 25 bp, Homo sapien
tagatcagtgatgcgagcattccat

SEQ ID NO: 931826 - DNA, 25 bp, Homo sapien
cgtagatcagtgatgcgagcattcc

SEQ ID NO: 931827 - DNA, 25 bp, Homo sapien
attggcctttggtctcttagacggt

SEQ ID NO: 931828 - DNA, 25 bp, Homo sapien
tcattggcctttggtctcttagacg

SEQ ID NO: 931829 - DNA, 25 bp, Homo sapien
gtggctgcggtagctcattggcctt

SEQ ID NO: 931830 - DNA, 25 bp, Homo sapien
tggctgcggtagctcattggccttt

SEQ ID NO: 931831 - DNA, 25 bp, Homo sapien
catttccagcccgacgatggtacta

SEQ ID NO: 931832 - DNA, 25 bp, Homo sapien
gggtcagttgcttctatcagtctca

SEQ ID NO: 931833 - DNA, 25 bp, Homo sapien
tggcctactgaacgcaaagtctgag

SEQ ID NO: 931834 - DNA, 25 bp, Homo sapien
cagaaactgagcgaaaacccaagta

SEQ ID NO: 931835 - DNA, 25 bp, Homo sapien
caccatatggggacacagtagacac

SEQ ID NO: 931836 - DNA, 25 bp, Homo sapien
caagacattgctgggagcagagaag

SEQ ID NO: 931837 - DNA, 25 bp, Homo sapien
ggtgcccaagacattgctgggagca

SEQ ID NO: 931838 - DNA, 25 bp, Homo sapien
tctgggaggaagacttgcaagcacc

SEQ ID NO: 931839 - DNA, 25 bp, Homo sapien
cagttcctatgggttaggaatttag

SEQ ID NO: 931840 - DNA, 25 bp, Homo sapien
tgcaatccattggaaggcttgcctg

SEQ ID NO: 931841 - DNA, 25 bp, Homo sapien
taggaatttaggtgtggctgaactt

SEQ ID NO: 931842 - DNA, 25 bp, Homo sapien
acttggcagttcaaggcattggctg

SEQ ID NO: 931843 - DNA, 25 bp, Homo sapien
agaagacatctgatcaagaaagatt

SEQ ID NO: 931844 - DNA, 25 bp, Homo sapien
acatctgatcaagaaagattcaggc

SEQ ID NO: 931845 - DNA, 25 bp, Homo sapien
atcaagaaagattcaggccgggagt

SEQ ID NO: 931846 - DNA, 25 bp, Homo sapien
agacatctgatcaagaaagattcag

SEQ ID NO: 931847 - DNA, 25 bp, Homo sapien
tctttcagcctccaggcgtttgctc

SEQ ID NO: 931848 - DNA, 25 bp, Homo sapien
ggcagcaatgagcatttgagccgcc

SEQ ID NO: 931849 - DNA, 25 bp, Homo sapien
atggggcagcaatgagcatttgagc

SEQ ID NO: 931850 - DNA, 25 bp, Homo sapien
cctccaggcgtttgctcctccagcc

SEQ ID NO: 931851 - DNA, 25 bp, Homo sapien
taagacgttagtgttcactggccgg

SEQ ID NO: 931852 - DNA, 25 bp, Homo sapien
taaactgcaattagacagtggcctc

SEQ ID NO: 931853 - DNA, 25 bp, Homo sapien
tcagcccaatgtgttgcgaggaatg

SEQ ID NO: 931854 - DNA, 25 bp, Homo sapien
tgtgtgtagtcttctaagcctgggc

SEQ ID NO: 931855 - DNA, 25 bp, Homo sapien
gcatacttgcctgtgtagtttttgc

SEQ ID NO: 931856 - DNA, 25 bp, Homo sapien
tgcatacttgcctgtgtagtttttg

SEQ ID NO: 931857 - DNA, 25 bp, Homo sapien
actgggtctggccttatcgttttga

SEQ ID NO: 931858 - DNA, 25 bp, Homo sapien
tgagttaagcccgtcctaccagaag

SEQ ID NO: 931859 - DNA, 25 bp, Homo sapien
tggccttatcgttttgagttaagcc

SEQ ID NO: 931860 - DNA, 25 bp, Homo sapien
gagttaagcccgtcctaccagaaga

SEQ ID NO: 931861 - DNA, 25 bp, Homo sapien
tttaaatgttatgtccgcacgcacc

SEQ ID NO: 931862 - DNA, 25 bp, Homo sapien
caaaatctcagagcttgtgccagaa

SEQ ID NO: 931863 - DNA, 25 bp, Homo sapien
tagacagaagggctggacataacca

SEQ ID NO: 931864 - DNA, 25 bp, Homo sapien
gcagattggcacatttaaatcccgg

SEQ ID NO: 931865 - DNA, 25 bp, Homo sapien
gggcctgggacaggacaggctgctt

SEQ ID NO: 931866 - DNA, 25 bp, Homo sapien
ggcctgggacaggacaggctgcttt

SEQ ID NO: 931867 - DNA, 25 bp, Homo sapien
ctgggcctgggacaggacaggctgc

SEQ ID NO: 931868 - DNA, 25 bp, Homo sapien
tgggcctgggacaggacaggctgct

SEQ ID NO: 931869 - DNA, 25 bp, Homo sapien
gaacttttcacaggcagataacagg

SEQ ID NO: 931870 - DNA, 25 bp, Homo sapien
taaacaagatgccaccggcaggtct

SEQ ID NO: 931871 - DNA, 25 bp, Homo sapien
tgtgtccctagagctcagtgccaaa

SEQ ID NO: 931872 - DNA, 25 bp, Homo sapien
aaacaatagccggactgagcacccg

SEQ ID NO: 931873 - DNA, 25 bp, Homo sapien
tggcgacgctggcaacttgcagccg

SEQ ID NO: 931874 - DNA, 25 bp, Homo sapien
gcgacgctggcaacttgcagccggt

SEQ ID NO: 931875 - DNA, 25 bp, Homo sapien
gctggcaacttgcagccggtgctcc

SEQ ID NO: 931876 - DNA, 25 bp, Homo sapien
gacgctggcaacttgcagccggtgc

SEQ ID NO: 931877 - DNA, 25 bp, Homo sapien
cccctccgcgccctgccggcaccga

SEQ ID NO: 931878 - DNA, 25 bp, Homo sapien
ccctccgcgccctgccggcaccgac

SEQ ID NO: 931879 - DNA, 25 bp, Homo sapien
gaatctagagatccagaaatcccaa

SEQ ID NO: 931880 - DNA, 25 bp, Homo sapien
gtgactggcctatgagagacactca

SEQ ID NO: 931881 - DNA, 25 bp, Homo sapien
tacacaatctcaactccacaaaggc

SEQ ID NO: 931882 - DNA, 25 bp, Homo sapien
tctgttctccgctgtgttcccattg

SEQ ID NO: 931883 - DNA, 25 bp, Homo sapien
aggttaggaggaaaggtgcacgtgg

SEQ ID NO: 931884 - DNA, 25 bp, Homo sapien
aggtgcacgtggacccagctttcct

SEQ ID NO: 931885 - DNA, 25 bp, Homo sapien
aacacctatgagtcagatcagtgag

SEQ ID NO: 931886 - DNA, 25 bp, Homo sapien
tcagatcagtgagggaacactaggc

SEQ ID NO: 931887 - DNA, 25 bp, Homo sapien
tacttcccgaaggaaacatagcaga

SEQ ID NO: 931888 - DNA, 25 bp, Homo sapien
ctattcagcctggttgacggaggaa

SEQ ID NO: 931889 - DNA, 25 bp, Homo sapien
aacaaatggtgttgcagctgggcat

SEQ ID NO: 931890 - DNA, 25 bp, Homo sapien
cctcagggtcagctggtttttacaa

SEQ ID NO: 931891 - DNA, 25 bp, Homo sapien
tagctcaataaaccagactggaaaa

SEQ ID NO: 931892 - DNA, 25 bp, Homo sapien
tgtatataactggtatcatattgta

SEQ ID NO: 931893 - DNA, 25 bp, Homo sapien
tgtagctcaataaaccagactggaa

SEQ ID NO: 931894 - DNA, 25 bp, Homo sapien
ttgtatgtatccttctgcaacctgc

SEQ ID NO: 931895 - DNA, 25 bp, Homo sapien
caagggcttataccaactgacactc

SEQ ID NO: 931896 - DNA, 25 bp, Homo sapien
gacactctaccagcatgtgtcagaa

SEQ ID NO: 931897 - DNA, 25 bp, Homo sapien
gggattatcagactttagcttttgc

SEQ ID NO: 931898 - DNA, 25 bp, Homo sapien
tctatagcactagtgctggaatctc

SEQ ID NO: 931899 - DNA, 25 bp, Homo sapien
ccagaaggctctagcccaagagaag

SEQ ID NO: 931900 - DNA, 25 bp, Homo sapien
caagagaagactggatacattggca

SEQ ID NO: 931901 - DNA, 25 bp, Homo sapien
tggaagtgactgcagcctagctgag

SEQ ID NO: 931902 - DNA, 25 bp, Homo sapien
atgcagagatgtttaggacatgagc

SEQ ID NO: 931903 - DNA, 25 bp, Homo sapien
ggatgaggtctgcatgattttattt

SEQ ID NO: 931904 - DNA, 25 bp, Homo sapien
gggatgaggtctgcatgattttatt

SEQ ID NO: 931905 - DNA, 25 bp, Homo sapien
ctggggatgaggtctgcatgatttt

SEQ ID NO: 931906 - DNA, 25 bp, Homo sapien
catgtggctaagctgtttacacacc

SEQ ID NO: 931907 - DNA, 25 bp, Homo sapien
ggcaattgagcttaaacctggtggg

SEQ ID NO: 931908 - DNA, 25 bp, Homo sapien
caaggaagttaccagttaccagtgt

SEQ ID NO: 931909 - DNA, 25 bp, Homo sapien
gaaacccatggttgtcccacctgtg

SEQ ID NO: 931910 - DNA, 25 bp, Homo sapien
taatgcccaccctatagagttgttg

SEQ ID NO: 931911 - DNA, 25 bp, Homo sapien
cacatttgacactccctggtagata

SEQ ID NO: 931912 - DNA, 25 bp, Homo sapien
aaaagtgacaatgggctggacaccg

SEQ ID NO: 931913 - DNA, 25 bp, Homo sapien
gttgttggaaggcatactgatagca

SEQ ID NO: 931914 - DNA, 25 bp, Homo sapien
tgcactcttgcctgggtgatgacag

SEQ ID NO: 931915 - DNA, 25 bp, Homo sapien
tcttgcctgggtgatgacagcgaaa

SEQ ID NO: 931916 - DNA, 25 bp, Homo sapien
gcactcttgcctgggtgatgacagc

SEQ ID NO: 931917 - DNA, 25 bp, Homo sapien
actcttgcctgggtgatgacagcga

SEQ ID NO: 931918 - DNA, 25 bp, Homo sapien
ttgtgcatcaggatgtagagagagt

SEQ ID NO: 931919 - DNA, 25 bp, Homo sapien
aattgtgcatcaggatgtagagaga

SEQ ID NO: 931920 - DNA, 25 bp, Homo sapien
caggatgtagagagagtggaagagg

SEQ ID NO: 931921 - DNA, 25 bp, Homo sapien
gcatcaggatgtagagagagtggaa

SEQ ID NO: 931922 - DNA, 25 bp, Homo sapien
cagaacagagactaggtttggtgag

SEQ ID NO: 931923 - DNA, 25 bp, Homo sapien
tctcccagcctcgagaattgataac

SEQ ID NO: 931924 - DNA, 25 bp, Homo sapien
gatgggacagattttgggaaagatc

SEQ ID NO: 931925 - DNA, 25 bp, Homo sapien
gggaaagatcatgatgagccatcaa

SEQ ID NO: 931926 - DNA, 25 bp, Homo sapien
ttatttatcaagacaagagtgttgc

SEQ ID NO: 931927 - DNA, 25 bp, Homo sapien
ccacacctggacagttatttattta

SEQ ID NO: 931928 - DNA, 25 bp, Homo sapien
aaggagtgggagacgcccttgatca

SEQ ID NO: 931929 - DNA, 25 bp, Homo sapien
caagagtgttgctgtgtctctcagg

SEQ ID NO: 931930 - DNA, 25 bp, Homo sapien
ctcaattgctctgaactctagctag

SEQ ID NO: 931931 - DNA, 25 bp, Homo sapien
gaactctagctagacttgacatggg

SEQ ID NO: 931932 - DNA, 25 bp, Homo sapien
caattgctctgaactctagctagac

SEQ ID NO: 931933 - DNA, 25 bp, Homo sapien
tgctctgaactctagctagacttga

SEQ ID NO: 931934 - DNA, 25 bp, Homo sapien
ccatttgtgcagatcatctagaaga

SEQ ID NO: 931935 - DNA, 25 bp, Homo sapien
catttgtgcagatcatctagaagaa

SEQ ID NO: 931936 - DNA, 25 bp, Homo sapien
atttgtgcagatcatctagaagaac

SEQ ID NO: 931937 - DNA, 25 bp, Homo sapien
tttgtgcagatcatctagaagaacc

SEQ ID NO: 931938 - DNA, 25 bp, Homo sapien
gtgcccagaccccaagctagagttt

SEQ ID NO: 931939 - DNA, 25 bp, Homo sapien
tcacctccgcgttcaagcaaattct

SEQ ID NO: 931940 - DNA, 25 bp, Homo sapien
acaggcatccgcctgtacgtctgac

SEQ ID NO: 931941 - DNA, 25 bp, Homo sapien
tccgcctgtacgtctgactaacttt

SEQ ID NO: 931942 - DNA, 25 bp, Homo sapien
gatgtgtagctgtctacctacagga

SEQ ID NO: 931943 - DNA, 25 bp, Homo sapien
gatggccgggaaaatctgcattcac

SEQ ID NO: 931944 - DNA, 25 bp, Homo sapien
tatcggcattgacacgggccatgga

SEQ ID NO: 931945 - DNA, 25 bp, Homo sapien
gtgcctggctgacttctagagtttc

SEQ ID NO: 931946 - DNA, 25 bp, Homo sapien
tggggagccctcaagaaactgacaa

SEQ ID NO: 931947 - DNA, 25 bp, Homo sapien
ccctcaagaaactgacaatcacggc

SEQ ID NO: 931948 - DNA, 25 bp, Homo sapien
gagccctcaagaaactgacaatcac

SEQ ID NO: 931949 - DNA, 25 bp, Homo sapien
ggggagccctcaagaaactgacaat

SEQ ID NO: 931950 - DNA, 25 bp, Homo sapien
ggtgctgcatgcttctaaacaacca

SEQ ID NO: 931951 - DNA, 25 bp, Homo sapien
ggaggtgctgcatgcttctaaacaa

SEQ ID NO: 931952 - DNA, 25 bp, Homo sapien
gcaggaggtgctgcatgcttctaaa

SEQ ID NO: 931953 - DNA, 25 bp, Homo sapien
agcaggaggtgctgcatgcttctaa

SEQ ID NO: 931954 - DNA, 25 bp, Homo sapien
tcgccgatacgtggcaggtagaaat

SEQ ID NO: 931955 - DNA, 25 bp, Homo sapien
ttccttatggcgcacaggtagcgta

SEQ ID NO: 931956 - DNA, 25 bp, Homo sapien
cgtagaaaataactgcttcacgctg

SEQ ID NO: 931957 - DNA, 25 bp, Homo sapien
tcgtgatcaaacaccagtcgagtcc

SEQ ID NO: 931958 - DNA, 25 bp, Homo sapien
atgttgggcactgactactcttttc

SEQ ID NO: 931959 - DNA, 25 bp, Homo sapien
gatgttgggcactgactactctttt

SEQ ID NO: 931960 - DNA, 25 bp, Homo sapien
tgatgttgggcactgactactcttt

SEQ ID NO: 931961 - DNA, 25 bp, Homo sapien
tgttgggcactgactactcttttct

SEQ ID NO: 931962 - DNA, 25 bp, Homo sapien
tcagagctttcccccgaaagccaaa

SEQ ID NO: 931963 - DNA, 25 bp, Homo sapien
aggtcggcaaactctcgaatcttag

SEQ ID NO: 931964 - DNA, 25 bp, Homo sapien
cggcaaactctcgaatcttagatgt

SEQ ID NO: 931965 - DNA, 25 bp, Homo sapien
cccgagttaggtcggcaaactctcg

SEQ ID NO: 931966 - DNA, 25 bp, Homo sapien
cacatccattgcctgaaacttcaat

SEQ ID NO: 931967 - DNA, 25 bp, Homo sapien
cattccatagtccttaagctttaga

SEQ ID NO: 931968 - DNA, 25 bp, Homo sapien
cctgaaacttcaatgagatccattc

SEQ ID NO: 931969 - DNA, 25 bp, Homo sapien
ccattgcctgaaacttcaatgagat

SEQ ID NO: 931970 - DNA, 25 bp, Homo sapien
tagttgtaaagaccgttgcactttg

SEQ ID NO: 931971 - DNA, 25 bp, Homo sapien
aggagaacgggggccgggcgcagtg

SEQ ID NO: 931972 - DNA, 25 bp, Homo sapien
acgggggccgggcgcagtggttcat

SEQ ID NO: 931973 - DNA, 25 bp, Homo sapien
cgggggccgggcgcagtggttcatg

SEQ ID NO: 931974 - DNA, 25 bp, Homo sapien
gggggccgggcgcagtggttcatgc

SEQ ID NO: 931975 - DNA, 25 bp, Homo sapien
gtttcctactatcttcttcaccgca

SEQ ID NO: 931976 - DNA, 25 bp, Homo sapien
ctgtttcctactatcttcttcaccg

SEQ ID NO: 931977 - DNA, 25 bp, Homo sapien
tttcctactatcttcttcaccgcag

SEQ ID NO: 931978 - DNA, 25 bp, Homo sapien
tcctactatcttcttcaccgcagtg

SEQ ID NO: 931979 - DNA, 25 bp, Homo sapien
aaatctttggcaataatggtgtctt

SEQ ID NO: 931980 - DNA, 25 bp, Homo sapien
tctttggcaataatggtgtcttctt

SEQ ID NO: 931981 - DNA, 25 bp, Homo sapien
tctctcaaattaccaaaatctttgg

SEQ ID NO: 931982 - DNA, 25 bp, Homo sapien
tttggcaataatggtgtcttctttc

SEQ ID NO: 931983 - DNA, 25 bp, Homo sapien
ggcttaatcccattccctggccgag

SEQ ID NO: 931984 - DNA, 25 bp, Homo sapien
tgcattttctcaagagagcacccgt

SEQ ID NO: 931985 - DNA, 25 bp, Homo sapien
cattgctagtacgtcgggtgctgga

SEQ ID NO: 931986 - DNA, 25 bp, Homo sapien
gcttggcggatccatgggtgggtga

SEQ ID NO: 931987 - DNA, 25 bp, Homo sapien
tcactcccggtctccaggttctctt

SEQ ID NO: 931988 - DNA, 25 bp, Homo sapien
cactcccggtctccaggttctcttc

SEQ ID NO: 931989 - DNA, 25 bp, Homo sapien
tgtcttgggacctgaacttggcctg

SEQ ID NO: 931990 - DNA, 25 bp, Homo sapien
tcaaggcctgacaacaagactgcta

SEQ ID NO: 931991 - DNA, 25 bp, Homo sapien
cagatcttgggagcgatggaacgcc

SEQ ID NO: 931992 - DNA, 25 bp, Homo sapien
gaagccgagcgccatattgtgaaga

SEQ ID NO: 931993 - DNA, 25 bp, Homo sapien
actcaggaagtggcgtcaaaaatcc

SEQ ID NO: 931994 - DNA, 25 bp, Homo sapien
tcaggaagtggcgtcaaaaatccca

SEQ ID NO: 931995 - DNA, 25 bp, Homo sapien
ggaagtggcgtcaaaaatcccattg

SEQ ID NO: 931996 - DNA, 25 bp, Homo sapien
cattggccaggcggggtatctcatg

SEQ ID NO: 931997 - DNA, 25 bp, Homo sapien
tgcactccagcctgtctcaaaaaaa

SEQ ID NO: 931998 - DNA, 25 bp, Homo sapien
ctgcactccagcctgtctcaaaaaa

SEQ ID NO: 931999 - DNA, 25 bp, Homo sapien
tatatggtggctcaaatgtgcccgc

SEQ ID NO: 932000 - DNA, 25 bp, Homo sapien
gaagctgcctgcgtaaaaagtgcca

SEQ ID NO: 932001 - DNA, 25 bp, Homo sapien
taaggagttccatgcaactgcggat

SEQ ID NO: 932002 - DNA, 25 bp, Homo sapien
gaagatcaccaaatagtgccctggg

SEQ ID NO: 932003 - DNA, 25 bp, Homo sapien
agcggctccagcgtcttgtaacaga

SEQ ID NO: 932004 - DNA, 25 bp, Homo sapien
gcttcccttcagaagagagggccca

SEQ ID NO: 932005 - DNA, 25 bp, Homo sapien
cctccggtgctcagatagaactaca

SEQ ID NO: 932006 - DNA, 25 bp, Homo sapien
gcctgagcaatgttacgaaatcccg

SEQ ID NO: 932007 - DNA, 25 bp, Homo sapien
gtgggacaccacctaagaaacctca

SEQ ID NO: 932008 - DNA, 25 bp, Homo sapien
gcctcctgggtcaagtactcatgaa

SEQ ID NO: 932009 - DNA, 25 bp, Homo sapien
gcttagtgacacagagcctccaggc

SEQ ID NO: 932010 - DNA, 25 bp, Homo sapien
tattaaggctcagttaagctgcctc

SEQ ID NO: 932011 - DNA, 25 bp, Homo sapien
gggccctcttggcagtcttgctggg

SEQ ID NO: 932012 - DNA, 25 bp, Homo sapien
ggcagtcttgctgggagtcgggccc

SEQ ID NO: 932013 - DNA, 25 bp, Homo sapien
gcccaagtcgggtccagggagagcc

SEQ ID NO: 932014 - DNA, 25 bp, Homo sapien
caaggactgagtgcttgtgggggag

SEQ ID NO: 932015 - DNA, 25 bp, Homo sapien
tgtggttggcaggcgaggtacaggg

SEQ ID NO: 932016 - DNA, 25 bp, Homo sapien
cccgatgacctgagggggccacgct

SEQ ID NO: 932017 - DNA, 25 bp, Homo sapien
agccccgatgacctgagggggccac

SEQ ID NO: 932018 - DNA, 25 bp, Homo sapien
ggcaggcgaggtacagggggagtct

SEQ ID NO: 932019 - DNA, 25 bp, Homo sapien
ggcactgatgacaccattgatgttc

SEQ ID NO: 932020 - DNA, 25 bp, Homo sapien
cagggcactgatgacaccattgatg

SEQ ID NO: 932021 - DNA, 25 bp, Homo sapien
cttcagggcactgatgacaccattg

SEQ ID NO: 932022 - DNA, 25 bp, Homo sapien
ctgatgacaccattgatgttctctt

SEQ ID NO: 932023 - DNA, 25 bp, Homo sapien
atcaaacttgaaagtactgatgtag

SEQ ID NO: 932024 - DNA, 25 bp, Homo sapien
tcaaacttgaaagtactgatgtagt

SEQ ID NO: 932025 - DNA, 25 bp, Homo sapien
tgagatctgggccacgatgccacac

SEQ ID NO: 932026 - DNA, 25 bp, Homo sapien
agatctgggccacgatgccacactc

SEQ ID NO: 932027 - DNA, 25 bp, Homo sapien
ttgaaggcttaacccagatgtcccc

SEQ ID NO: 932028 - DNA, 25 bp, Homo sapien
ctggccatccctcttgaaggcttaa

SEQ ID NO: 932029 - DNA, 25 bp, Homo sapien
ggtatcgaactgctgtactcaaatg

SEQ ID NO: 932030 - DNA, 25 bp, Homo sapien
gcactggcgtgagctcacttcacta

SEQ ID NO: 932031 - DNA, 25 bp, Homo sapien
aacagaaatttcaggctccccaagc

SEQ ID NO: 932032 - DNA, 25 bp, Homo sapien
catattaaatttcaagagggggcaa

SEQ ID NO: 932033 - DNA, 25 bp, Homo sapien
taaaagcactccgattgaagcctgc

SEQ ID NO: 932034 - DNA, 25 bp, Homo sapien
tccccaagaggcctgtgtacagctg

SEQ ID NO: 932035 - DNA, 25 bp, Homo sapien
cagagctctccggatgcgcttgtga

SEQ ID NO: 932036 - DNA, 25 bp, Homo sapien
agctctccggatgcgcttgtgaaca

SEQ ID NO: 932037 - DNA, 25 bp, Homo sapien
caatccggaccatcttccagagctc

SEQ ID NO: 932038 - DNA, 25 bp, Homo sapien
caggggctgtcctccaatccggacc

SEQ ID NO: 932039 - DNA, 25 bp, Homo sapien
atccccagtggccatggggtccttc

SEQ ID NO: 932040 - DNA, 25 bp, Homo sapien
caccagggagatgtagccctcgatg

SEQ ID NO: 932041 - DNA, 25 bp, Homo sapien
tgctgcgtctgcacgtccatcacca

SEQ ID NO: 932042 - DNA, 25 bp, Homo sapien
gagaagaagcggatgtggccgcagt

SEQ ID NO: 932043 - DNA, 25 bp, Homo sapien
tgacacagaacctgttgctcgggct

SEQ ID NO: 932044 - DNA, 25 bp, Homo sapien
gtgacacagaacctgttgctcgggc

SEQ ID NO: 932045 - DNA, 25 bp, Homo sapien
tcggctgccacggtctcgccattga

SEQ ID NO: 932046 - DNA, 25 bp, Homo sapien
tgacgacccgcaggatggtgaactc

SEQ ID NO: 932047 - DNA, 25 bp, Homo sapien
ggtctcgccattgacgacccgcagg

SEQ ID NO: 932048 - DNA, 25 bp, Homo sapien
cgccattgacgacccgcaggatggt

SEQ ID NO: 932049 - DNA, 25 bp, Homo sapien
cggatatgttctggtcagccagtgg

SEQ ID NO: 932050 - DNA, 25 bp, Homo sapien
caggatgaagtctgtctgatacgtg

SEQ ID NO: 932051 - DNA, 25 bp, Homo sapien
cgtggacagcatgaacacggatatg

SEQ ID NO: 932052 - DNA, 25 bp, Homo sapien
gatgactgacttggcgatcttggtc

SEQ ID NO: 932053 - DNA, 25 bp, Homo sapien
ctgagaaggaccagtggtcagccag

SEQ ID NO: 932054 - DNA, 25 bp, Homo sapien
tgagaaggaccagtggtcagccagt

SEQ ID NO: 932055 - DNA, 25 bp, Homo sapien
gaggcctgtctcttatcaaagccgc

SEQ ID NO: 932056 - DNA, 25 bp, Homo sapien
ggtgctgacataaccaagactctgc

SEQ ID NO: 932057 - DNA, 25 bp, Homo sapien
cagcggaagcggctgctgatatagc

SEQ ID NO: 932058 - DNA, 25 bp, Homo sapien
gatatagcctccgaggtggtgaagt

SEQ ID NO: 932059 - DNA, 25 bp, Homo sapien
cttggggagaagcccaggcctgaga

SEQ ID NO: 932060 - DNA, 25 bp, Homo sapien
ttggggagaagcccaggcctgagac

SEQ ID NO: 932061 - DNA, 25 bp, Homo sapien
tggggagaagcccaggcctgagacc

SEQ ID NO: 932062 - DNA, 25 bp, Homo sapien
catgccttgccatgcgtggcatgga

SEQ ID NO: 932063 - DNA, 25 bp, Homo sapien
cctgaccatgccttgccatgcgtgg

SEQ ID NO: 932064 - DNA, 25 bp, Homo sapien
gcgtggcatggaccacaatgatgta

SEQ ID NO: 932065 - DNA, 25 bp, Homo sapien
cacaatgatgtaccgctgtccccag

SEQ ID NO: 932066 - DNA, 25 bp, Homo sapien
ccacacatggtggtataccatcttc

SEQ ID NO: 932067 - DNA, 25 bp, Homo sapien
gagagtcttctcagactgtcctagg

SEQ ID NO: 932068 - DNA, 25 bp, Homo sapien
ctcagactgtcctaggccacacatg

SEQ ID NO: 932069 - DNA, 25 bp, Homo sapien
tagcctcatactgcagcccctaggc

SEQ ID NO: 932070 - DNA, 25 bp, Homo sapien
aagatgttctaaagcactttgtagg

SEQ ID NO: 932071 - DNA, 25 bp, Homo sapien
cactgcgcccgactgaagatgttct

SEQ ID NO: 932072 - DNA, 25 bp, Homo sapien
cccacagtgttgagactaaaagcgt

SEQ ID NO: 932073 - DNA, 25 bp, Homo sapien
gcactttgtaggtttcagtgaaaca

SEQ ID NO: 932074 - DNA, 25 bp, Homo sapien
cctcatcgacaatgatagtgtaatc

SEQ ID NO: 932075 - DNA, 25 bp, Homo sapien
tccttcctcatcgacaatgatagtg

SEQ ID NO: 932076 - DNA, 25 bp, Homo sapien
cgacaatgatagtgtaatcctctgg

SEQ ID NO: 932077 - DNA, 25 bp, Homo sapien
taggaatccttcctcatcgacaatg

SEQ ID NO: 932078 - DNA, 25 bp, Homo sapien
gcccagcccgatgacgtcttccctc

SEQ ID NO: 932079 - DNA, 25 bp, Homo sapien
tgagcccagcccgatgacgtcttcc

SEQ ID NO: 932080 - DNA, 25 bp, Homo sapien
agcccagcccgatgacgtcttccct

SEQ ID NO: 932081 - DNA, 25 bp, Homo sapien
ccagcccgatgacgtcttccctcat

SEQ ID NO: 932082 - DNA, 25 bp, Homo sapien
agtttaccaccagttcaccagcaaa

SEQ ID NO: 932083 - DNA, 25 bp, Homo sapien
tgtggcacagtttaccaccagttca

SEQ ID NO: 932084 - DNA, 25 bp, Homo sapien
gcacagtttaccaccagttcaccag

SEQ ID NO: 932085 - DNA, 25 bp, Homo sapien
tctgtggcacagtttaccaccagtt

SEQ ID NO: 932086 - DNA, 25 bp, Homo sapien
taaaaaaatcttgaggccgggcaca

SEQ ID NO: 932087 - DNA, 25 bp, Homo sapien
ccaccataccaggctgatttaaaaa

SEQ ID NO: 932088 - DNA, 25 bp, Homo sapien
ttaagaaacagtgtcccactctttc

SEQ ID NO: 932089 - DNA, 25 bp, Homo sapien
gcaccaccataccaggctgatttaa

SEQ ID NO: 932090 - DNA, 25 bp, Homo sapien
taaaagcaggatcaataagtacgtc

SEQ ID NO: 932091 - DNA, 25 bp, Homo sapien
tcagaagatcgcaggctgccaggta

SEQ ID NO: 932092 - DNA, 25 bp, Homo sapien
ggctgaatgccctaatattctacag

SEQ ID NO: 932093 - DNA, 25 bp, Homo sapien
tacgtcacgaaccaaaaattctgag

SEQ ID NO: 932094 - DNA, 25 bp, Homo sapien
gggtcagttgcttctatcagtctca

SEQ ID NO: 932095 - DNA, 25 bp, Homo sapien
catttccagcccgacgatggtacta

SEQ ID NO: 932096 - DNA, 25 bp, Homo sapien
tggcctactgaacgcaaagtctgag

SEQ ID NO: 932097 - DNA, 25 bp, Homo sapien
cagaaactgagcgaaaacccaagta

SEQ ID NO: 932098 - DNA, 25 bp, Homo sapien
tgcaatccattggaaggcttgcctg

SEQ ID NO: 932099 - DNA, 25 bp, Homo sapien
taggaatttaggtgtggctgaactt

SEQ ID NO: 932100 - DNA, 25 bp, Homo sapien
acttggcagttcaaggcattggctg

SEQ ID NO: 932101 - DNA, 25 bp, Homo sapien
cagttcctatgggttaggaatttag

SEQ ID NO: 932102 - DNA, 25 bp, Homo sapien
ggcagcaatgagcatttgagccgcc

SEQ ID NO: 932103 - DNA, 25 bp, Homo sapien
atggggcagcaatgagcatttgagc

SEQ ID NO: 932104 - DNA, 25 bp, Homo sapien
cctccaggcgtttgctcctccagcc

SEQ ID NO: 932105 - DNA, 25 bp, Homo sapien
tttcagcctccaggcgtttgctcct

SEQ ID NO: 932106 - DNA, 25 bp, Homo sapien
taagacgttagtgttcactggccgg

SEQ ID NO: 932107 - DNA, 25 bp, Homo sapien
tgtgtgtagtcttctaagcctgggc

SEQ ID NO: 932108 - DNA, 25 bp, Homo sapien
taaactgcaattagacagtggcctc

SEQ ID NO: 932109 - DNA, 25 bp, Homo sapien
tcagcccaatgtgttgcgaggaatg

SEQ ID NO: 932110 - DNA, 25 bp, Homo sapien
tccatgggcccatgcttactgcata

SEQ ID NO: 932111 - DNA, 25 bp, Homo sapien
gcccatgcttactgcatacttgcct

SEQ ID NO: 932112 - DNA, 25 bp, Homo sapien
tgggcccatgcttactgcatacttg

SEQ ID NO: 932113 - DNA, 25 bp, Homo sapien
catgggcccatgcttactgcatact

SEQ ID NO: 932114 - DNA, 25 bp, Homo sapien
tagacagaagggctggacataacca

SEQ ID NO: 932115 - DNA, 25 bp, Homo sapien
tttaaatgttatgtccgcacgcacc

SEQ ID NO: 932116 - DNA, 25 bp, Homo sapien
gcagattggcacatttaaatcccgg

SEQ ID NO: 932117 - DNA, 25 bp, Homo sapien
caaaatctcagagcttgtgccagaa

SEQ ID NO: 932118 - DNA, 25 bp, Homo sapien
ctgggcctgggacaggacaggctgc

SEQ ID NO: 932119 - DNA, 25 bp, Homo sapien
tgggcctgggacaggacaggctgct

SEQ ID NO: 932120 - DNA, 25 bp, Homo sapien
ggcctgggacaggacaggctgcttt

SEQ ID NO: 932121 - DNA, 25 bp, Homo sapien
gggcctgggacaggacaggctgctt

SEQ ID NO: 932122 - DNA, 25 bp, Homo sapien
gaacttttcacaggcagataacagg

SEQ ID NO: 932123 - DNA, 25 bp, Homo sapien
taaacaagatgccaccggcaggtct

SEQ ID NO: 932124 - DNA, 25 bp, Homo sapien
tgtgtccctagagctcagtgccaaa

SEQ ID NO: 932125 - DNA, 25 bp, Homo sapien
aaacaatagccggactgagcacccg

SEQ ID NO: 932126 - DNA, 25 bp, Homo sapien
gctggcaacttgcagccggtgctcc

SEQ ID NO: 932127 - DNA, 25 bp, Homo sapien
gacgctggcaacttgcagccggtgc

SEQ ID NO: 932128 - DNA, 25 bp, Homo sapien
tggcgacgctggcaacttgcagccg

SEQ ID NO: 932129 - DNA, 25 bp, Homo sapien
gcgacgctggcaacttgcagccggt

SEQ ID NO: 932130 - DNA, 25 bp, Homo sapien
gccaagttgcaagggggagccgcgg

SEQ ID NO: 932131 - DNA, 25 bp, Homo sapien
aagggaggaggcccgccaagttgca

SEQ ID NO: 932132 - DNA, 25 bp, Homo sapien
ccgaggggccgagcggcggagcagc

SEQ ID NO: 932133 - DNA, 25 bp, Homo sapien
gagcagcagccgaggggccgagcgg

SEQ ID NO: 932134 - DNA, 25 bp, Homo sapien
tacacaatctcaactccacaaaggc

SEQ ID NO: 932135 - DNA, 25 bp, Homo sapien
tctgttctccgctgtgttcccattg

SEQ ID NO: 932136 - DNA, 25 bp, Homo sapien
gtgactggcctatgagagacactca

SEQ ID NO: 932137 - DNA, 25 bp, Homo sapien
gaatctagagatccagaaatcccaa

SEQ ID NO: 932138 - DNA, 25 bp, Homo sapien
catgtgacagttagtagtaatgtct

SEQ ID NO: 932139 - DNA, 25 bp, Homo sapien
gtgacaccatgtgacagttagtagt

SEQ ID NO: 932140 - DNA, 25 bp, Homo sapien
tcccatccgtgacaccatgtgacag

SEQ ID NO: 932141 - DNA, 25 bp, Homo sapien
cccatccgtgacaccatgtgacagt

SEQ ID NO: 932142 - DNA, 25 bp, Homo sapien
aattaggcccatggtcaatgttagc

SEQ ID NO: 932143 - DNA, 25 bp, Homo sapien
cccttataccagttgcttagctcca

SEQ ID NO: 932144 - DNA, 25 bp, Homo sapien
catgaagttgaaatggtccgattcc

SEQ ID NO: 932145 - DNA, 25 bp, Homo sapien
tggcctaaatggattacccacccca

SEQ ID NO: 932146 - DNA, 25 bp, Homo sapien
aggtgcacgtggacccagctttcct

SEQ ID NO: 932147 - DNA, 25 bp, Homo sapien
aacacctatgagtcagatcagtgag

SEQ ID NO: 932148 - DNA, 25 bp, Homo sapien
tcagatcagtgagggaacactaggc

SEQ ID NO: 932149 - DNA, 25 bp, Homo sapien
aggttaggaggaaaggtgcacgtgg

SEQ ID NO: 932150 - DNA, 25 bp, Homo sapien
aacaaatggtgttgcagctgggcat

SEQ ID NO: 932151 - DNA, 25 bp, Homo sapien
gatattggaataactagtcgtgcat

SEQ ID NO: 932152 - DNA, 25 bp, Homo sapien
cagggtcagctggtttttacaaaat

SEQ ID NO: 932153 - DNA, 25 bp, Homo sapien
ctattcagcctggttgacggaggaa

SEQ ID NO: 932154 - DNA, 25 bp, Homo sapien
taagacttgactacaatagggcagt

SEQ ID NO: 932155 - DNA, 25 bp, Homo sapien
ttgtagctcaataaaccagactgga

SEQ ID NO: 932156 - DNA, 25 bp, Homo sapien
tctgccagactcacaaaactgtaca

SEQ ID NO: 932157 - DNA, 25 bp, Homo sapien
gattgtgatgatgtctacctaaagg

SEQ ID NO: 932158 - DNA, 25 bp, Homo sapien
gacactctaccagcatgtgtcagaa

SEQ ID NO: 932159 - DNA, 25 bp, Homo sapien
tctatagcactagtgctggaatctc

SEQ ID NO: 932160 - DNA, 25 bp, Homo sapien
gggattatcagactttagcttttgc

SEQ ID NO: 932161 - DNA, 25 bp, Homo sapien
caagggcttataccaactgacactc

SEQ ID NO: 932162 - DNA, 25 bp, Homo sapien
gacttcaagagatcatttctcctca

SEQ ID NO: 932163 - DNA, 25 bp, Homo sapien
ggtgaaatgtcatttaggaacaggg

SEQ ID NO: 932164 - DNA, 25 bp, Homo sapien
cattgagatctgaagggtggtgaaa

SEQ ID NO: 932165 - DNA, 25 bp, Homo sapien
ggctaaggtttctgtcaaaagtgac

SEQ ID NO: 932166 - DNA, 25 bp, Homo sapien
gttgttggaaggcatactgatagca

SEQ ID NO: 932167 - DNA, 25 bp, Homo sapien
cacatttgacactccctggtagata

SEQ ID NO: 932168 - DNA, 25 bp, Homo sapien
aaaagtgacaatgggctggacaccg

SEQ ID NO: 932169 - DNA, 25 bp, Homo sapien
taatgcccaccctatagagttgttg

SEQ ID NO: 932170 - DNA, 25 bp, Homo sapien
tgcactcttgcctgggtgatgacag

SEQ ID NO: 932171 - DNA, 25 bp, Homo sapien
gcactcttgcctgggtgatgacagc

SEQ ID NO: 932172 - DNA, 25 bp, Homo sapien
actcttgcctgggtgatgacagcga

SEQ ID NO: 932173 - DNA, 25 bp, Homo sapien
tcttgcctgggtgatgacagcgaaa

SEQ ID NO: 932174 - DNA, 25 bp, Homo sapien
caggatgtagagagagtggaagagg

SEQ ID NO: 932175 - DNA, 25 bp, Homo sapien
gcatcaggatgtagagagagtggaa

SEQ ID NO: 932176 - DNA, 25 bp, Homo sapien
aattgtgcatcaggatgtagagaga

SEQ ID NO: 932177 - DNA, 25 bp, Homo sapien
ttgtgcatcaggatgtagagagagt

SEQ ID NO: 932178 - DNA, 25 bp, Homo sapien
cacccagtatcttatagaatatcca

SEQ ID NO: 932179 - DNA, 25 bp, Homo sapien
tagtctttttgtacacccagtatct

SEQ ID NO: 932180 - DNA, 25 bp, Homo sapien
tatagagtttcttagccaaactgga

SEQ ID NO: 932181 - DNA, 25 bp, Homo sapien
aaccatttccttcaatggtataaat

SEQ ID NO: 932182 - DNA, 25 bp, Homo sapien
ggagaccccaacacgcttcaagctt

SEQ ID NO: 932183 - DNA, 25 bp, Homo sapien
aggagaccccaacacgcttcaagct

SEQ ID NO: 932184 - DNA, 25 bp, Homo sapien
gagggaccggactctgtcggcacct

SEQ ID NO: 932185 - DNA, 25 bp, Homo sapien
ttacagacgtcagcactgtgtctga

SEQ ID NO: 932186 - DNA, 25 bp, Homo sapien
gtcagcactgtgtctgaccagctcc

SEQ ID NO: 932187 - DNA, 25 bp, Homo sapien
cagacgtcagcactgtgtctgacca

SEQ ID NO: 932188 - DNA, 25 bp, Homo sapien
gcactgtgtctgaccagctcccatg

SEQ ID NO: 932189 - DNA, 25 bp, Homo sapien
ggctcgccatcttggtgtttcctgg

SEQ ID NO: 932190 - DNA, 25 bp, Homo sapien
tgtctgggtgtcccgcacacatgtg

SEQ ID NO: 932191 - DNA, 25 bp, Homo sapien
actggctcgccatcttggtgtttcc

SEQ ID NO: 932192 - DNA, 25 bp, Homo sapien
tggctcgccatcttggtgtttcctg

SEQ ID NO: 932193 - DNA, 25 bp, Homo sapien
gtgatgccttccctcgtcttccaac

SEQ ID NO: 932194 - DNA, 25 bp, Homo sapien
gcatgcccgtagctctccagttaca

SEQ ID NO: 932195 - DNA, 25 bp, Homo sapien
gtcttccaacttctgcatgcccgta

SEQ ID NO: 932196 - DNA, 25 bp, Homo sapien
ttctgcatgcccgtagctctccagt

SEQ ID NO: 932197 - DNA, 25 bp, Homo sapien
cctcctgaggaaggcgtggctctct

SEQ ID NO: 932198 - DNA, 25 bp, Homo sapien
caagagtgttgctgtgtctctcagg

SEQ ID NO: 932199 - DNA, 25 bp, Homo sapien
ttatttatcaagacaagagtgttgc

SEQ ID NO: 932200 - DNA, 25 bp, Homo sapien
aaggagtgggagacgcccttgatca

SEQ ID NO: 932201 - DNA, 25 bp, Homo sapien
attagccaggcgatgtgggaggcat

SEQ ID NO: 932202 - DNA, 25 bp, Homo sapien
tatgccgttacatgaacccgagggc

SEQ ID NO: 932203 - DNA, 25 bp, Homo sapien
ctcagatagccttgttccggaagta

SEQ ID NO: 932204 - DNA, 25 bp, Homo sapien
tcatatacccttgctcagtgagctt

SEQ ID NO: 932205 - DNA, 25 bp, Homo sapien
gaactctagctagacttgacatggg

SEQ ID NO: 932206 - DNA, 25 bp, Homo sapien
caattgctctgaactctagctagac

SEQ ID NO: 932207 - DNA, 25 bp, Homo sapien
ctcaattgctctgaactctagctag

SEQ ID NO: 932208 - DNA, 25 bp, Homo sapien
tgctctgaactctagctagacttga

SEQ ID NO: 932209 - DNA, 25 bp, Homo sapien
tttgtgcagatcatctagaagaacc

SEQ ID NO: 932210 - DNA, 25 bp, Homo sapien
atttgtgcagatcatctagaagaac

SEQ ID NO: 932211 - DNA, 25 bp, Homo sapien
ccatttgtgcagatcatctagaaga

SEQ ID NO: 932212 - DNA, 25 bp, Homo sapien
catttgtgcagatcatctagaagaa

SEQ ID NO: 932213 - DNA, 25 bp, Homo sapien
ttctagagtttcaataacagagatg

SEQ ID NO: 932214 - DNA, 25 bp, Homo sapien
acttctagagtttcaataacagaga

SEQ ID NO: 932215 - DNA, 25 bp, Homo sapien
ctagagtttcaataacagagatgtg

SEQ ID NO: 932216 - DNA, 25 bp, Homo sapien
gacttctagagtttcaataacagag

SEQ ID NO: 932217 - DNA, 25 bp, Homo sapien
acagacagaaatatcggcattgaca

SEQ ID NO: 932218 - DNA, 25 bp, Homo sapien
tatcggcattgacacgggccatgga

SEQ ID NO: 932219 - DNA, 25 bp, Homo sapien
cacgggccatggagaggcctaaaca

SEQ ID NO: 932220 - DNA, 25 bp, Homo sapien
ttgacacgggccatggagaggccta

SEQ ID NO: 932221 - DNA, 25 bp, Homo sapien
tggggagccctcaagaaactgacaa

SEQ ID NO: 932222 - DNA, 25 bp, Homo sapien
gagccctcaagaaactgacaatcac

SEQ ID NO: 932223 - DNA, 25 bp, Homo sapien
ggggagccctcaagaaactgacaat

SEQ ID NO: 932224 - DNA, 25 bp, Homo sapien
ccctcaagaaactgacaatcacggc

SEQ ID NO: 932225 - DNA, 25 bp, Homo sapien
agcaggaggtgctgcatgcttctaa

SEQ ID NO: 932226 - DNA, 25 bp, Homo sapien
ggaggtgctgcatgcttctaaacaa

SEQ ID NO: 932227 - DNA, 25 bp, Homo sapien
gcaggaggtgctgcatgcttctaaa

SEQ ID NO: 932228 - DNA, 25 bp, Homo sapien
ggtgctgcatgcttctaaacaacca

SEQ ID NO: 932229 - DNA, 25 bp, Homo sapien
ttccttatggcgcacaggtagcgta

SEQ ID NO: 932230 - DNA, 25 bp, Homo sapien
cgtagaaaataactgcttcacgctg

SEQ ID NO: 932231 - DNA, 25 bp, Homo sapien
tcgccgatacgtggcaggtagaaat

SEQ ID NO: 932232 - DNA, 25 bp, Homo sapien
tcgtgatcaaacaccagtcgagtcc

SEQ ID NO: 932233 - DNA, 25 bp, Homo sapien
atgttgggcactgactactcttttc

SEQ ID NO: 932234 - DNA, 25 bp, Homo sapien
gatgttgggcactgactactctttt

SEQ ID NO: 932235 - DNA, 25 bp, Homo sapien
tgatgttgggcactgactactcttt

SEQ ID NO: 932236 - DNA, 25 bp, Homo sapien
tgttgggcactgactactcttttct

SEQ ID NO: 932237 - DNA, 25 bp, Homo sapien
cggcaaactctcgaatcttagatgt

SEQ ID NO: 932238 - DNA, 25 bp, Homo sapien
aggtcggcaaactctcgaatcttag

SEQ ID NO: 932239 - DNA, 25 bp, Homo sapien
gagttaggtcggcaaactctcgaat

SEQ ID NO: 932240 - DNA, 25 bp, Homo sapien
cccgagttaggtcggcaaactctcg

SEQ ID NO: 932241 - DNA, 25 bp, Homo sapien
cctgaaacttcaatgagatccattc

SEQ ID NO: 932242 - DNA, 25 bp, Homo sapien
cattccatagtccttaagctttaga

SEQ ID NO: 932243 - DNA, 25 bp, Homo sapien
cacatccattgcctgaaacttcaat

SEQ ID NO: 932244 - DNA, 25 bp, Homo sapien
ccattgcctgaaacttcaatgagat

SEQ ID NO: 932245 - DNA, 25 bp, Homo sapien
tagttgtaaagaccgttgcactttg

SEQ ID NO: 932246 - DNA, 25 bp, Homo sapien
cgggggccgggcgcagtggttcatg

SEQ ID NO: 932247 - DNA, 25 bp, Homo sapien
acgggggccgggcgcagtggttcat

SEQ ID NO: 932248 - DNA, 25 bp, Homo sapien
aggagaacgggggccgggcgcagtg

SEQ ID NO: 932249 - DNA, 25 bp, Homo sapien
gggggccgggcgcagtggttcatgc

SEQ ID NO: 932250 - DNA, 25 bp, Homo sapien
gtttcctactatcttcttcaccgca

SEQ ID NO: 932251 - DNA, 25 bp, Homo sapien
tttcctactatcttcttcaccgcag

SEQ ID NO: 932252 - DNA, 25 bp, Homo sapien
ctgtttcctactatcttcttcaccg

SEQ ID NO: 932253 - DNA, 25 bp, Homo sapien
tcctactatcttcttcaccgcagtg

SEQ ID NO: 932254 - DNA, 25 bp, Homo sapien
gaaatcagttacaagaaacaaagca

SEQ ID NO: 932255 - DNA, 25 bp, Homo sapien
aatcagttacaagaaacaaagcagg

SEQ ID NO: 932256 - DNA, 25 bp, Homo sapien
aagaaatcagttacaagaaacaaag

SEQ ID NO: 932257 - DNA, 25 bp, Homo sapien
ctaaagaaatcagttacaagaaaca

SEQ ID NO: 932258 - DNA, 25 bp, Homo sapien
aaatctttggcaataatggtgtctt

SEQ ID NO: 932259 - DNA, 25 bp, Homo sapien
tctttggcaataatggtgtcttctt

SEQ ID NO: 932260 - DNA, 25 bp, Homo sapien
tctctcaaattaccaaaatctttgg

SEQ ID NO: 932261 - DNA, 25 bp, Homo sapien
tttggcaataatggtgtcttctttc

SEQ ID NO: 932262 - DNA, 25 bp, Homo sapien
tatcccgtgtgttcattaacttagc

SEQ ID NO: 932263 - DNA, 25 bp, Homo sapien
gctcatccaaagaatgtatcccgtg

SEQ ID NO: 932264 - DNA, 25 bp, Homo sapien
gaatctcacctaagtctgtctacca

SEQ ID NO: 932265 - DNA, 25 bp, Homo sapien
tacagcatttaacacatcgtaggcc

SEQ ID NO: 932266 - DNA, 25 bp, Homo sapien
aaccatttccttcaatggtataaat

SEQ ID NO: 932267 - DNA, 25 bp, Homo sapien
cacccagtatcttatagaatatcca

SEQ ID NO: 932268 - DNA, 25 bp, Homo sapien
tagtctttttgtacacccagtatct

SEQ ID NO: 932269 - DNA, 25 bp, Homo sapien
tatagagtttcttagccaaactgga

SEQ ID NO: 932270 - DNA, 25 bp, Homo sapien
atgataatctcactcttgtaaggtt

SEQ ID NO: 932271 - DNA, 25 bp, Homo sapien
gataatctcactcttgtaaggtttc

SEQ ID NO: 932272 - DNA, 25 bp, Homo sapien
tgataatctcactcttgtaaggttt

SEQ ID NO: 932273 - DNA, 25 bp, Homo sapien
taatctcactcttgtaaggtttcat

SEQ ID NO: 932274 - DNA, 25 bp, Homo sapien
cacctgggagttcagttggacaaca

SEQ ID NO: 932275 - DNA, 25 bp, Homo sapien
gcacctgggagttcagttggacaac

SEQ ID NO: 932276 - DNA, 25 bp, Homo sapien
acctgggagttcagttggacaacag

SEQ ID NO: 932277 - DNA, 25 bp, Homo sapien
ggctcgccatcttggtgtttcctgg

SEQ ID NO: 932278 - DNA, 25 bp, Homo sapien
actggctcgccatcttggtgtttcc

SEQ ID NO: 932279 - DNA, 25 bp, Homo sapien
tgtctgggtgtcccgcacacatgtg

SEQ ID NO: 932280 - DNA, 25 bp, Homo sapien
tggctcgccatcttggtgtttcctg

SEQ ID NO: 932281 - DNA, 25 bp, Homo sapien
gtgatgccttccctcgtcttccaac

SEQ ID NO: 932282 - DNA, 25 bp, Homo sapien
gcatgcccgtagctctccagttaca

SEQ ID NO: 932283 - DNA, 25 bp, Homo sapien
gtcttccaacttctgcatgcccgta

SEQ ID NO: 932284 - DNA, 25 bp, Homo sapien
ttctgcatgcccgtagctctccagt

SEQ ID NO: 932285 - DNA, 25 bp, Homo sapien
ccacacctggacagttatttattta

SEQ ID NO: 932286 - DNA, 25 bp, Homo sapien
aaggagtgggagacgcccttgatca

SEQ ID NO: 932287 - DNA, 25 bp, Homo sapien
caagagtgttgctgtgtctctcagg

SEQ ID NO: 932288 - DNA, 25 bp, Homo sapien
ttatttatcaagacaagagtgttgc

SEQ ID NO: 932289 - DNA, 25 bp, Homo sapien
agatagccttgttccggaagtatcg

SEQ ID NO: 932290 - DNA, 25 bp, Homo sapien
gatagccttgttccggaagtatcgg

SEQ ID NO: 932291 - DNA, 25 bp, Homo sapien
tccaatgctaatggcagacatcagg

SEQ ID NO: 932292 - DNA, 25 bp, Homo sapien
ggtgcagatcatctagaagaacctg

SEQ ID NO: 932293 - DNA, 25 bp, Homo sapien
aggagaggaaccattggtgcagatc

SEQ ID NO: 932294 - DNA, 25 bp, Homo sapien
ttattccaatgctaatggcagacat

SEQ ID NO: 932295 - DNA, 25 bp, Homo sapien
gatgtgtagctgtctacctacagga

SEQ ID NO: 932296 - DNA, 25 bp, Homo sapien
tatcggcattgacacgggccatgga

SEQ ID NO: 932297 - DNA, 25 bp, Homo sapien
gatggccgggaaaatctgcattcac

SEQ ID NO: 932298 - DNA, 25 bp, Homo sapien
gtgcctggctgacttctagagtttc

SEQ ID NO: 932299 - DNA, 25 bp, Homo sapien
cagtccactgccaaggtcatcaaag

SEQ ID NO: 932300 - DNA, 25 bp, Homo sapien
gactgcagtccactgccaaggtcat

SEQ ID NO: 932301 - DNA, 25 bp, Homo sapien
acagatgactgcagtccactgccaa

SEQ ID NO: 932302 - DNA, 25 bp, Homo sapien
aaacagatgactgcagtccactgcc

SEQ ID NO: 932303 - DNA, 25 bp, Homo sapien
gagccctcaagaaactgacaatcac

SEQ ID NO: 932304 - DNA, 25 bp, Homo sapien
ggggagccctcaagaaactgacaat

SEQ ID NO: 932305 - DNA, 25 bp, Homo sapien
ccctcaagaaactgacaatcacggc

SEQ ID NO: 932306 - DNA, 25 bp, Homo sapien
tggggagccctcaagaaactgacaa

SEQ ID NO: 932307 - DNA, 25 bp, Homo sapien
agcaggaggtgctgcatgcttctaa

SEQ ID NO: 932308 - DNA, 25 bp, Homo sapien
ggtgctgcatgcttctaaacaacca

SEQ ID NO: 932309 - DNA, 25 bp, Homo sapien
gcaggaggtgctgcatgcttctaaa

SEQ ID NO: 932310 - DNA, 25 bp, Homo sapien
ggaggtgctgcatgcttctaaacaa

SEQ ID NO: 932311 - DNA, 25 bp, Homo sapien
tcgccgatacgtggcaggtagaaat

SEQ ID NO: 932312 - DNA, 25 bp, Homo sapien
tcgtgatcaaacaccagtcgagtcc

SEQ ID NO: 932313 - DNA, 25 bp, Homo sapien
cgtagaaaataactgcttcacgctg

SEQ ID NO: 932314 - DNA, 25 bp, Homo sapien
ttccttatggcgcacaggtagcgta

SEQ ID NO: 932315 - DNA, 25 bp, Homo sapien
tgtgagagaataccaggcatggtgt

SEQ ID NO: 932316 - DNA, 25 bp, Homo sapien
ctgtgagagaataccaggcatggtg

SEQ ID NO: 932317 - DNA, 25 bp, Homo sapien
gagttaggtcggcaaactctcgaat

SEQ ID NO: 932318 - DNA, 25 bp, Homo sapien
cccgagttaggtcggcaaactctcg

SEQ ID NO: 932319 - DNA, 25 bp, Homo sapien
aggtcggcaaactctcgaatcttag

SEQ ID NO: 932320 - DNA, 25 bp, Homo sapien
cggcaaactctcgaatcttagatgt

SEQ ID NO: 932321 - DNA, 25 bp, Homo sapien
cattccatagtccttaagctttaga

SEQ ID NO: 932322 - DNA, 25 bp, Homo sapien
cacatccattgcctgaaacttcaat

SEQ ID NO: 932323 - DNA, 25 bp, Homo sapien
cctgaaacttcaatgagatccattc

SEQ ID NO: 932324 - DNA, 25 bp, Homo sapien
ccattgcctgaaacttcaatgagat

SEQ ID NO: 932325 - DNA, 25 bp, Homo sapien
tagttgtaaagaccgttgcactttg

SEQ ID NO: 932326 - DNA, 25 bp, Homo sapien
aggagaacgggggccgggcgcagtg

SEQ ID NO: 932327 - DNA, 25 bp, Homo sapien
cgggggccgggcgcagtggttcatg

SEQ ID NO: 932328 - DNA, 25 bp, Homo sapien
acgggggccgggcgcagtggttcat

SEQ ID NO: 932329 - DNA, 25 bp, Homo sapien
gggggccgggcgcagtggttcatgc

SEQ ID NO: 932330 - DNA, 25 bp, Homo sapien
gtttcctactatcttcttcaccgca

SEQ ID NO: 932331 - DNA, 25 bp, Homo sapien
tcctactatcttcttcaccgcagtg

SEQ ID NO: 932332 - DNA, 25 bp, Homo sapien
tttcctactatcttcttcaccgcag

SEQ ID NO: 932333 - DNA, 25 bp, Homo sapien
ctgtttcctactatcttcttcaccg

SEQ ID NO: 932334 - DNA, 25 bp, Homo sapien
ctaaagaaatcagttacaagaaaca

SEQ ID NO: 932335 - DNA, 25 bp, Homo sapien
aatcagttacaagaaacaaagcagg

SEQ ID NO: 932336 - DNA, 25 bp, Homo sapien
aagaaatcagttacaagaaacaaag

SEQ ID NO: 932337 - DNA, 25 bp, Homo sapien
gaaatcagttacaagaaacaaagca

SEQ ID NO: 932338 - DNA, 25 bp, Homo sapien
aaatctttggcaataatggtgtctt

SEQ ID NO: 932339 - DNA, 25 bp, Homo sapien
tctctcaaattaccaaaatctttgg

SEQ ID NO: 932340 - DNA, 25 bp, Homo sapien
tctttggcaataatggtgtcttctt

SEQ ID NO: 932341 - DNA, 25 bp, Homo sapien
tttggcaataatggtgtcttctttc

SEQ ID NO: 932342 - DNA, 25 bp, Homo sapien
gaatctcacctaagtctgtctacca

SEQ ID NO: 932343 - DNA, 25 bp, Homo sapien
gctcatccaaagaatgtatcccgtg

SEQ ID NO: 932344 - DNA, 25 bp, Homo sapien
tacagcatttaacacatcgtaggcc

SEQ ID NO: 932345 - DNA, 25 bp, Homo sapien
tatcccgtgtgttcattaacttagc

SEQ ID NO: 932346 - DNA, 25 bp, Homo sapien
cacccagtatcttatagaatatcca

SEQ ID NO: 932347 - DNA, 25 bp, Homo sapien
aaccatttccttcaatggtataaat

SEQ ID NO: 932348 - DNA, 25 bp, Homo sapien
tagtctttttgtacacccagtatct

SEQ ID NO: 932349 - DNA, 25 bp, Homo sapien
tatagagtttcttagccaaactgga

SEQ ID NO: 932350 - DNA, 25 bp, Homo sapien
atgataatctcactcttgtaaggtt

SEQ ID NO: 932351 - DNA, 25 bp, Homo sapien
gataatctcactcttgtaaggtttc

SEQ ID NO: 932352 - DNA, 25 bp, Homo sapien
tgataatctcactcttgtaaggttt

SEQ ID NO: 932353 - DNA, 25 bp, Homo sapien
taatctcactcttgtaaggtttcat

SEQ ID NO: 932354 - DNA, 25 bp, Homo sapien
tgggaaagatcatgatgagccatca

SEQ ID NO: 932355 - DNA, 25 bp, Homo sapien
cccagcctcgagaattgataacaca

SEQ ID NO: 932356 - DNA, 25 bp, Homo sapien
cagaacagagactaggtttggtgag

SEQ ID NO: 932357 - DNA, 25 bp, Homo sapien
gatcccagcagtgtccagaagaaga

SEQ ID NO: 932358 - DNA, 25 bp, Homo sapien
tgtgactgtctcatgaggaaatgat

SEQ ID NO: 932359 - DNA, 25 bp, Homo sapien
agtggtccctccgtgtctgctggag

SEQ ID NO: 932360 - DNA, 25 bp, Homo sapien
gactgtctcatgaggaaatgatggg

SEQ ID NO: 932361 - DNA, 25 bp, Homo sapien
cctttatgactctgcagtggtccct

SEQ ID NO: 932362 - DNA, 25 bp, Homo sapien
gagggcagtgtctcgatcttgactc

SEQ ID NO: 932363 - DNA, 25 bp, Homo sapien
gccagattggtcccgaacacctgac

SEQ ID NO: 932364 - DNA, 25 bp, Homo sapien
ttggccagattggtcccgaacacct

SEQ ID NO: 932365 - DNA, 25 bp, Homo sapien
ttgactcactgcagctgatgcctcc

SEQ ID NO: 932366 - DNA, 25 bp, Homo sapien
ttacagacgtcagcactgtgtctga

SEQ ID NO: 932367 - DNA, 25 bp, Homo sapien
cagacgtcagcactgtgtctgacca

SEQ ID NO: 932368 - DNA, 25 bp, Homo sapien
actggctcgccatcttggtgtttcc

SEQ ID NO: 932369 - DNA, 25 bp, Homo sapien
tggctcgccatcttggtgtttcctg

SEQ ID NO: 932370 - DNA, 25 bp, Homo sapien
tgtctgggtgtcccgcacacatgtg

SEQ ID NO: 932371 - DNA, 25 bp, Homo sapien
ggctcgccatcttggtgtttcctgg

SEQ ID NO: 932372 - DNA, 25 bp, Homo sapien
ttatttatcaagacaagagtgttgc

SEQ ID NO: 932373 - DNA, 25 bp, Homo sapien
aaggagtgggagacgcccttgatca

SEQ ID NO: 932374 - DNA, 25 bp, Homo sapien
ccacacctggacagttatttattta

SEQ ID NO: 932375 - DNA, 25 bp, Homo sapien
caagagtgttgctgtgtctctcagg

SEQ ID NO: 932376 - DNA, 25 bp, Homo sapien
tctgagaagctgacctcagccggag

SEQ ID NO: 932377 - DNA, 25 bp, Homo sapien
tgcccctgagcagcaacctgatttc

SEQ ID NO: 932378 - DNA, 25 bp, Homo sapien
tctgtcctcagctatctggccaatg

SEQ ID NO: 932379 - DNA, 25 bp, Homo sapien
ggaggtctctcctggtggtgcccct

SEQ ID NO: 932380 - DNA, 25 bp, Homo sapien
agatagccttgttccggaagtatcg

SEQ ID NO: 932381 - DNA, 25 bp, Homo sapien
gatagccttgttccggaagtatcgg

SEQ ID NO: 932382 - DNA, 25 bp, Homo sapien
ttattccaatgctaatggcagacat

SEQ ID NO: 932383 - DNA, 25 bp, Homo sapien
tccaatgctaatggcagacatcagg

SEQ ID NO: 932384 - DNA, 25 bp, Homo sapien
aggagaggaaccattggtgcagatc

SEQ ID NO: 932385 - DNA, 25 bp, Homo sapien
ggtgcagatcatctagaagaacctg

SEQ ID NO: 932386 - DNA, 25 bp, Homo sapien
gatgtgtagctgtctacctacagga

SEQ ID NO: 932387 - DNA, 25 bp, Homo sapien
tatcggcattgacacgggccatgga

SEQ ID NO: 932388 - DNA, 25 bp, Homo sapien
gatggccgggaaaatctgcattcac

SEQ ID NO: 932389 - DNA, 25 bp, Homo sapien
gtgcctggctgacttctagagtttc

SEQ ID NO: 932390 - DNA, 25 bp, Homo sapien
ctggaaactggggaatttatgaaga

SEQ ID NO: 932391 - DNA, 25 bp, Homo sapien
ctactggaaactggggaatttatga

SEQ ID NO: 932392 - DNA, 25 bp, Homo sapien
tggaaactggggaatttatgaagaa

SEQ ID NO: 932393 - DNA, 25 bp, Homo sapien
tactggaaactggggaatttatgaa

SEQ ID NO: 932394 - DNA, 25 bp, Homo sapien
tggggagccctcaagaaactgacaa

SEQ ID NO: 932395 - DNA, 25 bp, Homo sapien
ggggagccctcaagaaactgacaat

SEQ ID NO: 932396 - DNA, 25 bp, Homo sapien
ccctcaagaaactgacaatcacggc

SEQ ID NO: 932397 - DNA, 25 bp, Homo sapien
gagccctcaagaaactgacaatcac

SEQ ID NO: 932398 - DNA, 25 bp, Homo sapien
cagagagagtgaagcaggaggtgct

SEQ ID NO: 932399 - DNA, 25 bp, Homo sapien
gagagtgaagcaggaggtgctgcat

SEQ ID NO: 932400 - DNA, 25 bp, Homo sapien
gagtgaagcaggaggtgctgcatgc

SEQ ID NO: 932401 - DNA, 25 bp, Homo sapien
gtgaagcaggaggtgctgcatgctt

SEQ ID NO: 932402 - DNA, 25 bp, Homo sapien
tcgccgatacgtggcaggtagaaat

SEQ ID NO: 932403 - DNA, 25 bp, Homo sapien
ttccttatggcgcacaggtagcgta

SEQ ID NO: 932404 - DNA, 25 bp, Homo sapien
tcgtgatcaaacaccagtcgagtcc

SEQ ID NO: 932405 - DNA, 25 bp, Homo sapien
cgtagaaaataactgcttcacgctg

SEQ ID NO: 932406 - DNA, 25 bp, Homo sapien
gatctaaacggttgaggagtcatca

SEQ ID NO: 932407 - DNA, 25 bp, Homo sapien
agatctaaacggttgaggagtcatc

SEQ ID NO: 932408 - DNA, 25 bp, Homo sapien
aactcttgaatcttagatgtgtgat

SEQ ID NO: 932409 - DNA, 25 bp, Homo sapien
tcagagctttcccccgaaagccaaa

SEQ ID NO: 932410 - DNA, 25 bp, Homo sapien
cccgagttaggtcggcaaactcttg

SEQ ID NO: 932411 - DNA, 25 bp, Homo sapien
cagtgcacaaagtgagctcagagct

SEQ ID NO: 932412 - DNA, 25 bp, Homo sapien
cattccatagtccttaagctttaga

SEQ ID NO: 932413 - DNA, 25 bp, Homo sapien
cctgaaacttcaatgagatccattc

SEQ ID NO: 932414 - DNA, 25 bp, Homo sapien
cacatccattgcctgaaacttcaat

SEQ ID NO: 932415 - DNA, 25 bp, Homo sapien
ccattgcctgaaacttcaatgagat

SEQ ID NO: 932416 - DNA, 25 bp, Homo sapien
tagttgtaaagaccgttgcactttg

SEQ ID NO: 932417 - DNA, 25 bp, Homo sapien
cgggggccgggcgcagtggttcatg

SEQ ID NO: 932418 - DNA, 25 bp, Homo sapien
acgggggccgggcgcagtggttcat

SEQ ID NO: 932419 - DNA, 25 bp, Homo sapien
aggagaacgggggccgggcgcagtg

SEQ ID NO: 932420 - DNA, 25 bp, Homo sapien
gggggccgggcgcagtggttcatgc

SEQ ID NO: 932421 - DNA, 25 bp, Homo sapien
gtttcctactatcttcttcaccgca

SEQ ID NO: 932422 - DNA, 25 bp, Homo sapien
tttcctactatcttcttcaccgcag

SEQ ID NO: 932423 - DNA, 25 bp, Homo sapien
ctgtttcctactatcttcttcaccg

SEQ ID NO: 932424 - DNA, 25 bp, Homo sapien
tcctactatcttcttcaccgcagtg

SEQ ID NO: 932425 - DNA, 25 bp, Homo sapien
aaatctttggcaataatggtgtctt

SEQ ID NO: 932426 - DNA, 25 bp, Homo sapien
tctttggcaataatggtgtcttctt

SEQ ID NO: 932427 - DNA, 25 bp, Homo sapien
tctctcaaattaccaaaatctttgg

SEQ ID NO: 932428 - DNA, 25 bp, Homo sapien
tttggcaataatggtgtcttctttc

SEQ ID NO: 932429 - DNA, 25 bp, Homo sapien
gatatttagatacagacggcaagtg

SEQ ID NO: 932430 - DNA, 25 bp, Homo sapien
gcgtttacaaatctgacatggaatt

SEQ ID NO: 932431 - DNA, 25 bp, Homo sapien
tcaactgtgctagccaagattcggt

SEQ ID NO: 932432 - DNA, 25 bp, Homo sapien
gattcggtgtagcttaccagccaga

SEQ ID NO: 932433 - DNA, 25 bp, Homo sapien
gagcagctacgcaaattaggatgtg

SEQ ID NO: 932434 - DNA, 25 bp, Homo sapien
tttttaaaactgagcagctacgcaa

SEQ ID NO: 932435 - DNA, 25 bp, Homo sapien
ggatgtgtctggacgctctactgtc

SEQ ID NO: 932436 - DNA, 25 bp, Homo sapien
cctaagaggtaaaaatgcattgcat

SEQ ID NO: 932437 - DNA, 25 bp, Homo sapien
gggcctccacgaggcggcctcccac

SEQ ID NO: 932438 - DNA, 25 bp, Homo sapien
acgaggcggcctcccacgcgcctcg

SEQ ID NO: 932439 - DNA, 25 bp, Homo sapien
tcggaagccgtggttctcaaagagg

SEQ ID NO: 932440 - DNA, 25 bp, Homo sapien
catttccagggaggtcggaagccgt

SEQ ID NO: 932441 - DNA, 25 bp, Homo sapien
ttttcgcctagtggctctgtcaaag

SEQ ID NO: 932442 - DNA, 25 bp, Homo sapien
gcctagtggctctgtcaaaggtcga

SEQ ID NO: 932443 - DNA, 25 bp, Homo sapien
tagtggctctgtcaaaggtcgagtc

SEQ ID NO: 932444 - DNA, 25 bp, Homo sapien
tctccttttcgcctagtggctctgt

SEQ ID NO: 932445 - DNA, 25 bp, Homo sapien
cgagcgttggtgtctggcggtttcc

SEQ ID NO: 932446 - DNA, 25 bp, Homo sapien
agcgttggtgtctggcggtttccga

SEQ ID NO: 932447 - DNA, 25 bp, Homo sapien
ttccgagcgttggtgtctggcggtt

SEQ ID NO: 932448 - DNA, 25 bp, Homo sapien
ccgagcgttggtgtctggcggtttc

SEQ ID NO: 932449 - DNA, 25 bp, Homo sapien
tcttgctttggttgcgccatgccga

SEQ ID NO: 932450 - DNA, 25 bp, Homo sapien
gtaaagccctatcaccgggtctgcg

SEQ ID NO: 932451 - DNA, 25 bp, Homo sapien
tgtaccaggtaaagccctatcaccg

SEQ ID NO: 932452 - DNA, 25 bp, Homo sapien
ttgcgccatgccgatgtaccaggta

SEQ ID NO: 932453 - DNA, 25 bp, Homo sapien
ttggcactggccacttgcaggtagg

SEQ ID NO: 932454 - DNA, 25 bp, Homo sapien
cggcggccgggtgctggcccgggtg

SEQ ID NO: 932455 - DNA, 25 bp, Homo sapien
gtgcccctaggccggatagagtgct

SEQ ID NO: 932456 - DNA, 25 bp, Homo sapien
agagtgcttcccaaccgattcgcgg

SEQ ID NO: 932457 - DNA, 25 bp, Homo sapien
catcatgagtactgctgtgatcctt

SEQ ID NO: 932458 - DNA, 25 bp, Homo sapien
ggcagccaaaggatccttctcatca

SEQ ID NO: 932459 - DNA, 25 bp, Homo sapien
ttttaagtatgaagacagctgttca

SEQ ID NO: 932460 - DNA, 25 bp, Homo sapien
tattgatggatggtaatgcaggtgc

SEQ ID NO: 932461 - DNA, 25 bp, Homo sapien
ctgatttatgtatttttttcgtaga

SEQ ID NO: 932462 - DNA, 25 bp, Homo sapien
gacagggttttgccatgttggccgg

SEQ ID NO: 932463 - DNA, 25 bp, Homo sapien
ggctgatttatgtatttttttcgta

SEQ ID NO: 932464 - DNA, 25 bp, Homo sapien
ctggctgatttatgtatttttttcg

SEQ ID NO: 932465 - DNA, 25 bp, Homo sapien
caagagcaatagctatgggcaccaa

SEQ ID NO: 932466 - DNA, 25 bp, Homo sapien
gaccatcataattgtcaggagaagg

SEQ ID NO: 932467 - DNA, 25 bp, Homo sapien
caagcagaagcatttagggattggc

SEQ ID NO: 932468 - DNA, 25 bp, Homo sapien
gtgcccggccttgactaccatattt

SEQ ID NO: 932469 - DNA, 25 bp, Homo sapien
gcttcccttaaatggcatatgtatc

SEQ ID NO: 932470 - DNA, 25 bp, Homo sapien
tgtgcttcccttaaatggcatatgt

SEQ ID NO: 932471 - DNA, 25 bp, Homo sapien
cttcccttaaatggcatatgtatct

SEQ ID NO: 932472 - DNA, 25 bp, Homo sapien
tcctgtgcttcccttaaatggcata

SEQ ID NO: 932473 - DNA, 25 bp, Homo sapien
atatatgcctgtaaactaaggcttt

SEQ ID NO: 932474 - DNA, 25 bp, Homo sapien
tttaaagatcccatgactggtcaca

SEQ ID NO: 932475 - DNA, 25 bp, Homo sapien
atatgcctgtaaactaaggctttaa

SEQ ID NO: 932476 - DNA, 25 bp, Homo sapien
ttttaaagatcccatgactggtcac

SEQ ID NO: 932477 - DNA, 25 bp, Homo sapien
ttggcctcaagggattctccctcgt

SEQ ID NO: 932478 - DNA, 25 bp, Homo sapien
cagactcttggcctcaagggattct

SEQ ID NO: 932479 - DNA, 25 bp, Homo sapien
cctcaagggattctccctcgtcagc

SEQ ID NO: 932480 - DNA, 25 bp, Homo sapien
agactcttggcctcaagggattctc

SEQ ID NO: 932481 - DNA, 25 bp, Homo sapien
ctgtaatccctcctgctactcggga

SEQ ID NO: 932482 - DNA, 25 bp, Homo sapien
tgggtggcagaggtggcagtgagat

SEQ ID NO: 932483 - DNA, 25 bp, Homo sapien
gacgcctgtaatccctcctgctact

SEQ ID NO: 932484 - DNA, 25 bp, Homo sapien
tggcagaggtggcagtgagatgaga

SEQ ID NO: 932485 - DNA, 25 bp, Homo sapien
tccctctgtagcaaatcgcagtctt

SEQ ID NO: 932486 - DNA, 25 bp, Homo sapien
ctttgtgttccctctgtagcaaatc

SEQ ID NO: 932487 - DNA, 25 bp, Homo sapien
gtagcaaatcgcagtcttctccagg

SEQ ID NO: 932488 - DNA, 25 bp, Homo sapien
tgtgttccctctgtagcaaatcgca

SEQ ID NO: 932489 - DNA, 25 bp, Homo sapien
tccctgaccacaagagacttgcctg

SEQ ID NO: 932490 - DNA, 25 bp, Homo sapien
atgagccctgagatgtttgaagtga

SEQ ID NO: 932491 - DNA, 25 bp, Homo sapien
ggacaagttagttgttttctctgag

SEQ ID NO: 932492 - DNA, 25 bp, Homo sapien
gggataatcttacttgacttccctg

SEQ ID NO: 932493 - DNA, 25 bp, Homo sapien
cacagtcgcctcgaggtttctagcc

SEQ ID NO: 932494 - DNA, 25 bp, Homo sapien
gactcaagcacagtcgcctcgaggt

SEQ ID NO: 932495 - DNA, 25 bp, Homo sapien
gaatatttgagaggcggaaggcaca

SEQ ID NO: 932496 - DNA, 25 bp, Homo sapien
cacaaggcgtgacaattgatgggat

SEQ ID NO: 932497 - DNA, 25 bp, Homo sapien
aaggtaggcagaaggttacgcagga

SEQ ID NO: 932498 - DNA, 25 bp, Homo sapien
gtaggcagaaggttacgcaggagaa

SEQ ID NO: 932499 - DNA, 25 bp, Homo sapien
aggaaggtaggcagaaggttacgca

SEQ ID NO: 932500 - DNA, 25 bp, Homo sapien
gaaggtaggcagaaggttacgcagg

SEQ ID NO: 932501 - DNA, 25 bp, Homo sapien
ggaaggtgaggctggaggaggaggt

SEQ ID NO: 932502 - DNA, 25 bp, Homo sapien
ggaggaaggtgaggctggaggagga

SEQ ID NO: 932503 - DNA, 25 bp, Homo sapien
aggaaggtgaggctggaggaggagg

SEQ ID NO: 932504 - DNA, 25 bp, Homo sapien
ctggaggaaggtgaggctggaggag

SEQ ID NO: 932505 - DNA, 25 bp, Homo sapien
gaggctctgaggtaaagatggaggc

SEQ ID NO: 932506 - DNA, 25 bp, Homo sapien
tgggagtcgaggagtttacccaaga

SEQ ID NO: 932507 - DNA, 25 bp, Homo sapien
aggctctgaggtaaagatggaggct

SEQ ID NO: 932508 - DNA, 25 bp, Homo sapien
gaggagtttacccaagacgaagcat

SEQ ID NO: 932509 - DNA, 25 bp, Homo sapien
gggcaacagtgcaaggtcatgtctc

SEQ ID NO: 932510 - DNA, 25 bp, Homo sapien
agcctggcaacatgatctctacaaa

SEQ ID NO: 932511 - DNA, 25 bp, Homo sapien
taatcctggcacttcaagagccaag

SEQ ID NO: 932512 - DNA, 25 bp, Homo sapien
tgtttgagccgagaaatttgagacc

SEQ ID NO: 932513 - DNA, 25 bp, Homo sapien
gctcaatcttgaacaggacagtggt

SEQ ID NO: 932514 - DNA, 25 bp, Homo sapien
cataggcgtagttcggtttgaacag

SEQ ID NO: 932515 - DNA, 25 bp, Homo sapien
gggagcccagcgttccataggcgta

SEQ ID NO: 932516 - DNA, 25 bp, Homo sapien
gagcacaaaacttgtctgactcagc

SEQ ID NO: 932517 - DNA, 25 bp, Homo sapien
gcccagctccatgccccacaatgta

SEQ ID NO: 932518 - DNA, 25 bp, Homo sapien
ctctctgcatgctcagaaggcccag

SEQ ID NO: 932519 - DNA, 25 bp, Homo sapien
tctgcatgctcagaaggcccagctc

SEQ ID NO: 932520 - DNA, 25 bp, Homo sapien
ccagctccatgccccacaatgtaat

SEQ ID NO: 932521 - DNA, 25 bp, Homo sapien
cattcccagtggtgagttaagtcag

SEQ ID NO: 932522 - DNA, 25 bp, Homo sapien
tggtgcctcatctcgctcctaaaca

SEQ ID NO: 932523 - DNA, 25 bp, Homo sapien
tctcccaaatgcctaggtctcaagg

SEQ ID NO: 932524 - DNA, 25 bp, Homo sapien
aattcaaagaacctgcgctctgagc

SEQ ID NO: 932525 - DNA, 25 bp, Homo sapien
tttcattagccgaggagttttccta

SEQ ID NO: 932526 - DNA, 25 bp, Homo sapien
aatcgaagggtctgtccaagtgttc

SEQ ID NO: 932527 - DNA, 25 bp, Homo sapien
cattagccgaggagttttcctaaag

SEQ ID NO: 932528 - DNA, 25 bp, Homo sapien
aaagtaattagaatcgaagggtctg

SEQ ID NO: 932529 - DNA, 25 bp, Homo sapien
gctccttctcggatgacgtccttca

SEQ ID NO: 932530 - DNA, 25 bp, Homo sapien
gcaccgaagcatcaggcgccactag

SEQ ID NO: 932531 - DNA, 25 bp, Homo sapien
gcatcaggcgccactaggtctccag

SEQ ID NO: 932532 - DNA, 25 bp, Homo sapien
gcatcctctgacttaaccgctcgta

SEQ ID NO: 932533 - DNA, 25 bp, Homo sapien
ccaggactccctggtttaacgcgct

SEQ ID NO: 932534 - DNA, 25 bp, Homo sapien
caggactccctggtttaacgcgctt

SEQ ID NO: 932535 - DNA, 25 bp, Homo sapien
gctgtgactctggtggggttccgaa

SEQ ID NO: 932536 - DNA, 25 bp, Homo sapien
tccctgtggcgtgagccttcggcct

SEQ ID NO: 932537 - DNA, 25 bp, Homo sapien
cgaaggcccctttatgcccggcaga

SEQ ID NO: 932538 - DNA, 25 bp, Homo sapien
ccttcggcctggtgcgccccgctgc

SEQ ID NO: 932539 - DNA, 25 bp, Homo sapien
cacagggcacattgggcacttgcag

SEQ ID NO: 932540 - DNA, 25 bp, Homo sapien
tacagaggtcgcacggtgagttgcc

SEQ ID NO: 932541 - DNA, 25 bp, Homo sapien
acatgatgggacacgtaacgggacc

SEQ ID NO: 932542 - DNA, 25 bp, Homo sapien
taatcggagcgcacaaaacatgatg

SEQ ID NO: 932543 - DNA, 25 bp, Homo sapien
ttcattaactgtgtaacaggctggg

SEQ ID NO: 932544 - DNA, 25 bp, Homo sapien
taggcgtaggctacagccaactttc

SEQ ID NO: 932545 - DNA, 25 bp, Homo sapien
gaccagagtgggtagatcactcgag

SEQ ID NO: 932546 - DNA, 25 bp, Homo sapien
tggcccacatgatgaaaccgcctct

SEQ ID NO: 932547 - DNA, 25 bp, Homo sapien
gaacaggctgggagattgtctgtcc

SEQ ID NO: 932548 - DNA, 25 bp, Homo sapien
caggaacaccggctgagtgtggcct

SEQ ID NO: 932549 - DNA, 25 bp, Homo sapien
tgtggcctcccggaaatcagagaga

SEQ ID NO: 932550 - DNA, 25 bp, Homo sapien
cctttggtggagaagaccaacccag

SEQ ID NO: 932551 - DNA, 25 bp, Homo sapien
agactggcacttagcataccaagga

SEQ ID NO: 932552 - DNA, 25 bp, Homo sapien
attatctcagcacaaggaatgcggt

SEQ ID NO: 932553 - DNA, 25 bp, Homo sapien
ggcccaggagactggcacttagcat

SEQ ID NO: 932554 - DNA, 25 bp, Homo sapien
tcattatctcagcacaaggaatgcg

SEQ ID NO: 932555 - DNA, 25 bp, Homo sapien
gttttattaacaaggcatgtcctgc

SEQ ID NO: 932556 - DNA, 25 bp, Homo sapien
caaccaattgttcaaggtacaggtc

SEQ ID NO: 932557 - DNA, 25 bp, Homo sapien
gggcaaagtcacaaattaacagcat

SEQ ID NO: 932558 - DNA, 25 bp, Homo sapien
taacagcatctcagccaaccaattg

SEQ ID NO: 932559 - DNA, 25 bp, Homo sapien
tgtgccgccccaggcaataagacca

SEQ ID NO: 932560 - DNA, 25 bp, Homo sapien
ctgtgccgccccaggcaataagacc

SEQ ID NO: 932561 - DNA, 25 bp, Homo sapien
tcttgctggtgagcaaaagtgttgc

SEQ ID NO: 932562 - DNA, 25 bp, Homo sapien
ccttcctcgggctgtgttcttgctg

SEQ ID NO: 932563 - DNA, 25 bp, Homo sapien
aattgaacgggtcgagatgccgacg

SEQ ID NO: 932564 - DNA, 25 bp, Homo sapien
ggcgcaggatggtactggcacatct

SEQ ID NO: 932565 - DNA, 25 bp, Homo sapien
tcctgcctgcggaactgaggtaaac

SEQ ID NO: 932566 - DNA, 25 bp, Homo sapien
ttcatataacatggccagaaggagc

SEQ ID NO: 932567 - DNA, 25 bp, Homo sapien
gtatttaggcttgaggttcactccc

SEQ ID NO: 932568 - DNA, 25 bp, Homo sapien
tcaggtactgacactaggagggtct

SEQ ID NO: 932569 - DNA, 25 bp, Homo sapien
ccaaggcaaagctagattcaagggc

SEQ ID NO: 932570 - DNA, 25 bp, Homo sapien
aaattcaggagtcggcacttgtagc

SEQ ID NO: 932571 - DNA, 25 bp, Homo sapien
cacattcaattagcgaggccccaga

SEQ ID NO: 932572 - DNA, 25 bp, Homo sapien
gattcaaagagcaatacacagagcg

SEQ ID NO: 932573 - DNA, 25 bp, Homo sapien
tcagggcagcggacactatgtacag

SEQ ID NO: 932574 - DNA, 25 bp, Homo sapien
caaggctctttctagcacgtgccaa

SEQ ID NO: 932575 - DNA, 25 bp, Homo sapien
cacgtgccaaggtccagatttaggg

SEQ ID NO: 932576 - DNA, 25 bp, Homo sapien
gctttacgcagctggaagggtccaa

SEQ ID NO: 932577 - DNA, 25 bp, Homo sapien
tactttttgcgggtgtgctgccttc

SEQ ID NO: 932578 - DNA, 25 bp, Homo sapien
gagcccctggggtcttggatcccgc

SEQ ID NO: 932579 - DNA, 25 bp, Homo sapien
ggatcccgcaccaatggaaaatgaa

SEQ ID NO: 932580 - DNA, 25 bp, Homo sapien
cttcgggcctgcagtcgctgtcgag

SEQ ID NO: 932581 - DNA, 25 bp, Homo sapien
aacaaagccttgggcgggtgctgaa

SEQ ID NO: 932582 - DNA, 25 bp, Homo sapien
gagaggctgctgcccgatgtgccca

SEQ ID NO: 932583 - DNA, 25 bp, Homo sapien
cactccaggcgcaggggtgttctga

SEQ ID NO: 932584 - DNA, 25 bp, Homo sapien
ggtgctgaagatgccccaaaggaga

SEQ ID NO: 932585 - DNA, 25 bp, Homo sapien
tgtcttttgtgatgccccgtggtcc

SEQ ID NO: 932586 - DNA, 25 bp, Homo sapien
gtgtcgctgggaaacacacgccatg

SEQ ID NO: 932587 - DNA, 25 bp, Homo sapien
tagcgtacctgggttggctacctcc

SEQ ID NO: 932588 - DNA, 25 bp, Homo sapien
cttagatctatacccagtgtcgctg

SEQ ID NO: 932589 - DNA, 25 bp, Homo sapien
cacgttgaaggcaaacggtgtgctc

SEQ ID NO: 932590 - DNA, 25 bp, Homo sapien
acaggtttgctctcagttgtgctgc

SEQ ID NO: 932591 - DNA, 25 bp, Homo sapien
ggtggctgtgctcccactctgtcct

SEQ ID NO: 932592 - DNA, 25 bp, Homo sapien
gtgcccagggcgttctgacctaagc

SEQ ID NO: 932593 - DNA, 25 bp, Homo sapien
gctccaaagccggagctggtggctg

SEQ ID NO: 932594 - DNA, 25 bp, Homo sapien
ggtggctccaaagccggagctggtg

SEQ ID NO: 932595 - DNA, 25 bp, Homo sapien
tggctccaaagccggagctggtggc

SEQ ID NO: 932596 - DNA, 25 bp, Homo sapien
tccaaagccggagctggtggctgca

SEQ ID NO: 932597 - DNA, 25 bp, Homo sapien
tactgaacgtcagagtgggctggct

SEQ ID NO: 932598 - DNA, 25 bp, Homo sapien
ggtgctgccaaaaccactaaagtcg

SEQ ID NO: 932599 - DNA, 25 bp, Homo sapien
tggcaccgccaaaggtaggctggat

SEQ ID NO: 932600 - DNA, 25 bp, Homo sapien
aactggaatatggagcccatggccg

SEQ ID NO: 932601 - DNA, 25 bp, Homo sapien
tggcggtgctggtcgtggtactcac

SEQ ID NO: 932602 - DNA, 25 bp, Homo sapien
agtggcggtgctggtcgtggtactc

SEQ ID NO: 932603 - DNA, 25 bp, Homo sapien
gtggcggtgctggtcgtggtactca

SEQ ID NO: 932604 - DNA, 25 bp, Homo sapien
cagtggcggtgctggtcgtggtact

SEQ ID NO: 932605 - DNA, 25 bp, Homo sapien
gtttatgccaaagccaaacgcaggc

SEQ ID NO: 932606 - DNA, 25 bp, Homo sapien
tcacactgtttatgccaaagccaaa

SEQ ID NO: 932607 - DNA, 25 bp, Homo sapien
cactgtttatgccaaagccaaacgc

SEQ ID NO: 932608 - DNA, 25 bp, Homo sapien
ctgctcacactgtttatgccaaagc

SEQ ID NO: 932609 - DNA, 25 bp, Homo sapien
cagtggcgggagtagttgtctgctt

SEQ ID NO: 932610 - DNA, 25 bp, Homo sapien
cagttgtggtgggagcagtggcggg

SEQ ID NO: 932611 - DNA, 25 bp, Homo sapien
cttctcactcttgggtggagccgtg

SEQ ID NO: 932612 - DNA, 25 bp, Homo sapien
ctgtggatggactggcagaggtgat

SEQ ID NO: 932613 - DNA, 25 bp, Homo sapien
tgtctttggaggtgagagggcctca

SEQ ID NO: 932614 - DNA, 25 bp, Homo sapien
tggaggtgccttggtgtcagtggct

SEQ ID NO: 932615 - DNA, 25 bp, Homo sapien
tggcggccctgactgtgataaaccc

SEQ ID NO: 932616 - DNA, 25 bp, Homo sapien
cagtggctggtaccatggatggagc

SEQ ID NO: 932617 - DNA, 25 bp, Homo sapien
ggtctcagtgacagagttcgaggca

SEQ ID NO: 932618 - DNA, 25 bp, Homo sapien
caggctcgggggagtctgcatcttc

SEQ ID NO: 932619 - DNA, 25 bp, Homo sapien
gcaggcagggtaaaggtaaatgaag

SEQ ID NO: 932620 - DNA, 25 bp, Homo sapien
ttcttcaagctctctaacagtgggt

SEQ ID NO: 932621 - DNA, 25 bp, Homo sapien
cctcggcagtgatcgaatagccaag

SEQ ID NO: 932622 - DNA, 25 bp, Homo sapien
tcctccaaggcctggttgaaccact

SEQ ID NO: 932623 - DNA, 25 bp, Homo sapien
gaaccactgtaatgaagccttcttc

SEQ ID NO: 932624 - DNA, 25 bp, Homo sapien
tcttctctaagtctaggtcctcggc

SEQ ID NO: 932625 - DNA, 25 bp, Homo sapien
aactttccgcttacgctgcccagag

SEQ ID NO: 932626 - DNA, 25 bp, Homo sapien
cagcagctgaactttccgcttacgc

SEQ ID NO: 932627 - DNA, 25 bp, Homo sapien
aaggtcagctgttcccctcgccgag

SEQ ID NO: 932628 - DNA, 25 bp, Homo sapien
gttcccctcgccgagaaggcagcag

SEQ ID NO: 932629 - DNA, 25 bp, Homo sapien
caggtgtagactgagaattcgagtt

SEQ ID NO: 932630 - DNA, 25 bp, Homo sapien
gtagactgagaattcgagttttgtt

SEQ ID NO: 932631 - DNA, 25 bp, Homo sapien
ggtgtagactgagaattcgagtttt

SEQ ID NO: 932632 - DNA, 25 bp, Homo sapien
ctgccaggtgtagactgagaattcg

SEQ ID NO: 932633 - DNA, 25 bp, Homo sapien
gtattaatctctacatcctccacaa

SEQ ID NO: 932634 - DNA, 25 bp, Homo sapien
tattaatctctacatcctccacaaa

SEQ ID NO: 932635 - DNA, 25 bp, Homo sapien
caccaccaacagcagcccctcatcc

SEQ ID NO: 932636 - DNA, 25 bp, Homo sapien
ccctcatcctggctcagcaacctac

SEQ ID NO: 932637 - DNA, 25 bp, Homo sapien
ctccaccaccaacagcagcccctca

SEQ ID NO: 932638 - DNA, 25 bp, Homo sapien
ccaccaacagcagcccctcatcctg

SEQ ID NO: 932639 - DNA, 25 bp, Homo sapien
tgctgccaatggagttgaagaactg

SEQ ID NO: 932640 - DNA, 25 bp, Homo sapien
tgtctgctgccaatggagttgaaga

SEQ ID NO: 932641 - DNA, 25 bp, Homo sapien
aagaactggaatgatgacacagctc

SEQ ID NO: 932642 - DNA, 25 bp, Homo sapien
agttgaagaactggaatgatgacac

SEQ ID NO: 932643 - DNA, 25 bp, Homo sapien
tgtccacgtagcaaatgaaaactgc

SEQ ID NO: 932644 - DNA, 25 bp, Homo sapien
tctgtccacgtagcaaatgaaaact

SEQ ID NO: 932645 - DNA, 25 bp, Homo sapien
ccccttctgtccacgtagcaaatga

SEQ ID NO: 932646 - DNA, 25 bp, Homo sapien
ccacgtagcaaatgaaaactgcagg

SEQ ID NO: 932647 - DNA, 25 bp, Homo sapien
tctccggtgtctgggagcgggatga

SEQ ID NO: 932648 - DNA, 25 bp, Homo sapien
gcctctccggtgtctgggagcggga

SEQ ID NO: 932649 - DNA, 25 bp, Homo sapien
cggtgtctgggagcgggatgaggct

SEQ ID NO: 932650 - DNA, 25 bp, Homo sapien
tttgctggcctctccggtgtctggg

SEQ ID NO: 932651 - DNA, 25 bp, Homo sapien
agagaagggtgatgaactggggcca

SEQ ID NO: 932652 - DNA, 25 bp, Homo sapien
gagaagggtgatgaactggggccat

SEQ ID NO: 932653 - DNA, 25 bp, Homo sapien
ctagagaagggtgatgaactggggc

SEQ ID NO: 932654 - DNA, 25 bp, Homo sapien
tagagaagggtgatgaactggggcc

SEQ ID NO: 932655 - DNA, 25 bp, Homo sapien
agagctacaataaccaaatctgctg

SEQ ID NO: 932656 - DNA, 25 bp, Homo sapien
tacctgtcaaattggtaaaagccca

SEQ ID NO: 932657 - DNA, 25 bp, Homo sapien
tggtccctttcattcaatactgagg

SEQ ID NO: 932658 - DNA, 25 bp, Homo sapien
catgcgcatttaacccttgaccgga

SEQ ID NO: 932659 - DNA, 25 bp, Homo sapien
gagcttcgggatctcttattcaagt

SEQ ID NO: 932660 - DNA, 25 bp, Homo sapien
taagcgcctgtcaaggagctcatgg

SEQ ID NO: 932661 - DNA, 25 bp, Homo sapien
taggaactggtaatggcattgcggc

SEQ ID NO: 932662 - DNA, 25 bp, Homo sapien
agctcatggaagagcttcgggatct

SEQ ID NO: 932663 - DNA, 25 bp, Homo sapien
aatgctgaatgtccactgccactgc

SEQ ID NO: 932664 - DNA, 25 bp, Homo sapien
catgaggctaacatggctaatagct

SEQ ID NO: 932665 - DNA, 25 bp, Homo sapien
taacacgtttctacagaagcatgag

SEQ ID NO: 932666 - DNA, 25 bp, Homo sapien
tggcctctgtatctttacgggaatg

SEQ ID NO: 932667 - DNA, 25 bp, Homo sapien
gacatcgatctaacctgtgccttga

SEQ ID NO: 932668 - DNA, 25 bp, Homo sapien
gggcattacttgatggtgacgacag

SEQ ID NO: 932669 - DNA, 25 bp, Homo sapien
tacagtctcctttgcacatgggtct

SEQ ID NO: 932670 - DNA, 25 bp, Homo sapien
ggtgacgacagtgttgagctgatta

SEQ ID NO: 932671 - DNA, 25 bp, Homo sapien
tctttgagggcactcagtacagtct

SEQ ID NO: 932672 - DNA, 25 bp, Homo sapien
gcacagccttcttgtgataaccatt

SEQ ID NO: 932673 - DNA, 25 bp, Homo sapien
tcttgtgataaccattccagcacac

SEQ ID NO: 932674 - DNA, 25 bp, Homo sapien
aatcttctgtcaggaggggcgatcc

SEQ ID NO: 932675 - DNA, 25 bp, Homo sapien
cagccttcttgtgataaccattcca

SEQ ID NO: 932676 - DNA, 25 bp, Homo sapien
ggcggccaggcctattccgcaggtc

SEQ ID NO: 932677 - DNA, 25 bp, Homo sapien
gggagggcggtgtggagcgcggcgc

SEQ ID NO: 932678 - DNA, 25 bp, Homo sapien
taaaagtggtgaacgcgatgggtcg

SEQ ID NO: 932679 - DNA, 25 bp, Homo sapien
ccggagggtcggagaagaggagtgg

SEQ ID NO: 932680 - DNA, 25 bp, Homo sapien
agcagttcggcagggtcaggtcctt

SEQ ID NO: 932681 - DNA, 25 bp, Homo sapien
taggaggtttccgttggctgtcgac

SEQ ID NO: 932682 - DNA, 25 bp, Homo sapien
cggcccgggcttgcccaggtaactg

SEQ ID NO: 932683 - DNA, 25 bp, Homo sapien
tcaggtccttcgagcagggtccgcg

SEQ ID NO: 932684 - DNA, 25 bp, Homo sapien
ccgaccagcgacaggccgagaagcg

SEQ ID NO: 932685 - DNA, 25 bp, Homo sapien
ggaggccgaccagcgacaggccgag

SEQ ID NO: 932686 - DNA, 25 bp, Homo sapien
aggccgaccagcgacaggccgagaa

SEQ ID NO: 932687 - DNA, 25 bp, Homo sapien
taggaggccgaccagcgacaggccg

SEQ ID NO: 932688 - DNA, 25 bp, Homo sapien
gcggaggagacttaaatatcccagc

SEQ ID NO: 932689 - DNA, 25 bp, Homo sapien
gccgcggaggagacttaaatatccc

SEQ ID NO: 932690 - DNA, 25 bp, Homo sapien
cgcgccgcggaggagacttaaatat

SEQ ID NO: 932691 - DNA, 25 bp, Homo sapien
gcgccgcggaggagacttaaatatc

SEQ ID NO: 932692 - DNA, 25 bp, Homo sapien
ttcacaaacgccactggcggctgag

SEQ ID NO: 932693 - DNA, 25 bp, Homo sapien
cacaaacgccactggcggctgagtt

SEQ ID NO: 932694 - DNA, 25 bp, Homo sapien
caggtgcttttcacaaacgccactg

SEQ ID NO: 932695 - DNA, 25 bp, Homo sapien
gcttttcacaaacgccactggcggc

SEQ ID NO: 932696 - DNA, 25 bp, Homo sapien
gatcaagtcttagcatggatgtgaa

SEQ ID NO: 932697 - DNA, 25 bp, Homo sapien
agctgcaggttagtcctcccaccat

SEQ ID NO: 932698 - DNA, 25 bp, Homo sapien
gactaacaatattttgcactcattt

SEQ ID NO: 932699 - DNA, 25 bp, Homo sapien
gatataaaaaagctatcgaatggga

SEQ ID NO: 932700 - DNA, 25 bp, Homo sapien
aaagaactgatacagggcagctgcc

SEQ ID NO: 932701 - DNA, 25 bp, Homo sapien
aaaagaactgatacagggcagctgc

SEQ ID NO: 932702 - DNA, 25 bp, Homo sapien
caaactataggtgtgctgacagcat

SEQ ID NO: 932703 - DNA, 25 bp, Homo sapien
ttgaggcaaactataggtgtgctga

SEQ ID NO: 932704 - DNA, 25 bp, Homo sapien
tcccaagtatttgagagactgtggt

SEQ ID NO: 932705 - DNA, 25 bp, Homo sapien
agtcccaagtatttgagagactgtg

SEQ ID NO: 932706 - DNA, 25 bp, Homo sapien
cccaagtatttgagagactgtggtg

SEQ ID NO: 932707 - DNA, 25 bp, Homo sapien
gtcccaagtatttgagagactgtgg

SEQ ID NO: 932708 - DNA, 25 bp, Homo sapien
agcaatcctcttttacctcaacatt

SEQ ID NO: 932709 - DNA, 25 bp, Homo sapien
cactgcaacctgagaactctgagct

SEQ ID NO: 932710 - DNA, 25 bp, Homo sapien
cttttacctcaacattcccaagtag

SEQ ID NO: 932711 - DNA, 25 bp, Homo sapien
ctcttttacctcaacattcccaagt

SEQ ID NO: 932712 - DNA, 25 bp, Homo sapien
tgactttcatcgaaggagtgggatc

SEQ ID NO: 932713 - DNA, 25 bp, Homo sapien
gatggaagactgactttcatcgaag

SEQ ID NO: 932714 - DNA, 25 bp, Homo sapien
actgactttcatcgaaggagtggga

SEQ ID NO: 932715 - DNA, 25 bp, Homo sapien
agactgactttcatcgaaggagtgg

SEQ ID NO: 932716 - DNA, 25 bp, Homo sapien
atattcaactaggttaaaagtgtca

SEQ ID NO: 932717 - DNA, 25 bp, Homo sapien
cacaggtggaggacgaggttttggt

SEQ ID NO: 932718 - DNA, 25 bp, Homo sapien
ggacgaggttttggtatctgaatgc

SEQ ID NO: 932719 - DNA, 25 bp, Homo sapien
tcaattcacaagcacaggtggagga

SEQ ID NO: 932720 - DNA, 25 bp, Homo sapien
attcacaagcacaggtggaggacga

SEQ ID NO: 932721 - DNA, 25 bp, Homo sapien
gaggtgttactgagggtaccgaata

SEQ ID NO: 932722 - DNA, 25 bp, Homo sapien
ttcatgtatgtgtgcgggaaggaaa

SEQ ID NO: 932723 - DNA, 25 bp, Homo sapien
ccaaaggtctgggatgagcattttt

SEQ ID NO: 932724 - DNA, 25 bp, Homo sapien
taaacaactctttagtcactcccaa

SEQ ID NO: 932725 - DNA, 25 bp, Homo sapien
tgctccaacttaatgatgacgtttg

SEQ ID NO: 932726 - DNA, 25 bp, Homo sapien
caacttaatgatgacgtttggcttg

SEQ ID NO: 932727 - DNA, 25 bp, Homo sapien
cttaatgatgacgtttggcttggtg

SEQ ID NO: 932728 - DNA, 25 bp, Homo sapien
tccctgctccaacttaatgatgacg

SEQ ID NO: 932729 - DNA, 25 bp, Homo sapien
gtacaagatgttgccacctcataag

SEQ ID NO: 932730 - DNA, 25 bp, Homo sapien
agtacaagatgttgccacctcataa

SEQ ID NO: 932731 - DNA, 25 bp, Homo sapien
aagtacaagatgttgccacctcata

SEQ ID NO: 932732 - DNA, 25 bp, Homo sapien
tgcataacagaaatgctccattttt

SEQ ID NO: 932733 - DNA, 25 bp, Homo sapien
cataacagaaatgctccatttttta

SEQ ID NO: 932734 - DNA, 25 bp, Homo sapien
ctgcataacagaaatgctccatttt

SEQ ID NO: 932735 - DNA, 25 bp, Homo sapien
taacagaaatgctccattttttacc

SEQ ID NO: 932736 - DNA, 25 bp, Homo sapien
gcattcagaaagcaagctatcctca

SEQ ID NO: 932737 - DNA, 25 bp, Homo sapien
cattcagaaagcaagctatcctcac

SEQ ID NO: 932738 - DNA, 25 bp, Homo sapien
gagcattcagaaagcaagctatcct

SEQ ID NO: 932739 - DNA, 25 bp, Homo sapien
tgagagcattcagaaagcaagctat

SEQ ID NO: 932740 - DNA, 25 bp, Homo sapien
ccaaggaaactagatggctgtagtt

SEQ ID NO: 932741 - DNA, 25 bp, Homo sapien
ccaacatcacatccccgtatgttat

SEQ ID NO: 932742 - DNA, 25 bp, Homo sapien
tcatcagggtccagttgccgccact

SEQ ID NO: 932743 - DNA, 25 bp, Homo sapien
cccgtatgttatcttctcatcaggg

SEQ ID NO: 932744 - DNA, 25 bp, Homo sapien
ctgctcttggaaacatgcagagact

SEQ ID NO: 932745 - DNA, 25 bp, Homo sapien
catgcagagactgtggctgatagac

SEQ ID NO: 932746 - DNA, 25 bp, Homo sapien
tcttggaaacatgcagagactgtgg

SEQ ID NO: 932747 - DNA, 25 bp, Homo sapien
ggaaacatgcagagactgtggctga

SEQ ID NO: 932748 - DNA, 25 bp, Homo sapien
agcaggtcactgaagtcatgagggc

SEQ ID NO: 932749 - DNA, 25 bp, Homo sapien
cagaagcaggtcactgaagtcatga

SEQ ID NO: 932750 - DNA, 25 bp, Homo sapien
gaagcaggtcactgaagtcatgagg

SEQ ID NO: 932751 - DNA, 25 bp, Homo sapien
gggcagaagcaggtcactgaagtca

SEQ ID NO: 932752 - DNA, 25 bp, Homo sapien
tgcaaacactcagaagggtctaaaa

SEQ ID NO: 932753 - DNA, 25 bp, Homo sapien
gcataagaaccgcaaaagaaagctc

SEQ ID NO: 932754 - DNA, 25 bp, Homo sapien
gctcaataggctaacaccctgtgaa

SEQ ID NO: 932755 - DNA, 25 bp, Homo sapien
atcacctgcataagaaccgcaaaag

SEQ ID NO: 932756 - DNA, 25 bp, Homo sapien
tgtctctccggcaagcaatcgggac

SEQ ID NO: 932757 - DNA, 25 bp, Homo sapien
cagctgagggtggtgacaccctcca

SEQ ID NO: 932758 - DNA, 25 bp, Homo sapien
gagtggagacgacgtccgcagctga

SEQ ID NO: 932759 - DNA, 25 bp, Homo sapien
cccatgcagcacctgttcggtgcag

SEQ ID NO: 932760 - DNA, 25 bp, Homo sapien
tgattctcgtccactagaagccaaa

SEQ ID NO: 932761 - DNA, 25 bp, Homo sapien
gccccgcagactcggtgattctcgt

SEQ ID NO: 932762 - DNA, 25 bp, Homo sapien
tcgggggtcccagctcgagcctcta

SEQ ID NO: 932763 - DNA, 25 bp, Homo sapien
ctggtccgggcggtcagcatccagc

SEQ ID NO: 932764 - DNA, 25 bp, Homo sapien
cccaggacaagtaacggactctatt

SEQ ID NO: 932765 - DNA, 25 bp, Homo sapien
ccatgtttattttggatcctgttgg

SEQ ID NO: 932766 - DNA, 25 bp, Homo sapien
cccatcatgacctaaattagttttc

SEQ ID NO: 932767 - DNA, 25 bp, Homo sapien
tccttgacaagcaggtagtaacagc

SEQ ID NO: 932768 - DNA, 25 bp, Homo sapien
gaagatagggacactattttcctcc

SEQ ID NO: 932769 - DNA, 25 bp, Homo sapien
gctaaactccctaggcaacaggaag

SEQ ID NO: 932770 - DNA, 25 bp, Homo sapien
aattcctggattgtgaccaggcacg

SEQ ID NO: 932771 - DNA, 25 bp, Homo sapien
gggaagttctcttcaaggtacagaa

SEQ ID NO: 932772 - DNA, 25 bp, Homo sapien
ggaagttctcttcaaggtacagaaa

SEQ ID NO: 932773 - DNA, 25 bp, Homo sapien
tcgacttattcccatcagcaccaaa

SEQ ID NO: 932774 - DNA, 25 bp, Homo sapien
gaagttctcttcaaggtacagaaac

SEQ ID NO: 932775 - DNA, 25 bp, Homo sapien
cccttctgtttcacttgaatgatat

SEQ ID NO: 932776 - DNA, 25 bp, Homo sapien
acttgaatgatatttctgcagcata

SEQ ID NO: 932777 - DNA, 25 bp, Homo sapien
cttgaatgatatttctgcagcatac

SEQ ID NO: 932778 - DNA, 25 bp, Homo sapien
ttctgtttcacttgaatgatatttc

SEQ ID NO: 932779 - DNA, 25 bp, Homo sapien
cagccattgttgtattcaactgcat

SEQ ID NO: 932780 - DNA, 25 bp, Homo sapien
ctacagccattgttgtattcaactg

SEQ ID NO: 932781 - DNA, 25 bp, Homo sapien
tacagccattgttgtattcaactgc

SEQ ID NO: 932782 - DNA, 25 bp, Homo sapien
gccattgttgtattcaactgcatca

SEQ ID NO: 932783 - DNA, 25 bp, Homo sapien
gtgagaggtgactgttttgcttttt

SEQ ID NO: 932784 - DNA, 25 bp, Homo sapien
tgagaggtgactgttttgctttttt

SEQ ID NO: 932785 - DNA, 25 bp, Homo sapien
cctgcgcaccatgagttcaagtgat

SEQ ID NO: 932786 - DNA, 25 bp, Homo sapien
tttggatggtctctgaatgtcatgt

SEQ ID NO: 932787 - DNA, 25 bp, Homo sapien
tgagcccagccgggaacccacaggt

SEQ ID NO: 932788 - DNA, 25 bp, Homo sapien
cccacaggttttttggatggtctct

SEQ ID NO: 932789 - DNA, 25 bp, Homo sapien
tgatcttcctgtcacgagtctccca

SEQ ID NO: 932790 - DNA, 25 bp, Homo sapien
cagctgaaattttcgacttagtctt

SEQ ID NO: 932791 - DNA, 25 bp, Homo sapien
tcctgtcacgagtctcccaagtagt

SEQ ID NO: 932792 - DNA, 25 bp, Homo sapien
tgcacagctgaaattttcgacttag

SEQ ID NO: 932793 - DNA, 25 bp, Homo sapien
ggcttaggtaatccatggattccct

SEQ ID NO: 932794 - DNA, 25 bp, Homo sapien
gactagagtttcttagccgaactgg

SEQ ID NO: 932795 - DNA, 25 bp, Homo sapien
tcaaaatgtctcttggactcaaaat

SEQ ID NO: 932796 - DNA, 25 bp, Homo sapien
gtctcttggactcaaaattgcctta

SEQ ID NO: 932797 - DNA, 25 bp, Homo sapien
tcttgtacatgataatctcactctt

SEQ ID NO: 932798 - DNA, 25 bp, Homo sapien
tctgaaatgggcatgtacagagaca

SEQ ID NO: 932799 - DNA, 25 bp, Homo sapien
aaagagaccccaacatgcttcaggc

SEQ ID NO: 932800 - DNA, 25 bp, Homo sapien
agagacaaagagaccccaacatgct

SEQ ID NO: 932801 - DNA, 25 bp, Homo sapien
ccagactggactctgaaatgggcat

SEQ ID NO: 932802 - DNA, 25 bp, Homo sapien
tcggggtctaaggtgatcagatgca

SEQ ID NO: 932803 - DNA, 25 bp, Homo sapien
cacatggggttgagcagaggagaaa

SEQ ID NO: 932804 - DNA, 25 bp, Homo sapien
catgaagcagtgttcggaggacaga

SEQ ID NO: 932805 - DNA, 25 bp, Homo sapien
aatcagaaagatggcttagagaagc

SEQ ID NO: 932806 - DNA, 25 bp, Homo sapien
gtgccctctgaaacttaatgtctct

SEQ ID NO: 932807 - DNA, 25 bp, Homo sapien
tgtgccctctgaaacttaatgtctc

SEQ ID NO: 932808 - DNA, 25 bp, Homo sapien
tccatccatagtgagggataccaag

SEQ ID NO: 932809 - DNA, 25 bp, Homo sapien
catccatagtgagggataccaaggc

SEQ ID NO: 932810 - DNA, 25 bp, Homo sapien
ggagggcagtgtctcaatcttgact

SEQ ID NO: 932811 - DNA, 25 bp, Homo sapien
catgctggagggcagtgtctcaatc

SEQ ID NO: 932812 - DNA, 25 bp, Homo sapien
gcccatgctggagggcagtgtctca

SEQ ID NO: 932813 - DNA, 25 bp, Homo sapien
tgctggagggcagtgtctcaatctt

SEQ ID NO: 932814 - DNA, 25 bp, Homo sapien
tctagaactgttgggctcacatgat

SEQ ID NO: 932815 - DNA, 25 bp, Homo sapien
tatgggtcctttgggatctgagctc

SEQ ID NO: 932816 - DNA, 25 bp, Homo sapien
tactctcagctcttcaggacagttc

SEQ ID NO: 932817 - DNA, 25 bp, Homo sapien
gcccaggttgttctagaactgttgg

SEQ ID NO: 932818 - DNA, 25 bp, Homo sapien
atagcgtatttcagccgggccggct

SEQ ID NO: 932819 - DNA, 25 bp, Homo sapien
tccatcaatatccaatgccctggga

SEQ ID NO: 932820 - DNA, 25 bp, Homo sapien
agtatctcctggctatggtcatagc

SEQ ID NO: 932821 - DNA, 25 bp, Homo sapien
ggtttgctgcctcctatccatcaat

SEQ ID NO: 932822 - DNA, 25 bp, Homo sapien
tcagcttctttattagctccgacta

SEQ ID NO: 932823 - DNA, 25 bp, Homo sapien
tctttattagctccgactacagggc

SEQ ID NO: 932824 - DNA, 25 bp, Homo sapien
tagctccgactacagggctgtgcca

SEQ ID NO: 932825 - DNA, 25 bp, Homo sapien
ccgcgcctggcatatttcttatatt

SEQ ID NO: 932826 - DNA, 25 bp, Homo sapien
tttgtgcagatcatctagaagaacc

SEQ ID NO: 932827 - DNA, 25 bp, Homo sapien
ccatttgtgcagatcatctagaaga

SEQ ID NO: 932828 - DNA, 25 bp, Homo sapien
atttgtgcagatcatctagaagaac

SEQ ID NO: 932829 - DNA, 25 bp, Homo sapien
catttgtgcagatcatctagaagaa

SEQ ID NO: 932830 - DNA, 25 bp, Homo sapien
caggagtgtttccagttccaccctt

SEQ ID NO: 932831 - DNA, 25 bp, Homo sapien
ccaggagtgtttccagttccaccct

SEQ ID NO: 932832 - DNA, 25 bp, Homo sapien
gaaaccaggagtgtttccagttcca

SEQ ID NO: 932833 - DNA, 25 bp, Homo sapien
agtaagaaaccaggagtgtttccag

SEQ ID NO: 932834 - DNA, 25 bp, Homo sapien
ctgtgtgatgggtgttataactgtt

SEQ ID NO: 932835 - DNA, 25 bp, Homo sapien
cacatacgtataattttgctttcct

SEQ ID NO: 932836 - DNA, 25 bp, Homo sapien
atgctgtttctataaagctgtgtga

SEQ ID NO: 932837 - DNA, 25 bp, Homo sapien
ttttaagagaggattcttttcatcc

SEQ ID NO: 932838 - DNA, 25 bp, Homo sapien
ctgttaccttgcctttcaaattgct

SEQ ID NO: 932839 - DNA, 25 bp, Homo sapien
cgatcctgttaccttgcctttcaaa

SEQ ID NO: 932840 - DNA, 25 bp, Homo sapien
tcctgttaccttgcctttcaaattg

SEQ ID NO: 932841 - DNA, 25 bp, Homo sapien
agcgatcctgttaccttgcctttca

SEQ ID NO: 932842 - DNA, 25 bp, Homo sapien
ggagtacagtggccaccatgcttgg

SEQ ID NO: 932843 - DNA, 25 bp, Homo sapien
tggagtacagtggccaccatgcttg

SEQ ID NO: 932844 - DNA, 25 bp, Homo sapien
gctctggacctaagagaggacaagg

SEQ ID NO: 932845 - DNA, 25 bp, Homo sapien
tgagctctggacctaagagaggaca

SEQ ID NO: 932846 - DNA, 25 bp, Homo sapien
acctgagctctggacctaagagagg

SEQ ID NO: 932847 - DNA, 25 bp, Homo sapien
tctggacctaagagaggacaaggcc

SEQ ID NO: 932848 - DNA, 25 bp, Homo sapien
tgaaataagccgaggtacttccctg

SEQ ID NO: 932849 - DNA, 25 bp, Homo sapien
ataagaaatttcagatgccacggcc

SEQ ID NO: 932850 - DNA, 25 bp, Homo sapien
atgccacggcccaaatagctgcacg

SEQ ID NO: 932851 - DNA, 25 bp, Homo sapien
catcacgcccggacttttgttttat

SEQ ID NO: 932852 - DNA, 25 bp, Homo sapien
gctcctggtggatttagatacctcc

SEQ ID NO: 932853 - DNA, 25 bp, Homo sapien
gatgcctatggctcctggtggattt

SEQ ID NO: 932854 - DNA, 25 bp, Homo sapien
ggtggatttagatacctcctggtgc

SEQ ID NO: 932855 - DNA, 25 bp, Homo sapien
gcctatggctcctggtggatttaga

SEQ ID NO: 932856 - DNA, 25 bp, Homo sapien
actgacaatcacggcagaaggcgaa

SEQ ID NO: 932857 - DNA, 25 bp, Homo sapien
tgacaatcacggcagaaggcgaagg

SEQ ID NO: 932858 - DNA, 25 bp, Homo sapien
aaactgacaatcacggcagaaggcg

SEQ ID NO: 932859 - DNA, 25 bp, Homo sapien
aactgacaatcacggcagaaggcga

SEQ ID NO: 932860 - DNA, 25 bp, Homo sapien
accatgtcaagggtagttcaaccgc

SEQ ID NO: 932861 - DNA, 25 bp, Homo sapien
ggtgtggatacagagctgaaccatg

SEQ ID NO: 932862 - DNA, 25 bp, Homo sapien
ttcaaccgctgagattgattgattg

SEQ ID NO: 932863 - DNA, 25 bp, Homo sapien
tacagagctgaaccatgtcaagggt

SEQ ID NO: 932864 - DNA, 25 bp, Homo sapien
agaagcatgacctccatccctaatc

SEQ ID NO: 932865 - DNA, 25 bp, Homo sapien
cattcagattcataagggttccagt

SEQ ID NO: 932866 - DNA, 25 bp, Homo sapien
agtgcatgagatctcacatccaagg

SEQ ID NO: 932867 - DNA, 25 bp, Homo sapien
caaggataaccgctgagaacatgaa

SEQ ID NO: 932868 - DNA, 25 bp, Homo sapien
gaacatgaaagtgctgactcttcca

SEQ ID NO: 932869 - DNA, 25 bp, Homo sapien
aacatctttagtaaatcttttgctc

SEQ ID NO: 932870 - DNA, 25 bp, Homo sapien
atcttttgctcatgtgcattaacca

SEQ ID NO: 932871 - DNA, 25 bp, Homo sapien
ttttgctcatgtgcattaaccaata

SEQ ID NO: 932872 - DNA, 25 bp, Homo sapien
acatctttagtaaatcttttgctca

SEQ ID NO: 932873 - DNA, 25 bp, Homo sapien
aaccttcaccgacgcgtggcaggta

SEQ ID NO: 932874 - DNA, 25 bp, Homo sapien
tcccaaccttcaccgacgcgtggca

SEQ ID NO: 932875 - DNA, 25 bp, Homo sapien
cgagtcccaaccttcaccgacgcgt

SEQ ID NO: 932876 - DNA, 25 bp, Homo sapien
ttcaccgacgcgtggcaggtagaaa

SEQ ID NO: 932877 - DNA, 25 bp, Homo sapien
aaagaatccaagagatattataatt

SEQ ID NO: 932878 - DNA, 25 bp, Homo sapien
taaagaatccaagagatattataat

SEQ ID NO: 932879 - DNA, 25 bp, Homo sapien
gagctcagagcttccccctgaaaac

SEQ ID NO: 932880 - DNA, 25 bp, Homo sapien
tttcaacttcagttaggtcggcaaa

SEQ ID NO: 932881 - DNA, 25 bp, Homo sapien
tcagagcttccccctgaaaaccgaa

SEQ ID NO: 932882 - DNA, 25 bp, Homo sapien
agtttcaacttcagttaggtcggca

SEQ ID NO: 932883 - DNA, 25 bp, Homo sapien
gtctgaaacttcaatgagatccact

SEQ ID NO: 932884 - DNA, 25 bp, Homo sapien
gagatccactccatagtccttaagc

SEQ ID NO: 932885 - DNA, 25 bp, Homo sapien
aacttcaatgagatccactccatag

SEQ ID NO: 932886 - DNA, 25 bp, Homo sapien
gaaacttcaatgagatccactccat

SEQ ID NO: 932887 - DNA, 25 bp, Homo sapien
aaaaatggacccatgctagaatggc

SEQ ID NO: 932888 - DNA, 25 bp, Homo sapien
taaaaatggacccatgctagaatgg

SEQ ID NO: 932889 - DNA, 25 bp, Homo sapien
aaaatggacccatgctagaatggca

SEQ ID NO: 932890 - DNA, 25 bp, Homo sapien
caattagtggttaacaccgttgcac

SEQ ID NO: 932891 - DNA, 25 bp, Homo sapien
tagtggttaacaccgttgcactttg

SEQ ID NO: 932892 - DNA, 25 bp, Homo sapien
gtgatcaattagtggttaacaccgt

SEQ ID NO: 932893 - DNA, 25 bp, Homo sapien
gatcaattagtggttaacaccgttg

SEQ ID NO: 932894 - DNA, 25 bp, Homo sapien
aatgaagataataagttctatctca

SEQ ID NO: 932895 - DNA, 25 bp, Homo sapien
aagttctatctcataaagttactca

SEQ ID NO: 932896 - DNA, 25 bp, Homo sapien
ataataagttctatctcataaagtt

SEQ ID NO: 932897 - DNA, 25 bp, Homo sapien
aataagttctatctcataaagttac

SEQ ID NO: 932898 - DNA, 25 bp, Homo sapien
aattcttagcataacacctgcctgg

SEQ ID NO: 932899 - DNA, 25 bp, Homo sapien
gtttcttgactacaacaacacacac

SEQ ID NO: 932900 - DNA, 25 bp, Homo sapien
tagctaagtactaggcacataatag

SEQ ID NO: 932901 - DNA, 25 bp, Homo sapien
gcctggcacaccataagaacacaag

SEQ ID NO: 932902 - DNA, 25 bp, Homo sapien
attagtggcaccagcatccagactg

SEQ ID NO: 932903 - DNA, 25 bp, Homo sapien
tagtggcaccagcatccagactgtt

SEQ ID NO: 932904 - DNA, 25 bp, Homo sapien
tggcaccagcatccagactgttttc

SEQ ID NO: 932905 - DNA, 25 bp, Homo sapien
caatattagtggcaccagcatccag

SEQ ID NO: 932906 - DNA, 25 bp, Homo sapien
gtaccactggcccagagcaaatctg

SEQ ID NO: 932907 - DNA, 25 bp, Homo sapien
aatctgatggactgacttccgatca

SEQ ID NO: 932908 - DNA, 25 bp, Homo sapien
tggcccagagcaaatctgatggact

SEQ ID NO: 932909 - DNA, 25 bp, Homo sapien
ccgatcaataggtttgatggcctta

SEQ ID NO: 932910 - DNA, 25 bp, Homo sapien
ttaactgtgggaaatgactcaacac

SEQ ID NO: 932911 - DNA, 25 bp, Homo sapien
caacactgtaaatagtttatgggtc

SEQ ID NO: 932912 - DNA, 25 bp, Homo sapien
caagaaacaaagcaagtattcagct

SEQ ID NO: 932913 - DNA, 25 bp, Homo sapien
agtttatgggtctaatctgttcagt

SEQ ID NO: 932914 - DNA, 25 bp, Homo sapien
ccactccatgatgatgtttggcttg

SEQ ID NO: 932915 - DNA, 25 bp, Homo sapien
tccactccatgatgatgtttggctt

SEQ ID NO: 932916 - DNA, 25 bp, Homo sapien
ctccactccatgatgatgtttggct

SEQ ID NO: 932917 - DNA, 25 bp, Homo sapien
tgctatcttctcatcagggtccagt

SEQ ID NO: 932918 - DNA, 25 bp, Homo sapien
tcatcagggtccagttgccgccact

SEQ ID NO: 932919 - DNA, 25 bp, Homo sapien
catcacatccccgtatgctatcttc

SEQ ID NO: 932920 - DNA, 25 bp, Homo sapien
ccaacatcacatccccgtatgctat

SEQ ID NO: 932921 - DNA, 25 bp, Homo sapien
gaaacatgcagagactgtggctgat

SEQ ID NO: 932922 - DNA, 25 bp, Homo sapien
catgcagagactgtggctgatagac

SEQ ID NO: 932923 - DNA, 25 bp, Homo sapien
tcctgttgctcttggaaacatgcag

SEQ ID NO: 932924 - DNA, 25 bp, Homo sapien
tgctcttggaaacatgcagagactg

SEQ ID NO: 932925 - DNA, 25 bp, Homo sapien
caaaggcagaaatctcctgcattac

SEQ ID NO: 932926 - DNA, 25 bp, Homo sapien
gctcaaataggttaacaccctgtga

SEQ ID NO: 932927 - DNA, 25 bp, Homo sapien
ctgcattacgaaccacaaaagaaag

SEQ ID NO: 932928 - DNA, 25 bp, Homo sapien
caccctgtgaacactcagctgcaaa

SEQ ID NO: 932929 - DNA, 25 bp, Homo sapien
gctgctgtcgctggcgcgcgcgtct

SEQ ID NO: 932930 - DNA, 25 bp, Homo sapien
accaaggctgttctgctcccgaggg

SEQ ID NO: 932931 - DNA, 25 bp, Homo sapien
tcctgtccacctcaccaaggctgtt

SEQ ID NO: 932932 - DNA, 25 bp, Homo sapien
gtctgctcgcgaggtcccctcctgt

SEQ ID NO: 932933 - DNA, 25 bp, Homo sapien
gcaaatccaggcgggtgtccttctg

SEQ ID NO: 932934 - DNA, 25 bp, Homo sapien
gggcaaatccaggcgggtgtccttc

SEQ ID NO: 932935 - DNA, 25 bp, Homo sapien
aaatccaggcgggtgtccttctggg

SEQ ID NO: 932936 - DNA, 25 bp, Homo sapien
cttctgggggcccagatccgcctcc

SEQ ID NO: 932937 - DNA, 25 bp, Homo sapien
agccccgcaggctatgcgatgctcg

SEQ ID NO: 932938 - DNA, 25 bp, Homo sapien
gatgctcgtccactgcaggccaaac

SEQ ID NO: 932939 - DNA, 25 bp, Homo sapien
agagcaagcggcgacctgaagactc

SEQ ID NO: 932940 - DNA, 25 bp, Homo sapien
gcacagctccgcgtccgcctaggtg

SEQ ID NO: 932941 - DNA, 25 bp, Homo sapien
agggcagtgcggcggcagcgcgcat

SEQ ID NO: 932942 - DNA, 25 bp, Homo sapien
aggaagcgagggcagtgcggcggca

SEQ ID NO: 932943 - DNA, 25 bp, Homo sapien
ggaagcgagggcagtgcggcggcag

SEQ ID NO: 932944 - DNA, 25 bp, Homo sapien
agcgagggcagtgcggcggcagcgc

SEQ ID NO: 932945 - DNA, 25 bp, Homo sapien
tgcaggcaagtgtccccgtctttgg

SEQ ID NO: 932946 - DNA, 25 bp, Homo sapien
taggtcccctggcttaacacactgt

SEQ ID NO: 932947 - DNA, 25 bp, Homo sapien
cactgagcaaggtgatcccactggt

SEQ ID NO: 932948 - DNA, 25 bp, Homo sapien
gcgcccggcctatgctttaaatgga

SEQ ID NO: 932949 - DNA, 25 bp, Homo sapien
tggagcctatacctcagagccacgc

SEQ ID NO: 932950 - DNA, 25 bp, Homo sapien
agcctatacctcagagccacgctgg

SEQ ID NO: 932951 - DNA, 25 bp, Homo sapien
gagccacgctggctggtcaatcacc

SEQ ID NO: 932952 - DNA, 25 bp, Homo sapien
agccacgctggctggtcaatcacca

SEQ ID NO: 932953 - DNA, 25 bp, Homo sapien
tatcaccaagatgtaaccgaacccc

SEQ ID NO: 932954 - DNA, 25 bp, Homo sapien
ctcggtttgtccctatgagtggtaa

SEQ ID NO: 932955 - DNA, 25 bp, Homo sapien
ccataataaaagtattgttggaggg

SEQ ID NO: 932956 - DNA, 25 bp, Homo sapien
cctatccctgcaaactgaaatgtga

SEQ ID NO: 932957 - DNA, 25 bp, Homo sapien
tactctcagaatcgaacccaacagc

SEQ ID NO: 932958 - DNA, 25 bp, Homo sapien
gacatgtctggaaaaatctactctc

SEQ ID NO: 932959 - DNA, 25 bp, Homo sapien
tttggctcctgacaacaccacggtg

SEQ ID NO: 932960 - DNA, 25 bp, Homo sapien
caacaccacggtgtggtgctgatct

SEQ ID NO: 932961 - DNA, 25 bp, Homo sapien
gccaactaatctgaccggagcgaca

SEQ ID NO: 932962 - DNA, 25 bp, Homo sapien
taaagaccagggtcaaatggagcca

SEQ ID NO: 932963 - DNA, 25 bp, Homo sapien
tatgctacaggtggtgcagtctctg

SEQ ID NO: 932964 - DNA, 25 bp, Homo sapien
caggagacccctctagactaaggag

SEQ ID NO: 932965 - DNA, 25 bp, Homo sapien
aaaccttggtgtctgacttggtagc

SEQ ID NO: 932966 - DNA, 25 bp, Homo sapien
ctgtgattcccgtgttacctggtgg

SEQ ID NO: 932967 - DNA, 25 bp, Homo sapien
aagaaaagttgctctagacagtggt

SEQ ID NO: 932968 - DNA, 25 bp, Homo sapien
cctggtggcataaaccttggtgtct

SEQ ID NO: 932969 - DNA, 25 bp, Homo sapien
gacagaggctttccgccgggattca

SEQ ID NO: 932970 - DNA, 25 bp, Homo sapien
catgtgacactgaattagcctctgc

SEQ ID NO: 932971 - DNA, 25 bp, Homo sapien
tttgagcctcgtcacgggaactggg

SEQ ID NO: 932972 - DNA, 25 bp, Homo sapien
gatccaagtcagtaacagtccagca

SEQ ID NO: 932973 - DNA, 25 bp, Homo sapien
gaaagctgtcactcagcagctccgc

SEQ ID NO: 932974 - DNA, 25 bp, Homo sapien
ttttgaggaaagctgtcactcagca

SEQ ID NO: 932975 - DNA, 25 bp, Homo sapien
tgaggaaagctgtcactcagcagct

SEQ ID NO: 932976 - DNA, 25 bp, Homo sapien
gaggaaagctgtcactcagcagctc

SEQ ID NO: 932977 - DNA, 25 bp, Homo sapien
tgggcagcaccatcgctggagctac

SEQ ID NO: 932978 - DNA, 25 bp, Homo sapien
agcaccatcgctggagctaccacag

SEQ ID NO: 932979 - DNA, 25 bp, Homo sapien
ctgggcagcaccatcgctggagcta

SEQ ID NO: 932980 - DNA, 25 bp, Homo sapien
catcgctggagctaccacagttggg

SEQ ID NO: 932981 - DNA, 25 bp, Homo sapien
gaagtgtcatgcatgtcctcggcac

SEQ ID NO: 932982 - DNA, 25 bp, Homo sapien
ttcgtacctaggcttgctcatgggc

SEQ ID NO: 932983 - DNA, 25 bp, Homo sapien
tgggtccaaacagaaagggtgtcgc

SEQ ID NO: 932984 - DNA, 25 bp, Homo sapien
ggccagcctggatgctaactaggga

SEQ ID NO: 932985 - DNA, 25 bp, Homo sapien
ttaccacttcttgcagtgtaggtgg

SEQ ID NO: 932986 - DNA, 25 bp, Homo sapien
taggatctgtctatggttggtgccc

SEQ ID NO: 932987 - DNA, 25 bp, Homo sapien
tatagactcgaggtgatggatggca

SEQ ID NO: 932988 - DNA, 25 bp, Homo sapien
tagtccccaagtttcgtgtctagga

SEQ ID NO: 932989 - DNA, 25 bp, Homo sapien
ttggtgcccagagtcagtcaagtcc

SEQ ID NO: 932990 - DNA, 25 bp, Homo sapien
accagcaagctcgtagtgctttttc

SEQ ID NO: 932991 - DNA, 25 bp, Homo sapien
gtgctttttccgaagctctcccagt

SEQ ID NO: 932992 - DNA, 25 bp, Homo sapien
tttttgacgctccttctgcaattca

SEQ ID NO: 932993 - DNA, 25 bp, Homo sapien
tctcccagtttttgacgctccttct

SEQ ID NO: 932994 - DNA, 25 bp, Homo sapien
ctgagaatccatctcttggcgtttg

SEQ ID NO: 932995 - DNA, 25 bp, Homo sapien
tctcttggcgtttgatctgtgtcag

SEQ ID NO: 932996 - DNA, 25 bp, Homo sapien
tgatctgtgtcagcgtcatgcttga

SEQ ID NO: 932997 - DNA, 25 bp, Homo sapien
tctgtgtcagcgtcatgcttgagaa

SEQ ID NO: 932998 - DNA, 25 bp, Homo sapien
acaacgccggcagtggcctggttca

SEQ ID NO: 932999 - DNA, 25 bp, Homo sapien
aatggttgaggccacaacgccggca

SEQ ID NO: 933000 - DNA, 25 bp, Homo sapien
tctcttcgatctgtgatttgccgga

SEQ ID NO: 933001 - DNA, 25 bp, Homo sapien
gcctggttcactccccgagaggcct

SEQ ID NO: 933002 - DNA, 25 bp, Homo sapien
gcaatttcatgagaacacaccatta

SEQ ID NO: 933003 - DNA, 25 bp, Homo sapien
gcagcaatttcatgagaacacacca

SEQ ID NO: 933004 - DNA, 25 bp, Homo sapien
tttcatgagaacacaccattagctc

SEQ ID NO: 933005 - DNA, 25 bp, Homo sapien
gagaacacaccattagctcctcaaa

SEQ ID NO: 933006 - DNA, 25 bp, Homo sapien
ccatcgagagttcttggcataaaac

SEQ ID NO: 933007 - DNA, 25 bp, Homo sapien
tctgtccatcgagagttcttggcat

SEQ ID NO: 933008 - DNA, 25 bp, Homo sapien
gccttggaggctgagataagtcctt

SEQ ID NO: 933009 - DNA, 25 bp, Homo sapien
ggctgagataagtccttctgtccat

SEQ ID NO: 933010 - DNA, 25 bp, Homo sapien
ggccacgatgagcacctgaatagct

SEQ ID NO: 933011 - DNA, 25 bp, Homo sapien
gaggtccttagaggccacgatgagc

SEQ ID NO: 933012 - DNA, 25 bp, Homo sapien
gcacctgaatagcttgcatgaggct

SEQ ID NO: 933013 - DNA, 25 bp, Homo sapien
cttgcatgaggctggtacagcaacc

SEQ ID NO: 933014 - DNA, 25 bp, Homo sapien
ggatacactgagatcaagatccaag

SEQ ID NO: 933015 - DNA, 25 bp, Homo sapien
caagatcaatgaaaacgacggttct

SEQ ID NO: 933016 - DNA, 25 bp, Homo sapien
gccaaacaaacaagtcgaggataca

SEQ ID NO: 933017 - DNA, 25 bp, Homo sapien
tcaatgaaaacgacggttctcttcc

SEQ ID NO: 933018 - DNA, 25 bp, Homo sapien
tgtctcctgctcgggatttgctgag

SEQ ID NO: 933019 - DNA, 25 bp, Homo sapien
gtctcctgctcgggatttgctgagc

SEQ ID NO: 933020 - DNA, 25 bp, Homo sapien
ttcacctccaatttgactcctgtgt

SEQ ID NO: 933021 - DNA, 25 bp, Homo sapien
tgcttgatgtccagtcccctgggca

SEQ ID NO: 933022 - DNA, 25 bp, Homo sapien
tctattctggccgtggcagtttcaa

SEQ ID NO: 933023 - DNA, 25 bp, Homo sapien
tcctgcttgatgtccagtcccctgg

SEQ ID NO: 933024 - DNA, 25 bp, Homo sapien
agcagctgaagtggccgccatctcc

SEQ ID NO: 933025 - DNA, 25 bp, Homo sapien
catactgcttacaggcctcggtcag

SEQ ID NO: 933026 - DNA, 25 bp, Homo sapien
tgtcggcattctcaaggcttccctc

SEQ ID NO: 933027 - DNA, 25 bp, Homo sapien
tttccctgccatactgcttacaggc

SEQ ID NO: 933028 - DNA, 25 bp, Homo sapien
gccaggtaggcgagggtttccctgc

SEQ ID NO: 933029 - DNA, 25 bp, Homo sapien
tatggaatggagaagtccactgatg

SEQ ID NO: 933030 - DNA, 25 bp, Homo sapien
tggtggcaccatgagcaatggcgtc

SEQ ID NO: 933031 - DNA, 25 bp, Homo sapien
accatgagcaatggcgtcgctggtc

SEQ ID NO: 933032 - DNA, 25 bp, Homo sapien
aagtgggccagcagggttatggaat

SEQ ID NO: 933033 - DNA, 25 bp, Homo sapien
atactggctccagcttttctccagt

SEQ ID NO: 933034 - DNA, 25 bp, Homo sapien
cttctgggcaggccagatactggct

SEQ ID NO: 933035 - DNA, 25 bp, Homo sapien
tgggcaggccagatactggctccag

SEQ ID NO: 933036 - DNA, 25 bp, Homo sapien
ctcgatgcagctggaaatggatgtg

SEQ ID NO: 933037 - DNA, 25 bp, Homo sapien
gaagcatttttcgttggtctttggc

SEQ ID NO: 933038 - DNA, 25 bp, Homo sapien
ctttggcaagctggcacatagattc

SEQ ID NO: 933039 - DNA, 25 bp, Homo sapien
gcgtcttgtatcacctgctccgcag

SEQ ID NO: 933040 - DNA, 25 bp, Homo sapien
ttcaagctggttcagggcgtcttgt

SEQ ID NO: 933041 - DNA, 25 bp, Homo sapien
aattcctcctccctatgagctgcgc

SEQ ID NO: 933042 - DNA, 25 bp, Homo sapien
ctttccgaagagcagataattcctc

SEQ ID NO: 933043 - DNA, 25 bp, Homo sapien
tcctccctatgagctgcgccactca

SEQ ID NO: 933044 - DNA, 25 bp, Homo sapien
agttctttccgaagagcagataatt

SEQ ID NO: 933045 - DNA, 25 bp, Homo sapien
tccttctctagctcggcgaactcgg

SEQ ID NO: 933046 - DNA, 25 bp, Homo sapien
ctagctcggcgaactcggctgccca

SEQ ID NO: 933047 - DNA, 25 bp, Homo sapien
ctccttctctagctcggcgaactcg

SEQ ID NO: 933048 - DNA, 25 bp, Homo sapien
ttctctagctcggcgaactcggctg

SEQ ID NO: 933049 - DNA, 25 bp, Homo sapien
gaacctgaagctcccgttggcttgt

SEQ ID NO: 933050 - DNA, 25 bp, Homo sapien
ccgttggcttgtggcaagttcctgc

SEQ ID NO: 933051 - DNA, 25 bp, Homo sapien
gaagctcccgttggcttgtggcaag

SEQ ID NO: 933052 - DNA, 25 bp, Homo sapien
gcttcaagctctctagaacttccag

SEQ ID NO: 933053 - DNA, 25 bp, Homo sapien
tgatgcgctccaacgaatcctccag

SEQ ID NO: 933054 - DNA, 25 bp, Homo sapien
catggacacctgtttggtcacctct

SEQ ID NO: 933055 - DNA, 25 bp, Homo sapien
ctggtcactgatgcgctccaacgaa

SEQ ID NO: 933056 - DNA, 25 bp, Homo sapien
tggacacctgtttggtcacctctgc

SEQ ID NO: 933057 - DNA, 25 bp, Homo sapien
tccgcagcaggtcagcgtggttctg

SEQ ID NO: 933058 - DNA, 25 bp, Homo sapien
tctcctttagcttgctatatcgctg

SEQ ID NO: 933059 - DNA, 25 bp, Homo sapien
gcgtggttctgaaccagctcgctgt

SEQ ID NO: 933060 - DNA, 25 bp, Homo sapien
cttgctatatcgctgttcattggct

SEQ ID NO: 933061 - DNA, 25 bp, Homo sapien
tttctatctcagacaggctccgctg

SEQ ID NO: 933062 - DNA, 25 bp, Homo sapien
aggaattcacagtcgtcggccgcct

SEQ ID NO: 933063 - DNA, 25 bp, Homo sapien
tgagctcgtccagttctgcccgcag

SEQ ID NO: 933064 - DNA, 25 bp, Homo sapien
ctgctgctcggccagatctgcttcc

SEQ ID NO: 933065 - DNA, 25 bp, Homo sapien
ggggggactccggtcatgaggccaa

SEQ ID NO: 933066 - DNA, 25 bp, Homo sapien
ggggactccggtcatgaggccaacc

SEQ ID NO: 933067 - DNA, 25 bp, Homo sapien
ggactccggtcatgaggccaaccgc

SEQ ID NO: 933068 - DNA, 25 bp, Homo sapien
tgtggggggactccggtcatgaggc

SEQ ID NO: 933069 - DNA, 25 bp, Homo sapien
caaggtcatctctgggtatcaatca

SEQ ID NO: 933070 - DNA, 25 bp, Homo sapien
cttatcgccatgtgagaaggtctgg

SEQ ID NO: 933071 - DNA, 25 bp, Homo sapien
gcctaaatgctgtcctcatggcatg

SEQ ID NO: 933072 - DNA, 25 bp, Homo sapien
gaaggtctggtcttgttctccacag

SEQ ID NO: 933073 - DNA, 25 bp, Homo sapien
gatctctctgtatagtcgctcaatt

SEQ ID NO: 933074 - DNA, 25 bp, Homo sapien
gtatagtcgctcaattaagtggtcc

SEQ ID NO: 933075 - DNA, 25 bp, Homo sapien
ttctagctgtgccttcaatccactg

SEQ ID NO: 933076 - DNA, 25 bp, Homo sapien
tcaatccactgatctctctgtatag

SEQ ID NO: 933077 - DNA, 25 bp, Homo sapien
ctgtatctaagaagccccagtatca

SEQ ID NO: 933078 - DNA, 25 bp, Homo sapien
ggcttaacttagctcctgaaccatc

SEQ ID NO: 933079 - DNA, 25 bp, Homo sapien
ttgaggcagaccatggcttaactta

SEQ ID NO: 933080 - DNA, 25 bp, Homo sapien
gatgttctgtatctaagaagcccca

SEQ ID NO: 933081 - DNA, 25 bp, Homo sapien
aaagatgtcatcaaacttgttgtca

SEQ ID NO: 933082 - DNA, 25 bp, Homo sapien
aaattgaagggatcactgctgaatg

SEQ ID NO: 933083 - DNA, 25 bp, Homo sapien
tttgactgttgaaattgaagggatc

SEQ ID NO: 933084 - DNA, 25 bp, Homo sapien
actgctgaatgaactgccaaagatg

SEQ ID NO: 933085 - DNA, 25 bp, Homo sapien
ctgtggttgaccaaaaaggagtgag

SEQ ID NO: 933086 - DNA, 25 bp, Homo sapien
agaattctgtgtgtgggtcagttga

SEQ ID NO: 933087 - DNA, 25 bp, Homo sapien
gttgagtgatatgggagaatgcccc

SEQ ID NO: 933088 - DNA, 25 bp, Homo sapien
tctcgaattaaacggttcagacctg

SEQ ID NO: 933089 - DNA, 25 bp, Homo sapien
ttctctaggactggctcgctgtcgg

SEQ ID NO: 933090 - DNA, 25 bp, Homo sapien
ccaccacagggctgatatgttctga

SEQ ID NO: 933091 - DNA, 25 bp, Homo sapien
atgaggtcatccttctctaggactg

SEQ ID NO: 933092 - DNA, 25 bp, Homo sapien
gagaggcatccatgtccatgaggtc

SEQ ID NO: 933093 - DNA, 25 bp, Homo sapien
cctctgcagtgccgagggtgtgtgg

SEQ ID NO: 933094 - DNA, 25 bp, Homo sapien
agccgcttgaagtactgcaggttgc

SEQ ID NO: 933095 - DNA, 25 bp, Homo sapien
ttgctggagcggtagaacagatctt

SEQ ID NO: 933096 - DNA, 25 bp, Homo sapien
gttgctggagcggtagaacagatct

SEQ ID NO: 933097 - DNA, 25 bp, Homo sapien
ttgaagtactgcaggttgctggagc

SEQ ID NO: 933098 - DNA, 25 bp, Homo sapien
cagccccatgtaggggacagagcag

SEQ ID NO: 933099 - DNA, 25 bp, Homo sapien
gccccatgtaggggacagagcagcc

SEQ ID NO: 933100 - DNA, 25 bp, Homo sapien
tcatcagccccatgtaggggacaga

SEQ ID NO: 933101 - DNA, 25 bp, Homo sapien
tcagccccatgtaggggacagagca

SEQ ID NO: 933102 - DNA, 25 bp, Homo sapien
tttgtttttgttttgagatggaatc

SEQ ID NO: 933103 - DNA, 25 bp, Homo sapien
ccagcctaagtaaagatcttttgtt

SEQ ID NO: 933104 - DNA, 25 bp, Homo sapien
ggaatctcattctgacgcccaggcc

SEQ ID NO: 933105 - DNA, 25 bp, Homo sapien
atctcattctgacgcccaggcctga

SEQ ID NO: 933106 - DNA, 25 bp, Homo sapien
aactgctccatgaagcggtcccggt

SEQ ID NO: 933107 - DNA, 25 bp, Homo sapien
gctccatgaagcggtcccggtggcc

SEQ ID NO: 933108 - DNA, 25 bp, Homo sapien
ctgctccatgaagcggtcccggtgg

SEQ ID NO: 933109 - DNA, 25 bp, Homo sapien
tccatgaagcggtcccggtggcctt

SEQ ID NO: 933110 - DNA, 25 bp, Homo sapien
tttggaaatgggtcatacattcact

SEQ ID NO: 933111 - DNA, 25 bp, Homo sapien
gcagaagtggacagtgaatgaatat

SEQ ID NO: 933112 - DNA, 25 bp, Homo sapien
gaatgaatatggcacttgacctaaa

SEQ ID NO: 933113 - DNA, 25 bp, Homo sapien
tgacctaaatgatctttctcccaag

SEQ ID NO: 933114 - DNA, 25 bp, Homo sapien
aagagaagcttgacagtgtagtcat

SEQ ID NO: 933115 - DNA, 25 bp, Homo sapien
ccaagatgacctggatcagcggggc

SEQ ID NO: 933116 - DNA, 25 bp, Homo sapien
cctgctgccgtcacggacacagagc

SEQ ID NO: 933117 - DNA, 25 bp, Homo sapien
agcttgacagtgtagtcataaaggt

SEQ ID NO: 933118 - DNA, 25 bp, Homo sapien
ttgaaaactgtatgtccaagctcag

SEQ ID NO: 933119 - DNA, 25 bp, Homo sapien
tcagtgggtgtcaaaagtcttcccc

SEQ ID NO: 933120 - DNA, 25 bp, Homo sapien
gtagattctaatctgcatccagggt

SEQ ID NO: 933121 - DNA, 25 bp, Homo sapien
caagctcagtggttgtcaagtttta

SEQ ID NO: 933122 - DNA, 25 bp, Homo sapien
ctgtttggaagaggttgagttcaca

SEQ ID NO: 933123 - DNA, 25 bp, Homo sapien
tccaggtagtcaaacatctccactg

SEQ ID NO: 933124 - DNA, 25 bp, Homo sapien
caaacatctccactgttaactggaa

SEQ ID NO: 933125 - DNA, 25 bp, Homo sapien
agaggttgagttcacactccaggta

SEQ ID NO: 933126 - DNA, 25 bp, Homo sapien
tcatctgcaggttgcctgggaacct

SEQ ID NO: 933127 - DNA, 25 bp, Homo sapien
tggcggtcactcatctgcaggttgc

SEQ ID NO: 933128 - DNA, 25 bp, Homo sapien
gtccagctggcggtcactcatctgc

SEQ ID NO: 933129 - DNA, 25 bp, Homo sapien
agcctcgtccagctggcggtcactc

SEQ ID NO: 933130 - DNA, 25 bp, Homo sapien
gtggtactccatcttggttcttagc

SEQ ID NO: 933131 - DNA, 25 bp, Homo sapien
tcttagcagtttcaggtagatgctg

SEQ ID NO: 933132 - DNA, 25 bp, Homo sapien
tggtgtggtactccatcttggttct

SEQ ID NO: 933133 - DNA, 25 bp, Homo sapien
caggtagatgctgcacagctggcca

SEQ ID NO: 933134 - DNA, 25 bp, Homo sapien
cattgactgtgatattgccacctac

SEQ ID NO: 933135 - DNA, 25 bp, Homo sapien
tctcaatgcactatgactccaacgg

SEQ ID NO: 933136 - DNA, 25 bp, Homo sapien
aagctctggcattaagaattgggta

SEQ ID NO: 933137 - DNA, 25 bp, Homo sapien
tatacacacccacggacatcagaat

SEQ ID NO: 933138 - DNA, 25 bp, Homo sapien
ttctgtatctcagagagtccttcag

SEQ ID NO: 933139 - DNA, 25 bp, Homo sapien
gcagagcactgcgttgctagacaga

SEQ ID NO: 933140 - DNA, 25 bp, Homo sapien
catctcggaggagtttgtggaacac

SEQ ID NO: 933141 - DNA, 25 bp, Homo sapien
gaggcaggcggttgacaacagacca

SEQ ID NO: 933142 - DNA, 25 bp, Homo sapien
tgtggaacacatggcagaacttcca

SEQ ID NO: 933143 - DNA, 25 bp, Homo sapien
tgcccctttctcatggtgggtgccc

SEQ ID NO: 933144 - DNA, 25 bp, Homo sapien
ctgtgcccctttctcatggtgggtg

SEQ ID NO: 933145 - DNA, 25 bp, Homo sapien
gcccctttctcatggtgggtgccca

SEQ ID NO: 933146 - DNA, 25 bp, Homo sapien
tgtgcccctttctcatggtgggtgc

SEQ ID NO: 933147 - DNA, 25 bp, Homo sapien
tgccagtcactgcaggggactgagc

SEQ ID NO: 933148 - DNA, 25 bp, Homo sapien
ctgccagtcactgcaggggactgag

SEQ ID NO: 933149 - DNA, 25 bp, Homo sapien
aatttgcacaaataccctgtaggcc

SEQ ID NO: 933150 - DNA, 25 bp, Homo sapien
gggagcgccgctcagagctaagaca

SEQ ID NO: 933151 - DNA, 25 bp, Homo sapien
caatttcccgagatgtaagcgtctt

SEQ ID NO: 933152 - DNA, 25 bp, Homo sapien
ccgagcagtagtgcaagtcgtggtt

SEQ ID NO: 933153 - DNA, 25 bp, Homo sapien
ccctccctctctctctcgttcgttc

SEQ ID NO: 933154 - DNA, 25 bp, Homo sapien
ctctctcgttcgttctttctttcta

SEQ ID NO: 933155 - DNA, 25 bp, Homo sapien
tctctcgttcgttctttctttctat

SEQ ID NO: 933156 - DNA, 25 bp, Homo sapien
tccctctctctctcgttcgttcttt

SEQ ID NO: 933157 - DNA, 25 bp, Homo sapien
ctccctcagggtcggtcttccaagc

SEQ ID NO: 933158 - DNA, 25 bp, Homo sapien
tccctcagggtcggtcttccaagca

SEQ ID NO: 933159 - DNA, 25 bp, Homo sapien
ccctcagggtcggtcttccaagcaa

SEQ ID NO: 933160 - DNA, 25 bp, Homo sapien
cctcagggtcggtcttccaagcaac

SEQ ID NO: 933161 - DNA, 25 bp, Homo sapien
cgtattaatggccttattgatgctg

SEQ ID NO: 933162 - DNA, 25 bp, Homo sapien
tcctgcgtattaatggccttattga

SEQ ID NO: 933163 - DNA, 25 bp, Homo sapien
attaatggccttattgatgctgaca

SEQ ID NO: 933164 - DNA, 25 bp, Homo sapien
gccacttcctgcgtattaatggcct

SEQ ID NO: 933165 - DNA, 25 bp, Homo sapien
ccacgggtggtcggttcctctgcag

SEQ ID NO: 933166 - DNA, 25 bp, Homo sapien
cccacgggtggtcggttcctctgca

SEQ ID NO: 933167 - DNA, 25 bp, Homo sapien
cacgggtggtcggttcctctgcagg

SEQ ID NO: 933168 - DNA, 25 bp, Homo sapien
aacattatttctcccggagcaggag

SEQ ID NO: 933169 - DNA, 25 bp, Homo sapien
gaggaagaggcgcagagatcaggga

SEQ ID NO: 933170 - DNA, 25 bp, Homo sapien
agatcagggagcgaccgtggcccaa

SEQ ID NO: 933171 - DNA, 25 bp, Homo sapien
aattaaagcccgcacaaagagatgc

SEQ ID NO: 933172 - DNA, 25 bp, Homo sapien
cagcaccggcggtggtcactaagtc

SEQ ID NO: 933173 - DNA, 25 bp, Homo sapien
cacagagccttctccggctggccag

SEQ ID NO: 933174 - DNA, 25 bp, Homo sapien
tctccggctggccagcaccggcggt

SEQ ID NO: 933175 - DNA, 25 bp, Homo sapien
ccggcggtggtcactaagtctttgt

SEQ ID NO: 933176 - DNA, 25 bp, Homo sapien
acttctaagcaaattcccttgtact

SEQ ID NO: 933177 - DNA, 25 bp, Homo sapien
tccaacttctaagcaaattcccttg

SEQ ID NO: 933178 - DNA, 25 bp, Homo sapien
caacttctaagcaaattcccttgta

SEQ ID NO: 933179 - DNA, 25 bp, Homo sapien
ttctaagcaaattcccttgtacttc

SEQ ID NO: 933180 - DNA, 25 bp, Homo sapien
gccctgaaccagcacccgctctgta

SEQ ID NO: 933181 - DNA, 25 bp, Homo sapien
agcacccgctctgtactgtggaggg

SEQ ID NO: 933182 - DNA, 25 bp, Homo sapien
gtcatgctctttggttccaagccct

SEQ ID NO: 933183 - DNA, 25 bp, Homo sapien
ggtcatgctctttggttccaagccc

SEQ ID NO: 933184 - DNA, 25 bp, Homo sapien
tttgcagtgtgaccaagctcaggct

SEQ ID NO: 933185 - DNA, 25 bp, Homo sapien
taaactcactggcacaagggagccg

SEQ ID NO: 933186 - DNA, 25 bp, Homo sapien
ggatcacaacctcggcactagacaa

SEQ ID NO: 933187 - DNA, 25 bp, Homo sapien
tctctacacagataaggccatgcgt

SEQ ID NO: 933188 - DNA, 25 bp, Homo sapien
tgacagggagagtacagaaccaaat

SEQ ID NO: 933189 - DNA, 25 bp, Homo sapien
gagtgaggatgacagggagagtaca

SEQ ID NO: 933190 - DNA, 25 bp, Homo sapien
cagggagagtacagaaccaaatgga

SEQ ID NO: 933191 - DNA, 25 bp, Homo sapien
aggatgacagggagagtacagaacc

SEQ ID NO: 933192 - DNA, 25 bp, Homo sapien
cttctgtctttggggtgaagaagag

SEQ ID NO: 933193 - DNA, 25 bp, Homo sapien
tctgtctttggggtgaagaagagcc

SEQ ID NO: 933194 - DNA, 25 bp, Homo sapien
tgtctttggggtgaagaagagccct

SEQ ID NO: 933195 - DNA, 25 bp, Homo sapien
tctttggggtgaagaagagcccttc

SEQ ID NO: 933196 - DNA, 25 bp, Homo sapien
tagacctcaggatgatggtcaaggg

SEQ ID NO: 933197 - DNA, 25 bp, Homo sapien
caactactagaaaatctggcagaag

SEQ ID NO: 933198 - DNA, 25 bp, Homo sapien
tgacggctggatccacagttgagta

SEQ ID NO: 933199 - DNA, 25 bp, Homo sapien
ctgtagaccctctggctgacggctg

SEQ ID NO: 933200 - DNA, 25 bp, Homo sapien
tgaatggaacctcatcttggtgaga

SEQ ID NO: 933201 - DNA, 25 bp, Homo sapien
gttaaagcagcgcaaatggactatg

SEQ ID NO: 933202 - DNA, 25 bp, Homo sapien
gactatgcaactgaccgtagtaaaa

SEQ ID NO: 933203 - DNA, 25 bp, Homo sapien
gataaaatcttagtgatcagtgacg

SEQ ID NO: 933204 - DNA, 25 bp, Homo sapien
taaggttctccttgctacacaggca

SEQ ID NO: 933205 - DNA, 25 bp, Homo sapien
gacgattgtttctggattgggcgct

SEQ ID NO: 933206 - DNA, 25 bp, Homo sapien
gggcgcttggctgctcaatgattaa

SEQ ID NO: 933207 - DNA, 25 bp, Homo sapien
gaaagtacttttggcctcttgcagg

SEQ ID NO: 933208 - DNA, 25 bp, Homo sapien
ggtcagaatgccttggttggcattc

SEQ ID NO: 933209 - DNA, 25 bp, Homo sapien
cttggttggcattcagggacttgct

SEQ ID NO: 933210 - DNA, 25 bp, Homo sapien
agggacttgctggtctggccccaaa

SEQ ID NO: 933211 - DNA, 25 bp, Homo sapien
ccagggtcagaatgccttggttggc

SEQ ID NO: 933212 - DNA, 25 bp, Homo sapien
gctgagccatatgcggatgccaggt

SEQ ID NO: 933213 - DNA, 25 bp, Homo sapien
tttccacagatttgacgtcgcaggg

SEQ ID NO: 933214 - DNA, 25 bp, Homo sapien
ttaaacacaggtgtccatggtccct

SEQ ID NO: 933215 - DNA, 25 bp, Homo sapien
ggtgatttcaagcacggctgagcca

SEQ ID NO: 933216 - DNA, 25 bp, Homo sapien
ggccaaaagttcagcataggcggag

SEQ ID NO: 933217 - DNA, 25 bp, Homo sapien
gatattaatagacctgtttttcctc

SEQ ID NO: 933218 - DNA, 25 bp, Homo sapien
gaacgctttgcctctgatattaata

SEQ ID NO: 933219 - DNA, 25 bp, Homo sapien
gcataggcggagacctctgaacgct

SEQ ID NO: 933220 - DNA, 25 bp, Homo sapien
cagtggtctggagttcatttggcca

SEQ ID NO: 933221 - DNA, 25 bp, Homo sapien
gctgtcctgttatacaatccagtgg

SEQ ID NO: 933222 - DNA, 25 bp, Homo sapien
tgcaaaactcggttaagaacagggc

SEQ ID NO: 933223 - DNA, 25 bp, Homo sapien
gaacagggctccgtgacttctcttt

SEQ ID NO: 933224 - DNA, 25 bp, Homo sapien
taactcgcagctatttgaagctttc

SEQ ID NO: 933225 - DNA, 25 bp, Homo sapien
catgacctttgctaactcgcagcta

SEQ ID NO: 933226 - DNA, 25 bp, Homo sapien
tccagggctccacgattttcctaga

SEQ ID NO: 933227 - DNA, 25 bp, Homo sapien
ggtacacttcaaggtgacaccatcc

SEQ ID NO: 933228 - DNA, 25 bp, Homo sapien
ccaaatgagctgtaatggtcccttg

SEQ ID NO: 933229 - DNA, 25 bp, Homo sapien
gaggaagctggctcaaaacagacca

SEQ ID NO: 933230 - DNA, 25 bp, Homo sapien
tgtgtgctaatctgtccccgctctg

SEQ ID NO: 933231 - DNA, 25 bp, Homo sapien
aagcaaaggcatttactcggactcg

SEQ ID NO: 933232 - DNA, 25 bp, Homo sapien
caaatggacatctgtacagcacttg

SEQ ID NO: 933233 - DNA, 25 bp, Homo sapien
agcttgggtcgaatccttgctctgc

SEQ ID NO: 933234 - DNA, 25 bp, Homo sapien
taagtagttctctgaagtgtattcc

SEQ ID NO: 933235 - DNA, 25 bp, Homo sapien
ccctaatgaaaggtagtggagcttg

SEQ ID NO: 933236 - DNA, 25 bp, Homo sapien
aataaaaatgttggctgtgccgtgg

SEQ ID NO: 933237 - DNA, 25 bp, Homo sapien
caaggacacgctccttggagtacag

SEQ ID NO: 933238 - DNA, 25 bp, Homo sapien
tgtgccgtggcattcaaggacacgc

SEQ ID NO: 933239 - DNA, 25 bp, Homo sapien
tacagttttcgactgcagctgtgcc

SEQ ID NO: 933240 - DNA, 25 bp, Homo sapien
ttggcaagaatgtaaagaaaccgga

SEQ ID NO: 933241 - DNA, 25 bp, Homo sapien
acagtggagaagtttggttattcct

SEQ ID NO: 933242 - DNA, 25 bp, Homo sapien
caggtgttggcaagaatgtaaagaa

SEQ ID NO: 933243 - DNA, 25 bp, Homo sapien
tgtgaccacagtggagaagtttggt

SEQ ID NO: 933244 - DNA, 25 bp, Homo sapien
gcagtgaggctctaaaaagttaatt

SEQ ID NO: 933245 - DNA, 25 bp, Homo sapien
tagatgtttatattagcagtgaggc

SEQ ID NO: 933246 - DNA, 25 bp, Homo sapien
aattccgtgtgcatggcggagctca

SEQ ID NO: 933247 - DNA, 25 bp, Homo sapien
cttgaactctatgagaaaactatgg

SEQ ID NO: 933248 - DNA, 25 bp, Homo sapien
cttccagataaatgttagaatttaa

SEQ ID NO: 933249 - DNA, 25 bp, Homo sapien
gtagaacaagtttctcctggatgta

SEQ ID NO: 933250 - DNA, 25 bp, Homo sapien
catcaatgtgtttcggcagatcagg

SEQ ID NO: 933251 - DNA, 25 bp, Homo sapien
tctaggctggttccatcaatgtgtt

SEQ ID NO: 933252 - DNA, 25 bp, Homo sapien
cagtggatagaacaaggttctaggc

SEQ ID NO: 933253 - DNA, 25 bp, Homo sapien
tcggcagatcaggatagaaaacggg

SEQ ID NO: 933254 - DNA, 25 bp, Homo sapien
cctaaacaagaatgactgctgtagc

SEQ ID NO: 933255 - DNA, 25 bp, Homo sapien
aacaagaatgactgctgtagcctct

SEQ ID NO: 933256 - DNA, 25 bp, Homo sapien
ataaaaatgctaccaaggtcaggca

SEQ ID NO: 933257 - DNA, 25 bp, Homo sapien
actgctgtagcctctccggatggga

SEQ ID NO: 933258 - DNA, 25 bp, Homo sapien
agtgagacccatatctattttaaaa

SEQ ID NO: 933259 - DNA, 25 bp, Homo sapien
tgttttttaaattaagctgggcatg

SEQ ID NO: 933260 - DNA, 25 bp, Homo sapien
acatagtgagacccatatctatttt

SEQ ID NO: 933261 - DNA, 25 bp, Homo sapien
catagtgagacccatatctatttta

SEQ ID NO: 933262 - DNA, 25 bp, Homo sapien
gcctacataacagcttaatcaactg

SEQ ID NO: 933263 - DNA, 25 bp, Homo sapien
cacccagcctacataacagcttaat

SEQ ID NO: 933264 - DNA, 25 bp, Homo sapien
tagttcttacataacagccttttat

SEQ ID NO: 933265 - DNA, 25 bp, Homo sapien
cccagcctacataacagcttaatca

SEQ ID NO: 933266 - DNA, 25 bp, Homo sapien
tgtctatccagaagcaaaattgatg

SEQ ID NO: 933267 - DNA, 25 bp, Homo sapien
atctcttcatgagcctgccttcaat

SEQ ID NO: 933268 - DNA, 25 bp, Homo sapien
tttaagactccataatattccgttg

SEQ ID NO: 933269 - DNA, 25 bp, Homo sapien
ctgtgaacatgggtctacaaacatc

SEQ ID NO: 933270 - DNA, 25 bp, Homo sapien
ctttttggtggtatccttaggatca

SEQ ID NO: 933271 - DNA, 25 bp, Homo sapien
catattgactttgtaccttgctact

SEQ ID NO: 933272 - DNA, 25 bp, Homo sapien
ggtatccttaggatcacagcattta

SEQ ID NO: 933273 - DNA, 25 bp, Homo sapien
ccttttcagatcgttcattgttcat

SEQ ID NO: 933274 - DNA, 25 bp, Homo sapien
gcctggcatattgagtgtttttatc

SEQ ID NO: 933275 - DNA, 25 bp, Homo sapien
ctgtgcctggcatattgagtgtttt

SEQ ID NO: 933276 - DNA, 25 bp, Homo sapien
tgtgcctggcatattgagtgttttt

SEQ ID NO: 933277 - DNA, 25 bp, Homo sapien
gtgcctggcatattgagtgttttta

SEQ ID NO: 933278 - DNA, 25 bp, Homo sapien
gatgttaacttaccattccatagac

SEQ ID NO: 933279 - DNA, 25 bp, Homo sapien
tgacacatgccccaaatgaccaaga

SEQ ID NO: 933280 - DNA, 25 bp, Homo sapien
tttgtctacctatgagaactgcaca

SEQ ID NO: 933281 - DNA, 25 bp, Homo sapien
tgttcccctactattatcactgtgt

SEQ ID NO: 933282 - DNA, 25 bp, Homo sapien
tatttggccctcaaaatgagcctga

SEQ ID NO: 933283 - DNA, 25 bp, Homo sapien
taaaacattgacacctcaccgtcgc

SEQ ID NO: 933284 - DNA, 25 bp, Homo sapien
gctttttctggataggtggctcaca

SEQ ID NO: 933285 - DNA, 25 bp, Homo sapien
ctttaaatatctgtgccgggaagct

SEQ ID NO: 933286 - DNA, 25 bp, Homo sapien
tgtttgtttgtagtttagctgagac

SEQ ID NO: 933287 - DNA, 25 bp, Homo sapien
gtagtttagctgagacgcggtttta

SEQ ID NO: 933288 - DNA, 25 bp, Homo sapien
tgtttgtagtttagctgagacgcgg

SEQ ID NO: 933289 - DNA, 25 bp, Homo sapien
tttgtagtttagctgagacgcggtt

SEQ ID NO: 933290 - DNA, 25 bp, Homo sapien
catctactgcatgcttgctctgtgg

SEQ ID NO: 933291 - DNA, 25 bp, Homo sapien
cgctttaaagggagatacagaaaga

SEQ ID NO: 933292 - DNA, 25 bp, Homo sapien
cactgacccggcttccgctttaaag

SEQ ID NO: 933293 - DNA, 25 bp, Homo sapien
taagtcacacatatctaagccactg

SEQ ID NO: 933294 - DNA, 25 bp, Homo sapien
ttgcaagaaggcacctgctcagact

SEQ ID NO: 933295 - DNA, 25 bp, Homo sapien
cagacttcaggcaaggggtgacttc

SEQ ID NO: 933296 - DNA, 25 bp, Homo sapien
tcagacttcaggcaaggggtgactt

SEQ ID NO: 933297 - DNA, 25 bp, Homo sapien
tccttgcaagaaggcacctgctcag

SEQ ID NO: 933298 - DNA, 25 bp, Homo sapien
ctgcaggaagcaggcttagggccat

SEQ ID NO: 933299 - DNA, 25 bp, Homo sapien
gaagcaggcttagggccatcttggt

SEQ ID NO: 933300 - DNA, 25 bp, Homo sapien
gcaggaagcaggcttagggccatct

SEQ ID NO: 933301 - DNA, 25 bp, Homo sapien
aggaagcaggcttagggccatcttg

SEQ ID NO: 933302 - DNA, 25 bp, Homo sapien
cttgaaagtggcttgtgatggattg

SEQ ID NO: 933303 - DNA, 25 bp, Homo sapien
aagtggcttgtgatggattgggtgg

SEQ ID NO: 933304 - DNA, 25 bp, Homo sapien
taaagcttgaaagtggcttgtgatg

SEQ ID NO: 933305 - DNA, 25 bp, Homo sapien
aagcttgaaagtggcttgtgatgga

SEQ ID NO: 933306 - DNA, 25 bp, Homo sapien
gaaatgtgaggatggtgcaggagag

SEQ ID NO: 933307 - DNA, 25 bp, Homo sapien
aatgtgaggatggtgcaggagagtt

SEQ ID NO: 933308 - DNA, 25 bp, Homo sapien
tgaaatgtgaggatggtgcaggaga

SEQ ID NO: 933309 - DNA, 25 bp, Homo sapien
ggtgaaatgtgaggatggtgcagga

SEQ ID NO: 933310 - DNA, 25 bp, Homo sapien
gcagtgagagtcttttgatgggcat

SEQ ID NO: 933311 - DNA, 25 bp, Homo sapien
tagacgccaggacagaagaaggcag

SEQ ID NO: 933312 - DNA, 25 bp, Homo sapien
cagagcagtgagagtcttttgatgg

SEQ ID NO: 933313 - DNA, 25 bp, Homo sapien
gtctgagggtatagacgccaggaca

SEQ ID NO: 933314 - DNA, 25 bp, Homo sapien
gctctagactgggtatgcgggaggc

SEQ ID NO: 933315 - DNA, 25 bp, Homo sapien
aggcaaggctagaccaacagcgacc

SEQ ID NO: 933316 - DNA, 25 bp, Homo sapien
ggaggcaaggctagaccaacagcga

SEQ ID NO: 933317 - DNA, 25 bp, Homo sapien
ctgggtatgcgggaggcaaggctag

SEQ ID NO: 933318 - DNA, 25 bp, Homo sapien
gatctcagtgtgttgtctaggcagg

SEQ ID NO: 933319 - DNA, 25 bp, Homo sapien
caatgcaaccaagaagtgatcggag

SEQ ID NO: 933320 - DNA, 25 bp, Homo sapien
tacaccaggcattaaaaactcggag

SEQ ID NO: 933321 - DNA, 25 bp, Homo sapien
ttttcaaaatagaggcgggatctca

SEQ ID NO: 933322 - DNA, 25 bp, Homo sapien
gcagtgggttgggcacctgcttcat

SEQ ID NO: 933323 - DNA, 25 bp, Homo sapien
ctgagtccgctcgaagctctcgcgc

SEQ ID NO: 933324 - DNA, 25 bp, Homo sapien
gctcgaagctctcgcgctccgccgc

SEQ ID NO: 933325 - DNA, 25 bp, Homo sapien
ggcagtgggttgggcacctgcttca

SEQ ID NO: 933326 - DNA, 25 bp, Homo sapien
gagccgagtcaggggccctcggctg

SEQ ID NO: 933327 - DNA, 25 bp, Homo sapien
cctcggctgccccgggatccccacg

SEQ ID NO: 933328 - DNA, 25 bp, Homo sapien
ctcggctgccccgggatccccacgg

SEQ ID NO: 933329 - DNA, 25 bp, Homo sapien
ggagccgagtcaggggccctcggct

SEQ ID NO: 933330 - DNA, 25 bp, Homo sapien
tgggacccgggagcgccggactgac

SEQ ID NO: 933331 - DNA, 25 bp, Homo sapien
tgcgaatagcccgttagctccttcc

SEQ ID NO: 933332 - DNA, 25 bp, Homo sapien
gggaatcccagcccgcctgcgaata

SEQ ID NO: 933333 - DNA, 25 bp, Homo sapien
gctatcccgcgacggcccgtggaga

SEQ ID NO: 933334 - DNA, 25 bp, Homo sapien
tatcttaggctctgagccgcgcgtc

SEQ ID NO: 933335 - DNA, 25 bp, Homo sapien
tcatcaaaggaacccgtcagagctt

SEQ ID NO: 933336 - DNA, 25 bp, Homo sapien
ctgcaaggatcgcagagcccaggtc

SEQ ID NO: 933337 - DNA, 25 bp, Homo sapien
tgttggtagaaagccctgtagacac

SEQ ID NO: 933338 - DNA, 25 bp, Homo sapien
agtgagaaggcattaaacagtagaa

SEQ ID NO: 933339 - DNA, 25 bp, Homo sapien
gagaaggcattaaacagtagaacaa

SEQ ID NO: 933340 - DNA, 25 bp, Homo sapien
agaaggcattaaacagtagaacaag

SEQ ID NO: 933341 - DNA, 25 bp, Homo sapien
tagtgagaaggcattaaacagtaga

SEQ ID NO: 933342 - DNA, 25 bp, Homo sapien
gggtccaagcgtcctcggatgaaaa

SEQ ID NO: 933343 - DNA, 25 bp, Homo sapien
ccagcgggtccatgtagccttcaga

SEQ ID NO: 933344 - DNA, 25 bp, Homo sapien
ttcagaaaagattccgcaggctccc

SEQ ID NO: 933345 - DNA, 25 bp, Homo sapien
actctgggaggaaacaccctctcct

SEQ ID NO: 933346 - DNA, 25 bp, Homo sapien
ccattttttccttggatgggtacag

SEQ ID NO: 933347 - DNA, 25 bp, Homo sapien
cattttttccttggatgggtacaga

SEQ ID NO: 933348 - DNA, 25 bp, Homo sapien
tttccttggatgggtacagactttc

SEQ ID NO: 933349 - DNA, 25 bp, Homo sapien
ctgtgaaaaagagacacggataagt

SEQ ID NO: 933350 - DNA, 25 bp, Homo sapien
gtgaaaaagagacacggataagtca

SEQ ID NO: 933351 - DNA, 25 bp, Homo sapien
tgtgaaaaagagacacggataagtc

SEQ ID NO: 933352 - DNA, 25 bp, Homo sapien
catagcttcgcacccaggtccaggg

SEQ ID NO: 933353 - DNA, 25 bp, Homo sapien
tactggtgaattcatagcttcgcac

SEQ ID NO: 933354 - DNA, 25 bp, Homo sapien
gcagctgttactggtgaattcatag

SEQ ID NO: 933355 - DNA, 25 bp, Homo sapien
gcttgtggctgtattggaagcagca

SEQ ID NO: 933356 - DNA, 25 bp, Homo sapien
ggcagttccaaggtggagactcagg

SEQ ID NO: 933357 - DNA, 25 bp, Homo sapien
gcagttccaaggtggagactcagga

SEQ ID NO: 933358 - DNA, 25 bp, Homo sapien
tgcctgatccccttttatgagactg

SEQ ID NO: 933359 - DNA, 25 bp, Homo sapien
ccccttttatgagactgagacggcc

SEQ ID NO: 933360 - DNA, 25 bp, Homo sapien
cctgatccccttttatgagactgag

SEQ ID NO: 933361 - DNA, 25 bp, Homo sapien
gatccccttttatgagactgagacg

SEQ ID NO: 933362 - DNA, 25 bp, Homo sapien
agtccctgggatctgcggtacccct

SEQ ID NO: 933363 - DNA, 25 bp, Homo sapien
agacctcctcttggcttacgtaagg

SEQ ID NO: 933364 - DNA, 25 bp, Homo sapien
tccagagcttgctagtgctgctcca

SEQ ID NO: 933365 - DNA, 25 bp, Homo sapien
cttggcttacgtaaggacatttaca

SEQ ID NO: 933366 - DNA, 25 bp, Homo sapien
agtcaagatacccaacccagctcag

SEQ ID NO: 933367 - DNA, 25 bp, Homo sapien
aggccccgagtagcccgccaagcag

SEQ ID NO: 933368 - DNA, 25 bp, Homo sapien
tcaggcccaaactcagggctggagg

SEQ ID NO: 933369 - DNA, 25 bp, Homo sapien
tgctccctcgggtttttcatagaag

SEQ ID NO: 933370 - DNA, 25 bp, Homo sapien
catccctggagagtgttgctaagaa

SEQ ID NO: 933371 - DNA, 25 bp, Homo sapien
tggacccactcctgcttggggtcgc

SEQ ID NO: 933372 - DNA, 25 bp, Homo sapien
tggacagggcccttgacagccactg

SEQ ID NO: 933373 - DNA, 25 bp, Homo sapien
taggggaagccttcttctgcttggc

SEQ ID NO: 933374 - DNA, 25 bp, Homo sapien
ttcttcatgtacctctggacccact

SEQ ID NO: 933375 - DNA, 25 bp, Homo sapien
gctgaccactcggttctcaggaatt

SEQ ID NO: 933376 - DNA, 25 bp, Homo sapien
ctgccttgaggcatgtgctcctgct

SEQ ID NO: 933377 - DNA, 25 bp, Homo sapien
ggcatgtgctcctgctggacagctg

SEQ ID NO: 933378 - DNA, 25 bp, Homo sapien
ctggtagctgaccactcggttctca

SEQ ID NO: 933379 - DNA, 25 bp, Homo sapien
acagaaggctggttactatggtcat

SEQ ID NO: 933380 - DNA, 25 bp, Homo sapien
gttactatggtcatcaggcctgcca

SEQ ID NO: 933381 - DNA, 25 bp, Homo sapien
gctggttactatggtcatcaggcct

SEQ ID NO: 933382 - DNA, 25 bp, Homo sapien
ggaacagaaggctggttactatggt

SEQ ID NO: 933383 - DNA, 25 bp, Homo sapien
accagctcggggctcaaagctgacg

SEQ ID NO: 933384 - DNA, 25 bp, Homo sapien
gggctcaaagctgacgtgcaggagg

SEQ ID NO: 933385 - DNA, 25 bp, Homo sapien
ctcaaagctgacgtgcaggaggaaa

SEQ ID NO: 933386 - DNA, 25 bp, Homo sapien
gctcggggctcaaagctgacgtgca

SEQ ID NO: 933387 - DNA, 25 bp, Homo sapien
ttcatttcactgtaatagggagaac

SEQ ID NO: 933388 - DNA, 25 bp, Homo sapien
taagcatctggaagtattttataat

SEQ ID NO: 933389 - DNA, 25 bp, Homo sapien
actgtaatagggagaacatacttgg

SEQ ID NO: 933390 - DNA, 25 bp, Homo sapien
tctccttggatccattggatattga

SEQ ID NO: 933391 - DNA, 25 bp, Homo sapien
caaaatgcaatggtacctttcctac

SEQ ID NO: 933392 - DNA, 25 bp, Homo sapien
aaactcaagggcacgactattcatg

SEQ ID NO: 933393 - DNA, 25 bp, Homo sapien
cacgactattcatgtaggagtgctc

SEQ ID NO: 933394 - DNA, 25 bp, Homo sapien
aattctcaattatcctgcttctctg

SEQ ID NO: 933395 - DNA, 25 bp, Homo sapien
tctccaaatcatgtacagttgcttc

SEQ ID NO: 933396 - DNA, 25 bp, Homo sapien
tgagcgttagagacgtaagggacct

SEQ ID NO: 933397 - DNA, 25 bp, Homo sapien
ccagactgaggtatatggttccata

SEQ ID NO: 933398 - DNA, 25 bp, Homo sapien
gaagcaaaatgccaacctaacctta

SEQ ID NO: 933399 - DNA, 25 bp, Homo sapien
ttagtaacacggacaaggctcctcg

SEQ ID NO: 933400 - DNA, 25 bp, Homo sapien
gaaggtcctccctaagagtctcctg

SEQ ID NO: 933401 - DNA, 25 bp, Homo sapien
gaaagcgagacgttctgccatcaga

SEQ ID NO: 933402 - DNA, 25 bp, Homo sapien
tctagggaagtcatctcacttggcc

SEQ ID NO: 933403 - DNA, 25 bp, Homo sapien
cccttgcacaatggtgctggttgct

SEQ ID NO: 933404 - DNA, 25 bp, Homo sapien
tgaacagttcgtggaagccaggcag

SEQ ID NO: 933405 - DNA, 25 bp, Homo sapien
agccaggcaggcttctcttcatcgg

SEQ ID NO: 933406 - DNA, 25 bp, Homo sapien
gcactgtctgaacagttcgtggaag

SEQ ID NO: 933407 - DNA, 25 bp, Homo sapien
tgcctgggtccgtgtgcccaggacc

SEQ ID NO: 933408 - DNA, 25 bp, Homo sapien
cagctagccggaaacctgatctgct

SEQ ID NO: 933409 - DNA, 25 bp, Homo sapien
agccggaaacctgatctgctgtagc

SEQ ID NO: 933410 - DNA, 25 bp, Homo sapien
gcccaggacccatccatggccacac

SEQ ID NO: 933411 - DNA, 25 bp, Homo sapien
gcctctcaaggggaataaaccatcc

SEQ ID NO: 933412 - DNA, 25 bp, Homo sapien
caccctcatggacgcctctcaaggg

SEQ ID NO: 933413 - DNA, 25 bp, Homo sapien
ttgccttgcaccctcatggacgcct

SEQ ID NO: 933414 - DNA, 25 bp, Homo sapien
tcaaggggaataaaccatcctgtcc

SEQ ID NO: 933415 - DNA, 25 bp, Homo sapien
taaaaagtatttgtacaacatccgc

SEQ ID NO: 933416 - DNA, 25 bp, Homo sapien
caacatccgcatttcagagaatggg

SEQ ID NO: 933417 - DNA, 25 bp, Homo sapien
gttggaaactttcgctgagcagata

SEQ ID NO: 933418 - DNA, 25 bp, Homo sapien
aatgggatgctagctgccagttgcg

SEQ ID NO: 933419 - DNA, 25 bp, Homo sapien
cattgggcagaaatttggacccgcc

SEQ ID NO: 933420 - DNA, 25 bp, Homo sapien
ttacctgcttgcataggccgctgac

SEQ ID NO: 933421 - DNA, 25 bp, Homo sapien
aaaaagcacacatccggccttagga

SEQ ID NO: 933422 - DNA, 25 bp, Homo sapien
tcttcttggcgctgtttggatccct

SEQ ID NO: 933423 - DNA, 25 bp, Homo sapien
cgtccttagtcaccatagcgatggg

SEQ ID NO: 933424 - DNA, 25 bp, Homo sapien
gcttttatagacaccgcatgaccgt

SEQ ID NO: 933425 - DNA, 25 bp, Homo sapien
agagatgacctagagttggtgctca

SEQ ID NO: 933426 - DNA, 25 bp, Homo sapien
ggcaatagaaagctctgtatgggca

SEQ ID NO: 933427 - DNA, 25 bp, Homo sapien
catcgtgggtctcctaacctactgg

SEQ ID NO: 933428 - DNA, 25 bp, Homo sapien
atctcttttcagcatgacggacatg

SEQ ID NO: 933429 - DNA, 25 bp, Homo sapien
tcatgatcaacatgggagactccca

SEQ ID NO: 933430 - DNA, 25 bp, Homo sapien
cggtggccgaagaagtatctctttt

SEQ ID NO: 933431 - DNA, 25 bp, Homo sapien
agagagcagctttgtggaaaagatg

SEQ ID NO: 933432 - DNA, 25 bp, Homo sapien
cagagagagcagctttgtggaaaag

SEQ ID NO: 933433 - DNA, 25 bp, Homo sapien
acctcctctgtcagagagagcagct

SEQ ID NO: 933434 - DNA, 25 bp, Homo sapien
cctcctctgtcagagagagcagctt

SEQ ID NO: 933435 - DNA, 25 bp, Homo sapien
aaaaatgccttaggcactgaagacc

SEQ ID NO: 933436 - DNA, 25 bp, Homo sapien
aagaaaaatgccttaggcactgaag

SEQ ID NO: 933437 - DNA, 25 bp, Homo sapien
gcactgaagaccaggcactgcagag

SEQ ID NO: 933438 - DNA, 25 bp, Homo sapien
actgcagagaacctcacatgtgcat

SEQ ID NO: 933439 - DNA, 25 bp, Homo sapien
gctgaaccgaattggctgcaactcc

SEQ ID NO: 933440 - DNA, 25 bp, Homo sapien
aagcacgttcaattggctgaaccga

SEQ ID NO: 933441 - DNA, 25 bp, Homo sapien
agccccaacgggctctggggaatag

SEQ ID NO: 933442 - DNA, 25 bp, Homo sapien
caattggctgaaccgaattggctgc

SEQ ID NO: 933443 - DNA, 25 bp, Homo sapien
agtatgtgagccagcccctaggacc

SEQ ID NO: 933444 - DNA, 25 bp, Homo sapien
gtatgtgagccagcccctaggacct

SEQ ID NO: 933445 - DNA, 25 bp, Homo sapien
ggattgttgtgtctgtcctgaacac

SEQ ID NO: 933446 - DNA, 25 bp, Homo sapien
cacaattggattgtatagccagccc

SEQ ID NO: 933447 - DNA, 25 bp, Homo sapien
ccgtgagttcggagttcaagaattc

SEQ ID NO: 933448 - DNA, 25 bp, Homo sapien
tagccagccctgcatatccgtgagt

SEQ ID NO: 933449 - DNA, 25 bp, Homo sapien
tcccagaggaacttagaagggactc

SEQ ID NO: 933450 - DNA, 25 bp, Homo sapien
ttagaagggactcaaagccaggaag

SEQ ID NO: 933451 - DNA, 25 bp, Homo sapien
gaggaacttagaagggactcaaagc

SEQ ID NO: 933452 - DNA, 25 bp, Homo sapien
gaacttagaagggactcaaagccag

SEQ ID NO: 933453 - DNA, 25 bp, Homo sapien
caccgctacgggatgcgaggcatgt

SEQ ID NO: 933454 - DNA, 25 bp, Homo sapien
atcatcgtgttctacggctcccaga

SEQ ID NO: 933455 - DNA, 25 bp, Homo sapien
tcagcggaccctgaggagtatgacc

SEQ ID NO: 933456 - DNA, 25 bp, Homo sapien
aggagtttgccaaccgcctgtccaa

SEQ ID NO: 933457 - DNA, 25 bp, Homo sapien
aggacttctacgactggctgcagga

SEQ ID NO: 933458 - DNA, 25 bp, Homo sapien
tcgacaacgccctggtggttttctg

SEQ ID NO: 933459 - DNA, 25 bp, Homo sapien
catggccacctacggtgagggagac

SEQ ID NO: 933460 - DNA, 25 bp, Homo sapien
accccaccgacaatgcccaggactt

SEQ ID NO: 933461 - DNA, 25 bp, Homo sapien
tacgagcacttcaatgccatgggca

SEQ ID NO: 933462 - DNA, 25 bp, Homo sapien
ccatgggcaagtacgtggacaagcg

SEQ ID NO: 933463 - DNA, 25 bp, Homo sapien
cggcgcccagcgcatctttgagctg

SEQ ID NO: 933464 - DNA, 25 bp, Homo sapien
tggtcttgggaacaagacctacgag

SEQ ID NO: 933465 - DNA, 25 bp, Homo sapien
ttggaggaggacttcatcacctggc

SEQ ID NO: 933466 - DNA, 25 bp, Homo sapien
cacctggcgagagcagttctggccg

SEQ ID NO: 933467 - DNA, 25 bp, Homo sapien
ggtggaagccactggcgaggagtcc

SEQ ID NO: 933468 - DNA, 25 bp, Homo sapien
ttctggccggccgtgtgtgaacact

SEQ ID NO: 933469 - DNA, 25 bp, Homo sapien
cgccagtacgagcttgtggtccaca

SEQ ID NO: 933470 - DNA, 25 bp, Homo sapien
tccacaccgacatagatgcggccaa

SEQ ID NO: 933471 - DNA, 25 bp, Homo sapien
ggccggctgaagagctacgagaacc

SEQ ID NO: 933472 - DNA, 25 bp, Homo sapien
gctgaagagctacgagaaccagaag

SEQ ID NO: 933473 - DNA, 25 bp, Homo sapien
tttgtgcaaccagaagcgtccttgg

SEQ ID NO: 933474 - DNA, 25 bp, Homo sapien
aaccggtgagatttcctcatggaga

SEQ ID NO: 933475 - DNA, 25 bp, Homo sapien
gagacggagactcagatcaaagccc

SEQ ID NO: 933476 - DNA, 25 bp, Homo sapien
gagagcccttgatgtaaccggtgag

SEQ ID NO: 933477 - DNA, 25 bp, Homo sapien
gcgccacctcatgcacctggaattg

SEQ ID NO: 933478 - DNA, 25 bp, Homo sapien
tgaaccagggaaccgagcgccacct

SEQ ID NO: 933479 - DNA, 25 bp, Homo sapien
tggctgcagtcaccaccaaccggaa

SEQ ID NO: 933480 - DNA, 25 bp, Homo sapien
cctttgatgccaagaatccgttcct

SEQ ID NO: 933481 - DNA, 25 bp, Homo sapien
cctcccgagcctcacatctccctcc

SEQ ID NO: 933482 - DNA, 25 bp, Homo sapien
ggccagccttccgcccctcccgagc

SEQ ID NO: 933483 - DNA, 25 bp, Homo sapien
gtaccagctgccactgtcaccccct

SEQ ID NO: 933484 - DNA, 25 bp, Homo sapien
tgaaccctcactctgggcctcctga

SEQ ID NO: 933485 - DNA, 25 bp, Homo sapien
tcgtcatgtccctgaacaacctgga

SEQ ID NO: 933486 - DNA, 25 bp, Homo sapien
gctgtgtacccagccaacgactctg

SEQ ID NO: 933487 - DNA, 25 bp, Homo sapien
ctgggcaaaatcctgggtgccgacc

SEQ ID NO: 933488 - DNA, 25 bp, Homo sapien
gactctgctctcgtcaaccagctgg

SEQ ID NO: 933489 - DNA, 25 bp, Homo sapien
gtaccaacgtgctgtacgagctggc

SEQ ID NO: 933490 - DNA, 25 bp, Homo sapien
tcacctactacctggacatcaccaa

SEQ ID NO: 933491 - DNA, 25 bp, Homo sapien
gagctgctgcgcaagatggcctcct

SEQ ID NO: 933492 - DNA, 25 bp, Homo sapien
agctggcgcagtacgcctcggagcc

SEQ ID NO: 933493 - DNA, 25 bp, Homo sapien
gctactactccatcgcctcatcctc

SEQ ID NO: 933494 - DNA, 25 bp, Homo sapien
aggcccggaggcacatcctggccat

SEQ ID NO: 933495 - DNA, 25 bp, Homo sapien
ctgcaggcccgctactactccatcg

SEQ ID NO: 933496 - DNA, 25 bp, Homo sapien
gcaggactgcccgtccctgcggccc

SEQ ID NO: 933497 - DNA, 25 bp, Homo sapien
gggtggcacccttcataggcttcat

SEQ ID NO: 933498 - DNA, 25 bp, Homo sapien
cggccgtgcgctggtgcccatgttc

SEQ ID NO: 933499 - DNA, 25 bp, Homo sapien
catgttcgtgcgcaagtcccagttc

SEQ ID NO: 933500 - DNA, 25 bp, Homo sapien
aggctggccgcatcaacaagggcgt

SEQ ID NO: 933501 - DNA, 25 bp, Homo sapien
gccgccgctcggatgaggactacct

SEQ ID NO: 933502 - DNA, 25 bp, Homo sapien
ggagacgctgctgtactacggctgc

SEQ ID NO: 933503 - DNA, 25 bp, Homo sapien
cgcagttccacagggacggtgcgct

SEQ ID NO: 933504 - DNA, 25 bp, Homo sapien
ggtgcgctcacccagctcaacgtgg

SEQ ID NO: 933505 - DNA, 25 bp, Homo sapien
aggcggtgcccacatctacgtctgt

SEQ ID NO: 933506 - DNA, 25 bp, Homo sapien
aagcaagaccgagagcacctgtgga

SEQ ID NO: 933507 - DNA, 25 bp, Homo sapien
cacctgtggaagttgatcgaaggcg

SEQ ID NO: 933508 - DNA, 25 bp, Homo sapien
gaaggcggtgcccacatctacgtct

SEQ ID NO: 933509 - DNA, 25 bp, Homo sapien
cacgcgcaggcggtggactacatca

SEQ ID NO: 933510 - DNA, 25 bp, Homo sapien
aaactgatgaccaagggccgctact

SEQ ID NO: 933511 - DNA, 25 bp, Homo sapien
tctacgacatcgtggctgagctcgg

SEQ ID NO: 933512 - DNA, 25 bp, Homo sapien
ggatgtgcagaacaccttctacgac

SEQ ID NO: 933513 - DNA, 25 bp, Homo sapien
ttgcctggtattgtgtgagtagatc

SEQ ID NO: 933514 - DNA, 25 bp, Homo sapien
tattgtgtgagtagatctgggacct

SEQ ID NO: 933515 - DNA, 25 bp, Homo sapien
cccaggaacccatgtggtggggcca

SEQ ID NO: 933516 - DNA, 25 bp, Homo sapien
ggaacccatgtggtggggccaccca

SEQ ID NO: 933517 - DNA, 25 bp, Homo sapien
gcccacagcgcccataaaacccaag

SEQ ID NO: 933518 - DNA, 25 bp, Homo sapien
cagcgcccataaaacccaagggaga

SEQ ID NO: 933519 - DNA, 25 bp, Homo sapien
gatacacgcacactcgaggggcgcc

SEQ ID NO: 933520 - DNA, 25 bp, Homo sapien
cctgatacacgcacactcgaggggc

SEQ ID NO: 933521 - DNA, 25 bp, Homo sapien
actgtgaaacttgtggtgcacaacc

SEQ ID NO: 933522 - DNA, 25 bp, Homo sapien
ttcttgctcccgtgccgctgactgt

SEQ ID NO: 933523 - DNA, 25 bp, Homo sapien
cgctgactgtgaaacttgtggtgca

SEQ ID NO: 933524 - DNA, 25 bp, Homo sapien
tcccgtgccgctgactgtgaaactt

SEQ ID NO: 933525 - DNA, 25 bp, Homo sapien
tggtgaagaaattgccgaggaaaag

SEQ ID NO: 933526 - DNA, 25 bp, Homo sapien
gtgaagaaattgccgaggaaaagga

SEQ ID NO: 933527 - DNA, 25 bp, Homo sapien
agaaattgccgaggaaaaggaggag

SEQ ID NO: 933528 - DNA, 25 bp, Homo sapien
gggtggtgaagaaattgccgaggaa

SEQ ID NO: 933529 - DNA, 25 bp, Homo sapien
ctgccggaggaatagggtgagggct

SEQ ID NO: 933530 - DNA, 25 bp, Homo sapien
acatgggcctggccccccatccatc

SEQ ID NO: 933531 - DNA, 25 bp, Homo sapien
atcctgtccagggaccccggctcac

SEQ ID NO: 933532 - DNA, 25 bp, Homo sapien
ggaggaatagggtgagggctggaca

SEQ ID NO: 933533 - DNA, 25 bp, Homo sapien
gtcctgggccaggttgaacaacgtc

SEQ ID NO: 933534 - DNA, 25 bp, Homo sapien
tgggccaggttgaacaacgtcagcg

SEQ ID NO: 933535 - DNA, 25 bp, Homo sapien
cctgggccaggttgaacaacgtcag

SEQ ID NO: 933536 - DNA, 25 bp, Homo sapien
ggccaggttgaacaacgtcagcgcg

SEQ ID NO: 933537 - DNA, 25 bp, Homo sapien
aaaccggcgcagaggacggacagac

SEQ ID NO: 933538 - DNA, 25 bp, Homo sapien
gcagggacacagaggcacgacttac

SEQ ID NO: 933539 - DNA, 25 bp, Homo sapien
tcagaagacccagtccctgctggag

SEQ ID NO: 933540 - DNA, 25 bp, Homo sapien
gcagggaggaggcattttactcaga

SEQ ID NO: 933541 - DNA, 25 bp, Homo sapien
agcaggaaggtgaggccccgccaca

SEQ ID NO: 933542 - DNA, 25 bp, Homo sapien
ggccccgccacatccaggactggaa

SEQ ID NO: 933543 - DNA, 25 bp, Homo sapien
gaaggtgaggccccgccacatccag

SEQ ID NO: 933544 - DNA, 25 bp, Homo sapien
cgccacatccaggactggaagccct

SEQ ID NO: 933545 - DNA, 25 bp, Homo sapien
acgctaccactcagacccgggatgg

SEQ ID NO: 933546 - DNA, 25 bp, Homo sapien
gggacagaggggacgctaccactca

SEQ ID NO: 933547 - DNA, 25 bp, Homo sapien
ctaccactcagacccgggatgggag

SEQ ID NO: 933548 - DNA, 25 bp, Homo sapien
gggacgctaccactcagacccggga

SEQ ID NO: 933549 - DNA, 25 bp, Homo sapien
tagtactggagaaactgcacgaagc

SEQ ID NO: 933550 - DNA, 25 bp, Homo sapien
ggtccatggtgtgccgctcgcccag

SEQ ID NO: 933551 - DNA, 25 bp, Homo sapien
ggcagccgctctggtagtagtactg

SEQ ID NO: 933552 - DNA, 25 bp, Homo sapien
tccatggtgtgccgctcgcccagcg

SEQ ID NO: 933553 - DNA, 25 bp, Homo sapien
attggttccggaatttctggtacat

SEQ ID NO: 933554 - DNA, 25 bp, Homo sapien
catggaaaaggagaggaattggttc

SEQ ID NO: 933555 - DNA, 25 bp, Homo sapien
agaggaattggttccggaatttctg

SEQ ID NO: 933556 - DNA, 25 bp, Homo sapien
acatggaaaaggagaggaattggtt

SEQ ID NO: 933557 - DNA, 25 bp, Homo sapien
ggatgccgtgtatcccctccttgtc

SEQ ID NO: 933558 - DNA, 25 bp, Homo sapien
cttggggatgccgtgtatcccctcc

SEQ ID NO: 933559 - DNA, 25 bp, Homo sapien
tggggatgccgtgtatcccctcctt

SEQ ID NO: 933560 - DNA, 25 bp, Homo sapien
cccttggggatgccgtgtatcccct

SEQ ID NO: 933561 - DNA, 25 bp, Homo sapien
cacgtcagcatgactcccgacagga

SEQ ID NO: 933562 - DNA, 25 bp, Homo sapien
gtcagcatgactcccgacaggaagg

SEQ ID NO: 933563 - DNA, 25 bp, Homo sapien
agcatgactcccgacaggaaggtgg

SEQ ID NO: 933564 - DNA, 25 bp, Homo sapien
catgactcccgacaggaaggtggac

SEQ ID NO: 933565 - DNA, 25 bp, Homo sapien
ggcaccccattccatgctcccctcc

SEQ ID NO: 933566 - DNA, 25 bp, Homo sapien
cccagcgcctgttcctgcttcccgg

SEQ ID NO: 933567 - DNA, 25 bp, Homo sapien
agcgcctgttcctgcttcccggagg

SEQ ID NO: 933568 - DNA, 25 bp, Homo sapien
ggagggtcctggcaccccattccat

SEQ ID NO: 933569 - DNA, 25 bp, Homo sapien
tcagggtgcagtagtaccagaccag

SEQ ID NO: 933570 - DNA, 25 bp, Homo sapien
agccgttgttgatgaggatgctctc

SEQ ID NO: 933571 - DNA, 25 bp, Homo sapien
atgctctcccggatggtcagggtgc

SEQ ID NO: 933572 - DNA, 25 bp, Homo sapien
caggaagttgaaggcagcatctgtc

SEQ ID NO: 933573 - DNA, 25 bp, Homo sapien
aagcggcaagtgaaggagatgagga

SEQ ID NO: 933574 - DNA, 25 bp, Homo sapien
agcaggaagcggcaagtgaaggaga

SEQ ID NO: 933575 - DNA, 25 bp, Homo sapien
caggaagcggcaagtgaaggagatg

SEQ ID NO: 933576 - DNA, 25 bp, Homo sapien
ggaagcggcaagtgaaggagatgag

SEQ ID NO: 933577 - DNA, 25 bp, Homo sapien
ccggtgagacgggtggggtgctggt

SEQ ID NO: 933578 - DNA, 25 bp, Homo sapien
aggccggtgagacgggtggggtgct

SEQ ID NO: 933579 - DNA, 25 bp, Homo sapien
caggccggtgagacgggtggggtgc

SEQ ID NO: 933580 - DNA, 25 bp, Homo sapien
gcgcaggccggtgagacgggtgggg

SEQ ID NO: 933581 - DNA, 25 bp, Homo sapien
tcaggagcgtgacgttgacgttccc

SEQ ID NO: 933582 - DNA, 25 bp, Homo sapien
tgcttgctcaggagcgtgacgttga

SEQ ID NO: 933583 - DNA, 25 bp, Homo sapien
agcgtgacgttgacgttccccagaa

SEQ ID NO: 933584 - DNA, 25 bp, Homo sapien
tgacgttgacgttccccagaaccag

SEQ ID NO: 933585 - DNA, 25 bp, Homo sapien
ggccttggcgctctttcatctggtt

SEQ ID NO: 933586 - DNA, 25 bp, Homo sapien
tcttaggcaaataggcctccatgtc

SEQ ID NO: 933587 - DNA, 25 bp, Homo sapien
cctccatgtcaaagaagaggccttg

SEQ ID NO: 933588 - DNA, 25 bp, Homo sapien
ccattcttcttaggcaaataggcct

SEQ ID NO: 933589 - DNA, 25 bp, Homo sapien
tctgcccatggcgggtggggtaggg

SEQ ID NO: 933590 - DNA, 25 bp, Homo sapien
acactctgcccatggcgggtggggt

SEQ ID NO: 933591 - DNA, 25 bp, Homo sapien
cccacactctgcccatggcgggtgg

SEQ ID NO: 933592 - DNA, 25 bp, Homo sapien
actctgcccatggcgggtggggtag

SEQ ID NO: 933593 - DNA, 25 bp, Homo sapien
ctggagccgcttcttctgccgcgtg

SEQ ID NO: 933594 - DNA, 25 bp, Homo sapien
gccgcttcttctgccgcgtgatgga

SEQ ID NO: 933595 - DNA, 25 bp, Homo sapien
ttcttctgccgcgtgatggagctgg

SEQ ID NO: 933596 - DNA, 25 bp, Homo sapien
tcttctgccgcgtgatggagctggt

SEQ ID NO: 933597 - DNA, 25 bp, Homo sapien
tcaggcggtagagccgatgggtctc

SEQ ID NO: 933598 - DNA, 25 bp, Homo sapien
gcttcaggcggtagagccgatgggt

SEQ ID NO: 933599 - DNA, 25 bp, Homo sapien
tccagcttcaggcggtagagccgat

SEQ ID NO: 933600 - DNA, 25 bp, Homo sapien
cagcttcaggcggtagagccgatgg

SEQ ID NO: 933601 - DNA, 25 bp, Homo sapien
cgagacgcggctcgggggcgacccg

SEQ ID NO: 933602 - DNA, 25 bp, Homo sapien
tcgggggcgacccggcgtccgcagc

SEQ ID NO: 933603 - DNA, 25 bp, Homo sapien
cagcgagacgcggctcgggggcgac

SEQ ID NO: 933604 - DNA, 25 bp, Homo sapien
ctgagccagcgagacgcggctcggg

SEQ ID NO: 933605 - DNA, 25 bp, Homo sapien
gtagatcctcccagtcccgcaggca

SEQ ID NO: 933606 - DNA, 25 bp, Homo sapien
gaagtcctgctgtagatcctcccag

SEQ ID NO: 933607 - DNA, 25 bp, Homo sapien
tggaagtcctgctgtagatcctccc

SEQ ID NO: 933608 - DNA, 25 bp, Homo sapien
agtcctgctgtagatcctcccagtc

SEQ ID NO: 933609 - DNA, 25 bp, Homo sapien
ggcaccaatggggaaaggccacgcc

SEQ ID NO: 933610 - DNA, 25 bp, Homo sapien
ggctcgcgccgccacgggcaccaat

SEQ ID NO: 933611 - DNA, 25 bp, Homo sapien
tgcagcgccagtagccagtagtgga

SEQ ID NO: 933612 - DNA, 25 bp, Homo sapien
agtagtggaggacggcgcagcaacc

SEQ ID NO: 933613 - DNA, 25 bp, Homo sapien
gcactgactgtgccagccgcgtggt

SEQ ID NO: 933614 - DNA, 25 bp, Homo sapien
cagccgcgtggtgcagccagcaggg

SEQ ID NO: 933615 - DNA, 25 bp, Homo sapien
ctcgcggcctggaccgggactggga

SEQ ID NO: 933616 - DNA, 25 bp, Homo sapien
tatgcaagggcggttgctagccccg

SEQ ID NO: 933617 - DNA, 25 bp, Homo sapien
aatctgtttcaaggggtggatggca

SEQ ID NO: 933618 - DNA, 25 bp, Homo sapien
aacacagccaggcagaaatgagtgg

SEQ ID NO: 933619 - DNA, 25 bp, Homo sapien
gaatttctagaaacgtggataggga

SEQ ID NO: 933620 - DNA, 25 bp, Homo sapien
gggtgagaatctctccttggtgaac

SEQ ID NO: 933621 - DNA, 25 bp, Homo sapien
gacaagcctgggtatacacactctg

SEQ ID NO: 933622 - DNA, 25 bp, Homo sapien
agacaagcctgggtatacacactct

SEQ ID NO: 933623 - DNA, 25 bp, Homo sapien
ccagacaagcctgggtatacacact

SEQ ID NO: 933624 - DNA, 25 bp, Homo sapien
caagcctgggtatacacactctggc

SEQ ID NO: 933625 - DNA, 25 bp, Homo sapien
atgtttgtgatggaatctccaagga

SEQ ID NO: 933626 - DNA, 25 bp, Homo sapien
aggatagtcttctcccattccagca

SEQ ID NO: 933627 - DNA, 25 bp, Homo sapien
tcagtagagcggatccatgatgttt

SEQ ID NO: 933628 - DNA, 25 bp, Homo sapien
tagagcggatccatgatgtttgtga

SEQ ID NO: 933629 - DNA, 25 bp, Homo sapien
caatccccgatttggacacatgttg

SEQ ID NO: 933630 - DNA, 25 bp, Homo sapien
tgtttttgcacttcttgacataggc

SEQ ID NO: 933631 - DNA, 25 bp, Homo sapien
tggacacatgttgtttttgcacttc

SEQ ID NO: 933632 - DNA, 25 bp, Homo sapien
ttgcacttcttgacataggcccagg

SEQ ID NO: 933633 - DNA, 25 bp, Homo sapien
tacctctggtttgaagatgacatga

SEQ ID NO: 933634 - DNA, 25 bp, Homo sapien
gatgtcaacctgataaaggccatat

SEQ ID NO: 933635 - DNA, 25 bp, Homo sapien
tacaatggataggaagaagtaacct

SEQ ID NO: 933636 - DNA, 25 bp, Homo sapien
aatccacaggtttaaggcaatccct

SEQ ID NO: 933637 - DNA, 25 bp, Homo sapien
cccttacctatatggtcaagcaatt

SEQ ID NO: 933638 - DNA, 25 bp, Homo sapien
cttacctatatggtcaagcaatttt

SEQ ID NO: 933639 - DNA, 25 bp, Homo sapien
acccttacctatatggtcaagcaat

SEQ ID NO: 933640 - DNA, 25 bp, Homo sapien
tacctatatggtcaagcaatttttt

SEQ ID NO: 933641 - DNA, 25 bp, Homo sapien
tcgttactatgcatgaggtaggcta

SEQ ID NO: 933642 - DNA, 25 bp, Homo sapien
ctgcaaggtctgctcgttactatgc

SEQ ID NO: 933643 - DNA, 25 bp, Homo sapien
aggtaggctatgatggcggcacaac

SEQ ID NO: 933644 - DNA, 25 bp, Homo sapien
atggcggcacaactgcggctgatac

SEQ ID NO: 933645 - DNA, 25 bp, Homo sapien
gatcagaatgacagagccaaggtga

SEQ ID NO: 933646 - DNA, 25 bp, Homo sapien
tgacagagccaaggtgatggtgaat

SEQ ID NO: 933647 - DNA, 25 bp, Homo sapien
tggaaaagatcagaatgacagagcc

SEQ ID NO: 933648 - DNA, 25 bp, Homo sapien
ttgggtggaaaagatcagaatgaca

SEQ ID NO: 933649 - DNA, 25 bp, Homo sapien
agaagcttgtcagcatcgcctgcaa

SEQ ID NO: 933650 - DNA, 25 bp, Homo sapien
gggaatcttctatccggatgtgcag

SEQ ID NO: 933651 - DNA, 25 bp, Homo sapien
gaatctgggcttccggggaatcttc

SEQ ID NO: 933652 - DNA, 25 bp, Homo sapien
tccggatgtgcagaagcttgtcagc

SEQ ID NO: 933653 - DNA, 25 bp, Homo sapien
ccttccctggcacgatttcaatggg

SEQ ID NO: 933654 - DNA, 25 bp, Homo sapien
tgaaattgccaacgaagaccttccc

SEQ ID NO: 933655 - DNA, 25 bp, Homo sapien
aagaccttccctggcacgatttcaa

SEQ ID NO: 933656 - DNA, 25 bp, Homo sapien
acaggcttgactgaaattgccaacg

SEQ ID NO: 933657 - DNA, 25 bp, Homo sapien
gtccctgccttctacgattccggtg

SEQ ID NO: 933658 - DNA, 25 bp, Homo sapien
tgggtcccgagaaacccagcagcag

SEQ ID NO: 933659 - DNA, 25 bp, Homo sapien
tgcgttctctgggagatcctcagcc

SEQ ID NO: 933660 - DNA, 25 bp, Homo sapien
agagcaggcactttcccaccactaa

SEQ ID NO: 933661 - DNA, 25 bp, Homo sapien
ggtggtgggtgaggcgggtcaggat

SEQ ID NO: 933662 - DNA, 25 bp, Homo sapien
tcctgccatactcaatggctgcttg

SEQ ID NO: 933663 - DNA, 25 bp, Homo sapien
agaagcgctcatagccccctttcag

SEQ ID NO: 933664 - DNA, 25 bp, Homo sapien
tccggagaaagtggtacgtgcctga

SEQ ID NO: 933665 - DNA, 25 bp, Homo sapien
ggctaactctgcttccatattgaat

SEQ ID NO: 933666 - DNA, 25 bp, Homo sapien
gggctgtggaggatataagtggctg

SEQ ID NO: 933667 - DNA, 25 bp, Homo sapien
gagccaaagctcaccccacagggcc

SEQ ID NO: 933668 - DNA, 25 bp, Homo sapien
cagctctcaagacaggagccaaagc

SEQ ID NO: 933669 - DNA, 25 bp, Homo sapien
tcatcttttaagagtatctccaggg

SEQ ID NO: 933670 - DNA, 25 bp, Homo sapien
cttttaagagtatctccagggtgct

SEQ ID NO: 933671 - DNA, 25 bp, Homo sapien
catcaccatcagagtctgaatcatc

SEQ ID NO: 933672 - DNA, 25 bp, Homo sapien
ttgccatcaccatcagagtctgaat

SEQ ID NO: 933673 - DNA, 25 bp, Homo sapien
acgcagtacttcacacactccaggt

SEQ ID NO: 933674 - DNA, 25 bp, Homo sapien
gactccgggagaagatattcattat

SEQ ID NO: 933675 - DNA, 25 bp, Homo sapien
caggtccacagactccgggagaaga

SEQ ID NO: 933676 - DNA, 25 bp, Homo sapien
cacagactccgggagaagatattca

SEQ ID NO: 933677 - DNA, 25 bp, Homo sapien
aaacccatggtttgagcagagagag

SEQ ID NO: 933678 - DNA, 25 bp, Homo sapien
tagagagcaccactagaaacccatg

SEQ ID NO: 933679 - DNA, 25 bp, Homo sapien
gatattcaccacacccacttttagg

SEQ ID NO: 933680 - DNA, 25 bp, Homo sapien
tgttgggcagaaaaacaaccgatat

SEQ ID NO: 933681 - DNA, 25 bp, Homo sapien
tttcgtcatactcccatttggaacg

SEQ ID NO: 933682 - DNA, 25 bp, Homo sapien
tcacatggctttcgtcatactccca

SEQ ID NO: 933683 - DNA, 25 bp, Homo sapien
gatcacatggctttcgtcatactcc

SEQ ID NO: 933684 - DNA, 25 bp, Homo sapien
tggctttcgtcatactcccatttgg

SEQ ID NO: 933685 - DNA, 25 bp, Homo sapien
gaacatacgaccaaactactcagag

SEQ ID NO: 933686 - DNA, 25 bp, Homo sapien
gaatttgcaaaggaacatacgacca

SEQ ID NO: 933687 - DNA, 25 bp, Homo sapien
caaactactcagaggacctacgtcg

SEQ ID NO: 933688 - DNA, 25 bp, Homo sapien
cagaggacctacgtcgtcatcaacg

SEQ ID NO: 933689 - DNA, 25 bp, Homo sapien
agttttgtggcctgattcaggatgt

SEQ ID NO: 933690 - DNA, 25 bp, Homo sapien
cagagatagttggggtctgttaatc

SEQ ID NO: 933691 - DNA, 25 bp, Homo sapien
tctggagagttttgtggcctgattc

SEQ ID NO: 933692 - DNA, 25 bp, Homo sapien
gagatagttggggtctgttaatctg

SEQ ID NO: 933693 - DNA, 25 bp, Homo sapien
tcaaagacttcagttctcagcaccc

SEQ ID NO: 933694 - DNA, 25 bp, Homo sapien
cctcaaagacttcagttctcagcac

SEQ ID NO: 933695 - DNA, 25 bp, Homo sapien
cagtttcagcctccacatgggtcct

SEQ ID NO: 933696 - DNA, 25 bp, Homo sapien
ctcctcaaagacttcagttctcagc

SEQ ID NO: 933697 - DNA, 25 bp, Homo sapien
aagatcacccgtagctgaggaccaa

SEQ ID NO: 933698 - DNA, 25 bp, Homo sapien
gagctgcagactctagaagggtgcc

SEQ ID NO: 933699 - DNA, 25 bp, Homo sapien
tggatgccggaagcaaactgtacct

SEQ ID NO: 933700 - DNA, 25 bp, Homo sapien
gaagggtgcctggtagacatcgtaa

SEQ ID NO: 933701 - DNA, 25 bp, Homo sapien
ctcttcttaagagacccttggtggg

SEQ ID NO: 933702 - DNA, 25 bp, Homo sapien
ggactctttcaacacagtatagctc

SEQ ID NO: 933703 - DNA, 25 bp, Homo sapien
aaatggcaaatttaagacatcctcc

SEQ ID NO: 933704 - DNA, 25 bp, Homo sapien
cctcctttatacaggactctttcaa

SEQ ID NO: 933705 - DNA, 25 bp, Homo sapien
aagggtcaggatcttaagggatttg

SEQ ID NO: 933706 - DNA, 25 bp, Homo sapien
gctcatacggcaactaggctgtcag

SEQ ID NO: 933707 - DNA, 25 bp, Homo sapien
taagggtaacaggtctgctcatacg

SEQ ID NO: 933708 - DNA, 25 bp, Homo sapien
aaacctaagcctgctagacccctga

SEQ ID NO: 933709 - DNA, 25 bp, Homo sapien
ttttagggagagcaggtatggatca

SEQ ID NO: 933710 - DNA, 25 bp, Homo sapien
gcaaagcaactttacgatcatagaa

SEQ ID NO: 933711 - DNA, 25 bp, Homo sapien
taattcccttgtcgagattgatgtg

SEQ ID NO: 933712 - DNA, 25 bp, Homo sapien
aatcaggaaatagctgtcttggcag

SEQ ID NO: 933713 - DNA, 25 bp, Homo sapien
gaaaactatgtggacttgggcacac

SEQ ID NO: 933714 - DNA, 25 bp, Homo sapien
taaaatcaatgcctaccacacagtg

SEQ ID NO: 933715 - DNA, 25 bp, Homo sapien
gctaacattcatgggaccggcacaa

SEQ ID NO: 933716 - DNA, 25 bp, Homo sapien
caaacacagttctggcagtgtcaca

SEQ ID NO: 933717 - DNA, 25 bp, Homo sapien
tcagcccagtcgcatgttggacaaa

SEQ ID NO: 933718 - DNA, 25 bp, Homo sapien
gacaggaactgtatgaccacggaag

SEQ ID NO: 933719 - DNA, 25 bp, Homo sapien
cagaaacagtgggaccgtcagagca

SEQ ID NO: 933720 - DNA, 25 bp, Homo sapien
tggaggtcgccattatcagcagtgg

SEQ ID NO: 933721 - DNA, 25 bp, Homo sapien
aatagtggtcctctaaagcttgcag

SEQ ID NO: 933722 - DNA, 25 bp, Homo sapien
ccccggctgcgcgactatggccagg

SEQ ID NO: 933723 - DNA, 25 bp, Homo sapien
ggctgcgcgactatggccaggctcc

SEQ ID NO: 933724 - DNA, 25 bp, Homo sapien
tcgggtctgggacgcgctccacctc

SEQ ID NO: 933725 - DNA, 25 bp, Homo sapien
gggctcgggtctgggacgcgctcca

SEQ ID NO: 933726 - DNA, 25 bp, Homo sapien
ggctacgctagaacccagccaaaca

SEQ ID NO: 933727 - DNA, 25 bp, Homo sapien
tcctctaaggcgcttccagcctaaa

SEQ ID NO: 933728 - DNA, 25 bp, Homo sapien
ttccagcctaaagcccgtcctcttc

SEQ ID NO: 933729 - DNA, 25 bp, Homo sapien
cggccacacagacggctacgctaga

SEQ ID NO: 933730 - DNA, 25 bp, Homo sapien
gttggagtctttcgcaacgtacgta

SEQ ID NO: 933731 - DNA, 25 bp, Homo sapien
gagggttggagtctttcgcaacgta

SEQ ID NO: 933732 - DNA, 25 bp, Homo sapien
aggagggttggagtctttcgcaacg

SEQ ID NO: 933733 - DNA, 25 bp, Homo sapien
tggagtctttcgcaacgtacgtaac

SEQ ID NO: 933734 - DNA, 25 bp, Homo sapien
cagtagctcctacttagccggaaaa

SEQ ID NO: 933735 - DNA, 25 bp, Homo sapien
tatgttccaagagcccagtaggtgc

SEQ ID NO: 933736 - DNA, 25 bp, Homo sapien
cctttcagccgtgattgtggtggtc

SEQ ID NO: 933737 - DNA, 25 bp, Homo sapien
gattccctttttgacacagtagctc

SEQ ID NO: 933738 - DNA, 25 bp, Homo sapien
gaaaatccctgtgtgagagggcagc

SEQ ID NO: 933739 - DNA, 25 bp, Homo sapien
cactgatcccatggcttggcttgca

SEQ ID NO: 933740 - DNA, 25 bp, Homo sapien
cacctgggcgtcacgtttgtggcac

SEQ ID NO: 933741 - DNA, 25 bp, Homo sapien
gcagtgtgcccagaatagcatgtca

SEQ ID NO: 933742 - DNA, 25 bp, Homo sapien
gtgaagaccctgaagtgagccgctg

SEQ ID NO: 933743 - DNA, 25 bp, Homo sapien
cacgggttcatagttcagcggcgaa

SEQ ID NO: 933744 - DNA, 25 bp, Homo sapien
tctgtgggcgcatcaataaaagccg

SEQ ID NO: 933745 - DNA, 25 bp, Homo sapien
taactgttagactgaagcgtgacgc

SEQ ID NO: 933746 - DNA, 25 bp, Homo sapien
agaggaagtaccgtgggactccaga

SEQ ID NO: 933747 - DNA, 25 bp, Homo sapien
aggaggacttcccctatcaagatct

SEQ ID NO: 933748 - DNA, 25 bp, Homo sapien
gacgagtcaggtactgagaatccac

SEQ ID NO: 933749 - DNA, 25 bp, Homo sapien
aacacagaggaagtaccgtgggact

SEQ ID NO: 933750 - DNA, 25 bp, Homo sapien
ccattgactggagctagaaattaca

SEQ ID NO: 933751 - DNA, 25 bp, Homo sapien
aactgaacctgattggctaacaact

SEQ ID NO: 933752 - DNA, 25 bp, Homo sapien
gcagcttgtccttgctactgtgtgt

SEQ ID NO: 933753 - DNA, 25 bp, Homo sapien
tgtgttgtctccattgactggagct

SEQ ID NO: 933754 - DNA, 25 bp, Homo sapien
agaggcgagagccgggcccgtggag

SEQ ID NO: 933755 - DNA, 25 bp, Homo sapien
ccagaggcgagagccgggcccgtgg

SEQ ID NO: 933756 - DNA, 25 bp, Homo sapien
gcagaacacgagcctggcctgaggc

SEQ ID NO: 933757 - DNA, 25 bp, Homo sapien
aggcagaacacgagcctggcctgag

SEQ ID NO: 933758 - DNA, 25 bp, Homo sapien
gctggacgcggcccggatggagagc

SEQ ID NO: 933759 - DNA, 25 bp, Homo sapien
ggcccggatggagagccgggcctgg

SEQ ID NO: 933760 - DNA, 25 bp, Homo sapien
accgctggacgcggcccggatggag

SEQ ID NO: 933761 - DNA, 25 bp, Homo sapien
caggggttgggaccgctggacgcgg

SEQ ID NO: 933762 - DNA, 25 bp, Homo sapien
gagatgtcgccagaagggaaaagct

SEQ ID NO: 933763 - DNA, 25 bp, Homo sapien
catgagcaaatagctgggcccggag

SEQ ID NO: 933764 - DNA, 25 bp, Homo sapien
aaaaaaggccatcgggacacaggag

SEQ ID NO: 933765 - DNA, 25 bp, Homo sapien
cctggtgaagccaacttcgggatgc

SEQ ID NO: 933766 - DNA, 25 bp, Homo sapien
tatttgatcatttttgagtcatagt

SEQ ID NO: 933767 - DNA, 25 bp, Homo sapien
tgatcatttttgagtcatagtccaa

SEQ ID NO: 933768 - DNA, 25 bp, Homo sapien
gatcatttttgagtcatagtccaag

SEQ ID NO: 933769 - DNA, 25 bp, Homo sapien
tttgatcatttttgagtcatagtcc

SEQ ID NO: 933770 - DNA, 25 bp, Homo sapien
gtgtagcacccttagcttgaatggc

SEQ ID NO: 933771 - DNA, 25 bp, Homo sapien
ttcagactcatctatactgccgcag

SEQ ID NO: 933772 - DNA, 25 bp, Homo sapien
tactgccgcagtggtcaagtgtagc

SEQ ID NO: 933773 - DNA, 25 bp, Homo sapien
tgaatggcatatgcctcggctggca

SEQ ID NO: 933774 - DNA, 25 bp, Homo sapien
cagtttgaacgtttgtctcctccaa

SEQ ID NO: 933775 - DNA, 25 bp, Homo sapien
ggaatgcatcagtgcaccaccatac

SEQ ID NO: 933776 - DNA, 25 bp, Homo sapien
cagcggtgaacaaggtataacagtt

SEQ ID NO: 933777 - DNA, 25 bp, Homo sapien
tttaaagagagtggcatctcctccc

SEQ ID NO: 933778 - DNA, 25 bp, Homo sapien
aatgggactgaaacgttctccaggg

SEQ ID NO: 933779 - DNA, 25 bp, Homo sapien
atgagcacatgacagaagtacaaaa

SEQ ID NO: 933780 - DNA, 25 bp, Homo sapien
gagcacatgacagaagtacaaaatg

SEQ ID NO: 933781 - DNA, 25 bp, Homo sapien
gcacatgacagaagtacaaaatggg

SEQ ID NO: 933782 - DNA, 25 bp, Homo sapien
taatgtagaatgactgggagtcttg

SEQ ID NO: 933783 - DNA, 25 bp, Homo sapien
gaatgactgggagtcttgaccttct

SEQ ID NO: 933784 - DNA, 25 bp, Homo sapien
tgactgggagtcttgaccttctttt

SEQ ID NO: 933785 - DNA, 25 bp, Homo sapien
tgtagaatgactgggagtcttgacc

SEQ ID NO: 933786 - DNA, 25 bp, Homo sapien
ttcaggaaccttttcattactctca

SEQ ID NO: 933787 - DNA, 25 bp, Homo sapien
aggaaccttttcattactctcaggg

SEQ ID NO: 933788 - DNA, 25 bp, Homo sapien
atttcaggaaccttttcattactct

SEQ ID NO: 933789 - DNA, 25 bp, Homo sapien
caggaaccttttcattactctcagg

SEQ ID NO: 933790 - DNA, 25 bp, Homo sapien
cttcatggtctttttagaaactgcg

SEQ ID NO: 933791 - DNA, 25 bp, Homo sapien
tcatggtctttttagaaactgcgaa

SEQ ID NO: 933792 - DNA, 25 bp, Homo sapien
catggtctttttagaaactgcgaag

SEQ ID NO: 933793 - DNA, 25 bp, Homo sapien
ttcatggtctttttagaaactgcga

SEQ ID NO: 933794 - DNA, 25 bp, Homo sapien
tttattagcaactccaggaggcaag

SEQ ID NO: 933795 - DNA, 25 bp, Homo sapien
tattagcaactccaggaggcaagta

SEQ ID NO: 933796 - DNA, 25 bp, Homo sapien
ttattagcaactccaggaggcaagt

SEQ ID NO: 933797 - DNA, 25 bp, Homo sapien
cttctacgtacaggaacttgggatt

SEQ ID NO: 933798 - DNA, 25 bp, Homo sapien
ccttctacgtacaggaacttgggat

SEQ ID NO: 933799 - DNA, 25 bp, Homo sapien
caaaccttctacgtacaggaacttg

SEQ ID NO: 933800 - DNA, 25 bp, Homo sapien
tctacgtacaggaacttgggatttg

SEQ ID NO: 933801 - DNA, 25 bp, Homo sapien
atggataggtgaggtcaccacattc

SEQ ID NO: 933802 - DNA, 25 bp, Homo sapien
agatggataggtgaggtcaccacat

SEQ ID NO: 933803 - DNA, 25 bp, Homo sapien
gagatggataggtgaggtcaccaca

SEQ ID NO: 933804 - DNA, 25 bp, Homo sapien
gatggataggtgaggtcaccacatt

SEQ ID NO: 933805 - DNA, 25 bp, Homo sapien
tgaatggcaagatctttcttctcat

SEQ ID NO: 933806 - DNA, 25 bp, Homo sapien
cctcttttgaatggcaagatctttc

SEQ ID NO: 933807 - DNA, 25 bp, Homo sapien
cttttgaatggcaagatctttcttc

SEQ ID NO: 933808 - DNA, 25 bp, Homo sapien
cttctcatcatcagtgagccgagat

SEQ ID NO: 933809 - DNA, 25 bp, Homo sapien
catctttcactagcattggattgat

SEQ ID NO: 933810 - DNA, 25 bp, Homo sapien
ttcagcattccccagtcacatcttt

SEQ ID NO: 933811 - DNA, 25 bp, Homo sapien
caggggtgcgcatttttcagcattc

SEQ ID NO: 933812 - DNA, 25 bp, Homo sapien
aacaagtcagtggatgtcatctttc

SEQ ID NO: 933813 - DNA, 25 bp, Homo sapien
actgaaatagccaaacagacagaaa

SEQ ID NO: 933814 - DNA, 25 bp, Homo sapien
tcatggcactttgtgatcaccttga

SEQ ID NO: 933815 - DNA, 25 bp, Homo sapien
ccctcacgctcataagggtggaact

SEQ ID NO: 933816 - DNA, 25 bp, Homo sapien
aaaaagaccctcacgctcataaggg

SEQ ID NO: 933817 - DNA, 25 bp, Homo sapien
tgctgtgacagagttcatcttggca

SEQ ID NO: 933818 - DNA, 25 bp, Homo sapien
acttgctgtgacagagttcatcttg

SEQ ID NO: 933819 - DNA, 25 bp, Homo sapien
ttctccaaaacatctgcaacctcta

SEQ ID NO: 933820 - DNA, 25 bp, Homo sapien
caacctctaacgagtccttgcagaa

SEQ ID NO: 933821 - DNA, 25 bp, Homo sapien
taacgagtccttgcagaagccctga

SEQ ID NO: 933822 - DNA, 25 bp, Homo sapien
caaaacatctgcaacctctaacgag

SEQ ID NO: 933823 - DNA, 25 bp, Homo sapien
cttgtccatagagggagtatctgtc

SEQ ID NO: 933824 - DNA, 25 bp, Homo sapien
cctcttccaagtgctggcaactgtt

SEQ ID NO: 933825 - DNA, 25 bp, Homo sapien
tgtcctccatttggtttggatccac

SEQ ID NO: 933826 - DNA, 25 bp, Homo sapien
gagtatctgtcctccatttggtttg

SEQ ID NO: 933827 - DNA, 25 bp, Homo sapien
gccaacaccgggagaccgcgtggca

SEQ ID NO: 933828 - DNA, 25 bp, Homo sapien
tgccaacaccgggagaccgcgtggc

SEQ ID NO: 933829 - DNA, 25 bp, Homo sapien
atgccaacaccgggagaccgcgtgg

SEQ ID NO: 933830 - DNA, 25 bp, Homo sapien
ccaacaccgggagaccgcgtggcac

SEQ ID NO: 933831 - DNA, 25 bp, Homo sapien
tatgaactccttagacactctatcc

SEQ ID NO: 933832 - DNA, 25 bp, Homo sapien
tctatgaactccttagacactctat

SEQ ID NO: 933833 - DNA, 25 bp, Homo sapien
aattctatgaactccttagacactc

SEQ ID NO: 933834 - DNA, 25 bp, Homo sapien
gagaaattctatgaactccttagac

SEQ ID NO: 933835 - DNA, 25 bp, Homo sapien
gaggccgatgtgaccagaatttgca

SEQ ID NO: 933836 - DNA, 25 bp, Homo sapien
ccttgagtgtggctgagtactgcac

SEQ ID NO: 933837 - DNA, 25 bp, Homo sapien
caccaagtaacatgtagaaccacag

SEQ ID NO: 933838 - DNA, 25 bp, Homo sapien
taaaggtgtggtcataaagaaggca

SEQ ID NO: 933839 - DNA, 25 bp, Homo sapien
tgctacaactacctcagtaagccaa

SEQ ID NO: 933840 - DNA, 25 bp, Homo sapien
acaactacctcagtaagccaaagag

SEQ ID NO: 933841 - DNA, 25 bp, Homo sapien
tatgctacaactacctcagtaagcc

SEQ ID NO: 933842 - DNA, 25 bp, Homo sapien
tacaactacctcagtaagccaaaga

SEQ ID NO: 933843 - DNA, 25 bp, Homo sapien
ccttctttgatccgaccctggaaga

SEQ ID NO: 933844 - DNA, 25 bp, Homo sapien
acttggagaatgtgagggattgggc

SEQ ID NO: 933845 - DNA, 25 bp, Homo sapien
cttggagaatgtgagggattgggcc

SEQ ID NO: 933846 - DNA, 25 bp, Homo sapien
ggttgccgtagtaaccacatccttc

SEQ ID NO: 933847 - DNA, 25 bp, Homo sapien
tctgcctggctttgtggtactcttc

SEQ ID NO: 933848 - DNA, 25 bp, Homo sapien
ttggagcagaaaccctgccaggcag

SEQ ID NO: 933849 - DNA, 25 bp, Homo sapien
ccagtcctcctgaatctccttctgc

SEQ ID NO: 933850 - DNA, 25 bp, Homo sapien
ggaggtctgactgatgcacatgaat

SEQ ID NO: 933851 - DNA, 25 bp, Homo sapien
cttgcacaggaggtctgactgatgc

SEQ ID NO: 933852 - DNA, 25 bp, Homo sapien
ggtctgactgatgcacatgaattcc

SEQ ID NO: 933853 - DNA, 25 bp, Homo sapien
cacaggaggtctgactgatgcacat

SEQ ID NO: 933854 - DNA, 25 bp, Homo sapien
ggctgcaccgaatgttcctcctttc

SEQ ID NO: 933855 - DNA, 25 bp, Homo sapien
gccgcggaccctcccctgcgcgccc

SEQ ID NO: 933856 - DNA, 25 bp, Homo sapien
cggccgcggaccctcccctgcgcgc

SEQ ID NO: 933857 - DNA, 25 bp, Homo sapien
tccggccgcggaccctcccctgcgc

SEQ ID NO: 933858 - DNA, 25 bp, Homo sapien
gcggaccctcccctgcgcgccccca

SEQ ID NO: 933859 - DNA, 25 bp, Homo sapien
cgccgccgtggctgcgccagtggtg

SEQ ID NO: 933860 - DNA, 25 bp, Homo sapien
cgtggctgcgccagtggtgccaaga

SEQ ID NO: 933861 - DNA, 25 bp, Homo sapien
cgccgtggctgcgccagtggtgcca

SEQ ID NO: 933862 - DNA, 25 bp, Homo sapien
ccgtggctgcgccagtggtgccaag

SEQ ID NO: 933863 - DNA, 25 bp, Homo sapien
agcccggctgcatgaagcccggcat

SEQ ID NO: 933864 - DNA, 25 bp, Homo sapien
acgcagcccggctgcatgaagcccg

SEQ ID NO: 933865 - DNA, 25 bp, Homo sapien
agccacgcagcccggctgcatgaag

SEQ ID NO: 933866 - DNA, 25 bp, Homo sapien
ctgctctgcgcagccacgcagcccg

SEQ ID NO: 933867 - DNA, 25 bp, Homo sapien
ttcatgtgttgaattcataagatta

SEQ ID NO: 933868 - DNA, 25 bp, Homo sapien
ctgaagctggtttatcaagttgtaa

SEQ ID NO: 933869 - DNA, 25 bp, Homo sapien
catgtgttgaattcataagattatg

SEQ ID NO: 933870 - DNA, 25 bp, Homo sapien
atcttcatgtgttgaattcataaga

SEQ ID NO: 933871 - DNA, 25 bp, Homo sapien
gccaggaattccgtaagtagacagc

SEQ ID NO: 933872 - DNA, 25 bp, Homo sapien
ttcctttgcaagtaatatcctctca

SEQ ID NO: 933873 - DNA, 25 bp, Homo sapien
aggccaggaattccgtaagtagaca

SEQ ID NO: 933874 - DNA, 25 bp, Homo sapien
tgcaagtaatatcctctcaaggcca

SEQ ID NO: 933875 - DNA, 25 bp, Homo sapien
ttacgtagatcagcaatacaattat

SEQ ID NO: 933876 - DNA, 25 bp, Homo sapien
gtttacgtagatcagcaatacaatt

SEQ ID NO: 933877 - DNA, 25 bp, Homo sapien
acgtagatcagcaatacaattattc

SEQ ID NO: 933878 - DNA, 25 bp, Homo sapien
tgtttacgtagatcagcaatacaat

SEQ ID NO: 933879 - DNA, 25 bp, Homo sapien
gcagcaagggcctgacgctgagcga

SEQ ID NO: 933880 - DNA, 25 bp, Homo sapien
cagcaagggcctgacgctgagcgag

SEQ ID NO: 933881 - DNA, 25 bp, Homo sapien
tccaccgtgaacaacggggcggcca

SEQ ID NO: 933882 - DNA, 25 bp, Homo sapien
atcctggaccacgagcgcaagcggc

SEQ ID NO: 933883 - DNA, 25 bp, Homo sapien
tgaagcgcgcgcaccgcgagatcct

SEQ ID NO: 933884 - DNA, 25 bp, Homo sapien
gccgggcctggtgaagcgcgcgcac

SEQ ID NO: 933885 - DNA, 25 bp, Homo sapien
gaggaggagattcggcagaaagtgg

SEQ ID NO: 933886 - DNA, 25 bp, Homo sapien
ggacattccggcagatgctgatgga

SEQ ID NO: 933887 - DNA, 25 bp, Homo sapien
atggagaaggagggagtgctcacca

SEQ ID NO: 933888 - DNA, 25 bp, Homo sapien
tgctcaccagggaggaccggcctgg

SEQ ID NO: 933889 - DNA, 25 bp, Homo sapien
acgcgccctttgacgatgacgacgg

SEQ ID NO: 933890 - DNA, 25 bp, Homo sapien
agccgggcctggagtacgcgccctt

SEQ ID NO: 933891 - DNA, 25 bp, Homo sapien
ttgacgatgacgacggcccagtgga

SEQ ID NO: 933892 - DNA, 25 bp, Homo sapien
ggagtacgcgccctttgacgatgac

SEQ ID NO: 933893 - DNA, 25 bp, Homo sapien
attggtctagcagctcggcatcgcc

SEQ ID NO: 933894 - DNA, 25 bp, Homo sapien
gcattggtctagcagctcggcatcg

SEQ ID NO: 933895 - DNA, 25 bp, Homo sapien
accaagcattggtctagcagctcgg

SEQ ID NO: 933896 - DNA, 25 bp, Homo sapien
caagcattggtctagcagctcggca

SEQ ID NO: 933897 - DNA, 25 bp, Homo sapien
gagtgtgaagaagcatcgccgagac

SEQ ID NO: 933898 - DNA, 25 bp, Homo sapien
tgggagctcctcacccctccgcaag

SEQ ID NO: 933899 - DNA, 25 bp, Homo sapien
agctcctcacccctccgcaagaaga

SEQ ID NO: 933900 - DNA, 25 bp, Homo sapien
aagaagaagagtgtgaagaagcatc

SEQ ID NO: 933901 - DNA, 25 bp, Homo sapien
tctgggtcccggaggaagagacggc

SEQ ID NO: 933902 - DNA, 25 bp, Homo sapien
tgggtcccggaggaagagacggcac

SEQ ID NO: 933903 - DNA, 25 bp, Homo sapien
ctgggtcccggaggaagagacggca

SEQ ID NO: 933904 - DNA, 25 bp, Homo sapien
caaaagaaaagagaagaacaaagag

SEQ ID NO: 933905 - DNA, 25 bp, Homo sapien
tctcgaagctccaagtgcaaaagaa

SEQ ID NO: 933906 - DNA, 25 bp, Homo sapien
aagaaaagagaagaacaaagagaag

SEQ ID NO: 933907 - DNA, 25 bp, Homo sapien
aaaagagaagaacaaagagaagaag

SEQ ID NO: 933908 - DNA, 25 bp, Homo sapien
gtcgccttccccgtcgggcggcagc

SEQ ID NO: 933909 - DNA, 25 bp, Homo sapien
aagggcgaaagacgggcagccagcg

SEQ ID NO: 933910 - DNA, 25 bp, Homo sapien
tgagccccaagcaccgagacgaagg

SEQ ID NO: 933911 - DNA, 25 bp, Homo sapien
ggtccagcggaagccggtcgccttc

SEQ ID NO: 933912 - DNA, 25 bp, Homo sapien
tcggtcaccccgctggccttcaggg

SEQ ID NO: 933913 - DNA, 25 bp, Homo sapien
gagccagtgcggggcctcctggcct

SEQ ID NO: 933914 - DNA, 25 bp, Homo sapien
tcctggccttcagatcctggaggaa

SEQ ID NO: 933915 - DNA, 25 bp, Homo sapien
tttcgggcaaaaggcagtgacagag

SEQ ID NO: 933916 - DNA, 25 bp, Homo sapien
tcgtcccaaggtcgcggaggccgcg

SEQ ID NO: 933917 - DNA, 25 bp, Homo sapien
cccgctccagcagcgactccggcag

SEQ ID NO: 933918 - DNA, 25 bp, Homo sapien
gcgctcggcgccgtcgtcccaaggt

SEQ ID NO: 933919 - DNA, 25 bp, Homo sapien
ctcgcccagggtccgtgacaaggcg

SEQ ID NO: 933920 - DNA, 25 bp, Homo sapien
ctcgccgtcgcccaagaagcccctc

SEQ ID NO: 933921 - DNA, 25 bp, Homo sapien
agccgctcgccctccaaatctcgct

SEQ ID NO: 933922 - DNA, 25 bp, Homo sapien
ccagaagggaagagctcgtcgcgca

SEQ ID NO: 933923 - DNA, 25 bp, Homo sapien
cgctcgcgctctgcggagaagcggc

SEQ ID NO: 933924 - DNA, 25 bp, Homo sapien
gcgagggccgcgcaaggcactctga

SEQ ID NO: 933925 - DNA, 25 bp, Homo sapien
ggcgccgggactcgccaagcttcat

SEQ ID NO: 933926 - DNA, 25 bp, Homo sapien
aagcttcatggagccgcggcgcatc

SEQ ID NO: 933927 - DNA, 25 bp, Homo sapien
ccgcgcaaggcactctgaggccgag

SEQ ID NO: 933928 - DNA, 25 bp, Homo sapien
gcagtcgcagccatgggacccgcag

SEQ ID NO: 933929 - DNA, 25 bp, Homo sapien
ttgagcagcgactactcgacccgga

SEQ ID NO: 933930 - DNA, 25 bp, Homo sapien
ccacgggagctacagcagtcgcagc

SEQ ID NO: 933931 - DNA, 25 bp, Homo sapien
tgcttgagcagcgactactcgaccc

SEQ ID NO: 933932 - DNA, 25 bp, Homo sapien
gaacaaagagccgttacgaacacag

SEQ ID NO: 933933 - DNA, 25 bp, Homo sapien
gtcacttcaccttagctcagtgcag

SEQ ID NO: 933934 - DNA, 25 bp, Homo sapien
tgtgctgcttctacgggtgtcctct

SEQ ID NO: 933935 - DNA, 25 bp, Homo sapien
aaggctacaaagaggtctcagggcc

SEQ ID NO: 933936 - DNA, 25 bp, Homo sapien
ggaggtggtacagcacatgggtttg

SEQ ID NO: 933937 - DNA, 25 bp, Homo sapien
agcctaacccttggtgcacccccat

SEQ ID NO: 933938 - DNA, 25 bp, Homo sapien
tggtacagcacatgggtttggagct

SEQ ID NO: 933939 - DNA, 25 bp, Homo sapien
tgcatccttttgagctggctgcagg

SEQ ID NO: 933940 - DNA, 25 bp, Homo sapien
atcccagtcaccttcgagtcgcggg

SEQ ID NO: 933941 - DNA, 25 bp, Homo sapien
agctagccacgcagtccaacgagat

SEQ ID NO: 933942 - DNA, 25 bp, Homo sapien
tgcaaaatccgatgagactgccgcc

SEQ ID NO: 933943 - DNA, 25 bp, Homo sapien
caagtaaagccttagcccggatgcc

SEQ ID NO: 933944 - DNA, 25 bp, Homo sapien
ctgcttgccagtcccgtgctgtgcg

SEQ ID NO: 933945 - DNA, 25 bp, Homo sapien
cgtctccggcgtcgccagcccagga

SEQ ID NO: 933946 - DNA, 25 bp, Homo sapien
cagtgaatcctgtatgggggccgca

SEQ ID NO: 933947 - DNA, 25 bp, Homo sapien
ggagccgtctccggcgtcgccagcc

SEQ ID NO: 933948 - DNA, 25 bp, Homo sapien
tcaaagaggcgatcaaagacaggac

SEQ ID NO: 933949 - DNA, 25 bp, Homo sapien
tgcgggccacgttcacagatagaca

SEQ ID NO: 933950 - DNA, 25 bp, Homo sapien
tgcagtagtagcatccgcgtgcgct

SEQ ID NO: 933951 - DNA, 25 bp, Homo sapien
catttagcctaggagaccgatcaac

SEQ ID NO: 933952 - DNA, 25 bp, Homo sapien
ttaattgttgccttcgccgccatcg

SEQ ID NO: 933953 - DNA, 25 bp, Homo sapien
gaaggtttcgttcctcattcgacag

SEQ ID NO: 933954 - DNA, 25 bp, Homo sapien
gaacgcggtcttggccaagtggcac

SEQ ID NO: 933955 - DNA, 25 bp, Homo sapien
taagagccaggcctaatcggatggg

SEQ ID NO: 933956 - DNA, 25 bp, Homo sapien
tggacacccctgtactaaactcctg

SEQ ID NO: 933957 - DNA, 25 bp, Homo sapien
attacttcaagcagcatctactcag

SEQ ID NO: 933958 - DNA, 25 bp, Homo sapien
gaatgaatgatcagcaagtgctaca

SEQ ID NO: 933959 - DNA, 25 bp, Homo sapien
tgcttggcaaaagtgattacagtca

SEQ ID NO: 933960 - DNA, 25 bp, Homo sapien
tccatcattcgctaagcaatcttgg

SEQ ID NO: 933961 - DNA, 25 bp, Homo sapien
aatcttggggacaagccgcttcatt

SEQ ID NO: 933962 - DNA, 25 bp, Homo sapien
aatatacaggtatatcagacaaata

SEQ ID NO: 933963 - DNA, 25 bp, Homo sapien
taatatacaggtatatcagacaaat

SEQ ID NO: 933964 - DNA, 25 bp, Homo sapien
tatatcaatccgctggaagtgcagt

SEQ ID NO: 933965 - DNA, 25 bp, Homo sapien
catcttcctgtatcgagtgtctctt

SEQ ID NO: 933966 - DNA, 25 bp, Homo sapien
tacatttcctaacgatctcccagct

SEQ ID NO: 933967 - DNA, 25 bp, Homo sapien
tatattaagcggaaactgccttagc

SEQ ID NO: 933968 - DNA, 25 bp, Homo sapien
tacgggatcttgtatcatttgggaa

SEQ ID NO: 933969 - DNA, 25 bp, Homo sapien
caagttattctaatagtgtctaaaa

SEQ ID NO: 933970 - DNA, 25 bp, Homo sapien
caatgtgggaagatacgggatcttg

SEQ ID NO: 933971 - DNA, 25 bp, Homo sapien
tctaaaatgatttaatcaagacaga

SEQ ID NO: 933972 - DNA, 25 bp, Homo sapien
catttgctgattgagctttgcatac

SEQ ID NO: 933973 - DNA, 25 bp, Homo sapien
tgattgagctttgcatacttcccag

SEQ ID NO: 933974 - DNA, 25 bp, Homo sapien
ctgtgcccgaccccatttgctgatt

SEQ ID NO: 933975 - DNA, 25 bp, Homo sapien
cccgaccccatttgctgattgagct

SEQ ID NO: 933976 - DNA, 25 bp, Homo sapien
gctcatactccacccctagaatctg

SEQ ID NO: 933977 - DNA, 25 bp, Homo sapien
tgggcttggccatatgaatcagcat

SEQ ID NO: 933978 - DNA, 25 bp, Homo sapien
tctgggcttggccatatgaatcagc

SEQ ID NO: 933979 - DNA, 25 bp, Homo sapien
tcacattaatataacgctcatactc

SEQ ID NO: 933980 - DNA, 25 bp, Homo sapien
tttctctcttagcacgttcccttca

SEQ ID NO: 933981 - DNA, 25 bp, Homo sapien
aagttcatggagacccagcaactcc

SEQ ID NO: 933982 - DNA, 25 bp, Homo sapien
ctgcaaagttcatggagacccagca

SEQ ID NO: 933983 - DNA, 25 bp, Homo sapien
caggctttagtccttccctgcaaag

SEQ ID NO: 933984 - DNA, 25 bp, Homo sapien
cagttaagagcctcatgctgcagga

SEQ ID NO: 933985 - DNA, 25 bp, Homo sapien
tactgaatgtcttgtgctggcgtcc

SEQ ID NO: 933986 - DNA, 25 bp, Homo sapien
taaaataaggttaggactgctgata

SEQ ID NO: 933987 - DNA, 25 bp, Homo sapien
gctgatattgggaatgggcaaagaa

SEQ ID NO: 933988 - DNA, 25 bp, Homo sapien
tgcacaacacggaatgtacccaatg

SEQ ID NO: 933989 - DNA, 25 bp, Homo sapien
tcttcaacataggtgatggctgcac

SEQ ID NO: 933990 - DNA, 25 bp, Homo sapien
gacaattatcgctggctgtgagctg

SEQ ID NO: 933991 - DNA, 25 bp, Homo sapien
gctgttgtgggcactccattatcga

SEQ ID NO: 933992 - DNA, 25 bp, Homo sapien
gcaccagttgctcgcggtccaccat

SEQ ID NO: 933993 - DNA, 25 bp, Homo sapien
gccagccgggctttctgcaccagtt

SEQ ID NO: 933994 - DNA, 25 bp, Homo sapien
gttcttcatggccgcggccatgtcg

SEQ ID NO: 933995 - DNA, 25 bp, Homo sapien
tcatggccgcggccatgtcgtcgta

SEQ ID NO: 933996 - DNA, 25 bp, Homo sapien
gcccaagtgccggagaggaccgacc

SEQ ID NO: 933997 - DNA, 25 bp, Homo sapien
ctgaagggcttggagggcgcgactg

SEQ ID NO: 933998 - DNA, 25 bp, Homo sapien
gagggcgcgactggagcccaagtgc

SEQ ID NO: 933999 - DNA, 25 bp, Homo sapien
ccgacccacagagcgagcagctgag

SEQ ID NO: 934000 - DNA, 25 bp, Homo sapien
cggctgctgtgcgtgccactgacgg

SEQ ID NO: 934001 - DNA, 25 bp, Homo sapien
gcccacgccgcatgacgaaggcagg

SEQ ID NO: 934002 - DNA, 25 bp, Homo sapien
tgtgcgtgccactgacggacaaccc

SEQ ID NO: 934003 - DNA, 25 bp, Homo sapien
tgctgtgcgtgccactgacggacaa

SEQ ID NO: 934004 - DNA, 25 bp, Homo sapien
taaagagggcacgatggcatcatga

SEQ ID NO: 934005 - DNA, 25 bp, Homo sapien
aaagagggcacgatggcatcatgag

SEQ ID NO: 934006 - DNA, 25 bp, Homo sapien
agagggcacgatggcatcatgagga

SEQ ID NO: 934007 - DNA, 25 bp, Homo sapien
ataaagagggcacgatggcatcatg

SEQ ID NO: 934008 - DNA, 25 bp, Homo sapien
tgcgcaagaaagacagctgctcagg

SEQ ID NO: 934009 - DNA, 25 bp, Homo sapien
gcgcaagaaagacagctgctcaggg

SEQ ID NO: 934010 - DNA, 25 bp, Homo sapien
ctgcgcaagaaagacagctgctcag

SEQ ID NO: 934011 - DNA, 25 bp, Homo sapien
caacagtcgatgacaggctgaggtc

SEQ ID NO: 934012 - DNA, 25 bp, Homo sapien
gaggagataccccatttaaagagcc

SEQ ID NO: 934013 - DNA, 25 bp, Homo sapien
ttgtccagccgagcaccatctgagt

SEQ ID NO: 934014 - DNA, 25 bp, Homo sapien
ctatgaactggtggctacaggcccc

SEQ ID NO: 934015 - DNA, 25 bp, Homo sapien
tgtggtcacagttgtgggcatccca

SEQ ID NO: 934016 - DNA, 25 bp, Homo sapien
tcccagcggatatgagagcagagca

SEQ ID NO: 934017 - DNA, 25 bp, Homo sapien
tgtgggcatcccagcggatatgaga

SEQ ID NO: 934018 - DNA, 25 bp, Homo sapien
cacagttgtgggcatcccagcggat

SEQ ID NO: 934019 - DNA, 25 bp, Homo sapien
gctccattgaccagacgtagatgcc

SEQ ID NO: 934020 - DNA, 25 bp, Homo sapien
tgccccaccgttgccctaggtagag

SEQ ID NO: 934021 - DNA, 25 bp, Homo sapien
tctacacgtccctcgcatcggtggg

SEQ ID NO: 934022 - DNA, 25 bp, Homo sapien
cagctggcggcacaggacaccggct

SEQ ID NO: 934023 - DNA, 25 bp, Homo sapien
gaaggggctggtccatgccaggcca

SEQ ID NO: 934024 - DNA, 25 bp, Homo sapien
aggagtgggcacccgcgtggtctca

SEQ ID NO: 934025 - DNA, 25 bp, Homo sapien
tgggcacccgcgtggtctcagaacc

SEQ ID NO: 934026 - DNA, 25 bp, Homo sapien
agtgggcacccgcgtggtctcagaa

SEQ ID NO: 934027 - DNA, 25 bp, Homo sapien
ggcacccgcgtggtctcagaaccat

SEQ ID NO: 934028 - DNA, 25 bp, Homo sapien
ctttccactgactccgcccaaaggt

SEQ ID NO: 934029 - DNA, 25 bp, Homo sapien
ggtcacacgctagctctggtaaggg

SEQ ID NO: 934030 - DNA, 25 bp, Homo sapien
gcccaaaggtcacacgctagctctg

SEQ ID NO: 934031 - DNA, 25 bp, Homo sapien
gctagctctggtaagggtgatccac

SEQ ID NO: 934032 - DNA, 25 bp, Homo sapien
gaagcagtcgctcaggcgagcctcg

SEQ ID NO: 934033 - DNA, 25 bp, Homo sapien
tggaagcagtcgctcaggcgagcct

SEQ ID NO: 934034 - DNA, 25 bp, Homo sapien
gtggaagcagtcgctcaggcgagcc

SEQ ID NO: 934035 - DNA, 25 bp, Homo sapien
ggaagcagtcgctcaggcgagcctc

SEQ ID NO: 934036 - DNA, 25 bp, Homo sapien
gtgccggcgcagcccacgttgtcca

SEQ ID NO: 934037 - DNA, 25 bp, Homo sapien
tgccggcgcagcccacgttgtccag

SEQ ID NO: 934038 - DNA, 25 bp, Homo sapien
ccgcggccgtagccgaagtggccca

SEQ ID NO: 934039 - DNA, 25 bp, Homo sapien
tcccgtagcgcccagcgcaggcccg

SEQ ID NO: 934040 - DNA, 25 bp, Homo sapien
gcccgcagcccgcttcgcggcaggc

SEQ ID NO: 934041 - DNA, 25 bp, Homo sapien
ttcgcggcaggccacgcgcgcgtcc

SEQ ID NO: 934042 - DNA, 25 bp, Homo sapien
cgcgcgtccgcaaagtcccagtcat

SEQ ID NO: 934043 - DNA, 25 bp, Homo sapien
ccccagcccccggcgtgcaacacct

SEQ ID NO: 934044 - DNA, 25 bp, Homo sapien
ccccggcgtgcaacacctccacgcg

SEQ ID NO: 934045 - DNA, 25 bp, Homo sapien
ccgggccgcccaccagtcgcagccg

SEQ ID NO: 934046 - DNA, 25 bp, Homo sapien
cggcgtgcaacacctccacgcggcc

SEQ ID NO: 934047 - DNA, 25 bp, Homo sapien
agcagtgctgtctcccgggaaggct

SEQ ID NO: 934048 - DNA, 25 bp, Homo sapien
gcggcggtggtgagcagtgctgtct

SEQ ID NO: 934049 - DNA, 25 bp, Homo sapien
gcggtggtgagcagtgctgtctccc

SEQ ID NO: 934050 - DNA, 25 bp, Homo sapien
tggtgagcagtgctgtctcccggga

SEQ ID NO: 934051 - DNA, 25 bp, Homo sapien
tcaggcccagggatagttcctatcc

SEQ ID NO: 934052 - DNA, 25 bp, Homo sapien
tgggatctccgggaaacttggttga

SEQ ID NO: 934053 - DNA, 25 bp, Homo sapien
gaatgaaccgaaagctaattctagg

SEQ ID NO: 934054 - DNA, 25 bp, Homo sapien
tgcaaccccagagtcaccacgttgt

SEQ ID NO: 934055 - DNA, 25 bp, Homo sapien
gtcctctcttgtggctgaggatggc

SEQ ID NO: 934056 - DNA, 25 bp, Homo sapien
tggcagtgctgtgagcgttggggga

SEQ ID NO: 934057 - DNA, 25 bp, Homo sapien
cagtcctctcttgtggctgaggatg

SEQ ID NO: 934058 - DNA, 25 bp, Homo sapien
agtgctgtgagcgttgggggaccca

SEQ ID NO: 934059 - DNA, 25 bp, Homo sapien
cacaggccactgtgcaggatctcca

SEQ ID NO: 934060 - DNA, 25 bp, Homo sapien
tgtgtccggtgccatagccgaagaa

SEQ ID NO: 934061 - DNA, 25 bp, Homo sapien
tcgtggtggccgcagttgtgcacac

SEQ ID NO: 934062 - DNA, 25 bp, Homo sapien
ccttcgcagtgcacgttgtccagca

SEQ ID NO: 934063 - DNA, 25 bp, Homo sapien
tccattcggcagtgtcgtaggaggt

SEQ ID NO: 934064 - DNA, 25 bp, Homo sapien
ccttgttgggggctgcgttggcaag

SEQ ID NO: 934065 - DNA, 25 bp, Homo sapien
tgctctactggttaacatcttcctt

SEQ ID NO: 934066 - DNA, 25 bp, Homo sapien
ttttccattcggcagtgtcgtagga

SEQ ID NO: 934067 - DNA, 25 bp, Homo sapien
tgaagtggatacaggggtctttctg

SEQ ID NO: 934068 - DNA, 25 bp, Homo sapien
agagcctctggccacacaaagagtc

SEQ ID NO: 934069 - DNA, 25 bp, Homo sapien
tccatcctcacaccacggggtgttt

SEQ ID NO: 934070 - DNA, 25 bp, Homo sapien
tggacccataaggtgcttgccgcca

SEQ ID NO: 934071 - DNA, 25 bp, Homo sapien
gtgaaagcaattgtggacgccccag

SEQ ID NO: 934072 - DNA, 25 bp, Homo sapien
ggcgacacactacgttggcgtccac

SEQ ID NO: 934073 - DNA, 25 bp, Homo sapien
cagccacatcctcgtagtgaaagca

SEQ ID NO: 934074 - DNA, 25 bp, Homo sapien
accacgtcccagtcgtcatcacaga

SEQ ID NO: 934075 - DNA, 25 bp, Homo sapien
cttgaaagggcagtggagtgggctg

SEQ ID NO: 934076 - DNA, 25 bp, Homo sapien
gcagtggagtgggctgtagggcgct

SEQ ID NO: 934077 - DNA, 25 bp, Homo sapien
tgaaagggcagtggagtgggctgta

SEQ ID NO: 934078 - DNA, 25 bp, Homo sapien
agtggagtgggctgtagggcgctgg

SEQ ID NO: 934079 - DNA, 25 bp, Homo sapien
gtgaggaagagcattggcccctctg

SEQ ID NO: 934080 - DNA, 25 bp, Homo sapien
tgaggaagagcattggcccctctgc

SEQ ID NO: 934081 - DNA, 25 bp, Homo sapien
ttggacttcagtacccctgctttgc

SEQ ID NO: 934082 - DNA, 25 bp, Homo sapien
gacttcagtacccctgctttgccaa

SEQ ID NO: 934083 - DNA, 25 bp, Homo sapien
tggacttcagtacccctgctttgcc

SEQ ID NO: 934084 - DNA, 25 bp, Homo sapien
ttcttggacttcagtacccctgctt

SEQ ID NO: 934085 - DNA, 25 bp, Homo sapien
catgtatgtcctcattgctttcttt

SEQ ID NO: 934086 - DNA, 25 bp, Homo sapien
accttgcctggccttgagtctttct

SEQ ID NO: 934087 - DNA, 25 bp, Homo sapien
tctgcttcagccatcatgtatgtcc

SEQ ID NO: 934088 - DNA, 25 bp, Homo sapien
ccttgcctggccttgagtctttctg

SEQ ID NO: 934089 - DNA, 25 bp, Homo sapien
cttctcatccagctggggaccaatt

SEQ ID NO: 934090 - DNA, 25 bp, Homo sapien
ggaccaattagcatctctgcttcct

SEQ ID NO: 934091 - DNA, 25 bp, Homo sapien
ccagctggggaccaattagcatctc

SEQ ID NO: 934092 - DNA, 25 bp, Homo sapien
ctggggaccaattagcatctctgct

SEQ ID NO: 934093 - DNA, 25 bp, Homo sapien
tgtttcagatgctcccatcaaggcg

SEQ ID NO: 934094 - DNA, 25 bp, Homo sapien
ctcccatcaaggcgccagggagaag

SEQ ID NO: 934095 - DNA, 25 bp, Homo sapien
gaagggtgtttcagatgctcccatc

SEQ ID NO: 934096 - DNA, 25 bp, Homo sapien
tggtgaagggtgtttcagatgctcc

SEQ ID NO: 934097 - DNA, 25 bp, Homo sapien
gacacagggatttcaacaccccatt

SEQ ID NO: 934098 - DNA, 25 bp, Homo sapien
gatgaaagcctatctggatgcagac

SEQ ID NO: 934099 - DNA, 25 bp, Homo sapien
ccctggtgtacaaagtctggttggg

SEQ ID NO: 934100 - DNA, 25 bp, Homo sapien
tgtgccctggtgtacaaagtctggt

SEQ ID NO: 934101 - DNA, 25 bp, Homo sapien
gcagaggcaaagtccctgtccatgg

SEQ ID NO: 934102 - DNA, 25 bp, Homo sapien
tctacagtcaatccaagatcgaatc

SEQ ID NO: 934103 - DNA, 25 bp, Homo sapien
ccatccgaccttagggacagcaaga

SEQ ID NO: 934104 - DNA, 25 bp, Homo sapien
aagatcgaatcactttgtctgcccc

SEQ ID NO: 934105 - DNA, 25 bp, Homo sapien
tgagtgcttattccctcagctgtaa

SEQ ID NO: 934106 - DNA, 25 bp, Homo sapien
caatgtacacattgggtgttgttaa

SEQ ID NO: 934107 - DNA, 25 bp, Homo sapien
tgttaactcaaacagaaagtatcag

SEQ ID NO: 934108 - DNA, 25 bp, Homo sapien
ttggatatagctcccccaatgtaca

SEQ ID NO: 934109 - DNA, 25 bp, Homo sapien
tcttgaatacccgacctcaaacgat

SEQ ID NO: 934110 - DNA, 25 bp, Homo sapien
tgtacccggcctgctagcattttac

SEQ ID NO: 934111 - DNA, 25 bp, Homo sapien
tactgttatcctccatctactgacc

SEQ ID NO: 934112 - DNA, 25 bp, Homo sapien
ctactgacctaccttattctacttg

SEQ ID NO: 934113 - DNA, 25 bp, Homo sapien
cggtgatggcgccagctcaggaccc

SEQ ID NO: 934114 - DNA, 25 bp, Homo sapien
gcgtctccggtgatggcgccagctc

SEQ ID NO: 934115 - DNA, 25 bp, Homo sapien
cacctggcgtctccggtgatggcgc

SEQ ID NO: 934116 - DNA, 25 bp, Homo sapien
atggacatcacctggcgtctccggt

SEQ ID NO: 934117 - DNA, 25 bp, Homo sapien
gtgaaggaggagtaggacttagaaa

SEQ ID NO: 934118 - DNA, 25 bp, Homo sapien
catccagaaaggggacggttagagg

SEQ ID NO: 934119 - DNA, 25 bp, Homo sapien
aggaggagtaggacttagaaagtgg

SEQ ID NO: 934120 - DNA, 25 bp, Homo sapien
agtaggacttagaaagtggggcaca

SEQ ID NO: 934121 - DNA, 25 bp, Homo sapien
ggtgatctgtatgcaagggaatatt

SEQ ID NO: 934122 - DNA, 25 bp, Homo sapien
gcatcccgaggacagctttgggtga

SEQ ID NO: 934123 - DNA, 25 bp, Homo sapien
catcccgaggacagctttgggtgat

SEQ ID NO: 934124 - DNA, 25 bp, Homo sapien
ccacttgtagattttgtgcacaagc

SEQ ID NO: 934125 - DNA, 25 bp, Homo sapien
ttccacttgtagattttgtgcacaa

SEQ ID NO: 934126 - DNA, 25 bp, Homo sapien
acttgtagattttgtgcacaagccc

SEQ ID NO: 934127 - DNA, 25 bp, Homo sapien
tttttccacttgtagattttgtgca

SEQ ID NO: 934128 - DNA, 25 bp, Homo sapien
ataacgtggctgtaactgtctttct

SEQ ID NO: 934129 - DNA, 25 bp, Homo sapien
aacgtggctgtaactgtctttctca

SEQ ID NO: 934130 - DNA, 25 bp, Homo sapien
tattcgatgagacccataacgtggc

SEQ ID NO: 934131 - DNA, 25 bp, Homo sapien
cgtggctgtaactgtctttctcata

SEQ ID NO: 934132 - DNA, 25 bp, Homo sapien
tgtcctggaagtcattgccaactct

SEQ ID NO: 934133 - DNA, 25 bp, Homo sapien
gtcctggaagtcattgccaactctg

SEQ ID NO: 934134 - DNA, 25 bp, Homo sapien
ttgtcctggaagtcattgccaactc

SEQ ID NO: 934135 - DNA, 25 bp, Homo sapien
ttttcggtgcatctgcgaagatcca

SEQ ID NO: 934136 - DNA, 25 bp, Homo sapien
atttgtgccttttttcggtgcatct

SEQ ID NO: 934137 - DNA, 25 bp, Homo sapien
ggtgtgctccttcttgtcatccatt

SEQ ID NO: 934138 - DNA, 25 bp, Homo sapien
ggcactggtgtgctccttcttgtca

SEQ ID NO: 934139 - DNA, 25 bp, Homo sapien
ttgcgcataccagcccacagtcggt

SEQ ID NO: 934140 - DNA, 25 bp, Homo sapien
tcggtgcccactggagactatcagc

SEQ ID NO: 934141 - DNA, 25 bp, Homo sapien
acagtcggtgcccactggagactat

SEQ ID NO: 934142 - DNA, 25 bp, Homo sapien
gcttgcagcagttgcgcataccagc

SEQ ID NO: 934143 - DNA, 25 bp, Homo sapien
cttgagccgggcagtagcatctcct

SEQ ID NO: 934144 - DNA, 25 bp, Homo sapien
catctcctgtctctgggtgccccat

SEQ ID NO: 934145 - DNA, 25 bp, Homo sapien
agccgggcagtagcatctcctgtct

SEQ ID NO: 934146 - DNA, 25 bp, Homo sapien
tgagccgggcagtagcatctcctgt

SEQ ID NO: 934147 - DNA, 25 bp, Homo sapien
aacgatctgggagtagtgctgaacg

SEQ ID NO: 934148 - DNA, 25 bp, Homo sapien
agcaccctaacgatctgggagtagt

SEQ ID NO: 934149 - DNA, 25 bp, Homo sapien
accctaacgatctgggagtagtgct

SEQ ID NO: 934150 - DNA, 25 bp, Homo sapien
tgaacgaaatcctgctttgcttggg

SEQ ID NO: 934151 - DNA, 25 bp, Homo sapien
ccatctgccctgtgagaaggtcatt

SEQ ID NO: 934152 - DNA, 25 bp, Homo sapien
gtcatttctagttccaggtcacgca

SEQ ID NO: 934153 - DNA, 25 bp, Homo sapien
ggcctcctggaaagtgcccgaaaga

SEQ ID NO: 934154 - DNA, 25 bp, Homo sapien
catgttagtggaatcagagctggga

SEQ ID NO: 934155 - DNA, 25 bp, Homo sapien
gccacgatcctctggacagagattt

SEQ ID NO: 934156 - DNA, 25 bp, Homo sapien
tttgtggcgaagacctgacgagaga

SEQ ID NO: 934157 - DNA, 25 bp, Homo sapien
attccatggtgcctcagccacgatc

SEQ ID NO: 934158 - DNA, 25 bp, Homo sapien
acagcagcattccatggtgcctcag

SEQ ID NO: 934159 - DNA, 25 bp, Homo sapien
gagagacaagtacatttgatgttgg

SEQ ID NO: 934160 - DNA, 25 bp, Homo sapien
cagcttaggagagacaagtacattt

SEQ ID NO: 934161 - DNA, 25 bp, Homo sapien
tggttactaaatgttggaccctgga

SEQ ID NO: 934162 - DNA, 25 bp, Homo sapien
tttgatgttggttactaaatgttgg

SEQ ID NO: 934163 - DNA, 25 bp, Homo sapien
atctcagctactcagaagtctgatg

SEQ ID NO: 934164 - DNA, 25 bp, Homo sapien
tcagctactcagaagtctgatgcag

SEQ ID NO: 934165 - DNA, 25 bp, Homo sapien
ataaaacaaaagtccgggcgtgatg

SEQ ID NO: 934166 - DNA, 25 bp, Homo sapien
agtctgatgcaggagaattgctaaa

SEQ ID NO: 934167 - DNA, 25 bp, Homo sapien
tctttcctgttgactgccattagca

SEQ ID NO: 934168 - DNA, 25 bp, Homo sapien
tcctctttcctgttgactgccatta

SEQ ID NO: 934169 - DNA, 25 bp, Homo sapien
tttcctgttgactgccattagcatt

SEQ ID NO: 934170 - DNA, 25 bp, Homo sapien
cctctttcctgttgactgccattag

SEQ ID NO: 934171 - DNA, 25 bp, Homo sapien
gaaaggcgagcgcgatctcgcgccc

SEQ ID NO: 934172 - DNA, 25 bp, Homo sapien
ctaggaaaggcgagcgcgatctcgc

SEQ ID NO: 934173 - DNA, 25 bp, Homo sapien
aggaaaggcgagcgcgatctcgcgc

SEQ ID NO: 934174 - DNA, 25 bp, Homo sapien
aaaggcgagcgcgatctcgcgccca

SEQ ID NO: 934175 - DNA, 25 bp, Homo sapien
agtgctctgggtcataagcctggat

SEQ ID NO: 934176 - DNA, 25 bp, Homo sapien
ccagtgctctgggtcataagcctgg

SEQ ID NO: 934177 - DNA, 25 bp, Homo sapien
cagtgctctgggtcataagcctgga

SEQ ID NO: 934178 - DNA, 25 bp, Homo sapien
aaacaaacgccctttgagaagacag

SEQ ID NO: 934179 - DNA, 25 bp, Homo sapien
aacaaacgccctttgagaagacagg

SEQ ID NO: 934180 - DNA, 25 bp, Homo sapien
tttgagaagacagggactcgccagg

SEQ ID NO: 934181 - DNA, 25 bp, Homo sapien
aagacagggactcgccaggataccc

SEQ ID NO: 934182 - DNA, 25 bp, Homo sapien
ccaagccctgccgctcatggaacag

SEQ ID NO: 934183 - DNA, 25 bp, Homo sapien
gccctgccgctcatggaacagaaga

SEQ ID NO: 934184 - DNA, 25 bp, Homo sapien
aagccctgccgctcatggaacagaa

SEQ ID NO: 934185 - DNA, 25 bp, Homo sapien
ccctgccgctcatggaacagaagaa

SEQ ID NO: 934186 - DNA, 25 bp, Homo sapien
tcttcctggccctcgggttcatgca

SEQ ID NO: 934187 - DNA, 25 bp, Homo sapien
accgaagtttctggaacagggctat

SEQ ID NO: 934188 - DNA, 25 bp, Homo sapien
ctggaaccgaagtttctggaacagg

SEQ ID NO: 934189 - DNA, 25 bp, Homo sapien
gaagtttctggaacagggctatctg

SEQ ID NO: 934190 - DNA, 25 bp, Homo sapien
gggtcttcccatacaggaagtagaa

SEQ ID NO: 934191 - DNA, 25 bp, Homo sapien
cggttacggaccaagggtatgcgag

SEQ ID NO: 934192 - DNA, 25 bp, Homo sapien
tgcgagagcgggtcttcccatacag

SEQ ID NO: 934193 - DNA, 25 bp, Homo sapien
gaccaagggtatgcgagagcgggtc

SEQ ID NO: 934194 - DNA, 25 bp, Homo sapien
caggagaggcctccggctgaggtca

SEQ ID NO: 934195 - DNA, 25 bp, Homo sapien
accaccaggagaggcctccggctga

SEQ ID NO: 934196 - DNA, 25 bp, Homo sapien
aggacagaaatcaggttgctgctca

SEQ ID NO: 934197 - DNA, 25 bp, Homo sapien
ctgaggacagaaatcaggttgctgc

SEQ ID NO: 934198 - DNA, 25 bp, Homo sapien
gaccgtccctagctcaggactggca

SEQ ID NO: 934199 - DNA, 25 bp, Homo sapien
aagggaccgtccctagctcaggact

SEQ ID NO: 934200 - DNA, 25 bp, Homo sapien
gggaccgtccctagctcaggactgg

SEQ ID NO: 934201 - DNA, 25 bp, Homo sapien
aggtaagggaccgtccctagctcag

SEQ ID NO: 934202 - DNA, 25 bp, Homo sapien
ctgcagagagccacgccttcctcag

SEQ ID NO: 934203 - DNA, 25 bp, Homo sapien
agagagccacgccttcctcaggagg

SEQ ID NO: 934204 - DNA, 25 bp, Homo sapien
gagccacgccttcctcaggagggct

SEQ ID NO: 934205 - DNA, 25 bp, Homo sapien
tgcagagagccacgccttcctcagg

SEQ ID NO: 934206 - DNA, 25 bp, Homo sapien
ggaggccggcccggctgaaatacgc

SEQ ID NO: 934207 - DNA, 25 bp, Homo sapien
ccggcccggctgaaatacgctatga

SEQ ID NO: 934208 - DNA, 25 bp, Homo sapien
aggccggcccggctgaaatacgcta

SEQ ID NO: 934209 - DNA, 25 bp, Homo sapien
gcccggctgaaatacgctatgacca

SEQ ID NO: 934210 - DNA, 25 bp, Homo sapien
gagaactgtcccgaagagctgagag

SEQ ID NO: 934211 - DNA, 25 bp, Homo sapien
tgcaagagaccagcagaatcctgag

SEQ ID NO: 934212 - DNA, 25 bp, Homo sapien
catgtgagcccaacagttcgagaac

SEQ ID NO: 934213 - DNA, 25 bp, Homo sapien
tgccaagactcaagaccgtgggagc

SEQ ID NO: 934214 - DNA, 25 bp, Homo sapien
caggccaggaatcttttaatgacag

SEQ ID NO: 934215 - DNA, 25 bp, Homo sapien
tcccaggccaggaatcttttaatga

SEQ ID NO: 934216 - DNA, 25 bp, Homo sapien
ttgtccgacaccctcagatctttgt

SEQ ID NO: 934217 - DNA, 25 bp, Homo sapien
gccaggaatcttttaatgacaggat

SEQ ID NO: 934218 - DNA, 25 bp, Homo sapien
gcaaaaggacctatgcggggggctg

SEQ ID NO: 934219 - DNA, 25 bp, Homo sapien
ctcaggggcgagcaccttccgtggc

SEQ ID NO: 934220 - DNA, 25 bp, Homo sapien
ggctcaggggcgagcaccttccgtg

SEQ ID NO: 934221 - DNA, 25 bp, Homo sapien
caaaaggacctatgcggggggctgg

SEQ ID NO: 934222 - DNA, 25 bp, Homo sapien
cctcagattcatctgaccactcctt

SEQ ID NO: 934223 - DNA, 25 bp, Homo sapien
tgactgttgaagtccttgtggtgct

SEQ ID NO: 934224 - DNA, 25 bp, Homo sapien
aagctgactgttgaagtccttgtgg

SEQ ID NO: 934225 - DNA, 25 bp, Homo sapien
agattcatctgaccactccttcttc

SEQ ID NO: 934226 - DNA, 25 bp, Homo sapien
atggggggctgggatctaccccagg

SEQ ID NO: 934227 - DNA, 25 bp, Homo sapien
acatggggggctgggatctacccca

SEQ ID NO: 934228 - DNA, 25 bp, Homo sapien
tacatggggggctgggatctacccc

SEQ ID NO: 934229 - DNA, 25 bp, Homo sapien
ctacatggggggctgggatctaccc

SEQ ID NO: 934230 - DNA, 25 bp, Homo sapien
aggccaccgtgtaatgcttctgcat

SEQ ID NO: 934231 - DNA, 25 bp, Homo sapien
aagaaaccaggccaccgtgtaatgc

SEQ ID NO: 934232 - DNA, 25 bp, Homo sapien
accaggccaccgtgtaatgcttctg

SEQ ID NO: 934233 - DNA, 25 bp, Homo sapien
tgagtaaagaaaccaggccaccgtg

SEQ ID NO: 934234 - DNA, 25 bp, Homo sapien
actcgcagactgctggcttctctaa

SEQ ID NO: 934235 - DNA, 25 bp, Homo sapien
gcttctctaagccatctttctgatt

SEQ ID NO: 934236 - DNA, 25 bp, Homo sapien
ccagactcgcagactgctggcttct

SEQ ID NO: 934237 - DNA, 25 bp, Homo sapien
tccccagactcgcagactgctggct

SEQ ID NO: 934238 - DNA, 25 bp, Homo sapien
caacctcttcctcccagtctcaagt

SEQ ID NO: 934239 - DNA, 25 bp, Homo sapien
acctcttcctcccagtctcaagtga

SEQ ID NO: 934240 - DNA, 25 bp, Homo sapien
ctcttcctcccagtctcaagtgatt

SEQ ID NO: 934241 - DNA, 25 bp, Homo sapien
tgattctcctgtctcagcctcctga

SEQ ID NO: 934242 - DNA, 25 bp, Homo sapien
tggcccccttccttcgtcttagtca

SEQ ID NO: 934243 - DNA, 25 bp, Homo sapien
cttccttcgtcttagtcaatcctat

SEQ ID NO: 934244 - DNA, 25 bp, Homo sapien
tccttcgtcttagtcaatcctatcc

SEQ ID NO: 934245 - DNA, 25 bp, Homo sapien
ttcgtcttagtcaatcctatcccac

SEQ ID NO: 934246 - DNA, 25 bp, Homo sapien
cttacggaacctagtctccgttctg

SEQ ID NO: 934247 - DNA, 25 bp, Homo sapien
acagtgtctctcacccagtctggaa

SEQ ID NO: 934248 - DNA, 25 bp, Homo sapien
gtctggaatgcaacagcgtggtctc

SEQ ID NO: 934249 - DNA, 25 bp, Homo sapien
tctggaatgcaacagcgtggtctcg

SEQ ID NO: 934250 - DNA, 25 bp, Homo sapien
ccagtctggaatgcaacagcgtggt

SEQ ID NO: 934251 - DNA, 25 bp, Homo sapien
accgagtccacaggccatatgtctg

SEQ ID NO: 934252 - DNA, 25 bp, Homo sapien
gaaaactggtaggaggactttgcaa

SEQ ID NO: 934253 - DNA, 25 bp, Homo sapien
tgggccaaaccgagtccacaggcca

SEQ ID NO: 934254 - DNA, 25 bp, Homo sapien
gctgactggctgaaaactggtagga

SEQ ID NO: 934255 - DNA, 25 bp, Homo sapien
cagtagactggccttgacatggagg

SEQ ID NO: 934256 - DNA, 25 bp, Homo sapien
ccttgacatggaggctctggaactg

SEQ ID NO: 934257 - DNA, 25 bp, Homo sapien
acgtcttgccacagatttgccagtg

SEQ ID NO: 934258 - DNA, 25 bp, Homo sapien
gcagaagcaggagtccacatgaatc

SEQ ID NO: 934259 - DNA, 25 bp, Homo sapien
gttatcgacatttcgatgacattca

SEQ ID NO: 934260 - DNA, 25 bp, Homo sapien
cgacatttcgatgacattcatagac

SEQ ID NO: 934261 - DNA, 25 bp, Homo sapien
ataagttatcgacatttcgatgaca

SEQ ID NO: 934262 - DNA, 25 bp, Homo sapien
agcatatcctagaggatttctttct

SEQ ID NO: 934263 - DNA, 25 bp, Homo sapien
ctatactccaccctcctccactccc

SEQ ID NO: 934264 - DNA, 25 bp, Homo sapien
tccaccctcctccactccctggact

SEQ ID NO: 934265 - DNA, 25 bp, Homo sapien
caccctcctccactccctggactgc

SEQ ID NO: 934266 - DNA, 25 bp, Homo sapien
actccaccctcctccactccctgga

SEQ ID NO: 934267 - DNA, 25 bp, Homo sapien
tatgcaccaatttcaaggagagaag

SEQ ID NO: 934268 - DNA, 25 bp, Homo sapien
gacagtgtgatcagtaaacactagc

SEQ ID NO: 934269 - DNA, 25 bp, Homo sapien
gactagaagcagctaatatgcacca

SEQ ID NO: 934270 - DNA, 25 bp, Homo sapien
tagatcatccaagagtaaacttcgg

SEQ ID NO: 934271 - DNA, 25 bp, Homo sapien
cacagggtgggaggcagtgcgacac

SEQ ID NO: 934272 - DNA, 25 bp, Homo sapien
ttattcggaagcagacacagggtgg

SEQ ID NO: 934273 - DNA, 25 bp, Homo sapien
ttcggaagcagacacagggtgggag

SEQ ID NO: 934274 - DNA, 25 bp, Homo sapien
gaagcagacacagggtgggaggcag

SEQ ID NO: 934275 - DNA, 25 bp, Homo sapien
acagcagtcagagtcagggacacca

SEQ ID NO: 934276 - DNA, 25 bp, Homo sapien
gagaaccaggataacagcagtcaga

SEQ ID NO: 934277 - DNA, 25 bp, Homo sapien
gcagtcagagtcagggacaccacca

SEQ ID NO: 934278 - DNA, 25 bp, Homo sapien
gaaccaggataacagcagtcagagt

SEQ ID NO: 934279 - DNA, 25 bp, Homo sapien
caggaagatcagtggccccacggtg

SEQ ID NO: 934280 - DNA, 25 bp, Homo sapien
ccaggaagatcagtggccccacggt

SEQ ID NO: 934281 - DNA, 25 bp, Homo sapien
ttacagggaagcagacgtggaccac

SEQ ID NO: 934282 - DNA, 25 bp, Homo sapien
tacagggaagcagacgtggaccact

SEQ ID NO: 934283 - DNA, 25 bp, Homo sapien
acagggaagcagacgtggaccactg

SEQ ID NO: 934284 - DNA, 25 bp, Homo sapien
agcattgacagatgtcagccaggcc

SEQ ID NO: 934285 - DNA, 25 bp, Homo sapien
agccaggccttccactgggaaccag

SEQ ID NO: 934286 - DNA, 25 bp, Homo sapien
ttacagcattgacagatgtcagcca

SEQ ID NO: 934287 - DNA, 25 bp, Homo sapien
ctttgttacagcattgacagatgtc

SEQ ID NO: 934288 - DNA, 25 bp, Homo sapien
aaagagaagcagcttagatttttgt

SEQ ID NO: 934289 - DNA, 25 bp, Homo sapien
aagagaagcagcttagatttttgtt

SEQ ID NO: 934290 - DNA, 25 bp, Homo sapien
agagaagcagcttagatttttgttg

SEQ ID NO: 934291 - DNA, 25 bp, Homo sapien
gagaagcagcttagatttttgttgc

SEQ ID NO: 934292 - DNA, 25 bp, Homo sapien
cctgctcagctagggtgaccttcag

SEQ ID NO: 934293 - DNA, 25 bp, Homo sapien
tcctgctcagctagggtgaccttca

SEQ ID NO: 934294 - DNA, 25 bp, Homo sapien
gaacaggccttgttgagttcatctg

SEQ ID NO: 934295 - DNA, 25 bp, Homo sapien
aaggaacaggccttgttgagttcat

SEQ ID NO: 934296 - DNA, 25 bp, Homo sapien
tgcagaagaggcatcagtgagaccg

SEQ ID NO: 934297 - DNA, 25 bp, Homo sapien
ggaagacatccactgtgaactggag

SEQ ID NO: 934298 - DNA, 25 bp, Homo sapien
aactggagtgtatctggcccgggtc

SEQ ID NO: 934299 - DNA, 25 bp, Homo sapien
catgtttctggagtcattagcaaag

SEQ ID NO: 934300 - DNA, 25 bp, Homo sapien
aaagccagacaggtgggccgggcac

SEQ ID NO: 934301 - DNA, 25 bp, Homo sapien
aacagaacggtgttaaagccagaca

SEQ ID NO: 934302 - DNA, 25 bp, Homo sapien
taaagccagacaggtgggccgggca

SEQ ID NO: 934303 - DNA, 25 bp, Homo sapien
caccattgcactagcctgggtgaca

SEQ ID NO: 934304 - DNA, 25 bp, Homo sapien
cagagggtgtagtgagccaaaattg

SEQ ID NO: 934305 - DNA, 25 bp, Homo sapien
gcagagggtgtagtgagccaaaatt

SEQ ID NO: 934306 - DNA, 25 bp, Homo sapien
cctgggtgacagactgagactcggt

SEQ ID NO: 934307 - DNA, 25 bp, Homo sapien
gacgtggcccaagaaagaatgtgac

SEQ ID NO: 934308 - DNA, 25 bp, Homo sapien
aatgaatgacgtggcccaagaaaga

SEQ ID NO: 934309 - DNA, 25 bp, Homo sapien
gggccaccagtgctctgaagcaact

SEQ ID NO: 934310 - DNA, 25 bp, Homo sapien
ctggctaggtccaagtgggaggatc

SEQ ID NO: 934311 - DNA, 25 bp, Homo sapien
ccatgttggctgcaaagctatcttg

SEQ ID NO: 934312 - DNA, 25 bp, Homo sapien
tagcggacgcactagacaaccaaat

SEQ ID NO: 934313 - DNA, 25 bp, Homo sapien
ggagacgccaggtgatgtccattca

SEQ ID NO: 934314 - DNA, 25 bp, Homo sapien
cagatggaggccaattagcggacgc

SEQ ID NO: 934315 - DNA, 25 bp, Homo sapien
ggttgcagtgaagaagccggttaaa

SEQ ID NO: 934316 - DNA, 25 bp, Homo sapien
gttgcagtgaagaagccggttaaaa

SEQ ID NO: 934317 - DNA, 25 bp, Homo sapien
tactattgtcagaggcgggtgaacc

SEQ ID NO: 934318 - DNA, 25 bp, Homo sapien
catgaggctaacatggctaatagct

SEQ ID NO: 934319 - DNA, 25 bp, Homo sapien
taacacgtttctacagaagcatgag

SEQ ID NO: 934320 - DNA, 25 bp, Homo sapien
gacatcgatctaacctgtgccttga

SEQ ID NO: 934321 - DNA, 25 bp, Homo sapien
tggcctctgtatctttacgggaatg

SEQ ID NO: 934322 - DNA, 25 bp, Homo sapien
cattacttgatggtgaggacagtgt

SEQ ID NO: 934323 - DNA, 25 bp, Homo sapien
tacagtctcctttgcacatgggtct

SEQ ID NO: 934324 - DNA, 25 bp, Homo sapien
tctttgagggcactcagtacagtct

SEQ ID NO: 934325 - DNA, 25 bp, Homo sapien
ggacagtgttgagctgattatctgc

SEQ ID NO: 934326 - DNA, 25 bp, Homo sapien
taggaacaactggagaagaataaag

SEQ ID NO: 934327 - DNA, 25 bp, Homo sapien
gaaatcagaagctaaccaacaagcc

SEQ ID NO: 934328 - DNA, 25 bp, Homo sapien
tcattcaaacaagcagattcgtcct

SEQ ID NO: 934329 - DNA, 25 bp, Homo sapien
tggacacgaaaagggagagtattct

SEQ ID NO: 934330 - DNA, 25 bp, Homo sapien
acgcgaaaatcttctgtcaggaggg

SEQ ID NO: 934331 - DNA, 25 bp, Homo sapien
ctcagagtcactgggctacacacca

SEQ ID NO: 934332 - DNA, 25 bp, Homo sapien
tcaggaggggcgatcctcagagtca

SEQ ID NO: 934333 - DNA, 25 bp, Homo sapien
atcgcagaacgcgaaaatcttctgt

SEQ ID NO: 934334 - DNA, 25 bp, Homo sapien
agccttcttgtgataaccattccag

SEQ ID NO: 934335 - DNA, 25 bp, Homo sapien
ccttcttgtgataaccattccagca

SEQ ID NO: 934336 - DNA, 25 bp, Homo sapien
gcacagccttcttgtgataaccatt

SEQ ID NO: 934337 - DNA, 25 bp, Homo sapien
tcttgtgataaccattccagcacac

SEQ ID NO: 934338 - DNA, 25 bp, Homo sapien
cggcccgggcttgcccaggtaactg

SEQ ID NO: 934339 - DNA, 25 bp, Homo sapien
taggaggtttccgttggctgtcgac

SEQ ID NO: 934340 - DNA, 25 bp, Homo sapien
agcagttcggcagggtcaggtcctt

SEQ ID NO: 934341 - DNA, 25 bp, Homo sapien
tcaggtccttcgagcagggtccgcg

SEQ ID NO: 934342 - DNA, 25 bp, Homo sapien
gcgaagcgaacagtgttcgccgatg

SEQ ID NO: 934343 - DNA, 25 bp, Homo sapien
ggcgaagcgaacagtgttcgccgat

SEQ ID NO: 934344 - DNA, 25 bp, Homo sapien
aggcgaagcgaacagtgttcgccga

SEQ ID NO: 934345 - DNA, 25 bp, Homo sapien
gaggcgaagcgaacagtgttcgccg

SEQ ID NO: 934346 - DNA, 25 bp, Homo sapien
ggaggccgaccagcgacaggccgag

SEQ ID NO: 934347 - DNA, 25 bp, Homo sapien
taggaggccgaccagcgacaggccg

SEQ ID NO: 934348 - DNA, 25 bp, Homo sapien
ccgaccagcgacaggccgagaagcg

SEQ ID NO: 934349 - DNA, 25 bp, Homo sapien
aggccgaccagcgacaggccgagaa

SEQ ID NO: 934350 - DNA, 25 bp, Homo sapien
gccgcggaggagacttaaatatccc

SEQ ID NO: 934351 - DNA, 25 bp, Homo sapien
gcggaggagacttaaatatcccagc

SEQ ID NO: 934352 - DNA, 25 bp, Homo sapien
cgcagccgccggagacatcgcggct

SEQ ID NO: 934353 - DNA, 25 bp, Homo sapien
cgcgccgcggaggagacttaaatat

SEQ ID NO: 934354 - DNA, 25 bp, Homo sapien
aagtgagatcttcggctgaggatgt

SEQ ID NO: 934355 - DNA, 25 bp, Homo sapien
gaagtgagatcttcggctgaggatg

SEQ ID NO: 934356 - DNA, 25 bp, Homo sapien
tgtagaggtgatattcaagacaaca

SEQ ID NO: 934357 - DNA, 25 bp, Homo sapien
gatttagcacggcatatgaagttaa

SEQ ID NO: 934358 - DNA, 25 bp, Homo sapien
caacaataccataaagaagggcaga

SEQ ID NO: 934359 - DNA, 25 bp, Homo sapien
ggtaaaaggttgatactagccaatg

SEQ ID NO: 934360 - DNA, 25 bp, Homo sapien
ctggactatgttgacatggaaattc

SEQ ID NO: 934361 - DNA, 25 bp, Homo sapien
ggactatgttgacatggaaattcac

SEQ ID NO: 934362 - DNA, 25 bp, Homo sapien
tggactatgttgacatggaaattca

SEQ ID NO: 934363 - DNA, 25 bp, Homo sapien
cctgctccaacttaatgatgacgtt

SEQ ID NO: 934364 - DNA, 25 bp, Homo sapien
tgctccaacttaatgatgacgtttg

SEQ ID NO: 934365 - DNA, 25 bp, Homo sapien
gctccaacttaatgatgacgtttgg

SEQ ID NO: 934366 - DNA, 25 bp, Homo sapien
tccctgctccaacttaatgatgacg

SEQ ID NO: 934367 - DNA, 25 bp, Homo sapien
agtacaagatgttgccacctcataa

SEQ ID NO: 934368 - DNA, 25 bp, Homo sapien
aagtacaagatgttgccacctcata

SEQ ID NO: 934369 - DNA, 25 bp, Homo sapien
gtacaagatgttgccacctcataag

SEQ ID NO: 934370 - DNA, 25 bp, Homo sapien
gcattcagaaagcaagctatcctca

SEQ ID NO: 934371 - DNA, 25 bp, Homo sapien
tgagagcattcagaaagcaagctat

SEQ ID NO: 934372 - DNA, 25 bp, Homo sapien
gagcattcagaaagcaagctatcct

SEQ ID NO: 934373 - DNA, 25 bp, Homo sapien
cattcagaaagcaagctatcctcac

SEQ ID NO: 934374 - DNA, 25 bp, Homo sapien
ccaaggaaactagatggctgtagtt

SEQ ID NO: 934375 - DNA, 25 bp, Homo sapien
tatgttatcttctcatcagggtcca

SEQ ID NO: 934376 - DNA, 25 bp, Homo sapien
ccaacatcacatccccgtatgttat

SEQ ID NO: 934377 - DNA, 25 bp, Homo sapien
tcatcagggtccagttgccgccact

SEQ ID NO: 934378 - DNA, 25 bp, Homo sapien
tccatcaacagcatgccatttgtgg

SEQ ID NO: 934379 - DNA, 25 bp, Homo sapien
caacagcatgccatttgtggttcat

SEQ ID NO: 934380 - DNA, 25 bp, Homo sapien
catcaacagcatgccatttgtggtt

SEQ ID NO: 934381 - DNA, 25 bp, Homo sapien
tttccatcaacagcatgccatttgt

SEQ ID NO: 934382 - DNA, 25 bp, Homo sapien
gctccagcctccggagcttatccat

SEQ ID NO: 934383 - DNA, 25 bp, Homo sapien
ctgtggctccagcctccggagctta

SEQ ID NO: 934384 - DNA, 25 bp, Homo sapien
tggctccagcctccggagcttatcc

SEQ ID NO: 934385 - DNA, 25 bp, Homo sapien
tgtggctccagcctccggagcttat

SEQ ID NO: 934386 - DNA, 25 bp, Homo sapien
caacctgtgagtaccactttgttgc

SEQ ID NO: 934387 - DNA, 25 bp, Homo sapien
cttcaaattcaatcgagatttcaat

SEQ ID NO: 934388 - DNA, 25 bp, Homo sapien
gatttcaattcttctcacttctccc

SEQ ID NO: 934389 - DNA, 25 bp, Homo sapien
aacctgtgagtaccactttgttgca

SEQ ID NO: 934390 - DNA, 25 bp, Homo sapien
tagctgcaaataactgctggtctgc

SEQ ID NO: 934391 - DNA, 25 bp, Homo sapien
atcatggaatccagcctgaaggtga

SEQ ID NO: 934392 - DNA, 25 bp, Homo sapien
atagctgcaaataactgctggtctg

SEQ ID NO: 934393 - DNA, 25 bp, Homo sapien
ccatcatggaatccagcctgaaggt

SEQ ID NO: 934394 - DNA, 25 bp, Homo sapien
gaaatggccaattcacacatgtgcc

SEQ ID NO: 934395 - DNA, 25 bp, Homo sapien
gccaattcacacatgtgccacgttt

SEQ ID NO: 934396 - DNA, 25 bp, Homo sapien
gagcagtgtgaaatggccaattcac

SEQ ID NO: 934397 - DNA, 25 bp, Homo sapien
tgtgaaatggccaattcacacatgt

SEQ ID NO: 934398 - DNA, 25 bp, Homo sapien
acggcgcagcgcgagtttatatccc

SEQ ID NO: 934399 - DNA, 25 bp, Homo sapien
cggcgcagcgcgagtttatatccca

SEQ ID NO: 934400 - DNA, 25 bp, Homo sapien
cagcgcgagtttatatcccacacct

SEQ ID NO: 934401 - DNA, 25 bp, Homo sapien
gcgcagcgcgagtttatatcccaca

SEQ ID NO: 934402 - DNA, 25 bp, Homo sapien
ggtcaattcagcaattttgtcctgc

SEQ ID NO: 934403 - DNA, 25 bp, Homo sapien
gtcaattcagcaattttgtcctgct

SEQ ID NO: 934404 - DNA, 25 bp, Homo sapien
gggtcaattcagcaattttgtcctg

SEQ ID NO: 934405 - DNA, 25 bp, Homo sapien
tcaattcagcaattttgtcctgctt

SEQ ID NO: 934406 - DNA, 25 bp, Homo sapien
gctcagagtaaagaatgtgggcatc

SEQ ID NO: 934407 - DNA, 25 bp, Homo sapien
ggcatctcatcagcagacatgatca

SEQ ID NO: 934408 - DNA, 25 bp, Homo sapien
gagtaaagaatgtgggcatctcatc

SEQ ID NO: 934409 - DNA, 25 bp, Homo sapien
ctaacaattgtagctcagagtaaag

SEQ ID NO: 934410 - DNA, 25 bp, Homo sapien
ataattctgcgtgctttctgtgaac

SEQ ID NO: 934411 - DNA, 25 bp, Homo sapien
gataattctgcgtgctttctgtgaa

SEQ ID NO: 934412 - DNA, 25 bp, Homo sapien
taattctgcgtgctttctgtgaaca

SEQ ID NO: 934413 - DNA, 25 bp, Homo sapien
aattctgcgtgctttctgtgaacat

SEQ ID NO: 934414 - DNA, 25 bp, Homo sapien
ggaggcacacacctcctgctgcttt

SEQ ID NO: 934415 - DNA, 25 bp, Homo sapien
acacacctcctgctgctttcctcat

SEQ ID NO: 934416 - DNA, 25 bp, Homo sapien
gaggcacacacctcctgctgctttc

SEQ ID NO: 934417 - DNA, 25 bp, Homo sapien
ggcacacacctcctgctgctttcct

SEQ ID NO: 934418 - DNA, 25 bp, Homo sapien
ggttttctgatgtaggaaaatctcc

SEQ ID NO: 934419 - DNA, 25 bp, Homo sapien
tggactgagatgagccatcaaatga

SEQ ID NO: 934420 - DNA, 25 bp, Homo sapien
actttcagtcactaatgatctggaa

SEQ ID NO: 934421 - DNA, 25 bp, Homo sapien
catcaaatgatagtgactttcagtc

SEQ ID NO: 934422 - DNA, 25 bp, Homo sapien
ttatactttggtaaataatagtcac

SEQ ID NO: 934423 - DNA, 25 bp, Homo sapien
agagttctctacacttccagaaaat

SEQ ID NO: 934424 - DNA, 25 bp, Homo sapien
tgtcatcagagttctctacacttcc

SEQ ID NO: 934425 - DNA, 25 bp, Homo sapien
ggcctggctttattatactttggta

SEQ ID NO: 934426 - DNA, 25 bp, Homo sapien
agggtagcatttggtgcttctcacc

SEQ ID NO: 934427 - DNA, 25 bp, Homo sapien
gtagcatttggtgcttctcaccagc

SEQ ID NO: 934428 - DNA, 25 bp, Homo sapien
atgggagggtagcatttggtgcttc

SEQ ID NO: 934429 - DNA, 25 bp, Homo sapien
ggagggtagcatttggtgcttctca

SEQ ID NO: 934430 - DNA, 25 bp, Homo sapien
taaacaccatgaataaccagaccat

SEQ ID NO: 934431 - DNA, 25 bp, Homo sapien
cttcatgtcacccacatgtcttaag

SEQ ID NO: 934432 - DNA, 25 bp, Homo sapien
ccaccattccatgtaaacaccatga

SEQ ID NO: 934433 - DNA, 25 bp, Homo sapien
ggctttctcagaactatacttcatg

SEQ ID NO: 934434 - DNA, 25 bp, Homo sapien
agcctgagacaacagctctgctaag

SEQ ID NO: 934435 - DNA, 25 bp, Homo sapien
gacaacagctctgctaagtgccctt

SEQ ID NO: 934436 - DNA, 25 bp, Homo sapien
acagctctgctaagtgcccttgaga

SEQ ID NO: 934437 - DNA, 25 bp, Homo sapien
tgagacaacagctctgctaagtgcc

SEQ ID NO: 934438 - DNA, 25 bp, Homo sapien
gctgttattggtgtctttatttagg

SEQ ID NO: 934439 - DNA, 25 bp, Homo sapien
ttattggtgtctttatttaggctgt

SEQ ID NO: 934440 - DNA, 25 bp, Homo sapien
gcaagctgttattggtgtctttatt

SEQ ID NO: 934441 - DNA, 25 bp, Homo sapien
tgcaagctgttattggtgtctttat

SEQ ID NO: 934442 - DNA, 25 bp, Homo sapien
aaacctgagcatgtgttgtcaagtg

SEQ ID NO: 934443 - DNA, 25 bp, Homo sapien
tgagcatgtgttgtcaagtggctga

SEQ ID NO: 934444 - DNA, 25 bp, Homo sapien
agcatgtgttgtcaagtggctgatg

SEQ ID NO: 934445 - DNA, 25 bp, Homo sapien
cctgagcatgtgttgtcaagtggct

SEQ ID NO: 934446 - DNA, 25 bp, Homo sapien
caaaacctggtctgagtccatggta

SEQ ID NO: 934447 - DNA, 25 bp, Homo sapien
ccatggtaatgacgacataattgac

SEQ ID NO: 934448 - DNA, 25 bp, Homo sapien
gaaacccgtacttgtcagacttcat

SEQ ID NO: 934449 - DNA, 25 bp, Homo sapien
actctctgggattataattgcctgc

SEQ ID NO: 934450 - DNA, 25 bp, Homo sapien
agacagtagaggaatgaaagaatga

SEQ ID NO: 934451 - DNA, 25 bp, Homo sapien
tggctggttacccatttttatgatt

SEQ ID NO: 934452 - DNA, 25 bp, Homo sapien
gaatgaccattccatagacagagca

SEQ ID NO: 934453 - DNA, 25 bp, Homo sapien
tgaaagaatgaccattccatagaca

SEQ ID NO: 934454 - DNA, 25 bp, Homo sapien
cggtgatggcgccagctcaggaccc

SEQ ID NO: 934455 - DNA, 25 bp, Homo sapien
atggacatcacctggcgtctccggt

SEQ ID NO: 934456 - DNA, 25 bp, Homo sapien
gcgtctccggtgatggcgccagctc

SEQ ID NO: 934457 - DNA, 25 bp, Homo sapien
cacctggcgtctccggtgatggcgc

SEQ ID NO: 934458 - DNA, 25 bp, Homo sapien
tttttaagagacaagatgtcaccct

SEQ ID NO: 934459 - DNA, 25 bp, Homo sapien
taagagacaagatgtcaccctgtca

SEQ ID NO: 934460 - DNA, 25 bp, Homo sapien
ttttaagagacaagatgtcaccctg

SEQ ID NO: 934461 - DNA, 25 bp, Homo sapien
ccacaggggtgtcccaccacaccca

SEQ ID NO: 934462 - DNA, 25 bp, Homo sapien
aggaggagtaggacttagaaagtgg

SEQ ID NO: 934463 - DNA, 25 bp, Homo sapien
gtgaaggaggagtaggacttagaaa

SEQ ID NO: 934464 - DNA, 25 bp, Homo sapien
catccagaaaggggacggttagagg

SEQ ID NO: 934465 - DNA, 25 bp, Homo sapien
agtaggacttagaaagtggggcaca

SEQ ID NO: 934466 - DNA, 25 bp, Homo sapien
ggtgatctgtatgcaagggaatatt

SEQ ID NO: 934467 - DNA, 25 bp, Homo sapien
catcccgaggacagctttgggtgat

SEQ ID NO: 934468 - DNA, 25 bp, Homo sapien
gcatcccgaggacagctttgggtga

SEQ ID NO: 934469 - DNA, 25 bp, Homo sapien
ccacttgtagattttgtgcccaagc

SEQ ID NO: 934470 - DNA, 25 bp, Homo sapien
acttgtagattttgtgcccaagccc

SEQ ID NO: 934471 - DNA, 25 bp, Homo sapien
ttccacttgtagattttgtgcccaa

SEQ ID NO: 934472 - DNA, 25 bp, Homo sapien
ttttccacttgtagattttgtgccc

SEQ ID NO: 934473 - DNA, 25 bp, Homo sapien
cgtggctgtaactgtctttctcata

SEQ ID NO: 934474 - DNA, 25 bp, Homo sapien
ataacgtggctgtaactgtctttct

SEQ ID NO: 934475 - DNA, 25 bp, Homo sapien
tattcgatgagacccataacgtggc

SEQ ID NO: 934476 - DNA, 25 bp, Homo sapien
aacgtggctgtaactgtctttctca

SEQ ID NO: 934477 - DNA, 25 bp, Homo sapien
ttgtcctggaagtcattgccaactc

SEQ ID NO: 934478 - DNA, 25 bp, Homo sapien
gtcctggaagtcattgccaactctg

SEQ ID NO: 934479 - DNA, 25 bp, Homo sapien
tgtcctggaagtcattgccaactct

SEQ ID NO: 934480 - DNA, 25 bp, Homo sapien
tcggtgcccactggagactatcagc

SEQ ID NO: 934481 - DNA, 25 bp, Homo sapien
ggcactggtgtgctccttcttgtca

SEQ ID NO: 934482 - DNA, 25 bp, Homo sapien
ttttcggtgcatctgcgaagatcca

SEQ ID NO: 934483 - DNA, 25 bp, Homo sapien
gcttgcagcagttgcgcataccagc

SEQ ID NO: 934484 - DNA, 25 bp, Homo sapien
tagtgctgaacgaaatcctgctttt

SEQ ID NO: 934485 - DNA, 25 bp, Homo sapien
accctaacgatctgggagtagtgct

SEQ ID NO: 934486 - DNA, 25 bp, Homo sapien
agcaccctaacgatctgggagtagt

SEQ ID NO: 934487 - DNA, 25 bp, Homo sapien
aacgatctgggagtagtgctgaacg

SEQ ID NO: 934488 - DNA, 25 bp, Homo sapien
gattgctcttggctacccaggagcc

SEQ ID NO: 934489 - DNA, 25 bp, Homo sapien
gaagctggttgaccacaagggaatt

SEQ ID NO: 934490 - DNA, 25 bp, Homo sapien
ttgtaggttactggggccggcacca

SEQ ID NO: 934491 - DNA, 25 bp, Homo sapien
ccacaagggaattgtaggttactgg

SEQ ID NO: 934492 - DNA, 25 bp, Homo sapien
tataatcacatgtataagggtttct

SEQ ID NO: 934493 - DNA, 25 bp, Homo sapien
cagaatcacaaaacctagagaaggg

SEQ ID NO: 934494 - DNA, 25 bp, Homo sapien
tagcttttatcttctctcgcgacgg

SEQ ID NO: 934495 - DNA, 25 bp, Homo sapien
tggaaacccattctaactgccagaa

SEQ ID NO: 934496 - DNA, 25 bp, Homo sapien
gtagaggtgggacctcttgtcactg

SEQ ID NO: 934497 - DNA, 25 bp, Homo sapien
actattggcatgcacctccgcacct

SEQ ID NO: 934498 - DNA, 25 bp, Homo sapien
gaggtgggacctcttgtcactgagg

SEQ ID NO: 934499 - DNA, 25 bp, Homo sapien
gactattggcatgcacctccgcacc

SEQ ID NO: 934500 - DNA, 25 bp, Homo sapien
cactatggaaagtggggtaggccga

SEQ ID NO: 934501 - DNA, 25 bp, Homo sapien
aggaccggggagctggcactatgga

SEQ ID NO: 934502 - DNA, 25 bp, Homo sapien
gggtaggccgagggtgtggcaggaa

SEQ ID NO: 934503 - DNA, 25 bp, Homo sapien
ggcaggaacgggttcgtccagcagg

SEQ ID NO: 934504 - DNA, 25 bp, Homo sapien
tggaagctgactttccaccgcagcc

SEQ ID NO: 934505 - DNA, 25 bp, Homo sapien
tggccagtccagatgctcttgagtg

SEQ ID NO: 934506 - DNA, 25 bp, Homo sapien
gcctgtgatggtcaagttctgaacc

SEQ ID NO: 934507 - DNA, 25 bp, Homo sapien
tgccctgctcgttgcatggccacag

SEQ ID NO: 934508 - DNA, 25 bp, Homo sapien
acctgcagcttcaggttcaaacgat

SEQ ID NO: 934509 - DNA, 25 bp, Homo sapien
tgcaacctgcagcttcaggttcaaa

SEQ ID NO: 934510 - DNA, 25 bp, Homo sapien
caacctgcagcttcaggttcaaacg

SEQ ID NO: 934511 - DNA, 25 bp, Homo sapien
cctgcagcttcaggttcaaacgatt

SEQ ID NO: 934512 - DNA, 25 bp, Homo sapien
tatccagaagtattttgggtacatg

SEQ ID NO: 934513 - DNA, 25 bp, Homo sapien
tccatgtggatcctagatagtaagg

SEQ ID NO: 934514 - DNA, 25 bp, Homo sapien
gatagtaaggatctgttgaatttga

SEQ ID NO: 934515 - DNA, 25 bp, Homo sapien
tgaatttgaagtatctatccagaag

SEQ ID NO: 934516 - DNA, 25 bp, Homo sapien
tccatgttctcagcggttatccttg

SEQ ID NO: 934517 - DNA, 25 bp, Homo sapien
ccttggatgtgagatctcatgcact

SEQ ID NO: 934518 - DNA, 25 bp, Homo sapien
gttacttaaacatatgcagctaaaa

SEQ ID NO: 934519 - DNA, 25 bp, Homo sapien
tacttgtaaagcgtttggtgctaat

SEQ ID NO: 934520 - DNA, 25 bp, Homo sapien
cctcattcttgagggattagggatg

SEQ ID NO: 934521 - DNA, 25 bp, Homo sapien
atgcttctgtatcgacttcatgctg

SEQ ID NO: 934522 - DNA, 25 bp, Homo sapien
tgtatcgacttcatgctgaccaggg

SEQ ID NO: 934523 - DNA, 25 bp, Homo sapien
tacagatttacaaaccgcgtcccac

SEQ ID NO: 934524 - DNA, 25 bp, Homo sapien
aaagagtgctcgcttcaggagcaca

SEQ ID NO: 934525 - DNA, 25 bp, Homo sapien
tagaagagattattatggaagtatc

SEQ ID NO: 934526 - DNA, 25 bp, Homo sapien
tcagtcacaaacctaaacagcaaat

SEQ ID NO: 934527 - DNA, 25 bp, Homo sapien
agataaaaagagtgctcgcttcagg

SEQ ID NO: 934528 - DNA, 25 bp, Homo sapien
cttctctcaggccgatgacctcagg

SEQ ID NO: 934529 - DNA, 25 bp, Homo sapien
ccacacccagtgctctgggtcataa

SEQ ID NO: 934530 - DNA, 25 bp, Homo sapien
atgtaacggcataactggaaccaaa

SEQ ID NO: 934531 - DNA, 25 bp, Homo sapien
cctgcagcgcatggaacaaaagaag

SEQ ID NO: 934532 - DNA, 25 bp, Homo sapien
tggaacaaaagaagtggaaccgata

SEQ ID NO: 934533 - DNA, 25 bp, Homo sapien
cgatacttccggaacaaggctatct

SEQ ID NO: 934534 - DNA, 25 bp, Homo sapien
agagcgggtctcctcgtacaggaag

SEQ ID NO: 934535 - DNA, 25 bp, Homo sapien
agggtatatgagagcgggtctcctc

SEQ ID NO: 934536 - DNA, 25 bp, Homo sapien
cgggtctcctcgtacaggaagtaga

SEQ ID NO: 934537 - DNA, 25 bp, Homo sapien
atatgagagcgggtctcctcgtaca

SEQ ID NO: 934538 - DNA, 25 bp, Homo sapien
aggacagaaatcaggttgctgctca

SEQ ID NO: 934539 - DNA, 25 bp, Homo sapien
ccaccaggagagacctccggctgag

SEQ ID NO: 934540 - DNA, 25 bp, Homo sapien
ctgaggacagaaatcaggttgctgc

SEQ ID NO: 934541 - DNA, 25 bp, Homo sapien
caggagagacctccggctgaggtca

SEQ ID NO: 934542 - DNA, 25 bp, Homo sapien
ggaggccggcccggctgaaatacgc

SEQ ID NO: 934543 - DNA, 25 bp, Homo sapien
gcccggctgaaatacgctatgacca

SEQ ID NO: 934544 - DNA, 25 bp, Homo sapien
ccggcccggctgaaatacgctatga

SEQ ID NO: 934545 - DNA, 25 bp, Homo sapien
aggccggcccggctgaaatacgcta

SEQ ID NO: 934546 - DNA, 25 bp, Homo sapien
gaaggtcggatgcaaatccgagaag

SEQ ID NO: 934547 - DNA, 25 bp, Homo sapien
aaggtcggatgcaaatccgagaagc

SEQ ID NO: 934548 - DNA, 25 bp, Homo sapien
caggagtcttttaatgacaggatcc

SEQ ID NO: 934549 - DNA, 25 bp, Homo sapien
gtcccaggccaggagtcttttaatg

SEQ ID NO: 934550 - DNA, 25 bp, Homo sapien
gatctttgtcccaggccaggagtct

SEQ ID NO: 934551 - DNA, 25 bp, Homo sapien
ttgtccgacaccctcagatctttgt

SEQ ID NO: 934552 - DNA, 25 bp, Homo sapien
gtgtgagaagcaggacagggtttcc

SEQ ID NO: 934553 - DNA, 25 bp, Homo sapien
ctgtgattagagagcagatgtcagt

SEQ ID NO: 934554 - DNA, 25 bp, Homo sapien
gattagagagcagatgtcagtgtga

SEQ ID NO: 934555 - DNA, 25 bp, Homo sapien
tagagagcagatgtcagtgtgagaa

SEQ ID NO: 934556 - DNA, 25 bp, Homo sapien
tgtgagaatctacaggatgtagagc

SEQ ID NO: 934557 - DNA, 25 bp, Homo sapien
tgagaatctacaggatgtagagctg

SEQ ID NO: 934558 - DNA, 25 bp, Homo sapien
gtgtgcctcccgggggaaagtctca

SEQ ID NO: 934559 - DNA, 25 bp, Homo sapien
tgtgcctcccgggggaaagtctcag

SEQ ID NO: 934560 - DNA, 25 bp, Homo sapien
tgatcacttcagagtcctcccgcat

SEQ ID NO: 934561 - DNA, 25 bp, Homo sapien
gagtgatcacttcagagtcctcccg

SEQ ID NO: 934562 - DNA, 25 bp, Homo sapien
tcaagtctacctaatcctctgttgt

SEQ ID NO: 934563 - DNA, 25 bp, Homo sapien
tttatcaagtctacctaatcctctg

SEQ ID NO: 934564 - DNA, 25 bp, Homo sapien
cattggaaaagtgtggttattggaa

SEQ ID NO: 934565 - DNA, 25 bp, Homo sapien
cccattggaaaagtgtggttattgg

SEQ ID NO: 934566 - DNA, 25 bp, Homo sapien
tcccattggaaaagtgtggttattg

SEQ ID NO: 934567 - DNA, 25 bp, Homo sapien
ccattggaaaagtgtggttattgga

SEQ ID NO: 934568 - DNA, 25 bp, Homo sapien
acgagcgacactcgccgtcgcttcg

SEQ ID NO: 934569 - DNA, 25 bp, Homo sapien
agcagcctgttgaaggcctcgtagt

SEQ ID NO: 934570 - DNA, 25 bp, Homo sapien
tgttgaaggcctcgtagtactcagg

SEQ ID NO: 934571 - DNA, 25 bp, Homo sapien
tactcagggagcacgagcgacactc

SEQ ID NO: 934572 - DNA, 25 bp, Homo sapien
catcagattcatccaaacattccct

SEQ ID NO: 934573 - DNA, 25 bp, Homo sapien
ctccttctctggctcatcatcagat

SEQ ID NO: 934574 - DNA, 25 bp, Homo sapien
ccttctctggctcatcatcagattc

SEQ ID NO: 934575 - DNA, 25 bp, Homo sapien
tcagattcatccaaacattccctct

SEQ ID NO: 934576 - DNA, 25 bp, Homo sapien
gaatttctccattcttcccacacac

SEQ ID NO: 934577 - DNA, 25 bp, Homo sapien
atttctccattcttcccacacaccc

SEQ ID NO: 934578 - DNA, 25 bp, Homo sapien
cctgaatttctccattcttcccaca

SEQ ID NO: 934579 - DNA, 25 bp, Homo sapien
ctccattcttcccacacaccctccc

SEQ ID NO: 934580 - DNA, 25 bp, Homo sapien
ccgctgggggctccgctcttcctgg

SEQ ID NO: 934581 - DNA, 25 bp, Homo sapien
tcttcctggggctgcggttgatggc

SEQ ID NO: 934582 - DNA, 25 bp, Homo sapien
ggtgctccgctgggggctccgctct

SEQ ID NO: 934583 - DNA, 25 bp, Homo sapien
cctggggctgcggttgatggctcat

SEQ ID NO: 934584 - DNA, 25 bp, Homo sapien
agcttgaagcgtgttggggtctcct

SEQ ID NO: 934585 - DNA, 25 bp, Homo sapien
ctcttctctgtacatgcccgtttca

SEQ ID NO: 934586 - DNA, 25 bp, Homo sapien
aagcttgaagcgtgttggggtctcc

SEQ ID NO: 934587 - DNA, 25 bp, Homo sapien
tccatgttctcagcggttatccttg

SEQ ID NO: 934588 - DNA, 25 bp, Homo sapien
gttacttaaacatatgcagctaaaa

SEQ ID NO: 934589 - DNA, 25 bp, Homo sapien
ccttggatgtgagatctcatgcact

SEQ ID NO: 934590 - DNA, 25 bp, Homo sapien
tacttgtaaagcgtttggtgctaat

SEQ ID NO: 934591 - DNA, 25 bp, Homo sapien
tacagatttacaaaccgcgtcccac

SEQ ID NO: 934592 - DNA, 25 bp, Homo sapien
tgtatcgacttcatgctgaccaggg

SEQ ID NO: 934593 - DNA, 25 bp, Homo sapien
atgcttctgtatcgacttcatgctg

SEQ ID NO: 934594 - DNA, 25 bp, Homo sapien
cctcattcttgagggattagggatg

SEQ ID NO: 934595 - DNA, 25 bp, Homo sapien
tctagaagtcgaccgggcatggtgg

SEQ ID NO: 934596 - DNA, 25 bp, Homo sapien
ctctagaagtcgaccgggcatggtg

SEQ ID NO: 934597 - DNA, 25 bp, Homo sapien
gcacaggattatcttccagagctaa

SEQ ID NO: 934598 - DNA, 25 bp, Homo sapien
tcttccagagctaataaatatgttc

SEQ ID NO: 934599 - DNA, 25 bp, Homo sapien
aatcaatccagaccaatatgatcac

SEQ ID NO: 934600 - DNA, 25 bp, Homo sapien
aaaaatatcactgggcagcaaataa

SEQ ID NO: 934601 - DNA, 25 bp, Homo sapien
atagatacaaagattgaaaggtaaa

SEQ ID NO: 934602 - DNA, 25 bp, Homo sapien
aatagatacaaagattgaaaggtaa

SEQ ID NO: 934603 - DNA, 25 bp, Homo sapien
taatagatacaaagattgaaaggta

SEQ ID NO: 934604 - DNA, 25 bp, Homo sapien
tcctctttcctgttgtctgccatta

SEQ ID NO: 934605 - DNA, 25 bp, Homo sapien
tctcctctttcctgttgtctgccat

SEQ ID NO: 934606 - DNA, 25 bp, Homo sapien
tctttcctgttgtctgccattagca

SEQ ID NO: 934607 - DNA, 25 bp, Homo sapien
tttcctgttgtctgccattagcatt

SEQ ID NO: 934608 - DNA, 25 bp, Homo sapien
ccacacccagtgctctgggtcataa

SEQ ID NO: 934609 - DNA, 25 bp, Homo sapien
aagccctgccgctcatggaacagaa

SEQ ID NO: 934610 - DNA, 25 bp, Homo sapien
ccaagccctgccgctcatggaacag

SEQ ID NO: 934611 - DNA, 25 bp, Homo sapien
ccctgccgctcatggaacagaagaa

SEQ ID NO: 934612 - DNA, 25 bp, Homo sapien
gccctgccgctcatggaacagaaga

SEQ ID NO: 934613 - DNA, 25 bp, Homo sapien
accgaagtttctggaacagggctat

SEQ ID NO: 934614 - DNA, 25 bp, Homo sapien
tcgggttcaagcaacggcataactg

SEQ ID NO: 934615 - DNA, 25 bp, Homo sapien
cctcgggttcaagcaacggcataac

SEQ ID NO: 934616 - DNA, 25 bp, Homo sapien
tggccctcgggttcaagcaacggca

SEQ ID NO: 934617 - DNA, 25 bp, Homo sapien
gggttcaagcaacggcataactgga

SEQ ID NO: 934618 - DNA, 25 bp, Homo sapien
gggtcttcccatacaggaagtagaa

SEQ ID NO: 934619 - DNA, 25 bp, Homo sapien
gggtatgcgagagcgggtcttccca

SEQ ID NO: 934620 - DNA, 25 bp, Homo sapien
agcgggtcttcccatacaggaagta

SEQ ID NO: 934621 - DNA, 25 bp, Homo sapien
tgcgagagcgggtcttcccatacag

SEQ ID NO: 934622 - DNA, 25 bp, Homo sapien
aggacagaaatcaggttggtgctca

SEQ ID NO: 934623 - DNA, 25 bp, Homo sapien
ctgaggacagaaatcaggttggtgc

SEQ ID NO: 934624 - DNA, 25 bp, Homo sapien
caggagaggcctccggctgaggtca

SEQ ID NO: 934625 - DNA, 25 bp, Homo sapien
ggacagaaatcaggttggtgctcag

SEQ ID NO: 934626 - DNA, 25 bp, Homo sapien
gactgtccctagctcaggactggca

SEQ ID NO: 934627 - DNA, 25 bp, Homo sapien
aggtaagggactgtccctagctcag

SEQ ID NO: 934628 - DNA, 25 bp, Homo sapien
tcccagagaggaaggtaagggactg

SEQ ID NO: 934629 - DNA, 25 bp, Homo sapien
gaaggtaagggactgtccctagctc

SEQ ID NO: 934630 - DNA, 25 bp, Homo sapien
aggccggcccggctgaaatacgcta

SEQ ID NO: 934631 - DNA, 25 bp, Homo sapien
ggaggccggcccggctgaaatacgc

SEQ ID NO: 934632 - DNA, 25 bp, Homo sapien
ccggcccggctgaaatacgctatga

SEQ ID NO: 934633 - DNA, 25 bp, Homo sapien
gcccggctgaaatacgctatgacca

SEQ ID NO: 934634 - DNA, 25 bp, Homo sapien
ctcagtgttggggtgactgtactca

SEQ ID NO: 934635 - DNA, 25 bp, Homo sapien
ctgtactcatttggaaattgcggga

SEQ ID NO: 934636 - DNA, 25 bp, Homo sapien
tactcatttggaaattgcgggatgg

SEQ ID NO: 934637 - DNA, 25 bp, Homo sapien
actcatttggaaattgcgggatgga

SEQ ID NO: 934638 - DNA, 25 bp, Homo sapien
tcccaggccaggaatcttttaatga

SEQ ID NO: 934639 - DNA, 25 bp, Homo sapien
gccaggaatcttttaatgacaggat

SEQ ID NO: 934640 - DNA, 25 bp, Homo sapien
caggccaggaatcttttaatgacag

SEQ ID NO: 934641 - DNA, 25 bp, Homo sapien
ttgtccgacaccctcagatctttgt

SEQ ID NO: 934642 - DNA, 25 bp, Homo sapien
ggctcaggggcgagcaccttccgtg

SEQ ID NO: 934643 - DNA, 25 bp, Homo sapien
gctcaggggcgagcaccttccgtgg

SEQ ID NO: 934644 - DNA, 25 bp, Homo sapien
ctcaggggcgagcaccttccgtggc

SEQ ID NO: 934645 - DNA, 25 bp, Homo sapien
caaaaggacctatgcggggggctgg

SEQ ID NO: 934646 - DNA, 25 bp, Homo sapien
gcaaaaggacctatgcggggggctg

SEQ ID NO: 934647 - DNA, 25 bp, Homo sapien
gtttcgctatattggtctggttggt

SEQ ID NO: 934648 - DNA, 25 bp, Homo sapien
ttgttagtataaatgaggtttcgct

SEQ ID NO: 934649 - DNA, 25 bp, Homo sapien
cgctatattggtctggttggtctcg

SEQ ID NO: 934650 - DNA, 25 bp, Homo sapien
tgttagtataaatgaggtttcgcta

SEQ ID NO: 934651 - DNA, 25 bp, Homo sapien
caagctgactgttgaagtccttgtg

SEQ ID NO: 934652 - DNA, 25 bp, Homo sapien
tgactgttgaagtccttgtggtgct

SEQ ID NO: 934653 - DNA, 25 bp, Homo sapien
cctcagattcatctgaccactcctt

SEQ ID NO: 934654 - DNA, 25 bp, Homo sapien
agattcatctgaccactccttcttc

SEQ ID NO: 934655 - DNA, 25 bp, Homo sapien
ctccattcttcccacacaccctcct

SEQ ID NO: 934656 - DNA, 25 bp, Homo sapien
attcttcccacacaccctcctcagg

SEQ ID NO: 934657 - DNA, 25 bp, Homo sapien
ccattcttcccacacaccctcctca

SEQ ID NO: 934658 - DNA, 25 bp, Homo sapien
tcttcccacacaccctcctcaggtt

SEQ ID NO: 934659 - DNA, 25 bp, Homo sapien
atctgtcccctcttacggaacctag

SEQ ID NO: 934660 - DNA, 25 bp, Homo sapien
tcaggaaggtcggaatctctgatgt

SEQ ID NO: 934661 - DNA, 25 bp, Homo sapien
caggaaggtcggaatctctgatgtc

SEQ ID NO: 934662 - DNA, 25 bp, Homo sapien
tccaatcaggaaggtcggaatctct

SEQ ID NO: 934663 - DNA, 25 bp, Homo sapien
atcaggaaggtcggaatctctgatg

SEQ ID NO: 934664 - DNA, 25 bp, Homo sapien
aagcctgaagcatgttggggtctct

SEQ ID NO: 934665 - DNA, 25 bp, Homo sapien
gactccacatccctgtgttccctgt

SEQ ID NO: 934666 - DNA, 25 bp, Homo sapien
tcttcagggactccacatccctgtg

SEQ ID NO: 934667 - DNA, 25 bp, Homo sapien
cctgaagcatgttggggtctcttca

SEQ ID NO: 934668 - DNA, 25 bp, Homo sapien
tgtacatgcccatttcagagtccag

SEQ ID NO: 934669 - DNA, 25 bp, Homo sapien
ctgtacatgcccatttcagagtcca

SEQ ID NO: 934670 - DNA, 25 bp, Homo sapien
gtacatgcccatttcagagtccagt

SEQ ID NO: 934671 - DNA, 25 bp, Homo sapien
ctctgtacatgcccatttcagagtc

SEQ ID NO: 934672 - DNA, 25 bp, Homo sapien
caggaggacttgaggcctagagttt

SEQ ID NO: 934673 - DNA, 25 bp, Homo sapien
gcaggaggacttgaggcctagagtt

SEQ ID NO: 934674 - DNA, 25 bp, Homo sapien
cttaggaggaaaggtggcctttgct

SEQ ID NO: 934675 - DNA, 25 bp, Homo sapien
aggaggaaaggtggcctttgctgta

SEQ ID NO: 934676 - DNA, 25 bp, Homo sapien
aggaaaggtggcctttgctgtatcc

SEQ ID NO: 934677 - DNA, 25 bp, Homo sapien
ctcttaggaggaaaggtggcctttg

SEQ ID NO: 934678 - DNA, 25 bp, Homo sapien
tgagtattcaaggacctcccgtaag

SEQ ID NO: 934679 - DNA, 25 bp, Homo sapien
agtaccatgatatcctcagctgaag

SEQ ID NO: 934680 - DNA, 25 bp, Homo sapien
ggagctcattgcgtttttcccagaa

SEQ ID NO: 934681 - DNA, 25 bp, Homo sapien
tctctgagttcaattggtaaatccc

SEQ ID NO: 934682 - DNA, 25 bp, Homo sapien
cagataaaatccaggctcttagcaa

SEQ ID NO: 934683 - DNA, 25 bp, Homo sapien
aaatccaggctcttagcaataagag

SEQ ID NO: 934684 - DNA, 25 bp, Homo sapien
tatccagaagtcatgctgcagataa

SEQ ID NO: 934685 - DNA, 25 bp, Homo sapien
tccagaagtcatgctgcagataaaa

SEQ ID NO: 934686 - DNA, 25 bp, Homo sapien
catggacttctgagttcacatcaac

SEQ ID NO: 934687 - DNA, 25 bp, Homo sapien
gatgggaccttgacaataatagaac

SEQ ID NO: 934688 - DNA, 25 bp, Homo sapien
caacctctttccctgataactgtaa

SEQ ID NO: 934689 - DNA, 25 bp, Homo sapien
aatgagcttgaagtgaagatgggac

SEQ ID NO: 934690 - DNA, 25 bp, Homo sapien
taacttctttgccatgggttcaaac

SEQ ID NO: 934691 - DNA, 25 bp, Homo sapien
ttagctcagagtagtttgattgtct

SEQ ID NO: 934692 - DNA, 25 bp, Homo sapien
tcctttagctcagagtagtttgatt

SEQ ID NO: 934693 - DNA, 25 bp, Homo sapien
tgatcgaatcagctactgaggcttg

SEQ ID NO: 934694 - DNA, 25 bp, Homo sapien
tatgtgggttgcagcgtaaattcac

SEQ ID NO: 934695 - DNA, 25 bp, Homo sapien
gttgcagcgtaaattcaccaacaca

SEQ ID NO: 934696 - DNA, 25 bp, Homo sapien
caccaacacactcctatttcagaag

SEQ ID NO: 934697 - DNA, 25 bp, Homo sapien
tttcgaattatgtgggttgcagcgt

SEQ ID NO: 934698 - DNA, 25 bp, Homo sapien
tgcatttacttatgggtcgtggttt

SEQ ID NO: 934699 - DNA, 25 bp, Homo sapien
tgccataaagcattaaccccacctc

SEQ ID NO: 934700 - DNA, 25 bp, Homo sapien
tccttccaatctggctaacatcagc

SEQ ID NO: 934701 - DNA, 25 bp, Homo sapien
taatttcttggtcttcctaactgga

SEQ ID NO: 934702 - DNA, 25 bp, Homo sapien
gaagcttccaaaagagtgtatggca

SEQ ID NO: 934703 - DNA, 25 bp, Homo sapien
caggaacaatcagtctctgtgagga

SEQ ID NO: 934704 - DNA, 25 bp, Homo sapien
taaacatctggccaacatgcaagag

SEQ ID NO: 934705 - DNA, 25 bp, Homo sapien
gatattgagaagtcacaccggtgca

SEQ ID NO: 934706 - DNA, 25 bp, Homo sapien
ttccccagttggctgacataaacat

SEQ ID NO: 934707 - DNA, 25 bp, Homo sapien
gaggcttttagacatccagaagacg

SEQ ID NO: 934708 - DNA, 25 bp, Homo sapien
tagttgaggcttttagacatccaga

SEQ ID NO: 934709 - DNA, 25 bp, Homo sapien
ctatggcaccctgattagttgaggc

SEQ ID NO: 934710 - DNA, 25 bp, Homo sapien
ctctaatgatggctcatcccttgga

SEQ ID NO: 934711 - DNA, 25 bp, Homo sapien
tcctaggccacaaagtaattatatc

SEQ ID NO: 934712 - DNA, 25 bp, Homo sapien
actaaacggactgtggaaatcattc

SEQ ID NO: 934713 - DNA, 25 bp, Homo sapien
tctgggagaaagtcctgtagatcta

SEQ ID NO: 934714 - DNA, 25 bp, Homo sapien
tacatggaggtatgactagcaaaac

SEQ ID NO: 934715 - DNA, 25 bp, Homo sapien
caggccacttgccatgtctattaaa

SEQ ID NO: 934716 - DNA, 25 bp, Homo sapien
catgataagtatggaatattgcaac

SEQ ID NO: 934717 - DNA, 25 bp, Homo sapien
gaagcttcaaagatttccgtcttag

SEQ ID NO: 934718 - DNA, 25 bp, Homo sapien
ccccatctagtagactccagtttct

SEQ ID NO: 934719 - DNA, 25 bp, Homo sapien
tccataattatccaatgtttacccc

SEQ ID NO: 934720 - DNA, 25 bp, Homo sapien
agcttcagtgaatatgttgagtgca

SEQ ID NO: 934721 - DNA, 25 bp, Homo sapien
agtgaatatgttgagtgcatgtgtc

SEQ ID NO: 934722 - DNA, 25 bp, Homo sapien
gattatggttcaagcacatagaact

SEQ ID NO: 934723 - DNA, 25 bp, Homo sapien
ccaaacagagtaatcaagtatcctt

SEQ ID NO: 934724 - DNA, 25 bp, Homo sapien
ttgtatttgcaagccacagtgctaa

SEQ ID NO: 934725 - DNA, 25 bp, Homo sapien
gaaagggagacacttgtatttgcaa

SEQ ID NO: 934726 - DNA, 25 bp, Homo sapien
ggctatgtctacctgccagatggga

SEQ ID NO: 934727 - DNA, 25 bp, Homo sapien
tatatgatagagactgccagtgtcc

SEQ ID NO: 934728 - DNA, 25 bp, Homo sapien
cagatttgaaacacccttgtaaggg

SEQ ID NO: 934729 - DNA, 25 bp, Homo sapien
taatatatgcacttctaggcctggt

SEQ ID NO: 934730 - DNA, 25 bp, Homo sapien
gtagatacagtaacagaacttccct

SEQ ID NO: 934731 - DNA, 25 bp, Homo sapien
ttcctaatgtaatatccccagcagc

SEQ ID NO: 934732 - DNA, 25 bp, Homo sapien
tgtataaagatacttggctttcagc

SEQ ID NO: 934733 - DNA, 25 bp, Homo sapien
gaacttccctgcagtttatctatgg

SEQ ID NO: 934734 - DNA, 25 bp, Homo sapien
ttgtttgaacatgcaatttttgacc

SEQ ID NO: 934735 - DNA, 25 bp, Homo sapien
tatatttccataaactgttcccaga

SEQ ID NO: 934736 - DNA, 25 bp, Homo sapien
gttcccagacagatcactttgcctc

SEQ ID NO: 934737 - DNA, 25 bp, Homo sapien
taaactgttcccagacagatcactt

SEQ ID NO: 934738 - DNA, 25 bp, Homo sapien
agtgggtctcatcgtatctggcatt

SEQ ID NO: 934739 - DNA, 25 bp, Homo sapien
ctttgcccacaactctgcctgggcc

SEQ ID NO: 934740 - DNA, 25 bp, Homo sapien
gcccacaactctgcctgggccaaca

SEQ ID NO: 934741 - DNA, 25 bp, Homo sapien
ttgcccacaactctgcctgggccaa

SEQ ID NO: 934742 - DNA, 25 bp, Homo sapien
tttgcccacaactctgcctgggcca

SEQ ID NO: 934743 - DNA, 25 bp, Homo sapien
tagctgtttggccttccagggcctg

SEQ ID NO: 934744 - DNA, 25 bp, Homo sapien
gagtagctgtttggccttccagggc

SEQ ID NO: 934745 - DNA, 25 bp, Homo sapien
cagctgagtagctgtttggccttcc

SEQ ID NO: 934746 - DNA, 25 bp, Homo sapien
ctgagtagctgtttggccttccagg

SEQ ID NO: 934747 - DNA, 25 bp, Homo sapien
tatagagtatggatctctgccattg

SEQ ID NO: 934748 - DNA, 25 bp, Homo sapien
ttatagagtatggatctctgccatt

SEQ ID NO: 934749 - DNA, 25 bp, Homo sapien
tagagtatggatctctgccattgca

SEQ ID NO: 934750 - DNA, 25 bp, Homo sapien
gagtatggatctctgccattgcaac

SEQ ID NO: 934751 - DNA, 25 bp, Homo sapien
cacaaagcaggtgaggtctcttttg

SEQ ID NO: 934752 - DNA, 25 bp, Homo sapien
tagcggggccatttcacaaagcagg

SEQ ID NO: 934753 - DNA, 25 bp, Homo sapien
atttcacaaagcaggtgaggtctct

SEQ ID NO: 934754 - DNA, 25 bp, Homo sapien
ttcacaaagcaggtgaggtctcttt

SEQ ID NO: 934755 - DNA, 25 bp, Homo sapien
ttcttcacaaaagcaggggccagag

SEQ ID NO: 934756 - DNA, 25 bp, Homo sapien
tgcttcttcacaaaagcaggggcca

SEQ ID NO: 934757 - DNA, 25 bp, Homo sapien
ggccagagccaacttcttccccttg

SEQ ID NO: 934758 - DNA, 25 bp, Homo sapien
ccagagccaacttcttccccttggc

SEQ ID NO: 934759 - DNA, 25 bp, Homo sapien
ggtttagctaagattcctggtacac

SEQ ID NO: 934760 - DNA, 25 bp, Homo sapien
ttttagctatgtgaacgcaagtgag

SEQ ID NO: 934761 - DNA, 25 bp, Homo sapien
tccctaaggatgctgtacaaatgtg

SEQ ID NO: 934762 - DNA, 25 bp, Homo sapien
agtgagttcctcaatctcttggtgc

SEQ ID NO: 934763 - DNA, 25 bp, Homo sapien
tgagtcttcagaggacaagtctaga

SEQ ID NO: 934764 - DNA, 25 bp, Homo sapien
cacaactgaggagcatgctactggc

SEQ ID NO: 934765 - DNA, 25 bp, Homo sapien
aaaggtttgtattgccaaggctaag

SEQ ID NO: 934766 - DNA, 25 bp, Homo sapien
gggcaaagatggtgctaaatatcct

SEQ ID NO: 934767 - DNA, 25 bp, Homo sapien
ttcaattttgcaattatcaccctca

SEQ ID NO: 934768 - DNA, 25 bp, Homo sapien
ttatcaccctcaatactttgaactt

SEQ ID NO: 934769 - DNA, 25 bp, Homo sapien
tttgcaattatcaccctcaatactt

SEQ ID NO: 934770 - DNA, 25 bp, Homo sapien
gcaattatcaccctcaatactttga

SEQ ID NO: 934771 - DNA, 25 bp, Homo sapien
gccagtttgctaatgacaacgggat

SEQ ID NO: 934772 - DNA, 25 bp, Homo sapien
tgaattgtcaagaaacttcaacctt

SEQ ID NO: 934773 - DNA, 25 bp, Homo sapien
cgggataaagaagaacacaagcggc

SEQ ID NO: 934774 - DNA, 25 bp, Homo sapien
cacaagcggctccagaaatagaatt

SEQ ID NO: 934775 - DNA, 25 bp, Homo sapien
attaagttcactgtgcgttccctgg

SEQ ID NO: 934776 - DNA, 25 bp, Homo sapien
aggtggcacgggagccgcgcccgca

SEQ ID NO: 934777 - DNA, 25 bp, Homo sapien
accgcgaccagcacgcggtcgccat

SEQ ID NO: 934778 - DNA, 25 bp, Homo sapien
ttcaggggcgcgttcacctccacgg

SEQ ID NO: 934779 - DNA, 25 bp, Homo sapien
atcctcgtcgtacttcacctgcagg

SEQ ID NO: 934780 - DNA, 25 bp, Homo sapien
gctcgcctctacctgagctgtacgg

SEQ ID NO: 934781 - DNA, 25 bp, Homo sapien
actaggcgatgtaaacatcagctgc

SEQ ID NO: 934782 - DNA, 25 bp, Homo sapien
tgactaggcgatgtaaacatcagct

SEQ ID NO: 934783 - DNA, 25 bp, Homo sapien
gactaggcgatgtaaacatcagctg

SEQ ID NO: 934784 - DNA, 25 bp, Homo sapien
taaagcggtggaaagtcgcagagct

SEQ ID NO: 934785 - DNA, 25 bp, Homo sapien
gcagagctccgcctcttagaaacca

SEQ ID NO: 934786 - DNA, 25 bp, Homo sapien
ttcgctaaggccgacgggatacgta

SEQ ID NO: 934787 - DNA, 25 bp, Homo sapien
gatacgtagttctaaagcggtggaa

SEQ ID NO: 934788 - DNA, 25 bp, Homo sapien
aatcgctggaaaggcgggcgccctt

SEQ ID NO: 934789 - DNA, 25 bp, Homo sapien
tgttagaatcgctggaaaggcgggc

SEQ ID NO: 934790 - DNA, 25 bp, Homo sapien
ggcgccctttgtttcaagaccattg

SEQ ID NO: 934791 - DNA, 25 bp, Homo sapien
cgcaggggagcacgggtaagagggc

SEQ ID NO: 934792 - DNA, 25 bp, Homo sapien
cactggccaatgggaagcacggaag

SEQ ID NO: 934793 - DNA, 25 bp, Homo sapien
ggcggtacatgggaggccactggcc

SEQ ID NO: 934794 - DNA, 25 bp, Homo sapien
agctgcgtggtcaccttggatacca

SEQ ID NO: 934795 - DNA, 25 bp, Homo sapien
caccttggataccaaggacgcgact

SEQ ID NO: 934796 - DNA, 25 bp, Homo sapien
ttggtgtctgaccatgcaggttcct

SEQ ID NO: 934797 - DNA, 25 bp, Homo sapien
tctggccgacggttggtgtctgacc

SEQ ID NO: 934798 - DNA, 25 bp, Homo sapien
gcattcagggtcattaggtagcacc

SEQ ID NO: 934799 - DNA, 25 bp, Homo sapien
taggtagcaccgtggtttcaggctg

SEQ ID NO: 934800 - DNA, 25 bp, Homo sapien
gtcttagacataggtctcaatggtg

SEQ ID NO: 934801 - DNA, 25 bp, Homo sapien
ctgagagttctgcattccccgctgg

SEQ ID NO: 934802 - DNA, 25 bp, Homo sapien
ttctgagagttctgcattccccgct

SEQ ID NO: 934803 - DNA, 25 bp, Homo sapien
tgggtcttagacataggtctcaatg

SEQ ID NO: 934804 - DNA, 25 bp, Homo sapien
cttttaaggctctcacaccaaagcc

SEQ ID NO: 934805 - DNA, 25 bp, Homo sapien
gggacaaattcatgccgaaaaggac

SEQ ID NO: 934806 - DNA, 25 bp, Homo sapien
tcatgccgaaaaggacccagatcat

SEQ ID NO: 934807 - DNA, 25 bp, Homo sapien
caaagcctaaaggagtgctctggga

SEQ ID NO: 934808 - DNA, 25 bp, Homo sapien
tagctgaggtaagcattttacaact

SEQ ID NO: 934809 - DNA, 25 bp, Homo sapien
agctgaggtaagcattttacaactt

SEQ ID NO: 934810 - DNA, 25 bp, Homo sapien
atagctgaggtaagcattttacaac

SEQ ID NO: 934811 - DNA, 25 bp, Homo sapien
cagatgtgcttaaatcatggcccaa

SEQ ID NO: 934812 - DNA, 25 bp, Homo sapien
taggactggcatacactacagtgaa

SEQ ID NO: 934813 - DNA, 25 bp, Homo sapien
gctattgttcacacagagcagagga

SEQ ID NO: 934814 - DNA, 25 bp, Homo sapien
tctgggaaccaaaatgctgtagggt

SEQ ID NO: 934815 - DNA, 25 bp, Homo sapien
ttcattggataacagcataacaaca

SEQ ID NO: 934816 - DNA, 25 bp, Homo sapien
tacagcaagtaatacaagcaataga

SEQ ID NO: 934817 - DNA, 25 bp, Homo sapien
attctcaatattgctaattgcttgc

SEQ ID NO: 934818 - DNA, 25 bp, Homo sapien
aattgcttgcaagtgttcattggat

SEQ ID NO: 934819 - DNA, 25 bp, Homo sapien
aatgctgtgtagcataagaacctag

SEQ ID NO: 934820 - DNA, 25 bp, Homo sapien
ttagataacgaatacctggaggaat

SEQ ID NO: 934821 - DNA, 25 bp, Homo sapien
aaagtgctgaaggaattaattgccc

SEQ ID NO: 934822 - DNA, 25 bp, Homo sapien
gaacctagccgtcagacatcatttt

SEQ ID NO: 934823 - DNA, 25 bp, Homo sapien
ctgatcatcatcttagcctctttga

SEQ ID NO: 934824 - DNA, 25 bp, Homo sapien
gcttaaagtgcttgggtctgatcat

SEQ ID NO: 934825 - DNA, 25 bp, Homo sapien
aggacttgtagccaccagggtgtgc

SEQ ID NO: 934826 - DNA, 25 bp, Homo sapien
tgggtctgatcatcatcttagcctc

SEQ ID NO: 934827 - DNA, 25 bp, Homo sapien
ttgaaacgtaatgcatctccagctg

SEQ ID NO: 934828 - DNA, 25 bp, Homo sapien
ccagctgtgccattatagttaccaa

SEQ ID NO: 934829 - DNA, 25 bp, Homo sapien
gaaaatcccattacggacacctctg

SEQ ID NO: 934830 - DNA, 25 bp, Homo sapien
catacaaggcatatagttcgacacc

SEQ ID NO: 934831 - DNA, 25 bp, Homo sapien
tcaggtgtaactctgtaggtctcac

SEQ ID NO: 934832 - DNA, 25 bp, Homo sapien
tgcctattgcgtagtagtcagagca

SEQ ID NO: 934833 - DNA, 25 bp, Homo sapien
ttggtgctcccatcgagacgtgcct

SEQ ID NO: 934834 - DNA, 25 bp, Homo sapien
caaagcctgctttgtagtcttgcca

SEQ ID NO: 934835 - DNA, 25 bp, Homo sapien
ccaaactattgacaacaaatgttag

SEQ ID NO: 934836 - DNA, 25 bp, Homo sapien
ttggctgggacactttgaacatttg

SEQ ID NO: 934837 - DNA, 25 bp, Homo sapien
tctccaggcgaccatgaagtacatt

SEQ ID NO: 934838 - DNA, 25 bp, Homo sapien
catttgccatccaaactattgacaa

SEQ ID NO: 934839 - DNA, 25 bp, Homo sapien
tcagaggacagcttgttaacctcac

SEQ ID NO: 934840 - DNA, 25 bp, Homo sapien
ctcagaggacagcttgttaacctca

SEQ ID NO: 934841 - DNA, 25 bp, Homo sapien
cagaggacagcttgttaacctcact

SEQ ID NO: 934842 - DNA, 25 bp, Homo sapien
ctctaattctctaactctgttatca

SEQ ID NO: 934843 - DNA, 25 bp, Homo sapien
ctaattctctaactctgttatcacc

SEQ ID NO: 934844 - DNA, 25 bp, Homo sapien
attctctaactctgttatcaccaac

SEQ ID NO: 934845 - DNA, 25 bp, Homo sapien
taattctctaactctgttatcacca

SEQ ID NO: 934846 - DNA, 25 bp, Homo sapien
taacaacagtccgtttctgcctggg

SEQ ID NO: 934847 - DNA, 25 bp, Homo sapien
tctgcctgggtctccgttgtcatca

SEQ ID NO: 934848 - DNA, 25 bp, Homo sapien
ggctcctgtactgggtaacaacagt

SEQ ID NO: 934849 - DNA, 25 bp, Homo sapien
gggtctccgttgtcatcagcctgca

SEQ ID NO: 934850 - DNA, 25 bp, Homo sapien
tccttgaggttttggacttctttga

SEQ ID NO: 934851 - DNA, 25 bp, Homo sapien
tgaggttttggacttctttgaacac

SEQ ID NO: 934852 - DNA, 25 bp, Homo sapien
ttgaggttttggacttctttgaaca

SEQ ID NO: 934853 - DNA, 25 bp, Homo sapien
ctcctcgatcctgctgaattgcttc

SEQ ID NO: 934854 - DNA, 25 bp, Homo sapien
gaatagtcaaggggggcaggcttac

SEQ ID NO: 934855 - DNA, 25 bp, Homo sapien
tgaatagtcaaggggggcaggctta

SEQ ID NO: 934856 - DNA, 25 bp, Homo sapien
ctgaatagtcaaggggggcaggctt

SEQ ID NO: 934857 - DNA, 25 bp, Homo sapien
gccagtaccagttagccagcttcat

SEQ ID NO: 934858 - DNA, 25 bp, Homo sapien
tgagctcagccagtaccagttagcc

SEQ ID NO: 934859 - DNA, 25 bp, Homo sapien
agctgagctcagccagtaccagtta

SEQ ID NO: 934860 - DNA, 25 bp, Homo sapien
gggcactcccctgcctcttcgcatt

SEQ ID NO: 934861 - DNA, 25 bp, Homo sapien
gctcaccccagcagggagtgcgcag

SEQ ID NO: 934862 - DNA, 25 bp, Homo sapien
ggctggagctgctttaatagcggca

SEQ ID NO: 934863 - DNA, 25 bp, Homo sapien
tggagctgctttaatagcggcagct

SEQ ID NO: 934864 - DNA, 25 bp, Homo sapien
gctgctttaatagcggcagctgcct

SEQ ID NO: 934865 - DNA, 25 bp, Homo sapien
gtagccgtgaaaggcttcactgttc

SEQ ID NO: 934866 - DNA, 25 bp, Homo sapien
ggcactcggggatgcctccatgcta

SEQ ID NO: 934867 - DNA, 25 bp, Homo sapien
tgaaaggcttcactgttcatcacaa

SEQ ID NO: 934868 - DNA, 25 bp, Homo sapien
ggcttcactgttcatcacaatctgc

SEQ ID NO: 934869 - DNA, 25 bp, Homo sapien
gatgaatactggaaagaacgctggg

SEQ ID NO: 934870 - DNA, 25 bp, Homo sapien
ctggaaagaacgctgggtgaaacag

SEQ ID NO: 934871 - DNA, 25 bp, Homo sapien
tggaaagaacgctgggtgaaacagc

SEQ ID NO: 934872 - DNA, 25 bp, Homo sapien
ttactgatgaatactggaaagaacg

SEQ ID NO: 934873 - DNA, 25 bp, Homo sapien
cagactttgttgtggggagcacctc

SEQ ID NO: 934874 - DNA, 25 bp, Homo sapien
ccagactttgttgtggggagcacct

SEQ ID NO: 934875 - DNA, 25 bp, Homo sapien
cccagactttgttgtggggagcacc

SEQ ID NO: 934876 - DNA, 25 bp, Homo sapien
acagaggcatatgggtttcagtctg

SEQ ID NO: 934877 - DNA, 25 bp, Homo sapien
tctgacagaggcatatgggtttcag

SEQ ID NO: 934878 - DNA, 25 bp, Homo sapien
gttctgacagaggcatatgggtttc

SEQ ID NO: 934879 - DNA, 25 bp, Homo sapien
tgacagaggcatatgggtttcagtc

SEQ ID NO: 934880 - DNA, 25 bp, Homo sapien
atgttgaggagcctagacttaattc

SEQ ID NO: 934881 - DNA, 25 bp, Homo sapien
tgttgaggagcctagacttaattct

SEQ ID NO: 934882 - DNA, 25 bp, Homo sapien
tgaaggtgatgaggtcctttgaagg

SEQ ID NO: 934883 - DNA, 25 bp, Homo sapien
aagagtcagaggtccaactgctaca

SEQ ID NO: 934884 - DNA, 25 bp, Homo sapien
ttcactgagcaaatacaacagcagc

SEQ ID NO: 934885 - DNA, 25 bp, Homo sapien
tctccacggaggtctccaaaatgag

SEQ ID NO: 934886 - DNA, 25 bp, Homo sapien
gctacagaatgccaaacgtttcact

SEQ ID NO: 934887 - DNA, 25 bp, Homo sapien
cagtaccagagcacgcatctgcatg

SEQ ID NO: 934888 - DNA, 25 bp, Homo sapien
ccctcatcccatgactatagcagta

SEQ ID NO: 934889 - DNA, 25 bp, Homo sapien
tccaccaaaccagttattagcattc

SEQ ID NO: 934890 - DNA, 25 bp, Homo sapien
aaaccagttattagcattcccttgc

SEQ ID NO: 934891 - DNA, 25 bp, Homo sapien
gatttttcagtactctcttcaacct

SEQ ID NO: 934892 - DNA, 25 bp, Homo sapien
ctctctaaacagtttgaaaagattt

SEQ ID NO: 934893 - DNA, 25 bp, Homo sapien
aaagatttttcagtactctcttcaa

SEQ ID NO: 934894 - DNA, 25 bp, Homo sapien
gaaaagatttttcagtactctcttc

SEQ ID NO: 934895 - DNA, 25 bp, Homo sapien
gttgggacatcaggtcgtcctaaag

SEQ ID NO: 934896 - DNA, 25 bp, Homo sapien
tacgagaagatttggcatctaaaca

SEQ ID NO: 934897 - DNA, 25 bp, Homo sapien
agcactgaagaattacgtaaagaaa

SEQ ID NO: 934898 - DNA, 25 bp, Homo sapien
gaactagaagaattgttgggacatc

SEQ ID NO: 934899 - DNA, 25 bp, Homo sapien
aatgataacaaatatagctctctta

SEQ ID NO: 934900 - DNA, 25 bp, Homo sapien
atgataacaaatatagctctcttac

SEQ ID NO: 934901 - DNA, 25 bp, Homo sapien
taacaaatatagctctcttacaagg

SEQ ID NO: 934902 - DNA, 25 bp, Homo sapien
acaaatatagctctcttacaaggtc

SEQ ID NO: 934903 - DNA, 25 bp, Homo sapien
ggcaaacgagccttacttgaaatca

SEQ ID NO: 934904 - DNA, 25 bp, Homo sapien
gaacgagaacataaccaattggtca

SEQ ID NO: 934905 - DNA, 25 bp, Homo sapien
caaaacgctaaatgactccctaaag

SEQ ID NO: 934906 - DNA, 25 bp, Homo sapien
ttggtcaagctattggaattagcca

SEQ ID NO: 934907 - DNA, 25 bp, Homo sapien
ttgacaagcagaactaccatgatga

SEQ ID NO: 934908 - DNA, 25 bp, Homo sapien
tacgcaacagtctcattgacaagca

SEQ ID NO: 934909 - DNA, 25 bp, Homo sapien
tgcacttaggcaaactcaagcactg

SEQ ID NO: 934910 - DNA, 25 bp, Homo sapien
gaactgctcttgaaagtgtcctggg

SEQ ID NO: 934911 - DNA, 25 bp, Homo sapien
tacattatctgagagaaggcgagag

SEQ ID NO: 934912 - DNA, 25 bp, Homo sapien
cacaaggaagttgaagtagctaaga

SEQ ID NO: 934913 - DNA, 25 bp, Homo sapien
gaagctatccccaaagatgattcta

SEQ ID NO: 934914 - DNA, 25 bp, Homo sapien
tagctaagaggaatttggcccaaca

SEQ ID NO: 934915 - DNA, 25 bp, Homo sapien
gaaagagctagtagtcaaccttctc

SEQ ID NO: 934916 - DNA, 25 bp, Homo sapien
gagtctaagttagtagaacaacaac

SEQ ID NO: 934917 - DNA, 25 bp, Homo sapien
gctagtagtcaaccttctccgcatg

SEQ ID NO: 934918 - DNA, 25 bp, Homo sapien
aagtccaaggatttcctgaaagctc

SEQ ID NO: 934919 - DNA, 25 bp, Homo sapien
gaaatcaggatacacaagaagaaaa

SEQ ID NO: 934920 - DNA, 25 bp, Homo sapien
ggatcttgaaatcaggatacacaag

SEQ ID NO: 934921 - DNA, 25 bp, Homo sapien
cttgaaatcaggatacacaagaaga

SEQ ID NO: 934922 - DNA, 25 bp, Homo sapien
gcaaaggatcttgaaatcaggatac

SEQ ID NO: 934923 - DNA, 25 bp, Homo sapien
ctgagagagtttgctaaactgtatg

SEQ ID NO: 934924 - DNA, 25 bp, Homo sapien
ctgagaaatagtgccgttagtcaag

SEQ ID NO: 934925 - DNA, 25 bp, Homo sapien
gaaattctgagaaatagtgccgtta

SEQ ID NO: 934926 - DNA, 25 bp, Homo sapien
ctgtatgacaccattcgaaatgaaa

SEQ ID NO: 934927 - DNA, 25 bp, Homo sapien
gatggtgcagcttcgcaaaagatac

SEQ ID NO: 934928 - DNA, 25 bp, Homo sapien
tcacaatgatcgaagaggagatggt

SEQ ID NO: 934929 - DNA, 25 bp, Homo sapien
gagagcatgcaaaacgatgtgcgca

SEQ ID NO: 934930 - DNA, 25 bp, Homo sapien
caacaatgttaccatcagagagagc

SEQ ID NO: 934931 - DNA, 25 bp, Homo sapien
tgtgacccagaaattactgccagcc

SEQ ID NO: 934932 - DNA, 25 bp, Homo sapien
cgttcagctgatagagcgggaagaa

SEQ ID NO: 934933 - DNA, 25 bp, Homo sapien
tgaaaatgaagattgctgagaagca

SEQ ID NO: 934934 - DNA, 25 bp, Homo sapien
caagaggtccctggatgccgaccta

SEQ ID NO: 934935 - DNA, 25 bp, Homo sapien
gatctgaccgaaaaagaaatgatcc

SEQ ID NO: 934936 - DNA, 25 bp, Homo sapien
ctggagaaacagttcgtaaagcctg

SEQ ID NO: 934937 - DNA, 25 bp, Homo sapien
tcgtaaagcctgatggtgagaatag

SEQ ID NO: 934938 - DNA, 25 bp, Homo sapien
aatagagctcgcttccttccaggga

SEQ ID NO: 934939 - DNA, 25 bp, Homo sapien
gacaggctctgcagcaaaactcagg

SEQ ID NO: 934940 - DNA, 25 bp, Homo sapien
atttcatctatgagcaggtctccag

SEQ ID NO: 934941 - DNA, 25 bp, Homo sapien
tttcatctatgagcaggtctccagg

SEQ ID NO: 934942 - DNA, 25 bp, Homo sapien
ggttgaaagtccttcgagatgaaga

SEQ ID NO: 934943 - DNA, 25 bp, Homo sapien
gagctgtccatgaaacaagccctaa

SEQ ID NO: 934944 - DNA, 25 bp, Homo sapien
gatgaagaaatgcacgccttggcca

SEQ ID NO: 934945 - DNA, 25 bp, Homo sapien
ccaggatagaaaaaggtctgccact

SEQ ID NO: 934946 - DNA, 25 bp, Homo sapien
cgtccgaatgcctacatcccagaag

SEQ ID NO: 934947 - DNA, 25 bp, Homo sapien
gaacctggagccaatatgaggcaca

SEQ ID NO: 934948 - DNA, 25 bp, Homo sapien
tttacacaactgcagagcagcgtcc

SEQ ID NO: 934949 - DNA, 25 bp, Homo sapien
gataatcgccagctgcccaatggtg

SEQ ID NO: 934950 - DNA, 25 bp, Homo sapien
tgtctgaacgtgtaccaacctgaaa

SEQ ID NO: 934951 - DNA, 25 bp, Homo sapien
tattaagctactaggaagagcatcg

SEQ ID NO: 934952 - DNA, 25 bp, Homo sapien
gaattcacaaagacaaaccctgctg

SEQ ID NO: 934953 - DNA, 25 bp, Homo sapien
tcagagtgcaacagaaactagcttg

SEQ ID NO: 934954 - DNA, 25 bp, Homo sapien
gctgcttcctctacaaattctgcat

SEQ ID NO: 934955 - DNA, 25 bp, Homo sapien
tcataagcctaaaagcatcgcggtg

SEQ ID NO: 934956 - DNA, 25 bp, Homo sapien
tcctctacaaattctgcatccacat

SEQ ID NO: 934957 - DNA, 25 bp, Homo sapien
catcgcggtgtgtttcagagctgct

SEQ ID NO: 934958 - DNA, 25 bp, Homo sapien
caattgctataagggtctacttgta

SEQ ID NO: 934959 - DNA, 25 bp, Homo sapien
gaatagggaaggactgatgtgtcaa

SEQ ID NO: 934960 - DNA, 25 bp, Homo sapien
ggtactgctaatgtaaaccaattgc

SEQ ID NO: 934961 - DNA, 25 bp, Homo sapien
ccatgggtccgtgaaacatttataa

SEQ ID NO: 934962 - DNA, 25 bp, Homo sapien
acactgaacgatgacttgttaatca

SEQ ID NO: 934963 - DNA, 25 bp, Homo sapien
cagaaattctacactgaacgatgac

SEQ ID NO: 934964 - DNA, 25 bp, Homo sapien
tcaatgaagtagttcagaggcagaa

SEQ ID NO: 934965 - DNA, 25 bp, Homo sapien
tggaggactctatatctgtcagaat

SEQ ID NO: 934966 - DNA, 25 bp, Homo sapien
taagctgattctccacaataagcac

SEQ ID NO: 934967 - DNA, 25 bp, Homo sapien
cagatatgttgtcacgggcaaacag

SEQ ID NO: 934968 - DNA, 25 bp, Homo sapien
gggaaaccacttctggtgtaagctg

SEQ ID NO: 934969 - DNA, 25 bp, Homo sapien
tgataagaactgtaattgctgtcca

SEQ ID NO: 934970 - DNA, 25 bp, Homo sapien
cgtggttccgcgaaatgatgttaga

SEQ ID NO: 934971 - DNA, 25 bp, Homo sapien
tcccaaagtctacaaatcttctgcc

SEQ ID NO: 934972 - DNA, 25 bp, Homo sapien
tgttagaactcataggatgatccca

SEQ ID NO: 934973 - DNA, 25 bp, Homo sapien
tatagttctgaagcagtcgcgtcac

SEQ ID NO: 934974 - DNA, 25 bp, Homo sapien
cagacagccgttcgtgagaggacag

SEQ ID NO: 934975 - DNA, 25 bp, Homo sapien
tcagcaatgtttcccagagagatct

SEQ ID NO: 934976 - DNA, 25 bp, Homo sapien
caaagtagctggttagtctccaggc

SEQ ID NO: 934977 - DNA, 25 bp, Homo sapien
caaaaccagagatgggcatgccaac

SEQ ID NO: 934978 - DNA, 25 bp, Homo sapien
gaggaagccgcacaatgatactgaa

SEQ ID NO: 934979 - DNA, 25 bp, Homo sapien
gccgcacaatgatactgaatttcag

SEQ ID NO: 934980 - DNA, 25 bp, Homo sapien
gaagccgcacaatgatactgaattt

SEQ ID NO: 934981 - DNA, 25 bp, Homo sapien
cggaggaagccgcacaatgatactg

SEQ ID NO: 934982 - DNA, 25 bp, Homo sapien
cactgtcaatgcaatgcagcaggtt

SEQ ID NO: 934983 - DNA, 25 bp, Homo sapien
gctgtttcagtgagaagcaacactc

SEQ ID NO: 934984 - DNA, 25 bp, Homo sapien
cagcaggttatgcaaagggagacac

SEQ ID NO: 934985 - DNA, 25 bp, Homo sapien
tttcatgagccttatgacagctgtt

SEQ ID NO: 934986 - DNA, 25 bp, Homo sapien
tgcggacagtagaaaaagccaggtt

SEQ ID NO: 934987 - DNA, 25 bp, Homo sapien
gattcacaggagctaggcaacttgc

SEQ ID NO: 934988 - DNA, 25 bp, Homo sapien
taacaatagcgacccatactggaca

SEQ ID NO: 934989 - DNA, 25 bp, Homo sapien
cattctcaagcctgtctcacgggta

SEQ ID NO: 934990 - DNA, 25 bp, Homo sapien
aatgagcaaaacaggcacaactgct

SEQ ID NO: 934991 - DNA, 25 bp, Homo sapien
aaatgagcaaaacaggcacaactgc

SEQ ID NO: 934992 - DNA, 25 bp, Homo sapien
tggcaaggggctaagagtataaaaa

SEQ ID NO: 934993 - DNA, 25 bp, Homo sapien
gggctaagagtataaaaatgagcaa

SEQ ID NO: 934994 - DNA, 25 bp, Homo sapien
tctgtgcttatgagtgcaggtgaca

SEQ ID NO: 934995 - DNA, 25 bp, Homo sapien
cactgaatcagagaggcatggtaac

SEQ ID NO: 934996 - DNA, 25 bp, Homo sapien
gcagaacagaagatttaccattggg

SEQ ID NO: 934997 - DNA, 25 bp, Homo sapien
gaagctattgcctgaacgtggataa

SEQ ID NO: 934998 - DNA, 25 bp, Homo sapien
tagacacagaaggtagaacagtgct

SEQ ID NO: 934999 - DNA, 25 bp, Homo sapien
aactcatagacacagaaggtagaac

SEQ ID NO: 935000 - DNA, 25 bp, Homo sapien
acacagaaggtagaacagtgcttgc

SEQ ID NO: 935001 - DNA, 25 bp, Homo sapien
tgcttgccaggaaccggggagtagg

SEQ ID NO: 935002 - DNA, 25 bp, Homo sapien
aaaacaaactgtttgtagcttccag

SEQ ID NO: 935003 - DNA, 25 bp, Homo sapien
aaacaaactgtttgtagcttccaga

SEQ ID NO: 935004 - DNA, 25 bp, Homo sapien
caattggtttctacgatgtggcaaa

SEQ ID NO: 935005 - DNA, 25 bp, Homo sapien
tctacgatgtggcaaatgagatcca

SEQ ID NO: 935006 - DNA, 25 bp, Homo sapien
gaagattatgtttcctccaattggt

SEQ ID NO: 935007 - DNA, 25 bp, Homo sapien
tgtttcctccaattggtttctacga

SEQ ID NO: 935008 - DNA, 25 bp, Homo sapien
aggtaaagtgctacagggtttgctc

SEQ ID NO: 935009 - DNA, 25 bp, Homo sapien
tgaaggtaaagtgctacagggtttg

SEQ ID NO: 935010 - DNA, 25 bp, Homo sapien
cagtgaaggtaaagtgctacagggt

SEQ ID NO: 935011 - DNA, 25 bp, Homo sapien
atcagtgaaggtaaagtgctacagg

SEQ ID NO: 935012 - DNA, 25 bp, Homo sapien
aggcaaacgctatccttgatacaga

SEQ ID NO: 935013 - DNA, 25 bp, Homo sapien
cgctatccttgatacagatcctcag

SEQ ID NO: 935014 - DNA, 25 bp, Homo sapien
caaacgctatccttgatacagatcc

SEQ ID NO: 935015 - DNA, 25 bp, Homo sapien
tatccttgatacagatcctcagttt

SEQ ID NO: 935016 - DNA, 25 bp, Homo sapien
gcatactggtcttatacaaatttgg

SEQ ID NO: 935017 - DNA, 25 bp, Homo sapien
gagttccttggtacagtgctattga

SEQ ID NO: 935018 - DNA, 25 bp, Homo sapien
cactaatggctgcaataaaggcaga

SEQ ID NO: 935019 - DNA, 25 bp, Homo sapien
tagactctaagcaagatcaggcctc

SEQ ID NO: 935020 - DNA, 25 bp, Homo sapien
ctgatttaagaacgggagatctcca

SEQ ID NO: 935021 - DNA, 25 bp, Homo sapien
tgtctgcataaacctccatgtacag

SEQ ID NO: 935022 - DNA, 25 bp, Homo sapien
ttcattgtcctatgcatccatgggt

SEQ ID NO: 935023 - DNA, 25 bp, Homo sapien
gaatctggcctacttaggctactgg

SEQ ID NO: 935024 - DNA, 25 bp, Homo sapien
gtagtccagaaccatctgttcaatt

SEQ ID NO: 935025 - DNA, 25 bp, Homo sapien
aaaatggtcttttagctcagacacc

SEQ ID NO: 935026 - DNA, 25 bp, Homo sapien
cagaaccatctgttcaattttcttc

SEQ ID NO: 935027 - DNA, 25 bp, Homo sapien
tctacaccctgtaggtgtctcaaaa

SEQ ID NO: 935028 - DNA, 25 bp, Homo sapien
catgagcagccgctggtggctgtct

SEQ ID NO: 935029 - DNA, 25 bp, Homo sapien
agccccatgagcagccgctggtggc

SEQ ID NO: 935030 - DNA, 25 bp, Homo sapien
gcagccgctggtggctgtcttcctc

SEQ ID NO: 935031 - DNA, 25 bp, Homo sapien
ctcctgcaggaggggtgttaatctt

SEQ ID NO: 935032 - DNA, 25 bp, Homo sapien
taagtgtgacctagtcctacaaggt

SEQ ID NO: 935033 - DNA, 25 bp, Homo sapien
ctacaaggtgaacttatcagagctg

SEQ ID NO: 935034 - DNA, 25 bp, Homo sapien
aacagggaatgaccgagaaagaaag

SEQ ID NO: 935035 - DNA, 25 bp, Homo sapien
tcaaccccagtaggctctagctttg

SEQ ID NO: 935036 - DNA, 25 bp, Homo sapien
ccttctggggtcataaattgaggga

SEQ ID NO: 935037 - DNA, 25 bp, Homo sapien
aacagcgctcggtggaaggactgca

SEQ ID NO: 935038 - DNA, 25 bp, Homo sapien
taaattgagggaacagcgctcggtg

SEQ ID NO: 935039 - DNA, 25 bp, Homo sapien
gggtcataaattgagggaacagcgc

SEQ ID NO: 935040 - DNA, 25 bp, Homo sapien
gactagtaacaggatgcaaacggcc

SEQ ID NO: 935041 - DNA, 25 bp, Homo sapien
catacagtagctccataagcagggc

SEQ ID NO: 935042 - DNA, 25 bp, Homo sapien
cctgtagttcagtagccttgggagt

SEQ ID NO: 935043 - DNA, 25 bp, Homo sapien
tagtatacgcaaagcacgtgcaagg

SEQ ID NO: 935044 - DNA, 25 bp, Homo sapien
tcttgcttctaggttagaaatcacc

SEQ ID NO: 935045 - DNA, 25 bp, Homo sapien
tatccgcaggttacaagtctataag

SEQ ID NO: 935046 - DNA, 25 bp, Homo sapien
aattccagaatagggtccaagtggc

SEQ ID NO: 935047 - DNA, 25 bp, Homo sapien
tccattgtaaacatctatccgcagg

SEQ ID NO: 935048 - DNA, 25 bp, Homo sapien
gaaattccagcaccaaattccagaa

SEQ ID NO: 935049 - DNA, 25 bp, Homo sapien
attcctcacgtatgccgcagacctt

SEQ ID NO: 935050 - DNA, 25 bp, Homo sapien
atattcctcacgtatgccgcagacc

SEQ ID NO: 935051 - DNA, 25 bp, Homo sapien
gaatattcctcacgtatgccgcaga

SEQ ID NO: 935052 - DNA, 25 bp, Homo sapien
caagaatattcctcacgtatgccgc

SEQ ID NO: 935053 - DNA, 25 bp, Homo sapien
gagtgagaacacgtcagaaatgtgg

SEQ ID NO: 935054 - DNA, 25 bp, Homo sapien
tcacgtcaaggatataatgcaatac

SEQ ID NO: 935055 - DNA, 25 bp, Homo sapien
tgcaatacagttaagagcatcagag

SEQ ID NO: 935056 - DNA, 25 bp, Homo sapien
gttttatcggtgacttttcacgtca

SEQ ID NO: 935057 - DNA, 25 bp, Homo sapien
tacatgcagcgatactagagagaga

SEQ ID NO: 935058 - DNA, 25 bp, Homo sapien
tgggtcacccctggacagtgagtca

SEQ ID NO: 935059 - DNA, 25 bp, Homo sapien
gaccactaagttgggaacacctaga

SEQ ID NO: 935060 - DNA, 25 bp, Homo sapien
gatcaagtccctggcaattgggaag

SEQ ID NO: 935061 - DNA, 25 bp, Homo sapien
tcagagatcaggttgtgccactctc

SEQ ID NO: 935062 - DNA, 25 bp, Homo sapien
ctcttcagagatcaggttgtgccac

SEQ ID NO: 935063 - DNA, 25 bp, Homo sapien
cttcagagatcaggttgtgccactc

SEQ ID NO: 935064 - DNA, 25 bp, Homo sapien
agatcaggttgtgccactctctcct

SEQ ID NO: 935065 - DNA, 25 bp, Homo sapien
tgttatagtggaagtgtggcttggc

SEQ ID NO: 935066 - DNA, 25 bp, Homo sapien
tcccagtagcccttaaagctgagca

SEQ ID NO: 935067 - DNA, 25 bp, Homo sapien
gaagtgtggcttggcgtacttaaca

SEQ ID NO: 935068 - DNA, 25 bp, Homo sapien
catattctaggttggagttcagttt

SEQ ID NO: 935069 - DNA, 25 bp, Homo sapien
gacttaggtggtgtcaacagtgcca

SEQ ID NO: 935070 - DNA, 25 bp, Homo sapien
ggagtaggcgtactttcctgctaaa

SEQ ID NO: 935071 - DNA, 25 bp, Homo sapien
ccagattgaggcttagcagggaaac

SEQ ID NO: 935072 - DNA, 25 bp, Homo sapien
cttgagacccgtttttatgacttag

SEQ ID NO: 935073 - DNA, 25 bp, Homo sapien
ggatattctgacacaacttggtttt

SEQ ID NO: 935074 - DNA, 25 bp, Homo sapien
actttttgccaaaatatgtgcattt

SEQ ID NO: 935075 - DNA, 25 bp, Homo sapien
ccaataaaggtagacttaggatact

SEQ ID NO: 935076 - DNA, 25 bp, Homo sapien
tctgacacaacttggttttaaacca

SEQ ID NO: 935077 - DNA, 25 bp, Homo sapien
tgggtaagtatggcaagaacagtca

SEQ ID NO: 935078 - DNA, 25 bp, Homo sapien
gttgggtaagtatggcaagaacagt

SEQ ID NO: 935079 - DNA, 25 bp, Homo sapien
ttgggtaagtatggcaagaacagtc

SEQ ID NO: 935080 - DNA, 25 bp, Homo sapien
cagtattaataactactagcagatg

SEQ ID NO: 935081 - DNA, 25 bp, Homo sapien
gagcccccaagcatgtgtggaaatg

SEQ ID NO: 935082 - DNA, 25 bp, Homo sapien
acttgtcctcagtattaataactac

SEQ ID NO: 935083 - DNA, 25 bp, Homo sapien
ctacagtgcctcatacttgtcctca

SEQ ID NO: 935084 - DNA, 25 bp, Homo sapien
cctggaaacacagatcatcagtcta

SEQ ID NO: 935085 - DNA, 25 bp, Homo sapien
tgtgacctaaaatgccacagccttc

SEQ ID NO: 935086 - DNA, 25 bp, Homo sapien
cttcacagtagtcccatgcttttgc

SEQ ID NO: 935087 - DNA, 25 bp, Homo sapien
catatgttagtaggacttcacagta

SEQ ID NO: 935088 - DNA, 25 bp, Homo sapien
tcttctgtcacaagagttattccag

SEQ ID NO: 935089 - DNA, 25 bp, Homo sapien
tgtcttctgtcacaagagttattcc

SEQ ID NO: 935090 - DNA, 25 bp, Homo sapien
cttctgtcacaagagttattccagg

SEQ ID NO: 935091 - DNA, 25 bp, Homo sapien
gtcttctgtcacaagagttattcca

SEQ ID NO: 935092 - DNA, 25 bp, Homo sapien
tgcgtgtccacaatagctgctccac

SEQ ID NO: 935093 - DNA, 25 bp, Homo sapien
gatgtcaccctgtgcgtgtccacaa

SEQ ID NO: 935094 - DNA, 25 bp, Homo sapien
cctgatgtcaccctgtgcgtgtcca

SEQ ID NO: 935095 - DNA, 25 bp, Homo sapien
accctgtgcgtgtccacaatagctg

SEQ ID NO: 935096 - DNA, 25 bp, Homo sapien
gtccatgttacttgtctctgaatat

SEQ ID NO: 935097 - DNA, 25 bp, Homo sapien
tttgtccatgttacttgtctctgaa

SEQ ID NO: 935098 - DNA, 25 bp, Homo sapien
ttgtccatgttacttgtctctgaat

SEQ ID NO: 935099 - DNA, 25 bp, Homo sapien
tgtccatgttacttgtctctgaata

SEQ ID NO: 935100 - DNA, 25 bp, Homo sapien
caaagtagcatttggacaggttgag

SEQ ID NO: 935101 - DNA, 25 bp, Homo sapien
tattcaacttaagctgcaacatcag

SEQ ID NO: 935102 - DNA, 25 bp, Homo sapien
aacttaagctgcaacatcagcaaca

SEQ ID NO: 935103 - DNA, 25 bp, Homo sapien
gaggcattcactatcaatttactgc

SEQ ID NO: 935104 - DNA, 25 bp, Homo sapien
gaatgaggtcaaatgaatggcaggc

SEQ ID NO: 935105 - DNA, 25 bp, Homo sapien
aatgaggtcaaatgaatggcaggca

SEQ ID NO: 935106 - DNA, 25 bp, Homo sapien
tgaggtcaaatgaatggcaggcaga

SEQ ID NO: 935107 - DNA, 25 bp, Homo sapien
atgaggtcaaatgaatggcaggcag

SEQ ID NO: 935108 - DNA, 25 bp, Homo sapien
gatacataatgcaattctgggtagg

SEQ ID NO: 935109 - DNA, 25 bp, Homo sapien
tctctgcctccactaccaaagaagt

SEQ ID NO: 935110 - DNA, 25 bp, Homo sapien
gaattgcctaagaatatactcactt

SEQ ID NO: 935111 - DNA, 25 bp, Homo sapien
aaaagtcagacagaactctgttggt

SEQ ID NO: 935112 - DNA, 25 bp, Homo sapien
ccagggaccctgacaatgactgtaa

SEQ ID NO: 935113 - DNA, 25 bp, Homo sapien
ttgaccgcagtagagcgcgcagtgc

SEQ ID NO: 935114 - DNA, 25 bp, Homo sapien
gaagctgtaataaagacgactggct

SEQ ID NO: 935115 - DNA, 25 bp, Homo sapien
cacagtctaagcaagtgttctgcag

SEQ ID NO: 935116 - DNA, 25 bp, Homo sapien
aaatgaccaggtaagtaaacagcca

SEQ ID NO: 935117 - DNA, 25 bp, Homo sapien
atgaccaggtaagtaaacagccaca

SEQ ID NO: 935118 - DNA, 25 bp, Homo sapien
cattaagtaggtggaagaaatgacc

SEQ ID NO: 935119 - DNA, 25 bp, Homo sapien
tgttgaacattaagtaggtggaaga

SEQ ID NO: 935120 - DNA, 25 bp, Homo sapien
ttgagaaaagtaatgccctttgtca

SEQ ID NO: 935121 - DNA, 25 bp, Homo sapien
ttctcaagagaagtggtgaaggtct

SEQ ID NO: 935122 - DNA, 25 bp, Homo sapien
aggttgagaaaagtaatgccctttg

SEQ ID NO: 935123 - DNA, 25 bp, Homo sapien
ctttgtcatgtgtgacccaacattc

SEQ ID NO: 935124 - DNA, 25 bp, Homo sapien
tgacaactttcttcaggaaatatat

SEQ ID NO: 935125 - DNA, 25 bp, Homo sapien
attgacaactttcttcaggaaatat

SEQ ID NO: 935126 - DNA, 25 bp, Homo sapien
gacaactttcttcaggaaatatata

SEQ ID NO: 935127 - DNA, 25 bp, Homo sapien
caactttcttcaggaaatatatatc

SEQ ID NO: 935128 - DNA, 25 bp, Homo sapien
atatgtgatttgtccccaagaggca

SEQ ID NO: 935129 - DNA, 25 bp, Homo sapien
ccaagaggcacacttcgggctgtaa

SEQ ID NO: 935130 - DNA, 25 bp, Homo sapien
tcgggctgtaacatacacacaaact

SEQ ID NO: 935131 - DNA, 25 bp, Homo sapien
tatgtgatttgtccccaagaggcac

SEQ ID NO: 935132 - DNA, 25 bp, Homo sapien
cctgggaaatgaacatgatggcaac

SEQ ID NO: 935133 - DNA, 25 bp, Homo sapien
tcacccagtaattcttttaggattc

SEQ ID NO: 935134 - DNA, 25 bp, Homo sapien
gatggcaacatagatcataacctcc

SEQ ID NO: 935135 - DNA, 25 bp, Homo sapien
ggattctatcctgggaaatgaacat

SEQ ID NO: 935136 - DNA, 25 bp, Homo sapien
tctcccaattctgtaggtcgtttgg

SEQ ID NO: 935137 - DNA, 25 bp, Homo sapien
ctctaatcctcagtgatactgagtt

SEQ ID NO: 935138 - DNA, 25 bp, Homo sapien
ctgtaggtcgtttggtttactctgt

SEQ ID NO: 935139 - DNA, 25 bp, Homo sapien
tatctcattgtaacctctatctgca

SEQ ID NO: 935140 - DNA, 25 bp, Homo sapien
tgagcacgcccatccctagattgta

SEQ ID NO: 935141 - DNA, 25 bp, Homo sapien
taagggcctaagtccatcagcattc

SEQ ID NO: 935142 - DNA, 25 bp, Homo sapien
gttccttggaagacagccgtcttta

SEQ ID NO: 935143 - DNA, 25 bp, Homo sapien
gcttctgatgaccaaaatgtgatag

SEQ ID NO: 935144 - DNA, 25 bp, Homo sapien
tagttcacccttatttcaaacacag

SEQ ID NO: 935145 - DNA, 25 bp, Homo sapien
taacctcagtaaacgacactactgt

SEQ ID NO: 935146 - DNA, 25 bp, Homo sapien
aaaatgcatcccaaacccatctagt

SEQ ID NO: 935147 - DNA, 25 bp, Homo sapien
cacaggactagacttaactgctcat

SEQ ID NO: 935148 - DNA, 25 bp, Homo sapien
aaatttatctcggtattgatgataa

SEQ ID NO: 935149 - DNA, 25 bp, Homo sapien
atttatctcggtattgatgataatc

SEQ ID NO: 935150 - DNA, 25 bp, Homo sapien
aaaatttatctcggtattgatgata

SEQ ID NO: 935151 - DNA, 25 bp, Homo sapien
ttatctcggtattgatgataatcac

SEQ ID NO: 935152 - DNA, 25 bp, Homo sapien
taatcgcagggagaagggtatatcc

SEQ ID NO: 935153 - DNA, 25 bp, Homo sapien
caaaataaatggagatgcactacag

SEQ ID NO: 935154 - DNA, 25 bp, Homo sapien
cagctgagctacaagtggattgacc

SEQ ID NO: 935155 - DNA, 25 bp, Homo sapien
tgtagctctctgaaccatcgaatcc

SEQ ID NO: 935156 - DNA, 25 bp, Homo sapien
gagttgcttaatgatatgtccaagg

SEQ ID NO: 935157 - DNA, 25 bp, Homo sapien
cctgagttgcttaatgatatgtcca

SEQ ID NO: 935158 - DNA, 25 bp, Homo sapien
atcctgagttgcttaatgatatgtc

SEQ ID NO: 935159 - DNA, 25 bp, Homo sapien
aaatcctgagttgcttaatgatatg

SEQ ID NO: 935160 - DNA, 25 bp, Homo sapien
gttatagctctcatcagcataaaac

SEQ ID NO: 935161 - DNA, 25 bp, Homo sapien
cattaagttatagctctcatcagca

SEQ ID NO: 935162 - DNA, 25 bp, Homo sapien
agttatagctctcatcagcataaaa

SEQ ID NO: 935163 - DNA, 25 bp, Homo sapien
tattctgtctcttgggagatggcca

SEQ ID NO: 935164 - DNA, 25 bp, Homo sapien
tgttctgacatatcccactgagccc

SEQ ID NO: 935165 - DNA, 25 bp, Homo sapien
tgagcccaaacgaaatcctcagcta

SEQ ID NO: 935166 - DNA, 25 bp, Homo sapien
cttcaggtcaatgtaatataatctc

SEQ ID NO: 935167 - DNA, 25 bp, Homo sapien
gctcttagtttagcagacaggctga

SEQ ID NO: 935168 - DNA, 25 bp, Homo sapien
caggctgaggctgttgaagacaaca

SEQ ID NO: 935169 - DNA, 25 bp, Homo sapien
tctcttaagtcaagcctctgcagac

SEQ ID NO: 935170 - DNA, 25 bp, Homo sapien
agtaggcaatgaccccaatttggcc

SEQ ID NO: 935171 - DNA, 25 bp, Homo sapien
gcgacatggatacgaaattgttcaa

SEQ ID NO: 935172 - DNA, 25 bp, Homo sapien
atcttcttgggcgacatggatacga

SEQ ID NO: 935173 - DNA, 25 bp, Homo sapien
tcttgggcgacatggatacgaaatt

SEQ ID NO: 935174 - DNA, 25 bp, Homo sapien
tgggcgacatggatacgaaattgtt

SEQ ID NO: 935175 - DNA, 25 bp, Homo sapien
gatgactttcaatatgtgggtagag

SEQ ID NO: 935176 - DNA, 25 bp, Homo sapien
gaggatgactttcaatatgtgggta

SEQ ID NO: 935177 - DNA, 25 bp, Homo sapien
gactttcaatatgtgggtagagaaa

SEQ ID NO: 935178 - DNA, 25 bp, Homo sapien
gaagaggatgactttcaatatgtgg

SEQ ID NO: 935179 - DNA, 25 bp, Homo sapien
aatgtgacatggactgaggtgctga

SEQ ID NO: 935180 - DNA, 25 bp, Homo sapien
ggtgctgaagaggtgtaactgccaa

SEQ ID NO: 935181 - DNA, 25 bp, Homo sapien
cctgtgacaatcagggagaatgtta

SEQ ID NO: 935182 - DNA, 25 bp, Homo sapien
tttctattataaggtggtcctagag

SEQ ID NO: 935183 - DNA, 25 bp, Homo sapien
tttcaaccaacaaagtcaagcactt

SEQ ID NO: 935184 - DNA, 25 bp, Homo sapien
gggtggatttcaaccaacaaagtca

SEQ ID NO: 935185 - DNA, 25 bp, Homo sapien
taacagggtggatttcaaccaacaa

SEQ ID NO: 935186 - DNA, 25 bp, Homo sapien
tgttaacagggtggatttcaaccaa

SEQ ID NO: 935187 - DNA, 25 bp, Homo sapien
agtaacgaagattgtaatatcacac

SEQ ID NO: 935188 - DNA, 25 bp, Homo sapien
gcttttagtaacgaagattgtaata

SEQ ID NO: 935189 - DNA, 25 bp, Homo sapien
ttagtaacgaagattgtaatatcac

SEQ ID NO: 935190 - DNA, 25 bp, Homo sapien
taacgaagattgtaatatcacacat

SEQ ID NO: 935191 - DNA, 25 bp, Homo sapien
aatgccataaaatacagcaatcagg

SEQ ID NO: 935192 - DNA, 25 bp, Homo sapien
gtgtcacatctgagcaaatgccata

SEQ ID NO: 935193 - DNA, 25 bp, Homo sapien
gccataaaatacagcaatcaggagg

SEQ ID NO: 935194 - DNA, 25 bp, Homo sapien
ttcagtgtcacatctgagcaaatgc

SEQ ID NO: 935195 - DNA, 25 bp, Homo sapien
tatctcagggagcaatataactcta

SEQ ID NO: 935196 - DNA, 25 bp, Homo sapien
tcatgggttattctcctgggcatca

SEQ ID NO: 935197 - DNA, 25 bp, Homo sapien
taagctgcttggagtacacctcaca

SEQ ID NO: 935198 - DNA, 25 bp, Homo sapien
tctcactacacctaggcagagctgg

SEQ ID NO: 935199 - DNA, 25 bp, Homo sapien
ctttagtagactgaactaaacttgc

SEQ ID NO: 935200 - DNA, 25 bp, Homo sapien
tctttagtagactgaactaaacttg

SEQ ID NO: 935201 - DNA, 25 bp, Homo sapien
tcactgttgacagagcaactgaaaa

SEQ ID NO: 935202 - DNA, 25 bp, Homo sapien
gttgacagagcaactgaaaacttgc

SEQ ID NO: 935203 - DNA, 25 bp, Homo sapien
ctgttgacagagcaactgaaaactt

SEQ ID NO: 935204 - DNA, 25 bp, Homo sapien
tgacagagcaactgaaaacttgcaa

SEQ ID NO: 935205 - DNA, 25 bp, Homo sapien
tcttgtatccaaccagtttaggtca

SEQ ID NO: 935206 - DNA, 25 bp, Homo sapien
agcaaagtattctcttgtatccaac

SEQ ID NO: 935207 - DNA, 25 bp, Homo sapien
taggtcatgttcactcttgtatgca

SEQ ID NO: 935208 - DNA, 25 bp, Homo sapien
tcttgtatgcactaccagggaagtc

SEQ ID NO: 935209 - DNA, 25 bp, Homo sapien
gaacctcagagatccgggtgactgt

SEQ ID NO: 935210 - DNA, 25 bp, Homo sapien
cagattcaataagcggagtaaaccc

SEQ ID NO: 935211 - DNA, 25 bp, Homo sapien
tgggtaggctcaacaacatagtgga

SEQ ID NO: 935212 - DNA, 25 bp, Homo sapien
tattggctaatgactaaaaatgtcc

SEQ ID NO: 935213 - DNA, 25 bp, Homo sapien
ctcattttgtctggtttgacaatca

SEQ ID NO: 935214 - DNA, 25 bp, Homo sapien
tgtctggtttgacaatcatataatc

SEQ ID NO: 935215 - DNA, 25 bp, Homo sapien
taatccaaagacgacatttccctta

SEQ ID NO: 935216 - DNA, 25 bp, Homo sapien
tcatataatccaaagacgacatttc

SEQ ID NO: 935217 - DNA, 25 bp, Homo sapien
caagtttattcattacccttcaata

SEQ ID NO: 935218 - DNA, 25 bp, Homo sapien
tttattcattacccttcaataagat

SEQ ID NO: 935219 - DNA, 25 bp, Homo sapien
ttattcattacccttcaataagata

SEQ ID NO: 935220 - DNA, 25 bp, Homo sapien
gtttattcattacccttcaataaga

SEQ ID NO: 935221 - DNA, 25 bp, Homo sapien
atttaatacatgtaagctctcataa

SEQ ID NO: 935222 - DNA, 25 bp, Homo sapien
catgtaagctctcataatcgttttc

SEQ ID NO: 935223 - DNA, 25 bp, Homo sapien
gtaagctctcataatcgttttctaa

SEQ ID NO: 935224 - DNA, 25 bp, Homo sapien
taatacatgtaagctctcataatcg

SEQ ID NO: 935225 - DNA, 25 bp, Homo sapien
cagaagatggttaaaaacatatcta

SEQ ID NO: 935226 - DNA, 25 bp, Homo sapien
tatctaaccaatatattagtgaagg

SEQ ID NO: 935227 - DNA, 25 bp, Homo sapien
ggcaaaacgaatctcttttattaga

SEQ ID NO: 935228 - DNA, 25 bp, Homo sapien
gaaagccatagtcattgagaggtat

SEQ ID NO: 935229 - DNA, 25 bp, Homo sapien
cactaattgggcagaagtgtgtact

SEQ ID NO: 935230 - DNA, 25 bp, Homo sapien
gctgtgaacttataacttgtgtcct

SEQ ID NO: 935231 - DNA, 25 bp, Homo sapien
tgtgtccttgtctatatgaaagccc

SEQ ID NO: 935232 - DNA, 25 bp, Homo sapien
gaaggatatacagactctttacaca

SEQ ID NO: 935233 - DNA, 25 bp, Homo sapien
attttattgagctggtgtggagccc

SEQ ID NO: 935234 - DNA, 25 bp, Homo sapien
gttagagggcataacttggaccatc

SEQ ID NO: 935235 - DNA, 25 bp, Homo sapien
tataagtatgcgaggagagatcgtc

SEQ ID NO: 935236 - DNA, 25 bp, Homo sapien
aaagaacactgatgccccaagccat

SEQ ID NO: 935237 - DNA, 25 bp, Homo sapien
gcatagttattaagatgttgtcatg

SEQ ID NO: 935238 - DNA, 25 bp, Homo sapien
ttattaagatgttgtcatggccggg

SEQ ID NO: 935239 - DNA, 25 bp, Homo sapien
taaagcatagttattaagatgttgt

SEQ ID NO: 935240 - DNA, 25 bp, Homo sapien
agttattaagatgttgtcatggccg

SEQ ID NO: 935241 - DNA, 25 bp, Homo sapien
cggacacggttcaacagacacataa

SEQ ID NO: 935242 - DNA, 25 bp, Homo sapien
aaatcatcaaaaagcccggagtggc

SEQ ID NO: 935243 - DNA, 25 bp, Homo sapien
cataaacacgtctcgcaaatgtggg

SEQ ID NO: 935244 - DNA, 25 bp, Homo sapien
ctgttccaccgttaggtatagggtg

SEQ ID NO: 935245 - DNA, 25 bp, Homo sapien
acggattctttctcaaaacgtgaag

SEQ ID NO: 935246 - DNA, 25 bp, Homo sapien
aggagcactcctgtcttggcaaagc

SEQ ID NO: 935247 - DNA, 25 bp, Homo sapien
tctgccaagggcgaatttccgcggg

SEQ ID NO: 935248 - DNA, 25 bp, Homo sapien
tgccctcgccgtgaggtgatgctga

SEQ ID NO: 935249 - DNA, 25 bp, Homo sapien
cccacccctctccgcagcgcgcctc

SEQ ID NO: 935250 - DNA, 25 bp, Homo sapien
agccttctcagggcggcgacgcccc

SEQ ID NO: 935251 - DNA, 25 bp, Homo sapien
ggaggggagcgacgccctcgcacca

SEQ ID NO: 935252 - DNA, 25 bp, Homo sapien
cccctctccgcagcgcgcctcccgc

SEQ ID NO: 935253 - DNA, 25 bp, Homo sapien
gctgcgcccgcaaccacgggagcac

SEQ ID NO: 935254 - DNA, 25 bp, Homo sapien
cgctgcgcccgcaaccacgggagca

SEQ ID NO: 935255 - DNA, 25 bp, Homo sapien
ccgctgcgcccgcaaccacgggagc

SEQ ID NO: 935256 - DNA, 25 bp, Homo sapien
cccgctgcgcccgcaaccacgggag

SEQ ID NO: 935257 - DNA, 25 bp, Homo sapien
gaagtcggcgaccaggcgaagagcc

SEQ ID NO: 935258 - DNA, 25 bp, Homo sapien
tcccgaggtcgaagtcggcgaccag

SEQ ID NO: 935259 - DNA, 25 bp, Homo sapien
tccttcccgaggtcgaagtcggcga

SEQ ID NO: 935260 - DNA, 25 bp, Homo sapien
gtcgaagtcggcgaccaggcgaaga

SEQ ID NO: 935261 - DNA, 25 bp, Homo sapien
gccccgcaccgcgggcattcccggc

SEQ ID NO: 935262 - DNA, 25 bp, Homo sapien
tggggccccgcaccgcgggcattcc

SEQ ID NO: 935263 - DNA, 25 bp, Homo sapien
ctggggccccgcaccgcgggcattc

SEQ ID NO: 935264 - DNA, 25 bp, Homo sapien
aaagacgtgggcgcttcagggcctt

SEQ ID NO: 935265 - DNA, 25 bp, Homo sapien
actgtgcagcaaagtgtggaaacca

SEQ ID NO: 935266 - DNA, 25 bp, Homo sapien
ggcgaggccgctagcccagtggctt

SEQ ID NO: 935267 - DNA, 25 bp, Homo sapien
ggatagagggcgcaaagacgtgggc

SEQ ID NO: 935268 - DNA, 25 bp, Homo sapien
tatgagcatgtgaacacccgatcat

SEQ ID NO: 935269 - DNA, 25 bp, Homo sapien
ttgtaccaagattcgagggtggcac

SEQ ID NO: 935270 - DNA, 25 bp, Homo sapien
tgggtaatgtcccaacattgtacca

SEQ ID NO: 935271 - DNA, 25 bp, Homo sapien
tgtcccaacattgtaccaagattcg

SEQ ID NO: 935272 - DNA, 25 bp, Homo sapien
ttaagggtagctaaggtgcatgtca

SEQ ID NO: 935273 - DNA, 25 bp, Homo sapien
tctcccaagttctcgagtgagcatt

SEQ ID NO: 935274 - DNA, 25 bp, Homo sapien
gggtagctaaggtgcatgtcatccc

SEQ ID NO: 935275 - DNA, 25 bp, Homo sapien
ccatctctagctcacgtctcaccct

SEQ ID NO: 935276 - DNA, 25 bp, Homo sapien
gtggcccctccgcataccccagcat

SEQ ID NO: 935277 - DNA, 25 bp, Homo sapien
aagcaatggacacattgacaggatc

SEQ ID NO: 935278 - DNA, 25 bp, Homo sapien
cttttaagcaatggacacattgaca

SEQ ID NO: 935279 - DNA, 25 bp, Homo sapien
acaggatcatcaaccagaaggcctg

SEQ ID NO: 935280 - DNA, 25 bp, Homo sapien
ctggcagcaaaatccccagcttacc

SEQ ID NO: 935281 - DNA, 25 bp, Homo sapien
gcaaaatccccagcttaccagagac

SEQ ID NO: 935282 - DNA, 25 bp, Homo sapien
cagcaaaatccccagcttaccagag

SEQ ID NO: 935283 - DNA, 25 bp, Homo sapien
aaaatccccagcttaccagagacct

SEQ ID NO: 935284 - DNA, 25 bp, Homo sapien
ctttttcagataagcaccttttttg

SEQ ID NO: 935285 - DNA, 25 bp, Homo sapien
atctttttcagataagcaccttttt

SEQ ID NO: 935286 - DNA, 25 bp, Homo sapien
tatctttttcagataagcacctttt

SEQ ID NO: 935287 - DNA, 25 bp, Homo sapien
ttttatctttttcagataagcacct

SEQ ID NO: 935288 - DNA, 25 bp, Homo sapien
tcagtgtgccttttcggagctggca

SEQ ID NO: 935289 - DNA, 25 bp, Homo sapien
agtagggcccatgtgcgctcagtgt

SEQ ID NO: 935290 - DNA, 25 bp, Homo sapien
ctggcaccttgaactggacactgtg

SEQ ID NO: 935291 - DNA, 25 bp, Homo sapien
gccaataagcctgacacgggtggtg

SEQ ID NO: 935292 - DNA, 25 bp, Homo sapien
gaaattgcaccagaggctttcagtg

SEQ ID NO: 935293 - DNA, 25 bp, Homo sapien
aaattgcaccagaggctttcagtgg

SEQ ID NO: 935294 - DNA, 25 bp, Homo sapien
aggaaattgcaccagaggctttcag

SEQ ID NO: 935295 - DNA, 25 bp, Homo sapien
attgcaccagaggctttcagtggag

SEQ ID NO: 935296 - DNA, 25 bp, Homo sapien
ttacacaaccaagatacatttctca

SEQ ID NO: 935297 - DNA, 25 bp, Homo sapien
tacacaaccaagatacatttctcaa

SEQ ID NO: 935298 - DNA, 25 bp, Homo sapien
caaccaagatacatttctcaatggg

SEQ ID NO: 935299 - DNA, 25 bp, Homo sapien
cacaaccaagatacatttctcaatg

SEQ ID NO: 935300 - DNA, 25 bp, Homo sapien
tggaatctgacagagtctgagaaat

SEQ ID NO: 935301 - DNA, 25 bp, Homo sapien
tcatacgtttgtttggcagaggctg

SEQ ID NO: 935302 - DNA, 25 bp, Homo sapien
aaatgaaggctgcaactctctgtcc

SEQ ID NO: 935303 - DNA, 25 bp, Homo sapien
gaggctgggtcacatatggaatctg

SEQ ID NO: 935304 - DNA, 25 bp, Homo sapien
ccaatttatccccattcttccccat

SEQ ID NO: 935305 - DNA, 25 bp, Homo sapien
ttgcccaatttatccccattcttcc

SEQ ID NO: 935306 - DNA, 25 bp, Homo sapien
tgcccaatttatccccattcttccc

SEQ ID NO: 935307 - DNA, 25 bp, Homo sapien
cttgcccaatttatccccattcttc

SEQ ID NO: 935308 - DNA, 25 bp, Homo sapien
gaagtaaaagtgtctcttccggcat

SEQ ID NO: 935309 - DNA, 25 bp, Homo sapien
tggcctttggccttaataggaagta

SEQ ID NO: 935310 - DNA, 25 bp, Homo sapien
ctggcctttggccttaataggaagt

SEQ ID NO: 935311 - DNA, 25 bp, Homo sapien
cttaataggaagtaaaagtgtctct

SEQ ID NO: 935312 - DNA, 25 bp, Homo sapien
tgtatcagtggtatgtgccgcacct

SEQ ID NO: 935313 - DNA, 25 bp, Homo sapien
tatcagtggtatgtgccgcacctac

SEQ ID NO: 935314 - DNA, 25 bp, Homo sapien
tcagtggtatgtgccgcacctacca

SEQ ID NO: 935315 - DNA, 25 bp, Homo sapien
gccgcacctaccacacctgcagcat

SEQ ID NO: 935316 - DNA, 25 bp, Homo sapien
tcctccgagagaccgccgaggtgcg

SEQ ID NO: 935317 - DNA, 25 bp, Homo sapien
ctccctcctccgagagaccgccgag

SEQ ID NO: 935318 - DNA, 25 bp, Homo sapien
ccctcctccgagagaccgccgaggt

SEQ ID NO: 935319 - DNA, 25 bp, Homo sapien
ctcctccgagagaccgccgaggtgc

SEQ ID NO: 935320 - DNA, 25 bp, Homo sapien
gagaagattcaagtacaaagtatca

SEQ ID NO: 935321 - DNA, 25 bp, Homo sapien
ctgccttttatttccgaaagtcctg

SEQ ID NO: 935322 - DNA, 25 bp, Homo sapien
gtacaaagtatcatggccaaaaatg

SEQ ID NO: 935323 - DNA, 25 bp, Homo sapien
gaagaacaggaggtctacaaatagg

SEQ ID NO: 935324 - DNA, 25 bp, Homo sapien
tatgaaggcctgactagggctagag

SEQ ID NO: 935325 - DNA, 25 bp, Homo sapien
aaaagtagctggcttcactcaggga

SEQ ID NO: 935326 - DNA, 25 bp, Homo sapien
tccaagagaacaagtcagacatcac

SEQ ID NO: 935327 - DNA, 25 bp, Homo sapien
gctagagaacccacttctaagatgg

SEQ ID NO: 935328 - DNA, 25 bp, Homo sapien
cagcttggccaggtgtaagggacca

SEQ ID NO: 935329 - DNA, 25 bp, Homo sapien
ggacagaggcataaaggattgctct

SEQ ID NO: 935330 - DNA, 25 bp, Homo sapien
tcagggtgactccagttccactagg

SEQ ID NO: 935331 - DNA, 25 bp, Homo sapien
aagggaccagaacctagaataactg

SEQ ID NO: 935332 - DNA, 25 bp, Homo sapien
tccctggacttacaagacctatctc

SEQ ID NO: 935333 - DNA, 25 bp, Homo sapien
gacttacaagacctatctctagttc

SEQ ID NO: 935334 - DNA, 25 bp, Homo sapien
cttattgtcctttgctagcttctct

SEQ ID NO: 935335 - DNA, 25 bp, Homo sapien
tctctgacaacttcttattgtcctt

SEQ ID NO: 935336 - DNA, 25 bp, Homo sapien
cattctatattgttttccttgggca

SEQ ID NO: 935337 - DNA, 25 bp, Homo sapien
gacctgcatttgtagtttcctgtta

SEQ ID NO: 935338 - DNA, 25 bp, Homo sapien
tacttttcttgtgttccagacctgc

SEQ ID NO: 935339 - DNA, 25 bp, Homo sapien
ttaagctacctcaaaccctgaatgc

SEQ ID NO: 935340 - DNA, 25 bp, Homo sapien
tgccatgaatagtgaagctgatgct

SEQ ID NO: 935341 - DNA, 25 bp, Homo sapien
catgcagaaggcacatgagagaact

SEQ ID NO: 935342 - DNA, 25 bp, Homo sapien
ccttcaagaatatccaacgggctat

SEQ ID NO: 935343 - DNA, 25 bp, Homo sapien
aacgggctattcaaaggtcatgcag

SEQ ID NO: 935344 - DNA, 25 bp, Homo sapien
gatttagatgaaaccagattgatgc

SEQ ID NO: 935345 - DNA, 25 bp, Homo sapien
cagggttgcaacataggaaggttct

SEQ ID NO: 935346 - DNA, 25 bp, Homo sapien
tagctcttgcaataccttgagttca

SEQ ID NO: 935347 - DNA, 25 bp, Homo sapien
taagctccgagatggcagataattt

SEQ ID NO: 935348 - DNA, 25 bp, Homo sapien
taccgatcattgtctggttggtaca

SEQ ID NO: 935349 - DNA, 25 bp, Homo sapien
caacactataccaaaccgtactaga

SEQ ID NO: 935350 - DNA, 25 bp, Homo sapien
tacacaacttgttcagcatatcttc

SEQ ID NO: 935351 - DNA, 25 bp, Homo sapien
ggttggtacattcttttgaaccatc

SEQ ID NO: 935352 - DNA, 25 bp, Homo sapien
ttcctacagtcgaatttctctccca

SEQ ID NO: 935353 - DNA, 25 bp, Homo sapien
catttctcttcctacagtcgaattt

SEQ ID NO: 935354 - DNA, 25 bp, Homo sapien
tcctacagtcgaatttctctcccat

SEQ ID NO: 935355 - DNA, 25 bp, Homo sapien
ggaaagggccatctacaataagcat

SEQ ID NO: 935356 - DNA, 25 bp, Homo sapien
ctgaggggaaagggccatctacaat

SEQ ID NO: 935357 - DNA, 25 bp, Homo sapien
aggggaaagggccatctacaataag

SEQ ID NO: 935358 - DNA, 25 bp, Homo sapien
gggaaagggccatctacaataagca

SEQ ID NO: 935359 - DNA, 25 bp, Homo sapien
tacggctctgctaagaatacgctgg

SEQ ID NO: 935360 - DNA, 25 bp, Homo sapien
aattcgctgaccaatctgctctgta

SEQ ID NO: 935361 - DNA, 25 bp, Homo sapien
tgagaaagtattctaccactgatat

SEQ ID NO: 935362 - DNA, 25 bp, Homo sapien
gaaagtcagttcatggatcaaatcc

SEQ ID NO: 935363 - DNA, 25 bp, Homo sapien
ctgggcttggtgacgtagtgaggca

SEQ ID NO: 935364 - DNA, 25 bp, Homo sapien
catagcactgcactttggcatggga

SEQ ID NO: 935365 - DNA, 25 bp, Homo sapien
ccctagtgcacaggaattcgagatc

SEQ ID NO: 935366 - DNA, 25 bp, Homo sapien
gagttagaccagaatatattctctg

SEQ ID NO: 935367 - DNA, 25 bp, Homo sapien
cattcgcgtcgtctgtgaagaaggc

SEQ ID NO: 935368 - DNA, 25 bp, Homo sapien
ggcaaattcccttcagttcggcaaa

SEQ ID NO: 935369 - DNA, 25 bp, Homo sapien
gaacgtggcggtgacactactacag

SEQ ID NO: 935370 - DNA, 25 bp, Homo sapien
gtgcgggactcctgaaaactgcttt

SEQ ID NO: 935371 - DNA, 25 bp, Homo sapien
tccatttacccgcgtcccgcttctc

SEQ ID NO: 935372 - DNA, 25 bp, Homo sapien
catttacccgcgtcccgcttctcct

SEQ ID NO: 935373 - DNA, 25 bp, Homo sapien
gatcttacatctatgctatacttag

SEQ ID NO: 935374 - DNA, 25 bp, Homo sapien
ggtagaggtctttttgtgaaggatc

SEQ ID NO: 935375 - DNA, 25 bp, Homo sapien
tgagctaatacatggtaaatgataa

SEQ ID NO: 935376 - DNA, 25 bp, Homo sapien
gaggtggtcctggaccatactttga

SEQ ID NO: 935377 - DNA, 25 bp, Homo sapien
ttattctacagaccgataatagcaa

SEQ ID NO: 935378 - DNA, 25 bp, Homo sapien
aattctggacagtctgcattgtaac

SEQ ID NO: 935379 - DNA, 25 bp, Homo sapien
tacagaccgataatagcaattctgg

SEQ ID NO: 935380 - DNA, 25 bp, Homo sapien
gataatagcaattctggacagtctg

SEQ ID NO: 935381 - DNA, 25 bp, Homo sapien
gaaaatagacatgctggtccactcc

SEQ ID NO: 935382 - DNA, 25 bp, Homo sapien
agaaaatagacatgctggtccactc

SEQ ID NO: 935383 - DNA, 25 bp, Homo sapien
catgctggtccactccagcgtcatt

SEQ ID NO: 935384 - DNA, 25 bp, Homo sapien
tagacatgctggtccactccagcgt

SEQ ID NO: 935385 - DNA, 25 bp, Homo sapien
gtggcagcatctgtaggctaatgga

SEQ ID NO: 935386 - DNA, 25 bp, Homo sapien
tatcaatgtctattacgtctagcag

SEQ ID NO: 935387 - DNA, 25 bp, Homo sapien
tattacgtctagcagacttgccctg

SEQ ID NO: 935388 - DNA, 25 bp, Homo sapien
gggttatcaatgtctattacgtcta

SEQ ID NO: 935389 - DNA, 25 bp, Homo sapien
tgatgttccgaatgggttatcaatg

SEQ ID NO: 935390 - DNA, 25 bp, Homo sapien
tgaactcctcaagtggcacaagcga

SEQ ID NO: 935391 - DNA, 25 bp, Homo sapien
tagtagccatcacaatggttcgagt

SEQ ID NO: 935392 - DNA, 25 bp, Homo sapien
catacagggatgtaaaattgtgtct

SEQ ID NO: 935393 - DNA, 25 bp, Homo sapien
tcgagtggattgctaagtcatacag

SEQ ID NO: 935394 - DNA, 25 bp, Homo sapien
aagagcaaaaattgtgcaactttga

SEQ ID NO: 935395 - DNA, 25 bp, Homo sapien
gcaaaaattgtgcaactttgatatt

SEQ ID NO: 935396 - DNA, 25 bp, Homo sapien
gaaatggagggttactgctagtcat

SEQ ID NO: 935397 - DNA, 25 bp, Homo sapien
agaaatggagggttactgctagtca

SEQ ID NO: 935398 - DNA, 25 bp, Homo sapien
tcgacagtgtagaaacctagttctg

SEQ ID NO: 935399 - DNA, 25 bp, Homo sapien
taatacccaatacacaccacactgt

SEQ ID NO: 935400 - DNA, 25 bp, Homo sapien
tgtaatattagattcctcgacagtg

SEQ ID NO: 935401 - DNA, 25 bp, Homo sapien
tcttaaggtgctgattagaattaac

SEQ ID NO: 935402 - DNA, 25 bp, Homo sapien
cgcccggcctcgaatgtgttttttg

SEQ ID NO: 935403 - DNA, 25 bp, Homo sapien
ttttttttgatgacgaagtctcact

SEQ ID NO: 935404 - DNA, 25 bp, Homo sapien
tttttttttgatgacgaagtctcac

SEQ ID NO: 935405 - DNA, 25 bp, Homo sapien
accgcgcccggcctcgaatgtgttt

SEQ ID NO: 935406 - DNA, 25 bp, Homo sapien
agatggggttttactgtgttgctca

SEQ ID NO: 935407 - DNA, 25 bp, Homo sapien
gatggggttttactgtgttgctcag

SEQ ID NO: 935408 - DNA, 25 bp, Homo sapien
atggggttttactgtgttgctcagg

SEQ ID NO: 935409 - DNA, 25 bp, Homo sapien
ctggtctcaaactcctgagctcaat

SEQ ID NO: 935410 - DNA, 25 bp, Homo sapien
tatacagtctaattgttcatcctaa

SEQ ID NO: 935411 - DNA, 25 bp, Homo sapien
ctcaagtgggattagaagactatca

SEQ ID NO: 935412 - DNA, 25 bp, Homo sapien
tctagtcagagattcagtaagtgcc

SEQ ID NO: 935413 - DNA, 25 bp, Homo sapien
tctttaatatttgaactcaagtggg

SEQ ID NO: 935414 - DNA, 25 bp, Homo sapien
catcaattagggcaagagactcaat

SEQ ID NO: 935415 - DNA, 25 bp, Homo sapien
gaatgtagacagacactcgttggaa

SEQ ID NO: 935416 - DNA, 25 bp, Homo sapien
gattgttaactctccacgaggacag

SEQ ID NO: 935417 - DNA, 25 bp, Homo sapien
gaagaaatctcgaggattccactgg

SEQ ID NO: 935418 - DNA, 25 bp, Homo sapien
caggtgctgcagagacttgtgttgc

SEQ ID NO: 935419 - DNA, 25 bp, Homo sapien
ctgggtggaagtcgcgctgccttct

SEQ ID NO: 935420 - DNA, 25 bp, Homo sapien
tttgaaatggggctgaacttctgtg

SEQ ID NO: 935421 - DNA, 25 bp, Homo sapien
tggaagtcgcgctgccttctggaga

SEQ ID NO: 935422 - DNA, 25 bp, Homo sapien
ccttttgtacccacagactggtgat

SEQ ID NO: 935423 - DNA, 25 bp, Homo sapien
cttttgtacccacagactggtgata

SEQ ID NO: 935424 - DNA, 25 bp, Homo sapien
ttttgtacccacagactggtgatac

SEQ ID NO: 935425 - DNA, 25 bp, Homo sapien
ctacagtgagcagtgatggtgctac

SEQ ID NO: 935426 - DNA, 25 bp, Homo sapien
gagcagtgatggtgctactgtactc

SEQ ID NO: 935427 - DNA, 25 bp, Homo sapien
agtgagcagtgatggtgctactgta

SEQ ID NO: 935428 - DNA, 25 bp, Homo sapien
tacagtgagcagtgatggtgctact

SEQ ID NO: 935429 - DNA, 25 bp, Homo sapien
cctgtccatattccagccctgagta

SEQ ID NO: 935430 - DNA, 25 bp, Homo sapien
tccagccctgagtaaggcaatgtgt

SEQ ID NO: 935431 - DNA, 25 bp, Homo sapien
catattccagccctgagtaaggcaa

SEQ ID NO: 935432 - DNA, 25 bp, Homo sapien
agccctgagtaaggcaatgtgtgga

SEQ ID NO: 935433 - DNA, 25 bp, Homo sapien
cacggtttcaccaggttggccaggc

SEQ ID NO: 935434 - DNA, 25 bp, Homo sapien
tagagacacggtttcaccaggttgg

SEQ ID NO: 935435 - DNA, 25 bp, Homo sapien
accgtgcccagccattttttggtat

SEQ ID NO: 935436 - DNA, 25 bp, Homo sapien
cccagccattttttggtatttctag

SEQ ID NO: 935437 - DNA, 25 bp, Homo sapien
ggtttatgtataactccctgcatgg

SEQ ID NO: 935438 - DNA, 25 bp, Homo sapien
gtagatgttgatgcactcattcaca

SEQ ID NO: 935439 - DNA, 25 bp, Homo sapien
ggtagattccctccatgttattgat

SEQ ID NO: 935440 - DNA, 25 bp, Homo sapien
taggaccctactaacaatgttcaga

SEQ ID NO: 935441 - DNA, 25 bp, Homo sapien
tggataggcatggtagctgacgcct

SEQ ID NO: 935442 - DNA, 25 bp, Homo sapien
tctaaaatgcctcataatggtctgt

SEQ ID NO: 935443 - DNA, 25 bp, Homo sapien
gttccttgaacatcttgcataccaa

SEQ ID NO: 935444 - DNA, 25 bp, Homo sapien
ggaatgcatgtgagaaagtgatttc

SEQ ID NO: 935445 - DNA, 25 bp, Homo sapien
ttagagcatatttaacacttgggtt

SEQ ID NO: 935446 - DNA, 25 bp, Homo sapien
tcttagagcatatttaacacttggg

SEQ ID NO: 935447 - DNA, 25 bp, Homo sapien
cttagagcatatttaacacttgggt

SEQ ID NO: 935448 - DNA, 25 bp, Homo sapien
ttcttagagcatatttaacacttgg

SEQ ID NO: 935449 - DNA, 25 bp, Homo sapien
tccaagaggatatctaatagaagtt

SEQ ID NO: 935450 - DNA, 25 bp, Homo sapien
atgcattcatacaacttaaaactca

SEQ ID NO: 935451 - DNA, 25 bp, Homo sapien
cataattatctagttaacattctta

SEQ ID NO: 935452 - DNA, 25 bp, Homo sapien
tttaaatgatcgaaagccaaataac

SEQ ID NO: 935453 - DNA, 25 bp, Homo sapien
cagcctccagagtgagtagctgtga

SEQ ID NO: 935454 - DNA, 25 bp, Homo sapien
ctacagtggcatgccaccatgcttg

SEQ ID NO: 935455 - DNA, 25 bp, Homo sapien
agctgtgactacagtggcatgccac

SEQ ID NO: 935456 - DNA, 25 bp, Homo sapien
gcctccagagtgagtagctgtgact

SEQ ID NO: 935457 - DNA, 25 bp, Homo sapien
cacccagcctgatggacagattctt

SEQ ID NO: 935458 - DNA, 25 bp, Homo sapien
tccaatcccattactgaaaagcaac

SEQ ID NO: 935459 - DNA, 25 bp, Homo sapien
tgaaaagcaactccaagcacaggcc

SEQ ID NO: 935460 - DNA, 25 bp, Homo sapien
gcaaattgagctacttgagcctcgg

SEQ ID NO: 935461 - DNA, 25 bp, Homo sapien
gtcagtagcatctttatcatcccca

SEQ ID NO: 935462 - DNA, 25 bp, Homo sapien
agcatctttatcatccccatccatg

SEQ ID NO: 935463 - DNA, 25 bp, Homo sapien
tccccatccatgtacattcctttca

SEQ ID NO: 935464 - DNA, 25 bp, Homo sapien
ctataataataggtcagtagcatct

SEQ ID NO: 935465 - DNA, 25 bp, Homo sapien
gctgacttacaaataggcaccaaag

SEQ ID NO: 935466 - DNA, 25 bp, Homo sapien
tagccttgaaaactcgatcacagtg

SEQ ID NO: 935467 - DNA, 25 bp, Homo sapien
caaatacatgtggatttaggccagg

SEQ ID NO: 935468 - DNA, 25 bp, Homo sapien
tatgatttcgcttggtaggacccca

SEQ ID NO: 935469 - DNA, 25 bp, Homo sapien
taactgttgcatatcaccatcctgt

SEQ ID NO: 935470 - DNA, 25 bp, Homo sapien
gaggccgaatgtccaagatcagagt

SEQ ID NO: 935471 - DNA, 25 bp, Homo sapien
gatcagagtgccattgtagggttct

SEQ ID NO: 935472 - DNA, 25 bp, Homo sapien
gaaacatacatccataaccagccat

SEQ ID NO: 935473 - DNA, 25 bp, Homo sapien
tcaaaaggcataggtattcttcccg

SEQ ID NO: 935474 - DNA, 25 bp, Homo sapien
tgtgagacatcaagcccagcctaat

SEQ ID NO: 935475 - DNA, 25 bp, Homo sapien
tgctggctaccttcggagttccttg

SEQ ID NO: 935476 - DNA, 25 bp, Homo sapien
tgtaaaagcattaccccaatgtccg

SEQ ID NO: 935477 - DNA, 25 bp, Homo sapien
aatcaaagtctttggcttgacagcc

SEQ ID NO: 935478 - DNA, 25 bp, Homo sapien
tgctgtctcctgctactggaatgcc

SEQ ID NO: 935479 - DNA, 25 bp, Homo sapien
gaacccttacagattgttttgcaca

SEQ ID NO: 935480 - DNA, 25 bp, Homo sapien
tttgcagtttcccacgtgcgctagg

SEQ ID NO: 935481 - DNA, 25 bp, Homo sapien
catcttctgaaactcggctcaaacg

SEQ ID NO: 935482 - DNA, 25 bp, Homo sapien
ctgaaactcggctcaaacgtcatct

SEQ ID NO: 935483 - DNA, 25 bp, Homo sapien
cgtggtaaactccaatcatcttctg

SEQ ID NO: 935484 - DNA, 25 bp, Homo sapien
tgaacacgtggtaaactccaatcat

SEQ ID NO: 935485 - DNA, 25 bp, Homo sapien
tgccccgtagcaccgtggtcatatc

SEQ ID NO: 935486 - DNA, 25 bp, Homo sapien
cacatataatgtcaggtggaaccga

SEQ ID NO: 935487 - DNA, 25 bp, Homo sapien
ggaaaagcttactctagcactacag

SEQ ID NO: 935488 - DNA, 25 bp, Homo sapien
tgcttcagcttactgggcagttggg

SEQ ID NO: 935489 - DNA, 25 bp, Homo sapien
taaataggaaagctaaagagattag

SEQ ID NO: 935490 - DNA, 25 bp, Homo sapien
tccaatgagaattacacgtaatcat

SEQ ID NO: 935491 - DNA, 25 bp, Homo sapien
taacagcaaaggtaaatctaattcc

SEQ ID NO: 935492 - DNA, 25 bp, Homo sapien
cacgtaatcataagtaggaatataa

SEQ ID NO: 935493 - DNA, 25 bp, Homo sapien
tatcacacgggtagttaaaaggcaa

SEQ ID NO: 935494 - DNA, 25 bp, Homo sapien
tggccagctcgttagaaggcagtac

SEQ ID NO: 935495 - DNA, 25 bp, Homo sapien
gaaaagctgtgataccggcaacagt

SEQ ID NO: 935496 - DNA, 25 bp, Homo sapien
aaaggcaagttggtcctatctgaca

SEQ ID NO: 935497 - DNA, 25 bp, Homo sapien
taattacattgtcacacagtgctgg

SEQ ID NO: 935498 - DNA, 25 bp, Homo sapien
catgccaaggcagtcaagagcaaca

SEQ ID NO: 935499 - DNA, 25 bp, Homo sapien
ttactgactcctcagcatgccaagg

SEQ ID NO: 935500 - DNA, 25 bp, Homo sapien
tagagagccctctccttttacggca

SEQ ID NO: 935501 - DNA, 25 bp, Homo sapien
tattgaataaggctcctgatacaca

SEQ ID NO: 935502 - DNA, 25 bp, Homo sapien
caaaatgagctgatgttcttccata

SEQ ID NO: 935503 - DNA, 25 bp, Homo sapien
taaccccaggagagacatttatgga

SEQ ID NO: 935504 - DNA, 25 bp, Homo sapien
gaaaattctggcagcataattaacc

SEQ ID NO: 935505 - DNA, 25 bp, Homo sapien
agctgaaagcttacaatcttcataa

SEQ ID NO: 935506 - DNA, 25 bp, Homo sapien
acaatcttcataattactgccccac

SEQ ID NO: 935507 - DNA, 25 bp, Homo sapien
aatcttcataattactgccccacat

SEQ ID NO: 935508 - DNA, 25 bp, Homo sapien
gctgaaagcttacaatcttcataat

SEQ ID NO: 935509 - DNA, 25 bp, Homo sapien
aaagaaggacttgattcccggcaat

SEQ ID NO: 935510 - DNA, 25 bp, Homo sapien
tgagcattcccgaaatccagcttgc

SEQ ID NO: 935511 - DNA, 25 bp, Homo sapien
ccagcttgctgaacgcgcagatgca

SEQ ID NO: 935512 - DNA, 25 bp, Homo sapien
gttaaaacagtcttcgtggccgcag

SEQ ID NO: 935513 - DNA, 25 bp, Homo sapien
ttctctgtccgccaagaaggtccgg

SEQ ID NO: 935514 - DNA, 25 bp, Homo sapien
tcagcgtggcttgcccaatggagca

SEQ ID NO: 935515 - DNA, 25 bp, Homo sapien
tcttaggtggatccctcagcgtggc

SEQ ID NO: 935516 - DNA, 25 bp, Homo sapien
aaagaaccgtttggcaagctgcaac

SEQ ID NO: 935517 - DNA, 25 bp, Homo sapien
agtggctcagttagtagcagggact

SEQ ID NO: 935518 - DNA, 25 bp, Homo sapien
tttttcaagacagactcgcttgtca

SEQ ID NO: 935519 - DNA, 25 bp, Homo sapien
tcaagtacacctcgtgcctgagcct

SEQ ID NO: 935520 - DNA, 25 bp, Homo sapien
gacatatagtgcattcttgtttaga

SEQ ID NO: 935521 - DNA, 25 bp, Homo sapien
ctatgacaggatttcaaggacttta

SEQ ID NO: 935522 - DNA, 25 bp, Homo sapien
gggaacactgtaatctaattcagaa

SEQ ID NO: 935523 - DNA, 25 bp, Homo sapien
tgtatttgttgagtcagtgaattcc

SEQ ID NO: 935524 - DNA, 25 bp, Homo sapien
gtttgctgtactttcgtatgcttgg

SEQ ID NO: 935525 - DNA, 25 bp, Homo sapien
tgttgaagatcaagcagccaaaggc

SEQ ID NO: 935526 - DNA, 25 bp, Homo sapien
cattaaaggagccacgagttcagaa

SEQ ID NO: 935527 - DNA, 25 bp, Homo sapien
cctaatggaggtgcatcggttatcc

SEQ ID NO: 935528 - DNA, 25 bp, Homo sapien
aactctgcagctttctacgtgatgg

SEQ ID NO: 935529 - DNA, 25 bp, Homo sapien
gtttaacattgtcagcagtgtcagg

SEQ ID NO: 935530 - DNA, 25 bp, Homo sapien
gatgggtgctcaagttatagtttcc

SEQ ID NO: 935531 - DNA, 25 bp, Homo sapien
taggacaacattctagtttggaagg

SEQ ID NO: 935532 - DNA, 25 bp, Homo sapien
tagtctggagattggccagttctca

SEQ ID NO: 935533 - DNA, 25 bp, Homo sapien
cggagtagagtctgtattactttac

SEQ ID NO: 935534 - DNA, 25 bp, Homo sapien
ctgtacattctggttacaagggaga

SEQ ID NO: 935535 - DNA, 25 bp, Homo sapien
tatttagcaatataatcggagtaga

SEQ ID NO: 935536 - DNA, 25 bp, Homo sapien
tacaagggagagacttatacttttg

SEQ ID NO: 935537 - DNA, 25 bp, Homo sapien
taaggaagagtgatccctgggaaga

SEQ ID NO: 935538 - DNA, 25 bp, Homo sapien
aaaacagtgtcaggcattgtgtcaa

SEQ ID NO: 935539 - DNA, 25 bp, Homo sapien
tcacttcagggtatacaacccatgg

SEQ ID NO: 935540 - DNA, 25 bp, Homo sapien
gagaacctgttaggtttccagagga

SEQ ID NO: 935541 - DNA, 25 bp, Homo sapien
cagaggaggacacttctcagaatac

SEQ ID NO: 935542 - DNA, 25 bp, Homo sapien
cattcgctatgccaggattcagcta

SEQ ID NO: 935543 - DNA, 25 bp, Homo sapien
gaatacagctactcatgaaacaggc

SEQ ID NO: 935544 - DNA, 25 bp, Homo sapien
caagacagtttcagctgtatgcagt

SEQ ID NO: 935545 - DNA, 25 bp, Homo sapien
tttgtggtacctcttatctctcagg

SEQ ID NO: 935546 - DNA, 25 bp, Homo sapien
gacaatgactcaactgccatataga

SEQ ID NO: 935547 - DNA, 25 bp, Homo sapien
taaaataagggcaatgacaatgact

SEQ ID NO: 935548 - DNA, 25 bp, Homo sapien
tagttacgtggccagattacatagc

SEQ ID NO: 935549 - DNA, 25 bp, Homo sapien
tcagtggaatctgctacagtgcttc

SEQ ID NO: 935550 - DNA, 25 bp, Homo sapien
cgtattccatactcaggatagctgg

SEQ ID NO: 935551 - DNA, 25 bp, Homo sapien
gtcaccaaggctgttgaccttaaat

SEQ ID NO: 935552 - DNA, 25 bp, Homo sapien
taagacatcgtttctatatggtcat

SEQ ID NO: 935553 - DNA, 25 bp, Homo sapien
tcaccaatcctgttttatggaagta

SEQ ID NO: 935554 - DNA, 25 bp, Homo sapien
taagctgtaggttgactagaagtcc

SEQ ID NO: 935555 - DNA, 25 bp, Homo sapien
aaggatctcaataactcaaatgctg

SEQ ID NO: 935556 - DNA, 25 bp, Homo sapien
tgaagcttgacagattcagaacact

SEQ ID NO: 935557 - DNA, 25 bp, Homo sapien
tatccgagttctgttaaagccccag

SEQ ID NO: 935558 - DNA, 25 bp, Homo sapien
cacagagtgcgaggcagaaggctaa

SEQ ID NO: 935559 - DNA, 25 bp, Homo sapien
ggaatgaagacataggatagattca

SEQ ID NO: 935560 - DNA, 25 bp, Homo sapien
ggatagattcatggtagtaaactgt

SEQ ID NO: 935561 - DNA, 25 bp, Homo sapien
tgaaaagccaggtgagtagtactct

SEQ ID NO: 935562 - DNA, 25 bp, Homo sapien
tgtgatccatgtcgagggtcaaagc

SEQ ID NO: 935563 - DNA, 25 bp, Homo sapien
agttccaaggtgctttctcatccag

SEQ ID NO: 935564 - DNA, 25 bp, Homo sapien
cagccattttcacaatcagcaggac

SEQ ID NO: 935565 - DNA, 25 bp, Homo sapien
gaggctgttgcaggatcggaaaaaa

SEQ ID NO: 935566 - DNA, 25 bp, Homo sapien
aaacagtttaaagaggctgttgcag

SEQ ID NO: 935567 - DNA, 25 bp, Homo sapien
ttaaacagtttaaagaggctgttgc

SEQ ID NO: 935568 - DNA, 25 bp, Homo sapien
ttgcaggatcggaaaaaaggaaata

SEQ ID NO: 935569 - DNA, 25 bp, Homo sapien
atcacttccattcctaatgaacaaa

SEQ ID NO: 935570 - DNA, 25 bp, Homo sapien
cttccattcctaatgaacaaaactg

SEQ ID NO: 935571 - DNA, 25 bp, Homo sapien
aagtcaagattgttttgataccaga

SEQ ID NO: 935572 - DNA, 25 bp, Homo sapien
tcaagattgttttgataccagaaaa

SEQ ID NO: 935573 - DNA, 25 bp, Homo sapien
cctggaacttcaggacgctcctaaa

SEQ ID NO: 935574 - DNA, 25 bp, Homo sapien
tctgcttacaacttagctcatctgg

SEQ ID NO: 935575 - DNA, 25 bp, Homo sapien
tgagtcgcttttgaaaagcccgtgc

SEQ ID NO: 935576 - DNA, 25 bp, Homo sapien
ccttggccaaaggaacagcgttctg

SEQ ID NO: 935577 - DNA, 25 bp, Homo sapien
tccgcggtaattggaccatttgtcc

SEQ ID NO: 935578 - DNA, 25 bp, Homo sapien
caaacgactgcggtagaggatctct

SEQ ID NO: 935579 - DNA, 25 bp, Homo sapien
taccctataggtagagaggacgcca

SEQ ID NO: 935580 - DNA, 25 bp, Homo sapien
gagagggacgcgaagatcagcaaat

SEQ ID NO: 935581 - DNA, 25 bp, Homo sapien
ggttttaatggatttcgtgtggaga

SEQ ID NO: 935582 - DNA, 25 bp, Homo sapien
ccatctgtgtagctgtatcgtagac

SEQ ID NO: 935583 - DNA, 25 bp, Homo sapien
aatggatttcgtgtggagatgtgta

SEQ ID NO: 935584 - DNA, 25 bp, Homo sapien
tgtatcgtagaccaccagtgaagaa

SEQ ID NO: 935585 - DNA, 25 bp, Homo sapien
cctgtagcggttgccagatacagca

SEQ ID NO: 935586 - DNA, 25 bp, Homo sapien
caatcattggcctgtagcggttgcc

SEQ ID NO: 935587 - DNA, 25 bp, Homo sapien
aaggaagcaatcattggcctgtagc

SEQ ID NO: 935588 - DNA, 25 bp, Homo sapien
tcattggcctgtagcggttgccaga

SEQ ID NO: 935589 - DNA, 25 bp, Homo sapien
acttggaatccgctgttcaagggca

SEQ ID NO: 935590 - DNA, 25 bp, Homo sapien
gaacttggaatccgctgttcaaggg

SEQ ID NO: 935591 - DNA, 25 bp, Homo sapien
aagaacttggaatccgctgttcaag

SEQ ID NO: 935592 - DNA, 25 bp, Homo sapien
actgaagaacttggaatccgctgtt

SEQ ID NO: 935593 - DNA, 25 bp, Homo sapien
cacaacgtcctccttcacatcccgc

SEQ ID NO: 935594 - DNA, 25 bp, Homo sapien
cccacaacgtcctccttcacatccc

SEQ ID NO: 935595 - DNA, 25 bp, Homo sapien
tcacatcccgcttggattgataccc

SEQ ID NO: 935596 - DNA, 25 bp, Homo sapien
cacatcccgcttggattgatacccc

SEQ ID NO: 935597 - DNA, 25 bp, Homo sapien
ttcagcggtatgcaacagtacttac

SEQ ID NO: 935598 - DNA, 25 bp, Homo sapien
gcttttattccaggatgtcatggtt

SEQ ID NO: 935599 - DNA, 25 bp, Homo sapien
taatagtagcagtgcaatcccaggt

SEQ ID NO: 935600 - DNA, 25 bp, Homo sapien
tacaaacattggtcctttcagacca

SEQ ID NO: 935601 - DNA, 25 bp, Homo sapien
tgtaattgtccattgcacatgtgtg

SEQ ID NO: 935602 - DNA, 25 bp, Homo sapien
cattaaagtcacctgagtatctgac

SEQ ID NO: 935603 - DNA, 25 bp, Homo sapien
cattctaatgatttgaagtggccca

SEQ ID NO: 935604 - DNA, 25 bp, Homo sapien
caaacttctttagaggtgtgtgtgc

SEQ ID NO: 935605 - DNA, 25 bp, Homo sapien
taactactcttattgcttctatctg

SEQ ID NO: 935606 - DNA, 25 bp, Homo sapien
acttttatctgcacacccgttttgg

SEQ ID NO: 935607 - DNA, 25 bp, Homo sapien
tggcaaatgtgatcctgtcaacaaa

SEQ ID NO: 935608 - DNA, 25 bp, Homo sapien
gtagccatccaaatcattagtgagc

SEQ ID NO: 935609 - DNA, 25 bp, Homo sapien
acagaagaagtctgctgcaaaggag

SEQ ID NO: 935610 - DNA, 25 bp, Homo sapien
actacaggtctgcacgactacgcct

SEQ ID NO: 935611 - DNA, 25 bp, Homo sapien
tgcctggcctatctggtagtatttc

SEQ ID NO: 935612 - DNA, 25 bp, Homo sapien
caggtctgcacgactacgcctggct

SEQ ID NO: 935613 - DNA, 25 bp, Homo sapien
aacttttgaggaaggattaatacat

SEQ ID NO: 935614 - DNA, 25 bp, Homo sapien
ggtatgcgttaaatataggattaag

SEQ ID NO: 935615 - DNA, 25 bp, Homo sapien
ttgaggaaggattaatacatttaac

SEQ ID NO: 935616 - DNA, 25 bp, Homo sapien
aacaaagttgtggtatgcgttaaat

SEQ ID NO: 935617 - DNA, 25 bp, Homo sapien
tgggtctcagctgattggcgtctgc

SEQ ID NO: 935618 - DNA, 25 bp, Homo sapien
tcagctgtgtgatttactgctttct

SEQ ID NO: 935619 - DNA, 25 bp, Homo sapien
agcaccacaccttgaggttccttca

SEQ ID NO: 935620 - DNA, 25 bp, Homo sapien
accttgaggttccttcagggctgct

SEQ ID NO: 935621 - DNA, 25 bp, Homo sapien
tccggtggtggttacaagtaacatc

SEQ ID NO: 935622 - DNA, 25 bp, Homo sapien
tgaccagaaagggaattgttcgagt

SEQ ID NO: 935623 - DNA, 25 bp, Homo sapien
agaaagggaattgttcgagttgtat

SEQ ID NO: 935624 - DNA, 25 bp, Homo sapien
ccagaaagggaattgttcgagttgt

SEQ ID NO: 935625 - DNA, 25 bp, Homo sapien
gatggcactatcctttttctggcac

SEQ ID NO: 935626 - DNA, 25 bp, Homo sapien
tagtaccacagataacacacaagag

SEQ ID NO: 935627 - DNA, 25 bp, Homo sapien
gaaaagcagcccatttggaagtaca

SEQ ID NO: 935628 - DNA, 25 bp, Homo sapien
gtacaagcacctctcacagcgttgg

SEQ ID NO: 935629 - DNA, 25 bp, Homo sapien
cagcatgattggttcttggtaaagg

SEQ ID NO: 935630 - DNA, 25 bp, Homo sapien
ttctgctataacaatcccagaggct

SEQ ID NO: 935631 - DNA, 25 bp, Homo sapien
tgaagaacaacagggatctttccct

SEQ ID NO: 935632 - DNA, 25 bp, Homo sapien
atccttgtatccttacacggtggaa

SEQ ID NO: 935633 - DNA, 25 bp, Homo sapien
tcaaagagaaatgtaagcggctggg

SEQ ID NO: 935634 - DNA, 25 bp, Homo sapien
cctataacatatctcagtgtgagca

SEQ ID NO: 935635 - DNA, 25 bp, Homo sapien
tctgccagtctagcatactggaagc

SEQ ID NO: 935636 - DNA, 25 bp, Homo sapien
tggcagatcacttaacttacaatgg

SEQ ID NO: 935637 - DNA, 25 bp, Homo sapien
aatagaagccattgctcagcaccgt

SEQ ID NO: 935638 - DNA, 25 bp, Homo sapien
catcaatgccgtgaacttgccttac

SEQ ID NO: 935639 - DNA, 25 bp, Homo sapien
tatataacaggtcaacaagtgctct

SEQ ID NO: 935640 - DNA, 25 bp, Homo sapien
tgatatccagatacttgagatcctg

SEQ ID NO: 935641 - DNA, 25 bp, Homo sapien
cagtggtcagcgattggtgccttgc

SEQ ID NO: 935642 - DNA, 25 bp, Homo sapien
tctgtgggccgtaactcagtggtca

SEQ ID NO: 935643 - DNA, 25 bp, Homo sapien
catgagagctttgcccagtagatgc

SEQ ID NO: 935644 - DNA, 25 bp, Homo sapien
tatgtgcctgcaagtagcctgtagg

SEQ ID NO: 935645 - DNA, 25 bp, Homo sapien
tttgaatttaggacacagtgttagc

SEQ ID NO: 935646 - DNA, 25 bp, Homo sapien
ctgcaaatttgaatttaggacacag

SEQ ID NO: 935647 - DNA, 25 bp, Homo sapien
ttaggacacagtgttagcaggagga

SEQ ID NO: 935648 - DNA, 25 bp, Homo sapien
gcaaatttgaatttaggacacagtg

SEQ ID NO: 935649 - DNA, 25 bp, Homo sapien
ctttgtgtttaagcatatgacaatt

SEQ ID NO: 935650 - DNA, 25 bp, Homo sapien
tttgcattcagacagatttcctggt

SEQ ID NO: 935651 - DNA, 25 bp, Homo sapien
agatttcctggtgacctggagtagc

SEQ ID NO: 935652 - DNA, 25 bp, Homo sapien
ctttgcattcagacagatttcctgg

SEQ ID NO: 935653 - DNA, 25 bp, Homo sapien
tttcctggtgacctggagtagccat

SEQ ID NO: 935654 - DNA, 25 bp, Homo sapien
cctgccctgaaagcagatgcttcat

SEQ ID NO: 935655 - DNA, 25 bp, Homo sapien
gatgggagcgtgtccatgtcggtga

SEQ ID NO: 935656 - DNA, 25 bp, Homo sapien
aggtgtgccacccttcttaggagcc

SEQ ID NO: 935657 - DNA, 25 bp, Homo sapien
agcgtgtccatgtcggtgagaaggg

SEQ ID NO: 935658 - DNA, 25 bp, Homo sapien
tctaaatccaggcagataaaagtcc

SEQ ID NO: 935659 - DNA, 25 bp, Homo sapien
gatctaagccaactccataagcctg

SEQ ID NO: 935660 - DNA, 25 bp, Homo sapien
tcaataggacctggcttctaaatcc

SEQ ID NO: 935661 - DNA, 25 bp, Homo sapien
cagagtggaggacttaggatctaag

SEQ ID NO: 935662 - DNA, 25 bp, Homo sapien
ctctgagtgagttccggctttctgc

SEQ ID NO: 935663 - DNA, 25 bp, Homo sapien
ctgagtgagttccggctttctgcat

SEQ ID NO: 935664 - DNA, 25 bp, Homo sapien
tctgagtgagttccggctttctgca

SEQ ID NO: 935665 - DNA, 25 bp, Homo sapien
catcaacatcggcttttctgggctc

SEQ ID NO: 935666 - DNA, 25 bp, Homo sapien
ggctcactgattagttcatgctgta

SEQ ID NO: 935667 - DNA, 25 bp, Homo sapien
gtatgaaaagtgctttaccataatt

SEQ ID NO: 935668 - DNA, 25 bp, Homo sapien
ccgcaggtggcatttcatgccataa

SEQ ID NO: 935669 - DNA, 25 bp, Homo sapien
atgaatttctctgctcaggtaatag

SEQ ID NO: 935670 - DNA, 25 bp, Homo sapien
tccctgaggtatatataagtttgat

SEQ ID NO: 935671 - DNA, 25 bp, Homo sapien
ctccctgaggtatatataagtttga

SEQ ID NO: 935672 - DNA, 25 bp, Homo sapien
gaatttctctgctcaggtaatagga

SEQ ID NO: 935673 - DNA, 25 bp, Homo sapien
tcagggcccatgcaagcgtcagttt

SEQ ID NO: 935674 - DNA, 25 bp, Homo sapien
aatacacatttgaggcgattcctgg

SEQ ID NO: 935675 - DNA, 25 bp, Homo sapien
gagttgcctgggtgatctgctacca

SEQ ID NO: 935676 - DNA, 25 bp, Homo sapien
cgattcctggcatgtgtgtacccca

SEQ ID NO: 935677 - DNA, 25 bp, Homo sapien
gcctgggacgacagaaaagcctctt

SEQ ID NO: 935678 - DNA, 25 bp, Homo sapien
catgtcatgggtgaacggttccgaa

SEQ ID NO: 935679 - DNA, 25 bp, Homo sapien
gctgctgctaacaccgaggatggat

SEQ ID NO: 935680 - DNA, 25 bp, Homo sapien
cccagggaggctattacgtgtgacc

SEQ ID NO: 935681 - DNA, 25 bp, Homo sapien
gtctgcgcgttgatgcgatgccgcc

SEQ ID NO: 935682 - DNA, 25 bp, Homo sapien
cagtttcagcttgctccgtgcagtt

SEQ ID NO: 935683 - DNA, 25 bp, Homo sapien
gcctcgtggatctatgcgtgtgaca

SEQ ID NO: 935684 - DNA, 25 bp, Homo sapien
cgtgagacggaacctaagaagaact

SEQ ID NO: 935685 - DNA, 25 bp, Homo sapien
cgtgttcccgtttgatatcccaagt

SEQ ID NO: 935686 - DNA, 25 bp, Homo sapien
tggccgcaggctgaaagctcctttg

SEQ ID NO: 935687 - DNA, 25 bp, Homo sapien
ccgaggcgccgggtttgaggacgct

SEQ ID NO: 935688 - DNA, 25 bp, Homo sapien
tgatggagagaatggagcgaggccg

SEQ ID NO: 935689 - DNA, 25 bp, Homo sapien
ggcagcgggagaactccagggggcg

SEQ ID NO: 935690 - DNA, 25 bp, Homo sapien
ctacttccggcagacctggggcggc

SEQ ID NO: 935691 - DNA, 25 bp, Homo sapien
cagcgggagaactccagggggcggg

SEQ ID NO: 935692 - DNA, 25 bp, Homo sapien
cggcggcagcgggagaactccaggg

SEQ ID NO: 935693 - DNA, 25 bp, Homo sapien
agtggcgcacgcaggacgtccccgt

SEQ ID NO: 935694 - DNA, 25 bp, Homo sapien
acaggcgttagcagtggcgcacgca

SEQ ID NO: 935695 - DNA, 25 bp, Homo sapien
ttagcagtggcgcacgcaggacgtc

SEQ ID NO: 935696 - DNA, 25 bp, Homo sapien
aagcacaggcgttagcagtggcgca

SEQ ID NO: 935697 - DNA, 25 bp, Homo sapien
tgttctcgggcctgatagtcctgta

SEQ ID NO: 935698 - DNA, 25 bp, Homo sapien
taaatgggtctccaactcgagtaga

SEQ ID NO: 935699 - DNA, 25 bp, Homo sapien
tgtatagacagctcacttgacagcc

SEQ ID NO: 935700 - DNA, 25 bp, Homo sapien
gagtagaccttggaatcaccagggt

SEQ ID NO: 935701 - DNA, 25 bp, Homo sapien
tctgctagtctgattgagaaatgag

SEQ ID NO: 935702 - DNA, 25 bp, Homo sapien
gagaaatgagggctcatgtcttctt

SEQ ID NO: 935703 - DNA, 25 bp, Homo sapien
tgtctttactgtctgctagtctgat

SEQ ID NO: 935704 - DNA, 25 bp, Homo sapien
ccatctaaagtgattgtcagaagca

SEQ ID NO: 935705 - DNA, 25 bp, Homo sapien
tactttgcatctgctctttctgaag

SEQ ID NO: 935706 - DNA, 25 bp, Homo sapien
gcattgtttccaagtatggagccat

SEQ ID NO: 935707 - DNA, 25 bp, Homo sapien
tctgaagcattgtttccaagtatgg

SEQ ID NO: 935708 - DNA, 25 bp, Homo sapien
aattgcagaacaaatggttttactt

SEQ ID NO: 935709 - DNA, 25 bp, Homo sapien
ttttctagaatcgtgttcttcttct

SEQ ID NO: 935710 - DNA, 25 bp, Homo sapien
aagcttttctagaatcgtgttcttc

SEQ ID NO: 935711 - DNA, 25 bp, Homo sapien
tctagaatcgtgttcttcttcttca

SEQ ID NO: 935712 - DNA, 25 bp, Homo sapien
agcttttctagaatcgtgttcttct

SEQ ID NO: 935713 - DNA, 25 bp, Homo sapien
cagattgttctgtatatgggcctta

SEQ ID NO: 935714 - DNA, 25 bp, Homo sapien
tctgctagatgcagagagtagggaa

SEQ ID NO: 935715 - DNA, 25 bp, Homo sapien
tctagacttctagagggaagtacag

SEQ ID NO: 935716 - DNA, 25 bp, Homo sapien
tagggaagagtatcccagaaagtgg

SEQ ID NO: 935717 - DNA, 25 bp, Homo sapien
gactccacatggattctgtagttga

SEQ ID NO: 935718 - DNA, 25 bp, Homo sapien
tctgtgcctcctgcgtggtatttgg

SEQ ID NO: 935719 - DNA, 25 bp, Homo sapien
catgatgcgcttctgcatttgcggg

SEQ ID NO: 935720 - DNA, 25 bp, Homo sapien
caggactaaggcgtccactgtgcag

SEQ ID NO: 935721 - DNA, 25 bp, Homo sapien
cagaggtgtgtgttagatccctggc

SEQ ID NO: 935722 - DNA, 25 bp, Homo sapien
ggcatcagaggtgtgtgttagatcc

SEQ ID NO: 935723 - DNA, 25 bp, Homo sapien
tcagaggtgtgtgttagatccctgg

SEQ ID NO: 935724 - DNA, 25 bp, Homo sapien
catcagaggtgtgtgttagatccct

SEQ ID NO: 935725 - DNA, 25 bp, Homo sapien
cctatgatgtccttagctccagctg

SEQ ID NO: 935726 - DNA, 25 bp, Homo sapien
agcgcaattggggtcacaggcccct

SEQ ID NO: 935727 - DNA, 25 bp, Homo sapien
aattggggtcacaggcccctctttg

SEQ ID NO: 935728 - DNA, 25 bp, Homo sapien
gtggagggcctatgatgtccttagc

SEQ ID NO: 935729 - DNA, 25 bp, Homo sapien
tctagatttggagtatcagagctgg

SEQ ID NO: 935730 - DNA, 25 bp, Homo sapien
tgctctgaaggcctcggactggact

SEQ ID NO: 935731 - DNA, 25 bp, Homo sapien
ctcttggaattactcccgataaata

SEQ ID NO: 935732 - DNA, 25 bp, Homo sapien
cggactggactgaatctcttggaat

SEQ ID NO: 935733 - DNA, 25 bp, Homo sapien
taacggatgtacagacaatgtcttc

SEQ ID NO: 935734 - DNA, 25 bp, Homo sapien
tcttcacggtcaacttttcacatcg

SEQ ID NO: 935735 - DNA, 25 bp, Homo sapien
caaagaaattttaacggatgtacag

SEQ ID NO: 935736 - DNA, 25 bp, Homo sapien
cacatcgtcgtttgcttaggaaaga

SEQ ID NO: 935737 - DNA, 25 bp, Homo sapien
cttggctgatgtctattgtactgct

SEQ ID NO: 935738 - DNA, 25 bp, Homo sapien
gatgtctattgtactgctcagccat

SEQ ID NO: 935739 - DNA, 25 bp, Homo sapien
ggctgatgtctattgtactgctcag

SEQ ID NO: 935740 - DNA, 25 bp, Homo sapien
ctgatgtctattgtactgctcagcc

SEQ ID NO: 935741 - DNA, 25 bp, Homo sapien
gcagcactggcatattagactacag

SEQ ID NO: 935742 - DNA, 25 bp, Homo sapien
tagagaattttcgtggcagcccctt

SEQ ID NO: 935743 - DNA, 25 bp, Homo sapien
tagatgaaccagaagcaactacctg

SEQ ID NO: 935744 - DNA, 25 bp, Homo sapien
caggagaccgtgctagacatggcat

SEQ ID NO: 935745 - DNA, 25 bp, Homo sapien
ggctatgagacttcagacgactgag

SEQ ID NO: 935746 - DNA, 25 bp, Homo sapien
agcatgtgcccaaccctgaaggtgg

SEQ ID NO: 935747 - DNA, 25 bp, Homo sapien
tgtggacactgataactatgctgca

SEQ ID NO: 935748 - DNA, 25 bp, Homo sapien
tctgattgccggacttgggaaagga

SEQ ID NO: 935749 - DNA, 25 bp, Homo sapien
aacttggtgcatcactgagtatgga

SEQ ID NO: 935750 - DNA, 25 bp, Homo sapien
tacccatgatgccaggtggagtttg

SEQ ID NO: 935751 - DNA, 25 bp, Homo sapien
tctagggctagaaggtctggcaact

SEQ ID NO: 935752 - DNA, 25 bp, Homo sapien
ctgattggataactgccacagagca

SEQ ID NO: 935753 - DNA, 25 bp, Homo sapien
ataattagacaagctactatgaaag

SEQ ID NO: 935754 - DNA, 25 bp, Homo sapien
atgaaagagaaagcattatacatca

SEQ ID NO: 935755 - DNA, 25 bp, Homo sapien
attagacaagctactatgaaagaga

SEQ ID NO: 935756 - DNA, 25 bp, Homo sapien
gaaagagaaagcattatacatcagt

SEQ ID NO: 935757 - DNA, 25 bp, Homo sapien
tatggggacccatgcttgtcacttt

SEQ ID NO: 935758 - DNA, 25 bp, Homo sapien
cgtgtctttagggtggcccaataag

SEQ ID NO: 935759 - DNA, 25 bp, Homo sapien
gcagattttacaaaccgtgtcttta

SEQ ID NO: 935760 - DNA, 25 bp, Homo sapien
gcttgtcacttttcatgcacatgga

SEQ ID NO: 935761 - DNA, 25 bp, Homo sapien
tagaatcaagattgcttagtatgtt

SEQ ID NO: 935762 - DNA, 25 bp, Homo sapien
tagagcagttgaataaaaattatct

SEQ ID NO: 935763 - DNA, 25 bp, Homo sapien
aggggaggaacagcctaggaccaat

SEQ ID NO: 935764 - DNA, 25 bp, Homo sapien
taacagaaccagtaacaaagatata

SEQ ID NO: 935765 - DNA, 25 bp, Homo sapien
gctttggcatgtagcaccaacttct

SEQ ID NO: 935766 - DNA, 25 bp, Homo sapien
cacattgtgaactacagggccagac

SEQ ID NO: 935767 - DNA, 25 bp, Homo sapien
agggccagactctccgtaatgagga

SEQ ID NO: 935768 - DNA, 25 bp, Homo sapien
tccagctgagaggttcgaagccttt

SEQ ID NO: 935769 - DNA, 25 bp, Homo sapien
atcatttctctaagactgtgtgtgt

SEQ ID NO: 935770 - DNA, 25 bp, Homo sapien
ggattttcttagtttccatatttga

SEQ ID NO: 935771 - DNA, 25 bp, Homo sapien
aaatatagagtcctggactgaactg

SEQ ID NO: 935772 - DNA, 25 bp, Homo sapien
agatacgtccggcaatccccaggat

SEQ ID NO: 935773 - DNA, 25 bp, Homo sapien
ccttatcattttccgactcctcttg

SEQ ID NO: 935774 - DNA, 25 bp, Homo sapien
taactatgaaagcaactcctccttc

SEQ ID NO: 935775 - DNA, 25 bp, Homo sapien
tatcattttccgactcctcttgcag

SEQ ID NO: 935776 - DNA, 25 bp, Homo sapien
gtctttcaaggacttaactatgaaa

SEQ ID NO: 935777 - DNA, 25 bp, Homo sapien
cgcatttaaggtctttgagtttaga

SEQ ID NO: 935778 - DNA, 25 bp, Homo sapien
catttgaactcagggtatagatctg

SEQ ID NO: 935779 - DNA, 25 bp, Homo sapien
tagctctctctgtacgctttgaggg

SEQ ID NO: 935780 - DNA, 25 bp, Homo sapien
tgcacaagatgctggaaacaacgca

SEQ ID NO: 935781 - DNA, 25 bp, Homo sapien
cagatgccctgaaaggtcctacatt

SEQ ID NO: 935782 - DNA, 25 bp, Homo sapien
tttaagtggtgctagatctcctcgc

SEQ ID NO: 935783 - DNA, 25 bp, Homo sapien
tttcctgggcataaacatacgtgtg

SEQ ID NO: 935784 - DNA, 25 bp, Homo sapien
caaatgaacagtggactatcagtca

SEQ ID NO: 935785 - DNA, 25 bp, Homo sapien
tatatttaggtagaagtggagaact

SEQ ID NO: 935786 - DNA, 25 bp, Homo sapien
agcctcactcgtcttcctccagatt

SEQ ID NO: 935787 - DNA, 25 bp, Homo sapien
catattctgggacctgtcccgtgcc

SEQ ID NO: 935788 - DNA, 25 bp, Homo sapien
tattctgggacctgtcccgtgcctc

SEQ ID NO: 935789 - DNA, 25 bp, Homo sapien
atttgatgagttctattgctctggc

SEQ ID NO: 935790 - DNA, 25 bp, Homo sapien
tgtgtttagtctggcccacttgtac

SEQ ID NO: 935791 - DNA, 25 bp, Homo sapien
tcttgtgtttagtctggcccacttg

SEQ ID NO: 935792 - DNA, 25 bp, Homo sapien
ttctggcttatcaccacccttctct

SEQ ID NO: 935793 - DNA, 25 bp, Homo sapien
tctcttgtgtttagtctggcccact

SEQ ID NO: 935794 - DNA, 25 bp, Homo sapien
ttccttcgtaaaaggcatggagcag

SEQ ID NO: 935795 - DNA, 25 bp, Homo sapien
atctctgtgagaggcttttcttttc

SEQ ID NO: 935796 - DNA, 25 bp, Homo sapien
cttcgtaaaaggcatggagcagggc

SEQ ID NO: 935797 - DNA, 25 bp, Homo sapien
aggtaatggatttgatctctgtgag

SEQ ID NO: 935798 - DNA, 25 bp, Homo sapien
ccaggcatctggacgaaatggtctt

SEQ ID NO: 935799 - DNA, 25 bp, Homo sapien
ctgaaggatgattaagagtgatggc

SEQ ID NO: 935800 - DNA, 25 bp, Homo sapien
tctttgggatggcttgtaaagaggc

SEQ ID NO: 935801 - DNA, 25 bp, Homo sapien
taagagtgatggctgagagacaacc

SEQ ID NO: 935802 - DNA, 25 bp, Homo sapien
ctgcgcaatcccatgtcctggttca

SEQ ID NO: 935803 - DNA, 25 bp, Homo sapien
catgtcctggttcatcaggtatctt

SEQ ID NO: 935804 - DNA, 25 bp, Homo sapien
ggtggtagaaataacagattcagcc

SEQ ID NO: 935805 - DNA, 25 bp, Homo sapien
tgcagacttggtggtagaaataaca

SEQ ID NO: 935806 - DNA, 25 bp, Homo sapien
cagacttggtggtagaaataacaga

SEQ ID NO: 935807 - DNA, 25 bp, Homo sapien
cttggtggtagaaataacagattca

SEQ ID NO: 935808 - DNA, 25 bp, Homo sapien
ccttcctccacgaatgctgaatcca

SEQ ID NO: 935809 - DNA, 25 bp, Homo sapien
cttcctccacgaatgctgaatccaa

SEQ ID NO: 935810 - DNA, 25 bp, Homo sapien
cccttcctccacgaatgctgaatcc

SEQ ID NO: 935811 - DNA, 25 bp, Homo sapien
ttcctccacgaatgctgaatccaaa

SEQ ID NO: 935812 - DNA, 25 bp, Homo sapien
gaggctgcctgtagtccaagggtgg

SEQ ID NO: 935813 - DNA, 25 bp, Homo sapien
tcacatcttgccttgctttcacttc

SEQ ID NO: 935814 - DNA, 25 bp, Homo sapien
gaggctgtcggatgtctggtttcac

SEQ ID NO: 935815 - DNA, 25 bp, Homo sapien
tagtccgacagagggtactgcctgg

SEQ ID NO: 935816 - DNA, 25 bp, Homo sapien
catttgctttatggggcttttctct

SEQ ID NO: 935817 - DNA, 25 bp, Homo sapien
gcatcatttgctttatggggctttt

SEQ ID NO: 935818 - DNA, 25 bp, Homo sapien
tttctcttccttgcgtatatttaaa

SEQ ID NO: 935819 - DNA, 25 bp, Homo sapien
cttccttgcgtatatttaaaaacat

SEQ ID NO: 935820 - DNA, 25 bp, Homo sapien
ctattttcgtgtccttgcagctgaa

SEQ ID NO: 935821 - DNA, 25 bp, Homo sapien
ctgagctgggtgccgaggtggggct

SEQ ID NO: 935822 - DNA, 25 bp, Homo sapien
tattttcgtgtccttgcagctgaag

SEQ ID NO: 935823 - DNA, 25 bp, Homo sapien
tctgagctgggtgccgaggtggggc

SEQ ID NO: 935824 - DNA, 25 bp, Homo sapien
tgcaggactcccatcaatgatgcgt

SEQ ID NO: 935825 - DNA, 25 bp, Homo sapien
ttttgcacagcgatctgcaggactc

SEQ ID NO: 935826 - DNA, 25 bp, Homo sapien
ggaatgatgcgaagggtgacactaa

SEQ ID NO: 935827 - DNA, 25 bp, Homo sapien
tggccattcactgctaggatccggt

SEQ ID NO: 935828 - DNA, 25 bp, Homo sapien
ctattattgggatgaatggtactca

SEQ ID NO: 935829 - DNA, 25 bp, Homo sapien
tattattgggatgaatggtactcat

SEQ ID NO: 935830 - DNA, 25 bp, Homo sapien
tctattattgggatgaatggtactc

SEQ ID NO: 935831 - DNA, 25 bp, Homo sapien
ttctattattgggatgaatggtact

SEQ ID NO: 935832 - DNA, 25 bp, Homo sapien
gggcacattaaggccactgcctggc

SEQ ID NO: 935833 - DNA, 25 bp, Homo sapien
gatggatgacggttccaagggttgg

SEQ ID NO: 935834 - DNA, 25 bp, Homo sapien
agaggtgaatcagggggcacattaa

SEQ ID NO: 935835 - DNA, 25 bp, Homo sapien
tcggagaacaagggttttgcaacca

SEQ ID NO: 935836 - DNA, 25 bp, Homo sapien
ccctggctacctcatggaacagaaa

SEQ ID NO: 935837 - DNA, 25 bp, Homo sapien
tactgtttgggcaatagtctccacc

SEQ ID NO: 935838 - DNA, 25 bp, Homo sapien
gacagggtaaataactgaaccagct

SEQ ID NO: 935839 - DNA, 25 bp, Homo sapien
tatcaggagtgttatggtcaaggac

SEQ ID NO: 935840 - DNA, 25 bp, Homo sapien
ccagtgatgcacttgcggataggga

SEQ ID NO: 935841 - DNA, 25 bp, Homo sapien
gagccagcagcgtgctgaccagtga

SEQ ID NO: 935842 - DNA, 25 bp, Homo sapien
agtcctgagctggaggattgcgagg

SEQ ID NO: 935843 - DNA, 25 bp, Homo sapien
cacttgcggatagggacagaagatg

SEQ ID NO: 935844 - DNA, 25 bp, Homo sapien
ttggtgaatccatcgtactgacaga

SEQ ID NO: 935845 - DNA, 25 bp, Homo sapien
tatgcttaaagattggatttatttc

SEQ ID NO: 935846 - DNA, 25 bp, Homo sapien
tctgcttttagtctatgcttaaaga

SEQ ID NO: 935847 - DNA, 25 bp, Homo sapien
ttaatcttggtgaatccatcgtact

SEQ ID NO: 935848 - DNA, 25 bp, Homo sapien
tattttcgtgtttccatacccaaca

SEQ ID NO: 935849 - DNA, 25 bp, Homo sapien
tttgggccaaatcacttcaacatga

SEQ ID NO: 935850 - DNA, 25 bp, Homo sapien
gctcctttattttcgtgtttccata

SEQ ID NO: 935851 - DNA, 25 bp, Homo sapien
attttcgtgtttccatacccaacat

SEQ ID NO: 935852 - DNA, 25 bp, Homo sapien
cctctcttctgttctactgcttgca

SEQ ID NO: 935853 - DNA, 25 bp, Homo sapien
ctctcttctgttctactgcttgcag

SEQ ID NO: 935854 - DNA, 25 bp, Homo sapien
tgcaggctgctgaatgagctctgga

SEQ ID NO: 935855 - DNA, 25 bp, Homo sapien
cttgcaggctgctgaatgagctctg

SEQ ID NO: 935856 - DNA, 25 bp, Homo sapien
gcctttgccaaattgtaaccgagga

SEQ ID NO: 935857 - DNA, 25 bp, Homo sapien
catagaaccttagagctggaggagc

SEQ ID NO: 935858 - DNA, 25 bp, Homo sapien
caaatatgggctatgactgtcacct

SEQ ID NO: 935859 - DNA, 25 bp, Homo sapien
gaaaaggtggccagttggaagacaa

SEQ ID NO: 935860 - DNA, 25 bp, Homo sapien
tggatccagactcaggcctgttcag

SEQ ID NO: 935861 - DNA, 25 bp, Homo sapien
aatgaccacatcactggtctgcagg

SEQ ID NO: 935862 - DNA, 25 bp, Homo sapien
ggatccagactcaggcctgttcagg

SEQ ID NO: 935863 - DNA, 25 bp, Homo sapien
gaagccctcattctctttgcggtga

SEQ ID NO: 935864 - DNA, 25 bp, Homo sapien
ttctcccgttctctgggcagggctc

SEQ ID NO: 935865 - DNA, 25 bp, Homo sapien
ttggtgtaggttgcgtagtcactgc

SEQ ID NO: 935866 - DNA, 25 bp, Homo sapien
gcctggacttctcccgttctctggg

SEQ ID NO: 935867 - DNA, 25 bp, Homo sapien
tggtgggtggatacagagcctggac

SEQ ID NO: 935868 - DNA, 25 bp, Homo sapien
tcctgcagcaggctccaggtacata

SEQ ID NO: 935869 - DNA, 25 bp, Homo sapien
cctgcagcaggctccaggtacatac

SEQ ID NO: 935870 - DNA, 25 bp, Homo sapien
cctcgattcctgcagcaggctccag

SEQ ID NO: 935871 - DNA, 25 bp, Homo sapien
gattcctgcagcaggctccaggtac

SEQ ID NO: 935872 - DNA, 25 bp, Homo sapien
aacatacacaagctcatctcctggg

SEQ ID NO: 935873 - DNA, 25 bp, Homo sapien
ggttgacctgcccattgcgggctgc

SEQ ID NO: 935874 - DNA, 25 bp, Homo sapien
aggcggccatctctgtcggctgagc

SEQ ID NO: 935875 - DNA, 25 bp, Homo sapien
catagcggtgggttttgccggctac

SEQ ID NO: 935876 - DNA, 25 bp, Homo sapien
tctcccccgaggattctgaagccaa

SEQ ID NO: 935877 - DNA, 25 bp, Homo sapien
ctcccccgaggattctgaagccaaa

SEQ ID NO: 935878 - DNA, 25 bp, Homo sapien
ctccgaagatgaacatccaattcct

SEQ ID NO: 935879 - DNA, 25 bp, Homo sapien
ccgaagatgaacatccaattcctta

SEQ ID NO: 935880 - DNA, 25 bp, Homo sapien
cctccgaagatgaacatccaattcc

SEQ ID NO: 935881 - DNA, 25 bp, Homo sapien
tccgaagatgaacatccaattcctt

SEQ ID NO: 935882 - DNA, 25 bp, Homo sapien
agccattttcccgtcttgtctcggt

SEQ ID NO: 935883 - DNA, 25 bp, Homo sapien
gccacagcgccaagcaagatatatt

SEQ ID NO: 935884 - DNA, 25 bp, Homo sapien
cagcgccaagcaagatatatttatt

SEQ ID NO: 935885 - DNA, 25 bp, Homo sapien
cattttcccgtcttgtctcggtctc

SEQ ID NO: 935886 - DNA, 25 bp, Homo sapien
aatccattcgaaaactggtcctggg

SEQ ID NO: 935887 - DNA, 25 bp, Homo sapien
ggaatccattcgaaaactggtcctg

SEQ ID NO: 935888 - DNA, 25 bp, Homo sapien
gaggaatccattcgaaaactggtcc

SEQ ID NO: 935889 - DNA, 25 bp, Homo sapien
cagaggaatccattcgaaaactggt

SEQ ID NO: 935890 - DNA, 25 bp, Homo sapien
catgttctgtttcacgtggccgtag

SEQ ID NO: 935891 - DNA, 25 bp, Homo sapien
ctgtcatgttctgtttcacgtggcc

SEQ ID NO: 935892 - DNA, 25 bp, Homo sapien
cgtggccgtagtatcctatgatcat

SEQ ID NO: 935893 - DNA, 25 bp, Homo sapien
tctgtttcacgtggccgtagtatcc

SEQ ID NO: 935894 - DNA, 25 bp, Homo sapien
cagcggcacagggagagcaccgatg

SEQ ID NO: 935895 - DNA, 25 bp, Homo sapien
gagtcaggatgtttgctgtccctgc

SEQ ID NO: 935896 - DNA, 25 bp, Homo sapien
gctgatgaaagcaggaaggggttgt

SEQ ID NO: 935897 - DNA, 25 bp, Homo sapien
agagcaccgatgaggggcccacggt

SEQ ID NO: 935898 - DNA, 25 bp, Homo sapien
gcggtatggccggagcagataaact

SEQ ID NO: 935899 - DNA, 25 bp, Homo sapien
taaatggccctagatttctcgtaga

SEQ ID NO: 935900 - DNA, 25 bp, Homo sapien
gcttccgtgggtcaaaggcctctgt

SEQ ID NO: 935901 - DNA, 25 bp, Homo sapien
tctcgtagagctcatatggatcagg

SEQ ID NO: 935902 - DNA, 25 bp, Homo sapien
tatactggcgcagacattttagcat

SEQ ID NO: 935903 - DNA, 25 bp, Homo sapien
gcttcctatactggcgcagacattt

SEQ ID NO: 935904 - DNA, 25 bp, Homo sapien
ttcctatactggcgcagacatttta

SEQ ID NO: 935905 - DNA, 25 bp, Homo sapien
cctatactggcgcagacattttagc

SEQ ID NO: 935906 - DNA, 25 bp, Homo sapien
ggctttggagttttccatggagaaa

SEQ ID NO: 935907 - DNA, 25 bp, Homo sapien
aggctttggagttttccatggagaa

SEQ ID NO: 935908 - DNA, 25 bp, Homo sapien
ctttggagttttccatggagaaaag

SEQ ID NO: 935909 - DNA, 25 bp, Homo sapien
ttggagttttccatggagaaaagaa

SEQ ID NO: 935910 - DNA, 25 bp, Homo sapien
tggcacctgctcataccgaacctgg

SEQ ID NO: 935911 - DNA, 25 bp, Homo sapien
gaacctggtgcttcatcatagccga

SEQ ID NO: 935912 - DNA, 25 bp, Homo sapien
gagaaccacactttacagcccaaca

SEQ ID NO: 935913 - DNA, 25 bp, Homo sapien
ttcctaatggaattaacaagtcgag

SEQ ID NO: 935914 - DNA, 25 bp, Homo sapien
acccatggtaccctggctgcactct

SEQ ID NO: 935915 - DNA, 25 bp, Homo sapien
ttcttatctcatgcaccacctctga

SEQ ID NO: 935916 - DNA, 25 bp, Homo sapien
gaactgaccaatcttgccgtgtccc

SEQ ID NO: 935917 - DNA, 25 bp, Homo sapien
ttatctcatgcaccacctctgaaat

SEQ ID NO: 935918 - DNA, 25 bp, Homo sapien
tgttccccagaccatttgttctttc

SEQ ID NO: 935919 - DNA, 25 bp, Homo sapien
aaaatgctctccacttttaagagct

SEQ ID NO: 935920 - DNA, 25 bp, Homo sapien
gctctccacttttaagagctttctg

SEQ ID NO: 935921 - DNA, 25 bp, Homo sapien
cttaaaatgctctccacttttaaga

SEQ ID NO: 935922 - DNA, 25 bp, Homo sapien
cagacacagattcggaggatcccca

SEQ ID NO: 935923 - DNA, 25 bp, Homo sapien
gcaggtgtcataagagagagctcct

SEQ ID NO: 935924 - DNA, 25 bp, Homo sapien
tccaacccaagtgggagacaccaat

SEQ ID NO: 935925 - DNA, 25 bp, Homo sapien
aagtcactgcaggtgtcataagaga

SEQ ID NO: 935926 - DNA, 25 bp, Homo sapien
gaagaggaaacaattgacacaatga

SEQ ID NO: 935927 - DNA, 25 bp, Homo sapien
taggcaaatgcctgagtaggtattt

SEQ ID NO: 935928 - DNA, 25 bp, Homo sapien
gaagtgacaacatgaagaatggaag

SEQ ID NO: 935929 - DNA, 25 bp, Homo sapien
tgtaaactgtacatggataaagggt

SEQ ID NO: 935930 - DNA, 25 bp, Homo sapien
acaaatgcctggtgtttgctgtccg

SEQ ID NO: 935931 - DNA, 25 bp, Homo sapien
taagactttgtagagtgctgctcac

SEQ ID NO: 935932 - DNA, 25 bp, Homo sapien
tgctgtccgtttccaaacaaggaat

SEQ ID NO: 935933 - DNA, 25 bp, Homo sapien
tccaaacaaggaatcaacaatgtga

SEQ ID NO: 935934 - DNA, 25 bp, Homo sapien
agtgtcctgaacagcatcattccaa

SEQ ID NO: 935935 - DNA, 25 bp, Homo sapien
tgcagttcctgtagtagcagaagtg

SEQ ID NO: 935936 - DNA, 25 bp, Homo sapien
ctatgggtaattgttgctagtgcag

SEQ ID NO: 935937 - DNA, 25 bp, Homo sapien
ttcctgtagtagcagaagtgtcctg

SEQ ID NO: 935938 - DNA, 25 bp, Homo sapien
tctctctcactctttaagctttatt

SEQ ID NO: 935939 - DNA, 25 bp, Homo sapien
tttttctctctcactctttaagctt

SEQ ID NO: 935940 - DNA, 25 bp, Homo sapien
cctttaattcatgtttttctctctc

SEQ ID NO: 935941 - DNA, 25 bp, Homo sapien
tttctctctcactctttaagcttta

SEQ ID NO: 935942 - DNA, 25 bp, Homo sapien
aagtataatttcattcaactccaag

SEQ ID NO: 935943 - DNA, 25 bp, Homo sapien
taaagtataatttcattcaactcca

SEQ ID NO: 935944 - DNA, 25 bp, Homo sapien
ttaaagtataatttcattcaactcc

SEQ ID NO: 935945 - DNA, 25 bp, Homo sapien
gtataatttcattcaactccaagga

SEQ ID NO: 935946 - DNA, 25 bp, Homo sapien
tttattgctgagccagtgtttgtct

SEQ ID NO: 935947 - DNA, 25 bp, Homo sapien
ttttacccacatattttattgctga

SEQ ID NO: 935948 - DNA, 25 bp, Homo sapien
attttattgctgagccagtgtttgt

SEQ ID NO: 935949 - DNA, 25 bp, Homo sapien
ttttattgctgagccagtgtttgtc

SEQ ID NO: 935950 - DNA, 25 bp, Homo sapien
ttgtttcacccgctgtcctgtagga

SEQ ID NO: 935951 - DNA, 25 bp, Homo sapien
gcagggtcttcaggatcaaagggca

SEQ ID NO: 935952 - DNA, 25 bp, Homo sapien
gtagccacgacacaacaccaggttg

SEQ ID NO: 935953 - DNA, 25 bp, Homo sapien
cattgaccatcactggaggtggcct

SEQ ID NO: 935954 - DNA, 25 bp, Homo sapien
gtaagaaaaaaagagattgacaaca

SEQ ID NO: 935955 - DNA, 25 bp, Homo sapien
tgtaagaaaaaaagagattgacaac

SEQ ID NO: 935956 - DNA, 25 bp, Homo sapien
taagaaaaaaagagattgacaacat

SEQ ID NO: 935957 - DNA, 25 bp, Homo sapien
ctgtaagaaaaaaagagattgacaa

SEQ ID NO: 935958 - DNA, 25 bp, Homo sapien
tgaggtagagtgagtttgatgaagc

SEQ ID NO: 935959 - DNA, 25 bp, Homo sapien
ttcaaagtgcaagtgaggtagagtg

SEQ ID NO: 935960 - DNA, 25 bp, Homo sapien
ggtagagtgagtttgatgaagcagg

SEQ ID NO: 935961 - DNA, 25 bp, Homo sapien
tcaaagtgcaagtgaggtagagtga

SEQ ID NO: 935962 - DNA, 25 bp, Homo sapien
gtatcttccatcactcttcctgaca

SEQ ID NO: 935963 - DNA, 25 bp, Homo sapien
ttcaaaggtatcttccatcactctt

SEQ ID NO: 935964 - DNA, 25 bp, Homo sapien
aggtatcttccatcactcttcctga

SEQ ID NO: 935965 - DNA, 25 bp, Homo sapien
ctcttcaaaggtatcttccatcact

SEQ ID NO: 935966 - DNA, 25 bp, Homo sapien
gactgataatgtttgctggataaat

SEQ ID NO: 935967 - DNA, 25 bp, Homo sapien
atgtttgctggataaataaacttac

SEQ ID NO: 935968 - DNA, 25 bp, Homo sapien
gggactgataatgtttgctggataa

SEQ ID NO: 935969 - DNA, 25 bp, Homo sapien
gataatgtttgctggataaataaac

SEQ ID NO: 935970 - DNA, 25 bp, Homo sapien
taaggcagatcttaggacacgtgtg

SEQ ID NO: 935971 - DNA, 25 bp, Homo sapien
gatgatggccacaatacacggtttc

SEQ ID NO: 935972 - DNA, 25 bp, Homo sapien
tactacgctaagtacgatgatggcc

SEQ ID NO: 935973 - DNA, 25 bp, Homo sapien
tgagcctttgctgtgtactcggtac

SEQ ID NO: 935974 - DNA, 25 bp, Homo sapien
gaagtcttatgctagcttcctggca

SEQ ID NO: 935975 - DNA, 25 bp, Homo sapien
catccaataccaatctcagcagctt

SEQ ID NO: 935976 - DNA, 25 bp, Homo sapien
acgatgatttctctaatgctttccc

SEQ ID NO: 935977 - DNA, 25 bp, Homo sapien
catatttgactgatgattggaaact

SEQ ID NO: 935978 - DNA, 25 bp, Homo sapien
aataatagttatcatcatctctctg

SEQ ID NO: 935979 - DNA, 25 bp, Homo sapien
caaaataatagttatcatcatctct

SEQ ID NO: 935980 - DNA, 25 bp, Homo sapien
atgctcaaaataatagttatcatca

SEQ ID NO: 935981 - DNA, 25 bp, Homo sapien
catgctcaaaataatagttatcatc

SEQ ID NO: 935982 - DNA, 25 bp, Homo sapien
aagtcaatattcagctgagttaggc

SEQ ID NO: 935983 - DNA, 25 bp, Homo sapien
tgaagtccacgagaatctcagagac

SEQ ID NO: 935984 - DNA, 25 bp, Homo sapien
tgagttaggcatcagtcacttagga

SEQ ID NO: 935985 - DNA, 25 bp, Homo sapien
gagacaggtaggtagcaacctcctt

SEQ ID NO: 935986 - DNA, 25 bp, Homo sapien
ggctggctcttttgtaggatggatc

SEQ ID NO: 935987 - DNA, 25 bp, Homo sapien
tctggtgaatggtaactggctggca

SEQ ID NO: 935988 - DNA, 25 bp, Homo sapien
taatatttggctcaagcttgacctc

SEQ ID NO: 935989 - DNA, 25 bp, Homo sapien
tgtgcattcttcctccggccagtgt

SEQ ID NO: 935990 - DNA, 25 bp, Homo sapien
gtagtaagttagatgatgacactca

SEQ ID NO: 935991 - DNA, 25 bp, Homo sapien
tgtgtactcttgtcacttcatgcaa

SEQ ID NO: 935992 - DNA, 25 bp, Homo sapien
attttccagcaaagtagtaagttag

SEQ ID NO: 935993 - DNA, 25 bp, Homo sapien
gacactcaagatttaccatgtgtac

SEQ ID NO: 935994 - DNA, 25 bp, Homo sapien
tactgtctctgatgtttgctacaag

SEQ ID NO: 935995 - DNA, 25 bp, Homo sapien
tactccatacttcaccataaatcca

SEQ ID NO: 935996 - DNA, 25 bp, Homo sapien
gatgtttgctacaagtctaagtagt

SEQ ID NO: 935997 - DNA, 25 bp, Homo sapien
tatttgaggatatatgactctatac

SEQ ID NO: 935998 - DNA, 25 bp, Homo sapien
tccaccaatgatggtaaatccaaag

SEQ ID NO: 935999 - DNA, 25 bp, Homo sapien
tgcagaaactcatcaggctcgtctc

SEQ ID NO: 936000 - DNA, 25 bp, Homo sapien
ccaatgatggtaaatccaaagccca

SEQ ID NO: 936001 - DNA, 25 bp, Homo sapien
caggcccatccggaatcacactttt

SEQ ID NO: 936002 - DNA, 25 bp, Homo sapien
ttgctcttttttagggtggtgctga

SEQ ID NO: 936003 - DNA, 25 bp, Homo sapien
ctcttttttagggtggtgctgagga

SEQ ID NO: 936004 - DNA, 25 bp, Homo sapien
tgctcttttttagggtggtgctgag

SEQ ID NO: 936005 - DNA, 25 bp, Homo sapien
cttttttagggtggtgctgaggaat

SEQ ID NO: 936006 - DNA, 25 bp, Homo sapien
gggatgcatcccgggtgaagagtgg

SEQ ID NO: 936007 - DNA, 25 bp, Homo sapien
ctgggatgcatcccgggtgaagagt

SEQ ID NO: 936008 - DNA, 25 bp, Homo sapien
gatgcatcccgggtgaagagtggtt

SEQ ID NO: 936009 - DNA, 25 bp, Homo sapien
tgcatcccgggtgaagagtggtttt

SEQ ID NO: 936010 - DNA, 25 bp, Homo sapien
cgtggctcccaggtgtagtcaggtc

SEQ ID NO: 936011 - DNA, 25 bp, Homo sapien
tcccaggtgtagtcaggtcccgcaa

SEQ ID NO: 936012 - DNA, 25 bp, Homo sapien
tggctcccaggtgtagtcaggtccc

SEQ ID NO: 936013 - DNA, 25 bp, Homo sapien
gtgtagtcaggtcccgcaagcagcc

SEQ ID NO: 936014 - DNA, 25 bp, Homo sapien
cgcgctgatagtaagacaagtcatt

SEQ ID NO: 936015 - DNA, 25 bp, Homo sapien
tgggcctaggtaatgtccatgagga

SEQ ID NO: 936016 - DNA, 25 bp, Homo sapien
tgctgggtcgcgctgatagtaagac

SEQ ID NO: 936017 - DNA, 25 bp, Homo sapien
atggatttgggcctaggtaatgtcc

SEQ ID NO: 936018 - DNA, 25 bp, Homo sapien
tgcaggggctttgttccaagttctg

SEQ ID NO: 936019 - DNA, 25 bp, Homo sapien
gcatgttatgttgctgtagcttcct

SEQ ID NO: 936020 - DNA, 25 bp, Homo sapien
ggctttgttccaagttctgtgtggg

SEQ ID NO: 936021 - DNA, 25 bp, Homo sapien
gggcatgttatgttgctgtagcttc

SEQ ID NO: 936022 - DNA, 25 bp, Homo sapien
tgcaaagtccccatatccaacagga

SEQ ID NO: 936023 - DNA, 25 bp, Homo sapien
tccaacaggataaatgtgaggtaaa

SEQ ID NO: 936024 - DNA, 25 bp, Homo sapien
cattgatagagtatagcaaccagag

SEQ ID NO: 936025 - DNA, 25 bp, Homo sapien
gagtctgcactttttagagttggtc

SEQ ID NO: 936026 - DNA, 25 bp, Homo sapien
aacatatactgttcctgattttgcc

SEQ ID NO: 936027 - DNA, 25 bp, Homo sapien
cacatgtgccctctacgttgaacat

SEQ ID NO: 936028 - DNA, 25 bp, Homo sapien
tacttaaacatatactgttcctgat

SEQ ID NO: 936029 - DNA, 25 bp, Homo sapien
tgcatcaccacatgtgccctctacg

SEQ ID NO: 936030 - DNA, 25 bp, Homo sapien
gcttcactctcctgtaaaatacgca

SEQ ID NO: 936031 - DNA, 25 bp, Homo sapien
cagcttcactctcctgtaaaatacg

SEQ ID NO: 936032 - DNA, 25 bp, Homo sapien
cttcactctcctgtaaaatacgcat

SEQ ID NO: 936033 - DNA, 25 bp, Homo sapien
tccagcttcactctcctgtaaaata

SEQ ID NO: 936034 - DNA, 25 bp, Homo sapien
tcctgcattggaagttagcttgaaa

SEQ ID NO: 936035 - DNA, 25 bp, Homo sapien
tgtcttgcctctctgttagatgatt

SEQ ID NO: 936036 - DNA, 25 bp, Homo sapien
cacatctcgatgatcaagaagggat

SEQ ID NO: 936037 - DNA, 25 bp, Homo sapien
aggatctaccagcagcagatcttca

SEQ ID NO: 936038 - DNA, 25 bp, Homo sapien
taaatgggatcatcgattttttccc

SEQ ID NO: 936039 - DNA, 25 bp, Homo sapien
tgggatcatcgattttttcccagcc

SEQ ID NO: 936040 - DNA, 25 bp, Homo sapien
ggatcatcgattttttcccagccat

SEQ ID NO: 936041 - DNA, 25 bp, Homo sapien
gccataaatgggatcatcgattttt

SEQ ID NO: 936042 - DNA, 25 bp, Homo sapien
aaccgtagtggatgtccctaccgcc

SEQ ID NO: 936043 - DNA, 25 bp, Homo sapien
ggcggtagggacatccactacggtt

SEQ ID NO: 936044 - DNA, 25 bp, Homo sapien
catgtgacaggtttctaggcaaatc

SEQ ID NO: 936045 - DNA, 25 bp, Homo sapien
gatgtattgcttgtaatgcctcatg

SEQ ID NO: 936046 - DNA, 25 bp, Homo sapien
tcaataagttcctttgatgtattgc

SEQ ID NO: 936047 - DNA, 25 bp, Homo sapien
tctaggcaaatcaaggaagcagggt

SEQ ID NO: 936048 - DNA, 25 bp, Homo sapien
cagatgagttcagtgtaagcaggca

SEQ ID NO: 936049 - DNA, 25 bp, Homo sapien
gagtagcattgaagaaccaccctgt

SEQ ID NO: 936050 - DNA, 25 bp, Homo sapien
gacactcaagtagcacaggaagaac

SEQ ID NO: 936051 - DNA, 25 bp, Homo sapien
gttagtccagggtagcattggcacc

SEQ ID NO: 936052 - DNA, 25 bp, Homo sapien
aaaaaaggcaatccaattatatgct

SEQ ID NO: 936053 - DNA, 25 bp, Homo sapien
gaggcaaactagactttaagacaag

SEQ ID NO: 936054 - DNA, 25 bp, Homo sapien
atgctgagtataagaagcacacttt

SEQ ID NO: 936055 - DNA, 25 bp, Homo sapien
caaaagaaagccatactgatacgag

SEQ ID NO: 936056 - DNA, 25 bp, Homo sapien
aaaattcatgctagagtcctccaca

SEQ ID NO: 936057 - DNA, 25 bp, Homo sapien
aattcatgctagagtcctccacatc

SEQ ID NO: 936058 - DNA, 25 bp, Homo sapien
aaaaattcatgctagagtcctccac

SEQ ID NO: 936059 - DNA, 25 bp, Homo sapien
taaaaaattcatgctagagtcctcc

SEQ ID NO: 936060 - DNA, 25 bp, Homo sapien
ctttattacattccctgctgattca

SEQ ID NO: 936061 - DNA, 25 bp, Homo sapien
tgattcagtgaacttttgattagcc

SEQ ID NO: 936062 - DNA, 25 bp, Homo sapien
tccctgctgattcagtgaacttttg

SEQ ID NO: 936063 - DNA, 25 bp, Homo sapien
cagtgaacttttgattagcctccat

SEQ ID NO: 936064 - DNA, 25 bp, Homo sapien
taccaacgccatgacccagagactt

SEQ ID NO: 936065 - DNA, 25 bp, Homo sapien
caaagttgatcccagaatctatggc

SEQ ID NO: 936066 - DNA, 25 bp, Homo sapien
aagtatttatgcaactggtcagtca

SEQ ID NO: 936067 - DNA, 25 bp, Homo sapien
gcttaaagctgatgggttgagtgca

SEQ ID NO: 936068 - DNA, 25 bp, Homo sapien
agaggtaataccagcaccagagcag

SEQ ID NO: 936069 - DNA, 25 bp, Homo sapien
cagcagatgggagtcaagggtatat

SEQ ID NO: 936070 - DNA, 25 bp, Homo sapien
tgtcctataagacgtgactagagcc

SEQ ID NO: 936071 - DNA, 25 bp, Homo sapien
ccaattgcattagggtaaactgtcc

SEQ ID NO: 936072 - DNA, 25 bp, Homo sapien
tgcttctgtggctaacctgataagg

SEQ ID NO: 936073 - DNA, 25 bp, Homo sapien
ttccatcactatcattggcaccttg

SEQ ID NO: 936074 - DNA, 25 bp, Homo sapien
gaaacatgtgtaggcccctgagcac

SEQ ID NO: 936075 - DNA, 25 bp, Homo sapien
cctgataagggctatggaaacatgt

SEQ ID NO: 936076 - DNA, 25 bp, Homo sapien
tttctttacagctctcagggccatc

SEQ ID NO: 936077 - DNA, 25 bp, Homo sapien
gctacccacatttgcccttttagga

SEQ ID NO: 936078 - DNA, 25 bp, Homo sapien
actactttaaagagacccactcgat

SEQ ID NO: 936079 - DNA, 25 bp, Homo sapien
caaaggttgacactaagtctaccta

SEQ ID NO: 936080 - DNA, 25 bp, Homo sapien
aacaagccaggagtcatagttctgc

SEQ ID NO: 936081 - DNA, 25 bp, Homo sapien
taaccctgggacatattctaccttc

SEQ ID NO: 936082 - DNA, 25 bp, Homo sapien
gctcagcttatgctaaactttaagg

SEQ ID NO: 936083 - DNA, 25 bp, Homo sapien
aagtttgtgccatattaaccctggg

SEQ ID NO: 936084 - DNA, 25 bp, Homo sapien
aaaagaccaacacttgcacagacct

SEQ ID NO: 936085 - DNA, 25 bp, Homo sapien
gtatattcaataatctccaaagcct

SEQ ID NO: 936086 - DNA, 25 bp, Homo sapien
cacagactagtcagtgtaagagctg

SEQ ID NO: 936087 - DNA, 25 bp, Homo sapien
cacagacctttcagaggtagcaggt

SEQ ID NO: 936088 - DNA, 25 bp, Homo sapien
gaaagagagcatctatatccaaaaa

SEQ ID NO: 936089 - DNA, 25 bp, Homo sapien
taatttgcccatagggcctggtgcc

SEQ ID NO: 936090 - DNA, 25 bp, Homo sapien
cagctgtggtgagcatacatgaggc

SEQ ID NO: 936091 - DNA, 25 bp, Homo sapien
gaggctgtaccacgaaagcaggaga

SEQ ID NO: 936092 - DNA, 25 bp, Homo sapien
gtttgtactgatatgagcaggtgtc

SEQ ID NO: 936093 - DNA, 25 bp, Homo sapien
tatggcattagtgagctaacccagt

SEQ ID NO: 936094 - DNA, 25 bp, Homo sapien
aagtcatcataaaccagggcagggt

SEQ ID NO: 936095 - DNA, 25 bp, Homo sapien
gcaggtgtctgtaggtaggtcattc

SEQ ID NO: 936096 - DNA, 25 bp, Homo sapien
ccttactagagagcatgaggtttac

SEQ ID NO: 936097 - DNA, 25 bp, Homo sapien
ggcatgttccttactagagagcatg

SEQ ID NO: 936098 - DNA, 25 bp, Homo sapien
tgttccttactagagagcatgaggt

SEQ ID NO: 936099 - DNA, 25 bp, Homo sapien
catgttccttactagagagcatgag

SEQ ID NO: 936100 - DNA, 25 bp, Homo sapien
ttcattatgagaaatccttaggcta

SEQ ID NO: 936101 - DNA, 25 bp, Homo sapien
gaaattttaggtgtcccatatggca

SEQ ID NO: 936102 - DNA, 25 bp, Homo sapien
gagaaatccttaggctattctctgg

SEQ ID NO: 936103 - DNA, 25 bp, Homo sapien
ttgcacaatagggtttatcaagcca

SEQ ID NO: 936104 - DNA, 25 bp, Homo sapien
tgcccaaaactagcaaatctgaggt

SEQ ID NO: 936105 - DNA, 25 bp, Homo sapien
tattagctagctccatcatcatcca

SEQ ID NO: 936106 - DNA, 25 bp, Homo sapien
tcttccagaccatgaggacctgata

SEQ ID NO: 936107 - DNA, 25 bp, Homo sapien
ggaataactctatgaaagaggctct

SEQ ID NO: 936108 - DNA, 25 bp, Homo sapien
actcagcctaacacggagcacagtg

SEQ ID NO: 936109 - DNA, 25 bp, Homo sapien
taatcagggcctgcatcacagtgaa

SEQ ID NO: 936110 - DNA, 25 bp, Homo sapien
tgggcacaggtgtgaacacaagctg

SEQ ID NO: 936111 - DNA, 25 bp, Homo sapien
taacatcctccttgctaatcagggc

SEQ ID NO: 936112 - DNA, 25 bp, Homo sapien
tggacctttttgaattccagccctg

SEQ ID NO: 936113 - DNA, 25 bp, Homo sapien
ctttttgaattccagccctgaggaa

SEQ ID NO: 936114 - DNA, 25 bp, Homo sapien
ttttgaattccagccctgaggaaga

SEQ ID NO: 936115 - DNA, 25 bp, Homo sapien
aattccagccctgaggaagatccat

SEQ ID NO: 936116 - DNA, 25 bp, Homo sapien
ccaatgggctaagaacagtttacac

SEQ ID NO: 936117 - DNA, 25 bp, Homo sapien
cactgaagactaatgcaggaccccg

SEQ ID NO: 936118 - DNA, 25 bp, Homo sapien
tgaaagtatacaaaactcgccctgg

SEQ ID NO: 936119 - DNA, 25 bp, Homo sapien
gatgaggccacctgacatgttgtgt

SEQ ID NO: 936120 - DNA, 25 bp, Homo sapien
tacagaaaggtacagatatggctat

SEQ ID NO: 936121 - DNA, 25 bp, Homo sapien
ccttataacataggaatgtggacag

SEQ ID NO: 936122 - DNA, 25 bp, Homo sapien
aactcccagttagaacaggtcatgt

SEQ ID NO: 936123 - DNA, 25 bp, Homo sapien
cagtccctagcctgtgaacagttac

SEQ ID NO: 936124 - DNA, 25 bp, Homo sapien
tggccctgctgaaatgccgagttaa

SEQ ID NO: 936125 - DNA, 25 bp, Homo sapien
tccaattaaaagatcagagtcctca

SEQ ID NO: 936126 - DNA, 25 bp, Homo sapien
gtcaggccaggagtcaaacagaacc

SEQ ID NO: 936127 - DNA, 25 bp, Homo sapien
agagtcctcagagcgacgtattgca

SEQ ID NO: 936128 - DNA, 25 bp, Homo sapien
caaacattctcaaagcacattgctg

SEQ ID NO: 936129 - DNA, 25 bp, Homo sapien
gctgaaacaccataaaaacttaata

SEQ ID NO: 936130 - DNA, 25 bp, Homo sapien
tctcaaagcacattgctgaaacacc

SEQ ID NO: 936131 - DNA, 25 bp, Homo sapien
aagaaacacaaacattctcaaagca

SEQ ID NO: 936132 - DNA, 25 bp, Homo sapien
tttagcctttttcgcaagtcgtgga

SEQ ID NO: 936133 - DNA, 25 bp, Homo sapien
tttttcgcaagtcgtggatccagcc

SEQ ID NO: 936134 - DNA, 25 bp, Homo sapien
gcctttttcgcaagtcgtggatcca

SEQ ID NO: 936135 - DNA, 25 bp, Homo sapien
gcaagtcgtggatccagccatgatg

SEQ ID NO: 936136 - DNA, 25 bp, Homo sapien
aagaaaagagatcactctgaacaga

SEQ ID NO: 936137 - DNA, 25 bp, Homo sapien
gatcactctgaacagacacatacta

SEQ ID NO: 936138 - DNA, 25 bp, Homo sapien
gagatcactctgaacagacacatac

SEQ ID NO: 936139 - DNA, 25 bp, Homo sapien
aaagagatcactctgaacagacaca

SEQ ID NO: 936140 - DNA, 25 bp, Homo sapien
cagctgtaaatttggcaacctcagc

SEQ ID NO: 936141 - DNA, 25 bp, Homo sapien
ggcagctgtaaatttggcaacctca

SEQ ID NO: 936142 - DNA, 25 bp, Homo sapien
aaggcagctgtaaatttggcaacct

SEQ ID NO: 936143 - DNA, 25 bp, Homo sapien
ctgtaaatttggcaacctcagctcc

SEQ ID NO: 936144 - DNA, 25 bp, Homo sapien
tacaggattctccagttggaagagc

SEQ ID NO: 936145 - DNA, 25 bp, Homo sapien
caggattctccagttggaagagcac

SEQ ID NO: 936146 - DNA, 25 bp, Homo sapien
aatacaggattctccagttggaaga

SEQ ID NO: 936147 - DNA, 25 bp, Homo sapien
caaatacaggattctccagttggaa

SEQ ID NO: 936148 - DNA, 25 bp, Homo sapien
taggctccttagatatattcacaaa

SEQ ID NO: 936149 - DNA, 25 bp, Homo sapien
atttctaggctccttagatatattc

SEQ ID NO: 936150 - DNA, 25 bp, Homo sapien
ttctaggctccttagatatattcac

SEQ ID NO: 936151 - DNA, 25 bp, Homo sapien
tctaggctccttagatatattcaca

SEQ ID NO: 936152 - DNA, 25 bp, Homo sapien
ctgattatgtagtcccttggtcgca

SEQ ID NO: 936153 - DNA, 25 bp, Homo sapien
gatctaagttataaatcactccagg

SEQ ID NO: 936154 - DNA, 25 bp, Homo sapien
cagagtttccaacttcacgtgagaa

SEQ ID NO: 936155 - DNA, 25 bp, Homo sapien
tgcctatagagatctaagttataaa

SEQ ID NO: 936156 - DNA, 25 bp, Homo sapien
tcaatgaagtagacttcgcccttct

SEQ ID NO: 936157 - DNA, 25 bp, Homo sapien
tcaggcaatgggtctggttcctcat

SEQ ID NO: 936158 - DNA, 25 bp, Homo sapien
gggagggcatctcccctgaggcacc

SEQ ID NO: 936159 - DNA, 25 bp, Homo sapien
tcaggctgactgtacactggtgcag

SEQ ID NO: 936160 - DNA, 25 bp, Homo sapien
cgtgctaacagagatgttcttgtca

SEQ ID NO: 936161 - DNA, 25 bp, Homo sapien
ttaatgggagcccgtgctaacagag

SEQ ID NO: 936162 - DNA, 25 bp, Homo sapien
ccgtgctaacagagatgttcttgtc

SEQ ID NO: 936163 - DNA, 25 bp, Homo sapien
gctaacagagatgttcttgtcaaat

SEQ ID NO: 936164 - DNA, 25 bp, Homo sapien
ccgaggaatcacctacaagctttat

SEQ ID NO: 936165 - DNA, 25 bp, Homo sapien
ggattgtggaccaagttttcctaca

SEQ ID NO: 936166 - DNA, 25 bp, Homo sapien
taagactcaggatagcatggcagcc

SEQ ID NO: 936167 - DNA, 25 bp, Homo sapien
cacagagaaggatgtaagttcactg

SEQ ID NO: 936168 - DNA, 25 bp, Homo sapien
gatatagggcagtgttaactaaaat

SEQ ID NO: 936169 - DNA, 25 bp, Homo sapien
aggaacatgtttctcagtcttcttt

SEQ ID NO: 936170 - DNA, 25 bp, Homo sapien
tccttcgtaatggaataatgttacc

SEQ ID NO: 936171 - DNA, 25 bp, Homo sapien
tatttatgctctgaattgaagtttg

SEQ ID NO: 936172 - DNA, 25 bp, Homo sapien
ggaaccttactccaagaggctacca

SEQ ID NO: 936173 - DNA, 25 bp, Homo sapien
catgtttccagatcaggtggtaagg

SEQ ID NO: 936174 - DNA, 25 bp, Homo sapien
tatgggcattctgcagttgtagcga

SEQ ID NO: 936175 - DNA, 25 bp, Homo sapien
gcttgtacaaggtagtggcttcaca

SEQ ID NO: 936176 - DNA, 25 bp, Homo sapien
gctcactgatttattcctcttccgt

SEQ ID NO: 936177 - DNA, 25 bp, Homo sapien
gtggctcctggaagtatctggtctg

SEQ ID NO: 936178 - DNA, 25 bp, Homo sapien
tcctcaggaggctctatactggctt

SEQ ID NO: 936179 - DNA, 25 bp, Homo sapien
tccttcagcacttggagtggctcct

SEQ ID NO: 936180 - DNA, 25 bp, Homo sapien
cattcttggagttaaatatttcttc

SEQ ID NO: 936181 - DNA, 25 bp, Homo sapien
gcaaacaataccaaaacattcttgg

SEQ ID NO: 936182 - DNA, 25 bp, Homo sapien
ctgcaaacaataccaaaacattctt

SEQ ID NO: 936183 - DNA, 25 bp, Homo sapien
ccaaaacattcttggagttaaatat

SEQ ID NO: 936184 - DNA, 25 bp, Homo sapien
gaggatcctgcacgtatcttgccaa

SEQ ID NO: 936185 - DNA, 25 bp, Homo sapien
ggttagagatattcctaagttgcta

SEQ ID NO: 936186 - DNA, 25 bp, Homo sapien
tgaaggtcagtagcccataagtaca

SEQ ID NO: 936187 - DNA, 25 bp, Homo sapien
tcactttggctacatgggctctctt

SEQ ID NO: 936188 - DNA, 25 bp, Homo sapien
taaaagacaggtatctgtgtcagga

SEQ ID NO: 936189 - DNA, 25 bp, Homo sapien
gttattatcaacagacagctgttca

SEQ ID NO: 936190 - DNA, 25 bp, Homo sapien
aattcctaaaagacaggtatctgtg

SEQ ID NO: 936191 - DNA, 25 bp, Homo sapien
aagttattatcaacagacagctgtt

SEQ ID NO: 936192 - DNA, 25 bp, Homo sapien
atggttcaccaggtaacatcaaaac

SEQ ID NO: 936193 - DNA, 25 bp, Homo sapien
taacatttggctagattgagtaaga

SEQ ID NO: 936194 - DNA, 25 bp, Homo sapien
ggtgccaactgatctatcaaccatg

SEQ ID NO: 936195 - DNA, 25 bp, Homo sapien
tggatatatatggtggacatggaga

SEQ ID NO: 936196 - DNA, 25 bp, Homo sapien
caaccatgttccctttttgagctcc

SEQ ID NO: 936197 - DNA, 25 bp, Homo sapien
gtgcctccagtttccgtgactttcc

SEQ ID NO: 936198 - DNA, 25 bp, Homo sapien
ctccagtttccgtgactttccaaga

SEQ ID NO: 936199 - DNA, 25 bp, Homo sapien
ccagtttccgtgactttccaagatc

SEQ ID NO: 936200 - DNA, 25 bp, Homo sapien
ccagtgcctccagtttccgtgactt

SEQ ID NO: 936201 - DNA, 25 bp, Homo sapien
gggcggtgacattgctaactggcat

SEQ ID NO: 936202 - DNA, 25 bp, Homo sapien
gagggcggtgacattgctaactggc

SEQ ID NO: 936203 - DNA, 25 bp, Homo sapien
gggtggagggcggtgacattgctaa

SEQ ID NO: 936204 - DNA, 25 bp, Homo sapien
tggagggcggtgacattgctaactg

SEQ ID NO: 936205 - DNA, 25 bp, Homo sapien
tgcttcttgatgctatcagggccat

SEQ ID NO: 936206 - DNA, 25 bp, Homo sapien
gggagttgcttcttgatgctatcag

SEQ ID NO: 936207 - DNA, 25 bp, Homo sapien
tccaagggagttgcttcttgatgct

SEQ ID NO: 936208 - DNA, 25 bp, Homo sapien
ctctccaagggagttgcttcttgat

SEQ ID NO: 936209 - DNA, 25 bp, Homo sapien
tgcaatagtgactgtacccaggaag

SEQ ID NO: 936210 - DNA, 25 bp, Homo sapien
taggcactgaccatcatactcaggt

SEQ ID NO: 936211 - DNA, 25 bp, Homo sapien
caggtatctgaaggttccagtgcaa

SEQ ID NO: 936212 - DNA, 25 bp, Homo sapien
tacgtagttgaaagtggaaatggca

SEQ ID NO: 936213 - DNA, 25 bp, Homo sapien
taaatgatgaccgagtgcaccaaat

SEQ ID NO: 936214 - DNA, 25 bp, Homo sapien
tgatgaccgagtgcaccaaattgta

SEQ ID NO: 936215 - DNA, 25 bp, Homo sapien
ctgcattaaatgatgaccgagtgca

SEQ ID NO: 936216 - DNA, 25 bp, Homo sapien
cgagtgcaccaaattgtataatcat

SEQ ID NO: 936217 - DNA, 25 bp, Homo sapien
ggcttcttgtgacctctggtgtgga

SEQ ID NO: 936218 - DNA, 25 bp, Homo sapien
gagtgccctggaacgctaattctgc

SEQ ID NO: 936219 - DNA, 25 bp, Homo sapien
ggcataactccaggagcttgggtca

SEQ ID NO: 936220 - DNA, 25 bp, Homo sapien
tcatcaaggatgactggcataactc

SEQ ID NO: 936221 - DNA, 25 bp, Homo sapien
gcatttgcggaatagcaatgtaggt

SEQ ID NO: 936222 - DNA, 25 bp, Homo sapien
gcttcaggcatttgcggaatagcaa

SEQ ID NO: 936223 - DNA, 25 bp, Homo sapien
gaatagcaatgtaggtgtgctggct

SEQ ID NO: 936224 - DNA, 25 bp, Homo sapien
tgtaggtgtgctggctgtgaataaa

SEQ ID NO: 936225 - DNA, 25 bp, Homo sapien
aataccttttgtattggtctgtgtg

SEQ ID NO: 936226 - DNA, 25 bp, Homo sapien
tggtctgtgtggtacttaaaccaaa

SEQ ID NO: 936227 - DNA, 25 bp, Homo sapien
tattggtctgtgtggtacttaaacc

SEQ ID NO: 936228 - DNA, 25 bp, Homo sapien
attggtctgtgtggtacttaaacca

SEQ ID NO: 936229 - DNA, 25 bp, Homo sapien
gaagctgctctcagtttgccggaac

SEQ ID NO: 936230 - DNA, 25 bp, Homo sapien
gatactcctcagaatgttgaagctg

SEQ ID NO: 936231 - DNA, 25 bp, Homo sapien
tgtaggaatgtacctagtcaacacc

SEQ ID NO: 936232 - DNA, 25 bp, Homo sapien
tagtgcctggcttaaatcatcctgt

SEQ ID NO: 936233 - DNA, 25 bp, Homo sapien
tttggttgttcgagatattgcaaaa

SEQ ID NO: 936234 - DNA, 25 bp, Homo sapien
ttggttgttcgagatattgcaaaaa

SEQ ID NO: 936235 - DNA, 25 bp, Homo sapien
ttattctcactgtttttccccatag

SEQ ID NO: 936236 - DNA, 25 bp, Homo sapien
ttagtaaatgtcatttccattattc

SEQ ID NO: 936237 - DNA, 25 bp, Homo sapien
gtcatttccattattctcactgttt

SEQ ID NO: 936238 - DNA, 25 bp, Homo sapien
attctcactgtttttccccatagct

SEQ ID NO: 936239 - DNA, 25 bp, Homo sapien
ggctgtcaatgtgcctgtctccagg

SEQ ID NO: 936240 - DNA, 25 bp, Homo sapien
tctgccagactgataagcacttcca

SEQ ID NO: 936241 - DNA, 25 bp, Homo sapien
caattttcgcattcctctgtcaact

SEQ ID NO: 936242 - DNA, 25 bp, Homo sapien
gaatgaccatggatgactcaatttt

SEQ ID NO: 936243 - DNA, 25 bp, Homo sapien
tctgcattcatccaaagagctctgt

SEQ ID NO: 936244 - DNA, 25 bp, Homo sapien
tatctgcattcatccaaagagctct

SEQ ID NO: 936245 - DNA, 25 bp, Homo sapien
gcattcatccaaagagctctgtggt

SEQ ID NO: 936246 - DNA, 25 bp, Homo sapien
ctgcattcatccaaagagctctgtg

SEQ ID NO: 936247 - DNA, 25 bp, Homo sapien
agctgtagttacaggaaaatctgaa

SEQ ID NO: 936248 - DNA, 25 bp, Homo sapien
tcagctgtagttacaggaaaatctg

SEQ ID NO: 936249 - DNA, 25 bp, Homo sapien
tcctcagctgtagttacaggaaaat

SEQ ID NO: 936250 - DNA, 25 bp, Homo sapien
agttcctcagctgtagttacaggaa

SEQ ID NO: 936251 - DNA, 25 bp, Homo sapien
aaatactataaaatttgacatcgag

SEQ ID NO: 936252 - DNA, 25 bp, Homo sapien
taaaatttgacatcgagagataaaa

SEQ ID NO: 936253 - DNA, 25 bp, Homo sapien
ctataaaatttgacatcgagagata

SEQ ID NO: 936254 - DNA, 25 bp, Homo sapien
tactataaaatttgacatcgagaga

SEQ ID NO: 936255 - DNA, 25 bp, Homo sapien
tctaaactcatcttattaaagctct

SEQ ID NO: 936256 - DNA, 25 bp, Homo sapien
ggatacatttctaaactcatcttat

SEQ ID NO: 936257 - DNA, 25 bp, Homo sapien
catcttattaaagctctcaaaccca

SEQ ID NO: 936258 - DNA, 25 bp, Homo sapien
taggatacatttctaaactcatctt

SEQ ID NO: 936259 - DNA, 25 bp, Homo sapien
ccgtgcatttccatcgaatgagaaa

SEQ ID NO: 936260 - DNA, 25 bp, Homo sapien
gatttctcaggaacgttgtgcttac

SEQ ID NO: 936261 - DNA, 25 bp, Homo sapien
gatgccaacaagaaagatttctcag

SEQ ID NO: 936262 - DNA, 25 bp, Homo sapien
ctggtgtccccgtgcatttccatcg

SEQ ID NO: 936263 - DNA, 25 bp, Homo sapien
aatataatccactccagggacctca

SEQ ID NO: 936264 - DNA, 25 bp, Homo sapien
cataagtcccactttctaggagagc

SEQ ID NO: 936265 - DNA, 25 bp, Homo sapien
ccctccttatgtggccttgtggtgc

SEQ ID NO: 936266 - DNA, 25 bp, Homo sapien
tttctccaattccataaaatcttca

SEQ ID NO: 936267 - DNA, 25 bp, Homo sapien
tgattaccccactcataattaaccc

SEQ ID NO: 936268 - DNA, 25 bp, Homo sapien
cttcatgattaccccactcataatt

SEQ ID NO: 936269 - DNA, 25 bp, Homo sapien
catgattaccccactcataattaac

SEQ ID NO: 936270 - DNA, 25 bp, Homo sapien
tcatgattaccccactcataattaa

SEQ ID NO: 936271 - DNA, 25 bp, Homo sapien
tctctccttgagagataaatctcct

SEQ ID NO: 936272 - DNA, 25 bp, Homo sapien
tccagggatcatcctttgccatcat

SEQ ID NO: 936273 - DNA, 25 bp, Homo sapien
tcgaaggttgcatggaagccacatt

SEQ ID NO: 936274 - DNA, 25 bp, Homo sapien
tgttggaagcttcctgtcgaaggtt

SEQ ID NO: 936275 - DNA, 25 bp, Homo sapien
aacataggctgcatcaaggccgggc

SEQ ID NO: 936276 - DNA, 25 bp, Homo sapien
ggaagcatcggacccaaacttggtg

SEQ ID NO: 936277 - DNA, 25 bp, Homo sapien
taaaggttcaaaatagtgccccata

SEQ ID NO: 936278 - DNA, 25 bp, Homo sapien
gccccatatggcatcaattactgtt

SEQ ID NO: 936279 - DNA, 25 bp, Homo sapien
tatagccatgtaccggattcacaga

SEQ ID NO: 936280 - DNA, 25 bp, Homo sapien
attggccctggagtactctatagcc

SEQ ID NO: 936281 - DNA, 25 bp, Homo sapien
tataactacaacaatccataaagca

SEQ ID NO: 936282 - DNA, 25 bp, Homo sapien
gcatgcaggtcatgactttggcatt

SEQ ID NO: 936283 - DNA, 25 bp, Homo sapien
gagcacagctgtgttctaacgaagc

SEQ ID NO: 936284 - DNA, 25 bp, Homo sapien
cctacattaggttttcgatgctttg

SEQ ID NO: 936285 - DNA, 25 bp, Homo sapien
agtcgtttgcccacccctacattag

SEQ ID NO: 936286 - DNA, 25 bp, Homo sapien
gtaaatcaacaagatgcaacttcag

SEQ ID NO: 936287 - DNA, 25 bp, Homo sapien
ctgactggttgccattttgtgatct

SEQ ID NO: 936288 - DNA, 25 bp, Homo sapien
tcttgagtgccttgttaaaccgcat

SEQ ID NO: 936289 - DNA, 25 bp, Homo sapien
tcttcagccgcagcattctgactgg

SEQ ID NO: 936290 - DNA, 25 bp, Homo sapien
tgtcaggtcagcaccaatgtggtga

SEQ ID NO: 936291 - DNA, 25 bp, Homo sapien
ttcattcttttcaacctgatgattc

SEQ ID NO: 936292 - DNA, 25 bp, Homo sapien
tcttttcaacctgatgattcctgtc

SEQ ID NO: 936293 - DNA, 25 bp, Homo sapien
cattcttttcaacctgatgattcct

SEQ ID NO: 936294 - DNA, 25 bp, Homo sapien
ttcttttcaacctgatgattcctgt

SEQ ID NO: 936295 - DNA, 25 bp, Homo sapien
ctaccagcttggagtaggctgtgta

SEQ ID NO: 936296 - DNA, 25 bp, Homo sapien
aaatccacatgaataatctgcttac

SEQ ID NO: 936297 - DNA, 25 bp, Homo sapien
taccagcttggagtaggctgtgtag

SEQ ID NO: 936298 - DNA, 25 bp, Homo sapien
catgaataatctgcttacacgggtc

SEQ ID NO: 936299 - DNA, 25 bp, Homo sapien
tattcattatatatgtgtggaccca

SEQ ID NO: 936300 - DNA, 25 bp, Homo sapien
atattcattatatatgtgtggaccc

SEQ ID NO: 936301 - DNA, 25 bp, Homo sapien
attcattatatatgtgtggacccat

SEQ ID NO: 936302 - DNA, 25 bp, Homo sapien
aaacactgagtacatgtggacagaa

SEQ ID NO: 936303 - DNA, 25 bp, Homo sapien
tgagcggagggtatatttacaccac

SEQ ID NO: 936304 - DNA, 25 bp, Homo sapien
gggtggtcccccattgctgttctca

SEQ ID NO: 936305 - DNA, 25 bp, Homo sapien
acactgagtacatgtggacagaaag

SEQ ID NO: 936306 - DNA, 25 bp, Homo sapien
tgtttgggtacatcgttttgtgtca

SEQ ID NO: 936307 - DNA, 25 bp, Homo sapien
tttgggtacatcgttttgtgtcatg

SEQ ID NO: 936308 - DNA, 25 bp, Homo sapien
ggtacatcgttttgtgtcatgtagg

SEQ ID NO: 936309 - DNA, 25 bp, Homo sapien
tggtgtttgggtacatcgttttgtg

SEQ ID NO: 936310 - DNA, 25 bp, Homo sapien
attaaatggagtaaatggtatctca

SEQ ID NO: 936311 - DNA, 25 bp, Homo sapien
catagagtagctatgtgatattgaa

SEQ ID NO: 936312 - DNA, 25 bp, Homo sapien
taaatggagtaaatggtatctcaag

SEQ ID NO: 936313 - DNA, 25 bp, Homo sapien
ttaaatggagtaaatggtatctcaa

SEQ ID NO: 936314 - DNA, 25 bp, Homo sapien
ctccttcctaagagctttgtaggat

SEQ ID NO: 936315 - DNA, 25 bp, Homo sapien
taagagctttgtaggatactgttgc

SEQ ID NO: 936316 - DNA, 25 bp, Homo sapien
ctttgtaggatactgttgctctggc

SEQ ID NO: 936317 - DNA, 25 bp, Homo sapien
gatactgttgctctggcatatcttc

SEQ ID NO: 936318 - DNA, 25 bp, Homo sapien
ccacactgtaccagttcttcctcat

SEQ ID NO: 936319 - DNA, 25 bp, Homo sapien
tctttaatcgcagtattatcttcct

SEQ ID NO: 936320 - DNA, 25 bp, Homo sapien
actgtccagttttaggtgtgcaatc

SEQ ID NO: 936321 - DNA, 25 bp, Homo sapien
cacagttatgtcagatgactgtcca

SEQ ID NO: 936322 - DNA, 25 bp, Homo sapien
tacagaagcgatggtacttgtactg

SEQ ID NO: 936323 - DNA, 25 bp, Homo sapien
cctggatcatgctctatggctttac

SEQ ID NO: 936324 - DNA, 25 bp, Homo sapien
tgccagctagtgcttcatgggcaga

SEQ ID NO: 936325 - DNA, 25 bp, Homo sapien
aatttcatactaatgccagctagtg

SEQ ID NO: 936326 - DNA, 25 bp, Homo sapien
ttactcagtctaaaatctgatgcca

SEQ ID NO: 936327 - DNA, 25 bp, Homo sapien
acatttcatagctgtctcctcatca

SEQ ID NO: 936328 - DNA, 25 bp, Homo sapien
ctacatttcatagctgtctcctcat

SEQ ID NO: 936329 - DNA, 25 bp, Homo sapien
tcctcatcatttgcatttggacttt

SEQ ID NO: 936330 - DNA, 25 bp, Homo sapien
tcatttgcatttggactttcttcca

SEQ ID NO: 936331 - DNA, 25 bp, Homo sapien
gctctaattctcagcctatgggaag

SEQ ID NO: 936332 - DNA, 25 bp, Homo sapien
ctcacgatgaaaacccttggagggt

SEQ ID NO: 936333 - DNA, 25 bp, Homo sapien
gagggttacccttcagtggagcaaa

SEQ ID NO: 936334 - DNA, 25 bp, Homo sapien
taaaagcagcaatcggatctacatg

SEQ ID NO: 936335 - DNA, 25 bp, Homo sapien
aatagagaaccgatttcgcacaccc

SEQ ID NO: 936336 - DNA, 25 bp, Homo sapien
tcatgctcccctctctagtggatag

SEQ ID NO: 936337 - DNA, 25 bp, Homo sapien
gatttaaacctgctctgtagtcaca

SEQ ID NO: 936338 - DNA, 25 bp, Homo sapien
tggatagtgcctcaacactgtacct

SEQ ID NO: 936339 - DNA, 25 bp, Homo sapien
catgatggctctccactggctgtat

SEQ ID NO: 936340 - DNA, 25 bp, Homo sapien
tcaagtttaggttcacatctggtgg

SEQ ID NO: 936341 - DNA, 25 bp, Homo sapien
tggctgtattaaacaaaagctccgc

SEQ ID NO: 936342 - DNA, 25 bp, Homo sapien
gctccgcaaacaaacgagaggcatt

SEQ ID NO: 936343 - DNA, 25 bp, Homo sapien
gagctctgttcaaaggaagcagaga

SEQ ID NO: 936344 - DNA, 25 bp, Homo sapien
ggaagcagagaagccgcacgtcctc

SEQ ID NO: 936345 - DNA, 25 bp, Homo sapien
ctagagctctgttcaaaggaagcag

SEQ ID NO: 936346 - DNA, 25 bp, Homo sapien
agagaagccgcacgtcctctcccac

SEQ ID NO: 936347 - DNA, 25 bp, Homo sapien
ttcttgatagaagtagtctcagctg

SEQ ID NO: 936348 - DNA, 25 bp, Homo sapien
tcaacatggatgtctagaattttcc

SEQ ID NO: 936349 - DNA, 25 bp, Homo sapien
tcagtcagtgtcttctcaaaccacc

SEQ ID NO: 936350 - DNA, 25 bp, Homo sapien
tgtactgatccaacccattcgcaga

SEQ ID NO: 936351 - DNA, 25 bp, Homo sapien
gaacatggaatatggactgcatgta

SEQ ID NO: 936352 - DNA, 25 bp, Homo sapien
ccaagctattctaacagagacttga

SEQ ID NO: 936353 - DNA, 25 bp, Homo sapien
taagcatatccaatacagacacaac

SEQ ID NO: 936354 - DNA, 25 bp, Homo sapien
acaactttcaggctccaagctattc

SEQ ID NO: 936355 - DNA, 25 bp, Homo sapien
tgtctcttatcctgaaccagctttc

SEQ ID NO: 936356 - DNA, 25 bp, Homo sapien
tcttgcatgctgtcatctccagggc

SEQ ID NO: 936357 - DNA, 25 bp, Homo sapien
tctcttatcctgaaccagctttctt

SEQ ID NO: 936358 - DNA, 25 bp, Homo sapien
cttttcttgcatgctgtcatctcca

SEQ ID NO: 936359 - DNA, 25 bp, Homo sapien
ttctcatgtcagcaggcaaagactg

SEQ ID NO: 936360 - DNA, 25 bp, Homo sapien
tgtcagttctcatgtcagcaggcaa

SEQ ID NO: 936361 - DNA, 25 bp, Homo sapien
agttctcatgtcagcaggcaaagac

SEQ ID NO: 936362 - DNA, 25 bp, Homo sapien
tctcatgtcagcaggcaaagactgg

SEQ ID NO: 936363 - DNA, 25 bp, Homo sapien
ggtactttttactgcactatgctgc

SEQ ID NO: 936364 - DNA, 25 bp, Homo sapien
tgaacagtccgcaacagtcatggaa

SEQ ID NO: 936365 - DNA, 25 bp, Homo sapien
tttcaagacagtgctagccacctcc

SEQ ID NO: 936366 - DNA, 25 bp, Homo sapien
caaagagccaaagggacagaacagg

SEQ ID NO: 936367 - DNA, 25 bp, Homo sapien
cacatacccagatcacattgctttg

SEQ ID NO: 936368 - DNA, 25 bp, Homo sapien
ttcttacaggttgaaggatcaggaa

SEQ ID NO: 936369 - DNA, 25 bp, Homo sapien
gggtactattacacagcttacatca

SEQ ID NO: 936370 - DNA, 25 bp, Homo sapien
tcagctttagatctagccaagccac

SEQ ID NO: 936371 - DNA, 25 bp, Homo sapien
taattttcataacgctagtcaaagg

SEQ ID NO: 936372 - DNA, 25 bp, Homo sapien
agaacaaagtttccatccatgatag

SEQ ID NO: 936373 - DNA, 25 bp, Homo sapien
cactgatgaatatgcaacatgggca

SEQ ID NO: 936374 - DNA, 25 bp, Homo sapien
gatttaaaaagatcgattcccatgg

SEQ ID NO: 936375 - DNA, 25 bp, Homo sapien
gcttcggcttctgttgagtttgacc

SEQ ID NO: 936376 - DNA, 25 bp, Homo sapien
tattggcggtgacaaaatgcatgaa

SEQ ID NO: 936377 - DNA, 25 bp, Homo sapien
tttgtcccagcagatacactatgcc

SEQ ID NO: 936378 - DNA, 25 bp, Homo sapien
tatgaatgccagttataagcttcgg

SEQ ID NO: 936379 - DNA, 25 bp, Homo sapien
aattcttatggccaaacgtttcact

SEQ ID NO: 936380 - DNA, 25 bp, Homo sapien
aacacttaatgtaaacaccatgaga

SEQ ID NO: 936381 - DNA, 25 bp, Homo sapien
tagttacagaatacacagactatca

SEQ ID NO: 936382 - DNA, 25 bp, Homo sapien
tgttagcacctctcaacttatgtgc

SEQ ID NO: 936383 - DNA, 25 bp, Homo sapien
tctcctaagttgcagatccacccaa

SEQ ID NO: 936384 - DNA, 25 bp, Homo sapien
tgagcatacggcatatcataggtgc

SEQ ID NO: 936385 - DNA, 25 bp, Homo sapien
cacctatggcagagttccctggaca

SEQ ID NO: 936386 - DNA, 25 bp, Homo sapien
gaatatctaactgatgcctaacgct

SEQ ID NO: 936387 - DNA, 25 bp, Homo sapien
tacagacacatgccacaaagcctgg

SEQ ID NO: 936388 - DNA, 25 bp, Homo sapien
acagacacatgccacaaagcctggc

SEQ ID NO: 936389 - DNA, 25 bp, Homo sapien
cagacacatgccacaaagcctggct

SEQ ID NO: 936390 - DNA, 25 bp, Homo sapien
ctggtggaagagttagtcctacttt

SEQ ID NO: 936391 - DNA, 25 bp, Homo sapien
tacattagtcgtctgtgcaggacct

SEQ ID NO: 936392 - DNA, 25 bp, Homo sapien
attcacccctctcttggtggtggac

SEQ ID NO: 936393 - DNA, 25 bp, Homo sapien
gacacttgcaatactagagtctagg

SEQ ID NO: 936394 - DNA, 25 bp, Homo sapien
tgcaatgccatggcaagataagtgt

SEQ ID NO: 936395 - DNA, 25 bp, Homo sapien
ctgcaatgccatggcaagataagtg

SEQ ID NO: 936396 - DNA, 25 bp, Homo sapien
gcaatgccatggcaagataagtgtc

SEQ ID NO: 936397 - DNA, 25 bp, Homo sapien
ctagtttcctgcttatcggggctgc

SEQ ID NO: 936398 - DNA, 25 bp, Homo sapien
tcaatcccctatggtcctgctagtt

SEQ ID NO: 936399 - DNA, 25 bp, Homo sapien
gtttcctgcttatcggggctgctgg

SEQ ID NO: 936400 - DNA, 25 bp, Homo sapien
tttgagggactgaggtcaaataaca

SEQ ID NO: 936401 - DNA, 25 bp, Homo sapien
gtgctagttggtaaaaaacagacac

SEQ ID NO: 936402 - DNA, 25 bp, Homo sapien
tttttctctagagattcctgtgcta

SEQ ID NO: 936403 - DNA, 25 bp, Homo sapien
tttctctagagattcctgtgctagt

SEQ ID NO: 936404 - DNA, 25 bp, Homo sapien
ttcctgtgctagttggtaaaaaaca

SEQ ID NO: 936405 - DNA, 25 bp, Homo sapien
aaatccctgcaatgtgctgagccat

SEQ ID NO: 936406 - DNA, 25 bp, Homo sapien
gagaaatccctgcaatgtgctgagc

SEQ ID NO: 936407 - DNA, 25 bp, Homo sapien
tttgagaaatccctgcaatgtgctg

SEQ ID NO: 936408 - DNA, 25 bp, Homo sapien
gaaatccctgcaatgtgctgagcca

SEQ ID NO: 936409 - DNA, 25 bp, Homo sapien
gcatctggtgtacttgaaactatct

SEQ ID NO: 936410 - DNA, 25 bp, Homo sapien
tcagcatgcagtcttaagaaagacc

SEQ ID NO: 936411 - DNA, 25 bp, Homo sapien
gcatggtcaactcgattcacttggt

SEQ ID NO: 936412 - DNA, 25 bp, Homo sapien
caagggctcgctattaaacacagag

SEQ ID NO: 936413 - DNA, 25 bp, Homo sapien
aaagctgtattttcaacgatattca

SEQ ID NO: 936414 - DNA, 25 bp, Homo sapien
acaaccttcactttagtatgaaaag

SEQ ID NO: 936415 - DNA, 25 bp, Homo sapien
tattttcaacgatattcattgcctc

SEQ ID NO: 936416 - DNA, 25 bp, Homo sapien
gcctctttggcgtcattgccaccaa

SEQ ID NO: 936417 - DNA, 25 bp, Homo sapien
gagtgatacttaaccaacaagaaga

SEQ ID NO: 936418 - DNA, 25 bp, Homo sapien
cacactagggcctatcagaggatca

SEQ ID NO: 936419 - DNA, 25 bp, Homo sapien
aataatttgtcatcacactcctgtg

SEQ ID NO: 936420 - DNA, 25 bp, Homo sapien
tccaggcaaactctaccatttatag

SEQ ID NO: 936421 - DNA, 25 bp, Homo sapien
tattacagagagctcaatatatgaa

SEQ ID NO: 936422 - DNA, 25 bp, Homo sapien
ggaaatagatgctatccaatgttat

SEQ ID NO: 936423 - DNA, 25 bp, Homo sapien
taagcaataatgaagctaatgtttc

SEQ ID NO: 936424 - DNA, 25 bp, Homo sapien
aatttccctccacggtaccgatgat

SEQ ID NO: 936425 - DNA, 25 bp, Homo sapien
gaacagatggaaataaagccgatcc

SEQ ID NO: 936426 - DNA, 25 bp, Homo sapien
gactgggcctaatcatacaacttta

SEQ ID NO: 936427 - DNA, 25 bp, Homo sapien
aattatactccctaggactgggcct

SEQ ID NO: 936428 - DNA, 25 bp, Homo sapien
gggcttctattcaccgtacaggaaa

SEQ ID NO: 936429 - DNA, 25 bp, Homo sapien
tttagaagccggagttctacaattc

SEQ ID NO: 936430 - DNA, 25 bp, Homo sapien
tattcatagagtcaaactcatggtg

SEQ ID NO: 936431 - DNA, 25 bp, Homo sapien
gagttctacaattcatatccacatg

SEQ ID NO: 936432 - DNA, 25 bp, Homo sapien
gtgattaagaaccatggcggccatt

SEQ ID NO: 936433 - DNA, 25 bp, Homo sapien
gaagtacaggcagattcatcagtgc

SEQ ID NO: 936434 - DNA, 25 bp, Homo sapien
agaagtacaggcagattcatcagtg

SEQ ID NO: 936435 - DNA, 25 bp, Homo sapien
agctgattcaaagaagtacaggcag

SEQ ID NO: 936436 - DNA, 25 bp, Homo sapien
ccactacaccttcccaagttctcag

SEQ ID NO: 936437 - DNA, 25 bp, Homo sapien
tacaccttcccaagttctcagacaa

SEQ ID NO: 936438 - DNA, 25 bp, Homo sapien
ccttcccaagttctcagacaatgac

SEQ ID NO: 936439 - DNA, 25 bp, Homo sapien
tctcagacaatgacataatctgatt

SEQ ID NO: 936440 - DNA, 25 bp, Homo sapien
ggtctctcgtctatcatcatcctta

SEQ ID NO: 936441 - DNA, 25 bp, Homo sapien
gggtttgcaataggtagttgaggtc

SEQ ID NO: 936442 - DNA, 25 bp, Homo sapien
gtagttgaggtctctcgtctatcat

SEQ ID NO: 936443 - DNA, 25 bp, Homo sapien
ctgtctttggggtttgcaataggta

SEQ ID NO: 936444 - DNA, 25 bp, Homo sapien
agagtaattttagccacatctgtgc

SEQ ID NO: 936445 - DNA, 25 bp, Homo sapien
tagccacatctgtgcttcaatagtt

SEQ ID NO: 936446 - DNA, 25 bp, Homo sapien
ttatcaccatagagtaattttagcc

SEQ ID NO: 936447 - DNA, 25 bp, Homo sapien
gccacatctgtgcttcaatagttac

SEQ ID NO: 936448 - DNA, 25 bp, Homo sapien
taaatggcctgagaccctttgttcc

SEQ ID NO: 936449 - DNA, 25 bp, Homo sapien
tgaagcaaataaagctcagttctgc

SEQ ID NO: 936450 - DNA, 25 bp, Homo sapien
caagctcgctaagtgaaagggcaac

SEQ ID NO: 936451 - DNA, 25 bp, Homo sapien
tccaaaagaagagctagctcaggtg

SEQ ID NO: 936452 - DNA, 25 bp, Homo sapien
tctctagttcctcagggaaaggttc

SEQ ID NO: 936453 - DNA, 25 bp, Homo sapien
gaactgaggaattctatggcctatg

SEQ ID NO: 936454 - DNA, 25 bp, Homo sapien
tacacacatttgcactcttgaccaa

SEQ ID NO: 936455 - DNA, 25 bp, Homo sapien
tattgcaaggtttcaagtacaacac

SEQ ID NO: 936456 - DNA, 25 bp, Homo sapien
taaattagaactctatcccgattgc

SEQ ID NO: 936457 - DNA, 25 bp, Homo sapien
tgagggtctgaatgaaagtttcgca

SEQ ID NO: 936458 - DNA, 25 bp, Homo sapien
ttaagaccagactatgttctaggca

SEQ ID NO: 936459 - DNA, 25 bp, Homo sapien
taatgcttcacacaaaatacgtact

SEQ ID NO: 936460 - DNA, 25 bp, Homo sapien
agagcagaaaggatggagtaaagtc

SEQ ID NO: 936461 - DNA, 25 bp, Homo sapien
actgtatgtcattctttgacagcct

SEQ ID NO: 936462 - DNA, 25 bp, Homo sapien
cattctttgacagcctgtcagtgta

SEQ ID NO: 936463 - DNA, 25 bp, Homo sapien
ggatggagtaaagtcaaatggaaag

SEQ ID NO: 936464 - DNA, 25 bp, Homo sapien
tacacaccgctattcaagacattgg

SEQ ID NO: 936465 - DNA, 25 bp, Homo sapien
gaacatcctggctcaagatttggtg

SEQ ID NO: 936466 - DNA, 25 bp, Homo sapien
gagggcttatatgccacacccaaga

SEQ ID NO: 936467 - DNA, 25 bp, Homo sapien
ccaaaggtaggaagacagacgtaat

SEQ ID NO: 936468 - DNA, 25 bp, Homo sapien
tctggagaggagggtactgaattca

SEQ ID NO: 936469 - DNA, 25 bp, Homo sapien
gtcctgcagaagtgaacatgtggac

SEQ ID NO: 936470 - DNA, 25 bp, Homo sapien
ggaagtagagtaagaggagtaaatc

SEQ ID NO: 936471 - DNA, 25 bp, Homo sapien
attcagtcctgcagaagtgaacatg

SEQ ID NO: 936472 - DNA, 25 bp, Homo sapien
gaagtgacacaggtaagggttgaat

SEQ ID NO: 936473 - DNA, 25 bp, Homo sapien
tccttgtgatgtctaggatgcatct

SEQ ID NO: 936474 - DNA, 25 bp, Homo sapien
gagacattaatttctgccctggagg

SEQ ID NO: 936475 - DNA, 25 bp, Homo sapien
taggaggtataagtctgcagaaaga

SEQ ID NO: 936476 - DNA, 25 bp, Homo sapien
agttccattgcttccaacattgggc

SEQ ID NO: 936477 - DNA, 25 bp, Homo sapien
gaagttccattgcttccaacattgg

SEQ ID NO: 936478 - DNA, 25 bp, Homo sapien
tgcttccaacattgggcaagtccat

SEQ ID NO: 936479 - DNA, 25 bp, Homo sapien
tccattgcttccaacattgggcaag

SEQ ID NO: 936480 - DNA, 25 bp, Homo sapien
gctcagaaaagctcctcgggattca

SEQ ID NO: 936481 - DNA, 25 bp, Homo sapien
caacgtaaagcaaagtgatacagcc

SEQ ID NO: 936482 - DNA, 25 bp, Homo sapien
tcgggattcactgttgcgacaacgt

SEQ ID NO: 936483 - DNA, 25 bp, Homo sapien
cagacacatcatgctggcaggtagc

SEQ ID NO: 936484 - DNA, 25 bp, Homo sapien
agtggctgcccctcattgagtagca

SEQ ID NO: 936485 - DNA, 25 bp, Homo sapien
tctgagtagccagtcacaactatgg

SEQ ID NO: 936486 - DNA, 25 bp, Homo sapien
catgatttcactcctgtgcttcagg

SEQ ID NO: 936487 - DNA, 25 bp, Homo sapien
aaggtatatagggtctgcattcccc

SEQ ID NO: 936488 - DNA, 25 bp, Homo sapien
cctggtctggcaatagtgtggatcg

SEQ ID NO: 936489 - DNA, 25 bp, Homo sapien
tgtctgtgaaactactcggaactcc

SEQ ID NO: 936490 - DNA, 25 bp, Homo sapien
tgtggatcgacaatatgccctggaa

SEQ ID NO: 936491 - DNA, 25 bp, Homo sapien
taaagttctggccaaaggtctagag

SEQ ID NO: 936492 - DNA, 25 bp, Homo sapien
aaaattagtacattagctgtagctt

SEQ ID NO: 936493 - DNA, 25 bp, Homo sapien
ggcaatacctgtaagacccctgttc

SEQ ID NO: 936494 - DNA, 25 bp, Homo sapien
gtgtgtcattgattaaggcaatacc

SEQ ID NO: 936495 - DNA, 25 bp, Homo sapien
gagtatcttttctccgactaagcca

SEQ ID NO: 936496 - DNA, 25 bp, Homo sapien
ggctttcagtttagcagtgaacttt

SEQ ID NO: 936497 - DNA, 25 bp, Homo sapien
gataggtcttctaaattgggtgaga

SEQ ID NO: 936498 - DNA, 25 bp, Homo sapien
agtgaactttgtgtcacattgatgc

SEQ ID NO: 936499 - DNA, 25 bp, Homo sapien
tgcttctccagaacagggaccctca

SEQ ID NO: 936500 - DNA, 25 bp, Homo sapien
gaaagcttggcttaatgcaagacgc

SEQ ID NO: 936501 - DNA, 25 bp, Homo sapien
gggaaagcactttatctggcaagct

SEQ ID NO: 936502 - DNA, 25 bp, Homo sapien
taatttctggtgttggctcggttcc

SEQ ID NO: 936503 - DNA, 25 bp, Homo sapien
gaatgtctggcccaaaagcctaaaa

SEQ ID NO: 936504 - DNA, 25 bp, Homo sapien
cacctggtagtagctgtatttgcac

SEQ ID NO: 936505 - DNA, 25 bp, Homo sapien
ttcaatatggcgattcctgctccct

SEQ ID NO: 936506 - DNA, 25 bp, Homo sapien
tctcgagctgtgtaaatggcacacc

SEQ ID NO: 936507 - DNA, 25 bp, Homo sapien
gtcatggcgcaggacaagtaaagcc

SEQ ID NO: 936508 - DNA, 25 bp, Homo sapien
aattgctttacctccagtacctaga

SEQ ID NO: 936509 - DNA, 25 bp, Homo sapien
ttaaatgagtttgggtcttgttctg

SEQ ID NO: 936510 - DNA, 25 bp, Homo sapien
tcacgaggatagaaatttcatatgc

SEQ ID NO: 936511 - DNA, 25 bp, Homo sapien
tatcttgtcccaccaaaacataagt

SEQ ID NO: 936512 - DNA, 25 bp, Homo sapien
gcttgtaaattcaacgtgggccagg

SEQ ID NO: 936513 - DNA, 25 bp, Homo sapien
tattttgttgggtactggacatgtg

SEQ ID NO: 936514 - DNA, 25 bp, Homo sapien
taaattcaacgtgggccaggacagc

SEQ ID NO: 936515 - DNA, 25 bp, Homo sapien
tctggcttgtaaattcaacgtgggc

SEQ ID NO: 936516 - DNA, 25 bp, Homo sapien
ctgctgctgaacgaagtttttgaaa

SEQ ID NO: 936517 - DNA, 25 bp, Homo sapien
ggctgctgctgaacgaagtttttga

SEQ ID NO: 936518 - DNA, 25 bp, Homo sapien
ctgctgaacgaagtttttgaaacat

SEQ ID NO: 936519 - DNA, 25 bp, Homo sapien
gggaagagctctgatttacttggct

SEQ ID NO: 936520 - DNA, 25 bp, Homo sapien
gaatatagttcaaaccttctaatca

SEQ ID NO: 936521 - DNA, 25 bp, Homo sapien
cttctaatcaagtttaagaccctct

SEQ ID NO: 936522 - DNA, 25 bp, Homo sapien
tttaagaccctctgtaatcttcaca

SEQ ID NO: 936523 - DNA, 25 bp, Homo sapien
tgttatgttacatgaccattcttgg

SEQ ID NO: 936524 - DNA, 25 bp, Homo sapien
tcattacaagaactgaggatttgct

SEQ ID NO: 936525 - DNA, 25 bp, Homo sapien
tcaatcggaatgtccttctagctgc

SEQ ID NO: 936526 - DNA, 25 bp, Homo sapien
tctattcctcttacgctcattacaa

SEQ ID NO: 936527 - DNA, 25 bp, Homo sapien
ggatttgctcaaaaggtcttctcaa

SEQ ID NO: 936528 - DNA, 25 bp, Homo sapien
taatagaaaggtacattgatatgag

SEQ ID NO: 936529 - DNA, 25 bp, Homo sapien
gaatctgtcttctacactgctcact

SEQ ID NO: 936530 - DNA, 25 bp, Homo sapien
ggtacattgatatgagataaacaga

SEQ ID NO: 936531 - DNA, 25 bp, Homo sapien
tactccagcttataagaatctgtct

SEQ ID NO: 936532 - DNA, 25 bp, Homo sapien
taaaaatgtgtactgctaactagca

SEQ ID NO: 936533 - DNA, 25 bp, Homo sapien
cacaggtaaggatgtaccaatccaa

SEQ ID NO: 936534 - DNA, 25 bp, Homo sapien
cactgagaaagctatggatccattt

SEQ ID NO: 936535 - DNA, 25 bp, Homo sapien
tgtgactaagttttccactacaggg

SEQ ID NO: 936536 - DNA, 25 bp, Homo sapien
agaacctacaaaaagctacccaatg

SEQ ID NO: 936537 - DNA, 25 bp, Homo sapien
taaagtgtctcatactataagcaga

SEQ ID NO: 936538 - DNA, 25 bp, Homo sapien
tgttgacctctggtcacagatgggc

SEQ ID NO: 936539 - DNA, 25 bp, Homo sapien
cagatgggccttagtgatgaaagca

SEQ ID NO: 936540 - DNA, 25 bp, Homo sapien
tgcaggtagaaagtctagtagagct

SEQ ID NO: 936541 - DNA, 25 bp, Homo sapien
gggactcttatgaacacctatttat

SEQ ID NO: 936542 - DNA, 25 bp, Homo sapien
tagagctgacatcaaaatgtttgtg

SEQ ID NO: 936543 - DNA, 25 bp, Homo sapien
catcaaagctgtgttggattgcaaa

SEQ ID NO: 936544 - DNA, 25 bp, Homo sapien
tttccattggaataagatgattgct

SEQ ID NO: 936545 - DNA, 25 bp, Homo sapien
ttccattggaataagatgattgctt

SEQ ID NO: 936546 - DNA, 25 bp, Homo sapien
tggatacctcaaataccttgacttg

SEQ ID NO: 936547 - DNA, 25 bp, Homo sapien
tgatggatacctcaaataccttgac

SEQ ID NO: 936548 - DNA, 25 bp, Homo sapien
aatattcaaagtgatggatacctca

SEQ ID NO: 936549 - DNA, 25 bp, Homo sapien
caaagtgatggatacctcaaatacc

SEQ ID NO: 936550 - DNA, 25 bp, Homo sapien
tgctaacaatggcaaaagtccacct

SEQ ID NO: 936551 - DNA, 25 bp, Homo sapien
aaccatgggtccaaaagcctattca

SEQ ID NO: 936552 - DNA, 25 bp, Homo sapien
aagatttgataatggtgtcctggca

SEQ ID NO: 936553 - DNA, 25 bp, Homo sapien
ggtcaatagggctgggtgataacct

SEQ ID NO: 936554 - DNA, 25 bp, Homo sapien
cagtctggactagaatcaatatttc

SEQ ID NO: 936555 - DNA, 25 bp, Homo sapien
tcattcggaatcaccaacagtctgg

SEQ ID NO: 936556 - DNA, 25 bp, Homo sapien
tctcctgtctcccaatgtggagttc

SEQ ID NO: 936557 - DNA, 25 bp, Homo sapien
tactactgcagttataagcatttgc

SEQ ID NO: 936558 - DNA, 25 bp, Homo sapien
cacgaatgatttgctgaagctcatg

SEQ ID NO: 936559 - DNA, 25 bp, Homo sapien
gacgaaggtctttatcaacaattcc

SEQ ID NO: 936560 - DNA, 25 bp, Homo sapien
cacagaacccttttgaaatcgtaag

SEQ ID NO: 936561 - DNA, 25 bp, Homo sapien
taagttgaggtagtgacgaaggtct

SEQ ID NO: 936562 - DNA, 25 bp, Homo sapien
tattgtaacatttctaaagttttca

SEQ ID NO: 936563 - DNA, 25 bp, Homo sapien
catttctaaagttttcaaaatccat

SEQ ID NO: 936564 - DNA, 25 bp, Homo sapien
tgacaagagatctgctgttagtctg

SEQ ID NO: 936565 - DNA, 25 bp, Homo sapien
ctttctctctgcctacccttaactt

SEQ ID NO: 936566 - DNA, 25 bp, Homo sapien
tctgacaagagatctgctgttagtc

SEQ ID NO: 936567 - DNA, 25 bp, Homo sapien
gtaacccaacctttctctctgccta

SEQ ID NO: 936568 - DNA, 25 bp, Homo sapien
cttccatgagaacaaagaatctcat

SEQ ID NO: 936569 - DNA, 25 bp, Homo sapien
gagtcagcttgtgggtaggcaacac

SEQ ID NO: 936570 - DNA, 25 bp, Homo sapien
gttggagtcagcttgtgggtaggca

SEQ ID NO: 936571 - DNA, 25 bp, Homo sapien
tgtgggtaggcaacactatttgcca

SEQ ID NO: 936572 - DNA, 25 bp, Homo sapien
cagcttgtgggtaggcaacactatt

SEQ ID NO: 936573 - DNA, 25 bp, Homo sapien
ggctcctgctttagtcatgtgacat

SEQ ID NO: 936574 - DNA, 25 bp, Homo sapien
tccttgcaatagtgaatgagttact

SEQ ID NO: 936575 - DNA, 25 bp, Homo sapien
aaagtgtgcggcacttctatgcccc

SEQ ID NO: 936576 - DNA, 25 bp, Homo sapien
ctctttggctcctgctttagtcatg

SEQ ID NO: 936577 - DNA, 25 bp, Homo sapien
tattactcacaactcaagtgtcagg

SEQ ID NO: 936578 - DNA, 25 bp, Homo sapien
tattggaccctctagcacatgttgc

SEQ ID NO: 936579 - DNA, 25 bp, Homo sapien
tacttgttatggtgaagcctgtgca

SEQ ID NO: 936580 - DNA, 25 bp, Homo sapien
tgtgcatcagcaagtcagggaatgt

SEQ ID NO: 936581 - DNA, 25 bp, Homo sapien
aatctgacactgtaggcatgtgatc

SEQ ID NO: 936582 - DNA, 25 bp, Homo sapien
gctaatacacccaggcaccagagta

SEQ ID NO: 936583 - DNA, 25 bp, Homo sapien
gggaccactgcaaaggtaatactaa

SEQ ID NO: 936584 - DNA, 25 bp, Homo sapien
tctgcagagtagaaacccactaaga

SEQ ID NO: 936585 - DNA, 25 bp, Homo sapien
tctgcagctgctaaacatagaaact

SEQ ID NO: 936586 - DNA, 25 bp, Homo sapien
gaacttggctcagctatctacagta

SEQ ID NO: 936587 - DNA, 25 bp, Homo sapien
tataatgtattatggtgtgaggaaa

SEQ ID NO: 936588 - DNA, 25 bp, Homo sapien
gagaacttggctcagctatctacag

SEQ ID NO: 936589 - DNA, 25 bp, Homo sapien
ttcatcggttctgggctgagtggcc

SEQ ID NO: 936590 - DNA, 25 bp, Homo sapien
tcaaggaagttatgcaaccaggact

SEQ ID NO: 936591 - DNA, 25 bp, Homo sapien
aaaagcagggtccaacatctcctgg

SEQ ID NO: 936592 - DNA, 25 bp, Homo sapien
cacttttgatagagaaacccagagg

SEQ ID NO: 936593 - DNA, 25 bp, Homo sapien
caggtaccaggttgaaatgatgagc

SEQ ID NO: 936594 - DNA, 25 bp, Homo sapien
tctggatggaacctacagctgcctt

SEQ ID NO: 936595 - DNA, 25 bp, Homo sapien
gactgcaggccaagtaatgtaggtg

SEQ ID NO: 936596 - DNA, 25 bp, Homo sapien
cacacttacaagagacaggtaccag

SEQ ID NO: 936597 - DNA, 25 bp, Homo sapien
caaacacaggtttgttgtaacatct

SEQ ID NO: 936598 - DNA, 25 bp, Homo sapien
tgaagagatgaaactatgcaaacac

SEQ ID NO: 936599 - DNA, 25 bp, Homo sapien
gatgaccatgctccatttgctgtgg

SEQ ID NO: 936600 - DNA, 25 bp, Homo sapien
ttctaaatgagcacctgttctgtcc

SEQ ID NO: 936601 - DNA, 25 bp, Homo sapien
catgctctacaatccaaaatgtgtg

SEQ ID NO: 936602 - DNA, 25 bp, Homo sapien
gctgttctcacgagttcatgtgttg

SEQ ID NO: 936603 - DNA, 25 bp, Homo sapien
tggattttttcaggcaaccacacct

SEQ ID NO: 936604 - DNA, 25 bp, Homo sapien
ttagctttcagcaaacacagaagaa

SEQ ID NO: 936605 - DNA, 25 bp, Homo sapien
cattcagaggtaactcactctggcc

SEQ ID NO: 936606 - DNA, 25 bp, Homo sapien
tactatgttctctattgtaaacctc

SEQ ID NO: 936607 - DNA, 25 bp, Homo sapien
caggctctctatgataccaggaaaa

SEQ ID NO: 936608 - DNA, 25 bp, Homo sapien
gtctgtgtaatcctttgtcccattt

SEQ ID NO: 936609 - DNA, 25 bp, Homo sapien
ccttggcacgccagactttttctct

SEQ ID NO: 936610 - DNA, 25 bp, Homo sapien
tttaatttccccttggcacgccaga

SEQ ID NO: 936611 - DNA, 25 bp, Homo sapien
atttccccttggcacgccagacttt

SEQ ID NO: 936612 - DNA, 25 bp, Homo sapien
cccttggcacgccagactttttctc

SEQ ID NO: 936613 - DNA, 25 bp, Homo sapien
tccaagttcacgtgacttaagaaaa

SEQ ID NO: 936614 - DNA, 25 bp, Homo sapien
tcctgcagaatactataagattgac

SEQ ID NO: 936615 - DNA, 25 bp, Homo sapien
cgtatgcttatgaaatattgttggc

SEQ ID NO: 936616 - DNA, 25 bp, Homo sapien
gaaagcccatccgaaaacagaataa

SEQ ID NO: 936617 - DNA, 25 bp, Homo sapien
catagtaggtcatccaacccacctt

SEQ ID NO: 936618 - DNA, 25 bp, Homo sapien
taaatactcatcaattgtctctact

SEQ ID NO: 936619 - DNA, 25 bp, Homo sapien
gcccagatgccactccataaatact

SEQ ID NO: 936620 - DNA, 25 bp, Homo sapien
gacaaataactgaaataggactata

SEQ ID NO: 936621 - DNA, 25 bp, Homo sapien
cagtgcttcaaatgatgcggaatca

SEQ ID NO: 936622 - DNA, 25 bp, Homo sapien
tcgcataagtttagcaaactgaacc

SEQ ID NO: 936623 - DNA, 25 bp, Homo sapien
tgcggaatcagaaagcagcgattga

SEQ ID NO: 936624 - DNA, 25 bp, Homo sapien
gcagcgattgaaacttactaacccg

SEQ ID NO: 936625 - DNA, 25 bp, Homo sapien
ctagtctttgaactgaagctctttg

SEQ ID NO: 936626 - DNA, 25 bp, Homo sapien
gtctttgaactgaagctctttgctg

SEQ ID NO: 936627 - DNA, 25 bp, Homo sapien
tagtctttgaactgaagctctttgc

SEQ ID NO: 936628 - DNA, 25 bp, Homo sapien
tctttgaactgaagctctttgctgc

SEQ ID NO: 936629 - DNA, 25 bp, Homo sapien
gcaatgaatcaccaaggaacttcat

SEQ ID NO: 936630 - DNA, 25 bp, Homo sapien
ctaagcaatgaatcaccaaggaact

SEQ ID NO: 936631 - DNA, 25 bp, Homo sapien
tcactaagcaatgaatcaccaagga

SEQ ID NO: 936632 - DNA, 25 bp, Homo sapien
aagcaatgaatcaccaaggaacttc

SEQ ID NO: 936633 - DNA, 25 bp, Homo sapien
tacagaccagtgttaaatggatttg

SEQ ID NO: 936634 - DNA, 25 bp, Homo sapien
ctctttgggaatgcataattctgac

SEQ ID NO: 936635 - DNA, 25 bp, Homo sapien
aacatgatagaataagacctgcact

SEQ ID NO: 936636 - DNA, 25 bp, Homo sapien
cagtcctatggctagttgaatttat

SEQ ID NO: 936637 - DNA, 25 bp, Homo sapien
aaactacaagaagggactgggatct

SEQ ID NO: 936638 - DNA, 25 bp, Homo sapien
tatgatgccacaaccatttagaatg

SEQ ID NO: 936639 - DNA, 25 bp, Homo sapien
tgatcatctaatcagtgtggcaaat

SEQ ID NO: 936640 - DNA, 25 bp, Homo sapien
gactctcacttacataaagtggtta

SEQ ID NO: 936641 - DNA, 25 bp, Homo sapien
tgggcagagagccatcactagaatt

SEQ ID NO: 936642 - DNA, 25 bp, Homo sapien
caagtaatactgattgcctgggata

SEQ ID NO: 936643 - DNA, 25 bp, Homo sapien
tattccaactgaaatgggtaggctt

SEQ ID NO: 936644 - DNA, 25 bp, Homo sapien
gaagctcttatagtagtctgggcaa

SEQ ID NO: 936645 - DNA, 25 bp, Homo sapien
ctgttggcatagaatgtgtagctgc

SEQ ID NO: 936646 - DNA, 25 bp, Homo sapien
tgttggcatagaatgtgtagctgct

SEQ ID NO: 936647 - DNA, 25 bp, Homo sapien
cctgttggcatagaatgtgtagctg

SEQ ID NO: 936648 - DNA, 25 bp, Homo sapien
ggaatacagcctttgggcctaccat

SEQ ID NO: 936649 - DNA, 25 bp, Homo sapien
ttcctagatttgtactaagcacagg

SEQ ID NO: 936650 - DNA, 25 bp, Homo sapien
tccaacctacaagagatcggcatag

SEQ ID NO: 936651 - DNA, 25 bp, Homo sapien
gcttgcttctgacgtgatatctcac

SEQ ID NO: 936652 - DNA, 25 bp, Homo sapien
ggcttgattttgcagcggctagtac

SEQ ID NO: 936653 - DNA, 25 bp, Homo sapien
tggcttgattttgcagcggctagta

SEQ ID NO: 936654 - DNA, 25 bp, Homo sapien
tttggcttgattttgcagcggctag

SEQ ID NO: 936655 - DNA, 25 bp, Homo sapien
cttgattttgcagcggctagtactg

SEQ ID NO: 936656 - DNA, 25 bp, Homo sapien
cgaccgtaatacaccctgagtttgt

SEQ ID NO: 936657 - DNA, 25 bp, Homo sapien
tagaaatggacttggcactcagagg

SEQ ID NO: 936658 - DNA, 25 bp, Homo sapien
ggaggtgccgtatcacatgtcactg

SEQ ID NO: 936659 - DNA, 25 bp, Homo sapien
tgaaccctgttactctcctactgga

SEQ ID NO: 936660 - DNA, 25 bp, Homo sapien
acataaactctgttagataatagaa

SEQ ID NO: 936661 - DNA, 25 bp, Homo sapien
aaaataatgaatactcgtcaaaaag

SEQ ID NO: 936662 - DNA, 25 bp, Homo sapien
tattatgattccctaaatatgcatg

SEQ ID NO: 936663 - DNA, 25 bp, Homo sapien
gaatactcgtcaaaaagactaacat

SEQ ID NO: 936664 - DNA, 25 bp, Homo sapien
tccctctgacccctttatgtaatgt

SEQ ID NO: 936665 - DNA, 25 bp, Homo sapien
tcacatagttcaagcctaaggttag

SEQ ID NO: 936666 - DNA, 25 bp, Homo sapien
tatgtaatgtttctacccatctccc

SEQ ID NO: 936667 - DNA, 25 bp, Homo sapien
gatgggacgtcaaatccacttcctc

SEQ ID NO: 936668 - DNA, 25 bp, Homo sapien
ctgctgggctaagagtggaacatcc

SEQ ID NO: 936669 - DNA, 25 bp, Homo sapien
tctaaactgtccaaacccacgtgct

SEQ ID NO: 936670 - DNA, 25 bp, Homo sapien
cttttggagccaactgaaactggaa

SEQ ID NO: 936671 - DNA, 25 bp, Homo sapien
gaatcaaatttaccgacccctggca

SEQ ID NO: 936672 - DNA, 25 bp, Homo sapien
ttaagtgagaggcttcaccagaggc

SEQ ID NO: 936673 - DNA, 25 bp, Homo sapien
taagtgagaggcttcaccagaggct

SEQ ID NO: 936674 - DNA, 25 bp, Homo sapien
agtgagaggcttcaccagaggcttt

SEQ ID NO: 936675 - DNA, 25 bp, Homo sapien
tgagaggcttcaccagaggctttcc

SEQ ID NO: 936676 - DNA, 25 bp, Homo sapien
ttcctccatccctacctgcatcatc

SEQ ID NO: 936677 - DNA, 25 bp, Homo sapien
gaaaatggtttccctctattgtcac

SEQ ID NO: 936678 - DNA, 25 bp, Homo sapien
tggtttccctctattgtcactttta

SEQ ID NO: 936679 - DNA, 25 bp, Homo sapien
cagggtgtgagaaaattgctgtctg

SEQ ID NO: 936680 - DNA, 25 bp, Homo sapien
cagtggccctatctcagttaactgc

SEQ ID NO: 936681 - DNA, 25 bp, Homo sapien
aatgcagtggccctatctcagttaa

SEQ ID NO: 936682 - DNA, 25 bp, Homo sapien
tgggcatgagccacccttcttggcc

SEQ ID NO: 936683 - DNA, 25 bp, Homo sapien
ccctatctcagttaactgcaatctc

SEQ ID NO: 936684 - DNA, 25 bp, Homo sapien
caatccctggactgctctcttatgt

SEQ ID NO: 936685 - DNA, 25 bp, Homo sapien
gaagtctcgctgttttccaagctag

SEQ ID NO: 936686 - DNA, 25 bp, Homo sapien
gattttctatcacatgcaatgcaaa

SEQ ID NO: 936687 - DNA, 25 bp, Homo sapien
gaacaaactgggctctaattatatc

SEQ ID NO: 936688 - DNA, 25 bp, Homo sapien
ttcaagtataagcaggatgcccaca

SEQ ID NO: 936689 - DNA, 25 bp, Homo sapien
gcagcattcaagtataagcaggatg

SEQ ID NO: 936690 - DNA, 25 bp, Homo sapien
aagcagcattcaagtataagcagga

SEQ ID NO: 936691 - DNA, 25 bp, Homo sapien
gcattcaagtataagcaggatgccc

SEQ ID NO: 936692 - DNA, 25 bp, Homo sapien
ccaggtagctatttagtagcagagc

SEQ ID NO: 936693 - DNA, 25 bp, Homo sapien
aattgagatgccaaactgaagtcag

SEQ ID NO: 936694 - DNA, 25 bp, Homo sapien
caaaaattgagatgccaaactgaag

SEQ ID NO: 936695 - DNA, 25 bp, Homo sapien
ggaaatcaaggctcacggaagttaa

SEQ ID NO: 936696 - DNA, 25 bp, Homo sapien
agttcaagcacactactgctgctca

SEQ ID NO: 936697 - DNA, 25 bp, Homo sapien
cagttcaagcacactactgctgctc

SEQ ID NO: 936698 - DNA, 25 bp, Homo sapien
gggtacactctctctgtatatgaat

SEQ ID NO: 936699 - DNA, 25 bp, Homo sapien
atgaattacagtaagagagctgggt

SEQ ID NO: 936700 - DNA, 25 bp, Homo sapien
aattacagtaagagagctgggtcat

SEQ ID NO: 936701 - DNA, 25 bp, Homo sapien
cactctctctgtatatgaattacag

SEQ ID NO: 936702 - DNA, 25 bp, Homo sapien
catagttaagtggtcataggaggcc

SEQ ID NO: 936703 - DNA, 25 bp, Homo sapien
tgaagtcccatctaagcctaactgg

SEQ ID NO: 936704 - DNA, 25 bp, Homo sapien
tagacatgattgacccacgtttccc

SEQ ID NO: 936705 - DNA, 25 bp, Homo sapien
aaacctagcggtgccagatttcaag

SEQ ID NO: 936706 - DNA, 25 bp, Homo sapien
caatgtttgaccactagggccttgg

SEQ ID NO: 936707 - DNA, 25 bp, Homo sapien
tgtgggcagattaccaactgctgtg

SEQ ID NO: 936708 - DNA, 25 bp, Homo sapien
ttccctcaagtagatccaaccacgt

SEQ ID NO: 936709 - DNA, 25 bp, Homo sapien
cagaacaccttatgtgagagaacaa

SEQ ID NO: 936710 - DNA, 25 bp, Homo sapien
cattcaaatgtggtccgaaaggagt

SEQ ID NO: 936711 - DNA, 25 bp, Homo sapien
tttttagcagagcagagcgtttagg

SEQ ID NO: 936712 - DNA, 25 bp, Homo sapien
catggctgagctacgacttggtgaa

SEQ ID NO: 936713 - DNA, 25 bp, Homo sapien
gatgacatagtctgtcctcaagact

SEQ ID NO: 936714 - DNA, 25 bp, Homo sapien
taatcttctgggtattattataatt

SEQ ID NO: 936715 - DNA, 25 bp, Homo sapien
actaatcttctgggtattattataa

SEQ ID NO: 936716 - DNA, 25 bp, Homo sapien
catactaatcttctgggtattatta

SEQ ID NO: 936717 - DNA, 25 bp, Homo sapien
tactaatcttctgggtattattata

SEQ ID NO: 936718 - DNA, 25 bp, Homo sapien
catgtatagctttgtgtgtatggcc

SEQ ID NO: 936719 - DNA, 25 bp, Homo sapien
tgtggatcgtccctatcttaagcaa

SEQ ID NO: 936720 - DNA, 25 bp, Homo sapien
caatgtaccagacttgccatgtgga

SEQ ID NO: 936721 - DNA, 25 bp, Homo sapien
gcacagcttcattgacattgagaga

SEQ ID NO: 936722 - DNA, 25 bp, Homo sapien
caccaggtttgagagtactcctgaa

SEQ ID NO: 936723 - DNA, 25 bp, Homo sapien
atttcctatgaactggccaccaggt

SEQ ID NO: 936724 - DNA, 25 bp, Homo sapien
ttcagataacaagggctgaatagag

SEQ ID NO: 936725 - DNA, 25 bp, Homo sapien
tggaatcatcaccacgccttgaccc

SEQ ID NO: 936726 - DNA, 25 bp, Homo sapien
tattttagatataccagactgcaat

SEQ ID NO: 936727 - DNA, 25 bp, Homo sapien
ggaggaacacaaggatacttcgcta

SEQ ID NO: 936728 - DNA, 25 bp, Homo sapien
gaagagacaactgtatatcagtaca

SEQ ID NO: 936729 - DNA, 25 bp, Homo sapien
catgatacagcaacccgaaagttga

SEQ ID NO: 936730 - DNA, 25 bp, Homo sapien
gctggctgggaccagtttgggtttc

SEQ ID NO: 936731 - DNA, 25 bp, Homo sapien
taaagattttgatcccagggcagag

SEQ ID NO: 936732 - DNA, 25 bp, Homo sapien
aactcaagtcatattgcagggcaag

SEQ ID NO: 936733 - DNA, 25 bp, Homo sapien
cgaagcgtggattttatgaactcaa

SEQ ID NO: 936734 - DNA, 25 bp, Homo sapien
cattcagactaagggatgcatttca

SEQ ID NO: 936735 - DNA, 25 bp, Homo sapien
tatttccagaggtaagcattctaga

SEQ ID NO: 936736 - DNA, 25 bp, Homo sapien
gcataagtgtactggtctccccata

SEQ ID NO: 936737 - DNA, 25 bp, Homo sapien
caattatcttagttcaagatgccac

SEQ ID NO: 936738 - DNA, 25 bp, Homo sapien
taatgggttacaaaatgtgactatc

SEQ ID NO: 936739 - DNA, 25 bp, Homo sapien
cactgtgcccgccatagttcactag

SEQ ID NO: 936740 - DNA, 25 bp, Homo sapien
ccaggggctgggttcagttgcttca

SEQ ID NO: 936741 - DNA, 25 bp, Homo sapien
gcccgccatagttcactagtattat

SEQ ID NO: 936742 - DNA, 25 bp, Homo sapien
tcctacaggaattaccaggactggg

SEQ ID NO: 936743 - DNA, 25 bp, Homo sapien
ttttcccgctatccttctcttcaat

SEQ ID NO: 936744 - DNA, 25 bp, Homo sapien
ccacgttgctttatcttagtaaaag

SEQ ID NO: 936745 - DNA, 25 bp, Homo sapien
ttgctttatcttagtaaaagcccat

SEQ ID NO: 936746 - DNA, 25 bp, Homo sapien
gaaccacgttgctttatcttagtaa

SEQ ID NO: 936747 - DNA, 25 bp, Homo sapien
tccaaggaatagatgtacagaacag

SEQ ID NO: 936748 - DNA, 25 bp, Homo sapien
tgtggcttcactgcagaattcccta

SEQ ID NO: 936749 - DNA, 25 bp, Homo sapien
tgttgtacaagcacagctatcctga

SEQ ID NO: 936750 - DNA, 25 bp, Homo sapien
agaagggctcccaccaaatgataca

SEQ ID NO: 936751 - DNA, 25 bp, Homo sapien
tcttcacagagtattatgccataac

SEQ ID NO: 936752 - DNA, 25 bp, Homo sapien
agatttttacatccattcttcacag

SEQ ID NO: 936753 - DNA, 25 bp, Homo sapien
cacataatcctaggatcatcagagg

SEQ ID NO: 936754 - DNA, 25 bp, Homo sapien
tggagatacacaggattagttatgg

SEQ ID NO: 936755 - DNA, 25 bp, Homo sapien
ttgatttgtgtatagatacacatgc

SEQ ID NO: 936756 - DNA, 25 bp, Homo sapien
gttgatttgtgtatagatacacatg

SEQ ID NO: 936757 - DNA, 25 bp, Homo sapien
tgatttgtgtatagatacacatgcc

SEQ ID NO: 936758 - DNA, 25 bp, Homo sapien
tggcaatatcagttttcaggcagga

SEQ ID NO: 936759 - DNA, 25 bp, Homo sapien
aataattggaaggatatgctgtttc

SEQ ID NO: 936760 - DNA, 25 bp, Homo sapien
tgctatcaactgtgcagtctcacag

SEQ ID NO: 936761 - DNA, 25 bp, Homo sapien
ctcaagtctattgttttaatagcac

SEQ ID NO: 936762 - DNA, 25 bp, Homo sapien
tctgtacaggcgacattctaagtgt

SEQ ID NO: 936763 - DNA, 25 bp, Homo sapien
cataatgagtcctaaggcaagtggc

SEQ ID NO: 936764 - DNA, 25 bp, Homo sapien
caaatattgagaagccacatggtgt

SEQ ID NO: 936765 - DNA, 25 bp, Homo sapien
catcctagcctgtagcgaggtgagg

SEQ ID NO: 936766 - DNA, 25 bp, Homo sapien
tggcaaacactacttagaaaaaagc

SEQ ID NO: 936767 - DNA, 25 bp, Homo sapien
tgttgtacagtagtatttccaaggg

SEQ ID NO: 936768 - DNA, 25 bp, Homo sapien
aactaccaatctacacacctggcaa

SEQ ID NO: 936769 - DNA, 25 bp, Homo sapien
aaaaaagcaccctaagttgatgttg

SEQ ID NO: 936770 - DNA, 25 bp, Homo sapien
tgcatctataccactcctttgtcca

SEQ ID NO: 936771 - DNA, 25 bp, Homo sapien
atatttgaaatactccgggtctgca

SEQ ID NO: 936772 - DNA, 25 bp, Homo sapien
cgggtctgcatctataccactcctt

SEQ ID NO: 936773 - DNA, 25 bp, Homo sapien
gtttttgccattggtgatacaaagg

SEQ ID NO: 936774 - DNA, 25 bp, Homo sapien
tagggaccgatcacttttcaaacac

SEQ ID NO: 936775 - DNA, 25 bp, Homo sapien
tcagaatttatcagtcagaggaagc

SEQ ID NO: 936776 - DNA, 25 bp, Homo sapien
tggtctcttactccggatcttgtga

SEQ ID NO: 936777 - DNA, 25 bp, Homo sapien
tatattgagaaaaccagagctctcc

SEQ ID NO: 936778 - DNA, 25 bp, Homo sapien
gatgtaaacataagtcttgtggcct

SEQ ID NO: 936779 - DNA, 25 bp, Homo sapien
tcaatatttgagttggatcaggcaa

SEQ ID NO: 936780 - DNA, 25 bp, Homo sapien
tacactattgcgactaagttctggt

SEQ ID NO: 936781 - DNA, 25 bp, Homo sapien
tttattcctcatgtcacagtctgaa

SEQ ID NO: 936782 - DNA, 25 bp, Homo sapien
ggctcagccattgggattaagatca

SEQ ID NO: 936783 - DNA, 25 bp, Homo sapien
catccatgaggacggaagaaccaaa

SEQ ID NO: 936784 - DNA, 25 bp, Homo sapien
cctgtgtgcaagagaaatcagcttc

SEQ ID NO: 936785 - DNA, 25 bp, Homo sapien
caaatgtgcatataatggctcagcc

SEQ ID NO: 936786 - DNA, 25 bp, Homo sapien
agtggagctgctcataatatttggg

SEQ ID NO: 936787 - DNA, 25 bp, Homo sapien
tacatggtaggtcagggatgcctga

SEQ ID NO: 936788 - DNA, 25 bp, Homo sapien
tggctgcatttccactacatggtag

SEQ ID NO: 936789 - DNA, 25 bp, Homo sapien
catttccactacatggtaggtcagg

SEQ ID NO: 936790 - DNA, 25 bp, Homo sapien
gccttggaattagaacactttgatg

SEQ ID NO: 936791 - DNA, 25 bp, Homo sapien
tagaatttgactgagcctatgtagc

SEQ ID NO: 936792 - DNA, 25 bp, Homo sapien
aaaatttcttgagccctaccagagc

SEQ ID NO: 936793 - DNA, 25 bp, Homo sapien
tataattacatgcactcctgggtca

SEQ ID NO: 936794 - DNA, 25 bp, Homo sapien
tggctgctgtgaactttagtggcaa

SEQ ID NO: 936795 - DNA, 25 bp, Homo sapien
gctgctgtgaactttagtggcaaac

SEQ ID NO: 936796 - DNA, 25 bp, Homo sapien
cagccatagtgcaaggaatgtaggc

SEQ ID NO: 936797 - DNA, 25 bp, Homo sapien
ttagatgcaatagcagccatagtgc

SEQ ID NO: 936798 - DNA, 25 bp, Homo sapien
tctcttgaaacataactactgggcc

SEQ ID NO: 936799 - DNA, 25 bp, Homo sapien
caggagatgaaccaactgtgggctc

SEQ ID NO: 936800 - DNA, 25 bp, Homo sapien
tataggaatccctggcatatggtca

SEQ ID NO: 936801 - DNA, 25 bp, Homo sapien
gaacttactctttgctagcgtgaca

SEQ ID NO: 936802 - DNA, 25 bp, Homo sapien
gacgcaaatatccatacataccgca

SEQ ID NO: 936803 - DNA, 25 bp, Homo sapien
taccgcacacgaattgtgcagtgag

SEQ ID NO: 936804 - DNA, 25 bp, Homo sapien
tacataccgcacacgaattgtgcag

SEQ ID NO: 936805 - DNA, 25 bp, Homo sapien
ctaatatgcctgtgacgcaaatatc

SEQ ID NO: 936806 - DNA, 25 bp, Homo sapien
ggttcatttaagtcaggttggagct

SEQ ID NO: 936807 - DNA, 25 bp, Homo sapien
ccccaaatcggagccagaggagagc

SEQ ID NO: 936808 - DNA, 25 bp, Homo sapien
tctttcgagcaaagacagggagttc

SEQ ID NO: 936809 - DNA, 25 bp, Homo sapien
gggcaacccctgagtaaagtccatg

SEQ ID NO: 936810 - DNA, 25 bp, Homo sapien
tgcgctcctagcaccgcgccttctt

SEQ ID NO: 936811 - DNA, 25 bp, Homo sapien
cccagcactagactgcgctcctagc

SEQ ID NO: 936812 - DNA, 25 bp, Homo sapien
catctcctccgacaaccattcatct

SEQ ID NO: 936813 - DNA, 25 bp, Homo sapien
accgcgccttcttccggagcctcct

SEQ ID NO: 936814 - DNA, 25 bp, Homo sapien
cagaaacgctggacgcagttctccg

SEQ ID NO: 936815 - DNA, 25 bp, Homo sapien
ttagtcagtacgcacgtgacgcgcg

SEQ ID NO: 936816 - DNA, 25 bp, Homo sapien
agttacagaagacccgtcaaagcgc

SEQ ID NO: 936817 - DNA, 25 bp, Homo sapien
gtggctcacggatccctaagggaca

SEQ ID NO: 936818 - DNA, 25 bp, Homo sapien
ttcgggtgatgccactgacgcacat

SEQ ID NO: 936819 - DNA, 25 bp, Homo sapien
ggcgaaactcacttgcactgcgggt

SEQ ID NO: 936820 - DNA, 25 bp, Homo sapien
taactgagcaaacaaagttgcacgc

SEQ ID NO: 936821 - DNA, 25 bp, Homo sapien
aaagctcttcatccgcttcgggtga

SEQ ID NO: 936822 - DNA, 25 bp, Homo sapien
ggcaaaacactgagcaagccgctgc

SEQ ID NO: 936823 - DNA, 25 bp, Homo sapien
cgcccggcaaaacactgagcaagcc

SEQ ID NO: 936824 - DNA, 25 bp, Homo sapien
gcaaaacactgagcaagccgctgct

SEQ ID NO: 936825 - DNA, 25 bp, Homo sapien
ccggcaaaacactgagcaagccgct

SEQ ID NO: 936826 - DNA, 25 bp, Homo sapien
cagtgtttgatcacggccagcacgt

SEQ ID NO: 936827 - DNA, 25 bp, Homo sapien
ggttcctgccaatgacactctcatg

SEQ ID NO: 936828 - DNA, 25 bp, Homo sapien
tgcttgacacacttgagccggaggg

SEQ ID NO: 936829 - DNA, 25 bp, Homo sapien
catggactttgctagtccagtggct

SEQ ID NO: 936830 - DNA, 25 bp, Homo sapien
agtggggcgagtcgcctcagttcct

SEQ ID NO: 936831 - DNA, 25 bp, Homo sapien
cagtggggcgagtcgcctcagttcc

SEQ ID NO: 936832 - DNA, 25 bp, Homo sapien
gcgagtcgcctcagttcctgggctc

SEQ ID NO: 936833 - DNA, 25 bp, Homo sapien
ggggcgagtcgcctcagttcctggg

SEQ ID NO: 936834 - DNA, 25 bp, Homo sapien
aagaacagcagactttgccttcgcc

SEQ ID NO: 936835 - DNA, 25 bp, Homo sapien
ctctattcggtgctttccctcttct

SEQ ID NO: 936836 - DNA, 25 bp, Homo sapien
cttggatgaggttgtgctgtccctt

SEQ ID NO: 936837 - DNA, 25 bp, Homo sapien
taggagagcttggatgaggttgtgc

SEQ ID NO: 936838 - DNA, 25 bp, Homo sapien
aaatagcgggacctggacttgtggc

SEQ ID NO: 936839 - DNA, 25 bp, Homo sapien
gcgccaggctcctgtgcgaggagga

SEQ ID NO: 936840 - DNA, 25 bp, Homo sapien
cctgggctccgatggagcagaaata

SEQ ID NO: 936841 - DNA, 25 bp, Homo sapien
gaggaggacgcgctgactccctccg

SEQ ID NO: 936842 - DNA, 25 bp, Homo sapien
cctgggagccttgtagcgtggggga

SEQ ID NO: 936843 - DNA, 25 bp, Homo sapien
tgccgtgagaaggagttggggcggg

SEQ ID NO: 936844 - DNA, 25 bp, Homo sapien
gcggggcattgcgggagaaggcctg

SEQ ID NO: 936845 - DNA, 25 bp, Homo sapien
cgtgggggagttcactgtgtagaga

SEQ ID NO: 936846 - DNA, 25 bp, Homo sapien
tatagtcacttatttgtcttaaagt

SEQ ID NO: 936847 - DNA, 25 bp, Homo sapien
gtcttcatctatatagtcacttatt

SEQ ID NO: 936848 - DNA, 25 bp, Homo sapien
cctgattacgcagaagggaagcagc

SEQ ID NO: 936849 - DNA, 25 bp, Homo sapien
gggaagcagcctcgcattccccggg

SEQ ID NO: 936850 - DNA, 25 bp, Homo sapien
tagcggacggctgcggttgtctggt

SEQ ID NO: 936851 - DNA, 25 bp, Homo sapien
cagtaggggaatttagcggacggct

SEQ ID NO: 936852 - DNA, 25 bp, Homo sapien
aaaatggtacattcggagctggaac

SEQ ID NO: 936853 - DNA, 25 bp, Homo sapien
gagaagactcccgagggtgaaaatg

SEQ ID NO: 936854 - DNA, 25 bp, Homo sapien
ttcttttcgccaggtttgcatccaa

SEQ ID NO: 936855 - DNA, 25 bp, Homo sapien
gaagaatccttaagacggtctggcc

SEQ ID NO: 936856 - DNA, 25 bp, Homo sapien
gagaagttgagtgttagcattatga

SEQ ID NO: 936857 - DNA, 25 bp, Homo sapien
ccagagaagttgagtgttagcatta

SEQ ID NO: 936858 - DNA, 25 bp, Homo sapien
aagttgagtgttagcattatgaggc

SEQ ID NO: 936859 - DNA, 25 bp, Homo sapien
cagagaagttgagtgttagcattat

SEQ ID NO: 936860 - DNA, 25 bp, Homo sapien
ctggcttgcattacaacactgttga

SEQ ID NO: 936861 - DNA, 25 bp, Homo sapien
tcctcactgaggttgaatgaataag

SEQ ID NO: 936862 - DNA, 25 bp, Homo sapien
gaactcttagtacatgctactggaa

SEQ ID NO: 936863 - DNA, 25 bp, Homo sapien
tatagacctattaaggcccaaccat

SEQ ID NO: 936864 - DNA, 25 bp, Homo sapien
tcgagagaaagaatatgaagctagc

SEQ ID NO: 936865 - DNA, 25 bp, Homo sapien
gcataggttcacaaagaatgagtca

SEQ ID NO: 936866 - DNA, 25 bp, Homo sapien
taaggagatttggaaaaccattgtc

SEQ ID NO: 936867 - DNA, 25 bp, Homo sapien
ggtgaacctcacaaactatagacca

SEQ ID NO: 936868 - DNA, 25 bp, Homo sapien
cagccgtccctctcattctttaagt

SEQ ID NO: 936869 - DNA, 25 bp, Homo sapien
ggttctttctagtgacaaattatat

SEQ ID NO: 936870 - DNA, 25 bp, Homo sapien
tgttttctaaggtacaagatgttcc

SEQ ID NO: 936871 - DNA, 25 bp, Homo sapien
tctttaagtacttccatgttttcta

SEQ ID NO: 936872 - DNA, 25 bp, Homo sapien
gaacaaacgcgctttcttgtgcccc

SEQ ID NO: 936873 - DNA, 25 bp, Homo sapien
catgtcttcccttcaccgtcttgaa

SEQ ID NO: 936874 - DNA, 25 bp, Homo sapien
tttcttgtgcccctacatgtcttcc

SEQ ID NO: 936875 - DNA, 25 bp, Homo sapien
tcacaaagcaccagaacaaacgcgc

SEQ ID NO: 936876 - DNA, 25 bp, Homo sapien
aatgaagttttgagggtaccgacat

SEQ ID NO: 936877 - DNA, 25 bp, Homo sapien
cctgattaagattcttgtgtggtcc

SEQ ID NO: 936878 - DNA, 25 bp, Homo sapien
gagggtaccgacatcttgctggcag

SEQ ID NO: 936879 - DNA, 25 bp, Homo sapien
gacgacattccataagcaatgaagt

SEQ ID NO: 936880 - DNA, 25 bp, Homo sapien
tgtggttgatggtaggagttgttgc

SEQ ID NO: 936881 - DNA, 25 bp, Homo sapien
ctgtggttgatggtaggagttgttg

SEQ ID NO: 936882 - DNA, 25 bp, Homo sapien
tccatgtcatatacaaggtctttta

SEQ ID NO: 936883 - DNA, 25 bp, Homo sapien
taaattccatgtcatatacaaggtc

SEQ ID NO: 936884 - DNA, 25 bp, Homo sapien
atatacaaggtcttttattgtcctc

SEQ ID NO: 936885 - DNA, 25 bp, Homo sapien
cttgctaaattccatgtcatataca

SEQ ID NO: 936886 - DNA, 25 bp, Homo sapien
ttccaaagagtttacagcttcacag

SEQ ID NO: 936887 - DNA, 25 bp, Homo sapien
caggcaaatattggatttagaaaca

SEQ ID NO: 936888 - DNA, 25 bp, Homo sapien
ccacagtttccaaagagtttacagc

SEQ ID NO: 936889 - DNA, 25 bp, Homo sapien
gcttcacaggaggtctcctcacagg

SEQ ID NO: 936890 - DNA, 25 bp, Homo sapien
tagtttagaagtttccagtattgct

SEQ ID NO: 936891 - DNA, 25 bp, Homo sapien
agtttagaagtttccagtattgctc

SEQ ID NO: 936892 - DNA, 25 bp, Homo sapien
ttagtttagaagtttccagtattgc

SEQ ID NO: 936893 - DNA, 25 bp, Homo sapien
caccccttatgctttatactggtgg

SEQ ID NO: 936894 - DNA, 25 bp, Homo sapien
tcaccccttatgctttatactggtg

SEQ ID NO: 936895 - DNA, 25 bp, Homo sapien
taccaaagctaatcgttcctgtttc

SEQ ID NO: 936896 - DNA, 25 bp, Homo sapien
ttacaacatcgcttccttagacgga

SEQ ID NO: 936897 - DNA, 25 bp, Homo sapien
tccagaagcatagaacttacaacat

SEQ ID NO: 936898 - DNA, 25 bp, Homo sapien
ctctgctaaatactgctgacagata

SEQ ID NO: 936899 - DNA, 25 bp, Homo sapien
tctctgtagcaatgcaacacttcat

SEQ ID NO: 936900 - DNA, 25 bp, Homo sapien
ttcaaagatgtccaagaccttctct

SEQ ID NO: 936901 - DNA, 25 bp, Homo sapien
tcaaagatgtccaagaccttctctg

SEQ ID NO: 936902 - DNA, 25 bp, Homo sapien
cttcaaagatgtccaagaccttctc

SEQ ID NO: 936903 - DNA, 25 bp, Homo sapien
ccaccagtgggcaaagatattgagt

SEQ ID NO: 936904 - DNA, 25 bp, Homo sapien
acctgaatacatgctgcctctgcca

SEQ ID NO: 936905 - DNA, 25 bp, Homo sapien
atattgagtgttggtggtgacatga

SEQ ID NO: 936906 - DNA, 25 bp, Homo sapien
ggtggtgacatgaggccttttctct

SEQ ID NO: 936907 - DNA, 25 bp, Homo sapien
actggttcagatcccagcgtgggca

SEQ ID NO: 936908 - DNA, 25 bp, Homo sapien
tgtaactgactatggccgtgatgag

SEQ ID NO: 936909 - DNA, 25 bp, Homo sapien
taagaagtggacattatctcctggc

SEQ ID NO: 936910 - DNA, 25 bp, Homo sapien
tgagccacctgcaagtaaacatgat

SEQ ID NO: 936911 - DNA, 25 bp, Homo sapien
gcattgtaccagatacaaccttttt

SEQ ID NO: 936912 - DNA, 25 bp, Homo sapien
ctgccacgggtataccatgtcgcat

SEQ ID NO: 936913 - DNA, 25 bp, Homo sapien
taagtggttgtgataatactgacaa

SEQ ID NO: 936914 - DNA, 25 bp, Homo sapien
caaaacactgaattcagtggtaagt

SEQ ID NO: 936915 - DNA, 25 bp, Homo sapien
cactgtgatgcaatacttagataaa

SEQ ID NO: 936916 - DNA, 25 bp, Homo sapien
taaaagacatttgatggtaaacaca

SEQ ID NO: 936917 - DNA, 25 bp, Homo sapien
tctatctaatatggcttcagtgatg

SEQ ID NO: 936918 - DNA, 25 bp, Homo sapien
ttttttgggcctctatctaatatgg

SEQ ID NO: 936919 - DNA, 25 bp, Homo sapien
tcatacaggcttccgaggaatggca

SEQ ID NO: 936920 - DNA, 25 bp, Homo sapien
tacaggcttccgaggaatggcattc

SEQ ID NO: 936921 - DNA, 25 bp, Homo sapien
atacaggcttccgaggaatggcatt

SEQ ID NO: 936922 - DNA, 25 bp, Homo sapien
catacaggcttccgaggaatggcat

SEQ ID NO: 936923 - DNA, 25 bp, Homo sapien
cctggttccccagtgataaatctgc

SEQ ID NO: 936924 - DNA, 25 bp, Homo sapien
tatgacacttaagatgttgagcctg

SEQ ID NO: 936925 - DNA, 25 bp, Homo sapien
gaaacagtacagagatatcccaggt

SEQ ID NO: 936926 - DNA, 25 bp, Homo sapien
gaacaagacttgcatccatggaata

SEQ ID NO: 936927 - DNA, 25 bp, Homo sapien
tcactgtttccagatatgtctagga

SEQ ID NO: 936928 - DNA, 25 bp, Homo sapien
ctgtttccagatatgtctaggaggg

SEQ ID NO: 936929 - DNA, 25 bp, Homo sapien
ttattccggaaagcatatcacaata

SEQ ID NO: 936930 - DNA, 25 bp, Homo sapien
ccggaaagcatatcacaatatcaaa

SEQ ID NO: 936931 - DNA, 25 bp, Homo sapien
gatgctcgaatgctccaggagactg

SEQ ID NO: 936932 - DNA, 25 bp, Homo sapien
gctccaggagactgattttgagagg

SEQ ID NO: 936933 - DNA, 25 bp, Homo sapien
gagactgattttgagaggtgaagcc

SEQ ID NO: 936934 - DNA, 25 bp, Homo sapien
aaaactctgatgctcgaatgctcca

SEQ ID NO: 936935 - DNA, 25 bp, Homo sapien
gaacagttggttccgcatgcattac

SEQ ID NO: 936936 - DNA, 25 bp, Homo sapien
caatttgaccggtaataaaacagtg

SEQ ID NO: 936937 - DNA, 25 bp, Homo sapien
agtcagtgaaaccaagaacccttga

SEQ ID NO: 936938 - DNA, 25 bp, Homo sapien
tatccatcgaaattccgctgtcttg

SEQ ID NO: 936939 - DNA, 25 bp, Homo sapien
ccgtagattgtagtttatggattgt

SEQ ID NO: 936940 - DNA, 25 bp, Homo sapien
catgccattgtaggtccgtagattg

SEQ ID NO: 936941 - DNA, 25 bp, Homo sapien
cactaactgacgaggagctgagttt

SEQ ID NO: 936942 - DNA, 25 bp, Homo sapien
tatggattgtttgcactaactgacg

SEQ ID NO: 936943 - DNA, 25 bp, Homo sapien
gctgtattgcaaggctctccacttt

SEQ ID NO: 936944 - DNA, 25 bp, Homo sapien
tgtaccaaaccttttgcctttgaca

SEQ ID NO: 936945 - DNA, 25 bp, Homo sapien
taacaggctgctccagtactctgct

SEQ ID NO: 936946 - DNA, 25 bp, Homo sapien
caaatgcacccaggataacaggctg

SEQ ID NO: 936947 - DNA, 25 bp, Homo sapien
tggatcaggcccacgactttgttct

SEQ ID NO: 936948 - DNA, 25 bp, Homo sapien
aggcccacgactttgttctctggtc

SEQ ID NO: 936949 - DNA, 25 bp, Homo sapien
cacctgctgcgctggaggagtcaag

SEQ ID NO: 936950 - DNA, 25 bp, Homo sapien
tctggtcctttgaggttagccacct

SEQ ID NO: 936951 - DNA, 25 bp, Homo sapien
ggtggccagagtctatgcaagtggg

SEQ ID NO: 936952 - DNA, 25 bp, Homo sapien
ccagagtctatgcaagtgggtacat

SEQ ID NO: 936953 - DNA, 25 bp, Homo sapien
tggtggccagagtctatgcaagtgg

SEQ ID NO: 936954 - DNA, 25 bp, Homo sapien
gtggccagagtctatgcaagtgggt

SEQ ID NO: 936955 - DNA, 25 bp, Homo sapien
ttaggactgacttggtgatgcaggc

SEQ ID NO: 936956 - DNA, 25 bp, Homo sapien
gcttaggactgacttggtgatgcag

SEQ ID NO: 936957 - DNA, 25 bp, Homo sapien
cttaggactgacttggtgatgcagg

SEQ ID NO: 936958 - DNA, 25 bp, Homo sapien
ggcttaggactgacttggtgatgca

SEQ ID NO: 936959 - DNA, 25 bp, Homo sapien
gctcatttaggccatatttgccagc

SEQ ID NO: 936960 - DNA, 25 bp, Homo sapien
gccagcatagatatacaatctcctt

SEQ ID NO: 936961 - DNA, 25 bp, Homo sapien
atttgccagcatagatatacaatct

SEQ ID NO: 936962 - DNA, 25 bp, Homo sapien
tcaaagctcatttaggccatatttg

SEQ ID NO: 936963 - DNA, 25 bp, Homo sapien
taggtgaagcagaaatcatctcgag

SEQ ID NO: 936964 - DNA, 25 bp, Homo sapien
gcatttgttgtctccaagccactgt

SEQ ID NO: 936965 - DNA, 25 bp, Homo sapien
tcatctcgaggaaatagcactgaac

SEQ ID NO: 936966 - DNA, 25 bp, Homo sapien
cactgaacagtaatgccctgaaaca

SEQ ID NO: 936967 - DNA, 25 bp, Homo sapien
gcatcctcttgaccgcgtctgagtc

SEQ ID NO: 936968 - DNA, 25 bp, Homo sapien
tgcatcctcttgaccgcgtctgagt

SEQ ID NO: 936969 - DNA, 25 bp, Homo sapien
caaaggaagctaccctaatgatccc

SEQ ID NO: 936970 - DNA, 25 bp, Homo sapien
gactagtgctattgtcaggtggcaa

SEQ ID NO: 936971 - DNA, 25 bp, Homo sapien
gaatcctttgcgctcaaacttagga

SEQ ID NO: 936972 - DNA, 25 bp, Homo sapien
tgttgagagcatatttgaagccagt

SEQ ID NO: 936973 - DNA, 25 bp, Homo sapien
gatgaacaatggattttagggcttt

SEQ ID NO: 936974 - DNA, 25 bp, Homo sapien
gaacaatggattttagggctttggc

SEQ ID NO: 936975 - DNA, 25 bp, Homo sapien
caatggattttagggctttggctcc

SEQ ID NO: 936976 - DNA, 25 bp, Homo sapien
atgatgaacaatggattttagggct

SEQ ID NO: 936977 - DNA, 25 bp, Homo sapien
gttcagaggctttaagcatatcagt

SEQ ID NO: 936978 - DNA, 25 bp, Homo sapien
cttgaaagccaggatgggtacaagt

SEQ ID NO: 936979 - DNA, 25 bp, Homo sapien
tacaagttgttcagaggctttaagc

SEQ ID NO: 936980 - DNA, 25 bp, Homo sapien
tcagttaatgtcttccccaaagcca

SEQ ID NO: 936981 - DNA, 25 bp, Homo sapien
actttgactaacttcaccaggtgca

SEQ ID NO: 936982 - DNA, 25 bp, Homo sapien
gctcttgagacataaatcgaatttc

SEQ ID NO: 936983 - DNA, 25 bp, Homo sapien
cgaatttccattcagactttgacta

SEQ ID NO: 936984 - DNA, 25 bp, Homo sapien
ctattgctcttgagacataaatcga

SEQ ID NO: 936985 - DNA, 25 bp, Homo sapien
gatttcctcacataacaggactctg

SEQ ID NO: 936986 - DNA, 25 bp, Homo sapien
tcagaacaaaagagtggaggaaaca

SEQ ID NO: 936987 - DNA, 25 bp, Homo sapien
caattctggaactttgggatcctcc

SEQ ID NO: 936988 - DNA, 25 bp, Homo sapien
aagcagtggctaacgtttgtagaaa

SEQ ID NO: 936989 - DNA, 25 bp, Homo sapien
ccagttctagtatgtgctgtcgaag

SEQ ID NO: 936990 - DNA, 25 bp, Homo sapien
ttccagttctagtatgtgctgtcga

SEQ ID NO: 936991 - DNA, 25 bp, Homo sapien
cattcttgtgtagaagccatgctaa

SEQ ID NO: 936992 - DNA, 25 bp, Homo sapien
tcattccagttctagtatgtgctgt

SEQ ID NO: 936993 - DNA, 25 bp, Homo sapien
ttcaattatctggtagtgtgtgact

SEQ ID NO: 936994 - DNA, 25 bp, Homo sapien
gaggactttcaattatctggtagtg

SEQ ID NO: 936995 - DNA, 25 bp, Homo sapien
ggtcccgtgaggactttcaattatc

SEQ ID NO: 936996 - DNA, 25 bp, Homo sapien
cccgtgaggactttcaattatctgg

SEQ ID NO: 936997 - DNA, 25 bp, Homo sapien
tatttgtagatgtttccgcaagtct

SEQ ID NO: 936998 - DNA, 25 bp, Homo sapien
tccctttctccactggataatgccg

SEQ ID NO: 936999 - DNA, 25 bp, Homo sapien
ggataatgccgtgctcatgtttcag

SEQ ID NO: 937000 - DNA, 25 bp, Homo sapien
ggcatctacaactctccctggcaga

SEQ ID NO: 937001 - DNA, 25 bp, Homo sapien
ctggcagatttagccatgtgctctc

SEQ ID NO: 937002 - DNA, 25 bp, Homo sapien
tatgactaatggtaccagtctgtct

SEQ ID NO: 937003 - DNA, 25 bp, Homo sapien
ctaatggtaccagtctgtctaccag

SEQ ID NO: 937004 - DNA, 25 bp, Homo sapien
gactaatggtaccagtctgtctacc

SEQ ID NO: 937005 - DNA, 25 bp, Homo sapien
aatggtaccagtctgtctaccagga

SEQ ID NO: 937006 - DNA, 25 bp, Homo sapien
cttcaaaatgtagtactctatgcat

SEQ ID NO: 937007 - DNA, 25 bp, Homo sapien
tggatattttcctcatactctgctc

SEQ ID NO: 937008 - DNA, 25 bp, Homo sapien
ttctggatattttcctcatactctg

SEQ ID NO: 937009 - DNA, 25 bp, Homo sapien
tcatactctgctccactcaaagcac

SEQ ID NO: 937010 - DNA, 25 bp, Homo sapien
cagagccagtgacccacagcctcta

SEQ ID NO: 937011 - DNA, 25 bp, Homo sapien
tgacctagtcaaggagatatcttct

SEQ ID NO: 937012 - DNA, 25 bp, Homo sapien
gatatcttctaagtctaagacattg

SEQ ID NO: 937013 - DNA, 25 bp, Homo sapien
taatttcgtaatccagagatcattt

SEQ ID NO: 937014 - DNA, 25 bp, Homo sapien
catttctaggcggcctacaggccgt

SEQ ID NO: 937015 - DNA, 25 bp, Homo sapien
gctttggatatttgtcatcagttca

SEQ ID NO: 937016 - DNA, 25 bp, Homo sapien
tctaggcggcctacaggccgtaaaa

SEQ ID NO: 937017 - DNA, 25 bp, Homo sapien
cagacatttctaggcggcctacagg

SEQ ID NO: 937018 - DNA, 25 bp, Homo sapien
ttagttcttgctgttaagagcacac

SEQ ID NO: 937019 - DNA, 25 bp, Homo sapien
agttcttgctgttaagagcacactt

SEQ ID NO: 937020 - DNA, 25 bp, Homo sapien
tagttcttgctgttaagagcacact

SEQ ID NO: 937021 - DNA, 25 bp, Homo sapien
gttcttgctgttaagagcacacttc

SEQ ID NO: 937022 - DNA, 25 bp, Homo sapien
aaactgtggcatattacttgggccc

SEQ ID NO: 937023 - DNA, 25 bp, Homo sapien
catcgaaactacagaggaggagatc

SEQ ID NO: 937024 - DNA, 25 bp, Homo sapien
gactgtatgtaataagagggctgca

SEQ ID NO: 937025 - DNA, 25 bp, Homo sapien
taggaatggcaccacccataaggta

SEQ ID NO: 937026 - DNA, 25 bp, Homo sapien
ccacttgtccaaggggctgtgattg

SEQ ID NO: 937027 - DNA, 25 bp, Homo sapien
tgccacttgtccaaggggctgtgat

SEQ ID NO: 937028 - DNA, 25 bp, Homo sapien
tgtccaaggggctgtgattgggaac

SEQ ID NO: 937029 - DNA, 25 bp, Homo sapien
tgagtacagaacctgccacttgtcc

SEQ ID NO: 937030 - DNA, 25 bp, Homo sapien
tgttggagatatggatcttctgcca

SEQ ID NO: 937031 - DNA, 25 bp, Homo sapien
cttgttggagatatggatcttctgc

SEQ ID NO: 937032 - DNA, 25 bp, Homo sapien
ttgttggagatatggatcttctgcc

SEQ ID NO: 937033 - DNA, 25 bp, Homo sapien
ctgaagcttagtgcggataaacatg

SEQ ID NO: 937034 - DNA, 25 bp, Homo sapien
agcttagtgcggataaacatgatga

SEQ ID NO: 937035 - DNA, 25 bp, Homo sapien
gaagcttagtgcggataaacatgat

SEQ ID NO: 937036 - DNA, 25 bp, Homo sapien
cttagtgcggataaacatgatgact

SEQ ID NO: 937037 - DNA, 25 bp, Homo sapien
cagggctacatcttgttgatgcaga

SEQ ID NO: 937038 - DNA, 25 bp, Homo sapien
cacagggctacatcttgttgatgca

SEQ ID NO: 937039 - DNA, 25 bp, Homo sapien
agggctacatcttgttgatgcagat

SEQ ID NO: 937040 - DNA, 25 bp, Homo sapien
ggctacatcttgttgatgcagatga

SEQ ID NO: 937041 - DNA, 25 bp, Homo sapien
agaagacagcagctcatattcatca

SEQ ID NO: 937042 - DNA, 25 bp, Homo sapien
cttattggcacaaatacggacagcc

SEQ ID NO: 937043 - DNA, 25 bp, Homo sapien
agacagcagctcatattcatcagac

SEQ ID NO: 937044 - DNA, 25 bp, Homo sapien
tattggcacaaatacggacagcctc

SEQ ID NO: 937045 - DNA, 25 bp, Homo sapien
cgagactttgggtatggctgttttt

SEQ ID NO: 937046 - DNA, 25 bp, Homo sapien
agaaacgagactttgggtatggctg

SEQ ID NO: 937047 - DNA, 25 bp, Homo sapien
aaacgagactttgggtatggctgtt

SEQ ID NO: 937048 - DNA, 25 bp, Homo sapien
acgagactttgggtatggctgtttt

SEQ ID NO: 937049 - DNA, 25 bp, Homo sapien
tttgcggacagcgtctccctcgact

SEQ ID NO: 937050 - DNA, 25 bp, Homo sapien
tgtacccagagattcaaaaccccaa

SEQ ID NO: 937051 - DNA, 25 bp, Homo sapien
tgtctgcccctttgcggacagcgtc

SEQ ID NO: 937052 - DNA, 25 bp, Homo sapien
agcctggtcgtgaggaacagccgcc

SEQ ID NO: 937053 - DNA, 25 bp, Homo sapien
aaacaggccccactgcctttagcag

SEQ ID NO: 937054 - DNA, 25 bp, Homo sapien
cctgggaaagtaaggcacttgtact

SEQ ID NO: 937055 - DNA, 25 bp, Homo sapien
gaatgccctgtagctcccaagcttg

SEQ ID NO: 937056 - DNA, 25 bp, Homo sapien
taagatatgggtctgactctgcctc

SEQ ID NO: 937057 - DNA, 25 bp, Homo sapien
tttcccatcttgatatccttgctta

SEQ ID NO: 937058 - DNA, 25 bp, Homo sapien
cttgatatccttgcttatgttcctc

SEQ ID NO: 937059 - DNA, 25 bp, Homo sapien
tcattagcatggaattcaggagcct

SEQ ID NO: 937060 - DNA, 25 bp, Homo sapien
ctcttcattagcatggaattcagga

SEQ ID NO: 937061 - DNA, 25 bp, Homo sapien
cctgcatgatagtggtggagattcc

SEQ ID NO: 937062 - DNA, 25 bp, Homo sapien
actgtatttaccgaagaatgtagac

SEQ ID NO: 937063 - DNA, 25 bp, Homo sapien
tattcctatcattgacaggccagcc

SEQ ID NO: 937064 - DNA, 25 bp, Homo sapien
tccaagagggcagttaaattaatca

SEQ ID NO: 937065 - DNA, 25 bp, Homo sapien
tcttctaaagctgttgacgttagag

SEQ ID NO: 937066 - DNA, 25 bp, Homo sapien
ctgttgacgttagaggtggcatagc

SEQ ID NO: 937067 - DNA, 25 bp, Homo sapien
gaggtggcatagcttctgccactgc

SEQ ID NO: 937068 - DNA, 25 bp, Homo sapien
cgttagaggtggcatagcttctgcc

SEQ ID NO: 937069 - DNA, 25 bp, Homo sapien
cactggactttgacccttgcagaaa

SEQ ID NO: 937070 - DNA, 25 bp, Homo sapien
ccactggactttgacccttgcagaa

SEQ ID NO: 937071 - DNA, 25 bp, Homo sapien
ctggactttgacccttgcagaaact

SEQ ID NO: 937072 - DNA, 25 bp, Homo sapien
actggactttgacccttgcagaaac

SEQ ID NO: 937073 - DNA, 25 bp, Homo sapien
tgaaaccctaaccacgtggcatttg

SEQ ID NO: 937074 - DNA, 25 bp, Homo sapien
catcaggcaacgatgtgcagcgtta

SEQ ID NO: 937075 - DNA, 25 bp, Homo sapien
tcctcttaggagactctgtatggaa

SEQ ID NO: 937076 - DNA, 25 bp, Homo sapien
taccagtgttcagaatgttgaaacc

SEQ ID NO: 937077 - DNA, 25 bp, Homo sapien
tactgtcctctatgtatatcatgag

SEQ ID NO: 937078 - DNA, 25 bp, Homo sapien
gctactatccgcatgtggctactga

SEQ ID NO: 937079 - DNA, 25 bp, Homo sapien
cacaccagatgttgtaatacgtatg

SEQ ID NO: 937080 - DNA, 25 bp, Homo sapien
ccacacactgatttagagtggttga

SEQ ID NO: 937081 - DNA, 25 bp, Homo sapien
gaaactgaaggacagtgttaaagct

SEQ ID NO: 937082 - DNA, 25 bp, Homo sapien
tagactagagtcttgcagcaacaca

SEQ ID NO: 937083 - DNA, 25 bp, Homo sapien
ggcaaatgcatctgggacttgacca

SEQ ID NO: 937084 - DNA, 25 bp, Homo sapien
catgtgccacagatactaagaatgt

SEQ ID NO: 937085 - DNA, 25 bp, Homo sapien
acctgtaatatccacattgtgaagc

SEQ ID NO: 937086 - DNA, 25 bp, Homo sapien
aggttagtctttcagtacacgttgc

SEQ ID NO: 937087 - DNA, 25 bp, Homo sapien
aagaagcacatattggtgaccatca

SEQ ID NO: 937088 - DNA, 25 bp, Homo sapien
tccaagttacgtgttgtcactgggt

SEQ ID NO: 937089 - DNA, 25 bp, Homo sapien
cttcttcttcgaaaggaatcttgtc

SEQ ID NO: 937090 - DNA, 25 bp, Homo sapien
atcttcttcttcgaaaggaatcttg

SEQ ID NO: 937091 - DNA, 25 bp, Homo sapien
gaatcttcttcttcgaaaggaatct

SEQ ID NO: 937092 - DNA, 25 bp, Homo sapien
tcttcttcttcgaaaggaatcttgt

SEQ ID NO: 937093 - DNA, 25 bp, Homo sapien
tctgaatttctggtactactgctgt

SEQ ID NO: 937094 - DNA, 25 bp, Homo sapien
aatttctggtactactgctgtccca

SEQ ID NO: 937095 - DNA, 25 bp, Homo sapien
ttctggtactactgctgtcccacat

SEQ ID NO: 937096 - DNA, 25 bp, Homo sapien
ctcaggctgtttctcgttccataca

SEQ ID NO: 937097 - DNA, 25 bp, Homo sapien
gttccatacaaaatggctgaccaag

SEQ ID NO: 937098 - DNA, 25 bp, Homo sapien
tcaggctgtttctcgttccatacaa

SEQ ID NO: 937099 - DNA, 25 bp, Homo sapien
tctcgttccatacaaaatggctgac

SEQ ID NO: 937100 - DNA, 25 bp, Homo sapien
tgcaccggttggtccagctgttttt

SEQ ID NO: 937101 - DNA, 25 bp, Homo sapien
agttattttgcaccggttggtccag

SEQ ID NO: 937102 - DNA, 25 bp, Homo sapien
ttcagctcttcaactgcttggataa

SEQ ID NO: 937103 - DNA, 25 bp, Homo sapien
tacatctttaatcaccttttcagtc

SEQ ID NO: 937104 - DNA, 25 bp, Homo sapien
cttgctgctgcttttcatcttccat

SEQ ID NO: 937105 - DNA, 25 bp, Homo sapien
gtcacggtcttatctttcaatacat

SEQ ID NO: 937106 - DNA, 25 bp, Homo sapien
cgtgtcacggtcttatctttcaata

SEQ ID NO: 937107 - DNA, 25 bp, Homo sapien
tttcgtgtcacggtcttatctttca

SEQ ID NO: 937108 - DNA, 25 bp, Homo sapien
aacctttcgtgtcacggtcttatct

SEQ ID NO: 937109 - DNA, 25 bp, Homo sapien
ccagtagagcctctgatctcttctt

SEQ ID NO: 937110 - DNA, 25 bp, Homo sapien
tcctccagtagagcctctgatctct

SEQ ID NO: 937111 - DNA, 25 bp, Homo sapien
gatctcctccagtagagcctctgat

SEQ ID NO: 937112 - DNA, 25 bp, Homo sapien
tgatgatctcctccagtagagcctc

SEQ ID NO: 937113 - DNA, 25 bp, Homo sapien
cactctccccaaaattgtggagggc

SEQ ID NO: 937114 - DNA, 25 bp, Homo sapien
tcaggtaagtcagaggctgttcccc

SEQ ID NO: 937115 - DNA, 25 bp, Homo sapien
catgccgatcttgacattgttagaa

SEQ ID NO: 937116 - DNA, 25 bp, Homo sapien
cgaacttgcctgctaagctttataa

SEQ ID NO: 937117 - DNA, 25 bp, Homo sapien
agctgttgctgctagacctcagcac

SEQ ID NO: 937118 - DNA, 25 bp, Homo sapien
cagctgttgctgctagacctcagca

SEQ ID NO: 937119 - DNA, 25 bp, Homo sapien
tcagctgttgctgctagacctcagc

SEQ ID NO: 937120 - DNA, 25 bp, Homo sapien
gggattccgtgctctctggtgacaa

SEQ ID NO: 937121 - DNA, 25 bp, Homo sapien
gtgacaacccttgaggacaaaacag

SEQ ID NO: 937122 - DNA, 25 bp, Homo sapien
ggagaaagccatttatcagagccct

SEQ ID NO: 937123 - DNA, 25 bp, Homo sapien
gacaaaacaggcctattggagaaag

SEQ ID NO: 937124 - DNA, 25 bp, Homo sapien
ccctctgagtgtcaataaatatgat

SEQ ID NO: 937125 - DNA, 25 bp, Homo sapien
tccctctgagtgtcaataaatatga

SEQ ID NO: 937126 - DNA, 25 bp, Homo sapien
cctctgagtgtcaataaatatgatg

SEQ ID NO: 937127 - DNA, 25 bp, Homo sapien
gtccctctgagtgtcaataaatatg

SEQ ID NO: 937128 - DNA, 25 bp, Homo sapien
tggcagaagagggagtaaccaccca

SEQ ID NO: 937129 - DNA, 25 bp, Homo sapien
gccgactgggaatacagtctatcag

SEQ ID NO: 937130 - DNA, 25 bp, Homo sapien
agtaaccacccaagagcaatgccct

SEQ ID NO: 937131 - DNA, 25 bp, Homo sapien
tgggaagccgactgggaatacagtc

SEQ ID NO: 937132 - DNA, 25 bp, Homo sapien
gaagacctcatcaagtgggatgtaa

SEQ ID NO: 937133 - DNA, 25 bp, Homo sapien
tgctaagaagacctcatcaagtggg

SEQ ID NO: 937134 - DNA, 25 bp, Homo sapien
gggtaaccttgctaagaagacctca

SEQ ID NO: 937135 - DNA, 25 bp, Homo sapien
tcaagtgggatgtaagatcccaaca

SEQ ID NO: 937136 - DNA, 25 bp, Homo sapien
cacggaagccatctaaaaacttgac

SEQ ID NO: 937137 - DNA, 25 bp, Homo sapien
tgggctttctagtgagcctgtgaac

SEQ ID NO: 937138 - DNA, 25 bp, Homo sapien
agtctttgtgggctttctagtgagc

SEQ ID NO: 937139 - DNA, 25 bp, Homo sapien
gagcctgtgaactcacggaagccat

SEQ ID NO: 937140 - DNA, 25 bp, Homo sapien
tcctggaatcatttaaagtaagcat

SEQ ID NO: 937141 - DNA, 25 bp, Homo sapien
acagatgttatctccacattctgca

SEQ ID NO: 937142 - DNA, 25 bp, Homo sapien
ttcctggaatcatttaaagtaagca

SEQ ID NO: 937143 - DNA, 25 bp, Homo sapien
cttggtaacagatgttatctccaca

SEQ ID NO: 937144 - DNA, 25 bp, Homo sapien
ttgcaattcaccagttgtattttct

SEQ ID NO: 937145 - DNA, 25 bp, Homo sapien
tctttgcaattcaccagttgtattt

SEQ ID NO: 937146 - DNA, 25 bp, Homo sapien
atatctttgcaattcaccagttgta

SEQ ID NO: 937147 - DNA, 25 bp, Homo sapien
cttaatatctttgcaattcaccagt

SEQ ID NO: 937148 - DNA, 25 bp, Homo sapien
tagttcctttgtctgattaaacatt

SEQ ID NO: 937149 - DNA, 25 bp, Homo sapien
agttcctttgtctgattaaacattt

SEQ ID NO: 937150 - DNA, 25 bp, Homo sapien
tttagttcctttgtctgattaaaca

SEQ ID NO: 937151 - DNA, 25 bp, Homo sapien
ttagttcctttgtctgattaaacat

SEQ ID NO: 937152 - DNA, 25 bp, Homo sapien
agtatcaaatcagctgtatcagttc

SEQ ID NO: 937153 - DNA, 25 bp, Homo sapien
tgaatgttcgcccttctccaatcca

SEQ ID NO: 937154 - DNA, 25 bp, Homo sapien
gatttttccagtatcaaatcagctg

SEQ ID NO: 937155 - DNA, 25 bp, Homo sapien
gtctctgactgaatgttcgcccttc

SEQ ID NO: 937156 - DNA, 25 bp, Homo sapien
tatagatctcttaggccaacgtgtt

SEQ ID NO: 937157 - DNA, 25 bp, Homo sapien
gctctatagatctcttaggccaacg

SEQ ID NO: 937158 - DNA, 25 bp, Homo sapien
taaaaagctctatagatctcttagg

SEQ ID NO: 937159 - DNA, 25 bp, Homo sapien
gatctcttaggccaacgtgttacat

SEQ ID NO: 937160 - DNA, 25 bp, Homo sapien
gagttgagcccatgtctctgtggag

SEQ ID NO: 937161 - DNA, 25 bp, Homo sapien
gcctgacaccaggaggtaggcccat

SEQ ID NO: 937162 - DNA, 25 bp, Homo sapien
gatatgcccactggagtctgtctcc

SEQ ID NO: 937163 - DNA, 25 bp, Homo sapien
caatctggagagactccgtgaacag

SEQ ID NO: 937164 - DNA, 25 bp, Homo sapien
caatgttgttctatagaagatgaag

SEQ ID NO: 937165 - DNA, 25 bp, Homo sapien
tgcgcttcagttgtcccctcaagga

SEQ ID NO: 937166 - DNA, 25 bp, Homo sapien
gcctattttgcgcttcagttgtccc

SEQ ID NO: 937167 - DNA, 25 bp, Homo sapien
gaaaatgcctattttgcgcttcagt

SEQ ID NO: 937168 - DNA, 25 bp, Homo sapien
tggcagaagcccattatccagaagg

SEQ ID NO: 937169 - DNA, 25 bp, Homo sapien
agtcatcaaagctgcccttaactgt

SEQ ID NO: 937170 - DNA, 25 bp, Homo sapien
ggttcaggacaatactccctccctg

SEQ ID NO: 937171 - DNA, 25 bp, Homo sapien
tttgtcagtcatcaaagctgccctt

SEQ ID NO: 937172 - DNA, 25 bp, Homo sapien
tccctgcgaactggcctttgtcagt

SEQ ID NO: 937173 - DNA, 25 bp, Homo sapien
tgactaataaatgcctcatgccctt

SEQ ID NO: 937174 - DNA, 25 bp, Homo sapien
cctaacagaggggtaattgactaat

SEQ ID NO: 937175 - DNA, 25 bp, Homo sapien
ttgactaataaatgcctcatgccct

SEQ ID NO: 937176 - DNA, 25 bp, Homo sapien
atttcatttgcagctgcctaacaga

SEQ ID NO: 937177 - DNA, 25 bp, Homo sapien
gtactggcatggctacattatcaac

SEQ ID NO: 937178 - DNA, 25 bp, Homo sapien
tattcaaactaaacacgtcatacag

SEQ ID NO: 937179 - DNA, 25 bp, Homo sapien
aaaactttttgctttacaatgctag

SEQ ID NO: 937180 - DNA, 25 bp, Homo sapien
cagtttttagatataaggacatcaa

SEQ ID NO: 937181 - DNA, 25 bp, Homo sapien
tcaggtctagaaactggttcttgat

SEQ ID NO: 937182 - DNA, 25 bp, Homo sapien
tcatgtgggaataaatttccttatc

SEQ ID NO: 937183 - DNA, 25 bp, Homo sapien
agcacaggtcatgtgggaataaatt

SEQ ID NO: 937184 - DNA, 25 bp, Homo sapien
taaattcaggtctagaaactggttc

SEQ ID NO: 937185 - DNA, 25 bp, Homo sapien
ggaactatgctcacccctttgggag

SEQ ID NO: 937186 - DNA, 25 bp, Homo sapien
tgcaaaatcataaaggcaacggtca

SEQ ID NO: 937187 - DNA, 25 bp, Homo sapien
ttacgtatacatcaaacactgtgtg

SEQ ID NO: 937188 - DNA, 25 bp, Homo sapien
gcaacggtcaattatcagggtgctg

SEQ ID NO: 937189 - DNA, 25 bp, Homo sapien
taagatgcaccttggttaccttttc

SEQ ID NO: 937190 - DNA, 25 bp, Homo sapien
tggaaagcagatactaagatgcacc

SEQ ID NO: 937191 - DNA, 25 bp, Homo sapien
gcagatactaagatgcaccttggtt

SEQ ID NO: 937192 - DNA, 25 bp, Homo sapien
tgcaccttggttaccttttcttgaa

SEQ ID NO: 937193 - DNA, 25 bp, Homo sapien
ggaacaggacaatggaggttgttga

SEQ ID NO: 937194 - DNA, 25 bp, Homo sapien
aacaggacaatggaggttgttgaaa

SEQ ID NO: 937195 - DNA, 25 bp, Homo sapien
gaggaacaggacaatggaggttgtt

SEQ ID NO: 937196 - DNA, 25 bp, Homo sapien
caggacaatggaggttgttgaaaaa

SEQ ID NO: 937197 - DNA, 25 bp, Homo sapien
gattacagatactgttgaacaggtg

SEQ ID NO: 937198 - DNA, 25 bp, Homo sapien
cttgtgattacagatactgttgaac

SEQ ID NO: 937199 - DNA, 25 bp, Homo sapien
acagatactgttgaacaggtgaagg

SEQ ID NO: 937200 - DNA, 25 bp, Homo sapien
tactgttgaacaggtgaaggctttc

SEQ ID NO: 937201 - DNA, 25 bp, Homo sapien
gcatgtaactccttcaaagcagtga

SEQ ID NO: 937202 - DNA, 25 bp, Homo sapien
ttcgtcttccacgaggaccatgtca

SEQ ID NO: 937203 - DNA, 25 bp, Homo sapien
tgtcataggcactaagtgcagcaca

SEQ ID NO: 937204 - DNA, 25 bp, Homo sapien
tataatgcatgtaactccttcaaag

SEQ ID NO: 937205 - DNA, 25 bp, Homo sapien
gcaagtctttaaaggagaattgagt

SEQ ID NO: 937206 - DNA, 25 bp, Homo sapien
gatgctgttattctatctaaatcat

SEQ ID NO: 937207 - DNA, 25 bp, Homo sapien
tgattccagtcgttttcactcgaga

SEQ ID NO: 937208 - DNA, 25 bp, Homo sapien
tcatttggcacatacccagatgctg

SEQ ID NO: 937209 - DNA, 25 bp, Homo sapien
cattgcataaagttgtcgttggtcc

SEQ ID NO: 937210 - DNA, 25 bp, Homo sapien
tccacagccgttttattacctcagc

SEQ ID NO: 937211 - DNA, 25 bp, Homo sapien
tattcagatgccctttcaaagcagg

SEQ ID NO: 937212 - DNA, 25 bp, Homo sapien
tcagccagttgaggtgtcatgccac

SEQ ID NO: 937213 - DNA, 25 bp, Homo sapien
acataatcaattccaagggtagtca

SEQ ID NO: 937214 - DNA, 25 bp, Homo sapien
cataatcaattccaagggtagtcat

SEQ ID NO: 937215 - DNA, 25 bp, Homo sapien
gctaggatggattgcaatgtattac

SEQ ID NO: 937216 - DNA, 25 bp, Homo sapien
taggatggattgcaatgtattactg

SEQ ID NO: 937217 - DNA, 25 bp, Homo sapien
tagctaggatggattgcaatgtatt

SEQ ID NO: 937218 - DNA, 25 bp, Homo sapien
acaatagctaggatggattgcaatg

SEQ ID NO: 937219 - DNA, 25 bp, Homo sapien
attcttgctcactgtaaccattctt

SEQ ID NO: 937220 - DNA, 25 bp, Homo sapien
atgcattcttgctcactgtaaccat

SEQ ID NO: 937221 - DNA, 25 bp, Homo sapien
ttgctcactgtaaccattcttatgg

SEQ ID NO: 937222 - DNA, 25 bp, Homo sapien
actgtaaccattcttatggatgatc

SEQ ID NO: 937223 - DNA, 25 bp, Homo sapien
gataatgcataggaacaaactctgc

SEQ ID NO: 937224 - DNA, 25 bp, Homo sapien
gagatagagcactccaactgcaaag

SEQ ID NO: 937225 - DNA, 25 bp, Homo sapien
tccttcccaaaaccatagactagag

SEQ ID NO: 937226 - DNA, 25 bp, Homo sapien
acaacatcgtttttccaggagatgc

SEQ ID NO: 937227 - DNA, 25 bp, Homo sapien
cagaggcaaaagtgtgatgaaaatg

SEQ ID NO: 937228 - DNA, 25 bp, Homo sapien
agaggcaaaagtgtgatgaaaatgg

SEQ ID NO: 937229 - DNA, 25 bp, Homo sapien
tagtacttttcccagattctcctgc

SEQ ID NO: 937230 - DNA, 25 bp, Homo sapien
taacaatagtacttttcccagattc

SEQ ID NO: 937231 - DNA, 25 bp, Homo sapien
gtacttttcccagattctcctgctc

SEQ ID NO: 937232 - DNA, 25 bp, Homo sapien
caatagtacttttcccagattctcc

SEQ ID NO: 937233 - DNA, 25 bp, Homo sapien
tttatcctcctcattaaatctttga

SEQ ID NO: 937234 - DNA, 25 bp, Homo sapien
tcctcctcattaaatctttgagcca

SEQ ID NO: 937235 - DNA, 25 bp, Homo sapien
tatcctcctcattaaatctttgagc

SEQ ID NO: 937236 - DNA, 25 bp, Homo sapien
cctcctcattaaatctttgagccat

SEQ ID NO: 937237 - DNA, 25 bp, Homo sapien
tacggttcttgcatctcgctcagca

SEQ ID NO: 937238 - DNA, 25 bp, Homo sapien
tgctctctgaactaattccacttcc

SEQ ID NO: 937239 - DNA, 25 bp, Homo sapien
tcttttgatcttttggctgactcct

SEQ ID NO: 937240 - DNA, 25 bp, Homo sapien
tagtagcagctttacggttcttgca

SEQ ID NO: 937241 - DNA, 25 bp, Homo sapien
gacataggaggcaagagtaatgctc

SEQ ID NO: 937242 - DNA, 25 bp, Homo sapien
tgttgagcacagctgtggtttggac

SEQ ID NO: 937243 - DNA, 25 bp, Homo sapien
tacttgtcagtttatatgttcagat

SEQ ID NO: 937244 - DNA, 25 bp, Homo sapien
gcaagagtaatgctctgctgaagta

SEQ ID NO: 937245 - DNA, 25 bp, Homo sapien
tcaattcctggtgttgattgcttta

SEQ ID NO: 937246 - DNA, 25 bp, Homo sapien
ttcctggtgttgattgctttacata

SEQ ID NO: 937247 - DNA, 25 bp, Homo sapien
aattcctggtgttgattgctttaca

SEQ ID NO: 937248 - DNA, 25 bp, Homo sapien
cctggtgttgattgctttacataat

SEQ ID NO: 937249 - DNA, 25 bp, Homo sapien
tgtagtaaatatgaccttacggcca

SEQ ID NO: 937250 - DNA, 25 bp, Homo sapien
taaccacctggtaggagttagcaga

SEQ ID NO: 937251 - DNA, 25 bp, Homo sapien
acaaaacgaagaatgcaaaggaggc

SEQ ID NO: 937252 - DNA, 25 bp, Homo sapien
aaatagggctcagataaggtgcctt

SEQ ID NO: 937253 - DNA, 25 bp, Homo sapien
tgtaatgtgtctccccttattagcg

SEQ ID NO: 937254 - DNA, 25 bp, Homo sapien
cttctgtaatgtgtctccccttatt

SEQ ID NO: 937255 - DNA, 25 bp, Homo sapien
tgtgtctccccttattagcgggaac

SEQ ID NO: 937256 - DNA, 25 bp, Homo sapien
aatgtgtctccccttattagcggga

SEQ ID NO: 937257 - DNA, 25 bp, Homo sapien
cgtggaaatcctgtttactttctgc

SEQ ID NO: 937258 - DNA, 25 bp, Homo sapien
tgagttctcagctgctatgccgtgg

SEQ ID NO: 937259 - DNA, 25 bp, Homo sapien
tctggagccagtcttgaggtcctac

SEQ ID NO: 937260 - DNA, 25 bp, Homo sapien
gaggtcctacatctccgaaagcaag

SEQ ID NO: 937261 - DNA, 25 bp, Homo sapien
aagtgtggctataaatgtctttgta

SEQ ID NO: 937262 - DNA, 25 bp, Homo sapien
gatgcactctcatctagtaagtaac

SEQ ID NO: 937263 - DNA, 25 bp, Homo sapien
ctttgtagttgatgcactctcatct

SEQ ID NO: 937264 - DNA, 25 bp, Homo sapien
gttgatgcactctcatctagtaagt

SEQ ID NO: 937265 - DNA, 25 bp, Homo sapien
tcctatttcttatcactgtggcatc

SEQ ID NO: 937266 - DNA, 25 bp, Homo sapien
ctcctatttcttatcactgtggcat

SEQ ID NO: 937267 - DNA, 25 bp, Homo sapien
tctcctatttcttatcactgtggca

SEQ ID NO: 937268 - DNA, 25 bp, Homo sapien
aaacaaatggaagagtctttcttgg

SEQ ID NO: 937269 - DNA, 25 bp, Homo sapien
aacaaatggaagagtctttcttggt

SEQ ID NO: 937270 - DNA, 25 bp, Homo sapien
caaaacaaatggaagagtctttctt

SEQ ID NO: 937271 - DNA, 25 bp, Homo sapien
caaatggaagagtctttcttggttt

SEQ ID NO: 937272 - DNA, 25 bp, Homo sapien
cactctaaagcttgccgaagggtca

SEQ ID NO: 937273 - DNA, 25 bp, Homo sapien
ctgaagtgtccaactcttgaaggaa

SEQ ID NO: 937274 - DNA, 25 bp, Homo sapien
tgccttaaaatcaacagtcgtgtct

SEQ ID NO: 937275 - DNA, 25 bp, Homo sapien
tttgtttcatcagtccaacttaggg

SEQ ID NO: 937276 - DNA, 25 bp, Homo sapien
cagtgtaccagtagctgtaccagtg

SEQ ID NO: 937277 - DNA, 25 bp, Homo sapien
taccagtagctgtaccagtgggcaa

SEQ ID NO: 937278 - DNA, 25 bp, Homo sapien
tgtaccagtgggcaataacctttaa

SEQ ID NO: 937279 - DNA, 25 bp, Homo sapien
gaaacaagtacaacatttgtttcag

SEQ ID NO: 937280 - DNA, 25 bp, Homo sapien
acgcctgcaacaattgtctgcgcca

SEQ ID NO: 937281 - DNA, 25 bp, Homo sapien
ctcgtcgaaatcgtagtcctcctca

SEQ ID NO: 937282 - DNA, 25 bp, Homo sapien
gttgtcctcgtcgaaatcgtagtcc

SEQ ID NO: 937283 - DNA, 25 bp, Homo sapien
cgcctgcaacaattgtctgcgccat

SEQ ID NO: 937284 - DNA, 25 bp, Homo sapien
cgtgtggctccagcgcctttgggac

SEQ ID NO: 937285 - DNA, 25 bp, Homo sapien
gtcacgtgtggctccagcgcctttg

SEQ ID NO: 937286 - DNA, 25 bp, Homo sapien
acgtgtggctccagcgcctttggga

SEQ ID NO: 937287 - DNA, 25 bp, Homo sapien
ttctgtcacgtgtggctccagcgcc

SEQ ID NO: 937288 - DNA, 25 bp, Homo sapien
aagggcgtgcccaatctttctaaag

SEQ ID NO: 937289 - DNA, 25 bp, Homo sapien
tagataacacacaagcactggagcc

SEQ ID NO: 937290 - DNA, 25 bp, Homo sapien
tattaacgatcaagtccagaagggc

SEQ ID NO: 937291 - DNA, 25 bp, Homo sapien
caagctctgtccctaaagactgtat

SEQ ID NO: 937292 - DNA, 25 bp, Homo sapien
gattccttgggtctatttatagcta

SEQ ID NO: 937293 - DNA, 25 bp, Homo sapien
cagagaataaactgttgattacttg

SEQ ID NO: 937294 - DNA, 25 bp, Homo sapien
caataggaacaagtaagaagacagg

SEQ ID NO: 937295 - DNA, 25 bp, Homo sapien
gaaaaattcaaggcttgctggagca

SEQ ID NO: 937296 - DNA, 25 bp, Homo sapien
gcaacttacgcttggcatcttcaga

SEQ ID NO: 937297 - DNA, 25 bp, Homo sapien
tattacaaagcgtagactatgcatt

SEQ ID NO: 937298 - DNA, 25 bp, Homo sapien
tgctgtcataatcgcctcataaaga

SEQ ID NO: 937299 - DNA, 25 bp, Homo sapien
tacagcagtaggacaattgcaaagg

SEQ ID NO: 937300 - DNA, 25 bp, Homo sapien
aatgtcgtcgcttctggtttcctgc

SEQ ID NO: 937301 - DNA, 25 bp, Homo sapien
gctgagctaatgaactaaaactgag

SEQ ID NO: 937302 - DNA, 25 bp, Homo sapien
cttttgtggctcaaaggtagctgca

SEQ ID NO: 937303 - DNA, 25 bp, Homo sapien
tgtggcctgtctacaattctaaatg

SEQ ID NO: 937304 - DNA, 25 bp, Homo sapien
ttaacatcattgtttggagactgaa

SEQ ID NO: 937305 - DNA, 25 bp, Homo sapien
tcttaacatcattgtttggagactg

SEQ ID NO: 937306 - DNA, 25 bp, Homo sapien
aacatcattgtttggagactgaagg

SEQ ID NO: 937307 - DNA, 25 bp, Homo sapien
cctcttaacatcattgtttggagac

SEQ ID NO: 937308 - DNA, 25 bp, Homo sapien
gagtactgttttgtcagacttgttg

SEQ ID NO: 937309 - DNA, 25 bp, Homo sapien
caatcagaattgatggggtcactgc

SEQ ID NO: 937310 - DNA, 25 bp, Homo sapien
gtttcaccctggtcaaggtcactgc

SEQ ID NO: 937311 - DNA, 25 bp, Homo sapien
tgtatgagctacactgaacaggttt

SEQ ID NO: 937312 - DNA, 25 bp, Homo sapien
tagattggccataaacacagaagat

SEQ ID NO: 937313 - DNA, 25 bp, Homo sapien
ttagactgcaatacttaaaaaggcc

SEQ ID NO: 937314 - DNA, 25 bp, Homo sapien
taaagggaactgtgactctgaaaca

SEQ ID NO: 937315 - DNA, 25 bp, Homo sapien
ctatttttgctatagcgaggcctcc

SEQ ID NO: 937316 - DNA, 25 bp, Homo sapien
aacaattctagttttgcagccacca

SEQ ID NO: 937317 - DNA, 25 bp, Homo sapien
aaggaataccacagggatatggccc

SEQ ID NO: 937318 - DNA, 25 bp, Homo sapien
tttctagacataacaagcaccttgc

SEQ ID NO: 937319 - DNA, 25 bp, Homo sapien
gcagccaccatatcgattttgaaga

SEQ ID NO: 937320 - DNA, 25 bp, Homo sapien
tgaacagagcggatcaggagtccct

SEQ ID NO: 937321 - DNA, 25 bp, Homo sapien
tacttttccgactattgatgagggc

SEQ ID NO: 937322 - DNA, 25 bp, Homo sapien
caatgcagtgataaagtccttggtc

SEQ ID NO: 937323 - DNA, 25 bp, Homo sapien
gatgagggcctttaacttgccatag

SEQ ID NO: 937324 - DNA, 25 bp, Homo sapien
tatcaagggcctttttcaattatcc

SEQ ID NO: 937325 - DNA, 25 bp, Homo sapien
ggttgcctttgaaattggaatcaca

SEQ ID NO: 937326 - DNA, 25 bp, Homo sapien
ttaaagtgctttcccctggatagat

SEQ ID NO: 937327 - DNA, 25 bp, Homo sapien
tgaagccacaattaaagggtgaatt

SEQ ID NO: 937328 - DNA, 25 bp, Homo sapien
tctctgaagccctgatggattgctg

SEQ ID NO: 937329 - DNA, 25 bp, Homo sapien
aaacttggcttctggatttgcacac

SEQ ID NO: 937330 - DNA, 25 bp, Homo sapien
taccgtcttagcacccaagctcttg

SEQ ID NO: 937331 - DNA, 25 bp, Homo sapien
tgtgaatcacacaaaggtgccgttg

SEQ ID NO: 937332 - DNA, 25 bp, Homo sapien
cctcctgtctttgtctttctgtaac

SEQ ID NO: 937333 - DNA, 25 bp, Homo sapien
ttcctcctgtctttgtctttctgta

SEQ ID NO: 937334 - DNA, 25 bp, Homo sapien
ctttcctcctgtctttgtctttctg

SEQ ID NO: 937335 - DNA, 25 bp, Homo sapien
ctcctgtctttgtctttctgtaaca

SEQ ID NO: 937336 - DNA, 25 bp, Homo sapien
tattttttactccatactggacaat

SEQ ID NO: 937337 - DNA, 25 bp, Homo sapien
catactggacaatttcagctgcatt

SEQ ID NO: 937338 - DNA, 25 bp, Homo sapien
ttgatagatgcctgcggagacttgg

SEQ ID NO: 937339 - DNA, 25 bp, Homo sapien
ccacttgatagatgcctgcggagac

SEQ ID NO: 937340 - DNA, 25 bp, Homo sapien
ctgtagcaccttgacgagccacaag

SEQ ID NO: 937341 - DNA, 25 bp, Homo sapien
accttgacgagccacaaggaaggtc

SEQ ID NO: 937342 - DNA, 25 bp, Homo sapien
tgcttggaaatacttttacttggtg

SEQ ID NO: 937343 - DNA, 25 bp, Homo sapien
aggtctgcttggaaatacttttact

SEQ ID NO: 937344 - DNA, 25 bp, Homo sapien
atcctctgcattgagtcagtgggtt

SEQ ID NO: 937345 - DNA, 25 bp, Homo sapien
cattgagtcagtgggtttccatgtc

SEQ ID NO: 937346 - DNA, 25 bp, Homo sapien
tgagtcagtgggtttccatgtctca

SEQ ID NO: 937347 - DNA, 25 bp, Homo sapien
ctctgcattgagtcagtgggtttcc

SEQ ID NO: 937348 - DNA, 25 bp, Homo sapien
gaagtcgacgtagagcagctgcaat

SEQ ID NO: 937349 - DNA, 25 bp, Homo sapien
ctgactttcagtggtattatgtagt

SEQ ID NO: 937350 - DNA, 25 bp, Homo sapien
tattatgtagtctaagaagtcgacg

SEQ ID NO: 937351 - DNA, 25 bp, Homo sapien
tagtctaagaagtcgacgtagagca

SEQ ID NO: 937352 - DNA, 25 bp, Homo sapien
aaatgcaaagaactgcatgatagac

SEQ ID NO: 937353 - DNA, 25 bp, Homo sapien
tccttctctatccattattcatagt

SEQ ID NO: 937354 - DNA, 25 bp, Homo sapien
tatcaggcatgatattgtaaatgca

SEQ ID NO: 937355 - DNA, 25 bp, Homo sapien
actgcatgatagactcatttctttg

SEQ ID NO: 937356 - DNA, 25 bp, Homo sapien
tgactctgaattctgcatattcctt

SEQ ID NO: 937357 - DNA, 25 bp, Homo sapien
ctctgaattctgcatattccttttc

SEQ ID NO: 937358 - DNA, 25 bp, Homo sapien
actctgaattctgcatattcctttt

SEQ ID NO: 937359 - DNA, 25 bp, Homo sapien
gactctgaattctgcatattccttt

SEQ ID NO: 937360 - DNA, 25 bp, Homo sapien
caaggataaagcatggtcatcaagg

SEQ ID NO: 937361 - DNA, 25 bp, Homo sapien
catggtcatcaaggttttgaaagca

SEQ ID NO: 937362 - DNA, 25 bp, Homo sapien
atggtcatcaaggttttgaaagcaa

SEQ ID NO: 937363 - DNA, 25 bp, Homo sapien
atggccatcccaggcgcaataaggg

SEQ ID NO: 937364 - DNA, 25 bp, Homo sapien
cgtttcccagttgggtagaatctgg

SEQ ID NO: 937365 - DNA, 25 bp, Homo sapien
tcccagttgggtagaatctggaaca

SEQ ID NO: 937366 - DNA, 25 bp, Homo sapien
aatctggaacaggaatggccatccc

SEQ ID NO: 937367 - DNA, 25 bp, Homo sapien
tgtggcagcggtgcagagatacctg

SEQ ID NO: 937368 - DNA, 25 bp, Homo sapien
agagatacctgggaaaccccttcat

SEQ ID NO: 937369 - DNA, 25 bp, Homo sapien
cagagatacctgggaaaccccttca

SEQ ID NO: 937370 - DNA, 25 bp, Homo sapien
gatgtggcagcggtgcagagatacc

SEQ ID NO: 937371 - DNA, 25 bp, Homo sapien
tcatgtaatcggttgtgctaacaca

SEQ ID NO: 937372 - DNA, 25 bp, Homo sapien
cgaatggcttctcgttacttgggaa

SEQ ID NO: 937373 - DNA, 25 bp, Homo sapien
tacatgtgtagggacaaatcagaca

SEQ ID NO: 937374 - DNA, 25 bp, Homo sapien
tcagattgggatgcaaatgcatgcc

SEQ ID NO: 937375 - DNA, 25 bp, Homo sapien
attccaagcctctaacaatgttgtg

SEQ ID NO: 937376 - DNA, 25 bp, Homo sapien
ttttatttcggttggcttcacacac

SEQ ID NO: 937377 - DNA, 25 bp, Homo sapien
caggattgattactcattccaagcc

SEQ ID NO: 937378 - DNA, 25 bp, Homo sapien
tgttgtgatgttatagagtagccca

SEQ ID NO: 937379 - DNA, 25 bp, Homo sapien
tttcattgttgttataggagcatga

SEQ ID NO: 937380 - DNA, 25 bp, Homo sapien
attttcattgttgttataggagcat

SEQ ID NO: 937381 - DNA, 25 bp, Homo sapien
tgaaattttcattgttgttatagga

SEQ ID NO: 937382 - DNA, 25 bp, Homo sapien
tcattgttgttataggagcatgatt

SEQ ID NO: 937383 - DNA, 25 bp, Homo sapien
ggaagaacaaccactttttgcacag

SEQ ID NO: 937384 - DNA, 25 bp, Homo sapien
ccagaatgagctcgccactgacaga

SEQ ID NO: 937385 - DNA, 25 bp, Homo sapien
agctcgccactgacagagttgttag

SEQ ID NO: 937386 - DNA, 25 bp, Homo sapien
cactgacagagttgttagtaggaag

SEQ ID NO: 937387 - DNA, 25 bp, Homo sapien
tcttgatctacataccacactgcca

SEQ ID NO: 937388 - DNA, 25 bp, Homo sapien
tggtgactatgggaatatctcttga

SEQ ID NO: 937389 - DNA, 25 bp, Homo sapien
gaaagagacatcttaaggccagtgg

SEQ ID NO: 937390 - DNA, 25 bp, Homo sapien
tacaaggttttggtgaagtcacaac

SEQ ID NO: 937391 - DNA, 25 bp, Homo sapien
tgttccgagaaacaggacatggtat

SEQ ID NO: 937392 - DNA, 25 bp, Homo sapien
catattgggtgtaaatgctcctcct

SEQ ID NO: 937393 - DNA, 25 bp, Homo sapien
cagtgccaatacgaacaatcaaagg

SEQ ID NO: 937394 - DNA, 25 bp, Homo sapien
catggtatctcccatcagcagcgtt

SEQ ID NO: 937395 - DNA, 25 bp, Homo sapien
gatgaacgtgttccatacttctgca

SEQ ID NO: 937396 - DNA, 25 bp, Homo sapien
tagcctcaatcttcacacaaagtgg

SEQ ID NO: 937397 - DNA, 25 bp, Homo sapien
gctaatgatggcttgctaaactgaa

SEQ ID NO: 937398 - DNA, 25 bp, Homo sapien
gaattatgggtgttttctagcctca

SEQ ID NO: 937399 - DNA, 25 bp, Homo sapien
taacagagctaccaaccgtgtttta

SEQ ID NO: 937400 - DNA, 25 bp, Homo sapien
ttcttcctactgacttgggcttgct

SEQ ID NO: 937401 - DNA, 25 bp, Homo sapien
gacacaattggcaggcttcttccta

SEQ ID NO: 937402 - DNA, 25 bp, Homo sapien
gtttgctaacagagctaccaaccgt

SEQ ID NO: 937403 - DNA, 25 bp, Homo sapien
tatgactaggtcaatttcaaatagc

SEQ ID NO: 937404 - DNA, 25 bp, Homo sapien
tcaaatagcaagtcactctcaaaag

SEQ ID NO: 937405 - DNA, 25 bp, Homo sapien
gatgaaagcacacgtaatcacaacc

SEQ ID NO: 937406 - DNA, 25 bp, Homo sapien
ttatatgctgctcaaaagaatcact

SEQ ID NO: 937407 - DNA, 25 bp, Homo sapien
aatcagctgatgattgggcccttct

SEQ ID NO: 937408 - DNA, 25 bp, Homo sapien
cagctgatgattgggcccttctttg

SEQ ID NO: 937409 - DNA, 25 bp, Homo sapien
tctgccctgataggaaatcagctga

SEQ ID NO: 937410 - DNA, 25 bp, Homo sapien
ccagggcgaggatatggaattctgc

SEQ ID NO: 937411 - DNA, 25 bp, Homo sapien
cacacacacggctgatcctttgaaa

SEQ ID NO: 937412 - DNA, 25 bp, Homo sapien
ctgtatatcagataaatgatacaca

SEQ ID NO: 937413 - DNA, 25 bp, Homo sapien
gtatatcagataaatgatacacaca

SEQ ID NO: 937414 - DNA, 25 bp, Homo sapien
atgatacacacacacggctgatcct

SEQ ID NO: 937415 - DNA, 25 bp, Homo sapien
tgccatacactagtgttgtcctcgg

SEQ ID NO: 937416 - DNA, 25 bp, Homo sapien
ctcgggttatcagtttccagcagaa

SEQ ID NO: 937417 - DNA, 25 bp, Homo sapien
cactagtgttgtcctcgggttatca

SEQ ID NO: 937418 - DNA, 25 bp, Homo sapien
tgtaaaaatgccatacactagtgtt

SEQ ID NO: 937419 - DNA, 25 bp, Homo sapien
cttcatctgttaccgagcacaccag

SEQ ID NO: 937420 - DNA, 25 bp, Homo sapien
aaagtggtccacttgttgacaaggc

SEQ ID NO: 937421 - DNA, 25 bp, Homo sapien
catcaaagtgtgtttctgggccgtc

SEQ ID NO: 937422 - DNA, 25 bp, Homo sapien
acaaggctacgcagtccaccagtgt

SEQ ID NO: 937423 - DNA, 25 bp, Homo sapien
aggacatattcgagcaatcatggaa

SEQ ID NO: 937424 - DNA, 25 bp, Homo sapien
tgggatgacatgtgcatctacaaac

SEQ ID NO: 937425 - DNA, 25 bp, Homo sapien
gaatgaatctgtttcgtgctcctgt

SEQ ID NO: 937426 - DNA, 25 bp, Homo sapien
catttggatcagtaccatctgggat

SEQ ID NO: 937427 - DNA, 25 bp, Homo sapien
gcattcctcttggttaaacttcgaa

SEQ ID NO: 937428 - DNA, 25 bp, Homo sapien
catttggaattatgttgatcagttc

SEQ ID NO: 937429 - DNA, 25 bp, Homo sapien
cttcgaaaaatagcagcatctgtcc

SEQ ID NO: 937430 - DNA, 25 bp, Homo sapien
tgatcagttctgaccgcattcctct

SEQ ID NO: 937431 - DNA, 25 bp, Homo sapien
ggttgaaagagcagcgtccttttcc

SEQ ID NO: 937432 - DNA, 25 bp, Homo sapien
ccagattcacacttggagtcaatca

SEQ ID NO: 937433 - DNA, 25 bp, Homo sapien
taacagacaccgtgttcacgttggg

SEQ ID NO: 937434 - DNA, 25 bp, Homo sapien
tgatcataacagacaccgtgttcac

SEQ ID NO: 937435 - DNA, 25 bp, Homo sapien
ttgtcttttaaagacagggtctagc

SEQ ID NO: 937436 - DNA, 25 bp, Homo sapien
ggtgcgatctcggcttacggcaacc

SEQ ID NO: 937437 - DNA, 25 bp, Homo sapien
tcggcttacggcaacctccacatcc

SEQ ID NO: 937438 - DNA, 25 bp, Homo sapien
tctgtcacctgggctgaagtgcagt

SEQ ID NO: 937439 - DNA, 25 bp, Homo sapien
ccatgggatctctcattcaacagac

SEQ ID NO: 937440 - DNA, 25 bp, Homo sapien
catggcaactacacaattaaagagg

SEQ ID NO: 937441 - DNA, 25 bp, Homo sapien
gcaccgtgccacaaatcatctgtta

SEQ ID NO: 937442 - DNA, 25 bp, Homo sapien
tgctatcacctgagtacaacgatct

SEQ ID NO: 937443 - DNA, 25 bp, Homo sapien
taggtcttcatgtagcaaggattcc

SEQ ID NO: 937444 - DNA, 25 bp, Homo sapien
tgatgctccaaacacgaagtaggct

SEQ ID NO: 937445 - DNA, 25 bp, Homo sapien
gaaagctctgaatcagtctcgcaaa

SEQ ID NO: 937446 - DNA, 25 bp, Homo sapien
gacacaggagaagaaccgtggttag

SEQ ID NO: 937447 - DNA, 25 bp, Homo sapien
gttgcctccaactaaaagtatacac

SEQ ID NO: 937448 - DNA, 25 bp, Homo sapien
ctatatagttgcctccaactaaaag

SEQ ID NO: 937449 - DNA, 25 bp, Homo sapien
tgcctccaactaaaagtatacacac

SEQ ID NO: 937450 - DNA, 25 bp, Homo sapien
tatagttgcctccaactaaaagtat

SEQ ID NO: 937451 - DNA, 25 bp, Homo sapien
aatgtgtgcgattgaaagtctgaat

SEQ ID NO: 937452 - DNA, 25 bp, Homo sapien
tgttcaagtaagtacagacaggact

SEQ ID NO: 937453 - DNA, 25 bp, Homo sapien
acagacatacaaatgtgtgcgattg

SEQ ID NO: 937454 - DNA, 25 bp, Homo sapien
agacaggactgaaagcgccactccc

SEQ ID NO: 937455 - DNA, 25 bp, Homo sapien
taatttgtgcaaattgaaagaattc

SEQ ID NO: 937456 - DNA, 25 bp, Homo sapien
ttcttcacaacaactaatttgtgca

SEQ ID NO: 937457 - DNA, 25 bp, Homo sapien
catatctagcacattgtaaagactt

SEQ ID NO: 937458 - DNA, 25 bp, Homo sapien
gacttaaatgtaaggactccatcta

SEQ ID NO: 937459 - DNA, 25 bp, Homo sapien
ttttcccatgttcggtcttgtctga

SEQ ID NO: 937460 - DNA, 25 bp, Homo sapien
cagtcttcactcctgaaatcagcat

SEQ ID NO: 937461 - DNA, 25 bp, Homo sapien
gatccatctctacttccaagactca

SEQ ID NO: 937462 - DNA, 25 bp, Homo sapien
catgttcggtcttgtctgatccatc

SEQ ID NO: 937463 - DNA, 25 bp, Homo sapien
ctccagacacttgcattatcatcgt

SEQ ID NO: 937464 - DNA, 25 bp, Homo sapien
ccacagggtatctgggagctgctcc

SEQ ID NO: 937465 - DNA, 25 bp, Homo sapien
tatcatcgtttcaggagcctgctga

SEQ ID NO: 937466 - DNA, 25 bp, Homo sapien
aaagcccacagggtatctgggagct

SEQ ID NO: 937467 - DNA, 25 bp, Homo sapien
tgattgtagatgctggccagaaaac

SEQ ID NO: 937468 - DNA, 25 bp, Homo sapien
tatatccggtcctgatcttcatcca

SEQ ID NO: 937469 - DNA, 25 bp, Homo sapien
gaagtattcagaggtcttggtttct

SEQ ID NO: 937470 - DNA, 25 bp, Homo sapien
caaagcttcttgacttatattgtta

SEQ ID NO: 937471 - DNA, 25 bp, Homo sapien
atattcagggaaagaatgtgatctt

SEQ ID NO: 937472 - DNA, 25 bp, Homo sapien
tcactaatctatataaggacaacac

SEQ ID NO: 937473 - DNA, 25 bp, Homo sapien
atctatataaggacaacacagatga

SEQ ID NO: 937474 - DNA, 25 bp, Homo sapien
actaatctatataaggacaacacag

SEQ ID NO: 937475 - DNA, 25 bp, Homo sapien
ttatcactaatctatataaggacaa

SEQ ID NO: 937476 - DNA, 25 bp, Homo sapien
ttcctttgtgctagactgcgaaacc

SEQ ID NO: 937477 - DNA, 25 bp, Homo sapien
gctggagcagagatttaaacagtcc

SEQ ID NO: 937478 - DNA, 25 bp, Homo sapien
tctaaaatacaaggtcagtgactct

SEQ ID NO: 937479 - DNA, 25 bp, Homo sapien
ggagatggcatcactcaagctttca

SEQ ID NO: 937480 - DNA, 25 bp, Homo sapien
tccagaagtgtgaactcatcagtga

SEQ ID NO: 937481 - DNA, 25 bp, Homo sapien
gatctcgccgcttgaggagaatttt

SEQ ID NO: 937482 - DNA, 25 bp, Homo sapien
gtgagaaaccgctcttgttgaatct

SEQ ID NO: 937483 - DNA, 25 bp, Homo sapien
gggttcatgatctcgccgcttgagg

SEQ ID NO: 937484 - DNA, 25 bp, Homo sapien
gtagatactgggaagttgatcacac

SEQ ID NO: 937485 - DNA, 25 bp, Homo sapien
gtgaggctaaaactgacaggaaatt

SEQ ID NO: 937486 - DNA, 25 bp, Homo sapien
cacgcagactgaaaactattgtgag

SEQ ID NO: 937487 - DNA, 25 bp, Homo sapien
ggtaaacatttctgtagatactggg

SEQ ID NO: 937488 - DNA, 25 bp, Homo sapien
ggtggacatcagtaagccaactgct

SEQ ID NO: 937489 - DNA, 25 bp, Homo sapien
caactgctatggagggtattaagac

SEQ ID NO: 937490 - DNA, 25 bp, Homo sapien
tactcacaacactagaatacaaggc

SEQ ID NO: 937491 - DNA, 25 bp, Homo sapien
aagacaagcagcgaatggcaccagc

SEQ ID NO: 937492 - DNA, 25 bp, Homo sapien
acagatatacataaaggtgttcaac

SEQ ID NO: 937493 - DNA, 25 bp, Homo sapien
cagatatacataaaggtgttcaaca

SEQ ID NO: 937494 - DNA, 25 bp, Homo sapien
agatatacataaaggtgttcaacat

SEQ ID NO: 937495 - DNA, 25 bp, Homo sapien
gtgagacatcacaatgaccctgaaa

SEQ ID NO: 937496 - DNA, 25 bp, Homo sapien
tgcccagagacatttagatcagact

SEQ ID NO: 937497 - DNA, 25 bp, Homo sapien
gtaccccaaaaagatgctctcaaag

SEQ ID NO: 937498 - DNA, 25 bp, Homo sapien
aatctggaagactctatgtacccca

SEQ ID NO: 937499 - DNA, 25 bp, Homo sapien
caacacttctgctcctagataaaac

SEQ ID NO: 937500 - DNA, 25 bp, Homo sapien
cacttctgctcctagataaaactca

SEQ ID NO: 937501 - DNA, 25 bp, Homo sapien
aacacttctgctcctagataaaact

SEQ ID NO: 937502 - DNA, 25 bp, Homo sapien
ttctgctcctagataaaactcatcc

SEQ ID NO: 937503 - DNA, 25 bp, Homo sapien
aacgtgtttgttagcagcaaggaaa

SEQ ID NO: 937504 - DNA, 25 bp, Homo sapien
catctcattacaagacaagcaggga

SEQ ID NO: 937505 - DNA, 25 bp, Homo sapien
gcagggatttcttggtgtgtaaatc

SEQ ID NO: 937506 - DNA, 25 bp, Homo sapien
taatgaaaacgtgtttgttagcagc

SEQ ID NO: 937507 - DNA, 25 bp, Homo sapien
ttctcagggtaaaagtcttgcctat

SEQ ID NO: 937508 - DNA, 25 bp, Homo sapien
tatcttcttatggaacagatgatca

SEQ ID NO: 937509 - DNA, 25 bp, Homo sapien
tttctctgctcaccaattcttcctt

SEQ ID NO: 937510 - DNA, 25 bp, Homo sapien
tgactttaactccaacttcaggtac

SEQ ID NO: 937511 - DNA, 25 bp, Homo sapien
gagtgggaagacaatacccttctca

SEQ ID NO: 937512 - DNA, 25 bp, Homo sapien
agtgggaagacaatacccttctcat

SEQ ID NO: 937513 - DNA, 25 bp, Homo sapien
tcactgcattgctcccagcagttct

SEQ ID NO: 937514 - DNA, 25 bp, Homo sapien
ctttcagggtcacgccaaactggac

SEQ ID NO: 937515 - DNA, 25 bp, Homo sapien
cacgccaaactggacccaagagatt

SEQ ID NO: 937516 - DNA, 25 bp, Homo sapien
gggaattgctttcagggtcacgcca

SEQ ID NO: 937517 - DNA, 25 bp, Homo sapien
aagacaggcagggcgccatctgtca

SEQ ID NO: 937518 - DNA, 25 bp, Homo sapien
agacaggcagggcgccatctgtcat

SEQ ID NO: 937519 - DNA, 25 bp, Homo sapien
tccccattgaggagtctcgattacc

SEQ ID NO: 937520 - DNA, 25 bp, Homo sapien
tttcagctcaacaggcacactaggg

SEQ ID NO: 937521 - DNA, 25 bp, Homo sapien
aaagctacctcatagagctcatgac

SEQ ID NO: 937522 - DNA, 25 bp, Homo sapien
actgtatagcgctgagtgaaacctc

SEQ ID NO: 937523 - DNA, 25 bp, Homo sapien
tatgactcacccatgcttcttgctg

SEQ ID NO: 937524 - DNA, 25 bp, Homo sapien
caggcctcttacttccccagttgga

SEQ ID NO: 937525 - DNA, 25 bp, Homo sapien
gccctaaggcatgtttcaaaagcag

SEQ ID NO: 937526 - DNA, 25 bp, Homo sapien
aaagcagaaccagtcccaggagtgt

SEQ ID NO: 937527 - DNA, 25 bp, Homo sapien
catcgtttggacagttcatgagcca

SEQ ID NO: 937528 - DNA, 25 bp, Homo sapien
cagggcaacttgtctcatcgtttgg

SEQ ID NO: 937529 - DNA, 25 bp, Homo sapien
ccatgacatggtgtcttagactcga

SEQ ID NO: 937530 - DNA, 25 bp, Homo sapien
ttccaaacaactgccctgtcagggc

SEQ ID NO: 937531 - DNA, 25 bp, Homo sapien
tccaaggtatatacataattcctgg

SEQ ID NO: 937532 - DNA, 25 bp, Homo sapien
tcagttaaattacacttcagccatt

SEQ ID NO: 937533 - DNA, 25 bp, Homo sapien
gactctgaggttacataaataattc

SEQ ID NO: 937534 - DNA, 25 bp, Homo sapien
caacgttatgagagttttcatgctg

SEQ ID NO: 937535 - DNA, 25 bp, Homo sapien
tacttcttaagtggttaggtagaga

SEQ ID NO: 937536 - DNA, 25 bp, Homo sapien
ttaggtccccaaactcttgcaactg

SEQ ID NO: 937537 - DNA, 25 bp, Homo sapien
tagttacgctgcctagtagccaaga

SEQ ID NO: 937538 - DNA, 25 bp, Homo sapien
ttttaatgcctgattggacccactc

SEQ ID NO: 937539 - DNA, 25 bp, Homo sapien
tctccagagggaagtagtgccttct

SEQ ID NO: 937540 - DNA, 25 bp, Homo sapien
cagcaacttgcatggcctgactcaa

SEQ ID NO: 937541 - DNA, 25 bp, Homo sapien
taagtaagctttagtcaacagacca

SEQ ID NO: 937542 - DNA, 25 bp, Homo sapien
tcgtgttccgatctcaaaagaaagg

SEQ ID NO: 937543 - DNA, 25 bp, Homo sapien
gttgctgaggaccaaattcacgcca

SEQ ID NO: 937544 - DNA, 25 bp, Homo sapien
tacccacagatgtagcacacagcat

SEQ ID NO: 937545 - DNA, 25 bp, Homo sapien
cacacagcattgtacaaggtaggct

SEQ ID NO: 937546 - DNA, 25 bp, Homo sapien
cacttctttttgtacccacagatgt

SEQ ID NO: 937547 - DNA, 25 bp, Homo sapien
tcttttggtgatgataatacactca

SEQ ID NO: 937548 - DNA, 25 bp, Homo sapien
tattcctgcttaatgttctggtctc

SEQ ID NO: 937549 - DNA, 25 bp, Homo sapien
tggtgatgataatacactcattgtt

SEQ ID NO: 937550 - DNA, 25 bp, Homo sapien
ttttattcctgcttaatgttctggt

SEQ ID NO: 937551 - DNA, 25 bp, Homo sapien
gaaccgctgtgttcgtatgaccgat

SEQ ID NO: 937552 - DNA, 25 bp, Homo sapien
gacttgctcgcataggcacaaaggg

SEQ ID NO: 937553 - DNA, 25 bp, Homo sapien
aaaaattgagtgtgtctcggtgcca

SEQ ID NO: 937554 - DNA, 25 bp, Homo sapien
ggtatcaccacgatagccagcatga

SEQ ID NO: 937555 - DNA, 25 bp, Homo sapien
gaagattcaatacacccagagtaag

SEQ ID NO: 937556 - DNA, 25 bp, Homo sapien
tacatactatcaaagacctggagac

SEQ ID NO: 937557 - DNA, 25 bp, Homo sapien
tcaggtaatgtccaactcacaagtg

SEQ ID NO: 937558 - DNA, 25 bp, Homo sapien
ccatgggctgcaagattggccaata

SEQ ID NO: 937559 - DNA, 25 bp, Homo sapien
gggaagatcctttcacacagataga

SEQ ID NO: 937560 - DNA, 25 bp, Homo sapien
aacacgcaaattgtccggaatgcca

SEQ ID NO: 937561 - DNA, 25 bp, Homo sapien
aaatactccaaccaacacgcaaatt

SEQ ID NO: 937562 - DNA, 25 bp, Homo sapien
tgggaagatcctttcacacagatag

SEQ ID NO: 937563 - DNA, 25 bp, Homo sapien
ttcttcagatatgcaagttaatatc

SEQ ID NO: 937564 - DNA, 25 bp, Homo sapien
gatatgcaagttaatatccaaggga

SEQ ID NO: 937565 - DNA, 25 bp, Homo sapien
tatgcaagttaatatccaagggaaa

SEQ ID NO: 937566 - DNA, 25 bp, Homo sapien
tcagatatgcaagttaatatccaag

SEQ ID NO: 937567 - DNA, 25 bp, Homo sapien
tgaaagaaatcagcacggaaaagtc

SEQ ID NO: 937568 - DNA, 25 bp, Homo sapien
taaaggaatctcagcgctgcagtgc

SEQ ID NO: 937569 - DNA, 25 bp, Homo sapien
tcagcacggaaaagtcatcagtttg

SEQ ID NO: 937570 - DNA, 25 bp, Homo sapien
tattttctagcacgtcgcaaaggtg

SEQ ID NO: 937571 - DNA, 25 bp, Homo sapien
ggagctcttctccgcgtcgctcaat

SEQ ID NO: 937572 - DNA, 25 bp, Homo sapien
caatcaagcacctcggagtgaatgg

SEQ ID NO: 937573 - DNA, 25 bp, Homo sapien
acctcggagtgaatggaaagtggcc

SEQ ID NO: 937574 - DNA, 25 bp, Homo sapien
gcgtcgctcaatcaagcacctcgga

SEQ ID NO: 937575 - DNA, 25 bp, Homo sapien
ccgcggcgcgcggctccggctgccc

SEQ ID NO: 937576 - DNA, 25 bp, Homo sapien
gcggctccggctgccccggcgcgcc

SEQ ID NO: 937577 - DNA, 25 bp, Homo sapien
agcgccgcggcgcgcggctccggct

SEQ ID NO: 937578 - DNA, 25 bp, Homo sapien
ctgccccggcgcgccgccctgcagg

SEQ ID NO: 937579 - DNA, 25 bp, Homo sapien
ctcgcggctggccagacgcaagaat

SEQ ID NO: 937580 - DNA, 25 bp, Homo sapien
cagacgcaagaatgcgcggccgcag

SEQ ID NO: 937581 - DNA, 25 bp, Homo sapien
tggagccctagctccgcaaccctgc

SEQ ID NO: 937582 - DNA, 25 bp, Homo sapien
gggccgacccttagagctcgcggct

SEQ ID NO: 937583 - DNA, 25 bp, Homo sapien
cagttattgtgttatcgccaccatg

SEQ ID NO: 937584 - DNA, 25 bp, Homo sapien
gttatcgccaccatgaaatttgcca

SEQ ID NO: 937585 - DNA, 25 bp, Homo sapien
ttattgtgttatcgccaccatgaaa

SEQ ID NO: 937586 - DNA, 25 bp, Homo sapien
cttctcagttattgtgttatcgcca

SEQ ID NO: 937587 - DNA, 25 bp, Homo sapien
gactcatgaccagatcttatcttca

SEQ ID NO: 937588 - DNA, 25 bp, Homo sapien
ggcaaacatcgctgttggataaaca

SEQ ID NO: 937589 - DNA, 25 bp, Homo sapien
acatcgctgttggataaacactttc

SEQ ID NO: 937590 - DNA, 25 bp, Homo sapien
tcatgaccagatcttatcttcacat

SEQ ID NO: 937591 - DNA, 25 bp, Homo sapien
gcatttaaatttgccttcctataat

SEQ ID NO: 937592 - DNA, 25 bp, Homo sapien
ggcatttaaatttgccttcctataa

SEQ ID NO: 937593 - DNA, 25 bp, Homo sapien
catttaaatttgccttcctataatc

SEQ ID NO: 937594 - DNA, 25 bp, Homo sapien
taaatttgccttcctataatcttct

SEQ ID NO: 937595 - DNA, 25 bp, Homo sapien
gccaggcaggtccaaacagtgagca

SEQ ID NO: 937596 - DNA, 25 bp, Homo sapien
gcagccgagtccatgcaatcaggaa

SEQ ID NO: 937597 - DNA, 25 bp, Homo sapien
gtcaaattgttggtcggctgcagcc

SEQ ID NO: 937598 - DNA, 25 bp, Homo sapien
caaaaagccacgaggatccaaggat

SEQ ID NO: 937599 - DNA, 25 bp, Homo sapien
agaatttttgcttccaatactataa

SEQ ID NO: 937600 - DNA, 25 bp, Homo sapien
cattatgattcttttcaaaacaatt

SEQ ID NO: 937601 - DNA, 25 bp, Homo sapien
gataatcgggatctctggtggtcag

SEQ ID NO: 937602 - DNA, 25 bp, Homo sapien
catgaccattgttgcagtaagactg

SEQ ID NO: 937603 - DNA, 25 bp, Homo sapien
tattgcacagagatcgaatgaggtc

SEQ ID NO: 937604 - DNA, 25 bp, Homo sapien
tcacctgagacgttgtttagacaca

SEQ ID NO: 937605 - DNA, 25 bp, Homo sapien
gcagtgctccatatctacttccctt

SEQ ID NO: 937606 - DNA, 25 bp, Homo sapien
tgcgcagaagcaaatttgcagtgct

SEQ ID NO: 937607 - DNA, 25 bp, Homo sapien
gccttttccttttgcgcagaagcaa

SEQ ID NO: 937608 - DNA, 25 bp, Homo sapien
tcattgactagcttgatggggctga

SEQ ID NO: 937609 - DNA, 25 bp, Homo sapien
tgttagaaagcaggttagatgcaat

SEQ ID NO: 937610 - DNA, 25 bp, Homo sapien
gcaagtttagttgaggatgcaatca

SEQ ID NO: 937611 - DNA, 25 bp, Homo sapien
caatgttatagaagtagagccaaga

SEQ ID NO: 937612 - DNA, 25 bp, Homo sapien
tactcttattagcaaatgtagaagc

SEQ ID NO: 937613 - DNA, 25 bp, Homo sapien
tgttcctctcccactaacatggaga

SEQ ID NO: 937614 - DNA, 25 bp, Homo sapien
acttctgattcctaccacatccaca

SEQ ID NO: 937615 - DNA, 25 bp, Homo sapien
taaaagagacctgaaatgccctgtg

SEQ ID NO: 937616 - DNA, 25 bp, Homo sapien
ctaacatggagaccggagtaagaaa

SEQ ID NO: 937617 - DNA, 25 bp, Homo sapien
tagcgaggtaccacaacctaggtgg

SEQ ID NO: 937618 - DNA, 25 bp, Homo sapien
tagatcaagttgtcggcaccactgg

SEQ ID NO: 937619 - DNA, 25 bp, Homo sapien
gaattggttgtggtatagctctgga

SEQ ID NO: 937620 - DNA, 25 bp, Homo sapien
tcttttgacttttagatggccatct

SEQ ID NO: 937621 - DNA, 25 bp, Homo sapien
tgcaaatagtgcaagtgatgctatc

SEQ ID NO: 937622 - DNA, 25 bp, Homo sapien
caaatagtgcaagtgatgctatctc

SEQ ID NO: 937623 - DNA, 25 bp, Homo sapien
aatagtgcaagtgatgctatctcca

SEQ ID NO: 937624 - DNA, 25 bp, Homo sapien
ctgcaaatagtgcaagtgatgctat

SEQ ID NO: 937625 - DNA, 25 bp, Homo sapien
caccacagaagttacaagatacagt

SEQ ID NO: 937626 - DNA, 25 bp, Homo sapien
ctggtaaatctcgataaagcaccac

SEQ ID NO: 937627 - DNA, 25 bp, Homo sapien
gtaagaaaagaaagatagccatgga

SEQ ID NO: 937628 - DNA, 25 bp, Homo sapien
aagcaccacagaagttacaagatac

SEQ ID NO: 937629 - DNA, 25 bp, Homo sapien
ggcagccgcctcacagatatctcca

SEQ ID NO: 937630 - DNA, 25 bp, Homo sapien
ctcaccgagccgccaatgggctcag

SEQ ID NO: 937631 - DNA, 25 bp, Homo sapien
tggaggtgatcacgctcagtgtcaa

SEQ ID NO: 937632 - DNA, 25 bp, Homo sapien
ctgtcccgtgcactgagtgagggag

SEQ ID NO: 937633 - DNA, 25 bp, Homo sapien
aaccgcatccccagcctggctgagc

SEQ ID NO: 937634 - DNA, 25 bp, Homo sapien
tttgccaggagatgcccagcctgga

SEQ ID NO: 937635 - DNA, 25 bp, Homo sapien
tgctgcgcaccctgccgcgcctaca

SEQ ID NO: 937636 - DNA, 25 bp, Homo sapien
acagcgtgcgcaagctcaactgctg

SEQ ID NO: 937637 - DNA, 25 bp, Homo sapien
gcctacagaagctggacaaccaggc

SEQ ID NO: 937638 - DNA, 25 bp, Homo sapien
cgctaccgcatgaccgtgctgcgca

SEQ ID NO: 937639 - DNA, 25 bp, Homo sapien
ggctcaggatccgcccctgacgacg

SEQ ID NO: 937640 - DNA, 25 bp, Homo sapien
tatagtaacagtcaagtggagcaca

SEQ ID NO: 937641 - DNA, 25 bp, Homo sapien
agtaacagtcaagtggagcacacct

SEQ ID NO: 937642 - DNA, 25 bp, Homo sapien
attatagtaacagtcaagtggagca

SEQ ID NO: 937643 - DNA, 25 bp, Homo sapien
tagtaacagtcaagtggagcacacc

SEQ ID NO: 937644 - DNA, 25 bp, Homo sapien
catctgatcacatccggatgagttg

SEQ ID NO: 937645 - DNA, 25 bp, Homo sapien
gcacgcaactctagaaggcagctca

SEQ ID NO: 937646 - DNA, 25 bp, Homo sapien
ttatatcttctagatggcaggcatc

SEQ ID NO: 937647 - DNA, 25 bp, Homo sapien
aaatgaagacgatgtcagttggaga

SEQ ID NO: 937648 - DNA, 25 bp, Homo sapien
tactgcaaaaggtaagagtgaaccc

SEQ ID NO: 937649 - DNA, 25 bp, Homo sapien
tccatgtcaatagtgcctgctgggc

SEQ ID NO: 937650 - DNA, 25 bp, Homo sapien
ttagaatacgaccaacaggagatcc

SEQ ID NO: 937651 - DNA, 25 bp, Homo sapien
tccacagaataagccgatactgcaa

SEQ ID NO: 937652 - DNA, 25 bp, Homo sapien
aaatggcagtccatagtgcgtcaat

SEQ ID NO: 937653 - DNA, 25 bp, Homo sapien
attccaaatggcagtccatagtgcg

SEQ ID NO: 937654 - DNA, 25 bp, Homo sapien
tccaaatggcagtccatagtgcgtc

SEQ ID NO: 937655 - DNA, 25 bp, Homo sapien
ttgcccacaggaactttcaggtgaa

SEQ ID NO: 937656 - DNA, 25 bp, Homo sapien
tatttcccactcagatgggatagga

SEQ ID NO: 937657 - DNA, 25 bp, Homo sapien
ttatttcccactcagatgggatagg

SEQ ID NO: 937658 - DNA, 25 bp, Homo sapien
cctgaaagaatggttgggtggcatt

SEQ ID NO: 937659 - DNA, 25 bp, Homo sapien
ctttggttccaagggcagaaactgg

SEQ ID NO: 937660 - DNA, 25 bp, Homo sapien
tttccagtctgcgtttaccaggtat

SEQ ID NO: 937661 - DNA, 25 bp, Homo sapien
tctgcgtttaccaggtataaacacc

SEQ ID NO: 937662 - DNA, 25 bp, Homo sapien
ttggaggtattgcacagtcatccat

SEQ ID NO: 937663 - DNA, 25 bp, Homo sapien
cttggaggtattgcacagtcatcca

SEQ ID NO: 937664 - DNA, 25 bp, Homo sapien
tcttggaggtattgcacagtcatcc

SEQ ID NO: 937665 - DNA, 25 bp, Homo sapien
ttcttggaggtattgcacagtcatc

SEQ ID NO: 937666 - DNA, 25 bp, Homo sapien
tcttccacctatctgccctaaatat

SEQ ID NO: 937667 - DNA, 25 bp, Homo sapien
tgctaggtcaatgcagggagtggac

SEQ ID NO: 937668 - DNA, 25 bp, Homo sapien
aatgctaggtcaatgcagggagtgg

SEQ ID NO: 937669 - DNA, 25 bp, Homo sapien
cacctatctgccctaaatatccatt

SEQ ID NO: 937670 - DNA, 25 bp, Homo sapien
gagttccctggattattgaaaaaga

SEQ ID NO: 937671 - DNA, 25 bp, Homo sapien
cacgcagatgcagcatgttgctttc

SEQ ID NO: 937672 - DNA, 25 bp, Homo sapien
tgtgccttccagtgccctacgataa

SEQ ID NO: 937673 - DNA, 25 bp, Homo sapien
gctttcattcagttccacgcagatg

SEQ ID NO: 937674 - DNA, 25 bp, Homo sapien
gagccttcaattgtcttgcactctg

SEQ ID NO: 937675 - DNA, 25 bp, Homo sapien
cctgagccttcaattgtcttgcact

SEQ ID NO: 937676 - DNA, 25 bp, Homo sapien
tgtttccctgagccttcaattgtct

SEQ ID NO: 937677 - DNA, 25 bp, Homo sapien
ttccctgagccttcaattgtcttgc

SEQ ID NO: 937678 - DNA, 25 bp, Homo sapien
ccaggagacagtcttccttggcctc

SEQ ID NO: 937679 - DNA, 25 bp, Homo sapien
cccaatctagcttcacatgcacctt

SEQ ID NO: 937680 - DNA, 25 bp, Homo sapien
tcccatggaattataacatttatca

SEQ ID NO: 937681 - DNA, 25 bp, Homo sapien
cacatgcacctttactaagttccca

SEQ ID NO: 937682 - DNA, 25 bp, Homo sapien
gagtgttgtttaatcctcactaagg

SEQ ID NO: 937683 - DNA, 25 bp, Homo sapien
tgttgtttaatcctcactaagggca

SEQ ID NO: 937684 - DNA, 25 bp, Homo sapien
ccaaattccaaccaggtggctccgg

SEQ ID NO: 937685 - DNA, 25 bp, Homo sapien
tggctccggcacatcgaagctctga

SEQ ID NO: 937686 - DNA, 25 bp, Homo sapien
ctattcagtactgcctttgaaaata

SEQ ID NO: 937687 - DNA, 25 bp, Homo sapien
tattcagtactgcctttgaaaataa

SEQ ID NO: 937688 - DNA, 25 bp, Homo sapien
tggggtcatggttcatagcactgtg

SEQ ID NO: 937689 - DNA, 25 bp, Homo sapien
tgccaatccacttcttggggtcatg

SEQ ID NO: 937690 - DNA, 25 bp, Homo sapien
gccaccttgtcgttgccaatccact

SEQ ID NO: 937691 - DNA, 25 bp, Homo sapien
tgcagcatgccaccctttcagggct

SEQ ID NO: 937692 - DNA, 25 bp, Homo sapien
attctgctacccagatcaattcctg

SEQ ID NO: 937693 - DNA, 25 bp, Homo sapien
tctgctacccagatcaattcctgag

SEQ ID NO: 937694 - DNA, 25 bp, Homo sapien
acccagatcaattcctgagtcacca

SEQ ID NO: 937695 - DNA, 25 bp, Homo sapien
gctacccagatcaattcctgagtca

SEQ ID NO: 937696 - DNA, 25 bp, Homo sapien
cgcacacagtctcagatctgagaga

SEQ ID NO: 937697 - DNA, 25 bp, Homo sapien
cacagtctcagatctgagagaatag

SEQ ID NO: 937698 - DNA, 25 bp, Homo sapien
gtctcagatctgagagaatagccat

SEQ ID NO: 937699 - DNA, 25 bp, Homo sapien
cagtctcagatctgagagaatagcc

SEQ ID NO: 937700 - DNA, 25 bp, Homo sapien
agctttcacatcaacatagctgaaa

SEQ ID NO: 937701 - DNA, 25 bp, Homo sapien
cagctttcacatcaacatagctgaa

SEQ ID NO: 937702 - DNA, 25 bp, Homo sapien
gaaggcatcaaaatactcaacaagt

SEQ ID NO: 937703 - DNA, 25 bp, Homo sapien
cactaggaaatttagagatcaggca

SEQ ID NO: 937704 - DNA, 25 bp, Homo sapien
tgtaattagccatccttcgcatttg

SEQ ID NO: 937705 - DNA, 25 bp, Homo sapien
agtgagtagtcacaggaaggcatca

SEQ ID NO: 937706 - DNA, 25 bp, Homo sapien
tcatcaaaccgcttcttattgttca

SEQ ID NO: 937707 - DNA, 25 bp, Homo sapien
caaaccgcttcttattgttcagaag

SEQ ID NO: 937708 - DNA, 25 bp, Homo sapien
cctttggtcgtgagacttggttggc

SEQ ID NO: 937709 - DNA, 25 bp, Homo sapien
ttggtcgtgagacttggttggctct

SEQ ID NO: 937710 - DNA, 25 bp, Homo sapien
caggccctttggtcgtgagacttgg

SEQ ID NO: 937711 - DNA, 25 bp, Homo sapien
gtccaggccctttggtcgtgagact

SEQ ID NO: 937712 - DNA, 25 bp, Homo sapien
cttaaagtaatagctgctcaatgac

SEQ ID NO: 937713 - DNA, 25 bp, Homo sapien
cattgttgtgattatcagcacggat

SEQ ID NO: 937714 - DNA, 25 bp, Homo sapien
tatcagcacggataacatcagtaaa

SEQ ID NO: 937715 - DNA, 25 bp, Homo sapien
ttcttaaagtaatagctgctcaatg

SEQ ID NO: 937716 - DNA, 25 bp, Homo sapien
tctccaatctcttctttctactttc

SEQ ID NO: 937717 - DNA, 25 bp, Homo sapien
caatctcttctttctactttcatcc

SEQ ID NO: 937718 - DNA, 25 bp, Homo sapien
tttctccaatctcttctttctactt

SEQ ID NO: 937719 - DNA, 25 bp, Homo sapien
atctcttctttctactttcatcctg

SEQ ID NO: 937720 - DNA, 25 bp, Homo sapien
ctacaattgaatagctcagatgttc

SEQ ID NO: 937721 - DNA, 25 bp, Homo sapien
gaatgaaaggactcaacagtggaat

SEQ ID NO: 937722 - DNA, 25 bp, Homo sapien
agctgaatgaaaggactcaacagtg

SEQ ID NO: 937723 - DNA, 25 bp, Homo sapien
tgtggtggattgcatacaggaggct

SEQ ID NO: 937724 - DNA, 25 bp, Homo sapien
aatctttgctaaacagttgagctga

SEQ ID NO: 937725 - DNA, 25 bp, Homo sapien
ctgtggaaaattgtttgatacaaat

SEQ ID NO: 937726 - DNA, 25 bp, Homo sapien
ctattggtctgtggaaaattgtttg

SEQ ID NO: 937727 - DNA, 25 bp, Homo sapien
tggtctgtggaaaattgtttgatac

SEQ ID NO: 937728 - DNA, 25 bp, Homo sapien
tattggtctgtggaaaattgtttga

SEQ ID NO: 937729 - DNA, 25 bp, Homo sapien
ccatatggcatttgtagtacttaca

SEQ ID NO: 937730 - DNA, 25 bp, Homo sapien
tttccatatggcatttgtagtactt

SEQ ID NO: 937731 - DNA, 25 bp, Homo sapien
ttggctttctccctggtaaaacaca

SEQ ID NO: 937732 - DNA, 25 bp, Homo sapien
aaacacatgttcttgagttcttgga

SEQ ID NO: 937733 - DNA, 25 bp, Homo sapien
tattgtgttttccagacataataag

SEQ ID NO: 937734 - DNA, 25 bp, Homo sapien
attgtgttttccagacataataagc

SEQ ID NO: 937735 - DNA, 25 bp, Homo sapien
ttattgtgttttccagacataataa

SEQ ID NO: 937736 - DNA, 25 bp, Homo sapien
gaacactgatggtcacctgagcagt

SEQ ID NO: 937737 - DNA, 25 bp, Homo sapien
gtcagggatggcatcgttgtccaag

SEQ ID NO: 937738 - DNA, 25 bp, Homo sapien
ccacttctctgtctgagggggtcag

SEQ ID NO: 937739 - DNA, 25 bp, Homo sapien
gtccaagtctgttacttttacagct

SEQ ID NO: 937740 - DNA, 25 bp, Homo sapien
tctctgtttagtgaatctaatagct

SEQ ID NO: 937741 - DNA, 25 bp, Homo sapien
atttctctgtttagtgaatctaata

SEQ ID NO: 937742 - DNA, 25 bp, Homo sapien
ctctgtttagtgaatctaatagctt

SEQ ID NO: 937743 - DNA, 25 bp, Homo sapien
ttctctgtttagtgaatctaatagc

SEQ ID NO: 937744 - DNA, 25 bp, Homo sapien
tgattaattgatgtcagcgttttta

SEQ ID NO: 937745 - DNA, 25 bp, Homo sapien
gattaattgatgtcagcgtttttac

SEQ ID NO: 937746 - DNA, 25 bp, Homo sapien
attgatgtcagcgtttttacaatac

SEQ ID NO: 937747 - DNA, 25 bp, Homo sapien
ttaattgatgtcagcgtttttacaa

SEQ ID NO: 937748 - DNA, 25 bp, Homo sapien
aatgctgacgcacttccaattggat

SEQ ID NO: 937749 - DNA, 25 bp, Homo sapien
gggaggtgttcccaaattgcctcca

SEQ ID NO: 937750 - DNA, 25 bp, Homo sapien
ggccagtctgcatcggtaaatgtaa

SEQ ID NO: 937751 - DNA, 25 bp, Homo sapien
tccaactagtgtatcaactggacta

SEQ ID NO: 937752 - DNA, 25 bp, Homo sapien
atgtttgaaatgcactcctgcaaaa

SEQ ID NO: 937753 - DNA, 25 bp, Homo sapien
tccttcattagacactttcacaaac

SEQ ID NO: 937754 - DNA, 25 bp, Homo sapien
gcattatcaaaatctagatgtctag

SEQ ID NO: 937755 - DNA, 25 bp, Homo sapien
caaaatctagatgtctaggtccaat

SEQ ID NO: 937756 - DNA, 25 bp, Homo sapien
caaatgagccacccccttcgcaagt

SEQ ID NO: 937757 - DNA, 25 bp, Homo sapien
agcaaatgagccacccccttcgcaa

SEQ ID NO: 937758 - DNA, 25 bp, Homo sapien
ctgagcaaatgagccacccccttcg

SEQ ID NO: 937759 - DNA, 25 bp, Homo sapien
gagcaaatgagccacccccttcgca

SEQ ID NO: 937760 - DNA, 25 bp, Homo sapien
ccatccttatctgtacaagttagag

SEQ ID NO: 937761 - DNA, 25 bp, Homo sapien
gagactaaaagagtttcaactggga

SEQ ID NO: 937762 - DNA, 25 bp, Homo sapien
tgttccatttgaaaaggcatccaca

SEQ ID NO: 937763 - DNA, 25 bp, Homo sapien
gttattgggagcagttccatcctta

SEQ ID NO: 937764 - DNA, 25 bp, Homo sapien
gcattgaggtggattgttatttaca

SEQ ID NO: 937765 - DNA, 25 bp, Homo sapien
tgttatttacatcttgtagaaatac

SEQ ID NO: 937766 - DNA, 25 bp, Homo sapien
gaaatactgactgtcccagttgttg

SEQ ID NO: 937767 - DNA, 25 bp, Homo sapien
taaatatcctgcgagcattgaggtg

SEQ ID NO: 937768 - DNA, 25 bp, Homo sapien
gcctatttctcacagcaatcactaa

SEQ ID NO: 937769 - DNA, 25 bp, Homo sapien
cattgacattctggacgttgatact

SEQ ID NO: 937770 - DNA, 25 bp, Homo sapien
gaacaggactcttatcattgacatt

SEQ ID NO: 937771 - DNA, 25 bp, Homo sapien
taatgcataactccaaagacaggtt

SEQ ID NO: 937772 - DNA, 25 bp, Homo sapien
ggcagtggcattaattgaagaattt

SEQ ID NO: 937773 - DNA, 25 bp, Homo sapien
tatgcgaatccaaagcaaagtaggc

SEQ ID NO: 937774 - DNA, 25 bp, Homo sapien
tagaaataacaccattatgcgaatc

SEQ ID NO: 937775 - DNA, 25 bp, Homo sapien
tccaaagcaaagtaggcagtggcat

SEQ ID NO: 937776 - DNA, 25 bp, Homo sapien
tcaacttcctgtcctagatctggat

SEQ ID NO: 937777 - DNA, 25 bp, Homo sapien
tagatgcaggaatgttttcaggaac

SEQ ID NO: 937778 - DNA, 25 bp, Homo sapien
tatatataaaagtagatgcaggaat

SEQ ID NO: 937779 - DNA, 25 bp, Homo sapien
cctagatctggatctcttgaaagaa

SEQ ID NO: 937780 - DNA, 25 bp, Homo sapien
cagaaagtgacttcttgtcctcgct

SEQ ID NO: 937781 - DNA, 25 bp, Homo sapien
gcagtttatgctggttcagccaagc

SEQ ID NO: 937782 - DNA, 25 bp, Homo sapien
catcccgatcttggtactgctctag

SEQ ID NO: 937783 - DNA, 25 bp, Homo sapien
caagcttgtagtagaaatcgggtca

SEQ ID NO: 937784 - DNA, 25 bp, Homo sapien
tcacaggaaataggatcatctacat

SEQ ID NO: 937785 - DNA, 25 bp, Homo sapien
cgtatagctgctggtattattccca

SEQ ID NO: 937786 - DNA, 25 bp, Homo sapien
acttgggttgtcaagattcaaaggc

SEQ ID NO: 937787 - DNA, 25 bp, Homo sapien
ttattcccattatctgttgcctcag

SEQ ID NO: 937788 - DNA, 25 bp, Homo sapien
attaatagaatccaaaggaaatggc

SEQ ID NO: 937789 - DNA, 25 bp, Homo sapien
aggaataaatgatactgctatcttc

SEQ ID NO: 937790 - DNA, 25 bp, Homo sapien
actcttgctataatttctccaacag

SEQ ID NO: 937791 - DNA, 25 bp, Homo sapien
ttactcttgctataatttctccaac

SEQ ID NO: 937792 - DNA, 25 bp, Homo sapien
ttgctttcagtataaggtggaaaac

SEQ ID NO: 937793 - DNA, 25 bp, Homo sapien
tagtgtcccttgacagaacagacct

SEQ ID NO: 937794 - DNA, 25 bp, Homo sapien
tctaatcaagataattagtgtccct

SEQ ID NO: 937795 - DNA, 25 bp, Homo sapien
gacagaacagacctgttgtatctgt

SEQ ID NO: 937796 - DNA, 25 bp, Homo sapien
taacaacatcacttataggatccgt

SEQ ID NO: 937797 - DNA, 25 bp, Homo sapien
cagataactgtgtctcaatggtgta

SEQ ID NO: 937798 - DNA, 25 bp, Homo sapien
taggatccgttccaaaagagtttgc

SEQ ID NO: 937799 - DNA, 25 bp, Homo sapien
tcttcacctcttaatctaacaacat

SEQ ID NO: 937800 - DNA, 25 bp, Homo sapien
agaataaaatatgcattactcgaaa

SEQ ID NO: 937801 - DNA, 25 bp, Homo sapien
cttgaagaataaaatatgcattact

SEQ ID NO: 937802 - DNA, 25 bp, Homo sapien
tgaagaataaaatatgcattactcg

SEQ ID NO: 937803 - DNA, 25 bp, Homo sapien
gaagaataaaatatgcattactcga

SEQ ID NO: 937804 - DNA, 25 bp, Homo sapien
ttcagcctatcaccatttgcgaaga

SEQ ID NO: 937805 - DNA, 25 bp, Homo sapien
tgaaataatggatagtcctcatcaa

SEQ ID NO: 937806 - DNA, 25 bp, Homo sapien
tcaccatttgcgaagacctcatctg

SEQ ID NO: 937807 - DNA, 25 bp, Homo sapien
catctgtggccgtcactctataaat

SEQ ID NO: 937808 - DNA, 25 bp, Homo sapien
tcctaacatcttctcagccttgacc

SEQ ID NO: 937809 - DNA, 25 bp, Homo sapien
cctaacatcttctcagccttgacca

SEQ ID NO: 937810 - DNA, 25 bp, Homo sapien
ctcctaacatcttctcagccttgac

SEQ ID NO: 937811 - DNA, 25 bp, Homo sapien
ctaacatcttctcagccttgaccat

SEQ ID NO: 937812 - DNA, 25 bp, Homo sapien
tcagaagaaaccttattggatctgt

SEQ ID NO: 937813 - DNA, 25 bp, Homo sapien
gtgcctgaagaaaatttgggatcag

SEQ ID NO: 937814 - DNA, 25 bp, Homo sapien
aacatgtctatagagcctcccagta

SEQ ID NO: 937815 - DNA, 25 bp, Homo sapien
tacagtttggagattcgggaacatc

SEQ ID NO: 937816 - DNA, 25 bp, Homo sapien
catctttcgctgtgttcacagatcg

SEQ ID NO: 937817 - DNA, 25 bp, Homo sapien
acagatcgaattcggttgatgcaac

SEQ ID NO: 937818 - DNA, 25 bp, Homo sapien
tcgctgtgttcacagatcgaattcg

SEQ ID NO: 937819 - DNA, 25 bp, Homo sapien
gaattcggttgatgcaactatccat

SEQ ID NO: 937820 - DNA, 25 bp, Homo sapien
attcactgggttaattaaaatctga

SEQ ID NO: 937821 - DNA, 25 bp, Homo sapien
aagcacgacttagttgtgttccagg

SEQ ID NO: 937822 - DNA, 25 bp, Homo sapien
tgttccagggagcatattttcaggc

SEQ ID NO: 937823 - DNA, 25 bp, Homo sapien
ttcagaaaacggtagacatctccct

SEQ ID NO: 937824 - DNA, 25 bp, Homo sapien
tgccttgccgctaaaatttttgagt

SEQ ID NO: 937825 - DNA, 25 bp, Homo sapien
aagcaaaacactgcggcagttcccg

SEQ ID NO: 937826 - DNA, 25 bp, Homo sapien
caaccgcctcctggagcctataggg

SEQ ID NO: 937827 - DNA, 25 bp, Homo sapien
taaaattatctatcgctgctttcgc

SEQ ID NO: 937828 - DNA, 25 bp, Homo sapien
tctcatgaatggttggtaactggag

SEQ ID NO: 937829 - DNA, 25 bp, Homo sapien
ggtaactggagatggttgccagcat

SEQ ID NO: 937830 - DNA, 25 bp, Homo sapien
ccagcatgcgtttatttggcaatga

SEQ ID NO: 937831 - DNA, 25 bp, Homo sapien
tgggtgaccatgtgtggcataaaat

SEQ ID NO: 937832 - DNA, 25 bp, Homo sapien
tgacttaaaagtgcaaccagatgtt

SEQ ID NO: 937833 - DNA, 25 bp, Homo sapien
tttgactctattttgctgcagatgg

SEQ ID NO: 937834 - DNA, 25 bp, Homo sapien
caatgattatctgttgagggaaatc

SEQ ID NO: 937835 - DNA, 25 bp, Homo sapien
tgttgagggaaatctgggtttctcc

SEQ ID NO: 937836 - DNA, 25 bp, Homo sapien
tgagggaaatctgggtttctcctag

SEQ ID NO: 937837 - DNA, 25 bp, Homo sapien
tctgttgagggaaatctgggtttct

SEQ ID NO: 937838 - DNA, 25 bp, Homo sapien
cttgaagtagctctagagtcttgac

SEQ ID NO: 937839 - DNA, 25 bp, Homo sapien
agtagctctagagtcttgaccaaca

SEQ ID NO: 937840 - DNA, 25 bp, Homo sapien
gaagtagctctagagtcttgaccaa

SEQ ID NO: 937841 - DNA, 25 bp, Homo sapien
tgaagtagctctagagtcttgacca

SEQ ID NO: 937842 - DNA, 25 bp, Homo sapien
gtctaaaatgagaaagcaaagctaa

SEQ ID NO: 937843 - DNA, 25 bp, Homo sapien
tgtctaaaatgagaaagcaaagcta

SEQ ID NO: 937844 - DNA, 25 bp, Homo sapien
taaaatgagaaagcaaagctaaatt

SEQ ID NO: 937845 - DNA, 25 bp, Homo sapien
cttgtctaaaatgagaaagcaaagc

SEQ ID NO: 937846 - DNA, 25 bp, Homo sapien
actgcccacagagggatcacctggg

SEQ ID NO: 937847 - DNA, 25 bp, Homo sapien
tcacagcactgtttattccccagtg

SEQ ID NO: 937848 - DNA, 25 bp, Homo sapien
agtgcttctgccctaatgcactgcc

SEQ ID NO: 937849 - DNA, 25 bp, Homo sapien
gtttattccccagtgcttctgccct

SEQ ID NO: 937850 - DNA, 25 bp, Homo sapien
ttccaccctcaccatttatgttctg

SEQ ID NO: 937851 - DNA, 25 bp, Homo sapien
ctttccaccctcaccatttatgttc

SEQ ID NO: 937852 - DNA, 25 bp, Homo sapien
tttccaccctcaccatttatgttct

SEQ ID NO: 937853 - DNA, 25 bp, Homo sapien
tattggtgggtgcttcagacacact

SEQ ID NO: 937854 - DNA, 25 bp, Homo sapien
ggtaaatagtgtcttccaccagcaa

SEQ ID NO: 937855 - DNA, 25 bp, Homo sapien
gacaaacagtcatagcatccacagt

SEQ ID NO: 937856 - DNA, 25 bp, Homo sapien
tgaggacctgcccacagcatatagg

SEQ ID NO: 937857 - DNA, 25 bp, Homo sapien
tttgcataatatgctactcggacaa

SEQ ID NO: 937858 - DNA, 25 bp, Homo sapien
ccattttgcataatatgctactcgg

SEQ ID NO: 937859 - DNA, 25 bp, Homo sapien
gcataatatgctactcggacaaaaa

SEQ ID NO: 937860 - DNA, 25 bp, Homo sapien
taatatgctactcggacaaaaatac

SEQ ID NO: 937861 - DNA, 25 bp, Homo sapien
gttgctcacaaacaagtgggccacc

SEQ ID NO: 937862 - DNA, 25 bp, Homo sapien
atttggaatggcacatccacgacca

SEQ ID NO: 937863 - DNA, 25 bp, Homo sapien
atgttgctcacaaacaagtgggcca

SEQ ID NO: 937864 - DNA, 25 bp, Homo sapien
ggcacatccacgaccaggaacaatg

SEQ ID NO: 937865 - DNA, 25 bp, Homo sapien
ggtattctcctaaaaatgacttgcc

SEQ ID NO: 937866 - DNA, 25 bp, Homo sapien
gagtcaaccatccttttaagtgtgc

SEQ ID NO: 937867 - DNA, 25 bp, Homo sapien
catatatagatttgcatctcagaga

SEQ ID NO: 937868 - DNA, 25 bp, Homo sapien
gttggatgcagactaacatataacc

SEQ ID NO: 937869 - DNA, 25 bp, Homo sapien
agcctgttgcatcatcagatagagg

SEQ ID NO: 937870 - DNA, 25 bp, Homo sapien
attttataccctcctttctgtagcg

SEQ ID NO: 937871 - DNA, 25 bp, Homo sapien
cagttactgctggtattagtagtta

SEQ ID NO: 937872 - DNA, 25 bp, Homo sapien
aaataattctgttaattgaaattgc

SEQ ID NO: 937873 - DNA, 25 bp, Homo sapien
tagggataggaacattgccaagccg

SEQ ID NO: 937874 - DNA, 25 bp, Homo sapien
tcagagcaaggtgtataacacttgc

SEQ ID NO: 937875 - DNA, 25 bp, Homo sapien
tgccaagccgaaataacagttgcct

SEQ ID NO: 937876 - DNA, 25 bp, Homo sapien
gaaatgtccaagctcgtaaagtcac

SEQ ID NO: 937877 - DNA, 25 bp, Homo sapien
catttcccattatatagagatgtgc

SEQ ID NO: 937878 - DNA, 25 bp, Homo sapien
gagatgtgccactcgtaataggcca

SEQ ID NO: 937879 - DNA, 25 bp, Homo sapien
caccttccctcgatgatgctggctg

SEQ ID NO: 937880 - DNA, 25 bp, Homo sapien
catatttcagactcattcagagtca

SEQ ID NO: 937881 - DNA, 25 bp, Homo sapien
tcttttcaggaattgtgcatccata

SEQ ID NO: 937882 - DNA, 25 bp, Homo sapien
tcaatcgtactaacaaaatcatcca

SEQ ID NO: 937883 - DNA, 25 bp, Homo sapien
ggaattgtgcatccataattaggta

SEQ ID NO: 937884 - DNA, 25 bp, Homo sapien
ccataattaggtaaatcaatcgtac

SEQ ID NO: 937885 - DNA, 25 bp, Homo sapien
cagggccatataccagctgggaaac

SEQ ID NO: 937886 - DNA, 25 bp, Homo sapien
taaaaccagatctgatccttcaggg

SEQ ID NO: 937887 - DNA, 25 bp, Homo sapien
catgaattccaagccaagcttcata

SEQ ID NO: 937888 - DNA, 25 bp, Homo sapien
ctcttccgtggacatcatgaattcc

SEQ ID NO: 937889 - DNA, 25 bp, Homo sapien
agaagggaaacactgtcgtgcagta

SEQ ID NO: 937890 - DNA, 25 bp, Homo sapien
tctcctttatcaatgatcctccgca

SEQ ID NO: 937891 - DNA, 25 bp, Homo sapien
aaacactgtcgtgcagtaagaaccc

SEQ ID NO: 937892 - DNA, 25 bp, Homo sapien
tcctttatcaatgatcctccgcaga

SEQ ID NO: 937893 - DNA, 25 bp, Homo sapien
tgttcgtgttggaatcccatttaca

SEQ ID NO: 937894 - DNA, 25 bp, Homo sapien
ccatttacaactcgcaattgtttcg

SEQ ID NO: 937895 - DNA, 25 bp, Homo sapien
gcaattgtttcgttttggcacaaga

SEQ ID NO: 937896 - DNA, 25 bp, Homo sapien
tgtatctcaaactaaccatccatcc

SEQ ID NO: 937897 - DNA, 25 bp, Homo sapien
tgactattgtaggtgtggtatcacc

SEQ ID NO: 937898 - DNA, 25 bp, Homo sapien
gactattgtaggtgtggtatcacct

SEQ ID NO: 937899 - DNA, 25 bp, Homo sapien
attgtaggtgtggtatcaccttcac

SEQ ID NO: 937900 - DNA, 25 bp, Homo sapien
ctattgtaggtgtggtatcaccttc

SEQ ID NO: 937901 - DNA, 25 bp, Homo sapien
aacgagaaatagggcaataatccca

SEQ ID NO: 937902 - DNA, 25 bp, Homo sapien
tggatttcccgtgtagcaccagggt

SEQ ID NO: 937903 - DNA, 25 bp, Homo sapien
tcagcttacttgcatctggttccca

SEQ ID NO: 937904 - DNA, 25 bp, Homo sapien
tggatttcggcagtaattctcattc

SEQ ID NO: 937905 - DNA, 25 bp, Homo sapien
cccacattgaacatgttagtccaga

SEQ ID NO: 937906 - DNA, 25 bp, Homo sapien
ttgggataagttgcccatataattt

SEQ ID NO: 937907 - DNA, 25 bp, Homo sapien
cttgtcccacattgaacatgttagt

SEQ ID NO: 937908 - DNA, 25 bp, Homo sapien
gatcttgtttgggataagttgccca

SEQ ID NO: 937909 - DNA, 25 bp, Homo sapien
gactcagctggtaccaaacttccct

SEQ ID NO: 937910 - DNA, 25 bp, Homo sapien
tcagagttgctcgtgaagaatgaca

SEQ ID NO: 937911 - DNA, 25 bp, Homo sapien
aatgttcaagtaaatgagacaggaa

SEQ ID NO: 937912 - DNA, 25 bp, Homo sapien
tcccctcttccctctacaactctat

SEQ ID NO: 937913 - DNA, 25 bp, Homo sapien
gattcagacccatctggatttcggc

SEQ ID NO: 937914 - DNA, 25 bp, Homo sapien
aatttgggagcagtagccaactcgg

SEQ ID NO: 937915 - DNA, 25 bp, Homo sapien
catatcacagtttggaatttgggag

SEQ ID NO: 937916 - DNA, 25 bp, Homo sapien
tcggcagtaattttctcgtaggtcc

SEQ ID NO: 937917 - DNA, 25 bp, Homo sapien
agttcttacgttggtgaagtcagcg

SEQ ID NO: 937918 - DNA, 25 bp, Homo sapien
taagcatgttaatgtaaattgccgg

SEQ ID NO: 937919 - DNA, 25 bp, Homo sapien
tgttaatgtaaattgccggagttct

SEQ ID NO: 937920 - DNA, 25 bp, Homo sapien
aattgccggagttcttacgttggtg

SEQ ID NO: 937921 - DNA, 25 bp, Homo sapien
ttgaccttggatgcattcagttgtt

SEQ ID NO: 937922 - DNA, 25 bp, Homo sapien
tcatgctcgtgaggatactgagaat

SEQ ID NO: 937923 - DNA, 25 bp, Homo sapien
tactgagaatcccaacgctgacatg

SEQ ID NO: 937924 - DNA, 25 bp, Homo sapien
caaaggaacatcagtgtcattcata

SEQ ID NO: 937925 - DNA, 25 bp, Homo sapien
tccagtcttgatgagtccaggtgtc

SEQ ID NO: 937926 - DNA, 25 bp, Homo sapien
tgagtccaggtgtcaatcagtgcca

SEQ ID NO: 937927 - DNA, 25 bp, Homo sapien
gagtccaggtgtcaatcagtgccat

SEQ ID NO: 937928 - DNA, 25 bp, Homo sapien
gacagatcgaaacagaatgcaggct

SEQ ID NO: 937929 - DNA, 25 bp, Homo sapien
tgcaggctgggtacaaagacagcga

SEQ ID NO: 937930 - DNA, 25 bp, Homo sapien
gaaaaatgattgtatggactgctaa

SEQ ID NO: 937931 - DNA, 25 bp, Homo sapien
taggtaagggccagcatgtagaaaa

SEQ ID NO: 937932 - DNA, 25 bp, Homo sapien
gctggccatcgggattgcggcaata

SEQ ID NO: 937933 - DNA, 25 bp, Homo sapien
ttaattgcacagtactcccagcggg

SEQ ID NO: 937934 - DNA, 25 bp, Homo sapien
aattatcatcaaagcccttgtcggg

SEQ ID NO: 937935 - DNA, 25 bp, Homo sapien
gtgtgagggtcaagagtatagcacc

SEQ ID NO: 937936 - DNA, 25 bp, Homo sapien
caccaagaaaagtgtcacgtaaatc

SEQ ID NO: 937937 - DNA, 25 bp, Homo sapien
acaccaagaaaagtgtcacgtaaat

SEQ ID NO: 937938 - DNA, 25 bp, Homo sapien
acccctcagctcacaaaataacttt

SEQ ID NO: 937939 - DNA, 25 bp, Homo sapien
taactttccacttaggttgtctaca

SEQ ID NO: 937940 - DNA, 25 bp, Homo sapien
cacccctcagctcacaaaataactt

SEQ ID NO: 937941 - DNA, 25 bp, Homo sapien
acccacccctcagctcacaaaataa

SEQ ID NO: 937942 - DNA, 25 bp, Homo sapien
agagtcctgaattggtgacttgatt

SEQ ID NO: 937943 - DNA, 25 bp, Homo sapien
aattgctaccatatcccttctgctc

SEQ ID NO: 937944 - DNA, 25 bp, Homo sapien
tttaattgctaccatatcccttctg

SEQ ID NO: 937945 - DNA, 25 bp, Homo sapien
gagtcctgaattggtgacttgattt

SEQ ID NO: 937946 - DNA, 25 bp, Homo sapien
tggtgtctgatgatcccagcgctga

SEQ ID NO: 937947 - DNA, 25 bp, Homo sapien
ccagcgctgacaaatcttgcctgat

SEQ ID NO: 937948 - DNA, 25 bp, Homo sapien
cctgattctgtatgatccatgagac

SEQ ID NO: 937949 - DNA, 25 bp, Homo sapien
tctccccattgcaggtcatgcattc

SEQ ID NO: 937950 - DNA, 25 bp, Homo sapien
gacaatgcccttttatgctgtgaga

SEQ ID NO: 937951 - DNA, 25 bp, Homo sapien
gctcaagacagtaggtaagtaaacc

SEQ ID NO: 937952 - DNA, 25 bp, Homo sapien
gacagaactgaaaaatccggctatt

SEQ ID NO: 937953 - DNA, 25 bp, Homo sapien
tccccagagggatgtctcaggcagt

SEQ ID NO: 937954 - DNA, 25 bp, Homo sapien
ggaatgtcacagacttcgtagcgta

SEQ ID NO: 937955 - DNA, 25 bp, Homo sapien
tcgaggatttcgacagtagttttcc

SEQ ID NO: 937956 - DNA, 25 bp, Homo sapien
gacttcgtagcgtacctctggattg

SEQ ID NO: 937957 - DNA, 25 bp, Homo sapien
ttgcttgtgaaacaccagggtcccc

SEQ ID NO: 937958 - DNA, 25 bp, Homo sapien
gataatcattacagtataagagcat

SEQ ID NO: 937959 - DNA, 25 bp, Homo sapien
tgataatcattacagtataagagca

SEQ ID NO: 937960 - DNA, 25 bp, Homo sapien
cataggtttaatcccagtgtggagc

SEQ ID NO: 937961 - DNA, 25 bp, Homo sapien
tttgaccaagggatgaagcctagcc

SEQ ID NO: 937962 - DNA, 25 bp, Homo sapien
tattaatatactggatcctctcggc

SEQ ID NO: 937963 - DNA, 25 bp, Homo sapien
cagcatgggttctactgaccggcca

SEQ ID NO: 937964 - DNA, 25 bp, Homo sapien
taagtaagattcgtcaagggcttgc

SEQ ID NO: 937965 - DNA, 25 bp, Homo sapien
agaaccaataaaactacccgctgtg

SEQ ID NO: 937966 - DNA, 25 bp, Homo sapien
caatgttgagatccaccaaggttaa

SEQ ID NO: 937967 - DNA, 25 bp, Homo sapien
gattaacaaggtacagtgctcagca

SEQ ID NO: 937968 - DNA, 25 bp, Homo sapien
ccgtaatacaattcagcaagttggc

SEQ ID NO: 937969 - DNA, 25 bp, Homo sapien
caaattgaggcattaaggtaagata

SEQ ID NO: 937970 - DNA, 25 bp, Homo sapien
tctgaaggactaatatgagactgtt

SEQ ID NO: 937971 - DNA, 25 bp, Homo sapien
tgttaacatgtaaaaaagacagagg

SEQ ID NO: 937972 - DNA, 25 bp, Homo sapien
ccaatgatgcagtttctaatgtagt

SEQ ID NO: 937973 - DNA, 25 bp, Homo sapien
catttgatgccactcttagtgatag

SEQ ID NO: 937974 - DNA, 25 bp, Homo sapien
ctgtgttcgtgtggtatcatggaac

SEQ ID NO: 937975 - DNA, 25 bp, Homo sapien
gatactgttcccttgtagctgcgtc

SEQ ID NO: 937976 - DNA, 25 bp, Homo sapien
tattgcaactatgcaaaacatatgc

SEQ ID NO: 937977 - DNA, 25 bp, Homo sapien
caaacctgtaagtaattaactcttg

SEQ ID NO: 937978 - DNA, 25 bp, Homo sapien
taattaactcttgtaaactatttca

SEQ ID NO: 937979 - DNA, 25 bp, Homo sapien
tcaaataacattgaaatttcttgcc

SEQ ID NO: 937980 - DNA, 25 bp, Homo sapien
ctttgttttcatagaggtcaaattc

SEQ ID NO: 937981 - DNA, 25 bp, Homo sapien
gttttcatagaggtcaaattcatgg

SEQ ID NO: 937982 - DNA, 25 bp, Homo sapien
ttttcatagaggtcaaattcatggc

SEQ ID NO: 937983 - DNA, 25 bp, Homo sapien
ttgttttcatagaggtcaaattcat

SEQ ID NO: 937984 - DNA, 25 bp, Homo sapien
tattgaaggggaaccagaggcattg

SEQ ID NO: 937985 - DNA, 25 bp, Homo sapien
tgaaggggaaccagaggcattgttt

SEQ ID NO: 937986 - DNA, 25 bp, Homo sapien
ttgaaggggaaccagaggcattgtt

SEQ ID NO: 937987 - DNA, 25 bp, Homo sapien
gctattgaaggggaaccagaggcat

SEQ ID NO: 937988 - DNA, 25 bp, Homo sapien
gaggattttaccatttctgggccaa

SEQ ID NO: 937989 - DNA, 25 bp, Homo sapien
gcacaggttgccataaatttggaga

SEQ ID NO: 937990 - DNA, 25 bp, Homo sapien
gattcattaagaccctaagttcata

SEQ ID NO: 937991 - DNA, 25 bp, Homo sapien
cattcacgtcacagatggtttcgca

SEQ ID NO: 937992 - DNA, 25 bp, Homo sapien
gtttttatcttcagtgctggatcta

SEQ ID NO: 937993 - DNA, 25 bp, Homo sapien
caagtgaatggaagtcctttattcc

SEQ ID NO: 937994 - DNA, 25 bp, Homo sapien
cacattggtctgcagtattcacttt

SEQ ID NO: 937995 - DNA, 25 bp, Homo sapien
tattcctagtacatctattagcaca

SEQ ID NO: 937996 - DNA, 25 bp, Homo sapien
atcctaaggatcatctacaagaaag

SEQ ID NO: 937997 - DNA, 25 bp, Homo sapien
aaatcctaaggatcatctacaagaa

SEQ ID NO: 937998 - DNA, 25 bp, Homo sapien
aaaaaatcctaaggatcatctacaa

SEQ ID NO: 937999 - DNA, 25 bp, Homo sapien
aaaatcctaaggatcatctacaaga

SEQ ID NO: 938000 - DNA, 25 bp, Homo sapien
taattcccaactggactctccttgc

SEQ ID NO: 938001 - DNA, 25 bp, Homo sapien
gcattctgcctgtactcaggaaaca

SEQ ID NO: 938002 - DNA, 25 bp, Homo sapien
tctgcctgtactcaggaaacacagt

SEQ ID NO: 938003 - DNA, 25 bp, Homo sapien
tcacagcatatttgtaattcccaac

SEQ ID NO: 938004 - DNA, 25 bp, Homo sapien
tactacatactgagttcagaaagga

SEQ ID NO: 938005 - DNA, 25 bp, Homo sapien
ttagaaacctatactacatactgag

SEQ ID NO: 938006 - DNA, 25 bp, Homo sapien
ctacatactgagttcagaaaggatg

SEQ ID NO: 938007 - DNA, 25 bp, Homo sapien
aacctatactacatactgagttcag

SEQ ID NO: 938008 - DNA, 25 bp, Homo sapien
cagggctggcaggagtttggtcacc

SEQ ID NO: 938009 - DNA, 25 bp, Homo sapien
atgcaggaggacatgctgcagcagc

SEQ ID NO: 938010 - DNA, 25 bp, Homo sapien
gctggcaggagtttggtcacccaca

SEQ ID NO: 938011 - DNA, 25 bp, Homo sapien
agatgcaggaggacatgctgcagca

SEQ ID NO: 938012 - DNA, 25 bp, Homo sapien
taaaagagccagtcggctctgagct

SEQ ID NO: 938013 - DNA, 25 bp, Homo sapien
ttcggagtcagtgcctaaaagagcc

SEQ ID NO: 938014 - DNA, 25 bp, Homo sapien
cctgggtgaaagaatcctgttcgga

SEQ ID NO: 938015 - DNA, 25 bp, Homo sapien
tctaggtctgaactccctcttacgg

SEQ ID NO: 938016 - DNA, 25 bp, Homo sapien
agctccagatcccagtggctcctat

SEQ ID NO: 938017 - DNA, 25 bp, Homo sapien
tcaatttggaagctggagctccaga

SEQ ID NO: 938018 - DNA, 25 bp, Homo sapien
ttcaatttggaagctggagctccag

SEQ ID NO: 938019 - DNA, 25 bp, Homo sapien
ggctcctatccgagtaaggaaggga

SEQ ID NO: 938020 - DNA, 25 bp, Homo sapien
taagtgatgacattcagcagaacac

SEQ ID NO: 938021 - DNA, 25 bp, Homo sapien
gtaagtgatgacattcagcagaaca

SEQ ID NO: 938022 - DNA, 25 bp, Homo sapien
gtgatgacattcagcagaacaccca

SEQ ID NO: 938023 - DNA, 25 bp, Homo sapien
tgagtaagtgatgacattcagcaga

SEQ ID NO: 938024 - DNA, 25 bp, Homo sapien
ccttaaactgcttgtttgctttgcc

SEQ ID NO: 938025 - DNA, 25 bp, Homo sapien
ggagagcaccagattatagctgtcc

SEQ ID NO: 938026 - DNA, 25 bp, Homo sapien
caccagattatagctgtccttaaac

SEQ ID NO: 938027 - DNA, 25 bp, Homo sapien
gtccttaaactgcttgtttgctttg

SEQ ID NO: 938028 - DNA, 25 bp, Homo sapien
tctccagaagattttgccaacagaa

SEQ ID NO: 938029 - DNA, 25 bp, Homo sapien
gactatactatcataaagcaggtca

SEQ ID NO: 938030 - DNA, 25 bp, Homo sapien
gccaacagaatgactatactatcat

SEQ ID NO: 938031 - DNA, 25 bp, Homo sapien
acaccacccatgatcaggagcctgg

SEQ ID NO: 938032 - DNA, 25 bp, Homo sapien
tttatcaggagtggctctttgtatc

SEQ ID NO: 938033 - DNA, 25 bp, Homo sapien
tttgttttatcaggagtggctcttt

SEQ ID NO: 938034 - DNA, 25 bp, Homo sapien
cactgaaggtgataggtttaccctc

SEQ ID NO: 938035 - DNA, 25 bp, Homo sapien
gcatcacacagatagggaaccattt

SEQ ID NO: 938036 - DNA, 25 bp, Homo sapien
tccagaatgccaagttttgaactgc

SEQ ID NO: 938037 - DNA, 25 bp, Homo sapien
ggtgcattgaagtcccaaaggttgg

SEQ ID NO: 938038 - DNA, 25 bp, Homo sapien
taattcgtgaaaaagtccagaatgc

SEQ ID NO: 938039 - DNA, 25 bp, Homo sapien
caaaggttggctgttaaacttgcag

SEQ ID NO: 938040 - DNA, 25 bp, Homo sapien
ttctaaggcgatgaaagcacggagt

SEQ ID NO: 938041 - DNA, 25 bp, Homo sapien
gatgaaagcacggagtagtgaggta

SEQ ID NO: 938042 - DNA, 25 bp, Homo sapien
taaggcgatgaaagcacggagtagt

SEQ ID NO: 938043 - DNA, 25 bp, Homo sapien
atgaaagcacggagtagtgaggtag

SEQ ID NO: 938044 - DNA, 25 bp, Homo sapien
tggggacggttcttttttatcatca

SEQ ID NO: 938045 - DNA, 25 bp, Homo sapien
ttcaggtccagggtattgaaggcag

SEQ ID NO: 938046 - DNA, 25 bp, Homo sapien
cttgctttgcataaacttcaggtcc

SEQ ID NO: 938047 - DNA, 25 bp, Homo sapien
ttgaaggcagtgctgccagtccaga

SEQ ID NO: 938048 - DNA, 25 bp, Homo sapien
ctgcaaggaacattgcctagagttt

SEQ ID NO: 938049 - DNA, 25 bp, Homo sapien
gcaaggaacattgcctagagttttc

SEQ ID NO: 938050 - DNA, 25 bp, Homo sapien
gtctgcaaggaacattgcctagagt

SEQ ID NO: 938051 - DNA, 25 bp, Homo sapien
aaggaacattgcctagagttttcat

SEQ ID NO: 938052 - DNA, 25 bp, Homo sapien
ttactaaaggtctctttacttgctc

SEQ ID NO: 938053 - DNA, 25 bp, Homo sapien
caggctgtttgatgtctctataatt

SEQ ID NO: 938054 - DNA, 25 bp, Homo sapien
ccaggctgtttgatgtctctataat

SEQ ID NO: 938055 - DNA, 25 bp, Homo sapien
tgatgagagagtgttggccggtggc

SEQ ID NO: 938056 - DNA, 25 bp, Homo sapien
gagttaatatagtgtgatgagagag

SEQ ID NO: 938057 - DNA, 25 bp, Homo sapien
tggccggtggctcaagcagctctgc

SEQ ID NO: 938058 - DNA, 25 bp, Homo sapien
gagtgttggccggtggctcaagcag

SEQ ID NO: 938059 - DNA, 25 bp, Homo sapien
gagtgtttccatgttgagttctata

SEQ ID NO: 938060 - DNA, 25 bp, Homo sapien
tttgtacttcttcgagatgtgcaag

SEQ ID NO: 938061 - DNA, 25 bp, Homo sapien
gaacactagttttccatgagttgag

SEQ ID NO: 938062 - DNA, 25 bp, Homo sapien
ttttttcctaatagccagccactta

SEQ ID NO: 938063 - DNA, 25 bp, Homo sapien
gatgtttggtcattagtcaccacca

SEQ ID NO: 938064 - DNA, 25 bp, Homo sapien
gacatattgggttgatctgtactcc

SEQ ID NO: 938065 - DNA, 25 bp, Homo sapien
taaggaaacacttcagccgtcaaca

SEQ ID NO: 938066 - DNA, 25 bp, Homo sapien
tgttcaagactaataggagcctgat

SEQ ID NO: 938067 - DNA, 25 bp, Homo sapien
gacacaaggatcagatgggactcca

SEQ ID NO: 938068 - DNA, 25 bp, Homo sapien
gaccagcatgcccagtgtattctga

SEQ ID NO: 938069 - DNA, 25 bp, Homo sapien
catgcccagtgtattctgaaacagc

SEQ ID NO: 938070 - DNA, 25 bp, Homo sapien
aagcagacacaaggatcagatggga

SEQ ID NO: 938071 - DNA, 25 bp, Homo sapien
ttcaatggatgcaaagattctcttt

SEQ ID NO: 938072 - DNA, 25 bp, Homo sapien
taaatgagacattgcgaatttgtgg

SEQ ID NO: 938073 - DNA, 25 bp, Homo sapien
gcgaatttgtggcttgcattggtat

SEQ ID NO: 938074 - DNA, 25 bp, Homo sapien
tggcttgcattggtattaggcttac

SEQ ID NO: 938075 - DNA, 25 bp, Homo sapien
acttgtggtagtgaagtctttcatc

SEQ ID NO: 938076 - DNA, 25 bp, Homo sapien
gacggtaaggcatttgcaaaacttg

SEQ ID NO: 938077 - DNA, 25 bp, Homo sapien
cacatgatgagctggctttttctga

SEQ ID NO: 938078 - DNA, 25 bp, Homo sapien
tggtggcatgggtggacggtaaggc

SEQ ID NO: 938079 - DNA, 25 bp, Homo sapien
catcagttgtgagacacttaatgtc

SEQ ID NO: 938080 - DNA, 25 bp, Homo sapien
tcagttgtgagacacttaatgtctt

SEQ ID NO: 938081 - DNA, 25 bp, Homo sapien
gttgtgagacacttaatgtctttct

SEQ ID NO: 938082 - DNA, 25 bp, Homo sapien
cagttgtgagacacttaatgtcttt

SEQ ID NO: 938083 - DNA, 25 bp, Homo sapien
cacttgggttgcaaaggtcacttaa

SEQ ID NO: 938084 - DNA, 25 bp, Homo sapien
tgttacaaatatggaccacggttgg

SEQ ID NO: 938085 - DNA, 25 bp, Homo sapien
ccagttggccttttgcatgaatgca

SEQ ID NO: 938086 - DNA, 25 bp, Homo sapien
ggatactgcctatttgaacccgata

SEQ ID NO: 938087 - DNA, 25 bp, Homo sapien
gatcctgccaagagatgccaagttt

SEQ ID NO: 938088 - DNA, 25 bp, Homo sapien
gatgcagcattcacacacgtttaag

SEQ ID NO: 938089 - DNA, 25 bp, Homo sapien
cagccagtgggtgccttaggagtct

SEQ ID NO: 938090 - DNA, 25 bp, Homo sapien
tagtgttatgccatggaacaggccc

SEQ ID NO: 938091 - DNA, 25 bp, Homo sapien
ttccaatgatataccacagggaggg

SEQ ID NO: 938092 - DNA, 25 bp, Homo sapien
gagggatttaatccagaaacaccac

SEQ ID NO: 938093 - DNA, 25 bp, Homo sapien
gataccagccaaagtagtagaaact

SEQ ID NO: 938094 - DNA, 25 bp, Homo sapien
tcataacaggcggtgtgtgctgcca

SEQ ID NO: 938095 - DNA, 25 bp, Homo sapien
tctaagaatcaaaataataggttga

SEQ ID NO: 938096 - DNA, 25 bp, Homo sapien
ttaaagaatctgctaatccaaggta

SEQ ID NO: 938097 - DNA, 25 bp, Homo sapien
tctgctaatccaaggtagatgttct

SEQ ID NO: 938098 - DNA, 25 bp, Homo sapien
tccaaggtagatgttctaagaatca

SEQ ID NO: 938099 - DNA, 25 bp, Homo sapien
ttggcttgacctcctttctttcatg

SEQ ID NO: 938100 - DNA, 25 bp, Homo sapien
tgacattgtctccttgaaatacgtt

SEQ ID NO: 938101 - DNA, 25 bp, Homo sapien
agtttcaatcaatttacatcccaaa

SEQ ID NO: 938102 - DNA, 25 bp, Homo sapien
tacgttctcatgtacctttggctaa

SEQ ID NO: 938103 - DNA, 25 bp, Homo sapien
gtatctgggttgcttaaccatgtca

SEQ ID NO: 938104 - DNA, 25 bp, Homo sapien
ggttgcttaaccatgtcacaaggat

SEQ ID NO: 938105 - DNA, 25 bp, Homo sapien
aaagcagacatcaggcccttttcgg

SEQ ID NO: 938106 - DNA, 25 bp, Homo sapien
catcaggcccttttcggtatctggg

SEQ ID NO: 938107 - DNA, 25 bp, Homo sapien
ctaaaagagacttgttaaggaatct

SEQ ID NO: 938108 - DNA, 25 bp, Homo sapien
taaaagagacttgttaaggaatctc

SEQ ID NO: 938109 - DNA, 25 bp, Homo sapien
aaagagacttgttaaggaatctcat

SEQ ID NO: 938110 - DNA, 25 bp, Homo sapien
aaaagagacttgttaaggaatctca

SEQ ID NO: 938111 - DNA, 25 bp, Homo sapien
atattaagttggtgttcataagctt

SEQ ID NO: 938112 - DNA, 25 bp, Homo sapien
aagtctgctccgcttgtatgagcag

SEQ ID NO: 938113 - DNA, 25 bp, Homo sapien
tcgtgtgtcacatggacatgtccct

SEQ ID NO: 938114 - DNA, 25 bp, Homo sapien
agttggtgttcataagcttttctcc

SEQ ID NO: 938115 - DNA, 25 bp, Homo sapien
actgaatgatttactgtcgttatcg

SEQ ID NO: 938116 - DNA, 25 bp, Homo sapien
cgttatcgaagaaatactgggtttg

SEQ ID NO: 938117 - DNA, 25 bp, Homo sapien
gaacagtttccacagtctaatacac

SEQ ID NO: 938118 - DNA, 25 bp, Homo sapien
cacagtctaatacaccactgaatga

SEQ ID NO: 938119 - DNA, 25 bp, Homo sapien
gggaggccgtgaagtcatcatcctc

SEQ ID NO: 938120 - DNA, 25 bp, Homo sapien
ctgcttggacagggaggccgtgaag

SEQ ID NO: 938121 - DNA, 25 bp, Homo sapien
gacagggaggccgtgaagtcatcat

SEQ ID NO: 938122 - DNA, 25 bp, Homo sapien
aggccgtgaagtcatcatcctccat

SEQ ID NO: 938123 - DNA, 25 bp, Homo sapien
ctgcctcaaggagtcgtggaaaggt

SEQ ID NO: 938124 - DNA, 25 bp, Homo sapien
tcaaggagtcgtggaaaggtcaaac

SEQ ID NO: 938125 - DNA, 25 bp, Homo sapien
cctcaaggagtcgtggaaaggtcaa

SEQ ID NO: 938126 - DNA, 25 bp, Homo sapien
tggaaaggtcaaactcaagagaaac

SEQ ID NO: 938127 - DNA, 25 bp, Homo sapien
ggcccaccagccaatttgtaatatg

SEQ ID NO: 938128 - DNA, 25 bp, Homo sapien
tttgtaatatgtctgctactgatgg

SEQ ID NO: 938129 - DNA, 25 bp, Homo sapien
aatttgtaatatgtctgctactgat

SEQ ID NO: 938130 - DNA, 25 bp, Homo sapien
gtggcccaccagccaatttgtaata

SEQ ID NO: 938131 - DNA, 25 bp, Homo sapien
tgaggacacttgagtaccccttgag

SEQ ID NO: 938132 - DNA, 25 bp, Homo sapien
gtagtctacttgatactgaggacac

SEQ ID NO: 938133 - DNA, 25 bp, Homo sapien
taccccttgagaattgattagaccg

SEQ ID NO: 938134 - DNA, 25 bp, Homo sapien
tgattagaccgtggatattactgac

SEQ ID NO: 938135 - DNA, 25 bp, Homo sapien
caagctgggatcaatctctccaaaa

SEQ ID NO: 938136 - DNA, 25 bp, Homo sapien
gcaccgggctcacatactgactgat

SEQ ID NO: 938137 - DNA, 25 bp, Homo sapien
cacatatgctgagcgatgtcctgct

SEQ ID NO: 938138 - DNA, 25 bp, Homo sapien
tattaaccaggtgtctcatcaagct

SEQ ID NO: 938139 - DNA, 25 bp, Homo sapien
gaagaaacccaccatcatccagaat

SEQ ID NO: 938140 - DNA, 25 bp, Homo sapien
tcttttgcagtcacaaactggacca

SEQ ID NO: 938141 - DNA, 25 bp, Homo sapien
ttttgcagtcacaaactggaccagc

SEQ ID NO: 938142 - DNA, 25 bp, Homo sapien
ttcttttgcagtcacaaactggacc

SEQ ID NO: 938143 - DNA, 25 bp, Homo sapien
cttttgcagtcacaaactggaccag

SEQ ID NO: 938144 - DNA, 25 bp, Homo sapien
tttacatcaattttaattccaacaa

SEQ ID NO: 938145 - DNA, 25 bp, Homo sapien
ttctctatccaggaatttacatcaa

SEQ ID NO: 938146 - DNA, 25 bp, Homo sapien
gaggttttggtgaaattctctatcc

SEQ ID NO: 938147 - DNA, 25 bp, Homo sapien
cggatctctgattgaggttttggtg

SEQ ID NO: 938148 - DNA, 25 bp, Homo sapien
caaaggtataattagatgtaataca

SEQ ID NO: 938149 - DNA, 25 bp, Homo sapien
taattcaaaggtataattagatgta

SEQ ID NO: 938150 - DNA, 25 bp, Homo sapien
tcaaaggtataattagatgtaatac

SEQ ID NO: 938151 - DNA, 25 bp, Homo sapien
gaattaattcaaaggtataattaga

SEQ ID NO: 938152 - DNA, 25 bp, Homo sapien
ttctacagctttgcttaccataatg

SEQ ID NO: 938153 - DNA, 25 bp, Homo sapien
gcttaccataatgcccgattcatag

SEQ ID NO: 938154 - DNA, 25 bp, Homo sapien
gcccgattcataggcaccaggtcca

SEQ ID NO: 938155 - DNA, 25 bp, Homo sapien
taatgcccgattcataggcaccagg

SEQ ID NO: 938156 - DNA, 25 bp, Homo sapien
gagcagtgaaaacatagttatcatt

SEQ ID NO: 938157 - DNA, 25 bp, Homo sapien
ttatctaggctccttttatagaagc

SEQ ID NO: 938158 - DNA, 25 bp, Homo sapien
catagttatcattatctaggctcct

SEQ ID NO: 938159 - DNA, 25 bp, Homo sapien
tatagaagctgtcctcatatgtctc

SEQ ID NO: 938160 - DNA, 25 bp, Homo sapien
tctttgggataaactctggtaatcc

SEQ ID NO: 938161 - DNA, 25 bp, Homo sapien
ttgggataaactctggtaatcccac

SEQ ID NO: 938162 - DNA, 25 bp, Homo sapien
tttgggataaactctggtaatccca

SEQ ID NO: 938163 - DNA, 25 bp, Homo sapien
tcacaacaaatcgtgctttcactcc

SEQ ID NO: 938164 - DNA, 25 bp, Homo sapien
cagtcacaacaaatcgtgctttcac

SEQ ID NO: 938165 - DNA, 25 bp, Homo sapien
tcagtcacaacaaatcgtgctttca

SEQ ID NO: 938166 - DNA, 25 bp, Homo sapien
acaacaaatcgtgctttcactccct

SEQ ID NO: 938167 - DNA, 25 bp, Homo sapien
tctgcttactccagtaattttggac

SEQ ID NO: 938168 - DNA, 25 bp, Homo sapien
gcttactccagtaattttggacaag

SEQ ID NO: 938169 - DNA, 25 bp, Homo sapien
agcctgcatcaagcaagactctatt

SEQ ID NO: 938170 - DNA, 25 bp, Homo sapien
ctccagtaattttggacaagttcat

SEQ ID NO: 938171 - DNA, 25 bp, Homo sapien
gaaattcagtgttattatccgatat

SEQ ID NO: 938172 - DNA, 25 bp, Homo sapien
cagtgttattatccgatattttcag

SEQ ID NO: 938173 - DNA, 25 bp, Homo sapien
tatccgatattttcaggtcattgca

SEQ ID NO: 938174 - DNA, 25 bp, Homo sapien
cgatattttcaggtcattgcagtaa

SEQ ID NO: 938175 - DNA, 25 bp, Homo sapien
cttggtgctatgaatgtatagccag

SEQ ID NO: 938176 - DNA, 25 bp, Homo sapien
tgctatgaatgtatagccagattct

SEQ ID NO: 938177 - DNA, 25 bp, Homo sapien
ctatgaatgtatagccagattcttc

SEQ ID NO: 938178 - DNA, 25 bp, Homo sapien
ttatctggcttcagggtttccgaat

SEQ ID NO: 938179 - DNA, 25 bp, Homo sapien
ctgtaggttggtaataccaaggcca

SEQ ID NO: 938180 - DNA, 25 bp, Homo sapien
tgtaggttggtaataccaaggccaa

SEQ ID NO: 938181 - DNA, 25 bp, Homo sapien
tctggcctgagttattgtctcttct

SEQ ID NO: 938182 - DNA, 25 bp, Homo sapien
atctggcctgagttattgtctcttc

SEQ ID NO: 938183 - DNA, 25 bp, Homo sapien
gagggttccagtgaaaatcttaggc

SEQ ID NO: 938184 - DNA, 25 bp, Homo sapien
caaaaaatgtcagacaagctggcca

SEQ ID NO: 938185 - DNA, 25 bp, Homo sapien
tgtagttaacaagagccacggcgct

SEQ ID NO: 938186 - DNA, 25 bp, Homo sapien
tcttacggtagatgtccaaagcaga

SEQ ID NO: 938187 - DNA, 25 bp, Homo sapien
cattgacaggtgtccatgtgtatgt

SEQ ID NO: 938188 - DNA, 25 bp, Homo sapien
ccattgacaggtgtccatgtgtatg

SEQ ID NO: 938189 - DNA, 25 bp, Homo sapien
gccattgacaggtgtccatgtgtat

SEQ ID NO: 938190 - DNA, 25 bp, Homo sapien
ttccccatcaatcatcttatttcga

SEQ ID NO: 938191 - DNA, 25 bp, Homo sapien
catcttgagatttaaccagagttct

SEQ ID NO: 938192 - DNA, 25 bp, Homo sapien
ccccatcaatcatcttatttcgaat

SEQ ID NO: 938193 - DNA, 25 bp, Homo sapien
gagatttaaccagagttctgaatgt

SEQ ID NO: 938194 - DNA, 25 bp, Homo sapien
ttgtttagtcttactgattccactc

SEQ ID NO: 938195 - DNA, 25 bp, Homo sapien
aattgtttagtcttactgattccac

SEQ ID NO: 938196 - DNA, 25 bp, Homo sapien
gtttagtcttactgattccactcac

SEQ ID NO: 938197 - DNA, 25 bp, Homo sapien
ctgaggaattgtttagtcttactga

SEQ ID NO: 938198 - DNA, 25 bp, Homo sapien
aatatcattctctaactctgcatca

SEQ ID NO: 938199 - DNA, 25 bp, Homo sapien
tctctaactctgcatcaaggaaatc

SEQ ID NO: 938200 - DNA, 25 bp, Homo sapien
tctaactctgcatcaaggaaatcca

SEQ ID NO: 938201 - DNA, 25 bp, Homo sapien
cattctctaactctgcatcaaggaa

SEQ ID NO: 938202 - DNA, 25 bp, Homo sapien
ttactatatcaagaaaggcataaac

SEQ ID NO: 938203 - DNA, 25 bp, Homo sapien
gcacatgactgcaaaagtataagat

SEQ ID NO: 938204 - DNA, 25 bp, Homo sapien
taaagtttctcaactagggcagtgg

SEQ ID NO: 938205 - DNA, 25 bp, Homo sapien
taaaattctagcactggaagagagc

SEQ ID NO: 938206 - DNA, 25 bp, Homo sapien
attgttggtatacctacaccaatag

SEQ ID NO: 938207 - DNA, 25 bp, Homo sapien
taattgttggtatacctacaccaat

SEQ ID NO: 938208 - DNA, 25 bp, Homo sapien
ttgttggtatacctacaccaatagg

SEQ ID NO: 938209 - DNA, 25 bp, Homo sapien
attaattgttggtatacctacacca

SEQ ID NO: 938210 - DNA, 25 bp, Homo sapien
taaccattaggatcgattgcaaagt

SEQ ID NO: 938211 - DNA, 25 bp, Homo sapien
taaaacataaccattaggatcgatt

SEQ ID NO: 938212 - DNA, 25 bp, Homo sapien
ttaggatcgattgcaaagtaatacc

SEQ ID NO: 938213 - DNA, 25 bp, Homo sapien
caaagtaatacccattggggcacag

SEQ ID NO: 938214 - DNA, 25 bp, Homo sapien
tatcttccaaagacacatctactcc

SEQ ID NO: 938215 - DNA, 25 bp, Homo sapien
caaagacacatctactcccatcaca

SEQ ID NO: 938216 - DNA, 25 bp, Homo sapien
taatatcttccaaagacacatctac

SEQ ID NO: 938217 - DNA, 25 bp, Homo sapien
tccaaagacacatctactcccatca

SEQ ID NO: 938218 - DNA, 25 bp, Homo sapien
gagttccagtaatgacaagtcccag

SEQ ID NO: 938219 - DNA, 25 bp, Homo sapien
cttattttcaaattggccggttatg

SEQ ID NO: 938220 - DNA, 25 bp, Homo sapien
ttatgttgaagaccggaagagttcc

SEQ ID NO: 938221 - DNA, 25 bp, Homo sapien
caaattggccggttatgttgaagac

SEQ ID NO: 938222 - DNA, 25 bp, Homo sapien
tatgacagtctttgactgaatagct

SEQ ID NO: 938223 - DNA, 25 bp, Homo sapien
ctgtgtgcttttgttatgacagtct

SEQ ID NO: 938224 - DNA, 25 bp, Homo sapien
gacatcatctagaaagaagtagaaa

SEQ ID NO: 938225 - DNA, 25 bp, Homo sapien
gtctttgactgaatagctcaacctc

SEQ ID NO: 938226 - DNA, 25 bp, Homo sapien
tgctaaaaccattggtcttcccaaa

SEQ ID NO: 938227 - DNA, 25 bp, Homo sapien
caggtacacatttgtccattggact

SEQ ID NO: 938228 - DNA, 25 bp, Homo sapien
cattggacttgcttagctttgtctc

SEQ ID NO: 938229 - DNA, 25 bp, Homo sapien
tctcctgctaaaaccattggtcttc

SEQ ID NO: 938230 - DNA, 25 bp, Homo sapien
ttgattcttattgcaccaatggaag

SEQ ID NO: 938231 - DNA, 25 bp, Homo sapien
tgattcttattgcaccaatggaagg

SEQ ID NO: 938232 - DNA, 25 bp, Homo sapien
attgattcttattgcaccaatggaa

SEQ ID NO: 938233 - DNA, 25 bp, Homo sapien
gtattgattcttattgcaccaatgg

SEQ ID NO: 938234 - DNA, 25 bp, Homo sapien
tcctctgtcataattgtgttgacca

SEQ ID NO: 938235 - DNA, 25 bp, Homo sapien
ataggtcctctgtcataattgtgtt

SEQ ID NO: 938236 - DNA, 25 bp, Homo sapien
tgtcataattgtgttgaccaactga

SEQ ID NO: 938237 - DNA, 25 bp, Homo sapien
attgtgttgaccaactgaaaacgtg

SEQ ID NO: 938238 - DNA, 25 bp, Homo sapien
tcaggcctacctggattgctctgaa

SEQ ID NO: 938239 - DNA, 25 bp, Homo sapien
cctacctggattgctctgaaagatt

SEQ ID NO: 938240 - DNA, 25 bp, Homo sapien
tctccaattgtaactcatcaggcct

SEQ ID NO: 938241 - DNA, 25 bp, Homo sapien
cagctctccaattgtaactcatcag

SEQ ID NO: 938242 - DNA, 25 bp, Homo sapien
gagtatcctttcattcatctttagc

SEQ ID NO: 938243 - DNA, 25 bp, Homo sapien
cctttcattcatctttagcctataa

SEQ ID NO: 938244 - DNA, 25 bp, Homo sapien
ttagcctataataatgtataaggtc

SEQ ID NO: 938245 - DNA, 25 bp, Homo sapien
tcatctttagcctataataatgtat

SEQ ID NO: 938246 - DNA, 25 bp, Homo sapien
gcataataatcttattgcagtttgc

SEQ ID NO: 938247 - DNA, 25 bp, Homo sapien
cctccatccgtgaatagcataataa

SEQ ID NO: 938248 - DNA, 25 bp, Homo sapien
catccgtgaatagcataataatctt

SEQ ID NO: 938249 - DNA, 25 bp, Homo sapien
tcttctcctccatccgtgaatagca

SEQ ID NO: 938250 - DNA, 25 bp, Homo sapien
ttacatcctgagcattgctgttaaa

SEQ ID NO: 938251 - DNA, 25 bp, Homo sapien
tattcaccgcgtctttcaacacttt

SEQ ID NO: 938252 - DNA, 25 bp, Homo sapien
tgatattattcaccgcgtctttcaa

SEQ ID NO: 938253 - DNA, 25 bp, Homo sapien
tttggctgtgatattattcaccgcg

SEQ ID NO: 938254 - DNA, 25 bp, Homo sapien
ggtgctgttcccaacagtggctgct

SEQ ID NO: 938255 - DNA, 25 bp, Homo sapien
catggagttggccactccactcttc

SEQ ID NO: 938256 - DNA, 25 bp, Homo sapien
taatgacactcatggagttggccac

SEQ ID NO: 938257 - DNA, 25 bp, Homo sapien
agtggctgctggtttgcggtttcct

SEQ ID NO: 938258 - DNA, 25 bp, Homo sapien
agcaattaagttatcttctggcaac

SEQ ID NO: 938259 - DNA, 25 bp, Homo sapien
ttcaagccccatcaaataagtcaat

SEQ ID NO: 938260 - DNA, 25 bp, Homo sapien
catatacgacgaatttctaagtgcc

SEQ ID NO: 938261 - DNA, 25 bp, Homo sapien
tcctacatctattgctcaggccagc

SEQ ID NO: 938262 - DNA, 25 bp, Homo sapien
aggtagtgagatgggtttccagcca

SEQ ID NO: 938263 - DNA, 25 bp, Homo sapien
catctttgtttgcacaagctgccca

SEQ ID NO: 938264 - DNA, 25 bp, Homo sapien
tcttcgggagaaggagaaatctctt

SEQ ID NO: 938265 - DNA, 25 bp, Homo sapien
tattactcatagcaacagaggagca

SEQ ID NO: 938266 - DNA, 25 bp, Homo sapien
aaattggctgttaatgcttagactt

SEQ ID NO: 938267 - DNA, 25 bp, Homo sapien
ataaattggctgttaatgcttagac

SEQ ID NO: 938268 - DNA, 25 bp, Homo sapien
aattggctgttaatgcttagactta

SEQ ID NO: 938269 - DNA, 25 bp, Homo sapien
taaattggctgttaatgcttagact

SEQ ID NO: 938270 - DNA, 25 bp, Homo sapien
ggcaggatcattccatcgcgttgct

SEQ ID NO: 938271 - DNA, 25 bp, Homo sapien
gaatgagtcaaaccagatgtgagct

SEQ ID NO: 938272 - DNA, 25 bp, Homo sapien
gatgtgagcttactaacactgtcca

SEQ ID NO: 938273 - DNA, 25 bp, Homo sapien
cagggataacgtgttggcaggatca

SEQ ID NO: 938274 - DNA, 25 bp, Homo sapien
caaactccctcacattcataaacaa

SEQ ID NO: 938275 - DNA, 25 bp, Homo sapien
attcaaatccctgtgtcaacacttg

SEQ ID NO: 938276 - DNA, 25 bp, Homo sapien
ttgctgctcctatcatctaccactg

SEQ ID NO: 938277 - DNA, 25 bp, Homo sapien
tgcctgcaaatcagaacacgctgtg

SEQ ID NO: 938278 - DNA, 25 bp, Homo sapien
tctgcactggatttaagactttctc

SEQ ID NO: 938279 - DNA, 25 bp, Homo sapien
tttcacctagatgtcaaatctgcac

SEQ ID NO: 938280 - DNA, 25 bp, Homo sapien
gaactatcccaatggtttgttatga

SEQ ID NO: 938281 - DNA, 25 bp, Homo sapien
tatgccacagatagtatttttaaag

SEQ ID NO: 938282 - DNA, 25 bp, Homo sapien
gccgcgatacaccactaaaaacatt

SEQ ID NO: 938283 - DNA, 25 bp, Homo sapien
tctaggagtttcaacggtgtccgtg

SEQ ID NO: 938284 - DNA, 25 bp, Homo sapien
taatctagctacctggagcttcagg

SEQ ID NO: 938285 - DNA, 25 bp, Homo sapien
caaaaagagtttcacagggctcctt

SEQ ID NO: 938286 - DNA, 25 bp, Homo sapien
taagatagtcttgcaatatatcaaa

SEQ ID NO: 938287 - DNA, 25 bp, Homo sapien
gacaggtcagtaagatagtcttgca

SEQ ID NO: 938288 - DNA, 25 bp, Homo sapien
agtataaagtacctaaagtcaggag

SEQ ID NO: 938289 - DNA, 25 bp, Homo sapien
aaatgtctcagcctctataagataa

SEQ ID NO: 938290 - DNA, 25 bp, Homo sapien
gatcagtttaagtgtcaatccacta

SEQ ID NO: 938291 - DNA, 25 bp, Homo sapien
tgagagggtttctaacatttcggag

SEQ ID NO: 938292 - DNA, 25 bp, Homo sapien
gctacattcacgaaatcatcatctg

SEQ ID NO: 938293 - DNA, 25 bp, Homo sapien
catttcggagacagatgttcggatc

SEQ ID NO: 938294 - DNA, 25 bp, Homo sapien
taaccacgtctggtctcagtaacta

SEQ ID NO: 938295 - DNA, 25 bp, Homo sapien
gtgtgagtaaccacgtctggtctca

SEQ ID NO: 938296 - DNA, 25 bp, Homo sapien
tctcagtaactatgtcttaatcatc

SEQ ID NO: 938297 - DNA, 25 bp, Homo sapien
gtctggtctcagtaactatgtctta

SEQ ID NO: 938298 - DNA, 25 bp, Homo sapien
tagaaaacatgtacacttgcaaaca

SEQ ID NO: 938299 - DNA, 25 bp, Homo sapien
acacatatatcttgaattgaagcac

SEQ ID NO: 938300 - DNA, 25 bp, Homo sapien
agtaaatctccatagcaggatataa

SEQ ID NO: 938301 - DNA, 25 bp, Homo sapien
catgagtaacctaagcattttacac

SEQ ID NO: 938302 - DNA, 25 bp, Homo sapien
gaatatccatatagattctcttcat

SEQ ID NO: 938303 - DNA, 25 bp, Homo sapien
ggaatacagcggcaggaacatggtt

SEQ ID NO: 938304 - DNA, 25 bp, Homo sapien
tttattattgtcttgatatggcttc

SEQ ID NO: 938305 - DNA, 25 bp, Homo sapien
taccatgcccgaacaagttccaaca

SEQ ID NO: 938306 - DNA, 25 bp, Homo sapien
agcatgtctttaggagatgcagctc

SEQ ID NO: 938307 - DNA, 25 bp, Homo sapien
taagcatgtctttaggagatgcagc

SEQ ID NO: 938308 - DNA, 25 bp, Homo sapien
acatccaccagaataagcatgtctt

SEQ ID NO: 938309 - DNA, 25 bp, Homo sapien
aataagcatgtctttaggagatgca

SEQ ID NO: 938310 - DNA, 25 bp, Homo sapien
tgcgtacatcataaaggtcaatctt

SEQ ID NO: 938311 - DNA, 25 bp, Homo sapien
cataaaggtcaatcttatttggagt

SEQ ID NO: 938312 - DNA, 25 bp, Homo sapien
tttggagttctactattatcaaccc

SEQ ID NO: 938313 - DNA, 25 bp, Homo sapien
tggtcttctgcgtacatcataaagg

SEQ ID NO: 938314 - DNA, 25 bp, Homo sapien
ttccccaatcaatttcgcttttctg

SEQ ID NO: 938315 - DNA, 25 bp, Homo sapien
ccccaatcaatttcgcttttctgag

SEQ ID NO: 938316 - DNA, 25 bp, Homo sapien
cccaatcaatttcgcttttctgaga

SEQ ID NO: 938317 - DNA, 25 bp, Homo sapien
caatcaatttcgcttttctgagaaa

SEQ ID NO: 938318 - DNA, 25 bp, Homo sapien
tcatttgttgagactttgaatcatc

SEQ ID NO: 938319 - DNA, 25 bp, Homo sapien
aactgcgtgtgacccagagatcctg

SEQ ID NO: 938320 - DNA, 25 bp, Homo sapien
ctgatggagagaactgcgtgtgacc

SEQ ID NO: 938321 - DNA, 25 bp, Homo sapien
gttgagactttgaatcatctatggg

SEQ ID NO: 938322 - DNA, 25 bp, Homo sapien
taatatcgagctaggccagtggcac

SEQ ID NO: 938323 - DNA, 25 bp, Homo sapien
tgaagggtcttcctcgcgattcttt

SEQ ID NO: 938324 - DNA, 25 bp, Homo sapien
cctgccacaataatgaagggtcttc

SEQ ID NO: 938325 - DNA, 25 bp, Homo sapien
ttcatctaaggcacttgtccagttg

SEQ ID NO: 938326 - DNA, 25 bp, Homo sapien
tgtgtgtgtgaatattcatgagctg

SEQ ID NO: 938327 - DNA, 25 bp, Homo sapien
ttcaaaaagatcagttgtgtgtgtg

SEQ ID NO: 938328 - DNA, 25 bp, Homo sapien
aatattcatgagctgcatcagatcc

SEQ ID NO: 938329 - DNA, 25 bp, Homo sapien
tgtgtgaatattcatgagctgcatc

SEQ ID NO: 938330 - DNA, 25 bp, Homo sapien
atccaccagcttgaaagtcatacat

SEQ ID NO: 938331 - DNA, 25 bp, Homo sapien
gaacttagactgatggagattccat

SEQ ID NO: 938332 - DNA, 25 bp, Homo sapien
gagattccatctacaaggtcatggg

SEQ ID NO: 938333 - DNA, 25 bp, Homo sapien
tcattcaacgaaggaacttagactg

SEQ ID NO: 938334 - DNA, 25 bp, Homo sapien
atttccatatgagggacgatgatta

SEQ ID NO: 938335 - DNA, 25 bp, Homo sapien
gaaacaacaactgatcttcacagac

SEQ ID NO: 938336 - DNA, 25 bp, Homo sapien
gagggacgatgattactaaggaaat

SEQ ID NO: 938337 - DNA, 25 bp, Homo sapien
atggcacacttcttcaatcacatgg

SEQ ID NO: 938338 - DNA, 25 bp, Homo sapien
tatttgtcgtccaaaattagcatct

SEQ ID NO: 938339 - DNA, 25 bp, Homo sapien
gactgctgcgtgctgataagatatt

SEQ ID NO: 938340 - DNA, 25 bp, Homo sapien
gccctcatagatgtcagtaggaata

SEQ ID NO: 938341 - DNA, 25 bp, Homo sapien
gaaaacaggttttatcctctggctg

SEQ ID NO: 938342 - DNA, 25 bp, Homo sapien
cctgatttcctcaatgttggagtca

SEQ ID NO: 938343 - DNA, 25 bp, Homo sapien
ctctcctgatttcctcaatgttgga

SEQ ID NO: 938344 - DNA, 25 bp, Homo sapien
gatttcctcaatgttggagtcattc

SEQ ID NO: 938345 - DNA, 25 bp, Homo sapien
actctcctgatttcctcaatgttgg

SEQ ID NO: 938346 - DNA, 25 bp, Homo sapien
gtaacaaactaagaatttcattcat

SEQ ID NO: 938347 - DNA, 25 bp, Homo sapien
cctggtaacaaactaagaatttcat

SEQ ID NO: 938348 - DNA, 25 bp, Homo sapien
ggtaacaaactaagaatttcattca

SEQ ID NO: 938349 - DNA, 25 bp, Homo sapien
tggtaacaaactaagaatttcattc

SEQ ID NO: 938350 - DNA, 25 bp, Homo sapien
gaacgctcataggaaggactaccat

SEQ ID NO: 938351 - DNA, 25 bp, Homo sapien
aatgcattacaagttgcttagaacg

SEQ ID NO: 938352 - DNA, 25 bp, Homo sapien
cataggaaggactaccatttgctac

SEQ ID NO: 938353 - DNA, 25 bp, Homo sapien
caagttgcttagaacgctcatagga

SEQ ID NO: 938354 - DNA, 25 bp, Homo sapien
cattgtagtagacaacttcattgct

SEQ ID NO: 938355 - DNA, 25 bp, Homo sapien
catcctttgcattgtagtagacaac

SEQ ID NO: 938356 - DNA, 25 bp, Homo sapien
tgcattgtagtagacaacttcattg

SEQ ID NO: 938357 - DNA, 25 bp, Homo sapien
atcgagatcatcctttgcattgtag

SEQ ID NO: 938358 - DNA, 25 bp, Homo sapien
tagttagtaatgtggcttcccgagg

SEQ ID NO: 938359 - DNA, 25 bp, Homo sapien
catggctaaatgcttaaacggcttt

SEQ ID NO: 938360 - DNA, 25 bp, Homo sapien
taagcattgactagttagtaatgtg

SEQ ID NO: 938361 - DNA, 25 bp, Homo sapien
gcttaaacggctttaagcattgact

SEQ ID NO: 938362 - DNA, 25 bp, Homo sapien
ctgttggaggatacggctccatggc

SEQ ID NO: 938363 - DNA, 25 bp, Homo sapien
aggaatgtaaagctgttggaggata

SEQ ID NO: 938364 - DNA, 25 bp, Homo sapien
gctgttggaggatacggctccatgg

SEQ ID NO: 938365 - DNA, 25 bp, Homo sapien
ccagcctcatttatatctacatgta

SEQ ID NO: 938366 - DNA, 25 bp, Homo sapien
cagcctcatttatatctacatgtac

SEQ ID NO: 938367 - DNA, 25 bp, Homo sapien
cactgtactatcacgtactattgtc

SEQ ID NO: 938368 - DNA, 25 bp, Homo sapien
ctgtactatcacgtactattgtcat

SEQ ID NO: 938369 - DNA, 25 bp, Homo sapien
tccactgtactatcacgtactattg

SEQ ID NO: 938370 - DNA, 25 bp, Homo sapien
ttccactgtactatcacgtactatt

SEQ ID NO: 938371 - DNA, 25 bp, Homo sapien
tggtgagctgcttgaactttctccg

SEQ ID NO: 938372 - DNA, 25 bp, Homo sapien
gcttgaactttctccgcttccaatg

SEQ ID NO: 938373 - DNA, 25 bp, Homo sapien
gctgcttgaactttctccgcttcca

SEQ ID NO: 938374 - DNA, 25 bp, Homo sapien
aactttctccgcttccaatgccagg

SEQ ID NO: 938375 - DNA, 25 bp, Homo sapien
tgattctccttgctaataggctaca

SEQ ID NO: 938376 - DNA, 25 bp, Homo sapien
agttcaccttattcacctcttctga

SEQ ID NO: 938377 - DNA, 25 bp, Homo sapien
taaccttaggcattggttggaagtg

SEQ ID NO: 938378 - DNA, 25 bp, Homo sapien
gaccaatttccctacacagagcaat

SEQ ID NO: 938379 - DNA, 25 bp, Homo sapien
gtcatatcaaaaacgactacgaggg

SEQ ID NO: 938380 - DNA, 25 bp, Homo sapien
gaaatggatgtcaaggcagtaacca

SEQ ID NO: 938381 - DNA, 25 bp, Homo sapien
agtgttcactgatccatctctctgg

SEQ ID NO: 938382 - DNA, 25 bp, Homo sapien
ttgaaacaacttatgtgaggcctag

SEQ ID NO: 938383 - DNA, 25 bp, Homo sapien
aaatatgtaaagtgacagcataata

SEQ ID NO: 938384 - DNA, 25 bp, Homo sapien
acagaagtcactggaatgataccca

SEQ ID NO: 938385 - DNA, 25 bp, Homo sapien
aatttgatgaactttgtctctgagc

SEQ ID NO: 938386 - DNA, 25 bp, Homo sapien
aatgtactgtgtatagtctttataa

SEQ ID NO: 938387 - DNA, 25 bp, Homo sapien
tgatttcggtaaaagctccagtaac

SEQ ID NO: 938388 - DNA, 25 bp, Homo sapien
gcagtgacaaattttaagctctcga

SEQ ID NO: 938389 - DNA, 25 bp, Homo sapien
ttaaatggcagaaacatcatccact

SEQ ID NO: 938390 - DNA, 25 bp, Homo sapien
gcaaagagtgtactatatgcccctc

SEQ ID NO: 938391 - DNA, 25 bp, Homo sapien
cagatgttatcgagcttgagctccc

SEQ ID NO: 938392 - DNA, 25 bp, Homo sapien
tgagctcccttaagtcaccagctaa

SEQ ID NO: 938393 - DNA, 25 bp, Homo sapien
tcaccagctaaatggtggaccagct

SEQ ID NO: 938394 - DNA, 25 bp, Homo sapien
cttagtacatactcccattagttcc

SEQ ID NO: 938395 - DNA, 25 bp, Homo sapien
gggattcctgttggatagctactgc

SEQ ID NO: 938396 - DNA, 25 bp, Homo sapien
gattcctgttggatagctactgcat

SEQ ID NO: 938397 - DNA, 25 bp, Homo sapien
ggtggggattcctgttggatagcta

SEQ ID NO: 938398 - DNA, 25 bp, Homo sapien
ttcctgttggatagctactgcattg

SEQ ID NO: 938399 - DNA, 25 bp, Homo sapien
ggtagcaatactaccactgctaaaa

SEQ ID NO: 938400 - DNA, 25 bp, Homo sapien
tcttaacaagtaacaaccatgcata

SEQ ID NO: 938401 - DNA, 25 bp, Homo sapien
tacttcctacttcatcaaatggtag

SEQ ID NO: 938402 - DNA, 25 bp, Homo sapien
aatcaaatttacaagctcagtgtga

SEQ ID NO: 938403 - DNA, 25 bp, Homo sapien
ggtagcaaagtggaagtgagtgata

SEQ ID NO: 938404 - DNA, 25 bp, Homo sapien
agtggaagtgagtgataggtgaacc

SEQ ID NO: 938405 - DNA, 25 bp, Homo sapien
tgagtgataggtgaaccgaagcccc

SEQ ID NO: 938406 - DNA, 25 bp, Homo sapien
aagtgagtgataggtgaaccgaagc

SEQ ID NO: 938407 - DNA, 25 bp, Homo sapien
ttagattattggatgggtgtgtgca

SEQ ID NO: 938408 - DNA, 25 bp, Homo sapien
ctgttagttcagcataagtatcaag

SEQ ID NO: 938409 - DNA, 25 bp, Homo sapien
tgcagaagtgtctgttagttcagca

SEQ ID NO: 938410 - DNA, 25 bp, Homo sapien
cagactccttcatttggaacatgga

SEQ ID NO: 938411 - DNA, 25 bp, Homo sapien
caatagtcccatagagagtttttgg

SEQ ID NO: 938412 - DNA, 25 bp, Homo sapien
tcttccttttggtgagacattaaca

SEQ ID NO: 938413 - DNA, 25 bp, Homo sapien
aataatgggcatagttaacacatcc

SEQ ID NO: 938414 - DNA, 25 bp, Homo sapien
tgcagccaatccatacatacaatgg

SEQ ID NO: 938415 - DNA, 25 bp, Homo sapien
tgcagtcatatggttttccatactc

SEQ ID NO: 938416 - DNA, 25 bp, Homo sapien
cagtcatatggttttccatactcta

SEQ ID NO: 938417 - DNA, 25 bp, Homo sapien
ctgtaactgcagtcatatggttttc

SEQ ID NO: 938418 - DNA, 25 bp, Homo sapien
aactgcagtcatatggttttccata

SEQ ID NO: 938419 - DNA, 25 bp, Homo sapien
tagccaaatgggtgcaacctgaatc

SEQ ID NO: 938420 - DNA, 25 bp, Homo sapien
ctctgatacatgaagggtttggctc

SEQ ID NO: 938421 - DNA, 25 bp, Homo sapien
taaatgaatcctcaaaaagccatgt

SEQ ID NO: 938422 - DNA, 25 bp, Homo sapien
tattggtcctcaactaaaactgaag

SEQ ID NO: 938423 - DNA, 25 bp, Homo sapien
taatatttcctcacttacggcagat

SEQ ID NO: 938424 - DNA, 25 bp, Homo sapien
gaatggagaattcaaccaaagctat

SEQ ID NO: 938425 - DNA, 25 bp, Homo sapien
cctactgtaggtgatattaactcta

SEQ ID NO: 938426 - DNA, 25 bp, Homo sapien
tactaggaacttactaaagagactc

SEQ ID NO: 938427 - DNA, 25 bp, Homo sapien
cctttcatatctagctcaaatgtca

SEQ ID NO: 938428 - DNA, 25 bp, Homo sapien
agcctttcatatctagctcaaatgt

SEQ ID NO: 938429 - DNA, 25 bp, Homo sapien
gcctttcatatctagctcaaatgtc

SEQ ID NO: 938430 - DNA, 25 bp, Homo sapien
cgaccacccacactaaactgcccct

SEQ ID NO: 938431 - DNA, 25 bp, Homo sapien
tgtgtttttcccaatgtgagtgcat

SEQ ID NO: 938432 - DNA, 25 bp, Homo sapien
ctgtgtttttcccaatgtgagtgca

SEQ ID NO: 938433 - DNA, 25 bp, Homo sapien
actgtgtttttcccaatgtgagtgc

SEQ ID NO: 938434 - DNA, 25 bp, Homo sapien
aacatgattatgtaggccgtcaccg

SEQ ID NO: 938435 - DNA, 25 bp, Homo sapien
cataaactcattctaaattggcaga

SEQ ID NO: 938436 - DNA, 25 bp, Homo sapien
gaactgtttcaatgtccctgtctaa

SEQ ID NO: 938437 - DNA, 25 bp, Homo sapien
caacacatcatgctggtgacagatg

SEQ ID NO: 938438 - DNA, 25 bp, Homo sapien
atttaacaaagaacacatttggatt

SEQ ID NO: 938439 - DNA, 25 bp, Homo sapien
ggtgtcagtataatttttgtccttc

SEQ ID NO: 938440 - DNA, 25 bp, Homo sapien
tgtccttctatttatttaacaaaga

SEQ ID NO: 938441 - DNA, 25 bp, Homo sapien
tctatttatttaacaaagaacacat

SEQ ID NO: 938442 - DNA, 25 bp, Homo sapien
tatatttccagaagttgatttaatc

SEQ ID NO: 938443 - DNA, 25 bp, Homo sapien
ccagaagttgatttaatctgctctg

SEQ ID NO: 938444 - DNA, 25 bp, Homo sapien
tatttctgaataactaccttttaca

SEQ ID NO: 938445 - DNA, 25 bp, Homo sapien
atttccagaagttgatttaatctgc

SEQ ID NO: 938446 - DNA, 25 bp, Homo sapien
gaaaatctatcggactttatacaga

SEQ ID NO: 938447 - DNA, 25 bp, Homo sapien
tagctgtctcgaagatgaattcatc

SEQ ID NO: 938448 - DNA, 25 bp, Homo sapien
tggagaactgagaggcaataaagaa

SEQ ID NO: 938449 - DNA, 25 bp, Homo sapien
cattttctgtttgcctataccctaa

SEQ ID NO: 938450 - DNA, 25 bp, Homo sapien
tcccatcgcctctatttgcagaact

SEQ ID NO: 938451 - DNA, 25 bp, Homo sapien
cctctttcctatatctcccatcgcc

SEQ ID NO: 938452 - DNA, 25 bp, Homo sapien
tttaatagtctccttggtagcttcc

SEQ ID NO: 938453 - DNA, 25 bp, Homo sapien
cttcagcgacgcaacaagacctaca

SEQ ID NO: 938454 - DNA, 25 bp, Homo sapien
tgtaaaggactccaagggcagatgc

SEQ ID NO: 938455 - DNA, 25 bp, Homo sapien
tgtgtaccacccgaaattctctaga

SEQ ID NO: 938456 - DNA, 25 bp, Homo sapien
cagatgtgcccactcttaagtgtaa

SEQ ID NO: 938457 - DNA, 25 bp, Homo sapien
tattctctttacctaaggagtcaga

SEQ ID NO: 938458 - DNA, 25 bp, Homo sapien
tgtcctttgtctaactactcttatg

SEQ ID NO: 938459 - DNA, 25 bp, Homo sapien
gtcccatttcaagctaactgtattt

SEQ ID NO: 938460 - DNA, 25 bp, Homo sapien
tcataattcccatgagactctggct

SEQ ID NO: 938461 - DNA, 25 bp, Homo sapien
tctttatccaaactcattcctgtgc

SEQ ID NO: 938462 - DNA, 25 bp, Homo sapien
gaaacacactatcataaactgctaa

SEQ ID NO: 938463 - DNA, 25 bp, Homo sapien
taggtactggcatatacatacgatg

SEQ ID NO: 938464 - DNA, 25 bp, Homo sapien
tgccatttgttatctaccaacttcg

SEQ ID NO: 938465 - DNA, 25 bp, Homo sapien
acatacgatgttgccattatgattc

SEQ ID NO: 938466 - DNA, 25 bp, Homo sapien
attagagccatcaggtttctgcaga

SEQ ID NO: 938467 - DNA, 25 bp, Homo sapien
ctgattagagccatcaggtttctgc

SEQ ID NO: 938468 - DNA, 25 bp, Homo sapien
gattagagccatcaggtttctgcag

SEQ ID NO: 938469 - DNA, 25 bp, Homo sapien
tgattagagccatcaggtttctgca

SEQ ID NO: 938470 - DNA, 25 bp, Homo sapien
gatcgttcaaaacgctagcagctaa

SEQ ID NO: 938471 - DNA, 25 bp, Homo sapien
tgaatatttaattgcgttttgcctt

SEQ ID NO: 938472 - DNA, 25 bp, Homo sapien
tgtttggccatttagagatcgttca

SEQ ID NO: 938473 - DNA, 25 bp, Homo sapien
tatctgtgtagcagtgtcagtctaa

SEQ ID NO: 938474 - DNA, 25 bp, Homo sapien
acagcagcaggtatatcatttgggt

SEQ ID NO: 938475 - DNA, 25 bp, Homo sapien
caggacaaaagagctcataaggaca

SEQ ID NO: 938476 - DNA, 25 bp, Homo sapien
caagacacaaatttaggctcctgat

SEQ ID NO: 938477 - DNA, 25 bp, Homo sapien
taaggacaaaacacgaggctcaagt

SEQ ID NO: 938478 - DNA, 25 bp, Homo sapien
ggattccagtgaattactcctgagg

SEQ ID NO: 938479 - DNA, 25 bp, Homo sapien
cattttcttgggctatccaatggca

SEQ ID NO: 938480 - DNA, 25 bp, Homo sapien
tgggctatccaatggcaatatttgt

SEQ ID NO: 938481 - DNA, 25 bp, Homo sapien
tgtaatacaccactgtttcgtactt

SEQ ID NO: 938482 - DNA, 25 bp, Homo sapien
catgcaccccaatgcacagttgtgt

SEQ ID NO: 938483 - DNA, 25 bp, Homo sapien
gcatgtggtaaatctagcttagact

SEQ ID NO: 938484 - DNA, 25 bp, Homo sapien
taattgcacagtccctgacatacaa

SEQ ID NO: 938485 - DNA, 25 bp, Homo sapien
catctgtcctatatgcttcactgca

SEQ ID NO: 938486 - DNA, 25 bp, Homo sapien
tgctgacatcagtaattgccttgct

SEQ ID NO: 938487 - DNA, 25 bp, Homo sapien
catcaccctgcacctatttgatggg

SEQ ID NO: 938488 - DNA, 25 bp, Homo sapien
gagacataagtcctggataactcca

SEQ ID NO: 938489 - DNA, 25 bp, Homo sapien
caatgtagtgtgctgtgacacttcc

SEQ ID NO: 938490 - DNA, 25 bp, Homo sapien
tttgaaaagctagttgaaagcccat

SEQ ID NO: 938491 - DNA, 25 bp, Homo sapien
gaagagctcctctcttgtgccaata

SEQ ID NO: 938492 - DNA, 25 bp, Homo sapien
gcctgggtatctcacacctcaaaga

SEQ ID NO: 938493 - DNA, 25 bp, Homo sapien
taagtagggtgttcagttggtgacc

SEQ ID NO: 938494 - DNA, 25 bp, Homo sapien
cactatgcactatacctcgctaatt

SEQ ID NO: 938495 - DNA, 25 bp, Homo sapien
tatgcactatacctcgctaatttct

SEQ ID NO: 938496 - DNA, 25 bp, Homo sapien
gtacaccactatgcactatacctcg

SEQ ID NO: 938497 - DNA, 25 bp, Homo sapien
tacagctgtacaccactatgcacta

SEQ ID NO: 938498 - DNA, 25 bp, Homo sapien
tgtaactgccactaaaagataacat

SEQ ID NO: 938499 - DNA, 25 bp, Homo sapien
tacagagtggcattatgaagtcatc

SEQ ID NO: 938500 - DNA, 25 bp, Homo sapien
gaccagaacttatgaataagtttcc

SEQ ID NO: 938501 - DNA, 25 bp, Homo sapien
tctttacttaaaattggtgaccaga

SEQ ID NO: 938502 - DNA, 25 bp, Homo sapien
gataatacaggtaggtgtctctcat

SEQ ID NO: 938503 - DNA, 25 bp, Homo sapien
aatgggcgcgtatggattttaccag

SEQ ID NO: 938504 - DNA, 25 bp, Homo sapien
tatatcaggaacgatgttaggccca

SEQ ID NO: 938505 - DNA, 25 bp, Homo sapien
aacttgaatcatgaccgatctgtga

SEQ ID NO: 938506 - DNA, 25 bp, Homo sapien
ttccctaagcgctggaaatacaggc

SEQ ID NO: 938507 - DNA, 25 bp, Homo sapien
ctcagcttccctaagcgctggaaat

SEQ ID NO: 938508 - DNA, 25 bp, Homo sapien
tgcaatctcggttcatggctggcga

SEQ ID NO: 938509 - DNA, 25 bp, Homo sapien
tcggttcatggctggcgacctctgc

SEQ ID NO: 938510 - DNA, 25 bp, Homo sapien
tggtgaagtaaacaaccaggctttc

SEQ ID NO: 938511 - DNA, 25 bp, Homo sapien
gacctattttgagacggctattcag

SEQ ID NO: 938512 - DNA, 25 bp, Homo sapien
tttccccatagctaccaatctttga

SEQ ID NO: 938513 - DNA, 25 bp, Homo sapien
caacaatagccctaaaaagctgcct

SEQ ID NO: 938514 - DNA, 25 bp, Homo sapien
gctggtaccatatttaaacagtagg

SEQ ID NO: 938515 - DNA, 25 bp, Homo sapien
gagcatcagtgtagagatacagtgc

SEQ ID NO: 938516 - DNA, 25 bp, Homo sapien
gatacagtgcatcttaatttgcaaa

SEQ ID NO: 938517 - DNA, 25 bp, Homo sapien
taacgtgtcgtgtctcttaaagttg

SEQ ID NO: 938518 - DNA, 25 bp, Homo sapien
tttgtttaagaaccacattatgttg

SEQ ID NO: 938519 - DNA, 25 bp, Homo sapien
ccacattatgttgttgtgctagaaa

SEQ ID NO: 938520 - DNA, 25 bp, Homo sapien
gaaattgatatgtgcagtcacttaa

SEQ ID NO: 938521 - DNA, 25 bp, Homo sapien
caaacttgttactatcaatgacaag

SEQ ID NO: 938522 - DNA, 25 bp, Homo sapien
actgcggcctgttggcatgctgcct

SEQ ID NO: 938523 - DNA, 25 bp, Homo sapien
gccttgacagcgtcagctcccgtag

SEQ ID NO: 938524 - DNA, 25 bp, Homo sapien
actcatccacactgcggcctgttgg

SEQ ID NO: 938525 - DNA, 25 bp, Homo sapien
ccgtagaatacaaggactgccaaca

SEQ ID NO: 938526 - DNA, 25 bp, Homo sapien
gcctagcaaagcatctggaccatag

SEQ ID NO: 938527 - DNA, 25 bp, Homo sapien
ggaccatagcagacagtcagtaaat

SEQ ID NO: 938528 - DNA, 25 bp, Homo sapien
caacactctgaactgggataattag

SEQ ID NO: 938529 - DNA, 25 bp, Homo sapien
taagtaaccagctcattgactcatg

SEQ ID NO: 938530 - DNA, 25 bp, Homo sapien
ctggctgcaatttctaccagctggc

SEQ ID NO: 938531 - DNA, 25 bp, Homo sapien
taccagctggcgtgcattatttggt

SEQ ID NO: 938532 - DNA, 25 bp, Homo sapien
tgttgctcagaagtttctcaatatc

SEQ ID NO: 938533 - DNA, 25 bp, Homo sapien
tgctcagaagtttctcaatatccct

SEQ ID NO: 938534 - DNA, 25 bp, Homo sapien
ttaacaggttgtaaaacatcttgta

SEQ ID NO: 938535 - DNA, 25 bp, Homo sapien
aaatataggttatgttaacaggttg

SEQ ID NO: 938536 - DNA, 25 bp, Homo sapien
tataggttatgttaacaggttgtaa

SEQ ID NO: 938537 - DNA, 25 bp, Homo sapien
tgttaacaggttgtaaaacatcttg

SEQ ID NO: 938538 - DNA, 25 bp, Homo sapien
gatgctgcactctccaatctcgaaa

SEQ ID NO: 938539 - DNA, 25 bp, Homo sapien
ggtttgtacatgcaattttgaggct

SEQ ID NO: 938540 - DNA, 25 bp, Homo sapien
catcgtaagagaaagggtagccatc

SEQ ID NO: 938541 - DNA, 25 bp, Homo sapien
gcaattttgaggcttgatgctgcac

SEQ ID NO: 938542 - DNA, 25 bp, Homo sapien
caacagaaggcgaaatggagcatgg

SEQ ID NO: 938543 - DNA, 25 bp, Homo sapien
tagacaacagaaggcgaaatggagc

SEQ ID NO: 938544 - DNA, 25 bp, Homo sapien
gacaacagaaggcgaaatggagcat

SEQ ID NO: 938545 - DNA, 25 bp, Homo sapien
ctagacaacagaaggcgaaatggag

SEQ ID NO: 938546 - DNA, 25 bp, Homo sapien
gttcacagtaactagcagtaccaat

SEQ ID NO: 938547 - DNA, 25 bp, Homo sapien
ccttaatttctaaggatggcatttc

SEQ ID NO: 938548 - DNA, 25 bp, Homo sapien
taactagcagtaccaatggtttctc

SEQ ID NO: 938549 - DNA, 25 bp, Homo sapien
taatttctaaggatggcatttcctg

SEQ ID NO: 938550 - DNA, 25 bp, Homo sapien
ccacatgagaaatcatatcccattt

SEQ ID NO: 938551 - DNA, 25 bp, Homo sapien
gaagatagaactgcattcgaattaa

SEQ ID NO: 938552 - DNA, 25 bp, Homo sapien
gaactgcattcgaattaatgaaaag

SEQ ID NO: 938553 - DNA, 25 bp, Homo sapien
ctagaagatagaactgcattcgaat

SEQ ID NO: 938554 - DNA, 25 bp, Homo sapien
gatagaactgcattcgaattaatga

SEQ ID NO: 938555 - DNA, 25 bp, Homo sapien
ttgccagtgtgacaaggtcttcttg

SEQ ID NO: 938556 - DNA, 25 bp, Homo sapien
ccagtgtgacaaggtcttcttgcat

SEQ ID NO: 938557 - DNA, 25 bp, Homo sapien
tttgccagtgtgacaaggtcttctt

SEQ ID NO: 938558 - DNA, 25 bp, Homo sapien
gccagtgtgacaaggtcttcttgca

SEQ ID NO: 938559 - DNA, 25 bp, Homo sapien
ttcctttgtaatgaaggaggaccag

SEQ ID NO: 938560 - DNA, 25 bp, Homo sapien
tcctttgtaatgaaggaggaccagt

SEQ ID NO: 938561 - DNA, 25 bp, Homo sapien
cctttgtaatgaaggaggaccagtt

SEQ ID NO: 938562 - DNA, 25 bp, Homo sapien
ctttgtaatgaaggaggaccagtta

SEQ ID NO: 938563 - DNA, 25 bp, Homo sapien
tggctagaaaagctattcctaacag

SEQ ID NO: 938564 - DNA, 25 bp, Homo sapien
tgtatgcttggtggctagaaaagct

SEQ ID NO: 938565 - DNA, 25 bp, Homo sapien
gcttggtggctagaaaagctattcc

SEQ ID NO: 938566 - DNA, 25 bp, Homo sapien
ttttgtatgcttggtggctagaaaa

SEQ ID NO: 938567 - DNA, 25 bp, Homo sapien
catacttaaaagaggcactgccacc

SEQ ID NO: 938568 - DNA, 25 bp, Homo sapien
ggaatgctcctcgtagcaagcagaa

SEQ ID NO: 938569 - DNA, 25 bp, Homo sapien
tctgctttggttatgggaatgctcc

SEQ ID NO: 938570 - DNA, 25 bp, Homo sapien
gaaaagcagccaaacaaattgtgtg

SEQ ID NO: 938571 - DNA, 25 bp, Homo sapien
caggccagtggagaatgcagtcact

SEQ ID NO: 938572 - DNA, 25 bp, Homo sapien
ttgcatttcaggttctagagatgac

SEQ ID NO: 938573 - DNA, 25 bp, Homo sapien
ggtggctgcttgcatttcaggttct

SEQ ID NO: 938574 - DNA, 25 bp, Homo sapien
accctcaggccagtggagaatgcag

SEQ ID NO: 938575 - DNA, 25 bp, Homo sapien
tgtctaagtaagtgtaaggggacca

SEQ ID NO: 938576 - DNA, 25 bp, Homo sapien
attagttgtctaagtaagtgtaagg

SEQ ID NO: 938577 - DNA, 25 bp, Homo sapien
tgcattcttggaatccgcaaagtgc

SEQ ID NO: 938578 - DNA, 25 bp, Homo sapien
tggaatccgcaaagtgccctggaga

SEQ ID NO: 938579 - DNA, 25 bp, Homo sapien
ccagctaccattaagtaagcagcaa

SEQ ID NO: 938580 - DNA, 25 bp, Homo sapien
ggttcttggaatgactatgcattct

SEQ ID NO: 938581 - DNA, 25 bp, Homo sapien
gaagcggcaataagcaggtggttta

SEQ ID NO: 938582 - DNA, 25 bp, Homo sapien
ttcctgaagcggcaataagcaggtg

SEQ ID NO: 938583 - DNA, 25 bp, Homo sapien
aaatgaatcattcctgaagcggcaa

SEQ ID NO: 938584 - DNA, 25 bp, Homo sapien
tgttttcccagaatcttgtttcata

SEQ ID NO: 938585 - DNA, 25 bp, Homo sapien
ctccattccacaccgagtaccaacc

SEQ ID NO: 938586 - DNA, 25 bp, Homo sapien
cattccacaccgagtaccaaccaaa

SEQ ID NO: 938587 - DNA, 25 bp, Homo sapien
tccattccacaccgagtaccaacca

SEQ ID NO: 938588 - DNA, 25 bp, Homo sapien
ccattccacaccgagtaccaaccaa

SEQ ID NO: 938589 - DNA, 25 bp, Homo sapien
aaaggattctggcttttgtttatca

SEQ ID NO: 938590 - DNA, 25 bp, Homo sapien
actcgctttccccaaaaggattctg

SEQ ID NO: 938591 - DNA, 25 bp, Homo sapien
cgctttccccaaaaggattctggct

SEQ ID NO: 938592 - DNA, 25 bp, Homo sapien
caaaaggattctggcttttgtttat

SEQ ID NO: 938593 - DNA, 25 bp, Homo sapien
ctcagtagccaaaggacgacaccaa

SEQ ID NO: 938594 - DNA, 25 bp, Homo sapien
tctagcagtgttaactaagaattca

SEQ ID NO: 938595 - DNA, 25 bp, Homo sapien
tcataaatgtgaacgaagaaaatct

SEQ ID NO: 938596 - DNA, 25 bp, Homo sapien
caaaatcttggatgggagttctaaa

SEQ ID NO: 938597 - DNA, 25 bp, Homo sapien
acagcagagtgagaagaacaatgct

SEQ ID NO: 938598 - DNA, 25 bp, Homo sapien
gcttttgagaccagaatggctgctg

SEQ ID NO: 938599 - DNA, 25 bp, Homo sapien
tatccctttacacaaggcagcacag

SEQ ID NO: 938600 - DNA, 25 bp, Homo sapien
tgctgggacagtacacgaaacctga

SEQ ID NO: 938601 - DNA, 25 bp, Homo sapien
gagtgatgggtcatctgatgcttca

SEQ ID NO: 938602 - DNA, 25 bp, Homo sapien
ggatcagaactaatgtgacccaaca

SEQ ID NO: 938603 - DNA, 25 bp, Homo sapien
acagtttgcctgaaggcaaaagagt

SEQ ID NO: 938604 - DNA, 25 bp, Homo sapien
tttccttataggatggatcagaact

SEQ ID NO: 938605 - DNA, 25 bp, Homo sapien
gtgatcctctcacccgcatagctgg

SEQ ID NO: 938606 - DNA, 25 bp, Homo sapien
gcagccccaacgttcaggctcaagt

SEQ ID NO: 938607 - DNA, 25 bp, Homo sapien
ggctgcaaccacaccatatatgatc

SEQ ID NO: 938608 - DNA, 25 bp, Homo sapien
tataggagacctgtgtaacttgaca

SEQ ID NO: 938609 - DNA, 25 bp, Homo sapien
caagttacccagctagttgtagagc

SEQ ID NO: 938610 - DNA, 25 bp, Homo sapien
tagctaggcatggacaacagagcaa

SEQ ID NO: 938611 - DNA, 25 bp, Homo sapien
agttgttggaacatccttgacctga

SEQ ID NO: 938612 - DNA, 25 bp, Homo sapien
tctgcagttgttggaacatccttga

SEQ ID NO: 938613 - DNA, 25 bp, Homo sapien
tgcagttgttggaacatccttgacc

SEQ ID NO: 938614 - DNA, 25 bp, Homo sapien
cagttgttggaacatccttgacctg

SEQ ID NO: 938615 - DNA, 25 bp, Homo sapien
tattctcaacatgtagctcagcgca

SEQ ID NO: 938616 - DNA, 25 bp, Homo sapien
ccctccttgggtcaggatgcaagaa

SEQ ID NO: 938617 - DNA, 25 bp, Homo sapien
tgtcgatgtaatatgagcactgctc

SEQ ID NO: 938618 - DNA, 25 bp, Homo sapien
caaacagggctattgcaaatgtcga

SEQ ID NO: 938619 - DNA, 25 bp, Homo sapien
aagtgtgccggtttgttgaggccac

SEQ ID NO: 938620 - DNA, 25 bp, Homo sapien
aaagtgtgccggtttgttgaggcca

SEQ ID NO: 938621 - DNA, 25 bp, Homo sapien
ccggtttgttgaggccacaaagtca

SEQ ID NO: 938622 - DNA, 25 bp, Homo sapien
ctataaaaagtgtgccggtttgttg

SEQ ID NO: 938623 - DNA, 25 bp, Homo sapien
aggttggatcgcgtggtcccagtac

SEQ ID NO: 938624 - DNA, 25 bp, Homo sapien
ttgaagaacagggaccgcgtgtctg

SEQ ID NO: 938625 - DNA, 25 bp, Homo sapien
tgccgacacttagatgtttcaaata

SEQ ID NO: 938626 - DNA, 25 bp, Homo sapien
cagggaccgcgtgtctgccgacact

SEQ ID NO: 938627 - DNA, 25 bp, Homo sapien
catccagtaacgtgggataaaacga

SEQ ID NO: 938628 - DNA, 25 bp, Homo sapien
gaaggctgtcaagtgcatccagtaa

SEQ ID NO: 938629 - DNA, 25 bp, Homo sapien
gagccagcacgcgtctaatcggaag

SEQ ID NO: 938630 - DNA, 25 bp, Homo sapien
cacgcgtctaatcggaaggctgtca

SEQ ID NO: 938631 - DNA, 25 bp, Homo sapien
gacgaggggccgatgagcaaagatt

SEQ ID NO: 938632 - DNA, 25 bp, Homo sapien
ctcctccgacgaggggccgatgagc

SEQ ID NO: 938633 - DNA, 25 bp, Homo sapien
ccgatgagcaaagattggaaaagtg

SEQ ID NO: 938634 - DNA, 25 bp, Homo sapien
gggccgatgagcaaagattggaaaa

SEQ ID NO: 938635 - DNA, 25 bp, Homo sapien
cttcgcgatcgaagatcaatgcccc

SEQ ID NO: 938636 - DNA, 25 bp, Homo sapien
ttcgcgatcgaagatcaatgccccc

SEQ ID NO: 938637 - DNA, 25 bp, Homo sapien
gcccaagcgggggaaggagcggcgc

SEQ ID NO: 938638 - DNA, 25 bp, Homo sapien
cggcaagggcgggagcggacgccga

SEQ ID NO: 938639 - DNA, 25 bp, Homo sapien
agccgcgcgggggacggcaagggcg

SEQ ID NO: 938640 - DNA, 25 bp, Homo sapien
tggaaaccgcgggcggaggaagagc

SEQ ID NO: 938641 - DNA, 25 bp, Homo sapien
tcaagggcgactttggaaacagacc

SEQ ID NO: 938642 - DNA, 25 bp, Homo sapien
tccgccgccatcaagggcgactttg

SEQ ID NO: 938643 - DNA, 25 bp, Homo sapien
tttggaaacagacctcggcgagccc

SEQ ID NO: 938644 - DNA, 25 bp, Homo sapien
ccactagcgtgcgtcggctgctccg

SEQ ID NO: 938645 - DNA, 25 bp, Homo sapien
tcttcgggggttatttttgcacatg

SEQ ID NO: 938646 - DNA, 25 bp, Homo sapien
tgcagaggctccaacccaggacttg

SEQ ID NO: 938647 - DNA, 25 bp, Homo sapien
ccgcccagcgggcatccacaggctg

SEQ ID NO: 938648 - DNA, 25 bp, Homo sapien
ccaggacttggctcgcgtcttcggg

SEQ ID NO: 938649 - DNA, 25 bp, Homo sapien
agagcctcagggaccgggctgtgga

SEQ ID NO: 938650 - DNA, 25 bp, Homo sapien
tggacggacagagaagtactgacgc

SEQ ID NO: 938651 - DNA, 25 bp, Homo sapien
gacgctgtaaaatcttcccagccct

SEQ ID NO: 938652 - DNA, 25 bp, Homo sapien
gaccgggctgtggacggacagagaa

SEQ ID NO: 938653 - DNA, 25 bp, Homo sapien
gacagtagtaagagaagcgctttgc

SEQ ID NO: 938654 - DNA, 25 bp, Homo sapien
cagtagtaagagaagcgctttgcag

SEQ ID NO: 938655 - DNA, 25 bp, Homo sapien
gaggacagtagtaagagaagcgctt

SEQ ID NO: 938656 - DNA, 25 bp, Homo sapien
gtagtaagagaagcgctttgcagca

SEQ ID NO: 938657 - DNA, 25 bp, Homo sapien
aaggcatgaaaagggtaagcagcag

SEQ ID NO: 938658 - DNA, 25 bp, Homo sapien
tcaatgcgaaggcatgaaaagggta

SEQ ID NO: 938659 - DNA, 25 bp, Homo sapien
gcaggaacaggtggcactctgagaa

SEQ ID NO: 938660 - DNA, 25 bp, Homo sapien
agctcacttttgtcaatgcgaaggc

SEQ ID NO: 938661 - DNA, 25 bp, Homo sapien
taagtttgcaaattccctatgcgtt

SEQ ID NO: 938662 - DNA, 25 bp, Homo sapien
atgcctggcctttaagcactttttt

SEQ ID NO: 938663 - DNA, 25 bp, Homo sapien
aagcattacatagatccaactactg

SEQ ID NO: 938664 - DNA, 25 bp, Homo sapien
cctatgcgttcaatgttagttgcaa

SEQ ID NO: 938665 - DNA, 25 bp, Homo sapien
ttttaattaggaacctgagcatgca

SEQ ID NO: 938666 - DNA, 25 bp, Homo sapien
tagaatcaccacctgtagtcatggt

SEQ ID NO: 938667 - DNA, 25 bp, Homo sapien
gtcatggtgtctagtggacttcaaa

SEQ ID NO: 938668 - DNA, 25 bp, Homo sapien
tagtaacagtaatccacaggcaatc

SEQ ID NO: 938669 - DNA, 25 bp, Homo sapien
cctctcagctgctgtggttcactca

SEQ ID NO: 938670 - DNA, 25 bp, Homo sapien
ctctcagctgctgtggttcactcat

SEQ ID NO: 938671 - DNA, 25 bp, Homo sapien
ccctctcagctgctgtggttcactc

SEQ ID NO: 938672 - DNA, 25 bp, Homo sapien
tcccctctcagctgctgtggttcac

SEQ ID NO: 938673 - DNA, 25 bp, Homo sapien
gtaattcccataatagtgccgtaag

SEQ ID NO: 938674 - DNA, 25 bp, Homo sapien
gttagcaccatctcacaagtccttg

SEQ ID NO: 938675 - DNA, 25 bp, Homo sapien
tcccaaggctaacatgacagcaggt

SEQ ID NO: 938676 - DNA, 25 bp, Homo sapien
ggtcatcgcttttcaagctcccaag

SEQ ID NO: 938677 - DNA, 25 bp, Homo sapien
tcaactgacatgtatgatgccgtac

SEQ ID NO: 938678 - DNA, 25 bp, Homo sapien
aagtttcaccacctatcatcaggta

SEQ ID NO: 938679 - DNA, 25 bp, Homo sapien
gagacttgagttcattcttaagaca

SEQ ID NO: 938680 - DNA, 25 bp, Homo sapien
gatgccgtacagttgagaaatcctc

SEQ ID NO: 938681 - DNA, 25 bp, Homo sapien
tcctcaggtaaaagtaaagaggcat

SEQ ID NO: 938682 - DNA, 25 bp, Homo sapien
catatgatgaacaactgctctttgc

SEQ ID NO: 938683 - DNA, 25 bp, Homo sapien
ttgtttctgtttggatttgtagaag

SEQ ID NO: 938684 - DNA, 25 bp, Homo sapien
tttgcaggtaaacaagttcatctac

SEQ ID NO: 938685 - DNA, 25 bp, Homo sapien
gcctggcccaacaatgatttcttga

SEQ ID NO: 938686 - DNA, 25 bp, Homo sapien
tcttcacaactaaacccaatcctat

SEQ ID NO: 938687 - DNA, 25 bp, Homo sapien
cacacctactcagatatcctgggaa

SEQ ID NO: 938688 - DNA, 25 bp, Homo sapien
tccacaatgttttcgtgatccaccc

SEQ ID NO: 938689 - DNA, 25 bp, Homo sapien
agctgtactcccctgactctatttc

SEQ ID NO: 938690 - DNA, 25 bp, Homo sapien
cttggcagaggagtagttccctctt

SEQ ID NO: 938691 - DNA, 25 bp, Homo sapien
cagaggagtagttccctctttactt

SEQ ID NO: 938692 - DNA, 25 bp, Homo sapien
ctatttcaaattccctcagctggac

SEQ ID NO: 938693 - DNA, 25 bp, Homo sapien
cctccaagggatgagtcagacgtgg

SEQ ID NO: 938694 - DNA, 25 bp, Homo sapien
ttttgctcgggccagctaggctcgt

SEQ ID NO: 938695 - DNA, 25 bp, Homo sapien
tagctcgtggtactggcctggatcc

SEQ ID NO: 938696 - DNA, 25 bp, Homo sapien
ggcgcctttgactgagttttgctcg

SEQ ID NO: 938697 - DNA, 25 bp, Homo sapien
ggtgtcagcattgccctaagcatgg

SEQ ID NO: 938698 - DNA, 25 bp, Homo sapien
taggcaggtcgttcccacaagtgtt

SEQ ID NO: 938699 - DNA, 25 bp, Homo sapien
cagggtgtaccaacgaatattaagc

SEQ ID NO: 938700 - DNA, 25 bp, Homo sapien
cacaagtgttcagctaccagcagac

SEQ ID NO: 938701 - DNA, 25 bp, Homo sapien
tgataagccctagaccacagagcct

SEQ ID NO: 938702 - DNA, 25 bp, Homo sapien
ggtagtcatctcttgatctgtcagc

SEQ ID NO: 938703 - DNA, 25 bp, Homo sapien
cagcagggtgccttaatatgcgaat

SEQ ID NO: 938704 - DNA, 25 bp, Homo sapien
taaagccaattaccaggcaagcagt

SEQ ID NO: 938705 - DNA, 25 bp, Homo sapien
tattgaatccaaaatgttggagatt

SEQ ID NO: 938706 - DNA, 25 bp, Homo sapien
taaatctaatactctgccttcagcc

SEQ ID NO: 938707 - DNA, 25 bp, Homo sapien
tgctacgatatcaaactgatccctg

SEQ ID NO: 938708 - DNA, 25 bp, Homo sapien
gaaaaggcagagagttccatactcc

SEQ ID NO: 938709 - DNA, 25 bp, Homo sapien
cttggcaacacaacacagacggtct

SEQ ID NO: 938710 - DNA, 25 bp, Homo sapien
tgtaatcgattgctgctgttgcctt

SEQ ID NO: 938711 - DNA, 25 bp, Homo sapien
ggcaagcaacctgccccgggatttg

SEQ ID NO: 938712 - DNA, 25 bp, Homo sapien
cagacggtctctgaacaacagctgc

SEQ ID NO: 938713 - DNA, 25 bp, Homo sapien
tatgaatattcacagttttgtgcgc

SEQ ID NO: 938714 - DNA, 25 bp, Homo sapien
attatgaatattcacagttttgtgc

SEQ ID NO: 938715 - DNA, 25 bp, Homo sapien
tgaatattcacagttttgtgcgcca

SEQ ID NO: 938716 - DNA, 25 bp, Homo sapien
gaatattcacagttttgtgcgccat

SEQ ID NO: 938717 - DNA, 25 bp, Homo sapien
tttttaaccataccagacagatgtg

SEQ ID NO: 938718 - DNA, 25 bp, Homo sapien
tcaaaagggcacatcacagaaaagc

SEQ ID NO: 938719 - DNA, 25 bp, Homo sapien
ttttttaaccataccagacagatgt

SEQ ID NO: 938720 - DNA, 25 bp, Homo sapien
tggaaaagtcaaaagggcacatcac

SEQ ID NO: 938721 - DNA, 25 bp, Homo sapien
aattagtggcaacttcaagctcttt

SEQ ID NO: 938722 - DNA, 25 bp, Homo sapien
taattagtggcaacttcaagctctt

SEQ ID NO: 938723 - DNA, 25 bp, Homo sapien
taacagtagcatcacctctgggacc

SEQ ID NO: 938724 - DNA, 25 bp, Homo sapien
aacagtagcatcacctctgggacct

SEQ ID NO: 938725 - DNA, 25 bp, Homo sapien
cccatggggcagctggtaacgtgga

SEQ ID NO: 938726 - DNA, 25 bp, Homo sapien
ctggagaaaggcattacaggtcttt

SEQ ID NO: 938727 - DNA, 25 bp, Homo sapien
aatcgtctcaccattgataaccaca

SEQ ID NO: 938728 - DNA, 25 bp, Homo sapien
gcattacaggtctttctgtcatcaa

SEQ ID NO: 938729 - DNA, 25 bp, Homo sapien
agctggtttcataatcgtctcacca

SEQ ID NO: 938730 - DNA, 25 bp, Homo sapien
ggattctcgctgaccaggttcatgc

SEQ ID NO: 938731 - DNA, 25 bp, Homo sapien
catgctcaggtatagccatttgtta

SEQ ID NO: 938732 - DNA, 25 bp, Homo sapien
gctgaccaggttcatgctcaggtat

SEQ ID NO: 938733 - DNA, 25 bp, Homo sapien
ttgcaggattctcgctgaccaggtt

SEQ ID NO: 938734 - DNA, 25 bp, Homo sapien
cgcacttcctgcttgatctgctggg

SEQ ID NO: 938735 - DNA, 25 bp, Homo sapien
cttccacctcctgccgcacttcctg

SEQ ID NO: 938736 - DNA, 25 bp, Homo sapien
cctgcttgatctgctgggccagttt

SEQ ID NO: 938737 - DNA, 25 bp, Homo sapien
cagtttccttccagaaatgacaaca

SEQ ID NO: 938738 - DNA, 25 bp, Homo sapien
gagggagcagcgctgacatgaggaa

SEQ ID NO: 938739 - DNA, 25 bp, Homo sapien
agcgctgacatgaggaagcggctgc

SEQ ID NO: 938740 - DNA, 25 bp, Homo sapien
cttcatttcgaactgccccgaggtg

SEQ ID NO: 938741 - DNA, 25 bp, Homo sapien
tcatttcgaactgccccgaggtgga

SEQ ID NO: 938742 - DNA, 25 bp, Homo sapien
agcctgggcgttgacctcgccagga

SEQ ID NO: 938743 - DNA, 25 bp, Homo sapien
cctgggcgttgacctcgccaggagg

SEQ ID NO: 938744 - DNA, 25 bp, Homo sapien
ctgggcgttgacctcgccaggagga

SEQ ID NO: 938745 - DNA, 25 bp, Homo sapien
gcctgggcgttgacctcgccaggag

SEQ ID NO: 938746 - DNA, 25 bp, Homo sapien
tgtattcaaatttgtggggtctgca

SEQ ID NO: 938747 - DNA, 25 bp, Homo sapien
ttgtggggtctgcatagactttaaa

SEQ ID NO: 938748 - DNA, 25 bp, Homo sapien
gggtctgcatagactttaaattctt

SEQ ID NO: 938749 - DNA, 25 bp, Homo sapien
gttgcgtgtattcaaatttgtgggg

SEQ ID NO: 938750 - DNA, 25 bp, Homo sapien
atctgtgaagtttttacatcatcaa

SEQ ID NO: 938751 - DNA, 25 bp, Homo sapien
tctgtgaagtttttacatcatcaac

SEQ ID NO: 938752 - DNA, 25 bp, Homo sapien
catctgtgaagtttttacatcatca

SEQ ID NO: 938753 - DNA, 25 bp, Homo sapien
cagcaaagtcttgatctttgagagg

SEQ ID NO: 938754 - DNA, 25 bp, Homo sapien
ttgatctttgagaggatggtcattt

SEQ ID NO: 938755 - DNA, 25 bp, Homo sapien
tgttagtttttaagcaattgcagtg

SEQ ID NO: 938756 - DNA, 25 bp, Homo sapien
tgcagtgatccgtgggatcctgatg

SEQ ID NO: 938757 - DNA, 25 bp, Homo sapien
tctggtgcacctgttcgcagttgga

SEQ ID NO: 938758 - DNA, 25 bp, Homo sapien
cagtaacacccattgcactttgggt

SEQ ID NO: 938759 - DNA, 25 bp, Homo sapien
tctgcagcatggactctttgcggtc

SEQ ID NO: 938760 - DNA, 25 bp, Homo sapien
gacagaggttatacgcagtaacacc

SEQ ID NO: 938761 - DNA, 25 bp, Homo sapien
tatgtaaggggaggtgaaaacatac

SEQ ID NO: 938762 - DNA, 25 bp, Homo sapien
ctatgtaaggggaggtgaaaacata

SEQ ID NO: 938763 - DNA, 25 bp, Homo sapien
agagacagacattattactcttccc

SEQ ID NO: 938764 - DNA, 25 bp, Homo sapien
gacagacattattactcttccctga

SEQ ID NO: 938765 - DNA, 25 bp, Homo sapien
tctcttttagagatgtgcaaaaaca

SEQ ID NO: 938766 - DNA, 25 bp, Homo sapien
tgtcttctcttttagagatgtgcaa

SEQ ID NO: 938767 - DNA, 25 bp, Homo sapien
cttctgcttgaaccaattttttgtc

SEQ ID NO: 938768 - DNA, 25 bp, Homo sapien
tcttctcttttagagatgtgcaaaa

SEQ ID NO: 938769 - DNA, 25 bp, Homo sapien
gatgaacaactaggctgatacactt

SEQ ID NO: 938770 - DNA, 25 bp, Homo sapien
cacttattgatcagagcaaaaccca

SEQ ID NO: 938771 - DNA, 25 bp, Homo sapien
taatcatgatcaagcccatagcggg

SEQ ID NO: 938772 - DNA, 25 bp, Homo sapien
ccatagcgggagaccgaaggacaat

SEQ ID NO: 938773 - DNA, 25 bp, Homo sapien
cctggtcggcttctgcggtctccat

SEQ ID NO: 938774 - DNA, 25 bp, Homo sapien
cccctggtcggcttctgcggtctcc

SEQ ID NO: 938775 - DNA, 25 bp, Homo sapien
ggtcggcttctgcggtctccatgac

SEQ ID NO: 938776 - DNA, 25 bp, Homo sapien
tggtcggcttctgcggtctccatga

SEQ ID NO: 938777 - DNA, 25 bp, Homo sapien
ttctggcctgcgctcgccctctaag

SEQ ID NO: 938778 - DNA, 25 bp, Homo sapien
gccgtgttcttcagctgcgccttca

SEQ ID NO: 938779 - DNA, 25 bp, Homo sapien
ccgagccgttgcacgctggtcatca

SEQ ID NO: 938780 - DNA, 25 bp, Homo sapien
gcgctcgccctctaagtcttcacca

SEQ ID NO: 938781 - DNA, 25 bp, Homo sapien
ttgtattttttgatggctgcgagaa

SEQ ID NO: 938782 - DNA, 25 bp, Homo sapien
gtggtacatccttcttatagttctc

SEQ ID NO: 938783 - DNA, 25 bp, Homo sapien
aaggtggtacatccttcttatagtt

SEQ ID NO: 938784 - DNA, 25 bp, Homo sapien
tttgatggctgcgagaagaaaaggt

SEQ ID NO: 938785 - DNA, 25 bp, Homo sapien
tgcagacagataagcccagtgtggc

SEQ ID NO: 938786 - DNA, 25 bp, Homo sapien
cagacagataagcccagtgtggcag

SEQ ID NO: 938787 - DNA, 25 bp, Homo sapien
gcagacagataagcccagtgtggca

SEQ ID NO: 938788 - DNA, 25 bp, Homo sapien
gacagataagcccagtgtggcagat

SEQ ID NO: 938789 - DNA, 25 bp, Homo sapien
tcactgtacatcatccagaactgtt

SEQ ID NO: 938790 - DNA, 25 bp, Homo sapien
actgtacatcatccagaactgttat

SEQ ID NO: 938791 - DNA, 25 bp, Homo sapien
cactgtacatcatccagaactgtta

SEQ ID NO: 938792 - DNA, 25 bp, Homo sapien
tttcttacataaatccagatagagc

SEQ ID NO: 938793 - DNA, 25 bp, Homo sapien
ggcaacagcctttatacggcacagt

SEQ ID NO: 938794 - DNA, 25 bp, Homo sapien
ttactgtattacacccaaggcaagt

SEQ ID NO: 938795 - DNA, 25 bp, Homo sapien
cacattaatcagtagtgggagcacc

SEQ ID NO: 938796 - DNA, 25 bp, Homo sapien
tacagtccttagtccaagaatttgc

SEQ ID NO: 938797 - DNA, 25 bp, Homo sapien
tagccccatcgctagttccttggaa

SEQ ID NO: 938798 - DNA, 25 bp, Homo sapien
tttggtcagctgcaaacttggcaca

SEQ ID NO: 938799 - DNA, 25 bp, Homo sapien
gaagccctgttgtcaactctgctga

SEQ ID NO: 938800 - DNA, 25 bp, Homo sapien
cacactggcaggatcttatgctctc

SEQ ID NO: 938801 - DNA, 25 bp, Homo sapien
tagagcactagagagaactcgagtt

SEQ ID NO: 938802 - DNA, 25 bp, Homo sapien
caactatagtcttgatgtgaggcta

SEQ ID NO: 938803 - DNA, 25 bp, Homo sapien
gagcagtttctataccctgagaaga

SEQ ID NO: 938804 - DNA, 25 bp, Homo sapien
caatgcatcgctcaacagaaaggaa

SEQ ID NO: 938805 - DNA, 25 bp, Homo sapien
tttttctgagatccactttgtcaag

SEQ ID NO: 938806 - DNA, 25 bp, Homo sapien
caggcttcaccaatcaaggtctttt

SEQ ID NO: 938807 - DNA, 25 bp, Homo sapien
tttgtcaagccagatacaggcttca

SEQ ID NO: 938808 - DNA, 25 bp, Homo sapien
aaaagtttgtgccagttgactattc

SEQ ID NO: 938809 - DNA, 25 bp, Homo sapien
aagtttcattaaacgaaggctctcg

SEQ ID NO: 938810 - DNA, 25 bp, Homo sapien
gaaggctctcgatcatgtctgcata

SEQ ID NO: 938811 - DNA, 25 bp, Homo sapien
agagaatgtcctgcaggacttagac

SEQ ID NO: 938812 - DNA, 25 bp, Homo sapien
cttagactgaatcgaaaagtttcat

SEQ ID NO: 938813 - DNA, 25 bp, Homo sapien
gatcaggagacttaaatttgtatgt

SEQ ID NO: 938814 - DNA, 25 bp, Homo sapien
cattggagaatttcaactattagtt

SEQ ID NO: 938815 - DNA, 25 bp, Homo sapien
ctggtagatgatcaggagacttaaa

SEQ ID NO: 938816 - DNA, 25 bp, Homo sapien
caactattagttgttcaccatctgt

SEQ ID NO: 938817 - DNA, 25 bp, Homo sapien
ttaattgtgggtccattgctacctc

SEQ ID NO: 938818 - DNA, 25 bp, Homo sapien
tgaagcaaatacatggatggaggca

SEQ ID NO: 938819 - DNA, 25 bp, Homo sapien
tgtctcaaagcaggtggttgcgtta

SEQ ID NO: 938820 - DNA, 25 bp, Homo sapien
aaatcctccgtgtttgcaggttggg

SEQ ID NO: 938821 - DNA, 25 bp, Homo sapien
gatagctcttgctggattccggcag

SEQ ID NO: 938822 - DNA, 25 bp, Homo sapien
atctgaaggtaagaggagagagccc

SEQ ID NO: 938823 - DNA, 25 bp, Homo sapien
gagagcccagggtacctatatcctt

SEQ ID NO: 938824 - DNA, 25 bp, Homo sapien
tacaaggctgtagctcttacccggg

SEQ ID NO: 938825 - DNA, 25 bp, Homo sapien
ttcccactggcaacgaatgagcatt

SEQ ID NO: 938826 - DNA, 25 bp, Homo sapien
ccttgatggcatatgatatagaaca

SEQ ID NO: 938827 - DNA, 25 bp, Homo sapien
ttaatgttgtataaaatcgccaaac

SEQ ID NO: 938828 - DNA, 25 bp, Homo sapien
tttggtcatctaatgggtgtgtagg

SEQ ID NO: 938829 - DNA, 25 bp, Homo sapien
aatccaggactagaaataagtgaca

SEQ ID NO: 938830 - DNA, 25 bp, Homo sapien
taaggtgataaggtccagggaaatc

SEQ ID NO: 938831 - DNA, 25 bp, Homo sapien
cactggattttagattcacgtaatt

SEQ ID NO: 938832 - DNA, 25 bp, Homo sapien
cagggaaatcacaccccaaatagga

SEQ ID NO: 938833 - DNA, 25 bp, Homo sapien
tgttcttcagtctgaacttggcctc

SEQ ID NO: 938834 - DNA, 25 bp, Homo sapien
tcagtctgaacttggcctcattcat

SEQ ID NO: 938835 - DNA, 25 bp, Homo sapien
ggtgttcttcagtctgaacttggcc

SEQ ID NO: 938836 - DNA, 25 bp, Homo sapien
cttcagtctgaacttggcctcattc

SEQ ID NO: 938837 - DNA, 25 bp, Homo sapien
agcaagcatgcttactggctgctga

SEQ ID NO: 938838 - DNA, 25 bp, Homo sapien
ttcagcaagcatgcttactggctgc

SEQ ID NO: 938839 - DNA, 25 bp, Homo sapien
ctggttcagcaagcatgcttactgg

SEQ ID NO: 938840 - DNA, 25 bp, Homo sapien
agcatgcttactggctgctgatgaa

SEQ ID NO: 938841 - DNA, 25 bp, Homo sapien
aaaactgtgcttatctacagagtca

SEQ ID NO: 938842 - DNA, 25 bp, Homo sapien
taatttcaagaaaactgtgcttatc

SEQ ID NO: 938843 - DNA, 25 bp, Homo sapien
gtgcttatctacagagtcacagttt

SEQ ID NO: 938844 - DNA, 25 bp, Homo sapien
acagagtcacagtttttctgatgtc

SEQ ID NO: 938845 - DNA, 25 bp, Homo sapien
ggatatatttctggcattggctgaa

SEQ ID NO: 938846 - DNA, 25 bp, Homo sapien
ttgtcctggtttcggctctcgctgt

SEQ ID NO: 938847 - DNA, 25 bp, Homo sapien
tggttttgatcaggcactggcagag

SEQ ID NO: 938848 - DNA, 25 bp, Homo sapien
tcttgctcccagaaagcaggcttgt

SEQ ID NO: 938849 - DNA, 25 bp, Homo sapien
ctacccctggctgttttacaggctc

SEQ ID NO: 938850 - DNA, 25 bp, Homo sapien
caggctcttgtccattctgtcccat

SEQ ID NO: 938851 - DNA, 25 bp, Homo sapien
ctgctagtcctactcctacccctgg

SEQ ID NO: 938852 - DNA, 25 bp, Homo sapien
tttacaggctcttgtccattctgtc

SEQ ID NO: 938853 - DNA, 25 bp, Homo sapien
tccttcactgtccacgctataccca

SEQ ID NO: 938854 - DNA, 25 bp, Homo sapien
tctgcaggccggtgattgggaggct

SEQ ID NO: 938855 - DNA, 25 bp, Homo sapien
gctatacccactgccaaagctgctg

SEQ ID NO: 938856 - DNA, 25 bp, Homo sapien
gaaatagattagtctcccctgcagt

SEQ ID NO: 938857 - DNA, 25 bp, Homo sapien
caagagctcatggaatttaccttcc

SEQ ID NO: 938858 - DNA, 25 bp, Homo sapien
gagctatgagttgaaggttggccac

SEQ ID NO: 938859 - DNA, 25 bp, Homo sapien
aaagcaagagctcatggaatttacc

SEQ ID NO: 938860 - DNA, 25 bp, Homo sapien
gctcatggaatttaccttcctctat

SEQ ID NO: 938861 - DNA, 25 bp, Homo sapien
gactgatcttgggacttacatggtg

SEQ ID NO: 938862 - DNA, 25 bp, Homo sapien
caactggtaggctaacttgaactgt

SEQ ID NO: 938863 - DNA, 25 bp, Homo sapien
gattaggttagtagcatgcattcca

SEQ ID NO: 938864 - DNA, 25 bp, Homo sapien
tggagattcacatgcccaacacatc

SEQ ID NO: 938865 - DNA, 25 bp, Homo sapien
cttgctgtgtgctttgaacagggcc

SEQ ID NO: 938866 - DNA, 25 bp, Homo sapien
ttgctgtgtgctttgaacagggcct

SEQ ID NO: 938867 - DNA, 25 bp, Homo sapien
cctgagggctagctggctttggtct

SEQ ID NO: 938868 - DNA, 25 bp, Homo sapien
tcctggcatgattagactgaccgct

SEQ ID NO: 938869 - DNA, 25 bp, Homo sapien
tgaatggggaggactcctgctatgc

SEQ ID NO: 938870 - DNA, 25 bp, Homo sapien
tgattagactgaccgcttttatgtg

SEQ ID NO: 938871 - DNA, 25 bp, Homo sapien
tgaacattaagctgccatgctgagg

SEQ ID NO: 938872 - DNA, 25 bp, Homo sapien
tcctcagtgaggttgcattgcctta

SEQ ID NO: 938873 - DNA, 25 bp, Homo sapien
tacaaagtgtgatccaacagaatgg

SEQ ID NO: 938874 - DNA, 25 bp, Homo sapien
gacactgtatcaaatgctatgagcc

SEQ ID NO: 938875 - DNA, 25 bp, Homo sapien
gatttctcaatggtgggaacctgca

SEQ ID NO: 938876 - DNA, 25 bp, Homo sapien
gatgattttgagctaccaggactac

SEQ ID NO: 938877 - DNA, 25 bp, Homo sapien
tgcggagttgttgcacggcagcttc

SEQ ID NO: 938878 - DNA, 25 bp, Homo sapien
tccatgagaacggagatggccttct

SEQ ID NO: 938879 - DNA, 25 bp, Homo sapien
gcttttgataacagatggctttggg

SEQ ID NO: 938880 - DNA, 25 bp, Homo sapien
taccaccttggagtgttatcgaggt

SEQ ID NO: 938881 - DNA, 25 bp, Homo sapien
ctgctctgactggaatgagacttgc

SEQ ID NO: 938882 - DNA, 25 bp, Homo sapien
tgttctttgagaggataccaccttg

SEQ ID NO: 938883 - DNA, 25 bp, Homo sapien
ggatgaaaatctatcataatcccaa

SEQ ID NO: 938884 - DNA, 25 bp, Homo sapien
ctccccaaggaagtcgttggatgaa

SEQ ID NO: 938885 - DNA, 25 bp, Homo sapien
caaggaagtcgttggatgaaaatct

SEQ ID NO: 938886 - DNA, 25 bp, Homo sapien
tgaaaatctatcataatcccaaact

SEQ ID NO: 938887 - DNA, 25 bp, Homo sapien
gacatgtttagtccttctcttgtac

SEQ ID NO: 938888 - DNA, 25 bp, Homo sapien
tttctggacatgtttagtccttctc

SEQ ID NO: 938889 - DNA, 25 bp, Homo sapien
tggacatgtttagtccttctcttgt

SEQ ID NO: 938890 - DNA, 25 bp, Homo sapien
gattccactcaggattaagactttt

SEQ ID NO: 938891 - DNA, 25 bp, Homo sapien
attccctcttacattgacaattctc

SEQ ID NO: 938892 - DNA, 25 bp, Homo sapien
gtcagtaccttgtcaatataattcc

SEQ ID NO: 938893 - DNA, 25 bp, Homo sapien
cttacattgacaattctcaaagaca

SEQ ID NO: 938894 - DNA, 25 bp, Homo sapien
aatgtcagtaccttgtcaatataat

SEQ ID NO: 938895 - DNA, 25 bp, Homo sapien
cttgcattctggacaaccatgactt

SEQ ID NO: 938896 - DNA, 25 bp, Homo sapien
ttgcattctggacaaccatgacttg

SEQ ID NO: 938897 - DNA, 25 bp, Homo sapien
tgcattctggacaaccatgacttga

SEQ ID NO: 938898 - DNA, 25 bp, Homo sapien
ttcacaaaagggtcagaataaccat

SEQ ID NO: 938899 - DNA, 25 bp, Homo sapien
gaataaccattgttgtctcgaggaa

SEQ ID NO: 938900 - DNA, 25 bp, Homo sapien
cctggaagaaggtacactttcacaa

SEQ ID NO: 938901 - DNA, 25 bp, Homo sapien
aacaagatttcttgcttggagaata

SEQ ID NO: 938902 - DNA, 25 bp, Homo sapien
ggatgagagacaacctttgttccat

SEQ ID NO: 938903 - DNA, 25 bp, Homo sapien
atttctcctgtaattggatgagaga

SEQ ID NO: 938904 - DNA, 25 bp, Homo sapien
taattggatgagagacaacctttgt

SEQ ID NO: 938905 - DNA, 25 bp, Homo sapien
cctgtaattggatgagagacaacct

SEQ ID NO: 938906 - DNA, 25 bp, Homo sapien
tacatcttgatcagttttgtactca

SEQ ID NO: 938907 - DNA, 25 bp, Homo sapien
ttgatcagttttgtactcagaagag

SEQ ID NO: 938908 - DNA, 25 bp, Homo sapien
tcttgatcagttttgtactcagaag

SEQ ID NO: 938909 - DNA, 25 bp, Homo sapien
tgatacatcttgatcagttttgtac

SEQ ID NO: 938910 - DNA, 25 bp, Homo sapien
cagaggtcacatcaacaatcctcac

SEQ ID NO: 938911 - DNA, 25 bp, Homo sapien
gaaaacaagtgggtcagaggtcaca

SEQ ID NO: 938912 - DNA, 25 bp, Homo sapien
ctagaaaacaagtgggtcagaggtc

SEQ ID NO: 938913 - DNA, 25 bp, Homo sapien
ggtcagaggtcacatcaacaatcct

SEQ ID NO: 938914 - DNA, 25 bp, Homo sapien
aactgatgacagaaccagcggtgac

SEQ ID NO: 938915 - DNA, 25 bp, Homo sapien
gctgggaacggaactggatcctgct

SEQ ID NO: 938916 - DNA, 25 bp, Homo sapien
cagcggtgactgctgtagtgaaacc

SEQ ID NO: 938917 - DNA, 25 bp, Homo sapien
tgctgccaactgcttaggatcaacc

SEQ ID NO: 938918 - DNA, 25 bp, Homo sapien
gcttttggtggctcatgaagttcca

SEQ ID NO: 938919 - DNA, 25 bp, Homo sapien
agaatctgatagcatattgaggtcc

SEQ ID NO: 938920 - DNA, 25 bp, Homo sapien
tcagaatctgatagcatattgaggt

SEQ ID NO: 938921 - DNA, 25 bp, Homo sapien
cagaatctgatagcatattgaggtc

SEQ ID NO: 938922 - DNA, 25 bp, Homo sapien
cttccccactttgctgactaatgat

SEQ ID NO: 938923 - DNA, 25 bp, Homo sapien
gctgactaatgatactctgaacttc

SEQ ID NO: 938924 - DNA, 25 bp, Homo sapien
cccactttgctgactaatgatactc

SEQ ID NO: 938925 - DNA, 25 bp, Homo sapien
tttgctgactaatgatactctgaac

SEQ ID NO: 938926 - DNA, 25 bp, Homo sapien
cagatgggccttaggtttatttcaa

SEQ ID NO: 938927 - DNA, 25 bp, Homo sapien
tcagatgggccttaggtttatttca

SEQ ID NO: 938928 - DNA, 25 bp, Homo sapien
cttcagatgggccttaggtttattt

SEQ ID NO: 938929 - DNA, 25 bp, Homo sapien
ttcagatgggccttaggtttatttc

SEQ ID NO: 938930 - DNA, 25 bp, Homo sapien
catggccctctcagtggcagttgtc

SEQ ID NO: 938931 - DNA, 25 bp, Homo sapien
ttggctttgtctttgctcccctggg

SEQ ID NO: 938932 - DNA, 25 bp, Homo sapien
ggttaactctgcatgggacatccaa

SEQ ID NO: 938933 - DNA, 25 bp, Homo sapien
ttttctctcggcattgttacattgt

SEQ ID NO: 938934 - DNA, 25 bp, Homo sapien
ctgtgtgctgtgtttcttgatctcc

SEQ ID NO: 938935 - DNA, 25 bp, Homo sapien
gtgctgtgtttcttgatctccaacc

SEQ ID NO: 938936 - DNA, 25 bp, Homo sapien
gatctccaaccttgatcactgccat

SEQ ID NO: 938937 - DNA, 25 bp, Homo sapien
gtgtttcttgatctccaaccttgat

SEQ ID NO: 938938 - DNA, 25 bp, Homo sapien
tcaatgagatgtaaggtgatgcact

SEQ ID NO: 938939 - DNA, 25 bp, Homo sapien
ggtcatcgcctggttaagtgttaaa

SEQ ID NO: 938940 - DNA, 25 bp, Homo sapien
gtttctgtcagtaacaaccctgtcc

SEQ ID NO: 938941 - DNA, 25 bp, Homo sapien
caaaccttgcgcctactgtgtaatg

SEQ ID NO: 938942 - DNA, 25 bp, Homo sapien
tttattttaggagatggcacacata

SEQ ID NO: 938943 - DNA, 25 bp, Homo sapien
tagtacttggcttatgaacatcaga

SEQ ID NO: 938944 - DNA, 25 bp, Homo sapien
ctctgtccagtatttgtggtaggaa

SEQ ID NO: 938945 - DNA, 25 bp, Homo sapien
tcaaataaccagagcagtcactcag

SEQ ID NO: 938946 - DNA, 25 bp, Homo sapien
tagccaactgccaaaaggacaatgc

SEQ ID NO: 938947 - DNA, 25 bp, Homo sapien
tcacaactaaccataaggagagagg

SEQ ID NO: 938948 - DNA, 25 bp, Homo sapien
aacaagatacttctgtagccaactg

SEQ ID NO: 938949 - DNA, 25 bp, Homo sapien
gagaggtttacctacacagagaagg

SEQ ID NO: 938950 - DNA, 25 bp, Homo sapien
tccaatttctccactatgtcccggg

SEQ ID NO: 938951 - DNA, 25 bp, Homo sapien
taccacccacaattctaattcctaa

SEQ ID NO: 938952 - DNA, 25 bp, Homo sapien
gaagaatcttggcaatataggctcc

SEQ ID NO: 938953 - DNA, 25 bp, Homo sapien
aagcttccccgtctgttccgcactt

SEQ ID NO: 938954 - DNA, 25 bp, Homo sapien
acgtggctgggaaagcctcacaatc

SEQ ID NO: 938955 - DNA, 25 bp, Homo sapien
agttccacgtggctgggaaagcctc

SEQ ID NO: 938956 - DNA, 25 bp, Homo sapien
ttccacgtggctgggaaagcctcac

SEQ ID NO: 938957 - DNA, 25 bp, Homo sapien
gttccacgtggctgggaaagcctca

SEQ ID NO: 938958 - DNA, 25 bp, Homo sapien
gaaactgtgtgatcctttgagtctc

SEQ ID NO: 938959 - DNA, 25 bp, Homo sapien
aaagatgtagtgcatagttttcccg

SEQ ID NO: 938960 - DNA, 25 bp, Homo sapien
tatccttgcgtgaggaaagatgtag

SEQ ID NO: 938961 - DNA, 25 bp, Homo sapien
catagttttcccgttcatctgtata

SEQ ID NO: 938962 - DNA, 25 bp, Homo sapien
tagagtggaccaatctttccggcag

SEQ ID NO: 938963 - DNA, 25 bp, Homo sapien
tgtttcctcacgacgcagatgatag

SEQ ID NO: 938964 - DNA, 25 bp, Homo sapien
ttccggcagttttcggtccagacca

SEQ ID NO: 938965 - DNA, 25 bp, Homo sapien
cattttccaaacgagactccctggg

SEQ ID NO: 938966 - DNA, 25 bp, Homo sapien
ttggacaccaaggaaacatcataca

SEQ ID NO: 938967 - DNA, 25 bp, Homo sapien
ctttggacaccaaggaaacatcata

SEQ ID NO: 938968 - DNA, 25 bp, Homo sapien
tttggacaccaaggaaacatcatac

SEQ ID NO: 938969 - DNA, 25 bp, Homo sapien
tggacaccaaggaaacatcatacat

SEQ ID NO: 938970 - DNA, 25 bp, Homo sapien
tacagatgattgagggaagcagatg

SEQ ID NO: 938971 - DNA, 25 bp, Homo sapien
acagatgattgagggaagcagatgt

SEQ ID NO: 938972 - DNA, 25 bp, Homo sapien
aagtaatacagatgattgagggaag

SEQ ID NO: 938973 - DNA, 25 bp, Homo sapien
atacagatgattgagggaagcagat

SEQ ID NO: 938974 - DNA, 25 bp, Homo sapien
tcaataaaaatggtcaatccaatag

SEQ ID NO: 938975 - DNA, 25 bp, Homo sapien
caataaaaatggtcaatccaatagc

SEQ ID NO: 938976 - DNA, 25 bp, Homo sapien
gaacactgatctcataaacatgcca

SEQ ID NO: 938977 - DNA, 25 bp, Homo sapien
caactatggatttataggatgacca

SEQ ID NO: 938978 - DNA, 25 bp, Homo sapien
gaaaagtaggatacatctctggaga

SEQ ID NO: 938979 - DNA, 25 bp, Homo sapien
gctacagaatctatacacatgataa

SEQ ID NO: 938980 - DNA, 25 bp, Homo sapien
tccatgatgaatgctatgtcacggt

SEQ ID NO: 938981 - DNA, 25 bp, Homo sapien
gattcttccctcatgtgttgctgaa

SEQ ID NO: 938982 - DNA, 25 bp, Homo sapien
tgaacttcaggcaatgagtggcttg

SEQ ID NO: 938983 - DNA, 25 bp, Homo sapien
catagcctcgagtccgtgattcttc

SEQ ID NO: 938984 - DNA, 25 bp, Homo sapien
ttctgggccacaattggtattcttc

SEQ ID NO: 938985 - DNA, 25 bp, Homo sapien
actggtcggcttagttctggcagag

SEQ ID NO: 938986 - DNA, 25 bp, Homo sapien
tggccaacaggactgagtgggcttt

SEQ ID NO: 938987 - DNA, 25 bp, Homo sapien
gaggatgatgcatgactaaaggaaa

SEQ ID NO: 938988 - DNA, 25 bp, Homo sapien
gaatcccttttaattgataaatcaa

SEQ ID NO: 938989 - DNA, 25 bp, Homo sapien
agcccatagacagaggaaggtctgg

SEQ ID NO: 938990 - DNA, 25 bp, Homo sapien
ataaatcaagcccatagacagagga

SEQ ID NO: 938991 - DNA, 25 bp, Homo sapien
cttagggaagagctagaagaatccc

SEQ ID NO: 938992 - DNA, 25 bp, Homo sapien
tctcagtggttcgaaggagacggtc

SEQ ID NO: 938993 - DNA, 25 bp, Homo sapien
taatgccgctgttcctttggtgatc

SEQ ID NO: 938994 - DNA, 25 bp, Homo sapien
tgtcacttcttgagaccggcgtgtc

SEQ ID NO: 938995 - DNA, 25 bp, Homo sapien
tggcttatccgcttcatcctgcaga

SEQ ID NO: 938996 - DNA, 25 bp, Homo sapien
tcctggagaatcttggctcgtgcca

SEQ ID NO: 938997 - DNA, 25 bp, Homo sapien
tcaagctctctgtctatgtcctgga

SEQ ID NO: 938998 - DNA, 25 bp, Homo sapien
catttccaggtatcgtagcttagca

SEQ ID NO: 938999 - DNA, 25 bp, Homo sapien
tactccctggaggtaggctcgttct

SEQ ID NO: 939000 - DNA, 25 bp, Homo sapien
ctttgaggctcaaaacacctagggt

SEQ ID NO: 939001 - DNA, 25 bp, Homo sapien
gaatgcatttaacttgaccaactgg

SEQ ID NO: 939002 - DNA, 25 bp, Homo sapien
caacctgtaaactactgagctagcc

SEQ ID NO: 939003 - DNA, 25 bp, Homo sapien
ggtccagcagaggtctcaatcttca

SEQ ID NO: 939004 - DNA, 25 bp, Homo sapien
tccattgccttccaactgaaaagaa

SEQ ID NO: 939005 - DNA, 25 bp, Homo sapien
accaggagcctgatcgcctcctaaa

SEQ ID NO: 939006 - DNA, 25 bp, Homo sapien
cgcctcctaaaagtctgaaaacaca

SEQ ID NO: 939007 - DNA, 25 bp, Homo sapien
ctaatctagtattaggtttctaagg

SEQ ID NO: 939008 - DNA, 25 bp, Homo sapien
gactgaacggtgtaccatccttggc

SEQ ID NO: 939009 - DNA, 25 bp, Homo sapien
tcggtatactgaaaaggagccctgg

SEQ ID NO: 939010 - DNA, 25 bp, Homo sapien
agctgtactgtggaatctgcccgga

SEQ ID NO: 939011 - DNA, 25 bp, Homo sapien
tgagtaacaccatcagactgaacgg

SEQ ID NO: 939012 - DNA, 25 bp, Homo sapien
ctgtagtcttgcttgaataatccat

SEQ ID NO: 939013 - DNA, 25 bp, Homo sapien
cccagaatgaatgatgctttttgag

SEQ ID NO: 939014 - DNA, 25 bp, Homo sapien
atacagggcagagttatagtccagt

SEQ ID NO: 939015 - DNA, 25 bp, Homo sapien
ccagttcccagaatgaatgatgctt

SEQ ID NO: 939016 - DNA, 25 bp, Homo sapien
cagagttatagtccagttcccagaa

SEQ ID NO: 939017 - DNA, 25 bp, Homo sapien
gcaggcgcatgcagtgattttgagc

SEQ ID NO: 939018 - DNA, 25 bp, Homo sapien
tgaaggaacaaaagcgcacttgtac

SEQ ID NO: 939019 - DNA, 25 bp, Homo sapien
gcacttgtactccaaaatatgctgc

SEQ ID NO: 939020 - DNA, 25 bp, Homo sapien
aatatgctgctataacatccaaaga

SEQ ID NO: 939021 - DNA, 25 bp, Homo sapien
ggaacaccataatgatatttcaagg

SEQ ID NO: 939022 - DNA, 25 bp, Homo sapien
gagatgaggaacaccataatgatat

SEQ ID NO: 939023 - DNA, 25 bp, Homo sapien
aatgagatgaggaacaccataatga

SEQ ID NO: 939024 - DNA, 25 bp, Homo sapien
atcctgaaatgagatgaggaacacc

SEQ ID NO: 939025 - DNA, 25 bp, Homo sapien
ccagatctttggagggtgatcccaa

SEQ ID NO: 939026 - DNA, 25 bp, Homo sapien
cactgcatgtgctggagtacctaga

SEQ ID NO: 939027 - DNA, 25 bp, Homo sapien
tgctgagaccaacactaggagctgt

SEQ ID NO: 939028 - DNA, 25 bp, Homo sapien
catttgtgacaccaacaggaggcac

SEQ ID NO: 939029 - DNA, 25 bp, Homo sapien
tcaaacagaggtgtagctgtagtca

SEQ ID NO: 939030 - DNA, 25 bp, Homo sapien
gcatcaaacagaggtgtagctgtag

SEQ ID NO: 939031 - DNA, 25 bp, Homo sapien
catcaaacagaggtgtagctgtagt

SEQ ID NO: 939032 - DNA, 25 bp, Homo sapien
agcatcaaacagaggtgtagctgta

SEQ ID NO: 939033 - DNA, 25 bp, Homo sapien
aacagaaggactgccagatggtaac

SEQ ID NO: 939034 - DNA, 25 bp, Homo sapien
ggaaacagaaggactgccagatggt

SEQ ID NO: 939035 - DNA, 25 bp, Homo sapien
taggaagaatagttggtttaggtga

SEQ ID NO: 939036 - DNA, 25 bp, Homo sapien
cttctaaagaatgggcgaggtttag

SEQ ID NO: 939037 - DNA, 25 bp, Homo sapien
taaagtatgtagttgaaagctgctc

SEQ ID NO: 939038 - DNA, 25 bp, Homo sapien
tggaagggctattacagaagaaggt

SEQ ID NO: 939039 - DNA, 25 bp, Homo sapien
gatgtaaagtatgtagttgaaagct

SEQ ID NO: 939040 - DNA, 25 bp, Homo sapien
aagctgctctttcattggaagggct

SEQ ID NO: 939041 - DNA, 25 bp, Homo sapien
tgcactgctggtcgaatctgtaaga

SEQ ID NO: 939042 - DNA, 25 bp, Homo sapien
agcactagctctaccatctggtggg

SEQ ID NO: 939043 - DNA, 25 bp, Homo sapien
gcattctgtcaaagtccatggtgga

SEQ ID NO: 939044 - DNA, 25 bp, Homo sapien
gaaggctccgagtaggtcaaaatca

SEQ ID NO: 939045 - DNA, 25 bp, Homo sapien
gaagcatgcagactcgaagatccct

SEQ ID NO: 939046 - DNA, 25 bp, Homo sapien
tgtagaagttaccatagtacccagg

SEQ ID NO: 939047 - DNA, 25 bp, Homo sapien
caagaagatctatggagctcctcca

SEQ ID NO: 939048 - DNA, 25 bp, Homo sapien
catgtggtctgtgccgagctttgcg

SEQ ID NO: 939049 - DNA, 25 bp, Homo sapien
actgctactaatctctttgagctgg

SEQ ID NO: 939050 - DNA, 25 bp, Homo sapien
tgtgctactttttcgagtcagtcgt

SEQ ID NO: 939051 - DNA, 25 bp, Homo sapien
gagtcagtcgtctgtgtttccctgc

SEQ ID NO: 939052 - DNA, 25 bp, Homo sapien
tactaatctctttgagctggtttct

SEQ ID NO: 939053 - DNA, 25 bp, Homo sapien
tcactgcttgatgagccaacactag

SEQ ID NO: 939054 - DNA, 25 bp, Homo sapien
ttttaggctgctgagaacttgaggt

SEQ ID NO: 939055 - DNA, 25 bp, Homo sapien
tattccatcggaagaatatcccgtg

SEQ ID NO: 939056 - DNA, 25 bp, Homo sapien
tatcccgtgtcgctcagaccttggg

SEQ ID NO: 939057 - DNA, 25 bp, Homo sapien
tttcttcagaacgtatcttttcttc

SEQ ID NO: 939058 - DNA, 25 bp, Homo sapien
gttgtcttatcatcttctttaggta

SEQ ID NO: 939059 - DNA, 25 bp, Homo sapien
tctgaggtgtgccagatggtaaacc

SEQ ID NO: 939060 - DNA, 25 bp, Homo sapien
actgtctttggagccactctgcctt

SEQ ID NO: 939061 - DNA, 25 bp, Homo sapien
gcataggagatgctttgggtcctga

SEQ ID NO: 939062 - DNA, 25 bp, Homo sapien
caggcataggagatgctttgggtcc

SEQ ID NO: 939063 - DNA, 25 bp, Homo sapien
aggcataggagatgctttgggtcct

SEQ ID NO: 939064 - DNA, 25 bp, Homo sapien
aggaacaggcataggagatgctttg

SEQ ID NO: 939065 - DNA, 25 bp, Homo sapien
tttgcgtatgtctccaagctgtcct

SEQ ID NO: 939066 - DNA, 25 bp, Homo sapien
caagctgtcctgatattgctctctg

SEQ ID NO: 939067 - DNA, 25 bp, Homo sapien
ctccaagctgtcctgatattgctct

SEQ ID NO: 939068 - DNA, 25 bp, Homo sapien
gctgtcctgatattgctctctgggt

SEQ ID NO: 939069 - DNA, 25 bp, Homo sapien
atcagcaaacaggtagatacagcca

SEQ ID NO: 939070 - DNA, 25 bp, Homo sapien
gaaggacttagctcttcagttaagg

SEQ ID NO: 939071 - DNA, 25 bp, Homo sapien
cagttaaggcatgattgttggcatc

SEQ ID NO: 939072 - DNA, 25 bp, Homo sapien
tattggccattgaagcaatctgaga

SEQ ID NO: 939073 - DNA, 25 bp, Homo sapien
caaggctgctacttcctaattgtgt

SEQ ID NO: 939074 - DNA, 25 bp, Homo sapien
cttgatgtggacatgatatcaaagg

SEQ ID NO: 939075 - DNA, 25 bp, Homo sapien
gaaatattgcaactacttgatgtgg

SEQ ID NO: 939076 - DNA, 25 bp, Homo sapien
cagatggtctttgattggacccaag

SEQ ID NO: 939077 - DNA, 25 bp, Homo sapien
tgtgttaaaaagatactgtgtcccg

SEQ ID NO: 939078 - DNA, 25 bp, Homo sapien
attttgtagtgaccagtcagcctcc

SEQ ID NO: 939079 - DNA, 25 bp, Homo sapien
tgtgtcccgatataaacagatggca

SEQ ID NO: 939080 - DNA, 25 bp, Homo sapien
tactgtacacatatgctctcccaag

SEQ ID NO: 939081 - DNA, 25 bp, Homo sapien
aattgttttcatgaacgtgcacagc

SEQ ID NO: 939082 - DNA, 25 bp, Homo sapien
cctgaattgttttcatgaacgtgca

SEQ ID NO: 939083 - DNA, 25 bp, Homo sapien
gaattgttttcatgaacgtgcacag

SEQ ID NO: 939084 - DNA, 25 bp, Homo sapien
tgaattgttttcatgaacgtgcaca

SEQ ID NO: 939085 - DNA, 25 bp, Homo sapien
tcagaggcccaacaacagatggact

SEQ ID NO: 939086 - DNA, 25 bp, Homo sapien
ggttggacacccactatcagaggcc

SEQ ID NO: 939087 - DNA, 25 bp, Homo sapien
gaggttcttcccactagctcactga

SEQ ID NO: 939088 - DNA, 25 bp, Homo sapien
gacgctgcgtactgggtttagctga

SEQ ID NO: 939089 - DNA, 25 bp, Homo sapien
aaaagacacagactggcaaattgga

SEQ ID NO: 939090 - DNA, 25 bp, Homo sapien
atgtaaatggactaaatgctccaat

SEQ ID NO: 939091 - DNA, 25 bp, Homo sapien
agactggcaaattggataaggagtc

SEQ ID NO: 939092 - DNA, 25 bp, Homo sapien
tgtaaatggactaaatgctccaatt

SEQ ID NO: 939093 - DNA, 25 bp, Homo sapien
cacactattagaaataggcaacggt

SEQ ID NO: 939094 - DNA, 25 bp, Homo sapien
gagacatcatatgcatgttccaaac

SEQ ID NO: 939095 - DNA, 25 bp, Homo sapien
caatttccgatcagttcaaactcag

SEQ ID NO: 939096 - DNA, 25 bp, Homo sapien
tacttttcctgcagtagcttggtgt

SEQ ID NO: 939097 - DNA, 25 bp, Homo sapien
gctccctcttcatcatggatacatt

SEQ ID NO: 939098 - DNA, 25 bp, Homo sapien
atttctctggatgagtctaaccttt

SEQ ID NO: 939099 - DNA, 25 bp, Homo sapien
ttatcgtagaagcagttgtcctcat

SEQ ID NO: 939100 - DNA, 25 bp, Homo sapien
ttttgcctgcttttcttatcgtaga

SEQ ID NO: 939101 - DNA, 25 bp, Homo sapien
ttctctggatgagtctaacctttct

SEQ ID NO: 939102 - DNA, 25 bp, Homo sapien
tccatctgacccctactgattccta

SEQ ID NO: 939103 - DNA, 25 bp, Homo sapien
tgattcctagctccaaggctgcttc

SEQ ID NO: 939104 - DNA, 25 bp, Homo sapien
gcttcttcatgaccaaatagcttca

SEQ ID NO: 939105 - DNA, 25 bp, Homo sapien
tattgtaattgcttccatctgaccc

SEQ ID NO: 939106 - DNA, 25 bp, Homo sapien
gagctgttggttaattgcggtttca

SEQ ID NO: 939107 - DNA, 25 bp, Homo sapien
tggttaattgcggtttcatccacac

SEQ ID NO: 939108 - DNA, 25 bp, Homo sapien
aagccaactgagctgttggttaatt

SEQ ID NO: 939109 - DNA, 25 bp, Homo sapien
ttaattgcggtttcatccacacccc

SEQ ID NO: 939110 - DNA, 25 bp, Homo sapien
gagtcccttagagacccttgctgaa

SEQ ID NO: 939111 - DNA, 25 bp, Homo sapien
caaatcttagtggtctctagctgaa

SEQ ID NO: 939112 - DNA, 25 bp, Homo sapien
tataagtgctaagtagtatcgagac

SEQ ID NO: 939113 - DNA, 25 bp, Homo sapien
caccacgttagtattttgagtccct

SEQ ID NO: 939114 - DNA, 25 bp, Homo sapien
ggacctcagtgagattaggccttgc

SEQ ID NO: 939115 - DNA, 25 bp, Homo sapien
tgtttcgcactttcaccccaaagaa

SEQ ID NO: 939116 - DNA, 25 bp, Homo sapien
cttgctcaattataacaggtgtcac

SEQ ID NO: 939117 - DNA, 25 bp, Homo sapien
caggtgtcacttagatgagttggtc

SEQ ID NO: 939118 - DNA, 25 bp, Homo sapien
cgcaagtctcctataacagttcata

SEQ ID NO: 939119 - DNA, 25 bp, Homo sapien
tgcagaccattcctacacaccagtt

SEQ ID NO: 939120 - DNA, 25 bp, Homo sapien
caaagggtaaatggtggagccattc

SEQ ID NO: 939121 - DNA, 25 bp, Homo sapien
gtattatctcagcatgcctctgcag

SEQ ID NO: 939122 - DNA, 25 bp, Homo sapien
cagacagtactagtgatgaccctgc

SEQ ID NO: 939123 - DNA, 25 bp, Homo sapien
gaccctgcccactcaaacatatttg

SEQ ID NO: 939124 - DNA, 25 bp, Homo sapien
gattcttgaaattcctccagtggcg

SEQ ID NO: 939125 - DNA, 25 bp, Homo sapien
taatcaccacatttcaagcagatgg

SEQ ID NO: 939126 - DNA, 25 bp, Homo sapien
caggactgctatcatgccgttgggt

SEQ ID NO: 939127 - DNA, 25 bp, Homo sapien
catgattttgtgttcgtatttcgga

SEQ ID NO: 939128 - DNA, 25 bp, Homo sapien
gaggcacttgtggatgaaagacttg

SEQ ID NO: 939129 - DNA, 25 bp, Homo sapien
atttcggagtgccaaaaagaggcac

SEQ ID NO: 939130 - DNA, 25 bp, Homo sapien
ttcaaatgttattgcaaggaatata

SEQ ID NO: 939131 - DNA, 25 bp, Homo sapien
caatgaccctcgtgctgttttatag

SEQ ID NO: 939132 - DNA, 25 bp, Homo sapien
tgcaaaaccacagtacaaccagaat

SEQ ID NO: 939133 - DNA, 25 bp, Homo sapien
tcctcccaataatatcttgcaaaac

SEQ ID NO: 939134 - DNA, 25 bp, Homo sapien
catagttctctggagactattcaga

SEQ ID NO: 939135 - DNA, 25 bp, Homo sapien
tctggcctagggaatgactttctaa

SEQ ID NO: 939136 - DNA, 25 bp, Homo sapien
gactttctaactcagcatagttctc

SEQ ID NO: 939137 - DNA, 25 bp, Homo sapien
tcttgttctgagtattccacggtat

SEQ ID NO: 939138 - DNA, 25 bp, Homo sapien
tcagggtaatgctaacttcacaaat

SEQ ID NO: 939139 - DNA, 25 bp, Homo sapien
tgaaattgggaaatgcgccctcatc

SEQ ID NO: 939140 - DNA, 25 bp, Homo sapien
tggacaagtggttgtatgaacagac

SEQ ID NO: 939141 - DNA, 25 bp, Homo sapien
ggtaagtgctcaagagtgcaactgc

SEQ ID NO: 939142 - DNA, 25 bp, Homo sapien
gtgttcttcacactactgcttttga

SEQ ID NO: 939143 - DNA, 25 bp, Homo sapien
gagtgtttttctaacgtgttcttca

SEQ ID NO: 939144 - DNA, 25 bp, Homo sapien
acactactgcttttgaaacatttgc

SEQ ID NO: 939145 - DNA, 25 bp, Homo sapien
tctaacgtgttcttcacactactgc

SEQ ID NO: 939146 - DNA, 25 bp, Homo sapien
ccatatgctacttctgtgacattaa

SEQ ID NO: 939147 - DNA, 25 bp, Homo sapien
tatgctacttctgtgacattaacat

SEQ ID NO: 939148 - DNA, 25 bp, Homo sapien
taacattatactgttcacattctag

SEQ ID NO: 939149 - DNA, 25 bp, Homo sapien
tcacattctagctgttgactccttg

SEQ ID NO: 939150 - DNA, 25 bp, Homo sapien
tggcacgatcttggtaccctgcaac

SEQ ID NO: 939151 - DNA, 25 bp, Homo sapien
ctgcgcctggcctgattgtattttt

SEQ ID NO: 939152 - DNA, 25 bp, Homo sapien
tgcttcccgggttcaagcaattctc

SEQ ID NO: 939153 - DNA, 25 bp, Homo sapien
tcttggtaccctgcaacctctgctt

SEQ ID NO: 939154 - DNA, 25 bp, Homo sapien
tatgcatttcgaatacataaaatta

SEQ ID NO: 939155 - DNA, 25 bp, Homo sapien
atgcatttcgaatacataaaattag

SEQ ID NO: 939156 - DNA, 25 bp, Homo sapien
ccaatgacaaaatatgacgagctct

SEQ ID NO: 939157 - DNA, 25 bp, Homo sapien
agccgttggcactcctcaggtacag

SEQ ID NO: 939158 - DNA, 25 bp, Homo sapien
gacaggaaacaaccttagcgacagg

SEQ ID NO: 939159 - DNA, 25 bp, Homo sapien
gacgagctcttctcacaaccggaga

SEQ ID NO: 939160 - DNA, 25 bp, Homo sapien
gaggatccttagaacctatgttgag

SEQ ID NO: 939161 - DNA, 25 bp, Homo sapien
tgattctggtttgggcgatttctcc

SEQ ID NO: 939162 - DNA, 25 bp, Homo sapien
caggtatactttttgcaggtgctgg

SEQ ID NO: 939163 - DNA, 25 bp, Homo sapien
cagtcaaatgtggtgtagggttaaa

SEQ ID NO: 939164 - DNA, 25 bp, Homo sapien
gtttcccagtcacggtctcttgagg

SEQ ID NO: 939165 - DNA, 25 bp, Homo sapien
tctcttgaggagttgtaggctgtga

SEQ ID NO: 939166 - DNA, 25 bp, Homo sapien
gatgcctggctgaagattgatgctc

SEQ ID NO: 939167 - DNA, 25 bp, Homo sapien
tggctgaagattgatgctccaaacc

SEQ ID NO: 939168 - DNA, 25 bp, Homo sapien
gacccttttggcattggcttggcat

SEQ ID NO: 939169 - DNA, 25 bp, Homo sapien
caggtcgaggtatggctttagaatc

SEQ ID NO: 939170 - DNA, 25 bp, Homo sapien
ggcttggcatctggtttaggactca

SEQ ID NO: 939171 - DNA, 25 bp, Homo sapien
tttttgaatctgatgcaggtcgagg

SEQ ID NO: 939172 - DNA, 25 bp, Homo sapien
tacaaggtcagtggttggctttacc

SEQ ID NO: 939173 - DNA, 25 bp, Homo sapien
gatgatttgctcactgctgatgtag

SEQ ID NO: 939174 - DNA, 25 bp, Homo sapien
gagatcctgttttggtgcagcatcc

SEQ ID NO: 939175 - DNA, 25 bp, Homo sapien
tactttggagcttggaatatcaggt

SEQ ID NO: 939176 - DNA, 25 bp, Homo sapien
cagtggtattgcaaagaggacagat

SEQ ID NO: 939177 - DNA, 25 bp, Homo sapien
gacagtggtttgacactcagtgcat

SEQ ID NO: 939178 - DNA, 25 bp, Homo sapien
ctcagtgcatgtgttaaaattggcc

SEQ ID NO: 939179 - DNA, 25 bp, Homo sapien
taaatgaggattgggattaaaacca

SEQ ID NO: 939180 - DNA, 25 bp, Homo sapien
tttgtagattgctgagccgagggct

SEQ ID NO: 939181 - DNA, 25 bp, Homo sapien
gttttgtagattgctgagccgaggg

SEQ ID NO: 939182 - DNA, 25 bp, Homo sapien
ttttgtagattgctgagccgagggc

SEQ ID NO: 939183 - DNA, 25 bp, Homo sapien
ccaggctgttgaggtgagggctttg

SEQ ID NO: 939184 - DNA, 25 bp, Homo sapien
tttgttgagccaggctgttgagatg

SEQ ID NO: 939185 - DNA, 25 bp, Homo sapien
ttgagctgagggttttgctgagcca

SEQ ID NO: 939186 - DNA, 25 bp, Homo sapien
gagccaggctgttgagatgggggtt

SEQ ID NO: 939187 - DNA, 25 bp, Homo sapien
tgaaggaggctttgttgggccagtc

SEQ ID NO: 939188 - DNA, 25 bp, Homo sapien
ccgggtcctgcctgttgagctggaa

SEQ ID NO: 939189 - DNA, 25 bp, Homo sapien
ctgttgagctggaatctttcctggc

SEQ ID NO: 939190 - DNA, 25 bp, Homo sapien
gcagaagtctttccgggtcctgcct

SEQ ID NO: 939191 - DNA, 25 bp, Homo sapien
ccaggttgttgagctaggggttttg

SEQ ID NO: 939192 - DNA, 25 bp, Homo sapien
caggttgttgagctaggggttttgg

SEQ ID NO: 939193 - DNA, 25 bp, Homo sapien
tttgtaggcccaggtgccttagctg

SEQ ID NO: 939194 - DNA, 25 bp, Homo sapien
ggtgccttagctggagactgtagcc

SEQ ID NO: 939195 - DNA, 25 bp, Homo sapien
aggctgctccgatgaaggcttctct

SEQ ID NO: 939196 - DNA, 25 bp, Homo sapien
aggctgagctaaagcctttggccca

SEQ ID NO: 939197 - DNA, 25 bp, Homo sapien
tgagctaaagcctttggcccaggct

SEQ ID NO: 939198 - DNA, 25 bp, Homo sapien
ggctgctccgatgaaggcttctctg

SEQ ID NO: 939199 - DNA, 25 bp, Homo sapien
tattgatttgggagtgccatcctgc

SEQ ID NO: 939200 - DNA, 25 bp, Homo sapien
aggcttagcaggaccaagaggctga

SEQ ID NO: 939201 - DNA, 25 bp, Homo sapien
tcactgtccctggttgttgagccaa

SEQ ID NO: 939202 - DNA, 25 bp, Homo sapien
cctggatgcatctcgttgaagtggc

SEQ ID NO: 939203 - DNA, 25 bp, Homo sapien
taggaatcggcttgggtggctgttg

SEQ ID NO: 939204 - DNA, 25 bp, Homo sapien
ctgttgttgtaaaggaggttttatg

SEQ ID NO: 939205 - DNA, 25 bp, Homo sapien
cttgctgcttaggaatcggcttggg

SEQ ID NO: 939206 - DNA, 25 bp, Homo sapien
aggaggttttatgattccttcaggt

SEQ ID NO: 939207 - DNA, 25 bp, Homo sapien
gtttcttcctgggatgcctcagagt

SEQ ID NO: 939208 - DNA, 25 bp, Homo sapien
ttggtggtttcttcctgggatgcct

SEQ ID NO: 939209 - DNA, 25 bp, Homo sapien
gtggtttcttcctgggatgcctcag

SEQ ID NO: 939210 - DNA, 25 bp, Homo sapien
cttggtggtttcttcctgggatgcc

SEQ ID NO: 939211 - DNA, 25 bp, Homo sapien
ctgatatcaaatcaaaagggttgaa

SEQ ID NO: 939212 - DNA, 25 bp, Homo sapien
gaatttatttacaacagaggaaaca

SEQ ID NO: 939213 - DNA, 25 bp, Homo sapien
gaggaaacagcacttaaagcgttaa

SEQ ID NO: 939214 - DNA, 25 bp, Homo sapien
gatatcaaatcaaaagggttgaatt

SEQ ID NO: 939215 - DNA, 25 bp, Homo sapien
ccaggcatcatactagacttgtgct

SEQ ID NO: 939216 - DNA, 25 bp, Homo sapien
ctggactttgattctttcaagctaa

SEQ ID NO: 939217 - DNA, 25 bp, Homo sapien
taatagtggaaggactcctcccagg

SEQ ID NO: 939218 - DNA, 25 bp, Homo sapien
cctttaaatcagttctggactttga

SEQ ID NO: 939219 - DNA, 25 bp, Homo sapien
tgctttggaggatgactactatcca

SEQ ID NO: 939220 - DNA, 25 bp, Homo sapien
tgagaccaggttgagctggacgccc

SEQ ID NO: 939221 - DNA, 25 bp, Homo sapien
ttactgagaccaggttgagctggac

SEQ ID NO: 939222 - DNA, 25 bp, Homo sapien
gtcttcctgattgctttggaggatg

SEQ ID NO: 939223 - DNA, 25 bp, Homo sapien
agtgtttgctacactatctcttaat

SEQ ID NO: 939224 - DNA, 25 bp, Homo sapien
tatccatttcctaacacgtccgtgt

SEQ ID NO: 939225 - DNA, 25 bp, Homo sapien
tcacagagaaaaagacccgcaatgg

SEQ ID NO: 939226 - DNA, 25 bp, Homo sapien
ttaaacagagacaggtaaacaccca

SEQ ID NO: 939227 - DNA, 25 bp, Homo sapien
caatggccaagaggtttaaacagag

SEQ ID NO: 939228 - DNA, 25 bp, Homo sapien
atgaacggaggcgacatatatgtac

SEQ ID NO: 939229 - DNA, 25 bp, Homo sapien
taaaatgaacggaggcgacatatat

SEQ ID NO: 939230 - DNA, 25 bp, Homo sapien
ggagaataaaatgaacggaggcgac

SEQ ID NO: 939231 - DNA, 25 bp, Homo sapien
gaataaaatgaacggaggcgacata

SEQ ID NO: 939232 - DNA, 25 bp, Homo sapien
atatatgcccggacatatacatcat

SEQ ID NO: 939233 - DNA, 25 bp, Homo sapien
tgacagcggcgatctgtctcctctc

SEQ ID NO: 939234 - DNA, 25 bp, Homo sapien
ctgtgcatggaaggcgactccgcag

SEQ ID NO: 939235 - DNA, 25 bp, Homo sapien
tcttcgctcagctggctcaaatccg

SEQ ID NO: 939236 - DNA, 25 bp, Homo sapien
ctgcgcccttgacatgacagcggcg

SEQ ID NO: 939237 - DNA, 25 bp, Homo sapien
gaagcagatctgagcggtgccagcc

SEQ ID NO: 939238 - DNA, 25 bp, Homo sapien
acctttgcagaagacacctcccgga

SEQ ID NO: 939239 - DNA, 25 bp, Homo sapien
ctccatgttggacagcgccaggcaa

SEQ ID NO: 939240 - DNA, 25 bp, Homo sapien
ggttagtcccgctcgcaggtaacgc

SEQ ID NO: 939241 - DNA, 25 bp, Homo sapien
gcgcctctcggaacaggtgatgccc

SEQ ID NO: 939242 - DNA, 25 bp, Homo sapien
tcgcccgcgccctctcagtgcgcag

SEQ ID NO: 939243 - DNA, 25 bp, Homo sapien
ggaacaggtgatgcccgcggcccac

SEQ ID NO: 939244 - DNA, 25 bp, Homo sapien
cgcaggcgcctctcggaacaggtga

SEQ ID NO: 939245 - DNA, 25 bp, Homo sapien
cagacatcctgaggaaagatgggcc

SEQ ID NO: 939246 - DNA, 25 bp, Homo sapien
cagttggctttaggtggccaagaag

SEQ ID NO: 939247 - DNA, 25 bp, Homo sapien
gaaagatgggccatctactgccaga

SEQ ID NO: 939248 - DNA, 25 bp, Homo sapien
ggtggccaagaagcagacatcctga

SEQ ID NO: 939249 - DNA, 25 bp, Homo sapien
tacgcaaaatagctaatccagtggg

SEQ ID NO: 939250 - DNA, 25 bp, Homo sapien
taagtaaccagtgtgatgctatcag

SEQ ID NO: 939251 - DNA, 25 bp, Homo sapien
tccagtgggaaatcctattgtctcc

SEQ ID NO: 939252 - DNA, 25 bp, Homo sapien
cagatttaagtgtccagcccatatg

SEQ ID NO: 939253 - DNA, 25 bp, Homo sapien
tgttggatctccattggtgagtact

SEQ ID NO: 939254 - DNA, 25 bp, Homo sapien
gaacttatgatagacctttccaagt

SEQ ID NO: 939255 - DNA, 25 bp, Homo sapien
tataggaacttatgatagacctttc

SEQ ID NO: 939256 - DNA, 25 bp, Homo sapien
tactccaataacttcctttggctga

SEQ ID NO: 939257 - DNA, 25 bp, Homo sapien
aatgggagactcactgaacagtgta

SEQ ID NO: 939258 - DNA, 25 bp, Homo sapien
ctgaaatgggagactcactgaacag

SEQ ID NO: 939259 - DNA, 25 bp, Homo sapien
gaaatgggagactcactgaacagtg

SEQ ID NO: 939260 - DNA, 25 bp, Homo sapien
atgggagactcactgaacagtgtac

SEQ ID NO: 939261 - DNA, 25 bp, Homo sapien
ggctatttctttgactagagaagaa

SEQ ID NO: 939262 - DNA, 25 bp, Homo sapien
gggctatttctttgactagagaaga

SEQ ID NO: 939263 - DNA, 25 bp, Homo sapien
cattttggtgggtctaaagtaggca

SEQ ID NO: 939264 - DNA, 25 bp, Homo sapien
tgaatttgtgaaaaggccaaggtct

SEQ ID NO: 939265 - DNA, 25 bp, Homo sapien
ccctctaacttagtggaactcagct

SEQ ID NO: 939266 - DNA, 25 bp, Homo sapien
ggcacaggcctttggttcttatggt

SEQ ID NO: 939267 - DNA, 25 bp, Homo sapien
gaatcctagcattcgtcccgtgcaa

SEQ ID NO: 939268 - DNA, 25 bp, Homo sapien
ttcgtcccgtgcaatgtgtttcaat

SEQ ID NO: 939269 - DNA, 25 bp, Homo sapien
tacttactgaatcctagcattcgtc

SEQ ID NO: 939270 - DNA, 25 bp, Homo sapien
cctagcattcgtcccgtgcaatgtg

SEQ ID NO: 939271 - DNA, 25 bp, Homo sapien
ttcctttgtcagtgcttcacaactc

SEQ ID NO: 939272 - DNA, 25 bp, Homo sapien
ttttcctttgtcagtgcttcacaac

SEQ ID NO: 939273 - DNA, 25 bp, Homo sapien
tattttcctttgtcagtgcttcaca

SEQ ID NO: 939274 - DNA, 25 bp, Homo sapien
cctttgtcagtgcttcacaactcat

SEQ ID NO: 939275 - DNA, 25 bp, Homo sapien
atatactcctgaggatccaacaaca

SEQ ID NO: 939276 - DNA, 25 bp, Homo sapien
tatatactcctgaggatccaacaac

SEQ ID NO: 939277 - DNA, 25 bp, Homo sapien
tttatatactcctgaggatccaaca

SEQ ID NO: 939278 - DNA, 25 bp, Homo sapien
ctctttatatactcctgaggatcca

SEQ ID NO: 939279 - DNA, 25 bp, Homo sapien
gggaatctaggacaatagttctttg

SEQ ID NO: 939280 - DNA, 25 bp, Homo sapien
tgccaaatggcataaatcgagtgaa

SEQ ID NO: 939281 - DNA, 25 bp, Homo sapien
caatagttctttgtctgcgatacag

SEQ ID NO: 939282 - DNA, 25 bp, Homo sapien
tctgcgatacagatctcttgttgcc

SEQ ID NO: 939283 - DNA, 25 bp, Homo sapien
tactatctctgtggcaagtagagct

SEQ ID NO: 939284 - DNA, 25 bp, Homo sapien
tttacttaggatgtatgcagcttaa

SEQ ID NO: 939285 - DNA, 25 bp, Homo sapien
tatttaactctaatgctactatctc

SEQ ID NO: 939286 - DNA, 25 bp, Homo sapien
gtcagggatttaacatgatgaatct

SEQ ID NO: 939287 - DNA, 25 bp, Homo sapien
tgcccggtattttctgactcagaat

SEQ ID NO: 939288 - DNA, 25 bp, Homo sapien
tctgactcagaatcccgcttcctaa

SEQ ID NO: 939289 - DNA, 25 bp, Homo sapien
tcagaatcccgcttcctaaattgtc

SEQ ID NO: 939290 - DNA, 25 bp, Homo sapien
gccatctgcccggtattttctgact

SEQ ID NO: 939291 - DNA, 25 bp, Homo sapien
caggtgtaataagcaagacttccag

SEQ ID NO: 939292 - DNA, 25 bp, Homo sapien
tagtgctgagcacatgcaactccac

SEQ ID NO: 939293 - DNA, 25 bp, Homo sapien
acagtgccctttgcggagagccaag

SEQ ID NO: 939294 - DNA, 25 bp, Homo sapien
tctgtctgtgtaagagagcacccct

SEQ ID NO: 939295 - DNA, 25 bp, Homo sapien
ttctctttactgccctgctcttgtc

SEQ ID NO: 939296 - DNA, 25 bp, Homo sapien
ctcggttcacaaggtctttctcttt

SEQ ID NO: 939297 - DNA, 25 bp, Homo sapien
tctctttactgccctgctcttgtct

SEQ ID NO: 939298 - DNA, 25 bp, Homo sapien
tctttactgccctgctcttgtctct

SEQ ID NO: 939299 - DNA, 25 bp, Homo sapien
ggcaactaagggctgaacatcttca

SEQ ID NO: 939300 - DNA, 25 bp, Homo sapien
ttgccatggcaactaagggctgaac

SEQ ID NO: 939301 - DNA, 25 bp, Homo sapien
tgagtagttgttatccaacccttct

SEQ ID NO: 939302 - DNA, 25 bp, Homo sapien
acattcccagtgtaatgagtagttg

SEQ ID NO: 939303 - DNA, 25 bp, Homo sapien
ctttgtttttgctattacgtgctgc

SEQ ID NO: 939304 - DNA, 25 bp, Homo sapien
gctttgtttttgctattacgtgctg

SEQ ID NO: 939305 - DNA, 25 bp, Homo sapien
tgctttgtttttgctattacgtgct

SEQ ID NO: 939306 - DNA, 25 bp, Homo sapien
tgagtcatcaagatcttgagagaaa

SEQ ID NO: 939307 - DNA, 25 bp, Homo sapien
gggttgagtcatcaagatcttgaga

SEQ ID NO: 939308 - DNA, 25 bp, Homo sapien
tgggggttgagtcatcaagatcttg

SEQ ID NO: 939309 - DNA, 25 bp, Homo sapien
ttttgggggttgagtcatcaagatc

SEQ ID NO: 939310 - DNA, 25 bp, Homo sapien
tggcagatccacgttgtagtcaaag

SEQ ID NO: 939311 - DNA, 25 bp, Homo sapien
gctacaggtgtcacaggtcaattca

SEQ ID NO: 939312 - DNA, 25 bp, Homo sapien
taatggtacatagcgcgtagtggca

SEQ ID NO: 939313 - DNA, 25 bp, Homo sapien
gacacactgttaatggtccctgcag

SEQ ID NO: 939314 - DNA, 25 bp, Homo sapien
tatctaagtatgtgccctccctgag

SEQ ID NO: 939315 - DNA, 25 bp, Homo sapien
ttcagtactgccataaacaggcggg

SEQ ID NO: 939316 - DNA, 25 bp, Homo sapien
tcagacataaactttgtaaggcccc

SEQ ID NO: 939317 - DNA, 25 bp, Homo sapien
caaattgtggacttgggccctcaaa

SEQ ID NO: 939318 - DNA, 25 bp, Homo sapien
tctgcaaatgaacttgatgtatcca

SEQ ID NO: 939319 - DNA, 25 bp, Homo sapien
cacaaataaaacacggttgttatag

SEQ ID NO: 939320 - DNA, 25 bp, Homo sapien
taaagtatgatacaaggattaacat

SEQ ID NO: 939321 - DNA, 25 bp, Homo sapien
tattttagatttcagcgaagattat

SEQ ID NO: 939322 - DNA, 25 bp, Homo sapien
cctttcatgggttacagcactcaca

SEQ ID NO: 939323 - DNA, 25 bp, Homo sapien
cctgctacttaacactcatggctta

SEQ ID NO: 939324 - DNA, 25 bp, Homo sapien
catgagaatgccaaagtatcttgta

SEQ ID NO: 939325 - DNA, 25 bp, Homo sapien
gaatattttacgaagggcacaagcc

SEQ ID NO: 939326 - DNA, 25 bp, Homo sapien
tcctctttctatctgtgcaccatac

SEQ ID NO: 939327 - DNA, 25 bp, Homo sapien
gggttggcatacttccacttggagg

SEQ ID NO: 939328 - DNA, 25 bp, Homo sapien
tgtgcctgggcaggcggtaatgctc

SEQ ID NO: 939329 - DNA, 25 bp, Homo sapien
tgctcaggtttggaacggagcttct

SEQ ID NO: 939330 - DNA, 25 bp, Homo sapien
tataaccgatcagctgcaagaattc

SEQ ID NO: 939331 - DNA, 25 bp, Homo sapien
tgctccctgcgagatgctactctga

SEQ ID NO: 939332 - DNA, 25 bp, Homo sapien
ggcaaaaataggtcccagcatctga

SEQ ID NO: 939333 - DNA, 25 bp, Homo sapien
tacggaccgtatggacaaagctatg

SEQ ID NO: 939334 - DNA, 25 bp, Homo sapien
tgtcagtttacttgggtacctccaa

SEQ ID NO: 939335 - DNA, 25 bp, Homo sapien
aaagttagaggtatcttacatggac

SEQ ID NO: 939336 - DNA, 25 bp, Homo sapien
ttttcatgctcggtctggagggcca

SEQ ID NO: 939337 - DNA, 25 bp, Homo sapien
catgttagagatagtgcctctcaga

SEQ ID NO: 939338 - DNA, 25 bp, Homo sapien
ctttgttaggttgaggtgactttct

SEQ ID NO: 939339 - DNA, 25 bp, Homo sapien
agcctttgttaggttgaggtgactt

SEQ ID NO: 939340 - DNA, 25 bp, Homo sapien
aactttcgcttgtaaagatcgtggg

SEQ ID NO: 939341 - DNA, 25 bp, Homo sapien
tactgttgttctctatgccataagc

SEQ ID NO: 939342 - DNA, 25 bp, Homo sapien
ggtacattccagcaaagtactgttg

SEQ ID NO: 939343 - DNA, 25 bp, Homo sapien
gccataagccagatgttcttcagtc

SEQ ID NO: 939344 - DNA, 25 bp, Homo sapien
ctacaacaggaacattaatgccatc

SEQ ID NO: 939345 - DNA, 25 bp, Homo sapien
tacaacaggaacattaatgccatct

SEQ ID NO: 939346 - DNA, 25 bp, Homo sapien
acaacaggaacattaatgccatctt

SEQ ID NO: 939347 - DNA, 25 bp, Homo sapien
ttccatgtcgaacatcttgtctccg

SEQ ID NO: 939348 - DNA, 25 bp, Homo sapien
catgtcgaacatcttgtctccggaa

SEQ ID NO: 939349 - DNA, 25 bp, Homo sapien
tcgaacatcttgtctccggaaacgc

SEQ ID NO: 939350 - DNA, 25 bp, Homo sapien
gcatttccatgtcgaacatcttgtc

SEQ ID NO: 939351 - DNA, 25 bp, Homo sapien
taataccgggagcaggatatgccat

SEQ ID NO: 939352 - DNA, 25 bp, Homo sapien
gcagaagcagatccaatatacagct

SEQ ID NO: 939353 - DNA, 25 bp, Homo sapien
cagtgatggaatctgacttgagcca

SEQ ID NO: 939354 - DNA, 25 bp, Homo sapien
cagcagtcagcacaagcacttccat

SEQ ID NO: 939355 - DNA, 25 bp, Homo sapien
tccatagaaataataggaactggat

SEQ ID NO: 939356 - DNA, 25 bp, Homo sapien
tctccatagaaataataggaactgg

SEQ ID NO: 939357 - DNA, 25 bp, Homo sapien
ccgctttgaagaaatctccatagaa

SEQ ID NO: 939358 - DNA, 25 bp, Homo sapien
aatctccatagaaataataggaact

SEQ ID NO: 939359 - DNA, 25 bp, Homo sapien
tgtaatgcataaatttggtctgtat

SEQ ID NO: 939360 - DNA, 25 bp, Homo sapien
agttgtaatgcataaatttggtctg

SEQ ID NO: 939361 - DNA, 25 bp, Homo sapien
gtagttgtaatgcataaatttggtc

SEQ ID NO: 939362 - DNA, 25 bp, Homo sapien
ttgtagttgtaatgcataaatttgg

SEQ ID NO: 939363 - DNA, 25 bp, Homo sapien
gttgtaaattgtgattactttcagc

SEQ ID NO: 939364 - DNA, 25 bp, Homo sapien
tttcttggttgtaaattgtgattac

SEQ ID NO: 939365 - DNA, 25 bp, Homo sapien
gtaaattgtgattactttcagcaca

SEQ ID NO: 939366 - DNA, 25 bp, Homo sapien
tcttggttgtaaattgtgattactt

SEQ ID NO: 939367 - DNA, 25 bp, Homo sapien
tggcctggtacattagtggatgact

SEQ ID NO: 939368 - DNA, 25 bp, Homo sapien
aagacgtcatattggccatcctcag

SEQ ID NO: 939369 - DNA, 25 bp, Homo sapien
gcttccactcgatctactgctattt

SEQ ID NO: 939370 - DNA, 25 bp, Homo sapien
gatggcatcatcaggatagtccttg

SEQ ID NO: 939371 - DNA, 25 bp, Homo sapien
gaaaaacaagtggatcagataattc

SEQ ID NO: 939372 - DNA, 25 bp, Homo sapien
ctgaaaaacaagtggatcagataat

SEQ ID NO: 939373 - DNA, 25 bp, Homo sapien
aaaacaagtggatcagataattctt

SEQ ID NO: 939374 - DNA, 25 bp, Homo sapien
caagtggatcagataattctttttg

SEQ ID NO: 939375 - DNA, 25 bp, Homo sapien
tgtgatagacacatatagcatgccc

SEQ ID NO: 939376 - DNA, 25 bp, Homo sapien
gaaggctgcccgaatgctagacatg

SEQ ID NO: 939377 - DNA, 25 bp, Homo sapien
tgcatatggtccgttgaaggctgcc

SEQ ID NO: 939378 - DNA, 25 bp, Homo sapien
caggtccttccttatgtgcatatgg

SEQ ID NO: 939379 - DNA, 25 bp, Homo sapien
cttaactgcctacttaatacacttg

SEQ ID NO: 939380 - DNA, 25 bp, Homo sapien
cattttcttaactgcctacttaata

SEQ ID NO: 939381 - DNA, 25 bp, Homo sapien
actgcctacttaatacacttgaaga

SEQ ID NO: 939382 - DNA, 25 bp, Homo sapien
cctacttaatacacttgaagatgac

SEQ ID NO: 939383 - DNA, 25 bp, Homo sapien
tgttaaagagtccaaatatcactgg

SEQ ID NO: 939384 - DNA, 25 bp, Homo sapien
tggattcttatgatctctggtaggt

SEQ ID NO: 939385 - DNA, 25 bp, Homo sapien
atctctggtaggtagcaaaaaaacg

SEQ ID NO: 939386 - DNA, 25 bp, Homo sapien
gtgttaaagagtccaaatatcactg

SEQ ID NO: 939387 - DNA, 25 bp, Homo sapien
tctcgcttttaggaaagtgctccac

SEQ ID NO: 939388 - DNA, 25 bp, Homo sapien
acttattcaccagtattctctgccc

SEQ ID NO: 939389 - DNA, 25 bp, Homo sapien
tcattcctggtactgagcaaacgag

SEQ ID NO: 939390 - DNA, 25 bp, Homo sapien
tggtactgagcaaacgagtctcgct

SEQ ID NO: 939391 - DNA, 25 bp, Homo sapien
cttcattgtcaggaatcatgtatga

SEQ ID NO: 939392 - DNA, 25 bp, Homo sapien
gtaaattgcgtgagcattgttttct

SEQ ID NO: 939393 - DNA, 25 bp, Homo sapien
cccgaccctggtgtaaattgcgtga

SEQ ID NO: 939394 - DNA, 25 bp, Homo sapien
acagagtcgcccgaccctggtgtaa

SEQ ID NO: 939395 - DNA, 25 bp, Homo sapien
gaagatcgcagcgtctctgctccag

SEQ ID NO: 939396 - DNA, 25 bp, Homo sapien
tcagtgcggatatgggccagtcgcc

SEQ ID NO: 939397 - DNA, 25 bp, Homo sapien
agtcgccccatgctgcggaagatcg

SEQ ID NO: 939398 - DNA, 25 bp, Homo sapien
tttcaacagacgctcatcgtcatgc

SEQ ID NO: 939399 - DNA, 25 bp, Homo sapien
atatttcaacatcccggttcacact

SEQ ID NO: 939400 - DNA, 25 bp, Homo sapien
gttcacactcacattctgcttagga

SEQ ID NO: 939401 - DNA, 25 bp, Homo sapien
cggttcacactcacattctgcttag

SEQ ID NO: 939402 - DNA, 25 bp, Homo sapien
tcacactcacattctgcttaggatg

SEQ ID NO: 939403 - DNA, 25 bp, Homo sapien
gaagaatgtgagattctgaatgtgt

SEQ ID NO: 939404 - DNA, 25 bp, Homo sapien
aggaagaatgtgagattctgaatgt

SEQ ID NO: 939405 - DNA, 25 bp, Homo sapien
tgtgagattctgaatgtgtgatttt

SEQ ID NO: 939406 - DNA, 25 bp, Homo sapien
gaatgtgagattctgaatgtgtgat

SEQ ID NO: 939407 - DNA, 25 bp, Homo sapien
tcacagtcagagtaagttctaccga

SEQ ID NO: 939408 - DNA, 25 bp, Homo sapien
cagtgagtgaatgatctctccaagg

SEQ ID NO: 939409 - DNA, 25 bp, Homo sapien
gttctaccgagcttgccaaattcca

SEQ ID NO: 939410 - DNA, 25 bp, Homo sapien
tctggctcacataggttatcaggtt

SEQ ID NO: 939411 - DNA, 25 bp, Homo sapien
gggtcaaaaggacatctgccccttc

SEQ ID NO: 939412 - DNA, 25 bp, Homo sapien
caattaaagtggagatgaaggagga

SEQ ID NO: 939413 - DNA, 25 bp, Homo sapien
cctctctcagatctgggtgattcca

SEQ ID NO: 939414 - DNA, 25 bp, Homo sapien
gatctgggtgattccaggtgaaaca

SEQ ID NO: 939415 - DNA, 25 bp, Homo sapien
gaagttgattgagtcgacaagaaac

SEQ ID NO: 939416 - DNA, 25 bp, Homo sapien
cagaagaagttgattgagtcgacaa

SEQ ID NO: 939417 - DNA, 25 bp, Homo sapien
gagtcgacaagaaacaatatgcacc

SEQ ID NO: 939418 - DNA, 25 bp, Homo sapien
caactctcagaagaagttgattgag

SEQ ID NO: 939419 - DNA, 25 bp, Homo sapien
cccttcctgatgttcctggccagga

SEQ ID NO: 939420 - DNA, 25 bp, Homo sapien
gatgttcctggccaggaaccctcca

SEQ ID NO: 939421 - DNA, 25 bp, Homo sapien
cttcctgatgttcctggccaggaac

SEQ ID NO: 939422 - DNA, 25 bp, Homo sapien
tcctgatgttcctggccaggaaccc

SEQ ID NO: 939423 - DNA, 25 bp, Homo sapien
cagaacttctatgccccccatgagg

SEQ ID NO: 939424 - DNA, 25 bp, Homo sapien
caggtagaagtatttgaactttagc

SEQ ID NO: 939425 - DNA, 25 bp, Homo sapien
ccttcttagtagcttgtgtcgatga

SEQ ID NO: 939426 - DNA, 25 bp, Homo sapien
cagtacattgtagcaactctccttc

SEQ ID NO: 939427 - DNA, 25 bp, Homo sapien
cttcgaattatatttgcacctgagg

SEQ ID NO: 939428 - DNA, 25 bp, Homo sapien
agtagttaaagcacgggctctctcc

SEQ ID NO: 939429 - DNA, 25 bp, Homo sapien
agcacttcaaatacttcgaattata

SEQ ID NO: 939430 - DNA, 25 bp, Homo sapien
taacagctgaagtagttaaagcacg

SEQ ID NO: 939431 - DNA, 25 bp, Homo sapien
tgatatccaactctgatgaaggcac

SEQ ID NO: 939432 - DNA, 25 bp, Homo sapien
aaggtgtgtcctgttatagtgatgc

SEQ ID NO: 939433 - DNA, 25 bp, Homo sapien
caaaacccgaacataatttgcacat

SEQ ID NO: 939434 - DNA, 25 bp, Homo sapien
ggcacaaactggatcaaaagctcca

SEQ ID NO: 939435 - DNA, 25 bp, Homo sapien
ttttagagctgtactcggccagtgt

SEQ ID NO: 939436 - DNA, 25 bp, Homo sapien
tttagagctgtactcggccagtgta

SEQ ID NO: 939437 - DNA, 25 bp, Homo sapien
ttagagctgtactcggccagtgtat

SEQ ID NO: 939438 - DNA, 25 bp, Homo sapien
cctgtcaggataagactgctttgga

SEQ ID NO: 939439 - DNA, 25 bp, Homo sapien
catattccaactcaacaactctagg

SEQ ID NO: 939440 - DNA, 25 bp, Homo sapien
tctgcactagtatagaccgctcctg

SEQ ID NO: 939441 - DNA, 25 bp, Homo sapien
ctgggttagttcatgctaggtggct

SEQ ID NO: 939442 - DNA, 25 bp, Homo sapien
attaggctgcaactggaccacgaca

SEQ ID NO: 939443 - DNA, 25 bp, Homo sapien
tttctgcatcactactgtcagtatc

SEQ ID NO: 939444 - DNA, 25 bp, Homo sapien
tgtcagtatcttcattgtcgtcttc

SEQ ID NO: 939445 - DNA, 25 bp, Homo sapien
aactggaccacgacatcatgtttat

SEQ ID NO: 939446 - DNA, 25 bp, Homo sapien
attctcattttccatccatttattc

SEQ ID NO: 939447 - DNA, 25 bp, Homo sapien
ctcatggctctattctcattttcca

SEQ ID NO: 939448 - DNA, 25 bp, Homo sapien
tggcctcatggctctattctcattt

SEQ ID NO: 939449 - DNA, 25 bp, Homo sapien
tattctcattttccatccatttatt

SEQ ID NO: 939450 - DNA, 25 bp, Homo sapien
catccagcagcattgtatggagatc

SEQ ID NO: 939451 - DNA, 25 bp, Homo sapien
ttctctccaagctgagggaatatac

SEQ ID NO: 939452 - DNA, 25 bp, Homo sapien
gagggaatatacaaggtccctgcct

SEQ ID NO: 939453 - DNA, 25 bp, Homo sapien
ttgatgttctgttcagattcaagag

SEQ ID NO: 939454 - DNA, 25 bp, Homo sapien
tgtttttggagtcattaagaaccat

SEQ ID NO: 939455 - DNA, 25 bp, Homo sapien
ttgtttttggagtcattaagaacca

SEQ ID NO: 939456 - DNA, 25 bp, Homo sapien
catcaacaacgttgaaagctttacc

SEQ ID NO: 939457 - DNA, 25 bp, Homo sapien
taaaatcatcaacaacgttgaaagc

SEQ ID NO: 939458 - DNA, 25 bp, Homo sapien
tcaacaacgttgaaagctttaccca

SEQ ID NO: 939459 - DNA, 25 bp, Homo sapien
aatcatcaacaacgttgaaagcttt

SEQ ID NO: 939460 - DNA, 25 bp, Homo sapien
cccaagttgacattctaggatatca

SEQ ID NO: 939461 - DNA, 25 bp, Homo sapien
ttacaccatggaggtcggaaaatcc

SEQ ID NO: 939462 - DNA, 25 bp, Homo sapien
tggctctcaatagaactggcatgaa

SEQ ID NO: 939463 - DNA, 25 bp, Homo sapien
ggtttttaaacacatagcagcacag

SEQ ID NO: 939464 - DNA, 25 bp, Homo sapien
ttcttaattctatatccataggaca

SEQ ID NO: 939465 - DNA, 25 bp, Homo sapien
cttttcttaattctatatccatagg

SEQ ID NO: 939466 - DNA, 25 bp, Homo sapien
tttcttaattctatatccataggac

SEQ ID NO: 939467 - DNA, 25 bp, Homo sapien
tcttaattctatatccataggacat

SEQ ID NO: 939468 - DNA, 25 bp, Homo sapien
tttagcatcttactctattattgta

SEQ ID NO: 939469 - DNA, 25 bp, Homo sapien
tacagaatatccaccagttttagca

SEQ ID NO: 939470 - DNA, 25 bp, Homo sapien
gcatcttactctattattgtatcca

SEQ ID NO: 939471 - DNA, 25 bp, Homo sapien
tattacagaatatccaccagtttta

SEQ ID NO: 939472 - DNA, 25 bp, Homo sapien
ctttgggtaaagatacgtgcacgca

SEQ ID NO: 939473 - DNA, 25 bp, Homo sapien
tagcactcgtattcctccaggcctt

SEQ ID NO: 939474 - DNA, 25 bp, Homo sapien
gctttcgatttctacatagagctaa

SEQ ID NO: 939475 - DNA, 25 bp, Homo sapien
tacgtgcacgcaatactgctttcga

SEQ ID NO: 939476 - DNA, 25 bp, Homo sapien
cagagggcataatgtaatctccaag

SEQ ID NO: 939477 - DNA, 25 bp, Homo sapien
gttctagtggtcataaaagtcacaa

SEQ ID NO: 939478 - DNA, 25 bp, Homo sapien
tcacaaaagtcttgcgagtagccat

SEQ ID NO: 939479 - DNA, 25 bp, Homo sapien
aatgctaccagagggcataatgtaa

SEQ ID NO: 939480 - DNA, 25 bp, Homo sapien
tcaagatgtgagtggatgttgagaa

SEQ ID NO: 939481 - DNA, 25 bp, Homo sapien
caagatgtgagtggatgttgagaaa

SEQ ID NO: 939482 - DNA, 25 bp, Homo sapien
gagtggatgttgagaaagggcttgt

SEQ ID NO: 939483 - DNA, 25 bp, Homo sapien
tgtgagtggatgttgagaaagggct

SEQ ID NO: 939484 - DNA, 25 bp, Homo sapien
cttctttcttcttgtccttccccat

SEQ ID NO: 939485 - DNA, 25 bp, Homo sapien
cgttcacttctttcttcttgtcctt

SEQ ID NO: 939486 - DNA, 25 bp, Homo sapien
tcacttctttcttcttgtccttccc

SEQ ID NO: 939487 - DNA, 25 bp, Homo sapien
ttcacttctttcttcttgtccttcc

SEQ ID NO: 939488 - DNA, 25 bp, Homo sapien
ttcagtgtgtaagaaggtgaagtgc

SEQ ID NO: 939489 - DNA, 25 bp, Homo sapien
taacattcagtgtgtaagaaggtga

SEQ ID NO: 939490 - DNA, 25 bp, Homo sapien
tcatataacattcagtgtgtaagaa

SEQ ID NO: 939491 - DNA, 25 bp, Homo sapien
tataacattcagtgtgtaagaaggt

SEQ ID NO: 939492 - DNA, 25 bp, Homo sapien
taagagggcacctgaattttcaaat

SEQ ID NO: 939493 - DNA, 25 bp, Homo sapien
tccaggtgcaggtgatcagattagg

SEQ ID NO: 939494 - DNA, 25 bp, Homo sapien
ttatttagcgctttgttccataaga

SEQ ID NO: 939495 - DNA, 25 bp, Homo sapien
cagccggcaggaagtttatttagcg

SEQ ID NO: 939496 - DNA, 25 bp, Homo sapien
cattctactagacataggatctctt

SEQ ID NO: 939497 - DNA, 25 bp, Homo sapien
agtctctccgtacccagttccccat

SEQ ID NO: 939498 - DNA, 25 bp, Homo sapien
ttattgaagccccaatctcttttct

SEQ ID NO: 939499 - DNA, 25 bp, Homo sapien
catcattctactagacataggatct

SEQ ID NO: 939500 - DNA, 25 bp, Homo sapien
cccgttcagcactatggacagccag

SEQ ID NO: 939501 - DNA, 25 bp, Homo sapien
gttcagcactatggacagccagcca

SEQ ID NO: 939502 - DNA, 25 bp, Homo sapien
tttcccgttcaaatataacagatgc

SEQ ID NO: 939503 - DNA, 25 bp, Homo sapien
ttattccccgttcagcactatggac

SEQ ID NO: 939504 - DNA, 25 bp, Homo sapien
tgtaaggaaaggatttcaccacatg

SEQ ID NO: 939505 - DNA, 25 bp, Homo sapien
gtaaggaaaggatttcaccacatgt

SEQ ID NO: 939506 - DNA, 25 bp, Homo sapien
cttgtaaggaaaggatttcaccaca

SEQ ID NO: 939507 - DNA, 25 bp, Homo sapien
taaggaaaggatttcaccacatgta

SEQ ID NO: 939508 - DNA, 25 bp, Homo sapien
ttgagcctgcagtttcctcctccat

SEQ ID NO: 939509 - DNA, 25 bp, Homo sapien
catggtattcttgtattcattcttt

SEQ ID NO: 939510 - DNA, 25 bp, Homo sapien
ttctttctgctttgtcatggtattc

SEQ ID NO: 939511 - DNA, 25 bp, Homo sapien
tttctgctttgtcatggtattcttg

SEQ ID NO: 939512 - DNA, 25 bp, Homo sapien
tcactctttcccagttctgactttc

SEQ ID NO: 939513 - DNA, 25 bp, Homo sapien
aaagcccctctccattcccatcatt

SEQ ID NO: 939514 - DNA, 25 bp, Homo sapien
ttaaagcccctctccattcccatca

SEQ ID NO: 939515 - DNA, 25 bp, Homo sapien
agcccctctccattcccatcatttc

SEQ ID NO: 939516 - DNA, 25 bp, Homo sapien
taaagcccctctccattcccatcat

SEQ ID NO: 939517 - DNA, 25 bp, Homo sapien
agtaagtaaccccacaggagcaagg

SEQ ID NO: 939518 - DNA, 25 bp, Homo sapien
ggtgggtagtatcagctgtatgacc

SEQ ID NO: 939519 - DNA, 25 bp, Homo sapien
aggtgataatgtgccccgcggatgc

SEQ ID NO: 939520 - DNA, 25 bp, Homo sapien
tatgacctcctgtccaaagctccag

SEQ ID NO: 939521 - DNA, 25 bp, Homo sapien
gaggctttgtcagaaatcgaacgcg

SEQ ID NO: 939522 - DNA, 25 bp, Homo sapien
tataagccgggagcaagaggacatt

SEQ ID NO: 939523 - DNA, 25 bp, Homo sapien
tcgaacgcgttgtcatcagaaagca

SEQ ID NO: 939524 - DNA, 25 bp, Homo sapien
gctcttcagcaactacgccggtaga

SEQ ID NO: 939525 - DNA, 25 bp, Homo sapien
ctatatctatcaccccagcaccaac

SEQ ID NO: 939526 - DNA, 25 bp, Homo sapien
gaacatgtaccttctagtacaatga

SEQ ID NO: 939527 - DNA, 25 bp, Homo sapien
caacaacagcatgtcctgaacatgt

SEQ ID NO: 939528 - DNA, 25 bp, Homo sapien
cagcaccaacaacagcatgtcctga

SEQ ID NO: 939529 - DNA, 25 bp, Homo sapien
ttctaattccatggctatttcctca

SEQ ID NO: 939530 - DNA, 25 bp, Homo sapien
tgattctaattccatggctatttcc

SEQ ID NO: 939531 - DNA, 25 bp, Homo sapien
ctatgattctaattccatggctatt

SEQ ID NO: 939532 - DNA, 25 bp, Homo sapien
ctaattccatggctatttcctcaat

SEQ ID NO: 939533 - DNA, 25 bp, Homo sapien
aaatttaggagccactagacctaga

SEQ ID NO: 939534 - DNA, 25 bp, Homo sapien
aaatgagaaagccataagtgaccca

SEQ ID NO: 939535 - DNA, 25 bp, Homo sapien
gtgacccagtattaagtacttgctt

SEQ ID NO: 939536 - DNA, 25 bp, Homo sapien
tctttcaccgttctttccaagcctg

SEQ ID NO: 939537 - DNA, 25 bp, Homo sapien
tgccagttagcacttgccactgatt

SEQ ID NO: 939538 - DNA, 25 bp, Homo sapien
cacttgccactgattcagagttaga

SEQ ID NO: 939539 - DNA, 25 bp, Homo sapien
ggagaaaggtgtttactgcaaattg

SEQ ID NO: 939540 - DNA, 25 bp, Homo sapien
cagttagcacttgccactgattcag

SEQ ID NO: 939541 - DNA, 25 bp, Homo sapien
gcacctaatgtaggaaaacagaact

SEQ ID NO: 939542 - DNA, 25 bp, Homo sapien
tctgcattagaaccttcattctgtg

SEQ ID NO: 939543 - DNA, 25 bp, Homo sapien
gaaccttcattctgtgttctagatc

SEQ ID NO: 939544 - DNA, 25 bp, Homo sapien
cattagaaccttcattctgtgttct

SEQ ID NO: 939545 - DNA, 25 bp, Homo sapien
tttttctgcattagaaccttcattc

SEQ ID NO: 939546 - DNA, 25 bp, Homo sapien
gatgtccccgcaactgggacttgct

SEQ ID NO: 939547 - DNA, 25 bp, Homo sapien
ggaaggacgagagatgtccccgcaa

SEQ ID NO: 939548 - DNA, 25 bp, Homo sapien
gagatgtccccgcaactgggacttg

SEQ ID NO: 939549 - DNA, 25 bp, Homo sapien
gacgagagatgtccccgcaactggg

SEQ ID NO: 939550 - DNA, 25 bp, Homo sapien
ccgatgcgacggcagctgtttgcgc

SEQ ID NO: 939551 - DNA, 25 bp, Homo sapien
tgccaattccctggggcgtaaggtg

SEQ ID NO: 939552 - DNA, 25 bp, Homo sapien
gccgcctatgctgccaattccctgg

SEQ ID NO: 939553 - DNA, 25 bp, Homo sapien
gacggcagctgtttgcgccgcctat

SEQ ID NO: 939554 - DNA, 25 bp, Homo sapien
gaggctgagcgccgggacgtggtgg

SEQ ID NO: 939555 - DNA, 25 bp, Homo sapien
ggtgctggggctgcaagactttgac

SEQ ID NO: 939556 - DNA, 25 bp, Homo sapien
gtgctggggctgcaagactttgact

SEQ ID NO: 939557 - DNA, 25 bp, Homo sapien
cgccgggacgtggtgggctggtgct

SEQ ID NO: 939558 - DNA, 25 bp, Homo sapien
ggatagattccttaaccccttgctc

SEQ ID NO: 939559 - DNA, 25 bp, Homo sapien
gatagattccttaaccccttgctcc

SEQ ID NO: 939560 - DNA, 25 bp, Homo sapien
aggaaaaatgtatgcctgtttaagg

SEQ ID NO: 939561 - DNA, 25 bp, Homo sapien
tatgcctgtttaaggatagattcct

SEQ ID NO: 939562 - DNA, 25 bp, Homo sapien
tctgccaagttggtacagctgctat

SEQ ID NO: 939563 - DNA, 25 bp, Homo sapien
taagtagacgttcataggaagtcca

SEQ ID NO: 939564 - DNA, 25 bp, Homo sapien
ggtacagctgctataagtaaaattg

SEQ ID NO: 939565 - DNA, 25 bp, Homo sapien
ttttgcaggtgctgcggtgtctgac

SEQ ID NO: 939566 - DNA, 25 bp, Homo sapien
caaagctgagttgtcgtgtgtagga

SEQ ID NO: 939567 - DNA, 25 bp, Homo sapien
cactcatgtatgtgaagacaacact

SEQ ID NO: 939568 - DNA, 25 bp, Homo sapien
tgtgagatggttactggacagagaa

SEQ ID NO: 939569 - DNA, 25 bp, Homo sapien
cactaagtgaaggtgagaggatcca

SEQ ID NO: 939570 - DNA, 25 bp, Homo sapien
cggatggcagatgttgtaagtaaat

SEQ ID NO: 939571 - DNA, 25 bp, Homo sapien
ccatcagccacctgagtatttttca

SEQ ID NO: 939572 - DNA, 25 bp, Homo sapien
gctgaatggagcctatgtaatcgga

SEQ ID NO: 939573 - DNA, 25 bp, Homo sapien
aaatcattgggatgtctaccatcag

SEQ ID NO: 939574 - DNA, 25 bp, Homo sapien
cacagaggtatcaagtgtgtttgga

SEQ ID NO: 939575 - DNA, 25 bp, Homo sapien
gaggtatcaagtgtgtttggataag

SEQ ID NO: 939576 - DNA, 25 bp, Homo sapien
cagcacagaggtatcaagtgtgttt

SEQ ID NO: 939577 - DNA, 25 bp, Homo sapien
cagaggtatcaagtgtgtttggata

SEQ ID NO: 939578 - DNA, 25 bp, Homo sapien
tcaaagaaaaatatgtgtccatttt

SEQ ID NO: 939579 - DNA, 25 bp, Homo sapien
aagaaaaatatgtgtccattttgga

SEQ ID NO: 939580 - DNA, 25 bp, Homo sapien
aaagaaaaatatgtgtccattttgg

SEQ ID NO: 939581 - DNA, 25 bp, Homo sapien
agaaaaatatgtgtccattttggac

SEQ ID NO: 939582 - DNA, 25 bp, Homo sapien
tagatgccgatatggaatttggagt

SEQ ID NO: 939583 - DNA, 25 bp, Homo sapien
agtgtaagatattggttgtgggaaa

SEQ ID NO: 939584 - DNA, 25 bp, Homo sapien
ctctagaaagtagatgccgatatgg

SEQ ID NO: 939585 - DNA, 25 bp, Homo sapien
gaatttggagtgtaagatattggtt

SEQ ID NO: 939586 - DNA, 25 bp, Homo sapien
gagaatgacaatttccagttgcatc

SEQ ID NO: 939587 - DNA, 25 bp, Homo sapien
aatgacaatttccagttgcatccat

SEQ ID NO: 939588 - DNA, 25 bp, Homo sapien
gctgagaatgacaatttccagttgc

SEQ ID NO: 939589 - DNA, 25 bp, Homo sapien
gaatgacaatttccagttgcatcca

SEQ ID NO: 939590 - DNA, 25 bp, Homo sapien
aggtagcctgatgcctctggctttg

SEQ ID NO: 939591 - DNA, 25 bp, Homo sapien
gtagcctgatgcctctggctttgtt

SEQ ID NO: 939592 - DNA, 25 bp, Homo sapien
caggtagcctgatgcctctggcttt

SEQ ID NO: 939593 - DNA, 25 bp, Homo sapien
tcaggtagcctgatgcctctggctt

SEQ ID NO: 939594 - DNA, 25 bp, Homo sapien
tatcattagggatataattaccaga

SEQ ID NO: 939595 - DNA, 25 bp, Homo sapien
tttatcattagggatataattacca

SEQ ID NO: 939596 - DNA, 25 bp, Homo sapien
aatttatcattagggatataattac

SEQ ID NO: 939597 - DNA, 25 bp, Homo sapien
ctaatttatcattagggatataatt

SEQ ID NO: 939598 - DNA, 25 bp, Homo sapien
tcttttctgtagcttcactgtaact

SEQ ID NO: 939599 - DNA, 25 bp, Homo sapien
ttctgtagcttcactgtaactattg

SEQ ID NO: 939600 - DNA, 25 bp, Homo sapien
ctgtaactattgtcttgaaaattca

SEQ ID NO: 939601 - DNA, 25 bp, Homo sapien
aattatcttttctgtagcttcactg

SEQ ID NO: 939602 - DNA, 25 bp, Homo sapien
ggaaagcgtagttcttcttccatgc

SEQ ID NO: 939603 - DNA, 25 bp, Homo sapien
ccggaaagcgtagttcttcttccat

SEQ ID NO: 939604 - DNA, 25 bp, Homo sapien
cggaaagcgtagttcttcttccatg

SEQ ID NO: 939605 - DNA, 25 bp, Homo sapien
gaaagcgtagttcttcttccatgct

SEQ ID NO: 939606 - DNA, 25 bp, Homo sapien
tcaacaggcatgctattagggtcaa

SEQ ID NO: 939607 - DNA, 25 bp, Homo sapien
accacttctgaaggcaaatacaata

SEQ ID NO: 939608 - DNA, 25 bp, Homo sapien
gaaattagtagatggcaacaatgca

SEQ ID NO: 939609 - DNA, 25 bp, Homo sapien
caacaatgcaaattggatacttagc

SEQ ID NO: 939610 - DNA, 25 bp, Homo sapien
cagattaatacaacggtggtgcggg

SEQ ID NO: 939611 - DNA, 25 bp, Homo sapien
gagaagacggaagttgagccttcac

SEQ ID NO: 939612 - DNA, 25 bp, Homo sapien
catattcaagatgaaggtgggtctc

SEQ ID NO: 939613 - DNA, 25 bp, Homo sapien
taggagtctgcctatcaactacatg

SEQ ID NO: 939614 - DNA, 25 bp, Homo sapien
gaaactgtccttactatatgggctg

SEQ ID NO: 939615 - DNA, 25 bp, Homo sapien
cacaggtttagcatagagaaggtcc

SEQ ID NO: 939616 - DNA, 25 bp, Homo sapien
taaaaggtatatacaaggcacaggt

SEQ ID NO: 939617 - DNA, 25 bp, Homo sapien
tacttgaacgtgtaggaagctggtt

SEQ ID NO: 939618 - DNA, 25 bp, Homo sapien
tatcatgcagggattcaagcacgga

SEQ ID NO: 939619 - DNA, 25 bp, Homo sapien
tacatacaaacatgagggccggtag

SEQ ID NO: 939620 - DNA, 25 bp, Homo sapien
tcacctgcgtgggaaaatcttgcct

SEQ ID NO: 939621 - DNA, 25 bp, Homo sapien
catgcttattgaacgggcacgcacc

SEQ ID NO: 939622 - DNA, 25 bp, Homo sapien
cctctcaaattcgtgggtcctcctg

SEQ ID NO: 939623 - DNA, 25 bp, Homo sapien
tcaaattcgtgggtcctcctgtttc

SEQ ID NO: 939624 - DNA, 25 bp, Homo sapien
tcctgggtgccctctcaaattcgtg

SEQ ID NO: 939625 - DNA, 25 bp, Homo sapien
ggtgccctctcaaattcgtgggtcc

SEQ ID NO: 939626 - DNA, 25 bp, Homo sapien
aagagtttgtatgaacccatgttcc

SEQ ID NO: 939627 - DNA, 25 bp, Homo sapien
catgttccaccgcatggcagaggta

SEQ ID NO: 939628 - DNA, 25 bp, Homo sapien
gaatccttctgttgtagactacgta

SEQ ID NO: 939629 - DNA, 25 bp, Homo sapien
gaccttctggctaggtgtcatgcta

SEQ ID NO: 939630 - DNA, 25 bp, Homo sapien
agaccagcgctctctgcgacttcgg

SEQ ID NO: 939631 - DNA, 25 bp, Homo sapien
tttcgcctctggaattgccaataga

SEQ ID NO: 939632 - DNA, 25 bp, Homo sapien
gcgacttcggactgcattccaaaaa

SEQ ID NO: 939633 - DNA, 25 bp, Homo sapien
aaaatgtgctactattctctacacc

SEQ ID NO: 939634 - DNA, 25 bp, Homo sapien
aagccttcaaaaatgctactcccat

SEQ ID NO: 939635 - DNA, 25 bp, Homo sapien
tgctctcactaggtttaaagccttc

SEQ ID NO: 939636 - DNA, 25 bp, Homo sapien
gtcatagctgatgatttgctctcac

SEQ ID NO: 939637 - DNA, 25 bp, Homo sapien
atgctactcccatacaatccctgta

SEQ ID NO: 939638 - DNA, 25 bp, Homo sapien
gacttgtctcttgcataatctgcta

SEQ ID NO: 939639 - DNA, 25 bp, Homo sapien
tcagataagaggagtcacgtaacta

SEQ ID NO: 939640 - DNA, 25 bp, Homo sapien
tatcaacagccatgtctcctaggtc

SEQ ID NO: 939641 - DNA, 25 bp, Homo sapien
taggaggagacctttcattcaatct

SEQ ID NO: 939642 - DNA, 25 bp, Homo sapien
tataacttcttggtaaatattcttg

SEQ ID NO: 939643 - DNA, 25 bp, Homo sapien
ttcttggtaaatattcttgccgcat

SEQ ID NO: 939644 - DNA, 25 bp, Homo sapien
acttcttggtaaatattcttgccgc

SEQ ID NO: 939645 - DNA, 25 bp, Homo sapien
taacttcttggtaaatattcttgcc

SEQ ID NO: 939646 - DNA, 25 bp, Homo sapien
taatatgcttcgtatagggcaggct

SEQ ID NO: 939647 - DNA, 25 bp, Homo sapien
tgcagtagagtcaccagtatcttac

SEQ ID NO: 939648 - DNA, 25 bp, Homo sapien
ggttaaacagtcatagggccaatat

SEQ ID NO: 939649 - DNA, 25 bp, Homo sapien
taagatgtctttggtgctgggaagt

SEQ ID NO: 939650 - DNA, 25 bp, Homo sapien
tggtagtaggattccccaaacaatc

SEQ ID NO: 939651 - DNA, 25 bp, Homo sapien
catggttacccgtctcctggtagta

SEQ ID NO: 939652 - DNA, 25 bp, Homo sapien
tcccgtgagcattcgtaaatcaaat

SEQ ID NO: 939653 - DNA, 25 bp, Homo sapien
agcccatccagcttatgccaaaggg

SEQ ID NO: 939654 - DNA, 25 bp, Homo sapien
aacagtgagtcagtgggtctccatt

SEQ ID NO: 939655 - DNA, 25 bp, Homo sapien
tcttatatcttgtcgtcttgtgcgt

SEQ ID NO: 939656 - DNA, 25 bp, Homo sapien
tttcttatatcttgtcgtcttgtgc

SEQ ID NO: 939657 - DNA, 25 bp, Homo sapien
tctgaacagtgagtcagtgggtctc

SEQ ID NO: 939658 - DNA, 25 bp, Homo sapien
agcaattacatttaaaaggtgttat

SEQ ID NO: 939659 - DNA, 25 bp, Homo sapien
tacatttaaaaggtgttattgtatc

SEQ ID NO: 939660 - DNA, 25 bp, Homo sapien
catttaaaaggtgttattgtatcct

SEQ ID NO: 939661 - DNA, 25 bp, Homo sapien
ctgaagcaattacatttaaaaggtg

SEQ ID NO: 939662 - DNA, 25 bp, Homo sapien
gagatttaagtaggcattagggcca

SEQ ID NO: 939663 - DNA, 25 bp, Homo sapien
tacaaatgttgtaggacatacctca

SEQ ID NO: 939664 - DNA, 25 bp, Homo sapien
cacggtgtcgggctgaattccacat

SEQ ID NO: 939665 - DNA, 25 bp, Homo sapien
tactgctgtaaagactgcatattgc

SEQ ID NO: 939666 - DNA, 25 bp, Homo sapien
gagaacatgcagaaccatcccaagc

SEQ ID NO: 939667 - DNA, 25 bp, Homo sapien
cagtgggaaaatagcgagaacatgc

SEQ ID NO: 939668 - DNA, 25 bp, Homo sapien
cgaggcaacactcagcacacgcttt

SEQ ID NO: 939669 - DNA, 25 bp, Homo sapien
tatcacaccggtgtaaagggagctg

SEQ ID NO: 939670 - DNA, 25 bp, Homo sapien
gagtttactgctgtgacaaaaacta

SEQ ID NO: 939671 - DNA, 25 bp, Homo sapien
tgtgacaaaaactatcttgtctttt

SEQ ID NO: 939672 - DNA, 25 bp, Homo sapien
aaagagtttactgctgtgacaaaaa

SEQ ID NO: 939673 - DNA, 25 bp, Homo sapien
tgacaaaaactatcttgtcttttaa

SEQ ID NO: 939674 - DNA, 25 bp, Homo sapien
cttagtggaaagctccattgctgaa

SEQ ID NO: 939675 - DNA, 25 bp, Homo sapien
ctgcttagtggaaagctccattgct

SEQ ID NO: 939676 - DNA, 25 bp, Homo sapien
gcttagtggaaagctccattgctga

SEQ ID NO: 939677 - DNA, 25 bp, Homo sapien
tgcttagtggaaagctccattgctg

SEQ ID NO: 939678 - DNA, 25 bp, Homo sapien
tcttctaaatcataccaagtctcct

SEQ ID NO: 939679 - DNA, 25 bp, Homo sapien
ttctaaatcataccaagtctcctta

SEQ ID NO: 939680 - DNA, 25 bp, Homo sapien
aacctcttctaaatcataccaagtc

SEQ ID NO: 939681 - DNA, 25 bp, Homo sapien
agtctccttaggaattgaaactact

SEQ ID NO: 939682 - DNA, 25 bp, Homo sapien
cactggattgtacatggctggatga

SEQ ID NO: 939683 - DNA, 25 bp, Homo sapien
gcaaaggttataacatcatcaggaa

SEQ ID NO: 939684 - DNA, 25 bp, Homo sapien
tattgggcgattgttcataggaaac

SEQ ID NO: 939685 - DNA, 25 bp, Homo sapien
cactcggtctacgacaatttgtgta

SEQ ID NO: 939686 - DNA, 25 bp, Homo sapien
gggactcttccttgataaggcaccc

SEQ ID NO: 939687 - DNA, 25 bp, Homo sapien
tggccgtggataggggactcttcct

SEQ ID NO: 939688 - DNA, 25 bp, Homo sapien
tgataaggcacccattgatagttgg

SEQ ID NO: 939689 - DNA, 25 bp, Homo sapien
cacccattgatagttgggtccatcc

SEQ ID NO: 939690 - DNA, 25 bp, Homo sapien
ctgtgggcatatggaccaaggaaca

SEQ ID NO: 939691 - DNA, 25 bp, Homo sapien
tggaccaaggaacacccttctcaca

SEQ ID NO: 939692 - DNA, 25 bp, Homo sapien
tgggcatatggaccaaggaacaccc

SEQ ID NO: 939693 - DNA, 25 bp, Homo sapien
atggaccaaggaacacccttctcac

SEQ ID NO: 939694 - DNA, 25 bp, Homo sapien
acacacggctgatcccttgaaaatg

SEQ ID NO: 939695 - DNA, 25 bp, Homo sapien
tacacacggctgatcccttgaaaat

SEQ ID NO: 939696 - DNA, 25 bp, Homo sapien
cacacggctgatcccttgaaaatgt

SEQ ID NO: 939697 - DNA, 25 bp, Homo sapien
ccagatgtattttgtccccagattc

SEQ ID NO: 939698 - DNA, 25 bp, Homo sapien
tcccatctgtggaatagagatactg

SEQ ID NO: 939699 - DNA, 25 bp, Homo sapien
taatcatctgggcaaagataggact

SEQ ID NO: 939700 - DNA, 25 bp, Homo sapien
gaaaagtgtagcaaatatcccatct

SEQ ID NO: 939701 - DNA, 25 bp, Homo sapien
ctggaagtcgtaaacactccatata

SEQ ID NO: 939702 - DNA, 25 bp, Homo sapien
ctttaaagttcattaggaatacatc

SEQ ID NO: 939703 - DNA, 25 bp, Homo sapien
ttaaagttcattaggaatacatcct

SEQ ID NO: 939704 - DNA, 25 bp, Homo sapien
tcgtaaacactccatatacaactgg

SEQ ID NO: 939705 - DNA, 25 bp, Homo sapien
aatcagacgagctttgaggaatgtt

SEQ ID NO: 939706 - DNA, 25 bp, Homo sapien
tcagacgagctttgaggaatgttgt

SEQ ID NO: 939707 - DNA, 25 bp, Homo sapien
catttattcaccagacttctgtgcc

SEQ ID NO: 939708 - DNA, 25 bp, Homo sapien
ccatttattcaccagacttctgtgc

SEQ ID NO: 939709 - DNA, 25 bp, Homo sapien
aaaatgacatccttctcagtttttt

SEQ ID NO: 939710 - DNA, 25 bp, Homo sapien
gaaaatgacatccttctcagttttt

SEQ ID NO: 939711 - DNA, 25 bp, Homo sapien
tgaggtgggcactaatgaactttgg

SEQ ID NO: 939712 - DNA, 25 bp, Homo sapien
tctagcgtgagtagcttttccagag

SEQ ID NO: 939713 - DNA, 25 bp, Homo sapien
cttgcatatctgacctattctagcg

SEQ ID NO: 939714 - DNA, 25 bp, Homo sapien
gcattttcacggaagaaaaagtata

SEQ ID NO: 939715 - DNA, 25 bp, Homo sapien
accaaagccatttagcaataactcc

SEQ ID NO: 939716 - DNA, 25 bp, Homo sapien
aaagccatttagcaataactccctc

SEQ ID NO: 939717 - DNA, 25 bp, Homo sapien
ctgctgtactgataggaccaaagcc

SEQ ID NO: 939718 - DNA, 25 bp, Homo sapien
tgctgtactgataggaccaaagcca

SEQ ID NO: 939719 - DNA, 25 bp, Homo sapien
aactttcctcttgaaactgcttctg

SEQ ID NO: 939720 - DNA, 25 bp, Homo sapien
tcttgaaactgcttctgctcctacc

SEQ ID NO: 939721 - DNA, 25 bp, Homo sapien
tgaaactgcttctgctcctaccttt

SEQ ID NO: 939722 - DNA, 25 bp, Homo sapien
aaactttcctcttgaaactgcttct

SEQ ID NO: 939723 - DNA, 25 bp, Homo sapien
ggaggccggtcacaccatggttaca

SEQ ID NO: 939724 - DNA, 25 bp, Homo sapien
ttttgagagccatgtcagggaggcc

SEQ ID NO: 939725 - DNA, 25 bp, Homo sapien
taccctgagcacactaatctgattg

SEQ ID NO: 939726 - DNA, 25 bp, Homo sapien
ttcaatagttgagcaagccacacgc

SEQ ID NO: 939727 - DNA, 25 bp, Homo sapien
agagaacagttttgcatgggataag

SEQ ID NO: 939728 - DNA, 25 bp, Homo sapien
gtaagatttcagcttgggggaagaa

SEQ ID NO: 939729 - DNA, 25 bp, Homo sapien
gagagaacagttttgcatgggataa

SEQ ID NO: 939730 - DNA, 25 bp, Homo sapien
gcttaactgcacaataaatttcaag

SEQ ID NO: 939731 - DNA, 25 bp, Homo sapien
aagagttctctagtaacttaataca

SEQ ID NO: 939732 - DNA, 25 bp, Homo sapien
agtcatattgcatgtactgtaaaag

SEQ ID NO: 939733 - DNA, 25 bp, Homo sapien
tacagttacacatgttacatgtcta

SEQ ID NO: 939734 - DNA, 25 bp, Homo sapien
tcgccccataaaatcagctgcagtt

SEQ ID NO: 939735 - DNA, 25 bp, Homo sapien
ttcggaagatagcaaagtctcgccc

SEQ ID NO: 939736 - DNA, 25 bp, Homo sapien
cattgagccacctggaatcatgctg

SEQ ID NO: 939737 - DNA, 25 bp, Homo sapien
catgctgctctgtcctgattgggtg

SEQ ID NO: 939738 - DNA, 25 bp, Homo sapien
agcagcttagggtcatatggactct

SEQ ID NO: 939739 - DNA, 25 bp, Homo sapien
tagggtcatatggactcttcccacg

SEQ ID NO: 939740 - DNA, 25 bp, Homo sapien
cccacggccgttttcaaaatgtgag

SEQ ID NO: 939741 - DNA, 25 bp, Homo sapien
atatggactcttcccacggccgttt

SEQ ID NO: 939742 - DNA, 25 bp, Homo sapien
cgactgtttttagctttcaagacca

SEQ ID NO: 939743 - DNA, 25 bp, Homo sapien
taaaccattggtgacttcatggcaa

SEQ ID NO: 939744 - DNA, 25 bp, Homo sapien
gaatattcccctggtcatgccatcc

SEQ ID NO: 939745 - DNA, 25 bp, Homo sapien
caaaagacactttgtatgccagtta

SEQ ID NO: 939746 - DNA, 25 bp, Homo sapien
tattggtctccaggcattatatggc

SEQ ID NO: 939747 - DNA, 25 bp, Homo sapien
ctttgatattggtctccaggcatta

SEQ ID NO: 939748 - DNA, 25 bp, Homo sapien
ttttctgtgactaagaatttcccca

SEQ ID NO: 939749 - DNA, 25 bp, Homo sapien
gtctccaggcattatatggcttttc

SEQ ID NO: 939750 - DNA, 25 bp, Homo sapien
aactacaatgtttgatgtgaaaaat

SEQ ID NO: 939751 - DNA, 25 bp, Homo sapien
taactacaatgtttgatgtgaaaaa

SEQ ID NO: 939752 - DNA, 25 bp, Homo sapien
atctctcatcctgtaggagaatcat

SEQ ID NO: 939753 - DNA, 25 bp, Homo sapien
ccccgttccacaggcgtacaagtga

SEQ ID NO: 939754 - DNA, 25 bp, Homo sapien
taggtgcaaattggatgaaaagccc

SEQ ID NO: 939755 - DNA, 25 bp, Homo sapien
ccaatttcaatgtaggtgcaaattg

SEQ ID NO: 939756 - DNA, 25 bp, Homo sapien
caagtgagtctgattatatgcctta

SEQ ID NO: 939757 - DNA, 25 bp, Homo sapien
tactataaatgttcaggtcagttcc

SEQ ID NO: 939758 - DNA, 25 bp, Homo sapien
ctataaatgttcaggtcagttccta

SEQ ID NO: 939759 - DNA, 25 bp, Homo sapien
taaatgttcaggtcagttcctattt

SEQ ID NO: 939760 - DNA, 25 bp, Homo sapien
aatgttcaggtcagttcctattttg

SEQ ID NO: 939761 - DNA, 25 bp, Homo sapien
aattctcccaccattgatatgtgtg

SEQ ID NO: 939762 - DNA, 25 bp, Homo sapien
tttcacaagaatcctgttgagtcag

SEQ ID NO: 939763 - DNA, 25 bp, Homo sapien
tatgtgtgatcaaattcctgcccca

SEQ ID NO: 939764 - DNA, 25 bp, Homo sapien
ctctcttcacaagaaggccctgact

SEQ ID NO: 939765 - DNA, 25 bp, Homo sapien
tctggtgtaagatactggccacaca

SEQ ID NO: 939766 - DNA, 25 bp, Homo sapien
tcttctggtgtaagatactggccac

SEQ ID NO: 939767 - DNA, 25 bp, Homo sapien
tccagcccacttgcattcatctctt

SEQ ID NO: 939768 - DNA, 25 bp, Homo sapien
tggtgtaagatactggccacacaat

SEQ ID NO: 939769 - DNA, 25 bp, Homo sapien
aaaggaaggtatgataactggagct

SEQ ID NO: 939770 - DNA, 25 bp, Homo sapien
ggagctgttggccaagccattgaaa

SEQ ID NO: 939771 - DNA, 25 bp, Homo sapien
gaaaatatgtgatcctttgctccaa

SEQ ID NO: 939772 - DNA, 25 bp, Homo sapien
aaaatccttgatattaaccaggtcg

SEQ ID NO: 939773 - DNA, 25 bp, Homo sapien
ctctcactctcatataatttgcttt

SEQ ID NO: 939774 - DNA, 25 bp, Homo sapien
catataatttgctttagctaacagc

SEQ ID NO: 939775 - DNA, 25 bp, Homo sapien
tcactctcatataatttgctttagc

SEQ ID NO: 939776 - DNA, 25 bp, Homo sapien
tttgctttagctaacagctcttgca

SEQ ID NO: 939777 - DNA, 25 bp, Homo sapien
ctggggacccctcatttgctttagg

SEQ ID NO: 939778 - DNA, 25 bp, Homo sapien
ccctgacaaagattggagagtgttc

SEQ ID NO: 939779 - DNA, 25 bp, Homo sapien
tgccctgacaaagattggagagtgt

SEQ ID NO: 939780 - DNA, 25 bp, Homo sapien
tttgccctgacaaagattggagagt

SEQ ID NO: 939781 - DNA, 25 bp, Homo sapien
tgacaaagattggagagtgttctac

SEQ ID NO: 939782 - DNA, 25 bp, Homo sapien
cagccaatcctttcctgaagaaaca

SEQ ID NO: 939783 - DNA, 25 bp, Homo sapien
gatccagaagaactaataatcaggt

SEQ ID NO: 939784 - DNA, 25 bp, Homo sapien
cagaagaactaataatcaggtctcc

SEQ ID NO: 939785 - DNA, 25 bp, Homo sapien
cagtaagtactcagatccagaagaa

SEQ ID NO: 939786 - DNA, 25 bp, Homo sapien
caataactctggcacaatagagaca

SEQ ID NO: 939787 - DNA, 25 bp, Homo sapien
tataaaaacgcaataactctggcac

SEQ ID NO: 939788 - DNA, 25 bp, Homo sapien
tggaaatataaaaacgcaataactc

SEQ ID NO: 939789 - DNA, 25 bp, Homo sapien
tctggcacaatagagacattcagcc

SEQ ID NO: 939790 - DNA, 25 bp, Homo sapien
acataatcacgtcggtttaccaggt

SEQ ID NO: 939791 - DNA, 25 bp, Homo sapien
gaaagatacacataatcacgtcggt

SEQ ID NO: 939792 - DNA, 25 bp, Homo sapien
caggttaaactaaaggtttgatgat

SEQ ID NO: 939793 - DNA, 25 bp, Homo sapien
caaaaagcgtttaaagcatctcaga

SEQ ID NO: 939794 - DNA, 25 bp, Homo sapien
ttggcacattgttcttcccattctg

SEQ ID NO: 939795 - DNA, 25 bp, Homo sapien
tcttgctgtaagtaatactccccag

SEQ ID NO: 939796 - DNA, 25 bp, Homo sapien
tggcacattgttcttcccattctga

SEQ ID NO: 939797 - DNA, 25 bp, Homo sapien
ttgctgtaagtaatactccccagaa

SEQ ID NO: 939798 - DNA, 25 bp, Homo sapien
cttcctgtattgtgcggccagagaa

SEQ ID NO: 939799 - DNA, 25 bp, Homo sapien
cttccttcctgtattgtgcggccag

SEQ ID NO: 939800 - DNA, 25 bp, Homo sapien
ttccttcctgtattgtgcggccaga

SEQ ID NO: 939801 - DNA, 25 bp, Homo sapien
tccttcctgtattgtgcggccagag

SEQ ID NO: 939802 - DNA, 25 bp, Homo sapien
tacgcatgtagagggagatgacaca

SEQ ID NO: 939803 - DNA, 25 bp, Homo sapien
cactagactggctgacaatgggaga

SEQ ID NO: 939804 - DNA, 25 bp, Homo sapien
gatgacacaagatcccacagacagg

SEQ ID NO: 939805 - DNA, 25 bp, Homo sapien
taagctcctctgatagccggtggca

SEQ ID NO: 939806 - DNA, 25 bp, Homo sapien
aatatgattaactcctgccgtggag

SEQ ID NO: 939807 - DNA, 25 bp, Homo sapien
tgttctaacaattcgagctttcaaa

SEQ ID NO: 939808 - DNA, 25 bp, Homo sapien
ggccagatcactccttactctgaga

SEQ ID NO: 939809 - DNA, 25 bp, Homo sapien
tatttgacaccatacaccataacca

SEQ ID NO: 939810 - DNA, 25 bp, Homo sapien
tcactgccttggctacaaaagcagc

SEQ ID NO: 939811 - DNA, 25 bp, Homo sapien
gacaaaaacgatgttctcccaatgc

SEQ ID NO: 939812 - DNA, 25 bp, Homo sapien
cttgaggacttaagtgacaatgtga

SEQ ID NO: 939813 - DNA, 25 bp, Homo sapien
gattcaaaatctacagtgcattctg

SEQ ID NO: 939814 - DNA, 25 bp, Homo sapien
ggccagatgtgcatttgagatcctc

SEQ ID NO: 939815 - DNA, 25 bp, Homo sapien
ttggccagatgtgcatttgagatcc

SEQ ID NO: 939816 - DNA, 25 bp, Homo sapien
cagatgtgcatttgagatcctccat

SEQ ID NO: 939817 - DNA, 25 bp, Homo sapien
ccagatgtgcatttgagatcctcca

SEQ ID NO: 939818 - DNA, 25 bp, Homo sapien
gaagagtagctcattgcattaggat

SEQ ID NO: 939819 - DNA, 25 bp, Homo sapien
tacatggacgtccagttgacagact

SEQ ID NO: 939820 - DNA, 25 bp, Homo sapien
tgtgtaacagtcatgcctctgagtc

SEQ ID NO: 939821 - DNA, 25 bp, Homo sapien
catgggagtctctggctttgtacag

SEQ ID NO: 939822 - DNA, 25 bp, Homo sapien
tggctactgtgcaagtcaaaatcaa

SEQ ID NO: 939823 - DNA, 25 bp, Homo sapien
gactttgacgatctcagtcccagaa

SEQ ID NO: 939824 - DNA, 25 bp, Homo sapien
caaaatcaaatgactttgacgatct

SEQ ID NO: 939825 - DNA, 25 bp, Homo sapien
acctttgtggctactgtgcaagtca

SEQ ID NO: 939826 - DNA, 25 bp, Homo sapien
gggaccatgtgaggtctgctttagc

SEQ ID NO: 939827 - DNA, 25 bp, Homo sapien
tctgtctacatctgtgtgggaccat

SEQ ID NO: 939828 - DNA, 25 bp, Homo sapien
tgttcattgattgataatgagcagt

SEQ ID NO: 939829 - DNA, 25 bp, Homo sapien
catctgtgtgggaccatgtgaggtc

SEQ ID NO: 939830 - DNA, 25 bp, Homo sapien
ccaagagtgtgcttccaagtggaca

SEQ ID NO: 939831 - DNA, 25 bp, Homo sapien
tgaagccagtacacatggtcagaag

SEQ ID NO: 939832 - DNA, 25 bp, Homo sapien
gaagaactaactccagcataagcag

SEQ ID NO: 939833 - DNA, 25 bp, Homo sapien
aattccaggaggttaggagccagga

SEQ ID NO: 939834 - DNA, 25 bp, Homo sapien
ctgagagtgactggtaggatttcct

SEQ ID NO: 939835 - DNA, 25 bp, Homo sapien
cagcaaaagccgtttgttttatcct

SEQ ID NO: 939836 - DNA, 25 bp, Homo sapien
gcaaaagccgtttgttttatcctga

SEQ ID NO: 939837 - DNA, 25 bp, Homo sapien
tgactggtaggatttcctgggtcac

SEQ ID NO: 939838 - DNA, 25 bp, Homo sapien
ttctgagtaactgctagagtggata

SEQ ID NO: 939839 - DNA, 25 bp, Homo sapien
tgatgtaaatttgaatactcatccg

SEQ ID NO: 939840 - DNA, 25 bp, Homo sapien
ctgctagagtggatagaaagtacat

SEQ ID NO: 939841 - DNA, 25 bp, Homo sapien
tccgaatccagcaatggactcttct

SEQ ID NO: 939842 - DNA, 25 bp, Homo sapien
aacacactccagggtagcaatgaag

SEQ ID NO: 939843 - DNA, 25 bp, Homo sapien
gcaatgaaggggttactgtttatca

SEQ ID NO: 939844 - DNA, 25 bp, Homo sapien
caatgaaggggttactgtttatcat

SEQ ID NO: 939845 - DNA, 25 bp, Homo sapien
agcaatgaaggggttactgtttatc

SEQ ID NO: 939846 - DNA, 25 bp, Homo sapien
tgcggacaaagagccggcatgtgta

SEQ ID NO: 939847 - DNA, 25 bp, Homo sapien
gaagtcccagtaactcccacttgga

SEQ ID NO: 939848 - DNA, 25 bp, Homo sapien
gaatacttgaggtctggaagtccca

SEQ ID NO: 939849 - DNA, 25 bp, Homo sapien
ttattcagtcttgcggacaaagagc

SEQ ID NO: 939850 - DNA, 25 bp, Homo sapien
tttccttacggccatggtgattttc

SEQ ID NO: 939851 - DNA, 25 bp, Homo sapien
cttttccttacggccatggtgattt

SEQ ID NO: 939852 - DNA, 25 bp, Homo sapien
gcagtagagaagagtaaagttcact

SEQ ID NO: 939853 - DNA, 25 bp, Homo sapien
tcagtagagcctaaagcaaaccctg

SEQ ID NO: 939854 - DNA, 25 bp, Homo sapien
aatccacagtatttccttgacgttc

SEQ ID NO: 939855 - DNA, 25 bp, Homo sapien
gataaattgggttggcttcgtgtaa

SEQ ID NO: 939856 - DNA, 25 bp, Homo sapien
tgttataaacgatatacttctttgc

SEQ ID NO: 939857 - DNA, 25 bp, Homo sapien
tataaacgatatacttctttgccct

SEQ ID NO: 939858 - DNA, 25 bp, Homo sapien
ttataaacgatatacttctttgccc

SEQ ID NO: 939859 - DNA, 25 bp, Homo sapien
gttataaacgatatacttctttgcc

SEQ ID NO: 939860 - DNA, 25 bp, Homo sapien
gttttatccgtaccctatgccatgg

SEQ ID NO: 939861 - DNA, 25 bp, Homo sapien
catttcttggtgtaaactctgggtc

SEQ ID NO: 939862 - DNA, 25 bp, Homo sapien
catgttgaccatgtagatgaggcct

SEQ ID NO: 939863 - DNA, 25 bp, Homo sapien
tttggcatgtagactagggcaagcc

SEQ ID NO: 939864 - DNA, 25 bp, Homo sapien
tcaaatgtatggatctgacaaacac

SEQ ID NO: 939865 - DNA, 25 bp, Homo sapien
tgagcgtgcctacttcctggcacca

SEQ ID NO: 939866 - DNA, 25 bp, Homo sapien
cactgattggcttccccacttttaa

SEQ ID NO: 939867 - DNA, 25 bp, Homo sapien
ggatttttacaagccatgagcgtgc

SEQ ID NO: 939868 - DNA, 25 bp, Homo sapien
caatgtgttcagtccaacttgttat

SEQ ID NO: 939869 - DNA, 25 bp, Homo sapien
ttgttattgtaagtacctgggcact

SEQ ID NO: 939870 - DNA, 25 bp, Homo sapien
ttaattcctgagatacaatgtgttc

SEQ ID NO: 939871 - DNA, 25 bp, Homo sapien
tgtgttcagtccaacttgttattgt

SEQ ID NO: 939872 - DNA, 25 bp, Homo sapien
taacttgaccatgatgatatcgaag

SEQ ID NO: 939873 - DNA, 25 bp, Homo sapien
ggctagtattccaactcagtaacac

SEQ ID NO: 939874 - DNA, 25 bp, Homo sapien
gactctagagtctttagcctcatca

SEQ ID NO: 939875 - DNA, 25 bp, Homo sapien
gaaagtatcctccactggctagtat

SEQ ID NO: 939876 - DNA, 25 bp, Homo sapien
gccttgtagcatgtcaagacgagtg

SEQ ID NO: 939877 - DNA, 25 bp, Homo sapien
tgtagcatgtcaagacgagtgtagt

SEQ ID NO: 939878 - DNA, 25 bp, Homo sapien
gcatgtcaagacgagtgtagtatac

SEQ ID NO: 939879 - DNA, 25 bp, Homo sapien
tgtcaagacgagtgtagtatacaat

SEQ ID NO: 939880 - DNA, 25 bp, Homo sapien
taattccctttgttatgttagactg

SEQ ID NO: 939881 - DNA, 25 bp, Homo sapien
ccctttgttatgttagactgtccca

SEQ ID NO: 939882 - DNA, 25 bp, Homo sapien
tatgttagactgtcccatggatggt

SEQ ID NO: 939883 - DNA, 25 bp, Homo sapien
tgatgaataattccctttgttatgt

SEQ ID NO: 939884 - DNA, 25 bp, Homo sapien
tatgagcacatcttgggtaggcagt

SEQ ID NO: 939885 - DNA, 25 bp, Homo sapien
tcccaggtgtactggaaaactcaaa

SEQ ID NO: 939886 - DNA, 25 bp, Homo sapien
tcatgcacagcaattcagtagaact

SEQ ID NO: 939887 - DNA, 25 bp, Homo sapien
cactggaaaccctagtggagaatcc

SEQ ID NO: 939888 - DNA, 25 bp, Homo sapien
cataaccataaccttttatacttct

SEQ ID NO: 939889 - DNA, 25 bp, Homo sapien
ggaaattgctgtatgctttttgaag

SEQ ID NO: 939890 - DNA, 25 bp, Homo sapien
tcctcctgaatgcataccgttttaa

SEQ ID NO: 939891 - DNA, 25 bp, Homo sapien
cgttttggattctgatattctcggg

SEQ ID NO: 939892 - DNA, 25 bp, Homo sapien
tcaggtttttcttgttgtcgttgtc

SEQ ID NO: 939893 - DNA, 25 bp, Homo sapien
caggtttttcttgttgtcgttgtcg

SEQ ID NO: 939894 - DNA, 25 bp, Homo sapien
tgttgtcgttgtcgggggattgtaa

SEQ ID NO: 939895 - DNA, 25 bp, Homo sapien
tcttgttgtcgttgtcgggggattg

SEQ ID NO: 939896 - DNA, 25 bp, Homo sapien
cataactgatgcagttatgacatca

SEQ ID NO: 939897 - DNA, 25 bp, Homo sapien
taactgatgcagttatgacatcaca

SEQ ID NO: 939898 - DNA, 25 bp, Homo sapien
actgatgcagttatgacatcacagg

SEQ ID NO: 939899 - DNA, 25 bp, Homo sapien
tcataactgatgcagttatgacatc

SEQ ID NO: 939900 - DNA, 25 bp, Homo sapien
ttattgagcaaaagaccagatccct

SEQ ID NO: 939901 - DNA, 25 bp, Homo sapien
cacataagtcaggatcttgttgaag

SEQ ID NO: 939902 - DNA, 25 bp, Homo sapien
ccagatccctgagccgcacataagt

SEQ ID NO: 939903 - DNA, 25 bp, Homo sapien
tgagccgcacataagtcaggatctt

SEQ ID NO: 939904 - DNA, 25 bp, Homo sapien
caattgtgatttactgctcccgctt

SEQ ID NO: 939905 - DNA, 25 bp, Homo sapien
gcgatcatagttgattacagcctcg

SEQ ID NO: 939906 - DNA, 25 bp, Homo sapien
tagctgtgattgaatgggtaaacca

SEQ ID NO: 939907 - DNA, 25 bp, Homo sapien
tccaaatgtgctgtgactgcaattg

SEQ ID NO: 939908 - DNA, 25 bp, Homo sapien
agaaggcaccttttcacagggtagc

SEQ ID NO: 939909 - DNA, 25 bp, Homo sapien
tacaataatggcagaaggcaccttt

SEQ ID NO: 939910 - DNA, 25 bp, Homo sapien
ccttttcacagggtagcaggagaca

SEQ ID NO: 939911 - DNA, 25 bp, Homo sapien
aatggcagaaggcaccttttcacag

SEQ ID NO: 939912 - DNA, 25 bp, Homo sapien
cctcttgtgcgatgttggcgttcaa

SEQ ID NO: 939913 - DNA, 25 bp, Homo sapien
tcttgatgtctaatataattccttc

SEQ ID NO: 939914 - DNA, 25 bp, Homo sapien
tccttgagtggctgttgaaagctcc

SEQ ID NO: 939915 - DNA, 25 bp, Homo sapien
tgttggcgttcaaaattgaactcct

SEQ ID NO: 939916 - DNA, 25 bp, Homo sapien
gctattcaatgccaacgattgtcgg

SEQ ID NO: 939917 - DNA, 25 bp, Homo sapien
catgaagaatgactgtgaaactccg

SEQ ID NO: 939918 - DNA, 25 bp, Homo sapien
gaaactccgtttactccaccatcag

SEQ ID NO: 939919 - DNA, 25 bp, Homo sapien
gaagtcattgacacggttacggcat

SEQ ID NO: 939920 - DNA, 25 bp, Homo sapien
ccagattagggataaatgtgagcag

SEQ ID NO: 939921 - DNA, 25 bp, Homo sapien
tgagcagcaagaagcatgttcactt

SEQ ID NO: 939922 - DNA, 25 bp, Homo sapien
tcctttgtccatgcgttgaagtcaa

SEQ ID NO: 939923 - DNA, 25 bp, Homo sapien
caaagggctgttctgttcttaccta

SEQ ID NO: 939924 - DNA, 25 bp, Homo sapien
ccagcggagcactagattcaaggca

SEQ ID NO: 939925 - DNA, 25 bp, Homo sapien
caaacaacattgagagagaggcgtg

SEQ ID NO: 939926 - DNA, 25 bp, Homo sapien
cagatgggttgtaccagggcgcaaa

SEQ ID NO: 939927 - DNA, 25 bp, Homo sapien
gagaggcgtgattaaaacagcaggc

SEQ ID NO: 939928 - DNA, 25 bp, Homo sapien
taactgaacagttgctacatgacaa

SEQ ID NO: 939929 - DNA, 25 bp, Homo sapien
aatcaggccgttggatctattttcc

SEQ ID NO: 939930 - DNA, 25 bp, Homo sapien
tctcaggcaccttaacccgtgaaaa

SEQ ID NO: 939931 - DNA, 25 bp, Homo sapien
tgtgttaaacagtgtgcgactacta

SEQ ID NO: 939932 - DNA, 25 bp, Homo sapien
gatttgcctctagaattctcactct

SEQ ID NO: 939933 - DNA, 25 bp, Homo sapien
gtggatactctaacttcatgtgccc

SEQ ID NO: 939934 - DNA, 25 bp, Homo sapien
catgtgcccaaactggtagtagaaa

SEQ ID NO: 939935 - DNA, 25 bp, Homo sapien
tagactcgtgatagagggacccatc

SEQ ID NO: 939936 - DNA, 25 bp, Homo sapien
gtccaccagtagcattccaagtctt

SEQ ID NO: 939937 - DNA, 25 bp, Homo sapien
cataccaggtgttaaagggccaatc

SEQ ID NO: 939938 - DNA, 25 bp, Homo sapien
gttcaagtaagagaagtccaccagt

SEQ ID NO: 939939 - DNA, 25 bp, Homo sapien
ccaagtcttgtagggcatcatttct

SEQ ID NO: 939940 - DNA, 25 bp, Homo sapien
gccctatttctaccctgagatagca

SEQ ID NO: 939941 - DNA, 25 bp, Homo sapien
gaatgatgaatactctttcctccag

SEQ ID NO: 939942 - DNA, 25 bp, Homo sapien
gtttccaatgccctatacagggatg

SEQ ID NO: 939943 - DNA, 25 bp, Homo sapien
acagtgaatgatgaatactctttcc

SEQ ID NO: 939944 - DNA, 25 bp, Homo sapien
ccactgattttacaagccaagcctg

SEQ ID NO: 939945 - DNA, 25 bp, Homo sapien
tttacaagccaagcctgacacatgt

SEQ ID NO: 939946 - DNA, 25 bp, Homo sapien
actgattttacaagccaagcctgac

SEQ ID NO: 939947 - DNA, 25 bp, Homo sapien
gattttacaagccaagcctgacaca

SEQ ID NO: 939948 - DNA, 25 bp, Homo sapien
atggagtaaagaaaattgttcatat

SEQ ID NO: 939949 - DNA, 25 bp, Homo sapien
ttgttcatatttaggtcacaacaat

SEQ ID NO: 939950 - DNA, 25 bp, Homo sapien
aattgttcatatttaggtcacaaca

SEQ ID NO: 939951 - DNA, 25 bp, Homo sapien
gttcatatttaggtcacaacaatgc

SEQ ID NO: 939952 - DNA, 25 bp, Homo sapien
tttcagttatttctttgatctcttc

SEQ ID NO: 939953 - DNA, 25 bp, Homo sapien
ctagaagcctttcagttatttcttt

SEQ ID NO: 939954 - DNA, 25 bp, Homo sapien
tcagttatttctttgatctcttcta

SEQ ID NO: 939955 - DNA, 25 bp, Homo sapien
agttatttctttgatctcttctaac

SEQ ID NO: 939956 - DNA, 25 bp, Homo sapien
actattgcaagagcaaaacttttcg

SEQ ID NO: 939957 - DNA, 25 bp, Homo sapien
atcatttgtggagaaactctttgcc

SEQ ID NO: 939958 - DNA, 25 bp, Homo sapien
cacaattgcaggatctgtttcttcg

SEQ ID NO: 939959 - DNA, 25 bp, Homo sapien
tcgttttggcattgactatcttttc

SEQ ID NO: 939960 - DNA, 25 bp, Homo sapien
tctctcaggccaatagggctgccgt

SEQ ID NO: 939961 - DNA, 25 bp, Homo sapien
aattcttcgtgtaggtaatgcaagc

SEQ ID NO: 939962 - DNA, 25 bp, Homo sapien
cacagatatgccgttcttggatccc

SEQ ID NO: 939963 - DNA, 25 bp, Homo sapien
tggctggcacgctcttcggagaagt

SEQ ID NO: 939964 - DNA, 25 bp, Homo sapien
gagtggtctttttctttattgaaca

SEQ ID NO: 939965 - DNA, 25 bp, Homo sapien
gtcttccctgttgtcagcatctccg

SEQ ID NO: 939966 - DNA, 25 bp, Homo sapien
tctaaggcttttgatctggtcttcc

SEQ ID NO: 939967 - DNA, 25 bp, Homo sapien
tagttcatccttctaaggcttttga

SEQ ID NO: 939968 - DNA, 25 bp, Homo sapien
gatctcatgaatgaggtactacatg

SEQ ID NO: 939969 - DNA, 25 bp, Homo sapien
acagatctcatgaatgaggtactac

SEQ ID NO: 939970 - DNA, 25 bp, Homo sapien
agatcgaccaaagtgttaactgtca

SEQ ID NO: 939971 - DNA, 25 bp, Homo sapien
caagagatcgaccaaagtgttaact

SEQ ID NO: 939972 - DNA, 25 bp, Homo sapien
ggtactcccatgcaaaatagggttc

SEQ ID NO: 939973 - DNA, 25 bp, Homo sapien
tactcccatgcaaaatagggttcta

SEQ ID NO: 939974 - DNA, 25 bp, Homo sapien
gtactcccatgcaaaatagggttct

SEQ ID NO: 939975 - DNA, 25 bp, Homo sapien
taattgaagcctcgttgaggttaaa

SEQ ID NO: 939976 - DNA, 25 bp, Homo sapien
gttaattgaagcctcgttgaggtta

SEQ ID NO: 939977 - DNA, 25 bp, Homo sapien
ttaattgaagcctcgttgaggttaa

SEQ ID NO: 939978 - DNA, 25 bp, Homo sapien
gatgaaggcaaagaagctggaatac

SEQ ID NO: 939979 - DNA, 25 bp, Homo sapien
ctttcaagacctgatgaaggcaaag

SEQ ID NO: 939980 - DNA, 25 bp, Homo sapien
ctgatgaaggcaaagaagctggaat

SEQ ID NO: 939981 - DNA, 25 bp, Homo sapien
acctgatgaaggcaaagaagctgga

SEQ ID NO: 939982 - DNA, 25 bp, Homo sapien
cataccgttaatacttctgatcctg

SEQ ID NO: 939983 - DNA, 25 bp, Homo sapien
tgcctatattctttggaacagtgct

SEQ ID NO: 939984 - DNA, 25 bp, Homo sapien
gccatcctatccaatcaaatatcag

SEQ ID NO: 939985 - DNA, 25 bp, Homo sapien
cttttggacctttgtactcataccg

SEQ ID NO: 939986 - DNA, 25 bp, Homo sapien
catatgagagccattagagagtgtg

SEQ ID NO: 939987 - DNA, 25 bp, Homo sapien
ccttgaggtgtcagattaacactcc

SEQ ID NO: 939988 - DNA, 25 bp, Homo sapien
tgtttgtgggcacactggacatatg

SEQ ID NO: 939989 - DNA, 25 bp, Homo sapien
gagccattagagagtgtgctctgca

SEQ ID NO: 939990 - DNA, 25 bp, Homo sapien
tttcccattgagctgagacatagga

SEQ ID NO: 939991 - DNA, 25 bp, Homo sapien
tgaccgctctggaatggtttcttct

SEQ ID NO: 939992 - DNA, 25 bp, Homo sapien
ccggtgtgaccgctctggaatggtt

SEQ ID NO: 939993 - DNA, 25 bp, Homo sapien
gagacataggaaaactctgtagtaa

SEQ ID NO: 939994 - DNA, 25 bp, Homo sapien
catcttcaagtgcacaggttcgcat

SEQ ID NO: 939995 - DNA, 25 bp, Homo sapien
aaacttgcatcttcaagtgcacagg

SEQ ID NO: 939996 - DNA, 25 bp, Homo sapien
ttgcatcttcaagtgcacaggttcg

SEQ ID NO: 939997 - DNA, 25 bp, Homo sapien
ctggtagaaacttgcatcttcaagt

SEQ ID NO: 939998 - DNA, 25 bp, Homo sapien
aatcagtggctagttccagacaaaa

SEQ ID NO: 939999 - DNA, 25 bp, Homo sapien
aatgtcactgactctagtatagaaa

SEQ ID NO: 940000 - DNA, 25 bp, Homo sapien
ttaaattatcttaatggactccaaa

SEQ ID NO: 940001 - DNA, 25 bp, Homo sapien
taatttaggatgtttttctactgtc

SEQ ID NO: 940002 - DNA, 25 bp, Homo sapien
tatgtaatatcggtttgacacacca

SEQ ID NO: 940003 - DNA, 25 bp, Homo sapien
tggcataataggtaagaactggaac

SEQ ID NO: 940004 - DNA, 25 bp, Homo sapien
tatctgtcacagtacatcatagcag

SEQ ID NO: 940005 - DNA, 25 bp, Homo sapien
agggtaccagttttaatcatatgaa

SEQ ID NO: 940006 - DNA, 25 bp, Homo sapien
tctttgtctctctacatttgcctaa

SEQ ID NO: 940007 - DNA, 25 bp, Homo sapien
cttagtgtcacccttcaaaagcctc

SEQ ID NO: 940008 - DNA, 25 bp, Homo sapien
ctcctcttcgctttctgtatgcagt

SEQ ID NO: 940009 - DNA, 25 bp, Homo sapien
agtgagaaggcttagtgtcaccctt

SEQ ID NO: 940010 - DNA, 25 bp, Homo sapien
tacgaagtaattccagagtagatac

SEQ ID NO: 940011 - DNA, 25 bp, Homo sapien
tgtacgaagtaattccagagtagat

SEQ ID NO: 940012 - DNA, 25 bp, Homo sapien
tttgtacgaagtaattccagagtag

SEQ ID NO: 940013 - DNA, 25 bp, Homo sapien
ttttgtacgaagtaattccagagta

SEQ ID NO: 940014 - DNA, 25 bp, Homo sapien
ttggaatgtttcattcccaacatcg

SEQ ID NO: 940015 - DNA, 25 bp, Homo sapien
aagcacaaagcatccattcagtctc

SEQ ID NO: 940016 - DNA, 25 bp, Homo sapien
cgtctaataggtcaatataatcttc

SEQ ID NO: 940017 - DNA, 25 bp, Homo sapien
tcccaacatcgtctaataggtcaat

SEQ ID NO: 940018 - DNA, 25 bp, Homo sapien
caagtgaggagtttgatgtaacttt

SEQ ID NO: 940019 - DNA, 25 bp, Homo sapien
cctacaagtgaggagtttgatgtaa

SEQ ID NO: 940020 - DNA, 25 bp, Homo sapien
cagatcctacaagtgaggagtttga

SEQ ID NO: 940021 - DNA, 25 bp, Homo sapien
atcttcagatcctacaagtgaggag

SEQ ID NO: 940022 - DNA, 25 bp, Homo sapien
ttaagcttggagagacatcaacttg

SEQ ID NO: 940023 - DNA, 25 bp, Homo sapien
tggagagacatcaacttgggacatt

SEQ ID NO: 940024 - DNA, 25 bp, Homo sapien
agcttggagagacatcaacttggga

SEQ ID NO: 940025 - DNA, 25 bp, Homo sapien
cttggagagacatcaacttgggaca

SEQ ID NO: 940026 - DNA, 25 bp, Homo sapien
gataaccaagggagtaattgcctgc

SEQ ID NO: 940027 - DNA, 25 bp, Homo sapien
aacacattgaagtgcttccctgcca

SEQ ID NO: 940028 - DNA, 25 bp, Homo sapien
gccatttttcattaagtataccaca

SEQ ID NO: 940029 - DNA, 25 bp, Homo sapien
tgactggcccaaagtgaacacattg

SEQ ID NO: 940030 - DNA, 25 bp, Homo sapien
aagcttttcagaggaatgaaattaa

SEQ ID NO: 940031 - DNA, 25 bp, Homo sapien
agaagcttttcagaggaatgaaatt

SEQ ID NO: 940032 - DNA, 25 bp, Homo sapien
ggagaagcttttcagaggaatgaaa

SEQ ID NO: 940033 - DNA, 25 bp, Homo sapien
gcttttcagaggaatgaaattaaca

SEQ ID NO: 940034 - DNA, 25 bp, Homo sapien
tcgaagtttacccatgtgagctagg

SEQ ID NO: 940035 - DNA, 25 bp, Homo sapien
tacccatgtgagctaggaacttcat

SEQ ID NO: 940036 - DNA, 25 bp, Homo sapien
gctttctcgaagtttacccatgtga

SEQ ID NO: 940037 - DNA, 25 bp, Homo sapien
ctctggctttctcgaagtttaccca

SEQ ID NO: 940038 - DNA, 25 bp, Homo sapien
ggttctgcagggaatacaagcatgg

SEQ ID NO: 940039 - DNA, 25 bp, Homo sapien
cagggagcttttatttatggtggaa

SEQ ID NO: 940040 - DNA, 25 bp, Homo sapien
acaagcatggcaccatcatccttcc

SEQ ID NO: 940041 - DNA, 25 bp, Homo sapien
catccttccacttccggggtggcct

SEQ ID NO: 940042 - DNA, 25 bp, Homo sapien
tacagtcggtagtacccatctgcgg

SEQ ID NO: 940043 - DNA, 25 bp, Homo sapien
ccatctgcggggaatactgaaggag

SEQ ID NO: 940044 - DNA, 25 bp, Homo sapien
tcagcgaatacagtcggtagtaccc

SEQ ID NO: 940045 - DNA, 25 bp, Homo sapien
gggaatactgaaggagataacagtg

SEQ ID NO: 940046 - DNA, 25 bp, Homo sapien
taaatgtaagttcaacctcgggcat

SEQ ID NO: 940047 - DNA, 25 bp, Homo sapien
ttaaatgtaagttcaacctcgggca

SEQ ID NO: 940048 - DNA, 25 bp, Homo sapien
tatttgtcgttttgactgttgatca

SEQ ID NO: 940049 - DNA, 25 bp, Homo sapien
ttatttgtcgttttgactgttgatc

SEQ ID NO: 940050 - DNA, 25 bp, Homo sapien
gatcagcctggatatattcttctca

SEQ ID NO: 940051 - DNA, 25 bp, Homo sapien
ggctgggtaacttagctctgctcca

SEQ ID NO: 940052 - DNA, 25 bp, Homo sapien
cctgttacaggatgctgatctaggc

SEQ ID NO: 940053 - DNA, 25 bp, Homo sapien
ctccttctgggattgatggatcagc

SEQ ID NO: 940054 - DNA, 25 bp, Homo sapien
aggaatgtaccatgataaatgaaga

SEQ ID NO: 940055 - DNA, 25 bp, Homo sapien
taagcttggtccctgagaagtccaa

SEQ ID NO: 940056 - DNA, 25 bp, Homo sapien
catggtgtattgagttagcgctgcc

SEQ ID NO: 940057 - DNA, 25 bp, Homo sapien
tagcgctgccaatttttggaaccaa

SEQ ID NO: 940058 - DNA, 25 bp, Homo sapien
tgagtaggctacagagggttcccac

SEQ ID NO: 940059 - DNA, 25 bp, Homo sapien
tcttcatttccttgtctgccattta

SEQ ID NO: 940060 - DNA, 25 bp, Homo sapien
tctcaaaacaaaagtgttccctgcc

SEQ ID NO: 940061 - DNA, 25 bp, Homo sapien
tgtctgccatttactctcaaaacaa

SEQ ID NO: 940062 - DNA, 25 bp, Homo sapien
actctcaaaacaaaagtgttccctg

SEQ ID NO: 940063 - DNA, 25 bp, Homo sapien
tctgagctttacagcagtccttcat

SEQ ID NO: 940064 - DNA, 25 bp, Homo sapien
cttctgagctttacagcagtccttc

SEQ ID NO: 940065 - DNA, 25 bp, Homo sapien
ttctgagctttacagcagtccttca

SEQ ID NO: 940066 - DNA, 25 bp, Homo sapien
ctgagtacaggtaataagtatcatc

SEQ ID NO: 940067 - DNA, 25 bp, Homo sapien
tatcatcaatggcattgtcatcaat

SEQ ID NO: 940068 - DNA, 25 bp, Homo sapien
acaggtaataagtatcatcaatggc

SEQ ID NO: 940069 - DNA, 25 bp, Homo sapien
cagttactgagtacaggtaataagt

SEQ ID NO: 940070 - DNA, 25 bp, Homo sapien
ctggtttatgtctcctctgttttac

SEQ ID NO: 940071 - DNA, 25 bp, Homo sapien
tcaacaggtcactggctgggccttc

SEQ ID NO: 940072 - DNA, 25 bp, Homo sapien
cctggtttatgtctcctctgtttta

SEQ ID NO: 940073 - DNA, 25 bp, Homo sapien
gccctggtttatgtctcctctgttt

SEQ ID NO: 940074 - DNA, 25 bp, Homo sapien
ttatttgtgagaagtactgaatttt

SEQ ID NO: 940075 - DNA, 25 bp, Homo sapien
cttttatttgtgagaagtactgaat

SEQ ID NO: 940076 - DNA, 25 bp, Homo sapien
atttgtgagaagtactgaattttac

SEQ ID NO: 940077 - DNA, 25 bp, Homo sapien
tttgtgagaagtactgaattttaca

SEQ ID NO: 940078 - DNA, 25 bp, Homo sapien
cagaaggtcttctgaattacttaac

SEQ ID NO: 940079 - DNA, 25 bp, Homo sapien
aactgcaagtggtgggctgacatta

SEQ ID NO: 940080 - DNA, 25 bp, Homo sapien
taaatttccctcttacatagaactg

SEQ ID NO: 940081 - DNA, 25 bp, Homo sapien
ttgtaaaatcctgtgtaaagtgcat

SEQ ID NO: 940082 - DNA, 25 bp, Homo sapien
tatgttttacatccggtaattcacc

SEQ ID NO: 940083 - DNA, 25 bp, Homo sapien
ttcaccatgtcttgtcctttccttc

SEQ ID NO: 940084 - DNA, 25 bp, Homo sapien
tgtaaatatctttgccatctgaact

SEQ ID NO: 940085 - DNA, 25 bp, Homo sapien
tccctgtaggccactgtcttaaatt

SEQ ID NO: 940086 - DNA, 25 bp, Homo sapien
atactggtgtctagactcttgaata

SEQ ID NO: 940087 - DNA, 25 bp, Homo sapien
ctggtgtctagactcttgaatagcc

SEQ ID NO: 940088 - DNA, 25 bp, Homo sapien
ggtgtctagactcttgaatagcccc

SEQ ID NO: 940089 - DNA, 25 bp, Homo sapien
ccaagaaagccaaaggcttcactcc

SEQ ID NO: 940090 - DNA, 25 bp, Homo sapien
catgtgaaagaatttgctgattttt

SEQ ID NO: 940091 - DNA, 25 bp, Homo sapien
ctcatgtgaaagaatttgctgattt

SEQ ID NO: 940092 - DNA, 25 bp, Homo sapien
tcttatgtcttacatacttcctgtg

SEQ ID NO: 940093 - DNA, 25 bp, Homo sapien
tcatgtgaaagaatttgctgatttt

SEQ ID NO: 940094 - DNA, 25 bp, Homo sapien
ttttggatcgcttcttatcatcacc

SEQ ID NO: 940095 - DNA, 25 bp, Homo sapien
aattttggatcgcttcttatcatca

SEQ ID NO: 940096 - DNA, 25 bp, Homo sapien
attttggatcgcttcttatcatcac

SEQ ID NO: 940097 - DNA, 25 bp, Homo sapien
gccactaccctacaagacattttga

SEQ ID NO: 940098 - DNA, 25 bp, Homo sapien
tccacctgtggatcagaatgttaat

SEQ ID NO: 940099 - DNA, 25 bp, Homo sapien
ggacttggtacttgtttgctggaaa

SEQ ID NO: 940100 - DNA, 25 bp, Homo sapien
tatttggcaaagctgcctcaacaac

SEQ ID NO: 940101 - DNA, 25 bp, Homo sapien
ggaaattaaccagttagttatcgca

SEQ ID NO: 940102 - DNA, 25 bp, Homo sapien
agttatcgcatcatttctctggagg

SEQ ID NO: 940103 - DNA, 25 bp, Homo sapien
tattttgtatacacatggccaagga

SEQ ID NO: 940104 - DNA, 25 bp, Homo sapien
taggtgattggcagtacaaatcctc

SEQ ID NO: 940105 - DNA, 25 bp, Homo sapien
ttttccttccagagttggattagat

SEQ ID NO: 940106 - DNA, 25 bp, Homo sapien
gagttttagtcagaagcttattttc

SEQ ID NO: 940107 - DNA, 25 bp, Homo sapien
tagatacagcctatatgtgtgaaac

SEQ ID NO: 940108 - DNA, 25 bp, Homo sapien
tccagagttggattagatacagcct

SEQ ID NO: 940109 - DNA, 25 bp, Homo sapien
cttccttgtccacaagccatgggca

SEQ ID NO: 940110 - DNA, 25 bp, Homo sapien
ccttgtccacaagccatgggcaaat

SEQ ID NO: 940111 - DNA, 25 bp, Homo sapien
agccatgggcaaatgactgatttga

SEQ ID NO: 940112 - DNA, 25 bp, Homo sapien
gccatgggcaaatgactgatttgat

SEQ ID NO: 940113 - DNA, 25 bp, Homo sapien
tattgcccggaccacctagtagatg

SEQ ID NO: 940114 - DNA, 25 bp, Homo sapien
aatatggtcagaggccttattgccc

SEQ ID NO: 940115 - DNA, 25 bp, Homo sapien
taatgggcacaagtgaatacaggag

SEQ ID NO: 940116 - DNA, 25 bp, Homo sapien
ggtgttgcctttgaaccatagtaag

SEQ ID NO: 940117 - DNA, 25 bp, Homo sapien
agcactctgcttaatgtccttgtgg

SEQ ID NO: 940118 - DNA, 25 bp, Homo sapien
gcatagaagttcacaagtgcaggct

SEQ ID NO: 940119 - DNA, 25 bp, Homo sapien
tcaaaaactgccacatgatagtcac

SEQ ID NO: 940120 - DNA, 25 bp, Homo sapien
caaacagtggcattccaagccaagg

SEQ ID NO: 940121 - DNA, 25 bp, Homo sapien
gcccaggagaaaggctgaaggacat

SEQ ID NO: 940122 - DNA, 25 bp, Homo sapien
aggctgaaggacataaagtcaaggt

SEQ ID NO: 940123 - DNA, 25 bp, Homo sapien
agaaaggctgaaggacataaagtca

SEQ ID NO: 940124 - DNA, 25 bp, Homo sapien
ccaggagaaaggctgaaggacataa

SEQ ID NO: 940125 - DNA, 25 bp, Homo sapien
agtccatgagttgttcccttttaat

SEQ ID NO: 940126 - DNA, 25 bp, Homo sapien
tcaacaatatagacacattgaatcc

SEQ ID NO: 940127 - DNA, 25 bp, Homo sapien
tgtcaaggaatgtattccaaagatg

SEQ ID NO: 940128 - DNA, 25 bp, Homo sapien
caaggaatgtattccaaagatgttt

SEQ ID NO: 940129 - DNA, 25 bp, Homo sapien
gacacattgaatccaagaaacactg

SEQ ID NO: 940130 - DNA, 25 bp, Homo sapien
caaaacctatttcggctgtgttcat

SEQ ID NO: 940131 - DNA, 25 bp, Homo sapien
tcatcaaaacctatttcggctgtgt

SEQ ID NO: 940132 - DNA, 25 bp, Homo sapien
acctatttcggctgtgttcatggag

SEQ ID NO: 940133 - DNA, 25 bp, Homo sapien
ttaatcatcaaaacctatttcggct

SEQ ID NO: 940134 - DNA, 25 bp, Homo sapien
ttataatgctgattaagttcaatgc

SEQ ID NO: 940135 - DNA, 25 bp, Homo sapien
cctttctcagtgtctaagacattta

SEQ ID NO: 940136 - DNA, 25 bp, Homo sapien
tttctcagtgtctaagacatttaca

SEQ ID NO: 940137 - DNA, 25 bp, Homo sapien
catttacatagactgttttataatg

SEQ ID NO: 940138 - DNA, 25 bp, Homo sapien
gatttgcagtttgaactatgcagcc

SEQ ID NO: 940139 - DNA, 25 bp, Homo sapien
atttgcagtttgaactatgcagccc

SEQ ID NO: 940140 - DNA, 25 bp, Homo sapien
gcttaaggccgagttcaattcagcc

SEQ ID NO: 940141 - DNA, 25 bp, Homo sapien
acgcttaaggccgagttcaattcag

SEQ ID NO: 940142 - DNA, 25 bp, Homo sapien
gaccacgcttaaggccgagttcaat

SEQ ID NO: 940143 - DNA, 25 bp, Homo sapien
aaggccgagttcaattcagcccaca

SEQ ID NO: 940144 - DNA, 25 bp, Homo sapien
ttaagccaattgcttgagggaaata

SEQ ID NO: 940145 - DNA, 25 bp, Homo sapien
ccttgcatcaacaagtcagtgaaag

SEQ ID NO: 940146 - DNA, 25 bp, Homo sapien
tgagggaaatatactccttgcatca

SEQ ID NO: 940147 - DNA, 25 bp, Homo sapien
tatactccttgcatcaacaagtcag

SEQ ID NO: 940148 - DNA, 25 bp, Homo sapien
tatattgacagtgtgttcatcatcc

SEQ ID NO: 940149 - DNA, 25 bp, Homo sapien
ttttgtctgctatattgacagtgtg

SEQ ID NO: 940150 - DNA, 25 bp, Homo sapien
cgtataatgcctcctcatttttgtc

SEQ ID NO: 940151 - DNA, 25 bp, Homo sapien
caaaactcgtataatgcctcctcat

SEQ ID NO: 940152 - DNA, 25 bp, Homo sapien
taattcacttcatcctgtattttaa

SEQ ID NO: 940153 - DNA, 25 bp, Homo sapien
taagaatcgggatatgaaaagggag

SEQ ID NO: 940154 - DNA, 25 bp, Homo sapien
aataccacaatagcagaacttaaga

SEQ ID NO: 940155 - DNA, 25 bp, Homo sapien
gcagaacttaagaatcgggatatga

SEQ ID NO: 940156 - DNA, 25 bp, Homo sapien
ctgcaaacaccctgagtgccagtgg

SEQ ID NO: 940157 - DNA, 25 bp, Homo sapien
tctgaggctgcaaacaccctgagtg

SEQ ID NO: 940158 - DNA, 25 bp, Homo sapien
gctctgaggctgcaaacaccctgag

SEQ ID NO: 940159 - DNA, 25 bp, Homo sapien
aggctgcaaacaccctgagtgccag

SEQ ID NO: 940160 - DNA, 25 bp, Homo sapien
gatcagggctgttgatggtcggcct

SEQ ID NO: 940161 - DNA, 25 bp, Homo sapien
tctggatcagggctgttgatggtcg

SEQ ID NO: 940162 - DNA, 25 bp, Homo sapien
atcagggctgttgatggtcggcctg

SEQ ID NO: 940163 - DNA, 25 bp, Homo sapien
tggatcagggctgttgatggtcggc

SEQ ID NO: 940164 - DNA, 25 bp, Homo sapien
gcgaagtcacctccttcccaacacc

SEQ ID NO: 940165 - DNA, 25 bp, Homo sapien
tcacctccttcccaacaccccacgc

SEQ ID NO: 940166 - DNA, 25 bp, Homo sapien
cacctccttcccaacaccccacgca

SEQ ID NO: 940167 - DNA, 25 bp, Homo sapien
tcctggctggaaaccgcgcagggct

SEQ ID NO: 940168 - DNA, 25 bp, Homo sapien
aagcttcctggctggaaaccgcgca

SEQ ID NO: 940169 - DNA, 25 bp, Homo sapien
accaagggacacagcagcggcgcct

SEQ ID NO: 940170 - DNA, 25 bp, Homo sapien
agtgagcagacgtccaggcttcccg

SEQ ID NO: 940171 - DNA, 25 bp, Homo sapien
ctggtgaggcgctcgacaactggcc

SEQ ID NO: 940172 - DNA, 25 bp, Homo sapien
acaactggccgggaggagaagtcaa

SEQ ID NO: 940173 - DNA, 25 bp, Homo sapien
gccgcgcagcgccagggagagcgag

SEQ ID NO: 940174 - DNA, 25 bp, Homo sapien
agaacgccccaggtcagagcctgcc

SEQ ID NO: 940175 - DNA, 25 bp, Homo sapien
tgtttgtaatcagtgcagactcatc

SEQ ID NO: 940176 - DNA, 25 bp, Homo sapien
tgtaatcagtgcagactcatcagtg

SEQ ID NO: 940177 - DNA, 25 bp, Homo sapien
cattaccagttccacgtaatctaat

SEQ ID NO: 940178 - DNA, 25 bp, Homo sapien
cacgtaatctaatatgtttgcattc

SEQ ID NO: 940179 - DNA, 25 bp, Homo sapien
ggtgggtccaccctttgatatcatt

SEQ ID NO: 940180 - DNA, 25 bp, Homo sapien
caaagttctaagtctctaacacggg

SEQ ID NO: 940181 - DNA, 25 bp, Homo sapien
tggaactcttctccctgatataaag

SEQ ID NO: 940182 - DNA, 25 bp, Homo sapien
tgatatcattcaggctgcaaccgag

SEQ ID NO: 940183 - DNA, 25 bp, Homo sapien
tctctggattaaaatctctatgcac

SEQ ID NO: 940184 - DNA, 25 bp, Homo sapien
ctggattaaaatctctatgcaccat

SEQ ID NO: 940185 - DNA, 25 bp, Homo sapien
tctctgttttccctagggttcttca

SEQ ID NO: 940186 - DNA, 25 bp, Homo sapien
tctttctctggattaaaatctctat

SEQ ID NO: 940187 - DNA, 25 bp, Homo sapien
gtataatggcatggagccactctta

SEQ ID NO: 940188 - DNA, 25 bp, Homo sapien
gtgttgtctattctatgggttggga

SEQ ID NO: 940189 - DNA, 25 bp, Homo sapien
atgtataatggcatggagccactct

SEQ ID NO: 940190 - DNA, 25 bp, Homo sapien
tgtataatggcatggagccactctt

SEQ ID NO: 940191 - DNA, 25 bp, Homo sapien
tctgagtgcttgatatattttcaat

SEQ ID NO: 940192 - DNA, 25 bp, Homo sapien
cttccttgaggtttgaccttagata

SEQ ID NO: 940193 - DNA, 25 bp, Homo sapien
gtctgagtgcttgatatattttcaa

SEQ ID NO: 940194 - DNA, 25 bp, Homo sapien
ttataccctagtgaaaagagctcca

SEQ ID NO: 940195 - DNA, 25 bp, Homo sapien
caagagtattgtatccaaagcagcc

SEQ ID NO: 940196 - DNA, 25 bp, Homo sapien
cacaaggtagctggttctcaatagg

SEQ ID NO: 940197 - DNA, 25 bp, Homo sapien
ggcattttaagatcccctccgcaga

SEQ ID NO: 940198 - DNA, 25 bp, Homo sapien
tcaaccgtgactcagccaatagatc

SEQ ID NO: 940199 - DNA, 25 bp, Homo sapien
caaagtcagcttcactatggtgtgg

SEQ ID NO: 940200 - DNA, 25 bp, Homo sapien
tctgcaaacttcgaatcagtagccc

SEQ ID NO: 940201 - DNA, 25 bp, Homo sapien
tctgttcgcagtactggtcgaggct

SEQ ID NO: 940202 - DNA, 25 bp, Homo sapien
gatttaggtatacattccagaaagg

SEQ ID NO: 940203 - DNA, 25 bp, Homo sapien
gaaaggttgagttaaattcaatgcc

SEQ ID NO: 940204 - DNA, 25 bp, Homo sapien
cctgacctctggatataccatttaa

SEQ ID NO: 940205 - DNA, 25 bp, Homo sapien
accatttaatagttgcttgttggga

SEQ ID NO: 940206 - DNA, 25 bp, Homo sapien
tattttacatcttggcgtctagctc

SEQ ID NO: 940207 - DNA, 25 bp, Homo sapien
cactgggtgattgggtcgccatatt

SEQ ID NO: 940208 - DNA, 25 bp, Homo sapien
tgattgggtcgccatattttacatc

SEQ ID NO: 940209 - DNA, 25 bp, Homo sapien
tcccagcactgggtgattgggtcgc

SEQ ID NO: 940210 - DNA, 25 bp, Homo sapien
gagcatgcatttccatcccaggcac

SEQ ID NO: 940211 - DNA, 25 bp, Homo sapien
gcaagacaacagtctgcgcaagctt

SEQ ID NO: 940212 - DNA, 25 bp, Homo sapien
gaagtaggagcatatcgagagcatg

SEQ ID NO: 940213 - DNA, 25 bp, Homo sapien
cataagtgtcgcatctgtgcaagga

SEQ ID NO: 940214 - DNA, 25 bp, Homo sapien
ctgcaaatcgggcaaaacaaatgaa

SEQ ID NO: 940215 - DNA, 25 bp, Homo sapien
gcaaatcgggcaaaacaaatgaatt

SEQ ID NO: 940216 - DNA, 25 bp, Homo sapien
ggcaaaacaaatgaattagaagcat

SEQ ID NO: 940217 - DNA, 25 bp, Homo sapien
aaatcgggcaaaacaaatgaattag

SEQ ID NO: 940218 - DNA, 25 bp, Homo sapien
ctttcagactagtcttaagaatttc

SEQ ID NO: 940219 - DNA, 25 bp, Homo sapien
tttcagactagtcttaagaatttcc

SEQ ID NO: 940220 - DNA, 25 bp, Homo sapien
ttcagactagtcttaagaatttcct

SEQ ID NO: 940221 - DNA, 25 bp, Homo sapien
tgccctttgaacacacatatgatcc

SEQ ID NO: 940222 - DNA, 25 bp, Homo sapien
tacttgtaagtgtcctatttctgct

SEQ ID NO: 940223 - DNA, 25 bp, Homo sapien
cactacaggtgagcattatccaagc

SEQ ID NO: 940224 - DNA, 25 bp, Homo sapien
gatatgctgctaaacttcttaggag

SEQ ID NO: 940225 - DNA, 25 bp, Homo sapien
tccatgttcaagatgattgatgagt

SEQ ID NO: 940226 - DNA, 25 bp, Homo sapien
ccatgttcaagatgattgatgagtg

SEQ ID NO: 940227 - DNA, 25 bp, Homo sapien
gacaccagatagcaggtcttgttct

SEQ ID NO: 940228 - DNA, 25 bp, Homo sapien
gttcttgttaactccttgaccacta

SEQ ID NO: 940229 - DNA, 25 bp, Homo sapien
tgaccactattatcatcacaacata

SEQ ID NO: 940230 - DNA, 25 bp, Homo sapien
catcacaacataaacaggatcctgt

SEQ ID NO: 940231 - DNA, 25 bp, Homo sapien
gaaatgctgacaactttgaggacag

SEQ ID NO: 940232 - DNA, 25 bp, Homo sapien
tgctgacaactttgaggacagttcc

SEQ ID NO: 940233 - DNA, 25 bp, Homo sapien
tccagcactacctcttccatattcc

SEQ ID NO: 940234 - DNA, 25 bp, Homo sapien
cctttgaaatgctgacaactttgag

SEQ ID NO: 940235 - DNA, 25 bp, Homo sapien
caagaaacattacatcgtactggcc

SEQ ID NO: 940236 - DNA, 25 bp, Homo sapien
taatccacattgattctcttgaacg

SEQ ID NO: 940237 - DNA, 25 bp, Homo sapien
gtactggccatcttctgcaatgaca

SEQ ID NO: 940238 - DNA, 25 bp, Homo sapien
cctgcaactgggtatacggacttat

SEQ ID NO: 940239 - DNA, 25 bp, Homo sapien
cacagagtgccgctttatgaaactg

SEQ ID NO: 940240 - DNA, 25 bp, Homo sapien
atctggaaaatctcgggtggactta

SEQ ID NO: 940241 - DNA, 25 bp, Homo sapien
gacttaatcagtgggtcataggttt

SEQ ID NO: 940242 - DNA, 25 bp, Homo sapien
gccgctttatgaaactgatgacatc

SEQ ID NO: 940243 - DNA, 25 bp, Homo sapien
ccaataaaatttgtatagcttatca

SEQ ID NO: 940244 - DNA, 25 bp, Homo sapien
agacattgtttatgcacctgagaag

SEQ ID NO: 940245 - DNA, 25 bp, Homo sapien
tgtttatgcacctgagaagttcaca

SEQ ID NO: 940246 - DNA, 25 bp, Homo sapien
tggaggaaagtaaagacattgttta

SEQ ID NO: 940247 - DNA, 25 bp, Homo sapien
gagttctctttaagcctcgcatgac

SEQ ID NO: 940248 - DNA, 25 bp, Homo sapien
tcatgtaaaacgtgagttctcttta

SEQ ID NO: 940249 - DNA, 25 bp, Homo sapien
ggaaggcggtgacaaccaccacttg

SEQ ID NO: 940250 - DNA, 25 bp, Homo sapien
tgcttatgaggacagtcatgtaaaa

SEQ ID NO: 940251 - DNA, 25 bp, Homo sapien
taaaaactgctctgatgtcagccat

SEQ ID NO: 940252 - DNA, 25 bp, Homo sapien
caggccgtggataaggaattctccc

SEQ ID NO: 940253 - DNA, 25 bp, Homo sapien
gaattctcccatcatactgcaccca

SEQ ID NO: 940254 - DNA, 25 bp, Homo sapien
tgcacccaacgatggtctgcacttt

SEQ ID NO: 940255 - DNA, 25 bp, Homo sapien
tatacacacaaacagcagagccttt

SEQ ID NO: 940256 - DNA, 25 bp, Homo sapien
cacacaaacagcagagcctttgaag

SEQ ID NO: 940257 - DNA, 25 bp, Homo sapien
gctatacacacaaacagcagagcct

SEQ ID NO: 940258 - DNA, 25 bp, Homo sapien
acaaacagcagagcctttgaagatg

SEQ ID NO: 940259 - DNA, 25 bp, Homo sapien
ctggttgtagtaaagactccatata

SEQ ID NO: 940260 - DNA, 25 bp, Homo sapien
gactccatatactacaggatttctt

SEQ ID NO: 940261 - DNA, 25 bp, Homo sapien
ttcatctcttgtggggagtaaataa

SEQ ID NO: 940262 - DNA, 25 bp, Homo sapien
gtaaagactccatatactacaggat

SEQ ID NO: 940263 - DNA, 25 bp, Homo sapien
ctttcattaacaagtcggagggaca

SEQ ID NO: 940264 - DNA, 25 bp, Homo sapien
ggagaggtcatccacgattactcaa

SEQ ID NO: 940265 - DNA, 25 bp, Homo sapien
aaatctcctgtacttgccagcagag

SEQ ID NO: 940266 - DNA, 25 bp, Homo sapien
gagggcacccgtggaataaggaatc

SEQ ID NO: 940267 - DNA, 25 bp, Homo sapien
caaagagaagagttactgcattatg

SEQ ID NO: 940268 - DNA, 25 bp, Homo sapien
gaatggatgaactgtgtagttccag

SEQ ID NO: 940269 - DNA, 25 bp, Homo sapien
cttactttgaggactcttacaaaga

SEQ ID NO: 940270 - DNA, 25 bp, Homo sapien
actgcattatgacgtgtgcccagac

SEQ ID NO: 940271 - DNA, 25 bp, Homo sapien
cgtgtactttgcgtgtgaattttag

SEQ ID NO: 940272 - DNA, 25 bp, Homo sapien
ttgcgtgtgaattttagtaagaacc

SEQ ID NO: 940273 - DNA, 25 bp, Homo sapien
cacttccgtgtactttgcgtgtgaa

SEQ ID NO: 940274 - DNA, 25 bp, Homo sapien
tagagcacttccgtgtactttgcgt

SEQ ID NO: 940275 - DNA, 25 bp, Homo sapien
ggcatttggagccaaagggaaataa

SEQ ID NO: 940276 - DNA, 25 bp, Homo sapien
ttaattaggcagtaaggcctttcca

SEQ ID NO: 940277 - DNA, 25 bp, Homo sapien
caagttacttaattaggcagtaagg

SEQ ID NO: 940278 - DNA, 25 bp, Homo sapien
ggcagtaaggcctttccaagaaaga

SEQ ID NO: 940279 - DNA, 25 bp, Homo sapien
gaaaagtcgtccacttgtttatcag

SEQ ID NO: 940280 - DNA, 25 bp, Homo sapien
ttgtttatcaggctgcgttgtcctc

SEQ ID NO: 940281 - DNA, 25 bp, Homo sapien
gaagctcatcaaagtaagtatctgc

SEQ ID NO: 940282 - DNA, 25 bp, Homo sapien
cacttccaggaattgagcaaatcag

SEQ ID NO: 940283 - DNA, 25 bp, Homo sapien
tatttatcaacacaattctaccact

SEQ ID NO: 940284 - DNA, 25 bp, Homo sapien
tttatcaacacaattctaccactca

SEQ ID NO: 940285 - DNA, 25 bp, Homo sapien
aaatatttatcaacacaattctacc

SEQ ID NO: 940286 - DNA, 25 bp, Homo sapien
ttatcaacacaattctaccactcac

SEQ ID NO: 940287 - DNA, 25 bp, Homo sapien
caagcagttcagctctattggatga

SEQ ID NO: 940288 - DNA, 25 bp, Homo sapien
catacaaggcaatggtaaaggcagc

SEQ ID NO: 940289 - DNA, 25 bp, Homo sapien
gaacccagatattgagtccttgaac

SEQ ID NO: 940290 - DNA, 25 bp, Homo sapien
gaaaaagacagtattagccctcaat

SEQ ID NO: 940291 - DNA, 25 bp, Homo sapien
tttgtttgcatatccacacaatctc

SEQ ID NO: 940292 - DNA, 25 bp, Homo sapien
ctaagaactttaagcccagaagagg

SEQ ID NO: 940293 - DNA, 25 bp, Homo sapien
ccctggatttgtttgcatatccaca

SEQ ID NO: 940294 - DNA, 25 bp, Homo sapien
cttttgtactaaattgtcacctcct

SEQ ID NO: 940295 - DNA, 25 bp, Homo sapien
cacagcaactgtccaatctacatct

SEQ ID NO: 940296 - DNA, 25 bp, Homo sapien
caactgtccaatctacatctatctg

SEQ ID NO: 940297 - DNA, 25 bp, Homo sapien
tcaatcttcagtgggttatttctag

SEQ ID NO: 940298 - DNA, 25 bp, Homo sapien
acttagtacaaatgatctgcatggg

SEQ ID NO: 940299 - DNA, 25 bp, Homo sapien
gcacttattcgcctcaggctctcat

SEQ ID NO: 940300 - DNA, 25 bp, Homo sapien
tctgtggatgaaggcacttattcgc

SEQ ID NO: 940301 - DNA, 25 bp, Homo sapien
tgtgctctaccatgtataattataa

SEQ ID NO: 940302 - DNA, 25 bp, Homo sapien
cattgatcaatattgcccagtaaaa

SEQ ID NO: 940303 - DNA, 25 bp, Homo sapien
tcaatccacaacacagcttttcagg

SEQ ID NO: 940304 - DNA, 25 bp, Homo sapien
taggactactccaaacaacaggcat

SEQ ID NO: 940305 - DNA, 25 bp, Homo sapien
gtcaggatactgttgctataaggca

SEQ ID NO: 940306 - DNA, 25 bp, Homo sapien
taaggcatgcttcaatacactaaca

SEQ ID NO: 940307 - DNA, 25 bp, Homo sapien
tccaactcgagaaaggatggtttta

SEQ ID NO: 940308 - DNA, 25 bp, Homo sapien
ctcgagaaaggatggttttatcgga

SEQ ID NO: 940309 - DNA, 25 bp, Homo sapien
caactcgagaaaggatggttttatc

SEQ ID NO: 940310 - DNA, 25 bp, Homo sapien
tcttccaactcgagaaaggatggtt

SEQ ID NO: 940311 - DNA, 25 bp, Homo sapien
gattgtaggtgtctggtatgaagaa

SEQ ID NO: 940312 - DNA, 25 bp, Homo sapien
tatcatcatctggattgtaggtgtc

SEQ ID NO: 940313 - DNA, 25 bp, Homo sapien
gatgattcacgaaagaagaaatata

SEQ ID NO: 940314 - DNA, 25 bp, Homo sapien
tgccttcttgagatgattcacgaaa

SEQ ID NO: 940315 - DNA, 25 bp, Homo sapien
catgagtaggcccaagggatcgagt

SEQ ID NO: 940316 - DNA, 25 bp, Homo sapien
caagggatcgagtgaatgcagtatc

SEQ ID NO: 940317 - DNA, 25 bp, Homo sapien
tgtcagttctgatgtagtggtggtc

SEQ ID NO: 940318 - DNA, 25 bp, Homo sapien
tagtggtggtcatgagtaggcccaa

SEQ ID NO: 940319 - DNA, 25 bp, Homo sapien
agtcttgctgacattccttggaaca

SEQ ID NO: 940320 - DNA, 25 bp, Homo sapien
gatgctcagtacagacaaatttggc

SEQ ID NO: 940321 - DNA, 25 bp, Homo sapien
ctcaataggaaaatgcggttcagtc

SEQ ID NO: 940322 - DNA, 25 bp, Homo sapien
tggaacagacttcagaccacacagt

SEQ ID NO: 940323 - DNA, 25 bp, Homo sapien
tctgccagactccaaattatgtgtg

SEQ ID NO: 940324 - DNA, 25 bp, Homo sapien
aaggctgctgaggatcgaaaggaca

SEQ ID NO: 940325 - DNA, 25 bp, Homo sapien
tgaggatcgaaaggacatttcagtc

SEQ ID NO: 940326 - DNA, 25 bp, Homo sapien
gtgtgtctagtttgaatataatatc

SEQ ID NO: 940327 - DNA, 25 bp, Homo sapien
tccttgtagactccaagatcaatat

SEQ ID NO: 940328 - DNA, 25 bp, Homo sapien
tttgttatagggctgaagtactctg

SEQ ID NO: 940329 - DNA, 25 bp, Homo sapien
tcaatatacccacatattggatgaa

SEQ ID NO: 940330 - DNA, 25 bp, Homo sapien
caagatcaatatacccacatattgg

SEQ ID NO: 940331 - DNA, 25 bp, Homo sapien
tcgaacaaacaattaagacaaagta

SEQ ID NO: 940332 - DNA, 25 bp, Homo sapien
tagtttcgaacaaacaattaagaca

SEQ ID NO: 940333 - DNA, 25 bp, Homo sapien
gcaggccgatactaatagtttcgaa

SEQ ID NO: 940334 - DNA, 25 bp, Homo sapien
ccatggcaggccgatactaatagtt

SEQ ID NO: 940335 - DNA, 25 bp, Homo sapien
tccaaacagttgttaatcctaaaca

SEQ ID NO: 940336 - DNA, 25 bp, Homo sapien
tgtcctgaatcagagcactcggatg

SEQ ID NO: 940337 - DNA, 25 bp, Homo sapien
tagaggtacgattaaaggatggtgc

SEQ ID NO: 940338 - DNA, 25 bp, Homo sapien
gagtgaactaacctgttgtctgaga

SEQ ID NO: 940339 - DNA, 25 bp, Homo sapien
tcaagatgtctatgtttctgcccca

SEQ ID NO: 940340 - DNA, 25 bp, Homo sapien
gttcctttgcagcaggccaataaat

SEQ ID NO: 940341 - DNA, 25 bp, Homo sapien
taattccacccgttcctttgcagca

SEQ ID NO: 940342 - DNA, 25 bp, Homo sapien
tacataattccacccgttcctttgc

SEQ ID NO: 940343 - DNA, 25 bp, Homo sapien
ctttcccagctaatttacataattc

SEQ ID NO: 940344 - DNA, 25 bp, Homo sapien
ggtgacaggagtgcgaacctatctc

SEQ ID NO: 940345 - DNA, 25 bp, Homo sapien
taagcactgatgtctggtgtcaagg

SEQ ID NO: 940346 - DNA, 25 bp, Homo sapien
gaatctggcatggtgagcgctcaat

SEQ ID NO: 940347 - DNA, 25 bp, Homo sapien
tactcttgcggatggacttcaaact

SEQ ID NO: 940348 - DNA, 25 bp, Homo sapien
actgagtagaaagatgtggtctttg

SEQ ID NO: 940349 - DNA, 25 bp, Homo sapien
tttaagtcaaccagactgagtagaa

SEQ ID NO: 940350 - DNA, 25 bp, Homo sapien
taagtcaaccagactgagtagaaag

SEQ ID NO: 940351 - DNA, 25 bp, Homo sapien
tagaaagatgtggtctttggctccc

SEQ ID NO: 940352 - DNA, 25 bp, Homo sapien
tgaacccaaaaagggaatacagcta

SEQ ID NO: 940353 - DNA, 25 bp, Homo sapien
ctgatgaacccaaaaagggaataca

SEQ ID NO: 940354 - DNA, 25 bp, Homo sapien
aatacagctatttgaaagcagcaag

SEQ ID NO: 940355 - DNA, 25 bp, Homo sapien
caaaaagggaatacagctatttgaa

SEQ ID NO: 940356 - DNA, 25 bp, Homo sapien
tatttctgccaaaccaagcaaagtc

SEQ ID NO: 940357 - DNA, 25 bp, Homo sapien
ggcatgcgatttttgagattgtcca

SEQ ID NO: 940358 - DNA, 25 bp, Homo sapien
taacacgtaaagctaagacactcag

SEQ ID NO: 940359 - DNA, 25 bp, Homo sapien
aatcagaaatggatgctggctctgc

SEQ ID NO: 940360 - DNA, 25 bp, Homo sapien
tcttcaataaggtgtagattatccg

SEQ ID NO: 940361 - DNA, 25 bp, Homo sapien
caataaggtgtagattatccggcat

SEQ ID NO: 940362 - DNA, 25 bp, Homo sapien
taatctcatcaatactgtcttcaat

SEQ ID NO: 940363 - DNA, 25 bp, Homo sapien
caatactgtcttcaataaggtgtag

SEQ ID NO: 940364 - DNA, 25 bp, Homo sapien
catttcacagaagtcaatatgcttt

SEQ ID NO: 940365 - DNA, 25 bp, Homo sapien
tttttatgaactgatgccaaaacat

SEQ ID NO: 940366 - DNA, 25 bp, Homo sapien
ctgatgccaaaacatttcacagaag

SEQ ID NO: 940367 - DNA, 25 bp, Homo sapien
acatttcacagaagtcaatatgctt

SEQ ID NO: 940368 - DNA, 25 bp, Homo sapien
ctttgtaggttagcttgagtcttgg

SEQ ID NO: 940369 - DNA, 25 bp, Homo sapien
gaatattttgcttcaaagtgccagt

SEQ ID NO: 940370 - DNA, 25 bp, Homo sapien
tttgcttcaaagtgccagtgactgg

SEQ ID NO: 940371 - DNA, 25 bp, Homo sapien
tgactggaagaaacaacatggtcat

SEQ ID NO: 940372 - DNA, 25 bp, Homo sapien
agtctttcatctttattagcattca

SEQ ID NO: 940373 - DNA, 25 bp, Homo sapien
aaaggtgaaaatcttggcttctggc

SEQ ID NO: 940374 - DNA, 25 bp, Homo sapien
gaaaatcttggcttctggctttaag

SEQ ID NO: 940375 - DNA, 25 bp, Homo sapien
aaaaaggtgaaaatcttggcttctg

SEQ ID NO: 940376 - DNA, 25 bp, Homo sapien
tctctttcaaatggtgttaatttaa

SEQ ID NO: 940377 - DNA, 25 bp, Homo sapien
aacaatgttctctttcaaatggtgt

SEQ ID NO: 940378 - DNA, 25 bp, Homo sapien
aatgttctctttcaaatggtgttaa

SEQ ID NO: 940379 - DNA, 25 bp, Homo sapien
tgttctctttcaaatggtgttaatt

SEQ ID NO: 940380 - DNA, 25 bp, Homo sapien
ctactttaatcccagcccaatgatt

SEQ ID NO: 940381 - DNA, 25 bp, Homo sapien
ttaatcccagcccaatgattaacat

SEQ ID NO: 940382 - DNA, 25 bp, Homo sapien
atcccagcccaatgattaacatttc

SEQ ID NO: 940383 - DNA, 25 bp, Homo sapien
tactttaatcccagcccaatgatta

SEQ ID NO: 940384 - DNA, 25 bp, Homo sapien
aagatctgcagttggtaaggtgaag

SEQ ID NO: 940385 - DNA, 25 bp, Homo sapien
aattattgaggctgatgagtcccaa

SEQ ID NO: 940386 - DNA, 25 bp, Homo sapien
tgcagttggtaaggtgaagatccag

SEQ ID NO: 940387 - DNA, 25 bp, Homo sapien
tctgcagttggtaaggtgaagatcc

SEQ ID NO: 940388 - DNA, 25 bp, Homo sapien
gaatacagtgcttgtcaccagagtg

SEQ ID NO: 940389 - DNA, 25 bp, Homo sapien
gagaaagtaatatcacccaccacac

SEQ ID NO: 940390 - DNA, 25 bp, Homo sapien
taaccaagcatttcgtatctgaatg

SEQ ID NO: 940391 - DNA, 25 bp, Homo sapien
gaattgctttcaaccagccaaatgt

SEQ ID NO: 940392 - DNA, 25 bp, Homo sapien
tttcataacgttgctacatgggagc

SEQ ID NO: 940393 - DNA, 25 bp, Homo sapien
tagtctgagcatctccgcaagctgc

SEQ ID NO: 940394 - DNA, 25 bp, Homo sapien
tgtataatgataccacctatcacgg

SEQ ID NO: 940395 - DNA, 25 bp, Homo sapien
tgcttcaggtcttacagtcagtcag

SEQ ID NO: 940396 - DNA, 25 bp, Homo sapien
cagaggtgtccaaacaggccagtca

SEQ ID NO: 940397 - DNA, 25 bp, Homo sapien
cataagatacgacgtgagaaagacg

SEQ ID NO: 940398 - DNA, 25 bp, Homo sapien
gattctgccatcacttgtagtaggg

SEQ ID NO: 940399 - DNA, 25 bp, Homo sapien
gataaacacgggctaaactgcaaag

SEQ ID NO: 940400 - DNA, 25 bp, Homo sapien
agaaagcaatcacgcatctcaaaca

SEQ ID NO: 940401 - DNA, 25 bp, Homo sapien
agcaatcacgcatctcaaacactac

SEQ ID NO: 940402 - DNA, 25 bp, Homo sapien
agagaaagcaatcacgcatctcaaa

SEQ ID NO: 940403 - DNA, 25 bp, Homo sapien
aaagcaatcacgcatctcaaacact

SEQ ID NO: 940404 - DNA, 25 bp, Homo sapien
aaggacatatattattcctaacaaa

SEQ ID NO: 940405 - DNA, 25 bp, Homo sapien
ggacatatattattcctaacaaaat

SEQ ID NO: 940406 - DNA, 25 bp, Homo sapien
ccttaaaaggacatatattattcct

SEQ ID NO: 940407 - DNA, 25 bp, Homo sapien
taaaaggacatatattattcctaac

SEQ ID NO: 940408 - DNA, 25 bp, Homo sapien
ttttaatcagtagaggaaggtgcca

SEQ ID NO: 940409 - DNA, 25 bp, Homo sapien
tttttaatcagtagaggaaggtgcc

SEQ ID NO: 940410 - DNA, 25 bp, Homo sapien
tttaatcagtagaggaaggtgccaa

SEQ ID NO: 940411 - DNA, 25 bp, Homo sapien
tatttcatatacctacacacatata

SEQ ID NO: 940412 - DNA, 25 bp, Homo sapien
atatttcatatacctacacacatat

SEQ ID NO: 940413 - DNA, 25 bp, Homo sapien
tttcatatacctacacacatataca

SEQ ID NO: 940414 - DNA, 25 bp, Homo sapien
tcatatacctacacacatatacaca

SEQ ID NO: 940415 - DNA, 25 bp, Homo sapien
caggtgggactaggttcacaggacc

SEQ ID NO: 940416 - DNA, 25 bp, Homo sapien
tagacacaggtaaactgagacccgc

SEQ ID NO: 940417 - DNA, 25 bp, Homo sapien
tcatgcagggagctatatcaactac

SEQ ID NO: 940418 - DNA, 25 bp, Homo sapien
tagtgacagaattgggatgggaacc

SEQ ID NO: 940419 - DNA, 25 bp, Homo sapien
agcatagcattccttctctttgcaa

SEQ ID NO: 940420 - DNA, 25 bp, Homo sapien
atagcattccttctctttgcaagtt

SEQ ID NO: 940421 - DNA, 25 bp, Homo sapien
gcatagcattccttctctttgcaag

SEQ ID NO: 940422 - DNA, 25 bp, Homo sapien
tgtgtaagcatagcattccttctct

SEQ ID NO: 940423 - DNA, 25 bp, Homo sapien
aaaagtgagttgcacatacctagtg

SEQ ID NO: 940424 - DNA, 25 bp, Homo sapien
tacctagtgtgcaaattgagtatgc

SEQ ID NO: 940425 - DNA, 25 bp, Homo sapien
catccctctattggattgagctaag

SEQ ID NO: 940426 - DNA, 25 bp, Homo sapien
gattaagtattcacaagccatcatg

SEQ ID NO: 940427 - DNA, 25 bp, Homo sapien
cattgtgcaagggatctcatgggag

SEQ ID NO: 940428 - DNA, 25 bp, Homo sapien
aattgtaatacccatgcattgtgca

SEQ ID NO: 940429 - DNA, 25 bp, Homo sapien
ctggatagtgtggtgctgctgtaaa

SEQ ID NO: 940430 - DNA, 25 bp, Homo sapien
acaagctaacacagtaaatcagtac

SEQ ID NO: 940431 - DNA, 25 bp, Homo sapien
gggtcagggtcagaatgatatgatt

SEQ ID NO: 940432 - DNA, 25 bp, Homo sapien
atcgcacccagccggacttggactt

SEQ ID NO: 940433 - DNA, 25 bp, Homo sapien
tcagggtcagaatgatatgatttgg

SEQ ID NO: 940434 - DNA, 25 bp, Homo sapien
gcacccagccggacttggacttttg

SEQ ID NO: 940435 - DNA, 25 bp, Homo sapien
ggttttggtgatgaaataagagtcc

SEQ ID NO: 940436 - DNA, 25 bp, Homo sapien
tggtgatgaaataagagtccacgca

SEQ ID NO: 940437 - DNA, 25 bp, Homo sapien
ttttggtgatgaaataagagtccac

SEQ ID NO: 940438 - DNA, 25 bp, Homo sapien
gaaagtggtggggttttggtgatga

SEQ ID NO: 940439 - DNA, 25 bp, Homo sapien
cagggtagcccattaacgcattaac

SEQ ID NO: 940440 - DNA, 25 bp, Homo sapien
ccaggaggttgaactcgagtcatca

SEQ ID NO: 940441 - DNA, 25 bp, Homo sapien
ttttattaccgcttcgctcgaggcg

SEQ ID NO: 940442 - DNA, 25 bp, Homo sapien
cgcattaactccaggctcgttgggc

SEQ ID NO: 940443 - DNA, 25 bp, Homo sapien
ccagcacgagtcaaatccggccttt

SEQ ID NO: 940444 - DNA, 25 bp, Homo sapien
tttccaaagcgagccaagcccacta

SEQ ID NO: 940445 - DNA, 25 bp, Homo sapien
gtcaaatccggcctttccaaagcga

SEQ ID NO: 940446 - DNA, 25 bp, Homo sapien
aatccggcctttccaaagcgagcca

SEQ ID NO: 940447 - DNA, 25 bp, Homo sapien
caaagagatcccccgagtgttttgc

SEQ ID NO: 940448 - DNA, 25 bp, Homo sapien
ctacaaagagatcccccgagtgttt

SEQ ID NO: 940449 - DNA, 25 bp, Homo sapien
acaaagagatcccccgagtgttttg

SEQ ID NO: 940450 - DNA, 25 bp, Homo sapien
cggcgaagaaaaaggcgtcgcccat

SEQ ID NO: 940451 - DNA, 25 bp, Homo sapien
ccggatgttcccgactaaagcgtct

SEQ ID NO: 940452 - DNA, 25 bp, Homo sapien
ggcgcagatgccctttggtcaagta

SEQ ID NO: 940453 - DNA, 25 bp, Homo sapien
ttccatcagacggaacgtcgcgatt

SEQ ID NO: 940454 - DNA, 25 bp, Homo sapien
gaagccggggacacattcatagacg

SEQ ID NO: 940455 - DNA, 25 bp, Homo sapien
tcaggaggaaaactttgtgcagtgc

SEQ ID NO: 940456 - DNA, 25 bp, Homo sapien
tcatagacgctctctgctgcccaga

SEQ ID NO: 940457 - DNA, 25 bp, Homo sapien
gagagcaaagttcctggacgcgtct

SEQ ID NO: 940458 - DNA, 25 bp, Homo sapien
ggctgaggtccagcggcgcggcaac

SEQ ID NO: 940459 - DNA, 25 bp, Homo sapien
ccggcgcgcgttcctctgagccgca

SEQ ID NO: 940460 - DNA, 25 bp, Homo sapien
gggaacgggatgcaggctgaggtcc

SEQ ID NO: 940461 - DNA, 25 bp, Homo sapien
caggctgaggtccagcggcgcggca

SEQ ID NO: 940462 - DNA, 25 bp, Homo sapien
agaagttcatccctgctgcgcggag

SEQ ID NO: 940463 - DNA, 25 bp, Homo sapien
gtggcgaggaaaggcacgctccaaa

SEQ ID NO: 940464 - DNA, 25 bp, Homo sapien
gtggtgtgaccgcagcagctgtcct

SEQ ID NO: 940465 - DNA, 25 bp, Homo sapien
gctccaaacaggagggcggctttta

SEQ ID NO: 940466 - DNA, 25 bp, Homo sapien
atttctttgtgcagtaactggcaag

SEQ ID NO: 940467 - DNA, 25 bp, Homo sapien
tgcagtaactggcaagagcaggtcc

SEQ ID NO: 940468 - DNA, 25 bp, Homo sapien
caagagcaggtccatacagacagca

SEQ ID NO: 940469 - DNA, 25 bp, Homo sapien
ggaaggcattccaacacttctgctt

SEQ ID NO: 940470 - DNA, 25 bp, Homo sapien
gcctctgtagctagcagcctcacag

SEQ ID NO: 940471 - DNA, 25 bp, Homo sapien
ctgggcctctgtagctagcagcctc

SEQ ID NO: 940472 - DNA, 25 bp, Homo sapien
gggcctctgtagctagcagcctcac

SEQ ID NO: 940473 - DNA, 25 bp, Homo sapien
tctgtagctagcagcctcacagttg

SEQ ID NO: 940474 - DNA, 25 bp, Homo sapien
aatgtgggtgcatcttgacatgggc

SEQ ID NO: 940475 - DNA, 25 bp, Homo sapien
ctgctccatcggatctctccctgca

SEQ ID NO: 940476 - DNA, 25 bp, Homo sapien
catcggatctctccctgcactgcca

SEQ ID NO: 940477 - DNA, 25 bp, Homo sapien
ctccatcggatctctccctgcactg

SEQ ID NO: 940478 - DNA, 25 bp, Homo sapien
tccatcggatctctccctgcactgc

SEQ ID NO: 940479 - DNA, 25 bp, Homo sapien
cagagcacaattcgtcgtcttggat

SEQ ID NO: 940480 - DNA, 25 bp, Homo sapien
gataaatggtagtccaacttgcaac

SEQ ID NO: 940481 - DNA, 25 bp, Homo sapien
gcctgcagcaaatcttgaagtcctg

SEQ ID NO: 940482 - DNA, 25 bp, Homo sapien
caggtctacttataaaattgccgaa

SEQ ID NO: 940483 - DNA, 25 bp, Homo sapien
tgaagtcgtccagtatgaagtgttt

SEQ ID NO: 940484 - DNA, 25 bp, Homo sapien
cttgaagtcgtccagtatgaagtgt

SEQ ID NO: 940485 - DNA, 25 bp, Homo sapien
agtcgtccagtatgaagtgttttca

SEQ ID NO: 940486 - DNA, 25 bp, Homo sapien
aagtcgtccagtatgaagtgttttc

SEQ ID NO: 940487 - DNA, 25 bp, Homo sapien
cacacaatcctctttaaatcctctt

SEQ ID NO: 940488 - DNA, 25 bp, Homo sapien
tcacacaatcctctttaaatcctct

SEQ ID NO: 940489 - DNA, 25 bp, Homo sapien
caatcctctttaaatcctcttcatt

SEQ ID NO: 940490 - DNA, 25 bp, Homo sapien
cacaatcctctttaaatcctcttca

SEQ ID NO: 940491 - DNA, 25 bp, Homo sapien
tgcgcttttccgacaggcttaaaaa

SEQ ID NO: 940492 - DNA, 25 bp, Homo sapien
atggcgcaccacgagattataaccc

SEQ ID NO: 940493 - DNA, 25 bp, Homo sapien
ttccgacaggcttaaaaaatggcgc

SEQ ID NO: 940494 - DNA, 25 bp, Homo sapien
cgacaggcttaaaaaatggcgcacc

SEQ ID NO: 940495 - DNA, 25 bp, Homo sapien
catcttcacctaagatgaaagaaac

SEQ ID NO: 940496 - DNA, 25 bp, Homo sapien
taatacaatatcagtagctttaaga

SEQ ID NO: 940497 - DNA, 25 bp, Homo sapien
cagatttcaggtatacactactgag

SEQ ID NO: 940498 - DNA, 25 bp, Homo sapien
tcagcaacctcttttaatacaatat

SEQ ID NO: 940499 - DNA, 25 bp, Homo sapien
gaaagggtcctctattccaatcacc

SEQ ID NO: 940500 - DNA, 25 bp, Homo sapien
ggctggaagatcaccaagagctgtt

SEQ ID NO: 940501 - DNA, 25 bp, Homo sapien
ggaaccattccatctcaactccagt

SEQ ID NO: 940502 - DNA, 25 bp, Homo sapien
tctattccaatcacccaatgaaaac

SEQ ID NO: 940503 - DNA, 25 bp, Homo sapien
ttgtctaccattattgacaagtact

SEQ ID NO: 940504 - DNA, 25 bp, Homo sapien
cttgtctaccattattgacaagtac

SEQ ID NO: 940505 - DNA, 25 bp, Homo sapien
tcttgtctaccattattgacaagta

SEQ ID NO: 940506 - DNA, 25 bp, Homo sapien
gaatgtgcagtttctttttggacat

SEQ ID NO: 940507 - DNA, 25 bp, Homo sapien
ggaatgtgcagtttctttttggaca

SEQ ID NO: 940508 - DNA, 25 bp, Homo sapien
agggaacaaggtctgcttctttctc

SEQ ID NO: 940509 - DNA, 25 bp, Homo sapien
aagggaacaaggtctgcttctttct

SEQ ID NO: 940510 - DNA, 25 bp, Homo sapien
gaagggaacaaggtctgcttctttc

SEQ ID NO: 940511 - DNA, 25 bp, Homo sapien
gatgtccgattgtgacctagggcca

SEQ ID NO: 940512 - DNA, 25 bp, Homo sapien
tcccaactgatttgatgtccgattg

SEQ ID NO: 940513 - DNA, 25 bp, Homo sapien
gatttgatgtccgattgtgacctag

SEQ ID NO: 940514 - DNA, 25 bp, Homo sapien
actgatttgatgtccgattgtgacc

SEQ ID NO: 940515 - DNA, 25 bp, Homo sapien
gtttcattaggatagctgttggcat

SEQ ID NO: 940516 - DNA, 25 bp, Homo sapien
attagcattagggaatggcagtaat

SEQ ID NO: 940517 - DNA, 25 bp, Homo sapien
ttctcctgtttcattaggatagctg

SEQ ID NO: 940518 - DNA, 25 bp, Homo sapien
gtaatactttaggacactgtgttct

SEQ ID NO: 940519 - DNA, 25 bp, Homo sapien
tccctttacagtgccatctccaatc

SEQ ID NO: 940520 - DNA, 25 bp, Homo sapien
attccctttacagtgccatctccaa

SEQ ID NO: 940521 - DNA, 25 bp, Homo sapien
ctattccctttacagtgccatctcc

SEQ ID NO: 940522 - DNA, 25 bp, Homo sapien
cctttacagtgccatctccaatcag

SEQ ID NO: 940523 - DNA, 25 bp, Homo sapien
aaatggttttgtgagccagcagtct

SEQ ID NO: 940524 - DNA, 25 bp, Homo sapien
caagtgttaattgccaatacagtgg

SEQ ID NO: 940525 - DNA, 25 bp, Homo sapien
tttgcagtctgatgatacaatagca

SEQ ID NO: 940526 - DNA, 25 bp, Homo sapien
ttattcattcacaaatacatgcttt

SEQ ID NO: 940527 - DNA, 25 bp, Homo sapien
tgctctcattgtctttcctgccagc

SEQ ID NO: 940528 - DNA, 25 bp, Homo sapien
tcttctccaggagtgtgttctcaag

SEQ ID NO: 940529 - DNA, 25 bp, Homo sapien
ggagtgtgttctcaagagagctgat

SEQ ID NO: 940530 - DNA, 25 bp, Homo sapien
tgtgaatcaattaatccttttttcc

SEQ ID NO: 940531 - DNA, 25 bp, Homo sapien
ccaggtagaagtagatgaagtgttt

SEQ ID NO: 940532 - DNA, 25 bp, Homo sapien
caggtagaagtagatgaagtgtttg

SEQ ID NO: 940533 - DNA, 25 bp, Homo sapien
gtcgcacttggttaccacggagaac

SEQ ID NO: 940534 - DNA, 25 bp, Homo sapien
cgcacttggttaccacggagaactg

SEQ ID NO: 940535 - DNA, 25 bp, Homo sapien
tggtcgcacttggttaccacggaga

SEQ ID NO: 940536 - DNA, 25 bp, Homo sapien
tttggtcgcacttggttaccacgga

SEQ ID NO: 940537 - DNA, 25 bp, Homo sapien
gggaaggtgctagcacggctcaggc

SEQ ID NO: 940538 - DNA, 25 bp, Homo sapien
ctggggaaggtgctagcacggctca

SEQ ID NO: 940539 - DNA, 25 bp, Homo sapien
aaggtgctagcacggctcaggcccg

SEQ ID NO: 940540 - DNA, 25 bp, Homo sapien
gaaggtgctagcacggctcaggccc

SEQ ID NO: 940541 - DNA, 25 bp, Homo sapien
ctgtggctggtctttttaagagaat

SEQ ID NO: 940542 - DNA, 25 bp, Homo sapien
aagagaatgctgcttgactgaatcc

SEQ ID NO: 940543 - DNA, 25 bp, Homo sapien
gagaatgctgcttgactgaatccat

SEQ ID NO: 940544 - DNA, 25 bp, Homo sapien
ttaagagaatgctgcttgactgaat

SEQ ID NO: 940545 - DNA, 25 bp, Homo sapien
aactatgctgacgaactatcctgtg

SEQ ID NO: 940546 - DNA, 25 bp, Homo sapien
gatgttcacattctccacaagactg

SEQ ID NO: 940547 - DNA, 25 bp, Homo sapien
ctatcctgtgtctaattattgtgct

SEQ ID NO: 940548 - DNA, 25 bp, Homo sapien
tttttgtcaacacactgtaactatg

SEQ ID NO: 940549 - DNA, 25 bp, Homo sapien
atatttgcccttgtttatagtctcc

SEQ ID NO: 940550 - DNA, 25 bp, Homo sapien
ttgtttgattgcccccactgtatat

SEQ ID NO: 940551 - DNA, 25 bp, Homo sapien
ttcagttgtttgattgcccccactg

SEQ ID NO: 940552 - DNA, 25 bp, Homo sapien
agttgtttgattgcccccactgtat

SEQ ID NO: 940553 - DNA, 25 bp, Homo sapien
gagtaatctctaccccacattttat

SEQ ID NO: 940554 - DNA, 25 bp, Homo sapien
tgccaagagtaatctctaccccaca

SEQ ID NO: 940555 - DNA, 25 bp, Homo sapien
actctgtagctaagtctgtagtgca

SEQ ID NO: 940556 - DNA, 25 bp, Homo sapien
ctctgtagctaagtctgtagtgcag

SEQ ID NO: 940557 - DNA, 25 bp, Homo sapien
agaggaaatgttatctccacagacc

SEQ ID NO: 940558 - DNA, 25 bp, Homo sapien
ctcctttcgaaggagaggaaatgtt

SEQ ID NO: 940559 - DNA, 25 bp, Homo sapien
aaggagaggaaatgttatctccaca

SEQ ID NO: 940560 - DNA, 25 bp, Homo sapien
aaatgttatctccacagacctcagg

SEQ ID NO: 940561 - DNA, 25 bp, Homo sapien
tgttagtcaccatcccgcagtttcc

SEQ ID NO: 940562 - DNA, 25 bp, Homo sapien
catcccgcagtttcctttcatgtca

SEQ ID NO: 940563 - DNA, 25 bp, Homo sapien
acttgtgttagtcaccatcccgcag

SEQ ID NO: 940564 - DNA, 25 bp, Homo sapien
tctttccacttgtgttagtcaccat

SEQ ID NO: 940565 - DNA, 25 bp, Homo sapien
cacaagtgtcaattgcactaaccaa

SEQ ID NO: 940566 - DNA, 25 bp, Homo sapien
tgattaataccagactgttcaatgt

SEQ ID NO: 940567 - DNA, 25 bp, Homo sapien
cactaaccaaatagagttggctgat

SEQ ID NO: 940568 - DNA, 25 bp, Homo sapien
tgttcaatgttgatagaagaatctg

SEQ ID NO: 940569 - DNA, 25 bp, Homo sapien
cattaatcgagcttcacaaattgaa

SEQ ID NO: 940570 - DNA, 25 bp, Homo sapien
ggcattaatcgagcttcacaaattg

SEQ ID NO: 940571 - DNA, 25 bp, Homo sapien
tatgctggcattaatcgagcttcac

SEQ ID NO: 940572 - DNA, 25 bp, Homo sapien
tgctggcattaatcgagcttcacaa

SEQ ID NO: 940573 - DNA, 25 bp, Homo sapien
gctgcgtctaacagcatggcaaaga

SEQ ID NO: 940574 - DNA, 25 bp, Homo sapien
agttctttaaatagaggttgcttgg

SEQ ID NO: 940575 - DNA, 25 bp, Homo sapien
gaggttgcttggagctgcgtctaac

SEQ ID NO: 940576 - DNA, 25 bp, Homo sapien
taaatagaggttgcttggagctgcg

SEQ ID NO: 940577 - DNA, 25 bp, Homo sapien
aagtgacaaccatatagtcttcctt

SEQ ID NO: 940578 - DNA, 25 bp, Homo sapien
ctggaccttggctagatttaagatt

SEQ ID NO: 940579 - DNA, 25 bp, Homo sapien
agtgacaaccatatagtcttccttg

SEQ ID NO: 940580 - DNA, 25 bp, Homo sapien
agctggaccttggctagatttaaga

SEQ ID NO: 940581 - DNA, 25 bp, Homo sapien
gaagcctctttcagttgtattccag

SEQ ID NO: 940582 - DNA, 25 bp, Homo sapien
tatcaaagcccggtatatctgcatg

SEQ ID NO: 940583 - DNA, 25 bp, Homo sapien
tagcgcaagttctccaagccaaaaa

SEQ ID NO: 940584 - DNA, 25 bp, Homo sapien
tactgattaaggatttctcagggcc

SEQ ID NO: 940585 - DNA, 25 bp, Homo sapien
ctttttcggagtaattactgatggg

SEQ ID NO: 940586 - DNA, 25 bp, Homo sapien
aagccaattatgatccattctctga

SEQ ID NO: 940587 - DNA, 25 bp, Homo sapien
tttcggagtaattactgatgggaat

SEQ ID NO: 940588 - DNA, 25 bp, Homo sapien
ccatggtgtaacattaagccaatta

SEQ ID NO: 940589 - DNA, 25 bp, Homo sapien
tttgctgcattgggtcttgtgctaa

SEQ ID NO: 940590 - DNA, 25 bp, Homo sapien
gtcttgtgctaaatactaattcagt

SEQ ID NO: 940591 - DNA, 25 bp, Homo sapien
tgggtcttgtgctaaatactaattc

SEQ ID NO: 940592 - DNA, 25 bp, Homo sapien
ctttgctgcattgggtcttgtgcta

SEQ ID NO: 940593 - DNA, 25 bp, Homo sapien
gaagttttaagtagtctgccaccaa

SEQ ID NO: 940594 - DNA, 25 bp, Homo sapien
tgaagttttaagtagtctgccacca

SEQ ID NO: 940595 - DNA, 25 bp, Homo sapien
agttttaagtagtctgccaccaaag

SEQ ID NO: 940596 - DNA, 25 bp, Homo sapien
ggattccagggactatcaatcatac

SEQ ID NO: 940597 - DNA, 25 bp, Homo sapien
tcatacacccaccatcagtgatgag

SEQ ID NO: 940598 - DNA, 25 bp, Homo sapien
tgactgtccccatacaaaattccag

SEQ ID NO: 940599 - DNA, 25 bp, Homo sapien
gatgagaacccgtaattcagtcaat

SEQ ID NO: 940600 - DNA, 25 bp, Homo sapien
cattggtggcatataacatggctaa

SEQ ID NO: 940601 - DNA, 25 bp, Homo sapien
gcagtgctcctcattcaagcatgtg

SEQ ID NO: 940602 - DNA, 25 bp, Homo sapien
catggctaaccagtggataagggct

SEQ ID NO: 940603 - DNA, 25 bp, Homo sapien
tgtgagcaaggagattgcagtcact

SEQ ID NO: 940604 - DNA, 25 bp, Homo sapien
cagtaaacatgggaggattgcagat

SEQ ID NO: 940605 - DNA, 25 bp, Homo sapien
tccattatgtgtaagtaccatattt

SEQ ID NO: 940606 - DNA, 25 bp, Homo sapien
tgggaggattgcagatatctatttg

SEQ ID NO: 940607 - DNA, 25 bp, Homo sapien
aaatattggctattatgactagtgc

SEQ ID NO: 940608 - DNA, 25 bp, Homo sapien
cacagaccatctgattgtttatcct

SEQ ID NO: 940609 - DNA, 25 bp, Homo sapien
cacttttgcttgaaaatgtggctac

SEQ ID NO: 940610 - DNA, 25 bp, Homo sapien
tcctgtttaccccacttttgcttga

SEQ ID NO: 940611 - DNA, 25 bp, Homo sapien
ggctacatacttgaacttggaacat

SEQ ID NO: 940612 - DNA, 25 bp, Homo sapien
taagcccatgtagacacttaaagcc

SEQ ID NO: 940613 - DNA, 25 bp, Homo sapien
ggatagtaaccatggagaactcgta

SEQ ID NO: 940614 - DNA, 25 bp, Homo sapien
gattcactgagctgatagtcatcat

SEQ ID NO: 940615 - DNA, 25 bp, Homo sapien
gaggttcggcatagtgacatttgta

SEQ ID NO: 940616 - DNA, 25 bp, Homo sapien
tcgtgatccgcaggtttgaatctta

SEQ ID NO: 940617 - DNA, 25 bp, Homo sapien
gccttgggccagcttattgcatctt

SEQ ID NO: 940618 - DNA, 25 bp, Homo sapien
ggacacctgtttgactctcactgca

SEQ ID NO: 940619 - DNA, 25 bp, Homo sapien
cttgtgacataaggtttcaggttct

SEQ ID NO: 940620 - DNA, 25 bp, Homo sapien
tctcactgcatttgggatttcttcc

SEQ ID NO: 940621 - DNA, 25 bp, Homo sapien
cctgaagagtgttttgcagctaggt

SEQ ID NO: 940622 - DNA, 25 bp, Homo sapien
gctaggtgggcaagttctcctggat

SEQ ID NO: 940623 - DNA, 25 bp, Homo sapien
ctaccttgctaggtgggcaagttct

SEQ ID NO: 940624 - DNA, 25 bp, Homo sapien
tgttggcctaccttgctaggtgggc

SEQ ID NO: 940625 - DNA, 25 bp, Homo sapien
agaccctgttgcctgagtttcacca

SEQ ID NO: 940626 - DNA, 25 bp, Homo sapien
gtctatagaggcctgtgggcctcgt

SEQ ID NO: 940627 - DNA, 25 bp, Homo sapien
ggaggttgtttgtccgttctcagag

SEQ ID NO: 940628 - DNA, 25 bp, Homo sapien
gaacgcaaatattgcaggacagcaa

SEQ ID NO: 940629 - DNA, 25 bp, Homo sapien
cagagtagcaattctgagagtgaat

SEQ ID NO: 940630 - DNA, 25 bp, Homo sapien
tcagagtagcaattctgagagtgaa

SEQ ID NO: 940631 - DNA, 25 bp, Homo sapien
agagtagcaattctgagagtgaata

SEQ ID NO: 940632 - DNA, 25 bp, Homo sapien
gagtagcaattctgagagtgaatat

SEQ ID NO: 940633 - DNA, 25 bp, Homo sapien
tgcattttttggctaattcctcctg

SEQ ID NO: 940634 - DNA, 25 bp, Homo sapien
gggattaaacacatgtcccagttga

SEQ ID NO: 940635 - DNA, 25 bp, Homo sapien
tcctgtctcaaattcccagtaagag

SEQ ID NO: 940636 - DNA, 25 bp, Homo sapien
ccagttggtatttgagtctcctaga

SEQ ID NO: 940637 - DNA, 25 bp, Homo sapien
catggcctcccattgctaactttga

SEQ ID NO: 940638 - DNA, 25 bp, Homo sapien
gaaaggaggctacaatccaagagat

SEQ ID NO: 940639 - DNA, 25 bp, Homo sapien
catgggcctgaactatgtggtggat

SEQ ID NO: 940640 - DNA, 25 bp, Homo sapien
tcttttttgatggaggcacagtgaa

SEQ ID NO: 940641 - DNA, 25 bp, Homo sapien
caagcagagtaactatcagtcaata

SEQ ID NO: 940642 - DNA, 25 bp, Homo sapien
gcagagtaactatcagtcaataatt

SEQ ID NO: 940643 - DNA, 25 bp, Homo sapien
tcctcaagcagagtaactatcagtc

SEQ ID NO: 940644 - DNA, 25 bp, Homo sapien
tcagtcaataattttatatccagca

SEQ ID NO: 940645 - DNA, 25 bp, Homo sapien
tcaaccattgattacgttccctgac

SEQ ID NO: 940646 - DNA, 25 bp, Homo sapien
agaaggcttcgccagacaacgccac

SEQ ID NO: 940647 - DNA, 25 bp, Homo sapien
attacgttccctgacatgttcctgg

SEQ ID NO: 940648 - DNA, 25 bp, Homo sapien
gctccagaaggcttcgccagacaac

SEQ ID NO: 940649 - DNA, 25 bp, Homo sapien
ccagccactcttgatggcattgcta

SEQ ID NO: 940650 - DNA, 25 bp, Homo sapien
ctactaccaggttcccggatgctat

SEQ ID NO: 940651 - DNA, 25 bp, Homo sapien
ctaccaggttcccggatgctatcat

SEQ ID NO: 940652 - DNA, 25 bp, Homo sapien
ccctggatgtgtccagccactcttg

SEQ ID NO: 940653 - DNA, 25 bp, Homo sapien
gtactcatcctcattgagtgttctg

SEQ ID NO: 940654 - DNA, 25 bp, Homo sapien
agtcactgtactcatcctcattgag

SEQ ID NO: 940655 - DNA, 25 bp, Homo sapien
ctagtcactgtactcatcctcattg

SEQ ID NO: 940656 - DNA, 25 bp, Homo sapien
actcatcctcattgagtgttctgtg

SEQ ID NO: 940657 - DNA, 25 bp, Homo sapien
gtaagagaaccatacttcagggaaa

SEQ ID NO: 940658 - DNA, 25 bp, Homo sapien
aaaggaagaacactgtattctattg

SEQ ID NO: 940659 - DNA, 25 bp, Homo sapien
ttttcctttgtcacagtaagagaac

SEQ ID NO: 940660 - DNA, 25 bp, Homo sapien
aagaacactgtattctattgtaacc

SEQ ID NO: 940661 - DNA, 25 bp, Homo sapien
tttgcgagtcaaagacagcgtgtcc

SEQ ID NO: 940662 - DNA, 25 bp, Homo sapien
gcttcaccgaagtccctttgcgagt

SEQ ID NO: 940663 - DNA, 25 bp, Homo sapien
cgctatagatatttcccttggcata

SEQ ID NO: 940664 - DNA, 25 bp, Homo sapien
ttggcataagcttgcctctcttttt

SEQ ID NO: 940665 - DNA, 25 bp, Homo sapien
aagtcctaggccagctttggactgg

SEQ ID NO: 940666 - DNA, 25 bp, Homo sapien
cattccaagtcctaggccagctttg

SEQ ID NO: 940667 - DNA, 25 bp, Homo sapien
tggacattccaagtcctaggccagc

SEQ ID NO: 940668 - DNA, 25 bp, Homo sapien
ggcctcctggacattccaagtccta

SEQ ID NO: 940669 - DNA, 25 bp, Homo sapien
ttagggcactggtagaaaaccactg

SEQ ID NO: 940670 - DNA, 25 bp, Homo sapien
gaaatgcaagagaagttgcaaaggg

SEQ ID NO: 940671 - DNA, 25 bp, Homo sapien
aaatgcaagagaagttgcaaagggc

SEQ ID NO: 940672 - DNA, 25 bp, Homo sapien
ggaaatgcaagagaagttgcaaagg

SEQ ID NO: 940673 - DNA, 25 bp, Homo sapien
cacttcagctctggataggaaggac

SEQ ID NO: 940674 - DNA, 25 bp, Homo sapien
taagagagacagattgggaagaact

SEQ ID NO: 940675 - DNA, 25 bp, Homo sapien
tagaatctcacctagacaggcatag

SEQ ID NO: 940676 - DNA, 25 bp, Homo sapien
gatatagagatcaagaacatgtcct

SEQ ID NO: 940677 - DNA, 25 bp, Homo sapien
aaaaagatcatttggtgggaaggca

SEQ ID NO: 940678 - DNA, 25 bp, Homo sapien
gacatttgacaataacgacagctaa

SEQ ID NO: 940679 - DNA, 25 bp, Homo sapien
gaaggctaagctgtttcaatatgca

SEQ ID NO: 940680 - DNA, 25 bp, Homo sapien
taactaagtaggagcttcaataccc

SEQ ID NO: 940681 - DNA, 25 bp, Homo sapien
tcaatatgcataggctccacccctg

SEQ ID NO: 940682 - DNA, 25 bp, Homo sapien
tatatattgcagagttaaaactgaa

SEQ ID NO: 940683 - DNA, 25 bp, Homo sapien
aagtttgtggcttcaaaggcatccc

SEQ ID NO: 940684 - DNA, 25 bp, Homo sapien
taagactgtttgataagggtgaggt

SEQ ID NO: 940685 - DNA, 25 bp, Homo sapien
ggcatccccatctaaattaagactg

SEQ ID NO: 940686 - DNA, 25 bp, Homo sapien
gcaagcattcctacatttgctgtac

SEQ ID NO: 940687 - DNA, 25 bp, Homo sapien
cttggctgagcacaatcatcacaat

SEQ ID NO: 940688 - DNA, 25 bp, Homo sapien
gcacaatcatcacaattgcaagcat

SEQ ID NO: 940689 - DNA, 25 bp, Homo sapien
tcacaattgcaagcattcctacatt

SEQ ID NO: 940690 - DNA, 25 bp, Homo sapien
gtttgcatggcaacaactcctgtca

SEQ ID NO: 940691 - DNA, 25 bp, Homo sapien
ccaaaagttggccagagtatgcact

SEQ ID NO: 940692 - DNA, 25 bp, Homo sapien
tggcatgggctaactacacaacgtt

SEQ ID NO: 940693 - DNA, 25 bp, Homo sapien
tacttgttcatgagagcacttctgg

SEQ ID NO: 940694 - DNA, 25 bp, Homo sapien
cacaggtgaactgttcaggttggag

SEQ ID NO: 940695 - DNA, 25 bp, Homo sapien
ctaatacctcaagggaaaaagctat

SEQ ID NO: 940696 - DNA, 25 bp, Homo sapien
tggaattcactaatacctcaaggga

SEQ ID NO: 940697 - DNA, 25 bp, Homo sapien
gttattctcagtctactatcaattg

SEQ ID NO: 940698 - DNA, 25 bp, Homo sapien
cagtctactatcaattgctttggaa

SEQ ID NO: 940699 - DNA, 25 bp, Homo sapien
aataaagaaatgttgatgagagtgg

SEQ ID NO: 940700 - DNA, 25 bp, Homo sapien
tcaaataaagaaatgttgatgagag

SEQ ID NO: 940701 - DNA, 25 bp, Homo sapien
caaataaagaaatgttgatgagagt

SEQ ID NO: 940702 - DNA, 25 bp, Homo sapien
taaagaaatgttgatgagagtgggt

SEQ ID NO: 940703 - DNA, 25 bp, Homo sapien
ttcattctttgggtctcctcttgtt

SEQ ID NO: 940704 - DNA, 25 bp, Homo sapien
gcactttcattctttgggtctcctc

SEQ ID NO: 940705 - DNA, 25 bp, Homo sapien
ctttcattctttgggtctcctcttg

SEQ ID NO: 940706 - DNA, 25 bp, Homo sapien
cactttcattctttgggtctcctct

SEQ ID NO: 940707 - DNA, 25 bp, Homo sapien
ggtctccactgatccagataaagcg

SEQ ID NO: 940708 - DNA, 25 bp, Homo sapien
tatatggccagtctattaaccaccc

SEQ ID NO: 940709 - DNA, 25 bp, Homo sapien
tgcagactcatatccaggtaccttt

SEQ ID NO: 940710 - DNA, 25 bp, Homo sapien
tccctgtataatcaaaaatggccag

SEQ ID NO: 940711 - DNA, 25 bp, Homo sapien
tctgaatcctaactttttgtttata

SEQ ID NO: 940712 - DNA, 25 bp, Homo sapien
ctaactttttgtttataatgatact

SEQ ID NO: 940713 - DNA, 25 bp, Homo sapien
atcctaactttttgtttataatgat

SEQ ID NO: 940714 - DNA, 25 bp, Homo sapien
tcctaactttttgtttataatgata

SEQ ID NO: 940715 - DNA, 25 bp, Homo sapien
caatcaatccatcgtatatagtgca

SEQ ID NO: 940716 - DNA, 25 bp, Homo sapien
cctgtaacattgacggtaaagggat

SEQ ID NO: 940717 - DNA, 25 bp, Homo sapien
tgacggtaaagggatccaatcaatc

SEQ ID NO: 940718 - DNA, 25 bp, Homo sapien
ccatcgtatatagtgcacctgcaga

SEQ ID NO: 940719 - DNA, 25 bp, Homo sapien
catctagagatatagcaagcaacag

SEQ ID NO: 940720 - DNA, 25 bp, Homo sapien
gaagtgaaatccacacgagtcatgg

SEQ ID NO: 940721 - DNA, 25 bp, Homo sapien
cacatggcagatatatcgcaggcta

SEQ ID NO: 940722 - DNA, 25 bp, Homo sapien
tgtgaatccgctgctcaatttgcgt

SEQ ID NO: 940723 - DNA, 25 bp, Homo sapien
tcagagtccatgagcaaaatttgcc

SEQ ID NO: 940724 - DNA, 25 bp, Homo sapien
gctgtcatggcaaaagctcagagaa

SEQ ID NO: 940725 - DNA, 25 bp, Homo sapien
tgtccttgtgctcagagtccatgag

SEQ ID NO: 940726 - DNA, 25 bp, Homo sapien
tgctgtcatggcaaaagctcagaga

SEQ ID NO: 940727 - DNA, 25 bp, Homo sapien
gtcacaattagcttgcaggactgca

SEQ ID NO: 940728 - DNA, 25 bp, Homo sapien
catgctccctatctggtcacgtggg

SEQ ID NO: 940729 - DNA, 25 bp, Homo sapien
tcaatgactacaaacacagggtggt

SEQ ID NO: 940730 - DNA, 25 bp, Homo sapien
tctcagcttatctaatgggttaacc

SEQ ID NO: 940731 - DNA, 25 bp, Homo sapien
tctgacgtctacttctagaggccat

SEQ ID NO: 940732 - DNA, 25 bp, Homo sapien
ctgtaactggtgtagtctgtatccc

SEQ ID NO: 940733 - DNA, 25 bp, Homo sapien
tcccatgacggtgatattaaaatgt

SEQ ID NO: 940734 - DNA, 25 bp, Homo sapien
tttgtagggcaatattctgacgtct

SEQ ID NO: 940735 - DNA, 25 bp, Homo sapien
taaatcatatatctcaaggtctctg

SEQ ID NO: 940736 - DNA, 25 bp, Homo sapien
gaattgcagacatcttcgttgtaac

SEQ ID NO: 940737 - DNA, 25 bp, Homo sapien
cagacttagtgattataatactgac

SEQ ID NO: 940738 - DNA, 25 bp, Homo sapien
tgaaacttatcagcgaagtcatcac

SEQ ID NO: 940739 - DNA, 25 bp, Homo sapien
gtgtttggtacagactcagaggcat

SEQ ID NO: 940740 - DNA, 25 bp, Homo sapien
tttcagtgtttggtacagactcaga

SEQ ID NO: 940741 - DNA, 25 bp, Homo sapien
ttcagtgtttggtacagactcagag

SEQ ID NO: 940742 - DNA, 25 bp, Homo sapien
gtttggtacagactcagaggcattc

SEQ ID NO: 940743 - DNA, 25 bp, Homo sapien
gagcagtgaatctatgtgagagact

SEQ ID NO: 940744 - DNA, 25 bp, Homo sapien
gagaaatggaattggcactgaccac

SEQ ID NO: 940745 - DNA, 25 bp, Homo sapien
gaatctatgtgagagactgacaatg

SEQ ID NO: 940746 - DNA, 25 bp, Homo sapien
ttcttggagcagtgaatctatgtga

SEQ ID NO: 940747 - DNA, 25 bp, Homo sapien
caacttcttttgtgattatctggac

SEQ ID NO: 940748 - DNA, 25 bp, Homo sapien
aacttcttttgtgattatctggact

SEQ ID NO: 940749 - DNA, 25 bp, Homo sapien
ttttgtgattatctggactggacat

SEQ ID NO: 940750 - DNA, 25 bp, Homo sapien
cttttgtgattatctggactggaca

SEQ ID NO: 940751 - DNA, 25 bp, Homo sapien
gaagaccatctttctcactgttcat

SEQ ID NO: 940752 - DNA, 25 bp, Homo sapien
tgaagaccatctttctcactgttca

SEQ ID NO: 940753 - DNA, 25 bp, Homo sapien
tgtgaagaccatctttctcactgtt

SEQ ID NO: 940754 - DNA, 25 bp, Homo sapien
ctgtgaagaccatctttctcactgt

SEQ ID NO: 940755 - DNA, 25 bp, Homo sapien
ggttatgtctagatcctagtttagg

SEQ ID NO: 940756 - DNA, 25 bp, Homo sapien
tatgtctagatcctagtttaggccc

SEQ ID NO: 940757 - DNA, 25 bp, Homo sapien
acatggttatgtctagatcctagtt

SEQ ID NO: 940758 - DNA, 25 bp, Homo sapien
ctagatcctagtttaggccccaact

SEQ ID NO: 940759 - DNA, 25 bp, Homo sapien
aaacatcgttcaaggtcatggagga

SEQ ID NO: 940760 - DNA, 25 bp, Homo sapien
aaagaaaacatcgttcaaggtcatg

SEQ ID NO: 940761 - DNA, 25 bp, Homo sapien
ctctggtactgtgacttcaggctcc

SEQ ID NO: 940762 - DNA, 25 bp, Homo sapien
tggtactgtgacttcaggctccgaa

SEQ ID NO: 940763 - DNA, 25 bp, Homo sapien
aaaggaaattcaacaaggaatatct

SEQ ID NO: 940764 - DNA, 25 bp, Homo sapien
aggattgcggacttgcttctttcta

SEQ ID NO: 940765 - DNA, 25 bp, Homo sapien
ggacattgtgttctccagccatctg

SEQ ID NO: 940766 - DNA, 25 bp, Homo sapien
aaaatgtctggcctgcagtacttag

SEQ ID NO: 940767 - DNA, 25 bp, Homo sapien
tcctgtctctaatcttaggacattg

SEQ ID NO: 940768 - DNA, 25 bp, Homo sapien
tctggtggcctgtgtgaaatgcatc

SEQ ID NO: 940769 - DNA, 25 bp, Homo sapien
tggtggcctgtgtgaaatgcatcag

SEQ ID NO: 940770 - DNA, 25 bp, Homo sapien
ggcctgtgtgaaatgcatcagtagc

SEQ ID NO: 940771 - DNA, 25 bp, Homo sapien
tctctggtggcctgtgtgaaatgca

SEQ ID NO: 940772 - DNA, 25 bp, Homo sapien
tgcaggcagtaatttagtcagctgt

SEQ ID NO: 940773 - DNA, 25 bp, Homo sapien
tcagaaaagccgctggaaagacctt

SEQ ID NO: 940774 - DNA, 25 bp, Homo sapien
gcaggcagtaatttagtcagctgtg

SEQ ID NO: 940775 - DNA, 25 bp, Homo sapien
gaccttgagctttctacccaactgc

SEQ ID NO: 940776 - DNA, 25 bp, Homo sapien
tagtggttgccttctcacacgtgac

SEQ ID NO: 940777 - DNA, 25 bp, Homo sapien
tttggtcccgaccacagaatatggt

SEQ ID NO: 940778 - DNA, 25 bp, Homo sapien
tacagttctgccacctagtggttgc

SEQ ID NO: 940779 - DNA, 25 bp, Homo sapien
cacgtgacttggcagcatttacact

SEQ ID NO: 940780 - DNA, 25 bp, Homo sapien
aagcttggcaagtcgctttccacca

SEQ ID NO: 940781 - DNA, 25 bp, Homo sapien
caaaagcttggcaagtcgctttcca

SEQ ID NO: 940782 - DNA, 25 bp, Homo sapien
ggcaagtcgctttccaccatgtaaa

SEQ ID NO: 940783 - DNA, 25 bp, Homo sapien
agccagcaaaagcttggcaagtcgc

SEQ ID NO: 940784 - DNA, 25 bp, Homo sapien
tcccaaactcttttgatgtatgtct

SEQ ID NO: 940785 - DNA, 25 bp, Homo sapien
tcaagttatgcatattaatctcctc

SEQ ID NO: 940786 - DNA, 25 bp, Homo sapien
actcttttgatgtatgtcttctgaa

SEQ ID NO: 940787 - DNA, 25 bp, Homo sapien
tcttccaagttgacaaagcaaaact

SEQ ID NO: 940788 - DNA, 25 bp, Homo sapien
gagaaggggcactctggttttcaga

SEQ ID NO: 940789 - DNA, 25 bp, Homo sapien
tgcaatgggtttgtacatcctcctt

SEQ ID NO: 940790 - DNA, 25 bp, Homo sapien
taacttccttgcaatgggtttgtac

SEQ ID NO: 940791 - DNA, 25 bp, Homo sapien
tgatcctttaggggagaaggggcac

SEQ ID NO: 940792 - DNA, 25 bp, Homo sapien
tcagatgtagatttaaaatacttta

SEQ ID NO: 940793 - DNA, 25 bp, Homo sapien
cactgcaaagtcacgccaaattgta

SEQ ID NO: 940794 - DNA, 25 bp, Homo sapien
cagccactgcaaagtcacgccaaat

SEQ ID NO: 940795 - DNA, 25 bp, Homo sapien
atcagatgtagatttaaaatacttt

SEQ ID NO: 940796 - DNA, 25 bp, Homo sapien
gttggacacaacagatcccagccag

SEQ ID NO: 940797 - DNA, 25 bp, Homo sapien
aactccctcctgtcggggtagtgat

SEQ ID NO: 940798 - DNA, 25 bp, Homo sapien
ctgaagttggacacaacagatccca

SEQ ID NO: 940799 - DNA, 25 bp, Homo sapien
tgatgaggtaatacagtcgatccat

SEQ ID NO: 940800 - DNA, 25 bp, Homo sapien
tctcttcctccgatgattaaatcca

SEQ ID NO: 940801 - DNA, 25 bp, Homo sapien
taaatccagaaaagggtctactgtc

SEQ ID NO: 940802 - DNA, 25 bp, Homo sapien
atccagaaaagggtctactgtcagt

SEQ ID NO: 940803 - DNA, 25 bp, Homo sapien
ccagaaaagggtctactgtcagtca

SEQ ID NO: 940804 - DNA, 25 bp, Homo sapien
ttctcttcagttctaacataagtgc

SEQ ID NO: 940805 - DNA, 25 bp, Homo sapien
tctgccagcaacttgatcttgtact

SEQ ID NO: 940806 - DNA, 25 bp, Homo sapien
agacaccagatctgccagcaacttg

SEQ ID NO: 940807 - DNA, 25 bp, Homo sapien
cagatctgccagcaacttgatcttg

SEQ ID NO: 940808 - DNA, 25 bp, Homo sapien
caccagatctgccagcaacttgatc

SEQ ID NO: 940809 - DNA, 25 bp, Homo sapien
atgactacatcatcagccatgagtt

SEQ ID NO: 940810 - DNA, 25 bp, Homo sapien
tgagaatgactacatcatcagccat

SEQ ID NO: 940811 - DNA, 25 bp, Homo sapien
gagaatgactacatcatcagccatg

SEQ ID NO: 940812 - DNA, 25 bp, Homo sapien
ctttgagaatgactacatcatcagc

SEQ ID NO: 940813 - DNA, 25 bp, Homo sapien
ctgcccagccggcttcctcatcctc

SEQ ID NO: 940814 - DNA, 25 bp, Homo sapien
tctttctgcccagccggcttcctca

SEQ ID NO: 940815 - DNA, 25 bp, Homo sapien
tgcagtaggacctggcaggctcttc

SEQ ID NO: 940816 - DNA, 25 bp, Homo sapien
tggcagcctgcagtaggacctggca

SEQ ID NO: 940817 - DNA, 25 bp, Homo sapien
gacccagagattgttctgcacaaac

SEQ ID NO: 940818 - DNA, 25 bp, Homo sapien
cagtgtgcagttgagtcgcgagtac

SEQ ID NO: 940819 - DNA, 25 bp, Homo sapien
cagcattcccggatgggcgtggctt

SEQ ID NO: 940820 - DNA, 25 bp, Homo sapien
aatttgggagaatgcgaaaaagcag

SEQ ID NO: 940821 - DNA, 25 bp, Homo sapien
tctctgctcccgctctcctaatctc

SEQ ID NO: 940822 - DNA, 25 bp, Homo sapien
tctcctctggcatgcggtcagcccc

SEQ ID NO: 940823 - DNA, 25 bp, Homo sapien
ctgctcccgctctcctaatctcctc

SEQ ID NO: 940824 - DNA, 25 bp, Homo sapien
atctcctctggcatgcggtcagccc

SEQ ID NO: 940825 - DNA, 25 bp, Homo sapien
agagctttaaagttggagccgccac

SEQ ID NO: 940826 - DNA, 25 bp, Homo sapien
gaaagccaagcgctctagcagagct

SEQ ID NO: 940827 - DNA, 25 bp, Homo sapien
caagcgctctagcagagctttaaag

SEQ ID NO: 940828 - DNA, 25 bp, Homo sapien
gccaagcgctctagcagagctttaa

SEQ ID NO: 940829 - DNA, 25 bp, Homo sapien
cttcaccccactccgaaattcaccg

SEQ ID NO: 940830 - DNA, 25 bp, Homo sapien
attcaccgacctttgcatgcactgc

SEQ ID NO: 940831 - DNA, 25 bp, Homo sapien
ctccgaaattcaccgacctttgcat

SEQ ID NO: 940832 - DNA, 25 bp, Homo sapien
ccactccgaaattcaccgacctttg

SEQ ID NO: 940833 - DNA, 25 bp, Homo sapien
gggcagtggtccagcgtgcagccgg

SEQ ID NO: 940834 - DNA, 25 bp, Homo sapien
gcagtggtccagcgtgcagccggga

SEQ ID NO: 940835 - DNA, 25 bp, Homo sapien
gatgcctggatgttctgccaccggg

SEQ ID NO: 940836 - DNA, 25 bp, Homo sapien
atgcctggatgttctgccaccgggc

SEQ ID NO: 940837 - DNA, 25 bp, Homo sapien
caagttggccatttcgagggcaaaa

SEQ ID NO: 940838 - DNA, 25 bp, Homo sapien
gcacaagttggccatttcgagggca

SEQ ID NO: 940839 - DNA, 25 bp, Homo sapien
ctgcgcgcacaagttggccatttcg

SEQ ID NO: 940840 - DNA, 25 bp, Homo sapien
tggccatttcgagggcaaaataagt

SEQ ID NO: 940841 - DNA, 25 bp, Homo sapien
tagagcatggaccagtccctacagt

SEQ ID NO: 940842 - DNA, 25 bp, Homo sapien
tcctgccaggagttgtcggtgcgag

SEQ ID NO: 940843 - DNA, 25 bp, Homo sapien
cagccgggaaagttgaggtagagca

SEQ ID NO: 940844 - DNA, 25 bp, Homo sapien
ggtcccagaggaggacgtgtccctc

SEQ ID NO: 940845 - DNA, 25 bp, Homo sapien
aaatatcttggtagactcaccatcc

SEQ ID NO: 940846 - DNA, 25 bp, Homo sapien
aatcttgttccaagacatccgtgtg

SEQ ID NO: 940847 - DNA, 25 bp, Homo sapien
gactcaccatcccactcaattgttt

SEQ ID NO: 940848 - DNA, 25 bp, Homo sapien
tccaggcattgaaatacaagttctg

SEQ ID NO: 940849 - DNA, 25 bp, Homo sapien
gggaaaaatgccgaacaggaagtga

SEQ ID NO: 940850 - DNA, 25 bp, Homo sapien
ctaagcagcgttcagagccacatgg

SEQ ID NO: 940851 - DNA, 25 bp, Homo sapien
agcagcgttcagagccacatgggaa

SEQ ID NO: 940852 - DNA, 25 bp, Homo sapien
aaaatgccgaacaggaagtgaggga

SEQ ID NO: 940853 - DNA, 25 bp, Homo sapien
tggaatgctacacttagtagctgac

SEQ ID NO: 940854 - DNA, 25 bp, Homo sapien
ccttcactggaatgctacacttagt

SEQ ID NO: 940855 - DNA, 25 bp, Homo sapien
tgccttcactggaatgctacactta

SEQ ID NO: 940856 - DNA, 25 bp, Homo sapien
cactggaatgctacacttagtagct

SEQ ID NO: 940857 - DNA, 25 bp, Homo sapien
cccagaataaatctttgacgctaag

SEQ ID NO: 940858 - DNA, 25 bp, Homo sapien
agttatccagttagtgaatttcttg

SEQ ID NO: 940859 - DNA, 25 bp, Homo sapien
tgttgtataacttaactacccagaa

SEQ ID NO: 940860 - DNA, 25 bp, Homo sapien
ttgacgctaaggttgtcataggcga

SEQ ID NO: 940861 - DNA, 25 bp, Homo sapien
gatttaacaccctttgatcgtgttg

SEQ ID NO: 940862 - DNA, 25 bp, Homo sapien
tatccaccccattggactgatttaa

SEQ ID NO: 940863 - DNA, 25 bp, Homo sapien
tctcttcagctaccacaacttcata

SEQ ID NO: 940864 - DNA, 25 bp, Homo sapien
tctctcacatgctaatgaggcattc

SEQ ID NO: 940865 - DNA, 25 bp, Homo sapien
cttgagtccacaaatccaattggtt

SEQ ID NO: 940866 - DNA, 25 bp, Homo sapien
tccaaatggcattttgaatccactc

SEQ ID NO: 940867 - DNA, 25 bp, Homo sapien
ggcattttgaatccactcctctttt

SEQ ID NO: 940868 - DNA, 25 bp, Homo sapien
gaatttctgcctgcatatcttgagt

SEQ ID NO: 940869 - DNA, 25 bp, Homo sapien
gaaatggagtcttttctatgggtcc

SEQ ID NO: 940870 - DNA, 25 bp, Homo sapien
cacagctcatactttattgggtcat

SEQ ID NO: 940871 - DNA, 25 bp, Homo sapien
cactcatccccttgatcatctccat

SEQ ID NO: 940872 - DNA, 25 bp, Homo sapien
cccacagctcatactttattgggtc

SEQ ID NO: 940873 - DNA, 25 bp, Homo sapien
tagacacgctccagtttggcatggg

SEQ ID NO: 940874 - DNA, 25 bp, Homo sapien
tgctttcagtgggtatttctccata

SEQ ID NO: 940875 - DNA, 25 bp, Homo sapien
aaggaagacatatgctttcagtggg

SEQ ID NO: 940876 - DNA, 25 bp, Homo sapien
gagaacagagctcaatcagaatgaa

SEQ ID NO: 940877 - DNA, 25 bp, Homo sapien
tttgaaggttttgaagcataataat

SEQ ID NO: 940878 - DNA, 25 bp, Homo sapien
catgtaactttgtctttgaaggttt

SEQ ID NO: 940879 - DNA, 25 bp, Homo sapien
aggttttgaagcataataattctgc

SEQ ID NO: 940880 - DNA, 25 bp, Homo sapien
agcataataattctgctgaagcagc

SEQ ID NO: 940881 - DNA, 25 bp, Homo sapien
ggatagacatctggcaaaggatcag

SEQ ID NO: 940882 - DNA, 25 bp, Homo sapien
caactactgaaaagaaggcggagag

SEQ ID NO: 940883 - DNA, 25 bp, Homo sapien
ctatgcaagagcttactgagtccac

SEQ ID NO: 940884 - DNA, 25 bp, Homo sapien
ggcatgttgccctccattgaggaga

SEQ ID NO: 940885 - DNA, 25 bp, Homo sapien
ttctccagctgcatatgaatgtggc

SEQ ID NO: 940886 - DNA, 25 bp, Homo sapien
tcatcatccccgaatggagaacttt

SEQ ID NO: 940887 - DNA, 25 bp, Homo sapien
cacatgcttgtttacagttgacgca

SEQ ID NO: 940888 - DNA, 25 bp, Homo sapien
gaggtggttggtgccctttcacaca

SEQ ID NO: 940889 - DNA, 25 bp, Homo sapien
aacaggtaaactgatagacactgtt

SEQ ID NO: 940890 - DNA, 25 bp, Homo sapien
caggtaaactgatagacactgttgc

SEQ ID NO: 940891 - DNA, 25 bp, Homo sapien
ggtaaactgatagacactgttgcct

SEQ ID NO: 940892 - DNA, 25 bp, Homo sapien
gtaaactgatagacactgttgcctt

SEQ ID NO: 940893 - DNA, 25 bp, Homo sapien
gttcttcatctttcctagagacctt

SEQ ID NO: 940894 - DNA, 25 bp, Homo sapien
ttcctagagacctttctccaacaac

SEQ ID NO: 940895 - DNA, 25 bp, Homo sapien
tttctaagatgcttctaggaattta

SEQ ID NO: 940896 - DNA, 25 bp, Homo sapien
ttctaagatgcttctaggaatttaa

SEQ ID NO: 940897 - DNA, 25 bp, Homo sapien
gtatccttggctatgtttctttgtc

SEQ ID NO: 940898 - DNA, 25 bp, Homo sapien
tagtgccttgtataatcgacatcag

SEQ ID NO: 940899 - DNA, 25 bp, Homo sapien
tcaccctctctattgcttcttgagc

SEQ ID NO: 940900 - DNA, 25 bp, Homo sapien
tcaaattacgacttcctggaggact

SEQ ID NO: 940901 - DNA, 25 bp, Homo sapien
cagatgtgctacaggtaatgtggcc

SEQ ID NO: 940902 - DNA, 25 bp, Homo sapien
caagctgaataggagggacactgag

SEQ ID NO: 940903 - DNA, 25 bp, Homo sapien
ccccaaaaagataggtgaacagcag

SEQ ID NO: 940904 - DNA, 25 bp, Homo sapien
tgaacagcttgaatttctcaggcag

SEQ ID NO: 940905 - DNA, 25 bp, Homo sapien
tattaaagtcatggtcctccaggct

SEQ ID NO: 940906 - DNA, 25 bp, Homo sapien
tatataatgttgaaaagatggcccc

SEQ ID NO: 940907 - DNA, 25 bp, Homo sapien
gattcctagtactttcctcgttcag

SEQ ID NO: 940908 - DNA, 25 bp, Homo sapien
caagagtccaagcaatgtcaccaat

SEQ ID NO: 940909 - DNA, 25 bp, Homo sapien
tagttcgttctcttgcaaagcctgc

SEQ ID NO: 940910 - DNA, 25 bp, Homo sapien
cataaatccagtggaagccaggcac

SEQ ID NO: 940911 - DNA, 25 bp, Homo sapien
tgtatcaagaagagatggcctctcc

SEQ ID NO: 940912 - DNA, 25 bp, Homo sapien
taagtcagtataggccattttgtcc

SEQ ID NO: 940913 - DNA, 25 bp, Homo sapien
ccaaaatacagtatccaaggaagca

SEQ ID NO: 940914 - DNA, 25 bp, Homo sapien
tatccaaggaagcatctggtattca

SEQ ID NO: 940915 - DNA, 25 bp, Homo sapien
gaagcatctggtattcatctcaaga

SEQ ID NO: 940916 - DNA, 25 bp, Homo sapien
gagacctgcttcctagtgtccaaaa

SEQ ID NO: 940917 - DNA, 25 bp, Homo sapien
tccgcaagtcctacgacagcgtgat

SEQ ID NO: 940918 - DNA, 25 bp, Homo sapien
tctgcatcgctacggcggagaaggt

SEQ ID NO: 940919 - DNA, 25 bp, Homo sapien
gtgtccacagtagcctccgagggtg

SEQ ID NO: 940920 - DNA, 25 bp, Homo sapien
gatcgaggccttcgagcaggaagcc

SEQ ID NO: 940921 - DNA, 25 bp, Homo sapien
tgtttccaacattagggcttttcca

SEQ ID NO: 940922 - DNA, 25 bp, Homo sapien
tcaatgagacctactctggccattc

SEQ ID NO: 940923 - DNA, 25 bp, Homo sapien
tacagatgcccctatttcccttgta

SEQ ID NO: 940924 - DNA, 25 bp, Homo sapien
cccagatatttctgtggttaatcca

SEQ ID NO: 940925 - DNA, 25 bp, Homo sapien
taaagataaatatcctgtacttctt

SEQ ID NO: 940926 - DNA, 25 bp, Homo sapien
tcccctggaacatttgtagttccca

SEQ ID NO: 940927 - DNA, 25 bp, Homo sapien
gtaaagataaatatcctgtacttct

SEQ ID NO: 940928 - DNA, 25 bp, Homo sapien
tgtaaagataaatatcctgtacttc

SEQ ID NO: 940929 - DNA, 25 bp, Homo sapien
ggcaatggtgacatatgtacataga

SEQ ID NO: 940930 - DNA, 25 bp, Homo sapien
tgtcaggtactacaacagatgagat

SEQ ID NO: 940931 - DNA, 25 bp, Homo sapien
ttgagtgttttagagctagtgctgc

SEQ ID NO: 940932 - DNA, 25 bp, Homo sapien
gttcttcatgataaagcaaagacag

SEQ ID NO: 940933 - DNA, 25 bp, Homo sapien
tgtcaccctgaacatggcaggttct

SEQ ID NO: 940934 - DNA, 25 bp, Homo sapien
tcatatgtcaccctgaacatggcag

SEQ ID NO: 940935 - DNA, 25 bp, Homo sapien
tcaccctgaacatggcaggttctgg

SEQ ID NO: 940936 - DNA, 25 bp, Homo sapien
tatgtcaccctgaacatggcaggtt

SEQ ID NO: 940937 - DNA, 25 bp, Homo sapien
ttaacgacgtgtggatatgcttgaa

SEQ ID NO: 940938 - DNA, 25 bp, Homo sapien
acttgaaatcttgtggttcaataag

SEQ ID NO: 940939 - DNA, 25 bp, Homo sapien
cacttgaaatcttgtggttcaataa

SEQ ID NO: 940940 - DNA, 25 bp, Homo sapien
gctgtgcttgtcttcggaaagttca

SEQ ID NO: 940941 - DNA, 25 bp, Homo sapien
agttactgcatgcttagctgctgtg

SEQ ID NO: 940942 - DNA, 25 bp, Homo sapien
ctgtgcttgtcttcggaaagttcat

SEQ ID NO: 940943 - DNA, 25 bp, Homo sapien
ttagtagagaagaagtttcactatg

SEQ ID NO: 940944 - DNA, 25 bp, Homo sapien
tttagtagagaagaagtttcactat

SEQ ID NO: 940945 - DNA, 25 bp, Homo sapien
cctcaggcgatccacctcccaaagt

SEQ ID NO: 940946 - DNA, 25 bp, Homo sapien
tgacctcaggcgatccacctcccaa

SEQ ID NO: 940947 - DNA, 25 bp, Homo sapien
tgtcccctgaattgcgggtaggagg

SEQ ID NO: 940948 - DNA, 25 bp, Homo sapien
ggaatctccataatttccactcatt

SEQ ID NO: 940949 - DNA, 25 bp, Homo sapien
tctgagttgcctagagtattgacaa

SEQ ID NO: 940950 - DNA, 25 bp, Homo sapien
caaataaatcaggttagccctgtcc

SEQ ID NO: 940951 - DNA, 25 bp, Homo sapien
agccacatccgactccttctgaaag

SEQ ID NO: 940952 - DNA, 25 bp, Homo sapien
tgaggagcttgaaattagagtttgg

SEQ ID NO: 940953 - DNA, 25 bp, Homo sapien
gattttgaagcacccgagtgatgag

SEQ ID NO: 940954 - DNA, 25 bp, Homo sapien
tctgaaagtgaagacctgattttga

SEQ ID NO: 940955 - DNA, 25 bp, Homo sapien
gcctgaccttgcttaattatcttta

SEQ ID NO: 940956 - DNA, 25 bp, Homo sapien
aagtctactcttcactggtgttcac

SEQ ID NO: 940957 - DNA, 25 bp, Homo sapien
tttactttaaagctactctgcctga

SEQ ID NO: 940958 - DNA, 25 bp, Homo sapien
caagctaagtctactcttcactggt

SEQ ID NO: 940959 - DNA, 25 bp, Homo sapien
gacttttaatagtgtgacttactga

SEQ ID NO: 940960 - DNA, 25 bp, Homo sapien
caaatgttcactacatgtgaggctc

SEQ ID NO: 940961 - DNA, 25 bp, Homo sapien
agtatttagcaagggtaatcatccc

SEQ ID NO: 940962 - DNA, 25 bp, Homo sapien
ggataactgaaactatgagactgat

SEQ ID NO: 940963 - DNA, 25 bp, Homo sapien
gctgtttgtttgcacccaaggttca

SEQ ID NO: 940964 - DNA, 25 bp, Homo sapien
aaccatgtgcatctctgtcagcctg

SEQ ID NO: 940965 - DNA, 25 bp, Homo sapien
cctcaacaggttcagtgtcagtgga

SEQ ID NO: 940966 - DNA, 25 bp, Homo sapien
tctcttgtaggtgcagacgacaacc

SEQ ID NO: 940967 - DNA, 25 bp, Homo sapien
ggcatcttgttctatcagcatgggt

SEQ ID NO: 940968 - DNA, 25 bp, Homo sapien
tcttgttctatcagcatgggtacag

SEQ ID NO: 940969 - DNA, 25 bp, Homo sapien
ttttcagctctatacctgatggcat

SEQ ID NO: 940970 - DNA, 25 bp, Homo sapien
ttctatcagcatgggtacagactcg

SEQ ID NO: 940971 - DNA, 25 bp, Homo sapien
catcagagttgtggtatgacctgac

SEQ ID NO: 940972 - DNA, 25 bp, Homo sapien
tagtagcctggccaagcaagttagg

SEQ ID NO: 940973 - DNA, 25 bp, Homo sapien
tagtcccataatgttcatggagtcc

SEQ ID NO: 940974 - DNA, 25 bp, Homo sapien
catggagtcccataatgacactacg

SEQ ID NO: 940975 - DNA, 25 bp, Homo sapien
gacttttgtccctaggcatagtagc

SEQ ID NO: 940976 - DNA, 25 bp, Homo sapien
tgggcatccctctttatactttttg

SEQ ID NO: 940977 - DNA, 25 bp, Homo sapien
gaaaccagtgatgttgggcaactaa

SEQ ID NO: 940978 - DNA, 25 bp, Homo sapien
tagtagcacatgcaactcatattag

SEQ ID NO: 940979 - DNA, 25 bp, Homo sapien
gcatgcacagaaataatacaacttg

SEQ ID NO: 940980 - DNA, 25 bp, Homo sapien
cctcttcaatcgctaaaatttcatt

SEQ ID NO: 940981 - DNA, 25 bp, Homo sapien
tttcatttttagcatgcacagaaat

SEQ ID NO: 940982 - DNA, 25 bp, Homo sapien
tattcctcttcaatcgctaaaattt

SEQ ID NO: 940983 - DNA, 25 bp, Homo sapien
gtctgaaaataaggctgcccatagg

SEQ ID NO: 940984 - DNA, 25 bp, Homo sapien
ataaggctgcccataggcttcatgt

SEQ ID NO: 940985 - DNA, 25 bp, Homo sapien
aataaggctgcccataggcttcatg

SEQ ID NO: 940986 - DNA, 25 bp, Homo sapien
gaaaataaggctgcccataggcttc

SEQ ID NO: 940987 - DNA, 25 bp, Homo sapien
tatagcttttaatgggctcgtattg

SEQ ID NO: 940988 - DNA, 25 bp, Homo sapien
agatattatagcttttaatgggctc

SEQ ID NO: 940989 - DNA, 25 bp, Homo sapien
gcttttaatgggctcgtattgtaaa

SEQ ID NO: 940990 - DNA, 25 bp, Homo sapien
taatgggctcgtattgtaaagaaaa

SEQ ID NO: 940991 - DNA, 25 bp, Homo sapien
ccagggaagatttgatggctctcat

SEQ ID NO: 940992 - DNA, 25 bp, Homo sapien
tcagaatatagagactgtggctgcc

SEQ ID NO: 940993 - DNA, 25 bp, Homo sapien
taacctacataagggagtgaacagg

SEQ ID NO: 940994 - DNA, 25 bp, Homo sapien
tttttcagtagccatgctcaggcac

SEQ ID NO: 940995 - DNA, 25 bp, Homo sapien
cagatgctaaagactggacccaagt

SEQ ID NO: 940996 - DNA, 25 bp, Homo sapien
tgctgggctctgatctagacaagtg

SEQ ID NO: 940997 - DNA, 25 bp, Homo sapien
tcagtttaggagttgggcctgtcaa

SEQ ID NO: 940998 - DNA, 25 bp, Homo sapien
tttagcttccaacgaatgagtcggg

SEQ ID NO: 940999 - DNA, 25 bp, Homo sapien
tatactcatatgtgcaacagcagag

SEQ ID NO: 941000 - DNA, 25 bp, Homo sapien
ttcttaccagctccaacgaggatgg

SEQ ID NO: 941001 - DNA, 25 bp, Homo sapien
ccagggttcctctgaaagggttcat

SEQ ID NO: 941002 - DNA, 25 bp, Homo sapien
gctcataagcactctgttggcagga

SEQ ID NO: 941003 - DNA, 25 bp, Homo sapien
ttcattgctcaccattttttagtag

SEQ ID NO: 941004 - DNA, 25 bp, Homo sapien
tagaaaagctgttttaaggtcagga

SEQ ID NO: 941005 - DNA, 25 bp, Homo sapien
aaaatttattgtcttcattgctcac

SEQ ID NO: 941006 - DNA, 25 bp, Homo sapien
gtcttcattgctcaccattttttag

SEQ ID NO: 941007 - DNA, 25 bp, Homo sapien
ggtacttgaccatgtgataaggcaa

SEQ ID NO: 941008 - DNA, 25 bp, Homo sapien
aaatatggtcctgtaaaactagagc

SEQ ID NO: 941009 - DNA, 25 bp, Homo sapien
cattagtctcaaggctacagcactg

SEQ ID NO: 941010 - DNA, 25 bp, Homo sapien
tgtgacaggtatgaggacagaccct

SEQ ID NO: 941011 - DNA, 25 bp, Homo sapien
gaggttttcagttgaacagattcaa

SEQ ID NO: 941012 - DNA, 25 bp, Homo sapien
tttcagttgaacagattcaaaatgg

SEQ ID NO: 941013 - DNA, 25 bp, Homo sapien
cagttgaacagattcaaaatggtct

SEQ ID NO: 941014 - DNA, 25 bp, Homo sapien
cttgaggttttcagttgaacagatt

SEQ ID NO: 941015 - DNA, 25 bp, Homo sapien
taattatcctctagcccgaaagact

SEQ ID NO: 941016 - DNA, 25 bp, Homo sapien
tatggtgggcatatgactataccac

SEQ ID NO: 941017 - DNA, 25 bp, Homo sapien
tactctaattggagaggtgactgct

SEQ ID NO: 941018 - DNA, 25 bp, Homo sapien
tctgttaacacgaggcgaatgaatc

SEQ ID NO: 941019 - DNA, 25 bp, Homo sapien
cactgttaacagtttgctatgcaaa

SEQ ID NO: 941020 - DNA, 25 bp, Homo sapien
tgacaaccaacgaaaacaatgctgc

SEQ ID NO: 941021 - DNA, 25 bp, Homo sapien
caaaataacagcttgcgtgaatgct

SEQ ID NO: 941022 - DNA, 25 bp, Homo sapien
ccttactgatgatgtttgacaacca

SEQ ID NO: 941023 - DNA, 25 bp, Homo sapien
tagtcgtcattactaacttggaata

SEQ ID NO: 941024 - DNA, 25 bp, Homo sapien
gatttgagttttcctagtagtgact

SEQ ID NO: 941025 - DNA, 25 bp, Homo sapien
caactgtctgcagccgggagttcac

SEQ ID NO: 941026 - DNA, 25 bp, Homo sapien
cctagtagtgactgtttattggaat

SEQ ID NO: 941027 - DNA, 25 bp, Homo sapien
gatatttgcctatacactaggtctg

SEQ ID NO: 941028 - DNA, 25 bp, Homo sapien
tacctgaataacatggagcctcttg

SEQ ID NO: 941029 - DNA, 25 bp, Homo sapien
cccagatattgcaattgtccctaga

SEQ ID NO: 941030 - DNA, 25 bp, Homo sapien
cagacactgagagaatacctgcctt

SEQ ID NO: 941031 - DNA, 25 bp, Homo sapien
ttcacaggttgccaactttttctca

SEQ ID NO: 941032 - DNA, 25 bp, Homo sapien
agccaaaagtcaaccgtttcacagg

SEQ ID NO: 941033 - DNA, 25 bp, Homo sapien
ggcagtaaaagctcccacaccggct

SEQ ID NO: 941034 - DNA, 25 bp, Homo sapien
tcagagccaccagcaaaacggcagt

SEQ ID NO: 941035 - DNA, 25 bp, Homo sapien
ccacaggaaatagaacgtacaccca

SEQ ID NO: 941036 - DNA, 25 bp, Homo sapien
cacagagggcaagcttcagcactct

SEQ ID NO: 941037 - DNA, 25 bp, Homo sapien
gcaggctccctcaatctcatggaag

SEQ ID NO: 941038 - DNA, 25 bp, Homo sapien
aagtcatgctccgtacacagagggc

SEQ ID NO: 941039 - DNA, 25 bp, Homo sapien
atatctattatctgtctataaattg

SEQ ID NO: 941040 - DNA, 25 bp, Homo sapien
atctattatctgtctataaattgtt

SEQ ID NO: 941041 - DNA, 25 bp, Homo sapien
tatctattatctgtctataaattgt

SEQ ID NO: 941042 - DNA, 25 bp, Homo sapien
ttttcacagcagttgatcggccatt

SEQ ID NO: 941043 - DNA, 25 bp, Homo sapien
gatcggccattaatacaagatgttg

SEQ ID NO: 941044 - DNA, 25 bp, Homo sapien
tttagtaggattacacctcattttc

SEQ ID NO: 941045 - DNA, 25 bp, Homo sapien
ggactgaaatcactcctgctccaga

SEQ ID NO: 941046 - DNA, 25 bp, Homo sapien
tatttttcaatgtggtttcaactgt

SEQ ID NO: 941047 - DNA, 25 bp, Homo sapien
ttcaatgtggtttcaactgtgactc

SEQ ID NO: 941048 - DNA, 25 bp, Homo sapien
ctggtatttggcttgttggaactgg

SEQ ID NO: 941049 - DNA, 25 bp, Homo sapien
ggcttgttggaactgggaacatatc

SEQ ID NO: 941050 - DNA, 25 bp, Homo sapien
cattagagagctagattcttcttga

SEQ ID NO: 941051 - DNA, 25 bp, Homo sapien
tagagagctagattcttcttgaaac

SEQ ID NO: 941052 - DNA, 25 bp, Homo sapien
tgaaacttatctatgacctccagga

SEQ ID NO: 941053 - DNA, 25 bp, Homo sapien
tcttcttgaaacttatctatgacct

SEQ ID NO: 941054 - DNA, 25 bp, Homo sapien
tgttatattgttggtacagagagcc

SEQ ID NO: 941055 - DNA, 25 bp, Homo sapien
tttgtgtaatcatctgaccctgcca

SEQ ID NO: 941056 - DNA, 25 bp, Homo sapien
gattgtgatgataaggctgctcgga

SEQ ID NO: 941057 - DNA, 25 bp, Homo sapien
gctgctcggaaacccttactttcag

SEQ ID NO: 941058 - DNA, 25 bp, Homo sapien
caattcatagagtaacaatgcatgc

SEQ ID NO: 941059 - DNA, 25 bp, Homo sapien
actgctgatgaaagcttcagtgtca

SEQ ID NO: 941060 - DNA, 25 bp, Homo sapien
tttcctttatgaccctatgtgtagc

SEQ ID NO: 941061 - DNA, 25 bp, Homo sapien
gcatgcaaaaagaccagaaaactgc

SEQ ID NO: 941062 - DNA, 25 bp, Homo sapien
tatcaactgatatttggccctgcat

SEQ ID NO: 941063 - DNA, 25 bp, Homo sapien
cttatcaactgatatttggccctgc

SEQ ID NO: 941064 - DNA, 25 bp, Homo sapien
tttggccctgcatgtctccttttta

SEQ ID NO: 941065 - DNA, 25 bp, Homo sapien
caactgatatttggccctgcatgtc

SEQ ID NO: 941066 - DNA, 25 bp, Homo sapien
gccattcattaatgagcccacactg

SEQ ID NO: 941067 - DNA, 25 bp, Homo sapien
taaagtcatagtgcaaactctgatt

SEQ ID NO: 941068 - DNA, 25 bp, Homo sapien
gcccacataaactgatattgaagaa

SEQ ID NO: 941069 - DNA, 25 bp, Homo sapien
cagtcactatagcaaaccgaatggt

SEQ ID NO: 941070 - DNA, 25 bp, Homo sapien
gtttttactcccaggcccgcatgga

SEQ ID NO: 941071 - DNA, 25 bp, Homo sapien
gggacacacgatgaacccgactgtt

SEQ ID NO: 941072 - DNA, 25 bp, Homo sapien
ccatcaactgcattagtggctgtga

SEQ ID NO: 941073 - DNA, 25 bp, Homo sapien
cccgcatggaatacaagcctctttg

SEQ ID NO: 941074 - DNA, 25 bp, Homo sapien
gaccctgattagttctctggaatgc

SEQ ID NO: 941075 - DNA, 25 bp, Homo sapien
tctggaatgcccatgtaaatgtaaa

SEQ ID NO: 941076 - DNA, 25 bp, Homo sapien
tgaagatgatatgggtgtaagcttg

SEQ ID NO: 941077 - DNA, 25 bp, Homo sapien
tctttggttccaccccacgattcta

SEQ ID NO: 941078 - DNA, 25 bp, Homo sapien
acacagtcagctgaacagagggtct

SEQ ID NO: 941079 - DNA, 25 bp, Homo sapien
aacacagtcagctgaacagagggtc

SEQ ID NO: 941080 - DNA, 25 bp, Homo sapien
gttcagaacccgtggctccagtcat

SEQ ID NO: 941081 - DNA, 25 bp, Homo sapien
gaacccgtggctccagtcatagatg

SEQ ID NO: 941082 - DNA, 25 bp, Homo sapien
cttcctagttcagaacccgtggctc

SEQ ID NO: 941083 - DNA, 25 bp, Homo sapien
ggctccagtcatagatgttggtggt

SEQ ID NO: 941084 - DNA, 25 bp, Homo sapien
cattgagtccacataacgatggtaa

SEQ ID NO: 941085 - DNA, 25 bp, Homo sapien
ttgtagacattgagtccacataacg

SEQ ID NO: 941086 - DNA, 25 bp, Homo sapien
aatatgcttgaacctcttgctgtaa

SEQ ID NO: 941087 - DNA, 25 bp, Homo sapien
ccacataacgatggtaatatgcttg

SEQ ID NO: 941088 - DNA, 25 bp, Homo sapien
gccccactctggatatgatctccag

SEQ ID NO: 941089 - DNA, 25 bp, Homo sapien
agtttaagatcaggtaatcattgtc

SEQ ID NO: 941090 - DNA, 25 bp, Homo sapien
agccccactctggatatgatctcca

SEQ ID NO: 941091 - DNA, 25 bp, Homo sapien
caggtaatcattgtcagaacctcca

SEQ ID NO: 941092 - DNA, 25 bp, Homo sapien
tagaggtgtttaggttgttgtctaa

SEQ ID NO: 941093 - DNA, 25 bp, Homo sapien
actgatagaggtgtttaggttgttg

SEQ ID NO: 941094 - DNA, 25 bp, Homo sapien
tgatagaggtgtttaggttgttgtc

SEQ ID NO: 941095 - DNA, 25 bp, Homo sapien
gatagaggtgtttaggttgttgtct

SEQ ID NO: 941096 - DNA, 25 bp, Homo sapien
tacagtcaagttgggcaaagcacac

SEQ ID NO: 941097 - DNA, 25 bp, Homo sapien
taaaaactacttgtctccagctttg

SEQ ID NO: 941098 - DNA, 25 bp, Homo sapien
gtgaaaatcagaccaagactacatg

SEQ ID NO: 941099 - DNA, 25 bp, Homo sapien
tccatgccttagtgggtgactatcc

SEQ ID NO: 941100 - DNA, 25 bp, Homo sapien
tgctcctcacaaggttggctactgg

SEQ ID NO: 941101 - DNA, 25 bp, Homo sapien
tcacaaggttggctactggaccagc

SEQ ID NO: 941102 - DNA, 25 bp, Homo sapien
gctactggaccagccagtcacaaaa

SEQ ID NO: 941103 - DNA, 25 bp, Homo sapien
gagtgctgctcctcacaaggttggc

SEQ ID NO: 941104 - DNA, 25 bp, Homo sapien
ccgttcctgctggacatggtctaca

SEQ ID NO: 941105 - DNA, 25 bp, Homo sapien
gcactttgaattcccaacattgaag

SEQ ID NO: 941106 - DNA, 25 bp, Homo sapien
tttatattcaaagccaagtgcaggc

SEQ ID NO: 941107 - DNA, 25 bp, Homo sapien
catgttgccaggaaggacattccac

SEQ ID NO: 941108 - DNA, 25 bp, Homo sapien
tctgaaaatgttccaggaggacagg

SEQ ID NO: 941109 - DNA, 25 bp, Homo sapien
gatgatccattgttataaaatccag

SEQ ID NO: 941110 - DNA, 25 bp, Homo sapien
taatagcatctgtgagatcctcccg

SEQ ID NO: 941111 - DNA, 25 bp, Homo sapien
aaatccagggttgcaaggcggacaa

SEQ ID NO: 941112 - DNA, 25 bp, Homo sapien
gctgccaacttgtatctgactcctc

SEQ ID NO: 941113 - DNA, 25 bp, Homo sapien
ttagatttctgtccccatgcaagtc

SEQ ID NO: 941114 - DNA, 25 bp, Homo sapien
gttaagtaggtcgtcagcctgccca

SEQ ID NO: 941115 - DNA, 25 bp, Homo sapien
gcactcatcatttgtctctcttgga

SEQ ID NO: 941116 - DNA, 25 bp, Homo sapien
tcttcatcacatggagtatggatct

SEQ ID NO: 941117 - DNA, 25 bp, Homo sapien
aatagtcttttgtggtacagggagg

SEQ ID NO: 941118 - DNA, 25 bp, Homo sapien
gggcgctctgtacactcactggatc

SEQ ID NO: 941119 - DNA, 25 bp, Homo sapien
gagtatggatctggaaatagtcttt

SEQ ID NO: 941120 - DNA, 25 bp, Homo sapien
gcaacataaaaaaagcgtttcagaa

SEQ ID NO: 941121 - DNA, 25 bp, Homo sapien
ctgaaaattgagagtcgtctttaca

SEQ ID NO: 941122 - DNA, 25 bp, Homo sapien
ttgagagtcgtctttacaccttata

SEQ ID NO: 941123 - DNA, 25 bp, Homo sapien
aattgagagtcgtctttacacctta

SEQ ID NO: 941124 - DNA, 25 bp, Homo sapien
gaaaattgagagtcgtctttacacc

SEQ ID NO: 941125 - DNA, 25 bp, Homo sapien
ctggcagttgaatgaacctggtttg

SEQ ID NO: 941126 - DNA, 25 bp, Homo sapien
tgaatgaacctggtttgttgctgaa

SEQ ID NO: 941127 - DNA, 25 bp, Homo sapien
gaatgtgcctggcttgcaaggaaaa

SEQ ID NO: 941128 - DNA, 25 bp, Homo sapien
aaacattctgatgtgtacgccaccc

SEQ ID NO: 941129 - DNA, 25 bp, Homo sapien
gggacccaataccaataagcaaatc

SEQ ID NO: 941130 - DNA, 25 bp, Homo sapien
caataagcaaatcagcacctacttc

SEQ ID NO: 941131 - DNA, 25 bp, Homo sapien
caataccaataagcaaatcagcacc

SEQ ID NO: 941132 - DNA, 25 bp, Homo sapien
gcatgggagggggacccaataccaa

SEQ ID NO: 941133 - DNA, 25 bp, Homo sapien
tgtttgtgcctgatttcagcattac

SEQ ID NO: 941134 - DNA, 25 bp, Homo sapien
cagcacaggcttgaccgccttagaa

SEQ ID NO: 941135 - DNA, 25 bp, Homo sapien
tgtagttctccagtagagtatgttt

SEQ ID NO: 941136 - DNA, 25 bp, Homo sapien
tagaacccataaggatgcctgtagt

SEQ ID NO: 941137 - DNA, 25 bp, Homo sapien
tccattgtctgtaagttttacccac

SEQ ID NO: 941138 - DNA, 25 bp, Homo sapien
gaatgagagccccattctccattgt

SEQ ID NO: 941139 - DNA, 25 bp, Homo sapien
gccccattctccattgtctgtaagt

SEQ ID NO: 941140 - DNA, 25 bp, Homo sapien
tctccattgtctgtaagttttaccc

SEQ ID NO: 941141 - DNA, 25 bp, Homo sapien
aaagtgtcttgaataacagctttaa

SEQ ID NO: 941142 - DNA, 25 bp, Homo sapien
cacaagagccctagtaaagtgtctt

SEQ ID NO: 941143 - DNA, 25 bp, Homo sapien
caagagccctagtaaagtgtcttga

SEQ ID NO: 941144 - DNA, 25 bp, Homo sapien
aagtgtcttgaataacagctttaat

SEQ ID NO: 941145 - DNA, 25 bp, Homo sapien
gttgttgtcgacatactggtactca

SEQ ID NO: 941146 - DNA, 25 bp, Homo sapien
tcttaaggtgcacagcatagatcaa

SEQ ID NO: 941147 - DNA, 25 bp, Homo sapien
gattctatgtagtttccacgaggga

SEQ ID NO: 941148 - DNA, 25 bp, Homo sapien
catagatcaaagacaccgtgcagtc

SEQ ID NO: 941149 - DNA, 25 bp, Homo sapien
ttgttacagccgtctggcctgctgt

SEQ ID NO: 941150 - DNA, 25 bp, Homo sapien
tgttacagccgtctggcctgctgtc

SEQ ID NO: 941151 - DNA, 25 bp, Homo sapien
cacacttactgcatacctggttctt

SEQ ID NO: 941152 - DNA, 25 bp, Homo sapien
ccactgcccaaggaataggtgcctt

SEQ ID NO: 941153 - DNA, 25 bp, Homo sapien
aaatcctgccggcaattcatcccat

SEQ ID NO: 941154 - DNA, 25 bp, Homo sapien
tgaatgttgcgatgttagaaaatcc

SEQ ID NO: 941155 - DNA, 25 bp, Homo sapien
ttctagatactctccagaagcacag

SEQ ID NO: 941156 - DNA, 25 bp, Homo sapien
tctagatactctccagaagcacagg

SEQ ID NO: 941157 - DNA, 25 bp, Homo sapien
gattctgcagttttgagggctgagt

SEQ ID NO: 941158 - DNA, 25 bp, Homo sapien
accagggccttaagagaagtgccaa

SEQ ID NO: 941159 - DNA, 25 bp, Homo sapien
cagggccttaagagaagtgccaatg

SEQ ID NO: 941160 - DNA, 25 bp, Homo sapien
tggcaccagggccttaagagaagtg

SEQ ID NO: 941161 - DNA, 25 bp, Homo sapien
gcaccagggccttaagagaagtgcc

SEQ ID NO: 941162 - DNA, 25 bp, Homo sapien
ggaatggcaactctccacctggagc

SEQ ID NO: 941163 - DNA, 25 bp, Homo sapien
gagccactgctatcacattccgtat

SEQ ID NO: 941164 - DNA, 25 bp, Homo sapien
cacattccgtatattcaaagtgata

SEQ ID NO: 941165 - DNA, 25 bp, Homo sapien
aatttggaatggcaactctccacct

SEQ ID NO: 941166 - DNA, 25 bp, Homo sapien
aaaacaagcctttgttagagccagt

SEQ ID NO: 941167 - DNA, 25 bp, Homo sapien
caaaaacaagcctttgttagagcca

SEQ ID NO: 941168 - DNA, 25 bp, Homo sapien
gcaaacaatcacaaaaacaagcctt

SEQ ID NO: 941169 - DNA, 25 bp, Homo sapien
ctgcaaacaatcacaaaaacaagcc

SEQ ID NO: 941170 - DNA, 25 bp, Homo sapien
ctagtttgataggatgtggtaagca

SEQ ID NO: 941171 - DNA, 25 bp, Homo sapien
taggatgtggtaagcagcaagatca

SEQ ID NO: 941172 - DNA, 25 bp, Homo sapien
tgcagtgaaatacatcagcctcagc

SEQ ID NO: 941173 - DNA, 25 bp, Homo sapien
gaaactatgcctagagctgtgcagt

SEQ ID NO: 941174 - DNA, 25 bp, Homo sapien
ttttcatgacattaacccacttgaa

SEQ ID NO: 941175 - DNA, 25 bp, Homo sapien
gcataactctgtaagctttccaaaa

SEQ ID NO: 941176 - DNA, 25 bp, Homo sapien
tgatcattactattgtcattaaaaa

SEQ ID NO: 941177 - DNA, 25 bp, Homo sapien
gaatttgtccacagtatggtcccac

SEQ ID NO: 941178 - DNA, 25 bp, Homo sapien
ggtcctcagaactgccctgcataag

SEQ ID NO: 941179 - DNA, 25 bp, Homo sapien
tagtgctgtcgaccaccttgtaagg

SEQ ID NO: 941180 - DNA, 25 bp, Homo sapien
cactgcaactatgggtgctaacaga

SEQ ID NO: 941181 - DNA, 25 bp, Homo sapien
gaaaatccgactaatgctccagaga

SEQ ID NO: 941182 - DNA, 25 bp, Homo sapien
ttcttcacatgaagaaatgatcctt

SEQ ID NO: 941183 - DNA, 25 bp, Homo sapien
gcatcttatggccacaaagcttgga

SEQ ID NO: 941184 - DNA, 25 bp, Homo sapien
ggaaagcaggtctgtcaaaggaaac

SEQ ID NO: 941185 - DNA, 25 bp, Homo sapien
tatctgagctgtaaatgaacacacc

SEQ ID NO: 941186 - DNA, 25 bp, Homo sapien
gaaatagctagtgggccaagagcct

SEQ ID NO: 941187 - DNA, 25 bp, Homo sapien
cttaaaacacggcgcaccacaagat

SEQ ID NO: 941188 - DNA, 25 bp, Homo sapien
cgggcttaaaacacggcgcaccaca

SEQ ID NO: 941189 - DNA, 25 bp, Homo sapien
caccgtgcacgagccaaagcagggt

SEQ ID NO: 941190 - DNA, 25 bp, Homo sapien
aaaacacggcgcaccacaagattat

SEQ ID NO: 941191 - DNA, 25 bp, Homo sapien
gggagaggcgcccgccattgcccag

SEQ ID NO: 941192 - DNA, 25 bp, Homo sapien
gcgaggctgggggagaggcgcccgc

SEQ ID NO: 941193 - DNA, 25 bp, Homo sapien
ggcggcagcgaggctgggggagagg

SEQ ID NO: 941194 - DNA, 25 bp, Homo sapien
gggggagaggcgcccgccattgccc

SEQ ID NO: 941195 - DNA, 25 bp, Homo sapien
cagccggcgagcgcccagcagcaaa

SEQ ID NO: 941196 - DNA, 25 bp, Homo sapien
agccggcgagcgcccagcagcaaat

SEQ ID NO: 941197 - DNA, 25 bp, Homo sapien
ggcagccggcgagcgcccagcagca

SEQ ID NO: 941198 - DNA, 25 bp, Homo sapien
gccggcgagcgcccagcagcaaatc

SEQ ID NO: 941199 - DNA, 25 bp, Homo sapien
ccgggccgcgactgctgtgcgctcg

SEQ ID NO: 941200 - DNA, 25 bp, Homo sapien
cggtcggcgggccggcggcaaggca

SEQ ID NO: 941201 - DNA, 25 bp, Homo sapien
gggccggcggcaaggcagccttccc

SEQ ID NO: 941202 - DNA, 25 bp, Homo sapien
ggccgcgactgctgtgcgctcgtct

SEQ ID NO: 941203 - DNA, 25 bp, Homo sapien
gttgttgaacatggaggactgtctg

SEQ ID NO: 941204 - DNA, 25 bp, Homo sapien
agttgttgaacatggaggactgtct

SEQ ID NO: 941205 - DNA, 25 bp, Homo sapien
ttgttgaacatggaggactgtctgc

SEQ ID NO: 941206 - DNA, 25 bp, Homo sapien
tagggaacgtaagagctagacaagg

SEQ ID NO: 941207 - DNA, 25 bp, Homo sapien
aattcaaacatggcacgtcctctcc

SEQ ID NO: 941208 - DNA, 25 bp, Homo sapien
aaatctgccttaagactggcacatt

SEQ ID NO: 941209 - DNA, 25 bp, Homo sapien
gttatgtccatcaggaagaattcaa

SEQ ID NO: 941210 - DNA, 25 bp, Homo sapien
ctgatggatttgtcacaactgtaag

SEQ ID NO: 941211 - DNA, 25 bp, Homo sapien
tgtgccttgtactcagggacctgac

SEQ ID NO: 941212 - DNA, 25 bp, Homo sapien
tgccttgtactcagggacctgacaa

SEQ ID NO: 941213 - DNA, 25 bp, Homo sapien
ggtcctgtgccttgtactcagggac

SEQ ID NO: 941214 - DNA, 25 bp, Homo sapien
ggctgagacgatgggattttcaaac

SEQ ID NO: 941215 - DNA, 25 bp, Homo sapien
gagacgatgggattttcaaactgga

SEQ ID NO: 941216 - DNA, 25 bp, Homo sapien
ctgagacgatgggattttcaaactg

SEQ ID NO: 941217 - DNA, 25 bp, Homo sapien
gacgatgggattttcaaactggatc

SEQ ID NO: 941218 - DNA, 25 bp, Homo sapien
ccattatttctgactcataactcag

SEQ ID NO: 941219 - DNA, 25 bp, Homo sapien
cattatttctgactcataactcagg

SEQ ID NO: 941220 - DNA, 25 bp, Homo sapien
ctcaaaccagcacggaccacatatt

SEQ ID NO: 941221 - DNA, 25 bp, Homo sapien
ttacgcacataggtctgcaacaatc

SEQ ID NO: 941222 - DNA, 25 bp, Homo sapien
acataggtctgcaacaatcactgtg

SEQ ID NO: 941223 - DNA, 25 bp, Homo sapien
tggtcagaaggatgtgataaacgga

SEQ ID NO: 941224 - DNA, 25 bp, Homo sapien
aggcccttgtcacactgaacaccca

SEQ ID NO: 941225 - DNA, 25 bp, Homo sapien
ggcccttgtcacactgaacacccat

SEQ ID NO: 941226 - DNA, 25 bp, Homo sapien
aaggcccttgtcacactgaacaccc

SEQ ID NO: 941227 - DNA, 25 bp, Homo sapien
taaggcccttgtcacactgaacacc

SEQ ID NO: 941228 - DNA, 25 bp, Homo sapien
tgtcgatcctccagtaaagcaaagc

SEQ ID NO: 941229 - DNA, 25 bp, Homo sapien
gaaaattagtcaaacatgtcgatcc

SEQ ID NO: 941230 - DNA, 25 bp, Homo sapien
tcgttatgaaagtactgccaaagtg

SEQ ID NO: 941231 - DNA, 25 bp, Homo sapien
tgcaaccgggtagttcagaacacag

SEQ ID NO: 941232 - DNA, 25 bp, Homo sapien
gtttatacggctgcaacccaaggag

SEQ ID NO: 941233 - DNA, 25 bp, Homo sapien
gcccctgcggtaaggcaaatcaagt

SEQ ID NO: 941234 - DNA, 25 bp, Homo sapien
ggaactatgaaaatcggcacgcgag

SEQ ID NO: 941235 - DNA, 25 bp, Homo sapien
tcggctcggagccacagggaactat

SEQ ID NO: 941236 - DNA, 25 bp, Homo sapien
tagtcagtgccgagttttcctggca

SEQ ID NO: 941237 - DNA, 25 bp, Homo sapien
cagtgggatagtcagtgccgagttt

SEQ ID NO: 941238 - DNA, 25 bp, Homo sapien
tttcctggcaggacagccgacaacc

SEQ ID NO: 941239 - DNA, 25 bp, Homo sapien
agcatcagcagtgggatagtcagtg

SEQ ID NO: 941240 - DNA, 25 bp, Homo sapien
tccgtttccggtggctcgtcgcgct

SEQ ID NO: 941241 - DNA, 25 bp, Homo sapien
ttttttcgcgcgccgacacagccgg

SEQ ID NO: 941242 - DNA, 25 bp, Homo sapien
cgacacagccggaagtgacgcgtac

SEQ ID NO: 941243 - DNA, 25 bp, Homo sapien
gtgacgcgtacagccagcacgctgg

SEQ ID NO: 941244 - DNA, 25 bp, Homo sapien
cctggtattttttggagcttccatc

SEQ ID NO: 941245 - DNA, 25 bp, Homo sapien
ggtattttttggagcttccatcctg

SEQ ID NO: 941246 - DNA, 25 bp, Homo sapien
actctcgcccgtggctgcttcctcc

SEQ ID NO: 941247 - DNA, 25 bp, Homo sapien
ttttttggagcttccatcctggttc

SEQ ID NO: 941248 - DNA, 25 bp, Homo sapien
ccttgctgcccgctagctcccgccg

SEQ ID NO: 941249 - DNA, 25 bp, Homo sapien
cttgctgcccgctagctcccgccgg

SEQ ID NO: 941250 - DNA, 25 bp, Homo sapien
cctgtccggcccccttgctgcccgc

SEQ ID NO: 941251 - DNA, 25 bp, Homo sapien
cccttgctgcccgctagctcccgcc

SEQ ID NO: 941252 - DNA, 25 bp, Homo sapien
tgagagtagaagtggccaagtgccc

SEQ ID NO: 941253 - DNA, 25 bp, Homo sapien
tgttttaccacaatctccagagcag

SEQ ID NO: 941254 - DNA, 25 bp, Homo sapien
tacagtatgagtcaggactcctccc

SEQ ID NO: 941255 - DNA, 25 bp, Homo sapien
cctattgtgccgagttccgagaaag

SEQ ID NO: 941256 - DNA, 25 bp, Homo sapien
gttgtcagagaaaagcacactggag

SEQ ID NO: 941257 - DNA, 25 bp, Homo sapien
aatccattccatgactgagtactag

SEQ ID NO: 941258 - DNA, 25 bp, Homo sapien
gatacaagaagacccgagaaagtgg

SEQ ID NO: 941259 - DNA, 25 bp, Homo sapien
cccaagtttgtagaaagataatcca

SEQ ID NO: 941260 - DNA, 25 bp, Homo sapien
tatgttcatttatggctctgctgct

SEQ ID NO: 941261 - DNA, 25 bp, Homo sapien
ggctctgctgctcaaacttttccac

SEQ ID NO: 941262 - DNA, 25 bp, Homo sapien
tatatagaggaacaaatcccacggg

SEQ ID NO: 941263 - DNA, 25 bp, Homo sapien
cttaattgaatatgccttatgttca

SEQ ID NO: 941264 - DNA, 25 bp, Homo sapien
ttgtctgacagccctctgtgtaccc

SEQ ID NO: 941265 - DNA, 25 bp, Homo sapien
gtctgacagccctctgtgtacccat

SEQ ID NO: 941266 - DNA, 25 bp, Homo sapien
tgtctgacagccctctgtgtaccca

SEQ ID NO: 941267 - DNA, 25 bp, Homo sapien
ctttcaggcttaccatatatgcaca

SEQ ID NO: 941268 - DNA, 25 bp, Homo sapien
tgagtacaatgttaacacaatggca

SEQ ID NO: 941269 - DNA, 25 bp, Homo sapien
ctgttttccagataaaccaaatggg

SEQ ID NO: 941270 - DNA, 25 bp, Homo sapien
caaaaaagtgatagcagagttggcg

SEQ ID NO: 941271 - DNA, 25 bp, Homo sapien
caacataaatgtccagtaacggata

SEQ ID NO: 941272 - DNA, 25 bp, Homo sapien
ctctcacccagactgcggccttgat

SEQ ID NO: 941273 - DNA, 25 bp, Homo sapien
tgtccagtaacggataactgttaaa

SEQ ID NO: 941274 - DNA, 25 bp, Homo sapien
gttcgaaattttgtcatatcctttg

SEQ ID NO: 941275 - DNA, 25 bp, Homo sapien
aactgattcgattttcttgatggtc

SEQ ID NO: 941276 - DNA, 25 bp, Homo sapien
catctatgtcatgtgggcctagtgt

SEQ ID NO: 941277 - DNA, 25 bp, Homo sapien
taatggtctaatctctgcagcgtct

SEQ ID NO: 941278 - DNA, 25 bp, Homo sapien
gcagcgtctctatttaggcctcatt

SEQ ID NO: 941279 - DNA, 25 bp, Homo sapien
gtaacccatttaggcacgcggaata

SEQ ID NO: 941280 - DNA, 25 bp, Homo sapien
cagaaatccctaaatcaaagaaatg

SEQ ID NO: 941281 - DNA, 25 bp, Homo sapien
taaatgccgttgatgacctttaaca

SEQ ID NO: 941282 - DNA, 25 bp, Homo sapien
agagtgcttcgcatgtatgatgaca

SEQ ID NO: 941283 - DNA, 25 bp, Homo sapien
tatagcattcctaggtcagtggcct

SEQ ID NO: 941284 - DNA, 25 bp, Homo sapien
gatagcatttatgggaaggcatcat

SEQ ID NO: 941285 - DNA, 25 bp, Homo sapien
caaagtctgctttgtagtaaagtaa

SEQ ID NO: 941286 - DNA, 25 bp, Homo sapien
tataggttagatttaagacttggct

SEQ ID NO: 941287 - DNA, 25 bp, Homo sapien
agaggatggccacctttggaacttt

SEQ ID NO: 941288 - DNA, 25 bp, Homo sapien
gtggagcatgactgaatgccctttc

SEQ ID NO: 941289 - DNA, 25 bp, Homo sapien
aagtcagtctcctaatctagtggtc

SEQ ID NO: 941290 - DNA, 25 bp, Homo sapien
ccattcccctggtaaacaatatatg

SEQ ID NO: 941291 - DNA, 25 bp, Homo sapien
caaaggccctagcaagtaaaggaca

SEQ ID NO: 941292 - DNA, 25 bp, Homo sapien
tagtcccacagtaaccctgacagct

SEQ ID NO: 941293 - DNA, 25 bp, Homo sapien
gaccaggattagttgataaggacca

SEQ ID NO: 941294 - DNA, 25 bp, Homo sapien
aggcacctacctacttcaaacaagc

SEQ ID NO: 941295 - DNA, 25 bp, Homo sapien
tccatatcccaagcagaactgacag

SEQ ID NO: 941296 - DNA, 25 bp, Homo sapien
tctgacaccgaccttaaacaagagg

SEQ ID NO: 941297 - DNA, 25 bp, Homo sapien
gccttgagcctcaaacctgcagttt

SEQ ID NO: 941298 - DNA, 25 bp, Homo sapien
cagtgcagtgtcacacaccaagagt

SEQ ID NO: 941299 - DNA, 25 bp, Homo sapien
cccactatagaagaacaagttgatc

SEQ ID NO: 941300 - DNA, 25 bp, Homo sapien
tagtcctgttgagttctacactgtg

SEQ ID NO: 941301 - DNA, 25 bp, Homo sapien
cctttgacaacactaacaggtactg

SEQ ID NO: 941302 - DNA, 25 bp, Homo sapien
ttgatccaataagctactagtcctg

SEQ ID NO: 941303 - DNA, 25 bp, Homo sapien
tacatttggttaacccattgctggc

SEQ ID NO: 941304 - DNA, 25 bp, Homo sapien
catacaagtatagagacctaggagg

SEQ ID NO: 941305 - DNA, 25 bp, Homo sapien
tgtactacagaagggttaaggcaaa

SEQ ID NO: 941306 - DNA, 25 bp, Homo sapien
taccgagagaatagtttgtcatcca

SEQ ID NO: 941307 - DNA, 25 bp, Homo sapien
aaatcatgtatcagacttctgcagg

SEQ ID NO: 941308 - DNA, 25 bp, Homo sapien
ggttgcctagggaacaattgtatat

SEQ ID NO: 941309 - DNA, 25 bp, Homo sapien
tctcccttgcaagagggaattaaca

SEQ ID NO: 941310 - DNA, 25 bp, Homo sapien
cctggtaagtacttctccttggcag

SEQ ID NO: 941311 - DNA, 25 bp, Homo sapien
tttcggttctaagtctccttgtcga

SEQ ID NO: 941312 - DNA, 25 bp, Homo sapien
agtacaggtttgcacatatacacaa

SEQ ID NO: 941313 - DNA, 25 bp, Homo sapien
caacatgatgatagaaaatatgata

SEQ ID NO: 941314 - DNA, 25 bp, Homo sapien
tctaagtctccttgtcgataccagt

SEQ ID NO: 941315 - DNA, 25 bp, Homo sapien
tgtttaaattctcaacagtacttac

SEQ ID NO: 941316 - DNA, 25 bp, Homo sapien
cccttttgtatagacccaaggctga

SEQ ID NO: 941317 - DNA, 25 bp, Homo sapien
ctgtgcattgcaacttaaaccctca

SEQ ID NO: 941318 - DNA, 25 bp, Homo sapien
gaggatataattaagagataccctt

SEQ ID NO: 941319 - DNA, 25 bp, Homo sapien
atactactcaaagagatgcagacag

SEQ ID NO: 941320 - DNA, 25 bp, Homo sapien
aagtatgcaggcagtaatactactc

SEQ ID NO: 941321 - DNA, 25 bp, Homo sapien
atatattcaacggttttggaggtag

SEQ ID NO: 941322 - DNA, 25 bp, Homo sapien
aagaatatattcaacggttttggag

SEQ ID NO: 941323 - DNA, 25 bp, Homo sapien
tactaggcaaaacatggtaaactca

SEQ ID NO: 941324 - DNA, 25 bp, Homo sapien
taagagcctgggtgaggcacaaaat

SEQ ID NO: 941325 - DNA, 25 bp, Homo sapien
tcactcccaggattaatgattctgc

SEQ ID NO: 941326 - DNA, 25 bp, Homo sapien
taccaactggagtctaggcaacagt

SEQ ID NO: 941327 - DNA, 25 bp, Homo sapien
caacaactaaattgatgattcgatc

SEQ ID NO: 941328 - DNA, 25 bp, Homo sapien
gccaacaactaaattgatgattcga

SEQ ID NO: 941329 - DNA, 25 bp, Homo sapien
aatcaataaggatgttaagctgcca

SEQ ID NO: 941330 - DNA, 25 bp, Homo sapien
ggatgttaagctgccaacaactaaa

SEQ ID NO: 941331 - DNA, 25 bp, Homo sapien
tcattagccagcatctgctagagaa

SEQ ID NO: 941332 - DNA, 25 bp, Homo sapien
tctgctagagaaactaaaactcaaa

SEQ ID NO: 941333 - DNA, 25 bp, Homo sapien
ggtcagtcattagccagcatctgct

SEQ ID NO: 941334 - DNA, 25 bp, Homo sapien
tcagtcattagccagcatctgctag

SEQ ID NO: 941335 - DNA, 25 bp, Homo sapien
ttgttctattgtactgtcaggctgc

SEQ ID NO: 941336 - DNA, 25 bp, Homo sapien
tttgttctattgtactgtcaggctg

SEQ ID NO: 941337 - DNA, 25 bp, Homo sapien
gaaagctgtgtaagtggcccagtca

SEQ ID NO: 941338 - DNA, 25 bp, Homo sapien
ccatgaaagctgtgtaagtggccca

SEQ ID NO: 941339 - DNA, 25 bp, Homo sapien
catgaaagctgtgtaagtggcccag

SEQ ID NO: 941340 - DNA, 25 bp, Homo sapien
tcaccatgaaagctgtgtaagtggc

SEQ ID NO: 941341 - DNA, 25 bp, Homo sapien
aagactgactcgcaagccctgagaa

SEQ ID NO: 941342 - DNA, 25 bp, Homo sapien
gaaagactgtccaaactgtgtacta

SEQ ID NO: 941343 - DNA, 25 bp, Homo sapien
gctcttctaacacaagacagtggga

SEQ ID NO: 941344 - DNA, 25 bp, Homo sapien
tgtgctagggctaaaaaggccacac

SEQ ID NO: 941345 - DNA, 25 bp, Homo sapien
gatgggtttctcagtgtccccagga

SEQ ID NO: 941346 - DNA, 25 bp, Homo sapien
tgagactaggataggaactgggctt

SEQ ID NO: 941347 - DNA, 25 bp, Homo sapien
tttcctggcatgtaaaacagcaagc

SEQ ID NO: 941348 - DNA, 25 bp, Homo sapien
gctgtgaacacatatggaggcctct

SEQ ID NO: 941349 - DNA, 25 bp, Homo sapien
tgaagcagggagattggagaaggag

SEQ ID NO: 941350 - DNA, 25 bp, Homo sapien
ctgtaacgggctatgatcaattagt

SEQ ID NO: 941351 - DNA, 25 bp, Homo sapien
aagcagggagattggagaaggagca

SEQ ID NO: 941352 - DNA, 25 bp, Homo sapien
gcagggagattggagaaggagcaaa

SEQ ID NO: 941353 - DNA, 25 bp, Homo sapien
ttggcggacgtctccccaaacagag

SEQ ID NO: 941354 - DNA, 25 bp, Homo sapien
caggccactggtgccgtaggtcctg

SEQ ID NO: 941355 - DNA, 25 bp, Homo sapien
ccccaaacagaggtctgttgtccag

SEQ ID NO: 941356 - DNA, 25 bp, Homo sapien
ctggtgccgtaggtcctggtagcaa

SEQ ID NO: 941357 - DNA, 25 bp, Homo sapien
ttccccaagccacttaaaagcaaga

SEQ ID NO: 941358 - DNA, 25 bp, Homo sapien
caagacagcatgacctcccgaggtc

SEQ ID NO: 941359 - DNA, 25 bp, Homo sapien
gtctcaggtccacgactgcaagcct

SEQ ID NO: 941360 - DNA, 25 bp, Homo sapien
cgcatagccgaacccgagtggtcgg

SEQ ID NO: 941361 - DNA, 25 bp, Homo sapien
gggaacgcgactgctccgccccggc

SEQ ID NO: 941362 - DNA, 25 bp, Homo sapien
acacgcggggaacgcgactgctccg

SEQ ID NO: 941363 - DNA, 25 bp, Homo sapien
ctcacacgcggggaacgcgactgct

SEQ ID NO: 941364 - DNA, 25 bp, Homo sapien
gtgggggctcacacgcggggaacgc

SEQ ID NO: 941365 - DNA, 25 bp, Homo sapien
gcacgtattccttcatgttcaaggg

SEQ ID NO: 941366 - DNA, 25 bp, Homo sapien
ggaagaacgcattgagaacccctcg

SEQ ID NO: 941367 - DNA, 25 bp, Homo sapien
caattttctacggtaagcacgtatt

SEQ ID NO: 941368 - DNA, 25 bp, Homo sapien
gcaacttggattccctctcatgtgt

SEQ ID NO: 941369 - DNA, 25 bp, Homo sapien
gtacggtctaggcacagcgagaggg

SEQ ID NO: 941370 - DNA, 25 bp, Homo sapien
tcggccctgcccatattggtcccgc

SEQ ID NO: 941371 - DNA, 25 bp, Homo sapien
tctaggcacagcgagagggagaatc

SEQ ID NO: 941372 - DNA, 25 bp, Homo sapien
acagcgagagggagaatcccgcctc

SEQ ID NO: 941373 - DNA, 25 bp, Homo sapien
atcccctaggcgctcgcacgctggg

SEQ ID NO: 941374 - DNA, 25 bp, Homo sapien
cgaggcccaggaacgcgggccagat

SEQ ID NO: 941375 - DNA, 25 bp, Homo sapien
gccgggatccggtgccgaggcccag

SEQ ID NO: 941376 - DNA, 25 bp, Homo sapien
ccagatgcgtgggagaggaatcgcg

SEQ ID NO: 941377 - DNA, 25 bp, Homo sapien
tatacagccacgctggattctcagg

SEQ ID NO: 941378 - DNA, 25 bp, Homo sapien
tctgggttggaacgttgtacccaca

SEQ ID NO: 941379 - DNA, 25 bp, Homo sapien
gattctcagggcactatagcgccga

SEQ ID NO: 941380 - DNA, 25 bp, Homo sapien
caatctcgtcttccaggctctaggg

SEQ ID NO: 941381 - DNA, 25 bp, Homo sapien
ccttagaatgtcctgggtgatggaa

SEQ ID NO: 941382 - DNA, 25 bp, Homo sapien
acataccagtgggtagcacacccca

SEQ ID NO: 941383 - DNA, 25 bp, Homo sapien
cttggtgagtccctaaacggcttga

SEQ ID NO: 941384 - DNA, 25 bp, Homo sapien
tatgtatttgatctccactcccaga

SEQ ID NO: 941385 - DNA, 25 bp, Homo sapien
ttgaggagaatggtgttaggtcttc

SEQ ID NO: 941386 - DNA, 25 bp, Homo sapien
ggaagaattatctactcttcaattt

SEQ ID NO: 941387 - DNA, 25 bp, Homo sapien
catatttggtctgcattatgttgag

SEQ ID NO: 941388 - DNA, 25 bp, Homo sapien
tgaaatgaccataaggttttagtcc

SEQ ID NO: 941389 - DNA, 25 bp, Homo sapien
ttcccctaggtgctgtccctgggag

SEQ ID NO: 941390 - DNA, 25 bp, Homo sapien
tgtctaggtttcaccagtggaggct

SEQ ID NO: 941391 - DNA, 25 bp, Homo sapien
tcactggaggtgtactctagactct

SEQ ID NO: 941392 - DNA, 25 bp, Homo sapien
tccctgggagataggagtttgatct

SEQ ID NO: 941393 - DNA, 25 bp, Homo sapien
tgaaaccacttgttattgtggaggg

SEQ ID NO: 941394 - DNA, 25 bp, Homo sapien
taatgccccactcttagaacccgag

SEQ ID NO: 941395 - DNA, 25 bp, Homo sapien
gagggtgaggtgtcctaatgcccca

SEQ ID NO: 941396 - DNA, 25 bp, Homo sapien
tctcatccttcctcagaatcctcca

SEQ ID NO: 941397 - DNA, 25 bp, Homo sapien
tcttgtgtcctgacttgcttctcaa

SEQ ID NO: 941398 - DNA, 25 bp, Homo sapien
ggactactatggtcttgtgtcctga

SEQ ID NO: 941399 - DNA, 25 bp, Homo sapien
ctgctcttggtattgaggactacta

SEQ ID NO: 941400 - DNA, 25 bp, Homo sapien
caatattatctccagtataacctgt

SEQ ID NO: 941401 - DNA, 25 bp, Homo sapien
ctgtatcacccaaaatgagctctgg

SEQ ID NO: 941402 - DNA, 25 bp, Homo sapien
tcacccaaaatgagctctggactga

SEQ ID NO: 941403 - DNA, 25 bp, Homo sapien
tatcacccaaaatgagctctggact

SEQ ID NO: 941404 - DNA, 25 bp, Homo sapien
acccaaaatgagctctggactgatc

SEQ ID NO: 941405 - DNA, 25 bp, Homo sapien
tgcaaagattccattgactttttgg

SEQ ID NO: 941406 - DNA, 25 bp, Homo sapien
caaagattccattgactttttggtc

SEQ ID NO: 941407 - DNA, 25 bp, Homo sapien
ttgcaaagattccattgactttttg

SEQ ID NO: 941408 - DNA, 25 bp, Homo sapien
aaagattccattgactttttggtca

SEQ ID NO: 941409 - DNA, 25 bp, Homo sapien
gaggagccctctagcatgcagtact

SEQ ID NO: 941410 - DNA, 25 bp, Homo sapien
cagaaggtgtcgctccatcacagct

SEQ ID NO: 941411 - DNA, 25 bp, Homo sapien
ccaagtagttagtcagctgtggcca

SEQ ID NO: 941412 - DNA, 25 bp, Homo sapien
cagtactccatgtgtgccagaaggt

SEQ ID NO: 941413 - DNA, 25 bp, Homo sapien
aagtacaaggaagctggagtagctg

SEQ ID NO: 941414 - DNA, 25 bp, Homo sapien
agtacaaggaagctggagtagctgc

SEQ ID NO: 941415 - DNA, 25 bp, Homo sapien
gctggagtagctgcgagtagctgca

SEQ ID NO: 941416 - DNA, 25 bp, Homo sapien
gagtagctgcgagtagctgcaagca

SEQ ID NO: 941417 - DNA, 25 bp, Homo sapien
tgggacagctgacaaagctgtacat

SEQ ID NO: 941418 - DNA, 25 bp, Homo sapien
ctgggacagctgacaaagctgtaca

SEQ ID NO: 941419 - DNA, 25 bp, Homo sapien
tctgggacagctgacaaagctgtac

SEQ ID NO: 941420 - DNA, 25 bp, Homo sapien
gtcaattcgtccaatttattctcca

SEQ ID NO: 941421 - DNA, 25 bp, Homo sapien
accatttggccaatcccatgtacct

SEQ ID NO: 941422 - DNA, 25 bp, Homo sapien
taacctgaagatcattaaacaccat

SEQ ID NO: 941423 - DNA, 25 bp, Homo sapien
gaaatgtccaaggtagttagtcaag

SEQ ID NO: 941424 - DNA, 25 bp, Homo sapien
tatttacagaagtataccttacata

SEQ ID NO: 941425 - DNA, 25 bp, Homo sapien
tgattttgggaagtaaatgttagag

SEQ ID NO: 941426 - DNA, 25 bp, Homo sapien
tttgccaaaattaggactcagaaac

SEQ ID NO: 941427 - DNA, 25 bp, Homo sapien
tgggaagtaaatgttagaggttcaa

SEQ ID NO: 941428 - DNA, 25 bp, Homo sapien
tgttagaggttcaaaacacttaata

SEQ ID NO: 941429 - DNA, 25 bp, Homo sapien
agatttagctttccaaacagtttgt

SEQ ID NO: 941430 - DNA, 25 bp, Homo sapien
agctttccaaacagtttgtctcctg

SEQ ID NO: 941431 - DNA, 25 bp, Homo sapien
ttagctttccaaacagtttgtctcc

SEQ ID NO: 941432 - DNA, 25 bp, Homo sapien
acctttattcattaagagggaagat

SEQ ID NO: 941433 - DNA, 25 bp, Homo sapien
cctgtgacggtgagcaatagcttag

SEQ ID NO: 941434 - DNA, 25 bp, Homo sapien
aagtcagcggctagcctgtgacggt

SEQ ID NO: 941435 - DNA, 25 bp, Homo sapien
aatgggcgtctcactggatcagaag

SEQ ID NO: 941436 - DNA, 25 bp, Homo sapien
tggcgagcctctagcccagttggga

SEQ ID NO: 941437 - DNA, 25 bp, Homo sapien
tgagtctggcatcactatttttggc

SEQ ID NO: 941438 - DNA, 25 bp, Homo sapien
tctatacttgtccatgggatcccat

SEQ ID NO: 941439 - DNA, 25 bp, Homo sapien
tagtccaaagttctcatgagtgcct

SEQ ID NO: 941440 - DNA, 25 bp, Homo sapien
ttcccaagacaatacaaacctgagt

SEQ ID NO: 941441 - DNA, 25 bp, Homo sapien
cccttgtttagttttagaatctcat

SEQ ID NO: 941442 - DNA, 25 bp, Homo sapien
tttatcaaggggcgctgctttttct

SEQ ID NO: 941443 - DNA, 25 bp, Homo sapien
agtgtcttttcgcaccatcaccaac

SEQ ID NO: 941444 - DNA, 25 bp, Homo sapien
tctcaagtgtcttttcgcaccatca

SEQ ID NO: 941445 - DNA, 25 bp, Homo sapien
tgaagagaattgttaccagggttac

SEQ ID NO: 941446 - DNA, 25 bp, Homo sapien
ttttgataaggtgaagagaattgtt

SEQ ID NO: 941447 - DNA, 25 bp, Homo sapien
tgataaggtgaagagaattgttacc

SEQ ID NO: 941448 - DNA, 25 bp, Homo sapien
aggtgaagagaattgttaccagggt

SEQ ID NO: 941449 - DNA, 25 bp, Homo sapien
tggaaatcagtttgacggtttttga

SEQ ID NO: 941450 - DNA, 25 bp, Homo sapien
ttgctggcagatatgtaaaaacggt

SEQ ID NO: 941451 - DNA, 25 bp, Homo sapien
aacatagagttaacatacgacccca

SEQ ID NO: 941452 - DNA, 25 bp, Homo sapien
tgttattgtaactaaaggcacagag

SEQ ID NO: 941453 - DNA, 25 bp, Homo sapien
tcacaaatcttagcaggaagccagt

SEQ ID NO: 941454 - DNA, 25 bp, Homo sapien
tacaggtctcccatagattagggct

SEQ ID NO: 941455 - DNA, 25 bp, Homo sapien
gattagggctatttaccatatctcc

SEQ ID NO: 941456 - DNA, 25 bp, Homo sapien
tacatcagaatgaaaggaggttaca

SEQ ID NO: 941457 - DNA, 25 bp, Homo sapien
gatgatgtagtgtgctgcggcatac

SEQ ID NO: 941458 - DNA, 25 bp, Homo sapien
gtaaaagacatcagataggcccggg

SEQ ID NO: 941459 - DNA, 25 bp, Homo sapien
tcttctagaacttgggtagctccac

SEQ ID NO: 941460 - DNA, 25 bp, Homo sapien
gaagagcaaggagacccgagatgat

SEQ ID NO: 941461 - DNA, 25 bp, Homo sapien
ctcagcctccgaagattaaaggaaa

SEQ ID NO: 941462 - DNA, 25 bp, Homo sapien
actcagcctccgaagattaaaggaa

SEQ ID NO: 941463 - DNA, 25 bp, Homo sapien
ctggtgtaagtgttcgcctggtgct

SEQ ID NO: 941464 - DNA, 25 bp, Homo sapien
tcactgttcttttgccaagacacgg

SEQ ID NO: 941465 - DNA, 25 bp, Homo sapien
caagacacggggtggacaataagat

SEQ ID NO: 941466 - DNA, 25 bp, Homo sapien
acaaagcactggtgtaagtgttcgc

SEQ ID NO: 941467 - DNA, 25 bp, Homo sapien
gggaggagcgtgtggtaagccagac

SEQ ID NO: 941468 - DNA, 25 bp, Homo sapien
tggggaggagcgtgtggtaagccag

SEQ ID NO: 941469 - DNA, 25 bp, Homo sapien
ggggaggagcgtgtggtaagccaga

SEQ ID NO: 941470 - DNA, 25 bp, Homo sapien
tgggtcttaaccatcgcttcctgca

SEQ ID NO: 941471 - DNA, 25 bp, Homo sapien
ctgcggcgagaagttgggtgaaaat

SEQ ID NO: 941472 - DNA, 25 bp, Homo sapien
ttaaccatcgcttcctgcatctatc

SEQ ID NO: 941473 - DNA, 25 bp, Homo sapien
aaatgggtcttaaccatcgcttcct

SEQ ID NO: 941474 - DNA, 25 bp, Homo sapien
ccagagtgccttctagatcctgggt

SEQ ID NO: 941475 - DNA, 25 bp, Homo sapien
cagagtgccttctagatcctgggtc

SEQ ID NO: 941476 - DNA, 25 bp, Homo sapien
tgcccagagtgccttctagatcctg

SEQ ID NO: 941477 - DNA, 25 bp, Homo sapien
gctgcagccccgcagagttaggaca

SEQ ID NO: 941478 - DNA, 25 bp, Homo sapien
gggcccaagacgcccactggagaca

SEQ ID NO: 941479 - DNA, 25 bp, Homo sapien
actggagacagggtcgggtcccact

SEQ ID NO: 941480 - DNA, 25 bp, Homo sapien
ttaggacagctcatttggcacccgg

SEQ ID NO: 941481 - DNA, 25 bp, Homo sapien
caatcctgttccccggcgaatgcgg

SEQ ID NO: 941482 - DNA, 25 bp, Homo sapien
tctatccaatcctgttccccggcga

SEQ ID NO: 941483 - DNA, 25 bp, Homo sapien
aatcctgttccccggcgaatgcggg

SEQ ID NO: 941484 - DNA, 25 bp, Homo sapien
atccaatcctgttccccggcgaatg

SEQ ID NO: 941485 - DNA, 25 bp, Homo sapien
gaaagttaagtcgtgcagaaccgca

SEQ ID NO: 941486 - DNA, 25 bp, Homo sapien
gacaggtccgttgaagcagcattcc

SEQ ID NO: 941487 - DNA, 25 bp, Homo sapien
attcccgcacctttgaggcccaagg

SEQ ID NO: 941488 - DNA, 25 bp, Homo sapien
gtgcagaaccgcaaaggtgcctgga

SEQ ID NO: 941489 - DNA, 25 bp, Homo sapien
cttcttggtgtactggtatgtgaca

SEQ ID NO: 941490 - DNA, 25 bp, Homo sapien
caaaacaattgttgcagcaggctcc

SEQ ID NO: 941491 - DNA, 25 bp, Homo sapien
gacttagtccagttccctgtgatct

SEQ ID NO: 941492 - DNA, 25 bp, Homo sapien
tctgtgaattcatatctaattgccc

SEQ ID NO: 941493 - DNA, 25 bp, Homo sapien
tgttgcccaggttgcgacctcagct

SEQ ID NO: 941494 - DNA, 25 bp, Homo sapien
ggactataggcaggcactgccatac

SEQ ID NO: 941495 - DNA, 25 bp, Homo sapien
gttgcccaggttgcgacctcagctc

SEQ ID NO: 941496 - DNA, 25 bp, Homo sapien
tataggcaggcactgccatacctgg

SEQ ID NO: 941497 - DNA, 25 bp, Homo sapien
caatacttcatcaagacaggtgtca

SEQ ID NO: 941498 - DNA, 25 bp, Homo sapien
taataacttagggagagctagcctg

SEQ ID NO: 941499 - DNA, 25 bp, Homo sapien
tacccaacccattcaggaccataag

SEQ ID NO: 941500 - DNA, 25 bp, Homo sapien
ctgtacttaccttgaattttgttct

SEQ ID NO: 941501 - DNA, 25 bp, Homo sapien
ttatttttaaaatatactgtagcaa

SEQ ID NO: 941502 - DNA, 25 bp, Homo sapien
tatttttaaaatatactgtagcaaa

SEQ ID NO: 941503 - DNA, 25 bp, Homo sapien
tttatttttaaaatatactgtagca

SEQ ID NO: 941504 - DNA, 25 bp, Homo sapien
ataagttctgtgtcccagcctggac

SEQ ID NO: 941505 - DNA, 25 bp, Homo sapien
taagttctgtgtcccagcctggaca

SEQ ID NO: 941506 - DNA, 25 bp, Homo sapien
tcataagttctgtgtcccagcctgg

SEQ ID NO: 941507 - DNA, 25 bp, Homo sapien
gttctgtgtcccagcctggacactg

SEQ ID NO: 941508 - DNA, 25 bp, Homo sapien
tctgaaacaccactattaagtctgc

SEQ ID NO: 941509 - DNA, 25 bp, Homo sapien
tgatgcgtgccatgctccttgactc

SEQ ID NO: 941510 - DNA, 25 bp, Homo sapien
cacaatgcaggtgcggccttctctg

SEQ ID NO: 941511 - DNA, 25 bp, Homo sapien
gacaggcggtgagcaatcacaatgc

SEQ ID NO: 941512 - DNA, 25 bp, Homo sapien
gacagacaccttatcccaaaaattg

SEQ ID NO: 941513 - DNA, 25 bp, Homo sapien
cagacaccttatcccaaaaattgta

SEQ ID NO: 941514 - DNA, 25 bp, Homo sapien
tcagacagacaccttatcccaaaaa

SEQ ID NO: 941515 - DNA, 25 bp, Homo sapien
taaatcagacagacaccttatccca

SEQ ID NO: 941516 - DNA, 25 bp, Homo sapien
ataagacataagttgggaggccaca

SEQ ID NO: 941517 - DNA, 25 bp, Homo sapien
tcatggttgacagcaaaatcccttc

SEQ ID NO: 941518 - DNA, 25 bp, Homo sapien
ggttgacagcaaaatcccttctatt

SEQ ID NO: 941519 - DNA, 25 bp, Homo sapien
tgtttttccccctgtgcttgtgtgt

SEQ ID NO: 941520 - DNA, 25 bp, Homo sapien
gtttttgacctcctgagagctgagt

SEQ ID NO: 941521 - DNA, 25 bp, Homo sapien
gggcaatagcaatcctctgtttttg

SEQ ID NO: 941522 - DNA, 25 bp, Homo sapien
tctgatgagggctcgggcaatagca

SEQ ID NO: 941523 - DNA, 25 bp, Homo sapien
agtatccagagctgatgtagcttca

SEQ ID NO: 941524 - DNA, 25 bp, Homo sapien
tgagacacgattccgagttgagctc

SEQ ID NO: 941525 - DNA, 25 bp, Homo sapien
taacgtctcgatgaaaggatgtatg

SEQ ID NO: 941526 - DNA, 25 bp, Homo sapien
aaataggataggctcctgagacacg

SEQ ID NO: 941527 - DNA, 25 bp, Homo sapien
ggcaatgctgcagtcaaataggata

SEQ ID NO: 941528 - DNA, 25 bp, Homo sapien
taaaatatagccttcaatcaagtta

SEQ ID NO: 941529 - DNA, 25 bp, Homo sapien
tttccattatgacaatattggttgg

SEQ ID NO: 941530 - DNA, 25 bp, Homo sapien
gacaatattggttgggccaattaaa

SEQ ID NO: 941531 - DNA, 25 bp, Homo sapien
gccaattaaaatatagccttcaatc

SEQ ID NO: 941532 - DNA, 25 bp, Homo sapien
gaagcactggcacgtttgctcgggt

SEQ ID NO: 941533 - DNA, 25 bp, Homo sapien
ttgctcgggtgggatagttgaacac

SEQ ID NO: 941534 - DNA, 25 bp, Homo sapien
caccagggctagtgtctggcctttc

SEQ ID NO: 941535 - DNA, 25 bp, Homo sapien
tagttgaacacgacttcattaaatg

SEQ ID NO: 941536 - DNA, 25 bp, Homo sapien
caaacagcatgaataagtgggctgc

SEQ ID NO: 941537 - DNA, 25 bp, Homo sapien
caaatgaactggcatgtcctagagc

SEQ ID NO: 941538 - DNA, 25 bp, Homo sapien
ttcactgtagctgtcaatcagaggt

SEQ ID NO: 941539 - DNA, 25 bp, Homo sapien
aatcagaggttgtctttcaaacagc

SEQ ID NO: 941540 - DNA, 25 bp, Homo sapien
cacaaagtgtgtaagggccttgatc

SEQ ID NO: 941541 - DNA, 25 bp, Homo sapien
ttttctgataaagctctggccctga

SEQ ID NO: 941542 - DNA, 25 bp, Homo sapien
actgaatctgatctgtgagctcagc

SEQ ID NO: 941543 - DNA, 25 bp, Homo sapien
caagaagaggcttataactgaatct

SEQ ID NO: 941544 - DNA, 25 bp, Homo sapien
gaataacatctctgaagcgcatatg

SEQ ID NO: 941545 - DNA, 25 bp, Homo sapien
acaaccggcataggaaaaatacata

SEQ ID NO: 941546 - DNA, 25 bp, Homo sapien
tatgcaccaaatcgaaaacaaccgg

SEQ ID NO: 941547 - DNA, 25 bp, Homo sapien
cataaatgcttgtgagatactaaaa

SEQ ID NO: 941548 - DNA, 25 bp, Homo sapien
gacacaactgtcctaatattttcta

SEQ ID NO: 941549 - DNA, 25 bp, Homo sapien
acacaactgtcctaatattttctat

SEQ ID NO: 941550 - DNA, 25 bp, Homo sapien
cacaactgtcctaatattttctatt

SEQ ID NO: 941551 - DNA, 25 bp, Homo sapien
aagacacaactgtcctaatattttc

SEQ ID NO: 941552 - DNA, 25 bp, Homo sapien
aagaccaaagctaataacccaagat

SEQ ID NO: 941553 - DNA, 25 bp, Homo sapien
tctaacaattaatggagctaagact

SEQ ID NO: 941554 - DNA, 25 bp, Homo sapien
tactgctcaattctacctgctctac

SEQ ID NO: 941555 - DNA, 25 bp, Homo sapien
gctaagactattaactagattcaag

SEQ ID NO: 941556 - DNA, 25 bp, Homo sapien
tagcaatagggttaactgccaaccg

SEQ ID NO: 941557 - DNA, 25 bp, Homo sapien
ctgccaaccgtagataaatgatatg

SEQ ID NO: 941558 - DNA, 25 bp, Homo sapien
taattggaacaactgctaatagcaa

SEQ ID NO: 941559 - DNA, 25 bp, Homo sapien
tgatatgataataccagttccaagg

SEQ ID NO: 941560 - DNA, 25 bp, Homo sapien
ctgggagagaaaaagcacaaagcaa

SEQ ID NO: 941561 - DNA, 25 bp, Homo sapien
caccagtactgtttttatggtcatc

SEQ ID NO: 941562 - DNA, 25 bp, Homo sapien
ctgtggcaagtcttgtagaaagtgc

SEQ ID NO: 941563 - DNA, 25 bp, Homo sapien
tgtggcaagtcttgtagaaagtgca

SEQ ID NO: 941564 - DNA, 25 bp, Homo sapien
gtagaaagtgcaccagtactgtttt

SEQ ID NO: 941565 - DNA, 25 bp, Homo sapien
agtcttctggtgaggatctcgccag

SEQ ID NO: 941566 - DNA, 25 bp, Homo sapien
gccattgaccgcagtcttctggtga

SEQ ID NO: 941567 - DNA, 25 bp, Homo sapien
tttaaaagccattgaccgcagtctt

SEQ ID NO: 941568 - DNA, 25 bp, Homo sapien
tctcgccagctttcccaaacgtgaa

SEQ ID NO: 941569 - DNA, 25 bp, Homo sapien
tgctgcttcactgcatcatcgcctg

SEQ ID NO: 941570 - DNA, 25 bp, Homo sapien
ctgcatcatcgcctggtccaaaaat

SEQ ID NO: 941571 - DNA, 25 bp, Homo sapien
caaagagaatatgttgcacttctgc

SEQ ID NO: 941572 - DNA, 25 bp, Homo sapien
atcaaagagaatatgttgcacttct

SEQ ID NO: 941573 - DNA, 25 bp, Homo sapien
ttggcaatggcacatactgttccca

SEQ ID NO: 941574 - DNA, 25 bp, Homo sapien
tgagaatatgactgaaaatgccggc

SEQ ID NO: 941575 - DNA, 25 bp, Homo sapien
ttcccacgacaaagtagggccattc

SEQ ID NO: 941576 - DNA, 25 bp, Homo sapien
tatgactgaaaatgccggctgaagc

SEQ ID NO: 941577 - DNA, 25 bp, Homo sapien
aagtccatcggtttccacatcaagg

SEQ ID NO: 941578 - DNA, 25 bp, Homo sapien
ttctgagtagaatgcctaaataggc

SEQ ID NO: 941579 - DNA, 25 bp, Homo sapien
cctaaataggcgagatttccagcca

SEQ ID NO: 941580 - DNA, 25 bp, Homo sapien
catttggggccattctagtggcagc

SEQ ID NO: 941581 - DNA, 25 bp, Homo sapien
cagtcggtgtgctatcacaatggtg

SEQ ID NO: 941582 - DNA, 25 bp, Homo sapien
tgacatctgcatttcggaccgtaga

SEQ ID NO: 941583 - DNA, 25 bp, Homo sapien
tgttgacaagtttgaagtacacccc

SEQ ID NO: 941584 - DNA, 25 bp, Homo sapien
tcatcagttcgctgtggcttccttg

SEQ ID NO: 941585 - DNA, 25 bp, Homo sapien
taggcagagcctagtggacactttc

SEQ ID NO: 941586 - DNA, 25 bp, Homo sapien
aatggactagggaacccactcctgg

SEQ ID NO: 941587 - DNA, 25 bp, Homo sapien
ttctgatggcaggttcacttgcagc

SEQ ID NO: 941588 - DNA, 25 bp, Homo sapien
ggagcagaatcaggccttaatcaag

SEQ ID NO: 941589 - DNA, 25 bp, Homo sapien
gggcacgtgcaatggcgatcctctg

SEQ ID NO: 941590 - DNA, 25 bp, Homo sapien
ctctctctccaaccagggtgtcaaa

SEQ ID NO: 941591 - DNA, 25 bp, Homo sapien
gtgcaatggcgatcctctgcttctg

SEQ ID NO: 941592 - DNA, 25 bp, Homo sapien
accagggcacgtgcaatggcgatcc

SEQ ID NO: 941593 - DNA, 25 bp, Homo sapien
gataaactcataggcgttggcctct

SEQ ID NO: 941594 - DNA, 25 bp, Homo sapien
ggttacatttccacggccataacaa

SEQ ID NO: 941595 - DNA, 25 bp, Homo sapien
taaagttcctaatatcctgcccatc

SEQ ID NO: 941596 - DNA, 25 bp, Homo sapien
tgtggtggaaaacagcaccggctcc

SEQ ID NO: 941597 - DNA, 25 bp, Homo sapien
tattggaaagaggcttaaggaacaa

SEQ ID NO: 941598 - DNA, 25 bp, Homo sapien
gccaccatgtcaggcctttattgct

SEQ ID NO: 941599 - DNA, 25 bp, Homo sapien
gttaaatcatgatgttaacagtgaa

SEQ ID NO: 941600 - DNA, 25 bp, Homo sapien
attaatcaattatgccactgggcat

SEQ ID NO: 941601 - DNA, 25 bp, Homo sapien
tatccatcggcattgccattttgta

SEQ ID NO: 941602 - DNA, 25 bp, Homo sapien
atccatcggcattgccattttgtag

SEQ ID NO: 941603 - DNA, 25 bp, Homo sapien
ttcaaagggccaatttgtatccagc

SEQ ID NO: 941604 - DNA, 25 bp, Homo sapien
caaaactggattcacacgcaaattt

SEQ ID NO: 941605 - DNA, 25 bp, Homo sapien
ggattcacacgcaaatttgttactg

SEQ ID NO: 941606 - DNA, 25 bp, Homo sapien
tttcaaagggccaatttgtatccag

SEQ ID NO: 941607 - DNA, 25 bp, Homo sapien
tgtgccctcatcagggtcatagagc

SEQ ID NO: 941608 - DNA, 25 bp, Homo sapien
ctcatcagggtcatagagcctctgt

SEQ ID NO: 941609 - DNA, 25 bp, Homo sapien
tcagggtcatagagcctctgtatca

SEQ ID NO: 941610 - DNA, 25 bp, Homo sapien
gggtcatagagcctctgtatcagct

SEQ ID NO: 941611 - DNA, 25 bp, Homo sapien
ttgacgttagctcgagaagggtaag

SEQ ID NO: 941612 - DNA, 25 bp, Homo sapien
gacgttagctcgagaagggtaagaa

SEQ ID NO: 941613 - DNA, 25 bp, Homo sapien
tgacgttagctcgagaagggtaaga

SEQ ID NO: 941614 - DNA, 25 bp, Homo sapien
cttgacgttagctcgagaagggtaa

SEQ ID NO: 941615 - DNA, 25 bp, Homo sapien
ctgaaaaactgtcaattttaggatt

SEQ ID NO: 941616 - DNA, 25 bp, Homo sapien
caaaagcatcaatacatggggcagc

SEQ ID NO: 941617 - DNA, 25 bp, Homo sapien
gaaagctccaattaggattgaaaaa

SEQ ID NO: 941618 - DNA, 25 bp, Homo sapien
gatcacatatgctgctcctcttgca

SEQ ID NO: 941619 - DNA, 25 bp, Homo sapien
ccaacactgaaagctccaattagga

SEQ ID NO: 941620 - DNA, 25 bp, Homo sapien
gacggttcaatataaaacatggcag

SEQ ID NO: 941621 - DNA, 25 bp, Homo sapien
gctcctaaaaagcaccatgtcacat

SEQ ID NO: 941622 - DNA, 25 bp, Homo sapien
tgcatggaattacatagacggttca

SEQ ID NO: 941623 - DNA, 25 bp, Homo sapien
gattttggccctatgtaatgctcct

SEQ ID NO: 941624 - DNA, 25 bp, Homo sapien
ctagagtggatccataccagaaggc

SEQ ID NO: 941625 - DNA, 25 bp, Homo sapien
cttttgatatgactagagtggatcc

SEQ ID NO: 941626 - DNA, 25 bp, Homo sapien
tattcttttgatatgactagagtgg

SEQ ID NO: 941627 - DNA, 25 bp, Homo sapien
tatgactagagtggatccataccag

SEQ ID NO: 941628 - DNA, 25 bp, Homo sapien
aaggcgtggcaggaagacttgcatc

SEQ ID NO: 941629 - DNA, 25 bp, Homo sapien
aatccaatgggtatgcaatgacact

SEQ ID NO: 941630 - DNA, 25 bp, Homo sapien
tactttttcatactagacccagagg

SEQ ID NO: 941631 - DNA, 25 bp, Homo sapien
ttttattgcgtaaagcacccaggtc

SEQ ID NO: 941632 - DNA, 25 bp, Homo sapien
ttgcttaggtggctcgcttaccggg

SEQ ID NO: 941633 - DNA, 25 bp, Homo sapien
ctgtgtggactattatgtacaggaa

SEQ ID NO: 941634 - DNA, 25 bp, Homo sapien
catgttggctttgaagagggattaa

SEQ ID NO: 941635 - DNA, 25 bp, Homo sapien
gttagtgtggtctgtgtggactatt

SEQ ID NO: 941636 - DNA, 25 bp, Homo sapien
cagctctttgttctggcccccgaaa

SEQ ID NO: 941637 - DNA, 25 bp, Homo sapien
ccgaaagctatcacagtcctgatgg

SEQ ID NO: 941638 - DNA, 25 bp, Homo sapien
ctttgtcactaaatgccgagagtat

SEQ ID NO: 941639 - DNA, 25 bp, Homo sapien
gcataagcagctagttctttgtcac

SEQ ID NO: 941640 - DNA, 25 bp, Homo sapien
aaacgtggctactgcttgaaagaac

SEQ ID NO: 941641 - DNA, 25 bp, Homo sapien
agtcctagaatagggctgatggcca

SEQ ID NO: 941642 - DNA, 25 bp, Homo sapien
ttatcacaagggtgagcttccatcc

SEQ ID NO: 941643 - DNA, 25 bp, Homo sapien
cctctgatgaatcccactatgaatc

SEQ ID NO: 941644 - DNA, 25 bp, Homo sapien
cacagaatggtacttcgcacatgaa

SEQ ID NO: 941645 - DNA, 25 bp, Homo sapien
cacgtcctgcagtagaaagttccat

SEQ ID NO: 941646 - DNA, 25 bp, Homo sapien
tatttgctcaggatgcctttgccag

SEQ ID NO: 941647 - DNA, 25 bp, Homo sapien
aaataaacctactatgcaccttggg

SEQ ID NO: 941648 - DNA, 25 bp, Homo sapien
aaaccatcctatttcctgtcgtaga

SEQ ID NO: 941649 - DNA, 25 bp, Homo sapien
tataggcagcaacaagaactccagc

SEQ ID NO: 941650 - DNA, 25 bp, Homo sapien
tgatctgtcgaccagctgccaaagt

SEQ ID NO: 941651 - DNA, 25 bp, Homo sapien
tgttagccgcgtattgagttcagtg

SEQ ID NO: 941652 - DNA, 25 bp, Homo sapien
tagtcatttcttcttccagaatttt

SEQ ID NO: 941653 - DNA, 25 bp, Homo sapien
agtcatttcttcttccagaattttg

SEQ ID NO: 941654 - DNA, 25 bp, Homo sapien
ctagtcatttcttcttccagaattt

SEQ ID NO: 941655 - DNA, 25 bp, Homo sapien
gtcatttcttcttccagaattttgc

SEQ ID NO: 941656 - DNA, 25 bp, Homo sapien
ctggatttagcagcgacaaggaaaa

SEQ ID NO: 941657 - DNA, 25 bp, Homo sapien
atttagcagcgacaaggaaaagttc

SEQ ID NO: 941658 - DNA, 25 bp, Homo sapien
ggatttagcagcgacaaggaaaagt

SEQ ID NO: 941659 - DNA, 25 bp, Homo sapien
gatttagcagcgacaaggaaaagtt

SEQ ID NO: 941660 - DNA, 25 bp, Homo sapien
tctccaaatactatcatcatgaggg

SEQ ID NO: 941661 - DNA, 25 bp, Homo sapien
ggagaagtttcctgcagtatcaaca

SEQ ID NO: 941662 - DNA, 25 bp, Homo sapien
taaacaatttatcctgccaatcgga

SEQ ID NO: 941663 - DNA, 25 bp, Homo sapien
tatggccatgatggtacccagcgac

SEQ ID NO: 941664 - DNA, 25 bp, Homo sapien
tactaagttggatttcagctgacat

SEQ ID NO: 941665 - DNA, 25 bp, Homo sapien
ggctgtcacagtttgaaacacgtca

SEQ ID NO: 941666 - DNA, 25 bp, Homo sapien
cagctgacatgacacttaattctaa

SEQ ID NO: 941667 - DNA, 25 bp, Homo sapien
tggttacatgagaagtatgcagcag

SEQ ID NO: 941668 - DNA, 25 bp, Homo sapien
gctcgcctagctagacaatcttaaa

SEQ ID NO: 941669 - DNA, 25 bp, Homo sapien
tacaagtatgagtcagctcgcctag

SEQ ID NO: 941670 - DNA, 25 bp, Homo sapien
caaacttatacagcacaggtgcagc

SEQ ID NO: 941671 - DNA, 25 bp, Homo sapien
cagttagctctgtccggtgtcatcg

SEQ ID NO: 941672 - DNA, 25 bp, Homo sapien
gttaatactccaatcattttcactg

SEQ ID NO: 941673 - DNA, 25 bp, Homo sapien
caatgttaatactccaatcattttc

SEQ ID NO: 941674 - DNA, 25 bp, Homo sapien
taatactccaatcattttcactgtc

SEQ ID NO: 941675 - DNA, 25 bp, Homo sapien
atgttaatactccaatcattttcac

SEQ ID NO: 941676 - DNA, 25 bp, Homo sapien
taaaatcactggacaaacatctgcc

SEQ ID NO: 941677 - DNA, 25 bp, Homo sapien
tgttcaaaagaatgtgccatgggca

SEQ ID NO: 941678 - DNA, 25 bp, Homo sapien
caccaaacatgtacctgactcaggg

SEQ ID NO: 941679 - DNA, 25 bp, Homo sapien
gatacataagaaatggtcgcctgcc

SEQ ID NO: 941680 - DNA, 25 bp, Homo sapien
taaactatttcaggctaaaggcgaa

SEQ ID NO: 941681 - DNA, 25 bp, Homo sapien
gggaaccgagaaagacatgaaggca

SEQ ID NO: 941682 - DNA, 25 bp, Homo sapien
tgattcggatgtacagaagttcccc

SEQ ID NO: 941683 - DNA, 25 bp, Homo sapien
tctgccccgctcataaagcctgtga

SEQ ID NO: 941684 - DNA, 25 bp, Homo sapien
gtcctgctgattggcgtgtaacgga

SEQ ID NO: 941685 - DNA, 25 bp, Homo sapien
tccaagggtgaacttagtcctgctg

SEQ ID NO: 941686 - DNA, 25 bp, Homo sapien
gggtgaacttagtcctgctgattgg

SEQ ID NO: 941687 - DNA, 25 bp, Homo sapien
gcgtgtaacggaaaagccagtggct

SEQ ID NO: 941688 - DNA, 25 bp, Homo sapien
ccagttcaaagtcgccctccgcgct

SEQ ID NO: 941689 - DNA, 25 bp, Homo sapien
gctgttccgttctttgccgcctcaa

SEQ ID NO: 941690 - DNA, 25 bp, Homo sapien
gttccgttctttgccgcctcaagat

SEQ ID NO: 941691 - DNA, 25 bp, Homo sapien
cgccaggctgttccgttctttgccg

SEQ ID NO: 941692 - DNA, 25 bp, Homo sapien
tcgaacctcgcgcgtgtctggcagg

SEQ ID NO: 941693 - DNA, 25 bp, Homo sapien
ctcgaacctcgcgcgtgtctggcag

SEQ ID NO: 941694 - DNA, 25 bp, Homo sapien
ctggacgcgcgggcgctgcagcaga

SEQ ID NO: 941695 - DNA, 25 bp, Homo sapien
gcctctggacgcgcgggcgctgcag

SEQ ID NO: 941696 - DNA, 25 bp, Homo sapien
tctggacgcgcgggcgctgcagcag

SEQ ID NO: 941697 - DNA, 25 bp, Homo sapien
ctctggacgcgcgggcgctgcagca

SEQ ID NO: 941698 - DNA, 25 bp, Homo sapien
tccaggtggcactgaacccaattat

SEQ ID NO: 941699 - DNA, 25 bp, Homo sapien
acccaattatctccaaggacggcga

SEQ ID NO: 941700 - DNA, 25 bp, Homo sapien
ttgcttccgcatccccagttctggt

SEQ ID NO: 941701 - DNA, 25 bp, Homo sapien
tccaaggacggcgagagtcagccag

SEQ ID NO: 941702 - DNA, 25 bp, Homo sapien
ccaggttatgtaattcttgactcag

SEQ ID NO: 941703 - DNA, 25 bp, Homo sapien
tggccaggttatgtaattcttgact

SEQ ID NO: 941704 - DNA, 25 bp, Homo sapien
ggccaggttatgtaattcttgactc

SEQ ID NO: 941705 - DNA, 25 bp, Homo sapien
gccaggttatgtaattcttgactca

SEQ ID NO: 941706 - DNA, 25 bp, Homo sapien
tctaacaggcggtcagatcattatt

SEQ ID NO: 941707 - DNA, 25 bp, Homo sapien
tcaagatactctgagacggaagcag

SEQ ID NO: 941708 - DNA, 25 bp, Homo sapien
atatcagtctaccatgaccatgagg

SEQ ID NO: 941709 - DNA, 25 bp, Homo sapien
aacttgacttgaaactgcatgctgg

SEQ ID NO: 941710 - DNA, 25 bp, Homo sapien
ggctgggccctccagtgaacttctg

SEQ ID NO: 941711 - DNA, 25 bp, Homo sapien
gaagtttgatctttccacactaccg

SEQ ID NO: 941712 - DNA, 25 bp, Homo sapien
aactacttacctaacactggagtgg

SEQ ID NO: 941713 - DNA, 25 bp, Homo sapien
tcctttggagctaaactggttggca

SEQ ID NO: 941714 - DNA, 25 bp, Homo sapien
ttccattacatgtgaatcagcaggg

SEQ ID NO: 941715 - DNA, 25 bp, Homo sapien
tcagcagatgtatgcccagcagcca

SEQ ID NO: 941716 - DNA, 25 bp, Homo sapien
ccttggagcaagtgttaagtggcct

SEQ ID NO: 941717 - DNA, 25 bp, Homo sapien
taagtggcctcgaggaatgtcactg

SEQ ID NO: 941718 - DNA, 25 bp, Homo sapien
ggtacttaatcacatagtcctacag

SEQ ID NO: 941719 - DNA, 25 bp, Homo sapien
gagtgtcaccaactacagcaactag

SEQ ID NO: 941720 - DNA, 25 bp, Homo sapien
tatactcaagcagaaaaagctggag

SEQ ID NO: 941721 - DNA, 25 bp, Homo sapien
cagcaactagactgtgcaaacgaca

SEQ ID NO: 941722 - DNA, 25 bp, Homo sapien
gatggttctgtaagacccaatgtga

SEQ ID NO: 941723 - DNA, 25 bp, Homo sapien
tatattcacaggcagtttggacaag

SEQ ID NO: 941724 - DNA, 25 bp, Homo sapien
tcagaaggatcacttttggaagagg

SEQ ID NO: 941725 - DNA, 25 bp, Homo sapien
ccttaatgtggaaatgcaagaatca

SEQ ID NO: 941726 - DNA, 25 bp, Homo sapien
cttctataatcttttagcaaggcag

SEQ ID NO: 941727 - DNA, 25 bp, Homo sapien
gcagtcagttacagtccaaatggga

SEQ ID NO: 941728 - DNA, 25 bp, Homo sapien
tattatagacactttatgcaaacat

SEQ ID NO: 941729 - DNA, 25 bp, Homo sapien
tttagcaaggcagtcagttacagtc

SEQ ID NO: 941730 - DNA, 25 bp, Homo sapien
tatttaacatctcatacagtcagag

SEQ ID NO: 941731 - DNA, 25 bp, Homo sapien
tcctttaattacgaagtctctgaag

SEQ ID NO: 941732 - DNA, 25 bp, Homo sapien
tctccacttgatgatgtctctcact

SEQ ID NO: 941733 - DNA, 25 bp, Homo sapien
ggaaatgttaaacagatacctcttc

SEQ ID NO: 941734 - DNA, 25 bp, Homo sapien
cgctttgttccagcctggacactga

SEQ ID NO: 941735 - DNA, 25 bp, Homo sapien
tggcgctttgttccagcctggacac

SEQ ID NO: 941736 - DNA, 25 bp, Homo sapien
gctttgttccagcctggacactgac

SEQ ID NO: 941737 - DNA, 25 bp, Homo sapien
ggcgctttgttccagcctggacact

SEQ ID NO: 941738 - DNA, 25 bp, Homo sapien
tgatgcgtgccatgctccttgactc

SEQ ID NO: 941739 - DNA, 25 bp, Homo sapien
tctgaaacaccactattaagtctgc

SEQ ID NO: 941740 - DNA, 25 bp, Homo sapien
cacaatgcaggtgcggccttctctg

SEQ ID NO: 941741 - DNA, 25 bp, Homo sapien
gacaggcggtgagcaatcacaatgc

SEQ ID NO: 941742 - DNA, 25 bp, Homo sapien
caaaatatgaggctgtctaacaagg

SEQ ID NO: 941743 - DNA, 25 bp, Homo sapien
gagagctgagttcctttgtctccta

SEQ ID NO: 941744 - DNA, 25 bp, Homo sapien
gtctaacaagggcacgagctatggc

SEQ ID NO: 941745 - DNA, 25 bp, Homo sapien
cagagctgacgtggcttcatccaaa

SEQ ID NO: 941746 - DNA, 25 bp, Homo sapien
tgtaaataaggttttgttgttatga

SEQ ID NO: 941747 - DNA, 25 bp, Homo sapien
ctgtaaataaggttttgttgttatg

SEQ ID NO: 941748 - DNA, 25 bp, Homo sapien
taatacacaggacctaagagggctt

SEQ ID NO: 941749 - DNA, 25 bp, Homo sapien
tgggttcagccctctggactggact

SEQ ID NO: 941750 - DNA, 25 bp, Homo sapien
gagagagcactctttctggcatggg

SEQ ID NO: 941751 - DNA, 25 bp, Homo sapien
ggttcaacccttattcagagagagc

SEQ ID NO: 941752 - DNA, 25 bp, Homo sapien
gctgtttatttgaagagagacttac

SEQ ID NO: 941753 - DNA, 25 bp, Homo sapien
ggctgtttatttgaagagagactta

SEQ ID NO: 941754 - DNA, 25 bp, Homo sapien
tgtgctcggagccactgaacattca

SEQ ID NO: 941755 - DNA, 25 bp, Homo sapien
agcaatgctgcagtcaaacaggatg

SEQ ID NO: 941756 - DNA, 25 bp, Homo sapien
tgggctcctgggacacgatgcccag

SEQ ID NO: 941757 - DNA, 25 bp, Homo sapien
tgtatgttggcctcctttgctgccc

SEQ ID NO: 941758 - DNA, 25 bp, Homo sapien
ctgggatgtccggtcgggtgggata

SEQ ID NO: 941759 - DNA, 25 bp, Homo sapien
aatgtgacatttccttccaatgtgt

SEQ ID NO: 941760 - DNA, 25 bp, Homo sapien
gggatagttgaatacaacttcacca

SEQ ID NO: 941761 - DNA, 25 bp, Homo sapien
ctgaagcactgggatgtccggtcgg

SEQ ID NO: 941762 - DNA, 25 bp, Homo sapien
caatgatcatgatgatgtgggctgc

SEQ ID NO: 941763 - DNA, 25 bp, Homo sapien
ggcattaggccttccgtgctgtagc

SEQ ID NO: 941764 - DNA, 25 bp, Homo sapien
acggccatggcaccaaagacaacag

SEQ ID NO: 941765 - DNA, 25 bp, Homo sapien
tcaggagcaaatgaactgacttgcc

SEQ ID NO: 941766 - DNA, 25 bp, Homo sapien
cttaacttggaaggttgattttgca

SEQ ID NO: 941767 - DNA, 25 bp, Homo sapien
aatgccccaatgtcagcaactttca

SEQ ID NO: 941768 - DNA, 25 bp, Homo sapien
tgattttgcaaacctaaatgcccca

SEQ ID NO: 941769 - DNA, 25 bp, Homo sapien
aatgtcagcaactttcatcaattca

SEQ ID NO: 941770 - DNA, 25 bp, Homo sapien
attcctctcttatcaagggaaagta

SEQ ID NO: 941771 - DNA, 25 bp, Homo sapien
ccaattcctctcttatcaagggaaa

SEQ ID NO: 941772 - DNA, 25 bp, Homo sapien
aattcctctcttatcaagggaaagt

SEQ ID NO: 941773 - DNA, 25 bp, Homo sapien
caattcctctcttatcaagggaaag

SEQ ID NO: 941774 - DNA, 25 bp, Homo sapien
gtttatgtgccaccaagtaggctcc

SEQ ID NO: 941775 - DNA, 25 bp, Homo sapien
catcctcaaagctcatgagtttatg

SEQ ID NO: 941776 - DNA, 25 bp, Homo sapien
tcaaagctcatgagtttatgtgcca

SEQ ID NO: 941777 - DNA, 25 bp, Homo sapien
gctcatgagtttatgtgccaccaag

SEQ ID NO: 941778 - DNA, 25 bp, Homo sapien
aggaaaatgtaattccaaagatgtg

SEQ ID NO: 941779 - DNA, 25 bp, Homo sapien
aaaatgtaattccaaagatgtgtgc

SEQ ID NO: 941780 - DNA, 25 bp, Homo sapien
cattgcctgggtgaaggaaaatgta

SEQ ID NO: 941781 - DNA, 25 bp, Homo sapien
attgcctgggtgaaggaaaatgtaa

SEQ ID NO: 941782 - DNA, 25 bp, Homo sapien
tgcaaactctgagcatacatatgtt

SEQ ID NO: 941783 - DNA, 25 bp, Homo sapien
acatatgttcaaacttctgctcctg

SEQ ID NO: 941784 - DNA, 25 bp, Homo sapien
tatgttcaaacttctgctcctgagt

SEQ ID NO: 941785 - DNA, 25 bp, Homo sapien
ctgcaaactctgagcatacatatgt

SEQ ID NO: 941786 - DNA, 25 bp, Homo sapien
gtgtaacagattcttttagtttctg

SEQ ID NO: 941787 - DNA, 25 bp, Homo sapien
ggcacccatactgttgattgttaaa

SEQ ID NO: 941788 - DNA, 25 bp, Homo sapien
ttggcacccatactgttgattgtta

SEQ ID NO: 941789 - DNA, 25 bp, Homo sapien
tgtgactaattgtgtaacagattct

SEQ ID NO: 941790 - DNA, 25 bp, Homo sapien
gagtaacagtgttagttgccaacca

SEQ ID NO: 941791 - DNA, 25 bp, Homo sapien
tctgggtaattacagcaagcctgga

SEQ ID NO: 941792 - DNA, 25 bp, Homo sapien
tcaacaactcctgctattgcaatga

SEQ ID NO: 941793 - DNA, 25 bp, Homo sapien
gatgggtacaattgctaagagtaac

SEQ ID NO: 941794 - DNA, 25 bp, Homo sapien
gtagtcaatgctccagtggtgtttt

SEQ ID NO: 941795 - DNA, 25 bp, Homo sapien
tgctccagtggtgtttttagggtca

SEQ ID NO: 941796 - DNA, 25 bp, Homo sapien
catcattggcgagcctggtagtcaa

SEQ ID NO: 941797 - DNA, 25 bp, Homo sapien
tagggtcatcaaaccaactcacatc

SEQ ID NO: 941798 - DNA, 25 bp, Homo sapien
tatcggagccgcttggtgaggatct

SEQ ID NO: 941799 - DNA, 25 bp, Homo sapien
gatcggaaaaccatgtatcggagcc

SEQ ID NO: 941800 - DNA, 25 bp, Homo sapien
gatctctccagctttgccaaatgtg

SEQ ID NO: 941801 - DNA, 25 bp, Homo sapien
ctgtctgagcatggatcggaaaacc

SEQ ID NO: 941802 - DNA, 25 bp, Homo sapien
taataagtgattacctactactgcc

SEQ ID NO: 941803 - DNA, 25 bp, Homo sapien
tctagtaaggtcaaattccccagtg

SEQ ID NO: 941804 - DNA, 25 bp, Homo sapien
tccccagtgaggctgtaagtactca

SEQ ID NO: 941805 - DNA, 25 bp, Homo sapien
tattaatagttggtatggcaatcct

SEQ ID NO: 941806 - DNA, 25 bp, Homo sapien
gaaataattccaagggctagaaaca

SEQ ID NO: 941807 - DNA, 25 bp, Homo sapien
gctagaaacaatagtgaaaacaagt

SEQ ID NO: 941808 - DNA, 25 bp, Homo sapien
taattccaagggctagaaacaatag

SEQ ID NO: 941809 - DNA, 25 bp, Homo sapien
ccaagggctagaaacaatagtgaaa

SEQ ID NO: 941810 - DNA, 25 bp, Homo sapien
gtttcaggatcatcaattcttgtaa

SEQ ID NO: 941811 - DNA, 25 bp, Homo sapien
ttgtttcaggatcatcaattcttgt

SEQ ID NO: 941812 - DNA, 25 bp, Homo sapien
gtcgttttgtttcaggatcatcaat

SEQ ID NO: 941813 - DNA, 25 bp, Homo sapien
caggatcatcaattcttgtaaaaac

SEQ ID NO: 941814 - DNA, 25 bp, Homo sapien
gccagttaagagagccagttggaaa

SEQ ID NO: 941815 - DNA, 25 bp, Homo sapien
gaaaggaatttccttgagcctgcct

SEQ ID NO: 941816 - DNA, 25 bp, Homo sapien
gagtggtggtcattcactcagccca

SEQ ID NO: 941817 - DNA, 25 bp, Homo sapien
gccttcttggtaggatggccagtta

SEQ ID NO: 941818 - DNA, 25 bp, Homo sapien
caaatgctggttgcaggcctccatt

SEQ ID NO: 941819 - DNA, 25 bp, Homo sapien
ggccattcagttaaatttagcttca

SEQ ID NO: 941820 - DNA, 25 bp, Homo sapien
aggaaactggaggtatactttcatc

SEQ ID NO: 941821 - DNA, 25 bp, Homo sapien
ataaggccattcagttaaatttagc

SEQ ID NO: 941822 - DNA, 25 bp, Homo sapien
gggcttgtgatccacggacactcct

SEQ ID NO: 941823 - DNA, 25 bp, Homo sapien
cactcctacgagttgatctttttct

SEQ ID NO: 941824 - DNA, 25 bp, Homo sapien
cagagcctctttggtactaagcttt

SEQ ID NO: 941825 - DNA, 25 bp, Homo sapien
taagctttctgtcttgggcttgtga

SEQ ID NO: 941826 - DNA, 25 bp, Homo sapien
caaacgatgagctatcacaatggtg

SEQ ID NO: 941827 - DNA, 25 bp, Homo sapien
tcgaaaccagcgatgacgtcagcat

SEQ ID NO: 941828 - DNA, 25 bp, Homo sapien
gacgtcagcattacgaactgtagac

SEQ ID NO: 941829 - DNA, 25 bp, Homo sapien
aatgactccatcatcgaaaccagcg

SEQ ID NO: 941830 - DNA, 25 bp, Homo sapien
acctgaaccactgcttcgctttctg

SEQ ID NO: 941831 - DNA, 25 bp, Homo sapien
cagagccacctgaaccactgcttcg

SEQ ID NO: 941832 - DNA, 25 bp, Homo sapien
gcttctgcccaccactcaactgggc

SEQ ID NO: 941833 - DNA, 25 bp, Homo sapien
tgcttcgctttctgtgtccaaggct

SEQ ID NO: 941834 - DNA, 25 bp, Homo sapien
ggtgacattttcacggccatagcga

SEQ ID NO: 941835 - DNA, 25 bp, Homo sapien
catttatggtcctaatatcctgtcc

SEQ ID NO: 941836 - DNA, 25 bp, Homo sapien
gaatgttttcagctatcgtggtggc

SEQ ID NO: 941837 - DNA, 25 bp, Homo sapien
caccaatgatttcccgtagaaacct

SEQ ID NO: 941838 - DNA, 25 bp, Homo sapien
tggggtcatagagcctctgcatcag

SEQ ID NO: 941839 - DNA, 25 bp, Homo sapien
ctctgtggggtcatagagcctctgc

SEQ ID NO: 941840 - DNA, 25 bp, Homo sapien
cccttaatattatctggtttgtgcc

SEQ ID NO: 941841 - DNA, 25 bp, Homo sapien
ttcttttcgagatgggtaactgaag

SEQ ID NO: 941842 - DNA, 25 bp, Homo sapien
aacttcttttcgagatgggtaactg

SEQ ID NO: 941843 - DNA, 25 bp, Homo sapien
gtttgtgcccactcttcgaatagct

SEQ ID NO: 941844 - DNA, 25 bp, Homo sapien
tgcatttgcaaatgcttcaatgctt

SEQ ID NO: 941845 - DNA, 25 bp, Homo sapien
tcctcttgcatttgcaaatgcttca

SEQ ID NO: 941846 - DNA, 25 bp, Homo sapien
caatgcttggagatgcctgtccaac

SEQ ID NO: 941847 - DNA, 25 bp, Homo sapien
ctgtccaacactaaaagccccaatt

SEQ ID NO: 941848 - DNA, 25 bp, Homo sapien
ggccagagcataagatgcatagatc

SEQ ID NO: 941849 - DNA, 25 bp, Homo sapien
gaatattcccctgagaggaccaagg

SEQ ID NO: 941850 - DNA, 25 bp, Homo sapien
gcaggaaagcagcacctatagaaat

SEQ ID NO: 941851 - DNA, 25 bp, Homo sapien
ggaccaaggtggtcccataccagaa

SEQ ID NO: 941852 - DNA, 25 bp, Homo sapien
tctctggatatagctgtgtaagtcc

SEQ ID NO: 941853 - DNA, 25 bp, Homo sapien
tctgaaggagactgccctttcaaag

SEQ ID NO: 941854 - DNA, 25 bp, Homo sapien
ggaaggacattaggccatcagtttg

SEQ ID NO: 941855 - DNA, 25 bp, Homo sapien
gattcacagctgaaaacctagagcc

SEQ ID NO: 941856 - DNA, 25 bp, Homo sapien
tctgcctggtaatatagtatcaaag

SEQ ID NO: 941857 - DNA, 25 bp, Homo sapien
ccattcataggataaagccaacatg

SEQ ID NO: 941858 - DNA, 25 bp, Homo sapien
ttcaccactaaatgtttcctgcggg

SEQ ID NO: 941859 - DNA, 25 bp, Homo sapien
ttcctgcgggtctctaatatattaa

SEQ ID NO: 941860 - DNA, 25 bp, Homo sapien
ttgcatacgctaagagttctttatc

SEQ ID NO: 941861 - DNA, 25 bp, Homo sapien
tccagcttttgcatacgctaagagt

SEQ ID NO: 941862 - DNA, 25 bp, Homo sapien
tgccaagacctcttcagctactgct

SEQ ID NO: 941863 - DNA, 25 bp, Homo sapien
cagttctaattgctgccaagacctc

SEQ ID NO: 941864 - DNA, 25 bp, Homo sapien
gaaccattcacggtaggaggtctga

SEQ ID NO: 941865 - DNA, 25 bp, Homo sapien
cattcacggtaggaggtctgagata

SEQ ID NO: 941866 - DNA, 25 bp, Homo sapien
tctgagatagggtggccagcgccat

SEQ ID NO: 941867 - DNA, 25 bp, Homo sapien
agatagggtggccagcgccatccct

SEQ ID NO: 941868 - DNA, 25 bp, Homo sapien
gatggccaaaatcacaagggttagc

SEQ ID NO: 941869 - DNA, 25 bp, Homo sapien
caaccacgtgtaaatcctactataa

SEQ ID NO: 941870 - DNA, 25 bp, Homo sapien
caagggttagcttccaaccacgtgt

SEQ ID NO: 941871 - DNA, 25 bp, Homo sapien
tccttcattaatcttggagacatca

SEQ ID NO: 941872 - DNA, 25 bp, Homo sapien
tgaaacctgaatgtaagcagcaacc

SEQ ID NO: 941873 - DNA, 25 bp, Homo sapien
tctgtaagtcgggtgttaagctccc

SEQ ID NO: 941874 - DNA, 25 bp, Homo sapien
ccagcaccaattccactgtaataat

SEQ ID NO: 941875 - DNA, 25 bp, Homo sapien
tatctcctgtcgcattatagcatga

SEQ ID NO: 941876 - DNA, 25 bp, Homo sapien
aacaagaacactgcacatgctctct

SEQ ID NO: 941877 - DNA, 25 bp, Homo sapien
tcctaatcaatgtaccttttccaaa

SEQ ID NO: 941878 - DNA, 25 bp, Homo sapien
tttcctaatcaatgtaccttttcca

SEQ ID NO: 941879 - DNA, 25 bp, Homo sapien
acaacaagaacactgcacatgctct

SEQ ID NO: 941880 - DNA, 25 bp, Homo sapien
tgaagaaccctgtatcattgatatc

SEQ ID NO: 941881 - DNA, 25 bp, Homo sapien
tcatgaagaaccctgtatcattgat

SEQ ID NO: 941882 - DNA, 25 bp, Homo sapien
catgaagaaccctgtatcattgata

SEQ ID NO: 941883 - DNA, 25 bp, Homo sapien
aagaaccctgtatcattgatatcac

SEQ ID NO: 941884 - DNA, 25 bp, Homo sapien
agtccagccccatggatgatggcag

SEQ ID NO: 941885 - DNA, 25 bp, Homo sapien
aagtccagccccatggatgatggca

SEQ ID NO: 941886 - DNA, 25 bp, Homo sapien
tctattagtgatgtttgacatcaga

SEQ ID NO: 941887 - DNA, 25 bp, Homo sapien
ttctattagtgatgtttgacatcag

SEQ ID NO: 941888 - DNA, 25 bp, Homo sapien
aaaatacactgacagttggtttctt

SEQ ID NO: 941889 - DNA, 25 bp, Homo sapien
aaatacactgacagttggtttcttt

SEQ ID NO: 941890 - DNA, 25 bp, Homo sapien
tacactgacagttggtttcttttcc

SEQ ID NO: 941891 - DNA, 25 bp, Homo sapien
atacactgacagttggtttcttttc

SEQ ID NO: 941892 - DNA, 25 bp, Homo sapien
ggacagccccagtctacaagtttaa

SEQ ID NO: 941893 - DNA, 25 bp, Homo sapien
cacatgatatatccattggacagcc

SEQ ID NO: 941894 - DNA, 25 bp, Homo sapien
tacagtccattctaccgtgagagat

SEQ ID NO: 941895 - DNA, 25 bp, Homo sapien
ccacatcttgggtatacctgtatca

SEQ ID NO: 941896 - DNA, 25 bp, Homo sapien
acttctgctctaagcagggatattg

SEQ ID NO: 941897 - DNA, 25 bp, Homo sapien
tattgattccaaaggctagcttgcg

SEQ ID NO: 941898 - DNA, 25 bp, Homo sapien
gagctggaggctagaaataaattac

SEQ ID NO: 941899 - DNA, 25 bp, Homo sapien
aaattactcaaatctcgcaactatg

SEQ ID NO: 941900 - DNA, 25 bp, Homo sapien
cctccattgcggtccccttcaagat

SEQ ID NO: 941901 - DNA, 25 bp, Homo sapien
tttgctcctccattgcggtcccctt

SEQ ID NO: 941902 - DNA, 25 bp, Homo sapien
cttctttgctcctccattgcggtcc

SEQ ID NO: 941903 - DNA, 25 bp, Homo sapien
tcctccattgcggtccccttcaaga

SEQ ID NO: 941904 - DNA, 25 bp, Homo sapien
gaagagaaaccgcagctcattagcc

SEQ ID NO: 941905 - DNA, 25 bp, Homo sapien
tgaagagaaaccgcagctcattagc

SEQ ID NO: 941906 - DNA, 25 bp, Homo sapien
aagagaaaccgcagctcattagcca

SEQ ID NO: 941907 - DNA, 25 bp, Homo sapien
caagacgtgaaattttggaagaaga

SEQ ID NO: 941908 - DNA, 25 bp, Homo sapien
ggaagaagatactccgactttagtg

SEQ ID NO: 941909 - DNA, 25 bp, Homo sapien
gctccttggaacggccaccaagacg

SEQ ID NO: 941910 - DNA, 25 bp, Homo sapien
gatactccgactttagtggaaagac

SEQ ID NO: 941911 - DNA, 25 bp, Homo sapien
taaaggaaacgaacagcggcctctg

SEQ ID NO: 941912 - DNA, 25 bp, Homo sapien
gcttctttgagcttggaagagccgc

SEQ ID NO: 941913 - DNA, 25 bp, Homo sapien
gctactcgaatgagctcaggcttcc

SEQ ID NO: 941914 - DNA, 25 bp, Homo sapien
ggcttcctgtggcaaagagagcgaa

SEQ ID NO: 941915 - DNA, 25 bp, Homo sapien
aactgcgaaacaggttgaatttcca

SEQ ID NO: 941916 - DNA, 25 bp, Homo sapien
tcctcgagaaactgcgaaacaggtt

SEQ ID NO: 941917 - DNA, 25 bp, Homo sapien
gctcccggcccggattgactgaatg

SEQ ID NO: 941918 - DNA, 25 bp, Homo sapien
gattgactgaatgctgattcctcga

SEQ ID NO: 941919 - DNA, 25 bp, Homo sapien
ggtccccttgcaagttgacactcat

SEQ ID NO: 941920 - DNA, 25 bp, Homo sapien
ctggtccccttgcaagttgacactc

SEQ ID NO: 941921 - DNA, 25 bp, Homo sapien
tggtccccttgcaagttgacactca

SEQ ID NO: 941922 - DNA, 25 bp, Homo sapien
tatccataccctattaatgagcacg

SEQ ID NO: 941923 - DNA, 25 bp, Homo sapien
tcactatccataccctattaatgag

SEQ ID NO: 941924 - DNA, 25 bp, Homo sapien
aatgagcacgcttcgcgcttcctgg

SEQ ID NO: 941925 - DNA, 25 bp, Homo sapien
taccctattaatgagcacgcttcgc

SEQ ID NO: 941926 - DNA, 25 bp, Homo sapien
tcactgagatggacgtaggaaataa

SEQ ID NO: 941927 - DNA, 25 bp, Homo sapien
cagtgtggatgcagagttagctttc

SEQ ID NO: 941928 - DNA, 25 bp, Homo sapien
tgactatccgttaggtacaagaaac

SEQ ID NO: 941929 - DNA, 25 bp, Homo sapien
ccttctattcaggtcaaaggtggag

SEQ ID NO: 941930 - DNA, 25 bp, Homo sapien
ttttttatccagcttctcactgtgc

SEQ ID NO: 941931 - DNA, 25 bp, Homo sapien
cagcttctcactgtgccttttaagt

SEQ ID NO: 941932 - DNA, 25 bp, Homo sapien
tttttatccagcttctcactgtgcc

SEQ ID NO: 941933 - DNA, 25 bp, Homo sapien
tatccagcttctcactgtgcctttt

SEQ ID NO: 941934 - DNA, 25 bp, Homo sapien
ccctctctttcagggatggcaatga

SEQ ID NO: 941935 - DNA, 25 bp, Homo sapien
gaaattctcgaagtgtgcatgtcta

SEQ ID NO: 941936 - DNA, 25 bp, Homo sapien
agattccttggattgagctttgaca

SEQ ID NO: 941937 - DNA, 25 bp, Homo sapien
tctgactgagctaatttcaagaacc

SEQ ID NO: 941938 - DNA, 25 bp, Homo sapien
ggctaaggttaaagattagctgtaa

SEQ ID NO: 941939 - DNA, 25 bp, Homo sapien
gagagaggaacataacagtgtattc

SEQ ID NO: 941940 - DNA, 25 bp, Homo sapien
tattctagatgctacataaacattc

SEQ ID NO: 941941 - DNA, 25 bp, Homo sapien
tagcatttggacctgggtggaccaa

SEQ ID NO: 941942 - DNA, 25 bp, Homo sapien
tgagtactcctaggagaatgagaaa

SEQ ID NO: 941943 - DNA, 25 bp, Homo sapien
gatctctaatctttaggaatctgga

SEQ ID NO: 941944 - DNA, 25 bp, Homo sapien
ctggttgcttcctgaagtgagtact

SEQ ID NO: 941945 - DNA, 25 bp, Homo sapien
tctttaggaatctggagaatatctg

SEQ ID NO: 941946 - DNA, 25 bp, Homo sapien
tatgggctgtgcttaattccctcag

SEQ ID NO: 941947 - DNA, 25 bp, Homo sapien
caagtatgaaagtttctaggagtcc

SEQ ID NO: 941948 - DNA, 25 bp, Homo sapien
gaaaaggcatatgcggcaatgtcca

SEQ ID NO: 941949 - DNA, 25 bp, Homo sapien
tttggacaacatacatgaaatgctg

SEQ ID NO: 941950 - DNA, 25 bp, Homo sapien
aaaacctgggaatattcatcatgcc

SEQ ID NO: 941951 - DNA, 25 bp, Homo sapien
gcccatgtggctgagagttaaattt

SEQ ID NO: 941952 - DNA, 25 bp, Homo sapien
gccccagtacatgttgttccaagag

SEQ ID NO: 941953 - DNA, 25 bp, Homo sapien
ccaagaacactgttgtggcacatgt

SEQ ID NO: 941954 - DNA, 25 bp, Homo sapien
cctttctcatacttataggtgatat

SEQ ID NO: 941955 - DNA, 25 bp, Homo sapien
ggtaggagacatggaaacctttctc

SEQ ID NO: 941956 - DNA, 25 bp, Homo sapien
gaattttcctaagtgcagtgagggg

SEQ ID NO: 941957 - DNA, 25 bp, Homo sapien
gttttctatgaattacccataagca

SEQ ID NO: 941958 - DNA, 25 bp, Homo sapien
taatattgttaaagagcactgttca

SEQ ID NO: 941959 - DNA, 25 bp, Homo sapien
tatcacagtatagcattatacaatg

SEQ ID NO: 941960 - DNA, 25 bp, Homo sapien
gcactgttcaagataaactttcatg

SEQ ID NO: 941961 - DNA, 25 bp, Homo sapien
aactttcatgtatatcacagtatag

SEQ ID NO: 941962 - DNA, 25 bp, Homo sapien
caagagactgcttttgatgctaagg

SEQ ID NO: 941963 - DNA, 25 bp, Homo sapien
tttacaagaatgctcaatggtggtg

SEQ ID NO: 941964 - DNA, 25 bp, Homo sapien
tatggtgactgaaagcaatgtcttc

SEQ ID NO: 941965 - DNA, 25 bp, Homo sapien
tgaacacccaagtttgactgaagtg

SEQ ID NO: 941966 - DNA, 25 bp, Homo sapien
agtattgctgccttcgaacattttg

SEQ ID NO: 941967 - DNA, 25 bp, Homo sapien
ggcacaagcaggagcaattttaatt

SEQ ID NO: 941968 - DNA, 25 bp, Homo sapien
catatgtactgatcataatggcaca

SEQ ID NO: 941969 - DNA, 25 bp, Homo sapien
caattttaattaagcgaggaattag

SEQ ID NO: 941970 - DNA, 25 bp, Homo sapien
gcaacaatgttcttcattataatcc

SEQ ID NO: 941971 - DNA, 25 bp, Homo sapien
catttttagcaacaatgttcttcat

SEQ ID NO: 941972 - DNA, 25 bp, Homo sapien
ttagcaacaatgttcttcattataa

SEQ ID NO: 941973 - DNA, 25 bp, Homo sapien
ttcattataatccaggttgacatat

SEQ ID NO: 941974 - DNA, 25 bp, Homo sapien
tcattctccctagcagtgtcctgag

SEQ ID NO: 941975 - DNA, 25 bp, Homo sapien
cttgaactcttaagtgagaccccta

SEQ ID NO: 941976 - DNA, 25 bp, Homo sapien
taacatagtgtccatggcccttgcg

SEQ ID NO: 941977 - DNA, 25 bp, Homo sapien
taggactggatgcaattaaggagga

SEQ ID NO: 941978 - DNA, 25 bp, Homo sapien
tatctaggagtagaactgataactc

SEQ ID NO: 941979 - DNA, 25 bp, Homo sapien
aaagtttccctagggcacatatcta

SEQ ID NO: 941980 - DNA, 25 bp, Homo sapien
ggatagcctggtacatgtgcaaaag

SEQ ID NO: 941981 - DNA, 25 bp, Homo sapien
taacaatcttgccatggatagcctg

SEQ ID NO: 941982 - DNA, 25 bp, Homo sapien
taaatggagctgagttacttcttgg

SEQ ID NO: 941983 - DNA, 25 bp, Homo sapien
gtaagtatgggctgattatcactca

SEQ ID NO: 941984 - DNA, 25 bp, Homo sapien
gtatagctgagctgtggaacaaagg

SEQ ID NO: 941985 - DNA, 25 bp, Homo sapien
aataaagaaagatggctccctggtg

SEQ ID NO: 941986 - DNA, 25 bp, Homo sapien
tgactttcatatgtccaaagttgtg

SEQ ID NO: 941987 - DNA, 25 bp, Homo sapien
caaatggtaaagttgcaacagcagc

SEQ ID NO: 941988 - DNA, 25 bp, Homo sapien
tgtgtttttactacatcaaatggta

SEQ ID NO: 941989 - DNA, 25 bp, Homo sapien
tactacatcaaatggtaaagttgca

SEQ ID NO: 941990 - DNA, 25 bp, Homo sapien
caatttctcacgctcctttgtgttc

SEQ ID NO: 941991 - DNA, 25 bp, Homo sapien
tagttgcagagccacaattccaacc

SEQ ID NO: 941992 - DNA, 25 bp, Homo sapien
gactccactaccagcattcacaatt

SEQ ID NO: 941993 - DNA, 25 bp, Homo sapien
ctcacgctcctttgtgttctattat

SEQ ID NO: 941994 - DNA, 25 bp, Homo sapien
catatgagatgacattgcatgaaat

SEQ ID NO: 941995 - DNA, 25 bp, Homo sapien
taaagctctaaaatattataactgt

SEQ ID NO: 941996 - DNA, 25 bp, Homo sapien
actgtaatgatctaacaaatccaaa

SEQ ID NO: 941997 - DNA, 25 bp, Homo sapien
ggatctcaatatacatgagatgcta

SEQ ID NO: 941998 - DNA, 25 bp, Homo sapien
gacaatgcccctgaagtaaagttga

SEQ ID NO: 941999 - DNA, 25 bp, Homo sapien
taaaccagatttctcacataaccac

SEQ ID NO: 942000 - DNA, 25 bp, Homo sapien
tggctcatataaaccagatttctca

SEQ ID NO: 942001 - DNA, 25 bp, Homo sapien
aaaatttcatagttataccagtaca

SEQ ID NO: 942002 - DNA, 25 bp, Homo sapien
ctataaaaacagagaatgaaatgaa

SEQ ID NO: 942003 - DNA, 25 bp, Homo sapien
gacaaatcgatgcagttccacgtaa

SEQ ID NO: 942004 - DNA, 25 bp, Homo sapien
cgtaagaaaacttcttggactgcat

SEQ ID NO: 942005 - DNA, 25 bp, Homo sapien
tttcttgctgacaaatcgatgcagt

SEQ ID NO: 942006 - DNA, 25 bp, Homo sapien
ctctaagaacagtaggagcccagcc

SEQ ID NO: 942007 - DNA, 25 bp, Homo sapien
taatcaattctagtggacttatcac

SEQ ID NO: 942008 - DNA, 25 bp, Homo sapien
cttggttctaatcaattctagtgga

SEQ ID NO: 942009 - DNA, 25 bp, Homo sapien
ggacttatcacagttactgcaccaa

SEQ ID NO: 942010 - DNA, 25 bp, Homo sapien
tctagtggacttatcacagttactg

SEQ ID NO: 942011 - DNA, 25 bp, Homo sapien
caattccagcaacaattggtatgca

SEQ ID NO: 942012 - DNA, 25 bp, Homo sapien
gcacttaattgatcatagcaggtaa

SEQ ID NO: 942013 - DNA, 25 bp, Homo sapien
caacaattggtatgcaggtttcatt

SEQ ID NO: 942014 - DNA, 25 bp, Homo sapien
taacttagatctcagaagagcactt

SEQ ID NO: 942015 - DNA, 25 bp, Homo sapien
ctccatagagatttaatgccctcat

SEQ ID NO: 942016 - DNA, 25 bp, Homo sapien
gccactccatagagatttaatgccc

SEQ ID NO: 942017 - DNA, 25 bp, Homo sapien
cactccatagagatttaatgccctc

SEQ ID NO: 942018 - DNA, 25 bp, Homo sapien
ggccactccatagagatttaatgcc

SEQ ID NO: 942019 - DNA, 25 bp, Homo sapien
ttcgaatgattttaaaaaatgcatc

SEQ ID NO: 942020 - DNA, 25 bp, Homo sapien
tcctggcttcttataccatagtttg

SEQ ID NO: 942021 - DNA, 25 bp, Homo sapien
tgagtccattactatatacaaaaca

SEQ ID NO: 942022 - DNA, 25 bp, Homo sapien
acagacacatagatgatccatgagt

SEQ ID NO: 942023 - DNA, 25 bp, Homo sapien
tataccatagtttgttgcctccctc

SEQ ID NO: 942024 - DNA, 25 bp, Homo sapien
agtctaattttaacaacatccaggg

SEQ ID NO: 942025 - DNA, 25 bp, Homo sapien
ttgggcttggagtctaattttaaca

SEQ ID NO: 942026 - DNA, 25 bp, Homo sapien
attttaacaacatccaggggtgtca

SEQ ID NO: 942027 - DNA, 25 bp, Homo sapien
ggagtctaattttaacaacatccag

SEQ ID NO: 942028 - DNA, 25 bp, Homo sapien
ttaagtttcaattagcgagtggtat

SEQ ID NO: 942029 - DNA, 25 bp, Homo sapien
tgttaagtttcaattagcgagtggt

SEQ ID NO: 942030 - DNA, 25 bp, Homo sapien
gttaagtttcaattagcgagtggta

SEQ ID NO: 942031 - DNA, 25 bp, Homo sapien
tatgttaagtttcaattagcgagtg

SEQ ID NO: 942032 - DNA, 25 bp, Homo sapien
tagccaaatgatattagtcttccca

SEQ ID NO: 942033 - DNA, 25 bp, Homo sapien
gacagacgaattacttctctcatga

SEQ ID NO: 942034 - DNA, 25 bp, Homo sapien
gatctctatgacctttataactcaa

SEQ ID NO: 942035 - DNA, 25 bp, Homo sapien
gagtaaactagtcataaaacatctt

SEQ ID NO: 942036 - DNA, 25 bp, Homo sapien
ggtggagccgcagcaaaggaacata

SEQ ID NO: 942037 - DNA, 25 bp, Homo sapien
atcacatcagggccactatgataat

SEQ ID NO: 942038 - DNA, 25 bp, Homo sapien
gtggagccgcagcaaaggaacataa

SEQ ID NO: 942039 - DNA, 25 bp, Homo sapien
catcacatcagggccactatgataa

SEQ ID NO: 942040 - DNA, 25 bp, Homo sapien
tgaagaggtgtcactttgataatct

SEQ ID NO: 942041 - DNA, 25 bp, Homo sapien
cagtacatgaggcaagcatttgttg

SEQ ID NO: 942042 - DNA, 25 bp, Homo sapien
atgtcagtatagctccagtacatga

SEQ ID NO: 942043 - DNA, 25 bp, Homo sapien
gaagaggtgtcactttgataatctc

SEQ ID NO: 942044 - DNA, 25 bp, Homo sapien
aatgagccaagatcgcattactgca

SEQ ID NO: 942045 - DNA, 25 bp, Homo sapien
atgagaatccctttaacccaggagg

SEQ ID NO: 942046 - DNA, 25 bp, Homo sapien
tcccagttccgtgggggactgaggc

SEQ ID NO: 942047 - DNA, 25 bp, Homo sapien
cagaagttgcaatgagccaagatcg

SEQ ID NO: 942048 - DNA, 25 bp, Homo sapien
gttcttcaactctatgctccaatat

SEQ ID NO: 942049 - DNA, 25 bp, Homo sapien
tttattgtttgtaacatcagtagcc

SEQ ID NO: 942050 - DNA, 25 bp, Homo sapien
ttttattgtttgtaacatcagtagc

SEQ ID NO: 942051 - DNA, 25 bp, Homo sapien
ttcaactctatgctccaatatttta

SEQ ID NO: 942052 - DNA, 25 bp, Homo sapien
ttcttggggactgtgcacagtggtc

SEQ ID NO: 942053 - DNA, 25 bp, Homo sapien
aaaaagaatattcttggggactgtg

SEQ ID NO: 942054 - DNA, 25 bp, Homo sapien
aatattcttggggactgtgcacagt

SEQ ID NO: 942055 - DNA, 25 bp, Homo sapien
ggactgtgcacagtggtccatgcct

SEQ ID NO: 942056 - DNA, 25 bp, Homo sapien
gccttcatgtctttatgccctgaga

SEQ ID NO: 942057 - DNA, 25 bp, Homo sapien
agcataaccgctcagcggcattcca

SEQ ID NO: 942058 - DNA, 25 bp, Homo sapien
agttggtttcccctgcatgagacat

SEQ ID NO: 942059 - DNA, 25 bp, Homo sapien
gattattatatgctgtgggaaagac

SEQ ID NO: 942060 - DNA, 25 bp, Homo sapien
tagaggcggaaacacaacctgcagg

SEQ ID NO: 942061 - DNA, 25 bp, Homo sapien
taggtttggtcaacacagagccgcg

SEQ ID NO: 942062 - DNA, 25 bp, Homo sapien
cagtcctggcaaacctagaaggcgg

SEQ ID NO: 942063 - DNA, 25 bp, Homo sapien
tctgagactgagagagcaacggaat

SEQ ID NO: 942064 - DNA, 25 bp, Homo sapien
ggagactaagaagtcctgggtcaaa

SEQ ID NO: 942065 - DNA, 25 bp, Homo sapien
cctgactttacatagtgaaattttg

SEQ ID NO: 942066 - DNA, 25 bp, Homo sapien
agactaagaagtcctgggtcaaagg

SEQ ID NO: 942067 - DNA, 25 bp, Homo sapien
tgatagcagggatgtcttaatctgt

SEQ ID NO: 942068 - DNA, 25 bp, Homo sapien
caaatatgtttgaagcttaaaagtt

SEQ ID NO: 942069 - DNA, 25 bp, Homo sapien
catgcggaacacaaaatgtaattgg

SEQ ID NO: 942070 - DNA, 25 bp, Homo sapien
atttcagggatatcaagatgctcca

SEQ ID NO: 942071 - DNA, 25 bp, Homo sapien
gtttttgccataggtttctcagtaa

SEQ ID NO: 942072 - DNA, 25 bp, Homo sapien
taatctgttaacagcgtttttctcg

SEQ ID NO: 942073 - DNA, 25 bp, Homo sapien
gggtttcacaagctacacagaaaag

SEQ ID NO: 942074 - DNA, 25 bp, Homo sapien
cagaatttgtagttcaccggtacag

SEQ ID NO: 942075 - DNA, 25 bp, Homo sapien
gacttgtttcagactagtgaagaga

SEQ ID NO: 942076 - DNA, 25 bp, Homo sapien
accacatcaagggagcacagtgtgg

SEQ ID NO: 942077 - DNA, 25 bp, Homo sapien
gacggacaaaaacaatcactacagt

SEQ ID NO: 942078 - DNA, 25 bp, Homo sapien
gcagcccttgaacctaagagcttcc

SEQ ID NO: 942079 - DNA, 25 bp, Homo sapien
ccctctgacatagtctgcccaaatg

SEQ ID NO: 942080 - DNA, 25 bp, Homo sapien
tatgtgatatcctcccaaaaagtta

SEQ ID NO: 942081 - DNA, 25 bp, Homo sapien
cacatgcaggaaaatagtatacagg

SEQ ID NO: 942082 - DNA, 25 bp, Homo sapien
tatacaggttaaatatttcttatcc

SEQ ID NO: 942083 - DNA, 25 bp, Homo sapien
gaattgagattggttagattttatg

SEQ ID NO: 942084 - DNA, 25 bp, Homo sapien
tgcagaacagttaggaggatctcaa

SEQ ID NO: 942085 - DNA, 25 bp, Homo sapien
aactggcttgttactggttacttgc

SEQ ID NO: 942086 - DNA, 25 bp, Homo sapien
aagtacactcaaggcctgactctgc

SEQ ID NO: 942087 - DNA, 25 bp, Homo sapien
ttaaccatgtaagcagaagcgtcag

SEQ ID NO: 942088 - DNA, 25 bp, Homo sapien
gaacgatctcggtctgtagagcaga

SEQ ID NO: 942089 - DNA, 25 bp, Homo sapien
aaagcattgtgccttgactgtgaag

SEQ ID NO: 942090 - DNA, 25 bp, Homo sapien
tacagtctagacattgatatttagg

SEQ ID NO: 942091 - DNA, 25 bp, Homo sapien
ccaaatgatgctcttagtgctccca

SEQ ID NO: 942092 - DNA, 25 bp, Homo sapien
ctcttctgtgtgttttggtgttcat

SEQ ID NO: 942093 - DNA, 25 bp, Homo sapien
ggtgagtgagtattggcttaaagtc

SEQ ID NO: 942094 - DNA, 25 bp, Homo sapien
cagaatggtgagtgagtattggctt

SEQ ID NO: 942095 - DNA, 25 bp, Homo sapien
gtgagtattggcttaaagtcaccag

SEQ ID NO: 942096 - DNA, 25 bp, Homo sapien
gaatggtgagtgagtattggcttaa

SEQ ID NO: 942097 - DNA, 25 bp, Homo sapien
gccaccttcaattgtcttgtctaga

SEQ ID NO: 942098 - DNA, 25 bp, Homo sapien
ctgttgtgtgctatagccaccttca

SEQ ID NO: 942099 - DNA, 25 bp, Homo sapien
tgtgctatagccaccttcaattgtc

SEQ ID NO: 942100 - DNA, 25 bp, Homo sapien
ccttcttttgaagcgttgaaaccag

SEQ ID NO: 942101 - DNA, 25 bp, Homo sapien
ggaggagagcactgttactaccagg

SEQ ID NO: 942102 - DNA, 25 bp, Homo sapien
cccataccaatattcattgatagtg

SEQ ID NO: 942103 - DNA, 25 bp, Homo sapien
ccataccaatattcattgatagtgg

SEQ ID NO: 942104 - DNA, 25 bp, Homo sapien
aactgttcccataccaatattcatt

SEQ ID NO: 942105 - DNA, 25 bp, Homo sapien
tgttcccataccaatattcattgat

SEQ ID NO: 942106 - DNA, 25 bp, Homo sapien
ctgcaggctttttcctccagtcacc

SEQ ID NO: 942107 - DNA, 25 bp, Homo sapien
tgcaggctttttcctccagtcacct

SEQ ID NO: 942108 - DNA, 25 bp, Homo sapien
caggctttttcctccagtcacctgc

SEQ ID NO: 942109 - DNA, 25 bp, Homo sapien
gctttttcctccagtcacctgccat

SEQ ID NO: 942110 - DNA, 25 bp, Homo sapien
caacatccattctggtttatttgcc

SEQ ID NO: 942111 - DNA, 25 bp, Homo sapien
catgtcattgtatagactgcctcat

SEQ ID NO: 942112 - DNA, 25 bp, Homo sapien
tagactgcctcataatcacccaaca

SEQ ID NO: 942113 - DNA, 25 bp, Homo sapien
agacatccttgctaagcttgtgctg

SEQ ID NO: 942114 - DNA, 25 bp, Homo sapien
tgttctctactcctattttgactcc

SEQ ID NO: 942115 - DNA, 25 bp, Homo sapien
ttctctactcctattttgactcctg

SEQ ID NO: 942116 - DNA, 25 bp, Homo sapien
cgtgttctctactcctattttgact

SEQ ID NO: 942117 - DNA, 25 bp, Homo sapien
ctctactcctattttgactcctgct

SEQ ID NO: 942118 - DNA, 25 bp, Homo sapien
gctgctgagattaagcaagtgcacc

SEQ ID NO: 942119 - DNA, 25 bp, Homo sapien
gagctggtagcttctggtttgccaa

SEQ ID NO: 942120 - DNA, 25 bp, Homo sapien
aaaatgcagctgttacacacaagtg

SEQ ID NO: 942121 - DNA, 25 bp, Homo sapien
gacacatgagacaacgtactgccag

SEQ ID NO: 942122 - DNA, 25 bp, Homo sapien
agccactctttatttagatgggaag

SEQ ID NO: 942123 - DNA, 25 bp, Homo sapien
ctttatttagatgggaagtggcatg

SEQ ID NO: 942124 - DNA, 25 bp, Homo sapien
tggcatggtcctctgaacgctgcag

SEQ ID NO: 942125 - DNA, 25 bp, Homo sapien
gactggccacatgaactgtcctcca

SEQ ID NO: 942126 - DNA, 25 bp, Homo sapien
gcatttagtcctggcatagacacag

SEQ ID NO: 942127 - DNA, 25 bp, Homo sapien
tatgcaggagagcacacattgtcac

SEQ ID NO: 942128 - DNA, 25 bp, Homo sapien
cactgggagatgagtcctaaaagcc

SEQ ID NO: 942129 - DNA, 25 bp, Homo sapien
tgttagtcccgcaaatggagcaact

SEQ ID NO: 942130 - DNA, 25 bp, Homo sapien
tagtagcttacatgttagccagcag

SEQ ID NO: 942131 - DNA, 25 bp, Homo sapien
catctatagatagtggaagccaccc

SEQ ID NO: 942132 - DNA, 25 bp, Homo sapien
tagccagcagtaggtcggcactagt

SEQ ID NO: 942133 - DNA, 25 bp, Homo sapien
ccatgaggaggtgttaatagcagca

SEQ ID NO: 942134 - DNA, 25 bp, Homo sapien
tccagtttggctcagtagaagcaag

SEQ ID NO: 942135 - DNA, 25 bp, Homo sapien
ggtaccacctggaacatcatgctga

SEQ ID NO: 942136 - DNA, 25 bp, Homo sapien
gaaacagtaactcggctgagccaaa

SEQ ID NO: 942137 - DNA, 25 bp, Homo sapien
gatggcagccagctcgtggacttga

SEQ ID NO: 942138 - DNA, 25 bp, Homo sapien
tcccctcccgccataattataagta

SEQ ID NO: 942139 - DNA, 25 bp, Homo sapien
tgtaagccttacatcgagggaggga

SEQ ID NO: 942140 - DNA, 25 bp, Homo sapien
taatgtctttagcagtgtgcgaaca

SEQ ID NO: 942141 - DNA, 25 bp, Homo sapien
gatgcttttgtattcaccccaaagc

SEQ ID NO: 942142 - DNA, 25 bp, Homo sapien
cctgacgtggattactggattacct

SEQ ID NO: 942143 - DNA, 25 bp, Homo sapien
gaatggtaagtttcacactgcatcc

SEQ ID NO: 942144 - DNA, 25 bp, Homo sapien
gaagggcgtgtgctaaacttctaag

SEQ ID NO: 942145 - DNA, 25 bp, Homo sapien
aaccacatagtaagaggcacaagcc

SEQ ID NO: 942146 - DNA, 25 bp, Homo sapien
acatattaccgaaggcaaagaggac

SEQ ID NO: 942147 - DNA, 25 bp, Homo sapien
tacaacagctgttaagagaaagtcg

SEQ ID NO: 942148 - DNA, 25 bp, Homo sapien
agaaagtcgtgatgtaagtttatac

SEQ ID NO: 942149 - DNA, 25 bp, Homo sapien
gaggacaagcaaaggagagctccag

SEQ ID NO: 942150 - DNA, 25 bp, Homo sapien
ttaaacactcatgacacattgaatg

SEQ ID NO: 942151 - DNA, 25 bp, Homo sapien
aaacactcatgacacattgaatgaa

SEQ ID NO: 942152 - DNA, 25 bp, Homo sapien
taaacactcatgacacattgaatga

SEQ ID NO: 942153 - DNA, 25 bp, Homo sapien
gcttccccgctaaacataaagcaat

SEQ ID NO: 942154 - DNA, 25 bp, Homo sapien
tcagatacctgagattagaaatacc

SEQ ID NO: 942155 - DNA, 25 bp, Homo sapien
tactaaggtattgtgcactgctaac

SEQ ID NO: 942156 - DNA, 25 bp, Homo sapien
cagtgttccctacactactaaggta

SEQ ID NO: 942157 - DNA, 25 bp, Homo sapien
taaattgtgatttagccgggagcag

SEQ ID NO: 942158 - DNA, 25 bp, Homo sapien
cactgattacatggccttaccctac

SEQ ID NO: 942159 - DNA, 25 bp, Homo sapien
gaaacaagtaaccaatctctctagc

SEQ ID NO: 942160 - DNA, 25 bp, Homo sapien
tggcactaggttatgttcacactga

SEQ ID NO: 942161 - DNA, 25 bp, Homo sapien
taagatattcttaacagctaatttc

SEQ ID NO: 942162 - DNA, 25 bp, Homo sapien
tctctggcatccttaaccttaagat

SEQ ID NO: 942163 - DNA, 25 bp, Homo sapien
tttcaaagggatacccatctggtgt

SEQ ID NO: 942164 - DNA, 25 bp, Homo sapien
catggtctcactatagttaagacta

SEQ ID NO: 942165 - DNA, 25 bp, Homo sapien
tcatcatatgggaaattcacaacac

SEQ ID NO: 942166 - DNA, 25 bp, Homo sapien
atcatcatatgggaaattcacaaca

SEQ ID NO: 942167 - DNA, 25 bp, Homo sapien
gctgagcagtatcccgtcttcgaaa

SEQ ID NO: 942168 - DNA, 25 bp, Homo sapien
gagcagtatcccgtcttcgaaagct

SEQ ID NO: 942169 - DNA, 25 bp, Homo sapien
tgagcagtatcccgtcttcgaaagc

SEQ ID NO: 942170 - DNA, 25 bp, Homo sapien
gcagtatcccgtcttcgaaagctgt

SEQ ID NO: 942171 - DNA, 25 bp, Homo sapien
tgtaagagccctcagtttgacgcag

SEQ ID NO: 942172 - DNA, 25 bp, Homo sapien
tgtagtcgtcgaaggtgatctttcc

SEQ ID NO: 942173 - DNA, 25 bp, Homo sapien
ccattggtgctgtatcgttttgcaa

SEQ ID NO: 942174 - DNA, 25 bp, Homo sapien
cgcagcaggcgatgtagtcgtcgaa

SEQ ID NO: 942175 - DNA, 25 bp, Homo sapien
cagggccttctgcaattcttgtggg

SEQ ID NO: 942176 - DNA, 25 bp, Homo sapien
ggccttctgcaattcttgtgggtct

SEQ ID NO: 942177 - DNA, 25 bp, Homo sapien
caaaactgataaagtgttgtctcca

SEQ ID NO: 942178 - DNA, 25 bp, Homo sapien
tcaaaactgataaagtgttgtctcc

SEQ ID NO: 942179 - DNA, 25 bp, Homo sapien
aaaactgataaagtgttgtctccag

SEQ ID NO: 942180 - DNA, 25 bp, Homo sapien
aaagcggtcttgttactggaactag

SEQ ID NO: 942181 - DNA, 25 bp, Homo sapien
taaactcagtccaacaagtgggatg

SEQ ID NO: 942182 - DNA, 25 bp, Homo sapien
tgaaaaatcccatcacttgcagagg

SEQ ID NO: 942183 - DNA, 25 bp, Homo sapien
ggaaatagcgttgccattgtgaacc

SEQ ID NO: 942184 - DNA, 25 bp, Homo sapien
ttgaaaccataagccggcaagtctc

SEQ ID NO: 942185 - DNA, 25 bp, Homo sapien
atccagcattgaaaccataagccgg

SEQ ID NO: 942186 - DNA, 25 bp, Homo sapien
cagcattgaaaccataagccggcaa

SEQ ID NO: 942187 - DNA, 25 bp, Homo sapien
gcattgaaaccataagccggcaagt

SEQ ID NO: 942188 - DNA, 25 bp, Homo sapien
gaaacatacaatataatggacctag

SEQ ID NO: 942189 - DNA, 25 bp, Homo sapien
cctagaaggaaagccctacctccag

SEQ ID NO: 942190 - DNA, 25 bp, Homo sapien
attctactagaatgcctcaaacatc

SEQ ID NO: 942191 - DNA, 25 bp, Homo sapien
tctcaaccttatcacagacgaacaa

SEQ ID NO: 942192 - DNA, 25 bp, Homo sapien
cagtaagtagaaaggccacttccca

SEQ ID NO: 942193 - DNA, 25 bp, Homo sapien
caggtccagtaagtagaaaggccac

SEQ ID NO: 942194 - DNA, 25 bp, Homo sapien
cagcaggtccagtaagtagaaaggc

SEQ ID NO: 942195 - DNA, 25 bp, Homo sapien
tggagcagcaggtccagtaagtaga

SEQ ID NO: 942196 - DNA, 25 bp, Homo sapien
cagacatctctgcaattcatcagca

SEQ ID NO: 942197 - DNA, 25 bp, Homo sapien
tgtcagacatctctgcaattcatca

SEQ ID NO: 942198 - DNA, 25 bp, Homo sapien
aattcatcagcatctatctgcccat

SEQ ID NO: 942199 - DNA, 25 bp, Homo sapien
gacatctctgcaattcatcagcatc

SEQ ID NO: 942200 - DNA, 25 bp, Homo sapien
gatcctgagtttgtccgggaaacgc

SEQ ID NO: 942201 - DNA, 25 bp, Homo sapien
ctgtccagctacagcagcaaagtaa

SEQ ID NO: 942202 - DNA, 25 bp, Homo sapien
catacagcggatcctgagtttgtcc

SEQ ID NO: 942203 - DNA, 25 bp, Homo sapien
gcagcaaagtaaccatacagcggat

SEQ ID NO: 942204 - DNA, 25 bp, Homo sapien
tacacgtcattctgccgaatcaagt

SEQ ID NO: 942205 - DNA, 25 bp, Homo sapien
cattctgccgaatcaagttttcttc

SEQ ID NO: 942206 - DNA, 25 bp, Homo sapien
acacatacacgtcattctgccgaat

SEQ ID NO: 942207 - DNA, 25 bp, Homo sapien
cgtcattctgccgaatcaagttttc

SEQ ID NO: 942208 - DNA, 25 bp, Homo sapien
cttggccccgcagggccatccagga

SEQ ID NO: 942209 - DNA, 25 bp, Homo sapien
gccccgcagggccatccaggagaag

SEQ ID NO: 942210 - DNA, 25 bp, Homo sapien
cagggccatccaggagaagggacgg

SEQ ID NO: 942211 - DNA, 25 bp, Homo sapien
agggccatccaggagaagggacggg

SEQ ID NO: 942212 - DNA, 25 bp, Homo sapien
cgccggcgccaggatgccccgggta

SEQ ID NO: 942213 - DNA, 25 bp, Homo sapien
cgccaggatgccccgggtacgccat

SEQ ID NO: 942214 - DNA, 25 bp, Homo sapien
cgccgccggcgccaggatgccccgg

SEQ ID NO: 942215 - DNA, 25 bp, Homo sapien
ccggcgccaggatgccccgggtacg

SEQ ID NO: 942216 - DNA, 25 bp, Homo sapien
agccgccctcgccctgtgcgccagg

SEQ ID NO: 942217 - DNA, 25 bp, Homo sapien
gctggtgatccttagaggattgcct

SEQ ID NO: 942218 - DNA, 25 bp, Homo sapien
gagtggccaaatagaagaatcaaga

SEQ ID NO: 942219 - DNA, 25 bp, Homo sapien
gagttgaagtcttataggtagaagc

SEQ ID NO: 942220 - DNA, 25 bp, Homo sapien
gattgccttcttgcagagtggccaa

SEQ ID NO: 942221 - DNA, 25 bp, Homo sapien
agcagatgaatcacattgccctctt

SEQ ID NO: 942222 - DNA, 25 bp, Homo sapien
taaaacaaatacacactggccgtct

SEQ ID NO: 942223 - DNA, 25 bp, Homo sapien
tggaatcatgtacagttttcacttc

SEQ ID NO: 942224 - DNA, 25 bp, Homo sapien
cacaagggatagttctttggaatca

SEQ ID NO: 942225 - DNA, 25 bp, Homo sapien
tcaggctcagagtgttgggctgtta

SEQ ID NO: 942226 - DNA, 25 bp, Homo sapien
aaatcagggtgcagaaattgattag

SEQ ID NO: 942227 - DNA, 25 bp, Homo sapien
gttgacatctttattctggctcttc

SEQ ID NO: 942228 - DNA, 25 bp, Homo sapien
gcctgtggtggttgacatctttatt

SEQ ID NO: 942229 - DNA, 25 bp, Homo sapien
atcagggtgcagaaattgattaggg

SEQ ID NO: 942230 - DNA, 25 bp, Homo sapien
tccatcatgagaagagttaagcctg

SEQ ID NO: 942231 - DNA, 25 bp, Homo sapien
taggcctacgtttgagcactgtgca

SEQ ID NO: 942232 - DNA, 25 bp, Homo sapien
tgtgtaggaaaagccagaagtgcca

SEQ ID NO: 942233 - DNA, 25 bp, Homo sapien
ttttagaagtgccaagccaagccag

SEQ ID NO: 942234 - DNA, 25 bp, Homo sapien
ggatgtggccatggaatttgtaaac

SEQ ID NO: 942235 - DNA, 25 bp, Homo sapien
tcctgtgactaagaacacctgctgt

SEQ ID NO: 942236 - DNA, 25 bp, Homo sapien
aataaaagggctatttcataggcag

SEQ ID NO: 942237 - DNA, 25 bp, Homo sapien
agagcagtggcatgggctgcctggc

SEQ ID NO: 942238 - DNA, 25 bp, Homo sapien
tacaatggtgcgatgaaagcaacac

SEQ ID NO: 942239 - DNA, 25 bp, Homo sapien
caaagacttctctagaccagcctgg

SEQ ID NO: 942240 - DNA, 25 bp, Homo sapien
tttcggtgacggactatgagccagg

SEQ ID NO: 942241 - DNA, 25 bp, Homo sapien
gtaaaagagcagtatccagccccag

SEQ ID NO: 942242 - DNA, 25 bp, Homo sapien
tagaaaaatatcctggattgttgat

SEQ ID NO: 942243 - DNA, 25 bp, Homo sapien
tataatgtcatgtataatatgttat

SEQ ID NO: 942244 - DNA, 25 bp, Homo sapien
aaaaatatcctggattgttgatgtt

SEQ ID NO: 942245 - DNA, 25 bp, Homo sapien
gaaaaatatcctggattgttgatgt

SEQ ID NO: 942246 - DNA, 25 bp, Homo sapien
gactaagacagatatagaagctact

SEQ ID NO: 942247 - DNA, 25 bp, Homo sapien
ccttggaaagggtactatcagcaca

SEQ ID NO: 942248 - DNA, 25 bp, Homo sapien
acagtgagaaccatcctaaatttca

SEQ ID NO: 942249 - DNA, 25 bp, Homo sapien
tagctcattgcttgagctaggaagg

SEQ ID NO: 942250 - DNA, 25 bp, Homo sapien
gaaaataagagtcagggacctgcac

SEQ ID NO: 942251 - DNA, 25 bp, Homo sapien
tatagaggaagaattacatgccagc

SEQ ID NO: 942252 - DNA, 25 bp, Homo sapien
ggaaactctttagtgtgaaaccaca

SEQ ID NO: 942253 - DNA, 25 bp, Homo sapien
caagcaatgtttccctcagtcacgg

SEQ ID NO: 942254 - DNA, 25 bp, Homo sapien
ccagccctggcggatccttgtaagg

SEQ ID NO: 942255 - DNA, 25 bp, Homo sapien
taagccctaacacgtaggctgcagg

SEQ ID NO: 942256 - DNA, 25 bp, Homo sapien
tacacatggcatgattaggacaaac

SEQ ID NO: 942257 - DNA, 25 bp, Homo sapien
ggacaaacttgatcaccagcacagt

SEQ ID NO: 942258 - DNA, 25 bp, Homo sapien
tcagggtcaaataacccagtttgga

SEQ ID NO: 942259 - DNA, 25 bp, Homo sapien
tgtacacaagatcagggtcaaataa

SEQ ID NO: 942260 - DNA, 25 bp, Homo sapien
tacacaagatcagggtcaaataacc

SEQ ID NO: 942261 - DNA, 25 bp, Homo sapien
caagatcagggtcaaataacccagt

SEQ ID NO: 942262 - DNA, 25 bp, Homo sapien
caaatcggaactctctccagttgac

SEQ ID NO: 942263 - DNA, 25 bp, Homo sapien
tcggaactctctccagttgactgca

SEQ ID NO: 942264 - DNA, 25 bp, Homo sapien
gaactctctccagttgactgcattg

SEQ ID NO: 942265 - DNA, 25 bp, Homo sapien
ctggacaaatcggaactctctccag

SEQ ID NO: 942266 - DNA, 25 bp, Homo sapien
cagatggcaaagaagtgattcccaa

SEQ ID NO: 942267 - DNA, 25 bp, Homo sapien
caaagaagtgattcccaagagtaca

SEQ ID NO: 942268 - DNA, 25 bp, Homo sapien
agtgattcccaagagtacaaacaga

SEQ ID NO: 942269 - DNA, 25 bp, Homo sapien
aggtgctaaatggattctccttctt

SEQ ID NO: 942270 - DNA, 25 bp, Homo sapien
taatacatcagtcttgcaccacaag

SEQ ID NO: 942271 - DNA, 25 bp, Homo sapien
gactcttacccaggaaacttacatg

SEQ ID NO: 942272 - DNA, 25 bp, Homo sapien
tctagttattgaggtcaacttcccc

SEQ ID NO: 942273 - DNA, 25 bp, Homo sapien
tgtagagaaacccatagaagcatca

SEQ ID NO: 942274 - DNA, 25 bp, Homo sapien
cttaatagttgtatgagatctaaac

SEQ ID NO: 942275 - DNA, 25 bp, Homo sapien
gttgtatgagatctaaactggattc

SEQ ID NO: 942276 - DNA, 25 bp, Homo sapien
aatagttgtatgagatctaaactgg

SEQ ID NO: 942277 - DNA, 25 bp, Homo sapien
tattcttaatagttgtatgagatct

SEQ ID NO: 942278 - DNA, 25 bp, Homo sapien
ctgctttcggcaaagcatccagtgg

SEQ ID NO: 942279 - DNA, 25 bp, Homo sapien
cacaagtgtgtagaggacatgaagg

SEQ ID NO: 942280 - DNA, 25 bp, Homo sapien
tatcgaataggaatcacaagtgtgt

SEQ ID NO: 942281 - DNA, 25 bp, Homo sapien
ccatcgtacataatatcgaatagga

SEQ ID NO: 942282 - DNA, 25 bp, Homo sapien
ggaggtaaaccaaagcaagcagtgt

SEQ ID NO: 942283 - DNA, 25 bp, Homo sapien
tcaagccagtctgggaatcgacggt

SEQ ID NO: 942284 - DNA, 25 bp, Homo sapien
gaatggcagcaataacaccagggag

SEQ ID NO: 942285 - DNA, 25 bp, Homo sapien
gacggtattttgtgcctcggtacag

SEQ ID NO: 942286 - DNA, 25 bp, Homo sapien
aaaagacatggttctccacactgtg

SEQ ID NO: 942287 - DNA, 25 bp, Homo sapien
tgtggtgccgcatcacttatgaatg

SEQ ID NO: 942288 - DNA, 25 bp, Homo sapien
tagtactgacaagaagcctccagag

SEQ ID NO: 942289 - DNA, 25 bp, Homo sapien
gatgatggttttaggcacatcacac

SEQ ID NO: 942290 - DNA, 25 bp, Homo sapien
ccactgggcagtagggtggtcttct

SEQ ID NO: 942291 - DNA, 25 bp, Homo sapien
caccaaatgagcaaggtactctgca

SEQ ID NO: 942292 - DNA, 25 bp, Homo sapien
gccgacttgcatccagtgctcctga

SEQ ID NO: 942293 - DNA, 25 bp, Homo sapien
taaatgcttttaccacgtgggctcc

SEQ ID NO: 942294 - DNA, 25 bp, Homo sapien
ttcaatcccagtgatcttccaaaat

SEQ ID NO: 942295 - DNA, 25 bp, Homo sapien
tttcaatcccagtgatcttccaaaa

SEQ ID NO: 942296 - DNA, 25 bp, Homo sapien
tcaatcccagtgatcttccaaaatc

SEQ ID NO: 942297 - DNA, 25 bp, Homo sapien
agtgcatctatacaagttttctcca

SEQ ID NO: 942298 - DNA, 25 bp, Homo sapien
aactggcgactgatatcctgaatgg

SEQ ID NO: 942299 - DNA, 25 bp, Homo sapien
gaatgtgtgactgcctatctcctca

SEQ ID NO: 942300 - DNA, 25 bp, Homo sapien
ttgcacgcctccatcaaaagcagag

SEQ ID NO: 942301 - DNA, 25 bp, Homo sapien
ggagcttatctgaagttgcacgcct

SEQ ID NO: 942302 - DNA, 25 bp, Homo sapien
acctcgcccggcagtgaaaattaga

SEQ ID NO: 942303 - DNA, 25 bp, Homo sapien
ccactttcagatgctagggctctca

SEQ ID NO: 942304 - DNA, 25 bp, Homo sapien
caactcgcaagtcgaccactttcag

SEQ ID NO: 942305 - DNA, 25 bp, Homo sapien
tttcagatgctagggctctcacacc

SEQ ID NO: 942306 - DNA, 25 bp, Homo sapien
gtccagcgccaacggtgcgcgccgc

SEQ ID NO: 942307 - DNA, 25 bp, Homo sapien
agagggaagtttcgccgcgcctgca

SEQ ID NO: 942308 - DNA, 25 bp, Homo sapien
gggagaggcgcttccaaggaggaag

SEQ ID NO: 942309 - DNA, 25 bp, Homo sapien
gaagcgtccagcgccaacggtgcgc

SEQ ID NO: 942310 - DNA, 25 bp, Homo sapien
ggaaaattaagcttcccaaagatgc

SEQ ID NO: 942311 - DNA, 25 bp, Homo sapien
gtacccaaggacttcctgtgggcag

SEQ ID NO: 942312 - DNA, 25 bp, Homo sapien
aaagatgccagcaacctgagtaccc

SEQ ID NO: 942313 - DNA, 25 bp, Homo sapien
aaaattaagcttcccaaagatgcca

SEQ ID NO: 942314 - DNA, 25 bp, Homo sapien
tcagtggttgacttctgtcagccct

SEQ ID NO: 942315 - DNA, 25 bp, Homo sapien
cctcctcaaagagtaaagcttcact

SEQ ID NO: 942316 - DNA, 25 bp, Homo sapien
tggttgacttctgtcagccctggta

SEQ ID NO: 942317 - DNA, 25 bp, Homo sapien
cctcaaagagtaaagcttcacttgt

SEQ ID NO: 942318 - DNA, 25 bp, Homo sapien
taccagctcactatattcatgccca

SEQ ID NO: 942319 - DNA, 25 bp, Homo sapien
gttctaccagctcactatattcatg

SEQ ID NO: 942320 - DNA, 25 bp, Homo sapien
ctctagttctaccagctcactatat

SEQ ID NO: 942321 - DNA, 25 bp, Homo sapien
cactatattcatgcccacatactct

SEQ ID NO: 942322 - DNA, 25 bp, Homo sapien
ggataactgaaggaactaccctaca

SEQ ID NO: 942323 - DNA, 25 bp, Homo sapien
aaccatgttgtgttgggataactga

SEQ ID NO: 942324 - DNA, 25 bp, Homo sapien
gagattgccatttgtacattatggg

SEQ ID NO: 942325 - DNA, 25 bp, Homo sapien
gcaacatgatcttagagacctgaga

SEQ ID NO: 942326 - DNA, 25 bp, Homo sapien
tcttcatcataacacccagaaattg

SEQ ID NO: 942327 - DNA, 25 bp, Homo sapien
catcataacacccagaaattgtcag

SEQ ID NO: 942328 - DNA, 25 bp, Homo sapien
cacccagaaattgtcaggtcattca

SEQ ID NO: 942329 - DNA, 25 bp, Homo sapien
cttcatcttcatcataacacccaga

SEQ ID NO: 942330 - DNA, 25 bp, Homo sapien
gtaagaaagcatgatctatagcgtg

SEQ ID NO: 942331 - DNA, 25 bp, Homo sapien
cctggtaagaaagcatgatctatag

SEQ ID NO: 942332 - DNA, 25 bp, Homo sapien
tggtaagaaagcatgatctatagcg

SEQ ID NO: 942333 - DNA, 25 bp, Homo sapien
agaaagcatgatctatagcgtggct

SEQ ID NO: 942334 - DNA, 25 bp, Homo sapien
cactgaggcattgttccagtccatt

SEQ ID NO: 942335 - DNA, 25 bp, Homo sapien
acactgaggcattgttccagtccat

SEQ ID NO: 942336 - DNA, 25 bp, Homo sapien
ctgaggcattgttccagtccatttg

SEQ ID NO: 942337 - DNA, 25 bp, Homo sapien
cacactgaggcattgttccagtcca

SEQ ID NO: 942338 - DNA, 25 bp, Homo sapien
ggctgccacttcacaacttgtaaga

SEQ ID NO: 942339 - DNA, 25 bp, Homo sapien
caacttgtaagagtttcaatatggc

SEQ ID NO: 942340 - DNA, 25 bp, Homo sapien
tatggcatacagaagcaattggctt

SEQ ID NO: 942341 - DNA, 25 bp, Homo sapien
gagtttcaatatggcatacagaagc

SEQ ID NO: 942342 - DNA, 25 bp, Homo sapien
tactggaaaccttcaacttatgatt

SEQ ID NO: 942343 - DNA, 25 bp, Homo sapien
tggaaaccttcaacttatgattgac

SEQ ID NO: 942344 - DNA, 25 bp, Homo sapien
ccttcaacttatgattgactggaat

SEQ ID NO: 942345 - DNA, 25 bp, Homo sapien
gaaaccttcaacttatgattgactg

SEQ ID NO: 942346 - DNA, 25 bp, Homo sapien
tgaggatggcaaagtggttgctcat

SEQ ID NO: 942347 - DNA, 25 bp, Homo sapien
tgtatttgggggagaatgtgatgag

SEQ ID NO: 942348 - DNA, 25 bp, Homo sapien
agaatgtgatgaggatggcaaagtg

SEQ ID NO: 942349 - DNA, 25 bp, Homo sapien
ttgggggagaatgtgatgaggatgg

SEQ ID NO: 942350 - DNA, 25 bp, Homo sapien
taattgttttgaatccggaggagag

SEQ ID NO: 942351 - DNA, 25 bp, Homo sapien
gtttcctttctgaatcgccccttca

SEQ ID NO: 942352 - DNA, 25 bp, Homo sapien
ccgctctattgagggttgctggcaa

SEQ ID NO: 942353 - DNA, 25 bp, Homo sapien
tgttgtggcctgctattgcagctga

SEQ ID NO: 942354 - DNA, 25 bp, Homo sapien
ggactcaatcccctgggcaaactca

SEQ ID NO: 942355 - DNA, 25 bp, Homo sapien
ttcctcagtgaaggtatggaggtat

SEQ ID NO: 942356 - DNA, 25 bp, Homo sapien
tattgtagaaaatctctatgtcttg

SEQ ID NO: 942357 - DNA, 25 bp, Homo sapien
ggtatggaggtattgtagaaaatct

SEQ ID NO: 942358 - DNA, 25 bp, Homo sapien
caaaccgtccacttcaaacagttct

SEQ ID NO: 942359 - DNA, 25 bp, Homo sapien
cttcaaacagttctacgggtatagt

SEQ ID NO: 942360 - DNA, 25 bp, Homo sapien
cagttctacgggtatagttttctct

SEQ ID NO: 942361 - DNA, 25 bp, Homo sapien
cgtccacttcaaacagttctacggg

SEQ ID NO: 942362 - DNA, 25 bp, Homo sapien
agttgatgactaaagaaacctgctg

SEQ ID NO: 942363 - DNA, 25 bp, Homo sapien
acctgctgcacatcaatgcctctgg

SEQ ID NO: 942364 - DNA, 25 bp, Homo sapien
gttgatgactaaagaaacctgctgc

SEQ ID NO: 942365 - DNA, 25 bp, Homo sapien
gaaacctgctgcacatcaatgcctc

SEQ ID NO: 942366 - DNA, 25 bp, Homo sapien
gaggggcactagatgtccccttgga

SEQ ID NO: 942367 - DNA, 25 bp, Homo sapien
aggggcactagatgtccccttggag

SEQ ID NO: 942368 - DNA, 25 bp, Homo sapien
aaaggaaaacgtgctccttgtggca

SEQ ID NO: 942369 - DNA, 25 bp, Homo sapien
taaaggaaaacgtgctccttgtggc

SEQ ID NO: 942370 - DNA, 25 bp, Homo sapien
aaggaaaacgtgctccttgtggcag

SEQ ID NO: 942371 - DNA, 25 bp, Homo sapien
aatcagcgtgcctcctttcggtgta

SEQ ID NO: 942372 - DNA, 25 bp, Homo sapien
tgaggcctaattatgccatcagctc

SEQ ID NO: 942373 - DNA, 25 bp, Homo sapien
ggaggagcacaaggttcaccaagga

SEQ ID NO: 942374 - DNA, 25 bp, Homo sapien
cacttacacctggtttgaggcctaa

SEQ ID NO: 942375 - DNA, 25 bp, Homo sapien
gccaagtaacatgtcttaatttgca

SEQ ID NO: 942376 - DNA, 25 bp, Homo sapien
cttgggctgcaaagtctctttcatc

SEQ ID NO: 942377 - DNA, 25 bp, Homo sapien
ccaagtaacatgtcttaatttgcat

SEQ ID NO: 942378 - DNA, 25 bp, Homo sapien
ttgggctgcaaagtctctttcatct

SEQ ID NO: 942379 - DNA, 25 bp, Homo sapien
caaggagagaaagaatagagagtgg

SEQ ID NO: 942380 - DNA, 25 bp, Homo sapien
ctttcacagagcaaggagagaaaga

SEQ ID NO: 942381 - DNA, 25 bp, Homo sapien
cagagcaaggagagaaagaatagag

SEQ ID NO: 942382 - DNA, 25 bp, Homo sapien
agcaaggagagaaagaatagagagt

SEQ ID NO: 942383 - DNA, 25 bp, Homo sapien
ttgtagacatactccatccctgcgt

SEQ ID NO: 942384 - DNA, 25 bp, Homo sapien
catcatcatggaacaaagcttgtgg

SEQ ID NO: 942385 - DNA, 25 bp, Homo sapien
taagcaacgtgtcaatgttgtagac

SEQ ID NO: 942386 - DNA, 25 bp, Homo sapien
gcgtctatggctccattgccttcca

SEQ ID NO: 942387 - DNA, 25 bp, Homo sapien
aaaaccaggcattgcccaatgagag

SEQ ID NO: 942388 - DNA, 25 bp, Homo sapien
gaaaaccaggcattgcccaatgaga

SEQ ID NO: 942389 - DNA, 25 bp, Homo sapien
gactttgctgctatgtcagcctcag

SEQ ID NO: 942390 - DNA, 25 bp, Homo sapien
gattttccatactgaggcaacctgc

SEQ ID NO: 942391 - DNA, 25 bp, Homo sapien
ttttacagggatagaagacatactc

SEQ ID NO: 942392 - DNA, 25 bp, Homo sapien
gcacctgaacagaagtatatgggat

SEQ ID NO: 942393 - DNA, 25 bp, Homo sapien
ttgccatctgctgagcaatcagaaa

SEQ ID NO: 942394 - DNA, 25 bp, Homo sapien
gccatctgctgagcaatcagaaaaa

SEQ ID NO: 942395 - DNA, 25 bp, Homo sapien
catctgctgagcaatcagaaaaagt

SEQ ID NO: 942396 - DNA, 25 bp, Homo sapien
tctgctgagcaatcagaaaaagtaa

SEQ ID NO: 942397 - DNA, 25 bp, Homo sapien
cttaacgtaactgagctgtcccttc

SEQ ID NO: 942398 - DNA, 25 bp, Homo sapien
ccttaacgtaactgagctgtccctt

SEQ ID NO: 942399 - DNA, 25 bp, Homo sapien
tacatcttcttcatcgctgttaggg

SEQ ID NO: 942400 - DNA, 25 bp, Homo sapien
catcttcttcatcgctgttagggaa

SEQ ID NO: 942401 - DNA, 25 bp, Homo sapien
acatcttcttcatcgctgttaggga

SEQ ID NO: 942402 - DNA, 25 bp, Homo sapien
ctgtagtcatgacataagtctactg

SEQ ID NO: 942403 - DNA, 25 bp, Homo sapien
ccaatttgacaatcaggggagtctc

SEQ ID NO: 942404 - DNA, 25 bp, Homo sapien
ctgatgtctgatcctccaatttgac

SEQ ID NO: 942405 - DNA, 25 bp, Homo sapien
agtctactgatgtctgatcctccaa

SEQ ID NO: 942406 - DNA, 25 bp, Homo sapien
tgttgactgatcaaactacttaggt

SEQ ID NO: 942407 - DNA, 25 bp, Homo sapien
ggtagatgttattatggcttcatca

SEQ ID NO: 942408 - DNA, 25 bp, Homo sapien
gatcaaactacttaggtggatgtaa

SEQ ID NO: 942409 - DNA, 25 bp, Homo sapien
ctacttaggtggatgtaactatcta

SEQ ID NO: 942410 - DNA, 25 bp, Homo sapien
cagatgcatgctggccactgtggct

SEQ ID NO: 942411 - DNA, 25 bp, Homo sapien
gctggtcctgccattgctccagatg

SEQ ID NO: 942412 - DNA, 25 bp, Homo sapien
cattgctccagatgcatgctggcca

SEQ ID NO: 942413 - DNA, 25 bp, Homo sapien
tcctgccattgctccagatgcatgc

SEQ ID NO: 942414 - DNA, 25 bp, Homo sapien
tgaggaagcaccataactcttctgt

SEQ ID NO: 942415 - DNA, 25 bp, Homo sapien
agacttgaggaagcaccataactct

SEQ ID NO: 942416 - DNA, 25 bp, Homo sapien
gacttgaggaagcaccataactctt

SEQ ID NO: 942417 - DNA, 25 bp, Homo sapien
cttgaggaagcaccataactcttct

SEQ ID NO: 942418 - DNA, 25 bp, Homo sapien
tccaaatttaacattggtttcaatc

SEQ ID NO: 942419 - DNA, 25 bp, Homo sapien
ccaaatttaacattggtttcaatca

SEQ ID NO: 942420 - DNA, 25 bp, Homo sapien
agcttatacaggttcctggtgtcaa

SEQ ID NO: 942421 - DNA, 25 bp, Homo sapien
tggaggttgttctactgtattcagg

SEQ ID NO: 942422 - DNA, 25 bp, Homo sapien
gatccaaaacctccagccactttac

SEQ ID NO: 942423 - DNA, 25 bp, Homo sapien
tctatgccagagatgcgaatcattt

SEQ ID NO: 942424 - DNA, 25 bp, Homo sapien
cctgtctccgtcattatcttataaa

SEQ ID NO: 942425 - DNA, 25 bp, Homo sapien
gaacatgtctggtgcttaaaataag

SEQ ID NO: 942426 - DNA, 25 bp, Homo sapien
taagtgtcccctgtctccgtcatta

SEQ ID NO: 942427 - DNA, 25 bp, Homo sapien
tggttaactggagagcaattcttcc

SEQ ID NO: 942428 - DNA, 25 bp, Homo sapien
cactacttcactgatctttgccttg

SEQ ID NO: 942429 - DNA, 25 bp, Homo sapien
ctacttcactgatctttgccttgtt

SEQ ID NO: 942430 - DNA, 25 bp, Homo sapien
actacttcactgatctttgccttgt

SEQ ID NO: 942431 - DNA, 25 bp, Homo sapien
gcttcctcttatgaggcctcagcat

SEQ ID NO: 942432 - DNA, 25 bp, Homo sapien
ggcttcctcttatgaggcctcagca

SEQ ID NO: 942433 - DNA, 25 bp, Homo sapien
gcttggcttcctcttatgaggcctc

SEQ ID NO: 942434 - DNA, 25 bp, Homo sapien
ccattgactggctcagttctttctg

SEQ ID NO: 942435 - DNA, 25 bp, Homo sapien
ttctggcacagaaactgatcttcct

SEQ ID NO: 942436 - DNA, 25 bp, Homo sapien
tctggcacagaaactgatcttcctc

SEQ ID NO: 942437 - DNA, 25 bp, Homo sapien
tatgccacaatgaacgggatataca

SEQ ID NO: 942438 - DNA, 25 bp, Homo sapien
cattctttactcatactgggtttct

SEQ ID NO: 942439 - DNA, 25 bp, Homo sapien
tccactgctggaatagttggtcacg

SEQ ID NO: 942440 - DNA, 25 bp, Homo sapien
gttcatcagtggctttattatgcca

SEQ ID NO: 942441 - DNA, 25 bp, Homo sapien
gaacattgacgaagaatggaactaa

SEQ ID NO: 942442 - DNA, 25 bp, Homo sapien
atgattcacgacttgctctatctga

SEQ ID NO: 942443 - DNA, 25 bp, Homo sapien
gattcacgacttgctctatctgatc

SEQ ID NO: 942444 - DNA, 25 bp, Homo sapien
tgattcacgacttgctctatctgat

SEQ ID NO: 942445 - DNA, 25 bp, Homo sapien
attagcaggctaggaaagacggtga

SEQ ID NO: 942446 - DNA, 25 bp, Homo sapien
gggttgattagcaggctaggaaaga

SEQ ID NO: 942447 - DNA, 25 bp, Homo sapien
tttggggttgattagcaggctagga

SEQ ID NO: 942448 - DNA, 25 bp, Homo sapien
ttgattagcaggctaggaaagacgg

SEQ ID NO: 942449 - DNA, 25 bp, Homo sapien
gcaattcggaagctcctagagactt

SEQ ID NO: 942450 - DNA, 25 bp, Homo sapien
ttcggaagctcctagagacttcaca

SEQ ID NO: 942451 - DNA, 25 bp, Homo sapien
tggagtcacaaatggcaattcggaa

SEQ ID NO: 942452 - DNA, 25 bp, Homo sapien
tgctggagtcacaaatggcaattcg

SEQ ID NO: 942453 - DNA, 25 bp, Homo sapien
gaggtgccagtattcttgcggcaaa

SEQ ID NO: 942454 - DNA, 25 bp, Homo sapien
catttggaccaccagaaaggtaagg

SEQ ID NO: 942455 - DNA, 25 bp, Homo sapien
ctcaacagaatctaaaggaggtgcc

SEQ ID NO: 942456 - DNA, 25 bp, Homo sapien
gatgcaggaatcaaactaacgtagg

SEQ ID NO: 942457 - DNA, 25 bp, Homo sapien
aacagtgcgtcaactgcaccgcagt

SEQ ID NO: 942458 - DNA, 25 bp, Homo sapien
gcgtcaactgcaccgcagttgataa

SEQ ID NO: 942459 - DNA, 25 bp, Homo sapien
caccgcagttgataaccaagtctcg

SEQ ID NO: 942460 - DNA, 25 bp, Homo sapien
ccaagtctcggaaaatggaaccatc

SEQ ID NO: 942461 - DNA, 25 bp, Homo sapien
gagtgcccaagcagattcaaactga

SEQ ID NO: 942462 - DNA, 25 bp, Homo sapien
aaactgaatgggactacaatcagtt

SEQ ID NO: 942463 - DNA, 25 bp, Homo sapien
tctccagaaggtagtttcctggcag

SEQ ID NO: 942464 - DNA, 25 bp, Homo sapien
ttctccagaaggtagtttcctggca

SEQ ID NO: 942465 - DNA, 25 bp, Homo sapien
tcccaagaaggacagaaatgttgga

SEQ ID NO: 942466 - DNA, 25 bp, Homo sapien
ccaatttacagtatcctggttgttg

SEQ ID NO: 942467 - DNA, 25 bp, Homo sapien
agaccaatttacagtatcctggttg

SEQ ID NO: 942468 - DNA, 25 bp, Homo sapien
cagtatcctggttgttgcagttctt

SEQ ID NO: 942469 - DNA, 25 bp, Homo sapien
gttgttatttatacctttgacaatg

SEQ ID NO: 942470 - DNA, 25 bp, Homo sapien
cttatatttctccttcttagctttc

SEQ ID NO: 942471 - DNA, 25 bp, Homo sapien
atgagcttatatttctccttcttag

SEQ ID NO: 942472 - DNA, 25 bp, Homo sapien
aaatgagcttatatttctccttctt

SEQ ID NO: 942473 - DNA, 25 bp, Homo sapien
gagcttatatttctccttcttagct

SEQ ID NO: 942474 - DNA, 25 bp, Homo sapien
aagtcgggtggctggtgtattagca

SEQ ID NO: 942475 - DNA, 25 bp, Homo sapien
gttaagtcgggtggctggtgtatta

SEQ ID NO: 942476 - DNA, 25 bp, Homo sapien
tgttaagtcgggtggctggtgtatt

SEQ ID NO: 942477 - DNA, 25 bp, Homo sapien
taagtcgggtggctggtgtattagc

SEQ ID NO: 942478 - DNA, 25 bp, Homo sapien
ttatttgggcttcaggaccgccagt

SEQ ID NO: 942479 - DNA, 25 bp, Homo sapien
tcaggaccgccagttcagaattagg

SEQ ID NO: 942480 - DNA, 25 bp, Homo sapien
gccagttcagaattaggctctataa

SEQ ID NO: 942481 - DNA, 25 bp, Homo sapien
ttaggctctataatggtggttggtg

SEQ ID NO: 942482 - DNA, 25 bp, Homo sapien
catagctccctgtaagccactgtga

SEQ ID NO: 942483 - DNA, 25 bp, Homo sapien
tatgttagctacttctggctcatag

SEQ ID NO: 942484 - DNA, 25 bp, Homo sapien
ctttatgttagctacttctggctca

SEQ ID NO: 942485 - DNA, 25 bp, Homo sapien
ttatgttagctacttctggctcata

SEQ ID NO: 942486 - DNA, 25 bp, Homo sapien
tttatgttagctacttctggctcat

SEQ ID NO: 942487 - DNA, 25 bp, Homo sapien
taaatctcagcctgccgaagctctt

SEQ ID NO: 942488 - DNA, 25 bp, Homo sapien
cagttactgtctcctgcaattccta

SEQ ID NO: 942489 - DNA, 25 bp, Homo sapien
tctgatagccaattgccaccctgtc

SEQ ID NO: 942490 - DNA, 25 bp, Homo sapien
gatgtcttacatatgcctgtggata

SEQ ID NO: 942491 - DNA, 25 bp, Homo sapien
ttttacggccacagaatccatgcat

SEQ ID NO: 942492 - DNA, 25 bp, Homo sapien
gtctgtcttttacggccacagaatc

SEQ ID NO: 942493 - DNA, 25 bp, Homo sapien
tgtcttttacggccacagaatccat

SEQ ID NO: 942494 - DNA, 25 bp, Homo sapien
tcttttacggccacagaatccatgc

SEQ ID NO: 942495 - DNA, 25 bp, Homo sapien
gaagacaccatctgtgggagccact

SEQ ID NO: 942496 - DNA, 25 bp, Homo sapien
gcacgtagaactctagggcctaggg

SEQ ID NO: 942497 - DNA, 25 bp, Homo sapien
gctttagcgctgagaatgtcaacat

SEQ ID NO: 942498 - DNA, 25 bp, Homo sapien
gggagccactccaaagcacgtagaa

SEQ ID NO: 942499 - DNA, 25 bp, Homo sapien
tgctatgaaggccaagatgcactgc

SEQ ID NO: 942500 - DNA, 25 bp, Homo sapien
tctggctccagtgctgtaagtggtg

SEQ ID NO: 942501 - DNA, 25 bp, Homo sapien
ccctaaacttctggctccagtgctg

SEQ ID NO: 942502 - DNA, 25 bp, Homo sapien
gatgcactgcctatagtcccctaaa

SEQ ID NO: 942503 - DNA, 25 bp, Homo sapien
actgcaggatacatgggagcactcc

SEQ ID NO: 942504 - DNA, 25 bp, Homo sapien
tagtttcactagacacaagcaggta

SEQ ID NO: 942505 - DNA, 25 bp, Homo sapien
tggcattttgagtgctccccacagt

SEQ ID NO: 942506 - DNA, 25 bp, Homo sapien
catgattatgctctgccacaggaga

SEQ ID NO: 942507 - DNA, 25 bp, Homo sapien
ccaggaaaccagcaggttcaagggc

SEQ ID NO: 942508 - DNA, 25 bp, Homo sapien
tgcaactacacaccacaggcacctc

SEQ ID NO: 942509 - DNA, 25 bp, Homo sapien
tccattctcacaggctcctgcaact

SEQ ID NO: 942510 - DNA, 25 bp, Homo sapien
tggcagaagcccctccattctcaca

SEQ ID NO: 942511 - DNA, 25 bp, Homo sapien
ggatgcctgaggtccacctggcaga

SEQ ID NO: 942512 - DNA, 25 bp, Homo sapien
tgttgcagctattctgtacaattct

SEQ ID NO: 942513 - DNA, 25 bp, Homo sapien
acaattctctaccaacaggacccga

SEQ ID NO: 942514 - DNA, 25 bp, Homo sapien
aattctctaccaacaggacccgaca

SEQ ID NO: 942515 - DNA, 25 bp, Homo sapien
tgcagctattctgtacaattctcta

SEQ ID NO: 942516 - DNA, 25 bp, Homo sapien
aggctttctggtggacaccctgcca

SEQ ID NO: 942517 - DNA, 25 bp, Homo sapien
gccaccagcactggcattgttatta

SEQ ID NO: 942518 - DNA, 25 bp, Homo sapien
cctgccaccagcactggcattgtta

SEQ ID NO: 942519 - DNA, 25 bp, Homo sapien
tcacagagcatgaggctttctggtg

SEQ ID NO: 942520 - DNA, 25 bp, Homo sapien
tctaacaaagctagatgtcattttc

SEQ ID NO: 942521 - DNA, 25 bp, Homo sapien
taagaggactagtatatttgtggca

SEQ ID NO: 942522 - DNA, 25 bp, Homo sapien
aaagcccacaggaatctaacaaagc

SEQ ID NO: 942523 - DNA, 25 bp, Homo sapien
tagtatatttgtggcactctggaaa

SEQ ID NO: 942524 - DNA, 25 bp, Homo sapien
ggaacctctaacatacctgcagtca

SEQ ID NO: 942525 - DNA, 25 bp, Homo sapien
aggaggttgtgcttctccctagtgg

SEQ ID NO: 942526 - DNA, 25 bp, Homo sapien
cctgcagtcatccagtcccaaagct

SEQ ID NO: 942527 - DNA, 25 bp, Homo sapien
tctccctagtggaggaacctctaac

SEQ ID NO: 942528 - DNA, 25 bp, Homo sapien
acatcagagtcctattcctctccat

SEQ ID NO: 942529 - DNA, 25 bp, Homo sapien
tgctctcccacatcagagtcctatt

SEQ ID NO: 942530 - DNA, 25 bp, Homo sapien
ttcttgctctcccacatcagagtcc

SEQ ID NO: 942531 - DNA, 25 bp, Homo sapien
cacatcagagtcctattcctctcca

SEQ ID NO: 942532 - DNA, 25 bp, Homo sapien
gtggctaaaggattaaccaaggaga

SEQ ID NO: 942533 - DNA, 25 bp, Homo sapien
tggctaaaggattaaccaaggagat

SEQ ID NO: 942534 - DNA, 25 bp, Homo sapien
ggctaaaggattaaccaaggagatc

SEQ ID NO: 942535 - DNA, 25 bp, Homo sapien
gctaaaggattaaccaaggagatct

SEQ ID NO: 942536 - DNA, 25 bp, Homo sapien
gcagtaatcccacaccccgaaaata

SEQ ID NO: 942537 - DNA, 25 bp, Homo sapien
tgctgacttagtagttaaaacttct

SEQ ID NO: 942538 - DNA, 25 bp, Homo sapien
gctggtgccttatgtcatcccagat

SEQ ID NO: 942539 - DNA, 25 bp, Homo sapien
tgcaaccaggtagcaccatggaaac

SEQ ID NO: 942540 - DNA, 25 bp, Homo sapien
aagtagcaattgctcttgtggatca

SEQ ID NO: 942541 - DNA, 25 bp, Homo sapien
tcttgtggatcagttctgcactgct

SEQ ID NO: 942542 - DNA, 25 bp, Homo sapien
tgttacggaagtagcaattgctctt

SEQ ID NO: 942543 - DNA, 25 bp, Homo sapien
ctgcttgttacggaagtagcaattg

SEQ ID NO: 942544 - DNA, 25 bp, Homo sapien
ggtagtcgctgttgccgctgagaaa

SEQ ID NO: 942545 - DNA, 25 bp, Homo sapien
taaataaatatatcgctggcccgcg

SEQ ID NO: 942546 - DNA, 25 bp, Homo sapien
agagcagcatgtggactggctcgcc

SEQ ID NO: 942547 - DNA, 25 bp, Homo sapien
cggttgagcagccacctcgtcagag

SEQ ID NO: 942548 - DNA, 25 bp, Homo sapien
agttggcccctgtccatagtgaagg

SEQ ID NO: 942549 - DNA, 25 bp, Homo sapien
gcaattgaaaggctcctgttaatcc

SEQ ID NO: 942550 - DNA, 25 bp, Homo sapien
atagagcactagattggacctggtc

SEQ ID NO: 942551 - DNA, 25 bp, Homo sapien
gatgttctagatgtaagactgagag

SEQ ID NO: 942552 - DNA, 25 bp, Homo sapien
aagtttagctcaacatactctataa

SEQ ID NO: 942553 - DNA, 25 bp, Homo sapien
ctgtgtatattgcaatgttctgttt

SEQ ID NO: 942554 - DNA, 25 bp, Homo sapien
atatattacctctgtgtatattgca

SEQ ID NO: 942555 - DNA, 25 bp, Homo sapien
tgaacttaataccacaacaaataga

SEQ ID NO: 942556 - DNA, 25 bp, Homo sapien
gcacaaactccttaagagacatggg

SEQ ID NO: 942557 - DNA, 25 bp, Homo sapien
taagtagcacaaactccttaagaga

SEQ ID NO: 942558 - DNA, 25 bp, Homo sapien
agagacatgggcacattatccctct

SEQ ID NO: 942559 - DNA, 25 bp, Homo sapien
actccttaagagacatgggcacatt

SEQ ID NO: 942560 - DNA, 25 bp, Homo sapien
tgttgccgggtccatgaattcttcg

SEQ ID NO: 942561 - DNA, 25 bp, Homo sapien
catagtctggcaaaggtagagtgac

SEQ ID NO: 942562 - DNA, 25 bp, Homo sapien
tcgctggaggactcgaggatatgca

SEQ ID NO: 942563 - DNA, 25 bp, Homo sapien
catcgtcgagatacataactggaac

SEQ ID NO: 942564 - DNA, 25 bp, Homo sapien
tctggttatggaccgaaaaggacat

SEQ ID NO: 942565 - DNA, 25 bp, Homo sapien
tgcccttctggttatggaccgaaaa

SEQ ID NO: 942566 - DNA, 25 bp, Homo sapien
gctgcccttctggttatggaccgaa

SEQ ID NO: 942567 - DNA, 25 bp, Homo sapien
ttctggttatggaccgaaaaggaca

SEQ ID NO: 942568 - DNA, 25 bp, Homo sapien
gattccagcttttagcttatcataa

SEQ ID NO: 942569 - DNA, 25 bp, Homo sapien
taatatttatgctgccagggtacct

SEQ ID NO: 942570 - DNA, 25 bp, Homo sapien
tgctgccagggtacctctttactga

SEQ ID NO: 942571 - DNA, 25 bp, Homo sapien
gtacctctttactgatgaactcgtg

SEQ ID NO: 942572 - DNA, 25 bp, Homo sapien
taatggtgattacagattgtccttt

SEQ ID NO: 942573 - DNA, 25 bp, Homo sapien
cgaaagagttaaataatatcctagg

SEQ ID NO: 942574 - DNA, 25 bp, Homo sapien
caatcttttgccagttttatcagga

SEQ ID NO: 942575 - DNA, 25 bp, Homo sapien
aagagtaaatcacggtttgtcaaat

SEQ ID NO: 942576 - DNA, 25 bp, Homo sapien
tcacgcacctgtcctcgaggcccta

SEQ ID NO: 942577 - DNA, 25 bp, Homo sapien
tgtcacgcacctgtcctcgaggccc

SEQ ID NO: 942578 - DNA, 25 bp, Homo sapien
cacgcacctgtcctcgaggccctac

SEQ ID NO: 942579 - DNA, 25 bp, Homo sapien
gtcacgcacctgtcctcgaggccct

SEQ ID NO: 942580 - DNA, 25 bp, Homo sapien
gggtatctcgacaaacacttcaaag

SEQ ID NO: 942581 - DNA, 25 bp, Homo sapien
taaaggaccagagcgccaagtttct

SEQ ID NO: 942582 - DNA, 25 bp, Homo sapien
tacgtgagtcagaatgtcagcacca

SEQ ID NO: 942583 - DNA, 25 bp, Homo sapien
caagtttcttaatacgggtatctcg

SEQ ID NO: 942584 - DNA, 25 bp, Homo sapien
tctcacatccaactctggaaaatac

SEQ ID NO: 942585 - DNA, 25 bp, Homo sapien
cttctcacatccaactctggaaaat

SEQ ID NO: 942586 - DNA, 25 bp, Homo sapien
caactctggaaaatacttaggctct

SEQ ID NO: 942587 - DNA, 25 bp, Homo sapien
tctggaaaatacttaggctctgcgc

SEQ ID NO: 942588 - DNA, 25 bp, Homo sapien
catcatgaatgcctctctggtccat

SEQ ID NO: 942589 - DNA, 25 bp, Homo sapien
atcatcatgaatgcctctctggtcc

SEQ ID NO: 942590 - DNA, 25 bp, Homo sapien
tcatcatgaatgcctctctggtcca

SEQ ID NO: 942591 - DNA, 25 bp, Homo sapien
catgctctgatatcccatgcaaggt

SEQ ID NO: 942592 - DNA, 25 bp, Homo sapien
tctgatatcccatgcaaggtagctc

SEQ ID NO: 942593 - DNA, 25 bp, Homo sapien
ggctctgacacctttctgacacttt

SEQ ID NO: 942594 - DNA, 25 bp, Homo sapien
tggtcatgctctgatatcccatgca

SEQ ID NO: 942595 - DNA, 25 bp, Homo sapien
ttagacctgcacaacacagtctcct

SEQ ID NO: 942596 - DNA, 25 bp, Homo sapien
ctgcacaacacagtctccttctgta

SEQ ID NO: 942597 - DNA, 25 bp, Homo sapien
tgcacaacacagtctccttctgtac

SEQ ID NO: 942598 - DNA, 25 bp, Homo sapien
gacctgcacaacacagtctccttct

SEQ ID NO: 942599 - DNA, 25 bp, Homo sapien
agataaaagcgggagctattttttg

SEQ ID NO: 942600 - DNA, 25 bp, Homo sapien
ctgagataaaagcgggagctatttt

SEQ ID NO: 942601 - DNA, 25 bp, Homo sapien
tgagataaaagcgggagctattttt

SEQ ID NO: 942602 - DNA, 25 bp, Homo sapien
tattgagtaacaagatatgaataac

SEQ ID NO: 942603 - DNA, 25 bp, Homo sapien
tataaatattgagtaacaagatatg

SEQ ID NO: 942604 - DNA, 25 bp, Homo sapien
gaaaagagtgggcttaatccaacat

SEQ ID NO: 942605 - DNA, 25 bp, Homo sapien
ctgagtagaaggaaagggtcttatc

SEQ ID NO: 942606 - DNA, 25 bp, Homo sapien
atagatggacatttccattcaagcc

SEQ ID NO: 942607 - DNA, 25 bp, Homo sapien
catttccattcaagcctcatttaaa

SEQ ID NO: 942608 - DNA, 25 bp, Homo sapien
ttgtctttagtgtttatagatggac

SEQ ID NO: 942609 - DNA, 25 bp, Homo sapien
taagcttgtctttagtgtttataga

SEQ ID NO: 942610 - DNA, 25 bp, Homo sapien
cataccagatttgagctgatagaaa

SEQ ID NO: 942611 - DNA, 25 bp, Homo sapien
gccctggtgggtagcaaaattatgc

SEQ ID NO: 942612 - DNA, 25 bp, Homo sapien
aaagaaaatgctcttgctcagagta

SEQ ID NO: 942613 - DNA, 25 bp, Homo sapien
aaaatataatgttctcttgcgtctg

SEQ ID NO: 942614 - DNA, 25 bp, Homo sapien
ttgaacagctcatgaaccaactggg

SEQ ID NO: 942615 - DNA, 25 bp, Homo sapien
ttatttggatgttgtaactggaatt

SEQ ID NO: 942616 - DNA, 25 bp, Homo sapien
ggatgttgtaactggaattaccttc

SEQ ID NO: 942617 - DNA, 25 bp, Homo sapien
tttggatgttgtaactggaattacc

SEQ ID NO: 942618 - DNA, 25 bp, Homo sapien
gcttcaattggcttgctgcctttat

SEQ ID NO: 942619 - DNA, 25 bp, Homo sapien
tgccagcttcaattggcttgctgcc

SEQ ID NO: 942620 - DNA, 25 bp, Homo sapien
ccactgccagcttcaattggcttgc

SEQ ID NO: 942621 - DNA, 25 bp, Homo sapien
aattggcttgctgcctttattgatg

SEQ ID NO: 942622 - DNA, 25 bp, Homo sapien
tctgatggaaatgcgtaaggatgaa

SEQ ID NO: 942623 - DNA, 25 bp, Homo sapien
tgatggaaatgcgtaaggatgaaag

SEQ ID NO: 942624 - DNA, 25 bp, Homo sapien
aatctgatggaaatgcgtaaggatg

SEQ ID NO: 942625 - DNA, 25 bp, Homo sapien
tcaatctgatggaaatgcgtaagga

SEQ ID NO: 942626 - DNA, 25 bp, Homo sapien
gattgcccctgctaatactctccct

SEQ ID NO: 942627 - DNA, 25 bp, Homo sapien
tcacgattgcccctgctaatactct

SEQ ID NO: 942628 - DNA, 25 bp, Homo sapien
ttttttctttcacgattgcccctgc

SEQ ID NO: 942629 - DNA, 25 bp, Homo sapien
tctttcacgattgcccctgctaata

SEQ ID NO: 942630 - DNA, 25 bp, Homo sapien
cagattgatgggtctcgtaaagtcc

SEQ ID NO: 942631 - DNA, 25 bp, Homo sapien
aatatgcatgcattctccttgttgt

SEQ ID NO: 942632 - DNA, 25 bp, Homo sapien
cagtatgatttgactgggcttgtgc

SEQ ID NO: 942633 - DNA, 25 bp, Homo sapien
gaattattgtcattagtatcattaa

SEQ ID NO: 942634 - DNA, 25 bp, Homo sapien
tcagatttaatgtcacatcgaagag

SEQ ID NO: 942635 - DNA, 25 bp, Homo sapien
tagatactgattctcatgatgtagg

SEQ ID NO: 942636 - DNA, 25 bp, Homo sapien
cacatcgaagagtaacttgttgcat

SEQ ID NO: 942637 - DNA, 25 bp, Homo sapien
gattctcatgatgtaggatgcttac

SEQ ID NO: 942638 - DNA, 25 bp, Homo sapien
ttgaaagggtgacaatcagtgatga

SEQ ID NO: 942639 - DNA, 25 bp, Homo sapien
gaggagccttatgtgaggattgcca

SEQ ID NO: 942640 - DNA, 25 bp, Homo sapien
tttggctatcacaaatacgtctgag

SEQ ID NO: 942641 - DNA, 25 bp, Homo sapien
tcagtgatgaggagccttatgtgag

SEQ ID NO: 942642 - DNA, 25 bp, Homo sapien
tgatacggaaaaccctgattcatca

SEQ ID NO: 942643 - DNA, 25 bp, Homo sapien
cctgatacggaaaaccctgattcat

SEQ ID NO: 942644 - DNA, 25 bp, Homo sapien
tccctgatacggaaaaccctgattc

SEQ ID NO: 942645 - DNA, 25 bp, Homo sapien
cttccctgatacggaaaaccctgat

SEQ ID NO: 942646 - DNA, 25 bp, Homo sapien
cttttacttgatatagcttctctag

SEQ ID NO: 942647 - DNA, 25 bp, Homo sapien
gcaatcacctttgattcaccagaga

SEQ ID NO: 942648 - DNA, 25 bp, Homo sapien
tagcttctctagcaatcacctttga

SEQ ID NO: 942649 - DNA, 25 bp, Homo sapien
tcacctttgattcaccagagatata

SEQ ID NO: 942650 - DNA, 25 bp, Homo sapien
ttacttcttctatatcagctctttc

SEQ ID NO: 942651 - DNA, 25 bp, Homo sapien
ttctttagaactacattttcctctg

SEQ ID NO: 942652 - DNA, 25 bp, Homo sapien
ctcctgtctttctttagaactacat

SEQ ID NO: 942653 - DNA, 25 bp, Homo sapien
gttcttccatctcacttccctgctg

SEQ ID NO: 942654 - DNA, 25 bp, Homo sapien
tcctctggtcctccttctttgagca

SEQ ID NO: 942655 - DNA, 25 bp, Homo sapien
gtaaattacaggataaccaaagcta

SEQ ID NO: 942656 - DNA, 25 bp, Homo sapien
cagtgattgctggtgctagattgca

SEQ ID NO: 942657 - DNA, 25 bp, Homo sapien
gctggtgctagattgcatatatgaa

SEQ ID NO: 942658 - DNA, 25 bp, Homo sapien
caaagctatgctcagtgattgctgg

SEQ ID NO: 942659 - DNA, 25 bp, Homo sapien
cagcatggcttgtgattggacaaca

SEQ ID NO: 942660 - DNA, 25 bp, Homo sapien
actgagatgagtttgtgccctaggg

SEQ ID NO: 942661 - DNA, 25 bp, Homo sapien
catgagcaggtactcttttatgtca

SEQ ID NO: 942662 - DNA, 25 bp, Homo sapien
tgactgggaatcattcagcatggct

SEQ ID NO: 942663 - DNA, 25 bp, Homo sapien
aaggaaagagttgccccaggactgg

SEQ ID NO: 942664 - DNA, 25 bp, Homo sapien
gagttgatcccgagactgatgtgac

SEQ ID NO: 942665 - DNA, 25 bp, Homo sapien
tggcagctctgacaatacaagtagg

SEQ ID NO: 942666 - DNA, 25 bp, Homo sapien
tagtggttgctttcgactcaaaagt

SEQ ID NO: 942667 - DNA, 25 bp, Homo sapien
tcatcttcgtgaatcttctatttct

SEQ ID NO: 942668 - DNA, 25 bp, Homo sapien
cttctatttctccttgttctgaccc

SEQ ID NO: 942669 - DNA, 25 bp, Homo sapien
tcttctatttctccttgttctgacc

SEQ ID NO: 942670 - DNA, 25 bp, Homo sapien
tcttcgtgaatcttctatttctcct

SEQ ID NO: 942671 - DNA, 25 bp, Homo sapien
tgtattgcatttcacttgccccatg

SEQ ID NO: 942672 - DNA, 25 bp, Homo sapien
cttgtattgcatttcacttgcccca

SEQ ID NO: 942673 - DNA, 25 bp, Homo sapien
tattgcatttcacttgccccatggg

SEQ ID NO: 942674 - DNA, 25 bp, Homo sapien
tgcatttcacttgccccatgggagc

SEQ ID NO: 942675 - DNA, 25 bp, Homo sapien
gaaatgcgaataggcctctcactag

SEQ ID NO: 942676 - DNA, 25 bp, Homo sapien
caggaaatgcgaataggcctctcac

SEQ ID NO: 942677 - DNA, 25 bp, Homo sapien
tataacaggaaatgcgaataggcct

SEQ ID NO: 942678 - DNA, 25 bp, Homo sapien
attcctgtataacaggaaatgcgaa

SEQ ID NO: 942679 - DNA, 25 bp, Homo sapien
aaattattatcactgcaaattgaca

SEQ ID NO: 942680 - DNA, 25 bp, Homo sapien
taagtctaaattattatcactgcaa

SEQ ID NO: 942681 - DNA, 25 bp, Homo sapien
tcttgcctttaacatcaatgttgag

SEQ ID NO: 942682 - DNA, 25 bp, Homo sapien
gttgaggcaatgtgcctcaatattt

SEQ ID NO: 942683 - DNA, 25 bp, Homo sapien
caaactgattattctgcttcatgct

SEQ ID NO: 942684 - DNA, 25 bp, Homo sapien
gcgtagaactttcgggattcaaatc

SEQ ID NO: 942685 - DNA, 25 bp, Homo sapien
ttatcacaaggctgttgcgtagaac

SEQ ID NO: 942686 - DNA, 25 bp, Homo sapien
cagagctggtgttccaaactgatta

SEQ ID NO: 942687 - DNA, 25 bp, Homo sapien
tatttgttccttgtagtaactcaat

SEQ ID NO: 942688 - DNA, 25 bp, Homo sapien
caatgaagtaggcacaaataatgct

SEQ ID NO: 942689 - DNA, 25 bp, Homo sapien
ttccttgtagtaactcaatgaagta

SEQ ID NO: 942690 - DNA, 25 bp, Homo sapien
tgaagtaggcacaaataatgctgct

SEQ ID NO: 942691 - DNA, 25 bp, Homo sapien
acataactttgacatgtaaggatct

SEQ ID NO: 942692 - DNA, 25 bp, Homo sapien
taccgcacctgccagttcaatgaga

SEQ ID NO: 942693 - DNA, 25 bp, Homo sapien
taaacattgcactcattactgaatt

SEQ ID NO: 942694 - DNA, 25 bp, Homo sapien
tactgaattttccataccgcacctg

SEQ ID NO: 942695 - DNA, 25 bp, Homo sapien
ccagttcaatgagagatagtctatt

SEQ ID NO: 942696 - DNA, 25 bp, Homo sapien
taggtgcttggtgatgttcaattga

SEQ ID NO: 942697 - DNA, 25 bp, Homo sapien
aggtgcttggtgatgttcaattgac

SEQ ID NO: 942698 - DNA, 25 bp, Homo sapien
ctttaggtgcttggtgatgttcaat

SEQ ID NO: 942699 - DNA, 25 bp, Homo sapien
ttaggtgcttggtgatgttcaattg

SEQ ID NO: 942700 - DNA, 25 bp, Homo sapien
tatgattaatttctttctcatttct

SEQ ID NO: 942701 - DNA, 25 bp, Homo sapien
ttaaagctgctgcctatgattaatt

SEQ ID NO: 942702 - DNA, 25 bp, Homo sapien
ctatgattaatttctttctcatttc

SEQ ID NO: 942703 - DNA, 25 bp, Homo sapien
aagctgctgcctatgattaatttct

SEQ ID NO: 942704 - DNA, 25 bp, Homo sapien
gagagtctctatatcatatcctgaa

SEQ ID NO: 942705 - DNA, 25 bp, Homo sapien
gcatctcaccttctttagtgcttcc

SEQ ID NO: 942706 - DNA, 25 bp, Homo sapien
gtttgttgaatttagcatctcacct

SEQ ID NO: 942707 - DNA, 25 bp, Homo sapien
ctctctgagagtctctatatcatat

SEQ ID NO: 942708 - DNA, 25 bp, Homo sapien
cttcataaccttcagttagatccat

SEQ ID NO: 942709 - DNA, 25 bp, Homo sapien
cctgcttcataaccttcagttagat

SEQ ID NO: 942710 - DNA, 25 bp, Homo sapien
gcttcataaccttcagttagatcca

SEQ ID NO: 942711 - DNA, 25 bp, Homo sapien
tgcttcataaccttcagttagatcc

SEQ ID NO: 942712 - DNA, 25 bp, Homo sapien
ttcctcacatgtttccctggttact

SEQ ID NO: 942713 - DNA, 25 bp, Homo sapien
cctcacatgtttccctggttactgc

SEQ ID NO: 942714 - DNA, 25 bp, Homo sapien
cacatgtttccctggttactgctgc

SEQ ID NO: 942715 - DNA, 25 bp, Homo sapien
tcacatgtttccctggttactgctg

SEQ ID NO: 942716 - DNA, 25 bp, Homo sapien
gacttataggttacttggatatatg

SEQ ID NO: 942717 - DNA, 25 bp, Homo sapien
tcaaactatgtgtattttgctattg

SEQ ID NO: 942718 - DNA, 25 bp, Homo sapien
cagaacatagtatatcctggtaaat

SEQ ID NO: 942719 - DNA, 25 bp, Homo sapien
aaatttctgtcatacccctgcttta

SEQ ID NO: 942720 - DNA, 25 bp, Homo sapien
gatgaacctaaatgtggtccaggag

SEQ ID NO: 942721 - DNA, 25 bp, Homo sapien
gaacctaaatgtggtccaggagtca

SEQ ID NO: 942722 - DNA, 25 bp, Homo sapien
tgaacctaaatgtggtccaggagtc

SEQ ID NO: 942723 - DNA, 25 bp, Homo sapien
atgaacctaaatgtggtccaggagt

SEQ ID NO: 942724 - DNA, 25 bp, Homo sapien
catcgaaaagttcatagccagatgg

SEQ ID NO: 942725 - DNA, 25 bp, Homo sapien
tcctttgagaaagcacattgttttg

SEQ ID NO: 942726 - DNA, 25 bp, Homo sapien
gttcactgtatttagcatcgaaaag

SEQ ID NO: 942727 - DNA, 25 bp, Homo sapien
gagcataacacataattacagcttg

SEQ ID NO: 942728 - DNA, 25 bp, Homo sapien
tccactgcgattttctgcaaccccc

SEQ ID NO: 942729 - DNA, 25 bp, Homo sapien
tcaaaaatccactgcgattttctgc

SEQ ID NO: 942730 - DNA, 25 bp, Homo sapien
aaatccactgcgattttctgcaacc

SEQ ID NO: 942731 - DNA, 25 bp, Homo sapien
aatccactgcgattttctgcaaccc

SEQ ID NO: 942732 - DNA, 25 bp, Homo sapien
gctcggattggaacctgacaattga

SEQ ID NO: 942733 - DNA, 25 bp, Homo sapien
tagtcatcaggatacagagccatgc

SEQ ID NO: 942734 - DNA, 25 bp, Homo sapien
taggatgggctctggtgaaaacatg

SEQ ID NO: 942735 - DNA, 25 bp, Homo sapien
gatgggtcccctgtgagtatagaga

SEQ ID NO: 942736 - DNA, 25 bp, Homo sapien
caccccgtcccattttgcaacactc

SEQ ID NO: 942737 - DNA, 25 bp, Homo sapien
gtcccattttgcaacactcccctac

SEQ ID NO: 942738 - DNA, 25 bp, Homo sapien
ccgtcccattttgcaacactcccct

SEQ ID NO: 942739 - DNA, 25 bp, Homo sapien
cgtcccattttgcaacactccccta

SEQ ID NO: 942740 - DNA, 25 bp, Homo sapien
ccatccagacctataactgccctcg

SEQ ID NO: 942741 - DNA, 25 bp, Homo sapien
gggcttgggctttggcactcgctgt

SEQ ID NO: 942742 - DNA, 25 bp, Homo sapien
cctccaataaacctgtgttgctgtg

SEQ ID NO: 942743 - DNA, 25 bp, Homo sapien
ataactgccctcgtctataagtggg

SEQ ID NO: 942744 - DNA, 25 bp, Homo sapien
gttgtctagactgcacgtgagccat

SEQ ID NO: 942745 - DNA, 25 bp, Homo sapien
cataacctcgcggaaagtggctttc

SEQ ID NO: 942746 - DNA, 25 bp, Homo sapien
gaatggccatccagagttgtctaga

SEQ ID NO: 942747 - DNA, 25 bp, Homo sapien
gaagtgaagctacctgcagtcccaa

SEQ ID NO: 942748 - DNA, 25 bp, Homo sapien
taagtaaccttccagccaatgagag

SEQ ID NO: 942749 - DNA, 25 bp, Homo sapien
cagtgccgtgccacctggatggtat

SEQ ID NO: 942750 - DNA, 25 bp, Homo sapien
tctctgaaatgtggaaggcttatca

SEQ ID NO: 942751 - DNA, 25 bp, Homo sapien
gcacctcttgcagaatgactatcag

SEQ ID NO: 942752 - DNA, 25 bp, Homo sapien
aatagtaatcctactgttgggactg

SEQ ID NO: 942753 - DNA, 25 bp, Homo sapien
gaattcagtgccacgacttgggaaa

SEQ ID NO: 942754 - DNA, 25 bp, Homo sapien
gaacagtgacttctaatgtacttag

SEQ ID NO: 942755 - DNA, 25 bp, Homo sapien
ttggcattcctagaacaactgcact

SEQ ID NO: 942756 - DNA, 25 bp, Homo sapien
gagacaattctgtgcctattgattc

SEQ ID NO: 942757 - DNA, 25 bp, Homo sapien
tatgagacaattctgtgcctattga

SEQ ID NO: 942758 - DNA, 25 bp, Homo sapien
tgtatgagacaattctgtgcctatt

SEQ ID NO: 942759 - DNA, 25 bp, Homo sapien
gtgtatgagacaattctgtgcctat

SEQ ID NO: 942760 - DNA, 25 bp, Homo sapien
atatggtagctccattcagaattac

SEQ ID NO: 942761 - DNA, 25 bp, Homo sapien
ctatatggtagctccattcagaatt

SEQ ID NO: 942762 - DNA, 25 bp, Homo sapien
tatatggtagctccattcagaatta

SEQ ID NO: 942763 - DNA, 25 bp, Homo sapien
acaacctgagatcccaagttgccct

SEQ ID NO: 942764 - DNA, 25 bp, Homo sapien
tctgactgacaacctgagatcccaa

SEQ ID NO: 942765 - DNA, 25 bp, Homo sapien
gtctgactgacaacctgagatccca

SEQ ID NO: 942766 - DNA, 25 bp, Homo sapien
tgtctgactgacaacctgagatccc

SEQ ID NO: 942767 - DNA, 25 bp, Homo sapien
tctggaggttgatggtagcagttga

SEQ ID NO: 942768 - DNA, 25 bp, Homo sapien
tcagaattgaagtttaagagtgcgt

SEQ ID NO: 942769 - DNA, 25 bp, Homo sapien
gacaccagaagtcactgctgcccat

SEQ ID NO: 942770 - DNA, 25 bp, Homo sapien
cagttgagttgagaatcaagtaccc

SEQ ID NO: 942771 - DNA, 25 bp, Homo sapien
cttggcagagcttgtaggaacatgt

SEQ ID NO: 942772 - DNA, 25 bp, Homo sapien
aatttccagcttgtctgacttgagt

SEQ ID NO: 942773 - DNA, 25 bp, Homo sapien
tctgacttgagtgtggtaaaagggc

SEQ ID NO: 942774 - DNA, 25 bp, Homo sapien
gcactgttccaaatctatgcttcat

SEQ ID NO: 942775 - DNA, 25 bp, Homo sapien
cttgagtgtggtaaaagggccatgt

SEQ ID NO: 942776 - DNA, 25 bp, Homo sapien
ctgagataagaggcgcaagcaggtc

SEQ ID NO: 942777 - DNA, 25 bp, Homo sapien
gccagatttgagtcttgctattcat

SEQ ID NO: 942778 - DNA, 25 bp, Homo sapien
cagccagatttgagtcttgctattc

SEQ ID NO: 942779 - DNA, 25 bp, Homo sapien
agccagatttgagtcttgctattca

SEQ ID NO: 942780 - DNA, 25 bp, Homo sapien
gcagccagatttgagtcttgctatt

SEQ ID NO: 942781 - DNA, 25 bp, Homo sapien
tgtgaacttgagcattgcatgccca

SEQ ID NO: 942782 - DNA, 25 bp, Homo sapien
gtgaacttgagcattgcatgcccat

SEQ ID NO: 942783 - DNA, 25 bp, Homo sapien
tgaacttgagcattgcatgcccatc

SEQ ID NO: 942784 - DNA, 25 bp, Homo sapien
gaacttgagcattgcatgcccatca

SEQ ID NO: 942785 - DNA, 25 bp, Homo sapien
gatgaatgaaacctataggactcct

SEQ ID NO: 942786 - DNA, 25 bp, Homo sapien
tctgatgaatgaaacctataggact

SEQ ID NO: 942787 - DNA, 25 bp, Homo sapien
ctgatgaatgaaacctataggactc

SEQ ID NO: 942788 - DNA, 25 bp, Homo sapien
gaatgaaacctataggactcctttg

SEQ ID NO: 942789 - DNA, 25 bp, Homo sapien
tgagacacagccttccagagggacc

SEQ ID NO: 942790 - DNA, 25 bp, Homo sapien
ctgagacacagccttccagagggac

SEQ ID NO: 942791 - DNA, 25 bp, Homo sapien
agacacagccttccagagggaccat

SEQ ID NO: 942792 - DNA, 25 bp, Homo sapien
gagacacagccttccagagggacca

SEQ ID NO: 942793 - DNA, 25 bp, Homo sapien
aagattacaaaacactgaggaaaga

SEQ ID NO: 942794 - DNA, 25 bp, Homo sapien
ttagcatggatctaacaaagtatgt

SEQ ID NO: 942795 - DNA, 25 bp, Homo sapien
ccaatatctgttgcagaagattaca

SEQ ID NO: 942796 - DNA, 25 bp, Homo sapien
tgtagattcttcagtacaaccccag

SEQ ID NO: 942797 - DNA, 25 bp, Homo sapien
gacagatacttctagatgtgagacc

SEQ ID NO: 942798 - DNA, 25 bp, Homo sapien
tcttccacagggtagctggttgcct

SEQ ID NO: 942799 - DNA, 25 bp, Homo sapien
ggtgtatattcaacccatgagggaa

SEQ ID NO: 942800 - DNA, 25 bp, Homo sapien
caaatcactggcataggagctttct

SEQ ID NO: 942801 - DNA, 25 bp, Homo sapien
gggtagcaggttcaaacagggacat

SEQ ID NO: 942802 - DNA, 25 bp, Homo sapien
gccatgagaaactgcacatgactgg

SEQ ID NO: 942803 - DNA, 25 bp, Homo sapien
cccatggtgccctgagagtttatga

SEQ ID NO: 942804 - DNA, 25 bp, Homo sapien
taaggtctgacctaatggtgccaga

SEQ ID NO: 942805 - DNA, 25 bp, Homo sapien
ccaagcctccagataataattccag

SEQ ID NO: 942806 - DNA, 25 bp, Homo sapien
gaggatttaggcctgattgtccggc

SEQ ID NO: 942807 - DNA, 25 bp, Homo sapien
taatggatgtgcctgctgatgagcc

SEQ ID NO: 942808 - DNA, 25 bp, Homo sapien
tgtaagaaaacattgcacgacccat

SEQ ID NO: 942809 - DNA, 25 bp, Homo sapien
tttctgaataatgttccttattcca

SEQ ID NO: 942810 - DNA, 25 bp, Homo sapien
cctgacttttctgaataatgttcct

SEQ ID NO: 942811 - DNA, 25 bp, Homo sapien
ctgaataatgttccttattccacat

SEQ ID NO: 942812 - DNA, 25 bp, Homo sapien
tgacttttctgaataatgttcctta

SEQ ID NO: 942813 - DNA, 25 bp, Homo sapien
ggaatccctcatacaatgacacttt

SEQ ID NO: 942814 - DNA, 25 bp, Homo sapien
gatctggaatccctcatacaatgac

SEQ ID NO: 942815 - DNA, 25 bp, Homo sapien
tgaggatctggaatccctcatacaa

SEQ ID NO: 942816 - DNA, 25 bp, Homo sapien
tctggaatccctcatacaatgacac

SEQ ID NO: 942817 - DNA, 25 bp, Homo sapien
aatctcaatccatgagccatcagaa

SEQ ID NO: 942818 - DNA, 25 bp, Homo sapien
ctacgatatattaaatctcaatcca

SEQ ID NO: 942819 - DNA, 25 bp, Homo sapien
gatatattaaatctcaatccatgag

SEQ ID NO: 942820 - DNA, 25 bp, Homo sapien
tattaaatctcaatccatgagccat

SEQ ID NO: 942821 - DNA, 25 bp, Homo sapien
ggatcaatgtctctcttcaccaaga

SEQ ID NO: 942822 - DNA, 25 bp, Homo sapien
aggatcaatgtctctcttcaccaag

SEQ ID NO: 942823 - DNA, 25 bp, Homo sapien
tcttcaccaagaagactacctcctt

SEQ ID NO: 942824 - DNA, 25 bp, Homo sapien
aagaagactacctccttggtggctc

SEQ ID NO: 942825 - DNA, 25 bp, Homo sapien
cagctttagtatatgcgctaccaag

SEQ ID NO: 942826 - DNA, 25 bp, Homo sapien
gctttagtatatgcgctaccaaggc

SEQ ID NO: 942827 - DNA, 25 bp, Homo sapien
tccagctttagtatatgcgctacca

SEQ ID NO: 942828 - DNA, 25 bp, Homo sapien
ccagctttagtatatgcgctaccaa

SEQ ID NO: 942829 - DNA, 25 bp, Homo sapien
tctggttccacacttgctgctcctg

SEQ ID NO: 942830 - DNA, 25 bp, Homo sapien
gctgctcctggtttgcgtttaccat

SEQ ID NO: 942831 - DNA, 25 bp, Homo sapien
ttctggttccacacttgctgctcct

SEQ ID NO: 942832 - DNA, 25 bp, Homo sapien
cacttgctgctcctggtttgcgttt

SEQ ID NO: 942833 - DNA, 25 bp, Homo sapien
gacttggtctggaaaatctgcacat

SEQ ID NO: 942834 - DNA, 25 bp, Homo sapien
gcatgacgtgatggctagcttcccc

SEQ ID NO: 942835 - DNA, 25 bp, Homo sapien
gttacttgagtgtcggcatgacgtg

SEQ ID NO: 942836 - DNA, 25 bp, Homo sapien
atctgcacataagacagctctctgc

SEQ ID NO: 942837 - DNA, 25 bp, Homo sapien
atccagacaaaaggattatatacag

SEQ ID NO: 942838 - DNA, 25 bp, Homo sapien
tcctcacaacactctaaggccatga

SEQ ID NO: 942839 - DNA, 25 bp, Homo sapien
gcaggatgtagcattcccacactga

SEQ ID NO: 942840 - DNA, 25 bp, Homo sapien
gaagtagtacctatgatgaaagcat

SEQ ID NO: 942841 - DNA, 25 bp, Homo sapien
ctcaggagggtcatgcaaggtaatt

SEQ ID NO: 942842 - DNA, 25 bp, Homo sapien
ggctggagatcaaaaggaaatcaca

SEQ ID NO: 942843 - DNA, 25 bp, Homo sapien
ggaaatcacagccagacttcaggga

SEQ ID NO: 942844 - DNA, 25 bp, Homo sapien
gggccaacacctgtaactgtgggca

SEQ ID NO: 942845 - DNA, 25 bp, Homo sapien
gtcttatctatgattaggtcccctt

SEQ ID NO: 942846 - DNA, 25 bp, Homo sapien
atccttatcagcttgtgacccagac

SEQ ID NO: 942847 - DNA, 25 bp, Homo sapien
ttatcagcttgtgacccagacagcc

SEQ ID NO: 942848 - DNA, 25 bp, Homo sapien
ctatgattaggtccccttgtttaga

SEQ ID NO: 942849 - DNA, 25 bp, Homo sapien
actgactcgtctttcagcaagtcca

SEQ ID NO: 942850 - DNA, 25 bp, Homo sapien
cagcaagtccagagataaggagatg

SEQ ID NO: 942851 - DNA, 25 bp, Homo sapien
gactcgtctttcagcaagtccagag

SEQ ID NO: 942852 - DNA, 25 bp, Homo sapien
tctttcagcaagtccagagataagg

SEQ ID NO: 942853 - DNA, 25 bp, Homo sapien
tgcagaccagcttcatcccctgatg

SEQ ID NO: 942854 - DNA, 25 bp, Homo sapien
acacctcggatggcagcttcctgca

SEQ ID NO: 942855 - DNA, 25 bp, Homo sapien
tttcaacgtttctctgacacctcgg

SEQ ID NO: 942856 - DNA, 25 bp, Homo sapien
cgtttctctgacacctcggatggca

SEQ ID NO: 942857 - DNA, 25 bp, Homo sapien
tggactgcctgactgattacaccct

SEQ ID NO: 942858 - DNA, 25 bp, Homo sapien
gattacacccttggaatatttatgt

SEQ ID NO: 942859 - DNA, 25 bp, Homo sapien
gctgaaaggacacagtggactgcct

SEQ ID NO: 942860 - DNA, 25 bp, Homo sapien
ttatgtaacttttcgatggcagcaa

SEQ ID NO: 942861 - DNA, 25 bp, Homo sapien
ttttctatgaccgatgacattgaag

SEQ ID NO: 942862 - DNA, 25 bp, Homo sapien
tgtttttctatgaccgatgacattg

SEQ ID NO: 942863 - DNA, 25 bp, Homo sapien
tctatgaccgatgacattgaaggca

SEQ ID NO: 942864 - DNA, 25 bp, Homo sapien
tgaccgatgacattgaaggcaatgg

SEQ ID NO: 942865 - DNA, 25 bp, Homo sapien
gaacatgtctattaaatcccctgga

SEQ ID NO: 942866 - DNA, 25 bp, Homo sapien
caattgccaagagactaatgcccat

SEQ ID NO: 942867 - DNA, 25 bp, Homo sapien
cagtttcctgatctacaatttgtcc

SEQ ID NO: 942868 - DNA, 25 bp, Homo sapien
caatttgtccattgttctgcccaaa

SEQ ID NO: 942869 - DNA, 25 bp, Homo sapien
agtaactatcttcaacagcatgctc

SEQ ID NO: 942870 - DNA, 25 bp, Homo sapien
catttacaaagtaactatcttcaac

SEQ ID NO: 942871 - DNA, 25 bp, Homo sapien
aaaactctgtggaccacatttacaa

SEQ ID NO: 942872 - DNA, 25 bp, Homo sapien
aaaaactctgtggaccacatttaca

SEQ ID NO: 942873 - DNA, 25 bp, Homo sapien
ggtgggcaggaaaacgcttatcctc

SEQ ID NO: 942874 - DNA, 25 bp, Homo sapien
tatcctcagatgtgtcggcagcaaa

SEQ ID NO: 942875 - DNA, 25 bp, Homo sapien
gagcattctagtcccttgtacacag

SEQ ID NO: 942876 - DNA, 25 bp, Homo sapien
cagaaaggatgttcggaagctatgt

SEQ ID NO: 942877 - DNA, 25 bp, Homo sapien
gctaaatagcaagaacattcagacc

SEQ ID NO: 942878 - DNA, 25 bp, Homo sapien
gggcttttatacacagatgggcttc

SEQ ID NO: 942879 - DNA, 25 bp, Homo sapien
aagttaagtggacagcagctgcagg

SEQ ID NO: 942880 - DNA, 25 bp, Homo sapien
ttctgtctccttagacagttttgag

SEQ ID NO: 942881 - DNA, 25 bp, Homo sapien
tccaacggaagctaaagaactaggc

SEQ ID NO: 942882 - DNA, 25 bp, Homo sapien
ggcaagggtcttcgtgactacagga

SEQ ID NO: 942883 - DNA, 25 bp, Homo sapien
gatgtagtgctactggactagccaa

SEQ ID NO: 942884 - DNA, 25 bp, Homo sapien
gactacaggatcacagactgcggaa

SEQ ID NO: 942885 - DNA, 25 bp, Homo sapien
tcaatccaccgaggactgtgtaaca

SEQ ID NO: 942886 - DNA, 25 bp, Homo sapien
gctcatctgattccgtgaaatctgg

SEQ ID NO: 942887 - DNA, 25 bp, Homo sapien
caagaacttcagtggttaagtccca

SEQ ID NO: 942888 - DNA, 25 bp, Homo sapien
atctggagtatcaccctctgtttca

SEQ ID NO: 942889 - DNA, 25 bp, Homo sapien
gggagctctcgccttctaactgcct

SEQ ID NO: 942890 - DNA, 25 bp, Homo sapien
taactgcctttacgcatgacctggc

SEQ ID NO: 942891 - DNA, 25 bp, Homo sapien
tagggaagtgtcttcctagccagac

SEQ ID NO: 942892 - DNA, 25 bp, Homo sapien
catggtagctgtagagacctgcccg

SEQ ID NO: 942893 - DNA, 25 bp, Homo sapien
cctgacatatgcattataaagtcca

SEQ ID NO: 942894 - DNA, 25 bp, Homo sapien
catatgcattataaagtccatggct

SEQ ID NO: 942895 - DNA, 25 bp, Homo sapien
cattataaagtccatggctttggca

SEQ ID NO: 942896 - DNA, 25 bp, Homo sapien
tgataacctgacatatgcattataa

SEQ ID NO: 942897 - DNA, 25 bp, Homo sapien
catctaaacttgctgtatgcttcac

SEQ ID NO: 942898 - DNA, 25 bp, Homo sapien
agatgcatttacatctaaacttgct

SEQ ID NO: 942899 - DNA, 25 bp, Homo sapien
tgcatttacatctaaacttgctgta

SEQ ID NO: 942900 - DNA, 25 bp, Homo sapien
tttacatctaaacttgctgtatgct

SEQ ID NO: 942901 - DNA, 25 bp, Homo sapien
gaaggtgacagcattcagatgggca

SEQ ID NO: 942902 - DNA, 25 bp, Homo sapien
aacttgggcaaataactacatcctg

SEQ ID NO: 942903 - DNA, 25 bp, Homo sapien
aattcagcggttatgatgtctcagg

SEQ ID NO: 942904 - DNA, 25 bp, Homo sapien
tggaagattttgtgcccgaggaagt

SEQ ID NO: 942905 - DNA, 25 bp, Homo sapien
gcatgtggcccgtgacagaggacat

SEQ ID NO: 942906 - DNA, 25 bp, Homo sapien
gctgaaagcgcttgagcacaccgct

SEQ ID NO: 942907 - DNA, 25 bp, Homo sapien
ctagggctgatgacttctgaggaac

SEQ ID NO: 942908 - DNA, 25 bp, Homo sapien
gccgctttggcctcttgtagggctg

SEQ ID NO: 942909 - DNA, 25 bp, Homo sapien
attttgctctaagattcagtaaacg

SEQ ID NO: 942910 - DNA, 25 bp, Homo sapien
aaagcattttgctctaagattcagt

SEQ ID NO: 942911 - DNA, 25 bp, Homo sapien
agcattttgctctaagattcagtaa

SEQ ID NO: 942912 - DNA, 25 bp, Homo sapien
cattttgctctaagattcagtaaac

SEQ ID NO: 942913 - DNA, 25 bp, Homo sapien
cctccgctttggtaacgggcactga

SEQ ID NO: 942914 - DNA, 25 bp, Homo sapien
tccgctttggtaacgggcactgact

SEQ ID NO: 942915 - DNA, 25 bp, Homo sapien
ccgctttggtaacgggcactgactg

SEQ ID NO: 942916 - DNA, 25 bp, Homo sapien
ccctccgctttggtaacgggcactg

SEQ ID NO: 942917 - DNA, 25 bp, Homo sapien
tgagaactgcgcatctaggcttggg

SEQ ID NO: 942918 - DNA, 25 bp, Homo sapien
aaggtgagaactgcgcatctaggct

SEQ ID NO: 942919 - DNA, 25 bp, Homo sapien
gggactgcgcgcaccaaaggcttgc

SEQ ID NO: 942920 - DNA, 25 bp, Homo sapien
cgcaccaaaggcttgcaggcgctgg

SEQ ID NO: 942921 - DNA, 25 bp, Homo sapien
tttggacttcggtaaggagagggca

SEQ ID NO: 942922 - DNA, 25 bp, Homo sapien
ccactttggacttcggtaaggagag

SEQ ID NO: 942923 - DNA, 25 bp, Homo sapien
cagaaccactttggacttcggtaag

SEQ ID NO: 942924 - DNA, 25 bp, Homo sapien
gcagaaccactttggacttcggtaa

SEQ ID NO: 942925 - DNA, 25 bp, Homo sapien
ttcatatgcttgttgcctacatgca

SEQ ID NO: 942926 - DNA, 25 bp, Homo sapien
catatgcttgttgcctacatgcacg

SEQ ID NO: 942927 - DNA, 25 bp, Homo sapien
cttgttgcctacatgcacgtcttct

SEQ ID NO: 942928 - DNA, 25 bp, Homo sapien
tatgcttgttgcctacatgcacgtc

SEQ ID NO: 942929 - DNA, 25 bp, Homo sapien
ggaaaaccatgattgcttcaataga

SEQ ID NO: 942930 - DNA, 25 bp, Homo sapien
gataatgtaacatgactaagcagga

SEQ ID NO: 942931 - DNA, 25 bp, Homo sapien
tgtcttgggaatgtaaggctggttc

SEQ ID NO: 942932 - DNA, 25 bp, Homo sapien
ttccagcaatatttacaaaggataa

SEQ ID NO: 942933 - DNA, 25 bp, Homo sapien
tccagcctgggcgacaaatcgagac

SEQ ID NO: 942934 - DNA, 25 bp, Homo sapien
agcctgggcgacaaatcgagactct

SEQ ID NO: 942935 - DNA, 25 bp, Homo sapien
cctgggcgacaaatcgagactctgt

SEQ ID NO: 942936 - DNA, 25 bp, Homo sapien
ccagcctgggcgacaaatcgagact

SEQ ID NO: 942937 - DNA, 25 bp, Homo sapien
taaacagcatgcacaaactcaccac

SEQ ID NO: 942938 - DNA, 25 bp, Homo sapien
ctgcacagtggtcaattggctagat

SEQ ID NO: 942939 - DNA, 25 bp, Homo sapien
ggtcaattggctagatccacataaa

SEQ ID NO: 942940 - DNA, 25 bp, Homo sapien
catatagttaacaagtgactgagca

SEQ ID NO: 942941 - DNA, 25 bp, Homo sapien
tcagagagcacctcatgacctggaa

SEQ ID NO: 942942 - DNA, 25 bp, Homo sapien
gagagcacctcatgacctggaaaag

SEQ ID NO: 942943 - DNA, 25 bp, Homo sapien
gagcacctcatgacctggaaaagtc

SEQ ID NO: 942944 - DNA, 25 bp, Homo sapien
agagagcacctcatgacctggaaaa

SEQ ID NO: 942945 - DNA, 25 bp, Homo sapien
ttctagagcggaaaggtgaccccac

SEQ ID NO: 942946 - DNA, 25 bp, Homo sapien
ggtgggaatcgcgtaagaaaagcaa

SEQ ID NO: 942947 - DNA, 25 bp, Homo sapien
cagaaagaatctccggaagaccacg

SEQ ID NO: 942948 - DNA, 25 bp, Homo sapien
gaaaaaagcgcagtttcttggaggc

SEQ ID NO: 942949 - DNA, 25 bp, Homo sapien
gcagagtgagcattcaagtccaggt

SEQ ID NO: 942950 - DNA, 25 bp, Homo sapien
tacacatgagggaccgaaggataga

SEQ ID NO: 942951 - DNA, 25 bp, Homo sapien
aatacggtaccaatcctaggaactg

SEQ ID NO: 942952 - DNA, 25 bp, Homo sapien
taatacttagaacaaccccgtgaga

SEQ ID NO: 942953 - DNA, 25 bp, Homo sapien
tgggcaatgataacttttatgggca

SEQ ID NO: 942954 - DNA, 25 bp, Homo sapien
gttgcatgtatatattaagtagccg

SEQ ID NO: 942955 - DNA, 25 bp, Homo sapien
gaatcacttgttagttcttggtagg

SEQ ID NO: 942956 - DNA, 25 bp, Homo sapien
tatcttgtactttctaactgagccc

SEQ ID NO: 942957 - DNA, 25 bp, Homo sapien
gaaccttagagcagtggagatttgc

SEQ ID NO: 942958 - DNA, 25 bp, Homo sapien
gtggtggtgagaaccttagagcagt

SEQ ID NO: 942959 - DNA, 25 bp, Homo sapien
tggcctcagaagtaggactgaattc

SEQ ID NO: 942960 - DNA, 25 bp, Homo sapien
gactgaattctactattgctaggtg

SEQ ID NO: 942961 - DNA, 25 bp, Homo sapien
ttgtggatataacaggagccctggc

SEQ ID NO: 942962 - DNA, 25 bp, Homo sapien
gcagctttgcagatacccagactga

SEQ ID NO: 942963 - DNA, 25 bp, Homo sapien
aaagcggctgcccattacattcctc

SEQ ID NO: 942964 - DNA, 25 bp, Homo sapien
tcttccagtggccagatgagctaaa

SEQ ID NO: 942965 - DNA, 25 bp, Homo sapien
gccactgacaaggagtaactgacct

SEQ ID NO: 942966 - DNA, 25 bp, Homo sapien
taactgacctttgtgcctgtgcacc

SEQ ID NO: 942967 - DNA, 25 bp, Homo sapien
caccaccacactgctatatgttgag

SEQ ID NO: 942968 - DNA, 25 bp, Homo sapien
ctggaaatgcttaggtgctaatatc

SEQ ID NO: 942969 - DNA, 25 bp, Homo sapien
gatacacaattgatccagtgcattt

SEQ ID NO: 942970 - DNA, 25 bp, Homo sapien
tatttacggaataatgatgttccca

SEQ ID NO: 942971 - DNA, 25 bp, Homo sapien
gatgttcccagcattatactccata

SEQ ID NO: 942972 - DNA, 25 bp, Homo sapien
ccatatagaaagatgttagagattc

SEQ ID NO: 942973 - DNA, 25 bp, Homo sapien
catagtttctgtaatttctaatcaa

SEQ ID NO: 942974 - DNA, 25 bp, Homo sapien
atagtttctgtaatttctaatcaat

SEQ ID NO: 942975 - DNA, 25 bp, Homo sapien
cttcatagtttctgtaatttctaat

SEQ ID NO: 942976 - DNA, 25 bp, Homo sapien
tcatagtttctgtaatttctaatca

SEQ ID NO: 942977 - DNA, 25 bp, Homo sapien
aagtcctcagtatggcagttgaaag

SEQ ID NO: 942978 - DNA, 25 bp, Homo sapien
catccgggaccacggctgaaaagtc

SEQ ID NO: 942979 - DNA, 25 bp, Homo sapien
cacagttggtttcaagtgatgggta

SEQ ID NO: 942980 - DNA, 25 bp, Homo sapien
atgggtatggccagacatccgggac

SEQ ID NO: 942981 - DNA, 25 bp, Homo sapien
gaatagtatctgttgcaaccaccag

SEQ ID NO: 942982 - DNA, 25 bp, Homo sapien
tccctatcaggaagaagagtgcaag

SEQ ID NO: 942983 - DNA, 25 bp, Homo sapien
aaaccttgattccatgtgagctgca

SEQ ID NO: 942984 - DNA, 25 bp, Homo sapien
gggttcctgatccagaccgaaagag

SEQ ID NO: 942985 - DNA, 25 bp, Homo sapien
gcctacatattctaagccttttaag

SEQ ID NO: 942986 - DNA, 25 bp, Homo sapien
tctaaatccattaggcaacatgatc

SEQ ID NO: 942987 - DNA, 25 bp, Homo sapien
cattgagatgtaaatagattgcttc

SEQ ID NO: 942988 - DNA, 25 bp, Homo sapien
aaaatttgctatcctaagtgactgg

SEQ ID NO: 942989 - DNA, 25 bp, Homo sapien
gtacattgatttcgtgtcccgcaac

SEQ ID NO: 942990 - DNA, 25 bp, Homo sapien
gacttggctgttggcttggctgttg

SEQ ID NO: 942991 - DNA, 25 bp, Homo sapien
caatactatgtggtgaaagagcgca

SEQ ID NO: 942992 - DNA, 25 bp, Homo sapien
tgtaggaatgctagtcacttttgta

SEQ ID NO: 942993 - DNA, 25 bp, Homo sapien
tgtggggtcaatattagatcctttg

SEQ ID NO: 942994 - DNA, 25 bp, Homo sapien
ggggtcaatattagatcctttgcca

SEQ ID NO: 942995 - DNA, 25 bp, Homo sapien
tttgtggggtcaatattagatcctt

SEQ ID NO: 942996 - DNA, 25 bp, Homo sapien
tatttgtggggtcaatattagatcc

SEQ ID NO: 942997 - DNA, 25 bp, Homo sapien
gaaaattatatttggggggcatcac

SEQ ID NO: 942998 - DNA, 25 bp, Homo sapien
tgtggaaaattatatttggggggca

SEQ ID NO: 942999 - DNA, 25 bp, Homo sapien
tcctgttattttctgtggaaaatta

SEQ ID NO: 943000 - DNA, 25 bp, Homo sapien
ctcctgttattttctgtggaaaatt

SEQ ID NO: 943001 - DNA, 25 bp, Homo sapien
gaaactcaaagtcagcattaaccag

SEQ ID NO: 943002 - DNA, 25 bp, Homo sapien
gtgattcctgggctgatgctggcaa

SEQ ID NO: 943003 - DNA, 25 bp, Homo sapien
tccaggccgctgagatttttgcaag

SEQ ID NO: 943004 - DNA, 25 bp, Homo sapien
aagagcaagctttccagcactggag

SEQ ID NO: 943005 - DNA, 25 bp, Homo sapien
tgcagcccaaatgtagatagaacca

SEQ ID NO: 943006 - DNA, 25 bp, Homo sapien
tcatgcagcccaaatgtagatagaa

SEQ ID NO: 943007 - DNA, 25 bp, Homo sapien
gcccaaatgtagatagaaccatctt

SEQ ID NO: 943008 - DNA, 25 bp, Homo sapien
cagcccaaatgtagatagaaccatc

SEQ ID NO: 943009 - DNA, 25 bp, Homo sapien
tgctattcaaggctgctgttggaaa

SEQ ID NO: 943010 - DNA, 25 bp, Homo sapien
cattgacagccaacggggagggata

SEQ ID NO: 943011 - DNA, 25 bp, Homo sapien
aatgtcccttttacaacattgacag

SEQ ID NO: 943012 - DNA, 25 bp, Homo sapien
tattcaaggctgctgttggaaatgt

SEQ ID NO: 943013 - DNA, 25 bp, Homo sapien
gccacgcggggttcccgagacagac

SEQ ID NO: 943014 - DNA, 25 bp, Homo sapien
cgcgggtggagctgccggttctgct

SEQ ID NO: 943015 - DNA, 25 bp, Homo sapien
tcttgctatgccaaaggctcagggt

SEQ ID NO: 943016 - DNA, 25 bp, Homo sapien
ccgcgatccttttctagaggctgag

SEQ ID NO: 943017 - DNA, 25 bp, Homo sapien
caagttatcttctccctccgcccac

SEQ ID NO: 943018 - DNA, 25 bp, Homo sapien
gatggggctagggaaatcaaagcca

SEQ ID NO: 943019 - DNA, 25 bp, Homo sapien
gatcagatggggctagggaaatcaa

SEQ ID NO: 943020 - DNA, 25 bp, Homo sapien
cgatgatcagatggggctagggaaa

SEQ ID NO: 943021 - DNA, 25 bp, Homo sapien
cagatggggctagggaaatcaaagc

SEQ ID NO: 943022 - DNA, 25 bp, Homo sapien
gcatacattttttcgctgcatgagg

SEQ ID NO: 943023 - DNA, 25 bp, Homo sapien
gagttatacggctggcaacgctgtg

SEQ ID NO: 943024 - DNA, 25 bp, Homo sapien
gggccgtttacttcagctgcataca

SEQ ID NO: 943025 - DNA, 25 bp, Homo sapien
caaaggcacgcttcaaatgacggat

SEQ ID NO: 943026 - DNA, 25 bp, Homo sapien
tgttaattcctgagacacgcaacct

SEQ ID NO: 943027 - DNA, 25 bp, Homo sapien
ggatgacgtaaaaaggccgcgctgt

SEQ ID NO: 943028 - DNA, 25 bp, Homo sapien
ggagactactcagctcgtcactgaa

SEQ ID NO: 943029 - DNA, 25 bp, Homo sapien
tttgtcccacggcttctcgagatta

SEQ ID NO: 943030 - DNA, 25 bp, Homo sapien
gctggaaattaagtcccttctaaga

SEQ ID NO: 943031 - DNA, 25 bp, Homo sapien
gcccagctggaaattaagtcccttc

SEQ ID NO: 943032 - DNA, 25 bp, Homo sapien
tggaaattaagtcccttctaagata

SEQ ID NO: 943033 - DNA, 25 bp, Homo sapien
ccagctggaaattaagtcccttcta

SEQ ID NO: 943034 - DNA, 25 bp, Homo sapien
gtatgatgtgggtgatcttatcccc

SEQ ID NO: 943035 - DNA, 25 bp, Homo sapien
tattaggtccctcagttttcaagac

SEQ ID NO: 943036 - DNA, 25 bp, Homo sapien
aatgcaggacttcacattggagaga

SEQ ID NO: 943037 - DNA, 25 bp, Homo sapien
cagatattcattcactaatgcagga

SEQ ID NO: 943038 - DNA, 25 bp, Homo sapien
gggaaaacctgactgcgctcccaga

SEQ ID NO: 943039 - DNA, 25 bp, Homo sapien
cattgccgttcagggccacgggaaa

SEQ ID NO: 943040 - DNA, 25 bp, Homo sapien
acctcgctgggaacgcacttcctgg

SEQ ID NO: 943041 - DNA, 25 bp, Homo sapien
agaagcctccggtgtacctcgctgg

SEQ ID NO: 943042 - DNA, 25 bp, Homo sapien
cattttaagacaacgatgggtagaa

SEQ ID NO: 943043 - DNA, 25 bp, Homo sapien
gatttggtttatccagccatgggag

SEQ ID NO: 943044 - DNA, 25 bp, Homo sapien
tgaagtcacttttgagccctcatca

SEQ ID NO: 943045 - DNA, 25 bp, Homo sapien
tttaaatgccgtcagtagaaagcac

SEQ ID NO: 943046 - DNA, 25 bp, Homo sapien
catctttaccaaggcttagcacagc

SEQ ID NO: 943047 - DNA, 25 bp, Homo sapien
cagagaacatcaagctgccagcata

SEQ ID NO: 943048 - DNA, 25 bp, Homo sapien
tccaatgaaatgacctgagaaagcc

SEQ ID NO: 943049 - DNA, 25 bp, Homo sapien
tagcaccaaagaggtctaggacccc

SEQ ID NO: 943050 - DNA, 25 bp, Homo sapien
gtgattgacagttataatggtcaga

SEQ ID NO: 943051 - DNA, 25 bp, Homo sapien
cagttataatggtcagaacaaagga

SEQ ID NO: 943052 - DNA, 25 bp, Homo sapien
gattgacagttataatggtcagaac

SEQ ID NO: 943053 - DNA, 25 bp, Homo sapien
tgacagttataatggtcagaacaaa

SEQ ID NO: 943054 - DNA, 25 bp, Homo sapien
tcaagggtttcaggcatcatgggtt

SEQ ID NO: 943055 - DNA, 25 bp, Homo sapien
ctgagacactgaggccagctcaagg

SEQ ID NO: 943056 - DNA, 25 bp, Homo sapien
tctctgggcaggatggtacttttga

SEQ ID NO: 943057 - DNA, 25 bp, Homo sapien
tgggatgttgcaactccctgaatag

SEQ ID NO: 943058 - DNA, 25 bp, Homo sapien
cattgcggatattgagatcaactcc

SEQ ID NO: 943059 - DNA, 25 bp, Homo sapien
gtccccttcctcattgcggatattg

SEQ ID NO: 943060 - DNA, 25 bp, Homo sapien
tcctcattgcggatattgagatcaa

SEQ ID NO: 943061 - DNA, 25 bp, Homo sapien
cccttcctcattgcggatattgaga

SEQ ID NO: 943062 - DNA, 25 bp, Homo sapien
agcctggaactctgcacatcttctc

SEQ ID NO: 943063 - DNA, 25 bp, Homo sapien
tattcattggctacttggatttgct

SEQ ID NO: 943064 - DNA, 25 bp, Homo sapien
tgtctgtcctctgcattgcaaatgg

SEQ ID NO: 943065 - DNA, 25 bp, Homo sapien
tatagctaataaccctctgtctgtc

SEQ ID NO: 943066 - DNA, 25 bp, Homo sapien
tgcttgtttaggacctcaacttggt

SEQ ID NO: 943067 - DNA, 25 bp, Homo sapien
gaagaaccaatagggcacattacat

SEQ ID NO: 943068 - DNA, 25 bp, Homo sapien
gcaaattctgcccataagagtaggg

SEQ ID NO: 943069 - DNA, 25 bp, Homo sapien
cctagctccttgtaagtgtcatcac

SEQ ID NO: 943070 - DNA, 25 bp, Homo sapien
catagggatataacaataagcaaga

SEQ ID NO: 943071 - DNA, 25 bp, Homo sapien
gtactcaatgcctccttgattgtca

SEQ ID NO: 943072 - DNA, 25 bp, Homo sapien
aacaagtgtttcattgtccatgtac

SEQ ID NO: 943073 - DNA, 25 bp, Homo sapien
atttattatccactaagcaatgtca

SEQ ID NO: 943074 - DNA, 25 bp, Homo sapien
tcaggaggagactgctaggcattaa

SEQ ID NO: 943075 - DNA, 25 bp, Homo sapien
gagtgaaaaagagtccctggaagag

SEQ ID NO: 943076 - DNA, 25 bp, Homo sapien
taaattgagcacagatgagagccca

SEQ ID NO: 943077 - DNA, 25 bp, Homo sapien
agtcaggaaaaccagtcaggaggag

SEQ ID NO: 943078 - DNA, 25 bp, Homo sapien
agtcatctagacctgagggctccat

SEQ ID NO: 943079 - DNA, 25 bp, Homo sapien
tccaatacctccaagtctgcatgag

SEQ ID NO: 943080 - DNA, 25 bp, Homo sapien
tctccaatacctccaagtctgcatg

SEQ ID NO: 943081 - DNA, 25 bp, Homo sapien
tggttggtggagagtcatctagacc

SEQ ID NO: 943082 - DNA, 25 bp, Homo sapien
tcctcaacagggaccagcaacttga

SEQ ID NO: 943083 - DNA, 25 bp, Homo sapien
tatgcattttgactattcatcatac

SEQ ID NO: 943084 - DNA, 25 bp, Homo sapien
atcatacccctgtcctcaacaggga

SEQ ID NO: 943085 - DNA, 25 bp, Homo sapien
gcattttgactattcatcatacccc

SEQ ID NO: 943086 - DNA, 25 bp, Homo sapien
tccaaagccactgagatctagatca

SEQ ID NO: 943087 - DNA, 25 bp, Homo sapien
ctccaaagccactgagatctagatc

SEQ ID NO: 943088 - DNA, 25 bp, Homo sapien
ccaaagccactgagatctagatcaa

SEQ ID NO: 943089 - DNA, 25 bp, Homo sapien
tctccaaagccactgagatctagat

SEQ ID NO: 943090 - DNA, 25 bp, Homo sapien
gatcagaaatagctccttcgctagc

SEQ ID NO: 943091 - DNA, 25 bp, Homo sapien
taaaggccggcctatgatcagaaat

SEQ ID NO: 943092 - DNA, 25 bp, Homo sapien
tcttctcgtggctcaaaccgtgact

SEQ ID NO: 943093 - DNA, 25 bp, Homo sapien
gagtccagttcattcctatgtcagg

SEQ ID NO: 943094 - DNA, 25 bp, Homo sapien
tatttcgatcacttacaaacaccaa

SEQ ID NO: 943095 - DNA, 25 bp, Homo sapien
tttcgatcacttacaaacaccaatt

SEQ ID NO: 943096 - DNA, 25 bp, Homo sapien
tccaaagtcagttgtacatctttca

SEQ ID NO: 943097 - DNA, 25 bp, Homo sapien
atctttcaataccacacttttaatt

SEQ ID NO: 943098 - DNA, 25 bp, Homo sapien
gactaccatcatgcaatcaaaatgc

SEQ ID NO: 943099 - DNA, 25 bp, Homo sapien
cattttggtaaacaagtgtgtgtca

SEQ ID NO: 943100 - DNA, 25 bp, Homo sapien
tctatacaataaggacaatcatgat

SEQ ID NO: 943101 - DNA, 25 bp, Homo sapien
ggaacctgtgtaatgatcttgggca

SEQ ID NO: 943102 - DNA, 25 bp, Homo sapien
catgctttgacgctggtagtttatc

SEQ ID NO: 943103 - DNA, 25 bp, Homo sapien
tatcttctgcaaactattctgagct

SEQ ID NO: 943104 - DNA, 25 bp, Homo sapien
ggtctcttgagatgtaggatgaaaa

SEQ ID NO: 943105 - DNA, 25 bp, Homo sapien
tcttacagtcattggcaagtagatc

SEQ ID NO: 943106 - DNA, 25 bp, Homo sapien
acacacgctcgtggaaggagaaaac

SEQ ID NO: 943107 - DNA, 25 bp, Homo sapien
ctcaaacaactggactcggcccgtt

SEQ ID NO: 943108 - DNA, 25 bp, Homo sapien
cgaactccgcgctttttcacacacg

SEQ ID NO: 943109 - DNA, 25 bp, Homo sapien
tggaaggagaaaaccgctcaaacaa

SEQ ID NO: 943110 - DNA, 25 bp, Homo sapien
agaaatgcgcgctgtggagttgtct

SEQ ID NO: 943111 - DNA, 25 bp, Homo sapien
tggagttgtctggacatttaggaat

SEQ ID NO: 943112 - DNA, 25 bp, Homo sapien
gggtgttcagtctcgaggtctctga

SEQ ID NO: 943113 - DNA, 25 bp, Homo sapien
tacttcgggtcctggaaagcgagat

SEQ ID NO: 943114 - DNA, 25 bp, Homo sapien
taagttggtctttgttgtcactgtt

SEQ ID NO: 943115 - DNA, 25 bp, Homo sapien
tgacctgatgaacatctggcaaaga

SEQ ID NO: 943116 - DNA, 25 bp, Homo sapien
cagtgacctgatgaacatctggcaa

SEQ ID NO: 943117 - DNA, 25 bp, Homo sapien
cttaagttggtctttgttgtcactg

SEQ ID NO: 943118 - DNA, 25 bp, Homo sapien
ggtaaagtcagtagctgccaacttt

SEQ ID NO: 943119 - DNA, 25 bp, Homo sapien
aagtcagtagctgccaactttgtac

SEQ ID NO: 943120 - DNA, 25 bp, Homo sapien
aggtaaagtcagtagctgccaactt

SEQ ID NO: 943121 - DNA, 25 bp, Homo sapien
taaagtcagtagctgccaactttgt

SEQ ID NO: 943122 - DNA, 25 bp, Homo sapien
taatagttacatattccatgaaata

SEQ ID NO: 943123 - DNA, 25 bp, Homo sapien
cgtcatttggctgtcacggtctgct

SEQ ID NO: 943124 - DNA, 25 bp, Homo sapien
ctaggcttgaagcaatagaggagtc

SEQ ID NO: 943125 - DNA, 25 bp, Homo sapien
tggactccaaagcaactttccctgc

SEQ ID NO: 943126 - DNA, 25 bp, Homo sapien
gaaagggcatttgtgctcatggaaa

SEQ ID NO: 943127 - DNA, 25 bp, Homo sapien
atcttacacatgaggtgaaacccca

SEQ ID NO: 943128 - DNA, 25 bp, Homo sapien
tgggactgtcctagatttaaaatat

SEQ ID NO: 943129 - DNA, 25 bp, Homo sapien
tgctgctgtattccctgtatctttt

SEQ ID NO: 943130 - DNA, 25 bp, Homo sapien
gtatcttttctttgccggcttccag

SEQ ID NO: 943131 - DNA, 25 bp, Homo sapien
cagtttctagatgatcccttctctg

SEQ ID NO: 943132 - DNA, 25 bp, Homo sapien
tctgtcacttcaatattacgtttat

SEQ ID NO: 943133 - DNA, 25 bp, Homo sapien
cggtgagtgtgatgcgtggatccca

SEQ ID NO: 943134 - DNA, 25 bp, Homo sapien
tgatgcgtggatcccagttgtaaca

SEQ ID NO: 943135 - DNA, 25 bp, Homo sapien
gcgtggatcccagttgtaacatctg

SEQ ID NO: 943136 - DNA, 25 bp, Homo sapien
ttagaaggaaacagcgttcacatat

SEQ ID NO: 943137 - DNA, 25 bp, Homo sapien
tgtcacatctacagtgtgcatctgg

SEQ ID NO: 943138 - DNA, 25 bp, Homo sapien
gtcacatctacagtgtgcatctggt

SEQ ID NO: 943139 - DNA, 25 bp, Homo sapien
cagcgttcacatatgtcacatctac

SEQ ID NO: 943140 - DNA, 25 bp, Homo sapien
ttggtgcctcgccagaggttttctg

SEQ ID NO: 943141 - DNA, 25 bp, Homo sapien
tcgtttttgggttggtgcctcgcca

SEQ ID NO: 943142 - DNA, 25 bp, Homo sapien
tttttgggttggtgcctcgccagag

SEQ ID NO: 943143 - DNA, 25 bp, Homo sapien
ggtgcctcgccagaggttttctgat

SEQ ID NO: 943144 - DNA, 25 bp, Homo sapien
agagttctcagttgagggacttgaa

SEQ ID NO: 943145 - DNA, 25 bp, Homo sapien
caaatatgagggttaggttcttgga

SEQ ID NO: 943146 - DNA, 25 bp, Homo sapien
tcaaatatgagggttaggttcttgg

SEQ ID NO: 943147 - DNA, 25 bp, Homo sapien
gaaaacctgagaactgagagttctc

SEQ ID NO: 943148 - DNA, 25 bp, Homo sapien
gctctttgagcctcctttacacact

SEQ ID NO: 943149 - DNA, 25 bp, Homo sapien
tgctctttgagcctcctttacacac

SEQ ID NO: 943150 - DNA, 25 bp, Homo sapien
aaacatatggatatacttcagtgtg

SEQ ID NO: 943151 - DNA, 25 bp, Homo sapien
agtttcctcatacacagttctcaca

SEQ ID NO: 943152 - DNA, 25 bp, Homo sapien
catcaagctgtagggctctatggca

SEQ ID NO: 943153 - DNA, 25 bp, Homo sapien
catgcctaagggataggacttctcc

SEQ ID NO: 943154 - DNA, 25 bp, Homo sapien
ggctcttcataacttaaggcagtga

SEQ ID NO: 943155 - DNA, 25 bp, Homo sapien
gagcaccagtttttcattgattgga

SEQ ID NO: 943156 - DNA, 25 bp, Homo sapien
tatgtagcgattcagatcagctgcg

SEQ ID NO: 943157 - DNA, 25 bp, Homo sapien
gaagccagatgagaccctcaggtca

SEQ ID NO: 943158 - DNA, 25 bp, Homo sapien
tgcttgcactgtcaagctgaatgtt

SEQ ID NO: 943159 - DNA, 25 bp, Homo sapien
gctgcttgcactgtcaagctgaatg

SEQ ID NO: 943160 - DNA, 25 bp, Homo sapien
tgctgcttgcactgtcaagctgaat

SEQ ID NO: 943161 - DNA, 25 bp, Homo sapien
gcttgcactgtcaagctgaatgttt

SEQ ID NO: 943162 - DNA, 25 bp, Homo sapien
cactggtattgccattgaggaggct

SEQ ID NO: 943163 - DNA, 25 bp, Homo sapien
cacctaaagagggagtgtaggcaga

SEQ ID NO: 943164 - DNA, 25 bp, Homo sapien
attgggaaccctcagtttactgacg

SEQ ID NO: 943165 - DNA, 25 bp, Homo sapien
gaaccagttgggatcaactcctctt

SEQ ID NO: 943166 - DNA, 25 bp, Homo sapien
cccttgctatagctctagctttgga

SEQ ID NO: 943167 - DNA, 25 bp, Homo sapien
tttcacctgaacatattttctgcag

SEQ ID NO: 943168 - DNA, 25 bp, Homo sapien
ttatagagtcataattgtcaacttt

SEQ ID NO: 943169 - DNA, 25 bp, Homo sapien
tccaacttagatgaagttcataaca

SEQ ID NO: 943170 - DNA, 25 bp, Homo sapien
ctgtttggctcccattctgtattct

SEQ ID NO: 943171 - DNA, 25 bp, Homo sapien
tgcacggttactttggctgcaatgc

SEQ ID NO: 943172 - DNA, 25 bp, Homo sapien
gcccggttactctgccttcgtggga

SEQ ID NO: 943173 - DNA, 25 bp, Homo sapien
tgtgaattgccttgacagcatatgc

SEQ ID NO: 943174 - DNA, 25 bp, Homo sapien
cactgaagcagcgtaaaggtcactg

SEQ ID NO: 943175 - DNA, 25 bp, Homo sapien
tgaagcagcataaaggaatgtggtg

SEQ ID NO: 943176 - DNA, 25 bp, Homo sapien
cataaaggaatgtggtgtcctcaag

SEQ ID NO: 943177 - DNA, 25 bp, Homo sapien
gaagcagcgtaaaggtcactgaagc

SEQ ID NO: 943178 - DNA, 25 bp, Homo sapien
cattggaacatgctgtgttgctttt

SEQ ID NO: 943179 - DNA, 25 bp, Homo sapien
aatttattctaagagctctcctacc

SEQ ID NO: 943180 - DNA, 25 bp, Homo sapien
gagtagcgccagtgtatactgcgtc

SEQ ID NO: 943181 - DNA, 25 bp, Homo sapien
gattgctgacaagttaatataagca

SEQ ID NO: 943182 - DNA, 25 bp, Homo sapien
tggagtacatggagcatagtggcac

SEQ ID NO: 943183 - DNA, 25 bp, Homo sapien
ccttcatgtccttaagaagagcaca

SEQ ID NO: 943184 - DNA, 25 bp, Homo sapien
taagtaatttgatttcaacgtgccc

SEQ ID NO: 943185 - DNA, 25 bp, Homo sapien
taattgctttagtgatgtgggtggt

SEQ ID NO: 943186 - DNA, 25 bp, Homo sapien
agttcattgacttctcaggcccatg

SEQ ID NO: 943187 - DNA, 25 bp, Homo sapien
cccctgcagcagtgtaaagatttga

SEQ ID NO: 943188 - DNA, 25 bp, Homo sapien
caagggagccttatagacacgggtg

SEQ ID NO: 943189 - DNA, 25 bp, Homo sapien
gacctcagtggccatcatgctaatg

SEQ ID NO: 943190 - DNA, 25 bp, Homo sapien
ctgataagcatcaaaggaagaccct

SEQ ID NO: 943191 - DNA, 25 bp, Homo sapien
atgtgtaggtagttctttttcaact

SEQ ID NO: 943192 - DNA, 25 bp, Homo sapien
ctgatcttcaacatgtgtaggtagt

SEQ ID NO: 943193 - DNA, 25 bp, Homo sapien
taccagttatatataacgcttagaa

SEQ ID NO: 943194 - DNA, 25 bp, Homo sapien
tatataacgcttagaatttgttctt

SEQ ID NO: 943195 - DNA, 25 bp, Homo sapien
caaatctagccatgaacaagccctg

SEQ ID NO: 943196 - DNA, 25 bp, Homo sapien
aaatgatacctgaaatctgtccacg

SEQ ID NO: 943197 - DNA, 25 bp, Homo sapien
tctgaatggaactcatgatcctccc

SEQ ID NO: 943198 - DNA, 25 bp, Homo sapien
tagtccaggataccatcagttcttc

SEQ ID NO: 943199 - DNA, 25 bp, Homo sapien
gacatgggatttgggctgagccttc

SEQ ID NO: 943200 - DNA, 25 bp, Homo sapien
gggctgagccttcaaacgtagataa

SEQ ID NO: 943201 - DNA, 25 bp, Homo sapien
tagagatcactgatgtggtcatggc

SEQ ID NO: 943202 - DNA, 25 bp, Homo sapien
tgtggtcatggcagacatgggattt

SEQ ID NO: 943203 - DNA, 25 bp, Homo sapien
ctgcagagcagcctttgccctggac

SEQ ID NO: 943204 - DNA, 25 bp, Homo sapien
cagcctttgccctggacattagcac

SEQ ID NO: 943205 - DNA, 25 bp, Homo sapien
cctttgccctggacattagcaccat

SEQ ID NO: 943206 - DNA, 25 bp, Homo sapien
cagagcagcctttgccctggacatt

SEQ ID NO: 943207 - DNA, 25 bp, Homo sapien
aaagtatgggtcctgcagaaacgcc

SEQ ID NO: 943208 - DNA, 25 bp, Homo sapien
tctgccagtgggtaaatggaccatg

SEQ ID NO: 943209 - DNA, 25 bp, Homo sapien
gaaacgccaacctgtcttctgccag

SEQ ID NO: 943210 - DNA, 25 bp, Homo sapien
tggaagatagaacacggagggttta

SEQ ID NO: 943211 - DNA, 25 bp, Homo sapien
agccagtgatctgagacctgttgga

SEQ ID NO: 943212 - DNA, 25 bp, Homo sapien
cagccagtgatctgagacctgttgg

SEQ ID NO: 943213 - DNA, 25 bp, Homo sapien
ttctctcccacccattgacagatgc

SEQ ID NO: 943214 - DNA, 25 bp, Homo sapien
gtggacccagcagtattcttctctc

SEQ ID NO: 943215 - DNA, 25 bp, Homo sapien
tctcccacccattgacagatgcttg

SEQ ID NO: 943216 - DNA, 25 bp, Homo sapien
cccacccattgacagatgcttgaca

SEQ ID NO: 943217 - DNA, 25 bp, Homo sapien
gtccttttagtcttcttagcttcag

SEQ ID NO: 943218 - DNA, 25 bp, Homo sapien
gtggtgatgctgcaagtgaacagtt

SEQ ID NO: 943219 - DNA, 25 bp, Homo sapien
cttttagtcttcttagcttcaggtt

SEQ ID NO: 943220 - DNA, 25 bp, Homo sapien
cagcagtttcctctttagctccccc

SEQ ID NO: 943221 - DNA, 25 bp, Homo sapien
tcctctgtttgacagtgcgtacaga

SEQ ID NO: 943222 - DNA, 25 bp, Homo sapien
gtttgacagtgcgtacagagatgca

SEQ ID NO: 943223 - DNA, 25 bp, Homo sapien
cgtacagagatgcaagatttctgga

SEQ ID NO: 943224 - DNA, 25 bp, Homo sapien
gaatttaaggccataatagagaaac

SEQ ID NO: 943225 - DNA, 25 bp, Homo sapien
taatcctccactagtaacattccag

SEQ ID NO: 943226 - DNA, 25 bp, Homo sapien
tatttcataatcctccactagtaac

SEQ ID NO: 943227 - DNA, 25 bp, Homo sapien
tcataatcctccactagtaacattc

SEQ ID NO: 943228 - DNA, 25 bp, Homo sapien
ctccactagtaacattccagaagac

SEQ ID NO: 943229 - DNA, 25 bp, Homo sapien
caaccttcatcatgtgcccctggaa

SEQ ID NO: 943230 - DNA, 25 bp, Homo sapien
gcacatgctctcactccagttgcag

SEQ ID NO: 943231 - DNA, 25 bp, Homo sapien
tgcccctggaaaggcggtcagtgcc

SEQ ID NO: 943232 - DNA, 25 bp, Homo sapien
tgcaggctgtgctaggcagacttgt

SEQ ID NO: 943233 - DNA, 25 bp, Homo sapien
ctttatggcagtcttctgtgaacac

SEQ ID NO: 943234 - DNA, 25 bp, Homo sapien
gctctttatggcagtcttctgtgaa

SEQ ID NO: 943235 - DNA, 25 bp, Homo sapien
agctctttatggcagtcttctgtga

SEQ ID NO: 943236 - DNA, 25 bp, Homo sapien
tgccagctctttatggcagtcttct

SEQ ID NO: 943237 - DNA, 25 bp, Homo sapien
tctctgagttcctgaaaactgctga

SEQ ID NO: 943238 - DNA, 25 bp, Homo sapien
tgaaaactgctgatcaagaataggg

SEQ ID NO: 943239 - DNA, 25 bp, Homo sapien
gttctctgagttcctgaaaactgct

SEQ ID NO: 943240 - DNA, 25 bp, Homo sapien
tgatcaagaatagggggaaccttca

SEQ ID NO: 943241 - DNA, 25 bp, Homo sapien
taagctggcttaacacatctacgta

SEQ ID NO: 943242 - DNA, 25 bp, Homo sapien
gctaaagtgtcgtgctgaatcagag

SEQ ID NO: 943243 - DNA, 25 bp, Homo sapien
tctgtggttgagctctaagctggct

SEQ ID NO: 943244 - DNA, 25 bp, Homo sapien
caagttaactcgttgagaggcagct

SEQ ID NO: 943245 - DNA, 25 bp, Homo sapien
aaaatctgtgccgtttaggatatat

SEQ ID NO: 943246 - DNA, 25 bp, Homo sapien
aaatctgtgccgtttaggatatata

SEQ ID NO: 943247 - DNA, 25 bp, Homo sapien
aaaaatctgtgccgtttaggatata

SEQ ID NO: 943248 - DNA, 25 bp, Homo sapien
taaaaaatctgtgccgtttaggata

SEQ ID NO: 943249 - DNA, 25 bp, Homo sapien
tcatcgtcatgctagaggaaagtct

SEQ ID NO: 943250 - DNA, 25 bp, Homo sapien
taccgaccttacgaacaatgagaag

SEQ ID NO: 943251 - DNA, 25 bp, Homo sapien
tctcatgctcaaggaactgtgtaaa

SEQ ID NO: 943252 - DNA, 25 bp, Homo sapien
gccctttcaggcgttaagcatcctt

SEQ ID NO: 943253 - DNA, 25 bp, Homo sapien
gcaggtagctatttaagatccaagg

SEQ ID NO: 943254 - DNA, 25 bp, Homo sapien
taagtagacttaaccagacatctga

SEQ ID NO: 943255 - DNA, 25 bp, Homo sapien
tcagaactgcagcttatggtgggaa

SEQ ID NO: 943256 - DNA, 25 bp, Homo sapien
gagcagagaggatacactgagtgta

SEQ ID NO: 943257 - DNA, 25 bp, Homo sapien
ggtgagtagcgtgcagatctgacca

SEQ ID NO: 943258 - DNA, 25 bp, Homo sapien
aaattaatgaatagcactgaggccc

SEQ ID NO: 943259 - DNA, 25 bp, Homo sapien
tagaagtttcctgtaccaatcaggg

SEQ ID NO: 943260 - DNA, 25 bp, Homo sapien
gagatgtcactttccgttctgaaga

SEQ ID NO: 943261 - DNA, 25 bp, Homo sapien
ccagtattggattaggattgctcat

SEQ ID NO: 943262 - DNA, 25 bp, Homo sapien
tataccagagccttacagggtgcct

SEQ ID NO: 943263 - DNA, 25 bp, Homo sapien
aagagttgcagcctttgtggtcagt

SEQ ID NO: 943264 - DNA, 25 bp, Homo sapien
aaagccttccagctagcagctgtca

SEQ ID NO: 943265 - DNA, 25 bp, Homo sapien
cacaataattgaagatgtatcctgt

SEQ ID NO: 943266 - DNA, 25 bp, Homo sapien
aataattgaagatgtatcctgtagc

SEQ ID NO: 943267 - DNA, 25 bp, Homo sapien
taattgaagatgtatcctgtagcat

SEQ ID NO: 943268 - DNA, 25 bp, Homo sapien
tgaagatgtatcctgtagcattcat

SEQ ID NO: 943269 - DNA, 25 bp, Homo sapien
ccactgctactatgtatgctaggta

SEQ ID NO: 943270 - DNA, 25 bp, Homo sapien
tctctgaccttgctgtggcaaatcc

SEQ ID NO: 943271 - DNA, 25 bp, Homo sapien
ggcaaatccactgctactatgtatg

SEQ ID NO: 943272 - DNA, 25 bp, Homo sapien
tgctgtggcaaatccactgctacta

SEQ ID NO: 943273 - DNA, 25 bp, Homo sapien
gggactgtgtgtagaatcacttcca

SEQ ID NO: 943274 - DNA, 25 bp, Homo sapien
ttgctgttatggctacctgtgctga

SEQ ID NO: 943275 - DNA, 25 bp, Homo sapien
gaggcagcttcagtagttgtataat

SEQ ID NO: 943276 - DNA, 25 bp, Homo sapien
caggatgggtccagtcttgctgtta

SEQ ID NO: 943277 - DNA, 25 bp, Homo sapien
tggttgctgccttcttctgacaaag

SEQ ID NO: 943278 - DNA, 25 bp, Homo sapien
catatggttgctgccttcttctgac

SEQ ID NO: 943279 - DNA, 25 bp, Homo sapien
tcatatggttgctgccttcttctga

SEQ ID NO: 943280 - DNA, 25 bp, Homo sapien
tatggttgctgccttcttctgacaa

SEQ ID NO: 943281 - DNA, 25 bp, Homo sapien
caggcagtcttctaaggctgtcctt

SEQ ID NO: 943282 - DNA, 25 bp, Homo sapien
agactttgcaccttggttgggctgt

SEQ ID NO: 943283 - DNA, 25 bp, Homo sapien
gttgacaggcagtcttctaaggctg

SEQ ID NO: 943284 - DNA, 25 bp, Homo sapien
ttggttgggctgtccctttgctcct

SEQ ID NO: 943285 - DNA, 25 bp, Homo sapien
cagaatagaggcatagtggggagac

SEQ ID NO: 943286 - DNA, 25 bp, Homo sapien
aatagaggcatagtggggagacaat

SEQ ID NO: 943287 - DNA, 25 bp, Homo sapien
ctgtcagcagaatagaggcatagtg

SEQ ID NO: 943288 - DNA, 25 bp, Homo sapien
tgtcagcagaatagaggcatagtgg

SEQ ID NO: 943289 - DNA, 25 bp, Homo sapien
tctttgtgagtcaatcgagatgaat

SEQ ID NO: 943290 - DNA, 25 bp, Homo sapien
gatgaattaacagtcctattagtag

SEQ ID NO: 943291 - DNA, 25 bp, Homo sapien
ccttgcatacataagcctctctttg

SEQ ID NO: 943292 - DNA, 25 bp, Homo sapien
ctgtcagtctttgccggccttgcat

SEQ ID NO: 943293 - DNA, 25 bp, Homo sapien
ctcccacagtgcacagttggggact

SEQ ID NO: 943294 - DNA, 25 bp, Homo sapien
ctgctgcacgtgcacgtacatttcc

SEQ ID NO: 943295 - DNA, 25 bp, Homo sapien
tgtggctcccacagtgcacagttgg

SEQ ID NO: 943296 - DNA, 25 bp, Homo sapien
ctgtttttccctattttgaggcaca

SEQ ID NO: 943297 - DNA, 25 bp, Homo sapien
ctgtgtcacaataacatcactcagt

SEQ ID NO: 943298 - DNA, 25 bp, Homo sapien
gggataggtcacagtcattcgcact

SEQ ID NO: 943299 - DNA, 25 bp, Homo sapien
agacagtggtcccaaccgggctgat

SEQ ID NO: 943300 - DNA, 25 bp, Homo sapien
gagactgtctagttaaattgggcca

SEQ ID NO: 943301 - DNA, 25 bp, Homo sapien
tatcctcgactttctttagcagcca

SEQ ID NO: 943302 - DNA, 25 bp, Homo sapien
tcaggattaaactagtgcactgtgt

SEQ ID NO: 943303 - DNA, 25 bp, Homo sapien
ctcaggattaaactagtgcactgtg

SEQ ID NO: 943304 - DNA, 25 bp, Homo sapien
tcacccatgaggccactggatcctg

SEQ ID NO: 943305 - DNA, 25 bp, Homo sapien
ccatgaggccactggatcctgaaac

SEQ ID NO: 943306 - DNA, 25 bp, Homo sapien
catcacccatgaggccactggatcc

SEQ ID NO: 943307 - DNA, 25 bp, Homo sapien
acccatgaggccactggatcctgaa

SEQ ID NO: 943308 - DNA, 25 bp, Homo sapien
agaattaggcggttctgctttctct

SEQ ID NO: 943309 - DNA, 25 bp, Homo sapien
tccacctgattatcgtttttccagg

SEQ ID NO: 943310 - DNA, 25 bp, Homo sapien
tgcacagtcaggatcagaattaggc

SEQ ID NO: 943311 - DNA, 25 bp, Homo sapien
gcagcacattcgttgtactgtcggg

SEQ ID NO: 943312 - DNA, 25 bp, Homo sapien
cgttagcaggtcttgttgtacttaa

SEQ ID NO: 943313 - DNA, 25 bp, Homo sapien
acttaaatcacaggtgttcagggaa

SEQ ID NO: 943314 - DNA, 25 bp, Homo sapien
ccaggaagaaccgttagcaggtctt

SEQ ID NO: 943315 - DNA, 25 bp, Homo sapien
ctctcggtccccttgacccaggaag

SEQ ID NO: 943316 - DNA, 25 bp, Homo sapien
gaggcacacctggaggagtgagtat

SEQ ID NO: 943317 - DNA, 25 bp, Homo sapien
agggcagaggcacacctggaggagt

SEQ ID NO: 943318 - DNA, 25 bp, Homo sapien
gcagaggcacacctggaggagtgag

SEQ ID NO: 943319 - DNA, 25 bp, Homo sapien
gcacacctggaggagtgagtatggg

SEQ ID NO: 943320 - DNA, 25 bp, Homo sapien
tatatgtgccactctgacatcactg

SEQ ID NO: 943321 - DNA, 25 bp, Homo sapien
tatgtgccactctgacatcactgcc

SEQ ID NO: 943322 - DNA, 25 bp, Homo sapien
tgtatatgtgccactctgacatcac

SEQ ID NO: 943323 - DNA, 25 bp, Homo sapien
atgtgccactctgacatcactgcca

SEQ ID NO: 943324 - DNA, 25 bp, Homo sapien
gctgtatttgttataacacagagat

SEQ ID NO: 943325 - DNA, 25 bp, Homo sapien
cattcagctgtatttgttataacac

SEQ ID NO: 943326 - DNA, 25 bp, Homo sapien
gtatttgttataacacagagattca

SEQ ID NO: 943327 - DNA, 25 bp, Homo sapien
cacattcagctgtatttgttataac

SEQ ID NO: 943328 - DNA, 25 bp, Homo sapien
ttgtcggggtgggatattccatgca

SEQ ID NO: 943329 - DNA, 25 bp, Homo sapien
atgcagcagaaattgttgtcggggt

SEQ ID NO: 943330 - DNA, 25 bp, Homo sapien
tttcctgagtcttttagaaggtgat

SEQ ID NO: 943331 - DNA, 25 bp, Homo sapien
tgcgggggggctctttgtgccatga

SEQ ID NO: 943332 - DNA, 25 bp, Homo sapien
taagccaaaagcttgcacagctgtc

SEQ ID NO: 943333 - DNA, 25 bp, Homo sapien
tccacaccactatgagagattcgtg

SEQ ID NO: 943334 - DNA, 25 bp, Homo sapien
gattcgtgactaagtggttgaccca

SEQ ID NO: 943335 - DNA, 25 bp, Homo sapien
aaatattggaagcacagagaacagc

SEQ ID NO: 943336 - DNA, 25 bp, Homo sapien
ctcctgctgtgttgggatcatcctc

SEQ ID NO: 943337 - DNA, 25 bp, Homo sapien
tcctgctgtgttgggatcatcctct

SEQ ID NO: 943338 - DNA, 25 bp, Homo sapien
tctcctgctgtgttgggatcatcct

SEQ ID NO: 943339 - DNA, 25 bp, Homo sapien
acattcctctcataggaataagaca

SEQ ID NO: 943340 - DNA, 25 bp, Homo sapien
aacacattcctctcataggaataag

SEQ ID NO: 943341 - DNA, 25 bp, Homo sapien
cacattcctctcataggaataagac

SEQ ID NO: 943342 - DNA, 25 bp, Homo sapien
cattcctctcataggaataagacat

SEQ ID NO: 943343 - DNA, 25 bp, Homo sapien
cagtttgatactctgcagctctgag

SEQ ID NO: 943344 - DNA, 25 bp, Homo sapien
gaagtattcgagcataaggattggg

SEQ ID NO: 943345 - DNA, 25 bp, Homo sapien
gcactgttgcgttgatcaatctgga

SEQ ID NO: 943346 - DNA, 25 bp, Homo sapien
ggacctgaggccagcatcctggtgc

SEQ ID NO: 943347 - DNA, 25 bp, Homo sapien
gagatgtgcactgtcaattgaaggg

SEQ ID NO: 943348 - DNA, 25 bp, Homo sapien
gtcaattgaagggatccaggctctg

SEQ ID NO: 943349 - DNA, 25 bp, Homo sapien
tccttgccacagagatgtgcactgt

SEQ ID NO: 943350 - DNA, 25 bp, Homo sapien
agcacccgcattggtatccttgcca

SEQ ID NO: 943351 - DNA, 25 bp, Homo sapien
gttccatcagcctgaggcagattct

SEQ ID NO: 943352 - DNA, 25 bp, Homo sapien
cttgtgaacatagaggctcattgag

SEQ ID NO: 943353 - DNA, 25 bp, Homo sapien
catagaggctcattgagtacacccc

SEQ ID NO: 943354 - DNA, 25 bp, Homo sapien
tgatgggcccagttccatcagcctg

SEQ ID NO: 943355 - DNA, 25 bp, Homo sapien
tttatccaagcctgttgatgactgg

SEQ ID NO: 943356 - DNA, 25 bp, Homo sapien
ctgaataatggtacactgccattta

SEQ ID NO: 943357 - DNA, 25 bp, Homo sapien
aaatgaagtttcttggagaggctag

SEQ ID NO: 943358 - DNA, 25 bp, Homo sapien
ttcttggagaggctagttgttgtat

SEQ ID NO: 943359 - DNA, 25 bp, Homo sapien
attcattggcagaaacacgtctttg

SEQ ID NO: 943360 - DNA, 25 bp, Homo sapien
ggctatttgcagaagcataaccgta

SEQ ID NO: 943361 - DNA, 25 bp, Homo sapien
ttttggctgcattaatccctttatc

SEQ ID NO: 943362 - DNA, 25 bp, Homo sapien
taaccgtaaggcgatattcattggc

SEQ ID NO: 943363 - DNA, 25 bp, Homo sapien
gaaatgtcatgacttcgaggcaggg

SEQ ID NO: 943364 - DNA, 25 bp, Homo sapien
cctggaacagaaagctctcggctca

SEQ ID NO: 943365 - DNA, 25 bp, Homo sapien
cattagcaagttacaggatgcgggc

SEQ ID NO: 943366 - DNA, 25 bp, Homo sapien
caggagctgtcgaaaaatgccagca

SEQ ID NO: 943367 - DNA, 25 bp, Homo sapien
tgtggtaaaagtgacttgtgttgca

SEQ ID NO: 943368 - DNA, 25 bp, Homo sapien
ttgcacactattgtctgtttgaaga

SEQ ID NO: 943369 - DNA, 25 bp, Homo sapien
cgttcttgagggttgtttgcacact

SEQ ID NO: 943370 - DNA, 25 bp, Homo sapien
aagggctcaaagcatccccctttgc

SEQ ID NO: 943371 - DNA, 25 bp, Homo sapien
tgaaatgaaccctactgtctgtccc

SEQ ID NO: 943372 - DNA, 25 bp, Homo sapien
aatgaaccctactgtctgtccctgg

SEQ ID NO: 943373 - DNA, 25 bp, Homo sapien
ttttctgaaatgaaccctactgtct

SEQ ID NO: 943374 - DNA, 25 bp, Homo sapien
gcattactgtgctttcaatgctatt

SEQ ID NO: 943375 - DNA, 25 bp, Homo sapien
ggcgtgataccgctttgatagacac

SEQ ID NO: 943376 - DNA, 25 bp, Homo sapien
gctttgatagacaccgagtgaccta

SEQ ID NO: 943377 - DNA, 25 bp, Homo sapien
gagtgacctaatatacacactccag

SEQ ID NO: 943378 - DNA, 25 bp, Homo sapien
tgtactctaatctgtggtctcccag

SEQ ID NO: 943379 - DNA, 25 bp, Homo sapien
ccacatttggatagaggtcattatc

SEQ ID NO: 943380 - DNA, 25 bp, Homo sapien
agaggtcattatcctgttgcctggt

SEQ ID NO: 943381 - DNA, 25 bp, Homo sapien
gcttgaggtcttttatctagataaa

SEQ ID NO: 943382 - DNA, 25 bp, Homo sapien
gttaactgcttgaggtcttttatct

SEQ ID NO: 943383 - DNA, 25 bp, Homo sapien
gattgccagccctgtatgcagttgg

SEQ ID NO: 943384 - DNA, 25 bp, Homo sapien
tgtagcataagcacggaatcaaggt

SEQ ID NO: 943385 - DNA, 25 bp, Homo sapien
tcagaaggaagattggccaggcagt

SEQ ID NO: 943386 - DNA, 25 bp, Homo sapien
catacattgcgagtggtagccccag

SEQ ID NO: 943387 - DNA, 25 bp, Homo sapien
cactaagaataattgcaagttcttg

SEQ ID NO: 943388 - DNA, 25 bp, Homo sapien
tcagattagttgtctgcaatccctt

SEQ ID NO: 943389 - DNA, 25 bp, Homo sapien
tcccttctgagagggaacttatggg

SEQ ID NO: 943390 - DNA, 25 bp, Homo sapien
ttatgggtggccacactaagaataa

SEQ ID NO: 943391 - DNA, 25 bp, Homo sapien
cagagtccttgcctgtgcaagaatg

SEQ ID NO: 943392 - DNA, 25 bp, Homo sapien
gagtccttgcctgtgcaagaatgcc

SEQ ID NO: 943393 - DNA, 25 bp, Homo sapien
ctgcatctgtatcctaacaggcaaa

SEQ ID NO: 943394 - DNA, 25 bp, Homo sapien
agtccttgcctgtgcaagaatgccc

SEQ ID NO: 943395 - DNA, 25 bp, Homo sapien
acagcgggactgctcattttcattt

SEQ ID NO: 943396 - DNA, 25 bp, Homo sapien
gcacagcgggactgctcattttcat

SEQ ID NO: 943397 - DNA, 25 bp, Homo sapien
cacagcgggactgctcattttcatt

SEQ ID NO: 943398 - DNA, 25 bp, Homo sapien
tgcacagcgggactgctcattttca

SEQ ID NO: 943399 - DNA, 25 bp, Homo sapien
acatgatgctgacagttggttttaa

SEQ ID NO: 943400 - DNA, 25 bp, Homo sapien
tgatgctgacagttggttttaagaa

SEQ ID NO: 943401 - DNA, 25 bp, Homo sapien
catgatgctgacagttggttttaag

SEQ ID NO: 943402 - DNA, 25 bp, Homo sapien
cacatgatgctgacagttggtttta

SEQ ID NO: 943403 - DNA, 25 bp, Homo sapien
ttcagtaatgtctgaacttgaaagc

SEQ ID NO: 943404 - DNA, 25 bp, Homo sapien
tcagtaatgtctgaacttgaaagcc

SEQ ID NO: 943405 - DNA, 25 bp, Homo sapien
gagagcagtgcacattttgcaacca

SEQ ID NO: 943406 - DNA, 25 bp, Homo sapien
tttctttgagagcagtgcacatttt

SEQ ID NO: 943407 - DNA, 25 bp, Homo sapien
tttcaaatgacacatagtaaggaga

SEQ ID NO: 943408 - DNA, 25 bp, Homo sapien
cacatagtaaggagaatggaataat

SEQ ID NO: 943409 - DNA, 25 bp, Homo sapien
cctaagaaatgtggtagcattattc

SEQ ID NO: 943410 - DNA, 25 bp, Homo sapien
tctaacaggggattggtacctaaga

SEQ ID NO: 943411 - DNA, 25 bp, Homo sapien
gcagtaaatcgtctatacacaggca

SEQ ID NO: 943412 - DNA, 25 bp, Homo sapien
gtaaatcgtctatacacaggcaaac

SEQ ID NO: 943413 - DNA, 25 bp, Homo sapien
cctgaagcagtaaatcgtctataca

SEQ ID NO: 943414 - DNA, 25 bp, Homo sapien
gaagcagtaaatcgtctatacacag

SEQ ID NO: 943415 - DNA, 25 bp, Homo sapien
aataattatggagggcatgctgcac

SEQ ID NO: 943416 - DNA, 25 bp, Homo sapien
tgctacatagcgcaaggtgtgcctg

SEQ ID NO: 943417 - DNA, 25 bp, Homo sapien
tgcacagatggcgtaagggttcccc

SEQ ID NO: 943418 - DNA, 25 bp, Homo sapien
gggtccctgcaaagctatgtgctac

SEQ ID NO: 943419 - DNA, 25 bp, Homo sapien
tgacaaggccccttccactgagtag

SEQ ID NO: 943420 - DNA, 25 bp, Homo sapien
tcccactactgctttaagactcatc

SEQ ID NO: 943421 - DNA, 25 bp, Homo sapien
cactgagtagctgacctttttctcc

SEQ ID NO: 943422 - DNA, 25 bp, Homo sapien
tccacgaagcctttgctgacaaggc

SEQ ID NO: 943423 - DNA, 25 bp, Homo sapien
catggcaatctgcatgacaggaggg

SEQ ID NO: 943424 - DNA, 25 bp, Homo sapien
tgtgtcattactctgaaggggatac

SEQ ID NO: 943425 - DNA, 25 bp, Homo sapien
gcagagcaaaatgagcccacatcag

SEQ ID NO: 943426 - DNA, 25 bp, Homo sapien
tctgaaggggatacctggtccctgg

SEQ ID NO: 943427 - DNA, 25 bp, Homo sapien
gctgtacacgctccactggtttctc

SEQ ID NO: 943428 - DNA, 25 bp, Homo sapien
ctgctgtacacgctccactggtttc

SEQ ID NO: 943429 - DNA, 25 bp, Homo sapien
gtacacgctccactggtttctcctg

SEQ ID NO: 943430 - DNA, 25 bp, Homo sapien
tgtacacgctccactggtttctcct

SEQ ID NO: 943431 - DNA, 25 bp, Homo sapien
tattctgaaggctttcgacacccgt

SEQ ID NO: 943432 - DNA, 25 bp, Homo sapien
tctgtgataagcgacacatggttcc

SEQ ID NO: 943433 - DNA, 25 bp, Homo sapien
catggttccatattccccgactttg

SEQ ID NO: 943434 - DNA, 25 bp, Homo sapien
tctttcactcagagagtctgtgata

SEQ ID NO: 943435 - DNA, 25 bp, Homo sapien
gtttacactgtgagagaaaagctgc

SEQ ID NO: 943436 - DNA, 25 bp, Homo sapien
gaggagtttgttgggctccaccaag

SEQ ID NO: 943437 - DNA, 25 bp, Homo sapien
agtttgttgggctccaccaagtttg

SEQ ID NO: 943438 - DNA, 25 bp, Homo sapien
ttggaggagtttgttgggctccacc

SEQ ID NO: 943439 - DNA, 25 bp, Homo sapien
gggcctcgaagaaggactacattct

SEQ ID NO: 943440 - DNA, 25 bp, Homo sapien
aacagaaatgttgacttacagaagc

SEQ ID NO: 943441 - DNA, 25 bp, Homo sapien
cagagaggcctctttaaacacatga

SEQ ID NO: 943442 - DNA, 25 bp, Homo sapien
aagttttcccagatagtgtacacca

SEQ ID NO: 943443 - DNA, 25 bp, Homo sapien
ctattttaccaatgtcgagagcaga

SEQ ID NO: 943444 - DNA, 25 bp, Homo sapien
caatcagctgtaagtactctataag

SEQ ID NO: 943445 - DNA, 25 bp, Homo sapien
tatttagaactactgagccacacct

SEQ ID NO: 943446 - DNA, 25 bp, Homo sapien
gagtctacaaattgagcctctgtgt

SEQ ID NO: 943447 - DNA, 25 bp, Homo sapien
tctttatagacaccaacatgctggg

SEQ ID NO: 943448 - DNA, 25 bp, Homo sapien
gcttcctaatgacagcctgcctcag

SEQ ID NO: 943449 - DNA, 25 bp, Homo sapien
cagagacttgttagcatgtagtaca

SEQ ID NO: 943450 - DNA, 25 bp, Homo sapien
acagatgtcattttgctttagcagg

SEQ ID NO: 943451 - DNA, 25 bp, Homo sapien
gattgacacaaatggtcaggcggcg

SEQ ID NO: 943452 - DNA, 25 bp, Homo sapien
gctgcggagagttgcgctctctacg

SEQ ID NO: 943453 - DNA, 25 bp, Homo sapien
agcgagttgagggattgacacaaat

SEQ ID NO: 943454 - DNA, 25 bp, Homo sapien
ctggaaaccggtccgagggcgcgcg

SEQ ID NO: 943455 - DNA, 25 bp, Homo sapien
tctagtgtctaaaacctggtatggg

SEQ ID NO: 943456 - DNA, 25 bp, Homo sapien
ggctcttaaggtacagaactccaca

SEQ ID NO: 943457 - DNA, 25 bp, Homo sapien
cagggtgagtgagataaccaatgcc

SEQ ID NO: 943458 - DNA, 25 bp, Homo sapien
gagctaaaactggtgtgcaaccgca

SEQ ID NO: 943459 - DNA, 25 bp, Homo sapien
attgttgttcgcatcagttaatcca

SEQ ID NO: 943460 - DNA, 25 bp, Homo sapien
catttccactgttgtacccaagagc

SEQ ID NO: 943461 - DNA, 25 bp, Homo sapien
tgttcgcatcagttaatccaggtaa

SEQ ID NO: 943462 - DNA, 25 bp, Homo sapien
ttgtacccaagagcttcaaagcacc

SEQ ID NO: 943463 - DNA, 25 bp, Homo sapien
ctcctccaggtatgtaggatgccat

SEQ ID NO: 943464 - DNA, 25 bp, Homo sapien
tatactggaaagatacacctcctcc

SEQ ID NO: 943465 - DNA, 25 bp, Homo sapien
ttggaaagtttcaagcagccccttc

SEQ ID NO: 943466 - DNA, 25 bp, Homo sapien
actgtgtaatatactggaaagatac

SEQ ID NO: 943467 - DNA, 25 bp, Homo sapien
tcatgttactgcgtcatcagtgcag

SEQ ID NO: 943468 - DNA, 25 bp, Homo sapien
catgttactgcgtcatcagtgcagg

SEQ ID NO: 943469 - DNA, 25 bp, Homo sapien
ctgcaggagtgccttcatagatgcc

SEQ ID NO: 943470 - DNA, 25 bp, Homo sapien
tgccttcatagatgccgcacagatg

SEQ ID NO: 943471 - DNA, 25 bp, Homo sapien
caatctgaaggctcccagcacagtt

SEQ ID NO: 943472 - DNA, 25 bp, Homo sapien
gtccacaatctgaaggctcccagca

SEQ ID NO: 943473 - DNA, 25 bp, Homo sapien
ttccactgtccacaatctgaaggct

SEQ ID NO: 943474 - DNA, 25 bp, Homo sapien
tgaaggctcccagcacagttgccct

SEQ ID NO: 943475 - DNA, 25 bp, Homo sapien
cctcttaattttgggctggactatg

SEQ ID NO: 943476 - DNA, 25 bp, Homo sapien
aagacatgtgaggaagacccagacc

SEQ ID NO: 943477 - DNA, 25 bp, Homo sapien
gaatgtaccctgaataactcaatgg

SEQ ID NO: 943478 - DNA, 25 bp, Homo sapien
tgtgaagcaaaacctgcccagctga

SEQ ID NO: 943479 - DNA, 25 bp, Homo sapien
catgagaattcctcaagcaaaggta

SEQ ID NO: 943480 - DNA, 25 bp, Homo sapien
tgagaattcctcaagcaaaggtaat

SEQ ID NO: 943481 - DNA, 25 bp, Homo sapien
agaattcctcaagcaaaggtaatga

SEQ ID NO: 943482 - DNA, 25 bp, Homo sapien
tcatgagaattcctcaagcaaaggt

SEQ ID NO: 943483 - DNA, 25 bp, Homo sapien
gattaaatcaagactacaatggcca

SEQ ID NO: 943484 - DNA, 25 bp, Homo sapien
gaagggttcaatatgtccagggccc

SEQ ID NO: 943485 - DNA, 25 bp, Homo sapien
taacatagcagactgaaaacgctct

SEQ ID NO: 943486 - DNA, 25 bp, Homo sapien
tgtgaggcttagcagcagaaaccag

SEQ ID NO: 943487 - DNA, 25 bp, Homo sapien
atgtaaggtctctatgtcctctcct

SEQ ID NO: 943488 - DNA, 25 bp, Homo sapien
ttatgtaaggtctctatgtcctctc

SEQ ID NO: 943489 - DNA, 25 bp, Homo sapien
tatgtaaggtctctatgtcctctcc

SEQ ID NO: 943490 - DNA, 25 bp, Homo sapien
cattcttttagatatgcatggtcac

SEQ ID NO: 943491 - DNA, 25 bp, Homo sapien
aatggaggcgctaaggcagctggcc

SEQ ID NO: 943492 - DNA, 25 bp, Homo sapien
cagtaaagttggcaacctcattggc

SEQ ID NO: 943493 - DNA, 25 bp, Homo sapien
ctttacaaggacaatgagagctcct

SEQ ID NO: 943494 - DNA, 25 bp, Homo sapien
tataaaagtcatttattccatgcct

SEQ ID NO: 943495 - DNA, 25 bp, Homo sapien
ggagctcagagacaataccacacca

SEQ ID NO: 943496 - DNA, 25 bp, Homo sapien
gttcctatcctggtaagagaccttg

SEQ ID NO: 943497 - DNA, 25 bp, Homo sapien
tcaaagtgtacttctccccactaaa

SEQ ID NO: 943498 - DNA, 25 bp, Homo sapien
ccagcggaagttcccagtattttca

SEQ ID NO: 943499 - DNA, 25 bp, Homo sapien
tcatacatgtaaattccagcggaag

SEQ ID NO: 943500 - DNA, 25 bp, Homo sapien
gcatttttgagggagctgcttaagc

SEQ ID NO: 943501 - DNA, 25 bp, Homo sapien
taagcaagccacaagtttccaacac

SEQ ID NO: 943502 - DNA, 25 bp, Homo sapien
caactgcatatgtagttactgtgta

SEQ ID NO: 943503 - DNA, 25 bp, Homo sapien
actgcatatgtagttactgtgtatt

SEQ ID NO: 943504 - DNA, 25 bp, Homo sapien
aaagtctgtagaatccaactgcata

SEQ ID NO: 943505 - DNA, 25 bp, Homo sapien
agtctgtagaatccaactgcatatg

SEQ ID NO: 943506 - DNA, 25 bp, Homo sapien
caaagttagcttgccgtctgtggtt

SEQ ID NO: 943507 - DNA, 25 bp, Homo sapien
gagaaagcttctggatcaaaacatt

SEQ ID NO: 943508 - DNA, 25 bp, Homo sapien
atctggaacaggcatttggggctca

SEQ ID NO: 943509 - DNA, 25 bp, Homo sapien
gcatttggggctcatctccaggtct

SEQ ID NO: 943510 - DNA, 25 bp, Homo sapien
gaattggtctctgatggctggatct

SEQ ID NO: 943511 - DNA, 25 bp, Homo sapien
ttctggaattggtctctgatggctg

SEQ ID NO: 943512 - DNA, 25 bp, Homo sapien
ttaattttctgcctggacaaagctg

SEQ ID NO: 943513 - DNA, 25 bp, Homo sapien
attttctgcctggacaaagctgctg

SEQ ID NO: 943514 - DNA, 25 bp, Homo sapien
tccaagtccacgtctctctttagga

SEQ ID NO: 943515 - DNA, 25 bp, Homo sapien
catggggtgtgcttagtgagaaggg

SEQ ID NO: 943516 - DNA, 25 bp, Homo sapien
gggtgtgcttagtgagaagggagcc

SEQ ID NO: 943517 - DNA, 25 bp, Homo sapien
caagtccacgtctctctttaggatt

SEQ ID NO: 943518 - DNA, 25 bp, Homo sapien
gaagagcggtgtggcacttgtttct

SEQ ID NO: 943519 - DNA, 25 bp, Homo sapien
gatcctgccaggcaagtccttgagg

SEQ ID NO: 943520 - DNA, 25 bp, Homo sapien
tcatgccttagaccccagatcctgc

SEQ ID NO: 943521 - DNA, 25 bp, Homo sapien
gccaggcaagtccttgaggctcaca

SEQ ID NO: 943522 - DNA, 25 bp, Homo sapien
tgctcctttgcccagtttcccccca

SEQ ID NO: 943523 - DNA, 25 bp, Homo sapien
tggccccaccctgaccattcctttc

SEQ ID NO: 943524 - DNA, 25 bp, Homo sapien
agcttctggccccaccctgaccatt

SEQ ID NO: 943525 - DNA, 25 bp, Homo sapien
ttctggccccaccctgaccattcct

SEQ ID NO: 943526 - DNA, 25 bp, Homo sapien
ggatgtctccaagtacactgggcag

SEQ ID NO: 943527 - DNA, 25 bp, Homo sapien
cctgatgctactgcacgtttttggg

SEQ ID NO: 943528 - DNA, 25 bp, Homo sapien
tttgggagcatgaggtcaagccagc

SEQ ID NO: 943529 - DNA, 25 bp, Homo sapien
cagagctcaagaactgtccctccaa

SEQ ID NO: 943530 - DNA, 25 bp, Homo sapien
aggcaatgaatgatgacgatgtgga

SEQ ID NO: 943531 - DNA, 25 bp, Homo sapien
ttaataaaggcaatgaatgatgacg

SEQ ID NO: 943532 - DNA, 25 bp, Homo sapien
taaaggcaatgaatgatgacgatgt

SEQ ID NO: 943533 - DNA, 25 bp, Homo sapien
aataaaggcaatgaatgatgacgat

SEQ ID NO: 943534 - DNA, 25 bp, Homo sapien
tgtacgagtattcagaccccaagcc

SEQ ID NO: 943535 - DNA, 25 bp, Homo sapien
tagtggcaggcccaagaactcattt

SEQ ID NO: 943536 - DNA, 25 bp, Homo sapien
cagacctgccagctgcaatgattgg

SEQ ID NO: 943537 - DNA, 25 bp, Homo sapien
tctaatcagaaagcgtagtggcagg

SEQ ID NO: 943538 - DNA, 25 bp, Homo sapien
caaggcttatgtagtccatgggttc

SEQ ID NO: 943539 - DNA, 25 bp, Homo sapien
tcccaggcccacagctaattgggta

SEQ ID NO: 943540 - DNA, 25 bp, Homo sapien
tgggttctggttttagctgtgagcc

SEQ ID NO: 943541 - DNA, 25 bp, Homo sapien
aattgggtaaatggatttggagcct

SEQ ID NO: 943542 - DNA, 25 bp, Homo sapien
tttctcctgtgtggatttctcacat

SEQ ID NO: 943543 - DNA, 25 bp, Homo sapien
cctgtgtggatttctcacataacac

SEQ ID NO: 943544 - DNA, 25 bp, Homo sapien
tctcctgtgtggatttctcacataa

SEQ ID NO: 943545 - DNA, 25 bp, Homo sapien
tcctgtgtggatttctcacataaca

SEQ ID NO: 943546 - DNA, 25 bp, Homo sapien
tgaggtaaacgagcacaccaaccag

SEQ ID NO: 943547 - DNA, 25 bp, Homo sapien
accaaccagagtgatgcagtgggaa

SEQ ID NO: 943548 - DNA, 25 bp, Homo sapien
ctacagtaatccagagttgaggtaa

SEQ ID NO: 943549 - DNA, 25 bp, Homo sapien
ccagagttgaggtaaacgagcacac

SEQ ID NO: 943550 - DNA, 25 bp, Homo sapien
aggacctggatctcaagcaccagcc

SEQ ID NO: 943551 - DNA, 25 bp, Homo sapien
agagacaggacctggatctcaagca

SEQ ID NO: 943552 - DNA, 25 bp, Homo sapien
agacaggacctggatctcaagcacc

SEQ ID NO: 943553 - DNA, 25 bp, Homo sapien
gacaggacctggatctcaagcacca

SEQ ID NO: 943554 - DNA, 25 bp, Homo sapien
taacatgttgagttgaggcaaatct

SEQ ID NO: 943555 - DNA, 25 bp, Homo sapien
tcttgctgatcttatgactttttct

SEQ ID NO: 943556 - DNA, 25 bp, Homo sapien
cttcttgctgatcttatgacttttt

SEQ ID NO: 943557 - DNA, 25 bp, Homo sapien
cttaacatgttgagttgaggcaaat

SEQ ID NO: 943558 - DNA, 25 bp, Homo sapien
tcccctgggcctgatcagggtttga

SEQ ID NO: 943559 - DNA, 25 bp, Homo sapien
tgcatttaagtgtcctacgggtgtg

SEQ ID NO: 943560 - DNA, 25 bp, Homo sapien
ggtgtgggcctataatgtgacaacc

SEQ ID NO: 943561 - DNA, 25 bp, Homo sapien
tagggtgaaatgacgaagatctctc

SEQ ID NO: 943562 - DNA, 25 bp, Homo sapien
tgcagaagcgtctgttcaccaaccc

SEQ ID NO: 943563 - DNA, 25 bp, Homo sapien
aaagctgctgagaataaggatgtag

SEQ ID NO: 943564 - DNA, 25 bp, Homo sapien
aataaggatgtagcaacctctagca

SEQ ID NO: 943565 - DNA, 25 bp, Homo sapien
aatgcttaatgggcccaattctctg

SEQ ID NO: 943566 - DNA, 25 bp, Homo sapien
tcagctgtaagtatttttaattggt

SEQ ID NO: 943567 - DNA, 25 bp, Homo sapien
cagctgtaagtatttttaattggtt

SEQ ID NO: 943568 - DNA, 25 bp, Homo sapien
tcctcatctacaaggatgctaacac

SEQ ID NO: 943569 - DNA, 25 bp, Homo sapien
tgtagtaactagagcatcctcatct

SEQ ID NO: 943570 - DNA, 25 bp, Homo sapien
taagccatgttccaagaactaatgc

SEQ ID NO: 943571 - DNA, 25 bp, Homo sapien
taagattgattgtgggcctttcccg

SEQ ID NO: 943572 - DNA, 25 bp, Homo sapien
gcttctggatattagggctttctga

SEQ ID NO: 943573 - DNA, 25 bp, Homo sapien
ttctgtcatggtgttgcttctggat

SEQ ID NO: 943574 - DNA, 25 bp, Homo sapien
aattctgtcatggtgttgcttctgg

SEQ ID NO: 943575 - DNA, 25 bp, Homo sapien
gttgcttctggatattagggctttc

SEQ ID NO: 943576 - DNA, 25 bp, Homo sapien
gcagtaatcgttcttctccgctggg

SEQ ID NO: 943577 - DNA, 25 bp, Homo sapien
gaggcagtaatcgttcttctccgct

SEQ ID NO: 943578 - DNA, 25 bp, Homo sapien
tcttgccaccgaggcagtaatcgtt

SEQ ID NO: 943579 - DNA, 25 bp, Homo sapien
caccgaggcagtaatcgttcttctc

SEQ ID NO: 943580 - DNA, 25 bp, Homo sapien
ctgtagtaaggatatgcaaaggctc

SEQ ID NO: 943581 - DNA, 25 bp, Homo sapien
actgctcagcattgacatagtgtgg

SEQ ID NO: 943582 - DNA, 25 bp, Homo sapien
aagtgctcgcacctgaatatggctg

SEQ ID NO: 943583 - DNA, 25 bp, Homo sapien
cacccaaaagagaggattcaaggct

SEQ ID NO: 943584 - DNA, 25 bp, Homo sapien
tgtggttacaaagtgtcaggatctg

SEQ ID NO: 943585 - DNA, 25 bp, Homo sapien
aagaaggatttttggagctcaataa

SEQ ID NO: 943586 - DNA, 25 bp, Homo sapien
tgcagaatcacagtgccaagaagga

SEQ ID NO: 943587 - DNA, 25 bp, Homo sapien
gccaccagatctagagctcctgaga

SEQ ID NO: 943588 - DNA, 25 bp, Homo sapien
ttggagctcaataaattcatctctc

SEQ ID NO: 943589 - DNA, 25 bp, Homo sapien
ccatatggcaatgcaacaggcttac

SEQ ID NO: 943590 - DNA, 25 bp, Homo sapien
ccctcccatatggcaatgcaacagg

SEQ ID NO: 943591 - DNA, 25 bp, Homo sapien
tcccatatggcaatgcaacaggctt

SEQ ID NO: 943592 - DNA, 25 bp, Homo sapien
ctcccatatggcaatgcaacaggct

SEQ ID NO: 943593 - DNA, 25 bp, Homo sapien
gttctgcccctttcttgactatagt

SEQ ID NO: 943594 - DNA, 25 bp, Homo sapien
gcctcggatgacagctgatctgggt

SEQ ID NO: 943595 - DNA, 25 bp, Homo sapien
tgatctgggtaacgtacatggcctg

SEQ ID NO: 943596 - DNA, 25 bp, Homo sapien
tatttactggccaagttctgcccct

SEQ ID NO: 943597 - DNA, 25 bp, Homo sapien
gatccctgttatttacaccagcaaa

SEQ ID NO: 943598 - DNA, 25 bp, Homo sapien
catagtactctaagaacagctgtcc

SEQ ID NO: 943599 - DNA, 25 bp, Homo sapien
ctgccagtccgtgatctgtaaaggt

SEQ ID NO: 943600 - DNA, 25 bp, Homo sapien
cactgtgttgggacttgcccgagcc

SEQ ID NO: 943601 - DNA, 25 bp, Homo sapien
tcagacaccccacatcacaccccac

SEQ ID NO: 943602 - DNA, 25 bp, Homo sapien
agacaccccacatcacaccccacaa

SEQ ID NO: 943603 - DNA, 25 bp, Homo sapien
acaccccacatcacaccccacaaca

SEQ ID NO: 943604 - DNA, 25 bp, Homo sapien
accccacatcacaccccacaacaca

SEQ ID NO: 943605 - DNA, 25 bp, Homo sapien
tcctggctatcataagacatcatgg

SEQ ID NO: 943606 - DNA, 25 bp, Homo sapien
aaatttgcttcacatttgccccaag

SEQ ID NO: 943607 - DNA, 25 bp, Homo sapien
gacatcatggaaaagcgtccctctg

SEQ ID NO: 943608 - DNA, 25 bp, Homo sapien
tctgaaccagaagcgcccactttgg

SEQ ID NO: 943609 - DNA, 25 bp, Homo sapien
aaattcgcagatttctttccacaac

SEQ ID NO: 943610 - DNA, 25 bp, Homo sapien
gtcaccacaggaggaccatgagcca

SEQ ID NO: 943611 - DNA, 25 bp, Homo sapien
caccaagcaagatgaaattcgcaga

SEQ ID NO: 943612 - DNA, 25 bp, Homo sapien
tggctgagagtactccaccaagcaa

SEQ ID NO: 943613 - DNA, 25 bp, Homo sapien
ggataagattgtccctcatactcca

SEQ ID NO: 943614 - DNA, 25 bp, Homo sapien
tgatcctatgggataagattgtccc

SEQ ID NO: 943615 - DNA, 25 bp, Homo sapien
tatgggataagattgtccctcatac

SEQ ID NO: 943616 - DNA, 25 bp, Homo sapien
ctcagtgatcctatgggataagatt

SEQ ID NO: 943617 - DNA, 25 bp, Homo sapien
tcattagggtcttgacgtgacaaca

SEQ ID NO: 943618 - DNA, 25 bp, Homo sapien
gcatcatgtgaacacggccggtcag

SEQ ID NO: 943619 - DNA, 25 bp, Homo sapien
gctgctgagttcacaaagagagcac

SEQ ID NO: 943620 - DNA, 25 bp, Homo sapien
gacttggaattgaaagatcctcaca

SEQ ID NO: 943621 - DNA, 25 bp, Homo sapien
cttgtaacagtatacaagtttagac

SEQ ID NO: 943622 - DNA, 25 bp, Homo sapien
caagtttagacatagacttggatat

SEQ ID NO: 943623 - DNA, 25 bp, Homo sapien
gaaatgctgatatgacattcattct

SEQ ID NO: 943624 - DNA, 25 bp, Homo sapien
tagacttggatatttccacagggtc

SEQ ID NO: 943625 - DNA, 25 bp, Homo sapien
ccagttcccgatgtatatagggcaa

SEQ ID NO: 943626 - DNA, 25 bp, Homo sapien
tcattttcatacagagagcccttga

SEQ ID NO: 943627 - DNA, 25 bp, Homo sapien
gctgtttggtaaattgtgccttcct

SEQ ID NO: 943628 - DNA, 25 bp, Homo sapien
gcaaacagtgctagtcataccttaa

SEQ ID NO: 943629 - DNA, 25 bp, Homo sapien
cagtatttggagcagccatttcagg

SEQ ID NO: 943630 - DNA, 25 bp, Homo sapien
agggctctcagcagtgcttgctttc

SEQ ID NO: 943631 - DNA, 25 bp, Homo sapien
caggatgattgatcctctgggaaaa

SEQ ID NO: 943632 - DNA, 25 bp, Homo sapien
tagctgcaaggattaaagtgttacg

SEQ ID NO: 943633 - DNA, 25 bp, Homo sapien
tggtatttagctaagggatgagcct

SEQ ID NO: 943634 - DNA, 25 bp, Homo sapien
tagctaagggatgagccttccccat

SEQ ID NO: 943635 - DNA, 25 bp, Homo sapien
tttagctaagggatgagccttcccc

SEQ ID NO: 943636 - DNA, 25 bp, Homo sapien
gtatttagctaagggatgagccttc

SEQ ID NO: 943637 - DNA, 25 bp, Homo sapien
aaatgatgaatgctccaagtgcttt

SEQ ID NO: 943638 - DNA, 25 bp, Homo sapien
caaatgatgaatgctccaagtgctt

SEQ ID NO: 943639 - DNA, 25 bp, Homo sapien
gcaaatgatgaatgctccaagtgct

SEQ ID NO: 943640 - DNA, 25 bp, Homo sapien
agcaaatgatgaatgctccaagtgc

SEQ ID NO: 943641 - DNA, 25 bp, Homo sapien
gtgagcagatggtaccaggaaaacc

SEQ ID NO: 943642 - DNA, 25 bp, Homo sapien
gattggtgaattcaagcctctgatc

SEQ ID NO: 943643 - DNA, 25 bp, Homo sapien
aaaccaagggtattgcatccagctg

SEQ ID NO: 943644 - DNA, 25 bp, Homo sapien
ccttcaggggatgatttagtgagca

SEQ ID NO: 943645 - DNA, 25 bp, Homo sapien
gaatttataatcagctctaccatgg

SEQ ID NO: 943646 - DNA, 25 bp, Homo sapien
gtcagactctaagtataacccaagg

SEQ ID NO: 943647 - DNA, 25 bp, Homo sapien
tctgacagagccgatggaagcaata

SEQ ID NO: 943648 - DNA, 25 bp, Homo sapien
tcagaatgggcctatccaaagctgc

SEQ ID NO: 943649 - DNA, 25 bp, Homo sapien
cttgaactctgcctgctttgcatta

SEQ ID NO: 943650 - DNA, 25 bp, Homo sapien
tctgcctgctttgcattattgcctc

SEQ ID NO: 943651 - DNA, 25 bp, Homo sapien
tggagtttcttcaggcagctggact

SEQ ID NO: 943652 - DNA, 25 bp, Homo sapien
cttccctggagtttcttcaggcagc

SEQ ID NO: 943653 - DNA, 25 bp, Homo sapien
actccatctgttgtgcattgccagg

SEQ ID NO: 943654 - DNA, 25 bp, Homo sapien
cacgacctttagctcacccttagga

SEQ ID NO: 943655 - DNA, 25 bp, Homo sapien
taagcctggtttagtacagctaggt

SEQ ID NO: 943656 - DNA, 25 bp, Homo sapien
ttagaccctgaacccaactattgag

SEQ ID NO: 943657 - DNA, 25 bp, Homo sapien
caatcaatgccaattgttaaattat

SEQ ID NO: 943658 - DNA, 25 bp, Homo sapien
cacgaaggtggtatagagatgaatg

SEQ ID NO: 943659 - DNA, 25 bp, Homo sapien
aggaataggcattggtcacgaaggt

SEQ ID NO: 943660 - DNA, 25 bp, Homo sapien
tgttctgtggaagcatgtatacaat

SEQ ID NO: 943661 - DNA, 25 bp, Homo sapien
tggaatgactgaagataagcagatg

SEQ ID NO: 943662 - DNA, 25 bp, Homo sapien
ctttgtgggaatcttgatggagaga

SEQ ID NO: 943663 - DNA, 25 bp, Homo sapien
atgactgaagataagcagatgctct

SEQ ID NO: 943664 - DNA, 25 bp, Homo sapien
caggctttgtgggaatcttgatgga

SEQ ID NO: 943665 - DNA, 25 bp, Homo sapien
tcttgtcagtatctgaggctgacct

SEQ ID NO: 943666 - DNA, 25 bp, Homo sapien
ctcctttcttcatagggtcatgctc

SEQ ID NO: 943667 - DNA, 25 bp, Homo sapien
ccatagtaagcagctgcagtccctt

SEQ ID NO: 943668 - DNA, 25 bp, Homo sapien
cagtcccttggtgtcttgtcagtat

SEQ ID NO: 943669 - DNA, 25 bp, Homo sapien
gtcacctgtgagaacagtcagcaga

SEQ ID NO: 943670 - DNA, 25 bp, Homo sapien
ggtcacctgtgagaacagtcagcag

SEQ ID NO: 943671 - DNA, 25 bp, Homo sapien
gaggtcacctgtgagaacagtcagc

SEQ ID NO: 943672 - DNA, 25 bp, Homo sapien
ctgaggtcacctgtgagaacagtca

SEQ ID NO: 943673 - DNA, 25 bp, Homo sapien
tccacataaactcttgctgtcctcc

SEQ ID NO: 943674 - DNA, 25 bp, Homo sapien
ggaacacccactgatgaggcattgc

SEQ ID NO: 943675 - DNA, 25 bp, Homo sapien
tgctgtcctcctgacatacatggaa

SEQ ID NO: 943676 - DNA, 25 bp, Homo sapien
gacatacatggaacacccactgatg

SEQ ID NO: 943677 - DNA, 25 bp, Homo sapien
tcccttttatagatgttctctgtcc

SEQ ID NO: 943678 - DNA, 25 bp, Homo sapien
attgtgattcaatggcaaacactgc

SEQ ID NO: 943679 - DNA, 25 bp, Homo sapien
gccttgatttcagagatgtcatccc

SEQ ID NO: 943680 - DNA, 25 bp, Homo sapien
ttccaccttgttgattgtgattcaa

SEQ ID NO: 943681 - DNA, 25 bp, Homo sapien
gggtcaattccctgccaatggcaag

SEQ ID NO: 943682 - DNA, 25 bp, Homo sapien
ttgccaaagatgcaaggattccagg

SEQ ID NO: 943683 - DNA, 25 bp, Homo sapien
tctggagcacaccactagaggaatt

SEQ ID NO: 943684 - DNA, 25 bp, Homo sapien
ctttgtctttgctgacaatggaagg

SEQ ID NO: 943685 - DNA, 25 bp, Homo sapien
tctgtttgcatcgtctctccagtga

SEQ ID NO: 943686 - DNA, 25 bp, Homo sapien
tgtctctgtttgcatcgtctctcca

SEQ ID NO: 943687 - DNA, 25 bp, Homo sapien
gtttgcatcgtctctccagtgaggg

SEQ ID NO: 943688 - DNA, 25 bp, Homo sapien
gcatgtctctgtttgcatcgtctct

SEQ ID NO: 943689 - DNA, 25 bp, Homo sapien
ttgagggctctaccgcagggggaaa

SEQ ID NO: 943690 - DNA, 25 bp, Homo sapien
cactttcagtagatattgagggctc

SEQ ID NO: 943691 - DNA, 25 bp, Homo sapien
ggcagaaaccacaggcctgagttct

SEQ ID NO: 943692 - DNA, 25 bp, Homo sapien
ccacaggcctgagttctacaacact

SEQ ID NO: 943693 - DNA, 25 bp, Homo sapien
gattactgttcacgtgttggcttca

SEQ ID NO: 943694 - DNA, 25 bp, Homo sapien
ggccagtttttaccagtgccctaga

SEQ ID NO: 943695 - DNA, 25 bp, Homo sapien
ttctatgcggaagatggtacacaac

SEQ ID NO: 943696 - DNA, 25 bp, Homo sapien
catgcaaaatcagagtaaccgaagt

SEQ ID NO: 943697 - DNA, 25 bp, Homo sapien
acagagcctgatgctctgcagaggt

SEQ ID NO: 943698 - DNA, 25 bp, Homo sapien
gcagggacagagcctgatgctctgc

SEQ ID NO: 943699 - DNA, 25 bp, Homo sapien
agagcctgatgctctgcagaggtgt

SEQ ID NO: 943700 - DNA, 25 bp, Homo sapien
agggacagagcctgatgctctgcag

SEQ ID NO: 943701 - DNA, 25 bp, Homo sapien
cagtcggtctgtatgcaatggtgtc

SEQ ID NO: 943702 - DNA, 25 bp, Homo sapien
ctgtatgcaatggtgtcaccaaaca

SEQ ID NO: 943703 - DNA, 25 bp, Homo sapien
gtatgcaatggtgtcaccaaacaga

SEQ ID NO: 943704 - DNA, 25 bp, Homo sapien
gtcggtctgtatgcaatggtgtcac

SEQ ID NO: 943705 - DNA, 25 bp, Homo sapien
taccccaatggaaacatctggatcc

SEQ ID NO: 943706 - DNA, 25 bp, Homo sapien
tgtccatggatacagctcatctaaa

SEQ ID NO: 943707 - DNA, 25 bp, Homo sapien
ctaaattagatgtgtctgaaaattc

SEQ ID NO: 943708 - DNA, 25 bp, Homo sapien
tctgccagacagtccatatcccttg

SEQ ID NO: 943709 - DNA, 25 bp, Homo sapien
caggtgggcaacccagagaagattc

SEQ ID NO: 943710 - DNA, 25 bp, Homo sapien
tcaggtgggcaacccagagaagatt

SEQ ID NO: 943711 - DNA, 25 bp, Homo sapien
ggatatggacactcagtaatcttca

SEQ ID NO: 943712 - DNA, 25 bp, Homo sapien
gctttcagggcgaactaccaaggcc

SEQ ID NO: 943713 - DNA, 25 bp, Homo sapien
accaaggcccaggaactagacggag

SEQ ID NO: 943714 - DNA, 25 bp, Homo sapien
gcaaagagctttcagggcgaactac

SEQ ID NO: 943715 - DNA, 25 bp, Homo sapien
tgtagtcaccatgcagttcaataga

SEQ ID NO: 943716 - DNA, 25 bp, Homo sapien
tatgtactccccaagcaaatagcac

SEQ ID NO: 943717 - DNA, 25 bp, Homo sapien
tgggaagattcaatcaggctaatta

SEQ ID NO: 943718 - DNA, 25 bp, Homo sapien
tccagaagtaactactgccttgaat

SEQ ID NO: 943719 - DNA, 25 bp, Homo sapien
tgtaaccatcctcttatcactttcc

SEQ ID NO: 943720 - DNA, 25 bp, Homo sapien
ctatgtaaccatcctcttatcactt

SEQ ID NO: 943721 - DNA, 25 bp, Homo sapien
tccatttccaagaaatgttcgattc

SEQ ID NO: 943722 - DNA, 25 bp, Homo sapien
gtaaccatcctcttatcactttcca

SEQ ID NO: 943723 - DNA, 25 bp, Homo sapien
gagttgccagctagaggcattctca

SEQ ID NO: 943724 - DNA, 25 bp, Homo sapien
caggaactcttccatctaagggaac

SEQ ID NO: 943725 - DNA, 25 bp, Homo sapien
ggcattctcaggtagctaggtgtag

SEQ ID NO: 943726 - DNA, 25 bp, Homo sapien
tgtcttttgtcctccaactggtatg

SEQ ID NO: 943727 - DNA, 25 bp, Homo sapien
taatatgccatggtgaattattgac

SEQ ID NO: 943728 - DNA, 25 bp, Homo sapien
gaacagctatatagattttcagggt

SEQ ID NO: 943729 - DNA, 25 bp, Homo sapien
aatagaaggtattgttctttatagc

SEQ ID NO: 943730 - DNA, 25 bp, Homo sapien
gtgaattattgactctaatgagaac

SEQ ID NO: 943731 - DNA, 25 bp, Homo sapien
ccaaagccacaagatggagatctgt

SEQ ID NO: 943732 - DNA, 25 bp, Homo sapien
agatggagatctgtcactgagacta

SEQ ID NO: 943733 - DNA, 25 bp, Homo sapien
tccaaagccacaagatggagatctg

SEQ ID NO: 943734 - DNA, 25 bp, Homo sapien
gagatctgtcactgagactactggt

SEQ ID NO: 943735 - DNA, 25 bp, Homo sapien
gagattcatttctgactcgcttgtg

SEQ ID NO: 943736 - DNA, 25 bp, Homo sapien
cctattaacgttccagcattttcct

SEQ ID NO: 943737 - DNA, 25 bp, Homo sapien
cgcttgtggtgacttgcagagccct

SEQ ID NO: 943738 - DNA, 25 bp, Homo sapien
ccagcattttcctctccgtgagatt

SEQ ID NO: 943739 - DNA, 25 bp, Homo sapien
gagggacagcatctattgctctgcc

SEQ ID NO: 943740 - DNA, 25 bp, Homo sapien
accggtgtggactcgatgaactgga

SEQ ID NO: 943741 - DNA, 25 bp, Homo sapien
gccttctttctaccaccggtgtgga

SEQ ID NO: 943742 - DNA, 25 bp, Homo sapien
aggctgccctgaccattgagtcgtg

SEQ ID NO: 943743 - DNA, 25 bp, Homo sapien
gttagagcaacttcatggtactcct

SEQ ID NO: 943744 - DNA, 25 bp, Homo sapien
ttctattcagatcaggttgcacagc

SEQ ID NO: 943745 - DNA, 25 bp, Homo sapien
tggtactccttaagtggatatctct

SEQ ID NO: 943746 - DNA, 25 bp, Homo sapien
gctttgtgaccacatttctattcag

SEQ ID NO: 943747 - DNA, 25 bp, Homo sapien
ggcaattcttatggtgtgtaactgt

SEQ ID NO: 943748 - DNA, 25 bp, Homo sapien
tgtgggcaattcttatggtgtgtaa

SEQ ID NO: 943749 - DNA, 25 bp, Homo sapien
tgggcaattcttatggtgtgtaact

SEQ ID NO: 943750 - DNA, 25 bp, Homo sapien
cttgtgggcaattcttatggtgtgt

SEQ ID NO: 943751 - DNA, 25 bp, Homo sapien
tgattcggatataccaaccattgct

SEQ ID NO: 943752 - DNA, 25 bp, Homo sapien
cagtacattgaatttgatcggccag

SEQ ID NO: 943753 - DNA, 25 bp, Homo sapien
gattaagggatattcagacaggtag

SEQ ID NO: 943754 - DNA, 25 bp, Homo sapien
gatcggccagtgaaaagttaatctc

SEQ ID NO: 943755 - DNA, 25 bp, Homo sapien
ctcccgtctttatccttcccctctg

SEQ ID NO: 943756 - DNA, 25 bp, Homo sapien
gacctatctcccgtctttatccttc

SEQ ID NO: 943757 - DNA, 25 bp, Homo sapien
tgacaagacctatctcccgtcttta

SEQ ID NO: 943758 - DNA, 25 bp, Homo sapien
acaagacctatctcccgtctttatc

SEQ ID NO: 943759 - DNA, 25 bp, Homo sapien
tcaggtggcattcttccgtttttcc

SEQ ID NO: 943760 - DNA, 25 bp, Homo sapien
gggcagactgaattacaagtggaaa

SEQ ID NO: 943761 - DNA, 25 bp, Homo sapien
gaattacaagtggaaagtatactgg

SEQ ID NO: 943762 - DNA, 25 bp, Homo sapien
aggttaggggcagactgaattacaa

SEQ ID NO: 943763 - DNA, 25 bp, Homo sapien
tactgtctgcatgtacttaacattc

SEQ ID NO: 943764 - DNA, 25 bp, Homo sapien
atacttgtaatgtcctgcagtctgc

SEQ ID NO: 943765 - DNA, 25 bp, Homo sapien
atatacttgtaatgtcctgcagtct

SEQ ID NO: 943766 - DNA, 25 bp, Homo sapien
tatacttgtaatgtcctgcagtctg

SEQ ID NO: 943767 - DNA, 25 bp, Homo sapien
agacttgtcagataccatgtggctt

SEQ ID NO: 943768 - DNA, 25 bp, Homo sapien
aagacttgtcagataccatgtggct

SEQ ID NO: 943769 - DNA, 25 bp, Homo sapien
caagacttgtcagataccatgtggc

SEQ ID NO: 943770 - DNA, 25 bp, Homo sapien
agcaggtcttcgcctgaagaaagga

SEQ ID NO: 943771 - DNA, 25 bp, Homo sapien
ggtcttcgcctgaagaaaggatgaa

SEQ ID NO: 943772 - DNA, 25 bp, Homo sapien
caggtcttcgcctgaagaaaggatg

SEQ ID NO: 943773 - DNA, 25 bp, Homo sapien
gcaggtcttcgcctgaagaaaggat

SEQ ID NO: 943774 - DNA, 25 bp, Homo sapien
ccacatagagatcagaatacttctc

SEQ ID NO: 943775 - DNA, 25 bp, Homo sapien
tacttctctccacacgatttctcct

SEQ ID NO: 943776 - DNA, 25 bp, Homo sapien
cacatagagatcagaatacttctct

SEQ ID NO: 943777 - DNA, 25 bp, Homo sapien
ttaaatgcctgtagtgtaagcatac

SEQ ID NO: 943778 - DNA, 25 bp, Homo sapien
ggttgtcctagagattgcaatatgc

SEQ ID NO: 943779 - DNA, 25 bp, Homo sapien
gctcctctactagctttatgtattt

SEQ ID NO: 943780 - DNA, 25 bp, Homo sapien
tcaatcttagaatagtttaactcct

SEQ ID NO: 943781 - DNA, 25 bp, Homo sapien
tacatgttataaaacctaagagaca

SEQ ID NO: 943782 - DNA, 25 bp, Homo sapien
gagctactgctaaagcgcatcctgc

SEQ ID NO: 943783 - DNA, 25 bp, Homo sapien
tagacccagtgttagagtcatgatc

SEQ ID NO: 943784 - DNA, 25 bp, Homo sapien
gtgtcatgactccagatagacccag

SEQ ID NO: 943785 - DNA, 25 bp, Homo sapien
tggaacccaatagcccctgcatctt

SEQ ID NO: 943786 - DNA, 25 bp, Homo sapien
gcaggtagcttctctccgcagctag

SEQ ID NO: 943787 - DNA, 25 bp, Homo sapien
gcagctagccgtcccattgtatcct

SEQ ID NO: 943788 - DNA, 25 bp, Homo sapien
cacacaggttgtttcgtcatctact

SEQ ID NO: 943789 - DNA, 25 bp, Homo sapien
tctactcagctctcagcaaaaggga

SEQ ID NO: 943790 - DNA, 25 bp, Homo sapien
taactttagtactcatattgtacct

SEQ ID NO: 943791 - DNA, 25 bp, Homo sapien
ccgcaacttgggtagctgcagctgt

SEQ ID NO: 943792 - DNA, 25 bp, Homo sapien
tagtactcatattgtaccttagatc

SEQ ID NO: 943793 - DNA, 25 bp, Homo sapien
ggtctgcagccgcaacttgggtagc

SEQ ID NO: 943794 - DNA, 25 bp, Homo sapien
gagcttggttttcatatcctataga

SEQ ID NO: 943795 - DNA, 25 bp, Homo sapien
tttctcatttgtgccacccacggaa

SEQ ID NO: 943796 - DNA, 25 bp, Homo sapien
aaagtctgagcttggttttcatatc

SEQ ID NO: 943797 - DNA, 25 bp, Homo sapien
ttgtgccacccacggaatttccttc

SEQ ID NO: 943798 - DNA, 25 bp, Homo sapien
agatggagccatccgattcagccac

SEQ ID NO: 943799 - DNA, 25 bp, Homo sapien
gatggagccatccgattcagccacc

SEQ ID NO: 943800 - DNA, 25 bp, Homo sapien
atggagccatccgattcagccacca

SEQ ID NO: 943801 - DNA, 25 bp, Homo sapien
catgggcatggcaccaactgctaaa

SEQ ID NO: 943802 - DNA, 25 bp, Homo sapien
tgttggtggcaatctgggaacttcc

SEQ ID NO: 943803 - DNA, 25 bp, Homo sapien
tggagatccagcactcagtatgggc

SEQ ID NO: 943804 - DNA, 25 bp, Homo sapien
gagtgcagcagagatcaacccctga

SEQ ID NO: 943805 - DNA, 25 bp, Homo sapien
tcagtgcagtccaaaaggatctccc

SEQ ID NO: 943806 - DNA, 25 bp, Homo sapien
taagcagcaacacctccttcagatg

SEQ ID NO: 943807 - DNA, 25 bp, Homo sapien
ctggcccaggttgagaagctagtgc

SEQ ID NO: 943808 - DNA, 25 bp, Homo sapien
gaagtggattacatgcttgctggcc

SEQ ID NO: 943809 - DNA, 25 bp, Homo sapien
ttgtcctctagccatcctgtggaga

SEQ ID NO: 943810 - DNA, 25 bp, Homo sapien
gtctcttgtcctctagccatcctgt

SEQ ID NO: 943811 - DNA, 25 bp, Homo sapien
tgcagcttgcatgggtctcttgtcc

SEQ ID NO: 943812 - DNA, 25 bp, Homo sapien
tctgcagcttgcatgggtctcttgt

SEQ ID NO: 943813 - DNA, 25 bp, Homo sapien
acatatggcttgtattcctggctca

SEQ ID NO: 943814 - DNA, 25 bp, Homo sapien
cacggactttgacgccctgcatgta

SEQ ID NO: 943815 - DNA, 25 bp, Homo sapien
tctattgggcgctgctgttgtcaag

SEQ ID NO: 943816 - DNA, 25 bp, Homo sapien
tcttctcacaagttactggactcag

SEQ ID NO: 943817 - DNA, 25 bp, Homo sapien
aatgccagtcttttccctataggtc

SEQ ID NO: 943818 - DNA, 25 bp, Homo sapien
ccaggaagttccattatgctacatg

SEQ ID NO: 943819 - DNA, 25 bp, Homo sapien
taattctctatggtgacctcctgag

SEQ ID NO: 943820 - DNA, 25 bp, Homo sapien
aaaatgggattctctggacaagctc

SEQ ID NO: 943821 - DNA, 25 bp, Homo sapien
ccaccatgtctagctggaagttaga

SEQ ID NO: 943822 - DNA, 25 bp, Homo sapien
accatgtctagctggaagttagact

SEQ ID NO: 943823 - DNA, 25 bp, Homo sapien
caccatgtctagctggaagttagac

SEQ ID NO: 943824 - DNA, 25 bp, Homo sapien
tcatggcctgacttaagtataggtc

SEQ ID NO: 943825 - DNA, 25 bp, Homo sapien
cattaagtgtaatgccaaggcaggg

SEQ ID NO: 943826 - DNA, 25 bp, Homo sapien
taaaagcaaagcacgggtcagctgc

SEQ ID NO: 943827 - DNA, 25 bp, Homo sapien
gagagcctagaaacacactcagaga

SEQ ID NO: 943828 - DNA, 25 bp, Homo sapien
agagctggtgaaagtggcactggga

SEQ ID NO: 943829 - DNA, 25 bp, Homo sapien
cagaatttgaaggtaccttgagagc

SEQ ID NO: 943830 - DNA, 25 bp, Homo sapien
gcatatcatcatactaaaattgttc

SEQ ID NO: 943831 - DNA, 25 bp, Homo sapien
taataataatacagtcctgctattc

SEQ ID NO: 943832 - DNA, 25 bp, Homo sapien
aaaacactcgcgtacaattcagaag

SEQ ID NO: 943833 - DNA, 25 bp, Homo sapien
tgtgatacactgtgccgcctcagga

SEQ ID NO: 943834 - DNA, 25 bp, Homo sapien
tatgtgcaagaaaccttagaggtgc

SEQ ID NO: 943835 - DNA, 25 bp, Homo sapien
tgcccaatgatcaagtgctgtactg

SEQ ID NO: 943836 - DNA, 25 bp, Homo sapien
tcttatacaggatcactctgacctc

SEQ ID NO: 943837 - DNA, 25 bp, Homo sapien
ctaacattagcaattccagaagggt

SEQ ID NO: 943838 - DNA, 25 bp, Homo sapien
caaaattcttttgcaatgtggcata

SEQ ID NO: 943839 - DNA, 25 bp, Homo sapien
gggactctaatggagaatctgtttc

SEQ ID NO: 943840 - DNA, 25 bp, Homo sapien
tctttttttactccaagatagaaga

SEQ ID NO: 943841 - DNA, 25 bp, Homo sapien
aactttttcaatttagcttcatatc

SEQ ID NO: 943842 - DNA, 25 bp, Homo sapien
tgtttaaagtactcaagttacagcc

SEQ ID NO: 943843 - DNA, 25 bp, Homo sapien
ttttactccaagatagaagagtgat

SEQ ID NO: 943844 - DNA, 25 bp, Homo sapien
tctttctgacaaaatctgcgggatc

SEQ ID NO: 943845 - DNA, 25 bp, Homo sapien
gaattcaatgttagctttcacccgc

SEQ ID NO: 943846 - DNA, 25 bp, Homo sapien
tacttatgcttgaatccagaacccg

SEQ ID NO: 943847 - DNA, 25 bp, Homo sapien
cacccgcttggtgctctgaattaag

SEQ ID NO: 943848 - DNA, 25 bp, Homo sapien
tacgggtcaatccaactgagtagag

SEQ ID NO: 943849 - DNA, 25 bp, Homo sapien
tccacagatcccaccgttttgaaag

SEQ ID NO: 943850 - DNA, 25 bp, Homo sapien
ggcattggtcaacaatcgacaaagg

SEQ ID NO: 943851 - DNA, 25 bp, Homo sapien
aaaccggctgcctgcaaaaattcaa

SEQ ID NO: 943852 - DNA, 25 bp, Homo sapien
caaaggctcactgtctgtattatga

SEQ ID NO: 943853 - DNA, 25 bp, Homo sapien
ggtcctgctcattggtaatcatcct

SEQ ID NO: 943854 - DNA, 25 bp, Homo sapien
tgtattatgacacttcacaccaaaa

SEQ ID NO: 943855 - DNA, 25 bp, Homo sapien
ggctgtcgtttccttgccatgtcaa

SEQ ID NO: 943856 - DNA, 25 bp, Homo sapien
agaaagttatttctcatatgccaga

SEQ ID NO: 943857 - DNA, 25 bp, Homo sapien
tctcatatgccagaggtttcctggt

SEQ ID NO: 943858 - DNA, 25 bp, Homo sapien
tatttctcatatgccagaggtttcc

SEQ ID NO: 943859 - DNA, 25 bp, Homo sapien
gaaccaaagagaaagttatttctca

SEQ ID NO: 943860 - DNA, 25 bp, Homo sapien
gctaccctttatatccatgctacca

SEQ ID NO: 943861 - DNA, 25 bp, Homo sapien
ttttcaaactctaaatctagccctg

SEQ ID NO: 943862 - DNA, 25 bp, Homo sapien
ccttgccctgcccatagatactaga

SEQ ID NO: 943863 - DNA, 25 bp, Homo sapien
catgccaggcgtggcttatttctta

SEQ ID NO: 943864 - DNA, 25 bp, Homo sapien
tgtgaagactactagacagtgcact

SEQ ID NO: 943865 - DNA, 25 bp, Homo sapien
tcacgtagactcaacttctttggca

SEQ ID NO: 943866 - DNA, 25 bp, Homo sapien
tattagcatcatggtaaacaggctg

SEQ ID NO: 943867 - DNA, 25 bp, Homo sapien
cagcctgtaacagccacctgatgtg

SEQ ID NO: 943868 - DNA, 25 bp, Homo sapien
gtttgtcctaaggaaaggctctgca

SEQ ID NO: 943869 - DNA, 25 bp, Homo sapien
tgtttgtcctaaggaaaggctctgc

SEQ ID NO: 943870 - DNA, 25 bp, Homo sapien
tttgtcctaaggaaaggctctgcat

SEQ ID NO: 943871 - DNA, 25 bp, Homo sapien
cttgtttgtcctaaggaaaggctct

SEQ ID NO: 943872 - DNA, 25 bp, Homo sapien
cagaaaggctggagaacagctatct

SEQ ID NO: 943873 - DNA, 25 bp, Homo sapien
cctccagaaaggctggagaacagct

SEQ ID NO: 943874 - DNA, 25 bp, Homo sapien
tccagaaaggctggagaacagctat

SEQ ID NO: 943875 - DNA, 25 bp, Homo sapien
ccctccagaaaggctggagaacagc

SEQ ID NO: 943876 - DNA, 25 bp, Homo sapien
ccaaagacaaatctgcaaagggctg

SEQ ID NO: 943877 - DNA, 25 bp, Homo sapien
aggtaattccacaccgaaggctctt

SEQ ID NO: 943878 - DNA, 25 bp, Homo sapien
tgaagcattagggttcgaacccagg

SEQ ID NO: 943879 - DNA, 25 bp, Homo sapien
caaaatctgaaacagcgccgagctc

SEQ ID NO: 943880 - DNA, 25 bp, Homo sapien
tccactgtagttcgcttttacttcc

SEQ ID NO: 943881 - DNA, 25 bp, Homo sapien
acccatccactgtagttcgctttta

SEQ ID NO: 943882 - DNA, 25 bp, Homo sapien
tgcacccatccactgtagttcgctt

SEQ ID NO: 943883 - DNA, 25 bp, Homo sapien
tgtagttcgcttttacttccgcctc

SEQ ID NO: 943884 - DNA, 25 bp, Homo sapien
tagcctagcaaatttgctgattcca

SEQ ID NO: 943885 - DNA, 25 bp, Homo sapien
actggatacttagcctagcaaattt

SEQ ID NO: 943886 - DNA, 25 bp, Homo sapien
gggtctgtggcaaagaactggatac

SEQ ID NO: 943887 - DNA, 25 bp, Homo sapien
ggtctgtggcaaagaactggatact

SEQ ID NO: 943888 - DNA, 25 bp, Homo sapien
tccttgcccctggtcctttgtttgc

SEQ ID NO: 943889 - DNA, 25 bp, Homo sapien
cacccttgcgcttccttgcccctgg

SEQ ID NO: 943890 - DNA, 25 bp, Homo sapien
acacccttgcgcttccttgcccctg

SEQ ID NO: 943891 - DNA, 25 bp, Homo sapien
cacacccttgcgcttccttgcccct

SEQ ID NO: 943892 - DNA, 25 bp, Homo sapien
gtcatgtaaacatcctcagaagaga

SEQ ID NO: 943893 - DNA, 25 bp, Homo sapien
gcctgtgttgtgagaatccatatga

SEQ ID NO: 943894 - DNA, 25 bp, Homo sapien
cattgaatgtcaatgggatggccac

SEQ ID NO: 943895 - DNA, 25 bp, Homo sapien
cagaccatatgttgtaggactccaa

SEQ ID NO: 943896 - DNA, 25 bp, Homo sapien
tacttcttcaataacactactactt

SEQ ID NO: 943897 - DNA, 25 bp, Homo sapien
atcccctacttcttcaataacacta

SEQ ID NO: 943898 - DNA, 25 bp, Homo sapien
cttcaataacactactacttccttg

SEQ ID NO: 943899 - DNA, 25 bp, Homo sapien
ccctacttcttcaataacactacta

SEQ ID NO: 943900 - DNA, 25 bp, Homo sapien
gaatgtagttcttcattacaatcac

SEQ ID NO: 943901 - DNA, 25 bp, Homo sapien
tccagggcattgtggatattcctaa

SEQ ID NO: 943902 - DNA, 25 bp, Homo sapien
gcttgagcaatattcgagtcttgat

SEQ ID NO: 943903 - DNA, 25 bp, Homo sapien
gagtagacagcatcctgcttgagca

SEQ ID NO: 943904 - DNA, 25 bp, Homo sapien
ttttgttggtcattactgtctggtt

SEQ ID NO: 943905 - DNA, 25 bp, Homo sapien
tttgttggtcattactgtctggttt

SEQ ID NO: 943906 - DNA, 25 bp, Homo sapien
tatatgatctaagtaattgaggcat

SEQ ID NO: 943907 - DNA, 25 bp, Homo sapien
tcttgaatgtttatatgatctaagt

SEQ ID NO: 943908 - DNA, 25 bp, Homo sapien
gaatatattacaaggaagcaagggt

SEQ ID NO: 943909 - DNA, 25 bp, Homo sapien
caaggattagtctggttaccgtatg

SEQ ID NO: 943910 - DNA, 25 bp, Homo sapien
tagactgactatgggttataagaga

SEQ ID NO: 943911 - DNA, 25 bp, Homo sapien
gatatcagttaggatcttggcaaaa

SEQ ID NO: 943912 - DNA, 25 bp, Homo sapien
actatgcagctacaaaaaagaacga

SEQ ID NO: 943913 - DNA, 25 bp, Homo sapien
ctacaaaaaagaacgagttcatgtc

SEQ ID NO: 943914 - DNA, 25 bp, Homo sapien
ctatgcagctacaaaaaagaacgag

SEQ ID NO: 943915 - DNA, 25 bp, Homo sapien
cagctacaaaaaagaacgagttcat

SEQ ID NO: 943916 - DNA, 25 bp, Homo sapien
tcaacacaagccatagtacctaggg

SEQ ID NO: 943917 - DNA, 25 bp, Homo sapien
ggataaacaaggctggcttcactga

SEQ ID NO: 943918 - DNA, 25 bp, Homo sapien
caacatggacacttgacacaactca

SEQ ID NO: 943919 - DNA, 25 bp, Homo sapien
ttatgccactctagctgacaggagg

SEQ ID NO: 943920 - DNA, 25 bp, Homo sapien
gagctgggagtatgagctgaactaa

SEQ ID NO: 943921 - DNA, 25 bp, Homo sapien
tgcagggtacttaaaggaagtccaa

SEQ ID NO: 943922 - DNA, 25 bp, Homo sapien
tctgtgctggtcattttagtaaagc

SEQ ID NO: 943923 - DNA, 25 bp, Homo sapien
gctgaactaagacgcacacaaatta

SEQ ID NO: 943924 - DNA, 25 bp, Homo sapien
tgcgatgggactataaggatgaacc

SEQ ID NO: 943925 - DNA, 25 bp, Homo sapien
caaaaattccaggtaggctcaggga

SEQ ID NO: 943926 - DNA, 25 bp, Homo sapien
agtctggcattgtccctaaccgagg

SEQ ID NO: 943927 - DNA, 25 bp, Homo sapien
cgttttaatatgtcagggcagtcac

SEQ ID NO: 943928 - DNA, 25 bp, Homo sapien
ttagccctttttccagtaagatata

SEQ ID NO: 943929 - DNA, 25 bp, Homo sapien
tgagacttgtaaggcaaggtgtgtt

SEQ ID NO: 943930 - DNA, 25 bp, Homo sapien
gtttgctgcaacattagctatacaa

SEQ ID NO: 943931 - DNA, 25 bp, Homo sapien
ccagtaagatataaatctatgagac

SEQ ID NO: 943932 - DNA, 25 bp, Homo sapien
tattctatatactcataaccacatc

SEQ ID NO: 943933 - DNA, 25 bp, Homo sapien
tatatactcataaccacatcctact

SEQ ID NO: 943934 - DNA, 25 bp, Homo sapien
attaaaaatttgtctcacacgcttg

SEQ ID NO: 943935 - DNA, 25 bp, Homo sapien
aatttgtctcacacgcttgcagtga

SEQ ID NO: 943936 - DNA, 25 bp, Homo sapien
taggaaataccctctttgtgtgttg

SEQ ID NO: 943937 - DNA, 25 bp, Homo sapien
agtctggttaaatagcttggtctct

SEQ ID NO: 943938 - DNA, 25 bp, Homo sapien
tacttactagtaatctggccaggaa

SEQ ID NO: 943939 - DNA, 25 bp, Homo sapien
gacatgtgactgttacaaggcatcc

SEQ ID NO: 943940 - DNA, 25 bp, Homo sapien
ggaaaccactgctttctgatatgaa

SEQ ID NO: 943941 - DNA, 25 bp, Homo sapien
gcacggaacccatagattgacattt

SEQ ID NO: 943942 - DNA, 25 bp, Homo sapien
ggcttctggaaacataggcttacat

SEQ ID NO: 943943 - DNA, 25 bp, Homo sapien
caatataattcagaggcacggaacc

SEQ ID NO: 943944 - DNA, 25 bp, Homo sapien
gcccggctgcaccgtctgggaggtg

SEQ ID NO: 943945 - DNA, 25 bp, Homo sapien
gcccagccgcccttcgtctgggagg

SEQ ID NO: 943946 - DNA, 25 bp, Homo sapien
tgaggaacgcctctgcccggctgca

SEQ ID NO: 943947 - DNA, 25 bp, Homo sapien
tctgcccagccgcccttcgtctggg

SEQ ID NO: 943948 - DNA, 25 bp, Homo sapien
ggttacaggctcaataagaagagag

SEQ ID NO: 943949 - DNA, 25 bp, Homo sapien
ttctggttgtaggtggttacaggct

SEQ ID NO: 943950 - DNA, 25 bp, Homo sapien
gtaggtggttacaggctcaataaga

SEQ ID NO: 943951 - DNA, 25 bp, Homo sapien
aataagaagagagcctagtactaaa

SEQ ID NO: 943952 - DNA, 25 bp, Homo sapien
catgccagttagaaaggtaatcatt

SEQ ID NO: 943953 - DNA, 25 bp, Homo sapien
ggtaatcattaaagaggaaacaaca

SEQ ID NO: 943954 - DNA, 25 bp, Homo sapien
ccagttagaaaggtaatcattaaag

SEQ ID NO: 943955 - DNA, 25 bp, Homo sapien
ttagaaaggtaatcattaaagagga

SEQ ID NO: 943956 - DNA, 25 bp, Homo sapien
tagctgaaaagctggccttggaaca

SEQ ID NO: 943957 - DNA, 25 bp, Homo sapien
tagaaaccgctaatgaagaaatgac

SEQ ID NO: 943958 - DNA, 25 bp, Homo sapien
taacgtggctatagatcatctgagc

SEQ ID NO: 943959 - DNA, 25 bp, Homo sapien
ccttggaacagcaagtagaaaccgc

SEQ ID NO: 943960 - DNA, 25 bp, Homo sapien
cacacagtcagggatttgacatagc

SEQ ID NO: 943961 - DNA, 25 bp, Homo sapien
tagagaaatatgctccagtggtaag

SEQ ID NO: 943962 - DNA, 25 bp, Homo sapien
gaaagtgaaagtgcaacagattcct

SEQ ID NO: 943963 - DNA, 25 bp, Homo sapien
caattcctgagctagcacattctga

SEQ ID NO: 943964 - DNA, 25 bp, Homo sapien
tgtccataatgaaggcatgcaggtg

SEQ ID NO: 943965 - DNA, 25 bp, Homo sapien
ttacccctccacaggaagaaggcat

SEQ ID NO: 943966 - DNA, 25 bp, Homo sapien
tggaaagtcataggccatctgctgg

SEQ ID NO: 943967 - DNA, 25 bp, Homo sapien
tggagaggaccattctattcagcag

SEQ ID NO: 943968 - DNA, 25 bp, Homo sapien
tacgtatcgctcaagatcagatctg

SEQ ID NO: 943969 - DNA, 25 bp, Homo sapien
tgggctggagttatatggagaacca

SEQ ID NO: 943970 - DNA, 25 bp, Homo sapien
ttatcattcttctggtgggctggag

SEQ ID NO: 943971 - DNA, 25 bp, Homo sapien
gagaaccaagacatactacgtatcg

SEQ ID NO: 943972 - DNA, 25 bp, Homo sapien
tcagcggactgatgacacaaaatgc

SEQ ID NO: 943973 - DNA, 25 bp, Homo sapien
gcaccagtgtgcaaggtactctgag

SEQ ID NO: 943974 - DNA, 25 bp, Homo sapien
tcctaagtagcgcatggcagaaagt

SEQ ID NO: 943975 - DNA, 25 bp, Homo sapien
tgagtctacagagcctaactggaga

SEQ ID NO: 943976 - DNA, 25 bp, Homo sapien
tcagtgccattgtttgaccaccacg

SEQ ID NO: 943977 - DNA, 25 bp, Homo sapien
caaggctattctgctctaagagaca

SEQ ID NO: 943978 - DNA, 25 bp, Homo sapien
cttatgatagtaggcctctgcaatc

SEQ ID NO: 943979 - DNA, 25 bp, Homo sapien
ttttccacattagaagctgggttcc

SEQ ID NO: 943980 - DNA, 25 bp, Homo sapien
tgtggtttccaagtatctcactggg

SEQ ID NO: 943981 - DNA, 25 bp, Homo sapien
tatttggcaagagcgatgagtactc

SEQ ID NO: 943982 - DNA, 25 bp, Homo sapien
tataccttgcaggactagtccaaga

SEQ ID NO: 943983 - DNA, 25 bp, Homo sapien
taaggacttgactttggacttccac

SEQ ID NO: 943984 - DNA, 25 bp, Homo sapien
ttttcaggggtgtgaatcatagttg

SEQ ID NO: 943985 - DNA, 25 bp, Homo sapien
aagcatagtggaccaaattgtctta

SEQ ID NO: 943986 - DNA, 25 bp, Homo sapien
catataaacgaagcatagtggacca

SEQ ID NO: 943987 - DNA, 25 bp, Homo sapien
ggtgtgaatcatagttgtataattc

SEQ ID NO: 943988 - DNA, 25 bp, Homo sapien
gctccaaatggcacataggcaaact

SEQ ID NO: 943989 - DNA, 25 bp, Homo sapien
aaatggcacataggcaaacttttcc

SEQ ID NO: 943990 - DNA, 25 bp, Homo sapien
tccaaatggcacataggcaaacttt

SEQ ID NO: 943991 - DNA, 25 bp, Homo sapien
cagctccaaatggcacataggcaaa

SEQ ID NO: 943992 - DNA, 25 bp, Homo sapien
gtctttgattgacagtgggagaaac

SEQ ID NO: 943993 - DNA, 25 bp, Homo sapien
ccaggcgttctacccatgagtcttt

SEQ ID NO: 943994 - DNA, 25 bp, Homo sapien
gattaaagtccaggcgttctaccca

SEQ ID NO: 943995 - DNA, 25 bp, Homo sapien
taaagtccaggcgttctacccatga

SEQ ID NO: 943996 - DNA, 25 bp, Homo sapien
tggaggaatggtataccctgccaca

SEQ ID NO: 943997 - DNA, 25 bp, Homo sapien
ggaggaatggtataccctgccacag

SEQ ID NO: 943998 - DNA, 25 bp, Homo sapien
ctggaggaatggtataccctgccac

SEQ ID NO: 943999 - DNA, 25 bp, Homo sapien
gaggaatggtataccctgccacagt

SEQ ID NO: 944000 - DNA, 25 bp, Homo sapien
gatcaagtaaatttagatccttgag

SEQ ID NO: 944001 - DNA, 25 bp, Homo sapien
ttatacagcgatcaagtaaatttag

SEQ ID NO: 944002 - DNA, 25 bp, Homo sapien
tttcttttatacagcgatcaagtaa

SEQ ID NO: 944003 - DNA, 25 bp, Homo sapien
tacagcgatcaagtaaatttagatc

SEQ ID NO: 944004 - DNA, 25 bp, Homo sapien
atcatcagtcaaaggacgcccatcc

SEQ ID NO: 944005 - DNA, 25 bp, Homo sapien
taagcatccctgctacttcatcatc

SEQ ID NO: 944006 - DNA, 25 bp, Homo sapien
agcatccctgctacttcatcatcag

SEQ ID NO: 944007 - DNA, 25 bp, Homo sapien
tcatcatcagtcaaaggacgcccat

SEQ ID NO: 944008 - DNA, 25 bp, Homo sapien
ttcttgagactgtctgcgtttctgg

SEQ ID NO: 944009 - DNA, 25 bp, Homo sapien
atgtagcatctagtaaagtttggag

SEQ ID NO: 944010 - DNA, 25 bp, Homo sapien
tttggagaatgtcatcaattttttc

SEQ ID NO: 944011 - DNA, 25 bp, Homo sapien
ttctggattgccttatagaaaatat

SEQ ID NO: 944012 - DNA, 25 bp, Homo sapien
catacagctgtgctaccttttcatt

SEQ ID NO: 944013 - DNA, 25 bp, Homo sapien
ctgaaactaggcaaaggcagccaac

SEQ ID NO: 944014 - DNA, 25 bp, Homo sapien
aaggcagccaacctggtaagagcca

SEQ ID NO: 944015 - DNA, 25 bp, Homo sapien
gcatggctgaaacctccatccaaat

SEQ ID NO: 944016 - DNA, 25 bp, Homo sapien
tttcaattatagaaacatgctgttt

SEQ ID NO: 944017 - DNA, 25 bp, Homo sapien
taaagtgggctatgttaaggccact

SEQ ID NO: 944018 - DNA, 25 bp, Homo sapien
catgctgtttaaagtgggctatgtt

SEQ ID NO: 944019 - DNA, 25 bp, Homo sapien
tctccccaactctcaaagtattcct

SEQ ID NO: 944020 - DNA, 25 bp, Homo sapien
ttaggcacatcgtatgcaactccct

SEQ ID NO: 944021 - DNA, 25 bp, Homo sapien
ggattaggcacatcgtatgcaactc

SEQ ID NO: 944022 - DNA, 25 bp, Homo sapien
gattaggcacatcgtatgcaactcc

SEQ ID NO: 944023 - DNA, 25 bp, Homo sapien
tggattaggcacatcgtatgcaact

SEQ ID NO: 944024 - DNA, 25 bp, Homo sapien
aggtaagtaaatgtcttgcctacca

SEQ ID NO: 944025 - DNA, 25 bp, Homo sapien
ggtaagtaaatgtcttgcctaccat

SEQ ID NO: 944026 - DNA, 25 bp, Homo sapien
gcatcactccccagaaggtaagtaa

SEQ ID NO: 944027 - DNA, 25 bp, Homo sapien
ctattaaaaagcagtgcagcagcat

SEQ ID NO: 944028 - DNA, 25 bp, Homo sapien
tggacttttcccaaatgctatggca

SEQ ID NO: 944029 - DNA, 25 bp, Homo sapien
gagaacagccaaattgcaaatacct

SEQ ID NO: 944030 - DNA, 25 bp, Homo sapien
gaaacccagtttcgtttcatgacca

SEQ ID NO: 944031 - DNA, 25 bp, Homo sapien
cctcaagagagtagctattgtagaa

SEQ ID NO: 944032 - DNA, 25 bp, Homo sapien
cacggtataagataaacgaccagat

SEQ ID NO: 944033 - DNA, 25 bp, Homo sapien
acattattagcatcagaggaaggcc

SEQ ID NO: 944034 - DNA, 25 bp, Homo sapien
tcccggccgagaaactgttacatta

SEQ ID NO: 944035 - DNA, 25 bp, Homo sapien
cactccagtcactaccattaccaca

SEQ ID NO: 944036 - DNA, 25 bp, Homo sapien
ttagcatcagaggaaggcccttacc

SEQ ID NO: 944037 - DNA, 25 bp, Homo sapien
acaaccacaaatgccgcaaccacga

SEQ ID NO: 944038 - DNA, 25 bp, Homo sapien
gtcgttcaaacccacagccgccaat

SEQ ID NO: 944039 - DNA, 25 bp, Homo sapien
ggtcagtacagaccgctacaaccac

SEQ ID NO: 944040 - DNA, 25 bp, Homo sapien
gggcaccactgctgcggtcagtaca

SEQ ID NO: 944041 - DNA, 25 bp, Homo sapien
gatcagatacacagccggggaggcc

SEQ ID NO: 944042 - DNA, 25 bp, Homo sapien
tggcgggtgctacagccagcgccac

SEQ ID NO: 944043 - DNA, 25 bp, Homo sapien
acacaaggcaatggcgggtgctaca

SEQ ID NO: 944044 - DNA, 25 bp, Homo sapien
cccaacacaaggcaatggcgggtgc

SEQ ID NO: 944045 - DNA, 25 bp, Homo sapien
ccggcggccagacggatcaggtaga

SEQ ID NO: 944046 - DNA, 25 bp, Homo sapien
gtggccggcggccagacggatcagg

SEQ ID NO: 944047 - DNA, 25 bp, Homo sapien
caggtggccggcggccagacggatc

SEQ ID NO: 944048 - DNA, 25 bp, Homo sapien
cggccagacggatcaggtagaccag

SEQ ID NO: 944049 - DNA, 25 bp, Homo sapien
tggacaagaggttgccgcctgtcac

SEQ ID NO: 944050 - DNA, 25 bp, Homo sapien
gcagcatggacaagaggttgccgcc

SEQ ID NO: 944051 - DNA, 25 bp, Homo sapien
ggcgcaggcgatcagcagcatggac

SEQ ID NO: 944052 - DNA, 25 bp, Homo sapien
agggtgaaggcgcaggcgatcagca

SEQ ID NO: 944053 - DNA, 25 bp, Homo sapien
cctggcccagcaccgacccacccgc

SEQ ID NO: 944054 - DNA, 25 bp, Homo sapien
catcgcctggcccagcaccgaccca

SEQ ID NO: 944055 - DNA, 25 bp, Homo sapien
cttctccatcgcctggcccagcacc

SEQ ID NO: 944056 - DNA, 25 bp, Homo sapien
cgcctggcccagcaccgacccaccc

SEQ ID NO: 944057 - DNA, 25 bp, Homo sapien
caatcgacggaacgagagaagctgg

SEQ ID NO: 944058 - DNA, 25 bp, Homo sapien
aagccgtggtcttcttgcgcgggat

SEQ ID NO: 944059 - DNA, 25 bp, Homo sapien
taaataacactctgtgaagccgtgg

SEQ ID NO: 944060 - DNA, 25 bp, Homo sapien
ttcttgcgcgggatagggcacctga

SEQ ID NO: 944061 - DNA, 25 bp, Homo sapien
ctgaagaggcgatcaatccctgaga

SEQ ID NO: 944062 - DNA, 25 bp, Homo sapien
tcaatccctgagaatcgcgggcgac

SEQ ID NO: 944063 - DNA, 25 bp, Homo sapien
ggcgatcaatccctgagaatcgcgg

SEQ ID NO: 944064 - DNA, 25 bp, Homo sapien
gacacggcgttgaaggcgctgagcg

SEQ ID NO: 944065 - DNA, 25 bp, Homo sapien
gggttgtgaaaagcgaggtcgtgaa

SEQ ID NO: 944066 - DNA, 25 bp, Homo sapien
gggactccgacagccccaaataagc

SEQ ID NO: 944067 - DNA, 25 bp, Homo sapien
gggccacgtcttggggactccgaca

SEQ ID NO: 944068 - DNA, 25 bp, Homo sapien
tgaaaagcgaggtcgtgaagacgcc

SEQ ID NO: 944069 - DNA, 25 bp, Homo sapien
aaaggctctcctgaactctgctcgg

SEQ ID NO: 944070 - DNA, 25 bp, Homo sapien
tgcggaacacctctacctagagagc

SEQ ID NO: 944071 - DNA, 25 bp, Homo sapien
cccgtctatgatttgtcccgcaaca

SEQ ID NO: 944072 - DNA, 25 bp, Homo sapien
tccttgaggcacagcgagttcttgc

SEQ ID NO: 944073 - DNA, 25 bp, Homo sapien
ggtaacttactgaaccaagcgcaca

SEQ ID NO: 944074 - DNA, 25 bp, Homo sapien
ggtccctcaagtctctacaacagta

SEQ ID NO: 944075 - DNA, 25 bp, Homo sapien
agtgctgggacaatgcaaattcagg

SEQ ID NO: 944076 - DNA, 25 bp, Homo sapien
tcaggaaaacggtcccatttggcac

SEQ ID NO: 944077 - DNA, 25 bp, Homo sapien
gaagtaccttgcctccagtggaaaa

SEQ ID NO: 944078 - DNA, 25 bp, Homo sapien
tgcccgggctccacaatattcttaa

SEQ ID NO: 944079 - DNA, 25 bp, Homo sapien
ttggcatccagctctcggcagacta

SEQ ID NO: 944080 - DNA, 25 bp, Homo sapien
taaaagactcataacctacccgcag

SEQ ID NO: 944081 - DNA, 25 bp, Homo sapien
ttcacccggtggatcccgcacccac

SEQ ID NO: 944082 - DNA, 25 bp, Homo sapien
tctgggcgccatggaaccgggggcg

SEQ ID NO: 944083 - DNA, 25 bp, Homo sapien
cgatgggtctgggcgccatggaacc

SEQ ID NO: 944084 - DNA, 25 bp, Homo sapien
ggatggtcgatgggtctgggcgcca

SEQ ID NO: 944085 - DNA, 25 bp, Homo sapien
ttcagtttttattattgatccactg

SEQ ID NO: 944086 - DNA, 25 bp, Homo sapien
tgcatcaaaagttttcagtttttat

SEQ ID NO: 944087 - DNA, 25 bp, Homo sapien
gttttcagtttttattattgatcca

SEQ ID NO: 944088 - DNA, 25 bp, Homo sapien
tcagtttttattattgatccactgg

SEQ ID NO: 944089 - DNA, 25 bp, Homo sapien
ttgcacgcgtaaaaagatttaaagc

SEQ ID NO: 944090 - DNA, 25 bp, Homo sapien
cacgcgtaaaaagatttaaagctgt

SEQ ID NO: 944091 - DNA, 25 bp, Homo sapien
ttaattgcacgcgtaaaaagattta

SEQ ID NO: 944092 - DNA, 25 bp, Homo sapien
ttagaatttaattgcacgcgtaaaa

SEQ ID NO: 944093 - DNA, 25 bp, Homo sapien
agttagtgctcgaattagttgatct

SEQ ID NO: 944094 - DNA, 25 bp, Homo sapien
tgggctctctcacttaatgaaacag

SEQ ID NO: 944095 - DNA, 25 bp, Homo sapien
tttgtgttttccatataacaagtgc

SEQ ID NO: 944096 - DNA, 25 bp, Homo sapien
ccatataacaagtgcttggtgggct

SEQ ID NO: 944097 - DNA, 25 bp, Homo sapien
gtgggctctctcacttaatgaaaca

SEQ ID NO: 944098 - DNA, 25 bp, Homo sapien
tgagtttgccaggtttagtttttga

SEQ ID NO: 944099 - DNA, 25 bp, Homo sapien
cagtgatgttgttggcaactatctt

SEQ ID NO: 944100 - DNA, 25 bp, Homo sapien
ctgagtttgccaggtttagtttttg

SEQ ID NO: 944101 - DNA, 25 bp, Homo sapien
caactatcttgaatatcttctctaa

SEQ ID NO: 944102 - DNA, 25 bp, Homo sapien
ttagaggaccaaaatctggattcat

SEQ ID NO: 944103 - DNA, 25 bp, Homo sapien
aattagaggaccaaaatctggattc

SEQ ID NO: 944104 - DNA, 25 bp, Homo sapien
ttaaattagaggaccaaaatctgga

SEQ ID NO: 944105 - DNA, 25 bp, Homo sapien
aggaccaaaatctggattcattctg

SEQ ID NO: 944106 - DNA, 25 bp, Homo sapien
ttcctttacagatttccactggagg

SEQ ID NO: 944107 - DNA, 25 bp, Homo sapien
caaagggttgtcatcaaaatttatc

SEQ ID NO: 944108 - DNA, 25 bp, Homo sapien
gccctctgtagatagcgtgcaatag

SEQ ID NO: 944109 - DNA, 25 bp, Homo sapien
tagatagcactaggtagagctgtca

SEQ ID NO: 944110 - DNA, 25 bp, Homo sapien
tactttaatcctgatcatagtggaa

SEQ ID NO: 944111 - DNA, 25 bp, Homo sapien
taccatggagtgtgatattagctat

SEQ ID NO: 944112 - DNA, 25 bp, Homo sapien
gctataggagttttgcagatgtatt

SEQ ID NO: 944113 - DNA, 25 bp, Homo sapien
cagttataacgtcaaaaagaagtgg

SEQ ID NO: 944114 - DNA, 25 bp, Homo sapien
ctctctgattgcattatttgagata

SEQ ID NO: 944115 - DNA, 25 bp, Homo sapien
ttgctgcagatcatttaaagatagc

SEQ ID NO: 944116 - DNA, 25 bp, Homo sapien
gttgagtcatattagatagctctcc

SEQ ID NO: 944117 - DNA, 25 bp, Homo sapien
tattgtatgcatgtaaactaaccaa

SEQ ID NO: 944118 - DNA, 25 bp, Homo sapien
gaatctaaagcacacagtcccaatg

SEQ ID NO: 944119 - DNA, 25 bp, Homo sapien
cagcataaaataagtacgtggagtg

SEQ ID NO: 944120 - DNA, 25 bp, Homo sapien
aaagtacacaattctctagggaaag

SEQ ID NO: 944121 - DNA, 25 bp, Homo sapien
gaagttggcacagttcaataggaaa

SEQ ID NO: 944122 - DNA, 25 bp, Homo sapien
aaagagttgtctgatattcccaagc

SEQ ID NO: 944123 - DNA, 25 bp, Homo sapien
ggcattccaacattgcacagcaaga

SEQ ID NO: 944124 - DNA, 25 bp, Homo sapien
ccaatttattgtcggccagttggag

SEQ ID NO: 944125 - DNA, 25 bp, Homo sapien
taggtttccagtaaggtctagtgaa

SEQ ID NO: 944126 - DNA, 25 bp, Homo sapien
gatttgattcttgtctaaatataga

SEQ ID NO: 944127 - DNA, 25 bp, Homo sapien
tgatttgattcttgtctaaatatag

SEQ ID NO: 944128 - DNA, 25 bp, Homo sapien
cccttgaaatgttttgatttgattc

SEQ ID NO: 944129 - DNA, 25 bp, Homo sapien
tgagtctgccccttgaaatgttttg

SEQ ID NO: 944130 - DNA, 25 bp, Homo sapien
gagataggaagttaaccaaagcctg

SEQ ID NO: 944131 - DNA, 25 bp, Homo sapien
tgcccctaggccaagttgtttctga

SEQ ID NO: 944132 - DNA, 25 bp, Homo sapien
caaagcctgatattctgcagtcctc

SEQ ID NO: 944133 - DNA, 25 bp, Homo sapien
cagagacttgtggactaacttctcc

SEQ ID NO: 944134 - DNA, 25 bp, Homo sapien
gccaatacaaaattgtaacttgatt

SEQ ID NO: 944135 - DNA, 25 bp, Homo sapien
ttatgccaatacaaaattgtaactt

SEQ ID NO: 944136 - DNA, 25 bp, Homo sapien
gctgatatgttttatgccaatacaa

SEQ ID NO: 944137 - DNA, 25 bp, Homo sapien
tgctgatatgttttatgccaataca

SEQ ID NO: 944138 - DNA, 25 bp, Homo sapien
ggagctttattgctacaatttctcc

SEQ ID NO: 944139 - DNA, 25 bp, Homo sapien
tggagctttattgctacaatttctc

SEQ ID NO: 944140 - DNA, 25 bp, Homo sapien
gagctttattgctacaatttctcct

SEQ ID NO: 944141 - DNA, 25 bp, Homo sapien
caatttgataggcaaaaatatatgc

SEQ ID NO: 944142 - DNA, 25 bp, Homo sapien
aatatatgcaaattatgttttaaca

SEQ ID NO: 944143 - DNA, 25 bp, Homo sapien
attgccaatttgataggcaaaaata

SEQ ID NO: 944144 - DNA, 25 bp, Homo sapien
atatatgcaaattatgttttaacaa

SEQ ID NO: 944145 - DNA, 25 bp, Homo sapien
taacgtgggacagcatgcaaagcca

SEQ ID NO: 944146 - DNA, 25 bp, Homo sapien
ttcagtacaggctaacgtaacgtgg

SEQ ID NO: 944147 - DNA, 25 bp, Homo sapien
cattcagggagttacagtacttttt

SEQ ID NO: 944148 - DNA, 25 bp, Homo sapien
cagggagttacagtactttttcatg

SEQ ID NO: 944149 - DNA, 25 bp, Homo sapien
gcgtttgtgagctggccatcggtca

SEQ ID NO: 944150 - DNA, 25 bp, Homo sapien
tcacactgggatactcgaggaggag

SEQ ID NO: 944151 - DNA, 25 bp, Homo sapien
cggttgagtccagcaattgcgagga

SEQ ID NO: 944152 - DNA, 25 bp, Homo sapien
ggccgcacccactgcgcgtttgtga

SEQ ID NO: 944153 - DNA, 25 bp, Homo sapien
cagccgggatggagaattactagtc

SEQ ID NO: 944154 - DNA, 25 bp, Homo sapien
aagcccctccgaatgttctgattga

SEQ ID NO: 944155 - DNA, 25 bp, Homo sapien
gtcggtccgggcatctaacgagcag

SEQ ID NO: 944156 - DNA, 25 bp, Homo sapien
tgagtctttggctttcgtaccggaa

SEQ ID NO: 944157 - DNA, 25 bp, Homo sapien
tggaggccaggaataatcaagcacg

SEQ ID NO: 944158 - DNA, 25 bp, Homo sapien
ggaagacccagcttgccacagttga

SEQ ID NO: 944159 - DNA, 25 bp, Homo sapien
gacacttggtgacgtggaagaccca

SEQ ID NO: 944160 - DNA, 25 bp, Homo sapien
ttcaaagaggtgacgattgtgcccg

SEQ ID NO: 944161 - DNA, 25 bp, Homo sapien
tttggagttttggaggcggatctgc

SEQ ID NO: 944162 - DNA, 25 bp, Homo sapien
gatttggagttttggaggcggatct

SEQ ID NO: 944163 - DNA, 25 bp, Homo sapien
atttggagttttggaggcggatctg

SEQ ID NO: 944164 - DNA, 25 bp, Homo sapien
aggatttggagttttggaggcggat

SEQ ID NO: 944165 - DNA, 25 bp, Homo sapien
gagtgagcgtagggccctaagatgt

SEQ ID NO: 944166 - DNA, 25 bp, Homo sapien
gacagttcccagggtgatgtgtccc

SEQ ID NO: 944167 - DNA, 25 bp, Homo sapien
acagttcccagggtgatgtgtccca

SEQ ID NO: 944168 - DNA, 25 bp, Homo sapien
gggagtgagcgtagggccctaagat

SEQ ID NO: 944169 - DNA, 25 bp, Homo sapien
tatatgctgctagtacggatcaagt

SEQ ID NO: 944170 - DNA, 25 bp, Homo sapien
gggagttcttgtcccaatgcttatt

SEQ ID NO: 944171 - DNA, 25 bp, Homo sapien
tccaaaggctgacgtccagaattgt

SEQ ID NO: 944172 - DNA, 25 bp, Homo sapien
tatggctagtcaactatcacagcac

SEQ ID NO: 944173 - DNA, 25 bp, Homo sapien
ctaacttctggaggtaggtgttttg

SEQ ID NO: 944174 - DNA, 25 bp, Homo sapien
tttcttgttcctctatctgtaatgt

SEQ ID NO: 944175 - DNA, 25 bp, Homo sapien
ctctatctgtaatgttagatggtta

SEQ ID NO: 944176 - DNA, 25 bp, Homo sapien
ctgtaatgttagatggttaatttga

SEQ ID NO: 944177 - DNA, 25 bp, Homo sapien
ggtatcttatcttgatccctacagc

SEQ ID NO: 944178 - DNA, 25 bp, Homo sapien
taactaattcctgctcacatgtcag

SEQ ID NO: 944179 - DNA, 25 bp, Homo sapien
cctactagatcaagggtccctgtta

SEQ ID NO: 944180 - DNA, 25 bp, Homo sapien
aaagcctctcctgatccctactaga

SEQ ID NO: 944181 - DNA, 25 bp, Homo sapien
gaggacttgaactagactggctgca

SEQ ID NO: 944182 - DNA, 25 bp, Homo sapien
tagcaacagtgtactaagggccttg

SEQ ID NO: 944183 - DNA, 25 bp, Homo sapien
ccccacatgactgaggagttaggaa

SEQ ID NO: 944184 - DNA, 25 bp, Homo sapien
gaacaccgtaacagtatttccaggc

SEQ ID NO: 944185 - DNA, 25 bp, Homo sapien
tatctgcaaactgtaggacaacttt

SEQ ID NO: 944186 - DNA, 25 bp, Homo sapien
gggtatttggtaacagttgaggaca

SEQ ID NO: 944187 - DNA, 25 bp, Homo sapien
tcatgtagaatcaaaagtacctagc

SEQ ID NO: 944188 - DNA, 25 bp, Homo sapien
ccatttagatggacctagaacaagt

SEQ ID NO: 944189 - DNA, 25 bp, Homo sapien
cccttgtttagaatgggtctctgaa

SEQ ID NO: 944190 - DNA, 25 bp, Homo sapien
tacttccagagagtgaatgcccttg

SEQ ID NO: 944191 - DNA, 25 bp, Homo sapien
gttcacaaggccatgctacttccag

SEQ ID NO: 944192 - DNA, 25 bp, Homo sapien
taatcgaaattccttattgggtctg

SEQ ID NO: 944193 - DNA, 25 bp, Homo sapien
gagactatatgccttgttgaaagta

SEQ ID NO: 944194 - DNA, 25 bp, Homo sapien
cacaccaaacataagtacagattct

SEQ ID NO: 944195 - DNA, 25 bp, Homo sapien
cacatgaagttataccaaagctaca

SEQ ID NO: 944196 - DNA, 25 bp, Homo sapien
caaatcatgttgacgttcagtatat

SEQ ID NO: 944197 - DNA, 25 bp, Homo sapien
tacaaaatgtggtggcttgagtaac

SEQ ID NO: 944198 - DNA, 25 bp, Homo sapien
gcattacaaaatgtggtggcttgag

SEQ ID NO: 944199 - DNA, 25 bp, Homo sapien
acaaaatgtggtggcttgagtaaca

SEQ ID NO: 944200 - DNA, 25 bp, Homo sapien
attacaaaatgtggtggcttgagta

SEQ ID NO: 944201 - DNA, 25 bp, Homo sapien
tcattaacagttttaccacgagacc

SEQ ID NO: 944202 - DNA, 25 bp, Homo sapien
agcttcattaacagttttaccacga

SEQ ID NO: 944203 - DNA, 25 bp, Homo sapien
ttaacagttttaccacgagaccagc

SEQ ID NO: 944204 - DNA, 25 bp, Homo sapien
gcttcattaacagttttaccacgag

SEQ ID NO: 944205 - DNA, 25 bp, Homo sapien
catacttaagactgatgagtaaagc

SEQ ID NO: 944206 - DNA, 25 bp, Homo sapien
taaaacaaccatacttaagactgat

SEQ ID NO: 944207 - DNA, 25 bp, Homo sapien
ttccatgctatggatctgaaaacaa

SEQ ID NO: 944208 - DNA, 25 bp, Homo sapien
tgtatgtactataaagctcatttta

SEQ ID NO: 944209 - DNA, 25 bp, Homo sapien
cacatagattggtagactctcagga

SEQ ID NO: 944210 - DNA, 25 bp, Homo sapien
tcaggataatgaaaggtactacctt

SEQ ID NO: 944211 - DNA, 25 bp, Homo sapien
tgtgagcaatatttgtcatataaga

SEQ ID NO: 944212 - DNA, 25 bp, Homo sapien
tttctgcaggttaaaagctatctct

SEQ ID NO: 944213 - DNA, 25 bp, Homo sapien
tagtttatgcaactgggttaacatg

SEQ ID NO: 944214 - DNA, 25 bp, Homo sapien
gtactttcagattgtagtttatgca

SEQ ID NO: 944215 - DNA, 25 bp, Homo sapien
tgcaactgggttaacatgtttactt

SEQ ID NO: 944216 - DNA, 25 bp, Homo sapien
ttacatagtactttcagattgtagt

SEQ ID NO: 944217 - DNA, 25 bp, Homo sapien
gcagacattcaatatatccttgtta

SEQ ID NO: 944218 - DNA, 25 bp, Homo sapien
tggaccagccaacaacagaactatt

SEQ ID NO: 944219 - DNA, 25 bp, Homo sapien
aaagcagtattaatgattcctacac

SEQ ID NO: 944220 - DNA, 25 bp, Homo sapien
gaagaactgtaattgattgtgatca

SEQ ID NO: 944221 - DNA, 25 bp, Homo sapien
gacccaaaagcaaggtgaccgcaag

SEQ ID NO: 944222 - DNA, 25 bp, Homo sapien
gatcggtttcgtggcagacaattct

SEQ ID NO: 944223 - DNA, 25 bp, Homo sapien
cccttgcatgtgcaattcaaaagag

SEQ ID NO: 944224 - DNA, 25 bp, Homo sapien
actcaccacaatgtaaaatcactgg

SEQ ID NO: 944225 - DNA, 25 bp, Homo sapien
tcttaattaacaaattacgaggcag

SEQ ID NO: 944226 - DNA, 25 bp, Homo sapien
gtgaaatttcctaatctaaatgcct

SEQ ID NO: 944227 - DNA, 25 bp, Homo sapien
attaacaaattacgaggcaggtgga

SEQ ID NO: 944228 - DNA, 25 bp, Homo sapien
ctgatttggtctattcttaacaaat

SEQ ID NO: 944229 - DNA, 25 bp, Homo sapien
tgagcactggtctacctggagtcac

SEQ ID NO: 944230 - DNA, 25 bp, Homo sapien
taagcatgccatctaagggcctgag

SEQ ID NO: 944231 - DNA, 25 bp, Homo sapien
gactgactcaactagcacgctgctg

SEQ ID NO: 944232 - DNA, 25 bp, Homo sapien
acatagtgccaggaggtcaacccac

SEQ ID NO: 944233 - DNA, 25 bp, Homo sapien
gagcctttgagaagtaattatgcca

SEQ ID NO: 944234 - DNA, 25 bp, Homo sapien
tcattagccaatcagtctatagggc

SEQ ID NO: 944235 - DNA, 25 bp, Homo sapien
attttaatagcaagagtaggcagca

SEQ ID NO: 944236 - DNA, 25 bp, Homo sapien
taaacaggcaacataatcacacagt

SEQ ID NO: 944237 - DNA, 25 bp, Homo sapien
taagaacatgcgctgaaggtgatgc

SEQ ID NO: 944238 - DNA, 25 bp, Homo sapien
tatattcactcctacatacacaggg

SEQ ID NO: 944239 - DNA, 25 bp, Homo sapien
tactgacaccttcacttgtactgag

SEQ ID NO: 944240 - DNA, 25 bp, Homo sapien
tacacagggatgactttatgattgc

SEQ ID NO: 944241 - DNA, 25 bp, Homo sapien
cttgtattcatgaagtatgcgattt

SEQ ID NO: 944242 - DNA, 25 bp, Homo sapien
tatgcgatttgtccagtgaggtgcc

SEQ ID NO: 944243 - DNA, 25 bp, Homo sapien
ttcagtttggtaacaggtacgatgg

SEQ ID NO: 944244 - DNA, 25 bp, Homo sapien
ggtaacaggtacgatggattttaga

SEQ ID NO: 944245 - DNA, 25 bp, Homo sapien
ttccatagactatttgcaaaagcag

SEQ ID NO: 944246 - DNA, 25 bp, Homo sapien
gaataagaatagctagtgggtcttc

SEQ ID NO: 944247 - DNA, 25 bp, Homo sapien
gacttgccaatgttatcagcttagc

SEQ ID NO: 944248 - DNA, 25 bp, Homo sapien
tcaggagctgtataaaagcccttca

SEQ ID NO: 944249 - DNA, 25 bp, Homo sapien
cagcctagagtacagtggatgatca

SEQ ID NO: 944250 - DNA, 25 bp, Homo sapien
catccagcctagagtacagtggatg

SEQ ID NO: 944251 - DNA, 25 bp, Homo sapien
agtggatgatcataactaactgtag

SEQ ID NO: 944252 - DNA, 25 bp, Homo sapien
cagtggatgatcataactaactgta

SEQ ID NO: 944253 - DNA, 25 bp, Homo sapien
gtgtgcagtcgtgcaatactggctc

SEQ ID NO: 944254 - DNA, 25 bp, Homo sapien
gatgaacctggtagccttgtcaaaa

SEQ ID NO: 944255 - DNA, 25 bp, Homo sapien
tattggaatactgttagggactgca

SEQ ID NO: 944256 - DNA, 25 bp, Homo sapien
tccttatgctagagtaccacaatgc

SEQ ID NO: 944257 - DNA, 25 bp, Homo sapien
gaacaccctttatcatgctgagaag

SEQ ID NO: 944258 - DNA, 25 bp, Homo sapien
tcttccttcaaaatgtatacaactg

SEQ ID NO: 944259 - DNA, 25 bp, Homo sapien
tacaactgatcagccctttattaag

SEQ ID NO: 944260 - DNA, 25 bp, Homo sapien
gactttcgcattcttccctttgcaa

SEQ ID NO: 944261 - DNA, 25 bp, Homo sapien
gagccacttatggactgttgagaat

SEQ ID NO: 944262 - DNA, 25 bp, Homo sapien
tctggccagtcacgaacatgttgca

SEQ ID NO: 944263 - DNA, 25 bp, Homo sapien
aaaagctgaggtgtttccctttgag

SEQ ID NO: 944264 - DNA, 25 bp, Homo sapien
tgaggatccagattagtcaattcag

SEQ ID NO: 944265 - DNA, 25 bp, Homo sapien
ttatgatatggtttgagttgaaggc

SEQ ID NO: 944266 - DNA, 25 bp, Homo sapien
cattatctgctgcactgtggtatta

SEQ ID NO: 944267 - DNA, 25 bp, Homo sapien
ttttctgaacaaatccatatagtga

SEQ ID NO: 944268 - DNA, 25 bp, Homo sapien
gagacgcattccttccattatctgc

SEQ ID NO: 944269 - DNA, 25 bp, Homo sapien
tgctgagtttcttgagagagacgca

SEQ ID NO: 944270 - DNA, 25 bp, Homo sapien
tcaattcaacagaacgatatgaccc

SEQ ID NO: 944271 - DNA, 25 bp, Homo sapien
cattctgtatattcgaactttttca

SEQ ID NO: 944272 - DNA, 25 bp, Homo sapien
tgacccatccattctgtatattcga

SEQ ID NO: 944273 - DNA, 25 bp, Homo sapien
caacagaacgatatgacccatccat

SEQ ID NO: 944274 - DNA, 25 bp, Homo sapien
aaatatttaatggagatcttccttg

SEQ ID NO: 944275 - DNA, 25 bp, Homo sapien
acaaatatttaatggagatcttcct

SEQ ID NO: 944276 - DNA, 25 bp, Homo sapien
tatttaatggagatcttccttgttg

SEQ ID NO: 944277 - DNA, 25 bp, Homo sapien
ttaatggagatcttccttgttggtc

SEQ ID NO: 944278 - DNA, 25 bp, Homo sapien
ggagaatctgtactatttcagcatg

SEQ ID NO: 944279 - DNA, 25 bp, Homo sapien
gaggagaactaagttgtccatttaa

SEQ ID NO: 944280 - DNA, 25 bp, Homo sapien
cagcaaaatgaagaggagaactaag

SEQ ID NO: 944281 - DNA, 25 bp, Homo sapien
taacaatatgcgagtggcctcaact

SEQ ID NO: 944282 - DNA, 25 bp, Homo sapien
atatctcaaagaaatctaagaattt

SEQ ID NO: 944283 - DNA, 25 bp, Homo sapien
ggtcctgcaaagacaagatcttgtt

SEQ ID NO: 944284 - DNA, 25 bp, Homo sapien
tctgttatcatggacctttagattg

SEQ ID NO: 944285 - DNA, 25 bp, Homo sapien
caaggaggccccagtatttgctgtt

SEQ ID NO: 944286 - DNA, 25 bp, Homo sapien
gatggtacttaaactaaacagctgc

SEQ ID NO: 944287 - DNA, 25 bp, Homo sapien
tgagaccaagtgaggtaaaatatct

SEQ ID NO: 944288 - DNA, 25 bp, Homo sapien
tcctcggtctttgtaccaattagtg

SEQ ID NO: 944289 - DNA, 25 bp, Homo sapien
aaactcttgggaatcctgtaactgt

SEQ ID NO: 944290 - DNA, 25 bp, Homo sapien
tcttcactgtatcacagtcaagagc

SEQ ID NO: 944291 - DNA, 25 bp, Homo sapien
gccgccagtattttctggtaatcta

SEQ ID NO: 944292 - DNA, 25 bp, Homo sapien
taaagtgaattaccttgctcaatct

SEQ ID NO: 944293 - DNA, 25 bp, Homo sapien
gaaactctagaaatgatctactgca

SEQ ID NO: 944294 - DNA, 25 bp, Homo sapien
ctaatacaactaagacactgtggac

SEQ ID NO: 944295 - DNA, 25 bp, Homo sapien
taagtatcctactatatgacctggc

SEQ ID NO: 944296 - DNA, 25 bp, Homo sapien
aaactcctaaggcaaacaggtagag

SEQ ID NO: 944297 - DNA, 25 bp, Homo sapien
gaccttacaattctgaacattggca

SEQ ID NO: 944298 - DNA, 25 bp, Homo sapien
taacagtacgttccccatagggcag

SEQ ID NO: 944299 - DNA, 25 bp, Homo sapien
cagcatgcataatgaatgggtgccc

SEQ ID NO: 944300 - DNA, 25 bp, Homo sapien
cactatctaactggttgactgaaaa

SEQ ID NO: 944301 - DNA, 25 bp, Homo sapien
tgaatctccttcacaggcgcttcgg

SEQ ID NO: 944302 - DNA, 25 bp, Homo sapien
ggaaaatcatctacccactgtcgtt

SEQ ID NO: 944303 - DNA, 25 bp, Homo sapien
caatgtggagtaaaaccgaaacagt

SEQ ID NO: 944304 - DNA, 25 bp, Homo sapien
atttggatttttgagtagtctggag

SEQ ID NO: 944305 - DNA, 25 bp, Homo sapien
gaccaaagtatggatttattaccac

SEQ ID NO: 944306 - DNA, 25 bp, Homo sapien
gatctgatccaaacaaagggttgta

SEQ ID NO: 944307 - DNA, 25 bp, Homo sapien
tatactgaagatctgatccaaacaa

SEQ ID NO: 944308 - DNA, 25 bp, Homo sapien
tctttatttctagtgcactatagcc

SEQ ID NO: 944309 - DNA, 25 bp, Homo sapien
tctctagggctaacattttactctt

SEQ ID NO: 944310 - DNA, 25 bp, Homo sapien
ctcaagaggagaaggtcggaataaa

SEQ ID NO: 944311 - DNA, 25 bp, Homo sapien
tgacctgattcagtagcatatgcag

SEQ ID NO: 944312 - DNA, 25 bp, Homo sapien
gacattagtttttatccgctcaaga

SEQ ID NO: 944313 - DNA, 25 bp, Homo sapien
tatgcaggatttatgacattagttt

SEQ ID NO: 944314 - DNA, 25 bp, Homo sapien
ttgtgcatgacgttcatctaaccac

SEQ ID NO: 944315 - DNA, 25 bp, Homo sapien
agtgagattgtgcatgacgttcatc

SEQ ID NO: 944316 - DNA, 25 bp, Homo sapien
gagattgtgcatgacgttcatctaa

SEQ ID NO: 944317 - DNA, 25 bp, Homo sapien
aaagtgagattgtgcatgacgttca

SEQ ID NO: 944318 - DNA, 25 bp, Homo sapien
cagggcagtgtttaccatttctgaa

SEQ ID NO: 944319 - DNA, 25 bp, Homo sapien
tcttaattcttaagccagggcagtg

SEQ ID NO: 944320 - DNA, 25 bp, Homo sapien
tagaagtagccattcgaaagtgaag

SEQ ID NO: 944321 - DNA, 25 bp, Homo sapien
gacattagccctgttcttacagaaa

SEQ ID NO: 944322 - DNA, 25 bp, Homo sapien
tatccaaggctattaacatccttgc

SEQ ID NO: 944323 - DNA, 25 bp, Homo sapien
ctggattcactacagactcgcataa

SEQ ID NO: 944324 - DNA, 25 bp, Homo sapien
taagcagtaaaaaattgggcatcct

SEQ ID NO: 944325 - DNA, 25 bp, Homo sapien
gctgtaagtgtagcaaaatgagtac

SEQ ID NO: 944326 - DNA, 25 bp, Homo sapien
actgatggaacaataaataatgatg

SEQ ID NO: 944327 - DNA, 25 bp, Homo sapien
ctttgacaactgatggaacaataaa

SEQ ID NO: 944328 - DNA, 25 bp, Homo sapien
gcacctcacgtcttataagtaggaa

SEQ ID NO: 944329 - DNA, 25 bp, Homo sapien
tcacgtcttataagtaggaactact

SEQ ID NO: 944330 - DNA, 25 bp, Homo sapien
actgcacctcacgtcttataagtag

SEQ ID NO: 944331 - DNA, 25 bp, Homo sapien
ccactgcacctcacgtcttataagt

SEQ ID NO: 944332 - DNA, 25 bp, Homo sapien
cagggttaatacttccacaattcag

SEQ ID NO: 944333 - DNA, 25 bp, Homo sapien
ggtcttctttctatgaccaaatagg

SEQ ID NO: 944334 - DNA, 25 bp, Homo sapien
agatacttacctagggaactacact

SEQ ID NO: 944335 - DNA, 25 bp, Homo sapien
tttacaggactttccctaatccatg

SEQ ID NO: 944336 - DNA, 25 bp, Homo sapien
tgccttgaagtttcgtttccaataa

SEQ ID NO: 944337 - DNA, 25 bp, Homo sapien
tccaatatgccttgtgttatttcac

SEQ ID NO: 944338 - DNA, 25 bp, Homo sapien
ggtttctactacgtaatccaatatg

SEQ ID NO: 944339 - DNA, 25 bp, Homo sapien
tcaatgggaacttcatgcaacaaaa

SEQ ID NO: 944340 - DNA, 25 bp, Homo sapien
atcttctatgttttctggatttccc

SEQ ID NO: 944341 - DNA, 25 bp, Homo sapien
tattctttggacgaataacagcaac

SEQ ID NO: 944342 - DNA, 25 bp, Homo sapien
tagctctgtattcccgagaattgag

SEQ ID NO: 944343 - DNA, 25 bp, Homo sapien
tattcccgagaattgagactggcag

SEQ ID NO: 944344 - DNA, 25 bp, Homo sapien
gcaaggataactttgatatcagaca

SEQ ID NO: 944345 - DNA, 25 bp, Homo sapien
ccaaaactatttggtcagttgataa

SEQ ID NO: 944346 - DNA, 25 bp, Homo sapien
aaagctttctgaaggtgatttaaga

SEQ ID NO: 944347 - DNA, 25 bp, Homo sapien
ttggatgagctaaagcgtagtatgt

SEQ ID NO: 944348 - DNA, 25 bp, Homo sapien
taaatcttaagtctccattgcgcaa

SEQ ID NO: 944349 - DNA, 25 bp, Homo sapien
tttcatggctacactaaagtgcatc

SEQ ID NO: 944350 - DNA, 25 bp, Homo sapien
tgtgttatgcatatactttgtccca

SEQ ID NO: 944351 - DNA, 25 bp, Homo sapien
cattgcgcaatttccaacaagtgac

SEQ ID NO: 944352 - DNA, 25 bp, Homo sapien
tcaccacagattaacaatgacttca

SEQ ID NO: 944353 - DNA, 25 bp, Homo sapien
caaattatgagacagacgcattgaa

SEQ ID NO: 944354 - DNA, 25 bp, Homo sapien
tgaaaaggatgaggcctttttcttc

SEQ ID NO: 944355 - DNA, 25 bp, Homo sapien
gcaacagaccttcctacatcatgtg

SEQ ID NO: 944356 - DNA, 25 bp, Homo sapien
caagaactattcgtacttgactact

SEQ ID NO: 944357 - DNA, 25 bp, Homo sapien
gaactattcgtacttgactacttaa

SEQ ID NO: 944358 - DNA, 25 bp, Homo sapien
tattcgtacttgactacttaaaatc

SEQ ID NO: 944359 - DNA, 25 bp, Homo sapien
ttcaagaactattcgtacttgacta

SEQ ID NO: 944360 - DNA, 25 bp, Homo sapien
gagtagcttgaactaaaatacaaga

SEQ ID NO: 944361 - DNA, 25 bp, Homo sapien
agtagcttgaactaaaatacaagaa

SEQ ID NO: 944362 - DNA, 25 bp, Homo sapien
gtagcttgaactaaaatacaagaaa

SEQ ID NO: 944363 - DNA, 25 bp, Homo sapien
tatgctccctaagtaataagatctt

SEQ ID NO: 944364 - DNA, 25 bp, Homo sapien
taggcacaaatgataatatgctccc

SEQ ID NO: 944365 - DNA, 25 bp, Homo sapien
tgaataagtacaggaaacgtggcat

SEQ ID NO: 944366 - DNA, 25 bp, Homo sapien
cagtggaagtggtccttaattaggg

SEQ ID NO: 944367 - DNA, 25 bp, Homo sapien
ttggaccaccgagatgaaagacttc

SEQ ID NO: 944368 - DNA, 25 bp, Homo sapien
gcacatatgcactccagaagggtaa

SEQ ID NO: 944369 - DNA, 25 bp, Homo sapien
taagaaaataatgaggctgagatcc

SEQ ID NO: 944370 - DNA, 25 bp, Homo sapien
catcctcttagtatgctagacagcg

SEQ ID NO: 944371 - DNA, 25 bp, Homo sapien
acatgtagaaaaagcgatgaaagcc

SEQ ID NO: 944372 - DNA, 25 bp, Homo sapien
ctaaaaacatgtagaaaaagcgatg

SEQ ID NO: 944373 - DNA, 25 bp, Homo sapien
aaacatgtagaaaaagcgatgaaag

SEQ ID NO: 944374 - DNA, 25 bp, Homo sapien
aaaaacatgtagaaaaagcgatgaa

SEQ ID NO: 944375 - DNA, 25 bp, Homo sapien
aaaaatacgtaatcactctgcctgg

SEQ ID NO: 944376 - DNA, 25 bp, Homo sapien
cacccaaaaagtggctatggtttct

SEQ ID NO: 944377 - DNA, 25 bp, Homo sapien
tgggaggttttttcctgcgccacca

SEQ ID NO: 944378 - DNA, 25 bp, Homo sapien
ggaaaaacgtaagcctctttgctca

SEQ ID NO: 944379 - DNA, 25 bp, Homo sapien
ggggcaactagatgtggagatggtt

SEQ ID NO: 944380 - DNA, 25 bp, Homo sapien
tggggcaactagatgtggagatggt

SEQ ID NO: 944381 - DNA, 25 bp, Homo sapien
ctggggcaactagatgtggagatgg

SEQ ID NO: 944382 - DNA, 25 bp, Homo sapien
gggcaactagatgtggagatggttc

SEQ ID NO: 944383 - DNA, 25 bp, Homo sapien
cgagaggtcccacccgtacgggctg

SEQ ID NO: 944384 - DNA, 25 bp, Homo sapien
tccgttttccctcgctggagtcgaa

SEQ ID NO: 944385 - DNA, 25 bp, Homo sapien
ttgctcctcctgtttcccgaaggac

SEQ ID NO: 944386 - DNA, 25 bp, Homo sapien
gagtgcctctctggccgctacattc

SEQ ID NO: 944387 - DNA, 25 bp, Homo sapien
caggcacagcagcccggcccagctt

SEQ ID NO: 944388 - DNA, 25 bp, Homo sapien
cagggaccgtcaccgctttctcatt

SEQ ID NO: 944389 - DNA, 25 bp, Homo sapien
tggcgagggggggcagggaccgtca

SEQ ID NO: 944390 - DNA, 25 bp, Homo sapien
gggcagggaccgtcaccgctttctc

SEQ ID NO: 944391 - DNA, 25 bp, Homo sapien
cagaaaaaccctcagtcgccaaaag

SEQ ID NO: 944392 - DNA, 25 bp, Homo sapien
aggtctctggagtcggagaccctcc

SEQ ID NO: 944393 - DNA, 25 bp, Homo sapien
tctctggagtcggagaccctcctgc

SEQ ID NO: 944394 - DNA, 25 bp, Homo sapien
cgccaaaagaaagccgtcttgaggg

SEQ ID NO: 944395 - DNA, 25 bp, Homo sapien
tgctctttactgtccttccctctcc

SEQ ID NO: 944396 - DNA, 25 bp, Homo sapien
ttactgtccttccctctcctcgcac

SEQ ID NO: 944397 - DNA, 25 bp, Homo sapien
ctttactgtccttccctctcctcgc

SEQ ID NO: 944398 - DNA, 25 bp, Homo sapien
ctgctctttactgtccttccctctc

SEQ ID NO: 944399 - DNA, 25 bp, Homo sapien
tcttcaaaggccttagctttccacc

SEQ ID NO: 944400 - DNA, 25 bp, Homo sapien
gtcttcaaaggccttagctttccac

SEQ ID NO: 944401 - DNA, 25 bp, Homo sapien
ccaggtcttcaaaggccttagcttt

SEQ ID NO: 944402 - DNA, 25 bp, Homo sapien
gtcccaggtcttcaaaggccttagc

SEQ ID NO: 944403 - DNA, 25 bp, Homo sapien
tatgaaatcgcttccgggttcacac

SEQ ID NO: 944404 - DNA, 25 bp, Homo sapien
ggctatgaaatcgcttccgggttca

SEQ ID NO: 944405 - DNA, 25 bp, Homo sapien
gctatgaaatcgcttccgggttcac

SEQ ID NO: 944406 - DNA, 25 bp, Homo sapien
ctatgaaatcgcttccgggttcaca

SEQ ID NO: 944407 - DNA, 25 bp, Homo sapien
cagcctcgcggttggcggtgaaaga

SEQ ID NO: 944408 - DNA, 25 bp, Homo sapien
cctttgcagcctcgcggttggcggt

SEQ ID NO: 944409 - DNA, 25 bp, Homo sapien
tcgcggttggcggtgaaagagcttc

SEQ ID NO: 944410 - DNA, 25 bp, Homo sapien
cggttggcggtgaaagagcttccgg

SEQ ID NO: 944411 - DNA, 25 bp, Homo sapien
tggcaggcgactaggagactagggt

SEQ ID NO: 944412 - DNA, 25 bp, Homo sapien
ctggtggcaggcgactaggagacta

SEQ ID NO: 944413 - DNA, 25 bp, Homo sapien
taggagactagggtggtggcggtgg

SEQ ID NO: 944414 - DNA, 25 bp, Homo sapien
cgactaggagactagggtggtggcg

SEQ ID NO: 944415 - DNA, 25 bp, Homo sapien
gggcgccttcggctcacgcagcgct

SEQ ID NO: 944416 - DNA, 25 bp, Homo sapien
ccagtctgagcctcgccgcgggcgc

SEQ ID NO: 944417 - DNA, 25 bp, Homo sapien
cgccagtgcgcaccctcggccacat

SEQ ID NO: 944418 - DNA, 25 bp, Homo sapien
cgcgggccgccagtgcgcaccctcg

SEQ ID NO: 944419 - DNA, 25 bp, Homo sapien
tcccagcgaatttgcaagcctccgg

SEQ ID NO: 944420 - DNA, 25 bp, Homo sapien
gcgaatttgcaagcctccgggtctc

SEQ ID NO: 944421 - DNA, 25 bp, Homo sapien
ttttctcccagcgaatttgcaagcc

SEQ ID NO: 944422 - DNA, 25 bp, Homo sapien
tccgggtctccgtgacgcgtcccat

SEQ ID NO: 944423 - DNA, 25 bp, Homo sapien
caatggcattgtggacatgaaataa

SEQ ID NO: 944424 - DNA, 25 bp, Homo sapien
cagagggaaaacctaagttacatgt

SEQ ID NO: 944425 - DNA, 25 bp, Homo sapien
aggagggaaagggattgtagcagag

SEQ ID NO: 944426 - DNA, 25 bp, Homo sapien
ttttacaattatggggaaagaggca

SEQ ID NO: 944427 - DNA, 25 bp, Homo sapien
cttttgttaaggaagactagggcat

SEQ ID NO: 944428 - DNA, 25 bp, Homo sapien
gcagcagtcaggagcagatagtcta

SEQ ID NO: 944429 - DNA, 25 bp, Homo sapien
taccaagattctgttagggtacagc

SEQ ID NO: 944430 - DNA, 25 bp, Homo sapien
gaaagttatcccagcatgcatttta

SEQ ID NO: 944431 - DNA, 25 bp, Homo sapien
tctggcattgatataagcccgttgt

SEQ ID NO: 944432 - DNA, 25 bp, Homo sapien
tccagatctggcattgatataagcc

SEQ ID NO: 944433 - DNA, 25 bp, Homo sapien
gcattgatataagcccgttgttttg

SEQ ID NO: 944434 - DNA, 25 bp, Homo sapien
atataagcccgttgttttgtaagca

SEQ ID NO: 944435 - DNA, 25 bp, Homo sapien
ttaaattaacagtatcagcagtgtc

SEQ ID NO: 944436 - DNA, 25 bp, Homo sapien
ggacatccagactttagtagttaaa

SEQ ID NO: 944437 - DNA, 25 bp, Homo sapien
cagtgtttcactggataatgaatga

SEQ ID NO: 944438 - DNA, 25 bp, Homo sapien
ctcagtgacttgctcatcctaattt

SEQ ID NO: 944439 - DNA, 25 bp, Homo sapien
catttactcctcctactacaagact

SEQ ID NO: 944440 - DNA, 25 bp, Homo sapien
gatcatatcaacaaacatgctttgg

SEQ ID NO: 944441 - DNA, 25 bp, Homo sapien
tctcttttggattgatcatatcaac

SEQ ID NO: 944442 - DNA, 25 bp, Homo sapien
taaggtgctgatgtgagatatgaat

SEQ ID NO: 944443 - DNA, 25 bp, Homo sapien
gtccaaacaacttccgtttgccata

SEQ ID NO: 944444 - DNA, 25 bp, Homo sapien
ttctgacttcaggtccaaacaactt

SEQ ID NO: 944445 - DNA, 25 bp, Homo sapien
ttccgtttgccatattgcctccttt

SEQ ID NO: 944446 - DNA, 25 bp, Homo sapien
caacttccgtttgccatattgcctc

SEQ ID NO: 944447 - DNA, 25 bp, Homo sapien
ggcctcaggatcttcgtagactaaa

SEQ ID NO: 944448 - DNA, 25 bp, Homo sapien
ggaaccgtggatacattggactgac

SEQ ID NO: 944449 - DNA, 25 bp, Homo sapien
ccaatccgtggaatgtggaaccgtg

SEQ ID NO: 944450 - DNA, 25 bp, Homo sapien
tggaaactgcagacatgcttcaggc

SEQ ID NO: 944451 - DNA, 25 bp, Homo sapien
tggtagctatttctccccatgaagt

SEQ ID NO: 944452 - DNA, 25 bp, Homo sapien
gtagctatttctccccatgaagtgc

SEQ ID NO: 944453 - DNA, 25 bp, Homo sapien
atatggtagctatttctccccatga

SEQ ID NO: 944454 - DNA, 25 bp, Homo sapien
tatggtagctatttctccccatgaa

SEQ ID NO: 944455 - DNA, 25 bp, Homo sapien
cagccagatgctacagattgagaag

SEQ ID NO: 944456 - DNA, 25 bp, Homo sapien
tctaccagaggttgaagaatgccaa

SEQ ID NO: 944457 - DNA, 25 bp, Homo sapien
cgtgccaggccacaatataccttat

SEQ ID NO: 944458 - DNA, 25 bp, Homo sapien
tcgctgcttagcacaggagtgaaaa

SEQ ID NO: 944459 - DNA, 25 bp, Homo sapien
tcttgagttgaaaatgcccagcaat

SEQ ID NO: 944460 - DNA, 25 bp, Homo sapien
tcttaagtagtaaatcttgtgtgcc

SEQ ID NO: 944461 - DNA, 25 bp, Homo sapien
caccataagaagtaattagtctagc

SEQ ID NO: 944462 - DNA, 25 bp, Homo sapien
gtgtgcctgctagttgcctaaaaga

SEQ ID NO: 944463 - DNA, 25 bp, Homo sapien
tgaaagatagtgaccagtaatggcc

SEQ ID NO: 944464 - DNA, 25 bp, Homo sapien
tctttgaattatgagactcaggatg

SEQ ID NO: 944465 - DNA, 25 bp, Homo sapien
taaagtgaacaataattggccaact

SEQ ID NO: 944466 - DNA, 25 bp, Homo sapien
tataatactaaagtagaaccccatc

SEQ ID NO: 944467 - DNA, 25 bp, Homo sapien
aatgcagtcctctatttagcctagg

SEQ ID NO: 944468 - DNA, 25 bp, Homo sapien
taacgaggcagccaacagaggagat

SEQ ID NO: 944469 - DNA, 25 bp, Homo sapien
gaagcagcatctcaagctggtgaca

SEQ ID NO: 944470 - DNA, 25 bp, Homo sapien
tagggttgaatacagagaagttccc

SEQ ID NO: 944471 - DNA, 25 bp, Homo sapien
tgcctaacctaaatggatagttgcc

SEQ ID NO: 944472 - DNA, 25 bp, Homo sapien
gatagttgccagttaaataagtgag

SEQ ID NO: 944473 - DNA, 25 bp, Homo sapien
aacatgttaccgtgcctttgcctaa

SEQ ID NO: 944474 - DNA, 25 bp, Homo sapien
tcagtaaaacatcctgcgcaacatg

SEQ ID NO: 944475 - DNA, 25 bp, Homo sapien
gttttaaccaagtcagaaagctgat

SEQ ID NO: 944476 - DNA, 25 bp, Homo sapien
ttttacactagccacttactgagca

SEQ ID NO: 944477 - DNA, 25 bp, Homo sapien
cagttaaggtgagaaagaatgctct

SEQ ID NO: 944478 - DNA, 25 bp, Homo sapien
gacagtgtacacaatgggttccggt

SEQ ID NO: 944479 - DNA, 25 bp, Homo sapien
gagaggtagttgtcagtgttcgggc

SEQ ID NO: 944480 - DNA, 25 bp, Homo sapien
agttgtcagtgttcgggcactgatc

SEQ ID NO: 944481 - DNA, 25 bp, Homo sapien
aggtagttgtcagtgttcgggcact

SEQ ID NO: 944482 - DNA, 25 bp, Homo sapien
gtagttgtcagtgttcgggcactga

SEQ ID NO: 944483 - DNA, 25 bp, Homo sapien
tgagctgcacatcgatcaccaagta

SEQ ID NO: 944484 - DNA, 25 bp, Homo sapien
gccagccttggttgcgtgactaccg

SEQ ID NO: 944485 - DNA, 25 bp, Homo sapien
tccagggaataatggcggtgccctc

SEQ ID NO: 944486 - DNA, 25 bp, Homo sapien
aagtggtgacttctgcatgcctgag

SEQ ID NO: 944487 - DNA, 25 bp, Homo sapien
ccagcaatttgtttggcattgcgta

SEQ ID NO: 944488 - DNA, 25 bp, Homo sapien
gcatgccccccaactctgatagtta

SEQ ID NO: 944489 - DNA, 25 bp, Homo sapien
gacctgtttgagtctacaatcgttt

SEQ ID NO: 944490 - DNA, 25 bp, Homo sapien
ccaactctgatagttaagcttcccc

SEQ ID NO: 944491 - DNA, 25 bp, Homo sapien
caaagagatggagcaatggacttac

SEQ ID NO: 944492 - DNA, 25 bp, Homo sapien
gttccgagtccagcatataatagat

SEQ ID NO: 944493 - DNA, 25 bp, Homo sapien
agtccagcatataatagatgcagcc

SEQ ID NO: 944494 - DNA, 25 bp, Homo sapien
cagttccgagtccagcatataatag

SEQ ID NO: 944495 - DNA, 25 bp, Homo sapien
tccgagtccagcatataatagatgc

SEQ ID NO: 944496 - DNA, 25 bp, Homo sapien
ccatagattaaaagcacgaagcaga

SEQ ID NO: 944497 - DNA, 25 bp, Homo sapien
cgaagcagaaaacgaatagtgctcc

SEQ ID NO: 944498 - DNA, 25 bp, Homo sapien
tagtgctccatttagccaggtaaaa

SEQ ID NO: 944499 - DNA, 25 bp, Homo sapien
tcgcacgaagattaaggtaattcca

SEQ ID NO: 944500 - DNA, 25 bp, Homo sapien
gctagcatcaccagagtggttgcag

SEQ ID NO: 944501 - DNA, 25 bp, Homo sapien
gctgttgcccatgacacttcctcgg

SEQ ID NO: 944502 - DNA, 25 bp, Homo sapien
cacttcctcggccttgtagaaacta

SEQ ID NO: 944503 - DNA, 25 bp, Homo sapien
tgtagagcaaacaaagtgagtgcta

SEQ ID NO: 944504 - DNA, 25 bp, Homo sapien
actgatacggctcctagctgcagac

SEQ ID NO: 944505 - DNA, 25 bp, Homo sapien
tacggctcctagctgcagaccttga

SEQ ID NO: 944506 - DNA, 25 bp, Homo sapien
tgatacggctcctagctgcagacct

SEQ ID NO: 944507 - DNA, 25 bp, Homo sapien
ggctcctagctgcagaccttgaaga

SEQ ID NO: 944508 - DNA, 25 bp, Homo sapien
gggccatccacactgtatcaatgtt

SEQ ID NO: 944509 - DNA, 25 bp, Homo sapien
tctgggtacagatgctttccaaggc

SEQ ID NO: 944510 - DNA, 25 bp, Homo sapien
tcatcaggacaggatatgcggtatc

SEQ ID NO: 944511 - DNA, 25 bp, Homo sapien
ctgggcttaggaggactgtcatcac

SEQ ID NO: 944512 - DNA, 25 bp, Homo sapien
caaggcatgaggacaacagagcagt

SEQ ID NO: 944513 - DNA, 25 bp, Homo sapien
cgcagggctgaaggcatgcccagct

SEQ ID NO: 944514 - DNA, 25 bp, Homo sapien
gtggccgcagggctgaaggcatgcc

SEQ ID NO: 944515 - DNA, 25 bp, Homo sapien
tctgccagaggcaaatccagagact

SEQ ID NO: 944516 - DNA, 25 bp, Homo sapien
ccatcctagtacgaggcctgcgaga

SEQ ID NO: 944517 - DNA, 25 bp, Homo sapien
aaaatgaaggcccatcctagtacga

SEQ ID NO: 944518 - DNA, 25 bp, Homo sapien
tgcgagagaaggctttgaactcccg

SEQ ID NO: 944519 - DNA, 25 bp, Homo sapien
ctggtccacgggcagagccaggaaa

SEQ ID NO: 944520 - DNA, 25 bp, Homo sapien
ctggccaaggatggccaggagcaga

SEQ ID NO: 944521 - DNA, 25 bp, Homo sapien
ggccaaggatggccaggagcagagg

SEQ ID NO: 944522 - DNA, 25 bp, Homo sapien
tggccaaggatggccaggagcagag

SEQ ID NO: 944523 - DNA, 25 bp, Homo sapien
tgagagctggcacgatcctggggtt

SEQ ID NO: 944524 - DNA, 25 bp, Homo sapien
gagagctggcacgatcctggggttt

SEQ ID NO: 944525 - DNA, 25 bp, Homo sapien
ctgctgagagctggcacgatcctgg

SEQ ID NO: 944526 - DNA, 25 bp, Homo sapien
gctgagagctggcacgatcctgggg

SEQ ID NO: 944527 - DNA, 25 bp, Homo sapien
aggaattggctgcaagaaagggagc

SEQ ID NO: 944528 - DNA, 25 bp, Homo sapien
ttggctgcaagaaagggagccaccc

SEQ ID NO: 944529 - DNA, 25 bp, Homo sapien
ggctgcaagaaagggagccaccctg

SEQ ID NO: 944530 - DNA, 25 bp, Homo sapien
aaaggaattggctgcaagaaaggga

SEQ ID NO: 944531 - DNA, 25 bp, Homo sapien
tctccataacgaaatgtgtttgcac

SEQ ID NO: 944532 - DNA, 25 bp, Homo sapien
tgtgaactagacgtggaatccactc

SEQ ID NO: 944533 - DNA, 25 bp, Homo sapien
gactttgtgaactagacgtggaatc

SEQ ID NO: 944534 - DNA, 25 bp, Homo sapien
gaatccactctccataacgaaatgt

SEQ ID NO: 944535 - DNA, 25 bp, Homo sapien
catcagaggcaagtgtgccagcagg

SEQ ID NO: 944536 - DNA, 25 bp, Homo sapien
taactgttcctgaagtgcagcccag

SEQ ID NO: 944537 - DNA, 25 bp, Homo sapien
aggaagtcgcccagatgcccagatc

SEQ ID NO: 944538 - DNA, 25 bp, Homo sapien
ggtcccagcaacagtcaggttaact

SEQ ID NO: 944539 - DNA, 25 bp, Homo sapien
gaatgtaatctgcaggcacctgacg

SEQ ID NO: 944540 - DNA, 25 bp, Homo sapien
gaatgaatttaataacgcgacaaaa

SEQ ID NO: 944541 - DNA, 25 bp, Homo sapien
tatatttcagaggtgaactagaaca

SEQ ID NO: 944542 - DNA, 25 bp, Homo sapien
gaacaggtgctgtcaaggtttactt

SEQ ID NO: 944543 - DNA, 25 bp, Homo sapien
gaaccagggatttttgagcacccaa

SEQ ID NO: 944544 - DNA, 25 bp, Homo sapien
cagggatttttgagcacccaaactt

SEQ ID NO: 944545 - DNA, 25 bp, Homo sapien
tgaaccagggatttttgagcaccca

SEQ ID NO: 944546 - DNA, 25 bp, Homo sapien
ccagggatttttgagcacccaaact

SEQ ID NO: 944547 - DNA, 25 bp, Homo sapien
ataaacacactggtaattaccacag

SEQ ID NO: 944548 - DNA, 25 bp, Homo sapien
caacaactgaactgacaggaggaag

SEQ ID NO: 944549 - DNA, 25 bp, Homo sapien
aggaagaacactttgataatgaaag

SEQ ID NO: 944550 - DNA, 25 bp, Homo sapien
taccacagtgagcaacaactgaact

SEQ ID NO: 944551 - DNA, 25 bp, Homo sapien
taaagttgcattgttatcacctggg

SEQ ID NO: 944552 - DNA, 25 bp, Homo sapien
gtgtgtagcgctcaccagattggga

SEQ ID NO: 944553 - DNA, 25 bp, Homo sapien
tcaactgctcggtgtcctttggccg

SEQ ID NO: 944554 - DNA, 25 bp, Homo sapien
tcagatgttgatgacctccagaacc

SEQ ID NO: 944555 - DNA, 25 bp, Homo sapien
aagcagtcttcacgcagagctgaga

SEQ ID NO: 944556 - DNA, 25 bp, Homo sapien
gctgagaggcactagaggatgctca

SEQ ID NO: 944557 - DNA, 25 bp, Homo sapien
cactagaggatgctcagataaccaa

SEQ ID NO: 944558 - DNA, 25 bp, Homo sapien
agtttggactcctccgaggaaagca

SEQ ID NO: 944559 - DNA, 25 bp, Homo sapien
tcctgagccagtggtcggtcatcca

SEQ ID NO: 944560 - DNA, 25 bp, Homo sapien
cagctcctgagccagtggtcggtca

SEQ ID NO: 944561 - DNA, 25 bp, Homo sapien
ggccctcaagtagctctcccagctc

SEQ ID NO: 944562 - DNA, 25 bp, Homo sapien
ctgagccagtggtcggtcatccaaa

SEQ ID NO: 944563 - DNA, 25 bp, Homo sapien
ttctagcagtttcacaagtctctct

SEQ ID NO: 944564 - DNA, 25 bp, Homo sapien
tagcagtttcacaagtctctctcat

SEQ ID NO: 944565 - DNA, 25 bp, Homo sapien
cttctagcagtttcacaagtctctc

SEQ ID NO: 944566 - DNA, 25 bp, Homo sapien
tctagcagtttcacaagtctctctc

SEQ ID NO: 944567 - DNA, 25 bp, Homo sapien
atgcaggcactgacaatcccctggg

SEQ ID NO: 944568 - DNA, 25 bp, Homo sapien
tgcaaattagactgcatgcaggcac

SEQ ID NO: 944569 - DNA, 25 bp, Homo sapien
tttaaatcatgcaaattagactgca

SEQ ID NO: 944570 - DNA, 25 bp, Homo sapien
tcccctggggaattcggcattcctc

SEQ ID NO: 944571 - DNA, 25 bp, Homo sapien
gctcctgttcttccggagataccag

SEQ ID NO: 944572 - DNA, 25 bp, Homo sapien
ggctcctgttcttccggagatacca

SEQ ID NO: 944573 - DNA, 25 bp, Homo sapien
tggctcctgttcttccggagatacc

SEQ ID NO: 944574 - DNA, 25 bp, Homo sapien
tgtggctcctgttcttccggagata

SEQ ID NO: 944575 - DNA, 25 bp, Homo sapien
gatgtccataaacggcatgctctga

SEQ ID NO: 944576 - DNA, 25 bp, Homo sapien
tattgcatgggatacactcacgcta

SEQ ID NO: 944577 - DNA, 25 bp, Homo sapien
tatccaacggctgaagaatgtgcgc

SEQ ID NO: 944578 - DNA, 25 bp, Homo sapien
aaagccctcctcgaaattggtgcca

SEQ ID NO: 944579 - DNA, 25 bp, Homo sapien
cacttccggtcaggcggtcgggctg

SEQ ID NO: 944580 - DNA, 25 bp, Homo sapien
ctaggcgacagcaagcggaactgca

SEQ ID NO: 944581 - DNA, 25 bp, Homo sapien
agctcccagtaattccgggtgctgc

SEQ ID NO: 944582 - DNA, 25 bp, Homo sapien
agcaagcggaactgcagcaagctcc

SEQ ID NO: 944583 - DNA, 25 bp, Homo sapien
ccagtgcctcgggccagggaatcct

SEQ ID NO: 944584 - DNA, 25 bp, Homo sapien
cccagtgcctcgggccagggaatcc

SEQ ID NO: 944585 - DNA, 25 bp, Homo sapien
aagaccacgtcgtcctccatgtgga

SEQ ID NO: 944586 - DNA, 25 bp, Homo sapien
gtatgcaagaccacgtcgtcctcca

SEQ ID NO: 944587 - DNA, 25 bp, Homo sapien
acgtcgtcctccatgtggaagaagg

SEQ ID NO: 944588 - DNA, 25 bp, Homo sapien
ctgcagcgtatgcaagaccacgtcg

SEQ ID NO: 944589 - DNA, 25 bp, Homo sapien
gctgtaatttccagagagaccatta

SEQ ID NO: 944590 - DNA, 25 bp, Homo sapien
tatagatgactgaccaagggcttaa

SEQ ID NO: 944591 - DNA, 25 bp, Homo sapien
actaacagcatctatcataaagcca

SEQ ID NO: 944592 - DNA, 25 bp, Homo sapien
tatatgtgtatcttcctaggcaaaa

SEQ ID NO: 944593 - DNA, 25 bp, Homo sapien
gcttggtgcaaggtactcattaaga

SEQ ID NO: 944594 - DNA, 25 bp, Homo sapien
taagattaggctgttaccctcccac

SEQ ID NO: 944595 - DNA, 25 bp, Homo sapien
taagagaacttgacagcaccactgg

SEQ ID NO: 944596 - DNA, 25 bp, Homo sapien
tcaccattttgtacagccaagcagg

SEQ ID NO: 944597 - DNA, 25 bp, Homo sapien
ctcgaagacttgggtttatatcccg

SEQ ID NO: 944598 - DNA, 25 bp, Homo sapien
cgttgccggctcgaagacttgggtt

SEQ ID NO: 944599 - DNA, 25 bp, Homo sapien
gctcgaagacttgggtttatatccc

SEQ ID NO: 944600 - DNA, 25 bp, Homo sapien
catcagatcgtgggctagcaggccg

SEQ ID NO: 944601 - DNA, 25 bp, Homo sapien
gaggtgccatgtacccgggtgagtt

SEQ ID NO: 944602 - DNA, 25 bp, Homo sapien
tagaggtgccatgtacccgggtgag

SEQ ID NO: 944603 - DNA, 25 bp, Homo sapien
gctagaggtgccatgtacccgggtg

SEQ ID NO: 944604 - DNA, 25 bp, Homo sapien
aggtgccatgtacccgggtgagttg

SEQ ID NO: 944605 - DNA, 25 bp, Homo sapien
ttcctcctggttgttgtttgaagag

SEQ ID NO: 944606 - DNA, 25 bp, Homo sapien
tccacctaccgaaggacaagtgtcc

SEQ ID NO: 944607 - DNA, 25 bp, Homo sapien
tacgccaaggaatccccttagttgc

SEQ ID NO: 944608 - DNA, 25 bp, Homo sapien
tgcaactaagttggctgtcttgggt

SEQ ID NO: 944609 - DNA, 25 bp, Homo sapien
ggaaagccacttctacttcagttgt

SEQ ID NO: 944610 - DNA, 25 bp, Homo sapien
aagaagaccgcaccagtgtccagga

SEQ ID NO: 944611 - DNA, 25 bp, Homo sapien
cctcaggagtgccaggcggcactgc

SEQ ID NO: 944612 - DNA, 25 bp, Homo sapien
aaagaataaagctccccagtcataa

SEQ ID NO: 944613 - DNA, 25 bp, Homo sapien
cttaggaccccctcagatagtgaca

SEQ ID NO: 944614 - DNA, 25 bp, Homo sapien
tattttcccccgatgtgctgtaaag

SEQ ID NO: 944615 - DNA, 25 bp, Homo sapien
ctttacagcacatcgggggaaaata

SEQ ID NO: 944616 - DNA, 25 bp, Homo sapien
ttcagctcaattagaacaaacccag

SEQ ID NO: 944617 - DNA, 25 bp, Homo sapien
gttcagctcaattagaacaaaccca

SEQ ID NO: 944618 - DNA, 25 bp, Homo sapien
gttggagacgcaattggcagggaga

SEQ ID NO: 944619 - DNA, 25 bp, Homo sapien
gaggttgggatttgagagatcagtt

SEQ ID NO: 944620 - DNA, 25 bp, Homo sapien
cagttggagacgcaattggcaggga

SEQ ID NO: 944621 - DNA, 25 bp, Homo sapien
tggagacgcaattggcagggagagc

SEQ ID NO: 944622 - DNA, 25 bp, Homo sapien
tcagtaggtaataggatattttatt

SEQ ID NO: 944623 - DNA, 25 bp, Homo sapien
agctgctaagcataaaatttgtcaa

SEQ ID NO: 944624 - DNA, 25 bp, Homo sapien
gatgaatatacaactgggaattcca

SEQ ID NO: 944625 - DNA, 25 bp, Homo sapien
gtcaaatgctacaaaggtgatgaat

SEQ ID NO: 944626 - DNA, 25 bp, Homo sapien
taatgtcccaatttatactacagta

SEQ ID NO: 944627 - DNA, 25 bp, Homo sapien
aataaattagttccaccatttggct

SEQ ID NO: 944628 - DNA, 25 bp, Homo sapien
atatggaatctgttataatgtccca

SEQ ID NO: 944629 - DNA, 25 bp, Homo sapien
tacagtattaatctcaatcctgatc

SEQ ID NO: 944630 - DNA, 25 bp, Homo sapien
ttctgtccaggtcgaaacattgttc

SEQ ID NO: 944631 - DNA, 25 bp, Homo sapien
tgtccaggtcgaaacattgttccac

SEQ ID NO: 944632 - DNA, 25 bp, Homo sapien
gttactttctgtccaggtcgaaaca

SEQ ID NO: 944633 - DNA, 25 bp, Homo sapien
ggtcgaaacattgttccactttgat

SEQ ID NO: 944634 - DNA, 25 bp, Homo sapien
tgtgagctccctgttatacaattcc

SEQ ID NO: 944635 - DNA, 25 bp, Homo sapien
taaagttgcactccaatagaaaacg

SEQ ID NO: 944636 - DNA, 25 bp, Homo sapien
tggatattgtggcatagctacacta

SEQ ID NO: 944637 - DNA, 25 bp, Homo sapien
ggtgcagtatatctggcaggcaatt

SEQ ID NO: 944638 - DNA, 25 bp, Homo sapien
cctggttggttcatggattcgtcct

SEQ ID NO: 944639 - DNA, 25 bp, Homo sapien
gttttgattggtcctggttggttca

SEQ ID NO: 944640 - DNA, 25 bp, Homo sapien
ttaaatgtgactgactaatagccag

SEQ ID NO: 944641 - DNA, 25 bp, Homo sapien
ggtcttgtgtgaccaagtgcagtca

SEQ ID NO: 944642 - DNA, 25 bp, Homo sapien
tttttcaagagaccatacgttctct

SEQ ID NO: 944643 - DNA, 25 bp, Homo sapien
aatatagctcgtttataagtcaaag

SEQ ID NO: 944644 - DNA, 25 bp, Homo sapien
gactgagttaatgtgttctggtccc

SEQ ID NO: 944645 - DNA, 25 bp, Homo sapien
aaaatgtggtagtccagttgttact

SEQ ID NO: 944646 - DNA, 25 bp, Homo sapien
tgaagctgtccttaacactggaggc

SEQ ID NO: 944647 - DNA, 25 bp, Homo sapien
ctggaggctgtgaaaacaactggtc

SEQ ID NO: 944648 - DNA, 25 bp, Homo sapien
tggctccggtatctgcctttgataa

SEQ ID NO: 944649 - DNA, 25 bp, Homo sapien
cctgagtcatggagcttggtgcaga

SEQ ID NO: 944650 - DNA, 25 bp, Homo sapien
taaattgtagtaatgaaagatggaa

SEQ ID NO: 944651 - DNA, 25 bp, Homo sapien
ggtaaattgtagtaatgaaagatgg

SEQ ID NO: 944652 - DNA, 25 bp, Homo sapien
aaattgtagtaatgaaagatggaag

SEQ ID NO: 944653 - DNA, 25 bp, Homo sapien
aattgtagtaatgaaagatggaagg

SEQ ID NO: 944654 - DNA, 25 bp, Homo sapien
cacttcattgtgcttactatgcagc

SEQ ID NO: 944655 - DNA, 25 bp, Homo sapien
tatagataaccaaacacatgtacag

SEQ ID NO: 944656 - DNA, 25 bp, Homo sapien
tgcagcaaaagtatcacagataaca

SEQ ID NO: 944657 - DNA, 25 bp, Homo sapien
gagatgttgaatgctagtagaacag

SEQ ID NO: 944658 - DNA, 25 bp, Homo sapien
tcagaactgtataatgatgactgca

SEQ ID NO: 944659 - DNA, 25 bp, Homo sapien
gtataatgatgactgcacaagatac

SEQ ID NO: 944660 - DNA, 25 bp, Homo sapien
actgtataatgatgactgcacaaga

SEQ ID NO: 944661 - DNA, 25 bp, Homo sapien
gaactgtataatgatgactgcacaa

SEQ ID NO: 944662 - DNA, 25 bp, Homo sapien
ccattgaagacagacttaggtcact

SEQ ID NO: 944663 - DNA, 25 bp, Homo sapien
gccactgctatggttaagaaagacc

SEQ ID NO: 944664 - DNA, 25 bp, Homo sapien
gattcatctggaaggatctcggaca

SEQ ID NO: 944665 - DNA, 25 bp, Homo sapien
gcttccaaagtagagccggtacata

SEQ ID NO: 944666 - DNA, 25 bp, Homo sapien
aagggagagggaagaacttcaatgg

SEQ ID NO: 944667 - DNA, 25 bp, Homo sapien
aaagggagagggaagaacttcaatg

SEQ ID NO: 944668 - DNA, 25 bp, Homo sapien
tctggtagtaaagggagagggaaga

SEQ ID NO: 944669 - DNA, 25 bp, Homo sapien
cagctccagtaaaggagtcagttac

SEQ ID NO: 944670 - DNA, 25 bp, Homo sapien
agtaaagctttcagatcagctccag

SEQ ID NO: 944671 - DNA, 25 bp, Homo sapien
tggagtccactcgagagcagcattc

SEQ ID NO: 944672 - DNA, 25 bp, Homo sapien
gcagcattccatgtaaggcctccaa

SEQ ID NO: 944673 - DNA, 25 bp, Homo sapien
tgatgctacatgctgaaggtcaaca

SEQ ID NO: 944674 - DNA, 25 bp, Homo sapien
gatgctacatgctgaaggtcaacat

SEQ ID NO: 944675 - DNA, 25 bp, Homo sapien
gctacatgctgaaggtcaacatcat

SEQ ID NO: 944676 - DNA, 25 bp, Homo sapien
tgctacatgctgaaggtcaacatca

SEQ ID NO: 944677 - DNA, 25 bp, Homo sapien
aacagcctactatttatcttccttg

SEQ ID NO: 944678 - DNA, 25 bp, Homo sapien
atatctaaaaagctttataagtaag

SEQ ID NO: 944679 - DNA, 25 bp, Homo sapien
taccaacagcctactatttatcttc

SEQ ID NO: 944680 - DNA, 25 bp, Homo sapien
gttgagaaatgtaccaacagcctac

SEQ ID NO: 944681 - DNA, 25 bp, Homo sapien
aaggctttgcatctaattcagaatc

SEQ ID NO: 944682 - DNA, 25 bp, Homo sapien
gttttcagacttgcactgggccaaa

SEQ ID NO: 944683 - DNA, 25 bp, Homo sapien
tatgctttgagcaaacagtggctaa

SEQ ID NO: 944684 - DNA, 25 bp, Homo sapien
ggtcttctaaggacaattgccatta

SEQ ID NO: 944685 - DNA, 25 bp, Homo sapien
aagtaaagctcacaaggaaagagtg

SEQ ID NO: 944686 - DNA, 25 bp, Homo sapien
tttggactctaaatatgaaattgtc

SEQ ID NO: 944687 - DNA, 25 bp, Homo sapien
caaggaaagagtgtagcatttgttg

SEQ ID NO: 944688 - DNA, 25 bp, Homo sapien
tgggttttggactctaaatatgaaa

SEQ ID NO: 944689 - DNA, 25 bp, Homo sapien
tcagggcgactagtagcagccaata

SEQ ID NO: 944690 - DNA, 25 bp, Homo sapien
tcaggaggaggacagtatacacatt

SEQ ID NO: 944691 - DNA, 25 bp, Homo sapien
aagcagggcagggtcaatcaagtca

SEQ ID NO: 944692 - DNA, 25 bp, Homo sapien
tatctagtcgaccaggcctaagcag

SEQ ID NO: 944693 - DNA, 25 bp, Homo sapien
tttttttaccaaaatctgatgacat

SEQ ID NO: 944694 - DNA, 25 bp, Homo sapien
ttttgttataacattctatttctgt

SEQ ID NO: 944695 - DNA, 25 bp, Homo sapien
ttaccaaaatctgatgacatgatga

SEQ ID NO: 944696 - DNA, 25 bp, Homo sapien
gacatgatgacattttgttataaca

SEQ ID NO: 944697 - DNA, 25 bp, Homo sapien
ttaactactcggtctgtaactcctg

SEQ ID NO: 944698 - DNA, 25 bp, Homo sapien
aagccttctactccatccaactgag

SEQ ID NO: 944699 - DNA, 25 bp, Homo sapien
ccaactgagtcagcaactggttaac

SEQ ID NO: 944700 - DNA, 25 bp, Homo sapien
tgtattatcatgaccccgccgagga

SEQ ID NO: 944701 - DNA, 25 bp, Homo sapien
gggccaaaaatagaccagaattatc

SEQ ID NO: 944702 - DNA, 25 bp, Homo sapien
gctacttgaatgtttggcaaaactc

SEQ ID NO: 944703 - DNA, 25 bp, Homo sapien
aattccatatctggcaacaggtgga

SEQ ID NO: 944704 - DNA, 25 bp, Homo sapien
gatgtctggcgaataacacctaata

SEQ ID NO: 944705 - DNA, 25 bp, Homo sapien
tcctggtaaactcggtggtgaatac

SEQ ID NO: 944706 - DNA, 25 bp, Homo sapien
gaaatagagaatccacgtcctctag

SEQ ID NO: 944707 - DNA, 25 bp, Homo sapien
taaattggccagatggactcttgac

SEQ ID NO: 944708 - DNA, 25 bp, Homo sapien
cactataacttctctttaacccagg

SEQ ID NO: 944709 - DNA, 25 bp, Homo sapien
taaaaatatcccgaacagcttgttc

SEQ ID NO: 944710 - DNA, 25 bp, Homo sapien
tatcccgaacagcttgttcacttgc

SEQ ID NO: 944711 - DNA, 25 bp, Homo sapien
cacttgctccaatgtatttgctgag

SEQ ID NO: 944712 - DNA, 25 bp, Homo sapien
tgttcacttgctccaatgtatttgc

SEQ ID NO: 944713 - DNA, 25 bp, Homo sapien
tgcaattaccccagctagtaaggtt

SEQ ID NO: 944714 - DNA, 25 bp, Homo sapien
tcctgttctttgtcgtatgggcaag

SEQ ID NO: 944715 - DNA, 25 bp, Homo sapien
tccaggcggaccatacaacagtatt

SEQ ID NO: 944716 - DNA, 25 bp, Homo sapien
cattctactctctcgtgcaattacc

SEQ ID NO: 944717 - DNA, 25 bp, Homo sapien
taactggatagtatccatgagtatc

SEQ ID NO: 944718 - DNA, 25 bp, Homo sapien
tgcctaacttcatgtaacccaccaa

SEQ ID NO: 944719 - DNA, 25 bp, Homo sapien
caaagacgcaggaagaaatccgcgg

SEQ ID NO: 944720 - DNA, 25 bp, Homo sapien
ggtttatgcaggttgacacttcgca

SEQ ID NO: 944721 - DNA, 25 bp, Homo sapien
tggaagtccaatgttgttaaaacta

SEQ ID NO: 944722 - DNA, 25 bp, Homo sapien
tttctctggtggatatactctgacg

SEQ ID NO: 944723 - DNA, 25 bp, Homo sapien
cgagagagtcgagaatgtatggctc

SEQ ID NO: 944724 - DNA, 25 bp, Homo sapien
ccacaagtactgtaaaatctctagc

SEQ ID NO: 944725 - DNA, 25 bp, Homo sapien
tatggctcgatccacaagtactgta

SEQ ID NO: 944726 - DNA, 25 bp, Homo sapien
gtttatatcacagtccaatttattt

SEQ ID NO: 944727 - DNA, 25 bp, Homo sapien
tacatgctgcaggtcaagatcggtg

SEQ ID NO: 944728 - DNA, 25 bp, Homo sapien
gatcggtgaacttgtttatatcaca

SEQ ID NO: 944729 - DNA, 25 bp, Homo sapien
gcaggtcaagatcggtgaacttgtt

SEQ ID NO: 944730 - DNA, 25 bp, Homo sapien
ggctgaatgtgttggacgcactgaa

SEQ ID NO: 944731 - DNA, 25 bp, Homo sapien
tgctgagactgacttgtggcaatca

SEQ ID NO: 944732 - DNA, 25 bp, Homo sapien
aacttcccatggagataaactcttt

SEQ ID NO: 944733 - DNA, 25 bp, Homo sapien
tgaaatatgtgaactccttgagcag

SEQ ID NO: 944734 - DNA, 25 bp, Homo sapien
ctggaattaagcaatatagtgcaaa

SEQ ID NO: 944735 - DNA, 25 bp, Homo sapien
ggaattaagcaatatagtgcaaaag

SEQ ID NO: 944736 - DNA, 25 bp, Homo sapien
tggaattaagcaatatagtgcaaaa

SEQ ID NO: 944737 - DNA, 25 bp, Homo sapien
cagtccagcaatgaggtcaaggtca

SEQ ID NO: 944738 - DNA, 25 bp, Homo sapien
agccacctctagggttttttgtatg

SEQ ID NO: 944739 - DNA, 25 bp, Homo sapien
gctctgcaccgcatcaggactgtgc

SEQ ID NO: 944740 - DNA, 25 bp, Homo sapien
actgtgctcatgttccgggacagca

SEQ ID NO: 944741 - DNA, 25 bp, Homo sapien
tcatttatacccagtttcatcccat

SEQ ID NO: 944742 - DNA, 25 bp, Homo sapien
ttcatttatacccagtttcatccca

SEQ ID NO: 944743 - DNA, 25 bp, Homo sapien
ttatacccagtttcatcccattgag

SEQ ID NO: 944744 - DNA, 25 bp, Homo sapien
atttatacccagtttcatcccattg

SEQ ID NO: 944745 - DNA, 25 bp, Homo sapien
tggctaaagttgattttccacttcc

SEQ ID NO: 944746 - DNA, 25 bp, Homo sapien
cagtcaactctctccacatgggcat

SEQ ID NO: 944747 - DNA, 25 bp, Homo sapien
tcgtaaagctttacagtcaactctc

SEQ ID NO: 944748 - DNA, 25 bp, Homo sapien
cacatgggcatccagtttgtcaaat

SEQ ID NO: 944749 - DNA, 25 bp, Homo sapien
cctcctgtgagtaaaagagctccat

SEQ ID NO: 944750 - DNA, 25 bp, Homo sapien
ctttcctcctgtgagtaaaagagct

SEQ ID NO: 944751 - DNA, 25 bp, Homo sapien
tcctcctgtgagtaaaagagctcca

SEQ ID NO: 944752 - DNA, 25 bp, Homo sapien
ttcctcctgtgagtaaaagagctcc

SEQ ID NO: 944753 - DNA, 25 bp, Homo sapien
tgagtgatgtgctccaaggaggata

SEQ ID NO: 944754 - DNA, 25 bp, Homo sapien
ctgtgagtgatgtgctccaaggagg

SEQ ID NO: 944755 - DNA, 25 bp, Homo sapien
cgagacaaagggcgtcccaggaggc

SEQ ID NO: 944756 - DNA, 25 bp, Homo sapien
tgccgagacaaagggcgtcccagga

SEQ ID NO: 944757 - DNA, 25 bp, Homo sapien
aggaagaataaagtcaatttcctca

SEQ ID NO: 944758 - DNA, 25 bp, Homo sapien
agagctcagctttaaaaaaggaaga

SEQ ID NO: 944759 - DNA, 25 bp, Homo sapien
ccaaagagctcagctttaaaaaagg

SEQ ID NO: 944760 - DNA, 25 bp, Homo sapien
ggaagaataaagtcaatttcctcac

SEQ ID NO: 944761 - DNA, 25 bp, Homo sapien
tatcaatcatatgtaacaaatagta

SEQ ID NO: 944762 - DNA, 25 bp, Homo sapien
tattatcaatcatatgtaacaaata

SEQ ID NO: 944763 - DNA, 25 bp, Homo sapien
ttatcaatcatatgtaacaaatagt

SEQ ID NO: 944764 - DNA, 25 bp, Homo sapien
tcaatcatatgtaacaaatagtatt

SEQ ID NO: 944765 - DNA, 25 bp, Homo sapien
gcagcaaattgggactcaacagaaa

SEQ ID NO: 944766 - DNA, 25 bp, Homo sapien
ttctgcagcaaattgggactcaaca

SEQ ID NO: 944767 - DNA, 25 bp, Homo sapien
caagaatgaactatactcagagaaa

SEQ ID NO: 944768 - DNA, 25 bp, Homo sapien
ccaagaatgaactatactcagagaa

SEQ ID NO: 944769 - DNA, 25 bp, Homo sapien
tagtttccagcttaataaattcttc

SEQ ID NO: 944770 - DNA, 25 bp, Homo sapien
tggtggtagtagactgctgtagcca

SEQ ID NO: 944771 - DNA, 25 bp, Homo sapien
ggaagcatggtggtagtagactgct

SEQ ID NO: 944772 - DNA, 25 bp, Homo sapien
agcatggtggtagtagactgctgta

SEQ ID NO: 944773 - DNA, 25 bp, Homo sapien
aggatgttcatgttctataggcaca

SEQ ID NO: 944774 - DNA, 25 bp, Homo sapien
ctgaagaaacatctgttaggcggaa

SEQ ID NO: 944775 - DNA, 25 bp, Homo sapien
cacaatgagtgcagtgtagcctgaa

SEQ ID NO: 944776 - DNA, 25 bp, Homo sapien
cacaggtctgggatttgacattaca

SEQ ID NO: 944777 - DNA, 25 bp, Homo sapien
ctacggcatgcatttctatatttag

SEQ ID NO: 944778 - DNA, 25 bp, Homo sapien
ggtaacttccactggagttatcctg

SEQ ID NO: 944779 - DNA, 25 bp, Homo sapien
taggttgtaactttagagatcttgg

SEQ ID NO: 944780 - DNA, 25 bp, Homo sapien
cactggagttatcctgactacggca

SEQ ID NO: 944781 - DNA, 25 bp, Homo sapien
gtctacttcctctccgttatacaca

SEQ ID NO: 944782 - DNA, 25 bp, Homo sapien
ggttccaataaatggactagtgact

SEQ ID NO: 944783 - DNA, 25 bp, Homo sapien
gtagcattaatatttgtggccagga

SEQ ID NO: 944784 - DNA, 25 bp, Homo sapien
gctggagcactagttgccctgtcta

SEQ ID NO: 944785 - DNA, 25 bp, Homo sapien
agggtaagcagctcctggatgcatt

SEQ ID NO: 944786 - DNA, 25 bp, Homo sapien
cctggatgcattccaatccaggtgc

SEQ ID NO: 944787 - DNA, 25 bp, Homo sapien
gcagacaccggcagggtaagcagct

SEQ ID NO: 944788 - DNA, 25 bp, Homo sapien
cagggtaagcagctcctggatgcat

SEQ ID NO: 944789 - DNA, 25 bp, Homo sapien
atgccatggatctctccctacactg

SEQ ID NO: 944790 - DNA, 25 bp, Homo sapien
tcatgccatggatctctccctacac

SEQ ID NO: 944791 - DNA, 25 bp, Homo sapien
catgccatggatctctccctacact

SEQ ID NO: 944792 - DNA, 25 bp, Homo sapien
ccaagtcaatctgcctgggtttgaa

SEQ ID NO: 944793 - DNA, 25 bp, Homo sapien
tactgcaaagcgtaaatgtgtcccc

SEQ ID NO: 944794 - DNA, 25 bp, Homo sapien
tgtagggcactccatcctgatgaac

SEQ ID NO: 944795 - DNA, 25 bp, Homo sapien
tggcctgaacctatctaagcttgta

SEQ ID NO: 944796 - DNA, 25 bp, Homo sapien
tactaggaggttgagatttgcatac

SEQ ID NO: 944797 - DNA, 25 bp, Homo sapien
tccagactacttgtagcacacaggc

SEQ ID NO: 944798 - DNA, 25 bp, Homo sapien
tgaaaaacagaggttgctgacgcgt

SEQ ID NO: 944799 - DNA, 25 bp, Homo sapien
tcctggtcccatggaaatacatgaa

SEQ ID NO: 944800 - DNA, 25 bp, Homo sapien
gatttcagttaaaccccaagatgtc

SEQ ID NO: 944801 - DNA, 25 bp, Homo sapien
gtctagaggaacaacctttgactgc

SEQ ID NO: 944802 - DNA, 25 bp, Homo sapien
tattgtctagaggaacaacctttga

SEQ ID NO: 944803 - DNA, 25 bp, Homo sapien
ttgatttcagttaaaccccaagatg

SEQ ID NO: 944804 - DNA, 25 bp, Homo sapien
gaaaaaatgcttcctatcatagtcc

SEQ ID NO: 944805 - DNA, 25 bp, Homo sapien
tgattcccacagtatttgactgaag

SEQ ID NO: 944806 - DNA, 25 bp, Homo sapien
cataaacttgctactgatgatgagt

SEQ ID NO: 944807 - DNA, 25 bp, Homo sapien
aatgtattctctttggctcggcgtg

SEQ ID NO: 944808 - DNA, 25 bp, Homo sapien
tggataaatatgtacgtttgttgat

SEQ ID NO: 944809 - DNA, 25 bp, Homo sapien
tttgatctagaagatgttgttcaag

SEQ ID NO: 944810 - DNA, 25 bp, Homo sapien
gtacgtttgttgatcaacccaaaca

SEQ ID NO: 944811 - DNA, 25 bp, Homo sapien
ttggaaaaactattcgaatttgatc

SEQ ID NO: 944812 - DNA, 25 bp, Homo sapien
ctgctgagaggggttccacctcaac

SEQ ID NO: 944813 - DNA, 25 bp, Homo sapien
cagtatctcccaatcatctgctgag

SEQ ID NO: 944814 - DNA, 25 bp, Homo sapien
caagataccacatgggaacatggct

SEQ ID NO: 944815 - DNA, 25 bp, Homo sapien
tgagaggggttccacctcaacttgt

SEQ ID NO: 944816 - DNA, 25 bp, Homo sapien
tgatcactaaaatgcctgccttcca

SEQ ID NO: 944817 - DNA, 25 bp, Homo sapien
ttttcaccttgatcactaaaatgcc

SEQ ID NO: 944818 - DNA, 25 bp, Homo sapien
caagtttttgaccaacttgtctgtt

SEQ ID NO: 944819 - DNA, 25 bp, Homo sapien
ctgtcccccatttgagagtccaagt

SEQ ID NO: 944820 - DNA, 25 bp, Homo sapien
tgactccagaccacttctatagctt

SEQ ID NO: 944821 - DNA, 25 bp, Homo sapien
ggtgactccagaccacttctatagc

SEQ ID NO: 944822 - DNA, 25 bp, Homo sapien
gactccagaccacttctatagcttg

SEQ ID NO: 944823 - DNA, 25 bp, Homo sapien
tggtgactccagaccacttctatag

SEQ ID NO: 944824 - DNA, 25 bp, Homo sapien
catgtaagtttgtggccaaggacca

SEQ ID NO: 944825 - DNA, 25 bp, Homo sapien
tgtaagggctcatataactatggga

SEQ ID NO: 944826 - DNA, 25 bp, Homo sapien
tccagaaacgttatattatgcagcc

SEQ ID NO: 944827 - DNA, 25 bp, Homo sapien
caaactcattatagagacctcggaa

SEQ ID NO: 944828 - DNA, 25 bp, Homo sapien
gagtgagaacccgtcacacacacaa

SEQ ID NO: 944829 - DNA, 25 bp, Homo sapien
cagagaattggaaagctatgtggag

SEQ ID NO: 944830 - DNA, 25 bp, Homo sapien
cagtacaggcgtctactggatagag

SEQ ID NO: 944831 - DNA, 25 bp, Homo sapien
catctactgggtagtcagtcctgaa

SEQ ID NO: 944832 - DNA, 25 bp, Homo sapien
gaatggcatgagtaagagaacagaa

SEQ ID NO: 944833 - DNA, 25 bp, Homo sapien
taggacgtttctaggttcagtttca

SEQ ID NO: 944834 - DNA, 25 bp, Homo sapien
aaagacctgggataagacgagccca

SEQ ID NO: 944835 - DNA, 25 bp, Homo sapien
ggctgcactggacttgtgggatcca

SEQ ID NO: 944836 - DNA, 25 bp, Homo sapien
gtccctgagaggcttcggcctcgtc

SEQ ID NO: 944837 - DNA, 25 bp, Homo sapien
gagggaccctgatctctgcgcgctt

SEQ ID NO: 944838 - DNA, 25 bp, Homo sapien
gtggaggaagcagtcgcgagcgttg

SEQ ID NO: 944839 - DNA, 25 bp, Homo sapien
cagcacccgccaggcgatcgctgcc

SEQ ID NO: 944840 - DNA, 25 bp, Homo sapien
gagacgccgcggcaggtggaggaag

SEQ ID NO: 944841 - DNA, 25 bp, Homo sapien
gtcgcgagcgttggtgaaggccaca

SEQ ID NO: 944842 - DNA, 25 bp, Homo sapien
cggagcgtcgctctgggttcgccca

SEQ ID NO: 944843 - DNA, 25 bp, Homo sapien
cgtcccggagcgtcgctctgggttc

SEQ ID NO: 944844 - DNA, 25 bp, Homo sapien
tcgcccaccctagcgccgcaaagga

SEQ ID NO: 944845 - DNA, 25 bp, Homo sapien
ggttcgcccaccctagcgccgcaaa

SEQ ID NO: 944846 - DNA, 25 bp, Homo sapien
tgtgtcatcatgcaattcccagtct

SEQ ID NO: 944847 - DNA, 25 bp, Homo sapien
tattcagtaactgtgaaccacaggg

SEQ ID NO: 944848 - DNA, 25 bp, Homo sapien
gcacactacataatctgggttgaga

SEQ ID NO: 944849 - DNA, 25 bp, Homo sapien
cccagtctagtggtaggagaggcaa

SEQ ID NO: 944850 - DNA, 25 bp, Homo sapien
ccagccctagaagtgcgacaagcat

SEQ ID NO: 944851 - DNA, 25 bp, Homo sapien
taacaaacacaagccaaggagcatg

SEQ ID NO: 944852 - DNA, 25 bp, Homo sapien
tgcttttgggagagtaaaccaggga

SEQ ID NO: 944853 - DNA, 25 bp, Homo sapien
ctatgacttgtttggccttggacac

SEQ ID NO: 944854 - DNA, 25 bp, Homo sapien
ccaggtagttctaatatgagccaaa

SEQ ID NO: 944855 - DNA, 25 bp, Homo sapien
aaatcaatctgtgagagtggagccc

SEQ ID NO: 944856 - DNA, 25 bp, Homo sapien
tgccatttttgttaaaagctcccca

SEQ ID NO: 944857 - DNA, 25 bp, Homo sapien
taaagcagtggtttcagccaattaa

SEQ ID NO: 944858 - DNA, 25 bp, Homo sapien
gaaccattgaaacactagaagtcag

SEQ ID NO: 944859 - DNA, 25 bp, Homo sapien
cactagaagtcaggatgtttccgaa

SEQ ID NO: 944860 - DNA, 25 bp, Homo sapien
aatgccagggtttcaaaatcaagac

SEQ ID NO: 944861 - DNA, 25 bp, Homo sapien
aatacaagtattgaatgaaccattg

SEQ ID NO: 944862 - DNA, 25 bp, Homo sapien
ttcaaagtctgcaagcgatagcttg

SEQ ID NO: 944863 - DNA, 25 bp, Homo sapien
aaacacctccaacagaagtctgtct

SEQ ID NO: 944864 - DNA, 25 bp, Homo sapien
caagcgatagcttgccatcattgtc

SEQ ID NO: 944865 - DNA, 25 bp, Homo sapien
ttctggtaaacatggtccaaacacc

SEQ ID NO: 944866 - DNA, 25 bp, Homo sapien
tacagtgttatatctaccgattctt

SEQ ID NO: 944867 - DNA, 25 bp, Homo sapien
agtgttatatctaccgattctttaa

SEQ ID NO: 944868 - DNA, 25 bp, Homo sapien
tcttcttcagatgactgttggtgta

SEQ ID NO: 944869 - DNA, 25 bp, Homo sapien
cttcttcagatgactgttggtgtag

SEQ ID NO: 944870 - DNA, 25 bp, Homo sapien
aagccagtaatcacatacagaaatc

SEQ ID NO: 944871 - DNA, 25 bp, Homo sapien
gccagtaatcacatacagaaatctt

SEQ ID NO: 944872 - DNA, 25 bp, Homo sapien
ctatatattactaagccagtaatca

SEQ ID NO: 944873 - DNA, 25 bp, Homo sapien
cagtaatcacatacagaaatcttac

SEQ ID NO: 944874 - DNA, 25 bp, Homo sapien
agcttttcttcatacgttccttgaa

SEQ ID NO: 944875 - DNA, 25 bp, Homo sapien
gcttttcttcatacgttccttgaag

SEQ ID NO: 944876 - DNA, 25 bp, Homo sapien
cttttcttcatacgttccttgaaga

SEQ ID NO: 944877 - DNA, 25 bp, Homo sapien
gagcttttcttcatacgttccttga

SEQ ID NO: 944878 - DNA, 25 bp, Homo sapien
agttatcatggtctttgtcaaatgc

SEQ ID NO: 944879 - DNA, 25 bp, Homo sapien
tacttttatgtagttatcatggtct

SEQ ID NO: 944880 - DNA, 25 bp, Homo sapien
ttatgtagttatcatggtctttgtc

SEQ ID NO: 944881 - DNA, 25 bp, Homo sapien
tatcatggtctttgtcaaatgcaaa

SEQ ID NO: 944882 - DNA, 25 bp, Homo sapien
aaaagcgttacgatctagcccagtg

SEQ ID NO: 944883 - DNA, 25 bp, Homo sapien
cattcctaatacattgtgcaggacc

SEQ ID NO: 944884 - DNA, 25 bp, Homo sapien
tattcatcaacatgtcatcagtcat

SEQ ID NO: 944885 - DNA, 25 bp, Homo sapien
tgtggaaaagtcttatgagacactc

SEQ ID NO: 944886 - DNA, 25 bp, Homo sapien
agtttcactgatggattctaccagt

SEQ ID NO: 944887 - DNA, 25 bp, Homo sapien
tgacagtttcactgatggattctac

SEQ ID NO: 944888 - DNA, 25 bp, Homo sapien
gatggattctaccagtttcttcaga

SEQ ID NO: 944889 - DNA, 25 bp, Homo sapien
agttcttgacagtttcactgatgga

SEQ ID NO: 944890 - DNA, 25 bp, Homo sapien
gcctggacatcctgagctatcactg

SEQ ID NO: 944891 - DNA, 25 bp, Homo sapien
gatagcttagcttcaagcctggaca

SEQ ID NO: 944892 - DNA, 25 bp, Homo sapien
gtcgtgtggctttaacaactccaga

SEQ ID NO: 944893 - DNA, 25 bp, Homo sapien
tactccaatcccaacatggcatgtg

SEQ ID NO: 944894 - DNA, 25 bp, Homo sapien
gaaatagcatgcagctttgagtata

SEQ ID NO: 944895 - DNA, 25 bp, Homo sapien
tttccagcttaacatctaggagtgt

SEQ ID NO: 944896 - DNA, 25 bp, Homo sapien
tgagtataagaaaccaagatatgtg

SEQ ID NO: 944897 - DNA, 25 bp, Homo sapien
tttacttgcagtccaaagggagctg

SEQ ID NO: 944898 - DNA, 25 bp, Homo sapien
catgttctgtgcatataccactata

SEQ ID NO: 944899 - DNA, 25 bp, Homo sapien
catcaagttgtatgtcatgttacct

SEQ ID NO: 944900 - DNA, 25 bp, Homo sapien
tagcacaccctttgtaacaggcaaa

SEQ ID NO: 944901 - DNA, 25 bp, Homo sapien
cattcctagtaaacaattcagcagt

SEQ ID NO: 944902 - DNA, 25 bp, Homo sapien
gacttgaactagcagccttcttttt

SEQ ID NO: 944903 - DNA, 25 bp, Homo sapien
caggacttgaactagcagccttctt

SEQ ID NO: 944904 - DNA, 25 bp, Homo sapien
gtcaggacttgaactagcagccttc

SEQ ID NO: 944905 - DNA, 25 bp, Homo sapien
ggacttgaactagcagccttctttt

SEQ ID NO: 944906 - DNA, 25 bp, Homo sapien
catatgaggactaaaacagttcttg

SEQ ID NO: 944907 - DNA, 25 bp, Homo sapien
tctcaacaaccagtatcatatgagg

SEQ ID NO: 944908 - DNA, 25 bp, Homo sapien
ttccaaacaatccacacaaccaaga

SEQ ID NO: 944909 - DNA, 25 bp, Homo sapien
ttgcagttactggaatggagtaacc

SEQ ID NO: 944910 - DNA, 25 bp, Homo sapien
ttgaagtacatagggaatattacag

SEQ ID NO: 944911 - DNA, 25 bp, Homo sapien
agctgagcactctcttctaaaaatc

SEQ ID NO: 944912 - DNA, 25 bp, Homo sapien
tatcacaaagacctcttcatttcct

SEQ ID NO: 944913 - DNA, 25 bp, Homo sapien
ctacatgtttgaagtacatagggaa

SEQ ID NO: 944914 - DNA, 25 bp, Homo sapien
cctgggatgtctcgtaggcatatct

SEQ ID NO: 944915 - DNA, 25 bp, Homo sapien
tttgacctcaggacgataagtgcct

SEQ ID NO: 944916 - DNA, 25 bp, Homo sapien
cgcattcaaagtaccaagcaagtct

SEQ ID NO: 944917 - DNA, 25 bp, Homo sapien
gctgtgtaatgtaagtaagcctctg

SEQ ID NO: 944918 - DNA, 25 bp, Homo sapien
ttattcgtcatcgtaggcttggagc

SEQ ID NO: 944919 - DNA, 25 bp, Homo sapien
caaaaacttattcgtcatcgtaggc

SEQ ID NO: 944920 - DNA, 25 bp, Homo sapien
taggcttggagcacataaaatgtta

SEQ ID NO: 944921 - DNA, 25 bp, Homo sapien
tctgaatcattactaggggagcctt

SEQ ID NO: 944922 - DNA, 25 bp, Homo sapien
tgccttcaaaggtcatagctcacat

SEQ ID NO: 944923 - DNA, 25 bp, Homo sapien
ttttcattgcagctagtgcttggag

SEQ ID NO: 944924 - DNA, 25 bp, Homo sapien
cagagaaggtacctcgttttaagag

SEQ ID NO: 944925 - DNA, 25 bp, Homo sapien
tcacatttatactgagggcccctaa

SEQ ID NO: 944926 - DNA, 25 bp, Homo sapien
acctattctattgtctgtaaaaacg

SEQ ID NO: 944927 - DNA, 25 bp, Homo sapien
ttttctcgttcttcactgcttttct

SEQ ID NO: 944928 - DNA, 25 bp, Homo sapien
ctcgttcttcactgcttttcttctt

SEQ ID NO: 944929 - DNA, 25 bp, Homo sapien
ttctcgttcttcactgcttttcttc

SEQ ID NO: 944930 - DNA, 25 bp, Homo sapien
tgctttttctcgttcttcactgctt

SEQ ID NO: 944931 - DNA, 25 bp, Homo sapien
tgtaatttgtactcaaggcattttt

SEQ ID NO: 944932 - DNA, 25 bp, Homo sapien
catcagctctgaaatgagatagatt

SEQ ID NO: 944933 - DNA, 25 bp, Homo sapien
acaggcaaacaaaacatcagctctg

SEQ ID NO: 944934 - DNA, 25 bp, Homo sapien
ctgaaatgagatagattccaaggtc

SEQ ID NO: 944935 - DNA, 25 bp, Homo sapien
caaggtctgaatcctatcttactct

SEQ ID NO: 944936 - DNA, 25 bp, Homo sapien
taacctagttaagacttcacctcta

SEQ ID NO: 944937 - DNA, 25 bp, Homo sapien
agctttcataaactttcgtattaca

SEQ ID NO: 944938 - DNA, 25 bp, Homo sapien
ctgaaagttgtcaaagctttcataa

SEQ ID NO: 944939 - DNA, 25 bp, Homo sapien
taagtccaaatgtgagatatttcat

SEQ ID NO: 944940 - DNA, 25 bp, Homo sapien
tctactccccgaaaagtagctcaaa

SEQ ID NO: 944941 - DNA, 25 bp, Homo sapien
tatctcagattagaaaggtatgtgg

SEQ ID NO: 944942 - DNA, 25 bp, Homo sapien
caggtatgatgcaatgcctttcgta

SEQ ID NO: 944943 - DNA, 25 bp, Homo sapien
tagttctcacaacgaagtaatatga

SEQ ID NO: 944944 - DNA, 25 bp, Homo sapien
tcaatatactctgattctgacaagg

SEQ ID NO: 944945 - DNA, 25 bp, Homo sapien
gattctgacaaggactcagatgata

SEQ ID NO: 944946 - DNA, 25 bp, Homo sapien
ctcctcaatatactctgattctgac

SEQ ID NO: 944947 - DNA, 25 bp, Homo sapien
tcagatgataaaggtttatcttcag

SEQ ID NO: 944948 - DNA, 25 bp, Homo sapien
ctttctctttttgctgagtccttta

SEQ ID NO: 944949 - DNA, 25 bp, Homo sapien
tttctctttttgctgagtcctttaa

SEQ ID NO: 944950 - DNA, 25 bp, Homo sapien
tctctttttgctgagtcctttaata

SEQ ID NO: 944951 - DNA, 25 bp, Homo sapien
tctttttgctgagtcctttaatatc

SEQ ID NO: 944952 - DNA, 25 bp, Homo sapien
aaattatgacaacacccaaagcaag

SEQ ID NO: 944953 - DNA, 25 bp, Homo sapien
taagatttattcgagctgcatagtg

SEQ ID NO: 944954 - DNA, 25 bp, Homo sapien
tctacccaggattggattagacagg

SEQ ID NO: 944955 - DNA, 25 bp, Homo sapien
gacaggcctagtactgcagaaaaga

SEQ ID NO: 944956 - DNA, 25 bp, Homo sapien
tattcctgtactagtactgcactgt

SEQ ID NO: 944957 - DNA, 25 bp, Homo sapien
tttggttactactataaagaggata

SEQ ID NO: 944958 - DNA, 25 bp, Homo sapien
tacccaggaacacgttatgactctc

SEQ ID NO: 944959 - DNA, 25 bp, Homo sapien
cagtacggcaagttatacccaggaa

SEQ ID NO: 944960 - DNA, 25 bp, Homo sapien
agaaactaggactaccacacctggc

SEQ ID NO: 944961 - DNA, 25 bp, Homo sapien
tcccacttcagtctcgggagaaact

SEQ ID NO: 944962 - DNA, 25 bp, Homo sapien
ctttgtgtagagatggcctctcact

SEQ ID NO: 944963 - DNA, 25 bp, Homo sapien
tcgggagaaactaggactaccacac

SEQ ID NO: 944964 - DNA, 25 bp, Homo sapien
gaattcttggaattggtcattacag

SEQ ID NO: 944965 - DNA, 25 bp, Homo sapien
tgttatgtaaaccactcctaggcat

SEQ ID NO: 944966 - DNA, 25 bp, Homo sapien
aaatgaatggatggcgaaatccgcc

SEQ ID NO: 944967 - DNA, 25 bp, Homo sapien
aatactatgccagctgaaagacaca

SEQ ID NO: 944968 - DNA, 25 bp, Homo sapien
tgaaagttttgaaacgagagtgaga

SEQ ID NO: 944969 - DNA, 25 bp, Homo sapien
cattagaggttactagagaatgagg

SEQ ID NO: 944970 - DNA, 25 bp, Homo sapien
gcaaatccatagtcagaatacccat

SEQ ID NO: 944971 - DNA, 25 bp, Homo sapien
agttttgaaacgagagtgagatggt

SEQ ID NO: 944972 - DNA, 25 bp, Homo sapien
ctgaggtcagggttttgaaagcagc

SEQ ID NO: 944973 - DNA, 25 bp, Homo sapien
tctttaattggaagggccttcttca

SEQ ID NO: 944974 - DNA, 25 bp, Homo sapien
aattaaggtaggcataaattctgct

SEQ ID NO: 944975 - DNA, 25 bp, Homo sapien
tctgctttaactatataggtaagtt

SEQ ID NO: 944976 - DNA, 25 bp, Homo sapien
tcagttccatcttttgacttctttt

SEQ ID NO: 944977 - DNA, 25 bp, Homo sapien
ttctttctcagttccatcttttgac

SEQ ID NO: 944978 - DNA, 25 bp, Homo sapien
ttctcagttccatcttttgacttct

SEQ ID NO: 944979 - DNA, 25 bp, Homo sapien
tctttctcagttccatcttttgact

SEQ ID NO: 944980 - DNA, 25 bp, Homo sapien
gctttcagaagatttatgtgaacgg

SEQ ID NO: 944981 - DNA, 25 bp, Homo sapien
gtctgattcagtttctgacatggag

SEQ ID NO: 944982 - DNA, 25 bp, Homo sapien
agaagatttatgtgaacggttcttc

SEQ ID NO: 944983 - DNA, 25 bp, Homo sapien
cagtttctgacatggagctttcaga

SEQ ID NO: 944984 - DNA, 25 bp, Homo sapien
taaagatcaagtgatttgaatcaca

SEQ ID NO: 944985 - DNA, 25 bp, Homo sapien
atcactttcctgttataaagatcaa

SEQ ID NO: 944986 - DNA, 25 bp, Homo sapien
cttaatacttaatacatcactttcc

SEQ ID NO: 944987 - DNA, 25 bp, Homo sapien
tcctgttataaagatcaagtgattt

SEQ ID NO: 944988 - DNA, 25 bp, Homo sapien
ttcacaatgggtttccacttgacat

SEQ ID NO: 944989 - DNA, 25 bp, Homo sapien
agagatattatttcatgaaccatta

SEQ ID NO: 944990 - DNA, 25 bp, Homo sapien
catgaaccattataagcaaacctta

SEQ ID NO: 944991 - DNA, 25 bp, Homo sapien
atttcacaatgggtttccacttgac

SEQ ID NO: 944992 - DNA, 25 bp, Homo sapien
ctgctggaagaatcagagcttgatg

SEQ ID NO: 944993 - DNA, 25 bp, Homo sapien
agaatcagagcttgatgaagaagaa

SEQ ID NO: 944994 - DNA, 25 bp, Homo sapien
gctggaagaatcagagcttgatgaa

SEQ ID NO: 944995 - DNA, 25 bp, Homo sapien
ggaagaatcagagcttgatgaagaa

SEQ ID NO: 944996 - DNA, 25 bp, Homo sapien
caaaacaattaaagcttgtgagatg

SEQ ID NO: 944997 - DNA, 25 bp, Homo sapien
caattaaagcttgtgagatgcgaga

SEQ ID NO: 944998 - DNA, 25 bp, Homo sapien
agcttgtgagatgcgagaatgtttt

SEQ ID NO: 944999 - DNA, 25 bp, Homo sapien
ttaaagcttgtgagatgcgagaatg

SEQ ID NO: 945000 - DNA, 25 bp, Homo sapien
tggttggcaccgttttttatgtcag

SEQ ID NO: 945001 - DNA, 25 bp, Homo sapien
tactacgttataaggtggttggcac

SEQ ID NO: 945002 - DNA, 25 bp, Homo sapien
tgtggccatggtcaccaatctttct

SEQ ID NO: 945003 - DNA, 25 bp, Homo sapien
gttccctgtacaaaagctcaacaag

SEQ ID NO: 945004 - DNA, 25 bp, Homo sapien
acaatttctccctgtgtttttccag

SEQ ID NO: 945005 - DNA, 25 bp, Homo sapien
ttttggatgagctctcacttccact

SEQ ID NO: 945006 - DNA, 25 bp, Homo sapien
ctttttttggatgagctctcacttc

SEQ ID NO: 945007 - DNA, 25 bp, Homo sapien
tgtctttttttggatgagctctcac

SEQ ID NO: 945008 - DNA, 25 bp, Homo sapien
cagcttctaattacagtcaaaagaa

SEQ ID NO: 945009 - DNA, 25 bp, Homo sapien
ttcagcttctaattacagtcaaaag

SEQ ID NO: 945010 - DNA, 25 bp, Homo sapien
tcagcttctaattacagtcaaaaga

SEQ ID NO: 945011 - DNA, 25 bp, Homo sapien
caacaaagatggctagattctccgt

SEQ ID NO: 945012 - DNA, 25 bp, Homo sapien
ccgtctaggctgtaaaagttgaatt

SEQ ID NO: 945013 - DNA, 25 bp, Homo sapien
ggttctgtattattgagcagcaggc

SEQ ID NO: 945014 - DNA, 25 bp, Homo sapien
ggcattattactgaagctgaggtct

SEQ ID NO: 945015 - DNA, 25 bp, Homo sapien
cataactggccaaattagtctattt

SEQ ID NO: 945016 - DNA, 25 bp, Homo sapien
gccaccataactggccaaattagtc

SEQ ID NO: 945017 - DNA, 25 bp, Homo sapien
gagccaccataactggccaaattag

SEQ ID NO: 945018 - DNA, 25 bp, Homo sapien
accataactggccaaattagtctat

SEQ ID NO: 945019 - DNA, 25 bp, Homo sapien
ttcagccaaagccttggagcctttc

SEQ ID NO: 945020 - DNA, 25 bp, Homo sapien
cagccaaagccttggagcctttctt

SEQ ID NO: 945021 - DNA, 25 bp, Homo sapien
ttcaaattcagccaaagccttggag

SEQ ID NO: 945022 - DNA, 25 bp, Homo sapien
aaattcagccaaagccttggagcct

SEQ ID NO: 945023 - DNA, 25 bp, Homo sapien
ttggacatttctcctcgaaagttca

SEQ ID NO: 945024 - DNA, 25 bp, Homo sapien
tggacatttctcctcgaaagttcat

SEQ ID NO: 945025 - DNA, 25 bp, Homo sapien
gccttggtcgattcagataatcctg

SEQ ID NO: 945026 - DNA, 25 bp, Homo sapien
gatctcgccattgctattgggttca

SEQ ID NO: 945027 - DNA, 25 bp, Homo sapien
caggtaggccttggtcgattcagat

SEQ ID NO: 945028 - DNA, 25 bp, Homo sapien
gataatcctgtattgttggccctga

SEQ ID NO: 945029 - DNA, 25 bp, Homo sapien
tatccagctaagtatatgcaatctg

SEQ ID NO: 945030 - DNA, 25 bp, Homo sapien
taatccattaaagcaatcattaaac

SEQ ID NO: 945031 - DNA, 25 bp, Homo sapien
gcaatctgactaaccaactctttat

SEQ ID NO: 945032 - DNA, 25 bp, Homo sapien
aacatgcaaaacctcacttactcat

SEQ ID NO: 945033 - DNA, 25 bp, Homo sapien
tttacagctctttctcctaaagccc

SEQ ID NO: 945034 - DNA, 25 bp, Homo sapien
caatattgatcacattctaatttcc

SEQ ID NO: 945035 - DNA, 25 bp, Homo sapien
taatttccttggtatcatgtcataa

SEQ ID NO: 945036 - DNA, 25 bp, Homo sapien
tatcatgtcataattttggcagtac

SEQ ID NO: 945037 - DNA, 25 bp, Homo sapien
cattctaatttccttggtatcatgt

SEQ ID NO: 945038 - DNA, 25 bp, Homo sapien
agcgccaactgcgtgcgcggcgcac

SEQ ID NO: 945039 - DNA, 25 bp, Homo sapien
taaagcgccaactgcgtgcgcggcg

SEQ ID NO: 945040 - DNA, 25 bp, Homo sapien
aaagcgccaactgcgtgcgcggcgc

SEQ ID NO: 945041 - DNA, 25 bp, Homo sapien
ctaaagcgccaactgcgtgcgcggc

SEQ ID NO: 945042 - DNA, 25 bp, Homo sapien
tctgggatcggcggagggtgctggg

SEQ ID NO: 945043 - DNA, 25 bp, Homo sapien
ctgggatcggcggagggtgctgggt

SEQ ID NO: 945044 - DNA, 25 bp, Homo sapien
gcgcatctgggatcggcggagggtg

SEQ ID NO: 945045 - DNA, 25 bp, Homo sapien
agggttctcgctgtcctgccgccgg

SEQ ID NO: 945046 - DNA, 25 bp, Homo sapien
gccccactgttttcccggctgagta

SEQ ID NO: 945047 - DNA, 25 bp, Homo sapien
ctgcgtcgccccactgttttcccgg

SEQ ID NO: 945048 - DNA, 25 bp, Homo sapien
ggaacagcgagggttctcgctgtcc

SEQ ID NO: 945049 - DNA, 25 bp, Homo sapien
cctagagagcggcaccacgcggact

SEQ ID NO: 945050 - DNA, 25 bp, Homo sapien
agagcggcaccacgcggactcgacg

SEQ ID NO: 945051 - DNA, 25 bp, Homo sapien
gacggccgcgctctgctacagcgcc

SEQ ID NO: 945052 - DNA, 25 bp, Homo sapien
tccccactccgcctagagagcggca

SEQ ID NO: 945053 - DNA, 25 bp, Homo sapien
ttggcggagcgcctgcaggagtccg

SEQ ID NO: 945054 - DNA, 25 bp, Homo sapien
aggccggctccagagatcgctgcag

SEQ ID NO: 945055 - DNA, 25 bp, Homo sapien
tccagagatcgctgcagttggcgga

SEQ ID NO: 945056 - DNA, 25 bp, Homo sapien
cgcctgcaggagtccggtcgttcat

SEQ ID NO: 945057 - DNA, 25 bp, Homo sapien
tctttatcacagaatagttgtcatt

SEQ ID NO: 945058 - DNA, 25 bp, Homo sapien
gcttctgcctccttgtatcggatgc

SEQ ID NO: 945059 - DNA, 25 bp, Homo sapien
tgtagacatccagtgaatatgggta

SEQ ID NO: 945060 - DNA, 25 bp, Homo sapien
tctttgaaagccgacaccagttgta

SEQ ID NO: 945061 - DNA, 25 bp, Homo sapien
ttcacatacccgcctcttttatcaa

SEQ ID NO: 945062 - DNA, 25 bp, Homo sapien
acatacccgcctcttttatcaataa

SEQ ID NO: 945063 - DNA, 25 bp, Homo sapien
atacccgcctcttttatcaataatt

SEQ ID NO: 945064 - DNA, 25 bp, Homo sapien
cacatacccgcctcttttatcaata

SEQ ID NO: 945065 - DNA, 25 bp, Homo sapien
tagccaggagagtaattcatctcca

SEQ ID NO: 945066 - DNA, 25 bp, Homo sapien
ctcactacagttatactcattttac

SEQ ID NO: 945067 - DNA, 25 bp, Homo sapien
ccaggagagtaattcatctccagaa

SEQ ID NO: 945068 - DNA, 25 bp, Homo sapien
tgaattttactcactacagttatac

SEQ ID NO: 945069 - DNA, 25 bp, Homo sapien
gacatgttacctttgccactgcaac

SEQ ID NO: 945070 - DNA, 25 bp, Homo sapien
catttctaatgggtgccatgagcac

SEQ ID NO: 945071 - DNA, 25 bp, Homo sapien
ttctagcacccagtaagacatccag

SEQ ID NO: 945072 - DNA, 25 bp, Homo sapien
ggattattggtatgcaaccctctga

SEQ ID NO: 945073 - DNA, 25 bp, Homo sapien
gtggtggccaggcctagacaggcac

SEQ ID NO: 945074 - DNA, 25 bp, Homo sapien
tggtagcagggaacactttagtggt

SEQ ID NO: 945075 - DNA, 25 bp, Homo sapien
ggacaagccaggatggtagcaggga

SEQ ID NO: 945076 - DNA, 25 bp, Homo sapien
cagggaacactttagtggtagaaag

SEQ ID NO: 945077 - DNA, 25 bp, Homo sapien
tacaggggacagagatgtagaggtg

SEQ ID NO: 945078 - DNA, 25 bp, Homo sapien
cgcacataatttcaggcaccggcag

SEQ ID NO: 945079 - DNA, 25 bp, Homo sapien
taaccaggccctatggcaatgcaga

SEQ ID NO: 945080 - DNA, 25 bp, Homo sapien
gccaccttgtggaatataccggaat

SEQ ID NO: 945081 - DNA, 25 bp, Homo sapien
tacgagggcactacatcacgtgagg

SEQ ID NO: 945082 - DNA, 25 bp, Homo sapien
aagtattgcttcatgtggttgcctc

SEQ ID NO: 945083 - DNA, 25 bp, Homo sapien
caatgaacgttcttaggcatgtgta

SEQ ID NO: 945084 - DNA, 25 bp, Homo sapien
gttttcgaccatattaatcccacag

SEQ ID NO: 945085 - DNA, 25 bp, Homo sapien
taaggacttacatttcttggcacac

SEQ ID NO: 945086 - DNA, 25 bp, Homo sapien
ttaagagttttctcatcaagatgga

SEQ ID NO: 945087 - DNA, 25 bp, Homo sapien
caaaatgtttggtactatttaagag

SEQ ID NO: 945088 - DNA, 25 bp, Homo sapien
aataggcaccacttgtaaaagaagc

SEQ ID NO: 945089 - DNA, 25 bp, Homo sapien
gccattactgactttaataggcacc

SEQ ID NO: 945090 - DNA, 25 bp, Homo sapien
tcaaaagtaccaaatcaggcccggc

SEQ ID NO: 945091 - DNA, 25 bp, Homo sapien
gcactagaaataagcacagcctggg

SEQ ID NO: 945092 - DNA, 25 bp, Homo sapien
caactacaccgatggaagaactggg

SEQ ID NO: 945093 - DNA, 25 bp, Homo sapien
caagggtgttctccgcaggatcagc

SEQ ID NO: 945094 - DNA, 25 bp, Homo sapien
caggctgtattcagctccgaggtgt

SEQ ID NO: 945095 - DNA, 25 bp, Homo sapien
gctgtattcagctccgaggtgttct

SEQ ID NO: 945096 - DNA, 25 bp, Homo sapien
ggtcctggaagtatgggtgagacag

SEQ ID NO: 945097 - DNA, 25 bp, Homo sapien
tcctggaagtatgggtgagacaggg

SEQ ID NO: 945098 - DNA, 25 bp, Homo sapien
cagaagtaggtctttgcctagttca

SEQ ID NO: 945099 - DNA, 25 bp, Homo sapien
ggaagggcaacatctctaggccagt

SEQ ID NO: 945100 - DNA, 25 bp, Homo sapien
tctttgcctagttcatcgatatctg

SEQ ID NO: 945101 - DNA, 25 bp, Homo sapien
tatctgttacaaacttctcaattgg

SEQ ID NO: 945102 - DNA, 25 bp, Homo sapien
gaaccacacatggacataagcatta

SEQ ID NO: 945103 - DNA, 25 bp, Homo sapien
aaaagaaccacacatggacataagc

SEQ ID NO: 945104 - DNA, 25 bp, Homo sapien
ccacacatggacataagcattagct

SEQ ID NO: 945105 - DNA, 25 bp, Homo sapien
catggacataagcattagctactat

SEQ ID NO: 945106 - DNA, 25 bp, Homo sapien
ggccatagacttcagctgggaagat

SEQ ID NO: 945107 - DNA, 25 bp, Homo sapien
gagcccaggccatagacttcagctg

SEQ ID NO: 945108 - DNA, 25 bp, Homo sapien
gacttcagctgggaagataaccctg

SEQ ID NO: 945109 - DNA, 25 bp, Homo sapien
tcagctgggaagataaccctgtcat

SEQ ID NO: 945110 - DNA, 25 bp, Homo sapien
tgtcacagaccaaagatcagggcta

SEQ ID NO: 945111 - DNA, 25 bp, Homo sapien
gaagtgccccagttacattctagaa

SEQ ID NO: 945112 - DNA, 25 bp, Homo sapien
catgctttgtcagaagaagtgcccc

SEQ ID NO: 945113 - DNA, 25 bp, Homo sapien
caaggagcgatgtaactgaaaccaa

SEQ ID NO: 945114 - DNA, 25 bp, Homo sapien
gacaaggatgggtacttggtcacca

SEQ ID NO: 945115 - DNA, 25 bp, Homo sapien
gctcactggacaaggatgggtactt

SEQ ID NO: 945116 - DNA, 25 bp, Homo sapien
ctgggtgaccaaggatactcagtgg

SEQ ID NO: 945117 - DNA, 25 bp, Homo sapien
gggtacttggtcaccaggcatccca

SEQ ID NO: 945118 - DNA, 25 bp, Homo sapien
ctagttgatcaacatctgaacttcc

SEQ ID NO: 945119 - DNA, 25 bp, Homo sapien
tttcctagttgatcaacatctgaac

SEQ ID NO: 945120 - DNA, 25 bp, Homo sapien
ttttcctagttgatcaacatctgaa

SEQ ID NO: 945121 - DNA, 25 bp, Homo sapien
tcctagttgatcaacatctgaactt

SEQ ID NO: 945122 - DNA, 25 bp, Homo sapien
agttttgaacaagtacagggtgaca

SEQ ID NO: 945123 - DNA, 25 bp, Homo sapien
tgaatggtaaagacaactggtatcc

SEQ ID NO: 945124 - DNA, 25 bp, Homo sapien
atatgcctatccagcacactttggg

SEQ ID NO: 945125 - DNA, 25 bp, Homo sapien
tttatatcttatggcagggagcagg

SEQ ID NO: 945126 - DNA, 25 bp, Homo sapien
agtgctcagagggatgactcattgc

SEQ ID NO: 945127 - DNA, 25 bp, Homo sapien
tatgggttctacacattgacttaca

SEQ ID NO: 945128 - DNA, 25 bp, Homo sapien
cctgactgttctcctaagtgatgga

SEQ ID NO: 945129 - DNA, 25 bp, Homo sapien
gcaaccaaaagcaccgaggattagt

SEQ ID NO: 945130 - DNA, 25 bp, Homo sapien
ggtagcaggacaacacaccctgtgt

SEQ ID NO: 945131 - DNA, 25 bp, Homo sapien
gaccctcgtgggcaacactaactga

SEQ ID NO: 945132 - DNA, 25 bp, Homo sapien
gatgaacctggaagtaggaaggcct

SEQ ID NO: 945133 - DNA, 25 bp, Homo sapien
caatgcccagatagaaggatgcttc

SEQ ID NO: 945134 - DNA, 25 bp, Homo sapien
ctgaggagcatgttaggagactgac

SEQ ID NO: 945135 - DNA, 25 bp, Homo sapien
tgacgtaacttggtgaccagatcct

SEQ ID NO: 945136 - DNA, 25 bp, Homo sapien
gctaagcacttctgagttacaatga

SEQ ID NO: 945137 - DNA, 25 bp, Homo sapien
gcagtattactggacagcatggctt

SEQ ID NO: 945138 - DNA, 25 bp, Homo sapien
tgccaacggtttcctttaccacagc

SEQ ID NO: 945139 - DNA, 25 bp, Homo sapien
gactgtacaggcttcaaccacttta

SEQ ID NO: 945140 - DNA, 25 bp, Homo sapien
aattggagtcagtgtcttaggcacc

SEQ ID NO: 945141 - DNA, 25 bp, Homo sapien
tgtttcgttgttatgggtagtgaca

SEQ ID NO: 945142 - DNA, 25 bp, Homo sapien
aaatgtctctgtcttgccccttaga

SEQ ID NO: 945143 - DNA, 25 bp, Homo sapien
ctgcatagaagaatggtgagacacc

SEQ ID NO: 945144 - DNA, 25 bp, Homo sapien
tttggagttcccctgtgagctggcg

SEQ ID NO: 945145 - DNA, 25 bp, Homo sapien
tgagctggcgtaaggtacttcttcc

SEQ ID NO: 945146 - DNA, 25 bp, Homo sapien
tggcactcacaaccaaaaggctttt

SEQ ID NO: 945147 - DNA, 25 bp, Homo sapien
gcactggtgagtcctgacctacctt

SEQ ID NO: 945148 - DNA, 25 bp, Homo sapien
gtgtttcgcaaagttcatccaagtg

SEQ ID NO: 945149 - DNA, 25 bp, Homo sapien
tgttcacgtggacccttacagggag

SEQ ID NO: 945150 - DNA, 25 bp, Homo sapien
cacgggtggttctgtcacttggcca

SEQ ID NO: 945151 - DNA, 25 bp, Homo sapien
cagaagggcctaacaggtgactgga

SEQ ID NO: 945152 - DNA, 25 bp, Homo sapien
taccttctagttgggttgagcctag

SEQ ID NO: 945153 - DNA, 25 bp, Homo sapien
ttgtgtccaaggagcccgaatgccc

SEQ ID NO: 945154 - DNA, 25 bp, Homo sapien
gattttaactgtgctatatactcag

SEQ ID NO: 945155 - DNA, 25 bp, Homo sapien
tcatcctttatgtcaatggttccat

SEQ ID NO: 945156 - DNA, 25 bp, Homo sapien
ctcagtattttgtgagaacttccaa

SEQ ID NO: 945157 - DNA, 25 bp, Homo sapien
gatcatcaatttcttaggccagatt

SEQ ID NO: 945158 - DNA, 25 bp, Homo sapien
tccagacccctagttcctttttgca

SEQ ID NO: 945159 - DNA, 25 bp, Homo sapien
tatgtgttttctggtatttgaagcg

SEQ ID NO: 945160 - DNA, 25 bp, Homo sapien
cagacccctagttcctttttgcatg

SEQ ID NO: 945161 - DNA, 25 bp, Homo sapien
tttttgcatgtatgtgttttctggt

SEQ ID NO: 945162 - DNA, 25 bp, Homo sapien
gctgtatgccacctaacagagtgcc

SEQ ID NO: 945163 - DNA, 25 bp, Homo sapien
gcatgctgatgcctagagaattcaa

SEQ ID NO: 945164 - DNA, 25 bp, Homo sapien
ctgtttttaatcagggctgtatgcc

SEQ ID NO: 945165 - DNA, 25 bp, Homo sapien
gaattcaatatgactctgataagca

SEQ ID NO: 945166 - DNA, 25 bp, Homo sapien
ggaggtagatgctcagcgcaaaaca

SEQ ID NO: 945167 - DNA, 25 bp, Homo sapien
taaaccaagtgctgggtcttatcag

SEQ ID NO: 945168 - DNA, 25 bp, Homo sapien
cagcaagggcccgtatggagttact

SEQ ID NO: 945169 - DNA, 25 bp, Homo sapien
agagcaagggtatcagacagccaca

SEQ ID NO: 945170 - DNA, 25 bp, Homo sapien
gaagtctcaactgggtcaatactga

SEQ ID NO: 945171 - DNA, 25 bp, Homo sapien
tgccttagcatcaagtgggtaccca

SEQ ID NO: 945172 - DNA, 25 bp, Homo sapien
gagtcaagtcagaaccaggtcaagc

SEQ ID NO: 945173 - DNA, 25 bp, Homo sapien
gtgccaaaggatctctacccaatgt

SEQ ID NO: 945174 - DNA, 25 bp, Homo sapien
gtaatcaactcttggctgtaccgag

SEQ ID NO: 945175 - DNA, 25 bp, Homo sapien
ttattcctgcgatgaagtagaatga

SEQ ID NO: 945176 - DNA, 25 bp, Homo sapien
gcatcaatcatgactagtattcaag

SEQ ID NO: 945177 - DNA, 25 bp, Homo sapien
tacagttgagactattctagacaca

SEQ ID NO: 945178 - DNA, 25 bp, Homo sapien
cttataagaacagtggggtattcct

SEQ ID NO: 945179 - DNA, 25 bp, Homo sapien
aaggcggtttcaggacaggcttgca

SEQ ID NO: 945180 - DNA, 25 bp, Homo sapien
tcaggacaggcttgcaagtggtagc

SEQ ID NO: 945181 - DNA, 25 bp, Homo sapien
tggatctggccatcatgacccctaa

SEQ ID NO: 945182 - DNA, 25 bp, Homo sapien
catttctgcaaatatgcagccaaca

SEQ ID NO: 945183 - DNA, 25 bp, Homo sapien
tttctacgaaacatttctgcaaata

SEQ ID NO: 945184 - DNA, 25 bp, Homo sapien
aaacatttctgcaaatatgcagcca

SEQ ID NO: 945185 - DNA, 25 bp, Homo sapien
tttctgcaaatatgcagccaacact

SEQ ID NO: 945186 - DNA, 25 bp, Homo sapien
ggtgctctgtaccacagcgtgacga

SEQ ID NO: 945187 - DNA, 25 bp, Homo sapien
gactggagcaagacttcgggtgctc

SEQ ID NO: 945188 - DNA, 25 bp, Homo sapien
acttcgggtgctctgtaccacagcg

SEQ ID NO: 945189 - DNA, 25 bp, Homo sapien
gcaagacttcgggtgctctgtacca

SEQ ID NO: 945190 - DNA, 25 bp, Homo sapien
tgacagcttggggaatcaaagtaaa

SEQ ID NO: 945191 - DNA, 25 bp, Homo sapien
gacagcttggggaatcaaagtaaaa

SEQ ID NO: 945192 - DNA, 25 bp, Homo sapien
tattgaattacaacagagactatga

SEQ ID NO: 945193 - DNA, 25 bp, Homo sapien
caaaatttacaactctggtgggcgc

SEQ ID NO: 945194 - DNA, 25 bp, Homo sapien
gttttaagatgtccatatggtcagg

SEQ ID NO: 945195 - DNA, 25 bp, Homo sapien
gagactatgatctgtacaatttcta

SEQ ID NO: 945196 - DNA, 25 bp, Homo sapien
tccagctttaggcaatggactcaag

SEQ ID NO: 945197 - DNA, 25 bp, Homo sapien
caatgagaggcgaggctacaagagt

SEQ ID NO: 945198 - DNA, 25 bp, Homo sapien
cttttcccagctagccaatgagagg

SEQ ID NO: 945199 - DNA, 25 bp, Homo sapien
cacggacatgtcagcggtattggat

SEQ ID NO: 945200 - DNA, 25 bp, Homo sapien
tcacccctttattgaatggacagca

SEQ ID NO: 945201 - DNA, 25 bp, Homo sapien
ggtttgatatgtcagggaccagatc

SEQ ID NO: 945202 - DNA, 25 bp, Homo sapien
gacaggctaaattgctaacaggcca

SEQ ID NO: 945203 - DNA, 25 bp, Homo sapien
tatgtcagggactagaacaaacgct

SEQ ID NO: 945204 - DNA, 25 bp, Homo sapien
tccactaggaaactcacttgccctg

SEQ ID NO: 945205 - DNA, 25 bp, Homo sapien
ggacacctccactaggaaactcact

SEQ ID NO: 945206 - DNA, 25 bp, Homo sapien
cttgccctgtgttatttttgagcac

SEQ ID NO: 945207 - DNA, 25 bp, Homo sapien
tttgattaataaacggacacctcca

SEQ ID NO: 945208 - DNA, 25 bp, Homo sapien
tacaccttcctgacaagaatgaggg

SEQ ID NO: 945209 - DNA, 25 bp, Homo sapien
aatagattcccggtgtatcgcactc

SEQ ID NO: 945210 - DNA, 25 bp, Homo sapien
gaactcaagaggtagacataaggct

SEQ ID NO: 945211 - DNA, 25 bp, Homo sapien
tgatagctacttgggtgctcagagc

SEQ ID NO: 945212 - DNA, 25 bp, Homo sapien
tctctctaaaaaattgtctactaag

SEQ ID NO: 945213 - DNA, 25 bp, Homo sapien
atgccactggatttggtgaactcta

SEQ ID NO: 945214 - DNA, 25 bp, Homo sapien
gggactcgcatatacaaatgctaca

SEQ ID NO: 945215 - DNA, 25 bp, Homo sapien
acttgagaactacaatcgactattg

SEQ ID NO: 945216 - DNA, 25 bp, Homo sapien
tcaacttttggagagacctacacag

SEQ ID NO: 945217 - DNA, 25 bp, Homo sapien
tggctgcccagacacacattcaaag

SEQ ID NO: 945218 - DNA, 25 bp, Homo sapien
gaacatctaagtgcacaagtcagga

SEQ ID NO: 945219 - DNA, 25 bp, Homo sapien
tatctgaaggttatgaatggctgcc

SEQ ID NO: 945220 - DNA, 25 bp, Homo sapien
tacacatgcttacggacactccagt

SEQ ID NO: 945221 - DNA, 25 bp, Homo sapien
cctaggcttaggagtgaacacacaa

SEQ ID NO: 945222 - DNA, 25 bp, Homo sapien
tgataaaaataacccatgccaggtg

SEQ ID NO: 945223 - DNA, 25 bp, Homo sapien
cctattaggaggaaggatgagccca

SEQ ID NO: 945224 - DNA, 25 bp, Homo sapien
catctgccttcgaggaacttatggc

SEQ ID NO: 945225 - DNA, 25 bp, Homo sapien
atgagcatctgccttcgaggaactt

SEQ ID NO: 945226 - DNA, 25 bp, Homo sapien
cgaggaacttatggcctgataaata

SEQ ID NO: 945227 - DNA, 25 bp, Homo sapien
gccttcgaggaacttatggcctgat

SEQ ID NO: 945228 - DNA, 25 bp, Homo sapien
taaaagcgtccatctcagttacagc

SEQ ID NO: 945229 - DNA, 25 bp, Homo sapien
ttcaattaacgtacccaaggagaca

SEQ ID NO: 945230 - DNA, 25 bp, Homo sapien
agcctattcaagcttctccccaggg

SEQ ID NO: 945231 - DNA, 25 bp, Homo sapien
aacaacatgcgcaacaacttcctag

SEQ ID NO: 945232 - DNA, 25 bp, Homo sapien
cactgaggttagagccatctggaaa

SEQ ID NO: 945233 - DNA, 25 bp, Homo sapien
agttttatttgtccgctgctggtca

SEQ ID NO: 945234 - DNA, 25 bp, Homo sapien
gaagtcagcgagttttatttgtccg

SEQ ID NO: 945235 - DNA, 25 bp, Homo sapien
tatagatgcgggcaaggccgaagtc

SEQ ID NO: 945236 - DNA, 25 bp, Homo sapien
gccgaagtcagcgagttttatttgt

SEQ ID NO: 945237 - DNA, 25 bp, Homo sapien
aatgttctgtggttttagatcgcga

SEQ ID NO: 945238 - DNA, 25 bp, Homo sapien
acctcggagaagctgaaacatcata

SEQ ID NO: 945239 - DNA, 25 bp, Homo sapien
aatgaagaaagtccagacctcggag

SEQ ID NO: 945240 - DNA, 25 bp, Homo sapien
gcactactcggtgtgaatgaagaaa

SEQ ID NO: 945241 - DNA, 25 bp, Homo sapien
tgaacctgtaataagcatgactggg

SEQ ID NO: 945242 - DNA, 25 bp, Homo sapien
cattcagctacgtcaggaactctgg

SEQ ID NO: 945243 - DNA, 25 bp, Homo sapien
tggaattctgaaccaatgaacactg

SEQ ID NO: 945244 - DNA, 25 bp, Homo sapien
tgaccttcagtaattcaaccacgag

SEQ ID NO: 945245 - DNA, 25 bp, Homo sapien
tagtccagcaatgccatagtacccg

SEQ ID NO: 945246 - DNA, 25 bp, Homo sapien
caagaggagggttcaagaggattcc

SEQ ID NO: 945247 - DNA, 25 bp, Homo sapien
tagtacccgtctctttgccactgtg

SEQ ID NO: 945248 - DNA, 25 bp, Homo sapien
taactggcaagctaaaagagtcaca

SEQ ID NO: 945249 - DNA, 25 bp, Homo sapien
catccctttcaggtggttatccttt

SEQ ID NO: 945250 - DNA, 25 bp, Homo sapien
ggcaatcatccctttcaggtggtta

SEQ ID NO: 945251 - DNA, 25 bp, Homo sapien
cagggtgaggtacagacccaatggg

SEQ ID NO: 945252 - DNA, 25 bp, Homo sapien
caatggggcctgtaccaacattctt

SEQ ID NO: 945253 - DNA, 25 bp, Homo sapien
tataatatcgcctttgccatcacta

SEQ ID NO: 945254 - DNA, 25 bp, Homo sapien
ttactgtcaactctctatattcccc

SEQ ID NO: 945255 - DNA, 25 bp, Homo sapien
tcactatcatttactgtcaactctc

SEQ ID NO: 945256 - DNA, 25 bp, Homo sapien
ttgccatcactatcatttactgtca

SEQ ID NO: 945257 - DNA, 25 bp, Homo sapien
gtccccagtgtctatgaagtcccaa

SEQ ID NO: 945258 - DNA, 25 bp, Homo sapien
tatgtctaagggtgtaaatgattcc

SEQ ID NO: 945259 - DNA, 25 bp, Homo sapien
aaaaccagaataaatcctgccctgc

SEQ ID NO: 945260 - DNA, 25 bp, Homo sapien
ggagagaacctagacatttgattat

SEQ ID NO: 945261 - DNA, 25 bp, Homo sapien
gattaaactgattcctgagtctttc

SEQ ID NO: 945262 - DNA, 25 bp, Homo sapien
tttagcaaaaaagccataatcctgc

SEQ ID NO: 945263 - DNA, 25 bp, Homo sapien
taaactgattcctgagtctttcttt

SEQ ID NO: 945264 - DNA, 25 bp, Homo sapien
cgattaaactgattcctgagtcttt

SEQ ID NO: 945265 - DNA, 25 bp, Homo sapien
aataatttgatgaaggtattccaag

SEQ ID NO: 945266 - DNA, 25 bp, Homo sapien
aacatgtccattttatcgaatctaa

SEQ ID NO: 945267 - DNA, 25 bp, Homo sapien
gactgtcaaactgacatgacacaat

SEQ ID NO: 945268 - DNA, 25 bp, Homo sapien
cattaaaagggctcttgcagacttc

SEQ ID NO: 945269 - DNA, 25 bp, Homo sapien
cagtgccctgagatataccttccta

SEQ ID NO: 945270 - DNA, 25 bp, Homo sapien
tgtggcacctctcctagattccatg

SEQ ID NO: 945271 - DNA, 25 bp, Homo sapien
caatgagtaaccaagtcctgtcaag

SEQ ID NO: 945272 - DNA, 25 bp, Homo sapien
gctcagaagttgcagccacaagtta

SEQ ID NO: 945273 - DNA, 25 bp, Homo sapien
ttcccaaagtctcttcttgtttgtg

SEQ ID NO: 945274 - DNA, 25 bp, Homo sapien
ccaaagtctcttcttgtttgtgctc

SEQ ID NO: 945275 - DNA, 25 bp, Homo sapien
ctggttctcatttcccaaagtctct

SEQ ID NO: 945276 - DNA, 25 bp, Homo sapien
caaagtctcttcttgtttgtgctcc

SEQ ID NO: 945277 - DNA, 25 bp, Homo sapien
ggttgacagtcagcaagatggatct

SEQ ID NO: 945278 - DNA, 25 bp, Homo sapien
taaagaagggttgacagtcagcaag

SEQ ID NO: 945279 - DNA, 25 bp, Homo sapien
tagcttgtggtaaagaagggttgac

SEQ ID NO: 945280 - DNA, 25 bp, Homo sapien
agtcaccatagcttgtggtaaagaa

SEQ ID NO: 945281 - DNA, 25 bp, Homo sapien
tctggagcccaccaattttaactac

SEQ ID NO: 945282 - DNA, 25 bp, Homo sapien
gaggagtttattgccgctctagtcc

SEQ ID NO: 945283 - DNA, 25 bp, Homo sapien
gtttattgccgctctagtccccttc

SEQ ID NO: 945284 - DNA, 25 bp, Homo sapien
ctggaaatggaagccgtctggagcc

SEQ ID NO: 945285 - DNA, 25 bp, Homo sapien
tgaagggttaaaatatggcagatgt

SEQ ID NO: 945286 - DNA, 25 bp, Homo sapien
cccgcagctgtctgtgtagggctaa

SEQ ID NO: 945287 - DNA, 25 bp, Homo sapien
tgttgatagccgacactccttgcta

SEQ ID NO: 945288 - DNA, 25 bp, Homo sapien
attgtatccacttgtttaacctcgg

SEQ ID NO: 945289 - DNA, 25 bp, Homo sapien
gttccttcatcagtttgctaaggat

SEQ ID NO: 945290 - DNA, 25 bp, Homo sapien
ctgcaaaatacatgatcttgttcat

SEQ ID NO: 945291 - DNA, 25 bp, Homo sapien
gcaaaatacatgatcttgttcattt

SEQ ID NO: 945292 - DNA, 25 bp, Homo sapien
tctgttccttcatcagtttgctaag

SEQ ID NO: 945293 - DNA, 25 bp, Homo sapien
tatggctttcctgtggcaagtaaaa

SEQ ID NO: 945294 - DNA, 25 bp, Homo sapien
gacaaggcgatgattttccagtcca

SEQ ID NO: 945295 - DNA, 25 bp, Homo sapien
gagatctctgttatggctttcctgt

SEQ ID NO: 945296 - DNA, 25 bp, Homo sapien
ggtctcttatcagaacaagaagaat

SEQ ID NO: 945297 - DNA, 25 bp, Homo sapien
aaaattaacaagtatggccagtgac

SEQ ID NO: 945298 - DNA, 25 bp, Homo sapien
cattctaatctaaaagtggtatgac

SEQ ID NO: 945299 - DNA, 25 bp, Homo sapien
taaattgaggatagctatttccaga

SEQ ID NO: 945300 - DNA, 25 bp, Homo sapien
agtccccaatctttgctacatttgg

SEQ ID NO: 945301 - DNA, 25 bp, Homo sapien
tgtcattttaagtgagcaccccagg

SEQ ID NO: 945302 - DNA, 25 bp, Homo sapien
tacttattagaaactccctcctgag

SEQ ID NO: 945303 - DNA, 25 bp, Homo sapien
caccccaggtggttgattcactgac

SEQ ID NO: 945304 - DNA, 25 bp, Homo sapien
tgacgttagtaaagcaccacacctg

SEQ ID NO: 945305 - DNA, 25 bp, Homo sapien
ccatccttcaaatcatctctcctat

SEQ ID NO: 945306 - DNA, 25 bp, Homo sapien
atcatctctcctattccactcagtg

SEQ ID NO: 945307 - DNA, 25 bp, Homo sapien
tttatccccctgtctactctcaggc

SEQ ID NO: 945308 - DNA, 25 bp, Homo sapien
tctctcctattccactcagtggtca

SEQ ID NO: 945309 - DNA, 25 bp, Homo sapien
ctgtgtcctgcaaagatgagacaaa

SEQ ID NO: 945310 - DNA, 25 bp, Homo sapien
tgtcctgcaaagatgagacaaatca

SEQ ID NO: 945311 - DNA, 25 bp, Homo sapien
gtcctgcaaagatgagacaaatcac

SEQ ID NO: 945312 - DNA, 25 bp, Homo sapien
tcatgttaatttgctctgtgtcctg

SEQ ID NO: 945313 - DNA, 25 bp, Homo sapien
ttcaggcaaaatggagaccaccagg

SEQ ID NO: 945314 - DNA, 25 bp, Homo sapien
tcgtaattcaggcaaaatggagacc

SEQ ID NO: 945315 - DNA, 25 bp, Homo sapien
gcaaaatggagaccaccaggagctg

SEQ ID NO: 945316 - DNA, 25 bp, Homo sapien
ctgctcgtaattcaggcaaaatgga

SEQ ID NO: 945317 - DNA, 25 bp, Homo sapien
gaatatcctgagtttcagtggcctg

SEQ ID NO: 945318 - DNA, 25 bp, Homo sapien
gttaactggtaaacagtgccacaga

SEQ ID NO: 945319 - DNA, 25 bp, Homo sapien
tattaaagtcccacatgagcaccgt

SEQ ID NO: 945320 - DNA, 25 bp, Homo sapien
tctagtaagacaccatggagcatcc

SEQ ID NO: 945321 - DNA, 25 bp, Homo sapien
cttaaataaccatacagaatgtgta

SEQ ID NO: 945322 - DNA, 25 bp, Homo sapien
tacttatacataagtagtctgttct

SEQ ID NO: 945323 - DNA, 25 bp, Homo sapien
catgatacgttttaatctatgcaag

SEQ ID NO: 945324 - DNA, 25 bp, Homo sapien
gcaagacaatgtcaatattaatacc

SEQ ID NO: 945325 - DNA, 25 bp, Homo sapien
gaaagaaagccattgcttaacagac

SEQ ID NO: 945326 - DNA, 25 bp, Homo sapien
taacagactataatagtcgactgcc

SEQ ID NO: 945327 - DNA, 25 bp, Homo sapien
taatagtcgactgcctgataagaca

SEQ ID NO: 945328 - DNA, 25 bp, Homo sapien
cctgataagacatgaagatgattct

SEQ ID NO: 945329 - DNA, 25 bp, Homo sapien
caagtaagtggtcaagtcttgatcg

SEQ ID NO: 945330 - DNA, 25 bp, Homo sapien
ggtcaagtcttgatcgacatgttca

SEQ ID NO: 945331 - DNA, 25 bp, Homo sapien
gacatgttcaaacactaaagttagt

SEQ ID NO: 945332 - DNA, 25 bp, Homo sapien
tctggaactttatccaagtaagtgg

SEQ ID NO: 945333 - DNA, 25 bp, Homo sapien
aataatttgttcaagcatcatagaa

SEQ ID NO: 945334 - DNA, 25 bp, Homo sapien
tcaagcatcatagaacagagacaag

SEQ ID NO: 945335 - DNA, 25 bp, Homo sapien
tatgacaatctaatcagcaacagat

SEQ ID NO: 945336 - DNA, 25 bp, Homo sapien
gagacaagaggcagaaccaagattt

SEQ ID NO: 945337 - DNA, 25 bp, Homo sapien
ggttggtaaatctccaacttctctc

SEQ ID NO: 945338 - DNA, 25 bp, Homo sapien
ctagaggttggtaaatctccaactt

SEQ ID NO: 945339 - DNA, 25 bp, Homo sapien
aaatagtactttctccaaactccat

SEQ ID NO: 945340 - DNA, 25 bp, Homo sapien
tagaggttggtaaatctccaacttc

SEQ ID NO: 945341 - DNA, 25 bp, Homo sapien
ggttggcatgggtgaacaagtcact

SEQ ID NO: 945342 - DNA, 25 bp, Homo sapien
cagtgaccctgaagatctactacag

SEQ ID NO: 945343 - DNA, 25 bp, Homo sapien
taatatacagggtcctatttgccag

SEQ ID NO: 945344 - DNA, 25 bp, Homo sapien
gaggcaattttgaaccgcctgtgct

SEQ ID NO: 945345 - DNA, 25 bp, Homo sapien
tagaactcctgctattgctcaatac

SEQ ID NO: 945346 - DNA, 25 bp, Homo sapien
tacgcaagttaacagatgactcccc

SEQ ID NO: 945347 - DNA, 25 bp, Homo sapien
cacagaacactcattaaatcagcag

SEQ ID NO: 945348 - DNA, 25 bp, Homo sapien
tggactgctctattcctcaattacg

SEQ ID NO: 945349 - DNA, 25 bp, Homo sapien
tggccttactggtcactaagccttt

SEQ ID NO: 945350 - DNA, 25 bp, Homo sapien
ttggccttactggtcactaagcctt

SEQ ID NO: 945351 - DNA, 25 bp, Homo sapien
ggccttactggtcactaagcctttc

SEQ ID NO: 945352 - DNA, 25 bp, Homo sapien
cattcgatatcattagccagagtgt

SEQ ID NO: 945353 - DNA, 25 bp, Homo sapien
attcgatatcattagccagagtgtg

SEQ ID NO: 945354 - DNA, 25 bp, Homo sapien
ttcgatatcattagccagagtgtgg

SEQ ID NO: 945355 - DNA, 25 bp, Homo sapien
tcattcgatatcattagccagagtg

SEQ ID NO: 945356 - DNA, 25 bp, Homo sapien
aggttggggtcaagtggtgtgatca

SEQ ID NO: 945357 - DNA, 25 bp, Homo sapien
ggttggggtcaagtggtgtgatcat

SEQ ID NO: 945358 - DNA, 25 bp, Homo sapien
tgatagtggttgtataaaagggata

SEQ ID NO: 945359 - DNA, 25 bp, Homo sapien
accttttttgtccttgattccatag

SEQ ID NO: 945360 - DNA, 25 bp, Homo sapien
ctaataattctatgttgatagtggt

SEQ ID NO: 945361 - DNA, 25 bp, Homo sapien
ttgtccttgattccatagagagatt

SEQ ID NO: 945362 - DNA, 25 bp, Homo sapien
caatggttgtttcaaggcagaggca

SEQ ID NO: 945363 - DNA, 25 bp, Homo sapien
gaatttcatggctcgtgactgagag

SEQ ID NO: 945364 - DNA, 25 bp, Homo sapien
gaccctgtctgagcaaatattcgca

SEQ ID NO: 945365 - DNA, 25 bp, Homo sapien
ttagtctggccaagcaagtcatggg

SEQ ID NO: 945366 - DNA, 25 bp, Homo sapien
ccgcacaaatcaccagcctgggata

SEQ ID NO: 945367 - DNA, 25 bp, Homo sapien
ggtctctctgagtctgtagagagtt

SEQ ID NO: 945368 - DNA, 25 bp, Homo sapien
ccttctagcttgagtctaaactgcg

SEQ ID NO: 945369 - DNA, 25 bp, Homo sapien
gttgggaacaaagcaccgcacaaat

SEQ ID NO: 945370 - DNA, 25 bp, Homo sapien
gagagtaagaactgctgtctcccca

SEQ ID NO: 945371 - DNA, 25 bp, Homo sapien
tactggttaccacacaggagagagt

SEQ ID NO: 945372 - DNA, 25 bp, Homo sapien
ccacacaggagagagtaagaactgc

SEQ ID NO: 945373 - DNA, 25 bp, Homo sapien
catttaatactggttaccacacagg

SEQ ID NO: 945374 - DNA, 25 bp, Homo sapien
ctcgcggctctgtcgacaaaactta

SEQ ID NO: 945375 - DNA, 25 bp, Homo sapien
aggtcaccggctctggctcgcggct

SEQ ID NO: 945376 - DNA, 25 bp, Homo sapien
ggctcgctgtctggcaaggtcaccg

SEQ ID NO: 945377 - DNA, 25 bp, Homo sapien
tgacttgtctttcggctcgctgtct

SEQ ID NO: 945378 - DNA, 25 bp, Homo sapien
aacggcctccgttcttcaagtcgcg

SEQ ID NO: 945379 - DNA, 25 bp, Homo sapien
cacgcattcgtactgctggtcagcg

SEQ ID NO: 945380 - DNA, 25 bp, Homo sapien
gcaccgccacctcgcggatggtgga

SEQ ID NO: 945381 - DNA, 25 bp, Homo sapien
caagtcgcgggccttgaacaccttc

SEQ ID NO: 945382 - DNA, 25 bp, Homo sapien
gtgcgctcaactagctggcggccgc

SEQ ID NO: 945383 - DNA, 25 bp, Homo sapien
ccccggagatcggtctagctttact

SEQ ID NO: 945384 - DNA, 25 bp, Homo sapien
gggtgcgctcaactagctggcggcc

SEQ ID NO: 945385 - DNA, 25 bp, Homo sapien
gggctccccggagatcggtctagct

SEQ ID NO: 945386 - DNA, 25 bp, Homo sapien
gaggagcgagccgatccctcctctt

SEQ ID NO: 945387 - DNA, 25 bp, Homo sapien
cgattacatagcctctgcccaagcg

SEQ ID NO: 945388 - DNA, 25 bp, Homo sapien
ctcgaagcgaagtcctcaacacaga

SEQ ID NO: 945389 - DNA, 25 bp, Homo sapien
gggctggcgtaaccctggtgccgcc

SEQ ID NO: 945390 - DNA, 25 bp, Homo sapien
aagtgcaatcagacagcccagaagc

SEQ ID NO: 945391 - DNA, 25 bp, Homo sapien
aagaaagtgcaatcagacagcccag

SEQ ID NO: 945392 - DNA, 25 bp, Homo sapien
tgcaatcagacagcccagaagcctt

SEQ ID NO: 945393 - DNA, 25 bp, Homo sapien
agacagcccagaagccttcctcggg

SEQ ID NO: 945394 - DNA, 25 bp, Homo sapien
ggctgaagccgtcttcgcgcggaga

SEQ ID NO: 945395 - DNA, 25 bp, Homo sapien
cctgcagggctgaagccgtcttcgc

SEQ ID NO: 945396 - DNA, 25 bp, Homo sapien
agggctgaagccgtcttcgcgcgga

SEQ ID NO: 945397 - DNA, 25 bp, Homo sapien
tgcagggctgaagccgtcttcgcgc

SEQ ID NO: 945398 - DNA, 25 bp, Homo sapien
ccggctaaaggcccggtccagtctg

SEQ ID NO: 945399 - DNA, 25 bp, Homo sapien
ggtagcagaggtggctgccccattc

SEQ ID NO: 945400 - DNA, 25 bp, Homo sapien
gctaaaggcccggtccagtctgcag

SEQ ID NO: 945401 - DNA, 25 bp, Homo sapien
gacctccccgctgtaggtagcagag

SEQ ID NO: 945402 - DNA, 25 bp, Homo sapien
tggcactcactacattcagaacttt

SEQ ID NO: 945403 - DNA, 25 bp, Homo sapien
ggcccgctcgccttttgccaggaat

SEQ ID NO: 945404 - DNA, 25 bp, Homo sapien
acgatgagcgggtggagcggaccgc

SEQ ID NO: 945405 - DNA, 25 bp, Homo sapien
gccaggaattaaacaaacggcgcga

SEQ ID NO: 945406 - DNA, 25 bp, Homo sapien
acaagggtcgccaccagcacagcga

SEQ ID NO: 945407 - DNA, 25 bp, Homo sapien
agcacagcgacaagaggccacaccg

SEQ ID NO: 945408 - DNA, 25 bp, Homo sapien
aatgaaatccttcatgcgcctctcc

SEQ ID NO: 945409 - DNA, 25 bp, Homo sapien
cattcctccgcgactacaaaggctg

SEQ ID NO: 945410 - DNA, 25 bp, Homo sapien
tctggggaaggagttaccagcactc

SEQ ID NO: 945411 - DNA, 25 bp, Homo sapien
gtgtcagtcggctctccgcacgtgt

SEQ ID NO: 945412 - DNA, 25 bp, Homo sapien
cgcggcctcgcggagcaggtaatca

SEQ ID NO: 945413 - DNA, 25 bp, Homo sapien
ggcccagtcgcgtcgggcctcccga

SEQ ID NO: 945414 - DNA, 25 bp, Homo sapien
gcagggacccgcgaagccaactctg

SEQ ID NO: 945415 - DNA, 25 bp, Homo sapien
tcgtggcgcagtggcaagaaagtgt

SEQ ID NO: 945416 - DNA, 25 bp, Homo sapien
ccctagctcccttctacgagtcggg

SEQ ID NO: 945417 - DNA, 25 bp, Homo sapien
aattaaagccttccggagagaaatg

SEQ ID NO: 945418 - DNA, 25 bp, Homo sapien
ttcgttccatgtagttctgtttttc

SEQ ID NO: 945419 - DNA, 25 bp, Homo sapien
cttactgctttggtgtggcccaagg

SEQ ID NO: 945420 - DNA, 25 bp, Homo sapien
ccttttcgttccatgtagttctgtt

SEQ ID NO: 945421 - DNA, 25 bp, Homo sapien
tccttttcttactgctttggtgtgg

SEQ ID NO: 945422 - DNA, 25 bp, Homo sapien
tagccttcgatatgcaaatgttacc

SEQ ID NO: 945423 - DNA, 25 bp, Homo sapien
tcccatggatacttccacagttcct

SEQ ID NO: 945424 - DNA, 25 bp, Homo sapien
tggcttcttagccttcgatatgcaa

SEQ ID NO: 945425 - DNA, 25 bp, Homo sapien
catggatacttccacagttccttgg

SEQ ID NO: 945426 - DNA, 25 bp, Homo sapien
tcctgaataccacaaaccgatgggt

SEQ ID NO: 945427 - DNA, 25 bp, Homo sapien
gggtctcctgaataccacaaaccga

SEQ ID NO: 945428 - DNA, 25 bp, Homo sapien
gtctcctgaataccacaaaccgatg

SEQ ID NO: 945429 - DNA, 25 bp, Homo sapien
gaataccacaaaccgatgggtcttg

SEQ ID NO: 945430 - DNA, 25 bp, Homo sapien
aacagaggttgggtcatggcctaaa

SEQ ID NO: 945431 - DNA, 25 bp, Homo sapien
ggcaaaagacctgaacgaacacctc

SEQ ID NO: 945432 - DNA, 25 bp, Homo sapien
cctggagggcagatagagtacatgc

SEQ ID NO: 945433 - DNA, 25 bp, Homo sapien
gatctggatccttatagtctgggct

SEQ ID NO: 945434 - DNA, 25 bp, Homo sapien
atcctcatgcctaagcccaccgagt

SEQ ID NO: 945435 - DNA, 25 bp, Homo sapien
tgcagacatctgatggtcatagctc

SEQ ID NO: 945436 - DNA, 25 bp, Homo sapien
taatgcagacatctgatggtcatag

SEQ ID NO: 945437 - DNA, 25 bp, Homo sapien
cagacatctgatggtcatagctcac

SEQ ID NO: 945438 - DNA, 25 bp, Homo sapien
tctcatgtcaagaccaagtggaaca

SEQ ID NO: 945439 - DNA, 25 bp, Homo sapien
ggccaccccttgactgagcctttgg

SEQ ID NO: 945440 - DNA, 25 bp, Homo sapien
tgtggctcttttagatccagattga

SEQ ID NO: 945441 - DNA, 25 bp, Homo sapien
tttggcatttccctcatgtggctct

SEQ ID NO: 945442 - DNA, 25 bp, Homo sapien
ttacagctgcctaatgttttccaca

SEQ ID NO: 945443 - DNA, 25 bp, Homo sapien
tacagctgcctaatgttttccacaa

SEQ ID NO: 945444 - DNA, 25 bp, Homo sapien
acagctgcctaatgttttccacaaa

SEQ ID NO: 945445 - DNA, 25 bp, Homo sapien
ctgctgagaagaggatccggagaaa

SEQ ID NO: 945446 - DNA, 25 bp, Homo sapien
tctgccctgactagcttcacaggaa

SEQ ID NO: 945447 - DNA, 25 bp, Homo sapien
agatgttctgccctgactagcttca

SEQ ID NO: 945448 - DNA, 25 bp, Homo sapien
tgagaagaggatccggagaaaagat

SEQ ID NO: 945449 - DNA, 25 bp, Homo sapien
cagagacgcgggaacataaaacaca

SEQ ID NO: 945450 - DNA, 25 bp, Homo sapien
aaatgatcgcacatcggttccccag

SEQ ID NO: 945451 - DNA, 25 bp, Homo sapien
gagtagctttggcactcccaaggct

SEQ ID NO: 945452 - DNA, 25 bp, Homo sapien
taaaacacattccagcggttggcat

SEQ ID NO: 945453 - DNA, 25 bp, Homo sapien
tgaacaaattcctcctcgcaactga

SEQ ID NO: 945454 - DNA, 25 bp, Homo sapien
atttatttcgctctccacactgtgg

SEQ ID NO: 945455 - DNA, 25 bp, Homo sapien
gaggcgttctcccttataaggacac

SEQ ID NO: 945456 - DNA, 25 bp, Homo sapien
tggaatgtttcagacgtgaacagct

SEQ ID NO: 945457 - DNA, 25 bp, Homo sapien
tgcattctgggactggacataggac

SEQ ID NO: 945458 - DNA, 25 bp, Homo sapien
ggcgatggccatgactgtgcactta

SEQ ID NO: 945459 - DNA, 25 bp, Homo sapien
ttgaccagtaaatcccttgaatgag

SEQ ID NO: 945460 - DNA, 25 bp, Homo sapien
tataaaggtcagtgacccagcagag

SEQ ID NO: 945461 - DNA, 25 bp, Homo sapien
tcttaattgacccattggttgttca

SEQ ID NO: 945462 - DNA, 25 bp, Homo sapien
atttcttaattgacccattggttgt

SEQ ID NO: 945463 - DNA, 25 bp, Homo sapien
taattgacccattggttgttcagaa

SEQ ID NO: 945464 - DNA, 25 bp, Homo sapien
tatatttgtatagttctaaaagttc

SEQ ID NO: 945465 - DNA, 25 bp, Homo sapien
cacgggtgatgtgtgcactcctata

SEQ ID NO: 945466 - DNA, 25 bp, Homo sapien
cttgcagccattgttaactcaggac

SEQ ID NO: 945467 - DNA, 25 bp, Homo sapien
tgtgggcatgaccttcagaagactg

SEQ ID NO: 945468 - DNA, 25 bp, Homo sapien
gaattccatgtatccagcttgcagc

SEQ ID NO: 945469 - DNA, 25 bp, Homo sapien
gtcataagcaagtgggcctccaatg

SEQ ID NO: 945470 - DNA, 25 bp, Homo sapien
gtgggcctccaatggaaaatcccag

SEQ ID NO: 945471 - DNA, 25 bp, Homo sapien
tgtcataagcaagtgggcctccaat

SEQ ID NO: 945472 - DNA, 25 bp, Homo sapien
catgttctgctaaatccaaaagagc

SEQ ID NO: 945473 - DNA, 25 bp, Homo sapien
gagaatttggattgtgtaaagccca

SEQ ID NO: 945474 - DNA, 25 bp, Homo sapien
gataagtcagtcctattggttgcaa

SEQ ID NO: 945475 - DNA, 25 bp, Homo sapien
tttcagctcgaccttgtaaacgaag

SEQ ID NO: 945476 - DNA, 25 bp, Homo sapien
gaaccgatggatactttcaagcaat

SEQ ID NO: 945477 - DNA, 25 bp, Homo sapien
tcatcgcggtgtcttgtgagtagga

SEQ ID NO: 945478 - DNA, 25 bp, Homo sapien
tagttcccacattcgatgacctctg

SEQ ID NO: 945479 - DNA, 25 bp, Homo sapien
tgcccagtttagagcattgccaaag

SEQ ID NO: 945480 - DNA, 25 bp, Homo sapien
ggagagagttgctgtattacggcaa

SEQ ID NO: 945481 - DNA, 25 bp, Homo sapien
gtgaaaatattctgccctttcagga

SEQ ID NO: 945482 - DNA, 25 bp, Homo sapien
caggcacatatgaattaagaagagc

SEQ ID NO: 945483 - DNA, 25 bp, Homo sapien
tacggcaatactgtctgggatcctt

SEQ ID NO: 945484 - DNA, 25 bp, Homo sapien
tgacggttcattgccccataggtga

SEQ ID NO: 945485 - DNA, 25 bp, Homo sapien
tcccagagaatgtgcatagccaagg

SEQ ID NO: 945486 - DNA, 25 bp, Homo sapien
tcatcaacaaggagtagtacaggta

SEQ ID NO: 945487 - DNA, 25 bp, Homo sapien
gaatttcttccttagttcccagaga

SEQ ID NO: 945488 - DNA, 25 bp, Homo sapien
gatgaataattttggtacttgttgg

SEQ ID NO: 945489 - DNA, 25 bp, Homo sapien
tggtacttgttggtttagaagaatc

SEQ ID NO: 945490 - DNA, 25 bp, Homo sapien
tacttgttggtttagaagaatctgc

SEQ ID NO: 945491 - DNA, 25 bp, Homo sapien
ggtttagaagaatctgcacagtttt

SEQ ID NO: 945492 - DNA, 25 bp, Homo sapien
ggtgaagaataactttcagaagaga

SEQ ID NO: 945493 - DNA, 25 bp, Homo sapien
gaagtagaagttccaccatgacact

SEQ ID NO: 945494 - DNA, 25 bp, Homo sapien
ttgccacctcgatagaagtcttcct

SEQ ID NO: 945495 - DNA, 25 bp, Homo sapien
ccatgacactttgccacctcgatag

SEQ ID NO: 945496 - DNA, 25 bp, Homo sapien
tcagaaggacagtcgataaaccaat

SEQ ID NO: 945497 - DNA, 25 bp, Homo sapien
gcctttttgaagattgagtcacaga

SEQ ID NO: 945498 - DNA, 25 bp, Homo sapien
tgatctcttcaaggcttaaagcaga

SEQ ID NO: 945499 - DNA, 25 bp, Homo sapien
ccatccctgaaatatgtgtgggtgc

SEQ ID NO: 945500 - DNA, 25 bp, Homo sapien
tcttgggtcatccacagaggacagt

SEQ ID NO: 945501 - DNA, 25 bp, Homo sapien
caaggtctaacctgccattgcagaa

SEQ ID NO: 945502 - DNA, 25 bp, Homo sapien
cattcctttgagatcctggtagaaa

SEQ ID NO: 945503 - DNA, 25 bp, Homo sapien
gaaagtgaaggtttgctactcggct

SEQ ID NO: 945504 - DNA, 25 bp, Homo sapien
aatctgctttaaatgctctgaaatc

SEQ ID NO: 945505 - DNA, 25 bp, Homo sapien
aataatcatattggcattcagagaa

SEQ ID NO: 945506 - DNA, 25 bp, Homo sapien
taatgtccttagagctggtcccatc

SEQ ID NO: 945507 - DNA, 25 bp, Homo sapien
ggtcccatctcgcacaaatagtgag

SEQ ID NO: 945508 - DNA, 25 bp, Homo sapien
gcacttctttgcttgttggacttga

SEQ ID NO: 945509 - DNA, 25 bp, Homo sapien
cacaaatcttggctctcgaatgcac

SEQ ID NO: 945510 - DNA, 25 bp, Homo sapien
catgtatcggatcaatgagattgcc

SEQ ID NO: 945511 - DNA, 25 bp, Homo sapien
ttgaaatggttaatgagggcttcct

SEQ ID NO: 945512 - DNA, 25 bp, Homo sapien
ggtccatgtgtgatgcccatatcaa

SEQ ID NO: 945513 - DNA, 25 bp, Homo sapien
gacacagtttggtctttaggagcat

SEQ ID NO: 945514 - DNA, 25 bp, Homo sapien
tgtactcattgcagacggattagcc

SEQ ID NO: 945515 - DNA, 25 bp, Homo sapien
ggctgtagactaaaatccaacttgt

SEQ ID NO: 945516 - DNA, 25 bp, Homo sapien
gactctagaagaaaccgaagaagtc

SEQ ID NO: 945517 - DNA, 25 bp, Homo sapien
ccagggtgatgtaggagatcacaaa

SEQ ID NO: 945518 - DNA, 25 bp, Homo sapien
ggagatcacaaaaggccacctattc

SEQ ID NO: 945519 - DNA, 25 bp, Homo sapien
gaaaccgaagaagtctcacttccag

SEQ ID NO: 945520 - DNA, 25 bp, Homo sapien
tcttcctcctacgatgctagagaaa

SEQ ID NO: 945521 - DNA, 25 bp, Homo sapien
tatatgtggggaaaaccatctcttt

SEQ ID NO: 945522 - DNA, 25 bp, Homo sapien
cctcctacgatgctagagaaaagta

SEQ ID NO: 945523 - DNA, 25 bp, Homo sapien
gggaaaaccatctcttttagtgctg

SEQ ID NO: 945524 - DNA, 25 bp, Homo sapien
aaacatgatacaggatatgaaagga

SEQ ID NO: 945525 - DNA, 25 bp, Homo sapien
taacaaacatgatacaggatatgaa

SEQ ID NO: 945526 - DNA, 25 bp, Homo sapien
gaaataacaaacatgatacaggata

SEQ ID NO: 945527 - DNA, 25 bp, Homo sapien
acaaacatgatacaggatatgaaag

SEQ ID NO: 945528 - DNA, 25 bp, Homo sapien
aagcagtgtagagaagaacacaaat

SEQ ID NO: 945529 - DNA, 25 bp, Homo sapien
agcagtgtagagaagaacacaaatg

SEQ ID NO: 945530 - DNA, 25 bp, Homo sapien
gcagtgtagagaagaacacaaatga

SEQ ID NO: 945531 - DNA, 25 bp, Homo sapien
gagaacagcatgtatatagcacagg

SEQ ID NO: 945532 - DNA, 25 bp, Homo sapien
gaacacatattaccatgaggaagcc

SEQ ID NO: 945533 - DNA, 25 bp, Homo sapien
gaagccctctaatcaggcaggaatg

SEQ ID NO: 945534 - DNA, 25 bp, Homo sapien
gaaataaggcaatctcaacagagag

SEQ ID NO: 945535 - DNA, 25 bp, Homo sapien
gtaattcattcagggaggcaaaagc

SEQ ID NO: 945536 - DNA, 25 bp, Homo sapien
caagctctgcgggtaggcatatttc

SEQ ID NO: 945537 - DNA, 25 bp, Homo sapien
caaaatctgtaattagaggttagcc

SEQ ID NO: 945538 - DNA, 25 bp, Homo sapien
tgtgaccagtggatatcaatgaaac

SEQ ID NO: 945539 - DNA, 25 bp, Homo sapien
aatcctaggtagaaagacactcttt

SEQ ID NO: 945540 - DNA, 25 bp, Homo sapien
gccttcaatggaaaatcctaggtag

SEQ ID NO: 945541 - DNA, 25 bp, Homo sapien
ttctatatcatatgccagagggcct

SEQ ID NO: 945542 - DNA, 25 bp, Homo sapien
tcatatgccagagggccttcaatgg

SEQ ID NO: 945543 - DNA, 25 bp, Homo sapien
ggaggcaggccaagaaataaggacc

SEQ ID NO: 945544 - DNA, 25 bp, Homo sapien
aaaagtgtgcttgcctgcttggacc

SEQ ID NO: 945545 - DNA, 25 bp, Homo sapien
cagcctgaccagttagacgacgcag

SEQ ID NO: 945546 - DNA, 25 bp, Homo sapien
tgcttggacctgcacatgcgcttgt

SEQ ID NO: 945547 - DNA, 25 bp, Homo sapien
ttgagttttgctgcagtaggaaggc

SEQ ID NO: 945548 - DNA, 25 bp, Homo sapien
tatactttccatggtggtagcatct

SEQ ID NO: 945549 - DNA, 25 bp, Homo sapien
tccagcaaacctatctgctctcaga

SEQ ID NO: 945550 - DNA, 25 bp, Homo sapien
atggtggtagcatctttgtagtttg

SEQ ID NO: 945551 - DNA, 25 bp, Homo sapien
ccagcaaacctatctgctctcagag

SEQ ID NO: 945552 - DNA, 25 bp, Homo sapien
gaatctggatagtgtaaagaccaac

SEQ ID NO: 945553 - DNA, 25 bp, Homo sapien
ggaatggtccactttcctgataaaa

SEQ ID NO: 945554 - DNA, 25 bp, Homo sapien
tatttcctgaaacaacgactgactt

SEQ ID NO: 945555 - DNA, 25 bp, Homo sapien
gggatgtgaacttgctaagagccaa

SEQ ID NO: 945556 - DNA, 25 bp, Homo sapien
aagctcttgaggctttttccgcagc

SEQ ID NO: 945557 - DNA, 25 bp, Homo sapien
tactatcagtttgcctttgggattc

SEQ ID NO: 945558 - DNA, 25 bp, Homo sapien
tctctgggacttctgtggtgaccag

SEQ ID NO: 945559 - DNA, 25 bp, Homo sapien
tatacatgtcatatcgtctctggga

SEQ ID NO: 945560 - DNA, 25 bp, Homo sapien
ggtcattaacagtaatgctcctaca

SEQ ID NO: 945561 - DNA, 25 bp, Homo sapien
taggagatgtgttaggtcattaaca

SEQ ID NO: 945562 - DNA, 25 bp, Homo sapien
aatgctcctacagtttttgttccca

SEQ ID NO: 945563 - DNA, 25 bp, Homo sapien
tacagtttttgttcccatccaacca

SEQ ID NO: 945564 - DNA, 25 bp, Homo sapien
aatattggtttaggagactctgccc

SEQ ID NO: 945565 - DNA, 25 bp, Homo sapien
gattccgggatctcatgcagtttaa

SEQ ID NO: 945566 - DNA, 25 bp, Homo sapien
caccttgcgctgtcttgtaagcaga

SEQ ID NO: 945567 - DNA, 25 bp, Homo sapien
caatcagagggtgaatgatacgcac

SEQ ID NO: 945568 - DNA, 25 bp, Homo sapien
tagccccttctcttacaaacagtga

SEQ ID NO: 945569 - DNA, 25 bp, Homo sapien
tggccaggatatccctagagctagc

SEQ ID NO: 945570 - DNA, 25 bp, Homo sapien
tacatcccgttgcttggaattggcc

SEQ ID NO: 945571 - DNA, 25 bp, Homo sapien
gcctcttttctagatgctaccagtg

SEQ ID NO: 945572 - DNA, 25 bp, Homo sapien
ccttgactccaaaatggatggtgcc

SEQ ID NO: 945573 - DNA, 25 bp, Homo sapien
cgtgaattcatacaagctgatgcaa

SEQ ID NO: 945574 - DNA, 25 bp, Homo sapien
ggctcccgaatacacttcttggctt

SEQ ID NO: 945575 - DNA, 25 bp, Homo sapien
gctgatgcaaatcggaagacttcat

SEQ ID NO: 945576 - DNA, 25 bp, Homo sapien
aattgtcccggatcatgattgtcac

SEQ ID NO: 945577 - DNA, 25 bp, Homo sapien
tggcatacaagtcaattgttcaggt

SEQ ID NO: 945578 - DNA, 25 bp, Homo sapien
tcttgtttgatatctctgatctctc

SEQ ID NO: 945579 - DNA, 25 bp, Homo sapien
catggaactgatcaaaaggatatgg

SEQ ID NO: 945580 - DNA, 25 bp, Homo sapien
ttcactgagcagaatttgcccgtat

SEQ ID NO: 945581 - DNA, 25 bp, Homo sapien
cagaatttgcccgtattgctcatta

SEQ ID NO: 945582 - DNA, 25 bp, Homo sapien
ttcctgcaggactaatcctgttact

SEQ ID NO: 945583 - DNA, 25 bp, Homo sapien
tacaaggtccttctcagttaattcc

SEQ ID NO: 945584 - DNA, 25 bp, Homo sapien
tcaggtagagatacttgtttactca

SEQ ID NO: 945585 - DNA, 25 bp, Homo sapien
caggtagagatacttgtttactcat

SEQ ID NO: 945586 - DNA, 25 bp, Homo sapien
ttcaggtagagatacttgtttactc

SEQ ID NO: 945587 - DNA, 25 bp, Homo sapien
tatatgtataatattgctaaaggct

SEQ ID NO: 945588 - DNA, 25 bp, Homo sapien
tattgctaaaggctgactcttaaaa

SEQ ID NO: 945589 - DNA, 25 bp, Homo sapien
taatattgctaaaggctgactctta

SEQ ID NO: 945590 - DNA, 25 bp, Homo sapien
tgtataatattgctaaaggctgact

SEQ ID NO: 945591 - DNA, 25 bp, Homo sapien
tagtcctgggccaattagcagaacc

SEQ ID NO: 945592 - DNA, 25 bp, Homo sapien
gagcaactggcacaatgaacgctat

SEQ ID NO: 945593 - DNA, 25 bp, Homo sapien
tctgcagatcacaactagtcctggg

SEQ ID NO: 945594 - DNA, 25 bp, Homo sapien
gaataccatatttgcaccaggatga

SEQ ID NO: 945595 - DNA, 25 bp, Homo sapien
tgatattcccatctctctgccgagg

SEQ ID NO: 945596 - DNA, 25 bp, Homo sapien
gggtatgacatagcgctgttccagc

SEQ ID NO: 945597 - DNA, 25 bp, Homo sapien
cactgggcctgccatagagtactcc

SEQ ID NO: 945598 - DNA, 25 bp, Homo sapien
aaatagtctacttggtggacctgcc

SEQ ID NO: 945599 - DNA, 25 bp, Homo sapien
aatagacatgtcattgatccttcca

SEQ ID NO: 945600 - DNA, 25 bp, Homo sapien
tctattcccacggtcatatccttga

SEQ ID NO: 945601 - DNA, 25 bp, Homo sapien
tcgcgccaaagttcaggcactgaag

SEQ ID NO: 945602 - DNA, 25 bp, Homo sapien
aatggcctctcacccgatcgacttt

SEQ ID NO: 945603 - DNA, 25 bp, Homo sapien
tccgtgcctccgggaaaggatgctc

SEQ ID NO: 945604 - DNA, 25 bp, Homo sapien
actcactcactttccgtgcctccgg

SEQ ID NO: 945605 - DNA, 25 bp, Homo sapien
ctttccgtgcctccgggaaaggatg

SEQ ID NO: 945606 - DNA, 25 bp, Homo sapien
ctcactttccgtgcctccgggaaag

SEQ ID NO: 945607 - DNA, 25 bp, Homo sapien
ctggatcccttagattagttcccct

SEQ ID NO: 945608 - DNA, 25 bp, Homo sapien
cgttctggaaagcagctatgaggaa

SEQ ID NO: 945609 - DNA, 25 bp, Homo sapien
agttcccctttcttgataatttgca

SEQ ID NO: 945610 - DNA, 25 bp, Homo sapien
tcttgataatttgcaagagtcacgt

SEQ ID NO: 945611 - DNA, 25 bp, Homo sapien
ttaaaatgcaatagactggactgct

SEQ ID NO: 945612 - DNA, 25 bp, Homo sapien
aagaatacccttctcctaggtagca

SEQ ID NO: 945613 - DNA, 25 bp, Homo sapien
gcagaacagacttggtccttgttca

SEQ ID NO: 945614 - DNA, 25 bp, Homo sapien
ccttgttcagtttgccggaggatat

SEQ ID NO: 945615 - DNA, 25 bp, Homo sapien
tataggaatagcttccttgccaggt

SEQ ID NO: 945616 - DNA, 25 bp, Homo sapien
actaccacctggtccaagccttcct

SEQ ID NO: 945617 - DNA, 25 bp, Homo sapien
tcctggattataggaatagcttcct

SEQ ID NO: 945618 - DNA, 25 bp, Homo sapien
tctcaaaaaagcagccggaatgacc

SEQ ID NO: 945619 - DNA, 25 bp, Homo sapien
tgaggccatttctcacacagcgttt

SEQ ID NO: 945620 - DNA, 25 bp, Homo sapien
ctggaggaggtcccttttgactcta

SEQ ID NO: 945621 - DNA, 25 bp, Homo sapien
actctaggtccccagtgtcttaaga

SEQ ID NO: 945622 - DNA, 25 bp, Homo sapien
tgtcactcacagtcaccgaatgagg

SEQ ID NO: 945623 - DNA, 25 bp, Homo sapien
cttcttttagctggtgtcctctttc

SEQ ID NO: 945624 - DNA, 25 bp, Homo sapien
tcagaaatttaaccagccagtctct

SEQ ID NO: 945625 - DNA, 25 bp, Homo sapien
ttcttttagctggtgtcctctttca

SEQ ID NO: 945626 - DNA, 25 bp, Homo sapien
cagaaatttaaccagccagtctctc

SEQ ID NO: 945627 - DNA, 25 bp, Homo sapien
tcctcttctgatggctaggagacat

SEQ ID NO: 945628 - DNA, 25 bp, Homo sapien
gaaaatgtcatcgttttatatcaga

SEQ ID NO: 945629 - DNA, 25 bp, Homo sapien
taaaaactgaggcattaaattgtga

SEQ ID NO: 945630 - DNA, 25 bp, Homo sapien
tgtgaagtcttctgttctcccagta

SEQ ID NO: 945631 - DNA, 25 bp, Homo sapien
taaaaaaccaacgtctacaatctga

SEQ ID NO: 945632 - DNA, 25 bp, Homo sapien
tgattgcacattgggaaataaggat

SEQ ID NO: 945633 - DNA, 25 bp, Homo sapien
gacttgattgcacattgggaaataa

SEQ ID NO: 945634 - DNA, 25 bp, Homo sapien
caacgtctacaatctgatttttatg

SEQ ID NO: 945635 - DNA, 25 bp, Homo sapien
attgtgtatatgctgaaaaacctgc

SEQ ID NO: 945636 - DNA, 25 bp, Homo sapien
gaatgtactgtttagcccatgaaag

SEQ ID NO: 945637 - DNA, 25 bp, Homo sapien
catttgtaggtgagacaggatagtc

SEQ ID NO: 945638 - DNA, 25 bp, Homo sapien
gagaacgactctccactgaggaata

SEQ ID NO: 945639 - DNA, 25 bp, Homo sapien
ttactcatgaagttgatctttgaat

SEQ ID NO: 945640 - DNA, 25 bp, Homo sapien
gaagttgatctttgaatttaattgg

SEQ ID NO: 945641 - DNA, 25 bp, Homo sapien
agttgatctttgaatttaattggac

SEQ ID NO: 945642 - DNA, 25 bp, Homo sapien
tcatgaagttgatctttgaatttaa

SEQ ID NO: 945643 - DNA, 25 bp, Homo sapien
gaataacttcatacactgtactgtg

SEQ ID NO: 945644 - DNA, 25 bp, Homo sapien
actgtactgtgcaaatcttgccccg

SEQ ID NO: 945645 - DNA, 25 bp, Homo sapien
tcttgccccgatacacaatcagagg

SEQ ID NO: 945646 - DNA, 25 bp, Homo sapien
gtgctgaataacttcatacactgta

SEQ ID NO: 945647 - DNA, 25 bp, Homo sapien
aatagcaaaagagaagatatcagga

SEQ ID NO: 945648 - DNA, 25 bp, Homo sapien
gaaagctggcagtactgtaaaggaa

SEQ ID NO: 945649 - DNA, 25 bp, Homo sapien
tatcattatcttttctatacctcag

SEQ ID NO: 945650 - DNA, 25 bp, Homo sapien
gatatcaggatatcttagaatcaga

SEQ ID NO: 945651 - DNA, 25 bp, Homo sapien
aatccctcatcatattgcaaataag

SEQ ID NO: 945652 - DNA, 25 bp, Homo sapien
taagtaaagacagtaccaaggaatg

SEQ ID NO: 945653 - DNA, 25 bp, Homo sapien
aattatgtgcgcaagggtggcttaa

SEQ ID NO: 945654 - DNA, 25 bp, Homo sapien
caaggaatgtggaacactcaaagga

SEQ ID NO: 945655 - DNA, 25 bp, Homo sapien
ctcatgttaatttgacctgctaggt

SEQ ID NO: 945656 - DNA, 25 bp, Homo sapien
cttctgtcatttttgtgtcaaggaa

SEQ ID NO: 945657 - DNA, 25 bp, Homo sapien
acttgctatagctctcacatgaagc

SEQ ID NO: 945658 - DNA, 25 bp, Homo sapien
tttagtggaacatcttagctttttg

SEQ ID NO: 945659 - DNA, 25 bp, Homo sapien
taccacacaatatgccaagagatta

SEQ ID NO: 945660 - DNA, 25 bp, Homo sapien
caccgtggcacctagcttattttga

SEQ ID NO: 945661 - DNA, 25 bp, Homo sapien
caattggtagagacagaagtaatcc

SEQ ID NO: 945662 - DNA, 25 bp, Homo sapien
ctcctgaaagaggtgctaaatggac

SEQ ID NO: 945663 - DNA, 25 bp, Homo sapien
cgtatacatagctgccattctggct

SEQ ID NO: 945664 - DNA, 25 bp, Homo sapien
gctacgtatacatagctgccattct

SEQ ID NO: 945665 - DNA, 25 bp, Homo sapien
ttacatagctacgtatacatagctg

SEQ ID NO: 945666 - DNA, 25 bp, Homo sapien
tggcttctcatgcagatcctcctcc

SEQ ID NO: 945667 - DNA, 25 bp, Homo sapien
aatggccaattaagaacctcagcag

SEQ ID NO: 945668 - DNA, 25 bp, Homo sapien
gacatggctccaaatcaagttattc

SEQ ID NO: 945669 - DNA, 25 bp, Homo sapien
ccaaatcaagttattctgtttctga

SEQ ID NO: 945670 - DNA, 25 bp, Homo sapien
tttctgatagaaataagcagggctt

SEQ ID NO: 945671 - DNA, 25 bp, Homo sapien
gggttgcagtcacccaagtgatgca

SEQ ID NO: 945672 - DNA, 25 bp, Homo sapien
tagggtctcctgatccgctgtttat

SEQ ID NO: 945673 - DNA, 25 bp, Homo sapien
tttgccatctcatgcacctttaggg

SEQ ID NO: 945674 - DNA, 25 bp, Homo sapien
gcatgaggtatcttcaagggtgtga

SEQ ID NO: 945675 - DNA, 25 bp, Homo sapien
tatattccgaagtcatccagagcat

SEQ ID NO: 945676 - DNA, 25 bp, Homo sapien
aattcatatattccgaagtcatcca

SEQ ID NO: 945677 - DNA, 25 bp, Homo sapien
tcatatattccgaagtcatccagag

SEQ ID NO: 945678 - DNA, 25 bp, Homo sapien
caacaaattcatatattccgaagtc

SEQ ID NO: 945679 - DNA, 25 bp, Homo sapien
tgaaacttggctccctgtgattttg

SEQ ID NO: 945680 - DNA, 25 bp, Homo sapien
tatatagaagaggaagttgcggtta

SEQ ID NO: 945681 - DNA, 25 bp, Homo sapien
ggacaaagaagcaatcctggcccct

SEQ ID NO: 945682 - DNA, 25 bp, Homo sapien
taattttcctaaggtgacatgaggg

SEQ ID NO: 945683 - DNA, 25 bp, Homo sapien
ttgagctttcctgtattctgtttct

SEQ ID NO: 945684 - DNA, 25 bp, Homo sapien
atgtttgagctttcctgtattctgt

SEQ ID NO: 945685 - DNA, 25 bp, Homo sapien
gtttgagctttcctgtattctgttt

SEQ ID NO: 945686 - DNA, 25 bp, Homo sapien
aaatgtttgagctttcctgtattct

SEQ ID NO: 945687 - DNA, 25 bp, Homo sapien
gacacatggatataatcaaaaatag

SEQ ID NO: 945688 - DNA, 25 bp, Homo sapien
tcaaaaatagtgatattccagttat

SEQ ID NO: 945689 - DNA, 25 bp, Homo sapien
ttatacttgctaaaggtgacaatga

SEQ ID NO: 945690 - DNA, 25 bp, Homo sapien
atattccagttatacttgctaaagg

SEQ ID NO: 945691 - DNA, 25 bp, Homo sapien
cgttgaggagtgtgccatttccaca

SEQ ID NO: 945692 - DNA, 25 bp, Homo sapien
agctgactcatgtccctccggagat

SEQ ID NO: 945693 - DNA, 25 bp, Homo sapien
ttcactgattatggcagctgactca

SEQ ID NO: 945694 - DNA, 25 bp, Homo sapien
atgtccctccggagatgaaggtgcc

SEQ ID NO: 945695 - DNA, 25 bp, Homo sapien
cttcactggcgacaccaaacaccaa

SEQ ID NO: 945696 - DNA, 25 bp, Homo sapien
ttcactggcgacaccaaacaccaat

SEQ ID NO: 945697 - DNA, 25 bp, Homo sapien
gcttcactggcgacaccaaacacca

SEQ ID NO: 945698 - DNA, 25 bp, Homo sapien
agcttcactggcgacaccaaacacc

SEQ ID NO: 945699 - DNA, 25 bp, Homo sapien
tgttattcttagtgcgtactccaat

SEQ ID NO: 945700 - DNA, 25 bp, Homo sapien
tctcatatgttattcttagtgcgta

SEQ ID NO: 945701 - DNA, 25 bp, Homo sapien
cttagtgcgtactccaatatttggc

SEQ ID NO: 945702 - DNA, 25 bp, Homo sapien
tcttagtgcgtactccaatatttgg

SEQ ID NO: 945703 - DNA, 25 bp, Homo sapien
ttttgtaatttccaaggtgttgaga

SEQ ID NO: 945704 - DNA, 25 bp, Homo sapien
cttttctacctaggtataagatagg

SEQ ID NO: 945705 - DNA, 25 bp, Homo sapien
ttattaggatcccttccttgtatgt

SEQ ID NO: 945706 - DNA, 25 bp, Homo sapien
gaagtgcaaggccagcatgcattca

SEQ ID NO: 945707 - DNA, 25 bp, Homo sapien
taggtataagataggggaagtgcaa

SEQ ID NO: 945708 - DNA, 25 bp, Homo sapien
aaatgagtttcatcttgcctgccgg

SEQ ID NO: 945709 - DNA, 25 bp, Homo sapien
ccggttatgttgttgtaagcacagc

SEQ ID NO: 945710 - DNA, 25 bp, Homo sapien
tcagtcctcctaatccaggagtagg

SEQ ID NO: 945711 - DNA, 25 bp, Homo sapien
tcagatgcaacttctaagcgaggcc

SEQ ID NO: 945712 - DNA, 25 bp, Homo sapien
gagcaggtccttgcttagactccca

SEQ ID NO: 945713 - DNA, 25 bp, Homo sapien
catcttagaattggacgagcaggtc

SEQ ID NO: 945714 - DNA, 25 bp, Homo sapien
gtaacacaagtaatcacaacatagg

SEQ ID NO: 945715 - DNA, 25 bp, Homo sapien
gactcccaataaatgatgaggacct

SEQ ID NO: 945716 - DNA, 25 bp, Homo sapien
ccattggtaagctagccgagtgccc

SEQ ID NO: 945717 - DNA, 25 bp, Homo sapien
tccttggttactggagcaatatgaa

SEQ ID NO: 945718 - DNA, 25 bp, Homo sapien
tatatgatgggcataatgatatcac

SEQ ID NO: 945719 - DNA, 25 bp, Homo sapien
ccagagggaggatgaatctgcacca

SEQ ID NO: 945720 - DNA, 25 bp, Homo sapien
gacctctgacgccatggacagtgtg

SEQ ID NO: 945721 - DNA, 25 bp, Homo sapien
ggaaccacagacttattcacagagc

SEQ ID NO: 945722 - DNA, 25 bp, Homo sapien
ccgtgacttgtatcttctgactggc

SEQ ID NO: 945723 - DNA, 25 bp, Homo sapien
tgttgaccttcacgatgtaattgcc

SEQ ID NO: 945724 - DNA, 25 bp, Homo sapien
gaaaggaaagttgtgaagaccttga

SEQ ID NO: 945725 - DNA, 25 bp, Homo sapien
aaaggaaagttgtgaagaccttgag

SEQ ID NO: 945726 - DNA, 25 bp, Homo sapien
aaagaagagtggcttctaggtactg

SEQ ID NO: 945727 - DNA, 25 bp, Homo sapien
ggtgataatccttttcaaagaagag

SEQ ID NO: 945728 - DNA, 25 bp, Homo sapien
ggggcaaatgcagagagaacctgat

SEQ ID NO: 945729 - DNA, 25 bp, Homo sapien
agagaacctgatcaggtgataatcc

SEQ ID NO: 945730 - DNA, 25 bp, Homo sapien
aagaccccaagtgtgtcaccgaagg

SEQ ID NO: 945731 - DNA, 25 bp, Homo sapien
aagggctccatgaaagcatcctgtc

SEQ ID NO: 945732 - DNA, 25 bp, Homo sapien
ggtatattttgcactgaaagacccc

SEQ ID NO: 945733 - DNA, 25 bp, Homo sapien
ccatgcatgcagtgccctgttctca

SEQ ID NO: 945734 - DNA, 25 bp, Homo sapien
tctgttatggcctgctcaagaagtg

SEQ ID NO: 945735 - DNA, 25 bp, Homo sapien
tatggcctgctcaagaagtgtagtc

SEQ ID NO: 945736 - DNA, 25 bp, Homo sapien
gtagtcatatcatcttggaggggct

SEQ ID NO: 945737 - DNA, 25 bp, Homo sapien
tctgttttctgttatggcctgctca

SEQ ID NO: 945738 - DNA, 25 bp, Homo sapien
tgagtttgatctttcgctcaacgcc

SEQ ID NO: 945739 - DNA, 25 bp, Homo sapien
ctctagaccaggtgaggtttcctcc

SEQ ID NO: 945740 - DNA, 25 bp, Homo sapien
ggacatcgcgtcaatctggcttata

SEQ ID NO: 945741 - DNA, 25 bp, Homo sapien
tagtcacctgtgacttaggtttccg

SEQ ID NO: 945742 - DNA, 25 bp, Homo sapien
tatttaccggcttaactgaagcacc

SEQ ID NO: 945743 - DNA, 25 bp, Homo sapien
taagaccggcgatcgcagtggtcgc

SEQ ID NO: 945744 - DNA, 25 bp, Homo sapien
gacaggataccctgggtcggctcct

SEQ ID NO: 945745 - DNA, 25 bp, Homo sapien
tttagttcatcgttgctaccgccgg

SEQ ID NO: 945746 - DNA, 25 bp, Homo sapien
cctcctcaggatttcgatatgcaaa

SEQ ID NO: 945747 - DNA, 25 bp, Homo sapien
aaatcaaatctctcatgacccgaca

SEQ ID NO: 945748 - DNA, 25 bp, Homo sapien
gtcgcggcggctgaagcaaaggctt

SEQ ID NO: 945749 - DNA, 25 bp, Homo sapien
acccgacaggtaagtcgcggcggct

SEQ ID NO: 945750 - DNA, 25 bp, Homo sapien
ttgcaaggtcttccgcatccaggct

SEQ ID NO: 945751 - DNA, 25 bp, Homo sapien
tgtctgtcatatgcgagctgatagc

SEQ ID NO: 945752 - DNA, 25 bp, Homo sapien
tggagcactgctccagcgggtacca

SEQ ID NO: 945753 - DNA, 25 bp, Homo sapien
aacagcccgagcttccttgcaaggt

SEQ ID NO: 945754 - DNA, 25 bp, Homo sapien
ccagtggaatgagtgtagatataca

SEQ ID NO: 945755 - DNA, 25 bp, Homo sapien
agtctttagcttcctgaatggcacc

SEQ ID NO: 945756 - DNA, 25 bp, Homo sapien
aatattcaactggagagatacagca

SEQ ID NO: 945757 - DNA, 25 bp, Homo sapien
gaatggcacctggaatatagcagat

SEQ ID NO: 945758 - DNA, 25 bp, Homo sapien
gctccttaggaggatgatttctcat

SEQ ID NO: 945759 - DNA, 25 bp, Homo sapien
acctcggtgtcagctccttaggagg

SEQ ID NO: 945760 - DNA, 25 bp, Homo sapien
gtcagctccttaggaggatgatttc

SEQ ID NO: 945761 - DNA, 25 bp, Homo sapien
cagctccttaggaggatgatttctc

SEQ ID NO: 945762 - DNA, 25 bp, Homo sapien
aagtaggcacccataaaattaggct

SEQ ID NO: 945763 - DNA, 25 bp, Homo sapien
gaaggacttatattaaagtaggcac

SEQ ID NO: 945764 - DNA, 25 bp, Homo sapien
cataaaattaggctgtaggccgggc

SEQ ID NO: 945765 - DNA, 25 bp, Homo sapien
cataatctatcaagaaggacttata

SEQ ID NO: 945766 - DNA, 25 bp, Homo sapien
acgtgttcccatctactgtctgtca

SEQ ID NO: 945767 - DNA, 25 bp, Homo sapien
gatcgtttttcagccccgtttctga

SEQ ID NO: 945768 - DNA, 25 bp, Homo sapien
tacaacagacgttttgagatgtcaa

SEQ ID NO: 945769 - DNA, 25 bp, Homo sapien
tactgtcctagtgaatagcttccac

SEQ ID NO: 945770 - DNA, 25 bp, Homo sapien
tacactattagatgcgtttacatcc

SEQ ID NO: 945771 - DNA, 25 bp, Homo sapien
gatttgttactatcaagttgctgta

SEQ ID NO: 945772 - DNA, 25 bp, Homo sapien
ttagagattgaaaagagacactgtc

SEQ ID NO: 945773 - DNA, 25 bp, Homo sapien
cactgtctttaggagaagataggaa

SEQ ID NO: 945774 - DNA, 25 bp, Homo sapien
caaggcattcgttgcctggcatcag

SEQ ID NO: 945775 - DNA, 25 bp, Homo sapien
gacatatacaatacagttggctctg

SEQ ID NO: 945776 - DNA, 25 bp, Homo sapien
tgcatcactcctgttgactacatgg

SEQ ID NO: 945777 - DNA, 25 bp, Homo sapien
gaagtccgatgagttttcccgacca

SEQ ID NO: 945778 - DNA, 25 bp, Homo sapien
aaatatatatgcaccccaatacagg

SEQ ID NO: 945779 - DNA, 25 bp, Homo sapien
ccacacattaataatgggagacttt

SEQ ID NO: 945780 - DNA, 25 bp, Homo sapien
atgcataaagcaagtcctgagtgac

SEQ ID NO: 945781 - DNA, 25 bp, Homo sapien
cagatgcataaagcaagtcctgagt

SEQ ID NO: 945782 - DNA, 25 bp, Homo sapien
agcctgcatcgccaagtccatcctg

SEQ ID NO: 945783 - DNA, 25 bp, Homo sapien
aaaagaacaaagctggaggcatcac

SEQ ID NO: 945784 - DNA, 25 bp, Homo sapien
cctgcatcgccaagtccatcctgag

SEQ ID NO: 945785 - DNA, 25 bp, Homo sapien
tgcatcgccaagtccatcctgagcc

SEQ ID NO: 945786 - DNA, 25 bp, Homo sapien
gaacagtttgagttccttcagccac

SEQ ID NO: 945787 - DNA, 25 bp, Homo sapien
tgcctgcagtcaaaaagccctttct

SEQ ID NO: 945788 - DNA, 25 bp, Homo sapien
tcttggctgaacagtttgagttcct

SEQ ID NO: 945789 - DNA, 25 bp, Homo sapien
cacatctggatgctgtgatgcctgc

SEQ ID NO: 945790 - DNA, 25 bp, Homo sapien
ttaacaggaggctaaatgaagtttc

SEQ ID NO: 945791 - DNA, 25 bp, Homo sapien
gagagttcgcatacccttgcctgtg

SEQ ID NO: 945792 - DNA, 25 bp, Homo sapien
gcctgtgtctaatatactttgggaa

SEQ ID NO: 945793 - DNA, 25 bp, Homo sapien
gggaacattgtatacgattggctaa

SEQ ID NO: 945794 - DNA, 25 bp, Homo sapien
aaatgcagtaatgagggtcgtgccc

SEQ ID NO: 945795 - DNA, 25 bp, Homo sapien
catggaacggtggatcaaagagcac

SEQ ID NO: 945796 - DNA, 25 bp, Homo sapien
tattacctaactgagaatgacatgg

SEQ ID NO: 945797 - DNA, 25 bp, Homo sapien
ggtcgtgccctgatgcaattggatt

SEQ ID NO: 945798 - DNA, 25 bp, Homo sapien
caaaaacttctagcagctatagatg

SEQ ID NO: 945799 - DNA, 25 bp, Homo sapien
gaatattcaacgaagcagctgacca

SEQ ID NO: 945800 - DNA, 25 bp, Homo sapien
tgggatcccatatcaataagaaagc

SEQ ID NO: 945801 - DNA, 25 bp, Homo sapien
ctggtgaatgtttgcctgggatccc

SEQ ID NO: 945802 - DNA, 25 bp, Homo sapien
cctgtagaatttaccatgggagcat

SEQ ID NO: 945803 - DNA, 25 bp, Homo sapien
tagctagcatcaaaacagtaacagg

SEQ ID NO: 945804 - DNA, 25 bp, Homo sapien
tcacaagagagttaccagacatttc

SEQ ID NO: 945805 - DNA, 25 bp, Homo sapien
cagtaacaggaggtttgagtcatga

SEQ ID NO: 945806 - DNA, 25 bp, Homo sapien
gactctggtgctaattctgaataac

SEQ ID NO: 945807 - DNA, 25 bp, Homo sapien
gtctgtctcctgtctcgcagcaggg

SEQ ID NO: 945808 - DNA, 25 bp, Homo sapien
tagtccacaacctcttctcaatgag

SEQ ID NO: 945809 - DNA, 25 bp, Homo sapien
catttccgtctacagtctagtccac

SEQ ID NO: 945810 - DNA, 25 bp, Homo sapien
ctgttttgctggattggacacaagt

SEQ ID NO: 945811 - DNA, 25 bp, Homo sapien
gttttgctggattggacacaagtct

SEQ ID NO: 945812 - DNA, 25 bp, Homo sapien
aagggtacatgggagctgttttgct

SEQ ID NO: 945813 - DNA, 25 bp, Homo sapien
atgccaagggtacatgggagctgtt

SEQ ID NO: 945814 - DNA, 25 bp, Homo sapien
catctggtgcatagttgaatgggtg

SEQ ID NO: 945815 - DNA, 25 bp, Homo sapien
tgcatagttgaatgggtgaatgata

SEQ ID NO: 945816 - DNA, 25 bp, Homo sapien
gtgcatagttgaatgggtgaatgat

SEQ ID NO: 945817 - DNA, 25 bp, Homo sapien
ctggtgcatagttgaatgggtgaat

SEQ ID NO: 945818 - DNA, 25 bp, Homo sapien
tagatagcacccaagggcaagaggt

SEQ ID NO: 945819 - DNA, 25 bp, Homo sapien
agaaagccgctttgtcttgcagagg

SEQ ID NO: 945820 - DNA, 25 bp, Homo sapien
cagtattgacaaggagcaccctgta

SEQ ID NO: 945821 - DNA, 25 bp, Homo sapien
tctctgggtgcgctaaatatgtaac

SEQ ID NO: 945822 - DNA, 25 bp, Homo sapien
cagtgatcacgatgctgtgtttgct

SEQ ID NO: 945823 - DNA, 25 bp, Homo sapien
tgatggctcagtgatcacgatgctg

SEQ ID NO: 945824 - DNA, 25 bp, Homo sapien
ggaggatggagaatactttaaatgc

SEQ ID NO: 945825 - DNA, 25 bp, Homo sapien
gaggatggagaatactttaaatgca

SEQ ID NO: 945826 - DNA, 25 bp, Homo sapien
ctcgccttggttgttggctggttca

SEQ ID NO: 945827 - DNA, 25 bp, Homo sapien
tgcagcgcgagcagagcggttggag

SEQ ID NO: 945828 - DNA, 25 bp, Homo sapien
tattcaaagggatgatctcagcact

SEQ ID NO: 945829 - DNA, 25 bp, Homo sapien
tgtaaattgggatgtcgccagcctc

SEQ ID NO: 945830 - DNA, 25 bp, Homo sapien
cattggcgcttcacggtggtttgga

SEQ ID NO: 945831 - DNA, 25 bp, Homo sapien
gaattttgaattgggcccattggcg

SEQ ID NO: 945832 - DNA, 25 bp, Homo sapien
aattgggcccattggcgcttcacgg

SEQ ID NO: 945833 - DNA, 25 bp, Homo sapien
ggcccattggcgcttcacggtggtt

SEQ ID NO: 945834 - DNA, 25 bp, Homo sapien
ttttcaaaacgctgagtaagtagta

SEQ ID NO: 945835 - DNA, 25 bp, Homo sapien
cacattgtagattatttgagaatcc

SEQ ID NO: 945836 - DNA, 25 bp, Homo sapien
gagtaagtagtagggcgttagcacc

SEQ ID NO: 945837 - DNA, 25 bp, Homo sapien
gtagtagggcgttagcaccaagcaa

SEQ ID NO: 945838 - DNA, 25 bp, Homo sapien
tgaggaactagtacaaaccgaatgg

SEQ ID NO: 945839 - DNA, 25 bp, Homo sapien
tcttccgaagggaataggaatatga

SEQ ID NO: 945840 - DNA, 25 bp, Homo sapien
gctttcactattgctcctgagggtg

SEQ ID NO: 945841 - DNA, 25 bp, Homo sapien
gacttctctttgtgatggcatccag

SEQ ID NO: 945842 - DNA, 25 bp, Homo sapien
agtagatggtcgcaacaaagaagcc

SEQ ID NO: 945843 - DNA, 25 bp, Homo sapien
agaagcagtagatggtcgcaacaaa

SEQ ID NO: 945844 - DNA, 25 bp, Homo sapien
aagcagtagatggtcgcaacaaaga

SEQ ID NO: 945845 - DNA, 25 bp, Homo sapien
gcagtagatggtcgcaacaaagaag

SEQ ID NO: 945846 - DNA, 25 bp, Homo sapien
cattttggtcacaagcacccggaca

SEQ ID NO: 945847 - DNA, 25 bp, Homo sapien
cttcaggtacatgtgggattccgcc

SEQ ID NO: 945848 - DNA, 25 bp, Homo sapien
gacgacaaactggattcccagcagg

SEQ ID NO: 945849 - DNA, 25 bp, Homo sapien
gattccgcctcatgggtttccctca

SEQ ID NO: 945850 - DNA, 25 bp, Homo sapien
tgacaggtccatggattatgtaaag

SEQ ID NO: 945851 - DNA, 25 bp, Homo sapien
caggtccatggattatgtaaagcaa

SEQ ID NO: 945852 - DNA, 25 bp, Homo sapien
catggattatgtaaagcaaatgggt

SEQ ID NO: 945853 - DNA, 25 bp, Homo sapien
ggtccatggattatgtaaagcaaat

SEQ ID NO: 945854 - DNA, 25 bp, Homo sapien
ttgtcattgaagtacacggccctgg

SEQ ID NO: 945855 - DNA, 25 bp, Homo sapien
tacacggccctggtaatagcatgga

SEQ ID NO: 945856 - DNA, 25 bp, Homo sapien
atagtggttggcaccagcgggaacc

SEQ ID NO: 945857 - DNA, 25 bp, Homo sapien
aatagcatggatagtggttggcacc

SEQ ID NO: 945858 - DNA, 25 bp, Homo sapien
ttctgttcagttcccttccaccagg

SEQ ID NO: 945859 - DNA, 25 bp, Homo sapien
cagggggagctggactttcagcagc

SEQ ID NO: 945860 - DNA, 25 bp, Homo sapien
tctgttcagttcccttccaccaggg

SEQ ID NO: 945861 - DNA, 25 bp, Homo sapien
tccaccagggggagctggactttca

SEQ ID NO: 945862 - DNA, 25 bp, Homo sapien
cacagagcatccagaaatagttgca

SEQ ID NO: 945863 - DNA, 25 bp, Homo sapien
tagttgcaggccatcatgtactggt

SEQ ID NO: 945864 - DNA, 25 bp, Homo sapien
gaagatagatcccttcacagagcat

SEQ ID NO: 945865 - DNA, 25 bp, Homo sapien
cacagccacgacaatgagtgtatga

SEQ ID NO: 945866 - DNA, 25 bp, Homo sapien
ttgcattaggataaaacatatggat

SEQ ID NO: 945867 - DNA, 25 bp, Homo sapien
tagattccagcgtattgtctccaca

SEQ ID NO: 945868 - DNA, 25 bp, Homo sapien
ctctgtcttcgggttcatatacctt

SEQ ID NO: 945869 - DNA, 25 bp, Homo sapien
agtccctactgttactagattccag

SEQ ID NO: 945870 - DNA, 25 bp, Homo sapien
aaatgcaaaactcgacggtagaagt

SEQ ID NO: 945871 - DNA, 25 bp, Homo sapien
ctcgacggtagaagtaaatatgatt

SEQ ID NO: 945872 - DNA, 25 bp, Homo sapien
aacagctgcttaagtccaacatgaa

SEQ ID NO: 945873 - DNA, 25 bp, Homo sapien
catgaacaccatgttcactatttac

SEQ ID NO: 945874 - DNA, 25 bp, Homo sapien
cattgggtactacttcaaccaggtg

SEQ ID NO: 945875 - DNA, 25 bp, Homo sapien
cagaatgtaagtaagaaacatgttc

SEQ ID NO: 945876 - DNA, 25 bp, Homo sapien
cagggttaccctttggcagccaagg

SEQ ID NO: 945877 - DNA, 25 bp, Homo sapien
ttcgcacgagctctccattgggtac

SEQ ID NO: 945878 - DNA, 25 bp, Homo sapien
aatgccttcctatatttccaattca

SEQ ID NO: 945879 - DNA, 25 bp, Homo sapien
atgccttcctatatttccaattcaa

SEQ ID NO: 945880 - DNA, 25 bp, Homo sapien
cacaatagccaaatagtacagaaca

SEQ ID NO: 945881 - DNA, 25 bp, Homo sapien
aaatcactagggtgaaaattgacaa

SEQ ID NO: 945882 - DNA, 25 bp, Homo sapien
aaagaatgacccacaatagccaaat

SEQ ID NO: 945883 - DNA, 25 bp, Homo sapien
gccaaatagtacagaacatatgcat

SEQ ID NO: 945884 - DNA, 25 bp, Homo sapien
gcattgcacatagtatagttggacc

SEQ ID NO: 945885 - DNA, 25 bp, Homo sapien
ggaccaggttcgattgttttcagga

SEQ ID NO: 945886 - DNA, 25 bp, Homo sapien
ttctcaggagtgaaagcattgcaca

SEQ ID NO: 945887 - DNA, 25 bp, Homo sapien
catagtatagttggaccaggttcga

SEQ ID NO: 945888 - DNA, 25 bp, Homo sapien
tcccaggtgcgattgcaatatggac

SEQ ID NO: 945889 - DNA, 25 bp, Homo sapien
ataatctgggcagaactgataggac

SEQ ID NO: 945890 - DNA, 25 bp, Homo sapien
caaaatccggaaaataatctgggca

SEQ ID NO: 945891 - DNA, 25 bp, Homo sapien
tgataggacaatactccagccggtg

SEQ ID NO: 945892 - DNA, 25 bp, Homo sapien
tatgcgggtaactgctgcattcggt

SEQ ID NO: 945893 - DNA, 25 bp, Homo sapien
gctgcattcggtcatagcatttgta

SEQ ID NO: 945894 - DNA, 25 bp, Homo sapien
cttctccttggtatgcgggtaactg

SEQ ID NO: 945895 - DNA, 25 bp, Homo sapien
taactgctgcattcggtcatagcat

SEQ ID NO: 945896 - DNA, 25 bp, Homo sapien
gacgtaaagaaatggcttgggctct

SEQ ID NO: 945897 - DNA, 25 bp, Homo sapien
tcgtcctacgacgtaaagaaatggc

SEQ ID NO: 945898 - DNA, 25 bp, Homo sapien
tattgttggataggtttgatttgaa

SEQ ID NO: 945899 - DNA, 25 bp, Homo sapien
aaatggcttgggctctattgttgga

SEQ ID NO: 945900 - DNA, 25 bp, Homo sapien
ctccaattgtattgatggcagaagt

SEQ ID NO: 945901 - DNA, 25 bp, Homo sapien
tggcagaagtggtgttatgtactct

SEQ ID NO: 945902 - DNA, 25 bp, Homo sapien
aattctaagattgaagtttctccaa

SEQ ID NO: 945903 - DNA, 25 bp, Homo sapien
aactcatccctattaagttgacatg

SEQ ID NO: 945904 - DNA, 25 bp, Homo sapien
aacagtgccaagcaccggcttgtaa

SEQ ID NO: 945905 - DNA, 25 bp, Homo sapien
cagtgccaagcaccggcttgtaaat

SEQ ID NO: 945906 - DNA, 25 bp, Homo sapien
gtgccaagcaccggcttgtaaatgt

SEQ ID NO: 945907 - DNA, 25 bp, Homo sapien
gccaagcaccggcttgtaaatgtga

SEQ ID NO: 945908 - DNA, 25 bp, Homo sapien
ttttgatttttgaagatctctttgt

SEQ ID NO: 945909 - DNA, 25 bp, Homo sapien
tttgatttttgaagatctctttgtc

SEQ ID NO: 945910 - DNA, 25 bp, Homo sapien
tcatactgaagagcataatcatcca

SEQ ID NO: 945911 - DNA, 25 bp, Homo sapien
cattcatactgaagagcataatcat

SEQ ID NO: 945912 - DNA, 25 bp, Homo sapien
ttcatactgaagagcataatcatcc

SEQ ID NO: 945913 - DNA, 25 bp, Homo sapien
atactgaagagcataatcatccaaa

SEQ ID NO: 945914 - DNA, 25 bp, Homo sapien
cagaaaattgcatcctggggtggca

SEQ ID NO: 945915 - DNA, 25 bp, Homo sapien
tctctccagaaaattgcatcctggg

SEQ ID NO: 945916 - DNA, 25 bp, Homo sapien
tccagaaaattgcatcctggggtgg

SEQ ID NO: 945917 - DNA, 25 bp, Homo sapien
gaaaattgcatcctggggtggcaaa

SEQ ID NO: 945918 - DNA, 25 bp, Homo sapien
tcctgatatttgtgctgatgtttgc

SEQ ID NO: 945919 - DNA, 25 bp, Homo sapien
gtcctcctgatatttgtgctgatgt

SEQ ID NO: 945920 - DNA, 25 bp, Homo sapien
tatttgtgctgatgtttgctgctcc

SEQ ID NO: 945921 - DNA, 25 bp, Homo sapien
tataagtcctcctgatatttgtgct

SEQ ID NO: 945922 - DNA, 25 bp, Homo sapien
tccataattcttcacttgaatactc

SEQ ID NO: 945923 - DNA, 25 bp, Homo sapien
gatttttcgttttatacttatgctc

SEQ ID NO: 945924 - DNA, 25 bp, Homo sapien
tcttgctgacctacgatttttcgtt

SEQ ID NO: 945925 - DNA, 25 bp, Homo sapien
ttattgaatcttgctgacctacgat

SEQ ID NO: 945926 - DNA, 25 bp, Homo sapien
tatacttatgctctagttctccaag

SEQ ID NO: 945927 - DNA, 25 bp, Homo sapien
tttgaatgcgtgagtgaataatgtt

SEQ ID NO: 945928 - DNA, 25 bp, Homo sapien
gtttttgaatgcgtgagtgaataat

SEQ ID NO: 945929 - DNA, 25 bp, Homo sapien
tgttttcatagagaccatagggcat

SEQ ID NO: 945930 - DNA, 25 bp, Homo sapien
aatgcgtgagtgaataatgttttca

SEQ ID NO: 945931 - DNA, 25 bp, Homo sapien
ccagtgttctagtaatactgagaaa

SEQ ID NO: 945932 - DNA, 25 bp, Homo sapien
taatactgagaaacgtaaatcattg

SEQ ID NO: 945933 - DNA, 25 bp, Homo sapien
tgttctagtaatactgagaaacgta

SEQ ID NO: 945934 - DNA, 25 bp, Homo sapien
tagtaatactgagaaacgtaaatca

SEQ ID NO: 945935 - DNA, 25 bp, Homo sapien
gtccactgttgaagatactccaggt

SEQ ID NO: 945936 - DNA, 25 bp, Homo sapien
gggcccccgtccactgttgaagata

SEQ ID NO: 945937 - DNA, 25 bp, Homo sapien
ctgaactggagaacccacatcaaag

SEQ ID NO: 945938 - DNA, 25 bp, Homo sapien
catcaaagtagggatttgtggggcc

SEQ ID NO: 945939 - DNA, 25 bp, Homo sapien
tttctggagctgtctcacgctttcc

SEQ ID NO: 945940 - DNA, 25 bp, Homo sapien
cccaggctgaatatgaactcatctt

SEQ ID NO: 945941 - DNA, 25 bp, Homo sapien
tcccaggctgaatatgaactcatct

SEQ ID NO: 945942 - DNA, 25 bp, Homo sapien
ttctggagctgtctcacgctttccc

SEQ ID NO: 945943 - DNA, 25 bp, Homo sapien
ccatttccacaaatacgatagtaac

SEQ ID NO: 945944 - DNA, 25 bp, Homo sapien
cataacaacaacttctttacaggtt

SEQ ID NO: 945945 - DNA, 25 bp, Homo sapien
taactttatttgtaggcaccaggtc

SEQ ID NO: 945946 - DNA, 25 bp, Homo sapien
ggcaccaggtcaaaagtgacaggaa

SEQ ID NO: 945947 - DNA, 25 bp, Homo sapien
ttttaatggagcaaagctaatcttc

SEQ ID NO: 945948 - DNA, 25 bp, Homo sapien
gtcccaatgatgaaagctgtgtctc

SEQ ID NO: 945949 - DNA, 25 bp, Homo sapien
aaattgcgggcagcaaaagagattc

SEQ ID NO: 945950 - DNA, 25 bp, Homo sapien
gttgctggcaagatactcaggtact

SEQ ID NO: 945951 - DNA, 25 bp, Homo sapien
tttctgtctggtggcttacataaca

SEQ ID NO: 945952 - DNA, 25 bp, Homo sapien
ttataactcaacttccctttggaga

SEQ ID NO: 945953 - DNA, 25 bp, Homo sapien
tggagattgggactttgttgtcctt

SEQ ID NO: 945954 - DNA, 25 bp, Homo sapien
cactggtattcctgtctcttataac

SEQ ID NO: 945955 - DNA, 25 bp, Homo sapien
tgagtaagagtgtgaaatagtacct

SEQ ID NO: 945956 - DNA, 25 bp, Homo sapien
tcatttccgaatccatcatattagc

SEQ ID NO: 945957 - DNA, 25 bp, Homo sapien
cagtaggatacttacctctctgttc

SEQ ID NO: 945958 - DNA, 25 bp, Homo sapien
tactggagctagacctccttggttc

SEQ ID NO: 945959 - DNA, 25 bp, Homo sapien
gaaggtgctaaagcaatttgcatta

SEQ ID NO: 945960 - DNA, 25 bp, Homo sapien
gaatcttgggcgaaagaaattccat

SEQ ID NO: 945961 - DNA, 25 bp, Homo sapien
tatgtaccctgtgccatgaacttct

SEQ ID NO: 945962 - DNA, 25 bp, Homo sapien
gaacttctgtgaatcttgggcgaaa

SEQ ID NO: 945963 - DNA, 25 bp, Homo sapien
tacacatgcaaacgcacacagctca

SEQ ID NO: 945964 - DNA, 25 bp, Homo sapien
ttcatacacatgcaaacgcacacag

SEQ ID NO: 945965 - DNA, 25 bp, Homo sapien
tatattcatacacatgcaaacgcac

SEQ ID NO: 945966 - DNA, 25 bp, Homo sapien
catacacatgcaaacgcacacagct

SEQ ID NO: 945967 - DNA, 25 bp, Homo sapien
atgcatgggacctctggaaactcta

SEQ ID NO: 945968 - DNA, 25 bp, Homo sapien
acaagggatatcaatcatgatgtga

SEQ ID NO: 945969 - DNA, 25 bp, Homo sapien
tgttggggggattaaacgctgtcca

SEQ ID NO: 945970 - DNA, 25 bp, Homo sapien
gaaactctaaaacaagggatatcaa

SEQ ID NO: 945971 - DNA, 25 bp, Homo sapien
ctggaattctgtcactgggcggctg

SEQ ID NO: 945972 - DNA, 25 bp, Homo sapien
tgggcacagctcaatagaagcaaag

SEQ ID NO: 945973 - DNA, 25 bp, Homo sapien
ctcctgggcaggagatgtcagccgc

SEQ ID NO: 945974 - DNA, 25 bp, Homo sapien
ggactcaggcgctcaagcttcagcg

SEQ ID NO: 945975 - DNA, 25 bp, Homo sapien
cgagggacccgagttagaccttgag

SEQ ID NO: 945976 - DNA, 25 bp, Homo sapien
tgcgagtccgggagactaaagcgcc

SEQ ID NO: 945977 - DNA, 25 bp, Homo sapien
aaagcgccgcgtaaacacaggaagc

SEQ ID NO: 945978 - DNA, 25 bp, Homo sapien
cacaagaaccttatcccagagacat

SEQ ID NO: 945979 - DNA, 25 bp, Homo sapien
ttggtgccggacactgcgactcctc

SEQ ID NO: 945980 - DNA, 25 bp, Homo sapien
tttccccctaaagccctcgatgtca

SEQ ID NO: 945981 - DNA, 25 bp, Homo sapien
ctcgatgtcagcaggagtccgggac

SEQ ID NO: 945982 - DNA, 25 bp, Homo sapien
aatccaataccaggcggggcgcagc

SEQ ID NO: 945983 - DNA, 25 bp, Homo sapien
caacctcttttagcccacaactggg

SEQ ID NO: 945984 - DNA, 25 bp, Homo sapien
ccctaactctgtttaggcggtgttg

SEQ ID NO: 945985 - DNA, 25 bp, Homo sapien
tgattccaaggacgagtcaccctca

SEQ ID NO: 945986 - DNA, 25 bp, Homo sapien
gaggcaggcaagttgattccaagga

SEQ ID NO: 945987 - DNA, 25 bp, Homo sapien
tctcttgaaggaagtgtcctgcttc

SEQ ID NO: 945988 - DNA, 25 bp, Homo sapien
gataaatcatgctctcttgaaggaa

SEQ ID NO: 945989 - DNA, 25 bp, Homo sapien
gaaggaagtgtcctgcttcgatttt

SEQ ID NO: 945990 - DNA, 25 bp, Homo sapien
gaagtgtcctgcttcgattttccac

SEQ ID NO: 945991 - DNA, 25 bp, Homo sapien
agctggggtacttgtaagtctctct

SEQ ID NO: 945992 - DNA, 25 bp, Homo sapien
ctggggtacttgtaagtctctcttc

SEQ ID NO: 945993 - DNA, 25 bp, Homo sapien
gctggggtacttgtaagtctctctt

SEQ ID NO: 945994 - DNA, 25 bp, Homo sapien
cttctctacttcaaaggggggcagc

SEQ ID NO: 945995 - DNA, 25 bp, Homo sapien
taactgcctctatcactttagcttc

SEQ ID NO: 945996 - DNA, 25 bp, Homo sapien
tcactttagcttcagcttttaccag

SEQ ID NO: 945997 - DNA, 25 bp, Homo sapien
ttagcttcagcttttaccagctttc

SEQ ID NO: 945998 - DNA, 25 bp, Homo sapien
tgaaccaagaacttatcaggacctt

SEQ ID NO: 945999 - DNA, 25 bp, Homo sapien
caaaatctaaggattgtaagttaca

SEQ ID NO: 946000 - DNA, 25 bp, Homo sapien
gaccttatcaatgctgcctctatta

SEQ ID NO: 946001 - DNA, 25 bp, Homo sapien
caaaaattgatacttaggccgggca

SEQ ID NO: 946002 - DNA, 25 bp, Homo sapien
cttggaatggtgaggcaggagaact

SEQ ID NO: 946003 - DNA, 25 bp, Homo sapien
tgccattgtactccagcctgggcaa

SEQ ID NO: 946004 - DNA, 25 bp, Homo sapien
cagtgagccgagatcatgccattgt

SEQ ID NO: 946005 - DNA, 25 bp, Homo sapien
gcttgaacttgggaggcagaggttg

SEQ ID NO: 946006 - DNA, 25 bp, Homo sapien
gatgctgagagttctatagaaataa

SEQ ID NO: 946007 - DNA, 25 bp, Homo sapien
ctgctgtgtcgtggcttagatgctg

SEQ ID NO: 946008 - DNA, 25 bp, Homo sapien
tcccacgctgctgtgtcgtggctta

SEQ ID NO: 946009 - DNA, 25 bp, Homo sapien
gagagttctatagaaataatcggca

SEQ ID NO: 946010 - DNA, 25 bp, Homo sapien
tcaaatagaattttgccttcgtaat

SEQ ID NO: 946011 - DNA, 25 bp, Homo sapien
tttgccttcgtaattctgagggctt

SEQ ID NO: 946012 - DNA, 25 bp, Homo sapien
tagaattttgccttcgtaattctga

SEQ ID NO: 946013 - DNA, 25 bp, Homo sapien
ttcgtaattctgagggcttcctcca

SEQ ID NO: 946014 - DNA, 25 bp, Homo sapien
gtttcccactcatcttgactcagag

SEQ ID NO: 946015 - DNA, 25 bp, Homo sapien
aatgtgtttattgagatggtttccc

SEQ ID NO: 946016 - DNA, 25 bp, Homo sapien
ccactcatcttgactcagagtgctt

SEQ ID NO: 946017 - DNA, 25 bp, Homo sapien
atggtttcccactcatcttgactca

SEQ ID NO: 946018 - DNA, 25 bp, Homo sapien
gcttttcctcctataggctggcaga

SEQ ID NO: 946019 - DNA, 25 bp, Homo sapien
tgcttttcctcctataggctggcag

SEQ ID NO: 946020 - DNA, 25 bp, Homo sapien
tagtgctgctttctcctgaaggaac

SEQ ID NO: 946021 - DNA, 25 bp, Homo sapien
tttcctcctataggctggcagagga

SEQ ID NO: 946022 - DNA, 25 bp, Homo sapien
gaaggagatcctttgtgagaggcat

SEQ ID NO: 946023 - DNA, 25 bp, Homo sapien
gaccgtggtgattttatagcatctt

SEQ ID NO: 946024 - DNA, 25 bp, Homo sapien
gcatggctaaagaccgtggtgattt

SEQ ID NO: 946025 - DNA, 25 bp, Homo sapien
tttatagcatcttgggcatttcaca

SEQ ID NO: 946026 - DNA, 25 bp, Homo sapien
taggtcgtcactgccagaaaggatc

SEQ ID NO: 946027 - DNA, 25 bp, Homo sapien
cactgccagaaaggatcttttactt

SEQ ID NO: 946028 - DNA, 25 bp, Homo sapien
cgtcactgccagaaaggatctttta

SEQ ID NO: 946029 - DNA, 25 bp, Homo sapien
ggtcgtcactgccagaaaggatctt

SEQ ID NO: 946030 - DNA, 25 bp, Homo sapien
agatctttgtacaagatctcagagg

SEQ ID NO: 946031 - DNA, 25 bp, Homo sapien
cagagatctttgtacaagatctcag

SEQ ID NO: 946032 - DNA, 25 bp, Homo sapien
agagatctttgtacaagatctcaga

SEQ ID NO: 946033 - DNA, 25 bp, Homo sapien
gagatctttgtacaagatctcagag

SEQ ID NO: 946034 - DNA, 25 bp, Homo sapien
ggtgccaaaatctctgtaagcgcca

SEQ ID NO: 946035 - DNA, 25 bp, Homo sapien
gtgccaaaatctctgtaagcgccat

SEQ ID NO: 946036 - DNA, 25 bp, Homo sapien
gatttcatcccgtgcctccttggtg

SEQ ID NO: 946037 - DNA, 25 bp, Homo sapien
gcaataaccacttgatctctcatcg

SEQ ID NO: 946038 - DNA, 25 bp, Homo sapien
cactgtagtgtttaaatgcaataac

SEQ ID NO: 946039 - DNA, 25 bp, Homo sapien
cgctttgcacttcatcaggatttca

SEQ ID NO: 946040 - DNA, 25 bp, Homo sapien
gatgtagcctctttactgtcattca

SEQ ID NO: 946041 - DNA, 25 bp, Homo sapien
gtcagatgtagcctctttactgtca

SEQ ID NO: 946042 - DNA, 25 bp, Homo sapien
ctcccttgtcagatgtagcctcttt

SEQ ID NO: 946043 - DNA, 25 bp, Homo sapien
tggtgtcccctggatcctcattgcc

SEQ ID NO: 946044 - DNA, 25 bp, Homo sapien
gagtctgctctctcgtgtgtgagtg

SEQ ID NO: 946045 - DNA, 25 bp, Homo sapien
tgaaggtatcagtgttgctagttcc

SEQ ID NO: 946046 - DNA, 25 bp, Homo sapien
atcagtgttgctagttccttcttca

SEQ ID NO: 946047 - DNA, 25 bp, Homo sapien
cgtgtgtgagtgcagttcagtgaac

SEQ ID NO: 946048 - DNA, 25 bp, Homo sapien
aataaatggaggtctcaaataattc

SEQ ID NO: 946049 - DNA, 25 bp, Homo sapien
tggaggtctcaaataattctcttct

SEQ ID NO: 946050 - DNA, 25 bp, Homo sapien
aattttaggcaaatacacacaaatc

SEQ ID NO: 946051 - DNA, 25 bp, Homo sapien
aatggaggtctcaaataattctctt

SEQ ID NO: 946052 - DNA, 25 bp, Homo sapien
ttctatctcctcctctagactctga

SEQ ID NO: 946053 - DNA, 25 bp, Homo sapien
cttctatctcctcctctagactctg

SEQ ID NO: 946054 - DNA, 25 bp, Homo sapien
tctatctcctcctctagactctgaa

SEQ ID NO: 946055 - DNA, 25 bp, Homo sapien
tatctcctcctctagactctgaaca

SEQ ID NO: 946056 - DNA, 25 bp, Homo sapien
taccagttgctaaatagaaagaaga

SEQ ID NO: 946057 - DNA, 25 bp, Homo sapien
tgttccttcccttttagctatgtac

SEQ ID NO: 946058 - DNA, 25 bp, Homo sapien
taggaagcacgaacaatatatctgg

SEQ ID NO: 946059 - DNA, 25 bp, Homo sapien
ctgcaaacataggaagcacgaacaa

SEQ ID NO: 946060 - DNA, 25 bp, Homo sapien
gaatgagctggttgtctccagaatg

SEQ ID NO: 946061 - DNA, 25 bp, Homo sapien
cacgggcactatgtctgcgactgag

SEQ ID NO: 946062 - DNA, 25 bp, Homo sapien
ctgagatcttcgtagagctgcaggg

SEQ ID NO: 946063 - DNA, 25 bp, Homo sapien
tctggcggccttcacgggcactatg

SEQ ID NO: 946064 - DNA, 25 bp, Homo sapien
caagcatattccagccacgaaattg

SEQ ID NO: 946065 - DNA, 25 bp, Homo sapien
caacaatatttttggctcgagaagg

SEQ ID NO: 946066 - DNA, 25 bp, Homo sapien
aatggagctcaaacgtaagagatta

SEQ ID NO: 946067 - DNA, 25 bp, Homo sapien
ggtctaatatgtgttagcaagcata

SEQ ID NO: 946068 - DNA, 25 bp, Homo sapien
catgcccagctgagtaccaggttca

SEQ ID NO: 946069 - DNA, 25 bp, Homo sapien
tgaccataagcagtgtcactattct

SEQ ID NO: 946070 - DNA, 25 bp, Homo sapien
cactattctcaggtaagaatgaggc

SEQ ID NO: 946071 - DNA, 25 bp, Homo sapien
atgaggcatccacaacagtcacccg

SEQ ID NO: 946072 - DNA, 25 bp, Homo sapien
aacagctgccatcgatattctgcag

SEQ ID NO: 946073 - DNA, 25 bp, Homo sapien
caacagctgccatcgatattctgca

SEQ ID NO: 946074 - DNA, 25 bp, Homo sapien
tgcaacagctgccatcgatattctg

SEQ ID NO: 946075 - DNA, 25 bp, Homo sapien
ttttgcaacagctgccatcgatatt

SEQ ID NO: 946076 - DNA, 25 bp, Homo sapien
aagtctgtaatctttaacaagcact

SEQ ID NO: 946077 - DNA, 25 bp, Homo sapien
tataaagtctgtaatctttaacaag

SEQ ID NO: 946078 - DNA, 25 bp, Homo sapien
cttcttaataggacatgaaaattga

SEQ ID NO: 946079 - DNA, 25 bp, Homo sapien
catttcttcttaataggacatgaaa

SEQ ID NO: 946080 - DNA, 25 bp, Homo sapien
catgtataggttaaggagcctggac

SEQ ID NO: 946081 - DNA, 25 bp, Homo sapien
gattgtccttgctagtatttccagc

SEQ ID NO: 946082 - DNA, 25 bp, Homo sapien
agggtgggcatctttgtaccttgcc

SEQ ID NO: 946083 - DNA, 25 bp, Homo sapien
cctggactctaaaggtagtgtcaac

SEQ ID NO: 946084 - DNA, 25 bp, Homo sapien
atatacttcatggggttaatatcca

SEQ ID NO: 946085 - DNA, 25 bp, Homo sapien
atgtaacaactcaaagctatagtaa

SEQ ID NO: 946086 - DNA, 25 bp, Homo sapien
aaatatgtaacaactcaaagctata

SEQ ID NO: 946087 - DNA, 25 bp, Homo sapien
aacatatacttcatggggttaatat

SEQ ID NO: 946088 - DNA, 25 bp, Homo sapien
caggtttaggcaagcccataggata

SEQ ID NO: 946089 - DNA, 25 bp, Homo sapien
ggaatacctcatcaacaaggagaag

SEQ ID NO: 946090 - DNA, 25 bp, Homo sapien
cttcaggttgggcaaggaatacctc

SEQ ID NO: 946091 - DNA, 25 bp, Homo sapien
ggattaccctggcatcagtgtggat

SEQ ID NO: 946092 - DNA, 25 bp, Homo sapien
taagagcactggttcttaggaacca

SEQ ID NO: 946093 - DNA, 25 bp, Homo sapien
gaatgagataatgccctagaaacct

SEQ ID NO: 946094 - DNA, 25 bp, Homo sapien
tcattttaggttagtgggagctcct

SEQ ID NO: 946095 - DNA, 25 bp, Homo sapien
ggattcagctattctcctaagagca

SEQ ID NO: 946096 - DNA, 25 bp, Homo sapien
cattcaaagttctcaggcatatacc

SEQ ID NO: 946097 - DNA, 25 bp, Homo sapien
gtgtttcttatgtatcctgggagtc

SEQ ID NO: 946098 - DNA, 25 bp, Homo sapien
tgttcaagcaaaaggtaaacgcatt

SEQ ID NO: 946099 - DNA, 25 bp, Homo sapien
tacatggtccaagataaaaactata

SEQ ID NO: 946100 - DNA, 25 bp, Homo sapien
attaaatatgttaatcttgctatga

SEQ ID NO: 946101 - DNA, 25 bp, Homo sapien
aattaaatatgttaatcttgctatg

SEQ ID NO: 946102 - DNA, 25 bp, Homo sapien
taaatatgttaatcttgctatgaaa

SEQ ID NO: 946103 - DNA, 25 bp, Homo sapien
ttaaatatgttaatcttgctatgaa

SEQ ID NO: 946104 - DNA, 25 bp, Homo sapien
atagatagaaattgctttcccagag

SEQ ID NO: 946105 - DNA, 25 bp, Homo sapien
tataagtttagtggtctccaaccca

SEQ ID NO: 946106 - DNA, 25 bp, Homo sapien
gtgttgttaatctgcgactttgtct

SEQ ID NO: 946107 - DNA, 25 bp, Homo sapien
gcaatctaacacaataaaatgggag

SEQ ID NO: 946108 - DNA, 25 bp, Homo sapien
ttcagatacaaccataaaggcaaat

SEQ ID NO: 946109 - DNA, 25 bp, Homo sapien
tcagttatgatcctcttctgaaatc

SEQ ID NO: 946110 - DNA, 25 bp, Homo sapien
tgaaatcaggaatacgaccccaaga

SEQ ID NO: 946111 - DNA, 25 bp, Homo sapien
cagtctcacaaacagttgaaccata

SEQ ID NO: 946112 - DNA, 25 bp, Homo sapien
attgcttcttccgaattttccggat

SEQ ID NO: 946113 - DNA, 25 bp, Homo sapien
caaagcgaagctttggcatcttctt

SEQ ID NO: 946114 - DNA, 25 bp, Homo sapien
tctactggcaaagcgaagctttggc

SEQ ID NO: 946115 - DNA, 25 bp, Homo sapien
aattttccggattctactggcaaag

SEQ ID NO: 946116 - DNA, 25 bp, Homo sapien
aaggtggaataagaaaacattcact

SEQ ID NO: 946117 - DNA, 25 bp, Homo sapien
taaaggtggaataagaaaacattca

SEQ ID NO: 946118 - DNA, 25 bp, Homo sapien
ggtggaataagaaaacattcactac

SEQ ID NO: 946119 - DNA, 25 bp, Homo sapien
tatctaaaggtggaataagaaaaca

SEQ ID NO: 946120 - DNA, 25 bp, Homo sapien
taggtgaaagcatcacaggttctgt

SEQ ID NO: 946121 - DNA, 25 bp, Homo sapien
ctccacagccagtataggtgaaagc

SEQ ID NO: 946122 - DNA, 25 bp, Homo sapien
ttttgcacatgcacgtttgcaatcc

SEQ ID NO: 946123 - DNA, 25 bp, Homo sapien
acaaagttattgtcattccctccac

SEQ ID NO: 946124 - DNA, 25 bp, Homo sapien
taatagcgagtcacattggcagagc

SEQ ID NO: 946125 - DNA, 25 bp, Homo sapien
acattggcagagcacagtccctcat

SEQ ID NO: 946126 - DNA, 25 bp, Homo sapien
attggcagagcacagtccctcatct

SEQ ID NO: 946127 - DNA, 25 bp, Homo sapien
ttggattaaaataatagcgagtcac

SEQ ID NO: 946128 - DNA, 25 bp, Homo sapien
tactcaagagactatcatttcaagg

SEQ ID NO: 946129 - DNA, 25 bp, Homo sapien
taatcccatagaagcctcagtctga

SEQ ID NO: 946130 - DNA, 25 bp, Homo sapien
caaattgcaggtaagcttacatgct

SEQ ID NO: 946131 - DNA, 25 bp, Homo sapien
taatttccaggtaaccactggagca

SEQ ID NO: 946132 - DNA, 25 bp, Homo sapien
tttctttggtgcgcagaagcccata

SEQ ID NO: 946133 - DNA, 25 bp, Homo sapien
ttctttggtgcgcagaagcccatac

SEQ ID NO: 946134 - DNA, 25 bp, Homo sapien
ttttctttggtgcgcagaagcccat

SEQ ID NO: 946135 - DNA, 25 bp, Homo sapien
acctgttctcaatccggttccggtg

SEQ ID NO: 946136 - DNA, 25 bp, Homo sapien
tgttctcaatccggttccggtgaca

SEQ ID NO: 946137 - DNA, 25 bp, Homo sapien
ttctcaatccggttccggtgacacc

SEQ ID NO: 946138 - DNA, 25 bp, Homo sapien
cctgttctcaatccggttccggtga

SEQ ID NO: 946139 - DNA, 25 bp, Homo sapien
acactggtcgtccacactcacttgc

SEQ ID NO: 946140 - DNA, 25 bp, Homo sapien
gaaatacttttctgtggacccctca

SEQ ID NO: 946141 - DNA, 25 bp, Homo sapien
acttgcagccggcaaactttgggaa

SEQ ID NO: 946142 - DNA, 25 bp, Homo sapien
tctgtggacccctcacactggtcgt

SEQ ID NO: 946143 - DNA, 25 bp, Homo sapien
atcctccagcaagcatcgtcgcaag

SEQ ID NO: 946144 - DNA, 25 bp, Homo sapien
tacctgtcgtagtagtaacggagaa

SEQ ID NO: 946145 - DNA, 25 bp, Homo sapien
tgtagaaattgttggcgttgccctc

SEQ ID NO: 946146 - DNA, 25 bp, Homo sapien
atcgtcgcaagcctcccaggtgtag

SEQ ID NO: 946147 - DNA, 25 bp, Homo sapien
caggagacagatctccgcgttattt

SEQ ID NO: 946148 - DNA, 25 bp, Homo sapien
aggagacagatctccgcgttatttc

SEQ ID NO: 946149 - DNA, 25 bp, Homo sapien
gcaggagacagatctccgcgttatt

SEQ ID NO: 946150 - DNA, 25 bp, Homo sapien
ttgggagcgagtcccccctgccagc

SEQ ID NO: 946151 - DNA, 25 bp, Homo sapien
gggagcgagtcccccctgccagcgg

SEQ ID NO: 946152 - DNA, 25 bp, Homo sapien
tgggagcgagtcccccctgccagcg

SEQ ID NO: 946153 - DNA, 25 bp, Homo sapien
ggagcgagtcccccctgccagcgga

SEQ ID NO: 946154 - DNA, 25 bp, Homo sapien
acggggccccatggcccgctgcgcc

SEQ ID NO: 946155 - DNA, 25 bp, Homo sapien
agagaagctcctggagcggccagat

SEQ ID NO: 946156 - DNA, 25 bp, Homo sapien
cgctgcgccctctccgccggttggg

SEQ ID NO: 946157 - DNA, 25 bp, Homo sapien
cctctccgccggttggggagagaag

SEQ ID NO: 946158 - DNA, 25 bp, Homo sapien
ccagtgcagcctccgtcaggaaaag

SEQ ID NO: 946159 - DNA, 25 bp, Homo sapien
tcgacagccccagggggcgagcggg

SEQ ID NO: 946160 - DNA, 25 bp, Homo sapien
ggaaaagcagcagaatcgacagccc

SEQ ID NO: 946161 - DNA, 25 bp, Homo sapien
tcctgagcagcatcgcccagtgcag

SEQ ID NO: 946162 - DNA, 25 bp, Homo sapien
tttatgcggggcgagcgtccggccg

SEQ ID NO: 946163 - DNA, 25 bp, Homo sapien
cctgaggggtggctgattcatgcac

SEQ ID NO: 946164 - DNA, 25 bp, Homo sapien
cccgctgggcaaggcgtccgagaaa

SEQ ID NO: 946165 - DNA, 25 bp, Homo sapien
ccgagaaagcgcctggcgggaggag

SEQ ID NO: 946166 - DNA, 25 bp, Homo sapien
ggtaacccatcattctatgtttttc

SEQ ID NO: 946167 - DNA, 25 bp, Homo sapien
aattggggtgtggtaacccatcatt

SEQ ID NO: 946168 - DNA, 25 bp, Homo sapien
ttcttaacatagctggcacagggtt

SEQ ID NO: 946169 - DNA, 25 bp, Homo sapien
ttttcttaacatagctggcacaggg

SEQ ID NO: 946170 - DNA, 25 bp, Homo sapien
tggttcaagtaattcagtcccacca

SEQ ID NO: 946171 - DNA, 25 bp, Homo sapien
tcaagtaattcagtcccaccacgcc

SEQ ID NO: 946172 - DNA, 25 bp, Homo sapien
aagtaattcagtcccaccacgcccg

SEQ ID NO: 946173 - DNA, 25 bp, Homo sapien
gttcaagtaattcagtcccaccacg

SEQ ID NO: 946174 - DNA, 25 bp, Homo sapien
cgagtcacatttttggaatgaggaa

SEQ ID NO: 946175 - DNA, 25 bp, Homo sapien
ctcttccacctttacgagtcacatt

SEQ ID NO: 946176 - DNA, 25 bp, Homo sapien
cctttacgagtcacatttttggaat

SEQ ID NO: 946177 - DNA, 25 bp, Homo sapien
tccacctttacgagtcacatttttg

SEQ ID NO: 946178 - DNA, 25 bp, Homo sapien
gttgccagttgtgttctgattcctg

SEQ ID NO: 946179 - DNA, 25 bp, Homo sapien
gggaatctttagctggagcatggcc

SEQ ID NO: 946180 - DNA, 25 bp, Homo sapien
ctttgatgttggaggcagtgtctac

SEQ ID NO: 946181 - DNA, 25 bp, Homo sapien
tgatgacattcttgacttccgttgc

SEQ ID NO: 946182 - DNA, 25 bp, Homo sapien
agtgggaagggtgcaactttcttct

SEQ ID NO: 946183 - DNA, 25 bp, Homo sapien
aggagtgggaagggtgcaactttct

SEQ ID NO: 946184 - DNA, 25 bp, Homo sapien
gagtgggaagggtgcaactttcttc

SEQ ID NO: 946185 - DNA, 25 bp, Homo sapien
gaatgatctggcaaggatccactgg

SEQ ID NO: 946186 - DNA, 25 bp, Homo sapien
gatccactggtaaagggcatcccag

SEQ ID NO: 946187 - DNA, 25 bp, Homo sapien
caaagtacgtatgcattggtggaaa

SEQ ID NO: 946188 - DNA, 25 bp, Homo sapien
tatacgacctgaaaacttattgcag

SEQ ID NO: 946189 - DNA, 25 bp, Homo sapien
gtttacatgagtcacatttcactac

SEQ ID NO: 946190 - DNA, 25 bp, Homo sapien
gaagactcaacaccacagtcttttc

SEQ ID NO: 946191 - DNA, 25 bp, Homo sapien
tgagcacacatgagagagaaatctc

SEQ ID NO: 946192 - DNA, 25 bp, Homo sapien
gagtttacatgagtcacatttcact

SEQ ID NO: 946193 - DNA, 25 bp, Homo sapien
tcggtcaagactctgggcttctggc

SEQ ID NO: 946194 - DNA, 25 bp, Homo sapien
aatttcttcggtcaagactctgggc

SEQ ID NO: 946195 - DNA, 25 bp, Homo sapien
caaatttcttcggtcaagactctgg

SEQ ID NO: 946196 - DNA, 25 bp, Homo sapien
tcttcggtcaagactctgggcttct

SEQ ID NO: 946197 - DNA, 25 bp, Homo sapien
aaaatgcctgcccttcacatcgaag

SEQ ID NO: 946198 - DNA, 25 bp, Homo sapien
ccttcagttgtttcgggacgcgccg

SEQ ID NO: 946199 - DNA, 25 bp, Homo sapien
gaaaatggaagttgagcagcttcgc

SEQ ID NO: 946200 - DNA, 25 bp, Homo sapien
caagtaagttggctgttccggaata

SEQ ID NO: 946201 - DNA, 25 bp, Homo sapien
tgcctggggactgccagctgatgtg

SEQ ID NO: 946202 - DNA, 25 bp, Homo sapien
ggggactgccagctgatgtggggaa

SEQ ID NO: 946203 - DNA, 25 bp, Homo sapien
caccctttggcagtgcctggggact

SEQ ID NO: 946204 - DNA, 25 bp, Homo sapien
gactgccagctgatgtggggaaatc

SEQ ID NO: 946205 - DNA, 25 bp, Homo sapien
aaataacttgggagaaactgcatcc

SEQ ID NO: 946206 - DNA, 25 bp, Homo sapien
ccaacatgctttttaaggaaggaag

SEQ ID NO: 946207 - DNA, 25 bp, Homo sapien
taagaacattacttgagcatgacac

SEQ ID NO: 946208 - DNA, 25 bp, Homo sapien
gcatcctaagtggaagaactagttt

SEQ ID NO: 946209 - DNA, 25 bp, Homo sapien
ggttcatgataggattttctttaga

SEQ ID NO: 946210 - DNA, 25 bp, Homo sapien
cctgaggttcatgataggattttct

SEQ ID NO: 946211 - DNA, 25 bp, Homo sapien
ccacacttcctgaggttcatgatag

SEQ ID NO: 946212 - DNA, 25 bp, Homo sapien
aatccggagaataggggaccgtgtg

SEQ ID NO: 946213 - DNA, 25 bp, Homo sapien
ttgctgctgttcttttctgagtctt

SEQ ID NO: 946214 - DNA, 25 bp, Homo sapien
tgttcttttctgagtctttccttca

SEQ ID NO: 946215 - DNA, 25 bp, Homo sapien
tcatttccccaaaactttgctccca

SEQ ID NO: 946216 - DNA, 25 bp, Homo sapien
caaaactttgctcccaaggcatttc

SEQ ID NO: 946217 - DNA, 25 bp, Homo sapien
tccttttgctttcaaacttcacctc

SEQ ID NO: 946218 - DNA, 25 bp, Homo sapien
cttttgctttcaaacttcacctcca

SEQ ID NO: 946219 - DNA, 25 bp, Homo sapien
catcttagtgagttcattttccttt

SEQ ID NO: 946220 - DNA, 25 bp, Homo sapien
ttgctttcaaacttcacctccaact

SEQ ID NO: 946221 - DNA, 25 bp, Homo sapien
ggaaactgccatcgccctcagcctt

SEQ ID NO: 946222 - DNA, 25 bp, Homo sapien
tgtttggaaactgccatcgccctca

SEQ ID NO: 946223 - DNA, 25 bp, Homo sapien
tttgtttggaaactgccatcgccct

SEQ ID NO: 946224 - DNA, 25 bp, Homo sapien
tttggaaactgccatcgccctcagc

SEQ ID NO: 946225 - DNA, 25 bp, Homo sapien
cttggcttgcttgcagagcttcccc

SEQ ID NO: 946226 - DNA, 25 bp, Homo sapien
cagcaaatccctgacaccaactcat

SEQ ID NO: 946227 - DNA, 25 bp, Homo sapien
tggcttgcttgcagagcttcccctt

SEQ ID NO: 946228 - DNA, 25 bp, Homo sapien
acctctctccctcaacagcaaatcc

SEQ ID NO: 946229 - DNA, 25 bp, Homo sapien
tccatttcgcattccaccatggttg

SEQ ID NO: 946230 - DNA, 25 bp, Homo sapien
ctcctgtctacttccatttcgcatt

SEQ ID NO: 946231 - DNA, 25 bp, Homo sapien
tcctgtctacttccatttcgcattc

SEQ ID NO: 946232 - DNA, 25 bp, Homo sapien
atttcgcattccaccatggttgtaa

SEQ ID NO: 946233 - DNA, 25 bp, Homo sapien
agtttgtacccaaagcaagcttgaa

SEQ ID NO: 946234 - DNA, 25 bp, Homo sapien
tctgtggagtctggaactgattgcc

SEQ ID NO: 946235 - DNA, 25 bp, Homo sapien
actgattgcccaactaggagttctc

SEQ ID NO: 946236 - DNA, 25 bp, Homo sapien
cattgacaggtatatatagggctag

SEQ ID NO: 946237 - DNA, 25 bp, Homo sapien
tggatatcagcccaaaggattggta

SEQ ID NO: 946238 - DNA, 25 bp, Homo sapien
tatttggaccatctggagttagttc

SEQ ID NO: 946239 - DNA, 25 bp, Homo sapien
cctgggacttctctacctctgggct

SEQ ID NO: 946240 - DNA, 25 bp, Homo sapien
gaatctttggtagcatccttggacc

SEQ ID NO: 946241 - DNA, 25 bp, Homo sapien
tccaaacaccaaactgtgtaaatat

SEQ ID NO: 946242 - DNA, 25 bp, Homo sapien
tatccaaacaccaaactgtgtaaat

SEQ ID NO: 946243 - DNA, 25 bp, Homo sapien
atccaaacaccaaactgtgtaaata

SEQ ID NO: 946244 - DNA, 25 bp, Homo sapien
gaacatcaatgtgtctaaagggcta

SEQ ID NO: 946245 - DNA, 25 bp, Homo sapien
cattcttaacaatgtgcagaagatc

SEQ ID NO: 946246 - DNA, 25 bp, Homo sapien
tttgtagtgacttatcaaggcaggg

SEQ ID NO: 946247 - DNA, 25 bp, Homo sapien
gaagatcatgctttgtgcagagttc

SEQ ID NO: 946248 - DNA, 25 bp, Homo sapien
tcaatgtctatgaatttgaccatct

SEQ ID NO: 946249 - DNA, 25 bp, Homo sapien
ttccccatccgttcaccagtgactt

SEQ ID NO: 946250 - DNA, 25 bp, Homo sapien
cacattcttccccatccgttcacca

SEQ ID NO: 946251 - DNA, 25 bp, Homo sapien
caatgtctatgaatttgaccatctt

SEQ ID NO: 946252 - DNA, 25 bp, Homo sapien
tcactggttgcccaatgactttgcc

SEQ ID NO: 946253 - DNA, 25 bp, Homo sapien
cagggtagtccaacaatgaacagct

SEQ ID NO: 946254 - DNA, 25 bp, Homo sapien
cctactctatgctggtggatatgaa

SEQ ID NO: 946255 - DNA, 25 bp, Homo sapien
tccttaaagaatgctccctgtctag

SEQ ID NO: 946256 - DNA, 25 bp, Homo sapien
aacatgtgagctctttccgccccat

SEQ ID NO: 946257 - DNA, 25 bp, Homo sapien
aagttacttagctggtaattgatgg

SEQ ID NO: 946258 - DNA, 25 bp, Homo sapien
catttctgcttacatctctggctcc

SEQ ID NO: 946259 - DNA, 25 bp, Homo sapien
tgatgtttggccaagaagagacttt

SEQ ID NO: 946260 - DNA, 25 bp, Homo sapien
tttcttggaagatttggaaggcttc

SEQ ID NO: 946261 - DNA, 25 bp, Homo sapien
tcttggaagatttggaaggcttcag

SEQ ID NO: 946262 - DNA, 25 bp, Homo sapien
ttggaagatttggaaggcttcagag

SEQ ID NO: 946263 - DNA, 25 bp, Homo sapien
gaagatttggaaggcttcagagtca

SEQ ID NO: 946264 - DNA, 25 bp, Homo sapien
tgctactggtgaaatccctggaacc

SEQ ID NO: 946265 - DNA, 25 bp, Homo sapien
agaagtaggctttcactgctactgg

SEQ ID NO: 946266 - DNA, 25 bp, Homo sapien
tagatggcactgaaagtaagcctcc

SEQ ID NO: 946267 - DNA, 25 bp, Homo sapien
gcttctggacaaatgctgaggaaca

SEQ ID NO: 946268 - DNA, 25 bp, Homo sapien
ggtcatcagcccaaagtcatagtgt

SEQ ID NO: 946269 - DNA, 25 bp, Homo sapien
gacaaaatgccaggtagagacctac

SEQ ID NO: 946270 - DNA, 25 bp, Homo sapien
aaggatccctggttgggcagcgaca

SEQ ID NO: 946271 - DNA, 25 bp, Homo sapien
ccaggatttatgctcaggcagtgta

SEQ ID NO: 946272 - DNA, 25 bp, Homo sapien
ttgagtgattatcgcataccaggca

SEQ ID NO: 946273 - DNA, 25 bp, Homo sapien
ttaaggaatagagatatgaacccag

SEQ ID NO: 946274 - DNA, 25 bp, Homo sapien
tcccatcacacgtcaggcttatctg

SEQ ID NO: 946275 - DNA, 25 bp, Homo sapien
tcaaggacaaaagcagtgagcaagt

SEQ ID NO: 946276 - DNA, 25 bp, Homo sapien
aactgacaggttattagggatgaac

SEQ ID NO: 946277 - DNA, 25 bp, Homo sapien
ttttgaaatagagtcaagatttgct

SEQ ID NO: 946278 - DNA, 25 bp, Homo sapien
caggtagaggcccaaataatgacga

SEQ ID NO: 946279 - DNA, 25 bp, Homo sapien
tgaaaactcagtaaaatccaagaaa

SEQ ID NO: 946280 - DNA, 25 bp, Homo sapien
cagattctactgagaatgtaaaaga

SEQ ID NO: 946281 - DNA, 25 bp, Homo sapien
tcagattctactgagaatgtaaaag

SEQ ID NO: 946282 - DNA, 25 bp, Homo sapien
tacttcaagagctcagagtcaggct

SEQ ID NO: 946283 - DNA, 25 bp, Homo sapien
cacaaactggctgactacttcaaga

SEQ ID NO: 946284 - DNA, 25 bp, Homo sapien
gatacacatgtgcaatgggccctac

SEQ ID NO: 946285 - DNA, 25 bp, Homo sapien
cattacagttgatgcagttaggaaa

SEQ ID NO: 946286 - DNA, 25 bp, Homo sapien
tactgcaagccattaagttggaaca

SEQ ID NO: 946287 - DNA, 25 bp, Homo sapien
aatgagtcattaagaaacagtattc

SEQ ID NO: 946288 - DNA, 25 bp, Homo sapien
aatgccacagtatttgaacactagg

SEQ ID NO: 946289 - DNA, 25 bp, Homo sapien
tggaaattagtggagccacaccctc

SEQ ID NO: 946290 - DNA, 25 bp, Homo sapien
cagcatcatatagcacagcagcttt

SEQ ID NO: 946291 - DNA, 25 bp, Homo sapien
acagcatcatatagcacagcagctt

SEQ ID NO: 946292 - DNA, 25 bp, Homo sapien
aatccagttgtggaatcaaattgtg

SEQ ID NO: 946293 - DNA, 25 bp, Homo sapien
gaaatccagttgtggaatcaaattg

SEQ ID NO: 946294 - DNA, 25 bp, Homo sapien
tccagttgtggaatcaaattgtgaa

SEQ ID NO: 946295 - DNA, 25 bp, Homo sapien
cagttgtggaatcaaattgtgaatc

SEQ ID NO: 946296 - DNA, 25 bp, Homo sapien
tgttcctcccacttacatgcgtaag

SEQ ID NO: 946297 - DNA, 25 bp, Homo sapien
gcgtaagacgagatgaaaaatgcaa

SEQ ID NO: 946298 - DNA, 25 bp, Homo sapien
tagatacaaatggacgggaatcaag

SEQ ID NO: 946299 - DNA, 25 bp, Homo sapien
caaggacttacgatctctgtatttc

SEQ ID NO: 946300 - DNA, 25 bp, Homo sapien
aacttcatggcctatttcaatggaa

SEQ ID NO: 946301 - DNA, 25 bp, Homo sapien
ttaacttcatggcctatttcaatgg

SEQ ID NO: 946302 - DNA, 25 bp, Homo sapien
acttcatggcctatttcaatggaaa

SEQ ID NO: 946303 - DNA, 25 bp, Homo sapien
taacttcatggcctatttcaatgga

SEQ ID NO: 946304 - DNA, 25 bp, Homo sapien
tagttgccaggaggtactccttcac

SEQ ID NO: 946305 - DNA, 25 bp, Homo sapien
tacccactattagcatagccatagt

SEQ ID NO: 946306 - DNA, 25 bp, Homo sapien
gcttctcagactttcagtgagcctc

SEQ ID NO: 946307 - DNA, 25 bp, Homo sapien
agttcccatagttgccaggaggtac

SEQ ID NO: 946308 - DNA, 25 bp, Homo sapien
ctgcaaggatcagagtcacaaaggt

SEQ ID NO: 946309 - DNA, 25 bp, Homo sapien
caaggatcagagtcacaaaggtggt

SEQ ID NO: 946310 - DNA, 25 bp, Homo sapien
tgcaaggatcagagtcacaaaggtg

SEQ ID NO: 946311 - DNA, 25 bp, Homo sapien
aaggatcagagtcacaaaggtggtt

SEQ ID NO: 946312 - DNA, 25 bp, Homo sapien
tggttaatacagaaggacgggagct

SEQ ID NO: 946313 - DNA, 25 bp, Homo sapien
gttaatacagaaggacgggagctca

SEQ ID NO: 946314 - DNA, 25 bp, Homo sapien
agtggttaatacagaaggacgggag

SEQ ID NO: 946315 - DNA, 25 bp, Homo sapien
ttaatacagaaggacgggagctcat

SEQ ID NO: 946316 - DNA, 25 bp, Homo sapien
cttttgagttcctcctatctggaac

SEQ ID NO: 946317 - DNA, 25 bp, Homo sapien
ttcttttgagttcctcctatctgga

SEQ ID NO: 946318 - DNA, 25 bp, Homo sapien
tgagttcctcctatctggaactcac

SEQ ID NO: 946319 - DNA, 25 bp, Homo sapien
tttgagttcctcctatctggaactc

SEQ ID NO: 946320 - DNA, 25 bp, Homo sapien
gatgagccagtttcctaaccccaaa

SEQ ID NO: 946321 - DNA, 25 bp, Homo sapien
gaaaatgccgttctagtagctgtgc

SEQ ID NO: 946322 - DNA, 25 bp, Homo sapien
tactagcgtgctttgggtgcaacca

SEQ ID NO: 946323 - DNA, 25 bp, Homo sapien
tagctgtgcgttactataagggtcc

SEQ ID NO: 946324 - DNA, 25 bp, Homo sapien
aaacttgaatctgactcaaacttaa

SEQ ID NO: 946325 - DNA, 25 bp, Homo sapien
atctgactcaaacttaaggaaattc

SEQ ID NO: 946326 - DNA, 25 bp, Homo sapien
gatctgggacaaatggtgtgtttcc

SEQ ID NO: 946327 - DNA, 25 bp, Homo sapien
tgaatctgactcaaacttaaggaaa

SEQ ID NO: 946328 - DNA, 25 bp, Homo sapien
ggaccgcgtcttcagtaccagggcc

SEQ ID NO: 946329 - DNA, 25 bp, Homo sapien
cctaaagcgccacgacatcagtgga

SEQ ID NO: 946330 - DNA, 25 bp, Homo sapien
agggcccagcgaaacaccaacttct

SEQ ID NO: 946331 - DNA, 25 bp, Homo sapien
gctttgggtgagtaggaaacagcta

SEQ ID NO: 946332 - DNA, 25 bp, Homo sapien
gtccaaagagaaaagtgctgcaagt

SEQ ID NO: 946333 - DNA, 25 bp, Homo sapien
ggtccttcaagtcctgaatggttgt

SEQ ID NO: 946334 - DNA, 25 bp, Homo sapien
tgctgcaagttctaggctgctgctt

SEQ ID NO: 946335 - DNA, 25 bp, Homo sapien
tctccccagtccaaagagaaaagtg

SEQ ID NO: 946336 - DNA, 25 bp, Homo sapien
ggacccataactcttgttctcactc

SEQ ID NO: 946337 - DNA, 25 bp, Homo sapien
tgataaggactttcaggtcaacagc

SEQ ID NO: 946338 - DNA, 25 bp, Homo sapien
ggcttccctatagattcaggaccca

SEQ ID NO: 946339 - DNA, 25 bp, Homo sapien
agctgtgtttgatttggcttcccta

SEQ ID NO: 946340 - DNA, 25 bp, Homo sapien
tgcagtgggcagagcaccagcacaa

SEQ ID NO: 946341 - DNA, 25 bp, Homo sapien
tctgtttggttgctctggtctcttc

SEQ ID NO: 946342 - DNA, 25 bp, Homo sapien
cagcacaacccgtagaaagcagctc

SEQ ID NO: 946343 - DNA, 25 bp, Homo sapien
cttgaaggccaagtgctgtgatcat

SEQ ID NO: 946344 - DNA, 25 bp, Homo sapien
caggcctgggttagagtcctagcca

SEQ ID NO: 946345 - DNA, 25 bp, Homo sapien
tcttctgccaggtcgatggcctgca

SEQ ID NO: 946346 - DNA, 25 bp, Homo sapien
ccgtgtgttcctcccctgttgtgct

SEQ ID NO: 946347 - DNA, 25 bp, Homo sapien
tatctagagagcaaagaaatgcact

SEQ ID NO: 946348 - DNA, 25 bp, Homo sapien
tgctcggcagtccaagctatggagt

SEQ ID NO: 946349 - DNA, 25 bp, Homo sapien
gctatggagtggtacaatggcttta

SEQ ID NO: 946350 - DNA, 25 bp, Homo sapien
tacttcatggttagttgctcggcag

SEQ ID NO: 946351 - DNA, 25 bp, Homo sapien
aatggctttagagttgacagcgggc

SEQ ID NO: 946352 - DNA, 25 bp, Homo sapien
tttttcaaggtattgttcccaagca

SEQ ID NO: 946353 - DNA, 25 bp, Homo sapien
cactggattcatgtttttcaaggta

SEQ ID NO: 946354 - DNA, 25 bp, Homo sapien
ttttcaaggtattgttcccaagcat

SEQ ID NO: 946355 - DNA, 25 bp, Homo sapien
cctcaaatgggtccactggattcat

SEQ ID NO: 946356 - DNA, 25 bp, Homo sapien
agcagaatgacctgaagtgcttttc

SEQ ID NO: 946357 - DNA, 25 bp, Homo sapien
tctagcagaatgacctgaagtgctt

SEQ ID NO: 946358 - DNA, 25 bp, Homo sapien
ctagcagaatgacctgaagtgcttt

SEQ ID NO: 946359 - DNA, 25 bp, Homo sapien
ctctagcagaatgacctgaagtgct

SEQ ID NO: 946360 - DNA, 25 bp, Homo sapien
agttgtgactatatcacagtttagt

SEQ ID NO: 946361 - DNA, 25 bp, Homo sapien
gactatatcacagtttagtttcttc

SEQ ID NO: 946362 - DNA, 25 bp, Homo sapien
ttcaggacaaatctgaaaggcaatc

SEQ ID NO: 946363 - DNA, 25 bp, Homo sapien
ggcaatcacagcttcatagctgaga

SEQ ID NO: 946364 - DNA, 25 bp, Homo sapien
tagagattcaagttagcatacaaaa

SEQ ID NO: 946365 - DNA, 25 bp, Homo sapien
tacattgacaatctaaaaactatac

SEQ ID NO: 946366 - DNA, 25 bp, Homo sapien
taaactcaagactttattcctcttc

SEQ ID NO: 946367 - DNA, 25 bp, Homo sapien
tgttctatcaaaattgtgccaagta

SEQ ID NO: 946368 - DNA, 25 bp, Homo sapien
gaccatagcgaacacaaattgaata

SEQ ID NO: 946369 - DNA, 25 bp, Homo sapien
tgaagttcaccagtagaccatagcg

SEQ ID NO: 946370 - DNA, 25 bp, Homo sapien
aactctgtcgtagagaagtggcacc

SEQ ID NO: 946371 - DNA, 25 bp, Homo sapien
tctggaagcttgaccatgagtgact

SEQ ID NO: 946372 - DNA, 25 bp, Homo sapien
ctcaacatccctggatgaagtggcc

SEQ ID NO: 946373 - DNA, 25 bp, Homo sapien
tcctcaacatccctggatgaagtgg

SEQ ID NO: 946374 - DNA, 25 bp, Homo sapien
tcaacatccctggatgaagtggccg

SEQ ID NO: 946375 - DNA, 25 bp, Homo sapien
aacatccctggatgaagtggccggg

SEQ ID NO: 946376 - DNA, 25 bp, Homo sapien
attggataccccttctcaataatgg

SEQ ID NO: 946377 - DNA, 25 bp, Homo sapien
ccctttcgaaggggtatgcacacca

SEQ ID NO: 946378 - DNA, 25 bp, Homo sapien
ggtatgcacaccattggatacccct

SEQ ID NO: 946379 - DNA, 25 bp, Homo sapien
agccctttcgaaggggtatgcacac

SEQ ID NO: 946380 - DNA, 25 bp, Homo sapien
tgtaaacagtaatttgttcatatca

SEQ ID NO: 946381 - DNA, 25 bp, Homo sapien
ctattctaagtacaggaagctgtct

SEQ ID NO: 946382 - DNA, 25 bp, Homo sapien
gctattctaagtacaggaagctgtc

SEQ ID NO: 946383 - DNA, 25 bp, Homo sapien
aacagtaatttgttcatatcaaatg

SEQ ID NO: 946384 - DNA, 25 bp, Homo sapien
tctggaaggccagcgttcagtgatc

SEQ ID NO: 946385 - DNA, 25 bp, Homo sapien
ccatttccctcaggatagcgcactt

SEQ ID NO: 946386 - DNA, 25 bp, Homo sapien
caggatagcgcacttggtgtaaagg

SEQ ID NO: 946387 - DNA, 25 bp, Homo sapien
tggaaggccagcgttcagtgatctc

SEQ ID NO: 946388 - DNA, 25 bp, Homo sapien
ctgaagaagtcctagtcgcctccac

SEQ ID NO: 946389 - DNA, 25 bp, Homo sapien
cgccctgtgctgacttgtccagctg

SEQ ID NO: 946390 - DNA, 25 bp, Homo sapien
gagtgcagatgacattgttcccttt

SEQ ID NO: 946391 - DNA, 25 bp, Homo sapien
tgtgctgacttgtccagctgtttcc

SEQ ID NO: 946392 - DNA, 25 bp, Homo sapien
tttctccattccaaggttctcagag

SEQ ID NO: 946393 - DNA, 25 bp, Homo sapien
ctgtggttgacagaacattttgtac

SEQ ID NO: 946394 - DNA, 25 bp, Homo sapien
tgtggttgacagaacattttgtacc

SEQ ID NO: 946395 - DNA, 25 bp, Homo sapien
tggttgacagaacattttgtaccat

SEQ ID NO: 946396 - DNA, 25 bp, Homo sapien
gtggttgacagaacattttgtacca

SEQ ID NO: 946397 - DNA, 25 bp, Homo sapien
cctgatggctgttgcctactctggt

SEQ ID NO: 946398 - DNA, 25 bp, Homo sapien
gatgagctgctgatatcccggctgc

SEQ ID NO: 946399 - DNA, 25 bp, Homo sapien
tgatatcccggctgctactgattcc

SEQ ID NO: 946400 - DNA, 25 bp, Homo sapien
cgaagttccctgactcgctgtgtcc

SEQ ID NO: 946401 - DNA, 25 bp, Homo sapien
gaaaattgtactgcattggactagg

SEQ ID NO: 946402 - DNA, 25 bp, Homo sapien
tggaggccatgaggcaaggttaccc

SEQ ID NO: 946403 - DNA, 25 bp, Homo sapien
tggactagggtattccaataggatt

SEQ ID NO: 946404 - DNA, 25 bp, Homo sapien
tgtaagaccagatatcacagatttg

SEQ ID NO: 946405 - DNA, 25 bp, Homo sapien
aatgcttgtgagtggccacaacaca

SEQ ID NO: 946406 - DNA, 25 bp, Homo sapien
tgtattcagcaggtctaggcacagc

SEQ ID NO: 946407 - DNA, 25 bp, Homo sapien
tatggaagttttctgcaacaatgct

SEQ ID NO: 946408 - DNA, 25 bp, Homo sapien
gctgcagatatagctaatatggaag

SEQ ID NO: 946409 - DNA, 25 bp, Homo sapien
caggccagttagcatactctttcaa

SEQ ID NO: 946410 - DNA, 25 bp, Homo sapien
ggccagttagcatactctttcaaat

SEQ ID NO: 946411 - DNA, 25 bp, Homo sapien
aggccagttagcatactctttcaaa

SEQ ID NO: 946412 - DNA, 25 bp, Homo sapien
aagcataaattttccagtggtaatt

SEQ ID NO: 946413 - DNA, 25 bp, Homo sapien
aaagcataaattttccagtggtaat

SEQ ID NO: 946414 - DNA, 25 bp, Homo sapien
attttccagtggtaatttgacccat

SEQ ID NO: 946415 - DNA, 25 bp, Homo sapien
gcataaattttccagtggtaatttg

SEQ ID NO: 946416 - DNA, 25 bp, Homo sapien
caccaaactggcagctgtggacgtc

SEQ ID NO: 946417 - DNA, 25 bp, Homo sapien
agtgctagggttcaccaccaaactg

SEQ ID NO: 946418 - DNA, 25 bp, Homo sapien
gactctcagcagtgctagggttcac

SEQ ID NO: 946419 - DNA, 25 bp, Homo sapien
aaactggcagctgtggacgtcgtca

SEQ ID NO: 946420 - DNA, 25 bp, Homo sapien
tatacaaagatagtaggcagaactt

SEQ ID NO: 946421 - DNA, 25 bp, Homo sapien
taaagcatgtgagtaggactacttg

SEQ ID NO: 946422 - DNA, 25 bp, Homo sapien
tagggaggccatgatcactagatgt

SEQ ID NO: 946423 - DNA, 25 bp, Homo sapien
ggactacttgccgtgtataaacaga

SEQ ID NO: 946424 - DNA, 25 bp, Homo sapien
gtttgtcgggtactatagcagttcc

SEQ ID NO: 946425 - DNA, 25 bp, Homo sapien
gagatttcctgtttgtcgggtacta

SEQ ID NO: 946426 - DNA, 25 bp, Homo sapien
gtcgggtactatagcagttccgcca

SEQ ID NO: 946427 - DNA, 25 bp, Homo sapien
tttcctgtttgtcgggtactatagc

SEQ ID NO: 946428 - DNA, 25 bp, Homo sapien
cactgactgtgactgcctctttcag

SEQ ID NO: 946429 - DNA, 25 bp, Homo sapien
tgactgtgactgcctctttcagcat

SEQ ID NO: 946430 - DNA, 25 bp, Homo sapien
ctgactgtgactgcctctttcagca

SEQ ID NO: 946431 - DNA, 25 bp, Homo sapien
actgactgtgactgcctctttcagc

SEQ ID NO: 946432 - DNA, 25 bp, Homo sapien
aatgatctcctagaaaccttgactg

SEQ ID NO: 946433 - DNA, 25 bp, Homo sapien
taagactcttcaaacaatttcggag

SEQ ID NO: 946434 - DNA, 25 bp, Homo sapien
gacaattgagctggtttcattatgc

SEQ ID NO: 946435 - DNA, 25 bp, Homo sapien
gattaggtaacctacaatgatctcc

SEQ ID NO: 946436 - DNA, 25 bp, Homo sapien
cactggattaagtggtcactctctc

SEQ ID NO: 946437 - DNA, 25 bp, Homo sapien
gcattagtgtctccaaatgtgttcc

SEQ ID NO: 946438 - DNA, 25 bp, Homo sapien
cattgtgtgcgtcattcactgtgac

SEQ ID NO: 946439 - DNA, 25 bp, Homo sapien
cactggtgggttggactgatccctc

SEQ ID NO: 946440 - DNA, 25 bp, Homo sapien
gctgataatagtggagccctggtcc

SEQ ID NO: 946441 - DNA, 25 bp, Homo sapien
gctcttctggtgagaaagtttccaa

SEQ ID NO: 946442 - DNA, 25 bp, Homo sapien
ttttcaggcctccatcaggagcttc

SEQ ID NO: 946443 - DNA, 25 bp, Homo sapien
tggaaagcaatagacccctaagcaa

SEQ ID NO: 946444 - DNA, 25 bp, Homo sapien
gagtaaggttgataagtcagggagt

SEQ ID NO: 946445 - DNA, 25 bp, Homo sapien
agtaaggttgataagtcagggagtt

SEQ ID NO: 946446 - DNA, 25 bp, Homo sapien
caaggattctaaagaacctgggtca

SEQ ID NO: 946447 - DNA, 25 bp, Homo sapien
tgagaaagagctgtatgtaaaacct

SEQ ID NO: 946448 - DNA, 25 bp, Homo sapien
cgccaaggcataaacagcactgtca

SEQ ID NO: 946449 - DNA, 25 bp, Homo sapien
ttttactacgtaacacgccaaggca

SEQ ID NO: 946450 - DNA, 25 bp, Homo sapien
gcagatggcattaatcttacttatg

SEQ ID NO: 946451 - DNA, 25 bp, Homo sapien
tgaatgtgtaaaaatatagcccaag

SEQ ID NO: 946452 - DNA, 25 bp, Homo sapien
ctgtaaatatagtaactgcagatgg

SEQ ID NO: 946453 - DNA, 25 bp, Homo sapien
gactatgaattggttttgatggtac

SEQ ID NO: 946454 - DNA, 25 bp, Homo sapien
gctgtaagtccatgcctccaatgtt

SEQ ID NO: 946455 - DNA, 25 bp, Homo sapien
aatcgctggcctttactctgcatgg

SEQ ID NO: 946456 - DNA, 25 bp, Homo sapien
caagtctgtcagaactaacaaggta

SEQ ID NO: 946457 - DNA, 25 bp, Homo sapien
taatcaagctagcaatccaagtctg

SEQ ID NO: 946458 - DNA, 25 bp, Homo sapien
gagaaaccctccacaggatcgatag

SEQ ID NO: 946459 - DNA, 25 bp, Homo sapien
ggatcgatagcaattctcacaggga

SEQ ID NO: 946460 - DNA, 25 bp, Homo sapien
tctgccacgttagcttcgaaaggga

SEQ ID NO: 946461 - DNA, 25 bp, Homo sapien
cagccatcataggaattactcagtg

SEQ ID NO: 946462 - DNA, 25 bp, Homo sapien
tggccgcaggttagtgacagtataa

SEQ ID NO: 946463 - DNA, 25 bp, Homo sapien
aatcatggcagtggcagtatgtcca

SEQ ID NO: 946464 - DNA, 25 bp, Homo sapien
tagctcctccaacgcgaatcatggc

SEQ ID NO: 946465 - DNA, 25 bp, Homo sapien
aataactggcatctttccgcttccg

SEQ ID NO: 946466 - DNA, 25 bp, Homo sapien
tcagtaccccatgaaataccaagcc

SEQ ID NO: 946467 - DNA, 25 bp, Homo sapien
catgcatacttaatctggagcccaa

SEQ ID NO: 946468 - DNA, 25 bp, Homo sapien
ccaagccctgtggtggatggtcctt

SEQ ID NO: 946469 - DNA, 25 bp, Homo sapien
agttccccaggtagtgacacatgca

SEQ ID NO: 946470 - DNA, 25 bp, Homo sapien
cggcattgatcaattcagtggacac

SEQ ID NO: 946471 - DNA, 25 bp, Homo sapien
ggaataacggcattgatcaattcag

SEQ ID NO: 946472 - DNA, 25 bp, Homo sapien
cacagtcggaataacggcattgatc

SEQ ID NO: 946473 - DNA, 25 bp, Homo sapien
tttctttcacagtcggaataacggc

SEQ ID NO: 946474 - DNA, 25 bp, Homo sapien
gattcagaaacctggaccaactcac

SEQ ID NO: 946475 - DNA, 25 bp, Homo sapien
tagtctcctgaagatacagcactag

SEQ ID NO: 946476 - DNA, 25 bp, Homo sapien
tttcaacggataggtctgtctggtc

SEQ ID NO: 946477 - DNA, 25 bp, Homo sapien
gtctggtcctttccatcgtggtcta

SEQ ID NO: 946478 - DNA, 25 bp, Homo sapien
tcatgccaatcggcattcatccatg

SEQ ID NO: 946479 - DNA, 25 bp, Homo sapien
catgccaatcggcattcatccatga

SEQ ID NO: 946480 - DNA, 25 bp, Homo sapien
ggaacgtaacacacatcagtgtcat

SEQ ID NO: 946481 - DNA, 25 bp, Homo sapien
ctttcctatagctattctgaggaac

SEQ ID NO: 946482 - DNA, 25 bp, Homo sapien
tagctattctgaggaacgtaacaca

SEQ ID NO: 946483 - DNA, 25 bp, Homo sapien
ttctgaggaacgtaacacacatcag

SEQ ID NO: 946484 - DNA, 25 bp, Homo sapien
gctcttcaaattcactcatggccac

SEQ ID NO: 946485 - DNA, 25 bp, Homo sapien
ggccacttttctcggagctaaggct

SEQ ID NO: 946486 - DNA, 25 bp, Homo sapien
agctcttcaaattcactcatggcca

SEQ ID NO: 946487 - DNA, 25 bp, Homo sapien
catggccacttttctcggagctaag

SEQ ID NO: 946488 - DNA, 25 bp, Homo sapien
gtagagtatcagctcaatgtgcaaa

SEQ ID NO: 946489 - DNA, 25 bp, Homo sapien
cacactggtgtatggtcaactcttc

SEQ ID NO: 946490 - DNA, 25 bp, Homo sapien
tcttcatcattgtagagtatcagct

SEQ ID NO: 946491 - DNA, 25 bp, Homo sapien
ttgcagcacactggtgtatggtcaa

SEQ ID NO: 946492 - DNA, 25 bp, Homo sapien
tttctgtcttttaatcctgatggga

SEQ ID NO: 946493 - DNA, 25 bp, Homo sapien
gaaatataagaaggaacatccagaa

SEQ ID NO: 946494 - DNA, 25 bp, Homo sapien
gggaaatataagaaggaacatccag

SEQ ID NO: 946495 - DNA, 25 bp, Homo sapien
aagatacacaacagaagacggcact

SEQ ID NO: 946496 - DNA, 25 bp, Homo sapien
aatacttaggtccaccagtcaggga

SEQ ID NO: 946497 - DNA, 25 bp, Homo sapien
taaatccagctggtgactcctatgg

SEQ ID NO: 946498 - DNA, 25 bp, Homo sapien
tctcgctgagaaggaattagagtcc

SEQ ID NO: 946499 - DNA, 25 bp, Homo sapien
taaaccactggaagtagtctcgctg

SEQ ID NO: 946500 - DNA, 25 bp, Homo sapien
tggcaaacatggtgaagcctcctct

SEQ ID NO: 946501 - DNA, 25 bp, Homo sapien
agagttccagactagcctggcaaac

SEQ ID NO: 946502 - DNA, 25 bp, Homo sapien
cctggcaaacatggtgaagcctcct

SEQ ID NO: 946503 - DNA, 25 bp, Homo sapien
gcaaacatggtgaagcctcctctct

SEQ ID NO: 946504 - DNA, 25 bp, Homo sapien
aactggaactagaatgagataacat

SEQ ID NO: 946505 - DNA, 25 bp, Homo sapien
gagataacatggtattgcttcttct

SEQ ID NO: 946506 - DNA, 25 bp, Homo sapien
caatcaagtcaactagaactggaac

SEQ ID NO: 946507 - DNA, 25 bp, Homo sapien
cttcttagcagtcgtttgacaatca

SEQ ID NO: 946508 - DNA, 25 bp, Homo sapien
tcctgctttgatcgccggagatctg

SEQ ID NO: 946509 - DNA, 25 bp, Homo sapien
gagcactccgacgtgtcccatagtg

SEQ ID NO: 946510 - DNA, 25 bp, Homo sapien
tacaagtggcctacagggcacaggt

SEQ ID NO: 946511 - DNA, 25 bp, Homo sapien
tcactgctgaaacagtgggcgcaca

SEQ ID NO: 946512 - DNA, 25 bp, Homo sapien
tataaatagggcagatccgggcttt

SEQ ID NO: 946513 - DNA, 25 bp, Homo sapien
gaaagcctcaaaagtgtccacgtcc

SEQ ID NO: 946514 - DNA, 25 bp, Homo sapien
ttattattttagcaccacggcagca

SEQ ID NO: 946515 - DNA, 25 bp, Homo sapien
ccaatttaagaagccagccccgtgg

SEQ ID NO: 946516 - DNA, 25 bp, Homo sapien
gccaggtgatacctccgccggtgac

SEQ ID NO: 946517 - DNA, 25 bp, Homo sapien
gcccgcgcccgccaggtgatacctc

SEQ ID NO: 946518 - DNA, 25 bp, Homo sapien
acccaggggctctgcgacacaagga

SEQ ID NO: 946519 - DNA, 25 bp, Homo sapien
gctctgcgacacaaggagtctgcat

SEQ ID NO: 946520 - DNA, 25 bp, Homo sapien
gcgggaatgatccacttgaagaaaa

SEQ ID NO: 946521 - DNA, 25 bp, Homo sapien
tacaatggactctcgccgcttttct

SEQ ID NO: 946522 - DNA, 25 bp, Homo sapien
tgcatttagggtccaaatggtcccc

SEQ ID NO: 946523 - DNA, 25 bp, Homo sapien
gattcaagttcattctattcagagc

SEQ ID NO: 946524 - DNA, 25 bp, Homo sapien
gaaatttgccatagtctctcctcca

SEQ ID NO: 946525 - DNA, 25 bp, Homo sapien
caggcccttggtgattaacagaaag

SEQ ID NO: 946526 - DNA, 25 bp, Homo sapien
tgattccaatatgccagggtaccag

SEQ ID NO: 946527 - DNA, 25 bp, Homo sapien
tggttggttacagcctcataaagga

SEQ ID NO: 946528 - DNA, 25 bp, Homo sapien
catcccgtgattacataaagctggc

SEQ ID NO: 946529 - DNA, 25 bp, Homo sapien
tgggatactgaatgacacgaggctc

SEQ ID NO: 946530 - DNA, 25 bp, Homo sapien
taaagctggccatctacatgtggag

SEQ ID NO: 946531 - DNA, 25 bp, Homo sapien
gatacttcttaccattgtgtgaccc

SEQ ID NO: 946532 - DNA, 25 bp, Homo sapien
cagggctctaatgatgttgaacttg

SEQ ID NO: 946533 - DNA, 25 bp, Homo sapien
aacagcattgcatacatggatgagg

SEQ ID NO: 946534 - DNA, 25 bp, Homo sapien
gcaacagcaggttcacttacactgt

SEQ ID NO: 946535 - DNA, 25 bp, Homo sapien
tggcaacctgaaaaaggctgtcatt

SEQ ID NO: 946536 - DNA, 25 bp, Homo sapien
tgctgacctagacagagatgaactg

SEQ ID NO: 946537 - DNA, 25 bp, Homo sapien
tgatattgcacctttggacatcggt

SEQ ID NO: 946538 - DNA, 25 bp, Homo sapien
gatccacattgttaggtgctgacct

SEQ ID NO: 946539 - DNA, 25 bp, Homo sapien
tccatggttccacagaagctttgtt

SEQ ID NO: 946540 - DNA, 25 bp, Homo sapien
gaaaagagttgatattccttccgat

SEQ ID NO: 946541 - DNA, 25 bp, Homo sapien
tttaatgtgaaaccaggcaaactgg

SEQ ID NO: 946542 - DNA, 25 bp, Homo sapien
tgagggccccatgaaaatgagcagc

SEQ ID NO: 946543 - DNA, 25 bp, Homo sapien
gaaacagtctgaagcttcatcacat

SEQ ID NO: 946544 - DNA, 25 bp, Homo sapien
tttggagtcagcatcatgaccaaag

SEQ ID NO: 946545 - DNA, 25 bp, Homo sapien
cagtagcagcggagacagggtcata

SEQ ID NO: 946546 - DNA, 25 bp, Homo sapien
ggccagcgatggacttaaggcagta

SEQ ID NO: 946547 - DNA, 25 bp, Homo sapien
agggaccatgaggagtaatgaggga

SEQ ID NO: 946548 - DNA, 25 bp, Homo sapien
gaagtggacattgagcaatccccaa

SEQ ID NO: 946549 - DNA, 25 bp, Homo sapien
ttgtgtcagttgtcacttttagtgg

SEQ ID NO: 946550 - DNA, 25 bp, Homo sapien
gtcagttgtcacttttagtgggaaa

SEQ ID NO: 946551 - DNA, 25 bp, Homo sapien
tgtcagttgtcacttttagtgggaa

SEQ ID NO: 946552 - DNA, 25 bp, Homo sapien
tgtgtcagttgtcacttttagtggg

SEQ ID NO: 946553 - DNA, 25 bp, Homo sapien
agaccccgagagattcctgacacag

SEQ ID NO: 946554 - DNA, 25 bp, Homo sapien
gatgtcaagatcctcaccaagtgag

SEQ ID NO: 946555 - DNA, 25 bp, Homo sapien
gatggtacccacaaagcacttgatg

SEQ ID NO: 946556 - DNA, 25 bp, Homo sapien
tcaacagtggttgccctgatggtac

SEQ ID NO: 946557 - DNA, 25 bp, Homo sapien
gaatagtattgcaaaaaaacatggg

SEQ ID NO: 946558 - DNA, 25 bp, Homo sapien
ctttcttttggggatatgctagcag

SEQ ID NO: 946559 - DNA, 25 bp, Homo sapien
ggagataactcttccgtatactgat

SEQ ID NO: 946560 - DNA, 25 bp, Homo sapien
ggatatctcaaaaaacatggagata

SEQ ID NO: 946561 - DNA, 25 bp, Homo sapien
caaccactacttcagcgtgaggagc

SEQ ID NO: 946562 - DNA, 25 bp, Homo sapien
ctgttgtcatggaggaaccaagatg

SEQ ID NO: 946563 - DNA, 25 bp, Homo sapien
ctgggcaagcgggagatcaaccact

SEQ ID NO: 946564 - DNA, 25 bp, Homo sapien
ctccgccgcgcactgttgtcatgga

SEQ ID NO: 946565 - DNA, 25 bp, Homo sapien
ttctctcaagtggcagatttcttgg

SEQ ID NO: 946566 - DNA, 25 bp, Homo sapien
ggcaacctcacagttgtatgatgca

SEQ ID NO: 946567 - DNA, 25 bp, Homo sapien
aaagtttggcaacctcacagttgta

SEQ ID NO: 946568 - DNA, 25 bp, Homo sapien
cacagttgtatgatgcataaataca

SEQ ID NO: 946569 - DNA, 25 bp, Homo sapien
tgaagatttccctgcccactaaggt

SEQ ID NO: 946570 - DNA, 25 bp, Homo sapien
tggccaatctgctttatctcaggtg

SEQ ID NO: 946571 - DNA, 25 bp, Homo sapien
tgtgtgataactaggcctaaggcaa

SEQ ID NO: 946572 - DNA, 25 bp, Homo sapien
tgctctggcacctggatacctatct

SEQ ID NO: 946573 - DNA, 25 bp, Homo sapien
tgaagcaaagaactgccttgtagat

SEQ ID NO: 946574 - DNA, 25 bp, Homo sapien
actgccttgtagataaacatattgc

SEQ ID NO: 946575 - DNA, 25 bp, Homo sapien
catattgcatttattggagattcca

SEQ ID NO: 946576 - DNA, 25 bp, Homo sapien
tggagattccagaattcgtcaattg

SEQ ID NO: 946577 - DNA, 25 bp, Homo sapien
agttattcccaaaccgatctgtagg

SEQ ID NO: 946578 - DNA, 25 bp, Homo sapien
aaatgacataattagatggaatata

SEQ ID NO: 946579 - DNA, 25 bp, Homo sapien
aacagaatttgttgtgcaactttac

SEQ ID NO: 946580 - DNA, 25 bp, Homo sapien
gaatataatatactgtttccttgga

SEQ ID NO: 946581 - DNA, 25 bp, Homo sapien
cttaagataaagagtatctattcac

SEQ ID NO: 946582 - DNA, 25 bp, Homo sapien
taaagagtatctattcaccaaaaga

SEQ ID NO: 946583 - DNA, 25 bp, Homo sapien
agagtatctattcaccaaaagatac

SEQ ID NO: 946584 - DNA, 25 bp, Homo sapien
ttaagataaagagtatctattcacc

SEQ ID NO: 946585 - DNA, 25 bp, Homo sapien
gaagacaagactgcatcagttaaag

SEQ ID NO: 946586 - DNA, 25 bp, Homo sapien
tttgaagacaagactgcatcagtta

SEQ ID NO: 946587 - DNA, 25 bp, Homo sapien
agacaagactgcatcagttaaagtg

SEQ ID NO: 946588 - DNA, 25 bp, Homo sapien
tgaagacaagactgcatcagttaaa

SEQ ID NO: 946589 - DNA, 25 bp, Homo sapien
aatggttctatgaaacagtgtatca

SEQ ID NO: 946590 - DNA, 25 bp, Homo sapien
gaagttaatggttctatgaaacagt

SEQ ID NO: 946591 - DNA, 25 bp, Homo sapien
acagtgtatcaaagtgtggactgag

SEQ ID NO: 946592 - DNA, 25 bp, Homo sapien
tctatgaaacagtgtatcaaagtgt

SEQ ID NO: 946593 - DNA, 25 bp, Homo sapien
gactgattctagcacttcattgaga

SEQ ID NO: 946594 - DNA, 25 bp, Homo sapien
ttattatatttgtgacccagcaggc

SEQ ID NO: 946595 - DNA, 25 bp, Homo sapien
gaagatgtagatccaatatctctgc

SEQ ID NO: 946596 - DNA, 25 bp, Homo sapien
aactaaactgtgctggactgattct

SEQ ID NO: 946597 - DNA, 25 bp, Homo sapien
ctcagcaatatcctattagccattc

SEQ ID NO: 946598 - DNA, 25 bp, Homo sapien
ttataagagatgtataatatcatct

SEQ ID NO: 946599 - DNA, 25 bp, Homo sapien
tatcctattagccattctgagtctg

SEQ ID NO: 946600 - DNA, 25 bp, Homo sapien
gcaatatcctattagccattctgag

SEQ ID NO: 946601 - DNA, 25 bp, Homo sapien
ccacatgtgattgtagcaggagctg

SEQ ID NO: 946602 - DNA, 25 bp, Homo sapien
cattgcaaagccacatgtgattgta

SEQ ID NO: 946603 - DNA, 25 bp, Homo sapien
tgcaaagccacatgtgattgtagca

SEQ ID NO: 946604 - DNA, 25 bp, Homo sapien
aagccacatgtgattgtagcaggag

SEQ ID NO: 946605 - DNA, 25 bp, Homo sapien
atcacctccatagcaccacttttag

SEQ ID NO: 946606 - DNA, 25 bp, Homo sapien
ccatcaagattcacaatggtagcag

SEQ ID NO: 946607 - DNA, 25 bp, Homo sapien
gcagtgaagcgctttctcaatataa

SEQ ID NO: 946608 - DNA, 25 bp, Homo sapien
tcacctccatagcaccacttttaga

SEQ ID NO: 946609 - DNA, 25 bp, Homo sapien
tataactcagcatccaaaaatgtta

SEQ ID NO: 946610 - DNA, 25 bp, Homo sapien
gttaaactcttaagacatgctggag

SEQ ID NO: 946611 - DNA, 25 bp, Homo sapien
ctgttataactcagcatccaaaaat

SEQ ID NO: 946612 - DNA, 25 bp, Homo sapien
aaatgttaaactcttaagacatgct

SEQ ID NO: 946613 - DNA, 25 bp, Homo sapien
ctatcatggctgtcagcggaaggag

SEQ ID NO: 946614 - DNA, 25 bp, Homo sapien
tcaagacatcattcgccaggccatg

SEQ ID NO: 946615 - DNA, 25 bp, Homo sapien
ggccatgcagagcaaacatgaagac

SEQ ID NO: 946616 - DNA, 25 bp, Homo sapien
aaaagccatgccatttcccgtacta

SEQ ID NO: 946617 - DNA, 25 bp, Homo sapien
aacagttgaaagaaattcaattctt

SEQ ID NO: 946618 - DNA, 25 bp, Homo sapien
acagttgaaagaaattcaattcttc

SEQ ID NO: 946619 - DNA, 25 bp, Homo sapien
aagccattggttagcattgcaggac

SEQ ID NO: 946620 - DNA, 25 bp, Homo sapien
agcattgcaggacattctataaaca

SEQ ID NO: 946621 - DNA, 25 bp, Homo sapien
gcattgcaggacattctataaacaa

SEQ ID NO: 946622 - DNA, 25 bp, Homo sapien
ttgaagccattggttagcattgcag

SEQ ID NO: 946623 - DNA, 25 bp, Homo sapien
tttcttttcatcttagcatttacta

SEQ ID NO: 946624 - DNA, 25 bp, Homo sapien
ttttcatcttagcatttactactca

SEQ ID NO: 946625 - DNA, 25 bp, Homo sapien
gatagtttcttttcatcttagcatt

SEQ ID NO: 946626 - DNA, 25 bp, Homo sapien
tcttttcatcttagcatttactact

SEQ ID NO: 946627 - DNA, 25 bp, Homo sapien
taagatgctggccaatgatttctct

SEQ ID NO: 946628 - DNA, 25 bp, Homo sapien
gatttcacctggtaagagcaacagt

SEQ ID NO: 946629 - DNA, 25 bp, Homo sapien
gtcctctggagccttgacaacattg

SEQ ID NO: 946630 - DNA, 25 bp, Homo sapien
ctcacttggactattaggagcagtt

SEQ ID NO: 946631 - DNA, 25 bp, Homo sapien
caatgccctagttaacttaggaaga

SEQ ID NO: 946632 - DNA, 25 bp, Homo sapien
gcaagtggcaatgccctagttaact

SEQ ID NO: 946633 - DNA, 25 bp, Homo sapien
ctggagaacagcaagtggcaatgcc

SEQ ID NO: 946634 - DNA, 25 bp, Homo sapien
cttaggaagaaattagagatacatc

SEQ ID NO: 946635 - DNA, 25 bp, Homo sapien
ggaatttttgtgacctctgggcacc

SEQ ID NO: 946636 - DNA, 25 bp, Homo sapien
gacatgatagccacactgatccagt

SEQ ID NO: 946637 - DNA, 25 bp, Homo sapien
gacagagtattctccctaagtggaa

SEQ ID NO: 946638 - DNA, 25 bp, Homo sapien
gaaggttttccagctagtccagtct

SEQ ID NO: 946639 - DNA, 25 bp, Homo sapien
cataacatatgccagaaaagctcat

SEQ ID NO: 946640 - DNA, 25 bp, Homo sapien
tatttggtatacacttaatactgcc

SEQ ID NO: 946641 - DNA, 25 bp, Homo sapien
agctcatgcattattggaagagaaa

SEQ ID NO: 946642 - DNA, 25 bp, Homo sapien
ttaaagatcaacttttattgtaaca

SEQ ID NO: 946643 - DNA, 25 bp, Homo sapien
aattcattgcttcagtcagttttct

SEQ ID NO: 946644 - DNA, 25 bp, Homo sapien
taaattcattgcttcagtcagtttt

SEQ ID NO: 946645 - DNA, 25 bp, Homo sapien
attcattgcttcagtcagttttctt

SEQ ID NO: 946646 - DNA, 25 bp, Homo sapien
aaattcattgcttcagtcagttttc

SEQ ID NO: 946647 - DNA, 25 bp, Homo sapien
gcacaaacacaccaatcttgcataa

SEQ ID NO: 946648 - DNA, 25 bp, Homo sapien
tagttttaaatgtaccagaggcaca

SEQ ID NO: 946649 - DNA, 25 bp, Homo sapien
ggagatactgtactttagtctataa

SEQ ID NO: 946650 - DNA, 25 bp, Homo sapien
aaaaatgctagggtggtctctctcc

SEQ ID NO: 946651 - DNA, 25 bp, Homo sapien
tgaaaagttgtcaaacgaaaatctc

SEQ ID NO: 946652 - DNA, 25 bp, Homo sapien
taatccaaggagaattgtccgccat

SEQ ID NO: 946653 - DNA, 25 bp, Homo sapien
caaaggcattaatggttccctggca

SEQ ID NO: 946654 - DNA, 25 bp, Homo sapien
tttccaaaagagctacaaaggcatt

SEQ ID NO: 946655 - DNA, 25 bp, Homo sapien
cctggatgcatccaagctaagaatc

SEQ ID NO: 946656 - DNA, 25 bp, Homo sapien
gatgcttttgctctaagatcattta

SEQ ID NO: 946657 - DNA, 25 bp, Homo sapien
ctgtgtttatcattctgatgccaat

SEQ ID NO: 946658 - DNA, 25 bp, Homo sapien
gccaatctatgtaataatctaagct

SEQ ID NO: 946659 - DNA, 25 bp, Homo sapien
tgctctaagatcatttaccctgtgt

SEQ ID NO: 946660 - DNA, 25 bp, Homo sapien
ctgtagtctgctgttggggaatctg

SEQ ID NO: 946661 - DNA, 25 bp, Homo sapien
ggaatctgagtctgatgtggcaagt

SEQ ID NO: 946662 - DNA, 25 bp, Homo sapien
aatctgagtctgatgtggcaagttc

SEQ ID NO: 946663 - DNA, 25 bp, Homo sapien
ggggaatctgagtctgatgtggcaa

SEQ ID NO: 946664 - DNA, 25 bp, Homo sapien
ctgaggtctgaggagaataaaaatt

SEQ ID NO: 946665 - DNA, 25 bp, Homo sapien
catactagaatgaaaaactttacgg

SEQ ID NO: 946666 - DNA, 25 bp, Homo sapien
cgggtaaactatgaccccagtcatg

SEQ ID NO: 946667 - DNA, 25 bp, Homo sapien
gtcatgtaatccagcacaattcccc

SEQ ID NO: 946668 - DNA, 25 bp, Homo sapien
ctgtcgtttcttttctagcctccgt

SEQ ID NO: 946669 - DNA, 25 bp, Homo sapien
gatcaaagtcaacctatgccctgtc

SEQ ID NO: 946670 - DNA, 25 bp, Homo sapien
ggaatttagcttggaaaccactgat

SEQ ID NO: 946671 - DNA, 25 bp, Homo sapien
aagtcaacctatgccctgtcgtttc

SEQ ID NO: 946672 - DNA, 25 bp, Homo sapien
tgttaacaacgggagaaactggctg

SEQ ID NO: 946673 - DNA, 25 bp, Homo sapien
tctaggcatgtgctacatctccagg

SEQ ID NO: 946674 - DNA, 25 bp, Homo sapien
gaaactgggttcctcattgtgacaa

SEQ ID NO: 946675 - DNA, 25 bp, Homo sapien
actggctgaggcgtatctgggaact

SEQ ID NO: 946676 - DNA, 25 bp, Homo sapien
tgaaatgcttaggatatggttcttt

SEQ ID NO: 946677 - DNA, 25 bp, Homo sapien
catctttgagcaaacatgtaatgtt

SEQ ID NO: 946678 - DNA, 25 bp, Homo sapien
tattgtatatttcaggagagtaggg

SEQ ID NO: 946679 - DNA, 25 bp, Homo sapien
taatgttgagtttaatatcagtgtc

SEQ ID NO: 946680 - DNA, 25 bp, Homo sapien
tctctctattcttggacatgtctcg

SEQ ID NO: 946681 - DNA, 25 bp, Homo sapien
tgctgcgtttgcatcaatggcatgt

SEQ ID NO: 946682 - DNA, 25 bp, Homo sapien
catagttgtctgtgtgtaaaggagg

SEQ ID NO: 946683 - DNA, 25 bp, Homo sapien
gcatgtttgtgctatcatagttgtc

SEQ ID NO: 946684 - DNA, 25 bp, Homo sapien
ttatggcactttgggcattcaataa

SEQ ID NO: 946685 - DNA, 25 bp, Homo sapien
gcctgatgggtcatcaatttgaaaa

SEQ ID NO: 946686 - DNA, 25 bp, Homo sapien
taaaatcatatattagcctgatggg

SEQ ID NO: 946687 - DNA, 25 bp, Homo sapien
catatattagcctgatgggtcatca

SEQ ID NO: 946688 - DNA, 25 bp, Homo sapien
cacacatgtatggagcatgatgggc

SEQ ID NO: 946689 - DNA, 25 bp, Homo sapien
ttctacccctcctaaatatctctat

SEQ ID NO: 946690 - DNA, 25 bp, Homo sapien
tatggagcatgatgggcaactgaga

SEQ ID NO: 946691 - DNA, 25 bp, Homo sapien
agcttgacacacatgtatggagcat

SEQ ID NO: 946692 - DNA, 25 bp, Homo sapien
ctggtgtttgcatgtttctcttttc

SEQ ID NO: 946693 - DNA, 25 bp, Homo sapien
tctggtgtttgcatgtttctctttt

SEQ ID NO: 946694 - DNA, 25 bp, Homo sapien
tggtgtttgcatgtttctcttttcc

SEQ ID NO: 946695 - DNA, 25 bp, Homo sapien
ggatgagtacacatacagcgatgga

SEQ ID NO: 946696 - DNA, 25 bp, Homo sapien
gactatatgctcatgggatcttgca

SEQ ID NO: 946697 - DNA, 25 bp, Homo sapien
gcgatggaatactgatgagaaacac

SEQ ID NO: 946698 - DNA, 25 bp, Homo sapien
cagcatttgccaccaggtttatgac

SEQ ID NO: 946699 - DNA, 25 bp, Homo sapien
gaaaaaggaccagtgccactgccga

SEQ ID NO: 946700 - DNA, 25 bp, Homo sapien
gccagtgtaattaggaaatccgtgt

SEQ ID NO: 946701 - DNA, 25 bp, Homo sapien
agggcacagccagtgtaattaggaa

SEQ ID NO: 946702 - DNA, 25 bp, Homo sapien
cggcagcacatgatataagcaagta

SEQ ID NO: 946703 - DNA, 25 bp, Homo sapien
atcagaagggggtttgtattctcca

SEQ ID NO: 946704 - DNA, 25 bp, Homo sapien
tctccaccatcaggtaaaatcccct

SEQ ID NO: 946705 - DNA, 25 bp, Homo sapien
tctccacgaatcacttcctgatagg

SEQ ID NO: 946706 - DNA, 25 bp, Homo sapien
tggacacttgctttgttttatcaac

SEQ ID NO: 946707 - DNA, 25 bp, Homo sapien
atctgcaccaaccatgacataaacg

SEQ ID NO: 946708 - DNA, 25 bp, Homo sapien
gagtacgaaattttttatcacatgt

SEQ ID NO: 946709 - DNA, 25 bp, Homo sapien
gaaattttgcaccagtcaatgtaaa

SEQ ID NO: 946710 - DNA, 25 bp, Homo sapien
catttcttgactacatctcaattga

SEQ ID NO: 946711 - DNA, 25 bp, Homo sapien
tgtaaaaatgtgaaactctcaggtt

SEQ ID NO: 946712 - DNA, 25 bp, Homo sapien
gtaaaaatgtgaaactctcaggtta

SEQ ID NO: 946713 - DNA, 25 bp, Homo sapien
taaaaatgtgaaactctcaggttat

SEQ ID NO: 946714 - DNA, 25 bp, Homo sapien
aaaaatgtgaaactctcaggttatc

SEQ ID NO: 946715 - DNA, 25 bp, Homo sapien
ctgtctagggccgatgtgatgttta

SEQ ID NO: 946716 - DNA, 25 bp, Homo sapien
ttaatgggaagtggcaccctgccac

SEQ ID NO: 946717 - DNA, 25 bp, Homo sapien
ttcaggtcattaatgggaagtggca

SEQ ID NO: 946718 - DNA, 25 bp, Homo sapien
tctagggccgatgtgatgtttatgg

SEQ ID NO: 946719 - DNA, 25 bp, Homo sapien
ttttcactgcgccaagaaagtctcc

SEQ ID NO: 946720 - DNA, 25 bp, Homo sapien
tggctgccacacatttttcactgcg

SEQ ID NO: 946721 - DNA, 25 bp, Homo sapien
actgcgccaagaaagtctccaagaa

SEQ ID NO: 946722 - DNA, 25 bp, Homo sapien
gccacacatttttcactgcgccaag

SEQ ID NO: 946723 - DNA, 25 bp, Homo sapien
taatgaagaattctgcttgatatgg

SEQ ID NO: 946724 - DNA, 25 bp, Homo sapien
aagaattctgcttgatatggcaacg

SEQ ID NO: 946725 - DNA, 25 bp, Homo sapien
aattctgcttgatatggcaacggga

SEQ ID NO: 946726 - DNA, 25 bp, Homo sapien
tctgcttgatatggcaacgggaagt

SEQ ID NO: 946727 - DNA, 25 bp, Homo sapien
tgttccacgtgacccagcttcatgg

SEQ ID NO: 946728 - DNA, 25 bp, Homo sapien
acacccctcagaggctttgagctgg

SEQ ID NO: 946729 - DNA, 25 bp, Homo sapien
tgcctgctatctacccatccaagag

SEQ ID NO: 946730 - DNA, 25 bp, Homo sapien
tcagtgctactttttggagaattat

SEQ ID NO: 946731 - DNA, 25 bp, Homo sapien
cagagtttcgagtccctttgagagc

SEQ ID NO: 946732 - DNA, 25 bp, Homo sapien
ctttgagagcataatggtgaggtga

SEQ ID NO: 946733 - DNA, 25 bp, Homo sapien
ctgacagagtttcgagtccctttga

SEQ ID NO: 946734 - DNA, 25 bp, Homo sapien
gacagagtttcgagtccctttgaga

SEQ ID NO: 946735 - DNA, 25 bp, Homo sapien
acagggagtcttcagtccaggccca

SEQ ID NO: 946736 - DNA, 25 bp, Homo sapien
gtctacaattgataccggtaaacac

SEQ ID NO: 946737 - DNA, 25 bp, Homo sapien
cagaactggcacttggacttgcttt

SEQ ID NO: 946738 - DNA, 25 bp, Homo sapien
cttggacttgcttttcatatatgaa

SEQ ID NO: 946739 - DNA, 25 bp, Homo sapien
caaattatgccttgcagtctcaaag

SEQ ID NO: 946740 - DNA, 25 bp, Homo sapien
gccttgcagtctcaaaggtgcgcct

SEQ ID NO: 946741 - DNA, 25 bp, Homo sapien
cagtctcaaaggtgcgcctgttgta

SEQ ID NO: 946742 - DNA, 25 bp, Homo sapien
caaaggtgcgcctgttgtaggcagt

SEQ ID NO: 946743 - DNA, 25 bp, Homo sapien
tggcaaactattacaggtggtcttc

SEQ ID NO: 946744 - DNA, 25 bp, Homo sapien
ttatgaaaccatcccagtacatgtg

SEQ ID NO: 946745 - DNA, 25 bp, Homo sapien
tctccccaaccagaagtagtcattc

SEQ ID NO: 946746 - DNA, 25 bp, Homo sapien
cacttatccatattgctgggcaagc

SEQ ID NO: 946747 - DNA, 25 bp, Homo sapien
tgttggggacccatataggactcca

SEQ ID NO: 946748 - DNA, 25 bp, Homo sapien
tataggactccatcactatatggtg

SEQ ID NO: 946749 - DNA, 25 bp, Homo sapien
ggtgtcctttggatatatcgaagcc

SEQ ID NO: 946750 - DNA, 25 bp, Homo sapien
catccaggtcggtctgggtaaccca

SEQ ID NO: 946751 - DNA, 25 bp, Homo sapien
gaacaaagaggacacctgctgatgg

SEQ ID NO: 946752 - DNA, 25 bp, Homo sapien
cattccgatcggagtgtaccttgga

SEQ ID NO: 946753 - DNA, 25 bp, Homo sapien
tgaacaaagaggacacctgctgatg

SEQ ID NO: 946754 - DNA, 25 bp, Homo sapien
ggtatacattccgatcggagtgtac

SEQ ID NO: 946755 - DNA, 25 bp, Homo sapien
tgttttctagacaaagcatgtcaga

SEQ ID NO: 946756 - DNA, 25 bp, Homo sapien
caatacatgtaatgcggtttttacg

SEQ ID NO: 946757 - DNA, 25 bp, Homo sapien
aaatgcattggatactttttctggg

SEQ ID NO: 946758 - DNA, 25 bp, Homo sapien
ttcctcgcatctcttgtagaaatga

SEQ ID NO: 946759 - DNA, 25 bp, Homo sapien
gaaaacttgtccctgcagttcggtg

SEQ ID NO: 946760 - DNA, 25 bp, Homo sapien
cttgtccctgcagttcggtggatgg

SEQ ID NO: 946761 - DNA, 25 bp, Homo sapien
ctgtgaaaacttgtccctgcagttc

SEQ ID NO: 946762 - DNA, 25 bp, Homo sapien
aaagccttggatagcaagatcactg

SEQ ID NO: 946763 - DNA, 25 bp, Homo sapien
taaaactgctttggcaacacctgga

SEQ ID NO: 946764 - DNA, 25 bp, Homo sapien
tacaaagtacggcagaggtaaacac

SEQ ID NO: 946765 - DNA, 25 bp, Homo sapien
tgtacttaccagcaggaataatccc

SEQ ID NO: 946766 - DNA, 25 bp, Homo sapien
caatgtaccctgaatgtgaggtgct

SEQ ID NO: 946767 - DNA, 25 bp, Homo sapien
acaatctaccatggccctcctgggt

SEQ ID NO: 946768 - DNA, 25 bp, Homo sapien
caagaacttgcatagaacatctcag

SEQ ID NO: 946769 - DNA, 25 bp, Homo sapien
aacatttctgcgttctacagagcca

SEQ ID NO: 946770 - DNA, 25 bp, Homo sapien
catgtgtactcaattgcctttcagc

SEQ ID NO: 946771 - DNA, 25 bp, Homo sapien
ctgaagtactctgcagttgattctt

SEQ ID NO: 946772 - DNA, 25 bp, Homo sapien
tgaaatgaattgttccacagagctg

SEQ ID NO: 946773 - DNA, 25 bp, Homo sapien
aattgttccacagagctgatgtttc

SEQ ID NO: 946774 - DNA, 25 bp, Homo sapien
ttttcatgatggtataagatcatca

SEQ ID NO: 946775 - DNA, 25 bp, Homo sapien
tcaatcggaaaaaggttgcaaacca

SEQ ID NO: 946776 - DNA, 25 bp, Homo sapien
tctctaggagatatggccacttttc

SEQ ID NO: 946777 - DNA, 25 bp, Homo sapien
tgtcatcctgtctgggcatgccaaa

SEQ ID NO: 946778 - DNA, 25 bp, Homo sapien
tggaatccatcactaagaaggcatt

SEQ ID NO: 946779 - DNA, 25 bp, Homo sapien
gccatcagcacagcttaataaaaaa

SEQ ID NO: 946780 - DNA, 25 bp, Homo sapien
ccatttatgccatcagcacagctta

SEQ ID NO: 946781 - DNA, 25 bp, Homo sapien
ttccagttaactgttccatttatgc

SEQ ID NO: 946782 - DNA, 25 bp, Homo sapien
tggcctgtctggtcttccagttaac

SEQ ID NO: 946783 - DNA, 25 bp, Homo sapien
agcataggggttaaggaatactaag

SEQ ID NO: 946784 - DNA, 25 bp, Homo sapien
actagcataggggttaaggaatact

SEQ ID NO: 946785 - DNA, 25 bp, Homo sapien
actggcagcaatgactagcataggg

SEQ ID NO: 946786 - DNA, 25 bp, Homo sapien
cactggcagcaatgactagcatagg

SEQ ID NO: 946787 - DNA, 25 bp, Homo sapien
ccttgctggatagtggaatatccca

SEQ ID NO: 946788 - DNA, 25 bp, Homo sapien
gatttacaggtacaaccaatttgta

SEQ ID NO: 946789 - DNA, 25 bp, Homo sapien
ccaactgatttacaggtacaaccaa

SEQ ID NO: 946790 - DNA, 25 bp, Homo sapien
aaacatgcaagaccttgctggatag

SEQ ID NO: 946791 - DNA, 25 bp, Homo sapien
taaaagcaaactgtcaagtctttct

SEQ ID NO: 946792 - DNA, 25 bp, Homo sapien
ttaaaagcaaactgtcaagtctttc

SEQ ID NO: 946793 - DNA, 25 bp, Homo sapien
aaaagcaaactgtcaagtctttctc

SEQ ID NO: 946794 - DNA, 25 bp, Homo sapien
tcttttgcaaccatatcatgccact

SEQ ID NO: 946795 - DNA, 25 bp, Homo sapien
taatccatggattttaaagcaagcc

SEQ ID NO: 946796 - DNA, 25 bp, Homo sapien
tgtggttgattagagcagggtacta

SEQ ID NO: 946797 - DNA, 25 bp, Homo sapien
ttgcagcccacttaaaaaccatgtt

SEQ ID NO: 946798 - DNA, 25 bp, Homo sapien
gggtagattatggataattagcaaa

SEQ ID NO: 946799 - DNA, 25 bp, Homo sapien
gaaggtggctgggtattttggagaa

SEQ ID NO: 946800 - DNA, 25 bp, Homo sapien
gaggtaggaaataagtgttagaata

SEQ ID NO: 946801 - DNA, 25 bp, Homo sapien
gaatatgcatttaggtgtttacaga

SEQ ID NO: 946802 - DNA, 25 bp, Homo sapien
tagcgcactcggtacggcagcatct

SEQ ID NO: 946803 - DNA, 25 bp, Homo sapien
tggaaatagcgcactcggtacggca

SEQ ID NO: 946804 - DNA, 25 bp, Homo sapien
ttctggaaatagcgcactcggtacg

SEQ ID NO: 946805 - DNA, 25 bp, Homo sapien
aaatagcgcactcggtacggcagca

SEQ ID NO: 946806 - DNA, 25 bp, Homo sapien
ctgtttagctcccagcatttcatga

SEQ ID NO: 946807 - DNA, 25 bp, Homo sapien
gcatttcatgattccgcttccctgc

SEQ ID NO: 946808 - DNA, 25 bp, Homo sapien
accgagatttccgtcaccgagaaat

SEQ ID NO: 946809 - DNA, 25 bp, Homo sapien
gagatttccgtcaccgagaaatgca

SEQ ID NO: 946810 - DNA, 25 bp, Homo sapien
aaatgtcacatttttgtgttctcta

SEQ ID NO: 946811 - DNA, 25 bp, Homo sapien
tgtcacatttttgtgttctctacca

SEQ ID NO: 946812 - DNA, 25 bp, Homo sapien
gaaattcggtgttttaaatgtcaca

SEQ ID NO: 946813 - DNA, 25 bp, Homo sapien
cttagcaagagggggaaattcggtg

SEQ ID NO: 946814 - DNA, 25 bp, Homo sapien
gcggggacgcagcttgacacccatt

SEQ ID NO: 946815 - DNA, 25 bp, Homo sapien
gatgtgtttgtgtagcggggacgca

SEQ ID NO: 946816 - DNA, 25 bp, Homo sapien
tagcggggacgcagcttgacaccca

SEQ ID NO: 946817 - DNA, 25 bp, Homo sapien
ggacgcagcttgacacccatttcct

SEQ ID NO: 946818 - DNA, 25 bp, Homo sapien
aatgtgccagtggtcgcggggctca

SEQ ID NO: 946819 - DNA, 25 bp, Homo sapien
tcagcaagaatgtgccagtggtcgc

SEQ ID NO: 946820 - DNA, 25 bp, Homo sapien
cagcaagaatgtgccagtggtcgcg

SEQ ID NO: 946821 - DNA, 25 bp, Homo sapien
ctgtcagcaagaatgtgccagtggt

SEQ ID NO: 946822 - DNA, 25 bp, Homo sapien
cccgaccctgtcccgtccaagcaca

SEQ ID NO: 946823 - DNA, 25 bp, Homo sapien
tggcctggctaggccgtccgtcctc

SEQ ID NO: 946824 - DNA, 25 bp, Homo sapien
agaacagcggagaaggtccaccgag

SEQ ID NO: 946825 - DNA, 25 bp, Homo sapien
tcaacttcggttggtgtgtgtcgaa

SEQ ID NO: 946826 - DNA, 25 bp, Homo sapien
ccgagcctggcgaaaggtccgctga

SEQ ID NO: 946827 - DNA, 25 bp, Homo sapien
tgtcgaagaaacctgactgcgccct

SEQ ID NO: 946828 - DNA, 25 bp, Homo sapien
ttgggtttccaggaccaagtccaga

SEQ ID NO: 946829 - DNA, 25 bp, Homo sapien
gcttgggtttccaggaccaagtcca

SEQ ID NO: 946830 - DNA, 25 bp, Homo sapien
gggtttccaggaccaagtccagata

SEQ ID NO: 946831 - DNA, 25 bp, Homo sapien
ggtttccaggaccaagtccagatac

SEQ ID NO: 946832 - DNA, 25 bp, Homo sapien
ctatagatcgatttgcaatttgctc

SEQ ID NO: 946833 - DNA, 25 bp, Homo sapien
tcttcaaatgcgctaccaagtgcca

SEQ ID NO: 946834 - DNA, 25 bp, Homo sapien
atgagctgcagacggtcaggagcta

SEQ ID NO: 946835 - DNA, 25 bp, Homo sapien
acagagatgagctgcggacagtgat

SEQ ID NO: 946836 - DNA, 25 bp, Homo sapien
cccactctatttttctgcaggacgg

SEQ ID NO: 946837 - DNA, 25 bp, Homo sapien
cgcatgatggtgctggtagacaaaa

SEQ ID NO: 946838 - DNA, 25 bp, Homo sapien
gtagacaaaatggagccccgggcaa

SEQ ID NO: 946839 - DNA, 25 bp, Homo sapien
caggacggttctcgcatgatggtgc

SEQ ID NO: 946840 - DNA, 25 bp, Homo sapien
gtgacagttggccagagtaccctcc

SEQ ID NO: 946841 - DNA, 25 bp, Homo sapien
tgataaccagttaccttctcggtgg

SEQ ID NO: 946842 - DNA, 25 bp, Homo sapien
tatagcttttcctaggaggcatcaa

SEQ ID NO: 946843 - DNA, 25 bp, Homo sapien
tagtgccatttctgtcccatagaga

SEQ ID NO: 946844 - DNA, 25 bp, Homo sapien
gttgtccacgaaactcacgacctga

SEQ ID NO: 946845 - DNA, 25 bp, Homo sapien
tgtggaagcaattgatgggcgcccc

SEQ ID NO: 946846 - DNA, 25 bp, Homo sapien
tagttgacctgggagatcaccgaga

SEQ ID NO: 946847 - DNA, 25 bp, Homo sapien
gatacagagtttaccaaccagtgag

SEQ ID NO: 946848 - DNA, 25 bp, Homo sapien
caaaattatcggtgcagtgtggaaa

SEQ ID NO: 946849 - DNA, 25 bp, Homo sapien
gaaaggcttccgtgatcctctcgct

SEQ ID NO: 946850 - DNA, 25 bp, Homo sapien
tcaaggagcagcaactcgactggtt

SEQ ID NO: 946851 - DNA, 25 bp, Homo sapien
catgtacccaatgactccggctttg

SEQ ID NO: 946852 - DNA, 25 bp, Homo sapien
tgatcttcaagctgcagggtgccta

SEQ ID NO: 946853 - DNA, 25 bp, Homo sapien
tgcaggtgcacaaaataagagggcc

SEQ ID NO: 946854 - DNA, 25 bp, Homo sapien
gaaagtccctgatccacatttggct

SEQ ID NO: 946855 - DNA, 25 bp, Homo sapien
taagagctcccattgataggcaagc

SEQ ID NO: 946856 - DNA, 25 bp, Homo sapien
ttttctccccacacttctgtacaaa

SEQ ID NO: 946857 - DNA, 25 bp, Homo sapien
cagccaactgaatctcatcagtttc

SEQ ID NO: 946858 - DNA, 25 bp, Homo sapien
cttctgtacaaaacttcatgacagc

SEQ ID NO: 946859 - DNA, 25 bp, Homo sapien
ccacacttctgtacaaaacttcatg

SEQ ID NO: 946860 - DNA, 25 bp, Homo sapien
caaatagcactttttatttgccacc

SEQ ID NO: 946861 - DNA, 25 bp, Homo sapien
tttagcacctgtctcatccccaatg

SEQ ID NO: 946862 - DNA, 25 bp, Homo sapien
tggtggttcatatccctcagctcgt

SEQ ID NO: 946863 - DNA, 25 bp, Homo sapien
ttttccagaactactgctgtcacca

SEQ ID NO: 946864 - DNA, 25 bp, Homo sapien
ctcagctcgttcaactttagcacct

SEQ ID NO: 946865 - DNA, 25 bp, Homo sapien
agccttttctatgtcttttccaatg

SEQ ID NO: 946866 - DNA, 25 bp, Homo sapien
ctaacgaagacatcatggagaggat

SEQ ID NO: 946867 - DNA, 25 bp, Homo sapien
cgaagacatcatggagaggataaat

SEQ ID NO: 946868 - DNA, 25 bp, Homo sapien
aacgaagacatcatggagaggataa

SEQ ID NO: 946869 - DNA, 25 bp, Homo sapien
gtctggaatcaatttgttgacgact

SEQ ID NO: 946870 - DNA, 25 bp, Homo sapien
ggaatcaatttgttgacgacttctt

SEQ ID NO: 946871 - DNA, 25 bp, Homo sapien
ctggaatcaatttgttgacgacttc

SEQ ID NO: 946872 - DNA, 25 bp, Homo sapien
ctgtctggaatcaatttgttgacga

SEQ ID NO: 946873 - DNA, 25 bp, Homo sapien
tcaggtcatgatttccatcatcttc

SEQ ID NO: 946874 - DNA, 25 bp, Homo sapien
ccatcatcttcttttggatttggcg

SEQ ID NO: 946875 - DNA, 25 bp, Homo sapien
tttccatcatcttcttttggatttg

SEQ ID NO: 946876 - DNA, 25 bp, Homo sapien
atcatcttcttttggatttggcgga

SEQ ID NO: 946877 - DNA, 25 bp, Homo sapien
agaacagatgaagcaagtaaccatc

SEQ ID NO: 946878 - DNA, 25 bp, Homo sapien
acagaacagatgaagcaagtaacca

SEQ ID NO: 946879 - DNA, 25 bp, Homo sapien
acacagaacagatgaagcaagtaac

SEQ ID NO: 946880 - DNA, 25 bp, Homo sapien
ccaacacagaacagatgaagcaagt

SEQ ID NO: 946881 - DNA, 25 bp, Homo sapien
gaacacattttgtcatgggtaagat

SEQ ID NO: 946882 - DNA, 25 bp, Homo sapien
aagatccatgccatgaaagttagtc

SEQ ID NO: 946883 - DNA, 25 bp, Homo sapien
ttgtcatgggtaagatccatgccat

SEQ ID NO: 946884 - DNA, 25 bp, Homo sapien
gatccatgccatgaaagttagtcag

SEQ ID NO: 946885 - DNA, 25 bp, Homo sapien
ttcaaacacatgacccttgagacca

SEQ ID NO: 946886 - DNA, 25 bp, Homo sapien
agaccatcagatgcaattttggttc

SEQ ID NO: 946887 - DNA, 25 bp, Homo sapien
gagaccatcagatgcaattttggtt

SEQ ID NO: 946888 - DNA, 25 bp, Homo sapien
aaacacatgacccttgagaccatca

SEQ ID NO: 946889 - DNA, 25 bp, Homo sapien
ggtcctggtgatggcgtctttccaa

SEQ ID NO: 946890 - DNA, 25 bp, Homo sapien
tggtgatggcgtctttccaatattt

SEQ ID NO: 946891 - DNA, 25 bp, Homo sapien
ctggtgatggcgtctttccaatatt

SEQ ID NO: 946892 - DNA, 25 bp, Homo sapien
cttgggtcctggtgatggcgtcttt

SEQ ID NO: 946893 - DNA, 25 bp, Homo sapien
tatattgaacatagcaagtgctttc

SEQ ID NO: 946894 - DNA, 25 bp, Homo sapien
cttatattgaacatagcaagtgctt

SEQ ID NO: 946895 - DNA, 25 bp, Homo sapien
ttatattgaacatagcaagtgcttt

SEQ ID NO: 946896 - DNA, 25 bp, Homo sapien
tattgaacatagcaagtgctttcac

SEQ ID NO: 946897 - DNA, 25 bp, Homo sapien
taaagcacttgttcttgccaactgc

SEQ ID NO: 946898 - DNA, 25 bp, Homo sapien
tttgctgcctttcataaagcacttg

SEQ ID NO: 946899 - DNA, 25 bp, Homo sapien
tttttgctgcctttcataaagcact

SEQ ID NO: 946900 - DNA, 25 bp, Homo sapien
gctgcctttcataaagcacttgttc

SEQ ID NO: 946901 - DNA, 25 bp, Homo sapien
tgaaggttgtgggacttaacatgcc

SEQ ID NO: 946902 - DNA, 25 bp, Homo sapien
gatctatctggataacactccctgc

SEQ ID NO: 946903 - DNA, 25 bp, Homo sapien
caagagggtgtatggtgatgatgaa

SEQ ID NO: 946904 - DNA, 25 bp, Homo sapien
cacagtgtcggaggatggatctatc

SEQ ID NO: 946905 - DNA, 25 bp, Homo sapien
cagtgcaactctacaggtgtgaagt

SEQ ID NO: 946906 - DNA, 25 bp, Homo sapien
caccccagtgcaactctacaggtgt

SEQ ID NO: 946907 - DNA, 25 bp, Homo sapien
cccagtgcaactctacaggtgtgaa

SEQ ID NO: 946908 - DNA, 25 bp, Homo sapien
gtgcaactctacaggtgtgaagtgg

SEQ ID NO: 946909 - DNA, 25 bp, Homo sapien
tacagggcaagtgcgcatgcactgc

SEQ ID NO: 946910 - DNA, 25 bp, Homo sapien
cctcgagtgccttgtaggagagcaa

SEQ ID NO: 946911 - DNA, 25 bp, Homo sapien
acggccaccctgataactgctggtg

SEQ ID NO: 946912 - DNA, 25 bp, Homo sapien
tccatcaacccaagtcaggaacatg

SEQ ID NO: 946913 - DNA, 25 bp, Homo sapien
ctgcttgatctgtagacagcgctaa

SEQ ID NO: 946914 - DNA, 25 bp, Homo sapien
tctgtgaagaccaggaaattagtca

SEQ ID NO: 946915 - DNA, 25 bp, Homo sapien
tagacagcgctaagtctgtgaagac

SEQ ID NO: 946916 - DNA, 25 bp, Homo sapien
gctaagtctgtgaagaccaggaaat

SEQ ID NO: 946917 - DNA, 25 bp, Homo sapien
ccctcacattgcctgttacatctgt

SEQ ID NO: 946918 - DNA, 25 bp, Homo sapien
tacatctgtttatgcttatagaagt

SEQ ID NO: 946919 - DNA, 25 bp, Homo sapien
tttccactagattatcccagacagc

SEQ ID NO: 946920 - DNA, 25 bp, Homo sapien
tccacttcgtagacagagaatgcca

SEQ ID NO: 946921 - DNA, 25 bp, Homo sapien
tgcttttcgcccttccttggccgcc

SEQ ID NO: 946922 - DNA, 25 bp, Homo sapien
cttttcgcccttccttggccgccag

SEQ ID NO: 946923 - DNA, 25 bp, Homo sapien
gcttttcgcccttccttggccgcca

SEQ ID NO: 946924 - DNA, 25 bp, Homo sapien
catacatactttgtgttccctctaa

SEQ ID NO: 946925 - DNA, 25 bp, Homo sapien
tgctttttggatcatacatactttg

SEQ ID NO: 946926 - DNA, 25 bp, Homo sapien
actttctcacaaatgacactaattg

SEQ ID NO: 946927 - DNA, 25 bp, Homo sapien
ctaattgttgggttcatgtacttga

SEQ ID NO: 946928 - DNA, 25 bp, Homo sapien
tgcattctcccgtgtgactgctgtc

SEQ ID NO: 946929 - DNA, 25 bp, Homo sapien
actatgcattctcccgtgtgactgc

SEQ ID NO: 946930 - DNA, 25 bp, Homo sapien
ccactatgcattctcccgtgtgact

SEQ ID NO: 946931 - DNA, 25 bp, Homo sapien
tctcccgtgtgactgctgtcacata

SEQ ID NO: 946932 - DNA, 25 bp, Homo sapien
gtgtaacatcctccttaatactatt

SEQ ID NO: 946933 - DNA, 25 bp, Homo sapien
tgtaacatcctccttaatactattt

SEQ ID NO: 946934 - DNA, 25 bp, Homo sapien
ttttctcaaaatagtagatgcctgg

SEQ ID NO: 946935 - DNA, 25 bp, Homo sapien
ttgtggtgtttgttggattctcaga

SEQ ID NO: 946936 - DNA, 25 bp, Homo sapien
cctggatttgctattccaggtactt

SEQ ID NO: 946937 - DNA, 25 bp, Homo sapien
ggtgtttgttggattctcagaatct

SEQ ID NO: 946938 - DNA, 25 bp, Homo sapien
tgtatacagtccatctaggtctcct

SEQ ID NO: 946939 - DNA, 25 bp, Homo sapien
gtctcctgatgtcgtgttctccttt

SEQ ID NO: 946940 - DNA, 25 bp, Homo sapien
ctgtatacagtccatctaggtctcc

SEQ ID NO: 946941 - DNA, 25 bp, Homo sapien
atctaggtctcctgatgtcgtgttc

SEQ ID NO: 946942 - DNA, 25 bp, Homo sapien
gtcttgtttatctgtcaaatactga

SEQ ID NO: 946943 - DNA, 25 bp, Homo sapien
gtttatctgtcaaatactgactgtg

SEQ ID NO: 946944 - DNA, 25 bp, Homo sapien
tatctgtcaaatactgactgtgaag

SEQ ID NO: 946945 - DNA, 25 bp, Homo sapien
ttgtttatctgtcaaatactgactg

SEQ ID NO: 946946 - DNA, 25 bp, Homo sapien
tggcagaatttgtgtaagaacttgg

SEQ ID NO: 946947 - DNA, 25 bp, Homo sapien
tctgtacctctaatttcttacatag

SEQ ID NO: 946948 - DNA, 25 bp, Homo sapien
catagtaagtggaagttcaacaact

SEQ ID NO: 946949 - DNA, 25 bp, Homo sapien
tctgtggtctttagcgtcctcaccc

SEQ ID NO: 946950 - DNA, 25 bp, Homo sapien
tggtgaaccctttgactttacaaca

SEQ ID NO: 946951 - DNA, 25 bp, Homo sapien
tgtaaagtaggcagagtttcagctt

SEQ ID NO: 946952 - DNA, 25 bp, Homo sapien
catcctggattgataacctgcctcc

SEQ ID NO: 946953 - DNA, 25 bp, Homo sapien
gatgagccaatttccagcagatctg

SEQ ID NO: 946954 - DNA, 25 bp, Homo sapien
gatatgtttcttgtgtatcactaga

SEQ ID NO: 946955 - DNA, 25 bp, Homo sapien
ttcattcagtaacccttactcaggc

SEQ ID NO: 946956 - DNA, 25 bp, Homo sapien
gaaggctctcgttatcatcttctgc

SEQ ID NO: 946957 - DNA, 25 bp, Homo sapien
acccattcattcagtaacccttact

SEQ ID NO: 946958 - DNA, 25 bp, Homo sapien
ggtgtctattggtccctgctgtgag

SEQ ID NO: 946959 - DNA, 25 bp, Homo sapien
acaggtgtcagcgacctacttgagg

SEQ ID NO: 946960 - DNA, 25 bp, Homo sapien
tcctgtgtgaggtgtctattggtcc

SEQ ID NO: 946961 - DNA, 25 bp, Homo sapien
tagtctgacccttagtggaactcaa

SEQ ID NO: 946962 - DNA, 25 bp, Homo sapien
tcttttttgagactacaacctctgc

SEQ ID NO: 946963 - DNA, 25 bp, Homo sapien
tggtaatttggagaaaactgtcatc

SEQ ID NO: 946964 - DNA, 25 bp, Homo sapien
ggtgtaaatttctcacacatcgtgt

SEQ ID NO: 946965 - DNA, 25 bp, Homo sapien
tattcttggccttttgcgtttgcat

SEQ ID NO: 946966 - DNA, 25 bp, Homo sapien
ggtagaggccaataagatgatagct

SEQ ID NO: 946967 - DNA, 25 bp, Homo sapien
caaaccttaatgtcagtcgtacgat

SEQ ID NO: 946968 - DNA, 25 bp, Homo sapien
gatattctgcagtatacttcggctc

SEQ ID NO: 946969 - DNA, 25 bp, Homo sapien
ttttttagctatgtggagacttgcc

SEQ ID NO: 946970 - DNA, 25 bp, Homo sapien
tgcagaagcgaattctcatccagaa

SEQ ID NO: 946971 - DNA, 25 bp, Homo sapien
tgcagttaaaacagtcgaaaggatg

SEQ ID NO: 946972 - DNA, 25 bp, Homo sapien
cagagttacactgctaatgctgtag

SEQ ID NO: 946973 - DNA, 25 bp, Homo sapien
tgctgtagtcacaattgcctcttga

SEQ ID NO: 946974 - DNA, 25 bp, Homo sapien
ctctaagggcgttgtggtggttcca

SEQ ID NO: 946975 - DNA, 25 bp, Homo sapien
taacacacaccatagttggcagcag

SEQ ID NO: 946976 - DNA, 25 bp, Homo sapien
gaccactaagctaaatctattgcgg

SEQ ID NO: 946977 - DNA, 25 bp, Homo sapien
gagaaacggtttgcagccaactgtg

SEQ ID NO: 946978 - DNA, 25 bp, Homo sapien
gatcaattcctgatgaattatatgt

SEQ ID NO: 946979 - DNA, 25 bp, Homo sapien
tcaattcctgatgaattatatgtca

SEQ ID NO: 946980 - DNA, 25 bp, Homo sapien
caattcctgatgaattatatgtcat

SEQ ID NO: 946981 - DNA, 25 bp, Homo sapien
gtgatcaattcctgatgaattatat

SEQ ID NO: 946982 - DNA, 25 bp, Homo sapien
tagcggctgtgggtgttagatggca

SEQ ID NO: 946983 - DNA, 25 bp, Homo sapien
tagagtgttgtgatgaagcagagct

SEQ ID NO: 946984 - DNA, 25 bp, Homo sapien
cagatgggggactgcagggttgcag

SEQ ID NO: 946985 - DNA, 25 bp, Homo sapien
tgttgcttggtagcagtagcggctg

SEQ ID NO: 946986 - DNA, 25 bp, Homo sapien
ctgctgaattcagagtttgagtcat

SEQ ID NO: 946987 - DNA, 25 bp, Homo sapien
tcctcctttttgtacattaactgct

SEQ ID NO: 946988 - DNA, 25 bp, Homo sapien
tacatgtattaatctttacatttcc

SEQ ID NO: 946989 - DNA, 25 bp, Homo sapien
tgtacattaactgctgaattcagag

SEQ ID NO: 946990 - DNA, 25 bp, Homo sapien
ttaggtttcagagtcgcgattgacc

SEQ ID NO: 946991 - DNA, 25 bp, Homo sapien
gaatagttgaagacttgtcatcaga

SEQ ID NO: 946992 - DNA, 25 bp, Homo sapien
gacacatagtgataagaattttgat

SEQ ID NO: 946993 - DNA, 25 bp, Homo sapien
gaattttgattaggtttcagagtcg

SEQ ID NO: 946994 - DNA, 25 bp, Homo sapien
agcacaagttctcattgaccgctgc

SEQ ID NO: 946995 - DNA, 25 bp, Homo sapien
tgaccgctgccttacatgtgggccc

SEQ ID NO: 946996 - DNA, 25 bp, Homo sapien
ttggccaagcccacagcgtgtggca

SEQ ID NO: 946997 - DNA, 25 bp, Homo sapien
taaaagcctgagctcagaaaggccc

SEQ ID NO: 946998 - DNA, 25 bp, Homo sapien
gaagcctgcacccagatattggtac

SEQ ID NO: 946999 - DNA, 25 bp, Homo sapien
ggagtagactaaagccctcagctgt

SEQ ID NO: 947000 - DNA, 25 bp, Homo sapien
gaaagacactgattagaagcctgca

SEQ ID NO: 947001 - DNA, 25 bp, Homo sapien
taactagactttgggtcaggcgagg

SEQ ID NO: 947002 - DNA, 25 bp, Homo sapien
gaatctgtcatggtcccctattcga

SEQ ID NO: 947003 - DNA, 25 bp, Homo sapien
gcaggatctcagcaatatcacagtg

SEQ ID NO: 947004 - DNA, 25 bp, Homo sapien
ccttcagcctaagagaaccctggat

SEQ ID NO: 947005 - DNA, 25 bp, Homo sapien
gcctattcaccccttagatttgggc

SEQ ID NO: 947006 - DNA, 25 bp, Homo sapien
tagagtggtttcataagcagctgag

SEQ ID NO: 947007 - DNA, 25 bp, Homo sapien
cctattcacgagcaatgtatgaggg

SEQ ID NO: 947008 - DNA, 25 bp, Homo sapien
tctttacatcctcatgagcgcttgt

SEQ ID NO: 947009 - DNA, 25 bp, Homo sapien
gcagctgagtcatattacctattca

SEQ ID NO: 947010 - DNA, 25 bp, Homo sapien
gatgctgtctgcagtgaatatattg

SEQ ID NO: 947011 - DNA, 25 bp, Homo sapien
ggtttacatgcatctactaaaagac

SEQ ID NO: 947012 - DNA, 25 bp, Homo sapien
cagaaaagagtaccttctcaccttt

SEQ ID NO: 947013 - DNA, 25 bp, Homo sapien
taaagtttaagggatgcaaataagc

SEQ ID NO: 947014 - DNA, 25 bp, Homo sapien
tgatcaatagaacagcacacaggag

SEQ ID NO: 947015 - DNA, 25 bp, Homo sapien
gaagcttggagatactaggcaccac

SEQ ID NO: 947016 - DNA, 25 bp, Homo sapien
tgtgcaatcggacatgccggctgct

SEQ ID NO: 947017 - DNA, 25 bp, Homo sapien
actaggaagcatgaggtacagagcc

SEQ ID NO: 947018 - DNA, 25 bp, Homo sapien
agcgaactcatttgggcccctctgc

SEQ ID NO: 947019 - DNA, 25 bp, Homo sapien
aaagtcatacaagagagtgcccaag

SEQ ID NO: 947020 - DNA, 25 bp, Homo sapien
tcatggtttctgtgatccgcttccc

SEQ ID NO: 947021 - DNA, 25 bp, Homo sapien
tgccaggcctctcacaacatgaaaa

SEQ ID NO: 947022 - DNA, 25 bp, Homo sapien
cagtggatccaaaccaagaagaaat

SEQ ID NO: 947023 - DNA, 25 bp, Homo sapien
tccaaaccaagaagaaatccctgat

SEQ ID NO: 947024 - DNA, 25 bp, Homo sapien
gtggatccaaaccaagaagaaatcc

SEQ ID NO: 947025 - DNA, 25 bp, Homo sapien
gatccaaaccaagaagaaatccctg

SEQ ID NO: 947026 - DNA, 25 bp, Homo sapien
ggtcaatttagctggatgcctctga

SEQ ID NO: 947027 - DNA, 25 bp, Homo sapien
cccaaggctgtaagtgaggtgttag

SEQ ID NO: 947028 - DNA, 25 bp, Homo sapien
ggtgttagccagagccgtggtcatc

SEQ ID NO: 947029 - DNA, 25 bp, Homo sapien
gagaggatctgcgtccatgctcact

SEQ ID NO: 947030 - DNA, 25 bp, Homo sapien
gtaaactgtgactcttattgctaat

SEQ ID NO: 947031 - DNA, 25 bp, Homo sapien
tgagtcttcaaaaggagcagatctt

SEQ ID NO: 947032 - DNA, 25 bp, Homo sapien
aaaggagcagatcttttggaggaca

SEQ ID NO: 947033 - DNA, 25 bp, Homo sapien
cgaatgattcgttcagttccttctt

SEQ ID NO: 947034 - DNA, 25 bp, Homo sapien
catcaaacggcaagggtgacctctt

SEQ ID NO: 947035 - DNA, 25 bp, Homo sapien
aattcagtatacatgtggtgggaca

SEQ ID NO: 947036 - DNA, 25 bp, Homo sapien
gttatcgtggtatcagcagctatca

SEQ ID NO: 947037 - DNA, 25 bp, Homo sapien
catttatgtcccagtcgatcctcac

SEQ ID NO: 947038 - DNA, 25 bp, Homo sapien
caaatgcgcttcagtgattcactcc

SEQ ID NO: 947039 - DNA, 25 bp, Homo sapien
gaaagtagtgttataggaaatccaa

SEQ ID NO: 947040 - DNA, 25 bp, Homo sapien
tgtcttgcgtatttaaagtctcagg

SEQ ID NO: 947041 - DNA, 25 bp, Homo sapien
agtctcaggaaatctagtcttggtc

SEQ ID NO: 947042 - DNA, 25 bp, Homo sapien
aatggtgttgcaaccacttgtacac

SEQ ID NO: 947043 - DNA, 25 bp, Homo sapien
tatggatagcatgttacctaagctt

SEQ ID NO: 947044 - DNA, 25 bp, Homo sapien
tagtgccacgtctgaattgttctct

SEQ ID NO: 947045 - DNA, 25 bp, Homo sapien
tgcctactggctctcttatgatgaa

SEQ ID NO: 947046 - DNA, 25 bp, Homo sapien
gggtgttccctaagcatcacactca

SEQ ID NO: 947047 - DNA, 25 bp, Homo sapien
tcagaaaaattgagcccatgtaggg

SEQ ID NO: 947048 - DNA, 25 bp, Homo sapien
tgtagggcacgggatattatgtcac

SEQ ID NO: 947049 - DNA, 25 bp, Homo sapien
ttagggagcctaactactcaggaaa

SEQ ID NO: 947050 - DNA, 25 bp, Homo sapien
gaaaatgtgtaacctttatatatca

SEQ ID NO: 947051 - DNA, 25 bp, Homo sapien
aagtcactgccttaacaccctgaag

SEQ ID NO: 947052 - DNA, 25 bp, Homo sapien
gaaggttataccttcaaatcagaaa

SEQ ID NO: 947053 - DNA, 25 bp, Homo sapien
gttttcttcctagtcatgtctcagt

SEQ ID NO: 947054 - DNA, 25 bp, Homo sapien
tggcaaggcagcgatacacacatgt

SEQ ID NO: 947055 - DNA, 25 bp, Homo sapien
tctatggcatgggtgcaaatcggtc

SEQ ID NO: 947056 - DNA, 25 bp, Homo sapien
taaagacacgtgagctaaccctgct

SEQ ID NO: 947057 - DNA, 25 bp, Homo sapien
tcagctaagaacactgggtcctcgg

SEQ ID NO: 947058 - DNA, 25 bp, Homo sapien
cactttaggttcttctgttagaatg

SEQ ID NO: 947059 - DNA, 25 bp, Homo sapien
ttttctgcataaacctgtgtcactt

SEQ ID NO: 947060 - DNA, 25 bp, Homo sapien
tgtactgccttgcaacactgtgcca

SEQ ID NO: 947061 - DNA, 25 bp, Homo sapien
tgtgccaatcagcagtttccctttg

SEQ ID NO: 947062 - DNA, 25 bp, Homo sapien
aggatccacagatatgttatccacg

SEQ ID NO: 947063 - DNA, 25 bp, Homo sapien
gaggattctctgagtcatagaagaa

SEQ ID NO: 947064 - DNA, 25 bp, Homo sapien
tatccacgagggtattaaagtcaag

SEQ ID NO: 947065 - DNA, 25 bp, Homo sapien
cacagatatgttatccacgagggta

SEQ ID NO: 947066 - DNA, 25 bp, Homo sapien
caagaaaagaacaagacataaagta

SEQ ID NO: 947067 - DNA, 25 bp, Homo sapien
aacaagacataaagtaaaacacaat

SEQ ID NO: 947068 - DNA, 25 bp, Homo sapien
aacaagaaaagaacaagacataaag

SEQ ID NO: 947069 - DNA, 25 bp, Homo sapien
agaacaagacataaagtaaaacaca

SEQ ID NO: 947070 - DNA, 25 bp, Homo sapien
tttcggtgcatcataaaacatctcc

SEQ ID NO: 947071 - DNA, 25 bp, Homo sapien
ctccttctaaaatggcatgtggtaa

SEQ ID NO: 947072 - DNA, 25 bp, Homo sapien
tgtaccaacatctgtgcatgaacct

SEQ ID NO: 947073 - DNA, 25 bp, Homo sapien
tgcttccaaggatacaattctgccc

SEQ ID NO: 947074 - DNA, 25 bp, Homo sapien
aatataagttgcaagcatttgatga

SEQ ID NO: 947075 - DNA, 25 bp, Homo sapien
agtttcctgatgttgttcaactccc

SEQ ID NO: 947076 - DNA, 25 bp, Homo sapien
cctgatgttgttcaactccccgttc

SEQ ID NO: 947077 - DNA, 25 bp, Homo sapien
attctctaaatataagttgcaagca

SEQ ID NO: 947078 - DNA, 25 bp, Homo sapien
agcacaccactctgataccataatg

SEQ ID NO: 947079 - DNA, 25 bp, Homo sapien
agacaggcaagacaggcggctccat

SEQ ID NO: 947080 - DNA, 25 bp, Homo sapien
tggtgaattccacggcagatgaaac

SEQ ID NO: 947081 - DNA, 25 bp, Homo sapien
ggaagcagtacagccaattggtgaa

SEQ ID NO: 947082 - DNA, 25 bp, Homo sapien
tcaatggagttaaagtccaattagc

SEQ ID NO: 947083 - DNA, 25 bp, Homo sapien
gagccagcaactcagctatatagac

SEQ ID NO: 947084 - DNA, 25 bp, Homo sapien
tacacatgaatcttatgagccagca

SEQ ID NO: 947085 - DNA, 25 bp, Homo sapien
gtccaattagcatgcttttcataca

SEQ ID NO: 947086 - DNA, 25 bp, Homo sapien
ttgccatcgggtgaaatgttgattc

SEQ ID NO: 947087 - DNA, 25 bp, Homo sapien
gaacttcacttggactatagtagac

SEQ ID NO: 947088 - DNA, 25 bp, Homo sapien
tatagtagacaacatacgaccacgc

SEQ ID NO: 947089 - DNA, 25 bp, Homo sapien
tgttgattccattagcaaaatcaaa

SEQ ID NO: 947090 - DNA, 25 bp, Homo sapien
tttgtgccataaaagtgctcaggtc

SEQ ID NO: 947091 - DNA, 25 bp, Homo sapien
tagtgatcatttgtgccataaaagt

SEQ ID NO: 947092 - DNA, 25 bp, Homo sapien
ggtcccacagcaacaatatcattca

SEQ ID NO: 947093 - DNA, 25 bp, Homo sapien
ctcccaggattgtaagtaggggtca

SEQ ID NO: 947094 - DNA, 25 bp, Homo sapien
gcatccaatcagctcgagaaacaag

SEQ ID NO: 947095 - DNA, 25 bp, Homo sapien
tgttacatgaacaaggtgcctaggg

SEQ ID NO: 947096 - DNA, 25 bp, Homo sapien
agttgaacagccatacctactctgg

SEQ ID NO: 947097 - DNA, 25 bp, Homo sapien
taataacttgaatggagatcctgag

SEQ ID NO: 947098 - DNA, 25 bp, Homo sapien
acttggcatctggatggttcaccac

SEQ ID NO: 947099 - DNA, 25 bp, Homo sapien
ttggcatctggatggttcaccacca

SEQ ID NO: 947100 - DNA, 25 bp, Homo sapien
cttggcatctggatggttcaccacc

SEQ ID NO: 947101 - DNA, 25 bp, Homo sapien
atcaaatttacttccagtgatcccc

SEQ ID NO: 947102 - DNA, 25 bp, Homo sapien
caacactgttggatcttcttcattc

SEQ ID NO: 947103 - DNA, 25 bp, Homo sapien
tccccaattccaacactgttggatc

SEQ ID NO: 947104 - DNA, 25 bp, Homo sapien
catctgtgaatgtgctaatcccatg

SEQ ID NO: 947105 - DNA, 25 bp, Homo sapien
tctttattccaggatactttaatcc

SEQ ID NO: 947106 - DNA, 25 bp, Homo sapien
ggggttgaagctctttattccagga

SEQ ID NO: 947107 - DNA, 25 bp, Homo sapien
tgaagctctttattccaggatactt

SEQ ID NO: 947108 - DNA, 25 bp, Homo sapien
ctgttggggttgaagctctttattc

SEQ ID NO: 947109 - DNA, 25 bp, Homo sapien
gcagtatctccaagtcttcagagcc

SEQ ID NO: 947110 - DNA, 25 bp, Homo sapien
gccagtccattaggcagtatctcca

SEQ ID NO: 947111 - DNA, 25 bp, Homo sapien
tgaaagccagtccattaggcagtat

SEQ ID NO: 947112 - DNA, 25 bp, Homo sapien
tatctccaagtcttcagagccagtt

SEQ ID NO: 947113 - DNA, 25 bp, Homo sapien
cggaagttcaaatgagacccttctt

SEQ ID NO: 947114 - DNA, 25 bp, Homo sapien
aagttcaaatgagacccttcttcct

SEQ ID NO: 947115 - DNA, 25 bp, Homo sapien
gaagttcaaatgagacccttcttcc

SEQ ID NO: 947116 - DNA, 25 bp, Homo sapien
ggaagttcaaatgagacccttcttc

SEQ ID NO: 947117 - DNA, 25 bp, Homo sapien
tacgggttgtacctctcggagagca

SEQ ID NO: 947118 - DNA, 25 bp, Homo sapien
ttctacgggttgtacctctcggaga

SEQ ID NO: 947119 - DNA, 25 bp, Homo sapien
tgtacctctcggagagcattaagtc

SEQ ID NO: 947120 - DNA, 25 bp, Homo sapien
ctctcggagagcattaagtcgtgtt

SEQ ID NO: 947121 - DNA, 25 bp, Homo sapien
ctcgggtccacacgcagttttgctg

SEQ ID NO: 947122 - DNA, 25 bp, Homo sapien
aagcctggaaggtttgccatggcca

SEQ ID NO: 947123 - DNA, 25 bp, Homo sapien
caatttgagaatcttcaagcctgga

SEQ ID NO: 947124 - DNA, 25 bp, Homo sapien
ccaggcagtcaaggcgcagaagcga

SEQ ID NO: 947125 - DNA, 25 bp, Homo sapien
ccaagagggtgagcgcaatcagctt

SEQ ID NO: 947126 - DNA, 25 bp, Homo sapien
gggtgagcgcaatcagcttcgccat

SEQ ID NO: 947127 - DNA, 25 bp, Homo sapien
tggtggttcctgaagagtgccagtc

SEQ ID NO: 947128 - DNA, 25 bp, Homo sapien
tggttcctgaagagtgccagtccca

SEQ ID NO: 947129 - DNA, 25 bp, Homo sapien
acaccgacgggctaggaggctctgc

SEQ ID NO: 947130 - DNA, 25 bp, Homo sapien
gggatagacaaagggatcgatgggc

SEQ ID NO: 947131 - DNA, 25 bp, Homo sapien
aaagggatcgatgggcgcagacacc

SEQ ID NO: 947132 - DNA, 25 bp, Homo sapien
cgcagacaccgacgggctaggaggc

SEQ ID NO: 947133 - DNA, 25 bp, Homo sapien
cccaccgcaggagctcagcactttc

SEQ ID NO: 947134 - DNA, 25 bp, Homo sapien
ttcagccaaaagtcccattttgctc

SEQ ID NO: 947135 - DNA, 25 bp, Homo sapien
gcacagaaggcgtggcttgcggtca

SEQ ID NO: 947136 - DNA, 25 bp, Homo sapien
cagaaggcgtggcttgcggtcagcc

SEQ ID NO: 947137 - DNA, 25 bp, Homo sapien
ggttagcaatatgaaagagccactc

SEQ ID NO: 947138 - DNA, 25 bp, Homo sapien
tggccaggtggctagattttaccat

SEQ ID NO: 947139 - DNA, 25 bp, Homo sapien
gataaccgcagtcacctaggaatgg

SEQ ID NO: 947140 - DNA, 25 bp, Homo sapien
tgaagtgctgagtaccattgctggt

SEQ ID NO: 947141 - DNA, 25 bp, Homo sapien
ggttgaatccaagctcagggaccag

SEQ ID NO: 947142 - DNA, 25 bp, Homo sapien
tggatccagcaatgatagcagccac

SEQ ID NO: 947143 - DNA, 25 bp, Homo sapien
tgtcaggcttgtaaaatggatccag

SEQ ID NO: 947144 - DNA, 25 bp, Homo sapien
gaccattattgtgtttatccagggc

SEQ ID NO: 947145 - DNA, 25 bp, Homo sapien
aaagcacaggatccccttactccac

SEQ ID NO: 947146 - DNA, 25 bp, Homo sapien
ccttactccaccaattgctggttat

SEQ ID NO: 947147 - DNA, 25 bp, Homo sapien
tgctggttatgtaccagctcttctg

SEQ ID NO: 947148 - DNA, 25 bp, Homo sapien
cattattggaaaaagctcagtaact

SEQ ID NO: 947149 - DNA, 25 bp, Homo sapien
gatggataccaacatccacggatgc

SEQ ID NO: 947150 - DNA, 25 bp, Homo sapien
tcttcaagataggacattaggccag

SEQ ID NO: 947151 - DNA, 25 bp, Homo sapien
tcatctaagattcagagcccagtag

SEQ ID NO: 947152 - DNA, 25 bp, Homo sapien
tagggccaaatttactggaggttgc

SEQ ID NO: 947153 - DNA, 25 bp, Homo sapien
tgatggctatcaaggaatctctgtc

SEQ ID NO: 947154 - DNA, 25 bp, Homo sapien
gggctgctaacaaagatccgtaaag

SEQ ID NO: 947155 - DNA, 25 bp, Homo sapien
taagaaaagccacactcactggttg

SEQ ID NO: 947156 - DNA, 25 bp, Homo sapien
ggactgtcattaacctgacttgcaa

SEQ ID NO: 947157 - DNA, 25 bp, Homo sapien
gagttttgtgaaatacggtgcctat

SEQ ID NO: 947158 - DNA, 25 bp, Homo sapien
agccattgttggcatacacggtgct

SEQ ID NO: 947159 - DNA, 25 bp, Homo sapien
cattgttggcatacacggtgctcac

SEQ ID NO: 947160 - DNA, 25 bp, Homo sapien
ggtgcctatgagaattttcccatgg

SEQ ID NO: 947161 - DNA, 25 bp, Homo sapien
cctgggcttctcagacaaaacattc

SEQ ID NO: 947162 - DNA, 25 bp, Homo sapien
tcagacaaaacattctggatgcgaa

SEQ ID NO: 947163 - DNA, 25 bp, Homo sapien
acaaaacattctggatgcgaagtac

SEQ ID NO: 947164 - DNA, 25 bp, Homo sapien
gacaaaacattctggatgcgaagta

SEQ ID NO: 947165 - DNA, 25 bp, Homo sapien
cctcagggatgacttacacaatttt

SEQ ID NO: 947166 - DNA, 25 bp, Homo sapien
tattatgtgagtaaacacctgtttc

SEQ ID NO: 947167 - DNA, 25 bp, Homo sapien
tagtgcaggcatcccttacagaagg

SEQ ID NO: 947168 - DNA, 25 bp, Homo sapien
ctgtcgagaaaagatcgtttattag

SEQ ID NO: 947169 - DNA, 25 bp, Homo sapien
tgcaagacctacctgctcagagact

SEQ ID NO: 947170 - DNA, 25 bp, Homo sapien
gaaatacgatatggcaatctgggtc

SEQ ID NO: 947171 - DNA, 25 bp, Homo sapien
cccaacagcaagagttattgaaaag

SEQ ID NO: 947172 - DNA, 25 bp, Homo sapien
gactatctcctgattggaaatacga

SEQ ID NO: 947173 - DNA, 25 bp, Homo sapien
gtcctcagggttatagttcagtagc

SEQ ID NO: 947174 - DNA, 25 bp, Homo sapien
tggagggtcctcagggttatagttc

SEQ ID NO: 947175 - DNA, 25 bp, Homo sapien
tagcttcataggattaggatggcat

SEQ ID NO: 947176 - DNA, 25 bp, Homo sapien
tcagtagcttcataggattaggatg

SEQ ID NO: 947177 - DNA, 25 bp, Homo sapien
ctgtggcaggatcgacagtcaggtt

SEQ ID NO: 947178 - DNA, 25 bp, Homo sapien
gatcgacagtcaggttatccactaa

SEQ ID NO: 947179 - DNA, 25 bp, Homo sapien
ccactaaggtgcccaactgtatcac

SEQ ID NO: 947180 - DNA, 25 bp, Homo sapien
cagtcaggttatccactaaggtgcc

SEQ ID NO: 947181 - DNA, 25 bp, Homo sapien
taagaagtcagattgtgtgggccag

SEQ ID NO: 947182 - DNA, 25 bp, Homo sapien
gcttcttctggcacctaaagttggt

SEQ ID NO: 947183 - DNA, 25 bp, Homo sapien
cacattcctgggtcaagtatgggac

SEQ ID NO: 947184 - DNA, 25 bp, Homo sapien
tgtgggccagacagggtactcttac

SEQ ID NO: 947185 - DNA, 25 bp, Homo sapien
gttgagttaaatcccagttatcatg

SEQ ID NO: 947186 - DNA, 25 bp, Homo sapien
cagttgagttaaatcccagttatca

SEQ ID NO: 947187 - DNA, 25 bp, Homo sapien
ttgagttaaatcccagttatcatgt

SEQ ID NO: 947188 - DNA, 25 bp, Homo sapien
tcagttgagttaaatcccagttatc

SEQ ID NO: 947189 - DNA, 25 bp, Homo sapien
gctgagactgtgatcccattggcac

SEQ ID NO: 947190 - DNA, 25 bp, Homo sapien
cattggcactacaaaatcctttggc

SEQ ID NO: 947191 - DNA, 25 bp, Homo sapien
gactgtgatcccattggcactacaa

SEQ ID NO: 947192 - DNA, 25 bp, Homo sapien
tggtctgctgagactgtgatcccat

SEQ ID NO: 947193 - DNA, 25 bp, Homo sapien
agaacataagtccagcgaagatcca

SEQ ID NO: 947194 - DNA, 25 bp, Homo sapien
ggcatagaactgttctggtccaaga

SEQ ID NO: 947195 - DNA, 25 bp, Homo sapien
ggtccaagaaccacaatgtcattca

SEQ ID NO: 947196 - DNA, 25 bp, Homo sapien
aatagtggtctctggtggcatagaa

SEQ ID NO: 947197 - DNA, 25 bp, Homo sapien
aatgcctgtgccagtgtaccctcag

SEQ ID NO: 947198 - DNA, 25 bp, Homo sapien
tagagactgtggtcctcctagggcc

SEQ ID NO: 947199 - DNA, 25 bp, Homo sapien
ccagttctgcacaggtctgatgtac

SEQ ID NO: 947200 - DNA, 25 bp, Homo sapien
tcagctcatgcctactgtgggcctc

SEQ ID NO: 947201 - DNA, 25 bp, Homo sapien
gataagtccatgatttcaagcagtc

SEQ ID NO: 947202 - DNA, 25 bp, Homo sapien
tacgctgattactggaggataagtc

SEQ ID NO: 947203 - DNA, 25 bp, Homo sapien
tccttgaccagattgtcctgagatg

SEQ ID NO: 947204 - DNA, 25 bp, Homo sapien
caagcagtcagttagcagcggttgg

SEQ ID NO: 947205 - DNA, 25 bp, Homo sapien
ctcttccagcaaggcattccagtag

SEQ ID NO: 947206 - DNA, 25 bp, Homo sapien
tgtagatatatcactccaatgtcag

SEQ ID NO: 947207 - DNA, 25 bp, Homo sapien
tagggctggcacagcaaagaaccac

SEQ ID NO: 947208 - DNA, 25 bp, Homo sapien
aaaccgtgttattggtagggccatg

SEQ ID NO: 947209 - DNA, 25 bp, Homo sapien
tgattcacaacataaagatacacag

SEQ ID NO: 947210 - DNA, 25 bp, Homo sapien
gggatgattcacaacataaagatac

SEQ ID NO: 947211 - DNA, 25 bp, Homo sapien
tttatagttttcaggtataccagag

SEQ ID NO: 947212 - DNA, 25 bp, Homo sapien
tataccagagaacgttgttgttcct

SEQ ID NO: 947213 - DNA, 25 bp, Homo sapien
gatttctagcgcttgtgcccttggg

SEQ ID NO: 947214 - DNA, 25 bp, Homo sapien
gttcatctggcgcaaagtttggcat

SEQ ID NO: 947215 - DNA, 25 bp, Homo sapien
cgatgaaaatactgatcccatgtgg

SEQ ID NO: 947216 - DNA, 25 bp, Homo sapien
caagaagatttttcctggttcatct

SEQ ID NO: 947217 - DNA, 25 bp, Homo sapien
ctcatacaggcggatgcccctctgg

SEQ ID NO: 947218 - DNA, 25 bp, Homo sapien
agcttccagaagaaaaatcaggcag

SEQ ID NO: 947219 - DNA, 25 bp, Homo sapien
ccagaagaaaaatcaggcagcaata

SEQ ID NO: 947220 - DNA, 25 bp, Homo sapien
catacaggcggatgcccctctggga

SEQ ID NO: 947221 - DNA, 25 bp, Homo sapien
cttgaaaaaagtgatacaaatggat

SEQ ID NO: 947222 - DNA, 25 bp, Homo sapien
agagtgcctcttatccaaagaatca

SEQ ID NO: 947223 - DNA, 25 bp, Homo sapien
accagagtgcctcttatccaaagaa

SEQ ID NO: 947224 - DNA, 25 bp, Homo sapien
catcaacaaagagcacatctacacc

SEQ ID NO: 947225 - DNA, 25 bp, Homo sapien
tattgatgtgagcatgagagcagca

SEQ ID NO: 947226 - DNA, 25 bp, Homo sapien
cagctattgatgtgagcatgagagc

SEQ ID NO: 947227 - DNA, 25 bp, Homo sapien
tacagctattgatgtgagcatgaga

SEQ ID NO: 947228 - DNA, 25 bp, Homo sapien
ttgatgtgagcatgagagcagcatg

SEQ ID NO: 947229 - DNA, 25 bp, Homo sapien
ctggagataaaagccagcccactag

SEQ ID NO: 947230 - DNA, 25 bp, Homo sapien
tggagataaaagccagcccactagg

SEQ ID NO: 947231 - DNA, 25 bp, Homo sapien
actggagataaaagccagcccacta

SEQ ID NO: 947232 - DNA, 25 bp, Homo sapien
cagggtccagcgtccctaaagatac

SEQ ID NO: 947233 - DNA, 25 bp, Homo sapien
tggaacacagggtccagcgtcccta

SEQ ID NO: 947234 - DNA, 25 bp, Homo sapien
taaagataccttgcaaccattcctt

SEQ ID NO: 947235 - DNA, 25 bp, Homo sapien
cagcgtccctaaagataccttgcaa

SEQ ID NO: 947236 - DNA, 25 bp, Homo sapien
aaggtggcagttttcaggttctact

SEQ ID NO: 947237 - DNA, 25 bp, Homo sapien
gctccacttctcgagaggcattcac

SEQ ID NO: 947238 - DNA, 25 bp, Homo sapien
tggctccacttctcgagaggcattc

SEQ ID NO: 947239 - DNA, 25 bp, Homo sapien
tttcaggttctactggctccacttc

SEQ ID NO: 947240 - DNA, 25 bp, Homo sapien
taaatgggactaattcggctcggca

SEQ ID NO: 947241 - DNA, 25 bp, Homo sapien
agccgtaaacatccaactggtagcc

SEQ ID NO: 947242 - DNA, 25 bp, Homo sapien
caagtccggcgtttccaatggacgt

SEQ ID NO: 947243 - DNA, 25 bp, Homo sapien
ccaagcagaatgttgagggcgagct

SEQ ID NO: 947244 - DNA, 25 bp, Homo sapien
ggaccagcgccacgagcttccccat

SEQ ID NO: 947245 - DNA, 25 bp, Homo sapien
taaggacaggccgacccccagcagg

SEQ ID NO: 947246 - DNA, 25 bp, Homo sapien
gcaggaccagcgccacgagcttccc

SEQ ID NO: 947247 - DNA, 25 bp, Homo sapien
cgactaaggacaggccgacccccag

SEQ ID NO: 947248 - DNA, 25 bp, Homo sapien
cattcactgcttggtgcaaatgcaa

SEQ ID NO: 947249 - DNA, 25 bp, Homo sapien
gcaaagcagtatagccacttggaat

SEQ ID NO: 947250 - DNA, 25 bp, Homo sapien
tgcagaacacactgtcaagagaatg

SEQ ID NO: 947251 - DNA, 25 bp, Homo sapien
tattatcttatagaggtgccctgat

SEQ ID NO: 947252 - DNA, 25 bp, Homo sapien
cattctcccttctgtctagtggtcc

SEQ ID NO: 947253 - DNA, 25 bp, Homo sapien
ggatccctaggtctgcaatatttaa

SEQ ID NO: 947254 - DNA, 25 bp, Homo sapien
taatcttgctgtattcatctgtgac

SEQ ID NO: 947255 - DNA, 25 bp, Homo sapien
tccagcaaattgtactccccagtgt

SEQ ID NO: 947256 - DNA, 25 bp, Homo sapien
gcttgcctatccaaactccataagg

SEQ ID NO: 947257 - DNA, 25 bp, Homo sapien
actagttcgttctatggcagtagca

SEQ ID NO: 947258 - DNA, 25 bp, Homo sapien
ggttagcggtacaggctctggcatc

SEQ ID NO: 947259 - DNA, 25 bp, Homo sapien
taaccatgtggtcacggacgactga

SEQ ID NO: 947260 - DNA, 25 bp, Homo sapien
catgttctggcagttggaaggcaaa

SEQ ID NO: 947261 - DNA, 25 bp, Homo sapien
tagtagtcacagtgccagaagtgag

SEQ ID NO: 947262 - DNA, 25 bp, Homo sapien
catcaaaatacgttatcagtagttc

SEQ ID NO: 947263 - DNA, 25 bp, Homo sapien
tagttctaaacagccatagtagtca

SEQ ID NO: 947264 - DNA, 25 bp, Homo sapien
tgtcccttgcttggcattttaaaga

SEQ ID NO: 947265 - DNA, 25 bp, Homo sapien
agtgctctaagaactaaaagggccg

SEQ ID NO: 947266 - DNA, 25 bp, Homo sapien
gttaagttatcgcactttcatgcca

SEQ ID NO: 947267 - DNA, 25 bp, Homo sapien
tacatttctgggtcaatgttgctgg

SEQ ID NO: 947268 - DNA, 25 bp, Homo sapien
tacaaggctctgtggtataaagtgc

SEQ ID NO: 947269 - DNA, 25 bp, Homo sapien
taaagtgcctatgagcagcttccca

SEQ ID NO: 947270 - DNA, 25 bp, Homo sapien
cactgaggctacagaacttccttgg

SEQ ID NO: 947271 - DNA, 25 bp, Homo sapien
ggagaacagacccattgttggcata

SEQ ID NO: 947272 - DNA, 25 bp, Homo sapien
tcactcaatcatcaataagccctgt

SEQ ID NO: 947273 - DNA, 25 bp, Homo sapien
gaatataagaccaccgtacatgcat

SEQ ID NO: 947274 - DNA, 25 bp, Homo sapien
cgtacatgcatgtcactcaatcatc

SEQ ID NO: 947275 - DNA, 25 bp, Homo sapien
tgttttccacaatgacacactgatt

SEQ ID NO: 947276 - DNA, 25 bp, Homo sapien
tcgggtcatacacgaagagcttctg

SEQ ID NO: 947277 - DNA, 25 bp, Homo sapien
tccaccagtgtatccagctcaagta

SEQ ID NO: 947278 - DNA, 25 bp, Homo sapien
tggccattaggatgacagcctaccc

SEQ ID NO: 947279 - DNA, 25 bp, Homo sapien
ggatcaatagataaattatccacca

SEQ ID NO: 947280 - DNA, 25 bp, Homo sapien
cttccaaatgagaaattgtcaaaat

SEQ ID NO: 947281 - DNA, 25 bp, Homo sapien
tagaggtaaccttcctgcctctatg

SEQ ID NO: 947282 - DNA, 25 bp, Homo sapien
ttagaggtaaccttcctgcctctat

SEQ ID NO: 947283 - DNA, 25 bp, Homo sapien
agaggtaaccttcctgcctctatgc

SEQ ID NO: 947284 - DNA, 25 bp, Homo sapien
tttagaggtaaccttcctgcctcta

SEQ ID NO: 947285 - DNA, 25 bp, Homo sapien
cttcaactgagttaaattcatatta

SEQ ID NO: 947286 - DNA, 25 bp, Homo sapien
gagttaaattcatattagtgtgttt

SEQ ID NO: 947287 - DNA, 25 bp, Homo sapien
aactgagttaaattcatattagtgt

SEQ ID NO: 947288 - DNA, 25 bp, Homo sapien
ctgagttaaattcatattagtgtgt

SEQ ID NO: 947289 - DNA, 25 bp, Homo sapien
aaagcttcattaatacagtgtgaaa

SEQ ID NO: 947290 - DNA, 25 bp, Homo sapien
gaataagtcttaataacctgccaag

SEQ ID NO: 947291 - DNA, 25 bp, Homo sapien
taatcaatcatgggccctcaaggaa

SEQ ID NO: 947292 - DNA, 25 bp, Homo sapien
gaaaggacacagtggttagagctcc

SEQ ID NO: 947293 - DNA, 25 bp, Homo sapien
cagaatcaattcagtggtgctacaa

SEQ ID NO: 947294 - DNA, 25 bp, Homo sapien
catggcacctgctctgttgagcaat

SEQ ID NO: 947295 - DNA, 25 bp, Homo sapien
catgaactcagtgttgcagcagata

SEQ ID NO: 947296 - DNA, 25 bp, Homo sapien
taatctgtctacttcaaaggtgagt

SEQ ID NO: 947297 - DNA, 25 bp, Homo sapien
taaagtggcaacaaatggtcagttc

SEQ ID NO: 947298 - DNA, 25 bp, Homo sapien
caggacctgcctacaggctggatag

SEQ ID NO: 947299 - DNA, 25 bp, Homo sapien
ttaggcaggtctcactcaaagggaa

SEQ ID NO: 947300 - DNA, 25 bp, Homo sapien
tgctagtcagagaggatgacaacct

SEQ ID NO: 947301 - DNA, 25 bp, Homo sapien
gtttaagatcatccttataatggaa

SEQ ID NO: 947302 - DNA, 25 bp, Homo sapien
gaatcacactgtttgagcaaatagt

SEQ ID NO: 947303 - DNA, 25 bp, Homo sapien
tacagaaaagtagctcatagaacca

SEQ ID NO: 947304 - DNA, 25 bp, Homo sapien
acccaggcctgtatgagtccaaaat

SEQ ID NO: 947305 - DNA, 25 bp, Homo sapien
aaagaatttggccagcaccacaact

SEQ ID NO: 947306 - DNA, 25 bp, Homo sapien
ttaaaaggaaatacctgatacttca

SEQ ID NO: 947307 - DNA, 25 bp, Homo sapien
atttgcatataaatacatgtgacta

SEQ ID NO: 947308 - DNA, 25 bp, Homo sapien
atgtatgcatcagtatgatcacact

SEQ ID NO: 947309 - DNA, 25 bp, Homo sapien
aggtgaaatattgatcccatttgct

SEQ ID NO: 947310 - DNA, 25 bp, Homo sapien
cggtccaacagctgtgatgtcattc

SEQ ID NO: 947311 - DNA, 25 bp, Homo sapien
gactgtagtaaacaacatttgccca

SEQ ID NO: 947312 - DNA, 25 bp, Homo sapien
cccagtgtaagttcaagtatgtttc

SEQ ID NO: 947313 - DNA, 25 bp, Homo sapien
gcatagaaatgtgccggtccaacag

SEQ ID NO: 947314 - DNA, 25 bp, Homo sapien
aaaaatagcatgtgagaggaaacaa

SEQ ID NO: 947315 - DNA, 25 bp, Homo sapien
aaatagcatgtgagaggaaacaaaa

SEQ ID NO: 947316 - DNA, 25 bp, Homo sapien
agaaaaatagcatgtgagaggaaac

SEQ ID NO: 947317 - DNA, 25 bp, Homo sapien
aaagaaaaatagcatgtgagaggaa

SEQ ID NO: 947318 - DNA, 25 bp, Homo sapien
ggtaccaggtaatctgaacacaggt

SEQ ID NO: 947319 - DNA, 25 bp, Homo sapien
gaaagaacttagtgccatcagggca

SEQ ID NO: 947320 - DNA, 25 bp, Homo sapien
cacaggtcatttagcaattatggca

SEQ ID NO: 947321 - DNA, 25 bp, Homo sapien
caattatacgtaaggacagagctgt

SEQ ID NO: 947322 - DNA, 25 bp, Homo sapien
caaaggagtccgcatagaacagtga

SEQ ID NO: 947323 - DNA, 25 bp, Homo sapien
cctgtagtcgggcacttcatcattt

SEQ ID NO: 947324 - DNA, 25 bp, Homo sapien
catgcttgccctggtttataaggaa

SEQ ID NO: 947325 - DNA, 25 bp, Homo sapien
cccaccatagggattgtttgcaaat

SEQ ID NO: 947326 - DNA, 25 bp, Homo sapien
tcagatgcaacagagaattttctgc

SEQ ID NO: 947327 - DNA, 25 bp, Homo sapien
ttcagatgcaacagagaattttctg

SEQ ID NO: 947328 - DNA, 25 bp, Homo sapien
acaacaaagagataaactgtgtcat

SEQ ID NO: 947329 - DNA, 25 bp, Homo sapien
gtttacaacaaagagataaactgtg

SEQ ID NO: 947330 - DNA, 25 bp, Homo sapien
ttacaacaaagagataaactgtgtc

SEQ ID NO: 947331 - DNA, 25 bp, Homo sapien
ctgggtggtttacaacaaagagata

SEQ ID NO: 947332 - DNA, 25 bp, Homo sapien
tggctccctgacctttaagaaagtg

SEQ ID NO: 947333 - DNA, 25 bp, Homo sapien
aagacataactacgggacctctggg

SEQ ID NO: 947334 - DNA, 25 bp, Homo sapien
gaatgtataagctgttagacgacct

SEQ ID NO: 947335 - DNA, 25 bp, Homo sapien
tcctattgctgtccgtctggtgtta

SEQ ID NO: 947336 - DNA, 25 bp, Homo sapien
gctgatgccatgtggattgaatgag

SEQ ID NO: 947337 - DNA, 25 bp, Homo sapien
catgtggattgaatgaggccaaatc

SEQ ID NO: 947338 - DNA, 25 bp, Homo sapien
gaggccaaatcaaacccacgactga

SEQ ID NO: 947339 - DNA, 25 bp, Homo sapien
tgattcttaattcccgtgcccttgg

SEQ ID NO: 947340 - DNA, 25 bp, Homo sapien
agtattcctccaggcttatctggtg

SEQ ID NO: 947341 - DNA, 25 bp, Homo sapien
tattcctccaggcttatctggtgca

SEQ ID NO: 947342 - DNA, 25 bp, Homo sapien
cattagtattcctccaggcttatct

SEQ ID NO: 947343 - DNA, 25 bp, Homo sapien
tcctccaggcttatctggtgcaaag

SEQ ID NO: 947344 - DNA, 25 bp, Homo sapien
tgtggagtcctgggaattttagacc

SEQ ID NO: 947345 - DNA, 25 bp, Homo sapien
ctgtggagtcctgggaattttagac

SEQ ID NO: 947346 - DNA, 25 bp, Homo sapien
ttactacagctttaggtcaggcctg

SEQ ID NO: 947347 - DNA, 25 bp, Homo sapien
tgtctcatgtctattcctgtgccaa

SEQ ID NO: 947348 - DNA, 25 bp, Homo sapien
tatggactaacatgggaactgtaca

SEQ ID NO: 947349 - DNA, 25 bp, Homo sapien
ggtggaatactgaaagcctgaaaat

SEQ ID NO: 947350 - DNA, 25 bp, Homo sapien
tatattttcatggagggcaagcctg

SEQ ID NO: 947351 - DNA, 25 bp, Homo sapien
ggcaagcctggtaagtagaacaaac

SEQ ID NO: 947352 - DNA, 25 bp, Homo sapien
gaatattttagactagtggtcccag

SEQ ID NO: 947353 - DNA, 25 bp, Homo sapien
tatactggtgtttctgctaaagccc

SEQ ID NO: 947354 - DNA, 25 bp, Homo sapien
cacagtaagacctcaaatatccctc

SEQ ID NO: 947355 - DNA, 25 bp, Homo sapien
ttttcagcttacaagaatcaaggca

SEQ ID NO: 947356 - DNA, 25 bp, Homo sapien
tcaaggcaaaatgaagggtgtaaat

SEQ ID NO: 947357 - DNA, 25 bp, Homo sapien
tccacttatgattggctattcaggg

SEQ ID NO: 947358 - DNA, 25 bp, Homo sapien
aacaaaacacagattgcattggaat

SEQ ID NO: 947359 - DNA, 25 bp, Homo sapien
gaacactatctcaatgggcaaagag

SEQ ID NO: 947360 - DNA, 25 bp, Homo sapien
gaaataaagaacactatctcaatgg

SEQ ID NO: 947361 - DNA, 25 bp, Homo sapien
tatctcaatgggcaaagagtcttca

SEQ ID NO: 947362 - DNA, 25 bp, Homo sapien
cagccctcatcaaatacccttgtat

SEQ ID NO: 947363 - DNA, 25 bp, Homo sapien
agccctcatcaaatacccttgtatc

SEQ ID NO: 947364 - DNA, 25 bp, Homo sapien
gcagccctcatcaaatacccttgta

SEQ ID NO: 947365 - DNA, 25 bp, Homo sapien
aagccagaccattgggaagtatgtc

SEQ ID NO: 947366 - DNA, 25 bp, Homo sapien
agccagaccattgggaagtatgtca

SEQ ID NO: 947367 - DNA, 25 bp, Homo sapien
ctactgcaggaaggttttatcatcg

SEQ ID NO: 947368 - DNA, 25 bp, Homo sapien
cattaggtacaccaagtaccaggct

SEQ ID NO: 947369 - DNA, 25 bp, Homo sapien
tatgtcaggagcagtcaatgctaga

SEQ ID NO: 947370 - DNA, 25 bp, Homo sapien
cccctcttcggtgtgattatgtcag

SEQ ID NO: 947371 - DNA, 25 bp, Homo sapien
gaaaacttaatactgtgggctgatt

SEQ ID NO: 947372 - DNA, 25 bp, Homo sapien
agttatcagctcatggccagtcttg

SEQ ID NO: 947373 - DNA, 25 bp, Homo sapien
gctgatttggcactgtttgtcactc

SEQ ID NO: 947374 - DNA, 25 bp, Homo sapien
tgtggtgagcccttatatacccagt

SEQ ID NO: 947375 - DNA, 25 bp, Homo sapien
taattcagagtccaggtaaggtccc

SEQ ID NO: 947376 - DNA, 25 bp, Homo sapien
gagggtatccactgcatccactgct

SEQ ID NO: 947377 - DNA, 25 bp, Homo sapien
tttggtagccaacactcagggaagt

SEQ ID NO: 947378 - DNA, 25 bp, Homo sapien
tggcacagcgtagcatgacaaaccc

SEQ ID NO: 947379 - DNA, 25 bp, Homo sapien
ctagccatgagtgggggcatgtgcc

SEQ ID NO: 947380 - DNA, 25 bp, Homo sapien
actagccatgagtgggggcatgtgc

SEQ ID NO: 947381 - DNA, 25 bp, Homo sapien
aaaactagccatgagtgggggcatg

SEQ ID NO: 947382 - DNA, 25 bp, Homo sapien
aaactagccatgagtgggggcatgt

SEQ ID NO: 947383 - DNA, 25 bp, Homo sapien
tacagattctacttctctggaggct

SEQ ID NO: 947384 - DNA, 25 bp, Homo sapien
tgtggaaggtctacagattctactt

SEQ ID NO: 947385 - DNA, 25 bp, Homo sapien
ggcagtgtggaaggtctacagattc

SEQ ID NO: 947386 - DNA, 25 bp, Homo sapien
ggtctacagattctacttctctgga

SEQ ID NO: 947387 - DNA, 25 bp, Homo sapien
agggtttaaagaggcttacagcaat

SEQ ID NO: 947388 - DNA, 25 bp, Homo sapien
caaaaatgcctattgcaaagttcta

SEQ ID NO: 947389 - DNA, 25 bp, Homo sapien
gcttacagcaatacataaaacacag

SEQ ID NO: 947390 - DNA, 25 bp, Homo sapien
tctatatactgatgtgggttattaa

SEQ ID NO: 947391 - DNA, 25 bp, Homo sapien
taccagtttcttctagataacccag

SEQ ID NO: 947392 - DNA, 25 bp, Homo sapien
tctcctgtgcatattcctgacagct

SEQ ID NO: 947393 - DNA, 25 bp, Homo sapien
gagacgaaatagctatttgccatgt

SEQ ID NO: 947394 - DNA, 25 bp, Homo sapien
cagaatgactcataggttgtaccaa

SEQ ID NO: 947395 - DNA, 25 bp, Homo sapien
ccagactccgctgtattgaggtgta

SEQ ID NO: 947396 - DNA, 25 bp, Homo sapien
tagcggctgacaaaattaacgccat

SEQ ID NO: 947397 - DNA, 25 bp, Homo sapien
tttccctggcagaacaatcagttcc

SEQ ID NO: 947398 - DNA, 25 bp, Homo sapien
tctattgtagtggtgggcaaagcaa

SEQ ID NO: 947399 - DNA, 25 bp, Homo sapien
catcacgagcctatggtaggtataa

SEQ ID NO: 947400 - DNA, 25 bp, Homo sapien
taatacagcaaacagtatccgctgg

SEQ ID NO: 947401 - DNA, 25 bp, Homo sapien
gatgatgagtataagcaacaaacca

SEQ ID NO: 947402 - DNA, 25 bp, Homo sapien
cattccccaagtgacccctatggag

SEQ ID NO: 947403 - DNA, 25 bp, Homo sapien
gaaagcatgaactcttaaccaacag

SEQ ID NO: 947404 - DNA, 25 bp, Homo sapien
gaactcttaaccaacagtcattagc

SEQ ID NO: 947405 - DNA, 25 bp, Homo sapien
agcatgaactcttaaccaacagtca

SEQ ID NO: 947406 - DNA, 25 bp, Homo sapien
atagaaagcatgaactcttaaccaa

SEQ ID NO: 947407 - DNA, 25 bp, Homo sapien
actgtgtccggccaaacatgctcct

SEQ ID NO: 947408 - DNA, 25 bp, Homo sapien
tctgacagaaggcactcgaacatat

SEQ ID NO: 947409 - DNA, 25 bp, Homo sapien
caaagggtcaccaaattctgacaga

SEQ ID NO: 947410 - DNA, 25 bp, Homo sapien
aaacagactcaaagggtcaccaaat

SEQ ID NO: 947411 - DNA, 25 bp, Homo sapien
ctgcccattaaagtgcatcacagtc

SEQ ID NO: 947412 - DNA, 25 bp, Homo sapien
gtgcatcacagtcacgtaaagaaaa

SEQ ID NO: 947413 - DNA, 25 bp, Homo sapien
attgtaaagtaggccgagggtggtg

SEQ ID NO: 947414 - DNA, 25 bp, Homo sapien
cagtcacgtaaagaaaaggtgcatc

SEQ ID NO: 947415 - DNA, 25 bp, Homo sapien
ccttttgaagcactattgggcctat

SEQ ID NO: 947416 - DNA, 25 bp, Homo sapien
gaatcagaatctttggtggtgccac

SEQ ID NO: 947417 - DNA, 25 bp, Homo sapien
aaatctctggtaggtagacaccata

SEQ ID NO: 947418 - DNA, 25 bp, Homo sapien
aatcttctggcttaggcctccaaca

SEQ ID NO: 947419 - DNA, 25 bp, Homo sapien
cccaggagcgccagcgcgatcccca

SEQ ID NO: 947420 - DNA, 25 bp, Homo sapien
gccagaagcctctcgcccaggagcg

SEQ ID NO: 947421 - DNA, 25 bp, Homo sapien
agcgccagcgcgatccccagcaagc

SEQ ID NO: 947422 - DNA, 25 bp, Homo sapien
ccagaagcctctcgcccaggagcgc

SEQ ID NO: 947423 - DNA, 25 bp, Homo sapien
ccgggcgcgctgcctcgctccggcc

SEQ ID NO: 947424 - DNA, 25 bp, Homo sapien
cgcgctgcctcgctccggcctggcc

SEQ ID NO: 947425 - DNA, 25 bp, Homo sapien
ggcgcgctgcctcgctccggcctgg

SEQ ID NO: 947426 - DNA, 25 bp, Homo sapien
cgggcgcgctgcctcgctccggcct

SEQ ID NO: 947427 - DNA, 25 bp, Homo sapien
ctcgatggtgccggccgcgctccgc

SEQ ID NO: 947428 - DNA, 25 bp, Homo sapien
cgccccgtcctccgcctaggccgag

SEQ ID NO: 947429 - DNA, 25 bp, Homo sapien
cttcccggctcgatggtgccggccg

SEQ ID NO: 947430 - DNA, 25 bp, Homo sapien
gtcctccgcctaggccgagtccctg

SEQ ID NO: 947431 - DNA, 25 bp, Homo sapien
taaacttcacgtctaggccagttgg

SEQ ID NO: 947432 - DNA, 25 bp, Homo sapien
tttgtaaacttcacgtctaggccag

SEQ ID NO: 947433 - DNA, 25 bp, Homo sapien
tctttgtaaacttcacgtctaggcc

SEQ ID NO: 947434 - DNA, 25 bp, Homo sapien
tcacgtctaggccagttggcttgcc

SEQ ID NO: 947435 - DNA, 25 bp, Homo sapien
tggagagctataggctttgctgcct

SEQ ID NO: 947436 - DNA, 25 bp, Homo sapien
ggagagctataggctttgctgcctc

SEQ ID NO: 947437 - DNA, 25 bp, Homo sapien
tttggagagctataggctttgctgc

SEQ ID NO: 947438 - DNA, 25 bp, Homo sapien
ttggagagctataggctttgctgcc

SEQ ID NO: 947439 - DNA, 25 bp, Homo sapien
gttaattgtcaaataaaatatgatt

SEQ ID NO: 947440 - DNA, 25 bp, Homo sapien
cttgatatgtcttttgttaattgtc

SEQ ID NO: 947441 - DNA, 25 bp, Homo sapien
gatatgtcttttgttaattgtcaaa

SEQ ID NO: 947442 - DNA, 25 bp, Homo sapien
tgttaattgtcaaataaaatatgat

SEQ ID NO: 947443 - DNA, 25 bp, Homo sapien
catttgatgcgctcaaggcccagta

SEQ ID NO: 947444 - DNA, 25 bp, Homo sapien
caaaatagtgagtacggcctgggac

SEQ ID NO: 947445 - DNA, 25 bp, Homo sapien
ccgagagtgtagcaatctgagtaaa

SEQ ID NO: 947446 - DNA, 25 bp, Homo sapien
cttgggaatcattaaccgagagtgt

SEQ ID NO: 947447 - DNA, 25 bp, Homo sapien
tgtaagtagaattcctaacagcttt

SEQ ID NO: 947448 - DNA, 25 bp, Homo sapien
gtggtgtaagtagaattcctaacag

SEQ ID NO: 947449 - DNA, 25 bp, Homo sapien
gtaagtagaattcctaacagcttta

SEQ ID NO: 947450 - DNA, 25 bp, Homo sapien
ggtgtaagtagaattcctaacagct

SEQ ID NO: 947451 - DNA, 25 bp, Homo sapien
ctaggagatggggaaaggcagagaa

SEQ ID NO: 947452 - DNA, 25 bp, Homo sapien
gggaaaggcagagaaatagaatgga

SEQ ID NO: 947453 - DNA, 25 bp, Homo sapien
gatggggaaaggcagagaaatagaa

SEQ ID NO: 947454 - DNA, 25 bp, Homo sapien
tggggaaaggcagagaaatagaatg

SEQ ID NO: 947455 - DNA, 25 bp, Homo sapien
ttctcttatcttaacctcccaatgt

SEQ ID NO: 947456 - DNA, 25 bp, Homo sapien
atcaagtcattctcttatcttaacc

SEQ ID NO: 947457 - DNA, 25 bp, Homo sapien
ggatcaagtcattctcttatcttaa

SEQ ID NO: 947458 - DNA, 25 bp, Homo sapien
ttaaataactcatatatcaaataaa

SEQ ID NO: 947459 - DNA, 25 bp, Homo sapien
tccagaccatccaatgccagggaag

SEQ ID NO: 947460 - DNA, 25 bp, Homo sapien
ggaacacctgaattacaactgctgg

SEQ ID NO: 947461 - DNA, 25 bp, Homo sapien
tctgacagtttacgaaccccaggga

SEQ ID NO: 947462 - DNA, 25 bp, Homo sapien
gaaagccagtcatagggagattccc

SEQ ID NO: 947463 - DNA, 25 bp, Homo sapien
tgtcaacatttcaaagctctaagca

SEQ ID NO: 947464 - DNA, 25 bp, Homo sapien
tctaatggcctagaatggcctatat

SEQ ID NO: 947465 - DNA, 25 bp, Homo sapien
tctaatggcctagaatggcctacat

SEQ ID NO: 947466 - DNA, 25 bp, Homo sapien
tggcctccctgctgttgtcaacatt

SEQ ID NO: 947467 - DNA, 25 bp, Homo sapien
taagacaacgtattcacaggctcca

SEQ ID NO: 947468 - DNA, 25 bp, Homo sapien
ggagaccattattctgcccagtata

SEQ ID NO: 947469 - DNA, 25 bp, Homo sapien
gatgatatcacagcataggcaaggc

SEQ ID NO: 947470 - DNA, 25 bp, Homo sapien
tgattagactgggatcatcttaacc

SEQ ID NO: 947471 - DNA, 25 bp, Homo sapien
tgtctagaatacgactaatacagct

SEQ ID NO: 947472 - DNA, 25 bp, Homo sapien
tcatagttttgcagtcagagctttc

SEQ ID NO: 947473 - DNA, 25 bp, Homo sapien
tgtcatgtctaactggtcacctaac

SEQ ID NO: 947474 - DNA, 25 bp, Homo sapien
taaccctagatcaccaaaagtttca

SEQ ID NO: 947475 - DNA, 25 bp, Homo sapien
tatcccacagatttacatgcagtgg

SEQ ID NO: 947476 - DNA, 25 bp, Homo sapien
taagcagtgctttagctatatccca

SEQ ID NO: 947477 - DNA, 25 bp, Homo sapien
agtcaagataccgaacagttccaat

SEQ ID NO: 947478 - DNA, 25 bp, Homo sapien
tagacatagggtgcttgattttcaa

SEQ ID NO: 947479 - DNA, 25 bp, Homo sapien
tacaaactatttcttctagctattc

SEQ ID NO: 947480 - DNA, 25 bp, Homo sapien
ttattctgccggtgataaataccct

SEQ ID NO: 947481 - DNA, 25 bp, Homo sapien
tgtaccacttcctttggccctgtga

SEQ ID NO: 947482 - DNA, 25 bp, Homo sapien
tgttcttagttgcaacagaactaag

SEQ ID NO: 947483 - DNA, 25 bp, Homo sapien
ttgccccatggaaaacagagttggt

SEQ ID NO: 947484 - DNA, 25 bp, Homo sapien
caaatgatgtggcttgccccatgga

SEQ ID NO: 947485 - DNA, 25 bp, Homo sapien
gtcctctttcctgcacgcttcctca

SEQ ID NO: 947486 - DNA, 25 bp, Homo sapien
cagggccattgctattgtcctcttt

SEQ ID NO: 947487 - DNA, 25 bp, Homo sapien
gagtcggtagctcctaatatctttt

SEQ ID NO: 947488 - DNA, 25 bp, Homo sapien
ggagtcggtagctcctaatatcttt

SEQ ID NO: 947489 - DNA, 25 bp, Homo sapien
cctgaaagagcctatagaatacaga

SEQ ID NO: 947490 - DNA, 25 bp, Homo sapien
tgaaagagcctatagaatacagatg

SEQ ID NO: 947491 - DNA, 25 bp, Homo sapien
atgagggaagcacgattggtctccc

SEQ ID NO: 947492 - DNA, 25 bp, Homo sapien
gcacgattggtctcccttgctcttg

SEQ ID NO: 947493 - DNA, 25 bp, Homo sapien
cttgcaaggggaagcttgagagtgg

SEQ ID NO: 947494 - DNA, 25 bp, Homo sapien
tatggggacttgcaaggggaagctt

SEQ ID NO: 947495 - DNA, 25 bp, Homo sapien
ggactatggggacttgcaaggggaa

SEQ ID NO: 947496 - DNA, 25 bp, Homo sapien
atggaaagtgaaataccatatgttc

SEQ ID NO: 947497 - DNA, 25 bp, Homo sapien
gattttcccgtggtacagactcact

SEQ ID NO: 947498 - DNA, 25 bp, Homo sapien
taagggttcattgctcctggcagtt

SEQ ID NO: 947499 - DNA, 25 bp, Homo sapien
tgccttcattggaaagagatctggg

SEQ ID NO: 947500 - DNA, 25 bp, Homo sapien
tgtgcacaggccaaagatccagctt

SEQ ID NO: 947501 - DNA, 25 bp, Homo sapien
ctatgtgaagaaaagtacaagttaa

SEQ ID NO: 947502 - DNA, 25 bp, Homo sapien
gaggaactgtcactccacattgagg

SEQ ID NO: 947503 - DNA, 25 bp, Homo sapien
taatatgtgcaaactatgtgaagaa

SEQ ID NO: 947504 - DNA, 25 bp, Homo sapien
ttagtgaagtatgggctcctgtgca

SEQ ID NO: 947505 - DNA, 25 bp, Homo sapien
aagtggttgcaccaggagagttcct

SEQ ID NO: 947506 - DNA, 25 bp, Homo sapien
tgctggactgtatggtaagactata

SEQ ID NO: 947507 - DNA, 25 bp, Homo sapien
gggttaatacctatacctagaagca

SEQ ID NO: 947508 - DNA, 25 bp, Homo sapien
tattttgacttttcgaactggcttc

SEQ ID NO: 947509 - DNA, 25 bp, Homo sapien
tagtcttgcactaagttctcctggg

SEQ ID NO: 947510 - DNA, 25 bp, Homo sapien
tctaagagtaatcagcgcaactggt

SEQ ID NO: 947511 - DNA, 25 bp, Homo sapien
ttgatcccgtaaagtgtcctgagtg

SEQ ID NO: 947512 - DNA, 25 bp, Homo sapien
tcagaaatgcatgagctggactccc

SEQ ID NO: 947513 - DNA, 25 bp, Homo sapien
cctgcttgggatacaccagtcatca

SEQ ID NO: 947514 - DNA, 25 bp, Homo sapien
caggttctttggttccctgcttggg

SEQ ID NO: 947515 - DNA, 25 bp, Homo sapien
catctgataatgtttgaaggctgac

SEQ ID NO: 947516 - DNA, 25 bp, Homo sapien
agtcatcagcctcagagctcatctg

SEQ ID NO: 947517 - DNA, 25 bp, Homo sapien
aaggccatttggcaagtaattccag

SEQ ID NO: 947518 - DNA, 25 bp, Homo sapien
cacagtaataagagcacactggtgc

SEQ ID NO: 947519 - DNA, 25 bp, Homo sapien
cattcagaggtaagtatccaaacat

SEQ ID NO: 947520 - DNA, 25 bp, Homo sapien
taattccagtgcaaaaaatgggagc

SEQ ID NO: 947521 - DNA, 25 bp, Homo sapien
tcactccagaccatagcactcaagg

SEQ ID NO: 947522 - DNA, 25 bp, Homo sapien
gtgaatgtctggcaccccactgaca

SEQ ID NO: 947523 - DNA, 25 bp, Homo sapien
tcccaggatttctaacaaggtcagc

SEQ ID NO: 947524 - DNA, 25 bp, Homo sapien
gctactctcatagatgccaaaagga

SEQ ID NO: 947525 - DNA, 25 bp, Homo sapien
tgttccatatcctgataaagagtag

SEQ ID NO: 947526 - DNA, 25 bp, Homo sapien
ctttgcatacagacgagaaattggc

SEQ ID NO: 947527 - DNA, 25 bp, Homo sapien
ttggcaagccgtaaccaaaaccagc

SEQ ID NO: 947528 - DNA, 25 bp, Homo sapien
taagtagatgatagcatctgttcca

SEQ ID NO: 947529 - DNA, 25 bp, Homo sapien
tacatttagaactaggtggctgaga

SEQ ID NO: 947530 - DNA, 25 bp, Homo sapien
gtcctcactgatactaatgtcctag

SEQ ID NO: 947531 - DNA, 25 bp, Homo sapien
gaacttgtctaaataatcccttgca

SEQ ID NO: 947532 - DNA, 25 bp, Homo sapien
ctagagaagagagacgttatcaggt

SEQ ID NO: 947533 - DNA, 25 bp, Homo sapien
aagaggcggtcaataattctcaggg

SEQ ID NO: 947534 - DNA, 25 bp, Homo sapien
gtatgtataactaaagaggcggtca

SEQ ID NO: 947535 - DNA, 25 bp, Homo sapien
ccatcacaggcgttggtgcagtgga

SEQ ID NO: 947536 - DNA, 25 bp, Homo sapien
caaaggagcattccgggaattatcc

SEQ ID NO: 947537 - DNA, 25 bp, Homo sapien
caaacaaacaagtcatcaaagccac

SEQ ID NO: 947538 - DNA, 25 bp, Homo sapien
ttctctcaagagacacccaaaagga

SEQ ID NO: 947539 - DNA, 25 bp, Homo sapien
tcacctggcatatatgactgttatc

SEQ ID NO: 947540 - DNA, 25 bp, Homo sapien
gacagctttattactattgacccta

SEQ ID NO: 947541 - DNA, 25 bp, Homo sapien
tgttcaactgttgcccgcattgcat

SEQ ID NO: 947542 - DNA, 25 bp, Homo sapien
ttcccaagacaacaataacctctat

SEQ ID NO: 947543 - DNA, 25 bp, Homo sapien
aggctgattttcctggtgttcaact

SEQ ID NO: 947544 - DNA, 25 bp, Homo sapien
ccaagacaacaataacctctattgg

SEQ ID NO: 947545 - DNA, 25 bp, Homo sapien
tagcacagagggtaattcaaagttc

SEQ ID NO: 947546 - DNA, 25 bp, Homo sapien
tactatgtaatatagctcctgggag

SEQ ID NO: 947547 - DNA, 25 bp, Homo sapien
ggatttgattcttagcacctggctg

SEQ ID NO: 947548 - DNA, 25 bp, Homo sapien
cctgggagtaatgtctaatggaaac

SEQ ID NO: 947549 - DNA, 25 bp, Homo sapien
atcaaaatctctggggtagagccca

SEQ ID NO: 947550 - DNA, 25 bp, Homo sapien
aatcaaaatctctggggtagagccc

SEQ ID NO: 947551 - DNA, 25 bp, Homo sapien
gaatcaaaatctctggggtagagcc

SEQ ID NO: 947552 - DNA, 25 bp, Homo sapien
tcaaaatctctggggtagagcccaa

SEQ ID NO: 947553 - DNA, 25 bp, Homo sapien
gaatggagccataccacctacagga

SEQ ID NO: 947554 - DNA, 25 bp, Homo sapien
gcaaagtgtgcattgtggaccagca

SEQ ID NO: 947555 - DNA, 25 bp, Homo sapien
gtgttttaacatgccctgcaggcga

SEQ ID NO: 947556 - DNA, 25 bp, Homo sapien
ggtaacaaggcctcattcactgaaa

SEQ ID NO: 947557 - DNA, 25 bp, Homo sapien
aatttcaattattgtgaagtatcat

SEQ ID NO: 947558 - DNA, 25 bp, Homo sapien
atttcaattattgtgaagtatcata

SEQ ID NO: 947559 - DNA, 25 bp, Homo sapien
tttcaattattgtgaagtatcatac

SEQ ID NO: 947560 - DNA, 25 bp, Homo sapien
caaagagcatatgatggaggtgaga

SEQ ID NO: 947561 - DNA, 25 bp, Homo sapien
aacatacacgatgtgaattggttgg

SEQ ID NO: 947562 - DNA, 25 bp, Homo sapien
ggtgagaaggaacatacacgatgtg

SEQ ID NO: 947563 - DNA, 25 bp, Homo sapien
gatggaggtgagaaggaacatacac

SEQ ID NO: 947564 - DNA, 25 bp, Homo sapien
cattttagacttcaagagggttggc

SEQ ID NO: 947565 - DNA, 25 bp, Homo sapien
cattcagacagtatgggaagacctt

SEQ ID NO: 947566 - DNA, 25 bp, Homo sapien
ccaggccttggcaaagttcgaatca

SEQ ID NO: 947567 - DNA, 25 bp, Homo sapien
caactatttaccagaacagaatggg

SEQ ID NO: 947568 - DNA, 25 bp, Homo sapien
tatctgttggatagcaactccccat

SEQ ID NO: 947569 - DNA, 25 bp, Homo sapien
ttagcaactgaataggcagaattgg

SEQ ID NO: 947570 - DNA, 25 bp, Homo sapien
tctccaggtcttatgggtaacctct

SEQ ID NO: 947571 - DNA, 25 bp, Homo sapien
agtggaatcatgcatctgtcactgg

SEQ ID NO: 947572 - DNA, 25 bp, Homo sapien
tactgatcacagagcatccttgaac

SEQ ID NO: 947573 - DNA, 25 bp, Homo sapien
ctgatcacagagcatccttgaacac

SEQ ID NO: 947574 - DNA, 25 bp, Homo sapien
taaataatactgatcacagagcatc

SEQ ID NO: 947575 - DNA, 25 bp, Homo sapien
taatactgatcacagagcatccttg

SEQ ID NO: 947576 - DNA, 25 bp, Homo sapien
tgtctgtgagtcactaaatataaga

SEQ ID NO: 947577 - DNA, 25 bp, Homo sapien
cttccaatgtggcttgggtttcctg

SEQ ID NO: 947578 - DNA, 25 bp, Homo sapien
cacagttaggatcaatgcttccaat

SEQ ID NO: 947579 - DNA, 25 bp, Homo sapien
ggaccactgctaccacatcacagtt

SEQ ID NO: 947580 - DNA, 25 bp, Homo sapien
gattagtactatcactgagaatgtg

SEQ ID NO: 947581 - DNA, 25 bp, Homo sapien
gacatctagttatagtatggcttat

SEQ ID NO: 947582 - DNA, 25 bp, Homo sapien
tagtatggcttatattctacaccca

SEQ ID NO: 947583 - DNA, 25 bp, Homo sapien
cccgctgattagtgagacatctagt

SEQ ID NO: 947584 - DNA, 25 bp, Homo sapien
aatacggttcatgtaaaatcgatcc

SEQ ID NO: 947585 - DNA, 25 bp, Homo sapien
ggtcaactgtacaggcatctttata

SEQ ID NO: 947586 - DNA, 25 bp, Homo sapien
cagcatccgagtagaaatacggttc

SEQ ID NO: 947587 - DNA, 25 bp, Homo sapien
gattttgattggtgactgggtcaac

SEQ ID NO: 947588 - DNA, 25 bp, Homo sapien
ggtgtctatttcgaactttgatgag

SEQ ID NO: 947589 - DNA, 25 bp, Homo sapien
ctatttcgaactttgatgagtgtat

SEQ ID NO: 947590 - DNA, 25 bp, Homo sapien
tacattatggtgtctatttcgaact

SEQ ID NO: 947591 - DNA, 25 bp, Homo sapien
tgtagggactacattatggtgtcta

SEQ ID NO: 947592 - DNA, 25 bp, Homo sapien
tagtctccaatgacgctgaaatgta

SEQ ID NO: 947593 - DNA, 25 bp, Homo sapien
gccaaaacttgtcatgtgtaagagg

SEQ ID NO: 947594 - DNA, 25 bp, Homo sapien
tcctaaggttacttcacagaaggct

SEQ ID NO: 947595 - DNA, 25 bp, Homo sapien
gagatgactctagaatgccattgtg

SEQ ID NO: 947596 - DNA, 25 bp, Homo sapien
tctgataatgctttctggtcatctg

SEQ ID NO: 947597 - DNA, 25 bp, Homo sapien
caccaaatccatcaggctctgtata

SEQ ID NO: 947598 - DNA, 25 bp, Homo sapien
ttctcatggaattccaccaaatcca

SEQ ID NO: 947599 - DNA, 25 bp, Homo sapien
tggaattccaccaaatccatcaggc

SEQ ID NO: 947600 - DNA, 25 bp, Homo sapien
tgtaaagaaacaggtatgctttaag

SEQ ID NO: 947601 - DNA, 25 bp, Homo sapien
tgtgccaagtgctgtcctaagtggt

SEQ ID NO: 947602 - DNA, 25 bp, Homo sapien
caactgacacttactgactgctggc

SEQ ID NO: 947603 - DNA, 25 bp, Homo sapien
caaggattccacaactagaagtgac

SEQ ID NO: 947604 - DNA, 25 bp, Homo sapien
gataagggtctcatgcatgtctgct

SEQ ID NO: 947605 - DNA, 25 bp, Homo sapien
tactaattgggtcgggaggatatca

SEQ ID NO: 947606 - DNA, 25 bp, Homo sapien
tcgggaggatatcaatttccttcag

SEQ ID NO: 947607 - DNA, 25 bp, Homo sapien
ggcaattcttgtcgcaaaaatgcaa

SEQ ID NO: 947608 - DNA, 25 bp, Homo sapien
tttccttcagaatgttggcgagtct

SEQ ID NO: 947609 - DNA, 25 bp, Homo sapien
cagcagcaaagtgaaccccagttgt

SEQ ID NO: 947610 - DNA, 25 bp, Homo sapien
gatgtaccctgtggaaggatgccag

SEQ ID NO: 947611 - DNA, 25 bp, Homo sapien
tctaccaaggctgaaagttaaggca

SEQ ID NO: 947612 - DNA, 25 bp, Homo sapien
atgaagtcaaaccatccagcgtcgg

SEQ ID NO: 947613 - DNA, 25 bp, Homo sapien
tagcgcgagaaatgctccacctctc

SEQ ID NO: 947614 - DNA, 25 bp, Homo sapien
gctgtagcgcgagaaatgctccacc

SEQ ID NO: 947615 - DNA, 25 bp, Homo sapien
ggacgggctgtagcgcgagaaatgc

SEQ ID NO: 947616 - DNA, 25 bp, Homo sapien
gggctgtagcgcgagaaatgctcca

SEQ ID NO: 947617 - DNA, 25 bp, Homo sapien
tgcgcagcacgaagcgggccgcctt

SEQ ID NO: 947618 - DNA, 25 bp, Homo sapien
agcgctgcgcagcacgaagcgggcc

SEQ ID NO: 947619 - DNA, 25 bp, Homo sapien
caccaggccggcgccgttgagcgag

SEQ ID NO: 947620 - DNA, 25 bp, Homo sapien
ccgttgagcgagccagcgctgcgca

SEQ ID NO: 947621 - DNA, 25 bp, Homo sapien
cctggcggggactgtggctggcttg

SEQ ID NO: 947622 - DNA, 25 bp, Homo sapien
cttgacgcccacccggcctggcggg

SEQ ID NO: 947623 - DNA, 25 bp, Homo sapien
tggcggggactgtggctggcttgag

SEQ ID NO: 947624 - DNA, 25 bp, Homo sapien
cggcctggcggggactgtggctggc

SEQ ID NO: 947625 - DNA, 25 bp, Homo sapien
gagggtgccgcggagtgaagagtct

SEQ ID NO: 947626 - DNA, 25 bp, Homo sapien
gagtctgggcagagtcggagatgca

SEQ ID NO: 947627 - DNA, 25 bp, Homo sapien
ggcgaaggctgctcggagcagagcc

SEQ ID NO: 947628 - DNA, 25 bp, Homo sapien
tggctggcttgtgcgccccggcctg

SEQ ID NO: 947629 - DNA, 25 bp, Homo sapien
actggaacttggaaacgcgtcctga

SEQ ID NO: 947630 - DNA, 25 bp, Homo sapien
tggcacggtgaccacggagtgccct

SEQ ID NO: 947631 - DNA, 25 bp, Homo sapien
tccagccgcggtcatcacagaatgg

SEQ ID NO: 947632 - DNA, 25 bp, Homo sapien
tgaactccaggtcgcgccaatcaga

SEQ ID NO: 947633 - DNA, 25 bp, Homo sapien
gggaactgttattataattggcagc

SEQ ID NO: 947634 - DNA, 25 bp, Homo sapien
tccctgaggatgcttacagaacttg

SEQ ID NO: 947635 - DNA, 25 bp, Homo sapien
tgcaaccggttgaagtgcccctata

SEQ ID NO: 947636 - DNA, 25 bp, Homo sapien
tcttcgccaggcatagattgtccct

SEQ ID NO: 947637 - DNA, 25 bp, Homo sapien
ggtcccttgttactgcatctgaatg

SEQ ID NO: 947638 - DNA, 25 bp, Homo sapien
aatctaaccaaaattgacacctgac

SEQ ID NO: 947639 - DNA, 25 bp, Homo sapien
aaatttggtgagtctctgatggttc

SEQ ID NO: 947640 - DNA, 25 bp, Homo sapien
ttggctttgaagttgaggatgccat

SEQ ID NO: 947641 - DNA, 25 bp, Homo sapien
cccctctgacctagatgatgttggc

SEQ ID NO: 947642 - DNA, 25 bp, Homo sapien
ggttcccctctgacctagatgatgt

SEQ ID NO: 947643 - DNA, 25 bp, Homo sapien
cacaagatgacttatagtgcatgct

SEQ ID NO: 947644 - DNA, 25 bp, Homo sapien
cgaagatccaatcctgcctcctgtg

SEQ ID NO: 947645 - DNA, 25 bp, Homo sapien
tattcacagattacccgaagatcca

SEQ ID NO: 947646 - DNA, 25 bp, Homo sapien
ctataatgagaggttataatgctgc

SEQ ID NO: 947647 - DNA, 25 bp, Homo sapien
tgaagaaggaggatgtactaaacac

SEQ ID NO: 947648 - DNA, 25 bp, Homo sapien
taaaaagcacggcagtgtgctggga

SEQ ID NO: 947649 - DNA, 25 bp, Homo sapien
caggtttgtcaggtacttaagagtc

SEQ ID NO: 947650 - DNA, 25 bp, Homo sapien
caagtgattgaaaagggatggtaca

SEQ ID NO: 947651 - DNA, 25 bp, Homo sapien
aaagcctttacttcaattgtgatca

SEQ ID NO: 947652 - DNA, 25 bp, Homo sapien
agccaaatgaaagcctttacttcaa

SEQ ID NO: 947653 - DNA, 25 bp, Homo sapien
aagccaaatgaaagcctttacttca

SEQ ID NO: 947654 - DNA, 25 bp, Homo sapien
aatgaaagcctttacttcaattgtg

SEQ ID NO: 947655 - DNA, 25 bp, Homo sapien
ttctgatgactgctcaggtgaccct

SEQ ID NO: 947656 - DNA, 25 bp, Homo sapien
tctgcatgactctgaagtgtaacct

SEQ ID NO: 947657 - DNA, 25 bp, Homo sapien
tgaatgcgacaacggagaaggtccc

SEQ ID NO: 947658 - DNA, 25 bp, Homo sapien
tgtaacctcaaaaatcatgtcgtgc

SEQ ID NO: 947659 - DNA, 25 bp, Homo sapien
tgaaggggctgattggtaccaagct

SEQ ID NO: 947660 - DNA, 25 bp, Homo sapien
ctggaaagtggtgaaggggctgatt

SEQ ID NO: 947661 - DNA, 25 bp, Homo sapien
aaggggctgattggtaccaagctga

SEQ ID NO: 947662 - DNA, 25 bp, Homo sapien
gggctgattggtaccaagctgagta

SEQ ID NO: 947663 - DNA, 25 bp, Homo sapien
ttccaaagatactgtccctctagcc

SEQ ID NO: 947664 - DNA, 25 bp, Homo sapien
caaagatactgtccctctagcctgg

SEQ ID NO: 947665 - DNA, 25 bp, Homo sapien
gagaggatgatctatcttccaaaga

SEQ ID NO: 947666 - DNA, 25 bp, Homo sapien
caccacacaggagaggatgatctat

SEQ ID NO: 947667 - DNA, 25 bp, Homo sapien
caaggccaaaagatggcacctcttg

SEQ ID NO: 947668 - DNA, 25 bp, Homo sapien
aggccaaaagatggcacctcttgcc

SEQ ID NO: 947669 - DNA, 25 bp, Homo sapien
aagatggcacctcttgcctcaggtt

SEQ ID NO: 947670 - DNA, 25 bp, Homo sapien
gatggcacctcttgcctcaggtttc

SEQ ID NO: 947671 - DNA, 25 bp, Homo sapien
tttttaatatcatctggtcaataat

SEQ ID NO: 947672 - DNA, 25 bp, Homo sapien
attttacagttaggccacatatttt

SEQ ID NO: 947673 - DNA, 25 bp, Homo sapien
ttaatatcatctggtcaataatgtg

SEQ ID NO: 947674 - DNA, 25 bp, Homo sapien
tattttacagttaggccacatattt

SEQ ID NO: 947675 - DNA, 25 bp, Homo sapien
aatatccactatcgttcctaatacc

SEQ ID NO: 947676 - DNA, 25 bp, Homo sapien
atatccactatcgttcctaatacca

SEQ ID NO: 947677 - DNA, 25 bp, Homo sapien
tatccactatcgttcctaataccat

SEQ ID NO: 947678 - DNA, 25 bp, Homo sapien
aaaaggtgttgggagaactatggca

SEQ ID NO: 947679 - DNA, 25 bp, Homo sapien
ttgggagaactatggcagacaggtg

SEQ ID NO: 947680 - DNA, 25 bp, Homo sapien
ggagaactatggcagacaggtgtat

SEQ ID NO: 947681 - DNA, 25 bp, Homo sapien
gaactatggcagacaggtgtatcac

SEQ ID NO: 947682 - DNA, 25 bp, Homo sapien
agttgcctgggagtgaaagttgttc

SEQ ID NO: 947683 - DNA, 25 bp, Homo sapien
aaagttgttcaatggtggcatttca

SEQ ID NO: 947684 - DNA, 25 bp, Homo sapien
tggtggcatttcagcaggagctccc

SEQ ID NO: 947685 - DNA, 25 bp, Homo sapien
tcccagaatattgaagctcttctct

SEQ ID NO: 947686 - DNA, 25 bp, Homo sapien
ctgccgagcgcgtccaggtaaactg

SEQ ID NO: 947687 - DNA, 25 bp, Homo sapien
accccggtgtcgtctgcgctgggaa

SEQ ID NO: 947688 - DNA, 25 bp, Homo sapien
actggagcgggatgtcgccgctccc

SEQ ID NO: 947689 - DNA, 25 bp, Homo sapien
tgcgtgctccgctgagcccgaaggc

SEQ ID NO: 947690 - DNA, 25 bp, Homo sapien
gcgctgaaatctgcacccctctggg

SEQ ID NO: 947691 - DNA, 25 bp, Homo sapien
agcagtgggcgagcggcgctgaaat

SEQ ID NO: 947692 - DNA, 25 bp, Homo sapien
aagggcgtcccagtgcgccccgcct

SEQ ID NO: 947693 - DNA, 25 bp, Homo sapien
cttccccgggggagcagtgggcgag

SEQ ID NO: 947694 - DNA, 25 bp, Homo sapien
ctggtaaccgttccagtgtgcttca

SEQ ID NO: 947695 - DNA, 25 bp, Homo sapien
tgcctggtaaccgttccagtgtgct

SEQ ID NO: 947696 - DNA, 25 bp, Homo sapien
cctggtaaccgttccagtgtgcttc

SEQ ID NO: 947697 - DNA, 25 bp, Homo sapien
ctgcctggtaaccgttccagtgtgc

SEQ ID NO: 947698 - DNA, 25 bp, Homo sapien
tgaatgcagttttagatcctacagc

SEQ ID NO: 947699 - DNA, 25 bp, Homo sapien
gattgtttactctgacctgaaatag

SEQ ID NO: 947700 - DNA, 25 bp, Homo sapien
tgaagacttcactaattgtaatgga

SEQ ID NO: 947701 - DNA, 25 bp, Homo sapien
caccatgtggaagtctttaaatgtt

SEQ ID NO: 947702 - DNA, 25 bp, Homo sapien
tgaagatgtcaacgctgtcagggaa

SEQ ID NO: 947703 - DNA, 25 bp, Homo sapien
aagttgctttaaccagggcacatgc

SEQ ID NO: 947704 - DNA, 25 bp, Homo sapien
tcccaaatgctggaaaggcagatct

SEQ ID NO: 947705 - DNA, 25 bp, Homo sapien
gggtcagggtactggaaacatcacc

SEQ ID NO: 947706 - DNA, 25 bp, Homo sapien
attccaaaatactgctctctagttg

SEQ ID NO: 947707 - DNA, 25 bp, Homo sapien
gtgacagtgcctagagggctcccat

SEQ ID NO: 947708 - DNA, 25 bp, Homo sapien
tctgccctaatttccagtgacccaa

SEQ ID NO: 947709 - DNA, 25 bp, Homo sapien
gctctctagttgtccaaactgttcc

SEQ ID NO: 947710 - DNA, 25 bp, Homo sapien
agctgaactagaaggtgtactggcc

SEQ ID NO: 947711 - DNA, 25 bp, Homo sapien
ttccttagggttcgcaatgacagag

SEQ ID NO: 947712 - DNA, 25 bp, Homo sapien
tgtactggcctgcaaaaatatagga

SEQ ID NO: 947713 - DNA, 25 bp, Homo sapien
agtgtaggctacaacctgtcccaaa

SEQ ID NO: 947714 - DNA, 25 bp, Homo sapien
gctgcagtcagactcagaacttggg

SEQ ID NO: 947715 - DNA, 25 bp, Homo sapien
tatgtctgctcttttgttactcctt

SEQ ID NO: 947716 - DNA, 25 bp, Homo sapien
acagttgtgttgaaatgctggagct

SEQ ID NO: 947717 - DNA, 25 bp, Homo sapien
tgaacttccagtttgataagttcgt

SEQ ID NO: 947718 - DNA, 25 bp, Homo sapien
caagtaaactaagatctgtcctaaa

SEQ ID NO: 947719 - DNA, 25 bp, Homo sapien
tgccacttagtgctttctcgtcacc

SEQ ID NO: 947720 - DNA, 25 bp, Homo sapien
ggaccaaatctccacacttcgttag

SEQ ID NO: 947721 - DNA, 25 bp, Homo sapien
catcaatcacagatcttttctctgg

SEQ ID NO: 947722 - DNA, 25 bp, Homo sapien
tctaccatgcggcagatgtgggttg

SEQ ID NO: 947723 - DNA, 25 bp, Homo sapien
ggcgatgatgccttgacccttggct

SEQ ID NO: 947724 - DNA, 25 bp, Homo sapien
cagtggacagttggcactgaggttc

SEQ ID NO: 947725 - DNA, 25 bp, Homo sapien
gctgcccggccatagagggtgctgg

SEQ ID NO: 947726 - DNA, 25 bp, Homo sapien
gcaccttttatcaactcattggaat

SEQ ID NO: 947727 - DNA, 25 bp, Homo sapien
agcaccttttatcaactcattggaa

SEQ ID NO: 947728 - DNA, 25 bp, Homo sapien
cattggaattagaaattgcaaccat

SEQ ID NO: 947729 - DNA, 25 bp, Homo sapien
tcaactcattggaattagaaattgc

SEQ ID NO: 947730 - DNA, 25 bp, Homo sapien
cataaagacgattctcagcatcagt

SEQ ID NO: 947731 - DNA, 25 bp, Homo sapien
caccagcaatatgttggcagtgaga

SEQ ID NO: 947732 - DNA, 25 bp, Homo sapien
ccgaggtagtttccgtggaatgaca

SEQ ID NO: 947733 - DNA, 25 bp, Homo sapien
aaactccttcatagtagccccgagg

SEQ ID NO: 947734 - DNA, 25 bp, Homo sapien
ttccatgggaagagagttgaaataa

SEQ ID NO: 947735 - DNA, 25 bp, Homo sapien
gttaaaaggataatagagacaacag

SEQ ID NO: 947736 - DNA, 25 bp, Homo sapien
tagagacaacagcttggccgggcat

SEQ ID NO: 947737 - DNA, 25 bp, Homo sapien
aggtcatgagaaactcaggctgtga

SEQ ID NO: 947738 - DNA, 25 bp, Homo sapien
aagctggcagacacatcttttggca

SEQ ID NO: 947739 - DNA, 25 bp, Homo sapien
ggcagacacatcttttggcagcagc

SEQ ID NO: 947740 - DNA, 25 bp, Homo sapien
gcagctgctcgccatgtgatttaaa

SEQ ID NO: 947741 - DNA, 25 bp, Homo sapien
gctcgccatgtgatttaaaacttcc

SEQ ID NO: 947742 - DNA, 25 bp, Homo sapien
tctgtagagggcgtccgaggctcca

SEQ ID NO: 947743 - DNA, 25 bp, Homo sapien
cgaggctccatggatagtgaggtcc

SEQ ID NO: 947744 - DNA, 25 bp, Homo sapien
ggacacatgagtttgccctgacgat

SEQ ID NO: 947745 - DNA, 25 bp, Homo sapien
tccatagcctgtgctcagcatgcca

SEQ ID NO: 947746 - DNA, 25 bp, Homo sapien
ttccttcttgtgacattctgctatt

SEQ ID NO: 947747 - DNA, 25 bp, Homo sapien
caacccatacaagagtttttgcctc

SEQ ID NO: 947748 - DNA, 25 bp, Homo sapien
atctccagggaacagtagctttatt

SEQ ID NO: 947749 - DNA, 25 bp, Homo sapien
cctccttggctagggtagaaggctc

SEQ ID NO: 947750 - DNA, 25 bp, Homo sapien
tctttggaaaccacaaagccacatc

SEQ ID NO: 947751 - DNA, 25 bp, Homo sapien
gaaaaccaactgtcatgtgaatatt

SEQ ID NO: 947752 - DNA, 25 bp, Homo sapien
ggaaaaccaactgtcatgtgaatat

SEQ ID NO: 947753 - DNA, 25 bp, Homo sapien
gggaaaaccaactgtcatgtgaata

SEQ ID NO: 947754 - DNA, 25 bp, Homo sapien
tgacaggcaacagacaaggtgcatt

SEQ ID NO: 947755 - DNA, 25 bp, Homo sapien
tggaagccaaattgatggcctagaa

SEQ ID NO: 947756 - DNA, 25 bp, Homo sapien
gaaacactaaggcaagccttggtcc

SEQ ID NO: 947757 - DNA, 25 bp, Homo sapien
gagtggatgaagtaaagaggttccc

SEQ ID NO: 947758 - DNA, 25 bp, Homo sapien
ttattgcatgagatgttcgccaggg

SEQ ID NO: 947759 - DNA, 25 bp, Homo sapien
tactaacgccccattgtgtctgggc

SEQ ID NO: 947760 - DNA, 25 bp, Homo sapien
tagggatagggactggacttctact

SEQ ID NO: 947761 - DNA, 25 bp, Homo sapien
gattatgctgaagggtttatcctcc

SEQ ID NO: 947762 - DNA, 25 bp, Homo sapien
gcccaatataaaagtagctctctct

SEQ ID NO: 947763 - DNA, 25 bp, Homo sapien
ctgatcagcccaatataaaagtagc

SEQ ID NO: 947764 - DNA, 25 bp, Homo sapien
tttgatctctccactgatcagccca

SEQ ID NO: 947765 - DNA, 25 bp, Homo sapien
tctccactgatcagcccaatataaa

SEQ ID NO: 947766 - DNA, 25 bp, Homo sapien
gggcatggcttgggcatgctcacac

SEQ ID NO: 947767 - DNA, 25 bp, Homo sapien
cttgggcatgctcacactctgctgt

SEQ ID NO: 947768 - DNA, 25 bp, Homo sapien
tgtgtgactacattgcactacagcc

SEQ ID NO: 947769 - DNA, 25 bp, Homo sapien
tggaatgtgaaggaattggatcctg

SEQ ID NO: 947770 - DNA, 25 bp, Homo sapien
ttccattgccaataaaagcctttga

SEQ ID NO: 947771 - DNA, 25 bp, Homo sapien
cgagcttttcttcgccttaaatttg

SEQ ID NO: 947772 - DNA, 25 bp, Homo sapien
cctttgattggcgagcttttcttcg

SEQ ID NO: 947773 - DNA, 25 bp, Homo sapien
tttccattgccaataaaagcctttg

SEQ ID NO: 947774 - DNA, 25 bp, Homo sapien
ttttttgacatacgcagccttccct

SEQ ID NO: 947775 - DNA, 25 bp, Homo sapien
tattatgtgaccattcattgttttt

SEQ ID NO: 947776 - DNA, 25 bp, Homo sapien
ctgtctcttaaacccagttttgccg

SEQ ID NO: 947777 - DNA, 25 bp, Homo sapien
tttgtcctgtcttggattccgcacg

SEQ ID NO: 947778 - DNA, 25 bp, Homo sapien
gataaagttctcagtggatctgaac

SEQ ID NO: 947779 - DNA, 25 bp, Homo sapien
ggatctgaactttgcttcatgtggt

SEQ ID NO: 947780 - DNA, 25 bp, Homo sapien
tgtgccaacagcatcgtgataaagt

SEQ ID NO: 947781 - DNA, 25 bp, Homo sapien
catctttgtgatggcgtcagtttgt

SEQ ID NO: 947782 - DNA, 25 bp, Homo sapien
tgtgttctccgtgaaacattctgcc

SEQ ID NO: 947783 - DNA, 25 bp, Homo sapien
tgtcttccattagctaatggctgtg

SEQ ID NO: 947784 - DNA, 25 bp, Homo sapien
gcactcgccgtccttcatagctggt

SEQ ID NO: 947785 - DNA, 25 bp, Homo sapien
ggtgccacttttggccggccctgta

SEQ ID NO: 947786 - DNA, 25 bp, Homo sapien
ggagagcatcaatcaagtctcttag

SEQ ID NO: 947787 - DNA, 25 bp, Homo sapien
gcatcaatcaagtctcttagatgag

SEQ ID NO: 947788 - DNA, 25 bp, Homo sapien
tgcaggagagcatcaatcaagtctc

SEQ ID NO: 947789 - DNA, 25 bp, Homo sapien
tcaagtctcttagatgaggcctcag

SEQ ID NO: 947790 - DNA, 25 bp, Homo sapien
aggatctaatgggttgtctgaatgt

SEQ ID NO: 947791 - DNA, 25 bp, Homo sapien
aaagcaattccaaaggttggtgtca

SEQ ID NO: 947792 - DNA, 25 bp, Homo sapien
ggtgtcaacttacagcttagtaatg

SEQ ID NO: 947793 - DNA, 25 bp, Homo sapien
gattgaggcattggctcttcaacat

SEQ ID NO: 947794 - DNA, 25 bp, Homo sapien
acagtgttcaagatactcctcgttt

SEQ ID NO: 947795 - DNA, 25 bp, Homo sapien
tactcctcgtttgaagataagagtc

SEQ ID NO: 947796 - DNA, 25 bp, Homo sapien
ttacacagttgatacaacagtgttc

SEQ ID NO: 947797 - DNA, 25 bp, Homo sapien
cggtattacacagttgatacaacag

SEQ ID NO: 947798 - DNA, 25 bp, Homo sapien
cctgccaccattggtctacccagag

SEQ ID NO: 947799 - DNA, 25 bp, Homo sapien
gtcctgccaccattggtctacccag

SEQ ID NO: 947800 - DNA, 25 bp, Homo sapien
gccaccattggtctacccagagccc

SEQ ID NO: 947801 - DNA, 25 bp, Homo sapien
tgccaccattggtctacccagagcc

SEQ ID NO: 947802 - DNA, 25 bp, Homo sapien
cattcactgctctggaaacagccct

SEQ ID NO: 947803 - DNA, 25 bp, Homo sapien
gatctcattaatatgggctgctaca

SEQ ID NO: 947804 - DNA, 25 bp, Homo sapien
gggttcccatgctctccggtcgtca

SEQ ID NO: 947805 - DNA, 25 bp, Homo sapien
gaccagacggccctgactgtcttga

SEQ ID NO: 947806 - DNA, 25 bp, Homo sapien
agaacaatcttcttcctccacccca

SEQ ID NO: 947807 - DNA, 25 bp, Homo sapien
gaacaatcttcttcctccaccccac

SEQ ID NO: 947808 - DNA, 25 bp, Homo sapien
cagaacaatcttcttcctccacccc

SEQ ID NO: 947809 - DNA, 25 bp, Homo sapien
tcagaacaatcttcttcctccaccc

SEQ ID NO: 947810 - DNA, 25 bp, Homo sapien
cctccctaaaatgaatacattgtcc

SEQ ID NO: 947811 - DNA, 25 bp, Homo sapien
tgtccaagatctttatcccctcctc

SEQ ID NO: 947812 - DNA, 25 bp, Homo sapien
caaaactgcccctaaagtcaatatc

SEQ ID NO: 947813 - DNA, 25 bp, Homo sapien
tttatttgtatcacaaaactgcccc

SEQ ID NO: 947814 - DNA, 25 bp, Homo sapien
tgattgggctcccatccatcagaag

SEQ ID NO: 947815 - DNA, 25 bp, Homo sapien
caggatttcagagttgttcgtcctc

SEQ ID NO: 947816 - DNA, 25 bp, Homo sapien
tgtctgagaagttcttgattgggct

SEQ ID NO: 947817 - DNA, 25 bp, Homo sapien
cccttggtcttgtctgagaagttct

SEQ ID NO: 947818 - DNA, 25 bp, Homo sapien
atgatcttgcatgaactggagatgt

SEQ ID NO: 947819 - DNA, 25 bp, Homo sapien
cttgcatgaactggagatgtcagga

SEQ ID NO: 947820 - DNA, 25 bp, Homo sapien
gatcttgcatgaactggagatgtca

SEQ ID NO: 947821 - DNA, 25 bp, Homo sapien
gcatgaactggagatgtcaggattg

SEQ ID NO: 947822 - DNA, 25 bp, Homo sapien
gagctccatccccaggatcacagaa

SEQ ID NO: 947823 - DNA, 25 bp, Homo sapien
ccgggagtaggctctgaaaggggtg

SEQ ID NO: 947824 - DNA, 25 bp, Homo sapien
atctttaagccacatttaaactcac

SEQ ID NO: 947825 - DNA, 25 bp, Homo sapien
aataccaccactcacgagagccttc

SEQ ID NO: 947826 - DNA, 25 bp, Homo sapien
gctgaacaacatgctatgtggtttg

SEQ ID NO: 947827 - DNA, 25 bp, Homo sapien
tttgcacacttgatccttccatctc

SEQ ID NO: 947828 - DNA, 25 bp, Homo sapien
caacatgctatgtggtttgcacact

SEQ ID NO: 947829 - DNA, 25 bp, Homo sapien
catgctatgtggtttgcacacttga

SEQ ID NO: 947830 - DNA, 25 bp, Homo sapien
ctgactgcccattctgatgacccat

SEQ ID NO: 947831 - DNA, 25 bp, Homo sapien
ctccatctgactgcccattctgatg

SEQ ID NO: 947832 - DNA, 25 bp, Homo sapien
agcaagcccagctccatctgactgc

SEQ ID NO: 947833 - DNA, 25 bp, Homo sapien
catctgactgcccattctgatgacc

SEQ ID NO: 947834 - DNA, 25 bp, Homo sapien
ggagaatgaggaaagtattggaact

SEQ ID NO: 947835 - DNA, 25 bp, Homo sapien
tcagtctgtgcgagtcagagtcctt

SEQ ID NO: 947836 - DNA, 25 bp, Homo sapien
cgagtcagagtccttgaaactgggc

SEQ ID NO: 947837 - DNA, 25 bp, Homo sapien
aacttttggaaatgggtgtgctcag

SEQ ID NO: 947838 - DNA, 25 bp, Homo sapien
agttcagccaccttcgtgaccctgt

SEQ ID NO: 947839 - DNA, 25 bp, Homo sapien
ccaccttcgtgaccctgtgtgggtg

SEQ ID NO: 947840 - DNA, 25 bp, Homo sapien
tcagccaccttcgtgaccctgtgtg

SEQ ID NO: 947841 - DNA, 25 bp, Homo sapien
ccttcgtgaccctgtgtgggtgatg

SEQ ID NO: 947842 - DNA, 25 bp, Homo sapien
aagtctctcacgactgtagcaaaga

SEQ ID NO: 947843 - DNA, 25 bp, Homo sapien
ggcacaaatccatcattacatattc

SEQ ID NO: 947844 - DNA, 25 bp, Homo sapien
agtctctcacgactgtagcaaagac

SEQ ID NO: 947845 - DNA, 25 bp, Homo sapien
caagtctctcacgactgtagcaaag

SEQ ID NO: 947846 - DNA, 25 bp, Homo sapien
tttagttttgcccttcgcctctgga

SEQ ID NO: 947847 - DNA, 25 bp, Homo sapien
tagttttgcccttcgcctctggagc

SEQ ID NO: 947848 - DNA, 25 bp, Homo sapien
gagggtggagcggtctgttgaaaca

SEQ ID NO: 947849 - DNA, 25 bp, Homo sapien
caaggccaagtggacttgagagaga

SEQ ID NO: 947850 - DNA, 25 bp, Homo sapien
cccgtggtgttcaaacatgctgaaa

SEQ ID NO: 947851 - DNA, 25 bp, Homo sapien
atagctttcttgctcagtagcagtt

SEQ ID NO: 947852 - DNA, 25 bp, Homo sapien
ttcctgatcttttcccgtggtgttc

SEQ ID NO: 947853 - DNA, 25 bp, Homo sapien
ctttcattacgatttttcatatagc

SEQ ID NO: 947854 - DNA, 25 bp, Homo sapien
tagcagtcgttctgtggaaaccgat

SEQ ID NO: 947855 - DNA, 25 bp, Homo sapien
gaattctggtccgtggtttcatcca

SEQ ID NO: 947856 - DNA, 25 bp, Homo sapien
ctctcccgggagttaaatacagtgg

SEQ ID NO: 947857 - DNA, 25 bp, Homo sapien
tagctgcgatgctagactctcccgg

SEQ ID NO: 947858 - DNA, 25 bp, Homo sapien
tatgtcagaacatatttgtcttaca

SEQ ID NO: 947859 - DNA, 25 bp, Homo sapien
aaaagcaagtgggtaccaatgatgg

SEQ ID NO: 947860 - DNA, 25 bp, Homo sapien
aattcatgcgcctctgaccattatg

SEQ ID NO: 947861 - DNA, 25 bp, Homo sapien
tgcaaggcaacatgaattaaatact

SEQ ID NO: 947862 - DNA, 25 bp, Homo sapien
ggacgtaaaagggatgaagcattgc

SEQ ID NO: 947863 - DNA, 25 bp, Homo sapien
gagcaccatgattgccttacagtag

SEQ ID NO: 947864 - DNA, 25 bp, Homo sapien
agcctctttgggactacaatcctag

SEQ ID NO: 947865 - DNA, 25 bp, Homo sapien
tataatccagagacagaatttgtgc

SEQ ID NO: 947866 - DNA, 25 bp, Homo sapien
tgtagcccccaacgtgatcaggatt

SEQ ID NO: 947867 - DNA, 25 bp, Homo sapien
gatactgatggcttgaagagaggta

SEQ ID NO: 947868 - DNA, 25 bp, Homo sapien
caggcaggttgatcctggatttagg

SEQ ID NO: 947869 - DNA, 25 bp, Homo sapien
ggcctccaccaatagcctttgaggt

SEQ ID NO: 947870 - DNA, 25 bp, Homo sapien
catcgctgtagcaattcgtaagtca

SEQ ID NO: 947871 - DNA, 25 bp, Homo sapien
gaaccatcgctgtagcaattcgtaa

SEQ ID NO: 947872 - DNA, 25 bp, Homo sapien
cgtaagtcagcaaagttacaccaaa

SEQ ID NO: 947873 - DNA, 25 bp, Homo sapien
tgtagcaattcgtaagtcagcaaag

SEQ ID NO: 947874 - DNA, 25 bp, Homo sapien
tgataccaaagagttagttaagaac

SEQ ID NO: 947875 - DNA, 25 bp, Homo sapien
aatttacctgataccaaagagttag

SEQ ID NO: 947876 - DNA, 25 bp, Homo sapien
aatggagaaatcacagatataatta

SEQ ID NO: 947877 - DNA, 25 bp, Homo sapien
ttacctgataccaaagagttagtta

SEQ ID NO: 947878 - DNA, 25 bp, Homo sapien
cacctgtaatctcgtcttgataaca

SEQ ID NO: 947879 - DNA, 25 bp, Homo sapien
gagcttttggtccttcttcacgcag

SEQ ID NO: 947880 - DNA, 25 bp, Homo sapien
cactccgctgtaagtggtttggcca

SEQ ID NO: 947881 - DNA, 25 bp, Homo sapien
tctaaagcagtctatcactccgctg

SEQ ID NO: 947882 - DNA, 25 bp, Homo sapien
gtgaaattgggagaaggagactcct

SEQ ID NO: 947883 - DNA, 25 bp, Homo sapien
tttccctaagactgacatctccaga

SEQ ID NO: 947884 - DNA, 25 bp, Homo sapien
tcctacagataacactttaggattt

SEQ ID NO: 947885 - DNA, 25 bp, Homo sapien
aaaatttatactggctgataatcaa

SEQ ID NO: 947886 - DNA, 25 bp, Homo sapien
ctgtatccaaaatagggcagtgcat

SEQ ID NO: 947887 - DNA, 25 bp, Homo sapien
actgtatccaaaatagggcagtgca

SEQ ID NO: 947888 - DNA, 25 bp, Homo sapien
aaaagcgagactgtactcagaagac

SEQ ID NO: 947889 - DNA, 25 bp, Homo sapien
ttttttaaaagcgagactgtactca

SEQ ID NO: 947890 - DNA, 25 bp, Homo sapien
tagattttttaaaagcgagactgta

SEQ ID NO: 947891 - DNA, 25 bp, Homo sapien
ttttaaaagcgagactgtactcaga

SEQ ID NO: 947892 - DNA, 25 bp, Homo sapien
gcagggacgtctggtagatctgcct

SEQ ID NO: 947893 - DNA, 25 bp, Homo sapien
tactggcaagaacttggccaccaga

SEQ ID NO: 947894 - DNA, 25 bp, Homo sapien
ctgatcaagtggtctgaattttctc

SEQ ID NO: 947895 - DNA, 25 bp, Homo sapien
gattccaaaaggctaagccaatgct

SEQ ID NO: 947896 - DNA, 25 bp, Homo sapien
cctctctagggaagtggtctctttc

SEQ ID NO: 947897 - DNA, 25 bp, Homo sapien
cttaagtcctgccctactttctgtc

SEQ ID NO: 947898 - DNA, 25 bp, Homo sapien
tcctgaagctccatatgaaaaccag

SEQ ID NO: 947899 - DNA, 25 bp, Homo sapien
taagtcctgccctactttctgtcca

SEQ ID NO: 947900 - DNA, 25 bp, Homo sapien
tgatcacacatgtataacacacttc

SEQ ID NO: 947901 - DNA, 25 bp, Homo sapien
tcatctggtatgatagagcattcta

SEQ ID NO: 947902 - DNA, 25 bp, Homo sapien
gagaccatcattacagtttgacttg

SEQ ID NO: 947903 - DNA, 25 bp, Homo sapien
taattaattcaaaggtgagaccatc

SEQ ID NO: 947904 - DNA, 25 bp, Homo sapien
gattacagctctgtgaaaaacctga

SEQ ID NO: 947905 - DNA, 25 bp, Homo sapien
attggtagtctgaccccacaggcac

SEQ ID NO: 947906 - DNA, 25 bp, Homo sapien
gccatgatgggtaacaatgcttaag

SEQ ID NO: 947907 - DNA, 25 bp, Homo sapien
gcagcaattagaaactatgttcgga

SEQ ID NO: 947908 - DNA, 25 bp, Homo sapien
tatggcaccagctaagagcaggctt

SEQ ID NO: 947909 - DNA, 25 bp, Homo sapien
gaatgtcccgcagaaagcatgcttt

SEQ ID NO: 947910 - DNA, 25 bp, Homo sapien
tagatggccgagaaaggaatgtccc

SEQ ID NO: 947911 - DNA, 25 bp, Homo sapien
ccttcacatgagcatagcacggaaa

SEQ ID NO: 947912 - DNA, 25 bp, Homo sapien
atgaagatcactttaatcccagcta

SEQ ID NO: 947913 - DNA, 25 bp, Homo sapien
tcaaatgaagatcactttaatccca

SEQ ID NO: 947914 - DNA, 25 bp, Homo sapien
ctcgggagactgaggcagaagaatc

SEQ ID NO: 947915 - DNA, 25 bp, Homo sapien
aaatgaagatcactttaatcccagc

SEQ ID NO: 947916 - DNA, 25 bp, Homo sapien
attccaattctatatcatgccaaag

SEQ ID NO: 947917 - DNA, 25 bp, Homo sapien
tagtttaattatcaactctgcctcc

SEQ ID NO: 947918 - DNA, 25 bp, Homo sapien
tctctaaagatgataaactattggg

SEQ ID NO: 947919 - DNA, 25 bp, Homo sapien
aatcatctcagggtagacctacgtt

SEQ ID NO: 947920 - DNA, 25 bp, Homo sapien
gagactccagcagtgaatgcacatt

SEQ ID NO: 947921 - DNA, 25 bp, Homo sapien
tctagcacggggaaaatgccagact

SEQ ID NO: 947922 - DNA, 25 bp, Homo sapien
cagagactccagcagtgaatgcaca

SEQ ID NO: 947923 - DNA, 25 bp, Homo sapien
gtgaatgcacattgtctagcacggg

SEQ ID NO: 947924 - DNA, 25 bp, Homo sapien
tccagcccagtcaaaggatggttag

SEQ ID NO: 947925 - DNA, 25 bp, Homo sapien
taacccttagatacacagcttggca

SEQ ID NO: 947926 - DNA, 25 bp, Homo sapien
tggttagaccccacctacatggctg

SEQ ID NO: 947927 - DNA, 25 bp, Homo sapien
ccagagctacaaacaatgggcagca

SEQ ID NO: 947928 - DNA, 25 bp, Homo sapien
catacatacgtgttggccattggta

SEQ ID NO: 947929 - DNA, 25 bp, Homo sapien
gcattaagagattgccctggcctcc

SEQ ID NO: 947930 - DNA, 25 bp, Homo sapien
aatatactgtgagcagggacttggc

SEQ ID NO: 947931 - DNA, 25 bp, Homo sapien
taccactaggctggttgtaaaacca

SEQ ID NO: 947932 - DNA, 25 bp, Homo sapien
tcacagatgctcagatgaaggataa

SEQ ID NO: 947933 - DNA, 25 bp, Homo sapien
tcaactaaatctaggacagtggttc

SEQ ID NO: 947934 - DNA, 25 bp, Homo sapien
taggtaaggttaaagctcagcaggc

SEQ ID NO: 947935 - DNA, 25 bp, Homo sapien
gtgaggtcacccctagtcatttgca

SEQ ID NO: 947936 - DNA, 25 bp, Homo sapien
tctaattgccacttactgggaagtc

SEQ ID NO: 947937 - DNA, 25 bp, Homo sapien
cctgccacttgcaaacggatcttga

SEQ ID NO: 947938 - DNA, 25 bp, Homo sapien
gtcccgcacgacagacagagcactg

SEQ ID NO: 947939 - DNA, 25 bp, Homo sapien
tgacgatttctaaaggatttgtgaa

SEQ ID NO: 947940 - DNA, 25 bp, Homo sapien
gcactgactcgaggaccagtggtga

SEQ ID NO: 947941 - DNA, 25 bp, Homo sapien
gactcagctatttacggttggcaga

SEQ ID NO: 947942 - DNA, 25 bp, Homo sapien
tcggcagacaatggacaggaacacc

SEQ ID NO: 947943 - DNA, 25 bp, Homo sapien
tctggtccacacaaagacgtgctgc

SEQ ID NO: 947944 - DNA, 25 bp, Homo sapien
cctgcaggtccatgagaagaacaac

SEQ ID NO: 947945 - DNA, 25 bp, Homo sapien
actgtgtgcacccacgactgtagaa

SEQ ID NO: 947946 - DNA, 25 bp, Homo sapien
cccacgactgtagaagataaattac

SEQ ID NO: 947947 - DNA, 25 bp, Homo sapien
tgtgcacccacgactgtagaagata

SEQ ID NO: 947948 - DNA, 25 bp, Homo sapien
tgcacccacgactgtagaagataaa

SEQ ID NO: 947949 - DNA, 25 bp, Homo sapien
taaaagaatgtgaacgcgacttgcc

SEQ ID NO: 947950 - DNA, 25 bp, Homo sapien
cctgtttgaacggagtagctgcctg

SEQ ID NO: 947951 - DNA, 25 bp, Homo sapien
catccggccgagtatcttaaaaagg

SEQ ID NO: 947952 - DNA, 25 bp, Homo sapien
caagcacttctgatgtaggaggcac

SEQ ID NO: 947953 - DNA, 25 bp, Homo sapien
taagttcacatctccatatgacagt

SEQ ID NO: 947954 - DNA, 25 bp, Homo sapien
aatcttaagttcacatctccatatg

SEQ ID NO: 947955 - DNA, 25 bp, Homo sapien
tacaatcttaagttcacatctccat

SEQ ID NO: 947956 - DNA, 25 bp, Homo sapien
agttcacatctccatatgacagttt

SEQ ID NO: 947957 - DNA, 25 bp, Homo sapien
gctgtaatttgtatcggaagtccat

SEQ ID NO: 947958 - DNA, 25 bp, Homo sapien
tttgtatcggaagtccatgatcttc

SEQ ID NO: 947959 - DNA, 25 bp, Homo sapien
taatttgtatcggaagtccatgatc

SEQ ID NO: 947960 - DNA, 25 bp, Homo sapien
gctgctgtaatttgtatcggaagtc

SEQ ID NO: 947961 - DNA, 25 bp, Homo sapien
gcctaaatacattatctaaaggata

SEQ ID NO: 947962 - DNA, 25 bp, Homo sapien
tcagtagcctaaatacattatctaa

SEQ ID NO: 947963 - DNA, 25 bp, Homo sapien
tcacaatgataggaaatatcagtag

SEQ ID NO: 947964 - DNA, 25 bp, Homo sapien
gtagcctaaatacattatctaaagg

SEQ ID NO: 947965 - DNA, 25 bp, Homo sapien
cactcaccctgtcgagctctgaagg

SEQ ID NO: 947966 - DNA, 25 bp, Homo sapien
ggcatgaggtcggaaggccactcac

SEQ ID NO: 947967 - DNA, 25 bp, Homo sapien
tcacaagtgctgaagacggcattca

SEQ ID NO: 947968 - DNA, 25 bp, Homo sapien
cattcagcaacctcacaaagaagct

SEQ ID NO: 947969 - DNA, 25 bp, Homo sapien
taactgtatgaaagctatggcccag

SEQ ID NO: 947970 - DNA, 25 bp, Homo sapien
ggctggcccagtgtctagcatgaaa

SEQ ID NO: 947971 - DNA, 25 bp, Homo sapien
cacggtaaggcagaaaaaggctatt

SEQ ID NO: 947972 - DNA, 25 bp, Homo sapien
ccagggaggctatccttaactgtct

SEQ ID NO: 947973 - DNA, 25 bp, Homo sapien
tgccaatttagatagtgccatgagg

SEQ ID NO: 947974 - DNA, 25 bp, Homo sapien
ctttttgagaaaaccgatggagctg

SEQ ID NO: 947975 - DNA, 25 bp, Homo sapien
cctctcattggagtaggcaagcagt

SEQ ID NO: 947976 - DNA, 25 bp, Homo sapien
tatagcacccatgagcccttagtac

SEQ ID NO: 947977 - DNA, 25 bp, Homo sapien
aagaggctgtctcctactgtagaga

SEQ ID NO: 947978 - DNA, 25 bp, Homo sapien
tatgtatggcctggcgcacaaagat

SEQ ID NO: 947979 - DNA, 25 bp, Homo sapien
taatatctgggtggcgccatgactc

SEQ ID NO: 947980 - DNA, 25 bp, Homo sapien
gagtagccagttcctaatgctgcct

SEQ ID NO: 947981 - DNA, 25 bp, Homo sapien
ggaagactgaaggtccaagtctcca

SEQ ID NO: 947982 - DNA, 25 bp, Homo sapien
gtccaagtctccatcagaactccca

SEQ ID NO: 947983 - DNA, 25 bp, Homo sapien
aagtctccatcagaactcccacaac

SEQ ID NO: 947984 - DNA, 25 bp, Homo sapien
agggaagactgaaggtccaagtctc

SEQ ID NO: 947985 - DNA, 25 bp, Homo sapien
attcctttttagtgacaatcatttt

SEQ ID NO: 947986 - DNA, 25 bp, Homo sapien
ttattcctttttagtgacaatcatt

SEQ ID NO: 947987 - DNA, 25 bp, Homo sapien
tattcctttttagtgacaatcattt

SEQ ID NO: 947988 - DNA, 25 bp, Homo sapien
aagaaagatgctgctattacttaaa

SEQ ID NO: 947989 - DNA, 25 bp, Homo sapien
tgaggctgtggaactcacaacaacc

SEQ ID NO: 947990 - DNA, 25 bp, Homo sapien
caaccctctaaggtgtgtgactgac

SEQ ID NO: 947991 - DNA, 25 bp, Homo sapien
tccaattatagagaagactttgcca

SEQ ID NO: 947992 - DNA, 25 bp, Homo sapien
tgtgcataaatttatccctcacaaa

SEQ ID NO: 947993 - DNA, 25 bp, Homo sapien
aatttatccctcacaaaatcgttca

SEQ ID NO: 947994 - DNA, 25 bp, Homo sapien
aagtgggaccgaaccatctttgtgc

SEQ ID NO: 947995 - DNA, 25 bp, Homo sapien
tttctgctgcaagtgggaccgaacc

SEQ ID NO: 947996 - DNA, 25 bp, Homo sapien
tttcctataagaatacctgctagat

SEQ ID NO: 947997 - DNA, 25 bp, Homo sapien
agaagcaccaactcaaaagacttac

SEQ ID NO: 947998 - DNA, 25 bp, Homo sapien
cctgctagattcttgagtatgtaca

SEQ ID NO: 947999 - DNA, 25 bp, Homo sapien
caaaatcccttaataagaagcacca

SEQ ID NO: 948000 - DNA, 25 bp, Homo sapien
actcccaataactgtggcaacagac

SEQ ID NO: 948001 - DNA, 25 bp, Homo sapien
gggcaactcccaataactgtggcaa

SEQ ID NO: 948002 - DNA, 25 bp, Homo sapien
ccttctctggggcaactcccaataa

SEQ ID NO: 948003 - DNA, 25 bp, Homo sapien
tctggggcaactcccaataactgtg

SEQ ID NO: 948004 - DNA, 25 bp, Homo sapien
tccaagttcctcctctgccctggaa

SEQ ID NO: 948005 - DNA, 25 bp, Homo sapien
ttcctcctctgccctggaaaggcat

SEQ ID NO: 948006 - DNA, 25 bp, Homo sapien
aagttcctcctctgccctggaaagg

SEQ ID NO: 948007 - DNA, 25 bp, Homo sapien
tgctccaagttcctcctctgccctg

SEQ ID NO: 948008 - DNA, 25 bp, Homo sapien
tctcagatcactgcatcctcctggg

SEQ ID NO: 948009 - DNA, 25 bp, Homo sapien
gctgcgattacaggcccgccattat

SEQ ID NO: 948010 - DNA, 25 bp, Homo sapien
tgcgattacaggcccgccattatgc

SEQ ID NO: 948011 - DNA, 25 bp, Homo sapien
tcccaggcaggaatgcagcggcaca

SEQ ID NO: 948012 - DNA, 25 bp, Homo sapien
tgccagtcattcaaaccaaacaagt

SEQ ID NO: 948013 - DNA, 25 bp, Homo sapien
tatagcaggccaatgactgattcat

SEQ ID NO: 948014 - DNA, 25 bp, Homo sapien
tctcatcacctgaaagatctgagag

SEQ ID NO: 948015 - DNA, 25 bp, Homo sapien
caattgttgttctttaatacgccag

SEQ ID NO: 948016 - DNA, 25 bp, Homo sapien
tccccgaaagaacagttgagaagtc

SEQ ID NO: 948017 - DNA, 25 bp, Homo sapien
tctccttcggccaatgccagtggaa

SEQ ID NO: 948018 - DNA, 25 bp, Homo sapien
tctcgtagaaggcaatccccgaaag

SEQ ID NO: 948019 - DNA, 25 bp, Homo sapien
gtcagggtctgtgggatcctttcca

SEQ ID NO: 948020 - DNA, 25 bp, Homo sapien
gcagtcttgctaattcatgtcaggc

SEQ ID NO: 948021 - DNA, 25 bp, Homo sapien
tttgattagccaagccctagatgcc

SEQ ID NO: 948022 - DNA, 25 bp, Homo sapien
cctaacaggtattgagcatgtggca

SEQ ID NO: 948023 - DNA, 25 bp, Homo sapien
ggcactaagatgagaaaccaaacct

SEQ ID NO: 948024 - DNA, 25 bp, Homo sapien
caaagaagccttcatagcgtagcac

SEQ ID NO: 948025 - DNA, 25 bp, Homo sapien
cgttggttctgcattcgagttttta

SEQ ID NO: 948026 - DNA, 25 bp, Homo sapien
tacaagatcgataggatacacagca

SEQ ID NO: 948027 - DNA, 25 bp, Homo sapien
aaagagccagttgatcgttggttct

SEQ ID NO: 948028 - DNA, 25 bp, Homo sapien
agttaaagtcaaggacaagactgag

SEQ ID NO: 948029 - DNA, 25 bp, Homo sapien
gaagaaagtaagataggtcagaaga

SEQ ID NO: 948030 - DNA, 25 bp, Homo sapien
taggccgactctgcaacttgtagaa

SEQ ID NO: 948031 - DNA, 25 bp, Homo sapien
gtagaagaactggtcgagctgaatc

SEQ ID NO: 948032 - DNA, 25 bp, Homo sapien
ctggtcgagctgaatcacctgaggc

SEQ ID NO: 948033 - DNA, 25 bp, Homo sapien
cagaccaaacctgtaggccgactct

SEQ ID NO: 948034 - DNA, 25 bp, Homo sapien
taaattcatacttcaggtcagtcag

SEQ ID NO: 948035 - DNA, 25 bp, Homo sapien
tcacagagagttgtcaaatgagggt

SEQ ID NO: 948036 - DNA, 25 bp, Homo sapien
caactgtagccctatatagatggaa

SEQ ID NO: 948037 - DNA, 25 bp, Homo sapien
tttgacagatgcatccaaaagagaa

SEQ ID NO: 948038 - DNA, 25 bp, Homo sapien
gaaaaattgtgggaagccgctgcca

SEQ ID NO: 948039 - DNA, 25 bp, Homo sapien
ggcccactagggttcatgcagtaaa

SEQ ID NO: 948040 - DNA, 25 bp, Homo sapien
tctaaacctctaagcggcagcgaat

SEQ ID NO: 948041 - DNA, 25 bp, Homo sapien
tgcttgaatttgtcgggcccactag

SEQ ID NO: 948042 - DNA, 25 bp, Homo sapien
cctggctcaaggtctgacagtccta

SEQ ID NO: 948043 - DNA, 25 bp, Homo sapien
aagtgtagcctgcagcaacccattg

SEQ ID NO: 948044 - DNA, 25 bp, Homo sapien
tagcctgcagcaacccattgtggtc

SEQ ID NO: 948045 - DNA, 25 bp, Homo sapien
tgacagtcctaaaagtgtagcctgc

SEQ ID NO: 948046 - DNA, 25 bp, Homo sapien
tccatgccagaaactgcgaagtctc

SEQ ID NO: 948047 - DNA, 25 bp, Homo sapien
gccagaaactgcgaagtctcacagg

SEQ ID NO: 948048 - DNA, 25 bp, Homo sapien
agatggctctgcctaaaaggagaaa

SEQ ID NO: 948049 - DNA, 25 bp, Homo sapien
tcagagatggctctgcctaaaagga

SEQ ID NO: 948050 - DNA, 25 bp, Homo sapien
cctcttccagaggagcaatccgttc

SEQ ID NO: 948051 - DNA, 25 bp, Homo sapien
ttcaatgtctgctaaggtcatacgt

SEQ ID NO: 948052 - DNA, 25 bp, Homo sapien
gcctcagccaagttaaagggcagag

SEQ ID NO: 948053 - DNA, 25 bp, Homo sapien
gcctctgggcctcagccaagttaaa

SEQ ID NO: 948054 - DNA, 25 bp, Homo sapien
gtaacctgaccaaatttctgagctg

SEQ ID NO: 948055 - DNA, 25 bp, Homo sapien
cccttggctcatataaatctgctaa

SEQ ID NO: 948056 - DNA, 25 bp, Homo sapien
atctgctaactgaaacaagatgtca

SEQ ID NO: 948057 - DNA, 25 bp, Homo sapien
gatgtcaacttccatgggtgtaacc

SEQ ID NO: 948058 - DNA, 25 bp, Homo sapien
atattaatgaaggtgtggaattcct

SEQ ID NO: 948059 - DNA, 25 bp, Homo sapien
taatttaggtggttatattaatgaa

SEQ ID NO: 948060 - DNA, 25 bp, Homo sapien
ccaccgcaccggctctgattttttt

SEQ ID NO: 948061 - DNA, 25 bp, Homo sapien
ccaggaggggaagttatattaatct

SEQ ID NO: 948062 - DNA, 25 bp, Homo sapien
gccagagtgctatagatctttctaa

SEQ ID NO: 948063 - DNA, 25 bp, Homo sapien
gagtgctatagatctttctaatgag

SEQ ID NO: 948064 - DNA, 25 bp, Homo sapien
ctatagatctttctaatgagttcca

SEQ ID NO: 948065 - DNA, 25 bp, Homo sapien
gccagccagagtgctatagatcttt

SEQ ID NO: 948066 - DNA, 25 bp, Homo sapien
ttgttaaggagcgaattaaatccat

SEQ ID NO: 948067 - DNA, 25 bp, Homo sapien
taggagaaactaacttgatgggatg

SEQ ID NO: 948068 - DNA, 25 bp, Homo sapien
aactaacttgatgggatgtggtacc

SEQ ID NO: 948069 - DNA, 25 bp, Homo sapien
tgttaaggagcgaattaaatccatt

SEQ ID NO: 948070 - DNA, 25 bp, Homo sapien
gaagaggcctcgttggaataccatg

SEQ ID NO: 948071 - DNA, 25 bp, Homo sapien
tgataggcctagaagagatctcaga

SEQ ID NO: 948072 - DNA, 25 bp, Homo sapien
cctgcctatggtaagcactgtggga

SEQ ID NO: 948073 - DNA, 25 bp, Homo sapien
gattctaagacctcatcgcctatag

SEQ ID NO: 948074 - DNA, 25 bp, Homo sapien
gatattccgtattacccagacaaca

SEQ ID NO: 948075 - DNA, 25 bp, Homo sapien
taatgtatttctcgaagatattccg

SEQ ID NO: 948076 - DNA, 25 bp, Homo sapien
tgagttaaaccacttcattagggca

SEQ ID NO: 948077 - DNA, 25 bp, Homo sapien
aaatcagcccttgatatacttcaaa

SEQ ID NO: 948078 - DNA, 25 bp, Homo sapien
tcccagtcctagcattgtcccgttg

SEQ ID NO: 948079 - DNA, 25 bp, Homo sapien
tcccgttgcacaaaggcttgctttg

SEQ ID NO: 948080 - DNA, 25 bp, Homo sapien
gctttgcgtgctccagttgtatttc

SEQ ID NO: 948081 - DNA, 25 bp, Homo sapien
tgatgtctcggaagtcgatggctgt

SEQ ID NO: 948082 - DNA, 25 bp, Homo sapien
actgaagacaaatggcccttcctat

SEQ ID NO: 948083 - DNA, 25 bp, Homo sapien
tatctctaaggcagttccactcaag

SEQ ID NO: 948084 - DNA, 25 bp, Homo sapien
cacctaaggccagaaggtccaagag

SEQ ID NO: 948085 - DNA, 25 bp, Homo sapien
tgctgctgccgaagacagttaccaa

SEQ ID NO: 948086 - DNA, 25 bp, Homo sapien
ccccatttggccatgcagtcagtgt

SEQ ID NO: 948087 - DNA, 25 bp, Homo sapien
gcatgcactgcaacaccttggcaga

SEQ ID NO: 948088 - DNA, 25 bp, Homo sapien
tgtaaaaaccctgcacaacaggctg

SEQ ID NO: 948089 - DNA, 25 bp, Homo sapien
ggaacgtgtcctgcatcttactgtc

SEQ ID NO: 948090 - DNA, 25 bp, Homo sapien
tttctgagtcctgcccaagaacaga

SEQ ID NO: 948091 - DNA, 25 bp, Homo sapien
tcacatttcaagcaaccaagcatct

SEQ ID NO: 948092 - DNA, 25 bp, Homo sapien
acatttcaagcaaccaagcatctgc

SEQ ID NO: 948093 - DNA, 25 bp, Homo sapien
gccagggagttggtgcctatttctg

SEQ ID NO: 948094 - DNA, 25 bp, Homo sapien
ccgcatatgtcaggtgtctttttct

SEQ ID NO: 948095 - DNA, 25 bp, Homo sapien
gttgatgaattgtggtctgtccaaa

SEQ ID NO: 948096 - DNA, 25 bp, Homo sapien
aactgagtaaattccgcatatgtca

SEQ ID NO: 948097 - DNA, 25 bp, Homo sapien
tatgttgatgaattgtggtctgtcc

SEQ ID NO: 948098 - DNA, 25 bp, Homo sapien
gaatcaaaggtccagttacagtgct

SEQ ID NO: 948099 - DNA, 25 bp, Homo sapien
gacatgatagatcctgctccaggta

SEQ ID NO: 948100 - DNA, 25 bp, Homo sapien
gagggagcttttcaatggcgatcaa

SEQ ID NO: 948101 - DNA, 25 bp, Homo sapien
agaacagttggccatgggactctgc

SEQ ID NO: 948102 - DNA, 25 bp, Homo sapien
accattccaaacctaacttgcagtc

SEQ ID NO: 948103 - DNA, 25 bp, Homo sapien
cctgaccattccaaacctaacttgc

SEQ ID NO: 948104 - DNA, 25 bp, Homo sapien
tgaccattccaaacctaacttgcag

SEQ ID NO: 948105 - DNA, 25 bp, Homo sapien
cattccctgaccattccaaacctaa

SEQ ID NO: 948106 - DNA, 25 bp, Homo sapien
gaagccattatggtcaatcgtgcaa

SEQ ID NO: 948107 - DNA, 25 bp, Homo sapien
tcgtaaatagtggatttttgaccca

SEQ ID NO: 948108 - DNA, 25 bp, Homo sapien
gatactactatctttcaaaattgaa

SEQ ID NO: 948109 - DNA, 25 bp, Homo sapien
caactggaagtgctctctgatacta

SEQ ID NO: 948110 - DNA, 25 bp, Homo sapien
atatttcatgaaatcttgttcagtg

SEQ ID NO: 948111 - DNA, 25 bp, Homo sapien
catcattaccaccaacacttgtaat

SEQ ID NO: 948112 - DNA, 25 bp, Homo sapien
tcattaccaccaacacttgtaatga

SEQ ID NO: 948113 - DNA, 25 bp, Homo sapien
cattaccaccaacacttgtaatgaa

SEQ ID NO: 948114 - DNA, 25 bp, Homo sapien
ttctcagtcctctaatatcaaatcg

SEQ ID NO: 948115 - DNA, 25 bp, Homo sapien
tctaatatcaaatcgaactctcttc

SEQ ID NO: 948116 - DNA, 25 bp, Homo sapien
tgaagcccatttctcagtcctctaa

SEQ ID NO: 948117 - DNA, 25 bp, Homo sapien
tcaaatcgaactctcttccattcct

SEQ ID NO: 948118 - DNA, 25 bp, Homo sapien
tgaacatgcttacactcacaggctt

SEQ ID NO: 948119 - DNA, 25 bp, Homo sapien
caataacaccatgagctagctgctt

SEQ ID NO: 948120 - DNA, 25 bp, Homo sapien
ttataacaatgtcaccaaactcgct

SEQ ID NO: 948121 - DNA, 25 bp, Homo sapien
catccccaggaaacgctattataac

SEQ ID NO: 948122 - DNA, 25 bp, Homo sapien
ttctgcagctttgtagctaattccc

SEQ ID NO: 948123 - DNA, 25 bp, Homo sapien
tagctaattcccatgatgatgtttg

SEQ ID NO: 948124 - DNA, 25 bp, Homo sapien
cagctttgtagctaattcccatgat

SEQ ID NO: 948125 - DNA, 25 bp, Homo sapien
gctaattcccatgatgatgtttgtg

SEQ ID NO: 948126 - DNA, 25 bp, Homo sapien
ctgaaccaccatcttgtgcagcagc

SEQ ID NO: 948127 - DNA, 25 bp, Homo sapien
acagcagtcaggtcgggggagcggg

SEQ ID NO: 948128 - DNA, 25 bp, Homo sapien
agcacagcagtcaggtcgggggagc

SEQ ID NO: 948129 - DNA, 25 bp, Homo sapien
tgaaccaccatcttgtgcagcagct

SEQ ID NO: 948130 - DNA, 25 bp, Homo sapien
gtgaagacaagaagtatagggtgca

SEQ ID NO: 948131 - DNA, 25 bp, Homo sapien
tactccatgggaacaacgtgaagac

SEQ ID NO: 948132 - DNA, 25 bp, Homo sapien
cttctgtgtgtaggcagattattca

SEQ ID NO: 948133 - DNA, 25 bp, Homo sapien
gaagtatagggtgcataagtaactt

SEQ ID NO: 948134 - DNA, 25 bp, Homo sapien
aaatgctcacacaagtccacactta

SEQ ID NO: 948135 - DNA, 25 bp, Homo sapien
tactatcttctataaagaatttcca

SEQ ID NO: 948136 - DNA, 25 bp, Homo sapien
ctataaagaatttccatacacttta

SEQ ID NO: 948137 - DNA, 25 bp, Homo sapien
gaaaatgctcacacaagtccacact

SEQ ID NO: 948138 - DNA, 25 bp, Homo sapien
acgtgcacagaagcatgcttcttac

SEQ ID NO: 948139 - DNA, 25 bp, Homo sapien
cagacgtgcacagaagcatgcttct

SEQ ID NO: 948140 - DNA, 25 bp, Homo sapien
agacgtgcacagaagcatgcttctt

SEQ ID NO: 948141 - DNA, 25 bp, Homo sapien
acagacgtgcacagaagcatgcttc

SEQ ID NO: 948142 - DNA, 25 bp, Homo sapien
cagctgaaaggctaccataaacaaa

SEQ ID NO: 948143 - DNA, 25 bp, Homo sapien
aacagctgaaaggctaccataaaca

SEQ ID NO: 948144 - DNA, 25 bp, Homo sapien
accataaacaaagcatcaggggcac

SEQ ID NO: 948145 - DNA, 25 bp, Homo sapien
ggacagattcaaaggcaacaaattc

SEQ ID NO: 948146 - DNA, 25 bp, Homo sapien
ctggcagtttgttgaggccgaaaac

SEQ ID NO: 948147 - DNA, 25 bp, Homo sapien
ggttctttatgcttaaagatgctga

SEQ ID NO: 948148 - DNA, 25 bp, Homo sapien
tgaaataatgtgtactatagagcca

SEQ ID NO: 948149 - DNA, 25 bp, Homo sapien
tatgcccgaatctctagtctgccag

SEQ ID NO: 948150 - DNA, 25 bp, Homo sapien
tactatagagccatatgcccgaatc

SEQ ID NO: 948151 - DNA, 25 bp, Homo sapien
tactatatggtttagatgtggcaat

SEQ ID NO: 948152 - DNA, 25 bp, Homo sapien
taatgaagtactatatggtttagat

SEQ ID NO: 948153 - DNA, 25 bp, Homo sapien
cacatagttgtctcatatagttaaa

SEQ ID NO: 948154 - DNA, 25 bp, Homo sapien
taacacatgcaccacatagttgtct

SEQ ID NO: 948155 - DNA, 25 bp, Homo sapien
atacagggtgttctagagcaatgtc

SEQ ID NO: 948156 - DNA, 25 bp, Homo sapien
tatacagggtgttctagagcaatgt

SEQ ID NO: 948157 - DNA, 25 bp, Homo sapien
ttatacagggtgttctagagcaatg

SEQ ID NO: 948158 - DNA, 25 bp, Homo sapien
aaagaaagagtagccgctgtctcaa

SEQ ID NO: 948159 - DNA, 25 bp, Homo sapien
aaaaaagaaagagtagccgctgtct

SEQ ID NO: 948160 - DNA, 25 bp, Homo sapien
tagccgctgtctcaaatactctcca

SEQ ID NO: 948161 - DNA, 25 bp, Homo sapien
aaagagtagccgctgtctcaaatac

SEQ ID NO: 948162 - DNA, 25 bp, Homo sapien
tgactgggaaaagtagcctaatacc

SEQ ID NO: 948163 - DNA, 25 bp, Homo sapien
taaaaactggcgcaagatctggtaa

SEQ ID NO: 948164 - DNA, 25 bp, Homo sapien
gggcaacggagtgagctctcatgtc

SEQ ID NO: 948165 - DNA, 25 bp, Homo sapien
tgaattcacctattaacacaggcca

SEQ ID NO: 948166 - DNA, 25 bp, Homo sapien
cgaggacatgccgaatggttggaat

SEQ ID NO: 948167 - DNA, 25 bp, Homo sapien
catgccgaatggttggaatccacca

SEQ ID NO: 948168 - DNA, 25 bp, Homo sapien
taaatgagcgaggacatgccgaatg

SEQ ID NO: 948169 - DNA, 25 bp, Homo sapien
taagacataaatgagcgaggacatg

SEQ ID NO: 948170 - DNA, 25 bp, Homo sapien
tggaaagaaaataaaagtgaagcag

SEQ ID NO: 948171 - DNA, 25 bp, Homo sapien
gaaagaaaataaaagtgaagcagac

SEQ ID NO: 948172 - DNA, 25 bp, Homo sapien
tgaaactgtacttggaaagaaaata

SEQ ID NO: 948173 - DNA, 25 bp, Homo sapien
gttcttgaaactgtacttggaaaga

SEQ ID NO: 948174 - DNA, 25 bp, Homo sapien
ctgcaggggtgtgtacatttactat

SEQ ID NO: 948175 - DNA, 25 bp, Homo sapien
ggggtgtgtacatttactatcttac

SEQ ID NO: 948176 - DNA, 25 bp, Homo sapien
caggggtgtgtacatttactatctt

SEQ ID NO: 948177 - DNA, 25 bp, Homo sapien
tgcaggggtgtgtacatttactatc

SEQ ID NO: 948178 - DNA, 25 bp, Homo sapien
gaagcatcttcactagcagttggtg

SEQ ID NO: 948179 - DNA, 25 bp, Homo sapien
aagcatcttcactagcagttggtgt

SEQ ID NO: 948180 - DNA, 25 bp, Homo sapien
gcatcttcactagcagttggtgtag

SEQ ID NO: 948181 - DNA, 25 bp, Homo sapien
tgaagcatcttcactagcagttggt

SEQ ID NO: 948182 - DNA, 25 bp, Homo sapien
caacctgatgagtctttactaagca

SEQ ID NO: 948183 - DNA, 25 bp, Homo sapien
aacagagcttgtcttagagtttgcc

SEQ ID NO: 948184 - DNA, 25 bp, Homo sapien
ccctggtcagagagcctcaagtcat

SEQ ID NO: 948185 - DNA, 25 bp, Homo sapien
tacagcagttatgaactacagttgg

SEQ ID NO: 948186 - DNA, 25 bp, Homo sapien
caagaaattgggcagagggagtact

SEQ ID NO: 948187 - DNA, 25 bp, Homo sapien
tagtgaggccaactagactggatgt

SEQ ID NO: 948188 - DNA, 25 bp, Homo sapien
taggtacgcaaatggactctcacag

SEQ ID NO: 948189 - DNA, 25 bp, Homo sapien
gctcaggagcctaggtcaggacatg

SEQ ID NO: 948190 - DNA, 25 bp, Homo sapien
tagagcagattgagcacaagccaga

SEQ ID NO: 948191 - DNA, 25 bp, Homo sapien
catagaaagtttcatggtagagcag

SEQ ID NO: 948192 - DNA, 25 bp, Homo sapien
gtcgaaatgctagttccaccactca

SEQ ID NO: 948193 - DNA, 25 bp, Homo sapien
gaaattgttagcaccagatatggaa

SEQ ID NO: 948194 - DNA, 25 bp, Homo sapien
caagctggaggtgttaaggccgtaa

SEQ ID NO: 948195 - DNA, 25 bp, Homo sapien
ggatccctctctcagcaagctggag

SEQ ID NO: 948196 - DNA, 25 bp, Homo sapien
ggctgaccaatgtacccaaggcact

SEQ ID NO: 948197 - DNA, 25 bp, Homo sapien
gactggaaaatgtctggatcaagcc

SEQ ID NO: 948198 - DNA, 25 bp, Homo sapien
ggtctgatccaccactccacttaaa

SEQ ID NO: 948199 - DNA, 25 bp, Homo sapien
ttcaagtatcgagtgacaaagtcat

SEQ ID NO: 948200 - DNA, 25 bp, Homo sapien
agtatcgagtgacaaagtcattggg

SEQ ID NO: 948201 - DNA, 25 bp, Homo sapien
atctttggtctgatccaccactcca

SEQ ID NO: 948202 - DNA, 25 bp, Homo sapien
gcaaaagtagaggagtctacaatgc

SEQ ID NO: 948203 - DNA, 25 bp, Homo sapien
taagagaatcaatgtgtgtgctggg

SEQ ID NO: 948204 - DNA, 25 bp, Homo sapien
agagaatcaatgtgtgtgctgggca

SEQ ID NO: 948205 - DNA, 25 bp, Homo sapien
aaagtagaggagtctacaatgcccc

SEQ ID NO: 948206 - DNA, 25 bp, Homo sapien
ggatgtagcagctgacaaagataca

SEQ ID NO: 948207 - DNA, 25 bp, Homo sapien
ctgatcaattagactctcccccagt

SEQ ID NO: 948208 - DNA, 25 bp, Homo sapien
tagactctcccccagtatagtcctg

SEQ ID NO: 948209 - DNA, 25 bp, Homo sapien
gatgtagcagctgacaaagatacat

SEQ ID NO: 948210 - DNA, 25 bp, Homo sapien
ttcaaaaatattgttctaagctcag

SEQ ID NO: 948211 - DNA, 25 bp, Homo sapien
tctaagctcagctggatctgctctc

SEQ ID NO: 948212 - DNA, 25 bp, Homo sapien
ggatctgctctcttggttaaagcca

SEQ ID NO: 948213 - DNA, 25 bp, Homo sapien
gatctgctctcttggttaaagccac

SEQ ID NO: 948214 - DNA, 25 bp, Homo sapien
ggaaatttcaggtcgattcaatgag

SEQ ID NO: 948215 - DNA, 25 bp, Homo sapien
tctcctaatatgagttagagcagcc

SEQ ID NO: 948216 - DNA, 25 bp, Homo sapien
caatgagtctatgctccacaggagc

SEQ ID NO: 948217 - DNA, 25 bp, Homo sapien
tgtgtaagtcatcaatagcgtttgc

SEQ ID NO: 948218 - DNA, 25 bp, Homo sapien
gagtacagcagccaaacggtgagct

SEQ ID NO: 948219 - DNA, 25 bp, Homo sapien
gactgattgccttttgagcctcagc

SEQ ID NO: 948220 - DNA, 25 bp, Homo sapien
caaacggtgagcttagtcccatcca

SEQ ID NO: 948221 - DNA, 25 bp, Homo sapien
gagtacagcagccaaacggtagaga

SEQ ID NO: 948222 - DNA, 25 bp, Homo sapien
gttgtataggcttgattagagggct

SEQ ID NO: 948223 - DNA, 25 bp, Homo sapien
gggctgccttcgtgaacttaaatta

SEQ ID NO: 948224 - DNA, 25 bp, Homo sapien
ctaagaagttgtataggcttgatta

SEQ ID NO: 948225 - DNA, 25 bp, Homo sapien
caagtgattgggactaaatatggta

SEQ ID NO: 948226 - DNA, 25 bp, Homo sapien
tggaagaagccggagtcaacaacca

SEQ ID NO: 948227 - DNA, 25 bp, Homo sapien
gcggagcccttgaaacgtaatagga

SEQ ID NO: 948228 - DNA, 25 bp, Homo sapien
caagtgggagtgtccggcccacaaa

SEQ ID NO: 948229 - DNA, 25 bp, Homo sapien
caaagtttccgctgcgaggtcgggc

SEQ ID NO: 948230 - DNA, 25 bp, Homo sapien
attcgccccggttgcgggcgactgc

SEQ ID NO: 948231 - DNA, 25 bp, Homo sapien
gactgcgggacccactgactggctg

SEQ ID NO: 948232 - DNA, 25 bp, Homo sapien
ggcggctcacttctagtcccggcgg

SEQ ID NO: 948233 - DNA, 25 bp, Homo sapien
tacggccaggcagcgtgcgttcctg

SEQ ID NO: 948234 - DNA, 25 bp, Homo sapien
gctacgatcacgctgttgcactcca

SEQ ID NO: 948235 - DNA, 25 bp, Homo sapien
tcctggtggacttgagctacgatca

SEQ ID NO: 948236 - DNA, 25 bp, Homo sapien
aaagttttattgacgagcactttat

SEQ ID NO: 948237 - DNA, 25 bp, Homo sapien
tattgacgagcactttattcatcag

SEQ ID NO: 948238 - DNA, 25 bp, Homo sapien
agtagagagggtgttatgggcgggt

SEQ ID NO: 948239 - DNA, 25 bp, Homo sapien
gtagagagggtgttatgggcgggtc

SEQ ID NO: 948240 - DNA, 25 bp, Homo sapien
cctctgctattatcttctgaaaaag

SEQ ID NO: 948241 - DNA, 25 bp, Homo sapien
gttgatccagaattatgtgcctggg

SEQ ID NO: 948242 - DNA, 25 bp, Homo sapien
cccacttggtcaggatacataattt

SEQ ID NO: 948243 - DNA, 25 bp, Homo sapien
tgaatgggtgttgaagtttgtcaga

SEQ ID NO: 948244 - DNA, 25 bp, Homo sapien
gaactgatctccatcactattctag

SEQ ID NO: 948245 - DNA, 25 bp, Homo sapien
tagtgcaatcaaataggacagttga

SEQ ID NO: 948246 - DNA, 25 bp, Homo sapien
atgtatatttcagcccaaaagccag

SEQ ID NO: 948247 - DNA, 25 bp, Homo sapien
taaatatagagggattactgctgca

SEQ ID NO: 948248 - DNA, 25 bp, Homo sapien
aatgaaaaggttctcagacatttgg

SEQ ID NO: 948249 - DNA, 25 bp, Homo sapien
gacggtgctgttgtactctggccct

SEQ ID NO: 948250 - DNA, 25 bp, Homo sapien
tgatggcatccttcttcctcgttag

SEQ ID NO: 948251 - DNA, 25 bp, Homo sapien
cgttagtgtttcatcacaggatttt

SEQ ID NO: 948252 - DNA, 25 bp, Homo sapien
ctgagtcctggattgttctgtgggt

SEQ ID NO: 948253 - DNA, 25 bp, Homo sapien
gagcagagcttctgttctgtcatca

SEQ ID NO: 948254 - DNA, 25 bp, Homo sapien
tttggatgcagcctgccgtccctga

SEQ ID NO: 948255 - DNA, 25 bp, Homo sapien
ctcagctgtgaatactttggatgca

SEQ ID NO: 948256 - DNA, 25 bp, Homo sapien
ctgggtgcctattgacattattcga

SEQ ID NO: 948257 - DNA, 25 bp, Homo sapien
gaattgcttgacgtgtggcccatga

SEQ ID NO: 948258 - DNA, 25 bp, Homo sapien
tcaagtctgccttttgtagcaatgg

SEQ ID NO: 948259 - DNA, 25 bp, Homo sapien
gaagatgggagaatacagtagagaa

SEQ ID NO: 948260 - DNA, 25 bp, Homo sapien
tgaaaggtttaagaatagggccatg

SEQ ID NO: 948261 - DNA, 25 bp, Homo sapien
tggatgatgaaaggtttaagaatag

SEQ ID NO: 948262 - DNA, 25 bp, Homo sapien
aaggtttaagaatagggccatggtg

SEQ ID NO: 948263 - DNA, 25 bp, Homo sapien
atgatgaaaggtttaagaatagggc

SEQ ID NO: 948264 - DNA, 25 bp, Homo sapien
caaatcttctgccagttaaggagtc

SEQ ID NO: 948265 - DNA, 25 bp, Homo sapien
tctaatggctgttcatgtaggtttt

SEQ ID NO: 948266 - DNA, 25 bp, Homo sapien
ggattggtttttctaatggctgttc

SEQ ID NO: 948267 - DNA, 25 bp, Homo sapien
tctgccagttaaggagtctgtgtgg

SEQ ID NO: 948268 - DNA, 25 bp, Homo sapien
tttctacgtgggctgatactgtaag

SEQ ID NO: 948269 - DNA, 25 bp, Homo sapien
ggacaatctattattttatcagccc

SEQ ID NO: 948270 - DNA, 25 bp, Homo sapien
tgaatggaaatgcaaacagactccc

SEQ ID NO: 948271 - DNA, 25 bp, Homo sapien
aaggcctgctgctctactagctttt

SEQ ID NO: 948272 - DNA, 25 bp, Homo sapien
ctgggtccagatgcaagaggtccat

SEQ ID NO: 948273 - DNA, 25 bp, Homo sapien
gtgtttctatcctgaacactacaaa

SEQ ID NO: 948274 - DNA, 25 bp, Homo sapien
tgaacactacaaaccattcagagaa

SEQ ID NO: 948275 - DNA, 25 bp, Homo sapien
tattattcctgggtccagatgcaag

SEQ ID NO: 948276 - DNA, 25 bp, Homo sapien
tccatgggcccacctctggcttcag

SEQ ID NO: 948277 - DNA, 25 bp, Homo sapien
aatttctctcaagggagacgcttcc

SEQ ID NO: 948278 - DNA, 25 bp, Homo sapien
tataatttctctcaagggagacgct

SEQ ID NO: 948279 - DNA, 25 bp, Homo sapien
agatacacatccatgggcccacctc

SEQ ID NO: 948280 - DNA, 25 bp, Homo sapien
ttaattgagtagcatgggaaccagg

SEQ ID NO: 948281 - DNA, 25 bp, Homo sapien
tctccgggagaaactactgctaaca

SEQ ID NO: 948282 - DNA, 25 bp, Homo sapien
atacagggaagagatacagaggcac

SEQ ID NO: 948283 - DNA, 25 bp, Homo sapien
gattgtggtatgtggagccctctaa

SEQ ID NO: 948284 - DNA, 25 bp, Homo sapien
gtcaacaagccttacagaactaaat

SEQ ID NO: 948285 - DNA, 25 bp, Homo sapien
gggcaaatgtttcccggtcatggag

SEQ ID NO: 948286 - DNA, 25 bp, Homo sapien
tacaggaattcctgtcagatgggtc

SEQ ID NO: 948287 - DNA, 25 bp, Homo sapien
ggaggcttataccatcggtgttgga

SEQ ID NO: 948288 - DNA, 25 bp, Homo sapien
taatggatatggcagaaattaaaca

SEQ ID NO: 948289 - DNA, 25 bp, Homo sapien
aaatatagccgaggcacagtgttag

SEQ ID NO: 948290 - DNA, 25 bp, Homo sapien
taaacataagaagcattcaaaacaa

SEQ ID NO: 948291 - DNA, 25 bp, Homo sapien
agatccagaaatatagccgaggcac

SEQ ID NO: 948292 - DNA, 25 bp, Homo sapien
caacaagatgactgatagctaaact

SEQ ID NO: 948293 - DNA, 25 bp, Homo sapien
aaacaactaggctggctttgttctc

SEQ ID NO: 948294 - DNA, 25 bp, Homo sapien
tctcagcaacaagatgactgatagc

SEQ ID NO: 948295 - DNA, 25 bp, Homo sapien
ctggctttgttctcagcaacaagat

SEQ ID NO: 948296 - DNA, 25 bp, Homo sapien
gccacacagaaagctaggaagtata

SEQ ID NO: 948297 - DNA, 25 bp, Homo sapien
tgtgggcaccatatgaccagacttc

SEQ ID NO: 948298 - DNA, 25 bp, Homo sapien
gtttacttcaatagatgtgggcacc

SEQ ID NO: 948299 - DNA, 25 bp, Homo sapien
catgtgccttgaagacagagagcca

SEQ ID NO: 948300 - DNA, 25 bp, Homo sapien
gggccagattgtagaggtcacccga

SEQ ID NO: 948301 - DNA, 25 bp, Homo sapien
ggtcacccgaatggcagccaggcag

SEQ ID NO: 948302 - DNA, 25 bp, Homo sapien
ggctcagtggagcagtggaaagagt

SEQ ID NO: 948303 - DNA, 25 bp, Homo sapien
ttgtagaggtcacccgaatggcagc

SEQ ID NO: 948304 - DNA, 25 bp, Homo sapien
atcctaactcttccgaatgactcaa

SEQ ID NO: 948305 - DNA, 25 bp, Homo sapien
cctaactcttccgaatgactcaatt

SEQ ID NO: 948306 - DNA, 25 bp, Homo sapien
aactcttccgaatgactcaatttca

SEQ ID NO: 948307 - DNA, 25 bp, Homo sapien
aaatcctaactcttccgaatgactc

SEQ ID NO: 948308 - DNA, 25 bp, Homo sapien
ccacttcttttttcttgaggtggag

SEQ ID NO: 948309 - DNA, 25 bp, Homo sapien
tgcccacttcttttttcttgaggtg

SEQ ID NO: 948310 - DNA, 25 bp, Homo sapien
gggcttcttatgctgggtctcctcc

SEQ ID NO: 948311 - DNA, 25 bp, Homo sapien
gacccaggctaactctgttgtcgct

SEQ ID NO: 948312 - DNA, 25 bp, Homo sapien
caaaggccggatgcttactctcatg

SEQ ID NO: 948313 - DNA, 25 bp, Homo sapien
ttgtcgctctggagttgggcatctc

SEQ ID NO: 948314 - DNA, 25 bp, Homo sapien
tagttgggttatagccacatacccg

SEQ ID NO: 948315 - DNA, 25 bp, Homo sapien
tgtggatcactccaacagctgcttg

SEQ ID NO: 948316 - DNA, 25 bp, Homo sapien
tcggtgataccagcgttcttccagc

SEQ ID NO: 948317 - DNA, 25 bp, Homo sapien
gacaatttaccagtgcccttctcct

SEQ ID NO: 948318 - DNA, 25 bp, Homo sapien
ttccagtttccgcgatcttcctttc

SEQ ID NO: 948319 - DNA, 25 bp, Homo sapien
tccagtttccgcgatcttcctttcc

SEQ ID NO: 948320 - DNA, 25 bp, Homo sapien
ggctggcacccagagtaggcatcta

SEQ ID NO: 948321 - DNA, 25 bp, Homo sapien
tgtacaaacagacagccttcgagat

SEQ ID NO: 948322 - DNA, 25 bp, Homo sapien
taggcatctaggaaaacagccgcag

SEQ ID NO: 948323 - DNA, 25 bp, Homo sapien
gagatgctggtgttgtttcttaatc

SEQ ID NO: 948324 - DNA, 25 bp, Homo sapien
cttcagagctgcatagcatcatctg

SEQ ID NO: 948325 - DNA, 25 bp, Homo sapien
tccttcagagctgcatagcatcatc

SEQ ID NO: 948326 - DNA, 25 bp, Homo sapien
tcagagctgcatagcatcatctgat

SEQ ID NO: 948327 - DNA, 25 bp, Homo sapien
agagctgcatagcatcatctgatgt

SEQ ID NO: 948328 - DNA, 25 bp, Homo sapien
gccacagaagtctcagtaggtctga

SEQ ID NO: 948329 - DNA, 25 bp, Homo sapien
agctacgatgacatccagagttgat

SEQ ID NO: 948330 - DNA, 25 bp, Homo sapien
taggtctgaaagctacgatgacatc

SEQ ID NO: 948331 - DNA, 25 bp, Homo sapien
ccagagttgatgttaagtccacttc

SEQ ID NO: 948332 - DNA, 25 bp, Homo sapien
ttttgttttcatctcggagactgca

SEQ ID NO: 948333 - DNA, 25 bp, Homo sapien
tgttttcatctcggagactgcatat

SEQ ID NO: 948334 - DNA, 25 bp, Homo sapien
tttgttttcatctcggagactgcat

SEQ ID NO: 948335 - DNA, 25 bp, Homo sapien
ttgttttcatctcggagactgcata

SEQ ID NO: 948336 - DNA, 25 bp, Homo sapien
tgggtataaatcctttctgttttca

SEQ ID NO: 948337 - DNA, 25 bp, Homo sapien
tcctattgggttggccatggaaccc

SEQ ID NO: 948338 - DNA, 25 bp, Homo sapien
ttcctattgggttggccatggaacc

SEQ ID NO: 948339 - DNA, 25 bp, Homo sapien
aggtcaaacagagcctacccatttt

SEQ ID NO: 948340 - DNA, 25 bp, Homo sapien
aaacagagcctacccattttgggat

SEQ ID NO: 948341 - DNA, 25 bp, Homo sapien
tcaaacagagcctacccattttggg

SEQ ID NO: 948342 - DNA, 25 bp, Homo sapien
acaaggtcaaacagagcctacccat

SEQ ID NO: 948343 - DNA, 25 bp, Homo sapien
tcacccagaatccaatcccacagat

SEQ ID NO: 948344 - DNA, 25 bp, Homo sapien
agaatccaatcccacagatccctgg

SEQ ID NO: 948345 - DNA, 25 bp, Homo sapien
gatccctgggactcttccagttttc

SEQ ID NO: 948346 - DNA, 25 bp, Homo sapien
ggatgcattgagagcagttttcagt

SEQ ID NO: 948347 - DNA, 25 bp, Homo sapien
aacccacactgaattacacgctgac

SEQ ID NO: 948348 - DNA, 25 bp, Homo sapien
aactcggcacggtattttcggtcag

SEQ ID NO: 948349 - DNA, 25 bp, Homo sapien
ggtcaggtcacaactgcgtaatggg

SEQ ID NO: 948350 - DNA, 25 bp, Homo sapien
cactgaattacacgctgaccaaagc

SEQ ID NO: 948351 - DNA, 25 bp, Homo sapien
tattttggatatcctggcatacatc

SEQ ID NO: 948352 - DNA, 25 bp, Homo sapien
tagtattttggatatcctggcatac

SEQ ID NO: 948353 - DNA, 25 bp, Homo sapien
agtattttggatatcctggcataca

SEQ ID NO: 948354 - DNA, 25 bp, Homo sapien
ttttggatatcctggcatacatcac

SEQ ID NO: 948355 - DNA, 25 bp, Homo sapien
tgtagttcctgggacatccaagatg

SEQ ID NO: 948356 - DNA, 25 bp, Homo sapien
ggacatccaagatgacacagactga

SEQ ID NO: 948357 - DNA, 25 bp, Homo sapien
catccaagatgacacagactgacat

SEQ ID NO: 948358 - DNA, 25 bp, Homo sapien
gttcctgggacatccaagatgacac

SEQ ID NO: 948359 - DNA, 25 bp, Homo sapien
ggcacatgctctatgttaccattat

SEQ ID NO: 948360 - DNA, 25 bp, Homo sapien
cattatatttgcgtaactgatccat

SEQ ID NO: 948361 - DNA, 25 bp, Homo sapien
taccattatatttgcgtaactgatc

SEQ ID NO: 948362 - DNA, 25 bp, Homo sapien
gttgcttcaggcacatgctctatgt

SEQ ID NO: 948363 - DNA, 25 bp, Homo sapien
tgaatagggggttgtaagctttgat

SEQ ID NO: 948364 - DNA, 25 bp, Homo sapien
gttgtaagctttgattatgctttgc

SEQ ID NO: 948365 - DNA, 25 bp, Homo sapien
gggttgtaagctttgattatgcttt

SEQ ID NO: 948366 - DNA, 25 bp, Homo sapien
tagggggttgtaagctttgattatg

SEQ ID NO: 948367 - DNA, 25 bp, Homo sapien
aaattcctcctgctctaatggacat

SEQ ID NO: 948368 - DNA, 25 bp, Homo sapien
tggatctctgggaccacttgtcagg

SEQ ID NO: 948369 - DNA, 25 bp, Homo sapien
tgtcaggaacaattcagggaactgc

SEQ ID NO: 948370 - DNA, 25 bp, Homo sapien
tctgggaccacttgtcaggaacaat

SEQ ID NO: 948371 - DNA, 25 bp, Homo sapien
cttcgacgcctataacctgctgccg

SEQ ID NO: 948372 - DNA, 25 bp, Homo sapien
cgacgcctataacctgctgccgctt

SEQ ID NO: 948373 - DNA, 25 bp, Homo sapien
tcactgtagtcactttggctgcagg

SEQ ID NO: 948374 - DNA, 25 bp, Homo sapien
ctcactgtagtcactttggctgcag

SEQ ID NO: 948375 - DNA, 25 bp, Homo sapien
atttgaccatagttccagacatcat

SEQ ID NO: 948376 - DNA, 25 bp, Homo sapien
tgtgggaaccgcactgcttagggct

SEQ ID NO: 948377 - DNA, 25 bp, Homo sapien
ttgcctctgatgatggctattgcct

SEQ ID NO: 948378 - DNA, 25 bp, Homo sapien
gatgatggctattgcctgcctgaag

SEQ ID NO: 948379 - DNA, 25 bp, Homo sapien
ccgcactgcttagggcttgtggctg

SEQ ID NO: 948380 - DNA, 25 bp, Homo sapien
cacgtgctgtcttccgttggagaac

SEQ ID NO: 948381 - DNA, 25 bp, Homo sapien
cctgggcacggagaatgcatttttc

SEQ ID NO: 948382 - DNA, 25 bp, Homo sapien
cagagacaaagcacacgtattcggg

SEQ ID NO: 948383 - DNA, 25 bp, Homo sapien
catgacaccggctgtcacgtgctgt

SEQ ID NO: 948384 - DNA, 25 bp, Homo sapien
agatgatattgggtccattggtaaa

SEQ ID NO: 948385 - DNA, 25 bp, Homo sapien
ggtccattggtaaatctgaatctga

SEQ ID NO: 948386 - DNA, 25 bp, Homo sapien
tgggtccattggtaaatctgaatct

SEQ ID NO: 948387 - DNA, 25 bp, Homo sapien
gatattgggtccattggtaaatctg

SEQ ID NO: 948388 - DNA, 25 bp, Homo sapien
tgttgagtgattttggtagtttggg

SEQ ID NO: 948389 - DNA, 25 bp, Homo sapien
ggtgtcactccacatgtcatcatct

SEQ ID NO: 948390 - DNA, 25 bp, Homo sapien
tttggtggtgtcactccacatgtca

SEQ ID NO: 948391 - DNA, 25 bp, Homo sapien
gaggtctgccccagatttgacccat

SEQ ID NO: 948392 - DNA, 25 bp, Homo sapien
tcttccctatagctcaggtagacag

SEQ ID NO: 948393 - DNA, 25 bp, Homo sapien
aatatgacccatcttctctgacagc

SEQ ID NO: 948394 - DNA, 25 bp, Homo sapien
caagtatcaggagaagtaagccagt

SEQ ID NO: 948395 - DNA, 25 bp, Homo sapien
aacatgaccagttaccctcagaggg

SEQ ID NO: 948396 - DNA, 25 bp, Homo sapien
tatcagtgcagtttctaaatagtag

SEQ ID NO: 948397 - DNA, 25 bp, Homo sapien
gggaaaacagtagtcgattcaggag

SEQ ID NO: 948398 - DNA, 25 bp, Homo sapien
tatcttctgccaaagttgctggaag

SEQ ID NO: 948399 - DNA, 25 bp, Homo sapien
tcaggagaagtcaagaaatatcagt

SEQ ID NO: 948400 - DNA, 25 bp, Homo sapien
ttattagctgcatgatcaatgtgaa

SEQ ID NO: 948401 - DNA, 25 bp, Homo sapien
tattggcaattctccccgctattcc

SEQ ID NO: 948402 - DNA, 25 bp, Homo sapien
catttccaggtatgtctatgagggt

SEQ ID NO: 948403 - DNA, 25 bp, Homo sapien
taggcatcatcaatccactgagggc

SEQ ID NO: 948404 - DNA, 25 bp, Homo sapien
agaagactgccctccccaatatgag

SEQ ID NO: 948405 - DNA, 25 bp, Homo sapien
tgctggattcagtaaagaagactgc

SEQ ID NO: 948406 - DNA, 25 bp, Homo sapien
gaaccatccttgaatactaaggata

SEQ ID NO: 948407 - DNA, 25 bp, Homo sapien
cttttattgatgtatctgtctgatt

SEQ ID NO: 948408 - DNA, 25 bp, Homo sapien
aattctactcagtcatgatgaatga

SEQ ID NO: 948409 - DNA, 25 bp, Homo sapien
gttttatgcatctaggaatttaacc

SEQ ID NO: 948410 - DNA, 25 bp, Homo sapien
tttcaatctctactaaatttgtctg

SEQ ID NO: 948411 - DNA, 25 bp, Homo sapien
tcagtatgccaaattccagaatttc

SEQ ID NO: 948412 - DNA, 25 bp, Homo sapien
caatctctactaaatttgtctgata

SEQ ID NO: 948413 - DNA, 25 bp, Homo sapien
cttcagtatgccaaattccagaatt

SEQ ID NO: 948414 - DNA, 25 bp, Homo sapien
catttatacagccaacggacatatg

SEQ ID NO: 948415 - DNA, 25 bp, Homo sapien
caaaagtgggtgaatgaaatgaaca

SEQ ID NO: 948416 - DNA, 25 bp, Homo sapien
ttcccaaaggattgtaagtcattct

SEQ ID NO: 948417 - DNA, 25 bp, Homo sapien
caaacaatgccatcaaaagtgggtg

SEQ ID NO: 948418 - DNA, 25 bp, Homo sapien
gagatacctccttaaaattgaggca

SEQ ID NO: 948419 - DNA, 25 bp, Homo sapien
tcatggtaaagtccacctggtatag

SEQ ID NO: 948420 - DNA, 25 bp, Homo sapien
tggagatacctccttaaaattgagg

SEQ ID NO: 948421 - DNA, 25 bp, Homo sapien
ccacctggtatagcatgttgcaaag

SEQ ID NO: 948422 - DNA, 25 bp, Homo sapien
tgtaacttgccattaggtgtaaccc

SEQ ID NO: 948423 - DNA, 25 bp, Homo sapien
aagcctccaaaagcagcaactgtgt

SEQ ID NO: 948424 - DNA, 25 bp, Homo sapien
cctctaaatgacgtggaaggatgaa

SEQ ID NO: 948425 - DNA, 25 bp, Homo sapien
taaccctttactggcttgttctggc

SEQ ID NO: 948426 - DNA, 25 bp, Homo sapien
tttttgttggagcaagttctggttc

SEQ ID NO: 948427 - DNA, 25 bp, Homo sapien
ttgttggagcaagttctggttctct

SEQ ID NO: 948428 - DNA, 25 bp, Homo sapien
tttgttggagcaagttctggttctc

SEQ ID NO: 948429 - DNA, 25 bp, Homo sapien
tgttggagcaagttctggttctctg

SEQ ID NO: 948430 - DNA, 25 bp, Homo sapien
ccctcagggagttcaaggtctggca

SEQ ID NO: 948431 - DNA, 25 bp, Homo sapien
taatggaatatggttgctactgtag

SEQ ID NO: 948432 - DNA, 25 bp, Homo sapien
ccaggccatgttaggtggcagagat

SEQ ID NO: 948433 - DNA, 25 bp, Homo sapien
tgttcgttcgtaaactgccaggcca

SEQ ID NO: 948434 - DNA, 25 bp, Homo sapien
ctcagctgtaactttacatgaccca

SEQ ID NO: 948435 - DNA, 25 bp, Homo sapien
tgagttaatgaaggcctggactctg

SEQ ID NO: 948436 - DNA, 25 bp, Homo sapien
tacatgacccatgccggatagatgg

SEQ ID NO: 948437 - DNA, 25 bp, Homo sapien
gcttctgtagttctcgtgtgagtta

SEQ ID NO: 948438 - DNA, 25 bp, Homo sapien
tatctagccggtccaatcctttgga

SEQ ID NO: 948439 - DNA, 25 bp, Homo sapien
tataccccaagccatcaataagctg

SEQ ID NO: 948440 - DNA, 25 bp, Homo sapien
caacttggtgctatagaagggcccc

SEQ ID NO: 948441 - DNA, 25 bp, Homo sapien
tatgtagacagcaacaagacttctg

SEQ ID NO: 948442 - DNA, 25 bp, Homo sapien
tagatgggcacctcgcccaatgtgt

SEQ ID NO: 948443 - DNA, 25 bp, Homo sapien
ggaaattccgctgcacaagacttga

SEQ ID NO: 948444 - DNA, 25 bp, Homo sapien
cctctttgtcttgtgagttgatgag

SEQ ID NO: 948445 - DNA, 25 bp, Homo sapien
caagacttgaaacaatccctctcct

SEQ ID NO: 948446 - DNA, 25 bp, Homo sapien
tgcaggagacacagccatttaggga

SEQ ID NO: 948447 - DNA, 25 bp, Homo sapien
gacacagccatttagggagacagct

SEQ ID NO: 948448 - DNA, 25 bp, Homo sapien
ccatttagggagacagctcagggct

SEQ ID NO: 948449 - DNA, 25 bp, Homo sapien
gacagctcagggctttttctcacag

SEQ ID NO: 948450 - DNA, 25 bp, Homo sapien
gcaccatggttttggagattcctca

SEQ ID NO: 948451 - DNA, 25 bp, Homo sapien
tttctagtagctacagcaccatggt

SEQ ID NO: 948452 - DNA, 25 bp, Homo sapien
catgcattgaagagtctgtgaacgg

SEQ ID NO: 948453 - DNA, 25 bp, Homo sapien
ttgacacactagcacaatctgttgg

SEQ ID NO: 948454 - DNA, 25 bp, Homo sapien
agttgtaaacattcatatccagcta

SEQ ID NO: 948455 - DNA, 25 bp, Homo sapien
ttgtaaacattcatatccagctaga

SEQ ID NO: 948456 - DNA, 25 bp, Homo sapien
gtaaacattcatatccagctagaag

SEQ ID NO: 948457 - DNA, 25 bp, Homo sapien
gttgtaaacattcatatccagctag

SEQ ID NO: 948458 - DNA, 25 bp, Homo sapien
ttccagatccaagcatgacagttta

SEQ ID NO: 948459 - DNA, 25 bp, Homo sapien
gacctgattaattttgcacttaagc

SEQ ID NO: 948460 - DNA, 25 bp, Homo sapien
gcaacttccatgataagttatactt

SEQ ID NO: 948461 - DNA, 25 bp, Homo sapien
catgacagtttaatctccatatcca

SEQ ID NO: 948462 - DNA, 25 bp, Homo sapien
tgtgtactctgaaaggcgcctggtg

SEQ ID NO: 948463 - DNA, 25 bp, Homo sapien
ggtgatgaccacaacaacgccagtg

SEQ ID NO: 948464 - DNA, 25 bp, Homo sapien
tcatggaccggcaggactgagaagc

SEQ ID NO: 948465 - DNA, 25 bp, Homo sapien
gaggagccactagcaacctttgtgc

SEQ ID NO: 948466 - DNA, 25 bp, Homo sapien
gaagaaataatactagccgtaaaca

SEQ ID NO: 948467 - DNA, 25 bp, Homo sapien
cagtaaatagcaggattcacaccca

SEQ ID NO: 948468 - DNA, 25 bp, Homo sapien
tgaaaactgaccaaatgcagcaatt

SEQ ID NO: 948469 - DNA, 25 bp, Homo sapien
gccagattctgtactcctcatcact

SEQ ID NO: 948470 - DNA, 25 bp, Homo sapien
tgccctaccagatgtaaggacttgc

SEQ ID NO: 948471 - DNA, 25 bp, Homo sapien
tgtatatcttgggactagaactgac

SEQ ID NO: 948472 - DNA, 25 bp, Homo sapien
gaataaggtaagatttgccctacca

SEQ ID NO: 948473 - DNA, 25 bp, Homo sapien
tgactagggtagtgtggtactaacc

SEQ ID NO: 948474 - DNA, 25 bp, Homo sapien
tatgacgcagaacttgctttaagat

SEQ ID NO: 948475 - DNA, 25 bp, Homo sapien
gtcctagtgcaataatatgacgcag

SEQ ID NO: 948476 - DNA, 25 bp, Homo sapien
aagtggagggaaatacatgacatga

SEQ ID NO: 948477 - DNA, 25 bp, Homo sapien
gaaactgggcaatgagtatgtggaa

SEQ ID NO: 948478 - DNA, 25 bp, Homo sapien
gaggtactatcagaaaccactcagt

SEQ ID NO: 948479 - DNA, 25 bp, Homo sapien
tctctggttggacatccctctagct

SEQ ID NO: 948480 - DNA, 25 bp, Homo sapien
gaaaggcagcttgatcctagcctcc

SEQ ID NO: 948481 - DNA, 25 bp, Homo sapien
aatcctctaccccagaaaggcagct

SEQ ID NO: 948482 - DNA, 25 bp, Homo sapien
cgaatctctaggactcttgttcttg

SEQ ID NO: 948483 - DNA, 25 bp, Homo sapien
ccagtgtatgcatcatccttgtacc

SEQ ID NO: 948484 - DNA, 25 bp, Homo sapien
acagccaaggccgaatctctaggac

SEQ ID NO: 948485 - DNA, 25 bp, Homo sapien
tatgcatcatccttgtaccccagat

SEQ ID NO: 948486 - DNA, 25 bp, Homo sapien
cctgcctgtgtcctagagatactgt

SEQ ID NO: 948487 - DNA, 25 bp, Homo sapien
gaggcttgccctctaggacttcaac

SEQ ID NO: 948488 - DNA, 25 bp, Homo sapien
ggctgttccagatcacccatgtgac

SEQ ID NO: 948489 - DNA, 25 bp, Homo sapien
gatgcaaggcctatgttcgtccgga

SEQ ID NO: 948490 - DNA, 25 bp, Homo sapien
tgttgaaccttgttccaggctgata

SEQ ID NO: 948491 - DNA, 25 bp, Homo sapien
gataacataaagttggcccacttgg

SEQ ID NO: 948492 - DNA, 25 bp, Homo sapien
cacgtgattattagctcttaggcca

SEQ ID NO: 948493 - DNA, 25 bp, Homo sapien
ggatacataagataagtggcctgac

SEQ ID NO: 948494 - DNA, 25 bp, Homo sapien
tgactagtacataactgagccagga

SEQ ID NO: 948495 - DNA, 25 bp, Homo sapien
actgggctaaatgctgtacaaaatt

SEQ ID NO: 948496 - DNA, 25 bp, Homo sapien
gctaagtaacatgcctgaggcaaca

SEQ ID NO: 948497 - DNA, 25 bp, Homo sapien
taatcctgcaagttacatagtcctt

SEQ ID NO: 948498 - DNA, 25 bp, Homo sapien
tcaggtttattgacagatggcggaa

SEQ ID NO: 948499 - DNA, 25 bp, Homo sapien
cttttttaaccacccagtgacagag

SEQ ID NO: 948500 - DNA, 25 bp, Homo sapien
tactggagttacatgagcaaatggc

SEQ ID NO: 948501 - DNA, 25 bp, Homo sapien
aaatggcccagccttaatcttaagg

SEQ ID NO: 948502 - DNA, 25 bp, Homo sapien
agtacaactgctccaaggctcttgg

SEQ ID NO: 948503 - DNA, 25 bp, Homo sapien
gactcagtgagaatagcaagcccca

SEQ ID NO: 948504 - DNA, 25 bp, Homo sapien
aagctgcatgcacgacattttggga

SEQ ID NO: 948505 - DNA, 25 bp, Homo sapien
agtaaagacaatccccacccatgag

SEQ ID NO: 948506 - DNA, 25 bp, Homo sapien
gcccctgcaagatgcaataacactt

SEQ ID NO: 948507 - DNA, 25 bp, Homo sapien
tcctgcccctgcaagatgcaataac

SEQ ID NO: 948508 - DNA, 25 bp, Homo sapien
tgcccctgcaagatgcaataacact

SEQ ID NO: 948509 - DNA, 25 bp, Homo sapien
ctgcaagatgcaataacacttcctc

SEQ ID NO: 948510 - DNA, 25 bp, Homo sapien
aataatagctctccaatcctgtgca

SEQ ID NO: 948511 - DNA, 25 bp, Homo sapien
ggtttcacagaccaatatcatcagg

SEQ ID NO: 948512 - DNA, 25 bp, Homo sapien
ccttttggtggagaacatagcagcc

SEQ ID NO: 948513 - DNA, 25 bp, Homo sapien
gacatgactttccactgaacactgg

SEQ ID NO: 948514 - DNA, 25 bp, Homo sapien
ctggaaagctgtgcacaagcacgag

SEQ ID NO: 948515 - DNA, 25 bp, Homo sapien
gaaagctgtgcacaagcacgagggt

SEQ ID NO: 948516 - DNA, 25 bp, Homo sapien
cacgagggtcctccatggaggaaga

SEQ ID NO: 948517 - DNA, 25 bp, Homo sapien
caggggtgggtgacatggaaggctt

SEQ ID NO: 948518 - DNA, 25 bp, Homo sapien
cacaatggtactttagcagatcaaa

SEQ ID NO: 948519 - DNA, 25 bp, Homo sapien
aatggtactttagcagatcaaaatg

SEQ ID NO: 948520 - DNA, 25 bp, Homo sapien
gccagcacaatggtactttagcaga

SEQ ID NO: 948521 - DNA, 25 bp, Homo sapien
cagcacaatggtactttagcagatc

SEQ ID NO: 948522 - DNA, 25 bp, Homo sapien
tgatctgattgacctcttttgccag

SEQ ID NO: 948523 - DNA, 25 bp, Homo sapien
ttgtgactcacaatcaagaagaaag

SEQ ID NO: 948524 - DNA, 25 bp, Homo sapien
ccattgttataaaaggtctctactg

SEQ ID NO: 948525 - DNA, 25 bp, Homo sapien
ggcaaagcccatctcccattgttat

SEQ ID NO: 948526 - DNA, 25 bp, Homo sapien
ggaatcaggtgaaatctactccaga

SEQ ID NO: 948527 - DNA, 25 bp, Homo sapien
ggctcaggaactaagtaaattacag

SEQ ID NO: 948528 - DNA, 25 bp, Homo sapien
tactccagatcatttaacctgagcc

SEQ ID NO: 948529 - DNA, 25 bp, Homo sapien
gttgtactaaatgagcctgctatgt

SEQ ID NO: 948530 - DNA, 25 bp, Homo sapien
ttaggttacttcaacacttcttctg

SEQ ID NO: 948531 - DNA, 25 bp, Homo sapien
tattaagcaggtcaagtttaggtta

SEQ ID NO: 948532 - DNA, 25 bp, Homo sapien
atgtattaagcaggtcaagtttagg

SEQ ID NO: 948533 - DNA, 25 bp, Homo sapien
taggttacttcaacacttcttctgg

SEQ ID NO: 948534 - DNA, 25 bp, Homo sapien
tctccatcttataaccatgtttctc

SEQ ID NO: 948535 - DNA, 25 bp, Homo sapien
ctatgaagtctccatcttataacca

SEQ ID NO: 948536 - DNA, 25 bp, Homo sapien
agtctccatcttataaccatgtttc

SEQ ID NO: 948537 - DNA, 25 bp, Homo sapien
tgaagtctccatcttataaccatgt

SEQ ID NO: 948538 - DNA, 25 bp, Homo sapien
ctaagataaaacagaaagaacatca

SEQ ID NO: 948539 - DNA, 25 bp, Homo sapien
catcactatcaaacctttagggatt

SEQ ID NO: 948540 - DNA, 25 bp, Homo sapien
taacctcaggcaaagtacacatcac

SEQ ID NO: 948541 - DNA, 25 bp, Homo sapien
gacttactgctatccttcaaatact

SEQ ID NO: 948542 - DNA, 25 bp, Homo sapien
tattccaatgcaaacacatgaccgg

SEQ ID NO: 948543 - DNA, 25 bp, Homo sapien
cactaataatcatgaggctgctgag

SEQ ID NO: 948544 - DNA, 25 bp, Homo sapien
tcttgctgccaatcttgagggaatg

SEQ ID NO: 948545 - DNA, 25 bp, Homo sapien
ggctggtcactaactgcatgtataa

SEQ ID NO: 948546 - DNA, 25 bp, Homo sapien
aaactggagattatagtatctgccc

SEQ ID NO: 948547 - DNA, 25 bp, Homo sapien
tcagaatgactttgagttacctgga

SEQ ID NO: 948548 - DNA, 25 bp, Homo sapien
cggaaagagaaagacgaatgtggaa

SEQ ID NO: 948549 - DNA, 25 bp, Homo sapien
ctggcctatactggcttcttagagt

SEQ ID NO: 948550 - DNA, 25 bp, Homo sapien
gggcctgcgacatggacagttttta

SEQ ID NO: 948551 - DNA, 25 bp, Homo sapien
tcaagatttatatacctcaggcaaa

SEQ ID NO: 948552 - DNA, 25 bp, Homo sapien
gaccaaataacatcagacaacagta

SEQ ID NO: 948553 - DNA, 25 bp, Homo sapien
tggcaatgtggcaacaatcttagtg

SEQ ID NO: 948554 - DNA, 25 bp, Homo sapien
taaagcaaggattgtgcgaggctgt

SEQ ID NO: 948555 - DNA, 25 bp, Homo sapien
gtagcttttaagaggttaatcatct

SEQ ID NO: 948556 - DNA, 25 bp, Homo sapien
tcctaaggataagaaatagcaaata

SEQ ID NO: 948557 - DNA, 25 bp, Homo sapien
aaaagttgtatgcaattacacaaag

SEQ ID NO: 948558 - DNA, 25 bp, Homo sapien
tgttcatgtttagaatcacaggaga

SEQ ID NO: 948559 - DNA, 25 bp, Homo sapien
caattatcctcccagacatgtgcat

SEQ ID NO: 948560 - DNA, 25 bp, Homo sapien
agtcatcctctacattgtcatcatc

SEQ ID NO: 948561 - DNA, 25 bp, Homo sapien
gtcatcatcccaattatcctcccag

SEQ ID NO: 948562 - DNA, 25 bp, Homo sapien
gtaactgattagagaagtcatcctc

SEQ ID NO: 948563 - DNA, 25 bp, Homo sapien
caagttgaatggcaggaagatacca

SEQ ID NO: 948564 - DNA, 25 bp, Homo sapien
gaaaaaggaactggctcatgaagag

SEQ ID NO: 948565 - DNA, 25 bp, Homo sapien
gtagaccaaactgtaagccaccact

SEQ ID NO: 948566 - DNA, 25 bp, Homo sapien
taaacaaagacgaaagagctggcca

SEQ ID NO: 948567 - DNA, 25 bp, Homo sapien
tgagtatgataatgaagccacacca

SEQ ID NO: 948568 - DNA, 25 bp, Homo sapien
cagcatcactatactcatgagtatg

SEQ ID NO: 948569 - DNA, 25 bp, Homo sapien
tactcatgagtatgataatgaagcc

SEQ ID NO: 948570 - DNA, 25 bp, Homo sapien
aaacagcatcactatactcatgagt

SEQ ID NO: 948571 - DNA, 25 bp, Homo sapien
gagtcaagggtatccaatctcaact

SEQ ID NO: 948572 - DNA, 25 bp, Homo sapien
cctgaacctggtagatttgtggctt

SEQ ID NO: 948573 - DNA, 25 bp, Homo sapien
tattcttaagacacgcatgggcaaa

SEQ ID NO: 948574 - DNA, 25 bp, Homo sapien
ctgatggccattgggatcggttcca

SEQ ID NO: 948575 - DNA, 25 bp, Homo sapien
tccaggacagcccaagtatacccaa

SEQ ID NO: 948576 - DNA, 25 bp, Homo sapien
catacatgctaatcactggaaaggc

SEQ ID NO: 948577 - DNA, 25 bp, Homo sapien
gaagagtacactcatccctcggtat

SEQ ID NO: 948578 - DNA, 25 bp, Homo sapien
tagtcagccctctctacaggtgggt

SEQ ID NO: 948579 - DNA, 25 bp, Homo sapien
tccaaactcctaagtacattagagg

SEQ ID NO: 948580 - DNA, 25 bp, Homo sapien
tgtatcattgttctggactaaatct

SEQ ID NO: 948581 - DNA, 25 bp, Homo sapien
catcctcaatatgatggtattcggg

SEQ ID NO: 948582 - DNA, 25 bp, Homo sapien
tgtcagacacagctcaaattctaaa

SEQ ID NO: 948583 - DNA, 25 bp, Homo sapien
tacattgaagataatggaagccagg

SEQ ID NO: 948584 - DNA, 25 bp, Homo sapien
gagcctggacagaacgaagtcaccc

SEQ ID NO: 948585 - DNA, 25 bp, Homo sapien
ggcagcaaagattggttaggaaggg

SEQ ID NO: 948586 - DNA, 25 bp, Homo sapien
caagttgggcaagaagggcacctgt

SEQ ID NO: 948587 - DNA, 25 bp, Homo sapien
tcacggtggctcctcccagtgagga

SEQ ID NO: 948588 - DNA, 25 bp, Homo sapien
cacggtggctcctcccagtgaggaa

SEQ ID NO: 948589 - DNA, 25 bp, Homo sapien
acggtggctcctcccagtgaggaag

SEQ ID NO: 948590 - DNA, 25 bp, Homo sapien
cggtggctcctcccagtgaggaagc

SEQ ID NO: 948591 - DNA, 25 bp, Homo sapien
agcgttagcgcctcgagtgccggcc

SEQ ID NO: 948592 - DNA, 25 bp, Homo sapien
aaacccgaatctggggcgccactga

SEQ ID NO: 948593 - DNA, 25 bp, Homo sapien
acccaagctacctccacacggaggc

SEQ ID NO: 948594 - DNA, 25 bp, Homo sapien
agctgggcccgagcacccaagctac

SEQ ID NO: 948595 - DNA, 25 bp, Homo sapien
ctcgtcgtcttcctctaacagacct

SEQ ID NO: 948596 - DNA, 25 bp, Homo sapien
aactcgtcgtcttcctctaacagac

SEQ ID NO: 948597 - DNA, 25 bp, Homo sapien
caaactcgtcgtcttcctctaacag

SEQ ID NO: 948598 - DNA, 25 bp, Homo sapien
aaactcgtcgtcttcctctaacaga

SEQ ID NO: 948599 - DNA, 25 bp, Homo sapien
gctgacgctaccatagagacttggg

SEQ ID NO: 948600 - DNA, 25 bp, Homo sapien
gtcactaccgcctccgacgctgacg

SEQ ID NO: 948601 - DNA, 25 bp, Homo sapien
aacacctcccagataagcagaaaag

SEQ ID NO: 948602 - DNA, 25 bp, Homo sapien
tcttcctcaaggaaacgccaccgtc

SEQ ID NO: 948603 - DNA, 25 bp, Homo sapien
agaatgtcagcatcttccggcagca

SEQ ID NO: 948604 - DNA, 25 bp, Homo sapien
gaatgtcagcatcttccggcagcat

SEQ ID NO: 948605 - DNA, 25 bp, Homo sapien
ataagaatgtcagcatcttccggca

SEQ ID NO: 948606 - DNA, 25 bp, Homo sapien
caggtcataagttataagaatgtca

SEQ ID NO: 948607 - DNA, 25 bp, Homo sapien
tggtgatatcagaaagcagtctcat

SEQ ID NO: 948608 - DNA, 25 bp, Homo sapien
ttgcctgcttggtgatatcagaaag

SEQ ID NO: 948609 - DNA, 25 bp, Homo sapien
tgcttggtgatatcagaaagcagtc

SEQ ID NO: 948610 - DNA, 25 bp, Homo sapien
gatttcaggggtgccagaagatcct

SEQ ID NO: 948611 - DNA, 25 bp, Homo sapien
ttattagcatccactctgtgttcac

SEQ ID NO: 948612 - DNA, 25 bp, Homo sapien
cccaactcgggatctttattagcat

SEQ ID NO: 948613 - DNA, 25 bp, Homo sapien
tgcagttggcaggtgagctacccaa

SEQ ID NO: 948614 - DNA, 25 bp, Homo sapien
tggccatcggggaaggctaaatccc

SEQ ID NO: 948615 - DNA, 25 bp, Homo sapien
cacatttcgtagtgggtcacaatcc

SEQ ID NO: 948616 - DNA, 25 bp, Homo sapien
taacacggtaagtctacggtacaca

SEQ ID NO: 948617 - DNA, 25 bp, Homo sapien
tgggaagattcttgccggtaacacg

SEQ ID NO: 948618 - DNA, 25 bp, Homo sapien
ggtcacaatcctatagttggcagca

SEQ ID NO: 948619 - DNA, 25 bp, Homo sapien
gaatatagcttttgttgccaaggtg

SEQ ID NO: 948620 - DNA, 25 bp, Homo sapien
ctaagcaatgaagaacttgcctttt

SEQ ID NO: 948621 - DNA, 25 bp, Homo sapien
ctagttctagcattcagtagctgaa

SEQ ID NO: 948622 - DNA, 25 bp, Homo sapien
ttggcccatcatagctagtgttaga

SEQ ID NO: 948623 - DNA, 25 bp, Homo sapien
gattttttactcaattgaagtaagc

SEQ ID NO: 948624 - DNA, 25 bp, Homo sapien
gcaaataattgtcctcttcagtgta

SEQ ID NO: 948625 - DNA, 25 bp, Homo sapien
taaccagcccccattgcaatatgca

SEQ ID NO: 948626 - DNA, 25 bp, Homo sapien
ccagaatgcatctcatacactgtcc

SEQ ID NO: 948627 - DNA, 25 bp, Homo sapien
ggtgtcttagtcttagagccccaaa

SEQ ID NO: 948628 - DNA, 25 bp, Homo sapien
tctgtctgtcaaagatggttaatac

SEQ ID NO: 948629 - DNA, 25 bp, Homo sapien
ggaacccgactggacatagcatttg

SEQ ID NO: 948630 - DNA, 25 bp, Homo sapien
gggcctaaacttctattctgtctgt

SEQ ID NO: 948631 - DNA, 25 bp, Homo sapien
tgaaagtttgcctgctgtgtacaag

SEQ ID NO: 948632 - DNA, 25 bp, Homo sapien
ttatctcataagcttgagaatttat

SEQ ID NO: 948633 - DNA, 25 bp, Homo sapien
cttatctcataagcttgagaattta

SEQ ID NO: 948634 - DNA, 25 bp, Homo sapien
gcgccgtttcttaagccggtctgaa

SEQ ID NO: 948635 - DNA, 25 bp, Homo sapien
cgcacggtgcgcacacacactggcc

SEQ ID NO: 948636 - DNA, 25 bp, Homo sapien
cgcgcacggtgcgcacacacactgg

SEQ ID NO: 948637 - DNA, 25 bp, Homo sapien
cttaagccggtctgaaaagcgcaat

SEQ ID NO: 948638 - DNA, 25 bp, Homo sapien
ttccacctggctaattacctttgcc

SEQ ID NO: 948639 - DNA, 25 bp, Homo sapien
gctaattacctttgcccaaacacag

SEQ ID NO: 948640 - DNA, 25 bp, Homo sapien
ggcaatcaaggcttccacctggcta

SEQ ID NO: 948641 - DNA, 25 bp, Homo sapien
gggcaatcaaggcttccacctggct

SEQ ID NO: 948642 - DNA, 25 bp, Homo sapien
gaactccacaacctgaacatccact

SEQ ID NO: 948643 - DNA, 25 bp, Homo sapien
catccactccagcagccaactgcag

SEQ ID NO: 948644 - DNA, 25 bp, Homo sapien
ctccacaacctgaacatccactcca

SEQ ID NO: 948645 - DNA, 25 bp, Homo sapien
acatccactccagcagccaactgca

SEQ ID NO: 948646 - DNA, 25 bp, Homo sapien
tcaaagataaatggtcatcgccatc

SEQ ID NO: 948647 - DNA, 25 bp, Homo sapien
agtattaccttttctacccttgcag

SEQ ID NO: 948648 - DNA, 25 bp, Homo sapien
catccgaacaccaagaagtattacc

SEQ ID NO: 948649 - DNA, 25 bp, Homo sapien
tattaccttttctacccttgcagcg

SEQ ID NO: 948650 - DNA, 25 bp, Homo sapien
catagatatgagggcaagacaatcc

SEQ ID NO: 948651 - DNA, 25 bp, Homo sapien
tatgagggcaagacaatccaggtat

SEQ ID NO: 948652 - DNA, 25 bp, Homo sapien
gatatgagggcaagacaatccaggt

SEQ ID NO: 948653 - DNA, 25 bp, Homo sapien
tagatatgagggcaagacaatccag

SEQ ID NO: 948654 - DNA, 25 bp, Homo sapien
ctgccatgaatatggctgccttcca

SEQ ID NO: 948655 - DNA, 25 bp, Homo sapien
catgatgctgctgactagaccgaga

SEQ ID NO: 948656 - DNA, 25 bp, Homo sapien
tccagaccttggttgtcagctgcca

SEQ ID NO: 948657 - DNA, 25 bp, Homo sapien
ccgagaaacgtggagtccagacctt

SEQ ID NO: 948658 - DNA, 25 bp, Homo sapien
tctttccattttagatgctgacagc

SEQ ID NO: 948659 - DNA, 25 bp, Homo sapien
ctttccattttagatgctgacagcc

SEQ ID NO: 948660 - DNA, 25 bp, Homo sapien
tttccattttagatgctgacagccc

SEQ ID NO: 948661 - DNA, 25 bp, Homo sapien
tggtaaataccagatctttagtatg

SEQ ID NO: 948662 - DNA, 25 bp, Homo sapien
taccagatctttagtatgatgacta

SEQ ID NO: 948663 - DNA, 25 bp, Homo sapien
ttaaaaggatctggtaaataccaga

SEQ ID NO: 948664 - DNA, 25 bp, Homo sapien
gatctttagtatgatgactaatgtc

SEQ ID NO: 948665 - DNA, 25 bp, Homo sapien
ataattccacatttgattagcatgg

SEQ ID NO: 948666 - DNA, 25 bp, Homo sapien
aattccacatttgattagcatggga

SEQ ID NO: 948667 - DNA, 25 bp, Homo sapien
taggaaacttatagtcctctgttcc

SEQ ID NO: 948668 - DNA, 25 bp, Homo sapien
gaaacttatagtcctctgttccagg

SEQ ID NO: 948669 - DNA, 25 bp, Homo sapien
ggattgtaagggcaagattccagac

SEQ ID NO: 948670 - DNA, 25 bp, Homo sapien
cacttgggaggaattgttagcaggc

SEQ ID NO: 948671 - DNA, 25 bp, Homo sapien
gccggcttgtctgcccaaggttaat

SEQ ID NO: 948672 - DNA, 25 bp, Homo sapien
gattccagaccatgatacaagccgg

SEQ ID NO: 948673 - DNA, 25 bp, Homo sapien
ggaaatacggcaatgacagtgtagc

SEQ ID NO: 948674 - DNA, 25 bp, Homo sapien
gggaaatacggcaatgacagtgtag

SEQ ID NO: 948675 - DNA, 25 bp, Homo sapien
taggccttcatccatagctgtggat

SEQ ID NO: 948676 - DNA, 25 bp, Homo sapien
ttaaattaggccttcatccatagct

SEQ ID NO: 948677 - DNA, 25 bp, Homo sapien
aaggtcttcgtgacaactcaggaag

SEQ ID NO: 948678 - DNA, 25 bp, Homo sapien
tcatcagacagtgaacagggttgca

SEQ ID NO: 948679 - DNA, 25 bp, Homo sapien
gacaccttgattgtttatcccaggg

SEQ ID NO: 948680 - DNA, 25 bp, Homo sapien
aaaccaggacagttcaggcatgcag

SEQ ID NO: 948681 - DNA, 25 bp, Homo sapien
gtgataatcaggcttagaccagggc

SEQ ID NO: 948682 - DNA, 25 bp, Homo sapien
aggaagcatgtaggccttgaaggct

SEQ ID NO: 948683 - DNA, 25 bp, Homo sapien
taagaggctattgcactaatctagg

SEQ ID NO: 948684 - DNA, 25 bp, Homo sapien
caggtgggtccacttgttttggaca

SEQ ID NO: 948685 - DNA, 25 bp, Homo sapien
gtattctattacgattcaccacgat

SEQ ID NO: 948686 - DNA, 25 bp, Homo sapien
gactatgagtacgtttctttgaaaa

SEQ ID NO: 948687 - DNA, 25 bp, Homo sapien
tcaccacgatttctcctgagggtac

SEQ ID NO: 948688 - DNA, 25 bp, Homo sapien
aaatcctgctcattgaatgactatg

SEQ ID NO: 948689 - DNA, 25 bp, Homo sapien
tccattacagagtaagaaatcctgc

SEQ ID NO: 948690 - DNA, 25 bp, Homo sapien
gggccaccaagagagtacattcaac

SEQ ID NO: 948691 - DNA, 25 bp, Homo sapien
taaacctttccattacagagtaaga

SEQ ID NO: 948692 - DNA, 25 bp, Homo sapien
ggccaccaagagagtacattcaacc

SEQ ID NO: 948693 - DNA, 25 bp, Homo sapien
tttattatcaaagccctggagtgca

SEQ ID NO: 948694 - DNA, 25 bp, Homo sapien
gacatgggcacattcccctgggata

SEQ ID NO: 948695 - DNA, 25 bp, Homo sapien
gtgaacgaagactccctaagggctc

SEQ ID NO: 948696 - DNA, 25 bp, Homo sapien
ggcccataggcaaagagttcaagtt

SEQ ID NO: 948697 - DNA, 25 bp, Homo sapien
caagcaggaagatcatgggagcact

SEQ ID NO: 948698 - DNA, 25 bp, Homo sapien
gatccaaggagctcaacaacagcag

SEQ ID NO: 948699 - DNA, 25 bp, Homo sapien
tgacctctgtatgggcaagaaccaa

SEQ ID NO: 948700 - DNA, 25 bp, Homo sapien
caacagcagtgggaagaattacagg

SEQ ID NO: 948701 - DNA, 25 bp, Homo sapien
taccatacaaatcgccctggactca

SEQ ID NO: 948702 - DNA, 25 bp, Homo sapien
aatcagcaggtcattagtgtaccat

SEQ ID NO: 948703 - DNA, 25 bp, Homo sapien
tgtatgatttcgtttttgtgcagac

SEQ ID NO: 948704 - DNA, 25 bp, Homo sapien
tgtgttgcctgaacagtgtatgatt

SEQ ID NO: 948705 - DNA, 25 bp, Homo sapien
ggagggaagatatggtgttgctgac

SEQ ID NO: 948706 - DNA, 25 bp, Homo sapien
gagggaagatatggtgttgctgaca

SEQ ID NO: 948707 - DNA, 25 bp, Homo sapien
tgctcctagtggaattgaacccatt

SEQ ID NO: 948708 - DNA, 25 bp, Homo sapien
aagcggcttgcctgttccatatcaa

SEQ ID NO: 948709 - DNA, 25 bp, Homo sapien
gcatgtagcctgcagatttcctcaa

SEQ ID NO: 948710 - DNA, 25 bp, Homo sapien
caagaattttgaagctcctacgcct

SEQ ID NO: 948711 - DNA, 25 bp, Homo sapien
tactggaactcctaaagggtgagtg

SEQ ID NO: 948712 - DNA, 25 bp, Homo sapien
tggatactggaactcctaaagggtg

SEQ ID NO: 948713 - DNA, 25 bp, Homo sapien
ctaaagggtgagtgtttcggcagcc

SEQ ID NO: 948714 - DNA, 25 bp, Homo sapien
agggtgagtgtttcggcagcctttc

SEQ ID NO: 948715 - DNA, 25 bp, Homo sapien
caaaaacgtgactgtgattttacct

SEQ ID NO: 948716 - DNA, 25 bp, Homo sapien
ctccaaaaacgtgactgtgatttta

SEQ ID NO: 948717 - DNA, 25 bp, Homo sapien
tccaaaaacgtgactgtgattttac

SEQ ID NO: 948718 - DNA, 25 bp, Homo sapien
agtcaggctctttctagggagttgg

SEQ ID NO: 948719 - DNA, 25 bp, Homo sapien
agtcccgcgtggagccagaagatgc

SEQ ID NO: 948720 - DNA, 25 bp, Homo sapien
gagcttggagtcaggctctttctag

SEQ ID NO: 948721 - DNA, 25 bp, Homo sapien
gcacctacaccttcgcctctgcggt

SEQ ID NO: 948722 - DNA, 25 bp, Homo sapien
gctgtctggaagaagtcgcctgaac

SEQ ID NO: 948723 - DNA, 25 bp, Homo sapien
tatttagcttcatctgacggtgtca

SEQ ID NO: 948724 - DNA, 25 bp, Homo sapien
ggaatccataacaaggattgttcgg

SEQ ID NO: 948725 - DNA, 25 bp, Homo sapien
gattgttcggaatctgtaactagga

SEQ ID NO: 948726 - DNA, 25 bp, Homo sapien
agagctaataacgtcttctgaaggg

SEQ ID NO: 948727 - DNA, 25 bp, Homo sapien
tccgcaaacctgagcggcatgctgt

SEQ ID NO: 948728 - DNA, 25 bp, Homo sapien
ttacaaaatcctctccgcaaacctg

SEQ ID NO: 948729 - DNA, 25 bp, Homo sapien
atgctgtcagagctaataacgtctt

SEQ ID NO: 948730 - DNA, 25 bp, Homo sapien
tccgaggagatggatccctgaggtc

SEQ ID NO: 948731 - DNA, 25 bp, Homo sapien
accttgcctatttctcgcctactga

SEQ ID NO: 948732 - DNA, 25 bp, Homo sapien
ccgcgggaggcttcgaatataacct

SEQ ID NO: 948733 - DNA, 25 bp, Homo sapien
ttgccaccgagctttcccgcgggag

SEQ ID NO: 948734 - DNA, 25 bp, Homo sapien
tgcgcatgcccgagccgtcggattt

SEQ ID NO: 948735 - DNA, 25 bp, Homo sapien
taaggctcgcacgtgagccaactcc

SEQ ID NO: 948736 - DNA, 25 bp, Homo sapien
cgtcggatttgcatgataaggctcg

SEQ ID NO: 948737 - DNA, 25 bp, Homo sapien
aatggaatcttgctcctactgcgcc

SEQ ID NO: 948738 - DNA, 25 bp, Homo sapien
aggagatacctaccgaaccttcaga

SEQ ID NO: 948739 - DNA, 25 bp, Homo sapien
gctttctctaaactggcccaataaa

SEQ ID NO: 948740 - DNA, 25 bp, Homo sapien
aagcatatagcttccaatagccacg

SEQ ID NO: 948741 - DNA, 25 bp, Homo sapien
caaaatgagatagccatgttgtcta

SEQ ID NO: 948742 - DNA, 25 bp, Homo sapien
tagccgttctaacagacagtccgaa

SEQ ID NO: 948743 - DNA, 25 bp, Homo sapien
gcgtgcccaggacaagtaagtaact

SEQ ID NO: 948744 - DNA, 25 bp, Homo sapien
gaggaaccagccaattctgacggga

SEQ ID NO: 948745 - DNA, 25 bp, Homo sapien
tcgagcaaaacttggcgcacatggg

SEQ ID NO: 948746 - DNA, 25 bp, Homo sapien
ccttactagggaaatgtgtaggcat

SEQ ID NO: 948747 - DNA, 25 bp, Homo sapien
tcgcttttcgccctgtttactccat

SEQ ID NO: 948748 - DNA, 25 bp, Homo sapien
tccccattcagtgattggcaaagca

SEQ ID NO: 948749 - DNA, 25 bp, Homo sapien
gcaaaggcaataattgctccgcgct

SEQ ID NO: 948750 - DNA, 25 bp, Homo sapien
gggacagagtgacaatttgcggcaa

SEQ ID NO: 948751 - DNA, 25 bp, Homo sapien
ctgttgccggaggaacagggaccca

SEQ ID NO: 948752 - DNA, 25 bp, Homo sapien
aattaaagcgtctgcgcgctgttgc

SEQ ID NO: 948753 - DNA, 25 bp, Homo sapien
cttgatgatgtgactaactcgttag

SEQ ID NO: 948754 - DNA, 25 bp, Homo sapien
tctgtcactcaagcggccagagagg

SEQ ID NO: 948755 - DNA, 25 bp, Homo sapien
gggcggccagccaaatcaaagcttg

SEQ ID NO: 948756 - DNA, 25 bp, Homo sapien
gagatcagaagagttaaccccaggc

SEQ ID NO: 948757 - DNA, 25 bp, Homo sapien
cttgggagacattttgacagtgcgc

SEQ ID NO: 948758 - DNA, 25 bp, Homo sapien
ggtttctctacaaatctgtacaaga

SEQ ID NO: 948759 - DNA, 25 bp, Homo sapien
acaagacagtggctggttcttggag

SEQ ID NO: 948760 - DNA, 25 bp, Homo sapien
gttccctgcagacggcagctcgtgg

SEQ ID NO: 948761 - DNA, 25 bp, Homo sapien
tgaattccattatcgggcccctggt

SEQ ID NO: 948762 - DNA, 25 bp, Homo sapien
taaagtggctcgttttgtctgggag

SEQ ID NO: 948763 - DNA, 25 bp, Homo sapien
ccctgagcatcgttcttaaagtggc

SEQ ID NO: 948764 - DNA, 25 bp, Homo sapien
gagggtgacctcttgtgtagtgttt

SEQ ID NO: 948765 - DNA, 25 bp, Homo sapien
gcttcgacttagcagctgttagagt

SEQ ID NO: 948766 - DNA, 25 bp, Homo sapien
gataaagacttcgagggccttgccc

SEQ ID NO: 948767 - DNA, 25 bp, Homo sapien
ctccagattgcagggtttactttta

SEQ ID NO: 948768 - DNA, 25 bp, Homo sapien
caagccctaaaagagccttagggct

SEQ ID NO: 948769 - DNA, 25 bp, Homo sapien
ctcctactccagattgcagggttta

SEQ ID NO: 948770 - DNA, 25 bp, Homo sapien
ggaagccaatctgccgcgttcaatt

SEQ ID NO: 948771 - DNA, 25 bp, Homo sapien
taccgtcacccatgaaaacggaatg

SEQ ID NO: 948772 - DNA, 25 bp, Homo sapien
aacggaatgaaggactgggaagcca

SEQ ID NO: 948773 - DNA, 25 bp, Homo sapien
tgcgggctggactagtgcaaacaag

SEQ ID NO: 948774 - DNA, 25 bp, Homo sapien
ttgagagccctgaagctacaacccg

SEQ ID NO: 948775 - DNA, 25 bp, Homo sapien
tttagattccatcccgcaagcgcag

SEQ ID NO: 948776 - DNA, 25 bp, Homo sapien
gcaagcgcagagatatcacaccaag

SEQ ID NO: 948777 - DNA, 25 bp, Homo sapien
taaatagcctctgagccgcgaactc

SEQ ID NO: 948778 - DNA, 25 bp, Homo sapien
ggatacagtgctcaattgcagggac

SEQ ID NO: 948779 - DNA, 25 bp, Homo sapien
tggatacagtgctcaattgcaggga

SEQ ID NO: 948780 - DNA, 25 bp, Homo sapien
ctggatacagtgctcaattgcaggg

SEQ ID NO: 948781 - DNA, 25 bp, Homo sapien
tctggatacagtgctcaattgcagg

SEQ ID NO: 948782 - DNA, 25 bp, Homo sapien
caggaagctggcgaggaaagcggtg

SEQ ID NO: 948783 - DNA, 25 bp, Homo sapien
ctctaattggggtgcagccagagtt

SEQ ID NO: 948784 - DNA, 25 bp, Homo sapien
gaggccctgccacgacatactctaa

SEQ ID NO: 948785 - DNA, 25 bp, Homo sapien
gaagctggcgaggaaagcggtgcac

SEQ ID NO: 948786 - DNA, 25 bp, Homo sapien
aactcggaggaaactcgcgggcagc

SEQ ID NO: 948787 - DNA, 25 bp, Homo sapien
tcaattggcataagccgctgccggc

SEQ ID NO: 948788 - DNA, 25 bp, Homo sapien
tgccggcgggcttcgcgcaacgtaa

SEQ ID NO: 948789 - DNA, 25 bp, Homo sapien
gctccatctgcagccacccttttct

SEQ ID NO: 948790 - DNA, 25 bp, Homo sapien
gtctccttcccgcaacctccagaca

SEQ ID NO: 948791 - DNA, 25 bp, Homo sapien
ctgtaacttatggagtccagaagaa

SEQ ID NO: 948792 - DNA, 25 bp, Homo sapien
aaaggctcgcggcttaggtctctaa

SEQ ID NO: 948793 - DNA, 25 bp, Homo sapien
gggtccagaccgagaggatcttcag

SEQ ID NO: 948794 - DNA, 25 bp, Homo sapien
gtttctccgtgtgggcaaaggctcg

SEQ ID NO: 948795 - DNA, 25 bp, Homo sapien
gtctctaagcagatcgaaagtcggg

SEQ ID NO: 948796 - DNA, 25 bp, Homo sapien
tgttgaccaggcctgaaccacgcac

SEQ ID NO: 948797 - DNA, 25 bp, Homo sapien
ctgttgaccaggcctgaaccacgca

SEQ ID NO: 948798 - DNA, 25 bp, Homo sapien
cttaacctgcgtgggtctggagacc

SEQ ID NO: 948799 - DNA, 25 bp, Homo sapien
ttgggctgctccgaacttaatgtct

SEQ ID NO: 948800 - DNA, 25 bp, Homo sapien
tgcttggctgccttaacctgcgtgg

SEQ ID NO: 948801 - DNA, 25 bp, Homo sapien
agggagaaaggctagatccgcagcc

SEQ ID NO: 948802 - DNA, 25 bp, Homo sapien
ctttgaaagagaagtggttctacca

SEQ ID NO: 948803 - DNA, 25 bp, Homo sapien
tttgaaagagaagtggttctaccac

SEQ ID NO: 948804 - DNA, 25 bp, Homo sapien
caacgattcgttttcagaacacgct

SEQ ID NO: 948805 - DNA, 25 bp, Homo sapien
gatttgccaaaccactaaccgcatg

SEQ ID NO: 948806 - DNA, 25 bp, Homo sapien
ttactgtcagtcctccaacgattcg

SEQ ID NO: 948807 - DNA, 25 bp, Homo sapien
tgaaagcattacagtagcttctgtt

SEQ ID NO: 948808 - DNA, 25 bp, Homo sapien
aactgcggaaggtaggcgaagaact

SEQ ID NO: 948809 - DNA, 25 bp, Homo sapien
ggaaggtaggcgaagaactctgcaa

SEQ ID NO: 948810 - DNA, 25 bp, Homo sapien
gcgaagaactctgcaagtcgcgcac

SEQ ID NO: 948811 - DNA, 25 bp, Homo sapien
agctccggctgggattggaactgcg

SEQ ID NO: 948812 - DNA, 25 bp, Homo sapien
gtctgaaagcagacgcgcaactttc

SEQ ID NO: 948813 - DNA, 25 bp, Homo sapien
tgccctttggagacaaaccattcga

SEQ ID NO: 948814 - DNA, 25 bp, Homo sapien
actcgtggcgtctgcatcaagtctg

SEQ ID NO: 948815 - DNA, 25 bp, Homo sapien
agtagaagccgtgcgcctgtgacgt

SEQ ID NO: 948816 - DNA, 25 bp, Homo sapien
acgacacaggtgagaggccgctggg

SEQ ID NO: 948817 - DNA, 25 bp, Homo sapien
cagctcgcttctcccgcctcccgac

SEQ ID NO: 948818 - DNA, 25 bp, Homo sapien
gaggggacgacacaggtgagaggcc

SEQ ID NO: 948819 - DNA, 25 bp, Homo sapien
agacgcgaggggacgacacaggtga

SEQ ID NO: 948820 - DNA, 25 bp, Homo sapien
tcgcctggcgcctgcctgccggcct

SEQ ID NO: 948821 - DNA, 25 bp, Homo sapien
gcccgctcgcctggcgcctgcctgc

SEQ ID NO: 948822 - DNA, 25 bp, Homo sapien
cgtgcgcgcccgctcgcctggcgcc

SEQ ID NO: 948823 - DNA, 25 bp, Homo sapien
gggccccgtgcgcgcccgctcgcct

SEQ ID NO: 948824 - DNA, 25 bp, Homo sapien
acaaagttgccgtgagaggcgcagc

SEQ ID NO: 948825 - DNA, 25 bp, Homo sapien
gacatcaagtcaactggccgcgtaa

SEQ ID NO: 948826 - DNA, 25 bp, Homo sapien
tcaaggagattacgcagacgctggg

SEQ ID NO: 948827 - DNA, 25 bp, Homo sapien
aacagtcaggctctttccagtgggc

SEQ ID NO: 948828 - DNA, 25 bp, Homo sapien
catacagtcgtgcaaaaggacagtc

SEQ ID NO: 948829 - DNA, 25 bp, Homo sapien
tcagagtgctccatataatgacagc

SEQ ID NO: 948830 - DNA, 25 bp, Homo sapien
catataatgacagcgacatacagtc

SEQ ID NO: 948831 - DNA, 25 bp, Homo sapien
tcagaagtcaatagagatactcaga

SEQ ID NO: 948832 - DNA, 25 bp, Homo sapien
ttcagaatggtttaaaaccgatcag

SEQ ID NO: 948833 - DNA, 25 bp, Homo sapien
cttccacgctcagtcagtcttcaga

SEQ ID NO: 948834 - DNA, 25 bp, Homo sapien
aaccgatcagtcttgtcattttcta

SEQ ID NO: 948835 - DNA, 25 bp, Homo sapien
cattttctagcattcgcattgttac

SEQ ID NO: 948836 - DNA, 25 bp, Homo sapien
tttgggttcgtagctccccaggatc

SEQ ID NO: 948837 - DNA, 25 bp, Homo sapien
gtgccatccaatttgaagcagacat

SEQ ID NO: 948838 - DNA, 25 bp, Homo sapien
cagtgccatccaatttgaagcagac

SEQ ID NO: 948839 - DNA, 25 bp, Homo sapien
cgtagctccccaggatcaattctga

SEQ ID NO: 948840 - DNA, 25 bp, Homo sapien
tattcatacacaaattgcagagacg

SEQ ID NO: 948841 - DNA, 25 bp, Homo sapien
catacacaaattgcagagacgtagg

SEQ ID NO: 948842 - DNA, 25 bp, Homo sapien
ttcatacacaaattgcagagacgta

SEQ ID NO: 948843 - DNA, 25 bp, Homo sapien
tacacaaattgcagagacgtaggac

SEQ ID NO: 948844 - DNA, 25 bp, Homo sapien
aaacatggtacttttcgcaggctcc

SEQ ID NO: 948845 - DNA, 25 bp, Homo sapien
ggctccagtcacaagctgcaccaaa

SEQ ID NO: 948846 - DNA, 25 bp, Homo sapien
gcagagtctctccacaccttataga

SEQ ID NO: 948847 - DNA, 25 bp, Homo sapien
gattttagcttggaatctccagcag

SEQ ID NO: 948848 - DNA, 25 bp, Homo sapien
cctcagtgaatatctcttaagcaat

SEQ ID NO: 948849 - DNA, 25 bp, Homo sapien
gcaatgatcagggtttagaaatcta

SEQ ID NO: 948850 - DNA, 25 bp, Homo sapien
aatctatactgaaccaaagcacagg

SEQ ID NO: 948851 - DNA, 25 bp, Homo sapien
tattcttggttgagtgagcacatcc

SEQ ID NO: 948852 - DNA, 25 bp, Homo sapien
aatcgcctgagagtgtgcctgtcac

SEQ ID NO: 948853 - DNA, 25 bp, Homo sapien
taattaaatatagccggctgggaag

SEQ ID NO: 948854 - DNA, 25 bp, Homo sapien
ctttcagcaggaactaagtcataga

SEQ ID NO: 948855 - DNA, 25 bp, Homo sapien
cccatataaaccagtccagctgctg

SEQ ID NO: 948856 - DNA, 25 bp, Homo sapien
ggtttgtgaggagctctgaaggtgg

SEQ ID NO: 948857 - DNA, 25 bp, Homo sapien
aagaatcgcgctggccctgaccgca

SEQ ID NO: 948858 - DNA, 25 bp, Homo sapien
aggaggtggtctgggcaccgaagaa

SEQ ID NO: 948859 - DNA, 25 bp, Homo sapien
ggtctgggcaccgaagaatcgcgct

SEQ ID NO: 948860 - DNA, 25 bp, Homo sapien
aaagttgaggtcatagatttcaagg

SEQ ID NO: 948861 - DNA, 25 bp, Homo sapien
tccgaacttccccatatgaattcct

SEQ ID NO: 948862 - DNA, 25 bp, Homo sapien
caaggcaccattgaaagtgtccaca

SEQ ID NO: 948863 - DNA, 25 bp, Homo sapien
cacagtagtcccaaaaaagagagta

SEQ ID NO: 948864 - DNA, 25 bp, Homo sapien
ctaatagagtgtcccggaggccagc

SEQ ID NO: 948865 - DNA, 25 bp, Homo sapien
gctggctgcacttgtgtaccaggat

SEQ ID NO: 948866 - DNA, 25 bp, Homo sapien
ctggttggaggtcggagggtgggca

SEQ ID NO: 948867 - DNA, 25 bp, Homo sapien
tgggaattgattgagctggctgcac

SEQ ID NO: 948868 - DNA, 25 bp, Homo sapien
ggagactgcggcgagttacacgcca

SEQ ID NO: 948869 - DNA, 25 bp, Homo sapien
cggcgagttacacgccattgggtcg

SEQ ID NO: 948870 - DNA, 25 bp, Homo sapien
tgcggcgagttacacgccattgggt

SEQ ID NO: 948871 - DNA, 25 bp, Homo sapien
gactgcggcgagttacacgccattg

SEQ ID NO: 948872 - DNA, 25 bp, Homo sapien
tgagttggggaacaaaggcacacgt

SEQ ID NO: 948873 - DNA, 25 bp, Homo sapien
ctgagttggggaacaaaggcacacg

SEQ ID NO: 948874 - DNA, 25 bp, Homo sapien
cgggacactcagaggtcgcccgcgc

SEQ ID NO: 948875 - DNA, 25 bp, Homo sapien
tgggtctgttagtttctcacgggta

SEQ ID NO: 948876 - DNA, 25 bp, Homo sapien
tgactcaccgagttaaagcataggg

SEQ ID NO: 948877 - DNA, 25 bp, Homo sapien
tcacgggtactgtcaaaacagctcc

SEQ ID NO: 948878 - DNA, 25 bp, Homo sapien
ggtctagtgcatggcagcgccgtat

SEQ ID NO: 948879 - DNA, 25 bp, Homo sapien
tgtttgtgtcaatcccagcgaggcg

SEQ ID NO: 948880 - DNA, 25 bp, Homo sapien
tctgtaatgcggccagctgaaagct

SEQ ID NO: 948881 - DNA, 25 bp, Homo sapien
tccggcaaggcgaggtactgagtct

SEQ ID NO: 948882 - DNA, 25 bp, Homo sapien
gagtcttctgaaaccttctctgtaa

SEQ ID NO: 948883 - DNA, 25 bp, Homo sapien
taagctttggctgggtagctcccgg

SEQ ID NO: 948884 - DNA, 25 bp, Homo sapien
gaatcggtagctgaagactcgggca

SEQ ID NO: 948885 - DNA, 25 bp, Homo sapien
ccccgtagggctgtagtagtcagaa

SEQ ID NO: 948886 - DNA, 25 bp, Homo sapien
catagctgcggacgtctggaacgga

SEQ ID NO: 948887 - DNA, 25 bp, Homo sapien
taattgcgcgcttacgcacagcggg

SEQ ID NO: 948888 - DNA, 25 bp, Homo sapien
agggcctcgggagcaacagtaacac

SEQ ID NO: 948889 - DNA, 25 bp, Homo sapien
actgggagtcgtgaagtctctgtct

SEQ ID NO: 948890 - DNA, 25 bp, Homo sapien
tctggtctaagcagacatggctgtg

SEQ ID NO: 948891 - DNA, 25 bp, Homo sapien
caactccctgcctttgcggtctgga

SEQ ID NO: 948892 - DNA, 25 bp, Homo sapien
aactccaaagcagagctgccgtgcg

SEQ ID NO: 948893 - DNA, 25 bp, Homo sapien
actggcccgagtcacgagctttggg

SEQ ID NO: 948894 - DNA, 25 bp, Homo sapien
agctattgtcgcacttcctttcggg

SEQ ID NO: 948895 - DNA, 25 bp, Homo sapien
gctgccagccagccctgacttgacg

SEQ ID NO: 948896 - DNA, 25 bp, Homo sapien
ggggtaaacagagctgcagctgcca

SEQ ID NO: 948897 - DNA, 25 bp, Homo sapien
tcggggtaaacagagctgcagctgc

SEQ ID NO: 948898 - DNA, 25 bp, Homo sapien
cttcggggtaaacagagctgcagct

SEQ ID NO: 948899 - DNA, 25 bp, Homo sapien
gccagcgggctggacgctattgcct

SEQ ID NO: 948900 - DNA, 25 bp, Homo sapien
cagctttgtcctaaggccagcgggc

SEQ ID NO: 948901 - DNA, 25 bp, Homo sapien
tattgcctctcaaaatccaccgaca

SEQ ID NO: 948902 - DNA, 25 bp, Homo sapien
caccgacaaatccagccgtggagaa

SEQ ID NO: 948903 - DNA, 25 bp, Homo sapien
gctgccattactgctgctataattg

SEQ ID NO: 948904 - DNA, 25 bp, Homo sapien
gcctctaatgacaactcctggagca

SEQ ID NO: 948905 - DNA, 25 bp, Homo sapien
gctataattgcctcccaacgaaagg

SEQ ID NO: 948906 - DNA, 25 bp, Homo sapien
taagctgggcctctaatgacaactc

SEQ ID NO: 948907 - DNA, 25 bp, Homo sapien
cctgaggtagaccaagccttctgca

SEQ ID NO: 948908 - DNA, 25 bp, Homo sapien
ctgaggtagaccaagccttctgcat

SEQ ID NO: 948909 - DNA, 25 bp, Homo sapien
tatttgggcaggacattatgacgta

SEQ ID NO: 948910 - DNA, 25 bp, Homo sapien
caggcagcagcacttaacagggaga

SEQ ID NO: 948911 - DNA, 25 bp, Homo sapien
ttcagagagctctacccagcactgt

SEQ ID NO: 948912 - DNA, 25 bp, Homo sapien
taaagtttatttgcacgagcgcacg

SEQ ID NO: 948913 - DNA, 25 bp, Homo sapien
gatagtttgtggacattaggatcct

SEQ ID NO: 948914 - DNA, 25 bp, Homo sapien
tcagtaagggtactctacatcatac

SEQ ID NO: 948915 - DNA, 25 bp, Homo sapien
tacaactctaaacagaacaagaagc

SEQ ID NO: 948916 - DNA, 25 bp, Homo sapien
tggtcttcagttaagatgccagtgt

SEQ ID NO: 948917 - DNA, 25 bp, Homo sapien
tcatgctctactgactagcgcctgc

SEQ ID NO: 948918 - DNA, 25 bp, Homo sapien
tctcatgctctactgactagcgcct

SEQ ID NO: 948919 - DNA, 25 bp, Homo sapien
agtctcatgctctactgactagcgc

SEQ ID NO: 948920 - DNA, 25 bp, Homo sapien
catgctctactgactagcgcctgcc

SEQ ID NO: 948921 - DNA, 25 bp, Homo sapien
caagttctttagcctttggcttctc

SEQ ID NO: 948922 - DNA, 25 bp, Homo sapien
gttctttagcctttggcttctccag

SEQ ID NO: 948923 - DNA, 25 bp, Homo sapien
tggcttctccagcttggcaatgtga

SEQ ID NO: 948924 - DNA, 25 bp, Homo sapien
ggcaagttctttagcctttggcttc

SEQ ID NO: 948925 - DNA, 25 bp, Homo sapien
tgtgtgtgaaggctacaatggtgca

SEQ ID NO: 948926 - DNA, 25 bp, Homo sapien
tttcccttgataatgcagtaagggg

SEQ ID NO: 948927 - DNA, 25 bp, Homo sapien
atgccccagtcttgcctttcccttg

SEQ ID NO: 948928 - DNA, 25 bp, Homo sapien
tcccttgataatgcagtaaggggcc

SEQ ID NO: 948929 - DNA, 25 bp, Homo sapien
gactagatgccccagtcttgccttt

SEQ ID NO: 948930 - DNA, 25 bp, Homo sapien
tatgacacagggcaggcaggaagac

SEQ ID NO: 948931 - DNA, 25 bp, Homo sapien
atgacacagggcaggcaggaagaca

SEQ ID NO: 948932 - DNA, 25 bp, Homo sapien
tgacacagggcaggcaggaagacac

SEQ ID NO: 948933 - DNA, 25 bp, Homo sapien
gttatgacacagggcaggcaggaag

SEQ ID NO: 948934 - DNA, 25 bp, Homo sapien
tcgatgggatccatgtcctgtgcag

SEQ ID NO: 948935 - DNA, 25 bp, Homo sapien
gatgggatccatgtcctgtgcagtc

SEQ ID NO: 948936 - DNA, 25 bp, Homo sapien
tgggatccatgtcctgtgcagtcac

SEQ ID NO: 948937 - DNA, 25 bp, Homo sapien
cagctcgatgggatccatgtcctgt

SEQ ID NO: 948938 - DNA, 25 bp, Homo sapien
tgagccttcttgttccccaccaagg

SEQ ID NO: 948939 - DNA, 25 bp, Homo sapien
cttcttgttccccaccaaggtggtg

SEQ ID NO: 948940 - DNA, 25 bp, Homo sapien
agccttcttgttccccaccaaggtg

SEQ ID NO: 948941 - DNA, 25 bp, Homo sapien
ttgttccccaccaaggtggtgatgg

SEQ ID NO: 948942 - DNA, 25 bp, Homo sapien
acaggtgatctcttaacagagacat

SEQ ID NO: 948943 - DNA, 25 bp, Homo sapien
tgtttggcggtccaaggcctgggtg

SEQ ID NO: 948944 - DNA, 25 bp, Homo sapien
ggtcagtggccagcttaagaagctg

SEQ ID NO: 948945 - DNA, 25 bp, Homo sapien
tcagtggccagcttaagaagctgag

SEQ ID NO: 948946 - DNA, 25 bp, Homo sapien
ctggtcagtggccagcttaagaagc

SEQ ID NO: 948947 - DNA, 25 bp, Homo sapien
ttaatcgccggaggcgctttcagcc

SEQ ID NO: 948948 - DNA, 25 bp, Homo sapien
tggttaatcgccggaggcgctttca

SEQ ID NO: 948949 - DNA, 25 bp, Homo sapien
gccggaggcgctttcagccacttac

SEQ ID NO: 948950 - DNA, 25 bp, Homo sapien
tcgccggaggcgctttcagccactt

SEQ ID NO: 948951 - DNA, 25 bp, Homo sapien
caatggggccatttcataaagtagg

SEQ ID NO: 948952 - DNA, 25 bp, Homo sapien
gtgctgcaacctgatacaatggggc

SEQ ID NO: 948953 - DNA, 25 bp, Homo sapien
tacaatggggccatttcataaagta

SEQ ID NO: 948954 - DNA, 25 bp, Homo sapien
atggggccatttcataaagtaggtg

SEQ ID NO: 948955 - DNA, 25 bp, Homo sapien
tcccattggcctttctttttggcat

SEQ ID NO: 948956 - DNA, 25 bp, Homo sapien
ttcccattggcctttctttttggca

SEQ ID NO: 948957 - DNA, 25 bp, Homo sapien
ccacctgcttcttcccattggcctt

SEQ ID NO: 948958 - DNA, 25 bp, Homo sapien
tgcttcttcccattggcctttcttt

SEQ ID NO: 948959 - DNA, 25 bp, Homo sapien
aggagagagcccaatctcagtcttt

SEQ ID NO: 948960 - DNA, 25 bp, Homo sapien
caggaggagagagcccaatctcagt

SEQ ID NO: 948961 - DNA, 25 bp, Homo sapien
ggaggagagagcccaatctcagtct

SEQ ID NO: 948962 - DNA, 25 bp, Homo sapien
ggcaggaggagagagcccaatctca

SEQ ID NO: 948963 - DNA, 25 bp, Homo sapien
tgctcgtagggtgccaagcattcct

SEQ ID NO: 948964 - DNA, 25 bp, Homo sapien
caaaggttctcatgttgctcgtagg

SEQ ID NO: 948965 - DNA, 25 bp, Homo sapien
tctgcgtcagttcctcatagacaag

SEQ ID NO: 948966 - DNA, 25 bp, Homo sapien
caatagggttgtcccagtagagtcc

SEQ ID NO: 948967 - DNA, 25 bp, Homo sapien
ctgtgtagggagatagtgcaggcat

SEQ ID NO: 948968 - DNA, 25 bp, Homo sapien
catgggccaacccattctgctttct

SEQ ID NO: 948969 - DNA, 25 bp, Homo sapien
tctgctttctctgtctccatctgtc

SEQ ID NO: 948970 - DNA, 25 bp, Homo sapien
gctttctctgtctccatctgtctcc

SEQ ID NO: 948971 - DNA, 25 bp, Homo sapien
tttctctgtctccatctgtctccat

SEQ ID NO: 948972 - DNA, 25 bp, Homo sapien
gatgtcctggttaaggctttcttct

SEQ ID NO: 948973 - DNA, 25 bp, Homo sapien
agatgtcctggttaaggctttcttc

SEQ ID NO: 948974 - DNA, 25 bp, Homo sapien
gagagtattgacatctgaattacat

SEQ ID NO: 948975 - DNA, 25 bp, Homo sapien
aatccaacaggaacatacttatcaa

SEQ ID NO: 948976 - DNA, 25 bp, Homo sapien
tttcaaagagagagtattgacatct

SEQ ID NO: 948977 - DNA, 25 bp, Homo sapien
ccaacaggaacatacttatcaatca

SEQ ID NO: 948978 - DNA, 25 bp, Homo sapien
tcacatgccttcatgatggtgattg

SEQ ID NO: 948979 - DNA, 25 bp, Homo sapien
tgcatctgctgggtagaatctaaat

SEQ ID NO: 948980 - DNA, 25 bp, Homo sapien
atgcatctgctgggtagaatctaaa

SEQ ID NO: 948981 - DNA, 25 bp, Homo sapien
catgccttcatgatggtgattggca

SEQ ID NO: 948982 - DNA, 25 bp, Homo sapien
gggagcagagtgagccaatctgcaa

SEQ ID NO: 948983 - DNA, 25 bp, Homo sapien
gctcttagacggttgttgacattca

SEQ ID NO: 948984 - DNA, 25 bp, Homo sapien
tctgccacattgtgttgagctctta

SEQ ID NO: 948985 - DNA, 25 bp, Homo sapien
gaacattttcatttgacgtatttga

SEQ ID NO: 948986 - DNA, 25 bp, Homo sapien
cattcctactaattttggtggctgt

SEQ ID NO: 948987 - DNA, 25 bp, Homo sapien
tccaacattcctactaattttggtg

SEQ ID NO: 948988 - DNA, 25 bp, Homo sapien
caacattcctactaattttggtggc

SEQ ID NO: 948989 - DNA, 25 bp, Homo sapien
tcacttctccaacattcctactaat

SEQ ID NO: 948990 - DNA, 25 bp, Homo sapien
ttgcggtctcctggaacagctgttc

SEQ ID NO: 948991 - DNA, 25 bp, Homo sapien
cttctgtttgcggtctcctggaaca

SEQ ID NO: 948992 - DNA, 25 bp, Homo sapien
tctggacagccagcattatgaatgc

SEQ ID NO: 948993 - DNA, 25 bp, Homo sapien
gaggatttcccctttctcgaattca

SEQ ID NO: 948994 - DNA, 25 bp, Homo sapien
caggcaccagtggataagcttccat

SEQ ID NO: 948995 - DNA, 25 bp, Homo sapien
tggacatagctttcaggcattttga

SEQ ID NO: 948996 - DNA, 25 bp, Homo sapien
taatgatactgtagagacatggaca

SEQ ID NO: 948997 - DNA, 25 bp, Homo sapien
tcaggcaagcagttaaaagtatcac

SEQ ID NO: 948998 - DNA, 25 bp, Homo sapien
ccccgcagtgcatgcttctctctct

SEQ ID NO: 948999 - DNA, 25 bp, Homo sapien
gtgactgagctgagcggttccaccc

SEQ ID NO: 949000 - DNA, 25 bp, Homo sapien
tctcccttcatctggtaggtgactg

SEQ ID NO: 949001 - DNA, 25 bp, Homo sapien
cctgagctgcgattccttgggagga

SEQ ID NO: 949002 - DNA, 25 bp, Homo sapien
cactgacagttgctttcacttggct

SEQ ID NO: 949003 - DNA, 25 bp, Homo sapien
tgtgtgacctcacaggttgccactg

SEQ ID NO: 949004 - DNA, 25 bp, Homo sapien
tcttgctgattggaaccaagtgcct

SEQ ID NO: 949005 - DNA, 25 bp, Homo sapien
gattactggcattaacgttggtcag

SEQ ID NO: 949006 - DNA, 25 bp, Homo sapien
gtaaatcctgagaatgctagacttc

SEQ ID NO: 949007 - DNA, 25 bp, Homo sapien
gaatgctagacttcagctcttcatc

SEQ ID NO: 949008 - DNA, 25 bp, Homo sapien
gagaatgctagacttcagctcttca

SEQ ID NO: 949009 - DNA, 25 bp, Homo sapien
aatcctgagaatgctagacttcagc

SEQ ID NO: 949010 - DNA, 25 bp, Homo sapien
actaaaggcgttcttcagagtggtg

SEQ ID NO: 949011 - DNA, 25 bp, Homo sapien
agtggtgaatcccaatctttctgca

SEQ ID NO: 949012 - DNA, 25 bp, Homo sapien
ctctggaaatattgttttgccatcc

SEQ ID NO: 949013 - DNA, 25 bp, Homo sapien
aagaaattaagtttgaatatctggg

SEQ ID NO: 949014 - DNA, 25 bp, Homo sapien
gctttaaaactcaattcgatatgcc

SEQ ID NO: 949015 - DNA, 25 bp, Homo sapien
gccagaatagtcaatgcagtcttca

SEQ ID NO: 949016 - DNA, 25 bp, Homo sapien
tgcccagcctgtgacggaatacttt

SEQ ID NO: 949017 - DNA, 25 bp, Homo sapien
ccattgaggctctagataaattatc

SEQ ID NO: 949018 - DNA, 25 bp, Homo sapien
ctggctggatgaggctaggagaagt

SEQ ID NO: 949019 - DNA, 25 bp, Homo sapien
gaaatagccaaaaatgttatctggc

SEQ ID NO: 949020 - DNA, 25 bp, Homo sapien
gctaggagaagtctcagtgagtctt

SEQ ID NO: 949021 - DNA, 25 bp, Homo sapien
tgagtcttataaaccccagcacagt

SEQ ID NO: 949022 - DNA, 25 bp, Homo sapien
gaaataacgccgcatatctacaact

SEQ ID NO: 949023 - DNA, 25 bp, Homo sapien
agccctcagaaataacgccgcatat

SEQ ID NO: 949024 - DNA, 25 bp, Homo sapien
atagatcaacagaacagaacagagc

SEQ ID NO: 949025 - DNA, 25 bp, Homo sapien
aataacgccgcatatctacaactat

SEQ ID NO: 949026 - DNA, 25 bp, Homo sapien
tcattttgtgctggcctgctactcc

SEQ ID NO: 949027 - DNA, 25 bp, Homo sapien
tccaccggagttgatgcttgggctc

SEQ ID NO: 949028 - DNA, 25 bp, Homo sapien
gctccagaggtttatcgaatgcctg

SEQ ID NO: 949029 - DNA, 25 bp, Homo sapien
tgatcggcttcctctgtaacccctt

SEQ ID NO: 949030 - DNA, 25 bp, Homo sapien
atcgccctgaagtcagtgagttctc

SEQ ID NO: 949031 - DNA, 25 bp, Homo sapien
aggatgccaaatcgccctgaagtca

SEQ ID NO: 949032 - DNA, 25 bp, Homo sapien
ctgaggatgccaaatcgccctgaag

SEQ ID NO: 949033 - DNA, 25 bp, Homo sapien
tgccaaatcgccctgaagtcagtga

SEQ ID NO: 949034 - DNA, 25 bp, Homo sapien
tgtggaaggctagcggctcttctgt

SEQ ID NO: 949035 - DNA, 25 bp, Homo sapien
ctgggttacataaatggccaatttt

SEQ ID NO: 949036 - DNA, 25 bp, Homo sapien
gcatgtggaaggctagcggctcttc

SEQ ID NO: 949037 - DNA, 25 bp, Homo sapien
gaaggctagcggctcttctgtcttc

SEQ ID NO: 949038 - DNA, 25 bp, Homo sapien
tttggggacaatgaaggacaccaag

SEQ ID NO: 949039 - DNA, 25 bp, Homo sapien
ctttggggacaatgaaggacaccaa

SEQ ID NO: 949040 - DNA, 25 bp, Homo sapien
tgttaccaagtttagcgtaagctcg

SEQ ID NO: 949041 - DNA, 25 bp, Homo sapien
tcggtagacgggctacttgccaaac

SEQ ID NO: 949042 - DNA, 25 bp, Homo sapien
taagctcggtagacgggctacttgc

SEQ ID NO: 949043 - DNA, 25 bp, Homo sapien
tttagcgtaagctcggtagacgggc

SEQ ID NO: 949044 - DNA, 25 bp, Homo sapien
caaacctgatggttcctgaagtctc

SEQ ID NO: 949045 - DNA, 25 bp, Homo sapien
cactgcaaacctgatggttcctgaa

SEQ ID NO: 949046 - DNA, 25 bp, Homo sapien
cagtcactgcaaacctgatggttcc

SEQ ID NO: 949047 - DNA, 25 bp, Homo sapien
tgcaaacctgatggttcctgaagtc

SEQ ID NO: 949048 - DNA, 25 bp, Homo sapien
tacccttgattgatgaacagtcttc

SEQ ID NO: 949049 - DNA, 25 bp, Homo sapien
tgtagcagaagagcgtacacactct

SEQ ID NO: 949050 - DNA, 25 bp, Homo sapien
gaggacactcaactatccagccaga

SEQ ID NO: 949051 - DNA, 25 bp, Homo sapien
cagccttgttagcagagtgtacagc

SEQ ID NO: 949052 - DNA, 25 bp, Homo sapien
aaagcaccaaagctgtgcactgctg

SEQ ID NO: 949053 - DNA, 25 bp, Homo sapien
tctgaaacatgtgtattgtcttcat

SEQ ID NO: 949054 - DNA, 25 bp, Homo sapien
tgtcaaagaacacagcacaagcatt

SEQ ID NO: 949055 - DNA, 25 bp, Homo sapien
agtgtttggagagcatcccgagagc

SEQ ID NO: 949056 - DNA, 25 bp, Homo sapien
aagaaatctgggtaactgttccagt

SEQ ID NO: 949057 - DNA, 25 bp, Homo sapien
gaagaaatctgggtaactgttccag

SEQ ID NO: 949058 - DNA, 25 bp, Homo sapien
agcttgtctatgcaggagttggagt

SEQ ID NO: 949059 - DNA, 25 bp, Homo sapien
gagttggagttaacagcaatgtttc

SEQ ID NO: 949060 - DNA, 25 bp, Homo sapien
tatgcaggagttggagttaacagca

SEQ ID NO: 949061 - DNA, 25 bp, Homo sapien
tgtctatgcaggagttggagttaac

SEQ ID NO: 949062 - DNA, 25 bp, Homo sapien
gtcttcgtatttggctgaaccgggc

SEQ ID NO: 949063 - DNA, 25 bp, Homo sapien
ctttatgtcttcgtatttggctgaa

SEQ ID NO: 949064 - DNA, 25 bp, Homo sapien
tgtgtctgacgcgtgttcttcaaat

SEQ ID NO: 949065 - DNA, 25 bp, Homo sapien
tatttggctgaaccgggctgtgtct

SEQ ID NO: 949066 - DNA, 25 bp, Homo sapien
ttgtctgtccataatcagcgttgtc

SEQ ID NO: 949067 - DNA, 25 bp, Homo sapien
aggaaaattcattgtctgtccataa

SEQ ID NO: 949068 - DNA, 25 bp, Homo sapien
tgtctccaggtcttagaggaaaatt

SEQ ID NO: 949069 - DNA, 25 bp, Homo sapien
gtctccaggtcttagaggaaaattc

SEQ ID NO: 949070 - DNA, 25 bp, Homo sapien
tctctccaaaattttgactccttcc

SEQ ID NO: 949071 - DNA, 25 bp, Homo sapien
ccatagataatctctactttctctc

SEQ ID NO: 949072 - DNA, 25 bp, Homo sapien
tagataatctctactttctctccaa

SEQ ID NO: 949073 - DNA, 25 bp, Homo sapien
ctccaaaattttgactccttcccag

SEQ ID NO: 949074 - DNA, 25 bp, Homo sapien
tcccatagtgcctactataatgcct

SEQ ID NO: 949075 - DNA, 25 bp, Homo sapien
tttatagctctctctcccatagtgc

SEQ ID NO: 949076 - DNA, 25 bp, Homo sapien
tactataatgcctatcattgcaaac

SEQ ID NO: 949077 - DNA, 25 bp, Homo sapien
ttatagctctctctcccatagtgcc

SEQ ID NO: 949078 - DNA, 25 bp, Homo sapien
agcacgtctgtggtttgttttgtca

SEQ ID NO: 949079 - DNA, 25 bp, Homo sapien
cattccatttggttttagcatattt

SEQ ID NO: 949080 - DNA, 25 bp, Homo sapien
tgttatacaaagacagctgtgaccc

SEQ ID NO: 949081 - DNA, 25 bp, Homo sapien
tctgatttagtgtaagcacgtctgt

SEQ ID NO: 949082 - DNA, 25 bp, Homo sapien
tcatttgctcccttgccaattcctc

SEQ ID NO: 949083 - DNA, 25 bp, Homo sapien
ccacagtaccatcctaaattctgac

SEQ ID NO: 949084 - DNA, 25 bp, Homo sapien
gctcccttgccaattcctccagcaa

SEQ ID NO: 949085 - DNA, 25 bp, Homo sapien
ctccacagtaccatcctaaattctg

SEQ ID NO: 949086 - DNA, 25 bp, Homo sapien
atgctctcaattctagccatcattg

SEQ ID NO: 949087 - DNA, 25 bp, Homo sapien
gctctcaattctagccatcattgtc

SEQ ID NO: 949088 - DNA, 25 bp, Homo sapien
tcaattctagccatcattgtcttcc

SEQ ID NO: 949089 - DNA, 25 bp, Homo sapien
attctagccatcattgtcttcctgc

SEQ ID NO: 949090 - DNA, 25 bp, Homo sapien
aaagcagaactagcatttggtgaaa

SEQ ID NO: 949091 - DNA, 25 bp, Homo sapien
gtgttttgctgcacaacactcctgc

SEQ ID NO: 949092 - DNA, 25 bp, Homo sapien
aaggacgttgtgagttttggatacg

SEQ ID NO: 949093 - DNA, 25 bp, Homo sapien
cctgcattactaccaaaggacgttg

SEQ ID NO: 949094 - DNA, 25 bp, Homo sapien
cactggatctcccttccacatgggc

SEQ ID NO: 949095 - DNA, 25 bp, Homo sapien
tggatctcccttccacatgggcctc

SEQ ID NO: 949096 - DNA, 25 bp, Homo sapien
cacatgggcctccacagtctaccag

SEQ ID NO: 949097 - DNA, 25 bp, Homo sapien
tccacagtctaccagctccgcgcat

SEQ ID NO: 949098 - DNA, 25 bp, Homo sapien
agatctatagcccatttcttcaact

SEQ ID NO: 949099 - DNA, 25 bp, Homo sapien
cctcagtagatctatagcccatttc

SEQ ID NO: 949100 - DNA, 25 bp, Homo sapien
ttcctcagtagatctatagcccatt

SEQ ID NO: 949101 - DNA, 25 bp, Homo sapien
agtagatctatagcccatttcttca

SEQ ID NO: 949102 - DNA, 25 bp, Homo sapien
atttccattacctttttgatgattc

SEQ ID NO: 949103 - DNA, 25 bp, Homo sapien
ggtggtgtttgtagtttgatttcca

SEQ ID NO: 949104 - DNA, 25 bp, Homo sapien
attacctttttgatgattccttcca

SEQ ID NO: 949105 - DNA, 25 bp, Homo sapien
tgtttgtagtttgatttccattacc

SEQ ID NO: 949106 - DNA, 25 bp, Homo sapien
tgttgtctgtattccagaatgtatc

SEQ ID NO: 949107 - DNA, 25 bp, Homo sapien
tgtctgtattccagaatgtatcttg

SEQ ID NO: 949108 - DNA, 25 bp, Homo sapien
tgtattccagaatgtatcttgccag

SEQ ID NO: 949109 - DNA, 25 bp, Homo sapien
attccagaatgtatcttgccagtgc

SEQ ID NO: 949110 - DNA, 25 bp, Homo sapien
ccatcatcccttttaaggtcttctc

SEQ ID NO: 949111 - DNA, 25 bp, Homo sapien
ctatgctgaatcatctattgtcaac

SEQ ID NO: 949112 - DNA, 25 bp, Homo sapien
tcatcccttttaaggtcttctccca

SEQ ID NO: 949113 - DNA, 25 bp, Homo sapien
catctattgtcaactgcgcatcacc

SEQ ID NO: 949114 - DNA, 25 bp, Homo sapien
gaataaaacaacagttttcttgcat

SEQ ID NO: 949115 - DNA, 25 bp, Homo sapien
atgaagaataaaacaacagttttct

SEQ ID NO: 949116 - DNA, 25 bp, Homo sapien
agcatgttgatgaagaataaaacaa

SEQ ID NO: 949117 - DNA, 25 bp, Homo sapien
tgatgaagaataaaacaacagtttt

SEQ ID NO: 949118 - DNA, 25 bp, Homo sapien
gaaactgcagacagtctggaattgc

SEQ ID NO: 949119 - DNA, 25 bp, Homo sapien
agtctttcatgtctagtccccactc

SEQ ID NO: 949120 - DNA, 25 bp, Homo sapien
gctccatgttactcctttctcccca

SEQ ID NO: 949121 - DNA, 25 bp, Homo sapien
cttctctgctccatgttactccttt

SEQ ID NO: 949122 - DNA, 25 bp, Homo sapien
ccaagtctttcatgtctagtcccca

SEQ ID NO: 949123 - DNA, 25 bp, Homo sapien
tgatggtggggaaggtagtctccca

SEQ ID NO: 949124 - DNA, 25 bp, Homo sapien
ctggctgatggtggggaaggtagtc

SEQ ID NO: 949125 - DNA, 25 bp, Homo sapien
gatggtggggaaggtagtctcccag

SEQ ID NO: 949126 - DNA, 25 bp, Homo sapien
gctgatggtggggaaggtagtctcc

SEQ ID NO: 949127 - DNA, 25 bp, Homo sapien
acttccaacatttccactaaatcca

SEQ ID NO: 949128 - DNA, 25 bp, Homo sapien
tccccatccaacacgaagaaatatt

SEQ ID NO: 949129 - DNA, 25 bp, Homo sapien
gtccccatccaacacgaagaaatat

SEQ ID NO: 949130 - DNA, 25 bp, Homo sapien
ccatccaacacgaagaaatatttgc

SEQ ID NO: 949131 - DNA, 25 bp, Homo sapien
gcagaagggtcagtggcattgatcc

SEQ ID NO: 949132 - DNA, 25 bp, Homo sapien
gtcagcccggcctgggtaatggcgt

SEQ ID NO: 949133 - DNA, 25 bp, Homo sapien
cattgatccacttgggcatccagta

SEQ ID NO: 949134 - DNA, 25 bp, Homo sapien
gggcatccagtaatggctcagccag

SEQ ID NO: 949135 - DNA, 25 bp, Homo sapien
tgacggtagtaatatccttctttgg

SEQ ID NO: 949136 - DNA, 25 bp, Homo sapien
gacttgacggtagtaatatccttct

SEQ ID NO: 949137 - DNA, 25 bp, Homo sapien
aaagacttgacggtagtaatatcct

SEQ ID NO: 949138 - DNA, 25 bp, Homo sapien
tcaaagacttgacggtagtaatatc

SEQ ID NO: 949139 - DNA, 25 bp, Homo sapien
tgtatgagaccctttgaatcaccca

SEQ ID NO: 949140 - DNA, 25 bp, Homo sapien
cataatatggatagctgcagtgcct

SEQ ID NO: 949141 - DNA, 25 bp, Homo sapien
gaatctctctgataggaacatccta

SEQ ID NO: 949142 - DNA, 25 bp, Homo sapien
gacgtgactgtaacttgtatgagac

SEQ ID NO: 949143 - DNA, 25 bp, Homo sapien
atctctttgggtatcagattggaat

SEQ ID NO: 949144 - DNA, 25 bp, Homo sapien
ctctcaggagatgtttttctatccc

SEQ ID NO: 949145 - DNA, 25 bp, Homo sapien
ggaatcctcaaacgtctctctcagg

SEQ ID NO: 949146 - DNA, 25 bp, Homo sapien
tcttttggtcgccagagaatctctt

SEQ ID NO: 949147 - DNA, 25 bp, Homo sapien
gacagttttaccttgagttgattta

SEQ ID NO: 949148 - DNA, 25 bp, Homo sapien
tctgatggcaatggacagttttacc

SEQ ID NO: 949149 - DNA, 25 bp, Homo sapien
tggacagttttaccttgagttgatt

SEQ ID NO: 949150 - DNA, 25 bp, Homo sapien
atctgatggcaatggacagttttac

SEQ ID NO: 949151 - DNA, 25 bp, Homo sapien
aattctcatttctggtggcagagac

SEQ ID NO: 949152 - DNA, 25 bp, Homo sapien
tggtggcagagacaagtaataggaa

SEQ ID NO: 949153 - DNA, 25 bp, Homo sapien
tttggaattctcatttctggtggca

SEQ ID NO: 949154 - DNA, 25 bp, Homo sapien
ctggtggcagagacaagtaatagga

SEQ ID NO: 949155 - DNA, 25 bp, Homo sapien
ctagaaatgggactctcagttcaag

SEQ ID NO: 949156 - DNA, 25 bp, Homo sapien
taaaatgggtatttagtgcctgcca

SEQ ID NO: 949157 - DNA, 25 bp, Homo sapien
aaatcaccggtttcctgaagcctag

SEQ ID NO: 949158 - DNA, 25 bp, Homo sapien
tcagtgtttactaggtgagaccatc

SEQ ID NO: 949159 - DNA, 25 bp, Homo sapien
tatgcgatataaaccagtgtcccac

SEQ ID NO: 949160 - DNA, 25 bp, Homo sapien
cgatctgcgcggagaacatcaaaca

SEQ ID NO: 949161 - DNA, 25 bp, Homo sapien
gtagttcgatctgcgcggagaacat

SEQ ID NO: 949162 - DNA, 25 bp, Homo sapien
tcgatctgcgcggagaacatcaaac

SEQ ID NO: 949163 - DNA, 25 bp, Homo sapien
gcagcagtagttcgatctgcgcgga

SEQ ID NO: 949164 - DNA, 25 bp, Homo sapien
aacaccaagagttttgcttttggca

SEQ ID NO: 949165 - DNA, 25 bp, Homo sapien
ttgcttttggcacacaaagcagttt

SEQ ID NO: 949166 - DNA, 25 bp, Homo sapien
ctatttcacaaacaaaaacaccaag

SEQ ID NO: 949167 - DNA, 25 bp, Homo sapien
gcagtttttctttctccctctccaa

SEQ ID NO: 949168 - DNA, 25 bp, Homo sapien
gagtaaataactgaacagaggtaag

SEQ ID NO: 949169 - DNA, 25 bp, Homo sapien
gggagtaaataactgaacagaggta

SEQ ID NO: 949170 - DNA, 25 bp, Homo sapien
gtaaataactgaacagaggtaagca

SEQ ID NO: 949171 - DNA, 25 bp, Homo sapien
agggagtaaataactgaacagaggt

SEQ ID NO: 949172 - DNA, 25 bp, Homo sapien
tcagattcccttttgtaacctcaca

SEQ ID NO: 949173 - DNA, 25 bp, Homo sapien
gtatgagcatgagccctcataccca

SEQ ID NO: 949174 - DNA, 25 bp, Homo sapien
ctcatacccagctgtaactagtttt

SEQ ID NO: 949175 - DNA, 25 bp, Homo sapien
tagaaagcaaacactatcagattcc

SEQ ID NO: 949176 - DNA, 25 bp, Homo sapien
cacgctatctgtgttcttccgaata

SEQ ID NO: 949177 - DNA, 25 bp, Homo sapien
agatcaccacgctatctgtgttctt

SEQ ID NO: 949178 - DNA, 25 bp, Homo sapien
cgctatctgtgttcttccgaatata

SEQ ID NO: 949179 - DNA, 25 bp, Homo sapien
tcaccacgctatctgtgttcttccg

SEQ ID NO: 949180 - DNA, 25 bp, Homo sapien
gcacgaactgttgtaatgtcataag

SEQ ID NO: 949181 - DNA, 25 bp, Homo sapien
tactgaagcacgaactgttgtaatg

SEQ ID NO: 949182 - DNA, 25 bp, Homo sapien
ctactgaagcacgaactgttgtaat

SEQ ID NO: 949183 - DNA, 25 bp, Homo sapien
gaagcacgaactgttgtaatgtcat

SEQ ID NO: 949184 - DNA, 25 bp, Homo sapien
atgtctggagaggatactgtacttg

SEQ ID NO: 949185 - DNA, 25 bp, Homo sapien
tgtctggagaggatactgtacttgg

SEQ ID NO: 949186 - DNA, 25 bp, Homo sapien
gataaaaggcagccaatccttctgt

SEQ ID NO: 949187 - DNA, 25 bp, Homo sapien
caatcatcaacatctatcatgatgg

SEQ ID NO: 949188 - DNA, 25 bp, Homo sapien
tcttgggctggattagttattgaaa

SEQ ID NO: 949189 - DNA, 25 bp, Homo sapien
gtatttactcaatggtggagtgtgc

SEQ ID NO: 949190 - DNA, 25 bp, Homo sapien
tgtgttccctccaaacaaaatagga

SEQ ID NO: 949191 - DNA, 25 bp, Homo sapien
gttcatcccgacagtgatgatattt

SEQ ID NO: 949192 - DNA, 25 bp, Homo sapien
gggttcatcccgacagtgatgatat

SEQ ID NO: 949193 - DNA, 25 bp, Homo sapien
ggggttcatcccgacagtgatgata

SEQ ID NO: 949194 - DNA, 25 bp, Homo sapien
ggttcatcccgacagtgatgatatt

SEQ ID NO: 949195 - DNA, 25 bp, Homo sapien
aaagggagtcgcggagtgcttcaat

SEQ ID NO: 949196 - DNA, 25 bp, Homo sapien
ggagtcgcggagtgcttcaatgtaa

SEQ ID NO: 949197 - DNA, 25 bp, Homo sapien
aaaagggagtcgcggagtgcttcaa

SEQ ID NO: 949198 - DNA, 25 bp, Homo sapien
gggagtcgcggagtgcttcaatgta

SEQ ID NO: 949199 - DNA, 25 bp, Homo sapien
atgatacctctattcaaattaggta

SEQ ID NO: 949200 - DNA, 25 bp, Homo sapien
gaaattcacaatgatacctctattc

SEQ ID NO: 949201 - DNA, 25 bp, Homo sapien
cttcccaataactttcacgattagt

SEQ ID NO: 949202 - DNA, 25 bp, Homo sapien
cacgattagttaacatcatctacat

SEQ ID NO: 949203 - DNA, 25 bp, Homo sapien
tgactccatatgtatctctacccag

SEQ ID NO: 949204 - DNA, 25 bp, Homo sapien
ggtctgactccatatgtatctctac

SEQ ID NO: 949205 - DNA, 25 bp, Homo sapien
ctccatatgtatctctacccaggaa

SEQ ID NO: 949206 - DNA, 25 bp, Homo sapien
gactccatatgtatctctacccagg

SEQ ID NO: 949207 - DNA, 25 bp, Homo sapien
tgatgtctggtgcatagtagaccct

SEQ ID NO: 949208 - DNA, 25 bp, Homo sapien
gaaagccaagctgataatgccataa

SEQ ID NO: 949209 - DNA, 25 bp, Homo sapien
ccacctagcgttctcatgtatatga

SEQ ID NO: 949210 - DNA, 25 bp, Homo sapien
taacactgttcaagtgaaacagggc

SEQ ID NO: 949211 - DNA, 25 bp, Homo sapien
tcatcgtaaccaacaaactctgaag

SEQ ID NO: 949212 - DNA, 25 bp, Homo sapien
gaagtttaatcgcatccagacatct

SEQ ID NO: 949213 - DNA, 25 bp, Homo sapien
actctgaagtttaatcgcatccaga

SEQ ID NO: 949214 - DNA, 25 bp, Homo sapien
ctgaagtttaatcgcatccagacat

SEQ ID NO: 949215 - DNA, 25 bp, Homo sapien
cggatatttcttcactcgaattggc

SEQ ID NO: 949216 - DNA, 25 bp, Homo sapien
ttgtaacagagccacaaatacggat

SEQ ID NO: 949217 - DNA, 25 bp, Homo sapien
tcaactaccgccaaccggtgaaatc

SEQ ID NO: 949218 - DNA, 25 bp, Homo sapien
aaaacggaatgcatctggacctctg

SEQ ID NO: 949219 - DNA, 25 bp, Homo sapien
tgccaaacagcgcccaaatgccaca

SEQ ID NO: 949220 - DNA, 25 bp, Homo sapien
ctgccaaacagcgcccaaatgccac

SEQ ID NO: 949221 - DNA, 25 bp, Homo sapien
caaacagcgcccaaatgccacacat

SEQ ID NO: 949222 - DNA, 25 bp, Homo sapien
ccaaacagcgcccaaatgccacaca

SEQ ID NO: 949223 - DNA, 25 bp, Homo sapien
ttggctagagctgacagcgtccatg

SEQ ID NO: 949224 - DNA, 25 bp, Homo sapien
gctagagctgacagcgtccatgcca

SEQ ID NO: 949225 - DNA, 25 bp, Homo sapien
agagctgacagcgtccatgccacat

SEQ ID NO: 949226 - DNA, 25 bp, Homo sapien
agctgacagcgtccatgccacatct

SEQ ID NO: 949227 - DNA, 25 bp, Homo sapien
gagatcctagccccactctcaccat

SEQ ID NO: 949228 - DNA, 25 bp, Homo sapien
ccagagatcctagccccactctcac

SEQ ID NO: 949229 - DNA, 25 bp, Homo sapien
ctagccagagatcctagccccactc

SEQ ID NO: 949230 - DNA, 25 bp, Homo sapien
tagccagagatcctagccccactct

SEQ ID NO: 949231 - DNA, 25 bp, Homo sapien
agtgatttattcagatgtgattgaa

SEQ ID NO: 949232 - DNA, 25 bp, Homo sapien
cttcaagtgatttattcagatgtga

SEQ ID NO: 949233 - DNA, 25 bp, Homo sapien
tcaagtgatttattcagatgtgatt

SEQ ID NO: 949234 - DNA, 25 bp, Homo sapien
tgatttattcagatgtgattgaaga

SEQ ID NO: 949235 - DNA, 25 bp, Homo sapien
cagtcttataggagggcaaagttcc

SEQ ID NO: 949236 - DNA, 25 bp, Homo sapien
tacattctaaccactaaactggagg

SEQ ID NO: 949237 - DNA, 25 bp, Homo sapien
tgaagtaccacatgtcctatgctgt

SEQ ID NO: 949238 - DNA, 25 bp, Homo sapien
cttaacgctgcttagtgaatccctg

SEQ ID NO: 949239 - DNA, 25 bp, Homo sapien
taaattattagtcaagcgcccaggg

SEQ ID NO: 949240 - DNA, 25 bp, Homo sapien
cgcccagggcaatggacagtaaaga

SEQ ID NO: 949241 - DNA, 25 bp, Homo sapien
gaagccagccctgcaaaatgacagc

SEQ ID NO: 949242 - DNA, 25 bp, Homo sapien
cacgggccgagatgaaaactgtcct

SEQ ID NO: 949243 - DNA, 25 bp, Homo sapien
tctgtacttggtcgcctgtgtccct

SEQ ID NO: 949244 - DNA, 25 bp, Homo sapien
tttttctgtacttggtcgcctgtgt

SEQ ID NO: 949245 - DNA, 25 bp, Homo sapien
tgctcagcaagtcacttgatgagtc

SEQ ID NO: 949246 - DNA, 25 bp, Homo sapien
tttgctcagcaagtcacttgatgag

SEQ ID NO: 949247 - DNA, 25 bp, Homo sapien
ctcttctcggcagggtttgctcagc

SEQ ID NO: 949248 - DNA, 25 bp, Homo sapien
cagcaagtcacttgatgagtcttgc

SEQ ID NO: 949249 - DNA, 25 bp, Homo sapien
agacggtgataaggccgcagtctct

SEQ ID NO: 949250 - DNA, 25 bp, Homo sapien
gtgaaagcagacaccgagacggtga

SEQ ID NO: 949251 - DNA, 25 bp, Homo sapien
gacccggaccgcgaaaatgtccaca

SEQ ID NO: 949252 - DNA, 25 bp, Homo sapien
ggaggagggtgagcggtccaggtga

SEQ ID NO: 949253 - DNA, 25 bp, Homo sapien
ccacatagtaaaaaaaagtacacat

SEQ ID NO: 949254 - DNA, 25 bp, Homo sapien
cacatagtaaaaaaaagtacacata

SEQ ID NO: 949255 - DNA, 25 bp, Homo sapien
gccacatagtaaaaaaaagtacaca

SEQ ID NO: 949256 - DNA, 25 bp, Homo sapien
catagtaaaaaaaagtacacatata

SEQ ID NO: 949257 - DNA, 25 bp, Homo sapien
cctctcgatgcttcagggaaccagg

SEQ ID NO: 949258 - DNA, 25 bp, Homo sapien
ccctctcgatgcttcagggaaccag

SEQ ID NO: 949259 - DNA, 25 bp, Homo sapien
ctctccggagcggtccggcctgccg

SEQ ID NO: 949260 - DNA, 25 bp, Homo sapien
cgctgcctcctctccggagcggtcc

SEQ ID NO: 949261 - DNA, 25 bp, Homo sapien
ctgggcgtaagcaggtcagggtgat

SEQ ID NO: 949262 - DNA, 25 bp, Homo sapien
tcagggtgatgtggcgggctgaggc

SEQ ID NO: 949263 - DNA, 25 bp, Homo sapien
atgtggacagcttgacgggcggcga

SEQ ID NO: 949264 - DNA, 25 bp, Homo sapien
ctggctcctgtaacgcgtgcgggaa

SEQ ID NO: 949265 - DNA, 25 bp, Homo sapien
caggttcccctgcttggtgtgttac

SEQ ID NO: 949266 - DNA, 25 bp, Homo sapien
ctatgtagtgaaagacaggttcccc

SEQ ID NO: 949267 - DNA, 25 bp, Homo sapien
tgttacctagtgtgcttccttgtgc

SEQ ID NO: 949268 - DNA, 25 bp, Homo sapien
taatctgtgtaaacccagagcccat

SEQ ID NO: 949269 - DNA, 25 bp, Homo sapien
ccataagagacaggtacgccccggg

SEQ ID NO: 949270 - DNA, 25 bp, Homo sapien
cataagagacaggtacgccccgggg

SEQ ID NO: 949271 - DNA, 25 bp, Homo sapien
accataagagacaggtacgccccgg

SEQ ID NO: 949272 - DNA, 25 bp, Homo sapien
gttgggatctatccctgaaggaaca

SEQ ID NO: 949273 - DNA, 25 bp, Homo sapien
tgagttgggatctatccctgaagga

SEQ ID NO: 949274 - DNA, 25 bp, Homo sapien
actgagttgggatctatccctgaag

SEQ ID NO: 949275 - DNA, 25 bp, Homo sapien
gagttgggatctatccctgaaggaa

SEQ ID NO: 949276 - DNA, 25 bp, Homo sapien
gggtcttctatttagggtcacaata

SEQ ID NO: 949277 - DNA, 25 bp, Homo sapien
gcatggccatttgtgtctccttgga

SEQ ID NO: 949278 - DNA, 25 bp, Homo sapien
ggtctggcccacctaagatcatcct

SEQ ID NO: 949279 - DNA, 25 bp, Homo sapien
tgtgcttaacaaagcaagtgtgacc

SEQ ID NO: 949280 - DNA, 25 bp, Homo sapien
gccccagggaataaattttgactgc

SEQ ID NO: 949281 - DNA, 25 bp, Homo sapien
cagccccagggaataaattttgact

SEQ ID NO: 949282 - DNA, 25 bp, Homo sapien
agccccagggaataaattttgactg

SEQ ID NO: 949283 - DNA, 25 bp, Homo sapien
tccatgcctttcaaatccagggttc

SEQ ID NO: 949284 - DNA, 25 bp, Homo sapien
ttagcatgtgtctcgtccctagtgg

SEQ ID NO: 949285 - DNA, 25 bp, Homo sapien
ccacgaagctccatgcctttcaaat

SEQ ID NO: 949286 - DNA, 25 bp, Homo sapien
ctttcaaatccagggttctccagca

SEQ ID NO: 949287 - DNA, 25 bp, Homo sapien
ctggatttggcagactgatggtgct

SEQ ID NO: 949288 - DNA, 25 bp, Homo sapien
atttggcagactgatggtgctgagc

SEQ ID NO: 949289 - DNA, 25 bp, Homo sapien
ggcagactgatggtgctgagcataa

SEQ ID NO: 949290 - DNA, 25 bp, Homo sapien
tcttctggatttggcagactgatgg

SEQ ID NO: 949291 - DNA, 25 bp, Homo sapien
caatcattgttgaacatttttcaac

SEQ ID NO: 949292 - DNA, 25 bp, Homo sapien
cagatgaaagaagtaaccatcggta

SEQ ID NO: 949293 - DNA, 25 bp, Homo sapien
agcttcaatcattgttgaacatttt

SEQ ID NO: 949294 - DNA, 25 bp, Homo sapien
acatttttcaaccatggaacatatt

SEQ ID NO: 949295 - DNA, 25 bp, Homo sapien
tcctggcgaccaagtctttccaata

SEQ ID NO: 949296 - DNA, 25 bp, Homo sapien
cttgggtcctggcgaccaagtcttt

SEQ ID NO: 949297 - DNA, 25 bp, Homo sapien
tgggtcctggcgaccaagtctttcc

SEQ ID NO: 949298 - DNA, 25 bp, Homo sapien
ggtcctggcgaccaagtctttccaa

SEQ ID NO: 949299 - DNA, 25 bp, Homo sapien
atattgaacataggaggtgctttca

SEQ ID NO: 949300 - DNA, 25 bp, Homo sapien
cttatattgaacataggaggtgctt

SEQ ID NO: 949301 - DNA, 25 bp, Homo sapien
tattgaacataggaggtgctttcac

SEQ ID NO: 949302 - DNA, 25 bp, Homo sapien
tatattgaacataggaggtgctttc

SEQ ID NO: 949303 - DNA, 25 bp, Homo sapien
tactgatctttcttagagaatggac

SEQ ID NO: 949304 - DNA, 25 bp, Homo sapien
gatctttcttagagaatggaccaac

SEQ ID NO: 949305 - DNA, 25 bp, Homo sapien
ctttcttagagaatggaccaactac

SEQ ID NO: 949306 - DNA, 25 bp, Homo sapien
actgatctttcttagagaatggacc

SEQ ID NO: 949307 - DNA, 25 bp, Homo sapien
cataaggcacttgttcttaacaact

SEQ ID NO: 949308 - DNA, 25 bp, Homo sapien
tcataaggcacttgttcttaacaac

SEQ ID NO: 949309 - DNA, 25 bp, Homo sapien
tttcataaggcacttgttcttaaca

SEQ ID NO: 949310 - DNA, 25 bp, Homo sapien
taaggcacttgttcttaacaactgc

SEQ ID NO: 949311 - DNA, 25 bp, Homo sapien
tctttactcaagaatatagatctaa

SEQ ID NO: 949312 - DNA, 25 bp, Homo sapien
aaatggcatctactgggctcaagaa

SEQ ID NO: 949313 - DNA, 25 bp, Homo sapien
tagtcaggctgttgccaagcccagc

SEQ ID NO: 949314 - DNA, 25 bp, Homo sapien
tagagctaggatttagtttccattc

SEQ ID NO: 949315 - DNA, 25 bp, Homo sapien
ttctcttcacaacctcatgtttcct

SEQ ID NO: 949316 - DNA, 25 bp, Homo sapien
taaacttctcttcacaacctcatgt

SEQ ID NO: 949317 - DNA, 25 bp, Homo sapien
tctcttcacaacctcatgtttcctt

SEQ ID NO: 949318 - DNA, 25 bp, Homo sapien
ttgtaatgtgctcctaaacttgttc

SEQ ID NO: 949319 - DNA, 25 bp, Homo sapien
taatgtgctcctaaacttgttcttc

SEQ ID NO: 949320 - DNA, 25 bp, Homo sapien
cttcttgtaatgtgctcctaaactt

SEQ ID NO: 949321 - DNA, 25 bp, Homo sapien
ggaaaatctccataccccattgatg

SEQ ID NO: 949322 - DNA, 25 bp, Homo sapien
tcgaccgctccagaggaaacaaatg

SEQ ID NO: 949323 - DNA, 25 bp, Homo sapien
catgaatgacacagtaactacctgg

SEQ ID NO: 949324 - DNA, 25 bp, Homo sapien
catcatgaatgacacagtaactacc

SEQ ID NO: 949325 - DNA, 25 bp, Homo sapien
aagttcatgaccaatcgaccgctcc

SEQ ID NO: 949326 - DNA, 25 bp, Homo sapien
tgagcaagccgcctggatgattctc

SEQ ID NO: 949327 - DNA, 25 bp, Homo sapien
gattctgactctcattctaaagggc

SEQ ID NO: 949328 - DNA, 25 bp, Homo sapien
caaggaagttggctgtacatgtatt

SEQ ID NO: 949329 - DNA, 25 bp, Homo sapien
tctcacatgatgacaaactcgttga

SEQ ID NO: 949330 - DNA, 25 bp, Homo sapien
aagctcagctcatgagctgagatga

SEQ ID NO: 949331 - DNA, 25 bp, Homo sapien
gaggctgacactgtggactctccca

SEQ ID NO: 949332 - DNA, 25 bp, Homo sapien
aatcaagacaaagtacagcacacaa

SEQ ID NO: 949333 - DNA, 25 bp, Homo sapien
aggaaatcaagacaaagtacagcac

SEQ ID NO: 949334 - DNA, 25 bp, Homo sapien
cagctcagtcgacccatgcgccttg

SEQ ID NO: 949335 - DNA, 25 bp, Homo sapien
tagtaaatgtgcctctagaagtgtc

SEQ ID NO: 949336 - DNA, 25 bp, Homo sapien
gcctctagaagtgtccaagaactca

SEQ ID NO: 949337 - DNA, 25 bp, Homo sapien
aaatgtgcctctagaagtgtccaag

SEQ ID NO: 949338 - DNA, 25 bp, Homo sapien
ctagaagtgtccaagaactcactgc

SEQ ID NO: 949339 - DNA, 25 bp, Homo sapien
gatgacagattccactcatcactca

SEQ ID NO: 949340 - DNA, 25 bp, Homo sapien
aacagggagacgagagtcctggtct

SEQ ID NO: 949341 - DNA, 25 bp, Homo sapien
tggctcccccatttaagaccctgta

SEQ ID NO: 949342 - DNA, 25 bp, Homo sapien
cctgtaaacagggagacgagagtcc

SEQ ID NO: 949343 - DNA, 25 bp, Homo sapien
cagcttcgaggtccagtatgatttc

SEQ ID NO: 949344 - DNA, 25 bp, Homo sapien
ttcacagattaggaaacatcacaga

SEQ ID NO: 949345 - DNA, 25 bp, Homo sapien
ctttgcattcaaatagcagaatgtt

SEQ ID NO: 949346 - DNA, 25 bp, Homo sapien
cagacaaagaagaacactttgcatt

SEQ ID NO: 949347 - DNA, 25 bp, Homo sapien
cactttccagaagaggagactgagg

SEQ ID NO: 949348 - DNA, 25 bp, Homo sapien
ttgtctgcctagcagtcctgggaga

SEQ ID NO: 949349 - DNA, 25 bp, Homo sapien
caatcccactttccagaagaggaga

SEQ ID NO: 949350 - DNA, 25 bp, Homo sapien
aatcttgtctgcctagcagtcctgg

SEQ ID NO: 949351 - DNA, 25 bp, Homo sapien
cagaaagactggatcactcaactct

SEQ ID NO: 949352 - DNA, 25 bp, Homo sapien
gaaagactggatcactcaactctgc

SEQ ID NO: 949353 - DNA, 25 bp, Homo sapien
gagacagaaagactggatcactcaa

SEQ ID NO: 949354 - DNA, 25 bp, Homo sapien
gacagaaagactggatcactcaact

SEQ ID NO: 949355 - DNA, 25 bp, Homo sapien
agtccagccctcactaaacgctgga

SEQ ID NO: 949356 - DNA, 25 bp, Homo sapien
ctcactaaacgctggaactgttgtt

SEQ ID NO: 949357 - DNA, 25 bp, Homo sapien
tttcatcacacaggcttttccaagg

SEQ ID NO: 949358 - DNA, 25 bp, Homo sapien
ttccaaggctttccttcagtccagc

SEQ ID NO: 949359 - DNA, 25 bp, Homo sapien
acagcaggtactaggggtggctctg

SEQ ID NO: 949360 - DNA, 25 bp, Homo sapien
tcactctataaacacagcaggtact

SEQ ID NO: 949361 - DNA, 25 bp, Homo sapien
tccaaagacgtatcggtgcagggct

SEQ ID NO: 949362 - DNA, 25 bp, Homo sapien
taaacgaagcgtggtgcatccacac

SEQ ID NO: 949363 - DNA, 25 bp, Homo sapien
ccaggttccaacgtgagacaatgtc

SEQ ID NO: 949364 - DNA, 25 bp, Homo sapien
ggacagtaccatgtgagcccttggg

SEQ ID NO: 949365 - DNA, 25 bp, Homo sapien
ggcagggggctggttgtggcgtgtg

SEQ ID NO: 949366 - DNA, 25 bp, Homo sapien
tgaggaaaccccactcaaaatcctg

SEQ ID NO: 949367 - DNA, 25 bp, Homo sapien
gggacaacatggtacctatagttaa

SEQ ID NO: 949368 - DNA, 25 bp, Homo sapien
catacacttggaaatcactaagaga

SEQ ID NO: 949369 - DNA, 25 bp, Homo sapien
catgggacaacatggtacctatagt

SEQ ID NO: 949370 - DNA, 25 bp, Homo sapien
atatccatgggacaacatggtacct

SEQ ID NO: 949371 - DNA, 25 bp, Homo sapien
cgccagcctcgacctgccaaagtgc

SEQ ID NO: 949372 - DNA, 25 bp, Homo sapien
gatccgccagcctcgacctgccaaa

SEQ ID NO: 949373 - DNA, 25 bp, Homo sapien
gagacagttccgccatgttggctag

SEQ ID NO: 949374 - DNA, 25 bp, Homo sapien
tccgccagcctcgacctgccaaagt

SEQ ID NO: 949375 - DNA, 25 bp, Homo sapien
ccggactccacacatcaacaccgtc

SEQ ID NO: 949376 - DNA, 25 bp, Homo sapien
accggactccacacatcaacaccgt

SEQ ID NO: 949377 - DNA, 25 bp, Homo sapien
gataggtccgtcagtcctttggaac

SEQ ID NO: 949378 - DNA, 25 bp, Homo sapien
cggactccacacatcaacaccgtca

SEQ ID NO: 949379 - DNA, 25 bp, Homo sapien
tccagaggccacaagaagaaaaatg

SEQ ID NO: 949380 - DNA, 25 bp, Homo sapien
cattccagaggccacaagaagaaaa

SEQ ID NO: 949381 - DNA, 25 bp, Homo sapien
ttccagaggccacaagaagaaaaat

SEQ ID NO: 949382 - DNA, 25 bp, Homo sapien
cagaggccacaagaagaaaaatgac

SEQ ID NO: 949383 - DNA, 25 bp, Homo sapien
cgtcaccagggaaatatctatatct

SEQ ID NO: 949384 - DNA, 25 bp, Homo sapien
tcagcttgaaagatcgtcaccaggg

SEQ ID NO: 949385 - DNA, 25 bp, Homo sapien
gaaagatcgtcaccagggaaatatc

SEQ ID NO: 949386 - DNA, 25 bp, Homo sapien
tgtcttcatgtcagcttgaaagatc

SEQ ID NO: 949387 - DNA, 25 bp, Homo sapien
ctgcaacgtggatgcacctctacag

SEQ ID NO: 949388 - DNA, 25 bp, Homo sapien
cctgcaacgtggatgcacctctaca

SEQ ID NO: 949389 - DNA, 25 bp, Homo sapien
tgcctgacaacccagaaatctctgc

SEQ ID NO: 949390 - DNA, 25 bp, Homo sapien
ggttctgcctgacaacccagaaatc

SEQ ID NO: 949391 - DNA, 25 bp, Homo sapien
aatgctcggttctgcctgacaaccc

SEQ ID NO: 949392 - DNA, 25 bp, Homo sapien
gctcggttctgcctgacaacccaga

SEQ ID NO: 949393 - DNA, 25 bp, Homo sapien
taatgggatgggtgtttatggatac

SEQ ID NO: 949394 - DNA, 25 bp, Homo sapien
ttctaggcgtcttaatgggatgggt

SEQ ID NO: 949395 - DNA, 25 bp, Homo sapien
gcgtcttaatgggatgggtgtttat

SEQ ID NO: 949396 - DNA, 25 bp, Homo sapien
ccaggttttctaggcgtcttaatgg

SEQ ID NO: 949397 - DNA, 25 bp, Homo sapien
atcctcacaccagcctgacacttct

SEQ ID NO: 949398 - DNA, 25 bp, Homo sapien
tcacaccagcctgacacttcttcat

SEQ ID NO: 949399 - DNA, 25 bp, Homo sapien
cacaccagcctgacacttcttcatg

SEQ ID NO: 949400 - DNA, 25 bp, Homo sapien
cctcacaccagcctgacacttcttc

SEQ ID NO: 949401 - DNA, 25 bp, Homo sapien
atgaaggccgccctcccagctttaa

SEQ ID NO: 949402 - DNA, 25 bp, Homo sapien
ggtcccactacgtttggtcactgca

SEQ ID NO: 949403 - DNA, 25 bp, Homo sapien
tctttctatggacgagcatccctta

SEQ ID NO: 949404 - DNA, 25 bp, Homo sapien
gctaagtctttctatggacgagcat

SEQ ID NO: 949405 - DNA, 25 bp, Homo sapien
cagcacccccgcgctcccggcaccc

SEQ ID NO: 949406 - DNA, 25 bp, Homo sapien
ccccagcacccccgcgctcccggca

SEQ ID NO: 949407 - DNA, 25 bp, Homo sapien
gcgtccccagcacccccgcgctccc

SEQ ID NO: 949408 - DNA, 25 bp, Homo sapien
cgcgtccccagcacccccgcgctcc

SEQ ID NO: 949409 - DNA, 25 bp, Homo sapien
tgcgcttcccccctccagcaagagc

SEQ ID NO: 949410 - DNA, 25 bp, Homo sapien
ccccctccagcaagagccgcagcct

SEQ ID NO: 949411 - DNA, 25 bp, Homo sapien
cttcccccctccagcaagagccgca

SEQ ID NO: 949412 - DNA, 25 bp, Homo sapien
tcctcgcagtcctggggctgtgcgc

SEQ ID NO: 949413 - DNA, 25 bp, Homo sapien
ctggcccgggggtcgctgtcccttg

SEQ ID NO: 949414 - DNA, 25 bp, Homo sapien
ggaagaaggacccggcgcaagcggc

SEQ ID NO: 949415 - DNA, 25 bp, Homo sapien
gcgcggcgcggaggtgggcaccggg

SEQ ID NO: 949416 - DNA, 25 bp, Homo sapien
tctcacctgtcctggcccgggggtc

SEQ ID NO: 949417 - DNA, 25 bp, Homo sapien
ccacagccaccttgtctttgctctt

SEQ ID NO: 949418 - DNA, 25 bp, Homo sapien
gagagggtggacatcggccacagcc

SEQ ID NO: 949419 - DNA, 25 bp, Homo sapien
gagggtggacatcggccacagccac

SEQ ID NO: 949420 - DNA, 25 bp, Homo sapien
acagccaccttgtctttgctcttac

SEQ ID NO: 949421 - DNA, 25 bp, Homo sapien
cctgtgtcttgcatgatttggaggt

SEQ ID NO: 949422 - DNA, 25 bp, Homo sapien
cttgcatgatttggaggtggtggga

SEQ ID NO: 949423 - DNA, 25 bp, Homo sapien
aaaaccgaggctgctcaaaactcgt

SEQ ID NO: 949424 - DNA, 25 bp, Homo sapien
gctcaaaactcgtggagaattccgc

SEQ ID NO: 949425 - DNA, 25 bp, Homo sapien
tgaatgagcccaggatgcaccctta

SEQ ID NO: 949426 - DNA, 25 bp, Homo sapien
tggaggcatgccctgatgaatgagc

SEQ ID NO: 949427 - DNA, 25 bp, Homo sapien
tttgagcatcactgtggaccagtcg

SEQ ID NO: 949428 - DNA, 25 bp, Homo sapien
ggacattgtcaattgggccaaagga

SEQ ID NO: 949429 - DNA, 25 bp, Homo sapien
attctggacacgcttatacacttgg

SEQ ID NO: 949430 - DNA, 25 bp, Homo sapien
caattctggacacgcttatacactt

SEQ ID NO: 949431 - DNA, 25 bp, Homo sapien
ccaattctggacacgcttatacact

SEQ ID NO: 949432 - DNA, 25 bp, Homo sapien
tctggacacgcttatacacttggca

SEQ ID NO: 949433 - DNA, 25 bp, Homo sapien
gtcaatttctgtggctgggatgaac

SEQ ID NO: 949434 - DNA, 25 bp, Homo sapien
tgtcaatttctgtggctgggatgaa

SEQ ID NO: 949435 - DNA, 25 bp, Homo sapien
ttatgctgtttgtcaatttctgtgg

SEQ ID NO: 949436 - DNA, 25 bp, Homo sapien
gtttgtcaatttctgtggctgggat

SEQ ID NO: 949437 - DNA, 25 bp, Homo sapien
tccgggtcgaaatgcgccccgttca

SEQ ID NO: 949438 - DNA, 25 bp, Homo sapien
gagcactctctaggcagcttgtcta

SEQ ID NO: 949439 - DNA, 25 bp, Homo sapien
ccagagagcactctctaggcagctt

SEQ ID NO: 949440 - DNA, 25 bp, Homo sapien
ccgggtcgaaatgcgccccgttcag

SEQ ID NO: 949441 - DNA, 25 bp, Homo sapien
tacttggcttttgctttcatcacat

SEQ ID NO: 949442 - DNA, 25 bp, Homo sapien
catcacatcgttgaggaaagaggtg

SEQ ID NO: 949443 - DNA, 25 bp, Homo sapien
gctttcatcacatcgttgaggaaag

SEQ ID NO: 949444 - DNA, 25 bp, Homo sapien
aggaaagaggtggttgcttatggta

SEQ ID NO: 949445 - DNA, 25 bp, Homo sapien
gtggataatccaggcgcctgctctc

SEQ ID NO: 949446 - DNA, 25 bp, Homo sapien
tgttagggtggataatccaggcgcc

SEQ ID NO: 949447 - DNA, 25 bp, Homo sapien
tccagatttgttagggtggataatc

SEQ ID NO: 949448 - DNA, 25 bp, Homo sapien
tcctttgtccagatttgttagggtg

SEQ ID NO: 949449 - DNA, 25 bp, Homo sapien
ccgcctcccgctgcaccctttcctg

SEQ ID NO: 949450 - DNA, 25 bp, Homo sapien
gatggaagccaaagacgtccctgga

SEQ ID NO: 949451 - DNA, 25 bp, Homo sapien
ggaagccaaagacgtccctggagcc

SEQ ID NO: 949452 - DNA, 25 bp, Homo sapien
ccctggagccgcctcccgctgcacc

SEQ ID NO: 949453 - DNA, 25 bp, Homo sapien
aaggatctgaaccagcacaggcctc

SEQ ID NO: 949454 - DNA, 25 bp, Homo sapien
aggatctgaaccagcacaggcctct

SEQ ID NO: 949455 - DNA, 25 bp, Homo sapien
cagcataccaaggatctgaaccagc

SEQ ID NO: 949456 - DNA, 25 bp, Homo sapien
taccaaggatctgaaccagcacagg

SEQ ID NO: 949457 - DNA, 25 bp, Homo sapien
gactggacgtgtctctaagcaagat

SEQ ID NO: 949458 - DNA, 25 bp, Homo sapien
aagaaattgttgaaagtacaggcct

SEQ ID NO: 949459 - DNA, 25 bp, Homo sapien
tacagtctaagtcataaggaagttc

SEQ ID NO: 949460 - DNA, 25 bp, Homo sapien
caacgaacatgtgagcaatacagtc

SEQ ID NO: 949461 - DNA, 25 bp, Homo sapien
tccactgtcctccctgtgtggtgca

SEQ ID NO: 949462 - DNA, 25 bp, Homo sapien
ctgtcctccctgtgtggtgcaccat

SEQ ID NO: 949463 - DNA, 25 bp, Homo sapien
cactgtcctccctgtgtggtgcacc

SEQ ID NO: 949464 - DNA, 25 bp, Homo sapien
gtccactgtcctccctgtgtggtgc

SEQ ID NO: 949465 - DNA, 25 bp, Homo sapien
gctcagactccgtccttgaggctgg

SEQ ID NO: 949466 - DNA, 25 bp, Homo sapien
cagactccgtccttgaggctggcaa

SEQ ID NO: 949467 - DNA, 25 bp, Homo sapien
ctccgtccttgaggctggcaagaag

SEQ ID NO: 949468 - DNA, 25 bp, Homo sapien
ggaggctcagactccgtccttgagg

SEQ ID NO: 949469 - DNA, 25 bp, Homo sapien
gcaaccatcaccgtcatcgtctccg

SEQ ID NO: 949470 - DNA, 25 bp, Homo sapien
aaccatcaccgtcatcgtctccgga

SEQ ID NO: 949471 - DNA, 25 bp, Homo sapien
tcatcgtctccggaacagttttatc

SEQ ID NO: 949472 - DNA, 25 bp, Homo sapien
tttagcaaccatcaccgtcatcgtc

SEQ ID NO: 949473 - DNA, 25 bp, Homo sapien
gcgtatgatacttttagcccttggg

SEQ ID NO: 949474 - DNA, 25 bp, Homo sapien
taggcgtatgatacttttagccctt

SEQ ID NO: 949475 - DNA, 25 bp, Homo sapien
tttaggcgtatgatacttttagccc

SEQ ID NO: 949476 - DNA, 25 bp, Homo sapien
cttttaggcgtatgatacttttagc

SEQ ID NO: 949477 - DNA, 25 bp, Homo sapien
ggcttctttcctttaatatacagac

SEQ ID NO: 949478 - DNA, 25 bp, Homo sapien
tttcttcctacatagaagtgaggac

SEQ ID NO: 949479 - DNA, 25 bp, Homo sapien
cacacctggccaaggtgtctttttt

SEQ ID NO: 949480 - DNA, 25 bp, Homo sapien
cttttttcttcctacatagaagtga

SEQ ID NO: 949481 - DNA, 25 bp, Homo sapien
ttcattgggtgtgtataccacagtt

SEQ ID NO: 949482 - DNA, 25 bp, Homo sapien
atacttcattgggtgtgtataccac

SEQ ID NO: 949483 - DNA, 25 bp, Homo sapien
acttcattgggtgtgtataccacag

SEQ ID NO: 949484 - DNA, 25 bp, Homo sapien
ataatacttcattgggtgtgtatac

SEQ ID NO: 949485 - DNA, 25 bp, Homo sapien
ggagaaacactgtccctattaacaa

SEQ ID NO: 949486 - DNA, 25 bp, Homo sapien
gaaacctcagggatactgtgtccat

SEQ ID NO: 949487 - DNA, 25 bp, Homo sapien
aaatataaatgctgagtgctggctg

SEQ ID NO: 949488 - DNA, 25 bp, Homo sapien
aatgtaaaatataaatgctgagtgc

SEQ ID NO: 949489 - DNA, 25 bp, Homo sapien
cctcgaagcaaaatgatgtatagtg

SEQ ID NO: 949490 - DNA, 25 bp, Homo sapien
cacctcgaagcaaaatgatgtatag

SEQ ID NO: 949491 - DNA, 25 bp, Homo sapien
ttcacctcgaagcaaaatgatgtat

SEQ ID NO: 949492 - DNA, 25 bp, Homo sapien
cgaagcaaaatgatgtatagtgaaa

SEQ ID NO: 949493 - DNA, 25 bp, Homo sapien
agtgaccgcagcatacatcactgac

SEQ ID NO: 949494 - DNA, 25 bp, Homo sapien
agcatgggagtgaccgcagcataca

SEQ ID NO: 949495 - DNA, 25 bp, Homo sapien
gcatgggagtgaccgcagcatacat

SEQ ID NO: 949496 - DNA, 25 bp, Homo sapien
tgggagtgaccgcagcatacatcac

SEQ ID NO: 949497 - DNA, 25 bp, Homo sapien
agctgggaatccaacaggctaagga

SEQ ID NO: 949498 - DNA, 25 bp, Homo sapien
tccaacaggctaaggaaaaaggaca

SEQ ID NO: 949499 - DNA, 25 bp, Homo sapien
tgggaatccaacaggctaaggaaaa

SEQ ID NO: 949500 - DNA, 25 bp, Homo sapien
tcaactgtgcagctgggaatccaac

SEQ ID NO: 949501 - DNA, 25 bp, Homo sapien
gaagaaagacatctgcgtcagacag

SEQ ID NO: 949502 - DNA, 25 bp, Homo sapien
gatgaagaaagacatctgcgtcaga

SEQ ID NO: 949503 - DNA, 25 bp, Homo sapien
aaggatgaagaaagacatctgcgtc

SEQ ID NO: 949504 - DNA, 25 bp, Homo sapien
tgaagaaagacatctgcgtcagaca

SEQ ID NO: 949505 - DNA, 25 bp, Homo sapien
gctatgcgactgcatgtccacaatc

SEQ ID NO: 949506 - DNA, 25 bp, Homo sapien
ctgctatgcgactgcatgtccacaa

SEQ ID NO: 949507 - DNA, 25 bp, Homo sapien
tgctatgcgactgcatgtccacaat

SEQ ID NO: 949508 - DNA, 25 bp, Homo sapien
tatgcgactgcatgtccacaatcat

SEQ ID NO: 949509 - DNA, 25 bp, Homo sapien
accgtggccaaggtgaaaccgatgt

SEQ ID NO: 949510 - DNA, 25 bp, Homo sapien
aaccgtggccaaggtgaaaccgatg

SEQ ID NO: 949511 - DNA, 25 bp, Homo sapien
tgaaaccgatgtcagcccagcacag

SEQ ID NO: 949512 - DNA, 25 bp, Homo sapien
aaccgatgtcagcccagcacaggtg

SEQ ID NO: 949513 - DNA, 25 bp, Homo sapien
tctgacaccgtgctacaacttccat

SEQ ID NO: 949514 - DNA, 25 bp, Homo sapien
ctttattctgacaccgtgctacaac

SEQ ID NO: 949515 - DNA, 25 bp, Homo sapien
cgtgctacaacttccattgatgtag

SEQ ID NO: 949516 - DNA, 25 bp, Homo sapien
gacaccgtgctacaacttccattga

SEQ ID NO: 949517 - DNA, 25 bp, Homo sapien
tgcctctaatatccgggaccggagg

SEQ ID NO: 949518 - DNA, 25 bp, Homo sapien
ggagaggataagattccctccaatg

SEQ ID NO: 949519 - DNA, 25 bp, Homo sapien
ggataagattccctccaatgtagca

SEQ ID NO: 949520 - DNA, 25 bp, Homo sapien
attgcctctaatatccgggaccgga

SEQ ID NO: 949521 - DNA, 25 bp, Homo sapien
caaggaactatcatacccaaagttc

SEQ ID NO: 949522 - DNA, 25 bp, Homo sapien
taagcaagcgtgaatgctgtcccgg

SEQ ID NO: 949523 - DNA, 25 bp, Homo sapien
ttgactaagcaagcgtgaatgctgt

SEQ ID NO: 949524 - DNA, 25 bp, Homo sapien
agcgtgaatgctgtcccggcctgta

SEQ ID NO: 949525 - DNA, 25 bp, Homo sapien
tctctcttaaagagtaacatgagca

SEQ ID NO: 949526 - DNA, 25 bp, Homo sapien
taacatgagcaaccggtggcgatca

SEQ ID NO: 949527 - DNA, 25 bp, Homo sapien
ttagttgctacgtggagccctctcc

SEQ ID NO: 949528 - DNA, 25 bp, Homo sapien
gcttgcggcttttcgctctaggacg

SEQ ID NO: 949529 - DNA, 25 bp, Homo sapien
tattaggaacaagatgaccgaaggg

SEQ ID NO: 949530 - DNA, 25 bp, Homo sapien
gaagggatgtacacccactgcgcta

SEQ ID NO: 949531 - DNA, 25 bp, Homo sapien
ccacctttggatgttagggacagta

SEQ ID NO: 949532 - DNA, 25 bp, Homo sapien
tatccctagggagtgtacacatcct

SEQ ID NO: 949533 - DNA, 25 bp, Homo sapien
gtgcggctgccgcaggacacctttc

SEQ ID NO: 949534 - DNA, 25 bp, Homo sapien
ttagactgtgctgccgtgcggctgc

SEQ ID NO: 949535 - DNA, 25 bp, Homo sapien
gcggctgccgcaggacacctttcat

SEQ ID NO: 949536 - DNA, 25 bp, Homo sapien
gctgccgcaggacacctttcatatc

SEQ ID NO: 949537 - DNA, 25 bp, Homo sapien
acaggcgagacccacaggtggagag

SEQ ID NO: 949538 - DNA, 25 bp, Homo sapien
taaactcagcaaacaactgacaggc

SEQ ID NO: 949539 - DNA, 25 bp, Homo sapien
caaacaactgacaggcgagacccac

SEQ ID NO: 949540 - DNA, 25 bp, Homo sapien
aactgacaggcgagacccacaggtg

SEQ ID NO: 949541 - DNA, 25 bp, Homo sapien
gaaatacatgattatgttaatggtg

SEQ ID NO: 949542 - DNA, 25 bp, Homo sapien
gggaaatacatgattatgttaatgg

SEQ ID NO: 949543 - DNA, 25 bp, Homo sapien
gcagggaaatacatgattatgttaa

SEQ ID NO: 949544 - DNA, 25 bp, Homo sapien
aatacatgattatgttaatggtgaa

SEQ ID NO: 949545 - DNA, 25 bp, Homo sapien
atgatggtgaatgatatagcgggtg

SEQ ID NO: 949546 - DNA, 25 bp, Homo sapien
tgatggtgaatgatatagcgggtga

SEQ ID NO: 949547 - DNA, 25 bp, Homo sapien
gatggtgaatgatatagcgggtgac

SEQ ID NO: 949548 - DNA, 25 bp, Homo sapien
tctctcttccatgcctccaaaaatg

SEQ ID NO: 949549 - DNA, 25 bp, Homo sapien
actcaggagcatgtctctcttccat

SEQ ID NO: 949550 - DNA, 25 bp, Homo sapien
ctcaggagcatgtctctcttccatg

SEQ ID NO: 949551 - DNA, 25 bp, Homo sapien
ctcttccatgcctccaaaaatggca

SEQ ID NO: 949552 - DNA, 25 bp, Homo sapien
aggagatgactctgctgtgagactg

SEQ ID NO: 949553 - DNA, 25 bp, Homo sapien
ataggagatgactctgctgtgagac

SEQ ID NO: 949554 - DNA, 25 bp, Homo sapien
tgactctgctgtgagactggatgtc

SEQ ID NO: 949555 - DNA, 25 bp, Homo sapien
gatgactctgctgtgagactggatg

SEQ ID NO: 949556 - DNA, 25 bp, Homo sapien
acaggaacagcccagcaaggactgg

SEQ ID NO: 949557 - DNA, 25 bp, Homo sapien
gacaggaacagcccagcaaggactg

SEQ ID NO: 949558 - DNA, 25 bp, Homo sapien
aacagcccagcaaggactggctgca

SEQ ID NO: 949559 - DNA, 25 bp, Homo sapien
aggaacagcccagcaaggactggct

SEQ ID NO: 949560 - DNA, 25 bp, Homo sapien
ggaatatagagacatctgttagatt

SEQ ID NO: 949561 - DNA, 25 bp, Homo sapien
taggaggaggaatatagagacatct

SEQ ID NO: 949562 - DNA, 25 bp, Homo sapien
ctaggaggaggaatatagagacatc

SEQ ID NO: 949563 - DNA, 25 bp, Homo sapien
ggaggaatatagagacatctgttag

SEQ ID NO: 949564 - DNA, 25 bp, Homo sapien
gtctgcataatttggacacctttgc

SEQ ID NO: 949565 - DNA, 25 bp, Homo sapien
ttgatttctgtgttattcacttctt

SEQ ID NO: 949566 - DNA, 25 bp, Homo sapien
cagttctgacagactcaattgtctt

SEQ ID NO: 949567 - DNA, 25 bp, Homo sapien
tgatttctgtgttattcacttcttg

SEQ ID NO: 949568 - DNA, 25 bp, Homo sapien
tgcagttctgacagactcaattgtc

SEQ ID NO: 949569 - DNA, 25 bp, Homo sapien
catacataacaaattcgtaactgct

SEQ ID NO: 949570 - DNA, 25 bp, Homo sapien
gagacactagattcaagaatgttcc

SEQ ID NO: 949571 - DNA, 25 bp, Homo sapien
atcatacataacaaattcgtaactg

SEQ ID NO: 949572 - DNA, 25 bp, Homo sapien
cttagagacactagattcaagaatg

SEQ ID NO: 949573 - DNA, 25 bp, Homo sapien
cttagcttaggtggacttagagttt

SEQ ID NO: 949574 - DNA, 25 bp, Homo sapien
cttaggtggacttagagttttcatc

SEQ ID NO: 949575 - DNA, 25 bp, Homo sapien
tgtaactcctgtccttagcttaggt

SEQ ID NO: 949576 - DNA, 25 bp, Homo sapien
taactcctgtccttagcttaggtgg

SEQ ID NO: 949577 - DNA, 25 bp, Homo sapien
agtgccctgtctcgctgaaactttt

SEQ ID NO: 949578 - DNA, 25 bp, Homo sapien
cagtgccctgtctcgctgaaacttt

SEQ ID NO: 949579 - DNA, 25 bp, Homo sapien
acagtgccctgtctcgctgaaactt

SEQ ID NO: 949580 - DNA, 25 bp, Homo sapien
atggggacacattcctactataagg

SEQ ID NO: 949581 - DNA, 25 bp, Homo sapien
tttttcatcaatggggacacattcc

SEQ ID NO: 949582 - DNA, 25 bp, Homo sapien
caatggggacacattcctactataa

SEQ ID NO: 949583 - DNA, 25 bp, Homo sapien
catcaatggggacacattcctacta

SEQ ID NO: 949584 - DNA, 25 bp, Homo sapien
aaatgtaggcataaacctcactacc

SEQ ID NO: 949585 - DNA, 25 bp, Homo sapien
gagaagggagttcaatacttactga

SEQ ID NO: 949586 - DNA, 25 bp, Homo sapien
tgaataaatgtaggcataaacctca

SEQ ID NO: 949587 - DNA, 25 bp, Homo sapien
actgaataaatgtaggcataaacct

SEQ ID NO: 949588 - DNA, 25 bp, Homo sapien
gcagcaccgagctataaaccttgtc

SEQ ID NO: 949589 - DNA, 25 bp, Homo sapien
tttcaattataggattccgaacaac

SEQ ID NO: 949590 - DNA, 25 bp, Homo sapien
gatattcaataactggttttccatc

SEQ ID NO: 949591 - DNA, 25 bp, Homo sapien
tatacaatgaattcattagaccatg

SEQ ID NO: 949592 - DNA, 25 bp, Homo sapien
atacaatgaattcattagaccatgt

SEQ ID NO: 949593 - DNA, 25 bp, Homo sapien
tacaatgaattcattagaccatgtt

SEQ ID NO: 949594 - DNA, 25 bp, Homo sapien
tcttctggttcattaaagaactgtc

SEQ ID NO: 949595 - DNA, 25 bp, Homo sapien
tctgcgtatgtaaagattttgcagg

SEQ ID NO: 949596 - DNA, 25 bp, Homo sapien
aactgtctgttcttctgcgtatgta

SEQ ID NO: 949597 - DNA, 25 bp, Homo sapien
tggttcattaaagaactgtctgttc

SEQ ID NO: 949598 - DNA, 25 bp, Homo sapien
tacaatagcttcacacaatccgaca

SEQ ID NO: 949599 - DNA, 25 bp, Homo sapien
aatagcttcacacaatccgacattt

SEQ ID NO: 949600 - DNA, 25 bp, Homo sapien
caatagcttcacacaatccgacatt

SEQ ID NO: 949601 - DNA, 25 bp, Homo sapien
tgtacaatagcttcacacaatccga

SEQ ID NO: 949602 - DNA, 25 bp, Homo sapien
tagtattgacggggtttcattgtgt

SEQ ID NO: 949603 - DNA, 25 bp, Homo sapien
ttagtattgacggggtttcattgtg

SEQ ID NO: 949604 - DNA, 25 bp, Homo sapien
agtattgacggggtttcattgtgtt

SEQ ID NO: 949605 - DNA, 25 bp, Homo sapien
gtattgacggggtttcattgtgtta

SEQ ID NO: 949606 - DNA, 25 bp, Homo sapien
cttttctacctcatttggatgataa

SEQ ID NO: 949607 - DNA, 25 bp, Homo sapien
caccgagcccggcctcttcttcttt

SEQ ID NO: 949608 - DNA, 25 bp, Homo sapien
cttcttttctacctcatttggatga

SEQ ID NO: 949609 - DNA, 25 bp, Homo sapien
cttcttcttttctacctcatttgga

SEQ ID NO: 949610 - DNA, 25 bp, Homo sapien
atttctttcctagagctaatctgta

SEQ ID NO: 949611 - DNA, 25 bp, Homo sapien
aatactgcccaacagtcagaaggca

SEQ ID NO: 949612 - DNA, 25 bp, Homo sapien
ggtaacgaaacacagctccggacat

SEQ ID NO: 949613 - DNA, 25 bp, Homo sapien
tgcatcatttgaaggctagcgtctg

SEQ ID NO: 949614 - DNA, 25 bp, Homo sapien
catcctttgagaaagtcgccgtccc

SEQ ID NO: 949615 - DNA, 25 bp, Homo sapien
caacgcaaagcgcaaagagactgaa

SEQ ID NO: 949616 - DNA, 25 bp, Homo sapien
tggcacaacgcaggctaggtcagtg

SEQ ID NO: 949617 - DNA, 25 bp, Homo sapien
gacatcgacccaggacctgaagcgg

SEQ ID NO: 949618 - DNA, 25 bp, Homo sapien
gggctttattccatagacagacatc

SEQ ID NO: 949619 - DNA, 25 bp, Homo sapien
ggacctgaagcggtccctgcctgct

SEQ ID NO: 949620 - DNA, 25 bp, Homo sapien
tgaagaaactcagcagcgccggcag

SEQ ID NO: 949621 - DNA, 25 bp, Homo sapien
gcaggaactgcttctcctgggccgc

SEQ ID NO: 949622 - DNA, 25 bp, Homo sapien
cttcccgcggccagaagcgcgggtt

SEQ ID NO: 949623 - DNA, 25 bp, Homo sapien
actgcttctcctgggccgccgaggg

SEQ ID NO: 949624 - DNA, 25 bp, Homo sapien
acagccagcccagagaaagcagcca

SEQ ID NO: 949625 - DNA, 25 bp, Homo sapien
cacctgctagaacaccgcacttccg

SEQ ID NO: 949626 - DNA, 25 bp, Homo sapien
cccagagaaagcagccacctgctag

SEQ ID NO: 949627 - DNA, 25 bp, Homo sapien
acctgctagaacaccgcacttccgc

SEQ ID NO: 949628 - DNA, 25 bp, Homo sapien
tgaccgtggattgcccaggttcttg

SEQ ID NO: 949629 - DNA, 25 bp, Homo sapien
tgcctctgttactggatggaaggtc

SEQ ID NO: 949630 - DNA, 25 bp, Homo sapien
tgttactggatggaaggtcttgacc

SEQ ID NO: 949631 - DNA, 25 bp, Homo sapien
tggaaggtcttgaccgtggattgcc

SEQ ID NO: 949632 - DNA, 25 bp, Homo sapien
catgtggggcctcgactctttcccc

SEQ ID NO: 949633 - DNA, 25 bp, Homo sapien
actgagaatactccagtcccatgtg

SEQ ID NO: 949634 - DNA, 25 bp, Homo sapien
tccagtcccatgtggggcctcgact

SEQ ID NO: 949635 - DNA, 25 bp, Homo sapien
gactgagaatactccagtcccatgt

SEQ ID NO: 949636 - DNA, 25 bp, Homo sapien
taggtgaatcgccttagagccagga

SEQ ID NO: 949637 - DNA, 25 bp, Homo sapien
ttaggtgaatcgccttagagccagg

SEQ ID NO: 949638 - DNA, 25 bp, Homo sapien
tgagtgactctctcgtgacctcgct

SEQ ID NO: 949639 - DNA, 25 bp, Homo sapien
catgagtgactctctcgtgacctcg

SEQ ID NO: 949640 - DNA, 25 bp, Homo sapien
atgagtgactctctcgtgacctcgc

SEQ ID NO: 949641 - DNA, 25 bp, Homo sapien
taagaatgcaccatttcctggaatt

SEQ ID NO: 949642 - DNA, 25 bp, Homo sapien
ttaagaatgcaccatttcctggaat

SEQ ID NO: 949643 - DNA, 25 bp, Homo sapien
atcattatccgccgcagccatcaag

SEQ ID NO: 949644 - DNA, 25 bp, Homo sapien
ccatctccatcattatccgccgcag

SEQ ID NO: 949645 - DNA, 25 bp, Homo sapien
aggacttggtttctgactcggtcag

SEQ ID NO: 949646 - DNA, 25 bp, Homo sapien
agttctctggcaccactctcaaact

SEQ ID NO: 949647 - DNA, 25 bp, Homo sapien
ctggtcgttgtctatgaaccggaaa

SEQ ID NO: 949648 - DNA, 25 bp, Homo sapien
tacccgctctggtcgttgtctatga

SEQ ID NO: 949649 - DNA, 25 bp, Homo sapien
cgttgtctatgaaccggaaaacatc

SEQ ID NO: 949650 - DNA, 25 bp, Homo sapien
tatgaaccggaaaacatccttcacc

SEQ ID NO: 949651 - DNA, 25 bp, Homo sapien
cagcactgagcacgtccgtgatgct

SEQ ID NO: 949652 - DNA, 25 bp, Homo sapien
cactgagcacgtccgtgatgctcat

SEQ ID NO: 949653 - DNA, 25 bp, Homo sapien
gcactgagcacgtccgtgatgctca

SEQ ID NO: 949654 - DNA, 25 bp, Homo sapien
tcagcactgagcacgtccgtgatgc

SEQ ID NO: 949655 - DNA, 25 bp, Homo sapien
cagagatcacggtctttagtgccac

SEQ ID NO: 949656 - DNA, 25 bp, Homo sapien
tattgaccggtgtctaaaaactgcc

SEQ ID NO: 949657 - DNA, 25 bp, Homo sapien
tgagcatgacaatgtgcgcctatag

SEQ ID NO: 949658 - DNA, 25 bp, Homo sapien
aattctgccgcaccacgaaagcaat

SEQ ID NO: 949659 - DNA, 25 bp, Homo sapien
gatgcgggatgagccaagccgacat

SEQ ID NO: 949660 - DNA, 25 bp, Homo sapien
tctgcccaggatgcgggatgagcca

SEQ ID NO: 949661 - DNA, 25 bp, Homo sapien
ggacaaacacaaacgctgggctctg

SEQ ID NO: 949662 - DNA, 25 bp, Homo sapien
agtgtaaacatctcctcgagcccag

SEQ ID NO: 949663 - DNA, 25 bp, Homo sapien
gaggtcacaggctgtctctgaacca

SEQ ID NO: 949664 - DNA, 25 bp, Homo sapien
ttgaccgccaaacaaatccaaggct

SEQ ID NO: 949665 - DNA, 25 bp, Homo sapien
tcacaaagctatactctcctgggtc

SEQ ID NO: 949666 - DNA, 25 bp, Homo sapien
gaaccaatcattgttgccagaaaac

SEQ ID NO: 949667 - DNA, 25 bp, Homo sapien
taaccaggtctccttcgcaaggctg

SEQ ID NO: 949668 - DNA, 25 bp, Homo sapien
gggtcccttgtaactgcatctgcca

SEQ ID NO: 949669 - DNA, 25 bp, Homo sapien
gggtccccagctatgaatcaaaggg

SEQ ID NO: 949670 - DNA, 25 bp, Homo sapien
taaagaacagcgttgtcctgtccca

SEQ ID NO: 949671 - DNA, 25 bp, Homo sapien
ccttctgctttatccttgagagcct

SEQ ID NO: 949672 - DNA, 25 bp, Homo sapien
ttctgctttatccttgagagcctcc

SEQ ID NO: 949673 - DNA, 25 bp, Homo sapien
cttctgctttatccttgagagcctc

SEQ ID NO: 949674 - DNA, 25 bp, Homo sapien
tgactccctcggttttatgggcttg

SEQ ID NO: 949675 - DNA, 25 bp, Homo sapien
gcaaaagtcgtgtggccagcagagt

SEQ ID NO: 949676 - DNA, 25 bp, Homo sapien
gccagtctggcaccaactcgcccag

SEQ ID NO: 949677 - DNA, 25 bp, Homo sapien
tagaaactgacgcagcaggtgactc

SEQ ID NO: 949678 - DNA, 25 bp, Homo sapien
ccaggagcaatttggtccacacctc

SEQ ID NO: 949679 - DNA, 25 bp, Homo sapien
gggtatccaggagcaatttggtcca

SEQ ID NO: 949680 - DNA, 25 bp, Homo sapien
tgaggggtatccaggagcaatttgg

SEQ ID NO: 949681 - DNA, 25 bp, Homo sapien
tatccaggagcaatttggtccacac

SEQ ID NO: 949682 - DNA, 25 bp, Homo sapien
atgacgcagcccatcatggcggcgg

SEQ ID NO: 949683 - DNA, 25 bp, Homo sapien
cccaggcccgccgctccgcagggct

SEQ ID NO: 949684 - DNA, 25 bp, Homo sapien
ttcccaggcccgccgctccgcaggg

SEQ ID NO: 949685 - DNA, 25 bp, Homo sapien
cttcccaggcccgccgctccgcagg

SEQ ID NO: 949686 - DNA, 25 bp, Homo sapien
gcatcaaagcaggagctcaaagtgg

SEQ ID NO: 949687 - DNA, 25 bp, Homo sapien
caaagtggtagctgcgtaacatggc

SEQ ID NO: 949688 - DNA, 25 bp, Homo sapien
gactaatggcaggtggtatggcatc

SEQ ID NO: 949689 - DNA, 25 bp, Homo sapien
gactaaagctcttgcatgtgaacag

SEQ ID NO: 949690 - DNA, 25 bp, Homo sapien
tgagaacatagactccatcgaggga

SEQ ID NO: 949691 - DNA, 25 bp, Homo sapien
tctctgcagacgtacatgggaagtt

SEQ ID NO: 949692 - DNA, 25 bp, Homo sapien
tcaacatggatgcacaatgggccct

SEQ ID NO: 949693 - DNA, 25 bp, Homo sapien
caatattcaatagtagcaccgggta

SEQ ID NO: 949694 - DNA, 25 bp, Homo sapien
tagatgcttcccgttcctgcatcgg

SEQ ID NO: 949695 - DNA, 25 bp, Homo sapien
tcggcttccggagtgtggaaccacc

SEQ ID NO: 949696 - DNA, 25 bp, Homo sapien
tctccttctgggactagatgcttcc

SEQ ID NO: 949697 - DNA, 25 bp, Homo sapien
tcctgcatcggcttccggagtgtgg

SEQ ID NO: 949698 - DNA, 25 bp, Homo sapien
catggaagtgccgtggatgacgcca

SEQ ID NO: 949699 - DNA, 25 bp, Homo sapien
tgccgtggatgacgccatagctcag

SEQ ID NO: 949700 - DNA, 25 bp, Homo sapien
ctgttaaagacatggaagtgccgtg

SEQ ID NO: 949701 - DNA, 25 bp, Homo sapien
taaagacatggaagtgccgtggatg

SEQ ID NO: 949702 - DNA, 25 bp, Homo sapien
aatgatcgatgcctgaggtgacgga

SEQ ID NO: 949703 - DNA, 25 bp, Homo sapien
tgaggtgacggacaccccaaatacc

SEQ ID NO: 949704 - DNA, 25 bp, Homo sapien
tgtatgcctgtatcagagcgtcaca

SEQ ID NO: 949705 - DNA, 25 bp, Homo sapien
gagcgtcacacatacgccataaata

SEQ ID NO: 949706 - DNA, 25 bp, Homo sapien
tggattctcgctttgcctgcactga

SEQ ID NO: 949707 - DNA, 25 bp, Homo sapien
actgagtagaatgcactgatggcct

SEQ ID NO: 949708 - DNA, 25 bp, Homo sapien
gatggcctccagtaagatgaggctg

SEQ ID NO: 949709 - DNA, 25 bp, Homo sapien
catagaggtccgagggctgtggctc

SEQ ID NO: 949710 - DNA, 25 bp, Homo sapien
ctgtaatggttgtaatcaaggaatt

SEQ ID NO: 949711 - DNA, 25 bp, Homo sapien
tgtaatggttgtaatcaaggaattt

SEQ ID NO: 949712 - DNA, 25 bp, Homo sapien
tagccttgcggagtacctgggtgac

SEQ ID NO: 949713 - DNA, 25 bp, Homo sapien
tgccaggttgtagcattacagttac

SEQ ID NO: 949714 - DNA, 25 bp, Homo sapien
aagaacctctataggatttgccagg

SEQ ID NO: 949715 - DNA, 25 bp, Homo sapien
ggttagtgtgtagcgaacttccaca

SEQ ID NO: 949716 - DNA, 25 bp, Homo sapien
ctgtttttcaacttgaagggagagc

SEQ ID NO: 949717 - DNA, 25 bp, Homo sapien
tttttcaacttgaagggagagcaga

SEQ ID NO: 949718 - DNA, 25 bp, Homo sapien
cctgtttttcaacttgaagggagag

SEQ ID NO: 949719 - DNA, 25 bp, Homo sapien
gagccttctgagagccgggcggggc

SEQ ID NO: 949720 - DNA, 25 bp, Homo sapien
ctttcgagttttataatgagagcca

SEQ ID NO: 949721 - DNA, 25 bp, Homo sapien
cttctgcaggcgtaattgttcatct

SEQ ID NO: 949722 - DNA, 25 bp, Homo sapien
ggaacaccagttgcttgctttcgag

SEQ ID NO: 949723 - DNA, 25 bp, Homo sapien
gtttcaggtcatgagaagcattgcc

SEQ ID NO: 949724 - DNA, 25 bp, Homo sapien
gatcccgagagaaagcccatttctg

SEQ ID NO: 949725 - DNA, 25 bp, Homo sapien
tcggatcccgagagaaagcccattt

SEQ ID NO: 949726 - DNA, 25 bp, Homo sapien
tttccatacagcatgatcctggttg

SEQ ID NO: 949727 - DNA, 25 bp, Homo sapien
gcatttccatacagcatgatcctgg

SEQ ID NO: 949728 - DNA, 25 bp, Homo sapien
tgacccctgagacgttcacagctgg

SEQ ID NO: 949729 - DNA, 25 bp, Homo sapien
tgaatgcagaacttagcagcggcga

SEQ ID NO: 949730 - DNA, 25 bp, Homo sapien
cctggaattaagagccacgccggag

SEQ ID NO: 949731 - DNA, 25 bp, Homo sapien
tctgagcccgagaaaaggtctgagg

SEQ ID NO: 949732 - DNA, 25 bp, Homo sapien
catttgctgacatgagattgggagg

SEQ ID NO: 949733 - DNA, 25 bp, Homo sapien
gcagcgaagacggagaaaaggacta

SEQ ID NO: 949734 - DNA, 25 bp, Homo sapien
aaaaggactaggtggctgccaacgc

SEQ ID NO: 949735 - DNA, 25 bp, Homo sapien
gagacggctcttagctgcgttcaag

SEQ ID NO: 949736 - DNA, 25 bp, Homo sapien
tttgcgctgcatggtacttgtgaag

SEQ ID NO: 949737 - DNA, 25 bp, Homo sapien
ggtcaagccgatgctagccactagt

SEQ ID NO: 949738 - DNA, 25 bp, Homo sapien
aattgcactgtggataaatgttccg

SEQ ID NO: 949739 - DNA, 25 bp, Homo sapien
tccgagagtctccattgttgtacag

SEQ ID NO: 949740 - DNA, 25 bp, Homo sapien
tttccagactccagcgcaacctggg

SEQ ID NO: 949741 - DNA, 25 bp, Homo sapien
cccaacatattttccggtgctgata

SEQ ID NO: 949742 - DNA, 25 bp, Homo sapien
tccggtgctgatatgtttccagact

SEQ ID NO: 949743 - DNA, 25 bp, Homo sapien
ctggggtgctctccagacccgtgca

SEQ ID NO: 949744 - DNA, 25 bp, Homo sapien
caattgcaggtttaaggagttcaga

SEQ ID NO: 949745 - DNA, 25 bp, Homo sapien
gatcatggaatctgtcgtcgtctta

SEQ ID NO: 949746 - DNA, 25 bp, Homo sapien
tcagcctcgagtacatttattaacc

SEQ ID NO: 949747 - DNA, 25 bp, Homo sapien
gtcgtcttatacagtgtcagcctcg

SEQ ID NO: 949748 - DNA, 25 bp, Homo sapien
tagtggatcttagtgtggtgttgca

SEQ ID NO: 949749 - DNA, 25 bp, Homo sapien
taatcaacacgtgggttaacatgtt

SEQ ID NO: 949750 - DNA, 25 bp, Homo sapien
tgctgtgttcagttcaggtttttgt

SEQ ID NO: 949751 - DNA, 25 bp, Homo sapien
gaaatgtcagcatgtgctgtgttca

SEQ ID NO: 949752 - DNA, 25 bp, Homo sapien
aattcttaaagatgcattgacagtg

SEQ ID NO: 949753 - DNA, 25 bp, Homo sapien
tgtggacacgtgctggttaagcact

SEQ ID NO: 949754 - DNA, 25 bp, Homo sapien
tgttgaattaccaacagcctgtgaa

SEQ ID NO: 949755 - DNA, 25 bp, Homo sapien
agcctgtgaagatcagtttgaccgg

SEQ ID NO: 949756 - DNA, 25 bp, Homo sapien
gaggttcatggcaatataatagtca

SEQ ID NO: 949757 - DNA, 25 bp, Homo sapien
acaggcagaagaggttcatggcaat

SEQ ID NO: 949758 - DNA, 25 bp, Homo sapien
tataatagtcaatgaactttcagtt

SEQ ID NO: 949759 - DNA, 25 bp, Homo sapien
gatttttactgtatattgatgcata

SEQ ID NO: 949760 - DNA, 25 bp, Homo sapien
acattatgacgtgcttgggttctgg

SEQ ID NO: 949761 - DNA, 25 bp, Homo sapien
tataattggcaccatgctgtctgta

SEQ ID NO: 949762 - DNA, 25 bp, Homo sapien
tgccggacttggctactggactctc

SEQ ID NO: 949763 - DNA, 25 bp, Homo sapien
tctggtttgagttggcagcccgttg

SEQ ID NO: 949764 - DNA, 25 bp, Homo sapien
tctgccgttctgcagggtgacgccc

SEQ ID NO: 949765 - DNA, 25 bp, Homo sapien
taaagtatccgaggaagtgatgcag

SEQ ID NO: 949766 - DNA, 25 bp, Homo sapien
cagggcaggtaaacagctggtgctc

SEQ ID NO: 949767 - DNA, 25 bp, Homo sapien
tatcgataaaaaacaccagggcacg

SEQ ID NO: 949768 - DNA, 25 bp, Homo sapien
acaaatcgtaatgcccagagaaaac

SEQ ID NO: 949769 - DNA, 25 bp, Homo sapien
gcaggccacagcagaatgcacaggt

SEQ ID NO: 949770 - DNA, 25 bp, Homo sapien
gggaacaaatcgtaatgcccagaga

SEQ ID NO: 949771 - DNA, 25 bp, Homo sapien
caggtcactgttgtaggggaacaaa

SEQ ID NO: 949772 - DNA, 25 bp, Homo sapien
ggcccttcccgtgattgatctgaga

SEQ ID NO: 949773 - DNA, 25 bp, Homo sapien
tggccactgccgacagacacagtag

SEQ ID NO: 949774 - DNA, 25 bp, Homo sapien
tgctccatgtacaggacgggctgag

SEQ ID NO: 949775 - DNA, 25 bp, Homo sapien
gatggtgactgcacacacggacact

SEQ ID NO: 949776 - DNA, 25 bp, Homo sapien
ccatgttggcccgtctggtttgaaa

SEQ ID NO: 949777 - DNA, 25 bp, Homo sapien
ggcccgtctggtttgaaactcttga

SEQ ID NO: 949778 - DNA, 25 bp, Homo sapien
tgttggcccgtctggtttgaaactc

SEQ ID NO: 949779 - DNA, 25 bp, Homo sapien
tggcccgtctggtttgaaactcttg

SEQ ID NO: 949780 - DNA, 25 bp, Homo sapien
taaagcctctttgcaagtcctgctc

SEQ ID NO: 949781 - DNA, 25 bp, Homo sapien
tctgagaaatggtcactgcacatgg

SEQ ID NO: 949782 - DNA, 25 bp, Homo sapien
aaattaaagcctctttgcaagtcct

SEQ ID NO: 949783 - DNA, 25 bp, Homo sapien
gcacatggtaaagaggccctgagcc

SEQ ID NO: 949784 - DNA, 25 bp, Homo sapien
accgtccctgcatgtaggtgtgtgg

SEQ ID NO: 949785 - DNA, 25 bp, Homo sapien
ggagtgtccgcggagcttcacattt

SEQ ID NO: 949786 - DNA, 25 bp, Homo sapien
ggtgcacactccagcacaagaatgg

SEQ ID NO: 949787 - DNA, 25 bp, Homo sapien
gcttcacatttcagggccgtctcag

SEQ ID NO: 949788 - DNA, 25 bp, Homo sapien
ccctggtggcattggcccggacaga

SEQ ID NO: 949789 - DNA, 25 bp, Homo sapien
ggacagagatatggtcccagcctcc

SEQ ID NO: 949790 - DNA, 25 bp, Homo sapien
tggcccggacagagatatggtccca

SEQ ID NO: 949791 - DNA, 25 bp, Homo sapien
gcattggcccggacagagatatggt

SEQ ID NO: 949792 - DNA, 25 bp, Homo sapien
gggactcggggactcgaggatcctg

SEQ ID NO: 949793 - DNA, 25 bp, Homo sapien
aggagagagctgtgtcaccagggga

SEQ ID NO: 949794 - DNA, 25 bp, Homo sapien
gactcggggactcgaggatcctgga

SEQ ID NO: 949795 - DNA, 25 bp, Homo sapien
gagctgtgtcaccaggggactcggg

SEQ ID NO: 949796 - DNA, 25 bp, Homo sapien
tgtggctgccctgcactttgttggc

SEQ ID NO: 949797 - DNA, 25 bp, Homo sapien
acgccggtgcgatgacacactgtcc

SEQ ID NO: 949798 - DNA, 25 bp, Homo sapien
tgccctgcactttgttggcgatcac

SEQ ID NO: 949799 - DNA, 25 bp, Homo sapien
cccttgggctcgtgaggctgcacgc

SEQ ID NO: 949800 - DNA, 25 bp, Homo sapien
gatcccttggcgataccacaggttt

SEQ ID NO: 949801 - DNA, 25 bp, Homo sapien
cacacgttgttggacacgtgctccc

SEQ ID NO: 949802 - DNA, 25 bp, Homo sapien
ccctgcgggtagctgggcgtgatcc

SEQ ID NO: 949803 - DNA, 25 bp, Homo sapien
acggacactcggcacacgttgttgg

SEQ ID NO: 949804 - DNA, 25 bp, Homo sapien
gcaaaggatttctgactaagattcc

SEQ ID NO: 949805 - DNA, 25 bp, Homo sapien
caaaagaagatatgcggctgggcgc

SEQ ID NO: 949806 - DNA, 25 bp, Homo sapien
tcataaccagaatctagaaggactc

SEQ ID NO: 949807 - DNA, 25 bp, Homo sapien
ggatccgtatctctcaccatattaa

SEQ ID NO: 949808 - DNA, 25 bp, Homo sapien
atccagggcatacaccgacgtctgc

SEQ ID NO: 949809 - DNA, 25 bp, Homo sapien
tctcatccagggcatacaccgacgt

SEQ ID NO: 949810 - DNA, 25 bp, Homo sapien
gggacgggatgtggtaccagcagtc

SEQ ID NO: 949811 - DNA, 25 bp, Homo sapien
gacgggatgtggtaccagcagtcac

SEQ ID NO: 949812 - DNA, 25 bp, Homo sapien
aaggcggagccgtcccttgccacgg

SEQ ID NO: 949813 - DNA, 25 bp, Homo sapien
aggcgaagggctggtcggtgccaac

SEQ ID NO: 949814 - DNA, 25 bp, Homo sapien
tggctgcgaggggtacacggatccc

SEQ ID NO: 949815 - DNA, 25 bp, Homo sapien
caggccccgatggagatggaggcga

SEQ ID NO: 949816 - DNA, 25 bp, Homo sapien
accagcagaaatgggcctagcgcgt

SEQ ID NO: 949817 - DNA, 25 bp, Homo sapien
ccaaggactgggtgccaaagagccg

SEQ ID NO: 949818 - DNA, 25 bp, Homo sapien
tcggaccacaggcagtgtccactgg

SEQ ID NO: 949819 - DNA, 25 bp, Homo sapien
gcttgttgaaatcctgggcgcatct

SEQ ID NO: 949820 - DNA, 25 bp, Homo sapien
cagagggcgatgctgtgcccactcc

SEQ ID NO: 949821 - DNA, 25 bp, Homo sapien
tcggcacccgggctctccgggatga

SEQ ID NO: 949822 - DNA, 25 bp, Homo sapien
gcagggttgagctccgacacgccca

SEQ ID NO: 949823 - DNA, 25 bp, Homo sapien
cccttgtcgctgacggcccagaggg

SEQ ID NO: 949824 - DNA, 25 bp, Homo sapien
cacagcccagggaccccaaggtgac

SEQ ID NO: 949825 - DNA, 25 bp, Homo sapien
cagggaccccaaggtgaccaccagg

SEQ ID NO: 949826 - DNA, 25 bp, Homo sapien
tgtacagtggagaggggacacagcc

SEQ ID NO: 949827 - DNA, 25 bp, Homo sapien
gacacagcccagggaccccaaggtg

SEQ ID NO: 949828 - DNA, 25 bp, Homo sapien
aaatccttcatcgttttggacccat

SEQ ID NO: 949829 - DNA, 25 bp, Homo sapien
cacaaaatccttcatcgttttggac

SEQ ID NO: 949830 - DNA, 25 bp, Homo sapien
atccttcatcgttttggacccatgg

SEQ ID NO: 949831 - DNA, 25 bp, Homo sapien
aatccttcatcgttttggacccatg

SEQ ID NO: 949832 - DNA, 25 bp, Homo sapien
tgaaatcagggccacttcgtggaag

SEQ ID NO: 949833 - DNA, 25 bp, Homo sapien
aagatgaaatcagggccacttcgtg

SEQ ID NO: 949834 - DNA, 25 bp, Homo sapien
ggaagaagatgaaatcagggccact

SEQ ID NO: 949835 - DNA, 25 bp, Homo sapien
aatcagggccacttcgtggaagttt

SEQ ID NO: 949836 - DNA, 25 bp, Homo sapien
cagggaagtcgctggcatactgcca

SEQ ID NO: 949837 - DNA, 25 bp, Homo sapien
ggaagtcgctggcatactgccaccc

SEQ ID NO: 949838 - DNA, 25 bp, Homo sapien
tgaaatccacgaaccagtcggaaac

SEQ ID NO: 949839 - DNA, 25 bp, Homo sapien
ccggaacgctgaaatccacgaacca

SEQ ID NO: 949840 - DNA, 25 bp, Homo sapien
gtgccagccttcgtgcactcctgca

SEQ ID NO: 949841 - DNA, 25 bp, Homo sapien
tcgctccacatgtaccggtccgtgg

SEQ ID NO: 949842 - DNA, 25 bp, Homo sapien
acatgtaccggtccgtgggcagacc

SEQ ID NO: 949843 - DNA, 25 bp, Homo sapien
cgaggcatcgctccacatgtaccgg

SEQ ID NO: 949844 - DNA, 25 bp, Homo sapien
cgggcttcgggagttcaggagttgg

SEQ ID NO: 949845 - DNA, 25 bp, Homo sapien
gcgggcttcgggagttcaggagttg

SEQ ID NO: 949846 - DNA, 25 bp, Homo sapien
cagtatagaaaactacaggtcaggt

SEQ ID NO: 949847 - DNA, 25 bp, Homo sapien
tatgaaataccgtctaataaaagat

SEQ ID NO: 949848 - DNA, 25 bp, Homo sapien
gaatatgccacttataatactgtcc

SEQ ID NO: 949849 - DNA, 25 bp, Homo sapien
tgcatttctttagacagcctcaaaa

SEQ ID NO: 949850 - DNA, 25 bp, Homo sapien
gttccagcgctggttctcatagatg

SEQ ID NO: 949851 - DNA, 25 bp, Homo sapien
tgaacacacttcacgtctgactgcg

SEQ ID NO: 949852 - DNA, 25 bp, Homo sapien
actgcgtgtagatgttactggtgct

SEQ ID NO: 949853 - DNA, 25 bp, Homo sapien
gggttccagcgctggttctcataga

SEQ ID NO: 949854 - DNA, 25 bp, Homo sapien
accctgaaaatgagaggctggacat

SEQ ID NO: 949855 - DNA, 25 bp, Homo sapien
caccctgaaaatgagaggctggaca

SEQ ID NO: 949856 - DNA, 25 bp, Homo sapien
ggccctcagctcgaagtgggtactg

SEQ ID NO: 949857 - DNA, 25 bp, Homo sapien
ctcagctcgaagtgggtactggcag

SEQ ID NO: 949858 - DNA, 25 bp, Homo sapien
cgtgtggtcatagccgatgccccac

SEQ ID NO: 949859 - DNA, 25 bp, Homo sapien
gttggcctccaccatccgcaggtgg

SEQ ID NO: 949860 - DNA, 25 bp, Homo sapien
ctgtgtatacccaggccgtgtggtc

SEQ ID NO: 949861 - DNA, 25 bp, Homo sapien
tccatagccgcctgtgtatacccag

SEQ ID NO: 949862 - DNA, 25 bp, Homo sapien
gaagatgtcccccttgcaggtgatg

SEQ ID NO: 949863 - DNA, 25 bp, Homo sapien
gctgggctcgctcacgaagatgtcc

SEQ ID NO: 949864 - DNA, 25 bp, Homo sapien
agggggtgctcgtgggcctccaggt

SEQ ID NO: 949865 - DNA, 25 bp, Homo sapien
ggtgctcgtgggcctccaggtctgg

SEQ ID NO: 949866 - DNA, 25 bp, Homo sapien
tctcgcagcaagacaggctgagcag

SEQ ID NO: 949867 - DNA, 25 bp, Homo sapien
ttccggctctcgcagcaagacaggc

SEQ ID NO: 949868 - DNA, 25 bp, Homo sapien
gggcggccctgcaccttccggctct

SEQ ID NO: 949869 - DNA, 25 bp, Homo sapien
ggctctcgcagcaagacaggctgag

SEQ ID NO: 949870 - DNA, 25 bp, Homo sapien
tacagggcaaaggagtgcttggtct

SEQ ID NO: 949871 - DNA, 25 bp, Homo sapien
gcttggtctcgttcagcactgggac

SEQ ID NO: 949872 - DNA, 25 bp, Homo sapien
cctcattcaggaatatgtggatgta

SEQ ID NO: 949873 - DNA, 25 bp, Homo sapien
gtcctgctcggtggcagcagccaga

SEQ ID NO: 949874 - DNA, 25 bp, Homo sapien
catctcctgtgggacccgtgggcac

SEQ ID NO: 949875 - DNA, 25 bp, Homo sapien
gccccatctcctgtgggacccgtgg

SEQ ID NO: 949876 - DNA, 25 bp, Homo sapien
cctctagcaccccagccctgtgtcc

SEQ ID NO: 949877 - DNA, 25 bp, Homo sapien
ctggccccatctcctgtgggacccg

SEQ ID NO: 949878 - DNA, 25 bp, Homo sapien
aactgctccagggccaagcgcacgt

SEQ ID NO: 949879 - DNA, 25 bp, Homo sapien
acttgtggggcttccagtcgcacca

SEQ ID NO: 949880 - DNA, 25 bp, Homo sapien
cctcgtggaccacatagtagatgaa

SEQ ID NO: 949881 - DNA, 25 bp, Homo sapien
aagcgcacgtccacccacttgtggg

SEQ ID NO: 949882 - DNA, 25 bp, Homo sapien
tgctccacggcctgctcgtagtgtc

SEQ ID NO: 949883 - DNA, 25 bp, Homo sapien
cctttccgtgagctgctggaagatc

SEQ ID NO: 949884 - DNA, 25 bp, Homo sapien
tcccgcttggtcctttccgtgagct

SEQ ID NO: 949885 - DNA, 25 bp, Homo sapien
ctgggccggcgtgatggacagggac

SEQ ID NO: 949886 - DNA, 25 bp, Homo sapien
aggccacagaggagcgcaatgcctg

SEQ ID NO: 949887 - DNA, 25 bp, Homo sapien
aaatcagccctttctagctcaaaag

SEQ ID NO: 949888 - DNA, 25 bp, Homo sapien
ggatgagttgctctcccccagtaat

SEQ ID NO: 949889 - DNA, 25 bp, Homo sapien
gctcaaaagctacgctctctgttaa

SEQ ID NO: 949890 - DNA, 25 bp, Homo sapien
agtgaaccatctgggcatggcacat

SEQ ID NO: 949891 - DNA, 25 bp, Homo sapien
aggcccacagcgggtggtcatccac

SEQ ID NO: 949892 - DNA, 25 bp, Homo sapien
acagcgggtggtcatccaccccata

SEQ ID NO: 949893 - DNA, 25 bp, Homo sapien
gggtggtcatccaccccatacggct

SEQ ID NO: 949894 - DNA, 25 bp, Homo sapien
ggcattcttggaatcgtctagaggt

SEQ ID NO: 949895 - DNA, 25 bp, Homo sapien
gaatcgtctagaggttctgcaggga

SEQ ID NO: 949896 - DNA, 25 bp, Homo sapien
aggcatcttccacggtatcttctgc

SEQ ID NO: 949897 - DNA, 25 bp, Homo sapien
acggtatcttctgcggtcctgccag

SEQ ID NO: 949898 - DNA, 25 bp, Homo sapien
acccctcacctcatcaccgaagaag

SEQ ID NO: 949899 - DNA, 25 bp, Homo sapien
ttccgaggaggcatcggtgtcgctg

SEQ ID NO: 949900 - DNA, 25 bp, Homo sapien
ctcatcaccgaagaagcagccggca

SEQ ID NO: 949901 - DNA, 25 bp, Homo sapien
tgtcgctgggggcagactcgccact

SEQ ID NO: 949902 - DNA, 25 bp, Homo sapien
agtgtgaccggtcacactctcgggc

SEQ ID NO: 949903 - DNA, 25 bp, Homo sapien
tcgggccgcgatgatggctttccag

SEQ ID NO: 949904 - DNA, 25 bp, Homo sapien
tgccggaagtacacggctcggtcct

SEQ ID NO: 949905 - DNA, 25 bp, Homo sapien
gagctgccagagtgtgaccggtcac

SEQ ID NO: 949906 - DNA, 25 bp, Homo sapien
gctgtgttccgaggaatctgggcgc

SEQ ID NO: 949907 - DNA, 25 bp, Homo sapien
aggctgtgttccgaggaatctgggc

SEQ ID NO: 949908 - DNA, 25 bp, Homo sapien
gagaggctgtgttccgaggaatctg

SEQ ID NO: 949909 - DNA, 25 bp, Homo sapien
ctgtgttccgaggaatctgggcgca

SEQ ID NO: 949910 - DNA, 25 bp, Homo sapien
cgttcattcccacgttcaccatcgt

SEQ ID NO: 949911 - DNA, 25 bp, Homo sapien
ctggtcgttcattcccacgttcacc

SEQ ID NO: 949912 - DNA, 25 bp, Homo sapien
tggtcgttcattcccacgttcacca

SEQ ID NO: 949913 - DNA, 25 bp, Homo sapien
tcattcccacgttcaccatcgtcat

SEQ ID NO: 949914 - DNA, 25 bp, Homo sapien
gagttgacgcctcttcggaaccaca

SEQ ID NO: 949915 - DNA, 25 bp, Homo sapien
aaccatctcaatccaactggtgccg

SEQ ID NO: 949916 - DNA, 25 bp, Homo sapien
aatccaactggtgccgcagggattg

SEQ ID NO: 949917 - DNA, 25 bp, Homo sapien
cagggattgtgagagttgacgcctc

SEQ ID NO: 949918 - DNA, 25 bp, Homo sapien
aagtgatcccccagcctcatcccca

SEQ ID NO: 949919 - DNA, 25 bp, Homo sapien
atcccccagcctcatccccatctta

SEQ ID NO: 949920 - DNA, 25 bp, Homo sapien
tcaagtgatcccccagcctcatccc

SEQ ID NO: 949921 - DNA, 25 bp, Homo sapien
gtgatcccccagcctcatccccatc

SEQ ID NO: 949922 - DNA, 25 bp, Homo sapien
accacgctgactcccaccgagatgt

SEQ ID NO: 949923 - DNA, 25 bp, Homo sapien
catgaccccgttttcagatccagga

SEQ ID NO: 949924 - DNA, 25 bp, Homo sapien
ggaggctccacgatggaccaggaac

SEQ ID NO: 949925 - DNA, 25 bp, Homo sapien
accgagatgtgcatgaccccgtttt

SEQ ID NO: 949926 - DNA, 25 bp, Homo sapien
ctgttgattccttcccggaccaggg

SEQ ID NO: 949927 - DNA, 25 bp, Homo sapien
gacccttcggggttggagtggctga

SEQ ID NO: 949928 - DNA, 25 bp, Homo sapien
acagctgatctgaaccacctccccg

SEQ ID NO: 949929 - DNA, 25 bp, Homo sapien
ggagtggctgacgtcctctctgtac

SEQ ID NO: 949930 - DNA, 25 bp, Homo sapien
ctgggaggcaagacagggacacagc

SEQ ID NO: 949931 - DNA, 25 bp, Homo sapien
gggaggcaagacagggacacagcac

SEQ ID NO: 949932 - DNA, 25 bp, Homo sapien
tgggaggcaagacagggacacagca

SEQ ID NO: 949933 - DNA, 25 bp, Homo sapien
gagcaacgtgctcagagcgtctgaa

SEQ ID NO: 949934 - DNA, 25 bp, Homo sapien
ggagcctcccttcggctagcaggtg

SEQ ID NO: 949935 - DNA, 25 bp, Homo sapien
gggagactacatgtcacttcgtgat

SEQ ID NO: 949936 - DNA, 25 bp, Homo sapien
gacattccaggacacaaacgctgct

SEQ ID NO: 949937 - DNA, 25 bp, Homo sapien
cttgccctgcagagacacagcccac

SEQ ID NO: 949938 - DNA, 25 bp, Homo sapien
tgccctgcagagacacagcccacac

SEQ ID NO: 949939 - DNA, 25 bp, Homo sapien
ttgccctgcagagacacagcccaca

SEQ ID NO: 949940 - DNA, 25 bp, Homo sapien
cagccccctacagagaggtcgttga

SEQ ID NO: 949941 - DNA, 25 bp, Homo sapien
agaggtcgttgaaggggtcgggcag

SEQ ID NO: 949942 - DNA, 25 bp, Homo sapien
cccctacagagaggtcgttgaaggg

SEQ ID NO: 949943 - DNA, 25 bp, Homo sapien
gccccctacagagaggtcgttgaag

SEQ ID NO: 949944 - DNA, 25 bp, Homo sapien
cgcccgcctgccatccggacttcca

SEQ ID NO: 949945 - DNA, 25 bp, Homo sapien
ccgcccgcctgccatccggacttcc

SEQ ID NO: 949946 - DNA, 25 bp, Homo sapien
gcccgcctgccatccggacttccat

SEQ ID NO: 949947 - DNA, 25 bp, Homo sapien
cccgcccgcctgccatccggacttc

SEQ ID NO: 949948 - DNA, 25 bp, Homo sapien
tcattggaggccacgccaagacctg

SEQ ID NO: 949949 - DNA, 25 bp, Homo sapien
catggagcaacgctagagccagagg

SEQ ID NO: 949950 - DNA, 25 bp, Homo sapien
tccactcattggaggccacgccaag

SEQ ID NO: 949951 - DNA, 25 bp, Homo sapien
ctgggtcatggagcaacgctagagc

SEQ ID NO: 949952 - DNA, 25 bp, Homo sapien
ccaacccacattcaggaacagagac

SEQ ID NO: 949953 - DNA, 25 bp, Homo sapien
cccaacccacattcaggaacagaga

SEQ ID NO: 949954 - DNA, 25 bp, Homo sapien
tgtatctcctgtaccggatccactt

SEQ ID NO: 949955 - DNA, 25 bp, Homo sapien
ggcgccgcacacaagaattccactt

SEQ ID NO: 949956 - DNA, 25 bp, Homo sapien
ttggcccagatgtcccgggacttgt

SEQ ID NO: 949957 - DNA, 25 bp, Homo sapien
acttcttgtctttcgtgtaggtggc

SEQ ID NO: 949958 - DNA, 25 bp, Homo sapien
ctgaaacaccaaggaaggggctctc

SEQ ID NO: 949959 - DNA, 25 bp, Homo sapien
agggtgtggcctgaaacacccgagc

SEQ ID NO: 949960 - DNA, 25 bp, Homo sapien
tggcctgaaacacccgagctcaggc

SEQ ID NO: 949961 - DNA, 25 bp, Homo sapien
ctgaaacacccgagctcaggcacca

SEQ ID NO: 949962 - DNA, 25 bp, Homo sapien
cgagctcaggcaccacagggtgcag

SEQ ID NO: 949963 - DNA, 25 bp, Homo sapien
acagggcagtcatggagggtcccaa

SEQ ID NO: 949964 - DNA, 25 bp, Homo sapien
cagtcatggagggtcccaagttcac

SEQ ID NO: 949965 - DNA, 25 bp, Homo sapien
gggcagtcatggagggtcccaagtt

SEQ ID NO: 949966 - DNA, 25 bp, Homo sapien
ccccacagggcagtcatggagggtc

SEQ ID NO: 949967 - DNA, 25 bp, Homo sapien
ccactcccagtgcggcgagggcagt

SEQ ID NO: 949968 - DNA, 25 bp, Homo sapien
ctttctcagtgggttcacctccaaa

SEQ ID NO: 949969 - DNA, 25 bp, Homo sapien
agtgccaccctgtccagcggccggt

SEQ ID NO: 949970 - DNA, 25 bp, Homo sapien
aaattctcatccacgtaccagtcag

SEQ ID NO: 949971 - DNA, 25 bp, Homo sapien
cacagaggcggccttggacccaagc

SEQ ID NO: 949972 - DNA, 25 bp, Homo sapien
gacacagaggcggccttggacccaa

SEQ ID NO: 949973 - DNA, 25 bp, Homo sapien
tgagggccggggacacagaggcggc

SEQ ID NO: 949974 - DNA, 25 bp, Homo sapien
gggacacagaggcggccttggaccc

SEQ ID NO: 949975 - DNA, 25 bp, Homo sapien
ggcaactccaaccatgagggtcact

SEQ ID NO: 949976 - DNA, 25 bp, Homo sapien
caactccaaccatgagggtcactac

SEQ ID NO: 949977 - DNA, 25 bp, Homo sapien
tcggcaactccaaccatgagggtca

SEQ ID NO: 949978 - DNA, 25 bp, Homo sapien
cgctcggcaactccaaccatgaggg

SEQ ID NO: 949979 - DNA, 25 bp, Homo sapien
gtccttgcacatttcccagtactgg

SEQ ID NO: 949980 - DNA, 25 bp, Homo sapien
cagcgtgtacactctcccgaagagg

SEQ ID NO: 949981 - DNA, 25 bp, Homo sapien
ggcgctgacgcgcttgaactccagc

SEQ ID NO: 949982 - DNA, 25 bp, Homo sapien
tacacgtagacctggttgtcacagg

SEQ ID NO: 949983 - DNA, 25 bp, Homo sapien
gaagctctgcccgacagggcggctc

SEQ ID NO: 949984 - DNA, 25 bp, Homo sapien
cacagagctactggatgaagccacc

SEQ ID NO: 949985 - DNA, 25 bp, Homo sapien
ccagggcccatagtgctgttgcacc

SEQ ID NO: 949986 - DNA, 25 bp, Homo sapien
gagtcctggctcctgataggaacag

SEQ ID NO: 949987 - DNA, 25 bp, Homo sapien
tgacgatggcacgagatagaagcat

SEQ ID NO: 949988 - DNA, 25 bp, Homo sapien
cagacggccgggtgactgtgacgat

SEQ ID NO: 949989 - DNA, 25 bp, Homo sapien
gactgtgacgatggcacgagataga

SEQ ID NO: 949990 - DNA, 25 bp, Homo sapien
ccgggtgactgtgacgatggcacga

SEQ ID NO: 949991 - DNA, 25 bp, Homo sapien
ttcctctgagccttaggagtcctac

SEQ ID NO: 949992 - DNA, 25 bp, Homo sapien
tccggtatgcaaacagtcggcaatg

SEQ ID NO: 949993 - DNA, 25 bp, Homo sapien
ggctgttcaaaagcgacatcagggt

SEQ ID NO: 949994 - DNA, 25 bp, Homo sapien
acagtagctcgctggctgccaggtg

SEQ ID NO: 949995 - DNA, 25 bp, Homo sapien
tttttctattacactgtcactccca

SEQ ID NO: 949996 - DNA, 25 bp, Homo sapien
cgaagtcgcggtggtaggtcctcgg

SEQ ID NO: 949997 - DNA, 25 bp, Homo sapien
aagtcgcggtggtaggtcctcggcg

SEQ ID NO: 949998 - DNA, 25 bp, Homo sapien
cgcggtggtaggtcctcggcgtccg

SEQ ID NO: 949999 - DNA, 25 bp, Homo sapien
ggcgaagtcgcggtggtaggtcctc

SEQ ID NO: 950000 - DNA, 25 bp, Homo sapien
ctgaagcgagttgccgcgttctctc

SEQ ID NO: 950001 - DNA, 25 bp, Homo sapien
cagagtcggctgaagcgagttgccg

SEQ ID NO: 950002 - DNA, 25 bp, Homo sapien
tcggctgaagcgagttgccgcgttc

SEQ ID NO: 950003 - DNA, 25 bp, Homo sapien
gagttgccgcgttctctctggcggc

SEQ ID NO: 950004 - DNA, 25 bp, Homo sapien
ggagcggagagggcggtgtggacac

SEQ ID NO: 950005 - DNA, 25 bp, Homo sapien
gcaggagcggagagggcggtgtgga

SEQ ID NO: 950006 - DNA, 25 bp, Homo sapien
gcggagagggcggtgtggacaccgc

SEQ ID NO: 950007 - DNA, 25 bp, Homo sapien
caggagcggagagggcggtgtggac

SEQ ID NO: 950008 - DNA, 25 bp, Homo sapien
tggcggagagggtacctgggtgcgt

SEQ ID NO: 950009 - DNA, 25 bp, Homo sapien
gctgtgcggcgtcaggaggagcagg

SEQ ID NO: 950010 - DNA, 25 bp, Homo sapien
gaggagcagggtgtgggcgcccggc

SEQ ID NO: 950011 - DNA, 25 bp, Homo sapien
tgcaggcgaggagaaggggtggcgg

SEQ ID NO: 950012 - DNA, 25 bp, Homo sapien
cagcagttgtgaccttccgcaacat

SEQ ID NO: 950013 - DNA, 25 bp, Homo sapien
acctgtgaacagctgaagcatctcc

SEQ ID NO: 950014 - DNA, 25 bp, Homo sapien
cacctgagcagcagttgtgaccttc

SEQ ID NO: 950015 - DNA, 25 bp, Homo sapien
tgctgagccttccatagcaaatccc

SEQ ID NO: 950016 - DNA, 25 bp, Homo sapien
taaaagtataaagacggccaggcgc

SEQ ID NO: 950017 - DNA, 25 bp, Homo sapien
caaaaggtcaggagttcgagaccag

SEQ ID NO: 950018 - DNA, 25 bp, Homo sapien
ctttgggaggccgaggtgggtggat

SEQ ID NO: 950019 - DNA, 25 bp, Homo sapien
gtggctcacccttgtaatcctagca

SEQ ID NO: 950020 - DNA, 25 bp, Homo sapien
ctgctggggactttatattggactc

SEQ ID NO: 950021 - DNA, 25 bp, Homo sapien
gaggcagctgttcactccatctgcc

SEQ ID NO: 950022 - DNA, 25 bp, Homo sapien
aagcaagagtgagccctgaccaagc

SEQ ID NO: 950023 - DNA, 25 bp, Homo sapien
caagtgggcaactatgaagcaagag

SEQ ID NO: 950024 - DNA, 25 bp, Homo sapien
tgtgaggccgcattctgtccccggt

SEQ ID NO: 950025 - DNA, 25 bp, Homo sapien
tgtccggtccctccttcatgtcggt

SEQ ID NO: 950026 - DNA, 25 bp, Homo sapien
gggcaggattgtgaggccgcattct

SEQ ID NO: 950027 - DNA, 25 bp, Homo sapien
gtccctccttcatgtcggtcgctgg

SEQ ID NO: 950028 - DNA, 25 bp, Homo sapien
gggctttccgctgccccgtactgag

SEQ ID NO: 950029 - DNA, 25 bp, Homo sapien
aggcatccccgcatcattcctgggc

SEQ ID NO: 950030 - DNA, 25 bp, Homo sapien
tctgctggagtttaagggggctttc

SEQ ID NO: 950031 - DNA, 25 bp, Homo sapien
catcattcctgggcgtgtccccaag

SEQ ID NO: 950032 - DNA, 25 bp, Homo sapien
tgtaatctccaaaactatcgagtga

SEQ ID NO: 950033 - DNA, 25 bp, Homo sapien
aacaatcaggataactttcattgtc

SEQ ID NO: 950034 - DNA, 25 bp, Homo sapien
tcatctgatagagaatagaaaagtc

SEQ ID NO: 950035 - DNA, 25 bp, Homo sapien
tatcgagtgagatcccaaagagcat

SEQ ID NO: 950036 - DNA, 25 bp, Homo sapien
tgagggcagcactggtcaaagccat

SEQ ID NO: 950037 - DNA, 25 bp, Homo sapien
cagggcttgcacacagagcccggga

SEQ ID NO: 950038 - DNA, 25 bp, Homo sapien
ttccgcacactgcacgtttggaggg

SEQ ID NO: 950039 - DNA, 25 bp, Homo sapien
acagagcccgggatagcagttccat

SEQ ID NO: 950040 - DNA, 25 bp, Homo sapien
gaactttgtgtcacgaggcgctcgc

SEQ ID NO: 950041 - DNA, 25 bp, Homo sapien
tacctcgtcacaggtgggcccgtaa

SEQ ID NO: 950042 - DNA, 25 bp, Homo sapien
attagcgccgaatcaggcccgcggt

SEQ ID NO: 950043 - DNA, 25 bp, Homo sapien
aggcgctcgctgttggcagattagc

SEQ ID NO: 950044 - DNA, 25 bp, Homo sapien
cagacaggctgcccgaatgcggtgt

SEQ ID NO: 950045 - DNA, 25 bp, Homo sapien
gacttggatcttgaccagagccctt

SEQ ID NO: 950046 - DNA, 25 bp, Homo sapien
agtgggtccggcttgacttggatct

SEQ ID NO: 950047 - DNA, 25 bp, Homo sapien
agccctttatgggagggacagacag

SEQ ID NO: 950048 - DNA, 25 bp, Homo sapien
cattgaactttgttgaagaggcggc

SEQ ID NO: 950049 - DNA, 25 bp, Homo sapien
taaaagcccaaacctgactggatca

SEQ ID NO: 950050 - DNA, 25 bp, Homo sapien
gtcactgaacctaggctcactggcg

SEQ ID NO: 950051 - DNA, 25 bp, Homo sapien
cattgtgtgaacatggccgactgta

SEQ ID NO: 950052 - DNA, 25 bp, Homo sapien
tatttgattaagcttcaggactgtt

SEQ ID NO: 950053 - DNA, 25 bp, Homo sapien
gttcatttgctgttttgccttgagg

SEQ ID NO: 950054 - DNA, 25 bp, Homo sapien
cagctgcggtttcccggagcgtgga

SEQ ID NO: 950055 - DNA, 25 bp, Homo sapien
tgtggagccaccttcgcttaaaggg

SEQ ID NO: 950056 - DNA, 25 bp, Homo sapien
tattaaagttgtaatcccttgatat

SEQ ID NO: 950057 - DNA, 25 bp, Homo sapien
taaagttgtaatcccttgatattta

SEQ ID NO: 950058 - DNA, 25 bp, Homo sapien
aggaccaggccatgcccgttctggt

SEQ ID NO: 950059 - DNA, 25 bp, Homo sapien
gtgccaaggaccaggccatgcccgt

SEQ ID NO: 950060 - DNA, 25 bp, Homo sapien
agaacgccaaaggccaggtgtcacc

SEQ ID NO: 950061 - DNA, 25 bp, Homo sapien
tgcagccctttctgtagtacagact

SEQ ID NO: 950062 - DNA, 25 bp, Homo sapien
ggtaacactgctggacctggctgga

SEQ ID NO: 950063 - DNA, 25 bp, Homo sapien
gcagttccccttagcgccagatggg

SEQ ID NO: 950064 - DNA, 25 bp, Homo sapien
tgcatgtaacctttcccaatctcag

SEQ ID NO: 950065 - DNA, 25 bp, Homo sapien
tggcttacctgcatgtaacctttcc

SEQ ID NO: 950066 - DNA, 25 bp, Homo sapien
agcatcggccacgtccactggctta

SEQ ID NO: 950067 - DNA, 25 bp, Homo sapien
aatctcagcctcataggatactaca

SEQ ID NO: 950068 - DNA, 25 bp, Homo sapien
aacacacacggtgagcggccgggct

SEQ ID NO: 950069 - DNA, 25 bp, Homo sapien
cagcaacacacacggtgagcggccg

SEQ ID NO: 950070 - DNA, 25 bp, Homo sapien
cccagcaacacacacggtgagcggc

SEQ ID NO: 950071 - DNA, 25 bp, Homo sapien
agaggggataagtcacagccccagc

SEQ ID NO: 950072 - DNA, 25 bp, Homo sapien
atggctgctaggctgaaaaacccgc

SEQ ID NO: 950073 - DNA, 25 bp, Homo sapien
ggttccgagggcatcatggctgcta

SEQ ID NO: 950074 - DNA, 25 bp, Homo sapien
catccataccatagggccaggttcc

SEQ ID NO: 950075 - DNA, 25 bp, Homo sapien
gccgggctgggaattttaaccatga

SEQ ID NO: 950076 - DNA, 25 bp, Homo sapien
atgggccgtgtgcagcgaatccgtt

SEQ ID NO: 950077 - DNA, 25 bp, Homo sapien
tggatgcagctttggccaactagct

SEQ ID NO: 950078 - DNA, 25 bp, Homo sapien
gagaacacaaggagccgtgactccg

SEQ ID NO: 950079 - DNA, 25 bp, Homo sapien
caggaccccgagcagtttgagtgta

SEQ ID NO: 950080 - DNA, 25 bp, Homo sapien
cggaggagatttcgtcgagtgctac

SEQ ID NO: 950081 - DNA, 25 bp, Homo sapien
tctcggaggagatttcgtcgagtgc

SEQ ID NO: 950082 - DNA, 25 bp, Homo sapien
gagctctcggaggagatttcgtcga

SEQ ID NO: 950083 - DNA, 25 bp, Homo sapien
agatttcgtcgagtgctacgtgtgg

SEQ ID NO: 950084 - DNA, 25 bp, Homo sapien
gatgcgcccatcattccgcaaggga

SEQ ID NO: 950085 - DNA, 25 bp, Homo sapien
taagcaggcgacattagagttaggc

SEQ ID NO: 950086 - DNA, 25 bp, Homo sapien
gaaacttgtcaacccaactacgtga

SEQ ID NO: 950087 - DNA, 25 bp, Homo sapien
taagggcaggcaaagcgtcttagca

SEQ ID NO: 950088 - DNA, 25 bp, Homo sapien
gatgggtgccgagcgatcattcgtc

SEQ ID NO: 950089 - DNA, 25 bp, Homo sapien
tcgggcggagtttcacagtggcaaa

SEQ ID NO: 950090 - DNA, 25 bp, Homo sapien
gatcattcgtcacagtcgggcggag

SEQ ID NO: 950091 - DNA, 25 bp, Homo sapien
tcatcgaatgatgggtgccgagcga

SEQ ID NO: 950092 - DNA, 25 bp, Homo sapien
ttaagcgttctggacgtgggcaccc

SEQ ID NO: 950093 - DNA, 25 bp, Homo sapien
tgctcccagcgtggtctaaagtagt

SEQ ID NO: 950094 - DNA, 25 bp, Homo sapien
gaagagcaatgtcacacactgaggc

SEQ ID NO: 950095 - DNA, 25 bp, Homo sapien
tgctctacgagggaaactggatttt

SEQ ID NO: 950096 - DNA, 25 bp, Homo sapien
cggctttgcagtcccgttggcatcg

SEQ ID NO: 950097 - DNA, 25 bp, Homo sapien
gctttgcagtcccgttggcatcgtt

SEQ ID NO: 950098 - DNA, 25 bp, Homo sapien
gcggctttgcagtcccgttggcatc

SEQ ID NO: 950099 - DNA, 25 bp, Homo sapien
aggcggctttgcagtcccgttggca

SEQ ID NO: 950100 - DNA, 25 bp, Homo sapien
ttaaatggccgcaaaagtgacttcc

SEQ ID NO: 950101 - DNA, 25 bp, Homo sapien
cagccacggtcttttgaacgcagaa

SEQ ID NO: 950102 - DNA, 25 bp, Homo sapien
tgtcagagcgtgaacagagcatggc

SEQ ID NO: 950103 - DNA, 25 bp, Homo sapien
caaagtgcaaaggtgcctacagggc

SEQ ID NO: 950104 - DNA, 25 bp, Homo sapien
ccatcactcgatgcctggtccacac

SEQ ID NO: 950105 - DNA, 25 bp, Homo sapien
acccatcactcgatgcctggtccac

SEQ ID NO: 950106 - DNA, 25 bp, Homo sapien
cacccatcactcgatgcctggtcca

SEQ ID NO: 950107 - DNA, 25 bp, Homo sapien
tcggagcaccgagcaccactttttc

SEQ ID NO: 950108 - DNA, 25 bp, Homo sapien
agggtgcccaccacatagccatgcg

SEQ ID NO: 950109 - DNA, 25 bp, Homo sapien
cactttttcccttgggctgcagcag

SEQ ID NO: 950110 - DNA, 25 bp, Homo sapien
ccgactgtacggagcttccagggtg

SEQ ID NO: 950111 - DNA, 25 bp, Homo sapien
gacagtggtgtgcttaaagctctgc

SEQ ID NO: 950112 - DNA, 25 bp, Homo sapien
gtgcaccgtgcgctggcagtctccc

SEQ ID NO: 950113 - DNA, 25 bp, Homo sapien
gcagtctcccgacactgacagaatg

SEQ ID NO: 950114 - DNA, 25 bp, Homo sapien
gaagccggtaagaggcgtgcaccgt

SEQ ID NO: 950115 - DNA, 25 bp, Homo sapien
aaagagatggacgtccacacgtgcc

SEQ ID NO: 950116 - DNA, 25 bp, Homo sapien
tgtagctagaaaaggcctcacgagc

SEQ ID NO: 950117 - DNA, 25 bp, Homo sapien
cagggcctgaggtctaactaccaat

SEQ ID NO: 950118 - DNA, 25 bp, Homo sapien
taaagcagcaggctaggcgaacatc

SEQ ID NO: 950119 - DNA, 25 bp, Homo sapien
ctaaggccccggacacaaggtatag

SEQ ID NO: 950120 - DNA, 25 bp, Homo sapien
caaagcaagacagctcctggagcga

SEQ ID NO: 950121 - DNA, 25 bp, Homo sapien
tacaatgaggcaggtctacgttccc

SEQ ID NO: 950122 - DNA, 25 bp, Homo sapien
tggatgaactggttccgggagccca

SEQ ID NO: 950123 - DNA, 25 bp, Homo sapien
gatcaaaggcagcaagtcccctcct

SEQ ID NO: 950124 - DNA, 25 bp, Homo sapien
gaggatcaaaggcagcaagtcccct

SEQ ID NO: 950125 - DNA, 25 bp, Homo sapien
tagaggatcaaaggcagcaagtccc

SEQ ID NO: 950126 - DNA, 25 bp, Homo sapien
ctagaggatcaaaggcagcaagtcc

SEQ ID NO: 950127 - DNA, 25 bp, Homo sapien
ggatgtcgtcctggccgaatctgct

SEQ ID NO: 950128 - DNA, 25 bp, Homo sapien
aagttcacggtgctgatgcttctca

SEQ ID NO: 950129 - DNA, 25 bp, Homo sapien
gctattctcagacaagttcacggtg

SEQ ID NO: 950130 - DNA, 25 bp, Homo sapien
aatctgctctcctgtcggcagctgc

SEQ ID NO: 950131 - DNA, 25 bp, Homo sapien
caccaatcaaaacctgatcttgatc

SEQ ID NO: 950132 - DNA, 25 bp, Homo sapien
cacagcacgtgttagataatgtctc

SEQ ID NO: 950133 - DNA, 25 bp, Homo sapien
ggacaacagtaatagtacatcacca

SEQ ID NO: 950134 - DNA, 25 bp, Homo sapien
cctgatcttgatctcacacacacag

SEQ ID NO: 950135 - DNA, 25 bp, Homo sapien
gtggtttctaaacatatcctcacaa

SEQ ID NO: 950136 - DNA, 25 bp, Homo sapien
tttagtggtttctaaacatatcctc

SEQ ID NO: 950137 - DNA, 25 bp, Homo sapien
tagtggtttctaaacatatcctcac

SEQ ID NO: 950138 - DNA, 25 bp, Homo sapien
ggtttctaaacatatcctcacaaga

SEQ ID NO: 950139 - DNA, 25 bp, Homo sapien
catggcttgggtttagcgaccagga

SEQ ID NO: 950140 - DNA, 25 bp, Homo sapien
tgactagtccacgagagctgaggct

SEQ ID NO: 950141 - DNA, 25 bp, Homo sapien
taaggacggaaaacacatggcttgg

SEQ ID NO: 950142 - DNA, 25 bp, Homo sapien
aatgcaacgtcggacctggaggcct

SEQ ID NO: 950143 - DNA, 25 bp, Homo sapien
tccagcaacttcgtgtacgacgacg

SEQ ID NO: 950144 - DNA, 25 bp, Homo sapien
ttggcgtgggcacggtcactgcttc

SEQ ID NO: 950145 - DNA, 25 bp, Homo sapien
cttggcgtgggcacggtcactgctt

SEQ ID NO: 950146 - DNA, 25 bp, Homo sapien
gcaacttcgtgtacgacgacgggaa

SEQ ID NO: 950147 - DNA, 25 bp, Homo sapien
catgtccacgaagacagtttgcagc

SEQ ID NO: 950148 - DNA, 25 bp, Homo sapien
ctaaaatgtgagcatgtccacgaag

SEQ ID NO: 950149 - DNA, 25 bp, Homo sapien
cgaagacagtttgcagcttggctgc

SEQ ID NO: 950150 - DNA, 25 bp, Homo sapien
gtgagcatgtccacgaagacagttt

SEQ ID NO: 950151 - DNA, 25 bp, Homo sapien
gtcccgttgcaaccgaaactgatcg

SEQ ID NO: 950152 - DNA, 25 bp, Homo sapien
taaggtcttgttggagcccgcagtg

SEQ ID NO: 950153 - DNA, 25 bp, Homo sapien
gccttggacacgtcgtgttctccat

SEQ ID NO: 950154 - DNA, 25 bp, Homo sapien
tgttctccatagagccagccatcct

SEQ ID NO: 950155 - DNA, 25 bp, Homo sapien
tgtaaactgggatcttcggaagtac

SEQ ID NO: 950156 - DNA, 25 bp, Homo sapien
ctgtaaactgggatcttcggaagta

SEQ ID NO: 950157 - DNA, 25 bp, Homo sapien
cctcgctttgatcattgcccagaag

SEQ ID NO: 950158 - DNA, 25 bp, Homo sapien
cgctttgatcattgcccagaaggaa

SEQ ID NO: 950159 - DNA, 25 bp, Homo sapien
tcctcgctttgatcattgcccagaa

SEQ ID NO: 950160 - DNA, 25 bp, Homo sapien
tcgctttgatcattgcccagaagga

SEQ ID NO: 950161 - DNA, 25 bp, Homo sapien
tgacaggacttccttcaaaggcaaa

SEQ ID NO: 950162 - DNA, 25 bp, Homo sapien
tactgggccatcctagtcatcattc

SEQ ID NO: 950163 - DNA, 25 bp, Homo sapien
cactctctacttcgctggtgttgaa

SEQ ID NO: 950164 - DNA, 25 bp, Homo sapien
tgattacaacataaacctgcgcccc

SEQ ID NO: 950165 - DNA, 25 bp, Homo sapien
gcagccgtggctgggttattaaaca

SEQ ID NO: 950166 - DNA, 25 bp, Homo sapien
taccctttgtgaattcggggcagcc

SEQ ID NO: 950167 - DNA, 25 bp, Homo sapien
actggtatatgctctgcctgaagga

SEQ ID NO: 950168 - DNA, 25 bp, Homo sapien
ggttattaaacatatcgatcaaggg

SEQ ID NO: 950169 - DNA, 25 bp, Homo sapien
tggtgagcatttagaaagggtgtcg

SEQ ID NO: 950170 - DNA, 25 bp, Homo sapien
gtgagcatttagaaagggtgtcgta

SEQ ID NO: 950171 - DNA, 25 bp, Homo sapien
gagcatttagaaagggtgtcgtaat

SEQ ID NO: 950172 - DNA, 25 bp, Homo sapien
tgagcatttagaaagggtgtcgtaa

SEQ ID NO: 950173 - DNA, 25 bp, Homo sapien
gtagctggataacaggcacgcacta

SEQ ID NO: 950174 - DNA, 25 bp, Homo sapien
tagccaggctggtctcaaacttctg

SEQ ID NO: 950175 - DNA, 25 bp, Homo sapien
ggcacgcactaccacatctggctat

SEQ ID NO: 950176 - DNA, 25 bp, Homo sapien
tgattcttgtgcctcagcctcttga

SEQ ID NO: 950177 - DNA, 25 bp, Homo sapien
gaaatctggaagagaaaactggctc

SEQ ID NO: 950178 - DNA, 25 bp, Homo sapien
gattgaaatctggaagagaaaactg

SEQ ID NO: 950179 - DNA, 25 bp, Homo sapien
aatctggaagagaaaactggctcct

SEQ ID NO: 950180 - DNA, 25 bp, Homo sapien
tctggaagagaaaactggctcctac

SEQ ID NO: 950181 - DNA, 25 bp, Homo sapien
gaggagttccagacacgggggtaga

SEQ ID NO: 950182 - DNA, 25 bp, Homo sapien
ttgcttctctcgatcatgggtgaag

SEQ ID NO: 950183 - DNA, 25 bp, Homo sapien
ctcgatcatgggtgaagcctgagga

SEQ ID NO: 950184 - DNA, 25 bp, Homo sapien
tatttcttcgatcatattcatgatt

SEQ ID NO: 950185 - DNA, 25 bp, Homo sapien
caggtgctcaccacatgtgattaat

SEQ ID NO: 950186 - DNA, 25 bp, Homo sapien
acaggtgctcaccacatgtgattaa

SEQ ID NO: 950187 - DNA, 25 bp, Homo sapien
gtgctcaccacatgtgattaatttt

SEQ ID NO: 950188 - DNA, 25 bp, Homo sapien
ggtgctcaccacatgtgattaattt

SEQ ID NO: 950189 - DNA, 25 bp, Homo sapien
ttcaagcagagcctctttgcaacca

SEQ ID NO: 950190 - DNA, 25 bp, Homo sapien
ctgtaagtgataataatgtatgtgg

SEQ ID NO: 950191 - DNA, 25 bp, Homo sapien
gccacagtgcttatcaaccagaaag

SEQ ID NO: 950192 - DNA, 25 bp, Homo sapien
caaccatctgcaatgaatttctgga

SEQ ID NO: 950193 - DNA, 25 bp, Homo sapien
tgacgagaagtaacggtctccacat

SEQ ID NO: 950194 - DNA, 25 bp, Homo sapien
ctgacgagaagtaacggtctccaca

SEQ ID NO: 950195 - DNA, 25 bp, Homo sapien
gacgagaagtaacggtctccacata

SEQ ID NO: 950196 - DNA, 25 bp, Homo sapien
ggatttctccaaagactctaattta

SEQ ID NO: 950197 - DNA, 25 bp, Homo sapien
ttgagtgcgtttcggcttccttggc

SEQ ID NO: 950198 - DNA, 25 bp, Homo sapien
cttcaactcagcttgggatttctcc

SEQ ID NO: 950199 - DNA, 25 bp, Homo sapien
tctttgtgttcatatttgagtgcgt

SEQ ID NO: 950200 - DNA, 25 bp, Homo sapien
atcatcaacacggagcttctctcct

SEQ ID NO: 950201 - DNA, 25 bp, Homo sapien
cggtttcatgcatctgggcatcatc

SEQ ID NO: 950202 - DNA, 25 bp, Homo sapien
atgagtcaacagtgggaacgagttc

SEQ ID NO: 950203 - DNA, 25 bp, Homo sapien
cttgtcggtttcatgcatctgggca

SEQ ID NO: 950204 - DNA, 25 bp, Homo sapien
tcatatatttcacgtcaagttctat

SEQ ID NO: 950205 - DNA, 25 bp, Homo sapien
atatttcacgtcaagttctatcttc

SEQ ID NO: 950206 - DNA, 25 bp, Homo sapien
tccagctcatggataatctctttgt

SEQ ID NO: 950207 - DNA, 25 bp, Homo sapien
catatatttcacgtcaagttctatc

SEQ ID NO: 950208 - DNA, 25 bp, Homo sapien
tgggtacttgaaatctctatgagga

SEQ ID NO: 950209 - DNA, 25 bp, Homo sapien
attttcatcaagactctcgttgagt

SEQ ID NO: 950210 - DNA, 25 bp, Homo sapien
cgttgagtttcttgtgggtacttga

SEQ ID NO: 950211 - DNA, 25 bp, Homo sapien
cttgaaatctctatgaggacatgtc

SEQ ID NO: 950212 - DNA, 25 bp, Homo sapien
acagatgccagggatctttccaaaa

SEQ ID NO: 950213 - DNA, 25 bp, Homo sapien
cctcacagatgccagggatctttcc

SEQ ID NO: 950214 - DNA, 25 bp, Homo sapien
tctttccaaaatgcaggcgtaacat

SEQ ID NO: 950215 - DNA, 25 bp, Homo sapien
gatgccagggatctttccaaaatgc

SEQ ID NO: 950216 - DNA, 25 bp, Homo sapien
ctgctcccgccatggtgttccaggg

SEQ ID NO: 950217 - DNA, 25 bp, Homo sapien
gggaaaccagcttccgagctgtact

SEQ ID NO: 950218 - DNA, 25 bp, Homo sapien
tgttccagggaaaccagcttccgag

SEQ ID NO: 950219 - DNA, 25 bp, Homo sapien
ccatggtgttccagggaaaccagct

SEQ ID NO: 950220 - DNA, 25 bp, Homo sapien
ctctgggcacgctccatgctcctgc

SEQ ID NO: 950221 - DNA, 25 bp, Homo sapien
cctctgggcacgctccatgctcctg

SEQ ID NO: 950222 - DNA, 25 bp, Homo sapien
gcctctgggcacgctccatgctcct

SEQ ID NO: 950223 - DNA, 25 bp, Homo sapien
ggcctctgggcacgctccatgctcc

SEQ ID NO: 950224 - DNA, 25 bp, Homo sapien
cacgaaagggaaaagactggacgca

SEQ ID NO: 950225 - DNA, 25 bp, Homo sapien
gctgcaagcagaaacccgaacattg

SEQ ID NO: 950226 - DNA, 25 bp, Homo sapien
gaagcgactgctgacctctgagtaa

SEQ ID NO: 950227 - DNA, 25 bp, Homo sapien
acctccggcggttaatccagtgtgg

SEQ ID NO: 950228 - DNA, 25 bp, Homo sapien
tctgcagtatctcttggagctgtgg

SEQ ID NO: 950229 - DNA, 25 bp, Homo sapien
aggcttcggtgggtactgtgctttc

SEQ ID NO: 950230 - DNA, 25 bp, Homo sapien
ggtgggtactgtgctttccagtgtt

SEQ ID NO: 950231 - DNA, 25 bp, Homo sapien
tcatctgtgtagagtgcctgctcca

SEQ ID NO: 950232 - DNA, 25 bp, Homo sapien
taatgcactggcttatacctggagt

SEQ ID NO: 950233 - DNA, 25 bp, Homo sapien
aatgcactggcttatacctggagtc

SEQ ID NO: 950234 - DNA, 25 bp, Homo sapien
cagacacgtggagcagatgggttca

SEQ ID NO: 950235 - DNA, 25 bp, Homo sapien
tgaggtgccccagtccagacacgtg

SEQ ID NO: 950236 - DNA, 25 bp, Homo sapien
tgcagcggcacagccgttcacagtt

SEQ ID NO: 950237 - DNA, 25 bp, Homo sapien
cagcttcagtcccattcttgagaca

SEQ ID NO: 950238 - DNA, 25 bp, Homo sapien
atgcccctgaaggaccaccgggaca

SEQ ID NO: 950239 - DNA, 25 bp, Homo sapien
gaaatttataactgaggcaggcagc

SEQ ID NO: 950240 - DNA, 25 bp, Homo sapien
ccttggccagcggtcctttggctgt

SEQ ID NO: 950241 - DNA, 25 bp, Homo sapien
taagaggatgtaagtagcgcttgtg

SEQ ID NO: 950242 - DNA, 25 bp, Homo sapien
aattatccggcccagttgttgcagc

SEQ ID NO: 950243 - DNA, 25 bp, Homo sapien
gcttgtgaacaaggatggtgatgat

SEQ ID NO: 950244 - DNA, 25 bp, Homo sapien
gaaagaacatccacccaaaaattga

SEQ ID NO: 950245 - DNA, 25 bp, Homo sapien
aaaattgagatgagaaaagccacct

SEQ ID NO: 950246 - DNA, 25 bp, Homo sapien
tatcatgtgcttgcttccaggaaaa

SEQ ID NO: 950247 - DNA, 25 bp, Homo sapien
tctgacagccataaagtaaagccgt

SEQ ID NO: 950248 - DNA, 25 bp, Homo sapien
tagcctggggtccaatgaaccagcc

SEQ ID NO: 950249 - DNA, 25 bp, Homo sapien
aaaattaagttggcagactaggtca

SEQ ID NO: 950250 - DNA, 25 bp, Homo sapien
gatacgcgacctcagcaagttactg

SEQ ID NO: 950251 - DNA, 25 bp, Homo sapien
tcatatacctggtaggtagcctggg

SEQ ID NO: 950252 - DNA, 25 bp, Homo sapien
cagctctttccctactgtggtatga

SEQ ID NO: 950253 - DNA, 25 bp, Homo sapien
ggtcaattataactgctgtggctca

SEQ ID NO: 950254 - DNA, 25 bp, Homo sapien
gaattcttttatccagatcttagga

SEQ ID NO: 950255 - DNA, 25 bp, Homo sapien
taaagtgagtctaacctgtaactaa

SEQ ID NO: 950256 - DNA, 25 bp, Homo sapien
tgttactggccaaaccctgactact

SEQ ID NO: 950257 - DNA, 25 bp, Homo sapien
tgcccaacaagacgaagaggttagg

SEQ ID NO: 950258 - DNA, 25 bp, Homo sapien
ggttaggacttgagtatcccatgct

SEQ ID NO: 950259 - DNA, 25 bp, Homo sapien
aagattatcccaattgaagcaagca

SEQ ID NO: 950260 - DNA, 25 bp, Homo sapien
taccatggaattgttcgaaacgaga

SEQ ID NO: 950261 - DNA, 25 bp, Homo sapien
tggagccagtcaaggaagtaactcc

SEQ ID NO: 950262 - DNA, 25 bp, Homo sapien
tacatacgcacaagtggctgggcac

SEQ ID NO: 950263 - DNA, 25 bp, Homo sapien
tcaacattaggaactcacgactgac

SEQ ID NO: 950264 - DNA, 25 bp, Homo sapien
cccagggtgtaaccgccctctctgc

SEQ ID NO: 950265 - DNA, 25 bp, Homo sapien
tgcccagggtgtaaccgccctctct

SEQ ID NO: 950266 - DNA, 25 bp, Homo sapien
gcactgcccagggtgtaaccgccct

SEQ ID NO: 950267 - DNA, 25 bp, Homo sapien
ccctcggcagcgggcactgcccagg

SEQ ID NO: 950268 - DNA, 25 bp, Homo sapien
cagttcagttgacacgggggaccca

SEQ ID NO: 950269 - DNA, 25 bp, Homo sapien
taggcttttcctgccaggatcatag

SEQ ID NO: 950270 - DNA, 25 bp, Homo sapien
agtggcaatctcaccgatcttggcc

SEQ ID NO: 950271 - DNA, 25 bp, Homo sapien
gatcttggccactccatcgtagtag

SEQ ID NO: 950272 - DNA, 25 bp, Homo sapien
caggtttattaaatttcgcagccca

SEQ ID NO: 950273 - DNA, 25 bp, Homo sapien
tattaaatttcgcagcccaggattg

SEQ ID NO: 950274 - DNA, 25 bp, Homo sapien
gtttattaaatttcgcagcccagga

SEQ ID NO: 950275 - DNA, 25 bp, Homo sapien
ttaaatttcgcagcccaggattgaa

SEQ ID NO: 950276 - DNA, 25 bp, Homo sapien
tattagacttggctgaggcctatca

SEQ ID NO: 950277 - DNA, 25 bp, Homo sapien
tgactgtcacgattgccctagcatg

SEQ ID NO: 950278 - DNA, 25 bp, Homo sapien
gagtaactgcagcttcctacgacag

SEQ ID NO: 950279 - DNA, 25 bp, Homo sapien
aaacttgtccccatgctgtattaga

SEQ ID NO: 950280 - DNA, 25 bp, Homo sapien
tatcactagacgcagtcaggtgctt

SEQ ID NO: 950281 - DNA, 25 bp, Homo sapien
ctagacgcagtcaggtgcttggcac

SEQ ID NO: 950282 - DNA, 25 bp, Homo sapien
cactagacgcagtcaggtgcttggc

SEQ ID NO: 950283 - DNA, 25 bp, Homo sapien
ctggtatcactagacgcagtcaggt

SEQ ID NO: 950284 - DNA, 25 bp, Homo sapien
tatccacatacttgttgaagacctg

SEQ ID NO: 950285 - DNA, 25 bp, Homo sapien
tttcgtatctctaggataacctggg

SEQ ID NO: 950286 - DNA, 25 bp, Homo sapien
gggttcaatggctgcgtcacatggt

SEQ ID NO: 950287 - DNA, 25 bp, Homo sapien
gcaaagctgctatgagcgatcgcat

SEQ ID NO: 950288 - DNA, 25 bp, Homo sapien
gcacgcccggtcaagatcaatttta

SEQ ID NO: 950289 - DNA, 25 bp, Homo sapien
agcggttttcgtgcctaaggagtag

SEQ ID NO: 950290 - DNA, 25 bp, Homo sapien
ttcaagcggttttcgtgcctaagga

SEQ ID NO: 950291 - DNA, 25 bp, Homo sapien
ctggaagctgctgttcctggactaa

SEQ ID NO: 950292 - DNA, 25 bp, Homo sapien
ttacacaggtatctccaggaacctc

SEQ ID NO: 950293 - DNA, 25 bp, Homo sapien
tcatcaggacgagggagatcatgaa

SEQ ID NO: 950294 - DNA, 25 bp, Homo sapien
gtgtcatcatcaggacgagggagat

SEQ ID NO: 950295 - DNA, 25 bp, Homo sapien
tccacttcctgttaactggtatcag

SEQ ID NO: 950296 - DNA, 25 bp, Homo sapien
agagatgcctgcacccacggacgaa

SEQ ID NO: 950297 - DNA, 25 bp, Homo sapien
tatttcataagagatgcctgcaccc

SEQ ID NO: 950298 - DNA, 25 bp, Homo sapien
cacctgtatttcataagagatgcct

SEQ ID NO: 950299 - DNA, 25 bp, Homo sapien
ccacggacgaaccagctgcaggctg

SEQ ID NO: 950300 - DNA, 25 bp, Homo sapien
tttatgcctatggagccgtccacag

SEQ ID NO: 950301 - DNA, 25 bp, Homo sapien
aagcatttatgcctatggagccgtc

SEQ ID NO: 950302 - DNA, 25 bp, Homo sapien
gcatttatgcctatggagccgtcca

SEQ ID NO: 950303 - DNA, 25 bp, Homo sapien
catttatgcctatggagccgtccac

SEQ ID NO: 950304 - DNA, 25 bp, Homo sapien
tcagctcgttcaactttagcacctg

SEQ ID NO: 950305 - DNA, 25 bp, Homo sapien
gcacctgtctcgtccccagtggctt

SEQ ID NO: 950306 - DNA, 25 bp, Homo sapien
agctcgttcaactttagcacctgtc

SEQ ID NO: 950307 - DNA, 25 bp, Homo sapien
tcgttcaactttagcacctgtctcg

SEQ ID NO: 950308 - DNA, 25 bp, Homo sapien
tcatggagaggataaatagactggc

SEQ ID NO: 950309 - DNA, 25 bp, Homo sapien
ggagaggataaatagactggcaagc

SEQ ID NO: 950310 - DNA, 25 bp, Homo sapien
atggagaggataaatagactggcaa

SEQ ID NO: 950311 - DNA, 25 bp, Homo sapien
gaggataaatagactggcaagcctt

SEQ ID NO: 950312 - DNA, 25 bp, Homo sapien
cacttctttcaagtcatttgtctgc

SEQ ID NO: 950313 - DNA, 25 bp, Homo sapien
aatttattgaccacttctttcaagt

SEQ ID NO: 950314 - DNA, 25 bp, Homo sapien
ttctttcaagtcatttgtctgcacc

SEQ ID NO: 950315 - DNA, 25 bp, Homo sapien
atttattgaccacttctttcaagtc

SEQ ID NO: 950316 - DNA, 25 bp, Homo sapien
tcgggtcatgatttcgatcatcttc

SEQ ID NO: 950317 - DNA, 25 bp, Homo sapien
ctcgggtcatgatttcgatcatctt

SEQ ID NO: 950318 - DNA, 25 bp, Homo sapien
tcatcttcttccggatttggcggac

SEQ ID NO: 950319 - DNA, 25 bp, Homo sapien
cgatcatcttcttccggatttggcg

SEQ ID NO: 950320 - DNA, 25 bp, Homo sapien
cagacgaagcaagtaaccatcggta

SEQ ID NO: 950321 - DNA, 25 bp, Homo sapien
agaacagacgaagcaagtaaccatc

SEQ ID NO: 950322 - DNA, 25 bp, Homo sapien
ccaacacagaacagacgaagcaagt

SEQ ID NO: 950323 - DNA, 25 bp, Homo sapien
aacagacgaagcaagtaaccatcgg

SEQ ID NO: 950324 - DNA, 25 bp, Homo sapien
ctgccattttttgaccatggaacac

SEQ ID NO: 950325 - DNA, 25 bp, Homo sapien
gaccatggaacacattttgtcacgg

SEQ ID NO: 950326 - DNA, 25 bp, Homo sapien
ggaacacattttgtcacgggtaaga

SEQ ID NO: 950327 - DNA, 25 bp, Homo sapien
acacattttgtcacgggtaagatcc

SEQ ID NO: 950328 - DNA, 25 bp, Homo sapien
gccatggaagttaggcagtttttac

SEQ ID NO: 950329 - DNA, 25 bp, Homo sapien
cagtaatcagcctgaattttctaaa

SEQ ID NO: 950330 - DNA, 25 bp, Homo sapien
atcttcagtaatcagcctgaatttt

SEQ ID NO: 950331 - DNA, 25 bp, Homo sapien
cattctgcaaatcagcaagactcac

SEQ ID NO: 950332 - DNA, 25 bp, Homo sapien
cagcctgaattttctaaatgcaact

SEQ ID NO: 950333 - DNA, 25 bp, Homo sapien
tcctggtgacgagcgtctttccaat

SEQ ID NO: 950334 - DNA, 25 bp, Homo sapien
cttgggtcctggtgacgagcgtctt

SEQ ID NO: 950335 - DNA, 25 bp, Homo sapien
aatggatcaaccactttcttcttgg

SEQ ID NO: 950336 - DNA, 25 bp, Homo sapien
cttcttggctccctttttgccgcct

SEQ ID NO: 950337 - DNA, 25 bp, Homo sapien
cttgttcttgccaaccgccatggtg

SEQ ID NO: 950338 - DNA, 25 bp, Homo sapien
tttttgtctctcatcgacttctctc

SEQ ID NO: 950339 - DNA, 25 bp, Homo sapien
tcatcgacttctctcctatattcaa

SEQ ID NO: 950340 - DNA, 25 bp, Homo sapien
atttctacaatgttctttccgagaa

SEQ ID NO: 950341 - DNA, 25 bp, Homo sapien
tctacaatgttctttccgagaactt

SEQ ID NO: 950342 - DNA, 25 bp, Homo sapien
tccctgttgtcacctgcttttgtgc

SEQ ID NO: 950343 - DNA, 25 bp, Homo sapien
tacacattcagagaaacttctgaac

SEQ ID NO: 950344 - DNA, 25 bp, Homo sapien
cacattcagagaaacttctgaacaa

SEQ ID NO: 950345 - DNA, 25 bp, Homo sapien
gagaaacttctgaacaaactataga

SEQ ID NO: 950346 - DNA, 25 bp, Homo sapien
cattcagagaaacttctgaacaaac

SEQ ID NO: 950347 - DNA, 25 bp, Homo sapien
tgctgttctctcaaaagcacaagca

SEQ ID NO: 950348 - DNA, 25 bp, Homo sapien
ctgttctctcaaaagcacaagcact

SEQ ID NO: 950349 - DNA, 25 bp, Homo sapien
ctgctgttctctcaaaagcacaagc

SEQ ID NO: 950350 - DNA, 25 bp, Homo sapien
gctgttctctcaaaagcacaagcac

SEQ ID NO: 950351 - DNA, 25 bp, Homo sapien
tagtgactaccacaactgtatggcc

SEQ ID NO: 950352 - DNA, 25 bp, Homo sapien
tggtttgtcttctgacatgaaggat

SEQ ID NO: 950353 - DNA, 25 bp, Homo sapien
caactgtatggcctctcagaccaga

SEQ ID NO: 950354 - DNA, 25 bp, Homo sapien
cagaatttcctaggtcttggtttgt

SEQ ID NO: 950355 - DNA, 25 bp, Homo sapien
cagatttttgccatattaagcttaa

SEQ ID NO: 950356 - DNA, 25 bp, Homo sapien
taaaatatggtagatggttaggtaa

SEQ ID NO: 950357 - DNA, 25 bp, Homo sapien
actagattcatcaacactgccagat

SEQ ID NO: 950358 - DNA, 25 bp, Homo sapien
ggttaggtaatatagaggacatctc

SEQ ID NO: 950359 - DNA, 25 bp, Homo sapien
gacgctgcaattcgccttggtacgg

SEQ ID NO: 950360 - DNA, 25 bp, Homo sapien
tttgtgacgctgcaattcgccttgg

SEQ ID NO: 950361 - DNA, 25 bp, Homo sapien
tggttggcatttgtgacgctgcaat

SEQ ID NO: 950362 - DNA, 25 bp, Homo sapien
tgcaattcgccttggtacggtccct

SEQ ID NO: 950363 - DNA, 25 bp, Homo sapien
tcacagtgactgagcatcaaaaacg

SEQ ID NO: 950364 - DNA, 25 bp, Homo sapien
gtgtcaactgtgtctactctcccta

SEQ ID NO: 950365 - DNA, 25 bp, Homo sapien
caacacacgaatagaagagtttttg

SEQ ID NO: 950366 - DNA, 25 bp, Homo sapien
taaagatcgccctctatgaaggcaa

SEQ ID NO: 950367 - DNA, 25 bp, Homo sapien
gacagcacgggtcactgattccaag

SEQ ID NO: 950368 - DNA, 25 bp, Homo sapien
tagttgtaaaatgtgtagctggtca

SEQ ID NO: 950369 - DNA, 25 bp, Homo sapien
cttgtgtctttggtcccggagggct

SEQ ID NO: 950370 - DNA, 25 bp, Homo sapien
tcttagaggaaactcgagcttgtgt

SEQ ID NO: 950371 - DNA, 25 bp, Homo sapien
taggtgctctccgtgagccggttca

SEQ ID NO: 950372 - DNA, 25 bp, Homo sapien
ctccgtgagccggttcacctcctcg

SEQ ID NO: 950373 - DNA, 25 bp, Homo sapien
tccgtgagccggttcacctcctcgg

SEQ ID NO: 950374 - DNA, 25 bp, Homo sapien
gtgctctccgtgagccggttcacct

SEQ ID NO: 950375 - DNA, 25 bp, Homo sapien
cgcagccgtcggcccgagagtgccc

SEQ ID NO: 950376 - DNA, 25 bp, Homo sapien
tgcggccgccgggcgagcaagcgcg

SEQ ID NO: 950377 - DNA, 25 bp, Homo sapien
gcgagcaagcgcgggaggacgcggc

SEQ ID NO: 950378 - DNA, 25 bp, Homo sapien
cggggcgcgactaaggggctctgga

SEQ ID NO: 950379 - DNA, 25 bp, Homo sapien
tgtcaaaacttgcggcagcgccgcc

SEQ ID NO: 950380 - DNA, 25 bp, Homo sapien
aaaacttgcggcagcgccgccctgg

SEQ ID NO: 950381 - DNA, 25 bp, Homo sapien
aaaatgtcaaaacttgcggcagcgc

SEQ ID NO: 950382 - DNA, 25 bp, Homo sapien
ctgcgaaaatgtcaaaacttgcggc

SEQ ID NO: 950383 - DNA, 25 bp, Homo sapien
cagagctccggcgacgtagggcccg

SEQ ID NO: 950384 - DNA, 25 bp, Homo sapien
agctccggcgacgtagggcccgaga

SEQ ID NO: 950385 - DNA, 25 bp, Homo sapien
ctcccagagctccggcgacgtaggg

SEQ ID NO: 950386 - DNA, 25 bp, Homo sapien
gcgaggccacggtgcgccccctcgc

SEQ ID NO: 950387 - DNA, 25 bp, Homo sapien
tgtggagtgggctgctcgctttgct

SEQ ID NO: 950388 - DNA, 25 bp, Homo sapien
tgggctgggtgacagccttctcccc

SEQ ID NO: 950389 - DNA, 25 bp, Homo sapien
tgggtgacagccttctccccagtaa

SEQ ID NO: 950390 - DNA, 25 bp, Homo sapien
tgacagccttctccccagtaagaac

SEQ ID NO: 950391 - DNA, 25 bp, Homo sapien
gggtgacagccttctccccagtaag

SEQ ID NO: 950392 - DNA, 25 bp, Homo sapien
tggcaccaggtgtgtctcgacttgt

SEQ ID NO: 950393 - DNA, 25 bp, Homo sapien
acactcttcaaactcacggcttgaa

SEQ ID NO: 950394 - DNA, 25 bp, Homo sapien
tcaaactcacggcttgaaatgtcac

SEQ ID NO: 950395 - DNA, 25 bp, Homo sapien
gagatggcaccaggtgtgtctcgac

SEQ ID NO: 950396 - DNA, 25 bp, Homo sapien
tgaaggggctgttcgtggtgtctga

SEQ ID NO: 950397 - DNA, 25 bp, Homo sapien
aatctgcaaggagtttgggggcagc

SEQ ID NO: 950398 - DNA, 25 bp, Homo sapien
gcagctcatagaggcagacacagcc

SEQ ID NO: 950399 - DNA, 25 bp, Homo sapien
ctgagcgtctgtccttcctggtggt

SEQ ID NO: 950400 - DNA, 25 bp, Homo sapien
gctctgaggacgctgacttcagcac

SEQ ID NO: 950401 - DNA, 25 bp, Homo sapien
actcacctcctctagcaatttcagg

SEQ ID NO: 950402 - DNA, 25 bp, Homo sapien
gaagacaatgtccttggctctgagg

SEQ ID NO: 950403 - DNA, 25 bp, Homo sapien
tttcaggtcacttgggcagtgggac

SEQ ID NO: 950404 - DNA, 25 bp, Homo sapien
cccatttcttaagaacttggagtca

SEQ ID NO: 950405 - DNA, 25 bp, Homo sapien
gaaaggattccggtggcagacactg

SEQ ID NO: 950406 - DNA, 25 bp, Homo sapien
gacactgtggtcctatccatgagct

SEQ ID NO: 950407 - DNA, 25 bp, Homo sapien
tgggatgtgccagttgtggtgagtt

SEQ ID NO: 950408 - DNA, 25 bp, Homo sapien
gatcttcttgctggtcttgccattc

SEQ ID NO: 950409 - DNA, 25 bp, Homo sapien
tggtgatcttcttgctggtcttgcc

SEQ ID NO: 950410 - DNA, 25 bp, Homo sapien
ttagagttgtccgcagtcagcaatg

SEQ ID NO: 950411 - DNA, 25 bp, Homo sapien
gtgatcttcttgctggtcttgccat

SEQ ID NO: 950412 - DNA, 25 bp, Homo sapien
gcctccacaatcttcatgccttctt

SEQ ID NO: 950413 - DNA, 25 bp, Homo sapien
ggaccgaaagtgctccatggcctcc

SEQ ID NO: 950414 - DNA, 25 bp, Homo sapien
ctggaccgaaagtgctccatggcct

SEQ ID NO: 950415 - DNA, 25 bp, Homo sapien
catggcctccacaatcttcatgcct

SEQ ID NO: 950416 - DNA, 25 bp, Homo sapien
cttgccaaagaccacatgcctgcca

SEQ ID NO: 950417 - DNA, 25 bp, Homo sapien
ccaaagaccacatgcctgccatcca

SEQ ID NO: 950418 - DNA, 25 bp, Homo sapien
tgccaaagaccacatgcctgccatc

SEQ ID NO: 950419 - DNA, 25 bp, Homo sapien
ttgccaaagaccacatgcctgccat

SEQ ID NO: 950420 - DNA, 25 bp, Homo sapien
cccaagggctcgtcgataacagcaa

SEQ ID NO: 950421 - DNA, 25 bp, Homo sapien
gctcgtcgataacagcaatgtcgaa

SEQ ID NO: 950422 - DNA, 25 bp, Homo sapien
cggcccaagggctcgtcgataacag

SEQ ID NO: 950423 - DNA, 25 bp, Homo sapien
caagggctcgtcgataacagcaatg

SEQ ID NO: 950424 - DNA, 25 bp, Homo sapien
atagtacagagttcctggtggcggc

SEQ ID NO: 950425 - DNA, 25 bp, Homo sapien
tacagagttcctggtggcggcagtg

SEQ ID NO: 950426 - DNA, 25 bp, Homo sapien
agtacagagttcctggtggcggcag

SEQ ID NO: 950427 - DNA, 25 bp, Homo sapien
acagagttcctggtggcggcagtgt

SEQ ID NO: 950428 - DNA, 25 bp, Homo sapien
cagatgcccgccaccatgcttgact

SEQ ID NO: 950429 - DNA, 25 bp, Homo sapien
cctccacttctggagttcaagggat

SEQ ID NO: 950430 - DNA, 25 bp, Homo sapien
agatgcccgccaccatgcttgacta

SEQ ID NO: 950431 - DNA, 25 bp, Homo sapien
caacctccacttctggagttcaagg

SEQ ID NO: 950432 - DNA, 25 bp, Homo sapien
tccgtactgcagatcttcaggcaat

SEQ ID NO: 950433 - DNA, 25 bp, Homo sapien
gctgtccccgatgggagacagcttg

SEQ ID NO: 950434 - DNA, 25 bp, Homo sapien
agggagatgagctccgtactgcaga

SEQ ID NO: 950435 - DNA, 25 bp, Homo sapien
caggctttggcgaaaggctgtcccc

SEQ ID NO: 950436 - DNA, 25 bp, Homo sapien
gcttcgggtttgagcgaggacagca

SEQ ID NO: 950437 - DNA, 25 bp, Homo sapien
gggacccctttgtccacactgggca

SEQ ID NO: 950438 - DNA, 25 bp, Homo sapien
ggttctgagttaagcagactgcatc

SEQ ID NO: 950439 - DNA, 25 bp, Homo sapien
ggtagccaagtattgaggcttctgc

SEQ ID NO: 950440 - DNA, 25 bp, Homo sapien
aaattaaagccagtttgcaaggagg

SEQ ID NO: 950441 - DNA, 25 bp, Homo sapien
tgcaaggaggtctgtccatccgaag

SEQ ID NO: 950442 - DNA, 25 bp, Homo sapien
caatattaatctggctctcttggga

SEQ ID NO: 950443 - DNA, 25 bp, Homo sapien
tctaggagacctgcttattggacaa

SEQ ID NO: 950444 - DNA, 25 bp, Homo sapien
tctgtgtcggcactgcttacctcat

SEQ ID NO: 950445 - DNA, 25 bp, Homo sapien
gctctgtgtcggcactgcttacctc

SEQ ID NO: 950446 - DNA, 25 bp, Homo sapien
tgtgtcggcactgcttacctcatgc

SEQ ID NO: 950447 - DNA, 25 bp, Homo sapien
ctgctctgtgtcggcactgcttacc

SEQ ID NO: 950448 - DNA, 25 bp, Homo sapien
cctggggtcctcttcaccacgcacg

SEQ ID NO: 950449 - DNA, 25 bp, Homo sapien
gtcctcttcaccacgcacgtcacct

SEQ ID NO: 950450 - DNA, 25 bp, Homo sapien
tgtcttcactgctccgtcgccccag

SEQ ID NO: 950451 - DNA, 25 bp, Homo sapien
gggtcctcttcaccacgcacgtcac

SEQ ID NO: 950452 - DNA, 25 bp, Homo sapien
ggaaggctggcgctcctcgatttga

SEQ ID NO: 950453 - DNA, 25 bp, Homo sapien
ggcgctcctcgatttgataagtgat

SEQ ID NO: 950454 - DNA, 25 bp, Homo sapien
gataagtgatttcttcagggttgcc

SEQ ID NO: 950455 - DNA, 25 bp, Homo sapien
gccttgagggaaggctggcgctcct

SEQ ID NO: 950456 - DNA, 25 bp, Homo sapien
gggcaagatggctggccccaacagg

SEQ ID NO: 950457 - DNA, 25 bp, Homo sapien
gccccaacagggagtcgaggctggg

SEQ ID NO: 950458 - DNA, 25 bp, Homo sapien
ggccccaacagggagtcgaggctgg

SEQ ID NO: 950459 - DNA, 25 bp, Homo sapien
aggggcaagatggctggccccaaca

SEQ ID NO: 950460 - DNA, 25 bp, Homo sapien
tggactcttaggatcatgggtgggg

SEQ ID NO: 950461 - DNA, 25 bp, Homo sapien
caggatggactcttaggatcatggg

SEQ ID NO: 950462 - DNA, 25 bp, Homo sapien
atggactcttaggatcatgggtggg

SEQ ID NO: 950463 - DNA, 25 bp, Homo sapien
ggtcaggatggactcttaggatcat

SEQ ID NO: 950464 - DNA, 25 bp, Homo sapien
caataaagttctaagcggatcatgc

SEQ ID NO: 950465 - DNA, 25 bp, Homo sapien
tctctgcagtgccacgggaactggc

SEQ ID NO: 950466 - DNA, 25 bp, Homo sapien
tctgcgtgctaagtgattggtgaca

SEQ ID NO: 950467 - DNA, 25 bp, Homo sapien
gcactgattgtttcctaagggctct

SEQ ID NO: 950468 - DNA, 25 bp, Homo sapien
gagggcttcacgagatcaattcctg

SEQ ID NO: 950469 - DNA, 25 bp, Homo sapien
tgagggcttcacgagatcaattcct

SEQ ID NO: 950470 - DNA, 25 bp, Homo sapien
gtccttgagggcttcacgagatcaa

SEQ ID NO: 950471 - DNA, 25 bp, Homo sapien
cttgagggcttcacgagatcaattc

SEQ ID NO: 950472 - DNA, 25 bp, Homo sapien
acagcttcagatatagcttgggaag

SEQ ID NO: 950473 - DNA, 25 bp, Homo sapien
acacagcttcagatatagcttggga

SEQ ID NO: 950474 - DNA, 25 bp, Homo sapien
cacagcttcagatatagcttgggaa

SEQ ID NO: 950475 - DNA, 25 bp, Homo sapien
cagtgaatagactgcacgtgctcac

SEQ ID NO: 950476 - DNA, 25 bp, Homo sapien
gcctggccccaatgatgaatttcct

SEQ ID NO: 950477 - DNA, 25 bp, Homo sapien
gcagtgaatagactgcacgtgctca

SEQ ID NO: 950478 - DNA, 25 bp, Homo sapien
tttgggcataatcgttgttccttct

SEQ ID NO: 950479 - DNA, 25 bp, Homo sapien
cttttgggcataatcgttgttcctt

SEQ ID NO: 950480 - DNA, 25 bp, Homo sapien
ttttgggcataatcgttgttccttc

SEQ ID NO: 950481 - DNA, 25 bp, Homo sapien
gaagaccactccattattcatcggg

SEQ ID NO: 950482 - DNA, 25 bp, Homo sapien
catcgggtggaacattcttgcattt

SEQ ID NO: 950483 - DNA, 25 bp, Homo sapien
aagccaatagattattgaagaccac

SEQ ID NO: 950484 - DNA, 25 bp, Homo sapien
gaaatgccttaggattcctgacacc

SEQ ID NO: 950485 - DNA, 25 bp, Homo sapien
gggaagatcttactggaactcagtg

SEQ ID NO: 950486 - DNA, 25 bp, Homo sapien
catccattgcaaacatagcggcaag

SEQ ID NO: 950487 - DNA, 25 bp, Homo sapien
cactcgccttcgtggagggaaagca

SEQ ID NO: 950488 - DNA, 25 bp, Homo sapien
taaaggcatttggtagttctgcaaa

SEQ ID NO: 950489 - DNA, 25 bp, Homo sapien
ctgggagatccatgtgtggagcccc

SEQ ID NO: 950490 - DNA, 25 bp, Homo sapien
caagtgagaaacgtatctgtgtgca

SEQ ID NO: 950491 - DNA, 25 bp, Homo sapien
cattgtcagacctcattgctgggag

SEQ ID NO: 950492 - DNA, 25 bp, Homo sapien
agtgtgagtaggatgcccttctgag

SEQ ID NO: 950493 - DNA, 25 bp, Homo sapien
gcctacagccatggcggccaagggc

SEQ ID NO: 950494 - DNA, 25 bp, Homo sapien
ctgctgcctacagccatggcggcca

SEQ ID NO: 950495 - DNA, 25 bp, Homo sapien
gctgcctacagccatggcggccaag

SEQ ID NO: 950496 - DNA, 25 bp, Homo sapien
tgcctacagccatggcggccaaggg

SEQ ID NO: 950497 - DNA, 25 bp, Homo sapien
gatctgaggggagctctgctgttga

SEQ ID NO: 950498 - DNA, 25 bp, Homo sapien
agatgtgctcttctgatgggttaaa

SEQ ID NO: 950499 - DNA, 25 bp, Homo sapien
atgtgctcttctgatgggttaaatt

SEQ ID NO: 950500 - DNA, 25 bp, Homo sapien
tagatgtgctcttctgatgggttaa

SEQ ID NO: 950501 - DNA, 25 bp, Homo sapien
ttagatgtgctcttctgatgggtta

SEQ ID NO: 950502 - DNA, 25 bp, Homo sapien
aacggtcccgcatgtgagcagatgc

SEQ ID NO: 950503 - DNA, 25 bp, Homo sapien
tttcgcaacggtcccgcatgtgagc

SEQ ID NO: 950504 - DNA, 25 bp, Homo sapien
ctgccagtcaccatttcgcaacggt

SEQ ID NO: 950505 - DNA, 25 bp, Homo sapien
accatttcgcaacggtcccgcatgt

SEQ ID NO: 950506 - DNA, 25 bp, Homo sapien
gaagtaagcgaagcgctggttccct

SEQ ID NO: 950507 - DNA, 25 bp, Homo sapien
tctggagagaagtaagcgaagcgct

SEQ ID NO: 950508 - DNA, 25 bp, Homo sapien
tcagtctggagagaagtaagcgaag

SEQ ID NO: 950509 - DNA, 25 bp, Homo sapien
gagaagtaagcgaagcgctggttcc

SEQ ID NO: 950510 - DNA, 25 bp, Homo sapien
ctgtgagcataagggctgatctgcc

SEQ ID NO: 950511 - DNA, 25 bp, Homo sapien
tgcccacactgactggatacagctt

SEQ ID NO: 950512 - DNA, 25 bp, Homo sapien
ccttgggtcgggattttcatgatga

SEQ ID NO: 950513 - DNA, 25 bp, Homo sapien
gatgaaatagctgagcattggcctc

SEQ ID NO: 950514 - DNA, 25 bp, Homo sapien
atttcctatctagctcagccgccat

SEQ ID NO: 950515 - DNA, 25 bp, Homo sapien
cccctgccttacaatcttgcttctt

SEQ ID NO: 950516 - DNA, 25 bp, Homo sapien
tgcatttcctatctagctcagccgc

SEQ ID NO: 950517 - DNA, 25 bp, Homo sapien
gcatttcctatctagctcagccgcc

SEQ ID NO: 950518 - DNA, 25 bp, Homo sapien
agtaccgtgctccaaaaggggctca

SEQ ID NO: 950519 - DNA, 25 bp, Homo sapien
gtaccgtgctccaaaaggggctcag

SEQ ID NO: 950520 - DNA, 25 bp, Homo sapien
cctgaatattgggaaacggaggcca

SEQ ID NO: 950521 - DNA, 25 bp, Homo sapien
cataggatccctgtacattctggga

SEQ ID NO: 950522 - DNA, 25 bp, Homo sapien
ccagaggaatccgttaaggcatgtc

SEQ ID NO: 950523 - DNA, 25 bp, Homo sapien
cattctgggagattcgtaggtccca

SEQ ID NO: 950524 - DNA, 25 bp, Homo sapien
ttctgccactttcagtgaggttgca

SEQ ID NO: 950525 - DNA, 25 bp, Homo sapien
ccaggttttcccgaagtctcatgat

SEQ ID NO: 950526 - DNA, 25 bp, Homo sapien
gcagctcatatccattttaatccct

SEQ ID NO: 950527 - DNA, 25 bp, Homo sapien
tgcaggagggtatttaatccaccag

SEQ ID NO: 950528 - DNA, 25 bp, Homo sapien
tgcagttttattgaaagtatcttgt

SEQ ID NO: 950529 - DNA, 25 bp, Homo sapien
caatgtacttctttaagaggtggtg

SEQ ID NO: 950530 - DNA, 25 bp, Homo sapien
ccaatgtacttctttaagaggtggt

SEQ ID NO: 950531 - DNA, 25 bp, Homo sapien
gaggtggtggttttcttctttgcag

SEQ ID NO: 950532 - DNA, 25 bp, Homo sapien
tcctctgctttggataccttgcaga

SEQ ID NO: 950533 - DNA, 25 bp, Homo sapien
ctctgctttggataccttgcagacc

SEQ ID NO: 950534 - DNA, 25 bp, Homo sapien
gtcctctgctttggataccttgcag

SEQ ID NO: 950535 - DNA, 25 bp, Homo sapien
tgtcctctgctttggataccttgca

SEQ ID NO: 950536 - DNA, 25 bp, Homo sapien
cctggttacaaggaccgggcactgt

SEQ ID NO: 950537 - DNA, 25 bp, Homo sapien
tcttgctgaataaggtcaccgccca

SEQ ID NO: 950538 - DNA, 25 bp, Homo sapien
gagtggcctcgtgactttgtcccta

SEQ ID NO: 950539 - DNA, 25 bp, Homo sapien
aacctcggcttctgcgcacaagtga

SEQ ID NO: 950540 - DNA, 25 bp, Homo sapien
gatgttccgccccactgtgaagagt

SEQ ID NO: 950541 - DNA, 25 bp, Homo sapien
tttgtaggaccaagtcgacatgccc

SEQ ID NO: 950542 - DNA, 25 bp, Homo sapien
gattcttgtaagcactggactgtct

SEQ ID NO: 950543 - DNA, 25 bp, Homo sapien
caagctactcactgtattggacggg

SEQ ID NO: 950544 - DNA, 25 bp, Homo sapien
tcttctgatgatggaatttcgatta

SEQ ID NO: 950545 - DNA, 25 bp, Homo sapien
ggatgatgtctctggtttgccgcag

SEQ ID NO: 950546 - DNA, 25 bp, Homo sapien
cgattaaagtgcactgaaagatgct

SEQ ID NO: 950547 - DNA, 25 bp, Homo sapien
tagggctttgcaacttctggcagaa

SEQ ID NO: 950548 - DNA, 25 bp, Homo sapien
ggtaagaataactgtgattgtaaag

SEQ ID NO: 950549 - DNA, 25 bp, Homo sapien
ttagcccaactcgacaactgtgctc

SEQ ID NO: 950550 - DNA, 25 bp, Homo sapien
tgtgctccagtactttatttcaggg

SEQ ID NO: 950551 - DNA, 25 bp, Homo sapien
cagggagctcaatgctgacacattc

SEQ ID NO: 950552 - DNA, 25 bp, Homo sapien
caaagacatgtcctttggaaattgc

SEQ ID NO: 950553 - DNA, 25 bp, Homo sapien
taaatgcagctgtggatttctcaaa

SEQ ID NO: 950554 - DNA, 25 bp, Homo sapien
tttcaaagttatatcgcccttggca

SEQ ID NO: 950555 - DNA, 25 bp, Homo sapien
agttatatcgcccttggcattgtgc

SEQ ID NO: 950556 - DNA, 25 bp, Homo sapien
tcccagaactccatgccctcaacat

SEQ ID NO: 950557 - DNA, 25 bp, Homo sapien
gaaccccgcctccttgacattcatt

SEQ ID NO: 950558 - DNA, 25 bp, Homo sapien
aaccccgcctccttgacattcattc

SEQ ID NO: 950559 - DNA, 25 bp, Homo sapien
acctcccagaactccatgccctcaa

SEQ ID NO: 950560 - DNA, 25 bp, Homo sapien
gggagtgaaccacgccaatgctaca

SEQ ID NO: 950561 - DNA, 25 bp, Homo sapien
gctgagcccacgagacaacgttgag

SEQ ID NO: 950562 - DNA, 25 bp, Homo sapien
gaaggaccatgagtgctaatccctg

SEQ ID NO: 950563 - DNA, 25 bp, Homo sapien
gcattactgggacttgcggctgccc

SEQ ID NO: 950564 - DNA, 25 bp, Homo sapien
gccccagacaaggtgattcccagat

SEQ ID NO: 950565 - DNA, 25 bp, Homo sapien
gccagttgccaattcttcccggaga

SEQ ID NO: 950566 - DNA, 25 bp, Homo sapien
tccaacgaacggcagggaagagaca

SEQ ID NO: 950567 - DNA, 25 bp, Homo sapien
cccagggaggatccggacagagttt

SEQ ID NO: 950568 - DNA, 25 bp, Homo sapien
cttgacttccctggccaaagcaatc

SEQ ID NO: 950569 - DNA, 25 bp, Homo sapien
gatagagtctcaccctaccacccac

SEQ ID NO: 950570 - DNA, 25 bp, Homo sapien
taaagacggatctcactcagtctcc

SEQ ID NO: 950571 - DNA, 25 bp, Homo sapien
tttttaaagacggatctcactcagt

SEQ ID NO: 950572 - DNA, 25 bp, Homo sapien
gaaaattggccgcagcatccaagaa

SEQ ID NO: 950573 - DNA, 25 bp, Homo sapien
ggctgccgtgttgatgaaaatacca

SEQ ID NO: 950574 - DNA, 25 bp, Homo sapien
tccaagaaatcctcgaacggcaaag

SEQ ID NO: 950575 - DNA, 25 bp, Homo sapien
gaaaataccacggagacgtctgcag

SEQ ID NO: 950576 - DNA, 25 bp, Homo sapien
cgtgtgcaagcacgggggcgagttt

SEQ ID NO: 950577 - DNA, 25 bp, Homo sapien
tgctggccgtgtgcaagcacggggg

SEQ ID NO: 950578 - DNA, 25 bp, Homo sapien
ctgctggccgtgtgcaagcacgggg

SEQ ID NO: 950579 - DNA, 25 bp, Homo sapien
tggccgtgtgcaagcacgggggcga

SEQ ID NO: 950580 - DNA, 25 bp, Homo sapien
gagaggtggccgcagctctcctgag

SEQ ID NO: 950581 - DNA, 25 bp, Homo sapien
agagctctgctgtggaggtgagagg

SEQ ID NO: 950582 - DNA, 25 bp, Homo sapien
gagctgcttactggcaaggtgacct

SEQ ID NO: 950583 - DNA, 25 bp, Homo sapien
tcctgagctgcttactggcaaggtg

SEQ ID NO: 950584 - DNA, 25 bp, Homo sapien
ttcttgaataaggtggattcggcca

SEQ ID NO: 950585 - DNA, 25 bp, Homo sapien
ctatttcttgaataaggtggattcg

SEQ ID NO: 950586 - DNA, 25 bp, Homo sapien
atttcttgaataaggtggattcggc

SEQ ID NO: 950587 - DNA, 25 bp, Homo sapien
tcttgaataaggtggattcggccac

SEQ ID NO: 950588 - DNA, 25 bp, Homo sapien
gagtgaagaggccaggtcccattga

SEQ ID NO: 950589 - DNA, 25 bp, Homo sapien
acattctcgatatctttgttaacag

SEQ ID NO: 950590 - DNA, 25 bp, Homo sapien
gttaacagcaatttccgaggagaca

SEQ ID NO: 950591 - DNA, 25 bp, Homo sapien
tcccattgagcagtgggcagacagg

SEQ ID NO: 950592 - DNA, 25 bp, Homo sapien
agcttggctgtttcaccaatgtgaa

SEQ ID NO: 950593 - DNA, 25 bp, Homo sapien
cttggctgtttcaccaatgtgaatg

SEQ ID NO: 950594 - DNA, 25 bp, Homo sapien
agaagttggttgccagcttggctgt

SEQ ID NO: 950595 - DNA, 25 bp, Homo sapien
ctagaagttggttgccagcttggct

SEQ ID NO: 950596 - DNA, 25 bp, Homo sapien
aggaccctgcccatccatgcccctc

SEQ ID NO: 950597 - DNA, 25 bp, Homo sapien
caggaccctgcccatccatgcccct

SEQ ID NO: 950598 - DNA, 25 bp, Homo sapien
cagatggttacagcgacagagccca

SEQ ID NO: 950599 - DNA, 25 bp, Homo sapien
actaggatggccttataaagggcgc

SEQ ID NO: 950600 - DNA, 25 bp, Homo sapien
taaagggcgcaagaactgcagagac

SEQ ID NO: 950601 - DNA, 25 bp, Homo sapien
gggtgcatcccagcaaccgacttaa

SEQ ID NO: 950602 - DNA, 25 bp, Homo sapien
gcccatctatgtgtacaacctttag

SEQ ID NO: 950603 - DNA, 25 bp, Homo sapien
ttctctctgtgagtgtgcccatcta

SEQ ID NO: 950604 - DNA, 25 bp, Homo sapien
tgtgagtgtgcccatctatgtgtac

SEQ ID NO: 950605 - DNA, 25 bp, Homo sapien
accctttatgaccttctttctagct

SEQ ID NO: 950606 - DNA, 25 bp, Homo sapien
tggacagcagatgtgccaatatgag

SEQ ID NO: 950607 - DNA, 25 bp, Homo sapien
gcagatgtgccaatatgagaggaat

SEQ ID NO: 950608 - DNA, 25 bp, Homo sapien
ccacctgggagtcaacacggaacac

SEQ ID NO: 950609 - DNA, 25 bp, Homo sapien
gaacccccaatggacagcagatgtg

SEQ ID NO: 950610 - DNA, 25 bp, Homo sapien
tccaagtcagcagtcagttaacact

SEQ ID NO: 950611 - DNA, 25 bp, Homo sapien
gcagtggctgaactgtacagatgga

SEQ ID NO: 950612 - DNA, 25 bp, Homo sapien
cctggtcagtggtgcacaccaccct

SEQ ID NO: 950613 - DNA, 25 bp, Homo sapien
cgcaaatgaacccctcctggtcagt

SEQ ID NO: 950614 - DNA, 25 bp, Homo sapien
agcccgtggttctcacgaacaattt

SEQ ID NO: 950615 - DNA, 25 bp, Homo sapien
gatggagtctccagcaagaaaggcc

SEQ ID NO: 950616 - DNA, 25 bp, Homo sapien
ctcacgaacaatttccaggtactca

SEQ ID NO: 950617 - DNA, 25 bp, Homo sapien
taagttttgacagacttatagaggg

SEQ ID NO: 950618 - DNA, 25 bp, Homo sapien
tttgctgagtggcattccgcagggt

SEQ ID NO: 950619 - DNA, 25 bp, Homo sapien
tgataagtgtagcacatgggaaagc

SEQ ID NO: 950620 - DNA, 25 bp, Homo sapien
ggaaagcaaagacagccggctggat

SEQ ID NO: 950621 - DNA, 25 bp, Homo sapien
cattccgcagggtcatgtacatgat

SEQ ID NO: 950622 - DNA, 25 bp, Homo sapien
agaattcagggggttcctgattgga

SEQ ID NO: 950623 - DNA, 25 bp, Homo sapien
tgcagaattcagggggttcctgatt

SEQ ID NO: 950624 - DNA, 25 bp, Homo sapien
tcagggggttcctgattggaacttg

SEQ ID NO: 950625 - DNA, 25 bp, Homo sapien
ccagagggtgctgagagatgcaggg

SEQ ID NO: 950626 - DNA, 25 bp, Homo sapien
tgtgtcttgctgatgatattctcgg

SEQ ID NO: 950627 - DNA, 25 bp, Homo sapien
ggtcaggttgtacgctgtgctggcc

SEQ ID NO: 950628 - DNA, 25 bp, Homo sapien
tctcggcccggatgctgaagcagta

SEQ ID NO: 950629 - DNA, 25 bp, Homo sapien
ttgagacgccagcacacagtcagag

SEQ ID NO: 950630 - DNA, 25 bp, Homo sapien
tggaaggtctgaattagggtgggcc

SEQ ID NO: 950631 - DNA, 25 bp, Homo sapien
ttggaaggtctgaattagggtgggc

SEQ ID NO: 950632 - DNA, 25 bp, Homo sapien
ccccaacacttggatgcctcgaagg

SEQ ID NO: 950633 - DNA, 25 bp, Homo sapien
ccaacacttggatgcctcgaagggt

SEQ ID NO: 950634 - DNA, 25 bp, Homo sapien
gaaggtcccgatgatggaatagtta

SEQ ID NO: 950635 - DNA, 25 bp, Homo sapien
tagaccacggagtcttcagtcacca

SEQ ID NO: 950636 - DNA, 25 bp, Homo sapien
cactttgagcttcacggtgaaggtc

SEQ ID NO: 950637 - DNA, 25 bp, Homo sapien
cagcttcagcgaggcggagaagtcc

SEQ ID NO: 950638 - DNA, 25 bp, Homo sapien
tccccgaagtcccagctgtagagaa

SEQ ID NO: 950639 - DNA, 25 bp, Homo sapien
ttcaggacggtcttagtgagatagg

SEQ ID NO: 950640 - DNA, 25 bp, Homo sapien
tagggaagtgttctgggtgacaaca

SEQ ID NO: 950641 - DNA, 25 bp, Homo sapien
caaggcggtcttgaggaagttgctc

SEQ ID NO: 950642 - DNA, 25 bp, Homo sapien
tggcacatccagcagtcagcggcag

SEQ ID NO: 950643 - DNA, 25 bp, Homo sapien
ccgaccacacggatggtggagctga

SEQ ID NO: 950644 - DNA, 25 bp, Homo sapien
catcttgccagtaagcaccagcggg

SEQ ID NO: 950645 - DNA, 25 bp, Homo sapien
tgacccagacagagaccgggaattc

SEQ ID NO: 950646 - DNA, 25 bp, Homo sapien
accaggctggccgagatggtcacca

SEQ ID NO: 950647 - DNA, 25 bp, Homo sapien
ggtcaccaccgctcccgtggtggca

SEQ ID NO: 950648 - DNA, 25 bp, Homo sapien
gccaccaggctggccgagatggtca

SEQ ID NO: 950649 - DNA, 25 bp, Homo sapien
aggctggccgagatggtcaccaccg

SEQ ID NO: 950650 - DNA, 25 bp, Homo sapien
tcggtggtgagattgagttcataca

SEQ ID NO: 950651 - DNA, 25 bp, Homo sapien
gctatcggtggtgagattgagttca

SEQ ID NO: 950652 - DNA, 25 bp, Homo sapien
gtggtgagattgagttcatacaggc

SEQ ID NO: 950653 - DNA, 25 bp, Homo sapien
tatcggtggtgagattgagttcata

SEQ ID NO: 950654 - DNA, 25 bp, Homo sapien
tgtaggtccaagtcaccacgcttgg

SEQ ID NO: 950655 - DNA, 25 bp, Homo sapien
ctccaccttctaggatcaagagatc

SEQ ID NO: 950656 - DNA, 25 bp, Homo sapien
agtagctgtgacttgtaggtccaag

SEQ ID NO: 950657 - DNA, 25 bp, Homo sapien
ccttctaggatcaagagatcttcct

SEQ ID NO: 950658 - DNA, 25 bp, Homo sapien
tgtggcacgatgactgaccctgata

SEQ ID NO: 950659 - DNA, 25 bp, Homo sapien
cagtagatgcacgaccgagtgggca

SEQ ID NO: 950660 - DNA, 25 bp, Homo sapien
aagtaaaaatgctgcccatcccgtg

SEQ ID NO: 950661 - DNA, 25 bp, Homo sapien
gacatctgacggatgcgtgggccac

SEQ ID NO: 950662 - DNA, 25 bp, Homo sapien
agccagaggatgcggccgaggcgcg

SEQ ID NO: 950663 - DNA, 25 bp, Homo sapien
cggccgaggcgcgaccacactgcct

SEQ ID NO: 950664 - DNA, 25 bp, Homo sapien
gcggccgaggcgcgaccacactgcc

SEQ ID NO: 950665 - DNA, 25 bp, Homo sapien
ggagcgggagaagcgtggggcggac

SEQ ID NO: 950666 - DNA, 25 bp, Homo sapien
agctcgagaactgcggcggtcgctc

SEQ ID NO: 950667 - DNA, 25 bp, Homo sapien
ggagctcgagaactgcggcggtcgc

SEQ ID NO: 950668 - DNA, 25 bp, Homo sapien
ggcggacgcggagggaatgcagctg

SEQ ID NO: 950669 - DNA, 25 bp, Homo sapien
ggtgcgggcgccgtgctcgctcgtc

SEQ ID NO: 950670 - DNA, 25 bp, Homo sapien
gggaggtgcgggcgccgtgctcgct

SEQ ID NO: 950671 - DNA, 25 bp, Homo sapien
gcggtgcggggaggtgcgggcgccg

SEQ ID NO: 950672 - DNA, 25 bp, Homo sapien
ggtgcggggaggtgcgggcgccgtg

SEQ ID NO: 950673 - DNA, 25 bp, Homo sapien
cttctggtgggcttgttgtgggaca

SEQ ID NO: 950674 - DNA, 25 bp, Homo sapien
gcttctggtgggcttgttgtgggac

SEQ ID NO: 950675 - DNA, 25 bp, Homo sapien
gggcttctggtgggcttgttgtggg

SEQ ID NO: 950676 - DNA, 25 bp, Homo sapien
ttctggtgggcttgttgtgggacac

SEQ ID NO: 950677 - DNA, 25 bp, Homo sapien
gcatgtctcacatataagcatgaaa

SEQ ID NO: 950678 - DNA, 25 bp, Homo sapien
atgtctcacatataagcatgaaacc

SEQ ID NO: 950679 - DNA, 25 bp, Homo sapien
aggcatgtctcacatataagcatga

SEQ ID NO: 950680 - DNA, 25 bp, Homo sapien
accccaatcatcacccttacaaact

SEQ ID NO: 950681 - DNA, 25 bp, Homo sapien
tcagtcgtgtttctgggcctattgg

SEQ ID NO: 950682 - DNA, 25 bp, Homo sapien
ctgagatatcatgccctcacaggtc

SEQ ID NO: 950683 - DNA, 25 bp, Homo sapien
gccctcctaatcttgatgcagttag

SEQ ID NO: 950684 - DNA, 25 bp, Homo sapien
cagccacagtgcttaacccctgaga

SEQ ID NO: 950685 - DNA, 25 bp, Homo sapien
gtagggccaggtgcagtaactcacg

SEQ ID NO: 950686 - DNA, 25 bp, Homo sapien
cgagtagggccaggtgcagtaactc

SEQ ID NO: 950687 - DNA, 25 bp, Homo sapien
ctgaggcaggcggattacttgaggt

SEQ ID NO: 950688 - DNA, 25 bp, Homo sapien
cctataatcccagcactttgggagg

SEQ ID NO: 950689 - DNA, 25 bp, Homo sapien
ttcatctctcaagtgtcagcacatg

SEQ ID NO: 950690 - DNA, 25 bp, Homo sapien
tgagtgattgcagcacatgagtgat

SEQ ID NO: 950691 - DNA, 25 bp, Homo sapien
cagcacatgagtgattgcagcacat

SEQ ID NO: 950692 - DNA, 25 bp, Homo sapien
caagtgtcagcacatgagtgattgc

SEQ ID NO: 950693 - DNA, 25 bp, Homo sapien
cacagcatgggcatctcttcgagtt

SEQ ID NO: 950694 - DNA, 25 bp, Homo sapien
caatagaaatagagcctgcagccag

SEQ ID NO: 950695 - DNA, 25 bp, Homo sapien
tgaaacagccggttacaacacggtg

SEQ ID NO: 950696 - DNA, 25 bp, Homo sapien
gccccatggtaggtcagtctgcaca

SEQ ID NO: 950697 - DNA, 25 bp, Homo sapien
aggggcttgagctatccttctcggc

SEQ ID NO: 950698 - DNA, 25 bp, Homo sapien
ggggcttgagctatccttctcggca

SEQ ID NO: 950699 - DNA, 25 bp, Homo sapien
gggcttgagctatccttctcggcac

SEQ ID NO: 950700 - DNA, 25 bp, Homo sapien
caaagctactattctgggggcactc

SEQ ID NO: 950701 - DNA, 25 bp, Homo sapien
acaatattggggtgcaccagggtct

SEQ ID NO: 950702 - DNA, 25 bp, Homo sapien
ggcactcatctgaattgccgctcac

SEQ ID NO: 950703 - DNA, 25 bp, Homo sapien
aacttatcgtgagctcagagggaga

SEQ ID NO: 950704 - DNA, 25 bp, Homo sapien
aatcccgatcgatgctgatttctcc

SEQ ID NO: 950705 - DNA, 25 bp, Homo sapien
ctgtggcaaatcccgatcgatgctg

SEQ ID NO: 950706 - DNA, 25 bp, Homo sapien
ggcaaatcccgatcgatgctgattt

SEQ ID NO: 950707 - DNA, 25 bp, Homo sapien
gtggcaaatcccgatcgatgctgat

SEQ ID NO: 950708 - DNA, 25 bp, Homo sapien
gctttgcttttccgaattcatctcc

SEQ ID NO: 950709 - DNA, 25 bp, Homo sapien
aggctttgcttttccgaattcatct

SEQ ID NO: 950710 - DNA, 25 bp, Homo sapien
ggctttgcttttccgaattcatctc

SEQ ID NO: 950711 - DNA, 25 bp, Homo sapien
gaagctgaactatgacgatgctggg

SEQ ID NO: 950712 - DNA, 25 bp, Homo sapien
taagaagccaggattctccggtctg

SEQ ID NO: 950713 - DNA, 25 bp, Homo sapien
ccctctgtgaatgtacaggcggaac

SEQ ID NO: 950714 - DNA, 25 bp, Homo sapien
caggcggaactgtacgaacagctcc

SEQ ID NO: 950715 - DNA, 25 bp, Homo sapien
cagcttcgtgcttttgtacagacct

SEQ ID NO: 950716 - DNA, 25 bp, Homo sapien
ccagccttgggaatctcgttgagcg

SEQ ID NO: 950717 - DNA, 25 bp, Homo sapien
tgagaaacaggagttgatgaaccca

SEQ ID NO: 950718 - DNA, 25 bp, Homo sapien
tcgttgagcgttcggcgtggatcca

SEQ ID NO: 950719 - DNA, 25 bp, Homo sapien
gacatttactatcactgcacctgaa

SEQ ID NO: 950720 - DNA, 25 bp, Homo sapien
cagaaatgtacgttccttcgctagc

SEQ ID NO: 950721 - DNA, 25 bp, Homo sapien
cagtgggtgaagacagaactctgag

SEQ ID NO: 950722 - DNA, 25 bp, Homo sapien
tggctcttcggatgtcttctagaca

SEQ ID NO: 950723 - DNA, 25 bp, Homo sapien
tagcctcttggtgacagcgtgcgct

SEQ ID NO: 950724 - DNA, 25 bp, Homo sapien
tcagcgtagcctcttggtgacagcg

SEQ ID NO: 950725 - DNA, 25 bp, Homo sapien
gcctcttggtgacagcgtgcgctgc

SEQ ID NO: 950726 - DNA, 25 bp, Homo sapien
cgtagcctcttggtgacagcgtgcg

SEQ ID NO: 950727 - DNA, 25 bp, Homo sapien
gcatgaagcactctgtacccagctc

SEQ ID NO: 950728 - DNA, 25 bp, Homo sapien
tgtgcggagtgtacacgaagcatgc

SEQ ID NO: 950729 - DNA, 25 bp, Homo sapien
ggactgctgccatgtaacgtgtgtg

SEQ ID NO: 950730 - DNA, 25 bp, Homo sapien
aagcatgcccggaggctcagcatga

SEQ ID NO: 950731 - DNA, 25 bp, Homo sapien
gatttttgccggtctgactggactc

SEQ ID NO: 950732 - DNA, 25 bp, Homo sapien
aggtcaaggccgagggactgatttt

SEQ ID NO: 950733 - DNA, 25 bp, Homo sapien
agggactgatttttgccggtctgac

SEQ ID NO: 950734 - DNA, 25 bp, Homo sapien
gccggtctgactggactcaagttac

SEQ ID NO: 950735 - DNA, 25 bp, Homo sapien
gatgggagccgtgctttgcaaatga

SEQ ID NO: 950736 - DNA, 25 bp, Homo sapien
gcggtgaccgtgctcctctgattgt

SEQ ID NO: 950737 - DNA, 25 bp, Homo sapien
tcttgcgctccatgaagcctggtgt

SEQ ID NO: 950738 - DNA, 25 bp, Homo sapien
tcctcactgcgtgtgacaaggcctg

SEQ ID NO: 950739 - DNA, 25 bp, Homo sapien
gatgtgtcaattctagtccgttacc

SEQ ID NO: 950740 - DNA, 25 bp, Homo sapien
tccctagtgatgagtgaagttgagc

SEQ ID NO: 950741 - DNA, 25 bp, Homo sapien
ttttcatatgcttgtgagccagtca

SEQ ID NO: 950742 - DNA, 25 bp, Homo sapien
aatcccttggagatagatggtttac

SEQ ID NO: 950743 - DNA, 25 bp, Homo sapien
tttgattttgacatagaacattagt

SEQ ID NO: 950744 - DNA, 25 bp, Homo sapien
atagaacattagtgtacaactttca

SEQ ID NO: 950745 - DNA, 25 bp, Homo sapien
aaatccatactatgtttcgggaagg

SEQ ID NO: 950746 - DNA, 25 bp, Homo sapien
tacatccctgagtgtcggctgacgg

SEQ ID NO: 950747 - DNA, 25 bp, Homo sapien
gcctttcctgacatctcgggttggg

SEQ ID NO: 950748 - DNA, 25 bp, Homo sapien
caccttaatctgaatttggaccata

SEQ ID NO: 950749 - DNA, 25 bp, Homo sapien
gaccatacgtccgaacaagctcagg

SEQ ID NO: 950750 - DNA, 25 bp, Homo sapien
tcccgcgggttaggctcgtgataga

SEQ ID NO: 950751 - DNA, 25 bp, Homo sapien
tcgcgcggacccaaagtagaacagt

SEQ ID NO: 950752 - DNA, 25 bp, Homo sapien
gtttggaaagagtgaaccggagctc

SEQ ID NO: 950753 - DNA, 25 bp, Homo sapien
gatcacacgtgagtgggcttcgcgc

SEQ ID NO: 950754 - DNA, 25 bp, Homo sapien
ggaacgggcttctagaacaccctca

SEQ ID NO: 950755 - DNA, 25 bp, Homo sapien
gggcttctagaacaccctcaggaag

SEQ ID NO: 950756 - DNA, 25 bp, Homo sapien
aacgggcttctagaacaccctcagg

SEQ ID NO: 950757 - DNA, 25 bp, Homo sapien
acagccactggggaacgggcttcta

SEQ ID NO: 950758 - DNA, 25 bp, Homo sapien
gatgctcccgtaaagagctcagggc

SEQ ID NO: 950759 - DNA, 25 bp, Homo sapien
tctgggcaagtgaaccgagtagcaa

SEQ ID NO: 950760 - DNA, 25 bp, Homo sapien
tttaagcgagttcacaccaagccag

SEQ ID NO: 950761 - DNA, 25 bp, Homo sapien
gatgctcttctatggacaacagtgg

SEQ ID NO: 950762 - DNA, 25 bp, Homo sapien
agagagacaaccctttcccctcagg

SEQ ID NO: 950763 - DNA, 25 bp, Homo sapien
aaacctggctgcattttattggatg

SEQ ID NO: 950764 - DNA, 25 bp, Homo sapien
ggagggatatatgggtgggagccac

SEQ ID NO: 950765 - DNA, 25 bp, Homo sapien
tggtctggtggccatgagctagact

SEQ ID NO: 950766 - DNA, 25 bp, Homo sapien
cgtagagcttctcataggactcata

SEQ ID NO: 950767 - DNA, 25 bp, Homo sapien
ctcataggactcatatggtggaatg

SEQ ID NO: 950768 - DNA, 25 bp, Homo sapien
tggtggaatgtcgatccggttaaag

SEQ ID NO: 950769 - DNA, 25 bp, Homo sapien
actccacagcaaacccgcaggtctc

SEQ ID NO: 950770 - DNA, 25 bp, Homo sapien
gtgggcagtccagccctaggaccaa

SEQ ID NO: 950771 - DNA, 25 bp, Homo sapien
cagtaaagtaagtcttgggccttca

SEQ ID NO: 950772 - DNA, 25 bp, Homo sapien
gtgcccaatcaacacacagtaaagt

SEQ ID NO: 950773 - DNA, 25 bp, Homo sapien
gacaaaagagagtcaccgtgtgggc

SEQ ID NO: 950774 - DNA, 25 bp, Homo sapien
gtgtgtcataagcaggattccaaga

SEQ ID NO: 950775 - DNA, 25 bp, Homo sapien
tagacaaggtacgtgtgtcataagc

SEQ ID NO: 950776 - DNA, 25 bp, Homo sapien
caaggtacgtgtgtcataagcagga

SEQ ID NO: 950777 - DNA, 25 bp, Homo sapien
tgcaatagacaaggtacgtgtgtca

SEQ ID NO: 950778 - DNA, 25 bp, Homo sapien
tgtgtgtacataagacctggcagag

SEQ ID NO: 950779 - DNA, 25 bp, Homo sapien
taagagactctgacaacctttgtgt

SEQ ID NO: 950780 - DNA, 25 bp, Homo sapien
tgtgggacgctgcaaagtacttgtc

SEQ ID NO: 950781 - DNA, 25 bp, Homo sapien
aatgaaacagagtcctacaaatcgg

SEQ ID NO: 950782 - DNA, 25 bp, Homo sapien
caggtatgggccttcggaaggttgt

SEQ ID NO: 950783 - DNA, 25 bp, Homo sapien
ggccttcggaaggttgtctgtgttc

SEQ ID NO: 950784 - DNA, 25 bp, Homo sapien
tatgggccttcggaaggttgtctgt

SEQ ID NO: 950785 - DNA, 25 bp, Homo sapien
ttcggaaggttgtctgtgttcgcgt

SEQ ID NO: 950786 - DNA, 25 bp, Homo sapien
tggtgaacagccggggccctgccgc

SEQ ID NO: 950787 - DNA, 25 bp, Homo sapien
ttcagccgcgtgttcgacttccagt

SEQ ID NO: 950788 - DNA, 25 bp, Homo sapien
cagtcacaaactgcaggagcctggc

SEQ ID NO: 950789 - DNA, 25 bp, Homo sapien
tcaagtctattttatccaggccgcc

SEQ ID NO: 950790 - DNA, 25 bp, Homo sapien
caaagccttgaagccttggagcggg

SEQ ID NO: 950791 - DNA, 25 bp, Homo sapien
aggtgcagaaaggtgaattacttcc

SEQ ID NO: 950792 - DNA, 25 bp, Homo sapien
ctgaggaggtgcagaaaggtgaatt

SEQ ID NO: 950793 - DNA, 25 bp, Homo sapien
tccaaaatgcataaacccacgtcag

SEQ ID NO: 950794 - DNA, 25 bp, Homo sapien
attacttccaaaatgcataaaccca

SEQ ID NO: 950795 - DNA, 25 bp, Homo sapien
aggcttcagcagatgttgagggatg

SEQ ID NO: 950796 - DNA, 25 bp, Homo sapien
atgagctcattgaaccccttctgca

SEQ ID NO: 950797 - DNA, 25 bp, Homo sapien
ggatgagctcattgaaccccttctg

SEQ ID NO: 950798 - DNA, 25 bp, Homo sapien
gaactgggcttcgattcctctcata

SEQ ID NO: 950799 - DNA, 25 bp, Homo sapien
aagaaaaactcgcaagttggatgca

SEQ ID NO: 950800 - DNA, 25 bp, Homo sapien
gcaagttggatgcaacaccaagtgg

SEQ ID NO: 950801 - DNA, 25 bp, Homo sapien
tggattttccgccatgggcaggttt

SEQ ID NO: 950802 - DNA, 25 bp, Homo sapien
aacaccaagtggattttccgccatg

SEQ ID NO: 950803 - DNA, 25 bp, Homo sapien
tctgtgactggcacatttctgccat

SEQ ID NO: 950804 - DNA, 25 bp, Homo sapien
cacgcagaaggtgtggtccagtaca

SEQ ID NO: 950805 - DNA, 25 bp, Homo sapien
gttcatgctgcaggatccgcccgaa

SEQ ID NO: 950806 - DNA, 25 bp, Homo sapien
gaaggcgttgtgttccacgcagaag

SEQ ID NO: 950807 - DNA, 25 bp, Homo sapien
agacagaaggatgtaggttagaact

SEQ ID NO: 950808 - DNA, 25 bp, Homo sapien
aataagacagaaggatgtaggttag

SEQ ID NO: 950809 - DNA, 25 bp, Homo sapien
tgaaataagacagaaggatgtaggt

SEQ ID NO: 950810 - DNA, 25 bp, Homo sapien
tgttgaaataagacagaaggatgta

SEQ ID NO: 950811 - DNA, 25 bp, Homo sapien
tgaccggccgtcagtcaatacttac

SEQ ID NO: 950812 - DNA, 25 bp, Homo sapien
catacatacgatagacgtggtggtg

SEQ ID NO: 950813 - DNA, 25 bp, Homo sapien
cgcgcacgcgcatacatacgataga

SEQ ID NO: 950814 - DNA, 25 bp, Homo sapien
ctaagccaggtgaccggccgtcagt

SEQ ID NO: 950815 - DNA, 25 bp, Homo sapien
ccccgttgatgtagtgtccatggaa

SEQ ID NO: 950816 - DNA, 25 bp, Homo sapien
gagctggatgggcttccccagcagc

SEQ ID NO: 950817 - DNA, 25 bp, Homo sapien
gctgcttgtagaagggcactgtgaa

SEQ ID NO: 950818 - DNA, 25 bp, Homo sapien
aggatccacaccaagctcttatgca

SEQ ID NO: 950819 - DNA, 25 bp, Homo sapien
cagcgttttgtatgctctcagggcc

SEQ ID NO: 950820 - DNA, 25 bp, Homo sapien
tgtcagcatggtgccggccaatgtg

SEQ ID NO: 950821 - DNA, 25 bp, Homo sapien
tgacaacagagaatcgaaccaagcc

SEQ ID NO: 950822 - DNA, 25 bp, Homo sapien
gaggagccccgtgttcagcaatgac

SEQ ID NO: 950823 - DNA, 25 bp, Homo sapien
agaatccggatttatttgcaacatg

SEQ ID NO: 950824 - DNA, 25 bp, Homo sapien
gagcccgtaataaggattcagcatt

SEQ ID NO: 950825 - DNA, 25 bp, Homo sapien
ttcagcatttcatggcacagcaagt

SEQ ID NO: 950826 - DNA, 25 bp, Homo sapien
taaatattgtccgtagaatactgga

SEQ ID NO: 950827 - DNA, 25 bp, Homo sapien
caattagtggtgacaatcacggata

SEQ ID NO: 950828 - DNA, 25 bp, Homo sapien
cacggatattctggtaggttatggc

SEQ ID NO: 950829 - DNA, 25 bp, Homo sapien
gaattcctattctccgcagggtggc

SEQ ID NO: 950830 - DNA, 25 bp, Homo sapien
cgagcatgctcggaggaattcctat

SEQ ID NO: 950831 - DNA, 25 bp, Homo sapien
tttttcaagtctttcggtcgcatct

SEQ ID NO: 950832 - DNA, 25 bp, Homo sapien
tcttcattatctggcggtaagactc

SEQ ID NO: 950833 - DNA, 25 bp, Homo sapien
tcaccatcagccgttttttcaagtc

SEQ ID NO: 950834 - DNA, 25 bp, Homo sapien
cacggaatttcaccatcagccgttt

SEQ ID NO: 950835 - DNA, 25 bp, Homo sapien
tgctcctcgccaatttccacaggag

SEQ ID NO: 950836 - DNA, 25 bp, Homo sapien
ctgctcctcgccaatttccacagga

SEQ ID NO: 950837 - DNA, 25 bp, Homo sapien
gctcctcgccaatttccacaggaga

SEQ ID NO: 950838 - DNA, 25 bp, Homo sapien
tctctttcgtatctctgggcaggaa

SEQ ID NO: 950839 - DNA, 25 bp, Homo sapien
ttctctggacacttcgatgcggcaa

SEQ ID NO: 950840 - DNA, 25 bp, Homo sapien
cagttcgtgtctgaggactttcagc

SEQ ID NO: 950841 - DNA, 25 bp, Homo sapien
ggctgctgaagcgacagttcgtgtc

SEQ ID NO: 950842 - DNA, 25 bp, Homo sapien
agagatgcagaaagtcactccgaag

SEQ ID NO: 950843 - DNA, 25 bp, Homo sapien
agatgcagaaagtcactccgaagcc

SEQ ID NO: 950844 - DNA, 25 bp, Homo sapien
gagatgcagaaagtcactccgaagc

SEQ ID NO: 950845 - DNA, 25 bp, Homo sapien
tgcggaaacttccttcgtgcagccg

SEQ ID NO: 950846 - DNA, 25 bp, Homo sapien
tcatgagagcgctgcgtgcggaaac

SEQ ID NO: 950847 - DNA, 25 bp, Homo sapien
taagggccacgtgtctcatgagagc

SEQ ID NO: 950848 - DNA, 25 bp, Homo sapien
gggatagcacgtatctctacttctc

SEQ ID NO: 950849 - DNA, 25 bp, Homo sapien
tcatgatgtggtgtaaccttgggtc

SEQ ID NO: 950850 - DNA, 25 bp, Homo sapien
tcatcacagttcacactgttaaggt

SEQ ID NO: 950851 - DNA, 25 bp, Homo sapien
tgttcggttattatgatctacaaaa

SEQ ID NO: 950852 - DNA, 25 bp, Homo sapien
cctggcggcagtggtccaagttcat

SEQ ID NO: 950853 - DNA, 25 bp, Homo sapien
ctgggctcagatgtatggccttgta

SEQ ID NO: 950854 - DNA, 25 bp, Homo sapien
gaaggaattcgtatagaaaagctgc

SEQ ID NO: 950855 - DNA, 25 bp, Homo sapien
attcgtatagaaaagctgcatctcc

SEQ ID NO: 950856 - DNA, 25 bp, Homo sapien
tatggccttgtagaaggaattcgta

SEQ ID NO: 950857 - DNA, 25 bp, Homo sapien
gccacgtgctaactccagtctgtgt

SEQ ID NO: 950858 - DNA, 25 bp, Homo sapien
cgtgctaactccagtctgtgtatgc

SEQ ID NO: 950859 - DNA, 25 bp, Homo sapien
ctaactccagtctgtgtatgcaaaa

SEQ ID NO: 950860 - DNA, 25 bp, Homo sapien
cctggggtcgtgccacgtgctaact

SEQ ID NO: 950861 - DNA, 25 bp, Homo sapien
gggcgtctgtagtgaacctcgcaca

SEQ ID NO: 950862 - DNA, 25 bp, Homo sapien
cgcacatcagggtttcgaagccgct

SEQ ID NO: 950863 - DNA, 25 bp, Homo sapien
cagcaccggtgctatctgtgtaagg

SEQ ID NO: 950864 - DNA, 25 bp, Homo sapien
caggcccggagtcttcatacaccgt

SEQ ID NO: 950865 - DNA, 25 bp, Homo sapien
accgagccgccggttcctattctgt

SEQ ID NO: 950866 - DNA, 25 bp, Homo sapien
gccgccggttcctattctgtctcgt

SEQ ID NO: 950867 - DNA, 25 bp, Homo sapien
ggttcctattctgtctcgtgtctgt

SEQ ID NO: 950868 - DNA, 25 bp, Homo sapien
tattctgtctcgtgtctgtaaactg

SEQ ID NO: 950869 - DNA, 25 bp, Homo sapien
gggtttagtttgcatagatccaaac

SEQ ID NO: 950870 - DNA, 25 bp, Homo sapien
cacgaactgcatcagtatctgaggg

SEQ ID NO: 950871 - DNA, 25 bp, Homo sapien
tagtttgcatagatccaaacgctgg

SEQ ID NO: 950872 - DNA, 25 bp, Homo sapien
cactatctggccacgaactgcatca

SEQ ID NO: 950873 - DNA, 25 bp, Homo sapien
ggtatcttttaatctgctgatggca

SEQ ID NO: 950874 - DNA, 25 bp, Homo sapien
tatcgaatccgttttcccaacatat

SEQ ID NO: 950875 - DNA, 25 bp, Homo sapien
ggcattggagagcagccgcacacag

SEQ ID NO: 950876 - DNA, 25 bp, Homo sapien
ttcttatggttccacacgctaatgg

SEQ ID NO: 950877 - DNA, 25 bp, Homo sapien
ctgccgctccgcatggggcttacag

SEQ ID NO: 950878 - DNA, 25 bp, Homo sapien
catggggcttacagaacattcaact

SEQ ID NO: 950879 - DNA, 25 bp, Homo sapien
gatgtttctcgtaaaaggtagacac

SEQ ID NO: 950880 - DNA, 25 bp, Homo sapien
taaaaggtagacacctgctttcctg

SEQ ID NO: 950881 - DNA, 25 bp, Homo sapien
ttcacagtgtcggttgagtggcact

SEQ ID NO: 950882 - DNA, 25 bp, Homo sapien
atctttgcaaaagggtcagggagcc

SEQ ID NO: 950883 - DNA, 25 bp, Homo sapien
gacccatccacgacaatctttgcaa

SEQ ID NO: 950884 - DNA, 25 bp, Homo sapien
ctttgggtccaatgtgtttttcaca

SEQ ID NO: 950885 - DNA, 25 bp, Homo sapien
acatccatccatgtgacacagaaca

SEQ ID NO: 950886 - DNA, 25 bp, Homo sapien
aggagacccacacctagatgagacc

SEQ ID NO: 950887 - DNA, 25 bp, Homo sapien
ccatactcagatttttagagggtag

SEQ ID NO: 950888 - DNA, 25 bp, Homo sapien
tctaagagagcctagtatgcctcca

SEQ ID NO: 950889 - DNA, 25 bp, Homo sapien
agtctttctttgcaaggttcttggc

SEQ ID NO: 950890 - DNA, 25 bp, Homo sapien
tctttctttgcaaggttcttggcac

SEQ ID NO: 950891 - DNA, 25 bp, Homo sapien
ttctttgcaaggttcttggcacata

SEQ ID NO: 950892 - DNA, 25 bp, Homo sapien
gaagaagtctttctttgcaaggttc

SEQ ID NO: 950893 - DNA, 25 bp, Homo sapien
atagacgagctattagttttctcac

SEQ ID NO: 950894 - DNA, 25 bp, Homo sapien
ccaaggaactgggaccgcagataaa

SEQ ID NO: 950895 - DNA, 25 bp, Homo sapien
gggctctcttcacattggcctataa

SEQ ID NO: 950896 - DNA, 25 bp, Homo sapien
tctctttgggtggattcttcgggta

SEQ ID NO: 950897 - DNA, 25 bp, Homo sapien
tcatggtatagcttggattagcccc

SEQ ID NO: 950898 - DNA, 25 bp, Homo sapien
aacggtgacagagcagtgacttagc

SEQ ID NO: 950899 - DNA, 25 bp, Homo sapien
gtttcccaaacgtcagtctgtgatg

SEQ ID NO: 950900 - DNA, 25 bp, Homo sapien
tgctgggccctaacctacattcagg

SEQ ID NO: 950901 - DNA, 25 bp, Homo sapien
ggtgtgagtcaacatttccaaccga

SEQ ID NO: 950902 - DNA, 25 bp, Homo sapien
tgtgagtcaacatttccaaccgagg

SEQ ID NO: 950903 - DNA, 25 bp, Homo sapien
gagtcaacatttccaaccgaggcag

SEQ ID NO: 950904 - DNA, 25 bp, Homo sapien
ggcagtattaatttgacacatagaa

SEQ ID NO: 950905 - DNA, 25 bp, Homo sapien
ggacgaggaggcctttagcctagca

SEQ ID NO: 950906 - DNA, 25 bp, Homo sapien
cacacatctgttagtttcagctcct

SEQ ID NO: 950907 - DNA, 25 bp, Homo sapien
ttttgtctttccacaaagagaatgc

SEQ ID NO: 950908 - DNA, 25 bp, Homo sapien
gcatgtatacattgcttcttaatta

SEQ ID NO: 950909 - DNA, 25 bp, Homo sapien
tgatccgcccgagggttgaacaaat

SEQ ID NO: 950910 - DNA, 25 bp, Homo sapien
atccgcccgagggttgaacaaatgg

SEQ ID NO: 950911 - DNA, 25 bp, Homo sapien
tccgcccgagggttgaacaaatgga

SEQ ID NO: 950912 - DNA, 25 bp, Homo sapien
gtgatccgcccgagggttgaacaaa

SEQ ID NO: 950913 - DNA, 25 bp, Homo sapien
tcccagggtccgtgtgtcaattgca

SEQ ID NO: 950914 - DNA, 25 bp, Homo sapien
catgggttgggagctataaacctac

SEQ ID NO: 950915 - DNA, 25 bp, Homo sapien
caaactcggaaatgctgcgggcaga

SEQ ID NO: 950916 - DNA, 25 bp, Homo sapien
caactagcgtttgtcctctgtggcc

SEQ ID NO: 950917 - DNA, 25 bp, Homo sapien
gggcattacctatcagtgtgggcta

SEQ ID NO: 950918 - DNA, 25 bp, Homo sapien
aggtggccacctggtaaaatacaga

SEQ ID NO: 950919 - DNA, 25 bp, Homo sapien
cctcagctgagtgaccaagaaaatc

SEQ ID NO: 950920 - DNA, 25 bp, Homo sapien
tggccctagggtcacatttgctgaa

SEQ ID NO: 950921 - DNA, 25 bp, Homo sapien
tccgtgcagtaattcctttcccagg

SEQ ID NO: 950922 - DNA, 25 bp, Homo sapien
cattatcatgtacacgctggcaaga

SEQ ID NO: 950923 - DNA, 25 bp, Homo sapien
aatttgatccccactgtggcagcgg

SEQ ID NO: 950924 - DNA, 25 bp, Homo sapien
agattaatgccttcccacgggagtg

SEQ ID NO: 950925 - DNA, 25 bp, Homo sapien
tccactgtgagagtcttcatgcact

SEQ ID NO: 950926 - DNA, 25 bp, Homo sapien
gaaaggctaatctttctcgaaggaa

SEQ ID NO: 950927 - DNA, 25 bp, Homo sapien
tcatgcacttacgagcttgagatgc

SEQ ID NO: 950928 - DNA, 25 bp, Homo sapien
caggcaatctagcttcaaatctatg

SEQ ID NO: 950929 - DNA, 25 bp, Homo sapien
catagcagacgtagagagttcccat

SEQ ID NO: 950930 - DNA, 25 bp, Homo sapien
ccttagcacctgcatagcagacgta

SEQ ID NO: 950931 - DNA, 25 bp, Homo sapien
tagcacctgcatagcagacgtagag

SEQ ID NO: 950932 - DNA, 25 bp, Homo sapien
cctgcatagcagacgtagagagttc

SEQ ID NO: 950933 - DNA, 25 bp, Homo sapien
gaggagccatttcctaactcattct

SEQ ID NO: 950934 - DNA, 25 bp, Homo sapien
gtatcacccagataccaaagtcaga

SEQ ID NO: 950935 - DNA, 25 bp, Homo sapien
tgtgaggccagtatcacccagatac

SEQ ID NO: 950936 - DNA, 25 bp, Homo sapien
gacaaagatgttacagaccaatatc

SEQ ID NO: 950937 - DNA, 25 bp, Homo sapien
ctcacttcagatctccccagttggg

SEQ ID NO: 950938 - DNA, 25 bp, Homo sapien
tgtgtatgtgacaacagcctgctca

SEQ ID NO: 950939 - DNA, 25 bp, Homo sapien
tatacaaggaattgttaccagtgga

SEQ ID NO: 950940 - DNA, 25 bp, Homo sapien
agagaacttgaaggcaaaggccagg

SEQ ID NO: 950941 - DNA, 25 bp, Homo sapien
gcttactgggagatattgggtcatg

SEQ ID NO: 950942 - DNA, 25 bp, Homo sapien
gatgtattggtttaactcatggtga

SEQ ID NO: 950943 - DNA, 25 bp, Homo sapien
aatgagtcagttcttgccctggtag

SEQ ID NO: 950944 - DNA, 25 bp, Homo sapien
tgctctctgtcttccgctatgattg

SEQ ID NO: 950945 - DNA, 25 bp, Homo sapien
gaagtattccacgaaacctctgaag

SEQ ID NO: 950946 - DNA, 25 bp, Homo sapien
aggaagtattccacgaaacctctga

SEQ ID NO: 950947 - DNA, 25 bp, Homo sapien
gtattccacgaaacctctgaagaga

SEQ ID NO: 950948 - DNA, 25 bp, Homo sapien
agtattccacgaaacctctgaagag

SEQ ID NO: 950949 - DNA, 25 bp, Homo sapien
cccaaatatgtcaatttagaccttg

SEQ ID NO: 950950 - DNA, 25 bp, Homo sapien
caaatatgtcaatttagaccttgaa

SEQ ID NO: 950951 - DNA, 25 bp, Homo sapien
ccaaatatgtcaatttagaccttga

SEQ ID NO: 950952 - DNA, 25 bp, Homo sapien
aatatgtcaatttagaccttgaatt

SEQ ID NO: 950953 - DNA, 25 bp, Homo sapien
ggaaatgctttggatcgtagaccac

SEQ ID NO: 950954 - DNA, 25 bp, Homo sapien
ggcgcattgctgagagataaaatca

SEQ ID NO: 950955 - DNA, 25 bp, Homo sapien
tcactaaaacctcttggcgcattgc

SEQ ID NO: 950956 - DNA, 25 bp, Homo sapien
tgtacacatggtgtagggatgcacc

SEQ ID NO: 950957 - DNA, 25 bp, Homo sapien
gaaaaccattgttccaacgagctgc

SEQ ID NO: 950958 - DNA, 25 bp, Homo sapien
aaaccattgttccaacgagctgcca

SEQ ID NO: 950959 - DNA, 25 bp, Homo sapien
ccattgttccaacgagctgccaaca

SEQ ID NO: 950960 - DNA, 25 bp, Homo sapien
ggaaaaccattgttccaacgagctg

SEQ ID NO: 950961 - DNA, 25 bp, Homo sapien
aaccactggtgttgcacttgggaac

SEQ ID NO: 950962 - DNA, 25 bp, Homo sapien
gaagccaagttctttcaccgagaga

SEQ ID NO: 950963 - DNA, 25 bp, Homo sapien
gaatcccaaacgctgcctcaaagtg

SEQ ID NO: 950964 - DNA, 25 bp, Homo sapien
gaaacacaggacagggctagcgtaa

SEQ ID NO: 950965 - DNA, 25 bp, Homo sapien
taaggtatagcttaccagcctcgcc

SEQ ID NO: 950966 - DNA, 25 bp, Homo sapien
aaaatactctcagtgcagccttagg

SEQ ID NO: 950967 - DNA, 25 bp, Homo sapien
aataaatattatggccagggcgtgg

SEQ ID NO: 950968 - DNA, 25 bp, Homo sapien
tacaactcatgaaaagtgcttggcc

SEQ ID NO: 950969 - DNA, 25 bp, Homo sapien
gctggcactttccacggctagaagg

SEQ ID NO: 950970 - DNA, 25 bp, Homo sapien
aggttccttcccaagtagcacaaca

SEQ ID NO: 950971 - DNA, 25 bp, Homo sapien
ctttgggcccaataaaggagtgctt

SEQ ID NO: 950972 - DNA, 25 bp, Homo sapien
cctcattaggtgtcgctctgtgtca

SEQ ID NO: 950973 - DNA, 25 bp, Homo sapien
cagtcagtaaacaggtcaagtcccc

SEQ ID NO: 950974 - DNA, 25 bp, Homo sapien
ttatgacaagatgaccgaatggctc

SEQ ID NO: 950975 - DNA, 25 bp, Homo sapien
tattcaagcaatagcaacgatgtcc

SEQ ID NO: 950976 - DNA, 25 bp, Homo sapien
gctcctaagggaaatggcattctca

SEQ ID NO: 950977 - DNA, 25 bp, Homo sapien
ggtagggctgataatcaactatcct

SEQ ID NO: 950978 - DNA, 25 bp, Homo sapien
tgaaaatacagagccccagatatca

SEQ ID NO: 950979 - DNA, 25 bp, Homo sapien
ttattatagggtagggctgataatc

SEQ ID NO: 950980 - DNA, 25 bp, Homo sapien
cagataatcagcatgtatttctctc

SEQ ID NO: 950981 - DNA, 25 bp, Homo sapien
cacgcgagaaccctttggaaactat

SEQ ID NO: 950982 - DNA, 25 bp, Homo sapien
tgacaggtatgaacaggcagcaagc

SEQ ID NO: 950983 - DNA, 25 bp, Homo sapien
gctcaagtgaggaaccacgcgagaa

SEQ ID NO: 950984 - DNA, 25 bp, Homo sapien
tatgaaacactgtacagacgggagg

SEQ ID NO: 950985 - DNA, 25 bp, Homo sapien
taaaaataggtcagagataacccca

SEQ ID NO: 950986 - DNA, 25 bp, Homo sapien
tattattcagaaccaagacctcagt

SEQ ID NO: 950987 - DNA, 25 bp, Homo sapien
gggtcaggcaactcgctattacata

SEQ ID NO: 950988 - DNA, 25 bp, Homo sapien
gaattttattctgtagaacccagga

SEQ ID NO: 950989 - DNA, 25 bp, Homo sapien
gtgtacatccctgcattgttcctga

SEQ ID NO: 950990 - DNA, 25 bp, Homo sapien
atgggaatgtttccacaatttcatc

SEQ ID NO: 950991 - DNA, 25 bp, Homo sapien
taatgggaatgtttccacaatttca

SEQ ID NO: 950992 - DNA, 25 bp, Homo sapien
tgtacatccctgcattgttcctgat

SEQ ID NO: 950993 - DNA, 25 bp, Homo sapien
cgatgttgccgacattcctcagcca

SEQ ID NO: 950994 - DNA, 25 bp, Homo sapien
cattcctcagccaattagaattcct

SEQ ID NO: 950995 - DNA, 25 bp, Homo sapien
tcctcagccaattagaattcctttc

SEQ ID NO: 950996 - DNA, 25 bp, Homo sapien
tcagtgataaacgatgttgccgaca

SEQ ID NO: 950997 - DNA, 25 bp, Homo sapien
gcagttcaacatattacccaacagt

SEQ ID NO: 950998 - DNA, 25 bp, Homo sapien
ttagaccaggttgccaaagcagttc

SEQ ID NO: 950999 - DNA, 25 bp, Homo sapien
taagaataccactaagcccaagtgc

SEQ ID NO: 951000 - DNA, 25 bp, Homo sapien
gctacactccaacacaattttctga

SEQ ID NO: 951001 - DNA, 25 bp, Homo sapien
ggccatcttcactatctttgcactg

SEQ ID NO: 951002 - DNA, 25 bp, Homo sapien
tgcactgaatttcgctctgtgtcta

SEQ ID NO: 951003 - DNA, 25 bp, Homo sapien
cttcccttaaccagaaagatgagac

SEQ ID NO: 951004 - DNA, 25 bp, Homo sapien
aagatgagactaaaacctattccac

SEQ ID NO: 951005 - DNA, 25 bp, Homo sapien
tcctctcaaaccattcataacatct

SEQ ID NO: 951006 - DNA, 25 bp, Homo sapien
gatgatcacactcacaaatcctctc

SEQ ID NO: 951007 - DNA, 25 bp, Homo sapien
gctaaaccgcaatcctattgtaagg

SEQ ID NO: 951008 - DNA, 25 bp, Homo sapien
tggcattgcatgtgtaccattaccg

SEQ ID NO: 951009 - DNA, 25 bp, Homo sapien
cgagtttggaaagtcccggagcaga

SEQ ID NO: 951010 - DNA, 25 bp, Homo sapien
tgagaagcgtttcctatcagccctg

SEQ ID NO: 951011 - DNA, 25 bp, Homo sapien
ttaccgatgactttatggctgcgca

SEQ ID NO: 951012 - DNA, 25 bp, Homo sapien
gttgggccatgcaacaactatgggc

SEQ ID NO: 951013 - DNA, 25 bp, Homo sapien
acatccgcgccaccaagtcgcaggc

SEQ ID NO: 951014 - DNA, 25 bp, Homo sapien
gcccgcggcagagcgttgcgctcac

SEQ ID NO: 951015 - DNA, 25 bp, Homo sapien
tcacatccgcgccaccaagtcgcag

SEQ ID NO: 951016 - DNA, 25 bp, Homo sapien
accaagtcgcaggcccgcggcagag

SEQ ID NO: 951017 - DNA, 25 bp, Homo sapien
gcttccaaagcctccagtgagtgtg

SEQ ID NO: 951018 - DNA, 25 bp, Homo sapien
gcctcacggcgctctgggttgctga

SEQ ID NO: 951019 - DNA, 25 bp, Homo sapien
agttaaaagtagctagcggtctggc

SEQ ID NO: 951020 - DNA, 25 bp, Homo sapien
ccttgaaggtggcactacagagcca

SEQ ID NO: 951021 - DNA, 25 bp, Homo sapien
gctacaagataggattgaggaattt

SEQ ID NO: 951022 - DNA, 25 bp, Homo sapien
gacagaaagttaggaggcgggagca

SEQ ID NO: 951023 - DNA, 25 bp, Homo sapien
ggtgagggagaaacgaaagaggatg

SEQ ID NO: 951024 - DNA, 25 bp, Homo sapien
tagcaaaatagcttggaagtggtgg

SEQ ID NO: 951025 - DNA, 25 bp, Homo sapien
cggatcttgatgctggagccgttcc

SEQ ID NO: 951026 - DNA, 25 bp, Homo sapien
ttcctgcgtgtcccggggttcgaca

SEQ ID NO: 951027 - DNA, 25 bp, Homo sapien
ctgtcagacggatcttgatgctgga

SEQ ID NO: 951028 - DNA, 25 bp, Homo sapien
tcagacggatcttgatgctggagcc

SEQ ID NO: 951029 - DNA, 25 bp, Homo sapien
gtccgagccgggacacaaactccgc

SEQ ID NO: 951030 - DNA, 25 bp, Homo sapien
aacgatcgggcagccgcggatccag

SEQ ID NO: 951031 - DNA, 25 bp, Homo sapien
gcctcaaggttacggctccgggctg

SEQ ID NO: 951032 - DNA, 25 bp, Homo sapien
cggcaggcggatggtcgagccggga

SEQ ID NO: 951033 - DNA, 25 bp, Homo sapien
tcatctcgggttgtcaattagaggt

SEQ ID NO: 951034 - DNA, 25 bp, Homo sapien
cgggttgtcaattagaggtataatc

SEQ ID NO: 951035 - DNA, 25 bp, Homo sapien
ttttagacatcgcaatctgctcaga

SEQ ID NO: 951036 - DNA, 25 bp, Homo sapien
gaggtataatcattttagacatcgc

SEQ ID NO: 951037 - DNA, 25 bp, Homo sapien
tatcaaggatgacaatggtcacatt

SEQ ID NO: 951038 - DNA, 25 bp, Homo sapien
atatcaaggatgacaatggtcacat

SEQ ID NO: 951039 - DNA, 25 bp, Homo sapien
ctgacttccctgttttgtctgttga

SEQ ID NO: 951040 - DNA, 25 bp, Homo sapien
gctgacttccctgttttgtctgttg

SEQ ID NO: 951041 - DNA, 25 bp, Homo sapien
gacttccctgttttgtctgttgatt

SEQ ID NO: 951042 - DNA, 25 bp, Homo sapien
tgctgacttccctgttttgtctgtt

SEQ ID NO: 951043 - DNA, 25 bp, Homo sapien
caccatgcccgacaacatcctatgt

SEQ ID NO: 951044 - DNA, 25 bp, Homo sapien
ccaccatgcccgacaacatcctatg

SEQ ID NO: 951045 - DNA, 25 bp, Homo sapien
ccatgcccgacaacatcctatgttt

SEQ ID NO: 951046 - DNA, 25 bp, Homo sapien
accatgcccgacaacatcctatgtt

SEQ ID NO: 951047 - DNA, 25 bp, Homo sapien
tggaatgtgcttgaattatccccaa

SEQ ID NO: 951048 - DNA, 25 bp, Homo sapien
cacaaaaccagtccgtggtgtccaa

SEQ ID NO: 951049 - DNA, 25 bp, Homo sapien
gtctaaaacaacactcttggcatgt

SEQ ID NO: 951050 - DNA, 25 bp, Homo sapien
gggaaccactgccttggcaccaagt

SEQ ID NO: 951051 - DNA, 25 bp, Homo sapien
agcttcacatttgggttacactaag

SEQ ID NO: 951052 - DNA, 25 bp, Homo sapien
aagaagttatcctttagcactgggt

SEQ ID NO: 951053 - DNA, 25 bp, Homo sapien
cactaagatagaggactgctgcttc

SEQ ID NO: 951054 - DNA, 25 bp, Homo sapien
tcttaaagaagttatcctttagcac

SEQ ID NO: 951055 - DNA, 25 bp, Homo sapien
tgtggcaggagtgaagaccacctgc

SEQ ID NO: 951056 - DNA, 25 bp, Homo sapien
gataggcgagacacattaacttcag

SEQ ID NO: 951057 - DNA, 25 bp, Homo sapien
ttaacttcagaggatgtggcaggag

SEQ ID NO: 951058 - DNA, 25 bp, Homo sapien
tactcaaagatgacccgatacagca

SEQ ID NO: 951059 - DNA, 25 bp, Homo sapien
tcaaagccgactggccaatttgacg

SEQ ID NO: 951060 - DNA, 25 bp, Homo sapien
gccaatttgacggttctcatgcagc

SEQ ID NO: 951061 - DNA, 25 bp, Homo sapien
ttgacggttctcatgcagctgtaaa

SEQ ID NO: 951062 - DNA, 25 bp, Homo sapien
cgactggccaatttgacggttctca

SEQ ID NO: 951063 - DNA, 25 bp, Homo sapien
cagtgagcagattcaccagtggctc

SEQ ID NO: 951064 - DNA, 25 bp, Homo sapien
catctggggcagtgagcagattcac

SEQ ID NO: 951065 - DNA, 25 bp, Homo sapien
tggacgagctggatcagctgatcca

SEQ ID NO: 951066 - DNA, 25 bp, Homo sapien
gaccccagagtggacgagctggatc

SEQ ID NO: 951067 - DNA, 25 bp, Homo sapien
ggtggcccctgttgcaaagttcgcc

SEQ ID NO: 951068 - DNA, 25 bp, Homo sapien
tgttgcaaagttcgccaccatccag

SEQ ID NO: 951069 - DNA, 25 bp, Homo sapien
tggcccctgttgcaaagttcgccac

SEQ ID NO: 951070 - DNA, 25 bp, Homo sapien
cctgttgcaaagttcgccaccatcc

SEQ ID NO: 951071 - DNA, 25 bp, Homo sapien
gaaagtagtcctttgccatggttgc

SEQ ID NO: 951072 - DNA, 25 bp, Homo sapien
catggttgctgtgtgcgccacttac

SEQ ID NO: 951073 - DNA, 25 bp, Homo sapien
cccagggctattggaaagtagtcct

SEQ ID NO: 951074 - DNA, 25 bp, Homo sapien
ggattcctgaaggagttcaacccag

SEQ ID NO: 951075 - DNA, 25 bp, Homo sapien
tctgtgcccgtgacaatgttcccca

SEQ ID NO: 951076 - DNA, 25 bp, Homo sapien
gacaaggccccgctgctacgttgct

SEQ ID NO: 951077 - DNA, 25 bp, Homo sapien
gggagcacgttcagcatacccgcat

SEQ ID NO: 951078 - DNA, 25 bp, Homo sapien
atcaatggccatctgcgtctgctca

SEQ ID NO: 951079 - DNA, 25 bp, Homo sapien
ctggaagagcaaggctagaagtcta

SEQ ID NO: 951080 - DNA, 25 bp, Homo sapien
caaggctagaagtctaagtatttca

SEQ ID NO: 951081 - DNA, 25 bp, Homo sapien
aggctagaagtctaagtatttcaag

SEQ ID NO: 951082 - DNA, 25 bp, Homo sapien
agcaaggctagaagtctaagtattt

SEQ ID NO: 951083 - DNA, 25 bp, Homo sapien
aaacccactaggatttgacatcaaa

SEQ ID NO: 951084 - DNA, 25 bp, Homo sapien
gattcaagcttttggccacagagta

SEQ ID NO: 951085 - DNA, 25 bp, Homo sapien
gctgtgcgccatcacactcagttaa

SEQ ID NO: 951086 - DNA, 25 bp, Homo sapien
ccgggcgtggtcgttggcatctata

SEQ ID NO: 951087 - DNA, 25 bp, Homo sapien
gaacctgctaaagtgactatgaccc

SEQ ID NO: 951088 - DNA, 25 bp, Homo sapien
tatgacccgaggactcgaatccaca

SEQ ID NO: 951089 - DNA, 25 bp, Homo sapien
ccacagggcccaggattgcatttac

SEQ ID NO: 951090 - DNA, 25 bp, Homo sapien
actcgaatccacagggcccaggatt

SEQ ID NO: 951091 - DNA, 25 bp, Homo sapien
ggcacagattcgacaaggtccacgt

SEQ ID NO: 951092 - DNA, 25 bp, Homo sapien
tctgagctggtcatgagcactacca

SEQ ID NO: 951093 - DNA, 25 bp, Homo sapien
gtgttaaccacttggccgatgcgct

SEQ ID NO: 951094 - DNA, 25 bp, Homo sapien
tcaccgcagtgtcgcaagggtatgg

SEQ ID NO: 951095 - DNA, 25 bp, Homo sapien
aggagactgcctccagcattgggtg

SEQ ID NO: 951096 - DNA, 25 bp, Homo sapien
agactgcctccagcattgggtgcaa

SEQ ID NO: 951097 - DNA, 25 bp, Homo sapien
gagactgcctccagcattgggtgca

SEQ ID NO: 951098 - DNA, 25 bp, Homo sapien
ggagactgcctccagcattgggtgc

SEQ ID NO: 951099 - DNA, 25 bp, Homo sapien
tcccaaagtgctaccgcatccggcc

SEQ ID NO: 951100 - DNA, 25 bp, Homo sapien
tgtaggcctcttccaatgccgcaaa

SEQ ID NO: 951101 - DNA, 25 bp, Homo sapien
cttgtaggcctcttccaatgccgca

SEQ ID NO: 951102 - DNA, 25 bp, Homo sapien
ggcctcttccaatgccgcaaagaga

SEQ ID NO: 951103 - DNA, 25 bp, Homo sapien
aagcttgtaggcctcttccaatgcc

SEQ ID NO: 951104 - DNA, 25 bp, Homo sapien
tcaaggctaggagatgtgggatggc

SEQ ID NO: 951105 - DNA, 25 bp, Homo sapien
gtgatgacgttatctctgaactctg

SEQ ID NO: 951106 - DNA, 25 bp, Homo sapien
caaggctaggagatgtgggatggca

SEQ ID NO: 951107 - DNA, 25 bp, Homo sapien
tgtgatgacgttatctctgaactct

SEQ ID NO: 951108 - DNA, 25 bp, Homo sapien
gtctgctccgaagtccctgaagcga

SEQ ID NO: 951109 - DNA, 25 bp, Homo sapien
acggcacgagtctgctccgaagtcc

SEQ ID NO: 951110 - DNA, 25 bp, Homo sapien
cacgagtctgctccgaagtccctga

SEQ ID NO: 951111 - DNA, 25 bp, Homo sapien
cttctaccacggcacgagtctgctc

SEQ ID NO: 951112 - DNA, 25 bp, Homo sapien
agtgatgacttcaggaactccacca

SEQ ID NO: 951113 - DNA, 25 bp, Homo sapien
tgacttcaggaactccaccatcctg

SEQ ID NO: 951114 - DNA, 25 bp, Homo sapien
atgaccagtttcagaggggggttct

SEQ ID NO: 951115 - DNA, 25 bp, Homo sapien
aatgaggcccgcttcaatgaccagt

SEQ ID NO: 951116 - DNA, 25 bp, Homo sapien
tggcctggaaacataggactggatc

SEQ ID NO: 951117 - DNA, 25 bp, Homo sapien
cctggaaacataggactggatctga

SEQ ID NO: 951118 - DNA, 25 bp, Homo sapien
gaaacataggactggatctgagcta

SEQ ID NO: 951119 - DNA, 25 bp, Homo sapien
cataggactggatctgagctattca

SEQ ID NO: 951120 - DNA, 25 bp, Homo sapien
tttcggagctccagactgaccgcca

SEQ ID NO: 951121 - DNA, 25 bp, Homo sapien
gaagctcgtgatattccttctcttt

SEQ ID NO: 951122 - DNA, 25 bp, Homo sapien
ttcggagctccagactgaccgccat

SEQ ID NO: 951123 - DNA, 25 bp, Homo sapien
tcagggcagaagctcgtgatattcc

SEQ ID NO: 951124 - DNA, 25 bp, Homo sapien
agacacatctttgcctcggtactta

SEQ ID NO: 951125 - DNA, 25 bp, Homo sapien
gacacatctttgcctcggtacttaa

SEQ ID NO: 951126 - DNA, 25 bp, Homo sapien
gttggacagcaacaaagaaattttc

SEQ ID NO: 951127 - DNA, 25 bp, Homo sapien
cagcaacaaagaaattttcagtgcc

SEQ ID NO: 951128 - DNA, 25 bp, Homo sapien
caacaaagaaattttcagtgcccat

SEQ ID NO: 951129 - DNA, 25 bp, Homo sapien
gacagcaacaaagaaattttcagtg

SEQ ID NO: 951130 - DNA, 25 bp, Homo sapien
ttatagagctagcagatcacttcgt

SEQ ID NO: 951131 - DNA, 25 bp, Homo sapien
cagatcacttcgtgtagggacattc

SEQ ID NO: 951132 - DNA, 25 bp, Homo sapien
gctagcagatcacttcgtgtaggga

SEQ ID NO: 951133 - DNA, 25 bp, Homo sapien
tcacttcgtgtagggacattctgca

SEQ ID NO: 951134 - DNA, 25 bp, Homo sapien
agagcagatccctgttgcttctcca

SEQ ID NO: 951135 - DNA, 25 bp, Homo sapien
ccagcggcagagcagatccctgttg

SEQ ID NO: 951136 - DNA, 25 bp, Homo sapien
ctctggtcacagctcggattccgct

SEQ ID NO: 951137 - DNA, 25 bp, Homo sapien
tcacagctcggattccgcttctttc

SEQ ID NO: 951138 - DNA, 25 bp, Homo sapien
ttttctagatctagctgagtttttc

SEQ ID NO: 951139 - DNA, 25 bp, Homo sapien
cttccaggtcttattaacggtattg

SEQ ID NO: 951140 - DNA, 25 bp, Homo sapien
ttattaacggtattgagtcgcttcc

SEQ ID NO: 951141 - DNA, 25 bp, Homo sapien
tattgagtcgcttcctctggttggg

SEQ ID NO: 951142 - DNA, 25 bp, Homo sapien
gttcagatctgcatcactaccagcc

SEQ ID NO: 951143 - DNA, 25 bp, Homo sapien
tgcatcactaccagccagttcttca

SEQ ID NO: 951144 - DNA, 25 bp, Homo sapien
ttggacatcatttgatatctgtatg

SEQ ID NO: 951145 - DNA, 25 bp, Homo sapien
gatctgcatcactaccagccagttc

SEQ ID NO: 951146 - DNA, 25 bp, Homo sapien
gggattccagacttcagtttcaatg

SEQ ID NO: 951147 - DNA, 25 bp, Homo sapien
ggggattccagacttcagtttcaat

SEQ ID NO: 951148 - DNA, 25 bp, Homo sapien
aagaggggccagaggggctgcaggc

SEQ ID NO: 951149 - DNA, 25 bp, Homo sapien
aggggccagaggggctgcaggccat

SEQ ID NO: 951150 - DNA, 25 bp, Homo sapien
ctgagaaagaggggccagaggggct

SEQ ID NO: 951151 - DNA, 25 bp, Homo sapien
aaagaggggccagaggggctgcagg

SEQ ID NO: 951152 - DNA, 25 bp, Homo sapien
gacttcaacgtatcctttcggagga

SEQ ID NO: 951153 - DNA, 25 bp, Homo sapien
ggacacagcttaacccctaacagga

SEQ ID NO: 951154 - DNA, 25 bp, Homo sapien
tgaattagggtccaccttactccag

SEQ ID NO: 951155 - DNA, 25 bp, Homo sapien
taactagttacatttgctgagaccc

SEQ ID NO: 951156 - DNA, 25 bp, Homo sapien
ggatcacaaggtccgtaccctgacg

SEQ ID NO: 951157 - DNA, 25 bp, Homo sapien
tggtctaggacatgccctgggtgct

SEQ ID NO: 951158 - DNA, 25 bp, Homo sapien
gactcaagggtgcacccaagctgag

SEQ ID NO: 951159 - DNA, 25 bp, Homo sapien
actctggcgagtctggtggagccca

SEQ ID NO: 951160 - DNA, 25 bp, Homo sapien
tcacggctaaggttccagaatgcag

SEQ ID NO: 951161 - DNA, 25 bp, Homo sapien
tggaactgtcccgtgagctcaaaag

SEQ ID NO: 951162 - DNA, 25 bp, Homo sapien
tgaatccacatgtcccctgagtgcc

SEQ ID NO: 951163 - DNA, 25 bp, Homo sapien
gacactgtggcaacaacaggccatg

SEQ ID NO: 951164 - DNA, 25 bp, Homo sapien
ccacagctaaaggatcggacccagt

SEQ ID NO: 951165 - DNA, 25 bp, Homo sapien
tgagggcccttctgatgccacagct

SEQ ID NO: 951166 - DNA, 25 bp, Homo sapien
gatgaccatcgacaacctcaatgag

SEQ ID NO: 951167 - DNA, 25 bp, Homo sapien
ttccaagctggatctcgaggaggtg

SEQ ID NO: 951168 - DNA, 25 bp, Homo sapien
cattccacaaatgacaggagtgtag

SEQ ID NO: 951169 - DNA, 25 bp, Homo sapien
tccacaaatgacaggagtgtaggtt

SEQ ID NO: 951170 - DNA, 25 bp, Homo sapien
aatcattccacaaatgacaggagtg

SEQ ID NO: 951171 - DNA, 25 bp, Homo sapien
ttccacaaatgacaggagtgtaggt

SEQ ID NO: 951172 - DNA, 25 bp, Homo sapien
cagcgggcaatcgagtccttgcagg

SEQ ID NO: 951173 - DNA, 25 bp, Homo sapien
gaagaagatggagacggacctgaat

SEQ ID NO: 951174 - DNA, 25 bp, Homo sapien
aatcgagtccttgcaggccagccta

SEQ ID NO: 951175 - DNA, 25 bp, Homo sapien
gcagaggcacttcggctcaagaaga

SEQ ID NO: 951176 - DNA, 25 bp, Homo sapien
caaaatctgcagagccagtgtccca

SEQ ID NO: 951177 - DNA, 25 bp, Homo sapien
cccagggtttgaggctatagtagct

SEQ ID NO: 951178 - DNA, 25 bp, Homo sapien
tgttctagttcaaaggactcacttg

SEQ ID NO: 951179 - DNA, 25 bp, Homo sapien
agtgtcccagttcaaatctgaaggc

SEQ ID NO: 951180 - DNA, 25 bp, Homo sapien
aacggagtgggacgcccatgccgct

SEQ ID NO: 951181 - DNA, 25 bp, Homo sapien
gacaaaagaccttgcgaaactgcca

SEQ ID NO: 951182 - DNA, 25 bp, Homo sapien
ttaatcgttcttcaggtccaagagc

SEQ ID NO: 951183 - DNA, 25 bp, Homo sapien
gccacacttcggctcgcgattgtga

SEQ ID NO: 951184 - DNA, 25 bp, Homo sapien
ccacttccgggatctgtcagccgct

SEQ ID NO: 951185 - DNA, 25 bp, Homo sapien
ctgttcgcgtcgactgcccagagtc

SEQ ID NO: 951186 - DNA, 25 bp, Homo sapien
gtcgactgcccagagtccgcgaatc

SEQ ID NO: 951187 - DNA, 25 bp, Homo sapien
gcccgacggagcctgttcgcgtcga

SEQ ID NO: 951188 - DNA, 25 bp, Homo sapien
gagtttattgtgagggtgcctcctg

SEQ ID NO: 951189 - DNA, 25 bp, Homo sapien
tttattgtgagggtgcctcctggaa

SEQ ID NO: 951190 - DNA, 25 bp, Homo sapien
gaaacttgagtttattgtgagggtg

SEQ ID NO: 951191 - DNA, 25 bp, Homo sapien
cttgagtttattgtgagggtgcctc

SEQ ID NO: 951192 - DNA, 25 bp, Homo sapien
caggctccttgaaacaaccaggtca

SEQ ID NO: 951193 - DNA, 25 bp, Homo sapien
accgttcccgtcttgcatgtgagca

SEQ ID NO: 951194 - DNA, 25 bp, Homo sapien
gcacacggttctgccggttggacaa

SEQ ID NO: 951195 - DNA, 25 bp, Homo sapien
caagccctgtcagaggtacaccgtt

SEQ ID NO: 951196 - DNA, 25 bp, Homo sapien
tacgtagcatctcaacatgttaatg

SEQ ID NO: 951197 - DNA, 25 bp, Homo sapien
cgcacccgtcggttgataggtcttt

SEQ ID NO: 951198 - DNA, 25 bp, Homo sapien
taaagacagctattataaacatgtt

SEQ ID NO: 951199 - DNA, 25 bp, Homo sapien
ttccacactgtcaccattataaaga

SEQ ID NO: 951200 - DNA, 25 bp, Homo sapien
tacaggcgtacagcatcacatcccg

SEQ ID NO: 951201 - DNA, 25 bp, Homo sapien
gtacagcatcacatcccgctaattt

SEQ ID NO: 951202 - DNA, 25 bp, Homo sapien
aggcgtacagcatcacatcccgcta

SEQ ID NO: 951203 - DNA, 25 bp, Homo sapien
gagccatggcaccccacctgtttgc

SEQ ID NO: 951204 - DNA, 25 bp, Homo sapien
tgagttcaagcgatcaagcgattct

SEQ ID NO: 951205 - DNA, 25 bp, Homo sapien
ttgcccaaactggagcacagtagcg

SEQ ID NO: 951206 - DNA, 25 bp, Homo sapien
gcccaaactggagcacagtagcgca

SEQ ID NO: 951207 - DNA, 25 bp, Homo sapien
tgcccaggcacctgttaacccttta

SEQ ID NO: 951208 - DNA, 25 bp, Homo sapien
tgtccccagcatgctgtcccagatg

SEQ ID NO: 951209 - DNA, 25 bp, Homo sapien
ccagtgtgggtgttgtgaggtgctc

SEQ ID NO: 951210 - DNA, 25 bp, Homo sapien
gtgctctgatggaagctgtccccag

SEQ ID NO: 951211 - DNA, 25 bp, Homo sapien
ccagatgccacgagggagccggaac

SEQ ID NO: 951212 - DNA, 25 bp, Homo sapien
tgtatccttgagctggcatctgcct

SEQ ID NO: 951213 - DNA, 25 bp, Homo sapien
gcctaatgcaaagggcgagagttcg

SEQ ID NO: 951214 - DNA, 25 bp, Homo sapien
ttttgatacacctgcaattcgggcc

SEQ ID NO: 951215 - DNA, 25 bp, Homo sapien
gtgcaatggcaaggccacgcctaat

SEQ ID NO: 951216 - DNA, 25 bp, Homo sapien
gggatgctgagcttcggcgggcggc

SEQ ID NO: 951217 - DNA, 25 bp, Homo sapien
agcgtggcttgacggcccgcgagcg

SEQ ID NO: 951218 - DNA, 25 bp, Homo sapien
ttcctaagcagagctcgcagcgtgg

SEQ ID NO: 951219 - DNA, 25 bp, Homo sapien
gcgggcggctggacgttcctaagca

SEQ ID NO: 951220 - DNA, 25 bp, Homo sapien
cacaagaacagcgtcaggtgagagc

SEQ ID NO: 951221 - DNA, 25 bp, Homo sapien
tcgcccagaaacagcgtcgggtgag

SEQ ID NO: 951222 - DNA, 25 bp, Homo sapien
ggcctagactcgctgcacaagaaca

SEQ ID NO: 951223 - DNA, 25 bp, Homo sapien
ggacaagaaggcgagctccgagggt

SEQ ID NO: 951224 - DNA, 25 bp, Homo sapien
tggccaagcccttcggtctgtaaaa

SEQ ID NO: 951225 - DNA, 25 bp, Homo sapien
tagcctcgctctgcatttccgggac

SEQ ID NO: 951226 - DNA, 25 bp, Homo sapien
gactcgctgcggaataacatcgtta

SEQ ID NO: 951227 - DNA, 25 bp, Homo sapien
cacggtgcgaccgacataagacggg

SEQ ID NO: 951228 - DNA, 25 bp, Homo sapien
tcagggaggctaatggttgctttgc

SEQ ID NO: 951229 - DNA, 25 bp, Homo sapien
tgttgccttcatcctagctgctggg

SEQ ID NO: 951230 - DNA, 25 bp, Homo sapien
ggagcttttcttacctattcaagga

SEQ ID NO: 951231 - DNA, 25 bp, Homo sapien
taccaatacgagttcccataggggc

SEQ ID NO: 951232 - DNA, 25 bp, Homo sapien
tttgcacggccataggtagatagct

SEQ ID NO: 951233 - DNA, 25 bp, Homo sapien
gaactcgtgggagcaatccttctgc

SEQ ID NO: 951234 - DNA, 25 bp, Homo sapien
taaaaacggctcgagcacggaagcc

SEQ ID NO: 951235 - DNA, 25 bp, Homo sapien
tatgtgccctgaaccttgccgggtg

SEQ ID NO: 951236 - DNA, 25 bp, Homo sapien
taatctgccaaatatacaagttgaa

SEQ ID NO: 951237 - DNA, 25 bp, Homo sapien
tttaatctgccaaatatacaagttg

SEQ ID NO: 951238 - DNA, 25 bp, Homo sapien
agtttaatctgccaaatatacaagt

SEQ ID NO: 951239 - DNA, 25 bp, Homo sapien
caagtttaatctgccaaatatacaa

SEQ ID NO: 951240 - DNA, 25 bp, Homo sapien
cctgaggtcagtcagacaggactga

SEQ ID NO: 951241 - DNA, 25 bp, Homo sapien
ccctagccaggtgagtaggaaccgg

SEQ ID NO: 951242 - DNA, 25 bp, Homo sapien
ggccctagccaggtgagtaggaacc

SEQ ID NO: 951243 - DNA, 25 bp, Homo sapien
aggccctgaggtcagtcagacagga

SEQ ID NO: 951244 - DNA, 25 bp, Homo sapien
tgtctcaaagatagcagctacccct

SEQ ID NO: 951245 - DNA, 25 bp, Homo sapien
gttacatatgaaatgctgtcctgca

SEQ ID NO: 951246 - DNA, 25 bp, Homo sapien
tatctaccagacaaatgaaagctct

SEQ ID NO: 951247 - DNA, 25 bp, Homo sapien
atgctatctatctaccagacaaatg

SEQ ID NO: 951248 - DNA, 25 bp, Homo sapien
cattcgttttcctgacaatgtggca

SEQ ID NO: 951249 - DNA, 25 bp, Homo sapien
aatgtccctgagcaattggtttccc

SEQ ID NO: 951250 - DNA, 25 bp, Homo sapien
gacattcccgacacgcttcagtggc

SEQ ID NO: 951251 - DNA, 25 bp, Homo sapien
tcttgtgggcaaacggaaacttctc

SEQ ID NO: 951252 - DNA, 25 bp, Homo sapien
tggccagaccaccttatagaaagct

SEQ ID NO: 951253 - DNA, 25 bp, Homo sapien
ctataaactggaccaactcccatag

SEQ ID NO: 951254 - DNA, 25 bp, Homo sapien
cccatagccactctggcctagagga

SEQ ID NO: 951255 - DNA, 25 bp, Homo sapien
tcccatagccactctggcctagagg

SEQ ID NO: 951256 - DNA, 25 bp, Homo sapien
taaactggaccaactcccatagcca

SEQ ID NO: 951257 - DNA, 25 bp, Homo sapien
tactgtggacggtgctctgctgaga

SEQ ID NO: 951258 - DNA, 25 bp, Homo sapien
tcgcggacagggacacgagttcagt

SEQ ID NO: 951259 - DNA, 25 bp, Homo sapien
ggagtgactgtccacctactgtgga

SEQ ID NO: 951260 - DNA, 25 bp, Homo sapien
agagaccttagtgggacctgtgagc

SEQ ID NO: 951261 - DNA, 25 bp, Homo sapien
cctcctcccgctgtttccggatgat

SEQ ID NO: 951262 - DNA, 25 bp, Homo sapien
ccgctgtttccggatgatggccagc

SEQ ID NO: 951263 - DNA, 25 bp, Homo sapien
ctcccgctgtttccggatgatggcc

SEQ ID NO: 951264 - DNA, 25 bp, Homo sapien
tcctcccgctgtttccggatgatgg

SEQ ID NO: 951265 - DNA, 25 bp, Homo sapien
tggtgtcatggggacatctttccta

SEQ ID NO: 951266 - DNA, 25 bp, Homo sapien
aaatggtgtcatggggacatctttc

SEQ ID NO: 951267 - DNA, 25 bp, Homo sapien
tgtcatggggacatctttcctacca

SEQ ID NO: 951268 - DNA, 25 bp, Homo sapien
tggataaaatggtgtcatggggaca

SEQ ID NO: 951269 - DNA, 25 bp, Homo sapien
gttctctcctcgaaagctcctttgg

SEQ ID NO: 951270 - DNA, 25 bp, Homo sapien
gcccttcaacgcctttgcgcttttg

SEQ ID NO: 951271 - DNA, 25 bp, Homo sapien
tctcgatgtcgatgagcccttcaac

SEQ ID NO: 951272 - DNA, 25 bp, Homo sapien
tcgaaagctcctttggcccgtccag

SEQ ID NO: 951273 - DNA, 25 bp, Homo sapien
cactctcatctgagtctagagattt

SEQ ID NO: 951274 - DNA, 25 bp, Homo sapien
ttctcctttttggggtcacctgcag

SEQ ID NO: 951275 - DNA, 25 bp, Homo sapien
gagtctagagatttcttctcctttt

SEQ ID NO: 951276 - DNA, 25 bp, Homo sapien
cctcactctcatctgagtctagaga

SEQ ID NO: 951277 - DNA, 25 bp, Homo sapien
ctgccaaatcatgctggcattccca

SEQ ID NO: 951278 - DNA, 25 bp, Homo sapien
aggcgagtcctctccgcactccact

SEQ ID NO: 951279 - DNA, 25 bp, Homo sapien
acatgcagctgccaaatcatgctgg

SEQ ID NO: 951280 - DNA, 25 bp, Homo sapien
gcagctgccaaatcatgctggcatt

SEQ ID NO: 951281 - DNA, 25 bp, Homo sapien
cagggcttgtatactgcctcgcccg

SEQ ID NO: 951282 - DNA, 25 bp, Homo sapien
gggcttgtatactgcctcgcccggc

SEQ ID NO: 951283 - DNA, 25 bp, Homo sapien
gtcgatctcctcagggcttgtatac

SEQ ID NO: 951284 - DNA, 25 bp, Homo sapien
ctgcgcgtcgatctcctcagggctt

SEQ ID NO: 951285 - DNA, 25 bp, Homo sapien
ccagcaccacccaaaccgacacctc

SEQ ID NO: 951286 - DNA, 25 bp, Homo sapien
gcaccacccaaaccgacacctccgc

SEQ ID NO: 951287 - DNA, 25 bp, Homo sapien
caaaccgacacctccgccaccctca

SEQ ID NO: 951288 - DNA, 25 bp, Homo sapien
aaaccgacacctccgccaccctcat

SEQ ID NO: 951289 - DNA, 25 bp, Homo sapien
ggcgcctcgaactgacaccggaacc

SEQ ID NO: 951290 - DNA, 25 bp, Homo sapien
gcgcctcgaactgacaccggaaccg

SEQ ID NO: 951291 - DNA, 25 bp, Homo sapien
aaatagcttgggctcgacttcttcc

SEQ ID NO: 951292 - DNA, 25 bp, Homo sapien
tagcttgggctcgacttcttcctcc

SEQ ID NO: 951293 - DNA, 25 bp, Homo sapien
tgccaggcaacaacgcccctagtct

SEQ ID NO: 951294 - DNA, 25 bp, Homo sapien
tcagggaggcctccgcacgaagtcg

SEQ ID NO: 951295 - DNA, 25 bp, Homo sapien
tctccgttcgggaagacgcgtggcc

SEQ ID NO: 951296 - DNA, 25 bp, Homo sapien
tgcgcgccgcctaagtccaggcttg

SEQ ID NO: 951297 - DNA, 25 bp, Homo sapien
ctccttcccctagcgccccaatctc

SEQ ID NO: 951298 - DNA, 25 bp, Homo sapien
tcctgcactatcttccttcgctcct

SEQ ID NO: 951299 - DNA, 25 bp, Homo sapien
cctagcgccccaatctctcttacac

SEQ ID NO: 951300 - DNA, 25 bp, Homo sapien
aatcctgcactatcttccttcgctc

SEQ ID NO: 951301 - DNA, 25 bp, Homo sapien
acatctttcttctcgatctgattac

SEQ ID NO: 951302 - DNA, 25 bp, Homo sapien
ggcacatctttcttctcgatctgat

SEQ ID NO: 951303 - DNA, 25 bp, Homo sapien
gcacatctttcttctcgatctgatt

SEQ ID NO: 951304 - DNA, 25 bp, Homo sapien
cacatctttcttctcgatctgatta

SEQ ID NO: 951305 - DNA, 25 bp, Homo sapien
ctcctacgtcctctttctcctcgat

SEQ ID NO: 951306 - DNA, 25 bp, Homo sapien
cctcgatctggttaccgcctaccat

SEQ ID NO: 951307 - DNA, 25 bp, Homo sapien
tcctcgatctggttaccgcctacca

SEQ ID NO: 951308 - DNA, 25 bp, Homo sapien
tccctaaaaactgaggaggtcatag

SEQ ID NO: 951309 - DNA, 25 bp, Homo sapien
agaacgagatctaatggacttaccg

SEQ ID NO: 951310 - DNA, 25 bp, Homo sapien
acagggagggatagtcttcttgacc

SEQ ID NO: 951311 - DNA, 25 bp, Homo sapien
ttcacgctactgatagacatacctg

SEQ ID NO: 951312 - DNA, 25 bp, Homo sapien
gtgacaaggtttgagagtggcatgt

SEQ ID NO: 951313 - DNA, 25 bp, Homo sapien
tgtccactggaaagcgggcccttgc

SEQ ID NO: 951314 - DNA, 25 bp, Homo sapien
cctgggaatcccaccaagacgcgga

SEQ ID NO: 951315 - DNA, 25 bp, Homo sapien
gaaagcgggcccttgcctgcctggc

SEQ ID NO: 951316 - DNA, 25 bp, Homo sapien
gctgagcctgggaatcccaccaaga

SEQ ID NO: 951317 - DNA, 25 bp, Homo sapien
tctcgcaacctgtgcaagtcatggt

SEQ ID NO: 951318 - DNA, 25 bp, Homo sapien
gacctcttttacaagcggaaagcca

SEQ ID NO: 951319 - DNA, 25 bp, Homo sapien
gctgaaacagaaccgcatgagggaa

SEQ ID NO: 951320 - DNA, 25 bp, Homo sapien
tctctcttggactttgaagctcgcg

SEQ ID NO: 951321 - DNA, 25 bp, Homo sapien
tgtaacctcggtgtcaacagcagct

SEQ ID NO: 951322 - DNA, 25 bp, Homo sapien
ttcaggaatccatgtgaggcagcgt

SEQ ID NO: 951323 - DNA, 25 bp, Homo sapien
tgagtcccctttatgctgcagtgag

SEQ ID NO: 951324 - DNA, 25 bp, Homo sapien
gatatgagaacttgtgctgcctgcg

SEQ ID NO: 951325 - DNA, 25 bp, Homo sapien
cacatccgtcatcagcctccttgcc

SEQ ID NO: 951326 - DNA, 25 bp, Homo sapien
ccgtcatcagcctccttgccggtgt

SEQ ID NO: 951327 - DNA, 25 bp, Homo sapien
gtcatcagcctccttgccggtgtcc

SEQ ID NO: 951328 - DNA, 25 bp, Homo sapien
cctggggcttggtccggaacttctg

SEQ ID NO: 951329 - DNA, 25 bp, Homo sapien
tgcggggtttcctctgcgggcatca

SEQ ID NO: 951330 - DNA, 25 bp, Homo sapien
taataggctcggaagccgtcaatct

SEQ ID NO: 951331 - DNA, 25 bp, Homo sapien
cactgtcagccactgcttgtaatag

SEQ ID NO: 951332 - DNA, 25 bp, Homo sapien
cttctccaggtaggtgttcttccct

SEQ ID NO: 951333 - DNA, 25 bp, Homo sapien
aacaaatctcaggtattcaccccag

SEQ ID NO: 951334 - DNA, 25 bp, Homo sapien
taggacacggcataaaggaacagag

SEQ ID NO: 951335 - DNA, 25 bp, Homo sapien
gctgcccatgagcacatgatccaag

SEQ ID NO: 951336 - DNA, 25 bp, Homo sapien
tctgagggccacttaagcagagacc

SEQ ID NO: 951337 - DNA, 25 bp, Homo sapien
ttcgttcaccgggaccctgttctgc

SEQ ID NO: 951338 - DNA, 25 bp, Homo sapien
agggtactgggctgcaaactccagc

SEQ ID NO: 951339 - DNA, 25 bp, Homo sapien
gatgagataggtgtagttcagcttc

SEQ ID NO: 951340 - DNA, 25 bp, Homo sapien
ccagctggcggatgaccacttcgtt

SEQ ID NO: 951341 - DNA, 25 bp, Homo sapien
tgtagaccgtccttcggcctgtggc

SEQ ID NO: 951342 - DNA, 25 bp, Homo sapien
cccgatggccaggttgcagaatgtc

SEQ ID NO: 951343 - DNA, 25 bp, Homo sapien
ccagtagcgtgagggtcctgatgtc

SEQ ID NO: 951344 - DNA, 25 bp, Homo sapien
taaagaatgtcaggtcggcctctac

SEQ ID NO: 951345 - DNA, 25 bp, Homo sapien
tgacatgaggttgcctgccttggcc

SEQ ID NO: 951346 - DNA, 25 bp, Homo sapien
tagtatccacctctggttgggcctt

SEQ ID NO: 951347 - DNA, 25 bp, Homo sapien
caacagcaggttgtagctgtcccgg

SEQ ID NO: 951348 - DNA, 25 bp, Homo sapien
ggctgtagccctagactcagcatca

SEQ ID NO: 951349 - DNA, 25 bp, Homo sapien
ctgtgaccacgtgccctttgtggat

SEQ ID NO: 951350 - DNA, 25 bp, Homo sapien
cctctgtgaccacgtgccctttgtg

SEQ ID NO: 951351 - DNA, 25 bp, Homo sapien
tgaccacgtgccctttgtggatgat

SEQ ID NO: 951352 - DNA, 25 bp, Homo sapien
gaccacgtgccctttgtggatgatt

SEQ ID NO: 951353 - DNA, 25 bp, Homo sapien
tctgtagagctgagtccttccaggg

SEQ ID NO: 951354 - DNA, 25 bp, Homo sapien
catcgaggcacatcctaaggtctgc

SEQ ID NO: 951355 - DNA, 25 bp, Homo sapien
gactcggcacagacgttgaacaggg

SEQ ID NO: 951356 - DNA, 25 bp, Homo sapien
tcagcagcgcgtggtatgttttcaa

SEQ ID NO: 951357 - DNA, 25 bp, Homo sapien
tggttgtagaggttgaaggccttct

SEQ ID NO: 951358 - DNA, 25 bp, Homo sapien
ttgtagaggttgaaggccttcttca

SEQ ID NO: 951359 - DNA, 25 bp, Homo sapien
gttgtagaggttgaaggccttcttc

SEQ ID NO: 951360 - DNA, 25 bp, Homo sapien
ctggttgtagaggttgaaggccttc

SEQ ID NO: 951361 - DNA, 25 bp, Homo sapien
cgtgtagttgctctccatgggctgc

SEQ ID NO: 951362 - DNA, 25 bp, Homo sapien
caatcagcaccgtgtagttgctctc

SEQ ID NO: 951363 - DNA, 25 bp, Homo sapien
tcagcaccgtgtagttgctctccat

SEQ ID NO: 951364 - DNA, 25 bp, Homo sapien
caccgtgtagttgctctccatgggc

SEQ ID NO: 951365 - DNA, 25 bp, Homo sapien
caaaccgcaggttatggaactgggc

SEQ ID NO: 951366 - DNA, 25 bp, Homo sapien
aactgggctgcggatttgcggaata

SEQ ID NO: 951367 - DNA, 25 bp, Homo sapien
ttgtcagagagggtcccaaaactct

SEQ ID NO: 951368 - DNA, 25 bp, Homo sapien
tgcactgcaagaagtaccagtacgg

SEQ ID NO: 951369 - DNA, 25 bp, Homo sapien
ttttcctgacgctcctggccgaggg

SEQ ID NO: 951370 - DNA, 25 bp, Homo sapien
ccaggctgcccgtgttttcctgacg

SEQ ID NO: 951371 - DNA, 25 bp, Homo sapien
gttggagtggctcgggtcagagccc

SEQ ID NO: 951372 - DNA, 25 bp, Homo sapien
tgcccgtgttttcctgacgctcctg

SEQ ID NO: 951373 - DNA, 25 bp, Homo sapien
ctgaagggcgcccacattggccgca

SEQ ID NO: 951374 - DNA, 25 bp, Homo sapien
tgaagggcgcccacattggccgcat

SEQ ID NO: 951375 - DNA, 25 bp, Homo sapien
agggcgcccacattggccgcatcag

SEQ ID NO: 951376 - DNA, 25 bp, Homo sapien
cacattggccgcatcagcccctccc

SEQ ID NO: 951377 - DNA, 25 bp, Homo sapien
gctctacaggggtccaggtgttgca

SEQ ID NO: 951378 - DNA, 25 bp, Homo sapien
gtcgagcgagtctcacgaagtccat

SEQ ID NO: 951379 - DNA, 25 bp, Homo sapien
atgaacagtcccatggggcgggccc

SEQ ID NO: 951380 - DNA, 25 bp, Homo sapien
gccctggcgaacagtcgagcgagtc

SEQ ID NO: 951381 - DNA, 25 bp, Homo sapien
ttctggctttcctgtccctccaggg

SEQ ID NO: 951382 - DNA, 25 bp, Homo sapien
tctggctttcctgtccctccagggc

SEQ ID NO: 951383 - DNA, 25 bp, Homo sapien
tgcattttgttcctacacaagctca

SEQ ID NO: 951384 - DNA, 25 bp, Homo sapien
tgcctggccctgcacaaactgttat

SEQ ID NO: 951385 - DNA, 25 bp, Homo sapien
accctcacagtttcaggcactgcta

SEQ ID NO: 951386 - DNA, 25 bp, Homo sapien
aaccctgaattaggctgtatagtgg

SEQ ID NO: 951387 - DNA, 25 bp, Homo sapien
agtgcactccgacggggagccctgc

SEQ ID NO: 951388 - DNA, 25 bp, Homo sapien
tgtccggcgcagtgcactccgacgg

SEQ ID NO: 951389 - DNA, 25 bp, Homo sapien
ttgaagtgtccggcgcagtgcactc

SEQ ID NO: 951390 - DNA, 25 bp, Homo sapien
aagtgtccggcgcagtgcactccga

SEQ ID NO: 951391 - DNA, 25 bp, Homo sapien
aagcgcgcaggcgcaatccgcgtcg

SEQ ID NO: 951392 - DNA, 25 bp, Homo sapien
ctctccccaagcgcgcaggcgcaat

SEQ ID NO: 951393 - DNA, 25 bp, Homo sapien
gcgcaggcgcaatccgcgtcgccga

SEQ ID NO: 951394 - DNA, 25 bp, Homo sapien
gcgcaatccgcgtcgccgactcacg

SEQ ID NO: 951395 - DNA, 25 bp, Homo sapien
cctcgactcttgtgatcatccctgc

SEQ ID NO: 951396 - DNA, 25 bp, Homo sapien
ccctcgactcttgtgatcatccctg

SEQ ID NO: 951397 - DNA, 25 bp, Homo sapien
acccctcgactcttgtgatcatccc

SEQ ID NO: 951398 - DNA, 25 bp, Homo sapien
ctcgactcttgtgatcatccctgca

SEQ ID NO: 951399 - DNA, 25 bp, Homo sapien
caagcaacataatcggccgggcgtt

SEQ ID NO: 951400 - DNA, 25 bp, Homo sapien
acaagcaacataatcggccgggcgt

SEQ ID NO: 951401 - DNA, 25 bp, Homo sapien
tgctccctcattgcaaggcaagact

SEQ ID NO: 951402 - DNA, 25 bp, Homo sapien
cacagttttacctggggtacctgct

SEQ ID NO: 951403 - DNA, 25 bp, Homo sapien
caaggcaagactgcatttagtatat

SEQ ID NO: 951404 - DNA, 25 bp, Homo sapien
actgccgcggcagttcacagtttta

SEQ ID NO: 951405 - DNA, 25 bp, Homo sapien
acaggtacactgaattgttcggccc

SEQ ID NO: 951406 - DNA, 25 bp, Homo sapien
gctcacaggtacactgaattgttcg

SEQ ID NO: 951407 - DNA, 25 bp, Homo sapien
aagttaaccataggtgtgttcagat

SEQ ID NO: 951408 - DNA, 25 bp, Homo sapien
cactgaattgttcggccctcttctg

SEQ ID NO: 951409 - DNA, 25 bp, Homo sapien
agcaagcttcagcttatggagctcc

SEQ ID NO: 951410 - DNA, 25 bp, Homo sapien
cagaggtcagaagggttccctccca

SEQ ID NO: 951411 - DNA, 25 bp, Homo sapien
tcgggcgctgctgtctgtgaattct

SEQ ID NO: 951412 - DNA, 25 bp, Homo sapien
tctttttgaaagctgcctgcggcaa

SEQ ID NO: 951413 - DNA, 25 bp, Homo sapien
gatcttatatacaggaggctctcaa

SEQ ID NO: 951414 - DNA, 25 bp, Homo sapien
agcaagcttcagcttatggagctcc

SEQ ID NO: 951415 - DNA, 25 bp, Homo sapien
tgtgagggggacctctgcccctttc

SEQ ID NO: 951416 - DNA, 25 bp, Homo sapien
aatgtctgtcagtgtagtacctcaa

SEQ ID NO: 951417 - DNA, 25 bp, Homo sapien
taggaagtgaaggtacctcagcttc

SEQ ID NO: 951418 - DNA, 25 bp, Homo sapien
cctttccaggacgtgatgccttcag

SEQ ID NO: 951419 - DNA, 25 bp, Homo sapien
gatttgaggctaacgagggtgaccc

SEQ ID NO: 951420 - DNA, 25 bp, Homo sapien
tgacccggaagcagcgagttgtgca

SEQ ID NO: 951421 - DNA, 25 bp, Homo sapien
tgccttgagccctgcttagagaatg

SEQ ID NO: 951422 - DNA, 25 bp, Homo sapien
tagagaatgcgtggcctcagctgtc

SEQ ID NO: 951423 - DNA, 25 bp, Homo sapien
gcggaagactaagaaggggctggtc

SEQ ID NO: 951424 - DNA, 25 bp, Homo sapien
gggattcctgagctggaagcggaag

SEQ ID NO: 951425 - DNA, 25 bp, Homo sapien
gctgagtggtcaaggatgaggggat

SEQ ID NO: 951426 - DNA, 25 bp, Homo sapien
ttcctgagctggaagcggaagacta

SEQ ID NO: 951427 - DNA, 25 bp, Homo sapien
ctgctttggagagggccaggtccac

SEQ ID NO: 951428 - DNA, 25 bp, Homo sapien
tcagggctcgtcaggccaaaactgg

SEQ ID NO: 951429 - DNA, 25 bp, Homo sapien
agccaatcagaatggaacttcctgg

SEQ ID NO: 951430 - DNA, 25 bp, Homo sapien
gtgagcctggaagcgggcaactact

SEQ ID NO: 951431 - DNA, 25 bp, Homo sapien
taacaatccgccattacaaaggtcg

SEQ ID NO: 951432 - DNA, 25 bp, Homo sapien
gggtcatgcagagtcaaaacagcag

SEQ ID NO: 951433 - DNA, 25 bp, Homo sapien
tgtccccatcggtagtctgcgtgca

SEQ ID NO: 951434 - DNA, 25 bp, Homo sapien
ttcctgccgtttgcgggacgagtcc

SEQ ID NO: 951435 - DNA, 25 bp, Homo sapien
aacaccagttcttggtgacgccagg

SEQ ID NO: 951436 - DNA, 25 bp, Homo sapien
ttctgtgtggcggtggtcattcccc

SEQ ID NO: 951437 - DNA, 25 bp, Homo sapien
taactgtttcatgcgcttgttggcg

SEQ ID NO: 951438 - DNA, 25 bp, Homo sapien
gggtccctgcagtcgacatcatgtt

SEQ ID NO: 951439 - DNA, 25 bp, Homo sapien
cctattaggatatgaaaggattcag

SEQ ID NO: 951440 - DNA, 25 bp, Homo sapien
taattcctattaggatatgaaagga

SEQ ID NO: 951441 - DNA, 25 bp, Homo sapien
ttggaggttaattcctattaggata

SEQ ID NO: 951442 - DNA, 25 bp, Homo sapien
ggttaattcctattaggatatgaaa

SEQ ID NO: 951443 - DNA, 25 bp, Homo sapien
ttgagattgtgttcctcacggaggg

SEQ ID NO: 951444 - DNA, 25 bp, Homo sapien
gattgagattgtgttcctcacggag

SEQ ID NO: 951445 - DNA, 25 bp, Homo sapien
caacgattgagattgtgttcctcac

SEQ ID NO: 951446 - DNA, 25 bp, Homo sapien
acgattgagattgtgttcctcacgg

SEQ ID NO: 951447 - DNA, 25 bp, Homo sapien
gtggtatttgcggagccgctcgtgc

SEQ ID NO: 951448 - DNA, 25 bp, Homo sapien
cagtggtatttgcggagccgctcgt

SEQ ID NO: 951449 - DNA, 25 bp, Homo sapien
tcagtggtatttgcggagccgctcg

SEQ ID NO: 951450 - DNA, 25 bp, Homo sapien
tggtatttgcggagccgctcgtgct

SEQ ID NO: 951451 - DNA, 25 bp, Homo sapien
agtcaggaaggcaagatggtaagta

SEQ ID NO: 951452 - DNA, 25 bp, Homo sapien
aagtcaggaaggcaagatggtaagt

SEQ ID NO: 951453 - DNA, 25 bp, Homo sapien
tgaagtcaggaaggcaagatggtaa

SEQ ID NO: 951454 - DNA, 25 bp, Homo sapien
gtcaggaaggcaagatggtaagtat

SEQ ID NO: 951455 - DNA, 25 bp, Homo sapien
gacaagctcctctcaagcctcagag

SEQ ID NO: 951456 - DNA, 25 bp, Homo sapien
tcatgggaactaaaggcaagacgcc

SEQ ID NO: 951457 - DNA, 25 bp, Homo sapien
tcagagccggaacagccatgctttt

SEQ ID NO: 951458 - DNA, 25 bp, Homo sapien
agagaacccgtccttcagaggcagg

SEQ ID NO: 951459 - DNA, 25 bp, Homo sapien
gagtagctaaagagcacgtagcatg

SEQ ID NO: 951460 - DNA, 25 bp, Homo sapien
ggaaaaggagtagctaaagagcacg

SEQ ID NO: 951461 - DNA, 25 bp, Homo sapien
aaaggagtagctaaagagcacgtag

SEQ ID NO: 951462 - DNA, 25 bp, Homo sapien
tgagatgcttgtaggaaaaggagta

SEQ ID NO: 951463 - DNA, 25 bp, Homo sapien
tattatagactaatgcccactacgg

SEQ ID NO: 951464 - DNA, 25 bp, Homo sapien
gaaagggccaatcaaccacagaagt

SEQ ID NO: 951465 - DNA, 25 bp, Homo sapien
gaagttgagcacacagttgagtctg

SEQ ID NO: 951466 - DNA, 25 bp, Homo sapien
gctcctgaactaggcctacctggat

SEQ ID NO: 951467 - DNA, 25 bp, Homo sapien
aaacgctccgaaaatgccactagga

SEQ ID NO: 951468 - DNA, 25 bp, Homo sapien
gaaaatgccactaggactgaagtcc

SEQ ID NO: 951469 - DNA, 25 bp, Homo sapien
actgaagtcccgcatcaagatccag

SEQ ID NO: 951470 - DNA, 25 bp, Homo sapien
ctctttgaaacgctccgaaaatgcc

SEQ ID NO: 951471 - DNA, 25 bp, Homo sapien
ctgaaacggaagagtgagaaaaaat

SEQ ID NO: 951472 - DNA, 25 bp, Homo sapien
tgaaacggaagagtgagaaaaaata

SEQ ID NO: 951473 - DNA, 25 bp, Homo sapien
tgaagccaatatgagggtgccctgt

SEQ ID NO: 951474 - DNA, 25 bp, Homo sapien
gctttattaaccaacaggacgtctg

SEQ ID NO: 951475 - DNA, 25 bp, Homo sapien
aaaaagcagtaacgtggcggacagg

SEQ ID NO: 951476 - DNA, 25 bp, Homo sapien
cataatgcaattacacagaggctgc

SEQ ID NO: 951477 - DNA, 25 bp, Homo sapien
gagcaagtataatgaaagaaaccca

SEQ ID NO: 951478 - DNA, 25 bp, Homo sapien
cagcccgagcaagtataatgaaaga

SEQ ID NO: 951479 - DNA, 25 bp, Homo sapien
cagatgggccagcccgagcaagtat

SEQ ID NO: 951480 - DNA, 25 bp, Homo sapien
ggccagcccgagcaagtataatgaa

SEQ ID NO: 951481 - DNA, 25 bp, Homo sapien
tccaaatgactgaacggccccagat

SEQ ID NO: 951482 - DNA, 25 bp, Homo sapien
cctgtgggcgtcaaggagatgcatt

SEQ ID NO: 951483 - DNA, 25 bp, Homo sapien
caaagagtctaggaccacggtgcct

SEQ ID NO: 951484 - DNA, 25 bp, Homo sapien
gaaagactaaggctctgtcaggacc

SEQ ID NO: 951485 - DNA, 25 bp, Homo sapien
tacacatgggtgtctcggaaaagcc

SEQ ID NO: 951486 - DNA, 25 bp, Homo sapien
caaggctactatggagcatctaggg

SEQ ID NO: 951487 - DNA, 25 bp, Homo sapien
aaagctgcgcctaacattcaagtgc

SEQ ID NO: 951488 - DNA, 25 bp, Homo sapien
aggccgtcctagagaataaagttca

SEQ ID NO: 951489 - DNA, 25 bp, Homo sapien
cgctgtgccggaccgcgcgagggct

SEQ ID NO: 951490 - DNA, 25 bp, Homo sapien
ctggtgtccgctgtgccggaccgcg

SEQ ID NO: 951491 - DNA, 25 bp, Homo sapien
gtgccggaccgcgcgagggctgctg

SEQ ID NO: 951492 - DNA, 25 bp, Homo sapien
ggtgtccgctgtgccggaccgcgcg

SEQ ID NO: 951493 - DNA, 25 bp, Homo sapien
tgggctgcgtccctaagcaactgaa

SEQ ID NO: 951494 - DNA, 25 bp, Homo sapien
tgctccttgcggtgtgtgttgacca

SEQ ID NO: 951495 - DNA, 25 bp, Homo sapien
tgcccattgcaccagggcctatgta

SEQ ID NO: 951496 - DNA, 25 bp, Homo sapien
gaccatccacggtataatgcgggta

SEQ ID NO: 951497 - DNA, 25 bp, Homo sapien
tcttcttttatctgataaccttact

SEQ ID NO: 951498 - DNA, 25 bp, Homo sapien
tgaatggatggtgaacgcctggact

SEQ ID NO: 951499 - DNA, 25 bp, Homo sapien
tcaagtcttcggcagcgagaggagc

SEQ ID NO: 951500 - DNA, 25 bp, Homo sapien
ggtcagcgcacacttttcagggaaa

SEQ ID NO: 951501 - DNA, 25 bp, Homo sapien
ccttctagggtaagtcgagctggat

SEQ ID NO: 951502 - DNA, 25 bp, Homo sapien
ccttggagccattgatcaggatagt

SEQ ID NO: 951503 - DNA, 25 bp, Homo sapien
ggccatatgcggtccacaggctgag

SEQ ID NO: 951504 - DNA, 25 bp, Homo sapien
tgttgggttggattcaaagtcgtcc

SEQ ID NO: 951505 - DNA, 25 bp, Homo sapien
gagtgtacctctttgcttaaaaggc

SEQ ID NO: 951506 - DNA, 25 bp, Homo sapien
gtgagggttgagtgacccctttaga

SEQ ID NO: 951507 - DNA, 25 bp, Homo sapien
gctagcaaatcaccaggctagaggt

SEQ ID NO: 951508 - DNA, 25 bp, Homo sapien
tgttgctgaatcctgctagcaaatc

SEQ ID NO: 951509 - DNA, 25 bp, Homo sapien
aggctagaggtgagggttgagtgac

SEQ ID NO: 951510 - DNA, 25 bp, Homo sapien
ctaccctgtcctagtccactgtagt

SEQ ID NO: 951511 - DNA, 25 bp, Homo sapien
tggaaatgggtaacttcttggtgtg

SEQ ID NO: 951512 - DNA, 25 bp, Homo sapien
gaaatgggtaacttcttggtgtgta

SEQ ID NO: 951513 - DNA, 25 bp, Homo sapien
ttccattcttttcaggagcctaccc

SEQ ID NO: 951514 - DNA, 25 bp, Homo sapien
aaagcattacaggagcatacataag

SEQ ID NO: 951515 - DNA, 25 bp, Homo sapien
tcttgaccacctctgtgggactgtc

SEQ ID NO: 951516 - DNA, 25 bp, Homo sapien
ggtcacatgtttaacccttgcactg

SEQ ID NO: 951517 - DNA, 25 bp, Homo sapien
ccttgcactgacactcttagcacag

SEQ ID NO: 951518 - DNA, 25 bp, Homo sapien
tcaacaaactttgtactgttttgca

SEQ ID NO: 951519 - DNA, 25 bp, Homo sapien
caatagtaacattttagagtgcttc

SEQ ID NO: 951520 - DNA, 25 bp, Homo sapien
gttttgcatatccaatagtaacatt

SEQ ID NO: 951521 - DNA, 25 bp, Homo sapien
tttattgattactgaatgattcttc

SEQ ID NO: 951522 - DNA, 25 bp, Homo sapien
tctaagagcgaaatgaccacagcca

SEQ ID NO: 951523 - DNA, 25 bp, Homo sapien
cctgcaggcctactttccagaagta

SEQ ID NO: 951524 - DNA, 25 bp, Homo sapien
accactgtgctgaacgtctctggca

SEQ ID NO: 951525 - DNA, 25 bp, Homo sapien
ccgtctatgtgtctattacagggaa

SEQ ID NO: 951526 - DNA, 25 bp, Homo sapien
ggcgtaaggcatggtttgatcaaca

SEQ ID NO: 951527 - DNA, 25 bp, Homo sapien
gcggtcagctcttacggtccataaa

SEQ ID NO: 951528 - DNA, 25 bp, Homo sapien
gatcagaatgcgcaaacaaggtgga

SEQ ID NO: 951529 - DNA, 25 bp, Homo sapien
gcaagccttcagacagcggtcagct

SEQ ID NO: 951530 - DNA, 25 bp, Homo sapien
taaatgccttgagtgtggaaaagcc

SEQ ID NO: 951531 - DNA, 25 bp, Homo sapien
gaggaatctttttcgacatcaggtc

SEQ ID NO: 951532 - DNA, 25 bp, Homo sapien
ggcagctcgcgtatcttgttgaaca

SEQ ID NO: 951533 - DNA, 25 bp, Homo sapien
ggaaaagcctttggccggcattcaa

SEQ ID NO: 951534 - DNA, 25 bp, Homo sapien
tagagagactcagccatagaaaatg

SEQ ID NO: 951535 - DNA, 25 bp, Homo sapien
gatggcttcaaacttagagggaggt

SEQ ID NO: 951536 - DNA, 25 bp, Homo sapien
tgaacagtcacatccaaagcgcagc

SEQ ID NO: 951537 - DNA, 25 bp, Homo sapien
cagggaactgccaaatctagagaga

SEQ ID NO: 951538 - DNA, 25 bp, Homo sapien
tggatttccgatgggttcagcttgg

SEQ ID NO: 951539 - DNA, 25 bp, Homo sapien
caagcagaggcctctattacacgtg

SEQ ID NO: 951540 - DNA, 25 bp, Homo sapien
tcctcaatgactagcagagagctcc

SEQ ID NO: 951541 - DNA, 25 bp, Homo sapien
gagagagtggtctcctgaccgtgat

SEQ ID NO: 951542 - DNA, 25 bp, Homo sapien
attgactgatatactccaaatggca

SEQ ID NO: 951543 - DNA, 25 bp, Homo sapien
taattgactgatatactccaaatgg

SEQ ID NO: 951544 - DNA, 25 bp, Homo sapien
gatccataattgactgatatactcc

SEQ ID NO: 951545 - DNA, 25 bp, Homo sapien
tcaaggaagatccataattgactga

SEQ ID NO: 951546 - DNA, 25 bp, Homo sapien
ttgagatggagtctcgctctgttgc

SEQ ID NO: 951547 - DNA, 25 bp, Homo sapien
atgacagcactttatttcttttttg

SEQ ID NO: 951548 - DNA, 25 bp, Homo sapien
aaatgacagcactttatttcttttt

SEQ ID NO: 951549 - DNA, 25 bp, Homo sapien
caaaatgacagcactttatttcttt

SEQ ID NO: 951550 - DNA, 25 bp, Homo sapien
tctttggtgtcggataaggtgtgta

SEQ ID NO: 951551 - DNA, 25 bp, Homo sapien
ctttggtgtcggataaggtgtgtac

SEQ ID NO: 951552 - DNA, 25 bp, Homo sapien
ttctttggtgtcggataaggtgtgt

SEQ ID NO: 951553 - DNA, 25 bp, Homo sapien
cacagacggaacatccatagggctt

SEQ ID NO: 951554 - DNA, 25 bp, Homo sapien
tttaatgagggttgcactctgattg

SEQ ID NO: 951555 - DNA, 25 bp, Homo sapien
cccacagacggaacatccatagggc

SEQ ID NO: 951556 - DNA, 25 bp, Homo sapien
ttgcactctgattgaagcgtttccc

SEQ ID NO: 951557 - DNA, 25 bp, Homo sapien
gaagctcttctcgcattcttcacac

SEQ ID NO: 951558 - DNA, 25 bp, Homo sapien
gaagcgctccccacatttcagacag

SEQ ID NO: 951559 - DNA, 25 bp, Homo sapien
ttggaaatatgacaggtttccccgc

SEQ ID NO: 951560 - DNA, 25 bp, Homo sapien
ctgatgtctaaaaaggttggaaata

SEQ ID NO: 951561 - DNA, 25 bp, Homo sapien
tctctactgtgggtactttgatgac

SEQ ID NO: 951562 - DNA, 25 bp, Homo sapien
gagcgttgtttgaaactcttcccac

SEQ ID NO: 951563 - DNA, 25 bp, Homo sapien
tcagagcgttgtttgaaactcttcc

SEQ ID NO: 951564 - DNA, 25 bp, Homo sapien
ctggtgtctaaagaggtcagagcgt

SEQ ID NO: 951565 - DNA, 25 bp, Homo sapien
gaaactcttcccacagttaccacat

SEQ ID NO: 951566 - DNA, 25 bp, Homo sapien
gaacgcttcttgtagttgcccctgt

SEQ ID NO: 951567 - DNA, 25 bp, Homo sapien
catctgagatgctgttgagtccttc

SEQ ID NO: 951568 - DNA, 25 bp, Homo sapien
caaggttggaacacctggcactgtt

SEQ ID NO: 951569 - DNA, 25 bp, Homo sapien
tgaggtttcagcacgtgccacgtca

SEQ ID NO: 951570 - DNA, 25 bp, Homo sapien
ctgaaacgtgaaaatacaaattcct

SEQ ID NO: 951571 - DNA, 25 bp, Homo sapien
caggtgctaattttgctagttttag

SEQ ID NO: 951572 - DNA, 25 bp, Homo sapien
attacaggtgctaattttgctagtt

SEQ ID NO: 951573 - DNA, 25 bp, Homo sapien
agggattacaggtgctaattttgct

SEQ ID NO: 951574 - DNA, 25 bp, Homo sapien
ggattacaggtgctaattttgctag

SEQ ID NO: 951575 - DNA, 25 bp, Homo sapien
gagcaagatgaacatacagttgttc

SEQ ID NO: 951576 - DNA, 25 bp, Homo sapien
gaaattgtgtatagtaccaaagcct

SEQ ID NO: 951577 - DNA, 25 bp, Homo sapien
gctggtggcatatacattagttatg

SEQ ID NO: 951578 - DNA, 25 bp, Homo sapien
acacgttccaagtcccccagtgatg

SEQ ID NO: 951579 - DNA, 25 bp, Homo sapien
gataaacttgggtggtagacacagg

SEQ ID NO: 951580 - DNA, 25 bp, Homo sapien
cagaggctcctgcttgcgttacaga

SEQ ID NO: 951581 - DNA, 25 bp, Homo sapien
taatgatatacagcgtggagctacg

SEQ ID NO: 951582 - DNA, 25 bp, Homo sapien
cagcttactggctacctctggagaa

SEQ ID NO: 951583 - DNA, 25 bp, Homo sapien
gggatggtagtgaaccagcccttca

SEQ ID NO: 951584 - DNA, 25 bp, Homo sapien
cacacaccgcaataaaccagcagag

SEQ ID NO: 951585 - DNA, 25 bp, Homo sapien
tggtagtgaaccagcccttcacaaa

SEQ ID NO: 951586 - DNA, 25 bp, Homo sapien
ttcacaaaccacacaccgcaataaa

SEQ ID NO: 951587 - DNA, 25 bp, Homo sapien
tgtgctcccggaatccttctgcgca

SEQ ID NO: 951588 - DNA, 25 bp, Homo sapien
gaagtccctccgtgctgggtccagg

SEQ ID NO: 951589 - DNA, 25 bp, Homo sapien
ctgcagaagtccctccgtgctgggt

SEQ ID NO: 951590 - DNA, 25 bp, Homo sapien
cctcccaggttagagacacagccgt

SEQ ID NO: 951591 - DNA, 25 bp, Homo sapien
tcccacctccagaacaggcctttcg

SEQ ID NO: 951592 - DNA, 25 bp, Homo sapien
acgcctattttccacactcccacct

SEQ ID NO: 951593 - DNA, 25 bp, Homo sapien
taaacgcctattttccacactccca

SEQ ID NO: 951594 - DNA, 25 bp, Homo sapien
tccagaacaggcctttcgcttctca

SEQ ID NO: 951595 - DNA, 25 bp, Homo sapien
aagccgcgggatagttgggctccca

SEQ ID NO: 951596 - DNA, 25 bp, Homo sapien
cctaaagtgcagtcgagaagtttcg

SEQ ID NO: 951597 - DNA, 25 bp, Homo sapien
tcctggtaacgcagctgcctaaagt

SEQ ID NO: 951598 - DNA, 25 bp, Homo sapien
ctttcacgggcaaaagtccgtcgcg

SEQ ID NO: 951599 - DNA, 25 bp, Homo sapien
gcctctgggcggtcaagctggaatt

SEQ ID NO: 951600 - DNA, 25 bp, Homo sapien
cccagggtcccaactcggcgtcact

SEQ ID NO: 951601 - DNA, 25 bp, Homo sapien
cagggtcccaactcggcgtcactgc

SEQ ID NO: 951602 - DNA, 25 bp, Homo sapien
actgccgcgcctctgggcggtcaag

SEQ ID NO: 951603 - DNA, 25 bp, Homo sapien
tcaaacaaccgaaaacatcccgtgc

SEQ ID NO: 951604 - DNA, 25 bp, Homo sapien
agctttgcgcctacaactctctcgg

SEQ ID NO: 951605 - DNA, 25 bp, Homo sapien
gcaaacccaaggaactcatcagccg

SEQ ID NO: 951606 - DNA, 25 bp, Homo sapien
tttcaggtgaagaaagagcaaaccc

SEQ ID NO: 951607 - DNA, 25 bp, Homo sapien
gcagctgtctcttaatggaactcct

SEQ ID NO: 951608 - DNA, 25 bp, Homo sapien
tgccagtagcaggaggattcgaaaa

SEQ ID NO: 951609 - DNA, 25 bp, Homo sapien
tatagatgtatgctaccaggcctgg

SEQ ID NO: 951610 - DNA, 25 bp, Homo sapien
tagtgagctagtaccttccagaatt

SEQ ID NO: 951611 - DNA, 25 bp, Homo sapien
accacgcctggccacatctggtctt

SEQ ID NO: 951612 - DNA, 25 bp, Homo sapien
ccacgcctggccacatctggtcttt

SEQ ID NO: 951613 - DNA, 25 bp, Homo sapien
cacgcctggccacatctggtctttg

SEQ ID NO: 951614 - DNA, 25 bp, Homo sapien
tccagatctaaataccaacagggtc

SEQ ID NO: 951615 - DNA, 25 bp, Homo sapien
cagggtctaaactatccggttacag

SEQ ID NO: 951616 - DNA, 25 bp, Homo sapien
ccggttacagcttaatcccaggcag

SEQ ID NO: 951617 - DNA, 25 bp, Homo sapien
tcctagtcattggaaatcagcaagc

SEQ ID NO: 951618 - DNA, 25 bp, Homo sapien
aaagccttcagagtgaggtcccacc

SEQ ID NO: 951619 - DNA, 25 bp, Homo sapien
catcaggtgctccacatgggtcaga

SEQ ID NO: 951620 - DNA, 25 bp, Homo sapien
ggaaaagctacaaccaacgcgtgca

SEQ ID NO: 951621 - DNA, 25 bp, Homo sapien
gagagaaatcccatcagtgtcgtga

SEQ ID NO: 951622 - DNA, 25 bp, Homo sapien
gggtctctccccaggcggattcttg

SEQ ID NO: 951623 - DNA, 25 bp, Homo sapien
cacaaatgtcatgctgaggctggaa

SEQ ID NO: 951624 - DNA, 25 bp, Homo sapien
ctcgccgtaagggtggaattgctct

SEQ ID NO: 951625 - DNA, 25 bp, Homo sapien
gctggaagccttttcacacccatta

SEQ ID NO: 951626 - DNA, 25 bp, Homo sapien
cttcttgcacttgccacatgtttgg

SEQ ID NO: 951627 - DNA, 25 bp, Homo sapien
aggtccgagccagaactaaagctct

SEQ ID NO: 951628 - DNA, 25 bp, Homo sapien
gaggtccgagccagaactaaagctc

SEQ ID NO: 951629 - DNA, 25 bp, Homo sapien
gcacttgccacatgtttggggcctc

SEQ ID NO: 951630 - DNA, 25 bp, Homo sapien
tgacacaccacgttagaactctgcc

SEQ ID NO: 951631 - DNA, 25 bp, Homo sapien
gtgcacatcttcacatcggacctct

SEQ ID NO: 951632 - DNA, 25 bp, Homo sapien
tccactttcccctatatgggttatg

SEQ ID NO: 951633 - DNA, 25 bp, Homo sapien
tgggcttattttccagacatctctg

SEQ ID NO: 951634 - DNA, 25 bp, Homo sapien
gtttctccttataatgtcctggcag

SEQ ID NO: 951635 - DNA, 25 bp, Homo sapien
tgttagacttaaaatagggtgtgga

SEQ ID NO: 951636 - DNA, 25 bp, Homo sapien
ctccttataatgtcctggcaggtat

SEQ ID NO: 951637 - DNA, 25 bp, Homo sapien
ttccttcttcacattagaatccaaa

SEQ ID NO: 951638 - DNA, 25 bp, Homo sapien
aaccagtggcgctcagtgaagggca

SEQ ID NO: 951639 - DNA, 25 bp, Homo sapien
tgtataactacagttctggctctgg

SEQ ID NO: 951640 - DNA, 25 bp, Homo sapien
ttccgagatcgcgactgtggccgag

SEQ ID NO: 951641 - DNA, 25 bp, Homo sapien
ggagcactggagtcttctgtataac

SEQ ID NO: 951642 - DNA, 25 bp, Homo sapien
agccctgagttgtggtttgcgcccg

SEQ ID NO: 951643 - DNA, 25 bp, Homo sapien
tttcttcgctatcccaggaagcagc

SEQ ID NO: 951644 - DNA, 25 bp, Homo sapien
agcctttcttcgctatcccaggaag

SEQ ID NO: 951645 - DNA, 25 bp, Homo sapien
caaagcctttcttcgctatcccagg

SEQ ID NO: 951646 - DNA, 25 bp, Homo sapien
ggagtgcccattggccaggagtccc

SEQ ID NO: 951647 - DNA, 25 bp, Homo sapien
gcttgggcctcaggcgggctcaaca

SEQ ID NO: 951648 - DNA, 25 bp, Homo sapien
agctggagtgcccattggccaggag

SEQ ID NO: 951649 - DNA, 25 bp, Homo sapien
agccacctaataccgagggtctgtg

SEQ ID NO: 951650 - DNA, 25 bp, Homo sapien
gtcagcgtggggaccaagtgtggtg

SEQ ID NO: 951651 - DNA, 25 bp, Homo sapien
ccttagccggtcagcgtggggacca

SEQ ID NO: 951652 - DNA, 25 bp, Homo sapien
gccggtcagcgtggggaccaagtgt

SEQ ID NO: 951653 - DNA, 25 bp, Homo sapien
tagccggtcagcgtggggaccaagt

SEQ ID NO: 951654 - DNA, 25 bp, Homo sapien
taaactagcaaatcgatggccactg

SEQ ID NO: 951655 - DNA, 25 bp, Homo sapien
tggccactgtctgatgtgtccaaca

SEQ ID NO: 951656 - DNA, 25 bp, Homo sapien
aatggctaaactagcaaatcgatgg

SEQ ID NO: 951657 - DNA, 25 bp, Homo sapien
tagcaaatcgatggccactgtctga

SEQ ID NO: 951658 - DNA, 25 bp, Homo sapien
taactacaacatactgcaaaatccc

SEQ ID NO: 951659 - DNA, 25 bp, Homo sapien
ttaactacaacatactgcaaaatcc

SEQ ID NO: 951660 - DNA, 25 bp, Homo sapien
cgtttaactacaacatactgcaaaa

SEQ ID NO: 951661 - DNA, 25 bp, Homo sapien
ctacaacatactgcaaaatcccttt

SEQ ID NO: 951662 - DNA, 25 bp, Homo sapien
acctggctatacacagaattttgta

SEQ ID NO: 951663 - DNA, 25 bp, Homo sapien
tctttaatcttaatccaaaatgctg

SEQ ID NO: 951664 - DNA, 25 bp, Homo sapien
catatctggtgcactattgagccta

SEQ ID NO: 951665 - DNA, 25 bp, Homo sapien
taaccgtgtcaagattgaaaatcct

SEQ ID NO: 951666 - DNA, 25 bp, Homo sapien
cctagttcacacaaatatgtagttg

SEQ ID NO: 951667 - DNA, 25 bp, Homo sapien
cgagaagtcggctattcagtgagct

SEQ ID NO: 951668 - DNA, 25 bp, Homo sapien
ttgtagagcgactgagaacttgtgg

SEQ ID NO: 951669 - DNA, 25 bp, Homo sapien
ggactgcagccgtgtaataagcatt

SEQ ID NO: 951670 - DNA, 25 bp, Homo sapien
gattgcaaagtctataccggactgc

SEQ ID NO: 951671 - DNA, 25 bp, Homo sapien
gagacaaatctgtagtatcccttga

SEQ ID NO: 951672 - DNA, 25 bp, Homo sapien
gtaccccctggagacaaatctgtag

SEQ ID NO: 951673 - DNA, 25 bp, Homo sapien
aatctgtagtatcccttgattcagg

SEQ ID NO: 951674 - DNA, 25 bp, Homo sapien
ttcactatcacgatgccttccatct

SEQ ID NO: 951675 - DNA, 25 bp, Homo sapien
ccaaatagggtctgttttgcagggc

SEQ ID NO: 951676 - DNA, 25 bp, Homo sapien
tgcagggctgtcctttgtgacctag

SEQ ID NO: 951677 - DNA, 25 bp, Homo sapien
cctaggttttatgagatcaggtttt

SEQ ID NO: 951678 - DNA, 25 bp, Homo sapien
gctgtcctttgtgacctaggtttta

SEQ ID NO: 951679 - DNA, 25 bp, Homo sapien
aacatcacacagtggggcctgtcat

SEQ ID NO: 951680 - DNA, 25 bp, Homo sapien
ctgcatgttctcattcacaggtggg

SEQ ID NO: 951681 - DNA, 25 bp, Homo sapien
tgttctcattcacaggtgggaactg

SEQ ID NO: 951682 - DNA, 25 bp, Homo sapien
cactgcatgttctcattcacaggtg

SEQ ID NO: 951683 - DNA, 25 bp, Homo sapien
aagtctgggatgctgggatagaagg

SEQ ID NO: 951684 - DNA, 25 bp, Homo sapien
gactttggggaccaggagcactaga

SEQ ID NO: 951685 - DNA, 25 bp, Homo sapien
agccatgcacgtccaactctgtccc

SEQ ID NO: 951686 - DNA, 25 bp, Homo sapien
ggcacggacccgcttccactccgtc

SEQ ID NO: 951687 - DNA, 25 bp, Homo sapien
tccagatttcggagcgaggaggcac

SEQ ID NO: 951688 - DNA, 25 bp, Homo sapien
catcttaatcgcaatttagcccagt

SEQ ID NO: 951689 - DNA, 25 bp, Homo sapien
tgcacatagtcctactggagacaca

SEQ ID NO: 951690 - DNA, 25 bp, Homo sapien
gaggctactcctgtatgcacatagt

SEQ ID NO: 951691 - DNA, 25 bp, Homo sapien
gagggtgcaaggtggaacaactttc

SEQ ID NO: 951692 - DNA, 25 bp, Homo sapien
gtgcccatatcttcaggtttctgta

SEQ ID NO: 951693 - DNA, 25 bp, Homo sapien
cactgggtactactagcatttgtca

SEQ ID NO: 951694 - DNA, 25 bp, Homo sapien
taggtcacctaatacatgtgttgga

SEQ ID NO: 951695 - DNA, 25 bp, Homo sapien
gctactcacggaagcgggaccatta

SEQ ID NO: 951696 - DNA, 25 bp, Homo sapien
tatgccttgcagatctagcttcacc

SEQ ID NO: 951697 - DNA, 25 bp, Homo sapien
ccaaggacctactgagatttcgatc

SEQ ID NO: 951698 - DNA, 25 bp, Homo sapien
tagattttagtcttcccaccaggga

SEQ ID NO: 951699 - DNA, 25 bp, Homo sapien
tcgcagtcattgttggtataacggc

SEQ ID NO: 951700 - DNA, 25 bp, Homo sapien
cgtggaaaagctgcgaaaacgagcc

SEQ ID NO: 951701 - DNA, 25 bp, Homo sapien
gagacgcccagtgagttagcatgga

SEQ ID NO: 951702 - DNA, 25 bp, Homo sapien
gccgcctccttgcagggagtctcaa

SEQ ID NO: 951703 - DNA, 25 bp, Homo sapien
cttgttttgccttcacgggagtaga

SEQ ID NO: 951704 - DNA, 25 bp, Homo sapien
ggttcattcacctcgcggaccgagg

SEQ ID NO: 951705 - DNA, 25 bp, Homo sapien
cctggtgcgagctggtctgtatgtc

SEQ ID NO: 951706 - DNA, 25 bp, Homo sapien
ggtagttcgcttccccgagagtgcg

SEQ ID NO: 951707 - DNA, 25 bp, Homo sapien
ggtctagctggtctgagttagcgaa

SEQ ID NO: 951708 - DNA, 25 bp, Homo sapien
cgttgctctcaggattccgggaaaa

SEQ ID NO: 951709 - DNA, 25 bp, Homo sapien
gctctcaggattccgggaaaaggcc

SEQ ID NO: 951710 - DNA, 25 bp, Homo sapien
gaaaaggccggtctagctggtctga

SEQ ID NO: 951711 - DNA, 25 bp, Homo sapien
caggattcaaggtcttcttatttgt

SEQ ID NO: 951712 - DNA, 25 bp, Homo sapien
ctttgtaggcatacttctccgcctt

SEQ ID NO: 951713 - DNA, 25 bp, Homo sapien
caggctgcccactgggacggttttt

SEQ ID NO: 951714 - DNA, 25 bp, Homo sapien
tcttcttatttgtggggaggcaggc

SEQ ID NO: 951715 - DNA, 25 bp, Homo sapien
ggttctgtacagattgatgcaatta

SEQ ID NO: 951716 - DNA, 25 bp, Homo sapien
acaacctgccccgtatggtgcctaa

SEQ ID NO: 951717 - DNA, 25 bp, Homo sapien
tgtgcccctccttttatgtggcgaa

SEQ ID NO: 951718 - DNA, 25 bp, Homo sapien
ttcctgattaagtgttccttactct

SEQ ID NO: 951719 - DNA, 25 bp, Homo sapien
tgtcaagagaacctgctactaatgc

SEQ ID NO: 951720 - DNA, 25 bp, Homo sapien
ctactaatgctttctttgataggca

SEQ ID NO: 951721 - DNA, 25 bp, Homo sapien
gataggcagtatgataggttggaaa

SEQ ID NO: 951722 - DNA, 25 bp, Homo sapien
aaaaagcattcacgtcaatgtcaag

SEQ ID NO: 951723 - DNA, 25 bp, Homo sapien
ctcttgattcgtttgttggttgatt

SEQ ID NO: 951724 - DNA, 25 bp, Homo sapien
catgcctggtccatagatcctcttg

SEQ ID NO: 951725 - DNA, 25 bp, Homo sapien
atgcctggtccatagatcctcttga

SEQ ID NO: 951726 - DNA, 25 bp, Homo sapien
atagatcctcttgattcgtttgttg

SEQ ID NO: 951727 - DNA, 25 bp, Homo sapien
gcatttaggctagtgccaagaaaac

SEQ ID NO: 951728 - DNA, 25 bp, Homo sapien
tcagggcttgttaggaggcaaaatc

SEQ ID NO: 951729 - DNA, 25 bp, Homo sapien
gcattaccagttattgtaaccttgg

SEQ ID NO: 951730 - DNA, 25 bp, Homo sapien
tgagtgaaaacctagagagctcttg

SEQ ID NO: 951731 - DNA, 25 bp, Homo sapien
tacctggtcccttctatcaaagagt

SEQ ID NO: 951732 - DNA, 25 bp, Homo sapien
gagttgactctaaatgtcccacagg

SEQ ID NO: 951733 - DNA, 25 bp, Homo sapien
gatacttgggcgcacagagttggca

SEQ ID NO: 951734 - DNA, 25 bp, Homo sapien
catgtcaggataagagggaacaact

SEQ ID NO: 951735 - DNA, 25 bp, Homo sapien
gagaaaagccctatacgtgtagtga

SEQ ID NO: 951736 - DNA, 25 bp, Homo sapien
gagctcagcccttactagacatcag

SEQ ID NO: 951737 - DNA, 25 bp, Homo sapien
aagagtcttcagtcgtagtgtccac

SEQ ID NO: 951738 - DNA, 25 bp, Homo sapien
tacctacttgaacatcagagggtcc

SEQ ID NO: 951739 - DNA, 25 bp, Homo sapien
tctgcgaagaagacatgataaggac

SEQ ID NO: 951740 - DNA, 25 bp, Homo sapien
ttaggcctgctctttactagggatc

SEQ ID NO: 951741 - DNA, 25 bp, Homo sapien
gataaggacatcagggagccaacaa

SEQ ID NO: 951742 - DNA, 25 bp, Homo sapien
taaaacacatcgacgtaagtagctc

SEQ ID NO: 951743 - DNA, 25 bp, Homo sapien
gtcacgtatggtgactgaaacagga

SEQ ID NO: 951744 - DNA, 25 bp, Homo sapien
cacatgtatgcgtttggtttaggaa

SEQ ID NO: 951745 - DNA, 25 bp, Homo sapien
cccttatgtatagagaccagtagtc

SEQ ID NO: 951746 - DNA, 25 bp, Homo sapien
tgtcaaacatgtatacccttatgta

SEQ ID NO: 951747 - DNA, 25 bp, Homo sapien
tgttacataccaagtgcagctctgg

SEQ ID NO: 951748 - DNA, 25 bp, Homo sapien
tatgagcaggccagggttcaaatgc

SEQ ID NO: 951749 - DNA, 25 bp, Homo sapien
tagatgccctcgctctggtatgagc

SEQ ID NO: 951750 - DNA, 25 bp, Homo sapien
tacaacctgggcataatgaaagcat

SEQ ID NO: 951751 - DNA, 25 bp, Homo sapien
cctggcagagttcctgcagtcacgg

SEQ ID NO: 951752 - DNA, 25 bp, Homo sapien
tcggccccgtagcggctggaaacgc

SEQ ID NO: 951753 - DNA, 25 bp, Homo sapien
cccgtagcggctggaaacgcagttg

SEQ ID NO: 951754 - DNA, 25 bp, Homo sapien
ggcagagttcctgcagtcacggtca

SEQ ID NO: 951755 - DNA, 25 bp, Homo sapien
cagtgtgaaacactggatgtcagta

SEQ ID NO: 951756 - DNA, 25 bp, Homo sapien
ccctggatgtcagtagtaatatcat

SEQ ID NO: 951757 - DNA, 25 bp, Homo sapien
tgttaacactgcattatcaccctgg

SEQ ID NO: 951758 - DNA, 25 bp, Homo sapien
taatatcacagggtgctaacacagt

SEQ ID NO: 951759 - DNA, 25 bp, Homo sapien
tgaatccccaccattggcctacatt

SEQ ID NO: 951760 - DNA, 25 bp, Homo sapien
cccaccattggcctacattgggagt

SEQ ID NO: 951761 - DNA, 25 bp, Homo sapien
aatccccaccattggcctacattgg

SEQ ID NO: 951762 - DNA, 25 bp, Homo sapien
accattggcctacattgggagtggg

SEQ ID NO: 951763 - DNA, 25 bp, Homo sapien
ctgcatggggattgggtagaggccc

SEQ ID NO: 951764 - DNA, 25 bp, Homo sapien
tgcatggggattgggtagaggcccc

SEQ ID NO: 951765 - DNA, 25 bp, Homo sapien
catggggattgggtagaggccccag

SEQ ID NO: 951766 - DNA, 25 bp, Homo sapien
gtctgcatggggattgggtagaggc

SEQ ID NO: 951767 - DNA, 25 bp, Homo sapien
gatgctgacgttagaggacaaggac

SEQ ID NO: 951768 - DNA, 25 bp, Homo sapien
tcccttctgggtgcgactgacaaac

SEQ ID NO: 951769 - DNA, 25 bp, Homo sapien
tgacaaacgaggagtcccacgaagt

SEQ ID NO: 951770 - DNA, 25 bp, Homo sapien
tacctgattatactggtggtctcca

SEQ ID NO: 951771 - DNA, 25 bp, Homo sapien
tcttggctttcgtcaccaccttcat

SEQ ID NO: 951772 - DNA, 25 bp, Homo sapien
atgccctttgcatccgagttcttcc

SEQ ID NO: 951773 - DNA, 25 bp, Homo sapien
cgagttcttcccgaggacctggaag

SEQ ID NO: 951774 - DNA, 25 bp, Homo sapien
tacatcatcctcggccgggttttcc

SEQ ID NO: 951775 - DNA, 25 bp, Homo sapien
tggctttggtgctgcatgccctgga

SEQ ID NO: 951776 - DNA, 25 bp, Homo sapien
tgctgtggccttactacgtgctggg

SEQ ID NO: 951777 - DNA, 25 bp, Homo sapien
ctctgaggatgaagctcggccccct

SEQ ID NO: 951778 - DNA, 25 bp, Homo sapien
cccctgcagttctccgtgctgtggc

SEQ ID NO: 951779 - DNA, 25 bp, Homo sapien
ggagcctgtacctggacaatctgga

SEQ ID NO: 951780 - DNA, 25 bp, Homo sapien
gcccttgctggcacttgttgtccac

SEQ ID NO: 951781 - DNA, 25 bp, Homo sapien
acttcccagagtatggaggaggacc

SEQ ID NO: 951782 - DNA, 25 bp, Homo sapien
gggaggagaaccgagctcagtacaa

SEQ ID NO: 951783 - DNA, 25 bp, Homo sapien
gtcctttgcaagagaaactctgttt

SEQ ID NO: 951784 - DNA, 25 bp, Homo sapien
tgagggaggctgttgtcctttgcaa

SEQ ID NO: 951785 - DNA, 25 bp, Homo sapien
catgtgccgtgctgctgggtaatga

SEQ ID NO: 951786 - DNA, 25 bp, Homo sapien
tcacattgtgatgatgctgtacacc

SEQ ID NO: 951787 - DNA, 25 bp, Homo sapien
aggctataattacctgctccagtca

SEQ ID NO: 951788 - DNA, 25 bp, Homo sapien
ttaactacatcaattataaacctct

SEQ ID NO: 951789 - DNA, 25 bp, Homo sapien
tgttcaatttaactacatcaattat

SEQ ID NO: 951790 - DNA, 25 bp, Homo sapien
tttttctgcaggctataattacctg

SEQ ID NO: 951791 - DNA, 25 bp, Homo sapien
tgtagttagaggttaaccatgtgag

SEQ ID NO: 951792 - DNA, 25 bp, Homo sapien
gttagaggttaaccatgtgagcccc

SEQ ID NO: 951793 - DNA, 25 bp, Homo sapien
gatttgtagttagaggttaaccatg

SEQ ID NO: 951794 - DNA, 25 bp, Homo sapien
agaggttaaccatgtgagcccctca

SEQ ID NO: 951795 - DNA, 25 bp, Homo sapien
gaagatgaggattatggcatccctc

SEQ ID NO: 951796 - DNA, 25 bp, Homo sapien
gtttcatggcatcgggcaggtcctg

SEQ ID NO: 951797 - DNA, 25 bp, Homo sapien
agggctgcccataccagttcctgtc

SEQ ID NO: 951798 - DNA, 25 bp, Homo sapien
ccggtcattgataatgtggtgcagc

SEQ ID NO: 951799 - DNA, 25 bp, Homo sapien
ggtgcggtggcagtcggcacagtcc

SEQ ID NO: 951800 - DNA, 25 bp, Homo sapien
aagcctcatcggtgcggtggcagtc

SEQ ID NO: 951801 - DNA, 25 bp, Homo sapien
ctggcaagcctcatcggtgcggtgg

SEQ ID NO: 951802 - DNA, 25 bp, Homo sapien
cagtgtagttatgccgcgagagcgc

SEQ ID NO: 951803 - DNA, 25 bp, Homo sapien
actgtctccacgttgaaacccacag

SEQ ID NO: 951804 - DNA, 25 bp, Homo sapien
acccacagtgggaattgtggtcacc

SEQ ID NO: 951805 - DNA, 25 bp, Homo sapien
cacagtgggaattgtggtcaccgac

SEQ ID NO: 951806 - DNA, 25 bp, Homo sapien
ggaattgtggtcaccgactggccca

SEQ ID NO: 951807 - DNA, 25 bp, Homo sapien
catccaggcgcaacatgaggatcca

SEQ ID NO: 951808 - DNA, 25 bp, Homo sapien
atccaggcgcaacatgaggatccac

SEQ ID NO: 951809 - DNA, 25 bp, Homo sapien
caccaggtgctgtgatagattcttc

SEQ ID NO: 951810 - DNA, 25 bp, Homo sapien
cattagctatagcagcacacttgta

SEQ ID NO: 951811 - DNA, 25 bp, Homo sapien
cagtgtttgctgtcatcgtccttgt

SEQ ID NO: 951812 - DNA, 25 bp, Homo sapien
tgagtcattgttttacaccaggtgc

SEQ ID NO: 951813 - DNA, 25 bp, Homo sapien
tggggcacagctttcttgaagacca

SEQ ID NO: 951814 - DNA, 25 bp, Homo sapien
tctggggcacagctttcttgaagac

SEQ ID NO: 951815 - DNA, 25 bp, Homo sapien
ggggcacagctttcttgaagaccaa

SEQ ID NO: 951816 - DNA, 25 bp, Homo sapien
ctggggcacagctttcttgaagacc

SEQ ID NO: 951817 - DNA, 25 bp, Homo sapien
tttctggttgaagaagtccttgcgt

SEQ ID NO: 951818 - DNA, 25 bp, Homo sapien
tcttgaatccacctttagaacaatg

SEQ ID NO: 951819 - DNA, 25 bp, Homo sapien
tcattctccacttagggttccatct

SEQ ID NO: 951820 - DNA, 25 bp, Homo sapien
gtccttgcgtgtctaatttcaaggg

SEQ ID NO: 951821 - DNA, 25 bp, Homo sapien
gggagccaccaacagagtaacattc

SEQ ID NO: 951822 - DNA, 25 bp, Homo sapien
attgccatggatacaaagaagtgcc

SEQ ID NO: 951823 - DNA, 25 bp, Homo sapien
tggcttccaagcgtagtgcaaacgg

SEQ ID NO: 951824 - DNA, 25 bp, Homo sapien
tccagagtctagtaacccttcccag

SEQ ID NO: 951825 - DNA, 25 bp, Homo sapien
ggtagtccttcatatccaccagaaa

SEQ ID NO: 951826 - DNA, 25 bp, Homo sapien
ggcttcacgtgagaactaatcaggg

SEQ ID NO: 951827 - DNA, 25 bp, Homo sapien
gggttcacccgacagcatgacagaa

SEQ ID NO: 951828 - DNA, 25 bp, Homo sapien
tatcacctggaacataaggtcaagg

SEQ ID NO: 951829 - DNA, 25 bp, Homo sapien
aatatacagctagtggttgagaacc

SEQ ID NO: 951830 - DNA, 25 bp, Homo sapien
gagaaccactgtcatgagagagctt

SEQ ID NO: 951831 - DNA, 25 bp, Homo sapien
ctggtgattccaatatacagctagt

SEQ ID NO: 951832 - DNA, 25 bp, Homo sapien
gaaccactgtcatgagagagcttct

SEQ ID NO: 951833 - DNA, 25 bp, Homo sapien
tgtgtatatgtaaggatctatgctg

SEQ ID NO: 951834 - DNA, 25 bp, Homo sapien
gtgtatatgtaaggatctatgctgt

SEQ ID NO: 951835 - DNA, 25 bp, Homo sapien
ctagttccatattggtagattaaat

SEQ ID NO: 951836 - DNA, 25 bp, Homo sapien
tatatccagagtgcgaactgtgcct

SEQ ID NO: 951837 - DNA, 25 bp, Homo sapien
tcaaagtgaagtacagcgagtggtc

SEQ ID NO: 951838 - DNA, 25 bp, Homo sapien
tgcagactccatgctagcactaggg

SEQ ID NO: 951839 - DNA, 25 bp, Homo sapien
gatttcgtattagtgcagccacagg

SEQ ID NO: 951840 - DNA, 25 bp, Homo sapien
gaagagcataagttggaatcaccac

SEQ ID NO: 951841 - DNA, 25 bp, Homo sapien
tctgtaccacggcatcataggtagg

SEQ ID NO: 951842 - DNA, 25 bp, Homo sapien
accaccattgaccctttgggaatga

SEQ ID NO: 951843 - DNA, 25 bp, Homo sapien
catctttcttgcaagtcctctcaag

SEQ ID NO: 951844 - DNA, 25 bp, Homo sapien
aataaaatacaccaaagtcactatc

SEQ ID NO: 951845 - DNA, 25 bp, Homo sapien
aatccttagcatgaccatgtagtgg

SEQ ID NO: 951846 - DNA, 25 bp, Homo sapien
ccaaagtcactatcacctttcaaaa

SEQ ID NO: 951847 - DNA, 25 bp, Homo sapien
tggggctatgaccattaccaccaaa

SEQ ID NO: 951848 - DNA, 25 bp, Homo sapien
gaagagaatagaaccccacactcag

SEQ ID NO: 951849 - DNA, 25 bp, Homo sapien
ggaatagtttcctagttgttgcttc

SEQ ID NO: 951850 - DNA, 25 bp, Homo sapien
ggatgctaccaaggtacacaatttg

SEQ ID NO: 951851 - DNA, 25 bp, Homo sapien
tttgtgtctgcctcacagccacacc

SEQ ID NO: 951852 - DNA, 25 bp, Homo sapien
ccacctacgagtgagaacatacagt

SEQ ID NO: 951853 - DNA, 25 bp, Homo sapien
tacgagtgagaacatacagtgtttg

SEQ ID NO: 951854 - DNA, 25 bp, Homo sapien
cctacgagtgagaacatacagtgtt

SEQ ID NO: 951855 - DNA, 25 bp, Homo sapien
cacctacgagtgagaacatacagtg

SEQ ID NO: 951856 - DNA, 25 bp, Homo sapien
cctatgtgttactttgcacgtgaga

SEQ ID NO: 951857 - DNA, 25 bp, Homo sapien
tttctccttagcctcgatggtcttt

SEQ ID NO: 951858 - DNA, 25 bp, Homo sapien
tgtgttactttgcacgtgagatggg

SEQ ID NO: 951859 - DNA, 25 bp, Homo sapien
atgcagtttctccttagcctcgatg

SEQ ID NO: 951860 - DNA, 25 bp, Homo sapien
tgataacagtaaacaggtgaaccag

SEQ ID NO: 951861 - DNA, 25 bp, Homo sapien
tggttggctatgctctgcccctaga

SEQ ID NO: 951862 - DNA, 25 bp, Homo sapien
aaagatcttatgcttctgccagtag

SEQ ID NO: 951863 - DNA, 25 bp, Homo sapien
cagaacagcggtattggtgacccgc

SEQ ID NO: 951864 - DNA, 25 bp, Homo sapien
gtgaggaggcatttttgctaaggct

SEQ ID NO: 951865 - DNA, 25 bp, Homo sapien
gaggcatttttgctaaggcttcacc

SEQ ID NO: 951866 - DNA, 25 bp, Homo sapien
ggagtggtgaggaggcatttttgct

SEQ ID NO: 951867 - DNA, 25 bp, Homo sapien
ggaatcagtgattatgctttttata

SEQ ID NO: 951868 - DNA, 25 bp, Homo sapien
tgggcaaaactgcatcaatctcctt

SEQ ID NO: 951869 - DNA, 25 bp, Homo sapien
actgggctgcgagctccagatcaga

SEQ ID NO: 951870 - DNA, 25 bp, Homo sapien
agattattgactgggctgcgagctc

SEQ ID NO: 951871 - DNA, 25 bp, Homo sapien
ggccagttcatataaagtgaaggaa

SEQ ID NO: 951872 - DNA, 25 bp, Homo sapien
ctgaaaggagaggaaagacatttta

SEQ ID NO: 951873 - DNA, 25 bp, Homo sapien
tgaaaggagaggaaagacattttag

SEQ ID NO: 951874 - DNA, 25 bp, Homo sapien
caggcaatacaagatctagggtaca

SEQ ID NO: 951875 - DNA, 25 bp, Homo sapien
tatctcaggatgtacaagacagcag

SEQ ID NO: 951876 - DNA, 25 bp, Homo sapien
agttctcagaatggactatctcagg

SEQ ID NO: 951877 - DNA, 25 bp, Homo sapien
tcttatgattacaggttggcctccc

SEQ ID NO: 951878 - DNA, 25 bp, Homo sapien
tgtgggactcagtttctttcgaatt

SEQ ID NO: 951879 - DNA, 25 bp, Homo sapien
tctgggagtcaatcatcagctgaag

SEQ ID NO: 951880 - DNA, 25 bp, Homo sapien
tcagctgaaggaaatctagtcggtg

SEQ ID NO: 951881 - DNA, 25 bp, Homo sapien
gtttctttcgaattctgggagtcaa

SEQ ID NO: 951882 - DNA, 25 bp, Homo sapien
tggtcataactgcttacccaggaag

SEQ ID NO: 951883 - DNA, 25 bp, Homo sapien
gagttgccggttccatctctggtca

SEQ ID NO: 951884 - DNA, 25 bp, Homo sapien
gaagacgtgttacctgagtcaccag

SEQ ID NO: 951885 - DNA, 25 bp, Homo sapien
tggatacagctttctggccaaagag

SEQ ID NO: 951886 - DNA, 25 bp, Homo sapien
gcagtgtccgtatagattaatctcc

SEQ ID NO: 951887 - DNA, 25 bp, Homo sapien
cagcagcttttttgggggagcattt

SEQ ID NO: 951888 - DNA, 25 bp, Homo sapien
ccgtatagattaatctcctgacatt

SEQ ID NO: 951889 - DNA, 25 bp, Homo sapien
ttcttcagcagtgtccgtatagatt

SEQ ID NO: 951890 - DNA, 25 bp, Homo sapien
gttcactccaggctgtgaaacactc

SEQ ID NO: 951891 - DNA, 25 bp, Homo sapien
taccaatctgtgatatgaggaaagc

SEQ ID NO: 951892 - DNA, 25 bp, Homo sapien
gtcagcagtcggcaggtagcctcat

SEQ ID NO: 951893 - DNA, 25 bp, Homo sapien
tttaccacacactacatgtcagcag

SEQ ID NO: 951894 - DNA, 25 bp, Homo sapien
tttgtcgttgaggcgacttttcttc

SEQ ID NO: 951895 - DNA, 25 bp, Homo sapien
ttgtttgtcgttgaggcgacttttc

SEQ ID NO: 951896 - DNA, 25 bp, Homo sapien
tgtttgtcgttgaggcgacttttct

SEQ ID NO: 951897 - DNA, 25 bp, Homo sapien
tagaggcagaaagttgattattgga

SEQ ID NO: 951898 - DNA, 25 bp, Homo sapien
ggcagaaagttgattattggatgct

SEQ ID NO: 951899 - DNA, 25 bp, Homo sapien
tgattattggatgcttagggcagtg

SEQ ID NO: 951900 - DNA, 25 bp, Homo sapien
gaaagttgattattggatgcttagg

SEQ ID NO: 951901 - DNA, 25 bp, Homo sapien
acaatggaattgtaccttttaagtg

SEQ ID NO: 951902 - DNA, 25 bp, Homo sapien
tttacaatagtaatggtcatacata

SEQ ID NO: 951903 - DNA, 25 bp, Homo sapien
agtttacaatagtaatggtcataca

SEQ ID NO: 951904 - DNA, 25 bp, Homo sapien
tacaatagtaatggtcatacatatt

SEQ ID NO: 951905 - DNA, 25 bp, Homo sapien
ccacaaaggggtcttgtggattgtt

SEQ ID NO: 951906 - DNA, 25 bp, Homo sapien
gagagtcgatgttcactccaaatga

SEQ ID NO: 951907 - DNA, 25 bp, Homo sapien
tcgatgttcactccaaatgatgtgc

SEQ ID NO: 951908 - DNA, 25 bp, Homo sapien
tgagagagtcgatgttcactccaaa

SEQ ID NO: 951909 - DNA, 25 bp, Homo sapien
ttaaaatcagcacctcttaccgtcc

SEQ ID NO: 951910 - DNA, 25 bp, Homo sapien
atcagcacctcttaccgtccttcca

SEQ ID NO: 951911 - DNA, 25 bp, Homo sapien
aaattaaaatcagcacctcttaccg

SEQ ID NO: 951912 - DNA, 25 bp, Homo sapien
gaaaattaaaatcagcacctcttac

SEQ ID NO: 951913 - DNA, 25 bp, Homo sapien
tatcagacaactacagtagcatgtg

SEQ ID NO: 951914 - DNA, 25 bp, Homo sapien
gctgagttagactcacctctgaggt

SEQ ID NO: 951915 - DNA, 25 bp, Homo sapien
cagaaggtggttatctggtgccagt

SEQ ID NO: 951916 - DNA, 25 bp, Homo sapien
tgatggagacaccaagctgagttag

SEQ ID NO: 951917 - DNA, 25 bp, Homo sapien
tctccatactgggcaatgatgggga

SEQ ID NO: 951918 - DNA, 25 bp, Homo sapien
aagtttctcaccaatacatctccat

SEQ ID NO: 951919 - DNA, 25 bp, Homo sapien
acatctccatactgggcaatgatgg

SEQ ID NO: 951920 - DNA, 25 bp, Homo sapien
catctccatactgggcaatgatggg

SEQ ID NO: 951921 - DNA, 25 bp, Homo sapien
aatgtgcagactcaagtcccagaag

SEQ ID NO: 951922 - DNA, 25 bp, Homo sapien
tgcagactcaagtcccagaaggata

SEQ ID NO: 951923 - DNA, 25 bp, Homo sapien
gcagactcaagtcccagaaggatat

SEQ ID NO: 951924 - DNA, 25 bp, Homo sapien
tgtgcagactcaagtcccagaagga

SEQ ID NO: 951925 - DNA, 25 bp, Homo sapien
agagatggcacttttcataaatccc

SEQ ID NO: 951926 - DNA, 25 bp, Homo sapien
gagatggcacttttcataaatccca

SEQ ID NO: 951927 - DNA, 25 bp, Homo sapien
tggtgaaggttggagacagcaatga

SEQ ID NO: 951928 - DNA, 25 bp, Homo sapien
ctggtgaaggttggagacagcaatg

SEQ ID NO: 951929 - DNA, 25 bp, Homo sapien
tgcaaggctataggatacaagatca

SEQ ID NO: 951930 - DNA, 25 bp, Homo sapien
tcttactaaagagcatacctgatgt

SEQ ID NO: 951931 - DNA, 25 bp, Homo sapien
gatgtacaggacctctatgctgaaa

SEQ ID NO: 951932 - DNA, 25 bp, Homo sapien
ggcatactatattcacgggatgaaa

SEQ ID NO: 951933 - DNA, 25 bp, Homo sapien
tctggacaaggcagagcgctgctgt

SEQ ID NO: 951934 - DNA, 25 bp, Homo sapien
gagaggacgctattgcagtgccacg

SEQ ID NO: 951935 - DNA, 25 bp, Homo sapien
taactaacaaagagcgagaggacgc

SEQ ID NO: 951936 - DNA, 25 bp, Homo sapien
tgttgaggcaaatagcgaagcactc

SEQ ID NO: 951937 - DNA, 25 bp, Homo sapien
gaagaaatcgaaatgtcaccatgct

SEQ ID NO: 951938 - DNA, 25 bp, Homo sapien
caaaattggtgccagaacttgacaa

SEQ ID NO: 951939 - DNA, 25 bp, Homo sapien
caaggctgtaaatttcacaagggcc

SEQ ID NO: 951940 - DNA, 25 bp, Homo sapien
gatatagctacagatgctgccctgg

SEQ ID NO: 951941 - DNA, 25 bp, Homo sapien
aattttgaaatggaatgcctagagc

SEQ ID NO: 951942 - DNA, 25 bp, Homo sapien
tactggacttttgtaagacctgtct

SEQ ID NO: 951943 - DNA, 25 bp, Homo sapien
tgcaactccattttcagtcgacata

SEQ ID NO: 951944 - DNA, 25 bp, Homo sapien
gcctagagctgcaatctgatgttca

SEQ ID NO: 951945 - DNA, 25 bp, Homo sapien
ttttctgtatcagtgattgcaaact

SEQ ID NO: 951946 - DNA, 25 bp, Homo sapien
gattttgaaagaccctctgaatggg

SEQ ID NO: 951947 - DNA, 25 bp, Homo sapien
ctgtggtggtagatatataatgaaa

SEQ ID NO: 951948 - DNA, 25 bp, Homo sapien
gcaaacttggaacctgttcaatgat

SEQ ID NO: 951949 - DNA, 25 bp, Homo sapien
cagccatagtccacagaaaatgaac

SEQ ID NO: 951950 - DNA, 25 bp, Homo sapien
tatgcctacctttccaaaatggtgt

SEQ ID NO: 951951 - DNA, 25 bp, Homo sapien
gctactagagtcaccacagtgtggt

SEQ ID NO: 951952 - DNA, 25 bp, Homo sapien
gaattgccctatatgatgttaagag

SEQ ID NO: 951953 - DNA, 25 bp, Homo sapien
cttgatggtgctggtcgttgcacaa

SEQ ID NO: 951954 - DNA, 25 bp, Homo sapien
tgacggaatgggtctgcatcttgat

SEQ ID NO: 951955 - DNA, 25 bp, Homo sapien
tgatggtgctggtcgttgcacaaat

SEQ ID NO: 951956 - DNA, 25 bp, Homo sapien
gccacatggtgacggaatgggtctg

SEQ ID NO: 951957 - DNA, 25 bp, Homo sapien
gtaaactatatcaaagtcaatttcc

SEQ ID NO: 951958 - DNA, 25 bp, Homo sapien
atctgaaaagctctgtaaactatat

SEQ ID NO: 951959 - DNA, 25 bp, Homo sapien
ttgcttagaactacccacacacata

SEQ ID NO: 951960 - DNA, 25 bp, Homo sapien
aaattgcttagaactacccacacac

SEQ ID NO: 951961 - DNA, 25 bp, Homo sapien
tctgatcacgtcgggatctgtgatg

SEQ ID NO: 951962 - DNA, 25 bp, Homo sapien
ccagcacagggagttgaccttcata

SEQ ID NO: 951963 - DNA, 25 bp, Homo sapien
atggccagcacagggagttgacctt

SEQ ID NO: 951964 - DNA, 25 bp, Homo sapien
cacagggagttgaccttcatacgtt

SEQ ID NO: 951965 - DNA, 25 bp, Homo sapien
aagccagactttgatcattatgtta

SEQ ID NO: 951966 - DNA, 25 bp, Homo sapien
taaacttcactagcccgattctgca

SEQ ID NO: 951967 - DNA, 25 bp, Homo sapien
tgattaaacttcactagcccgattc

SEQ ID NO: 951968 - DNA, 25 bp, Homo sapien
actagcccgattctgcagctggagc

SEQ ID NO: 951969 - DNA, 25 bp, Homo sapien
gacacacagcaagagtctcacacag

SEQ ID NO: 951970 - DNA, 25 bp, Homo sapien
cccaaggcttcatatgatgaagggt

SEQ ID NO: 951971 - DNA, 25 bp, Homo sapien
tagttcattagggtgtgacacacag

SEQ ID NO: 951972 - DNA, 25 bp, Homo sapien
ttgtacgacacacagcaaccttagg

SEQ ID NO: 951973 - DNA, 25 bp, Homo sapien
tagcccctctgacagggaacagctg

SEQ ID NO: 951974 - DNA, 25 bp, Homo sapien
aaagtggagcataagtggtttccca

SEQ ID NO: 951975 - DNA, 25 bp, Homo sapien
tgaagaagtacaaagaggcaaagct

SEQ ID NO: 951976 - DNA, 25 bp, Homo sapien
caaagtaagtgcaatggtataaacc

SEQ ID NO: 951977 - DNA, 25 bp, Homo sapien
tacctggtgacacatgggatccttg

SEQ ID NO: 951978 - DNA, 25 bp, Homo sapien
acagaaggcgatgctgggagtccct

SEQ ID NO: 951979 - DNA, 25 bp, Homo sapien
cagtagcaggtctatccaatggagg

SEQ ID NO: 951980 - DNA, 25 bp, Homo sapien
gtttataacggcaagcagattccca

SEQ ID NO: 951981 - DNA, 25 bp, Homo sapien
tttccatactttttatagcactctg

SEQ ID NO: 951982 - DNA, 25 bp, Homo sapien
aaacagttgcgtccaatgaaatcag

SEQ ID NO: 951983 - DNA, 25 bp, Homo sapien
gttgaaggaagctattcagagatgt

SEQ ID NO: 951984 - DNA, 25 bp, Homo sapien
ctttcactggcagttgaaggaagct

SEQ ID NO: 951985 - DNA, 25 bp, Homo sapien
aatcaggcctgctatctttcactgg

SEQ ID NO: 951986 - DNA, 25 bp, Homo sapien
gcaaattacaatgcgtgctctgagc

SEQ ID NO: 951987 - DNA, 25 bp, Homo sapien
cgtgaatgatcacctgcaagggcag

SEQ ID NO: 951988 - DNA, 25 bp, Homo sapien
tcagctgtgatgttttaaccatgca

SEQ ID NO: 951989 - DNA, 25 bp, Homo sapien
tctactacaagagttgatctgggaa

SEQ ID NO: 951990 - DNA, 25 bp, Homo sapien
aacctcagaactccctcccaaggag

SEQ ID NO: 951991 - DNA, 25 bp, Homo sapien
gcatttttactgatggaactaagct

SEQ ID NO: 951992 - DNA, 25 bp, Homo sapien
aagctgatgtttgcaaccataagaa

SEQ ID NO: 951993 - DNA, 25 bp, Homo sapien
gcaaaagaggaagctcaagcaactc

SEQ ID NO: 951994 - DNA, 25 bp, Homo sapien
aaaagtccatgtgtacgggtcccat

SEQ ID NO: 951995 - DNA, 25 bp, Homo sapien
aaagtccatgtgtacgggtcccata

SEQ ID NO: 951996 - DNA, 25 bp, Homo sapien
aagtccatgtgtacgggtcccatat

SEQ ID NO: 951997 - DNA, 25 bp, Homo sapien
gagttactcaggaactggaatggtc

SEQ ID NO: 951998 - DNA, 25 bp, Homo sapien
gtaattgcattcactcatcaggtcc

SEQ ID NO: 951999 - DNA, 25 bp, Homo sapien
tctgtttagtaagtggactcttcgc

SEQ ID NO: 952000 - DNA, 25 bp, Homo sapien
caatcctggagtgaatacttgataa

SEQ ID NO: 952001 - DNA, 25 bp, Homo sapien
cactgcctctgtacgtgaagtatct

SEQ ID NO: 952002 - DNA, 25 bp, Homo sapien
cagttcactgcctctgtacgtgaag

SEQ ID NO: 952003 - DNA, 25 bp, Homo sapien
ttttcaaggtggtcaaccagaaagc

SEQ ID NO: 952004 - DNA, 25 bp, Homo sapien
aggtggtcaaccagaaagcagtcag

SEQ ID NO: 952005 - DNA, 25 bp, Homo sapien
tccaccgccaaatttgggatgaggt

SEQ ID NO: 952006 - DNA, 25 bp, Homo sapien
ttccaccgccaaatttgggatgagg

SEQ ID NO: 952007 - DNA, 25 bp, Homo sapien
ccaccgccaaatttgggatgaggtc

SEQ ID NO: 952008 - DNA, 25 bp, Homo sapien
cttttagctgagtgctgctgtttgc

SEQ ID NO: 952009 - DNA, 25 bp, Homo sapien
ttttagctgagtgctgctgtttgct

SEQ ID NO: 952010 - DNA, 25 bp, Homo sapien
ctcagcctcctgggtagctgagatt

SEQ ID NO: 952011 - DNA, 25 bp, Homo sapien
gagtgtaatggtgcgtctcggctca

SEQ ID NO: 952012 - DNA, 25 bp, Homo sapien
ctgagattataggtgcataccacca

SEQ ID NO: 952013 - DNA, 25 bp, Homo sapien
accaccacacctagctaatttttgt

SEQ ID NO: 952014 - DNA, 25 bp, Homo sapien
ctggttgaagaagtcctcctaagcg

SEQ ID NO: 952015 - DNA, 25 bp, Homo sapien
tgactcaacctttagaacaatgggt

SEQ ID NO: 952016 - DNA, 25 bp, Homo sapien
gaagtcctcctaagcgtaatttcag

SEQ ID NO: 952017 - DNA, 25 bp, Homo sapien
ctcctaagcgtaatttcagcgggat

SEQ ID NO: 952018 - DNA, 25 bp, Homo sapien
gatggtaggacaaagtagttcccaa

SEQ ID NO: 952019 - DNA, 25 bp, Homo sapien
tgtgaatgggctccatatctacaaa

SEQ ID NO: 952020 - DNA, 25 bp, Homo sapien
catgtgaatgggctccatatctaca

SEQ ID NO: 952021 - DNA, 25 bp, Homo sapien
tcacctgatggtaggacaaagtagt

SEQ ID NO: 952022 - DNA, 25 bp, Homo sapien
tttagtaagtggactcttccctgat

SEQ ID NO: 952023 - DNA, 25 bp, Homo sapien
ctatttagtaagtggactcttccct

SEQ ID NO: 952024 - DNA, 25 bp, Homo sapien
tatttagtaagtggactcttccctg

SEQ ID NO: 952025 - DNA, 25 bp, Homo sapien
tagtaagtggactcttccctgattt

SEQ ID NO: 952026 - DNA, 25 bp, Homo sapien
ccaccgccaaatttgggatgaggtc

SEQ ID NO: 952027 - DNA, 25 bp, Homo sapien
tccaccgccaaatttgggatgaggt

SEQ ID NO: 952028 - DNA, 25 bp, Homo sapien
ttccaccgccaaatttgggatgagg

SEQ ID NO: 952029 - DNA, 25 bp, Homo sapien
ccagaaatatcaggggagatgggct

SEQ ID NO: 952030 - DNA, 25 bp, Homo sapien
tactggcttcagttgtatgttacaa

SEQ ID NO: 952031 - DNA, 25 bp, Homo sapien
taatactggcttcagttgtatgtta

SEQ ID NO: 952032 - DNA, 25 bp, Homo sapien
tgcatttagacagttgggagttgag

SEQ ID NO: 952033 - DNA, 25 bp, Homo sapien
taaacaatgggcaaagtcatagtgg

SEQ ID NO: 952034 - DNA, 25 bp, Homo sapien
ctatgttaataatcaaattgggctg

SEQ ID NO: 952035 - DNA, 25 bp, Homo sapien
tagtgggttaactctcacctatgtt

SEQ ID NO: 952036 - DNA, 25 bp, Homo sapien
tgttaataatcaaattgggctgggc

SEQ ID NO: 952037 - DNA, 25 bp, Homo sapien
ttcagttctatagatttctccttaa

SEQ ID NO: 952038 - DNA, 25 bp, Homo sapien
ataacacatgatataaatgtcactg

SEQ ID NO: 952039 - DNA, 25 bp, Homo sapien
taacacatgatataaatgtcactgt

SEQ ID NO: 952040 - DNA, 25 bp, Homo sapien
tataacacatgatataaatgtcact

SEQ ID NO: 952041 - DNA, 25 bp, Homo sapien
gctcaggaggagttaatggtgctaa

SEQ ID NO: 952042 - DNA, 25 bp, Homo sapien
tttttattaatgattgtggttgaaa

SEQ ID NO: 952043 - DNA, 25 bp, Homo sapien
atgattgtggttgaaattattgaga

SEQ ID NO: 952044 - DNA, 25 bp, Homo sapien
gttaattatgttatcagagctcagg

SEQ ID NO: 952045 - DNA, 25 bp, Homo sapien
gatagtcctatgagaagcagagaag

SEQ ID NO: 952046 - DNA, 25 bp, Homo sapien
acaatgcacgtacagaatccccgat

SEQ ID NO: 952047 - DNA, 25 bp, Homo sapien
tatgcagcacattggatgaagcccg

SEQ ID NO: 952048 - DNA, 25 bp, Homo sapien
tatacagaccatgagagagcacaat

SEQ ID NO: 952049 - DNA, 25 bp, Homo sapien
tttctgttagaagaagtcctccaaa

SEQ ID NO: 952050 - DNA, 25 bp, Homo sapien
ttttctgttagaagaagtcctccaa

SEQ ID NO: 952051 - DNA, 25 bp, Homo sapien
tagagcaagtttcatgttcacgaga

SEQ ID NO: 952052 - DNA, 25 bp, Homo sapien
gagcaagtttcatgttcacgagagc

SEQ ID NO: 952053 - DNA, 25 bp, Homo sapien
agcaagtttcatgttcacgagagca

SEQ ID NO: 952054 - DNA, 25 bp, Homo sapien
agagcaagtttcatgttcacgagag

SEQ ID NO: 952055 - DNA, 25 bp, Homo sapien
tgatggaaagcagtgtcatcactgc

SEQ ID NO: 952056 - DNA, 25 bp, Homo sapien
aatttgattcctgaagatttgagta

SEQ ID NO: 952057 - DNA, 25 bp, Homo sapien
cctccatagaatagtttaagtcaga

SEQ ID NO: 952058 - DNA, 25 bp, Homo sapien
tttacacaggcatatgatgctactg

SEQ ID NO: 952059 - DNA, 25 bp, Homo sapien
tgatgaagaacatagcttggaatca

SEQ ID NO: 952060 - DNA, 25 bp, Homo sapien
ttgggtcatgatgaagaacatagct

SEQ ID NO: 952061 - DNA, 25 bp, Homo sapien
catgtcaagatactccaactgtagc

SEQ ID NO: 952062 - DNA, 25 bp, Homo sapien
ggtcatgatgaagaacatagcttgg

SEQ ID NO: 952063 - DNA, 25 bp, Homo sapien
actcagtccatgtagtactgttgaa

SEQ ID NO: 952064 - DNA, 25 bp, Homo sapien
taactcagtccatgtagtactgttg

SEQ ID NO: 952065 - DNA, 25 bp, Homo sapien
aactcagtccatgtagtactgttga

SEQ ID NO: 952066 - DNA, 25 bp, Homo sapien
aagataattgattgggccatgagct

SEQ ID NO: 952067 - DNA, 25 bp, Homo sapien
aaagataattgattgggccatgagc

SEQ ID NO: 952068 - DNA, 25 bp, Homo sapien
gataattgattgggccatgagctcc

SEQ ID NO: 952069 - DNA, 25 bp, Homo sapien
agataattgattgggccatgagctc

SEQ ID NO: 952070 - DNA, 25 bp, Homo sapien
tgggtctcagagtcttttgaattct

SEQ ID NO: 952071 - DNA, 25 bp, Homo sapien
gggtctcagagtcttttgaattctg

SEQ ID NO: 952072 - DNA, 25 bp, Homo sapien
gtgggtctcagagtcttttgaattc

SEQ ID NO: 952073 - DNA, 25 bp, Homo sapien
ggtctcagagtcttttgaattctga

SEQ ID NO: 952074 - DNA, 25 bp, Homo sapien
tctgttcactcgaggctgtcagagg

SEQ ID NO: 952075 - DNA, 25 bp, Homo sapien
ggcctgataggaccttttgttggag

SEQ ID NO: 952076 - DNA, 25 bp, Homo sapien
tacagggaagtgcaccgatcatatg

SEQ ID NO: 952077 - DNA, 25 bp, Homo sapien
cactacacttcagcaggtggcctga

SEQ ID NO: 952078 - DNA, 25 bp, Homo sapien
tttgaggcgaccttcttttatctgt

SEQ ID NO: 952079 - DNA, 25 bp, Homo sapien
tgtgtctctttgaggcgaccttctt

SEQ ID NO: 952080 - DNA, 25 bp, Homo sapien
tttgtgtctctttgaggcgaccttc

SEQ ID NO: 952081 - DNA, 25 bp, Homo sapien
tctctttgaggcgaccttcttttat

SEQ ID NO: 952082 - DNA, 25 bp, Homo sapien
aacacagtgatatttaatgcttcaa

SEQ ID NO: 952083 - DNA, 25 bp, Homo sapien
ggaaacacagtgatatttaatgctt

SEQ ID NO: 952084 - DNA, 25 bp, Homo sapien
taatgcttcaagaattggggtaagg

SEQ ID NO: 952085 - DNA, 25 bp, Homo sapien
gatatttaatgcttcaagaattggg

SEQ ID NO: 952086 - DNA, 25 bp, Homo sapien
tgggaaactcacacatacgtggaag

SEQ ID NO: 952087 - DNA, 25 bp, Homo sapien
tgggctagggtctcttaggataacc

SEQ ID NO: 952088 - DNA, 25 bp, Homo sapien
ttatatacgacaacaggatttctgg

SEQ ID NO: 952089 - DNA, 25 bp, Homo sapien
gaagggcaaactaagcctgaagcca

SEQ ID NO: 952090 - DNA, 25 bp, Homo sapien
gagaacgaatggatctaatggatta

SEQ ID NO: 952091 - DNA, 25 bp, Homo sapien
acgaatggatctaatggattaaatc

SEQ ID NO: 952092 - DNA, 25 bp, Homo sapien
gagagaacgaatggatctaatggat

SEQ ID NO: 952093 - DNA, 25 bp, Homo sapien
gaacgaatggatctaatggattaaa

SEQ ID NO: 952094 - DNA, 25 bp, Homo sapien
gagtgaccacatatcccctgtctgc

SEQ ID NO: 952095 - DNA, 25 bp, Homo sapien
ggtgacattgcctgactacagactc

SEQ ID NO: 952096 - DNA, 25 bp, Homo sapien
gaaaattccactatccccagctgtg

SEQ ID NO: 952097 - DNA, 25 bp, Homo sapien
tacagactctatgcccagagccgat

SEQ ID NO: 952098 - DNA, 25 bp, Homo sapien
acatctccatactgggcaatgatag

SEQ ID NO: 952099 - DNA, 25 bp, Homo sapien
ctgcttcccgcctcagatttctcac

SEQ ID NO: 952100 - DNA, 25 bp, Homo sapien
cacatctccatactgggcaatgata

SEQ ID NO: 952101 - DNA, 25 bp, Homo sapien
aacacatctccatactgggcaatga

SEQ ID NO: 952102 - DNA, 25 bp, Homo sapien
gttggagacagcaatgatcgtattc

SEQ ID NO: 952103 - DNA, 25 bp, Homo sapien
gatcatgtcgggatctgtgatagcc

SEQ ID NO: 952104 - DNA, 25 bp, Homo sapien
cactagcactgttttgatcatgtcg

SEQ ID NO: 952105 - DNA, 25 bp, Homo sapien
catgtcgggatctgtgatagccagc

SEQ ID NO: 952106 - DNA, 25 bp, Homo sapien
cgggatctgtgatagccagcatagg

SEQ ID NO: 952107 - DNA, 25 bp, Homo sapien
tctgacacaggagccatccaagtct

SEQ ID NO: 952108 - DNA, 25 bp, Homo sapien
aacagccttatgctacagctggagc

SEQ ID NO: 952109 - DNA, 25 bp, Homo sapien
gccagactttgatccggacattaca

SEQ ID NO: 952110 - DNA, 25 bp, Homo sapien
tgtatgggccatgccagatccacag

SEQ ID NO: 952111 - DNA, 25 bp, Homo sapien
attccatgtcaaacgtccaatagcc

SEQ ID NO: 952112 - DNA, 25 bp, Homo sapien
taacattccatgtcaaacgtccaat

SEQ ID NO: 952113 - DNA, 25 bp, Homo sapien
acattccatgtcaaacgtccaatag

SEQ ID NO: 952114 - DNA, 25 bp, Homo sapien
tttataacattccatgtcaaacgtc

SEQ ID NO: 952115 - DNA, 25 bp, Homo sapien
agaaagttacagacaccagggacct

SEQ ID NO: 952116 - DNA, 25 bp, Homo sapien
aaaatgtcacctctacacatcggag

SEQ ID NO: 952117 - DNA, 25 bp, Homo sapien
tgccctgccccaactgatcgattga

SEQ ID NO: 952118 - DNA, 25 bp, Homo sapien
cattatgacttgttactgccctgcc

SEQ ID NO: 952119 - DNA, 25 bp, Homo sapien
tcctgagagttagcaagagagcccc

SEQ ID NO: 952120 - DNA, 25 bp, Homo sapien
ggtaaactttgccacgctctgggtg

SEQ ID NO: 952121 - DNA, 25 bp, Homo sapien
gatgcctacacgctatttctgaaag

SEQ ID NO: 952122 - DNA, 25 bp, Homo sapien
gtaccttcctgggaacctgcctgga

SEQ ID NO: 952123 - DNA, 25 bp, Homo sapien
caaaaaaggcagaggtgtgggccct

SEQ ID NO: 952124 - DNA, 25 bp, Homo sapien
ttacggaaggacaaagcatttccca

SEQ ID NO: 952125 - DNA, 25 bp, Homo sapien
tgggccctggaattccaagcttctt

SEQ ID NO: 952126 - DNA, 25 bp, Homo sapien
aaagtccatgtgtacgggttccata

SEQ ID NO: 952127 - DNA, 25 bp, Homo sapien
aggagaagccaggtttccacggcca

SEQ ID NO: 952128 - DNA, 25 bp, Homo sapien
tccacggccaagtttgggatgagat

SEQ ID NO: 952129 - DNA, 25 bp, Homo sapien
atagaggagtatcaggctgacagcc

SEQ ID NO: 952130 - DNA, 25 bp, Homo sapien
acggccaagtttgggatgagatcca

SEQ ID NO: 952131 - DNA, 25 bp, Homo sapien
tgagtctttttttcagcagcgtgct

SEQ ID NO: 952132 - DNA, 25 bp, Homo sapien
gtgtgtggagctttcctgccctgca

SEQ ID NO: 952133 - DNA, 25 bp, Homo sapien
tttcagcagcgtgctgctgtttgct

SEQ ID NO: 952134 - DNA, 25 bp, Homo sapien
gctgtgtgtgtggagctttcctgcc

SEQ ID NO: 952135 - DNA, 25 bp, Homo sapien
tcaatgcatgtacagaatccccggt

SEQ ID NO: 952136 - DNA, 25 bp, Homo sapien
taaacaatgggcaaagtcacagtgg

SEQ ID NO: 952137 - DNA, 25 bp, Homo sapien
ttctagttctgacaaaggccccacg

SEQ ID NO: 952138 - DNA, 25 bp, Homo sapien
gaaatagtcccgtgagaagcagagg

SEQ ID NO: 952139 - DNA, 25 bp, Homo sapien
tgaagaagtcctcctaagcttaatt

SEQ ID NO: 952140 - DNA, 25 bp, Homo sapien
taagatgtgtgaagattggacagtg

SEQ ID NO: 952141 - DNA, 25 bp, Homo sapien
ctttatacttagtctataagatgtg

SEQ ID NO: 952142 - DNA, 25 bp, Homo sapien
gcattcatcatctatcatttaacaa

SEQ ID NO: 952143 - DNA, 25 bp, Homo sapien
agtgagagcattcatcatctatcat

SEQ ID NO: 952144 - DNA, 25 bp, Homo sapien
tatatggacagtcttcaacttccag

SEQ ID NO: 952145 - DNA, 25 bp, Homo sapien
accagattattaggtatgatggcaa

SEQ ID NO: 952146 - DNA, 25 bp, Homo sapien
atttaaaccagattattaggtatga

SEQ ID NO: 952147 - DNA, 25 bp, Homo sapien
ttaattatatggacagtcttcaact

SEQ ID NO: 952148 - DNA, 25 bp, Homo sapien
gtatatgtaaggatctatgttgtcc

SEQ ID NO: 952149 - DNA, 25 bp, Homo sapien
gattagagcaagtttcatgttcatg

SEQ ID NO: 952150 - DNA, 25 bp, Homo sapien
tctgaaggactctgattagagcaag

SEQ ID NO: 952151 - DNA, 25 bp, Homo sapien
acttccaaagggtgtgtatatgtaa

SEQ ID NO: 952152 - DNA, 25 bp, Homo sapien
gggccacccctcaactagtagtaca

SEQ ID NO: 952153 - DNA, 25 bp, Homo sapien
gctggtcattgaaatcctgctatgc

SEQ ID NO: 952154 - DNA, 25 bp, Homo sapien
aagtaggttcctgcctcaagtcaca

SEQ ID NO: 952155 - DNA, 25 bp, Homo sapien
cacaggatacttttgtgggctggtc

SEQ ID NO: 952156 - DNA, 25 bp, Homo sapien
aggacataactgatgaccttcatcg

SEQ ID NO: 952157 - DNA, 25 bp, Homo sapien
cgtaagttgttggaattgtggatga

SEQ ID NO: 952158 - DNA, 25 bp, Homo sapien
gatgaccttcatcgtaagttgttgg

SEQ ID NO: 952159 - DNA, 25 bp, Homo sapien
acactgatgacccataaggacataa

SEQ ID NO: 952160 - DNA, 25 bp, Homo sapien
cacggtgaagagcatagcttggaat

SEQ ID NO: 952161 - DNA, 25 bp, Homo sapien
agaccctctcaagtctcatagcaat

SEQ ID NO: 952162 - DNA, 25 bp, Homo sapien
ccctctcaagtctcatagcaattgg

SEQ ID NO: 952163 - DNA, 25 bp, Homo sapien
gaccctctcaagtctcatagcaatt

SEQ ID NO: 952164 - DNA, 25 bp, Homo sapien
accctctcaagtctcatagcaattg

SEQ ID NO: 952165 - DNA, 25 bp, Homo sapien
aagataattgattgggccacgagct

SEQ ID NO: 952166 - DNA, 25 bp, Homo sapien
aaagataattgattgggccacgagc

SEQ ID NO: 952167 - DNA, 25 bp, Homo sapien
agataattgattgggccacgagctc

SEQ ID NO: 952168 - DNA, 25 bp, Homo sapien
ctgatgtgtatcttacagaaccaga

SEQ ID NO: 952169 - DNA, 25 bp, Homo sapien
gaaccagaataaggcaaatcatttt

SEQ ID NO: 952170 - DNA, 25 bp, Homo sapien
aagtgaagccctcaaatccctaagg

SEQ ID NO: 952171 - DNA, 25 bp, Homo sapien
tagggcatcacagtttagatgaaga

SEQ ID NO: 952172 - DNA, 25 bp, Homo sapien
tcttttgaattctgagagtcaatca

SEQ ID NO: 952173 - DNA, 25 bp, Homo sapien
tgaattctgagagtcaatcatcagc

SEQ ID NO: 952174 - DNA, 25 bp, Homo sapien
ctttgtgggactcagtttcttttga

SEQ ID NO: 952175 - DNA, 25 bp, Homo sapien
ctgagagtcaatcatcagctgaagg

SEQ ID NO: 952176 - DNA, 25 bp, Homo sapien
taatacttcaagaattgggatgagg

SEQ ID NO: 952177 - DNA, 25 bp, Homo sapien
tgctagtgatcacatccatgctgta

SEQ ID NO: 952178 - DNA, 25 bp, Homo sapien
tgagagagtcgatgttcactccaaa

SEQ ID NO: 952179 - DNA, 25 bp, Homo sapien
tccaaatgatgtgctagtgatcaca

SEQ ID NO: 952180 - DNA, 25 bp, Homo sapien
tcgatgttcactccaaatgatgtgc

SEQ ID NO: 952181 - DNA, 25 bp, Homo sapien
ggtgttatcaggtgccagtgatgca

SEQ ID NO: 952182 - DNA, 25 bp, Homo sapien
tctgagatcaaggagcccatcatag

SEQ ID NO: 952183 - DNA, 25 bp, Homo sapien
gaactgaattagacctacctctgag

SEQ ID NO: 952184 - DNA, 25 bp, Homo sapien
cacatgtccagtcaagacagacaaa

SEQ ID NO: 952185 - DNA, 25 bp, Homo sapien
gcttaaaactttggtacaatcacac

SEQ ID NO: 952186 - DNA, 25 bp, Homo sapien
taagttctccattataactctccca

SEQ ID NO: 952187 - DNA, 25 bp, Homo sapien
tagatagcaaataataggcttgccc

SEQ ID NO: 952188 - DNA, 25 bp, Homo sapien
tcactgccaaccaacagataccaag

SEQ ID NO: 952189 - DNA, 25 bp, Homo sapien
ttgaagttgcattaccacagccctc

SEQ ID NO: 952190 - DNA, 25 bp, Homo sapien
gaaccccatggctgcgcttctactt

SEQ ID NO: 952191 - DNA, 25 bp, Homo sapien
tgtctggtcactggaataacccaac

SEQ ID NO: 952192 - DNA, 25 bp, Homo sapien
ggttcatgacagctcagaaccccat

SEQ ID NO: 952193 - DNA, 25 bp, Homo sapien
cacatctccatactgggcaatgata

SEQ ID NO: 952194 - DNA, 25 bp, Homo sapien
acatctccatactgggcaatgatag

SEQ ID NO: 952195 - DNA, 25 bp, Homo sapien
ctgcttcccgcctcagatttctcac

SEQ ID NO: 952196 - DNA, 25 bp, Homo sapien
aacacatctccatactgggcaatga

SEQ ID NO: 952197 - DNA, 25 bp, Homo sapien
gatggcacttttcataaatcccact

SEQ ID NO: 952198 - DNA, 25 bp, Homo sapien
tggcacttttcataaatcccactgg

SEQ ID NO: 952199 - DNA, 25 bp, Homo sapien
agagatggcacttttcataaatccc

SEQ ID NO: 952200 - DNA, 25 bp, Homo sapien
tggtgaaggttggagacagcaatga

SEQ ID NO: 952201 - DNA, 25 bp, Homo sapien
cctacatcagttgtggaggtctcca

SEQ ID NO: 952202 - DNA, 25 bp, Homo sapien
gatgggccctatgctagatgctcaa

SEQ ID NO: 952203 - DNA, 25 bp, Homo sapien
caactatttagtgactgtctactgg

SEQ ID NO: 952204 - DNA, 25 bp, Homo sapien
gaggtctccatggttgtagaaaatg

SEQ ID NO: 952205 - DNA, 25 bp, Homo sapien
gatcatgtcaggatctgtgatagcc

SEQ ID NO: 952206 - DNA, 25 bp, Homo sapien
gcactgttttgatcatgtcaggatc

SEQ ID NO: 952207 - DNA, 25 bp, Homo sapien
cactagcactgttttgatcatgtca

SEQ ID NO: 952208 - DNA, 25 bp, Homo sapien
gtcaggatctgtgatagccagcaca

SEQ ID NO: 952209 - DNA, 25 bp, Homo sapien
tttccatactttttatgacattcca

SEQ ID NO: 952210 - DNA, 25 bp, Homo sapien
acattccatgtcaaacatacaaaag

SEQ ID NO: 952211 - DNA, 25 bp, Homo sapien
tttatgacattccatgtcaaacata

SEQ ID NO: 952212 - DNA, 25 bp, Homo sapien
atgacattccatgtcaaacatacaa

SEQ ID NO: 952213 - DNA, 25 bp, Homo sapien
gatgatgtaagccaaagagctgact

SEQ ID NO: 952214 - DNA, 25 bp, Homo sapien
ctgagagaattagaatctgagaaac

SEQ ID NO: 952215 - DNA, 25 bp, Homo sapien
caggtatgtgggaaagatgatgtaa

SEQ ID NO: 952216 - DNA, 25 bp, Homo sapien
actgctgcggctggccatgtggaca

SEQ ID NO: 952217 - DNA, 25 bp, Homo sapien
ctgagatttgggctgttcaactgag

SEQ ID NO: 952218 - DNA, 25 bp, Homo sapien
aaagtttgcacatcaagttctgagc

SEQ ID NO: 952219 - DNA, 25 bp, Homo sapien
aggttgctgatctacctgagatttg

SEQ ID NO: 952220 - DNA, 25 bp, Homo sapien
aaaaccttctttatggcgctcacaa

SEQ ID NO: 952221 - DNA, 25 bp, Homo sapien
cttaaaaagtccatgtgaatgggtt

SEQ ID NO: 952222 - DNA, 25 bp, Homo sapien
ttatggtaggacaaaatatttccca

SEQ ID NO: 952223 - DNA, 25 bp, Homo sapien
aagtccatgtgaatgggttccatat

SEQ ID NO: 952224 - DNA, 25 bp, Homo sapien
tgggccctggaattccaagcttctt

SEQ ID NO: 952225 - DNA, 25 bp, Homo sapien
gctgacagccaggagaagccaggtt

SEQ ID NO: 952226 - DNA, 25 bp, Homo sapien
agatagaggagcaccaggctgacag

SEQ ID NO: 952227 - DNA, 25 bp, Homo sapien
atagaggagcaccaggctgacagcc

SEQ ID NO: 952228 - DNA, 25 bp, Homo sapien
atggccaagtctgggatgagagcca

SEQ ID NO: 952229 - DNA, 25 bp, Homo sapien
ctttgctgggctatgtgcatggagc

SEQ ID NO: 952230 - DNA, 25 bp, Homo sapien
actctagtacggagatgtgttcttg

SEQ ID NO: 952231 - DNA, 25 bp, Homo sapien
tcctgatcatactctagtacggaga

SEQ ID NO: 952232 - DNA, 25 bp, Homo sapien
gttgagatgctcctgatcatactct

SEQ ID NO: 952233 - DNA, 25 bp, Homo sapien
tctttgagtgttgagatgctcctga

SEQ ID NO: 952234 - DNA, 25 bp, Homo sapien
gaattagggagttcacggatgcccc

SEQ ID NO: 952235 - DNA, 25 bp, Homo sapien
taaatcagagaattcaatgtgggcg

SEQ ID NO: 952236 - DNA, 25 bp, Homo sapien
caatagagtgcactgggacctgggt

SEQ ID NO: 952237 - DNA, 25 bp, Homo sapien
gaagtggtagactttccgaggccca

SEQ ID NO: 952238 - DNA, 25 bp, Homo sapien
gacatgcatcagatccatgagggag

SEQ ID NO: 952239 - DNA, 25 bp, Homo sapien
ggtgttgccactcaccgcaataagg

SEQ ID NO: 952240 - DNA, 25 bp, Homo sapien
aagtgctgggttgcacagcccacaa

SEQ ID NO: 952241 - DNA, 25 bp, Homo sapien
gcccctcaaggatgaagtctgccag

SEQ ID NO: 952242 - DNA, 25 bp, Homo sapien
ggaaaagcaccttttgatagaggac

SEQ ID NO: 952243 - DNA, 25 bp, Homo sapien
atactggggtccagtatacccaagg

SEQ ID NO: 952244 - DNA, 25 bp, Homo sapien
ctggaaatactggggtccagtatac

SEQ ID NO: 952245 - DNA, 25 bp, Homo sapien
gaaaagcaccttttgatagaggaca

SEQ ID NO: 952246 - DNA, 25 bp, Homo sapien
tctgattttcatagggcccatggga

SEQ ID NO: 952247 - DNA, 25 bp, Homo sapien
agtattcacctatgcaagcttccag

SEQ ID NO: 952248 - DNA, 25 bp, Homo sapien
caggtatctctttggtatcggcacg

SEQ ID NO: 952249 - DNA, 25 bp, Homo sapien
tacatagcccgtgattaggctggcc

SEQ ID NO: 952250 - DNA, 25 bp, Homo sapien
gtaattgatctatagaacaaacctg

SEQ ID NO: 952251 - DNA, 25 bp, Homo sapien
ttaccctaagcaaaccaacacatga

SEQ ID NO: 952252 - DNA, 25 bp, Homo sapien
taccctaagcaaaccaacacatgaa

SEQ ID NO: 952253 - DNA, 25 bp, Homo sapien
gacatgtaattgatctatagaacaa

SEQ ID NO: 952254 - DNA, 25 bp, Homo sapien
gaaagtctttactgaaaatctggga

SEQ ID NO: 952255 - DNA, 25 bp, Homo sapien
cctgaaagtctttactgaaaatctg

SEQ ID NO: 952256 - DNA, 25 bp, Homo sapien
tgcctgaaagtctttactgaaaatc

SEQ ID NO: 952257 - DNA, 25 bp, Homo sapien
aagtctttactgaaaatctgggaga

SEQ ID NO: 952258 - DNA, 25 bp, Homo sapien
cacaaagggcagataccaaacggta

SEQ ID NO: 952259 - DNA, 25 bp, Homo sapien
catgggactgcctcttgtgaagcac

SEQ ID NO: 952260 - DNA, 25 bp, Homo sapien
cagttacggtacttcaggctgcaag

SEQ ID NO: 952261 - DNA, 25 bp, Homo sapien
tatactgcgggatgttcacactacg

SEQ ID NO: 952262 - DNA, 25 bp, Homo sapien
ttcccagtcccacgatccaggtaaa

SEQ ID NO: 952263 - DNA, 25 bp, Homo sapien
ccggaggcgtgagacagaagaacaa

SEQ ID NO: 952264 - DNA, 25 bp, Homo sapien
ggtgtgcaggtgcactccgtccaca

SEQ ID NO: 952265 - DNA, 25 bp, Homo sapien
ccgtccacagcgctgtagaaggaga

SEQ ID NO: 952266 - DNA, 25 bp, Homo sapien
tatcaagggccaatagccagcagca

SEQ ID NO: 952267 - DNA, 25 bp, Homo sapien
tccagggaagcctatcaagggccaa

SEQ ID NO: 952268 - DNA, 25 bp, Homo sapien
gaagcctatcaagggccaatagcca

SEQ ID NO: 952269 - DNA, 25 bp, Homo sapien
gcactccaataaatcgcccagatgc

SEQ ID NO: 952270 - DNA, 25 bp, Homo sapien
agtaattcccatgacgtcctcccga

SEQ ID NO: 952271 - DNA, 25 bp, Homo sapien
catttttgaacgatcagtaattccc

SEQ ID NO: 952272 - DNA, 25 bp, Homo sapien
ctccatccagcaaagtagttccatg

SEQ ID NO: 952273 - DNA, 25 bp, Homo sapien
gctgtatttttcacgtatctccctt

SEQ ID NO: 952274 - DNA, 25 bp, Homo sapien
ggagaagacgagtttgggatgagct

SEQ ID NO: 952275 - DNA, 25 bp, Homo sapien
agctgtgtcttcagctaggtttaca

SEQ ID NO: 952276 - DNA, 25 bp, Homo sapien
gaagacgagtttgggatgagctgtg

SEQ ID NO: 952277 - DNA, 25 bp, Homo sapien
tgtgtcttcagctaggtttacagcc

SEQ ID NO: 952278 - DNA, 25 bp, Homo sapien
ggtttctaaggatattttgatactg

SEQ ID NO: 952279 - DNA, 25 bp, Homo sapien
aggtgcatcccacaaattctggtat

SEQ ID NO: 952280 - DNA, 25 bp, Homo sapien
tactttgggctttacttgctcctct

SEQ ID NO: 952281 - DNA, 25 bp, Homo sapien
tcttctttccaatatagcactatac

SEQ ID NO: 952282 - DNA, 25 bp, Homo sapien
ggtaatatcctttgctcagaaatct

SEQ ID NO: 952283 - DNA, 25 bp, Homo sapien
tgatactaatatacccactccagat

SEQ ID NO: 952284 - DNA, 25 bp, Homo sapien
tacattctcttgacgaactgaccac

SEQ ID NO: 952285 - DNA, 25 bp, Homo sapien
agtgcagaaatgtttagaacttaca

SEQ ID NO: 952286 - DNA, 25 bp, Homo sapien
caagatgagctgcaactagggagat

SEQ ID NO: 952287 - DNA, 25 bp, Homo sapien
gccttttgattagcgcatgcagacc

SEQ ID NO: 952288 - DNA, 25 bp, Homo sapien
caaggttgagcttgtggcacaggca

SEQ ID NO: 952289 - DNA, 25 bp, Homo sapien
gcacaacaattagcccagcaggagg

SEQ ID NO: 952290 - DNA, 25 bp, Homo sapien
tgtcctggaaccctaagtcctggga

SEQ ID NO: 952291 - DNA, 25 bp, Homo sapien
tataccgctgtggaaatggtgaagc

SEQ ID NO: 952292 - DNA, 25 bp, Homo sapien
gaccccgtgaagagatctagtggca

SEQ ID NO: 952293 - DNA, 25 bp, Homo sapien
gagggtagccctacaagacttgcct

SEQ ID NO: 952294 - DNA, 25 bp, Homo sapien
tgtgtcttactaaatggcttcccct

SEQ ID NO: 952295 - DNA, 25 bp, Homo sapien
tgtattataaaccaggcgccaggcc

SEQ ID NO: 952296 - DNA, 25 bp, Homo sapien
gggacaatcatcctcttatagaaca

SEQ ID NO: 952297 - DNA, 25 bp, Homo sapien
cactgtcttactctggccacttgca

SEQ ID NO: 952298 - DNA, 25 bp, Homo sapien
cattcctggactgccctgcatgtag

SEQ ID NO: 952299 - DNA, 25 bp, Homo sapien
taaaggccatgtgaactcctggtcc

SEQ ID NO: 952300 - DNA, 25 bp, Homo sapien
ccattcaagggtatgctggactgca

SEQ ID NO: 952301 - DNA, 25 bp, Homo sapien
tgcaggcaatacagggaatcgaggc

SEQ ID NO: 952302 - DNA, 25 bp, Homo sapien
tcaacttcgtctttgttccactgca

SEQ ID NO: 952303 - DNA, 25 bp, Homo sapien
gagtttgcttactggcattgtttcc

SEQ ID NO: 952304 - DNA, 25 bp, Homo sapien
gcaagtaactatcctctcccctggt

SEQ ID NO: 952305 - DNA, 25 bp, Homo sapien
tccaatgagaagtgtaatgtcaact

SEQ ID NO: 952306 - DNA, 25 bp, Homo sapien
taggaagctcctccatagatggcga

SEQ ID NO: 952307 - DNA, 25 bp, Homo sapien
taataaggctgcataaagttgtccc

SEQ ID NO: 952308 - DNA, 25 bp, Homo sapien
ccattttggctagaagtgaacaccc

SEQ ID NO: 952309 - DNA, 25 bp, Homo sapien
gagcagcacccagtcaagggctaaa

SEQ ID NO: 952310 - DNA, 25 bp, Homo sapien
gaatcaccagcacagcttctagagc

SEQ ID NO: 952311 - DNA, 25 bp, Homo sapien
tatcactagcaccttgtaacagtgc

SEQ ID NO: 952312 - DNA, 25 bp, Homo sapien
tctccaatgtgcttacgaactcatg

SEQ ID NO: 952313 - DNA, 25 bp, Homo sapien
tagagcatgtacctgccttggtgcc

SEQ ID NO: 952314 - DNA, 25 bp, Homo sapien
ttcatcaatggtatctggcacactg

SEQ ID NO: 952315 - DNA, 25 bp, Homo sapien
ttggaatcgctttagcatttccttc

SEQ ID NO: 952316 - DNA, 25 bp, Homo sapien
cttggaatcgctttagcatttcctt

SEQ ID NO: 952317 - DNA, 25 bp, Homo sapien
cttcacctttacagcttcaagagaa

SEQ ID NO: 952318 - DNA, 25 bp, Homo sapien
caagagaatagttcacatcctggat

SEQ ID NO: 952319 - DNA, 25 bp, Homo sapien
gaatagttcacatcctggatctcac

SEQ ID NO: 952320 - DNA, 25 bp, Homo sapien
cagcttcaagagaatagttcacatc

SEQ ID NO: 952321 - DNA, 25 bp, Homo sapien
cccataagagaacaggagtgcatac

SEQ ID NO: 952322 - DNA, 25 bp, Homo sapien
caggtccccataagagaacaggagt

SEQ ID NO: 952323 - DNA, 25 bp, Homo sapien
atgccacccaggtccccataagaga

SEQ ID NO: 952324 - DNA, 25 bp, Homo sapien
tgccacccaggtccccataagagaa

SEQ ID NO: 952325 - DNA, 25 bp, Homo sapien
gccaagcattccaactcaagaagtt

SEQ ID NO: 952326 - DNA, 25 bp, Homo sapien
ggtaaatataaaggagccaagcatt

SEQ ID NO: 952327 - DNA, 25 bp, Homo sapien
aggagccaagcattccaactcaaga

SEQ ID NO: 952328 - DNA, 25 bp, Homo sapien
gagccaagcattccaactcaagaag

SEQ ID NO: 952329 - DNA, 25 bp, Homo sapien
ccacctctaagatgagcttcttcaa

SEQ ID NO: 952330 - DNA, 25 bp, Homo sapien
caatgaagcgatagtttgattgagt

SEQ ID NO: 952331 - DNA, 25 bp, Homo sapien
gctttgaaaactccgtgctgattct

SEQ ID NO: 952332 - DNA, 25 bp, Homo sapien
tgagttttaacgtgttctcattcag

SEQ ID NO: 952333 - DNA, 25 bp, Homo sapien
ttctacatcctgtaaatgcatgact

SEQ ID NO: 952334 - DNA, 25 bp, Homo sapien
ttcacttctacatcctgtaaatgca

SEQ ID NO: 952335 - DNA, 25 bp, Homo sapien
cacttctacatcctgtaaatgcatg

SEQ ID NO: 952336 - DNA, 25 bp, Homo sapien
tcttcacttctacatcctgtaaatg

SEQ ID NO: 952337 - DNA, 25 bp, Homo sapien
cacgagattacgctgagacttaaga

SEQ ID NO: 952338 - DNA, 25 bp, Homo sapien
gagattacgctgagacttaagaagt

SEQ ID NO: 952339 - DNA, 25 bp, Homo sapien
tggccacgagattacgctgagactt

SEQ ID NO: 952340 - DNA, 25 bp, Homo sapien
cttggccacgagattacgctgagac

SEQ ID NO: 952341 - DNA, 25 bp, Homo sapien
acccaggttagactgcagcggcctg

SEQ ID NO: 952342 - DNA, 25 bp, Homo sapien
aaaatgctgaagacggtcacaggcc

SEQ ID NO: 952343 - DNA, 25 bp, Homo sapien
taaaagtcacctaatcaaaacagag

SEQ ID NO: 952344 - DNA, 25 bp, Homo sapien
aggcatgctccgtcaggtccaacta

SEQ ID NO: 952345 - DNA, 25 bp, Homo sapien
gatatcagggaattccgcccagtga

SEQ ID NO: 952346 - DNA, 25 bp, Homo sapien
gaacacctacgaagtcaaccttgtg

SEQ ID NO: 952347 - DNA, 25 bp, Homo sapien
tccatggatttagggaacttccagc

SEQ ID NO: 952348 - DNA, 25 bp, Homo sapien
ccatccatctgagtatatgctgaga

SEQ ID NO: 952349 - DNA, 25 bp, Homo sapien
tcttccattcatccacgtggatgtc

SEQ ID NO: 952350 - DNA, 25 bp, Homo sapien
tacaagagcagcctaattagtcttc

SEQ ID NO: 952351 - DNA, 25 bp, Homo sapien
tgcttaaaatggtacaagagcagcc

SEQ ID NO: 952352 - DNA, 25 bp, Homo sapien
gagcagcctaattagtcttctcttc

SEQ ID NO: 952353 - DNA, 25 bp, Homo sapien
ttggccaggaaagcttgctcacgcc

SEQ ID NO: 952354 - DNA, 25 bp, Homo sapien
tccagaagtactgagcaacctccag

SEQ ID NO: 952355 - DNA, 25 bp, Homo sapien
gatccttcatgataaggccctgcct

SEQ ID NO: 952356 - DNA, 25 bp, Homo sapien
taatgttgtacacgcttaagttcct

SEQ ID NO: 952357 - DNA, 25 bp, Homo sapien
ttagccatacaagcacctgaaacgt

SEQ ID NO: 952358 - DNA, 25 bp, Homo sapien
gacatttacagatacagacaggcac

SEQ ID NO: 952359 - DNA, 25 bp, Homo sapien
aaaatatctcattgaggccgggcgt

SEQ ID NO: 952360 - DNA, 25 bp, Homo sapien
ccatgagataggacagataatcccc

SEQ ID NO: 952361 - DNA, 25 bp, Homo sapien
tgcttccagtaggaatgacagccac

SEQ ID NO: 952362 - DNA, 25 bp, Homo sapien
aagtaaactttatcgggcaacactg

SEQ ID NO: 952363 - DNA, 25 bp, Homo sapien
ttaaccctagctctgaaattcgtgt

SEQ ID NO: 952364 - DNA, 25 bp, Homo sapien
ccacttcgtggctcttttaggagca

SEQ ID NO: 952365 - DNA, 25 bp, Homo sapien
gctggtcgtcctcgcagaagagccg

SEQ ID NO: 952366 - DNA, 25 bp, Homo sapien
tgccatggcgtgagtctggtgctcc

SEQ ID NO: 952367 - DNA, 25 bp, Homo sapien
tggacaccgggtcctggaaatagtc

SEQ ID NO: 952368 - DNA, 25 bp, Homo sapien
tcgaaggcctcgtcgatgggtgcca

SEQ ID NO: 952369 - DNA, 25 bp, Homo sapien
aggccagcaagctgcgagcggccgc

SEQ ID NO: 952370 - DNA, 25 bp, Homo sapien
ggaggccagacgacttccgaaccgc

SEQ ID NO: 952371 - DNA, 25 bp, Homo sapien
ctgccgcggagacggagtccgacgt

SEQ ID NO: 952372 - DNA, 25 bp, Homo sapien
agtccgacgtgaggcgcgggagagg

SEQ ID NO: 952373 - DNA, 25 bp, Homo sapien
agggtacaacgcagtttctcttccg

SEQ ID NO: 952374 - DNA, 25 bp, Homo sapien
tcaggacccaaaaagaacgcacgga

SEQ ID NO: 952375 - DNA, 25 bp, Homo sapien
aataattccccaaagcaatgcctcc

SEQ ID NO: 952376 - DNA, 25 bp, Homo sapien
ggaataattccccaaagcaatgcct

SEQ ID NO: 952377 - DNA, 25 bp, Homo sapien
caaagcaatgcctccctgagcaatg

SEQ ID NO: 952378 - DNA, 25 bp, Homo sapien
tccccaaagcaatgcctccctgagc

SEQ ID NO: 952379 - DNA, 25 bp, Homo sapien
caggattttaagtatggtgatgagg

SEQ ID NO: 952380 - DNA, 25 bp, Homo sapien
cggttatgctgctacatatgtcaca

SEQ ID NO: 952381 - DNA, 25 bp, Homo sapien
gtggagtcaaggcagcgcagtccca

SEQ ID NO: 952382 - DNA, 25 bp, Homo sapien
atggtgaataagctcctccttggac

SEQ ID NO: 952383 - DNA, 25 bp, Homo sapien
ttttcctgggctaagcttcttcctg

SEQ ID NO: 952384 - DNA, 25 bp, Homo sapien
tcctgggctaagcttcttcctggaa

SEQ ID NO: 952385 - DNA, 25 bp, Homo sapien
tgtttttcctgggctaagcttcttc

SEQ ID NO: 952386 - DNA, 25 bp, Homo sapien
ttcctgggctaagcttcttcctgga

SEQ ID NO: 952387 - DNA, 25 bp, Homo sapien
tctgtgtggtattgagggttatgaa

SEQ ID NO: 952388 - DNA, 25 bp, Homo sapien
gaacttggtccagcatgagttgctg

SEQ ID NO: 952389 - DNA, 25 bp, Homo sapien
caattgtaacaagctgcaacgagaa

SEQ ID NO: 952390 - DNA, 25 bp, Homo sapien
tattgagggttatgaaattaaagag

SEQ ID NO: 952391 - DNA, 25 bp, Homo sapien
atgttggaaagaagattcaatcaca

SEQ ID NO: 952392 - DNA, 25 bp, Homo sapien
aggcaagtcaggtgtctttataact

SEQ ID NO: 952393 - DNA, 25 bp, Homo sapien
caggcaagtcaggtgtctttataac

SEQ ID NO: 952394 - DNA, 25 bp, Homo sapien
ctgccccgggaggagatcatcagga

SEQ ID NO: 952395 - DNA, 25 bp, Homo sapien
tgccccgggaggagatcatcaggac

SEQ ID NO: 952396 - DNA, 25 bp, Homo sapien
gccccgggaggagatcatcaggaca

SEQ ID NO: 952397 - DNA, 25 bp, Homo sapien
ccccgggaggagatcatcaggacac

SEQ ID NO: 952398 - DNA, 25 bp, Homo sapien
accactgggaggctatcggttgctt

SEQ ID NO: 952399 - DNA, 25 bp, Homo sapien
ctctctgaagttaggaagtatttag

SEQ ID NO: 952400 - DNA, 25 bp, Homo sapien
tctgaagttaggaagtatttagaag

SEQ ID NO: 952401 - DNA, 25 bp, Homo sapien
ctatcggttgctttcttgtgtcttc

SEQ ID NO: 952402 - DNA, 25 bp, Homo sapien
cgggacagattgcaggttatactac

SEQ ID NO: 952403 - DNA, 25 bp, Homo sapien
gctgactccaaacatggtctttagg

SEQ ID NO: 952404 - DNA, 25 bp, Homo sapien
ggcgggacagattgcaggttatact

SEQ ID NO: 952405 - DNA, 25 bp, Homo sapien
aacaagagacagaaaccgctgactc

SEQ ID NO: 952406 - DNA, 25 bp, Homo sapien
gttctcggcgacatgcaaaggagct

SEQ ID NO: 952407 - DNA, 25 bp, Homo sapien
ggttctcggcgacatgcaaaggagc

SEQ ID NO: 952408 - DNA, 25 bp, Homo sapien
aggcaaggttctcggcgacatgcaa

SEQ ID NO: 952409 - DNA, 25 bp, Homo sapien
caaggttctcggcgacatgcaaagg

SEQ ID NO: 952410 - DNA, 25 bp, Homo sapien
aggacaagccgagcccccagctgag

SEQ ID NO: 952411 - DNA, 25 bp, Homo sapien
ctgagccacataagcccagagcagc

SEQ ID NO: 952412 - DNA, 25 bp, Homo sapien
aggtggtactgcaaccccagggctg

SEQ ID NO: 952413 - DNA, 25 bp, Homo sapien
gccccctccaggacaagccgagccc

SEQ ID NO: 952414 - DNA, 25 bp, Homo sapien
cttcccctttcctgataattcccag

SEQ ID NO: 952415 - DNA, 25 bp, Homo sapien
gggacatctgtgttgccctcccgtc

SEQ ID NO: 952416 - DNA, 25 bp, Homo sapien
ctttcctgataattcccagtgccag

SEQ ID NO: 952417 - DNA, 25 bp, Homo sapien
ctgggacatctgtgttgccctcccg

SEQ ID NO: 952418 - DNA, 25 bp, Homo sapien
aaacccatatagagggcgctgggta

SEQ ID NO: 952419 - DNA, 25 bp, Homo sapien
gtgaaacccatatagagggcgctgg

SEQ ID NO: 952420 - DNA, 25 bp, Homo sapien
gaaacccatatagagggcgctgggt

SEQ ID NO: 952421 - DNA, 25 bp, Homo sapien
tgaaacccatatagagggcgctggg

SEQ ID NO: 952422 - DNA, 25 bp, Homo sapien
acaaggcggaatcccaggagcacgg

SEQ ID NO: 952423 - DNA, 25 bp, Homo sapien
gacacacgaattcactctgctcatc

SEQ ID NO: 952424 - DNA, 25 bp, Homo sapien
ctgggtgtgacacacgaattcactc

SEQ ID NO: 952425 - DNA, 25 bp, Homo sapien
agcagcacaaggcggaatcccagga

SEQ ID NO: 952426 - DNA, 25 bp, Homo sapien
tgttatcgccaacacaatgcttatg

SEQ ID NO: 952427 - DNA, 25 bp, Homo sapien
ctgcagctgttatcgccaacacaat

SEQ ID NO: 952428 - DNA, 25 bp, Homo sapien
caatgcttatgtcccatgctttcag

SEQ ID NO: 952429 - DNA, 25 bp, Homo sapien
gccaacacaatgcttatgtcccatg

SEQ ID NO: 952430 - DNA, 25 bp, Homo sapien
tctctacaccagaatgtttaggccc

SEQ ID NO: 952431 - DNA, 25 bp, Homo sapien
aggccttcttccactatggttttga

SEQ ID NO: 952432 - DNA, 25 bp, Homo sapien
ccagaatgtttaggcccagtgaagt

SEQ ID NO: 952433 - DNA, 25 bp, Homo sapien
tagtgactttctctacaccagaatg

SEQ ID NO: 952434 - DNA, 25 bp, Homo sapien
tgggctcaaggtgagatgatttttt

SEQ ID NO: 952435 - DNA, 25 bp, Homo sapien
gattttttgggtccaagtctactca

SEQ ID NO: 952436 - DNA, 25 bp, Homo sapien
aggccttgtggatccattgactgtg

SEQ ID NO: 952437 - DNA, 25 bp, Homo sapien
agtctactcaagacaggcatcccag

SEQ ID NO: 952438 - DNA, 25 bp, Homo sapien
gctggcctcccagggcaccacgagg

SEQ ID NO: 952439 - DNA, 25 bp, Homo sapien
gcctcccagggcaccacgaggggct

SEQ ID NO: 952440 - DNA, 25 bp, Homo sapien
tagctggcctcccagggcaccacga

SEQ ID NO: 952441 - DNA, 25 bp, Homo sapien
tggcctcccagggcaccacgagggg

SEQ ID NO: 952442 - DNA, 25 bp, Homo sapien
gtaagtgccatttccattgtgaaga

SEQ ID NO: 952443 - DNA, 25 bp, Homo sapien
ccacccaggactggtaagtgccatt

SEQ ID NO: 952444 - DNA, 25 bp, Homo sapien
ggtaagtgccatttccattgtgaag

SEQ ID NO: 952445 - DNA, 25 bp, Homo sapien
gaaggctgacgctttccctcttgcc

SEQ ID NO: 952446 - DNA, 25 bp, Homo sapien
ccctggatgtcagcgatcagcagag

SEQ ID NO: 952447 - DNA, 25 bp, Homo sapien
gactttccagaatatcagggaaggc

SEQ ID NO: 952448 - DNA, 25 bp, Homo sapien
cagccccgggagactttccagaata

SEQ ID NO: 952449 - DNA, 25 bp, Homo sapien
gcactgcacaatcctgagtctcact

SEQ ID NO: 952450 - DNA, 25 bp, Homo sapien
gaatgctccgtgtgcttctccatgt

SEQ ID NO: 952451 - DNA, 25 bp, Homo sapien
gactctgacggcaataagttgtgaa

SEQ ID NO: 952452 - DNA, 25 bp, Homo sapien
tgcctcttacagacagtgttaccct

SEQ ID NO: 952453 - DNA, 25 bp, Homo sapien
ggaacagatgagaccggactaagat

SEQ ID NO: 952454 - DNA, 25 bp, Homo sapien
taagatgttgcctgagctcctagcc

SEQ ID NO: 952455 - DNA, 25 bp, Homo sapien
tgagatcgtcttttattctgggctc

SEQ ID NO: 952456 - DNA, 25 bp, Homo sapien
cttcctggcccattctgcctgaaat

SEQ ID NO: 952457 - DNA, 25 bp, Homo sapien
tcctccaggtaagccttggcccgct

SEQ ID NO: 952458 - DNA, 25 bp, Homo sapien
caggtaagccttggcccgctgcacg

SEQ ID NO: 952459 - DNA, 25 bp, Homo sapien
ccttggcccgctgcacgtagactgg

SEQ ID NO: 952460 - DNA, 25 bp, Homo sapien
agccttggcccgctgcacgtagact

SEQ ID NO: 952461 - DNA, 25 bp, Homo sapien
tatttccagaatgctccgctgcttc

SEQ ID NO: 952462 - DNA, 25 bp, Homo sapien
atagtaatatttccagaatgctccg

SEQ ID NO: 952463 - DNA, 25 bp, Homo sapien
gctgcttctgttattctcgatctca

SEQ ID NO: 952464 - DNA, 25 bp, Homo sapien
gctccgctgcttctgttattctcga

SEQ ID NO: 952465 - DNA, 25 bp, Homo sapien
gcaattcaagcatgcaatcccttta

SEQ ID NO: 952466 - DNA, 25 bp, Homo sapien
ccagccagggtgatatggcgaaatc

SEQ ID NO: 952467 - DNA, 25 bp, Homo sapien
cctccttaagagagctacagcctgg

SEQ ID NO: 952468 - DNA, 25 bp, Homo sapien
actcttagtcttgcacattgggcaa

SEQ ID NO: 952469 - DNA, 25 bp, Homo sapien
aatattggctgtaccctgtgctagg

SEQ ID NO: 952470 - DNA, 25 bp, Homo sapien
tcctctgaccatagcgcaggtggcc

SEQ ID NO: 952471 - DNA, 25 bp, Homo sapien
tgcaagggagatcaggacagactgt

SEQ ID NO: 952472 - DNA, 25 bp, Homo sapien
gcccttcctgggtctgcatcgtatg

SEQ ID NO: 952473 - DNA, 25 bp, Homo sapien
taatactccacgatgtctttcaggg

SEQ ID NO: 952474 - DNA, 25 bp, Homo sapien
ctccacgatgtctttcagggtctcc

SEQ ID NO: 952475 - DNA, 25 bp, Homo sapien
tactccacgatgtctttcagggtct

SEQ ID NO: 952476 - DNA, 25 bp, Homo sapien
cgttgtaatactccacgatgtcttt

SEQ ID NO: 952477 - DNA, 25 bp, Homo sapien
tgagtgagccaagggcctgaaacgc

SEQ ID NO: 952478 - DNA, 25 bp, Homo sapien
ctgaaacgcggggacgtcttcaaca

SEQ ID NO: 952479 - DNA, 25 bp, Homo sapien
gacttcctgtctttactgttgtatc

SEQ ID NO: 952480 - DNA, 25 bp, Homo sapien
tcaacatgcttggacagcccagtgt

SEQ ID NO: 952481 - DNA, 25 bp, Homo sapien
gcagagacagcaggacaggcaccat

SEQ ID NO: 952482 - DNA, 25 bp, Homo sapien
agcagagacagcaggacaggcacca

SEQ ID NO: 952483 - DNA, 25 bp, Homo sapien
atcttggttctcctgggggacagca

SEQ ID NO: 952484 - DNA, 25 bp, Homo sapien
gggacagcaggacccagaagcagca

SEQ ID NO: 952485 - DNA, 25 bp, Homo sapien
cacagatattatcctgggtcctggg

SEQ ID NO: 952486 - DNA, 25 bp, Homo sapien
aggccaatgggagtgccaggacggg

SEQ ID NO: 952487 - DNA, 25 bp, Homo sapien
gaggcacagatattatcctgggtcc

SEQ ID NO: 952488 - DNA, 25 bp, Homo sapien
ggcacagatattatcctgggtcctg

SEQ ID NO: 952489 - DNA, 25 bp, Homo sapien
gaaaggactacattgaattcaacaa

SEQ ID NO: 952490 - DNA, 25 bp, Homo sapien
tgcagcgggccaaggcttacctgga

SEQ ID NO: 952491 - DNA, 25 bp, Homo sapien
agaagtaggaggcagaaccagtcta

SEQ ID NO: 952492 - DNA, 25 bp, Homo sapien
gaagaatgcctatgatggaaaggac

SEQ ID NO: 952493 - DNA, 25 bp, Homo sapien
cacctaatctttatgtgcaggatca

SEQ ID NO: 952494 - DNA, 25 bp, Homo sapien
actctggtcagatgcctcctaggct

SEQ ID NO: 952495 - DNA, 25 bp, Homo sapien
cagtgggctcctctgcatccttgag

SEQ ID NO: 952496 - DNA, 25 bp, Homo sapien
caggatcataaaacacaccgtgcgg

SEQ ID NO: 952497 - DNA, 25 bp, Homo sapien
tccccctcacaggttcaagcaactg

SEQ ID NO: 952498 - DNA, 25 bp, Homo sapien
cccctcacaggttcaagcaactgtc

SEQ ID NO: 952499 - DNA, 25 bp, Homo sapien
ccctcacaggttcaagcaactgtcc

SEQ ID NO: 952500 - DNA, 25 bp, Homo sapien
cctccccctcacaggttcaagcaac

SEQ ID NO: 952501 - DNA, 25 bp, Homo sapien
gcctaagtccgtgtgcggtgccctt

SEQ ID NO: 952502 - DNA, 25 bp, Homo sapien
tgggacctgatcctccaagctggag

SEQ ID NO: 952503 - DNA, 25 bp, Homo sapien
ttcggaaaccgagatgcaaagtcct

SEQ ID NO: 952504 - DNA, 25 bp, Homo sapien
gaaatcgaactttcacatggactgg

SEQ ID NO: 952505 - DNA, 25 bp, Homo sapien
acaggcatgtgtcccaaggcttggc

SEQ ID NO: 952506 - DNA, 25 bp, Homo sapien
cgcctgatctcaggcagtccgccaa

SEQ ID NO: 952507 - DNA, 25 bp, Homo sapien
cgaacgcctgatctcaggcagtccg

SEQ ID NO: 952508 - DNA, 25 bp, Homo sapien
ctacaggcatgtgtcccaaggcttg

SEQ ID NO: 952509 - DNA, 25 bp, Homo sapien
ccagaacacttttgggccccgagag

SEQ ID NO: 952510 - DNA, 25 bp, Homo sapien
aactttgtcatcagtggctgcggcc

SEQ ID NO: 952511 - DNA, 25 bp, Homo sapien
gagatattccgccaacgcttcaggc

SEQ ID NO: 952512 - DNA, 25 bp, Homo sapien
taaaggtgagcacagaccctgtttg

SEQ ID NO: 952513 - DNA, 25 bp, Homo sapien
tcaggacgagagtctttgtgctgct

SEQ ID NO: 952514 - DNA, 25 bp, Homo sapien
ttacagtcacgaggtaagaagcaag

SEQ ID NO: 952515 - DNA, 25 bp, Homo sapien
cagaaaagaattaggctcggcacgg

SEQ ID NO: 952516 - DNA, 25 bp, Homo sapien
gcatgttagtcctgggcaacgtagc

SEQ ID NO: 952517 - DNA, 25 bp, Homo sapien
cagagagcctatcttattgttgtat

SEQ ID NO: 952518 - DNA, 25 bp, Homo sapien
cacagttattgtgatcacgtgataa

SEQ ID NO: 952519 - DNA, 25 bp, Homo sapien
gtgagacatgtttgagcactgcatt

SEQ ID NO: 952520 - DNA, 25 bp, Homo sapien
tctaatagtacttggcaagagatgg

SEQ ID NO: 952521 - DNA, 25 bp, Homo sapien
catcctgtgtgattagtgtgattcc

SEQ ID NO: 952522 - DNA, 25 bp, Homo sapien
gctggatcttaacccctcaggacag

SEQ ID NO: 952523 - DNA, 25 bp, Homo sapien
ggtcctggatgtgtagtaagaacga

SEQ ID NO: 952524 - DNA, 25 bp, Homo sapien
tgtaattccacgaacttgcacctgg

SEQ ID NO: 952525 - DNA, 25 bp, Homo sapien
caaaaacgacattgggacatgctgc

SEQ ID NO: 952526 - DNA, 25 bp, Homo sapien
tcccgaaagagagggtatgtgcacc

SEQ ID NO: 952527 - DNA, 25 bp, Homo sapien
gtgcaccagtctacagttccaaagg

SEQ ID NO: 952528 - DNA, 25 bp, Homo sapien
tatatatgatcactggtagcctacc

SEQ ID NO: 952529 - DNA, 25 bp, Homo sapien
tcgccactcaagtaggacaagggtc

SEQ ID NO: 952530 - DNA, 25 bp, Homo sapien
gctgtgtaagtagtcatcgccactc

SEQ ID NO: 952531 - DNA, 25 bp, Homo sapien
tgcgcagggtgcaactggctaccta

SEQ ID NO: 952532 - DNA, 25 bp, Homo sapien
cattggtcccatcgttgtgcgcagg

SEQ ID NO: 952533 - DNA, 25 bp, Homo sapien
agaaaaacccattactccagaagag

SEQ ID NO: 952534 - DNA, 25 bp, Homo sapien
ccagaagagtatatctaagtaacta

SEQ ID NO: 952535 - DNA, 25 bp, Homo sapien
ccatgcaacggaagaaaaacccatt

SEQ ID NO: 952536 - DNA, 25 bp, Homo sapien
tttctacccatgcaacggaagaaaa

SEQ ID NO: 952537 - DNA, 25 bp, Homo sapien
ggtcatggtcaaaaacgcttgcaac

SEQ ID NO: 952538 - DNA, 25 bp, Homo sapien
tcaaaagttcttggcccgctgaagt

SEQ ID NO: 952539 - DNA, 25 bp, Homo sapien
ccactagggttgcttcgatcttcag

SEQ ID NO: 952540 - DNA, 25 bp, Homo sapien
ggacagttcacatagacatcagaga

SEQ ID NO: 952541 - DNA, 25 bp, Homo sapien
tgtgttttgtaccttcagtcccttg

SEQ ID NO: 952542 - DNA, 25 bp, Homo sapien
tattttagcctatttgacagaacac

SEQ ID NO: 952543 - DNA, 25 bp, Homo sapien
gggtgctcaatcttaactgcagagg

SEQ ID NO: 952544 - DNA, 25 bp, Homo sapien
tatatgaccataatgtccgtgtgtg

SEQ ID NO: 952545 - DNA, 25 bp, Homo sapien
tattccaggtagtcatgctgatctg

SEQ ID NO: 952546 - DNA, 25 bp, Homo sapien
gagcaacttctcagagatacgaggg

SEQ ID NO: 952547 - DNA, 25 bp, Homo sapien
ggttcatcctaccatcctcatggaa

SEQ ID NO: 952548 - DNA, 25 bp, Homo sapien
tgctgatctgcttatccaaagccag

SEQ ID NO: 952549 - DNA, 25 bp, Homo sapien
tccaactctgcaggtcaaacgaaag

SEQ ID NO: 952550 - DNA, 25 bp, Homo sapien
ttttgacatcccacaatacagaatg

SEQ ID NO: 952551 - DNA, 25 bp, Homo sapien
gttccatttaatagcggacaccacc

SEQ ID NO: 952552 - DNA, 25 bp, Homo sapien
gacttctaaatcatggtctctgaca

SEQ ID NO: 952553 - DNA, 25 bp, Homo sapien
aaaaacttggatttcattccagtgt

SEQ ID NO: 952554 - DNA, 25 bp, Homo sapien
ggtccaagcagccacagttgcccta

SEQ ID NO: 952555 - DNA, 25 bp, Homo sapien
agcagccacagttgccctaaatctc

SEQ ID NO: 952556 - DNA, 25 bp, Homo sapien
caaggttaagtgcagtatggaagga

SEQ ID NO: 952557 - DNA, 25 bp, Homo sapien
tgtacacatacatagtcagtggtcc

SEQ ID NO: 952558 - DNA, 25 bp, Homo sapien
taaccattggaaacctcgaatgagg

SEQ ID NO: 952559 - DNA, 25 bp, Homo sapien
tccattttaggaagccagtggcgtc

SEQ ID NO: 952560 - DNA, 25 bp, Homo sapien
taaaagctagggaactcctccacta

SEQ ID NO: 952561 - DNA, 25 bp, Homo sapien
tagatacaggtgaagctttgctcct

SEQ ID NO: 952562 - DNA, 25 bp, Homo sapien
gttgcccattagaagatccttgagt

SEQ ID NO: 952563 - DNA, 25 bp, Homo sapien
tagacaataactttcagccagttgc

SEQ ID NO: 952564 - DNA, 25 bp, Homo sapien
ccttgagttcacctatgacttggaa

SEQ ID NO: 952565 - DNA, 25 bp, Homo sapien
ttttaagtagtcctcaacttgggca

SEQ ID NO: 952566 - DNA, 25 bp, Homo sapien
tgagtacatacagacttatttggcc

SEQ ID NO: 952567 - DNA, 25 bp, Homo sapien
gagatgacgttgcatctcccctgac

SEQ ID NO: 952568 - DNA, 25 bp, Homo sapien
cactcctgtggtatgtactgagtac

SEQ ID NO: 952569 - DNA, 25 bp, Homo sapien
gctgtgtctgaaacgtgaaactcca

SEQ ID NO: 952570 - DNA, 25 bp, Homo sapien
gggtttccccagagttgccacagta

SEQ ID NO: 952571 - DNA, 25 bp, Homo sapien
taaaaatagccggagacctatctgg

SEQ ID NO: 952572 - DNA, 25 bp, Homo sapien
tatggtgaacacagtagacctctcc

SEQ ID NO: 952573 - DNA, 25 bp, Homo sapien
ggtagcttgctgacaggcttctgta

SEQ ID NO: 952574 - DNA, 25 bp, Homo sapien
taccctcagaggactaacagttctc

SEQ ID NO: 952575 - DNA, 25 bp, Homo sapien
tgtccagtgactcgaagagaagtct

SEQ ID NO: 952576 - DNA, 25 bp, Homo sapien
caacagtaacagtgcagcctggaag

SEQ ID NO: 952577 - DNA, 25 bp, Homo sapien
gatgagcgtgaagccctcttggaga

SEQ ID NO: 952578 - DNA, 25 bp, Homo sapien
ttttaatctgcgtgaggctcaactg

SEQ ID NO: 952579 - DNA, 25 bp, Homo sapien
ccagcctatggtctagaacatggag

SEQ ID NO: 952580 - DNA, 25 bp, Homo sapien
gattgtaaatggtcagaatgccctc

SEQ ID NO: 952581 - DNA, 25 bp, Homo sapien
tacagaacacacttggtggaccggc

SEQ ID NO: 952582 - DNA, 25 bp, Homo sapien
gattatcgccaataaacctgaggcc

SEQ ID NO: 952583 - DNA, 25 bp, Homo sapien
tacccagcacgaggaatcagcagat

SEQ ID NO: 952584 - DNA, 25 bp, Homo sapien
tggaccggccctatgactgtaagtg

SEQ ID NO: 952585 - DNA, 25 bp, Homo sapien
cagtgcaaagattgtggcaaggctt

SEQ ID NO: 952586 - DNA, 25 bp, Homo sapien
ggaaaggcagcctcattcgtcacta

SEQ ID NO: 952587 - DNA, 25 bp, Homo sapien
gaagaggcgccatatcagtgcaaag

SEQ ID NO: 952588 - DNA, 25 bp, Homo sapien
attcgtcactatcggatccacactg

SEQ ID NO: 952589 - DNA, 25 bp, Homo sapien
caccggagagaagccatataagtgt

SEQ ID NO: 952590 - DNA, 25 bp, Homo sapien
gcagcagcatcgattccggtgatag

SEQ ID NO: 952591 - DNA, 25 bp, Homo sapien
gagaagcaccgtaactttcaagcgc

SEQ ID NO: 952592 - DNA, 25 bp, Homo sapien
gggaaaagccctactggtgtcatca

SEQ ID NO: 952593 - DNA, 25 bp, Homo sapien
acttagggtcccagtaagccatgcc

SEQ ID NO: 952594 - DNA, 25 bp, Homo sapien
gagtcccttcgccacacttagggtc

SEQ ID NO: 952595 - DNA, 25 bp, Homo sapien
tcagaaggtgtcaggaggttccaca

SEQ ID NO: 952596 - DNA, 25 bp, Homo sapien
catgccagcattaccttttgcgtag

SEQ ID NO: 952597 - DNA, 25 bp, Homo sapien
tcggttttttacagaagccatacag

SEQ ID NO: 952598 - DNA, 25 bp, Homo sapien
taataactgcataccaagagccagg

SEQ ID NO: 952599 - DNA, 25 bp, Homo sapien
cattatcagccacaactcgtcggtt

SEQ ID NO: 952600 - DNA, 25 bp, Homo sapien
ccatgttgaactgtgccggcacagc

SEQ ID NO: 952601 - DNA, 25 bp, Homo sapien
ctcgtggtacagttggaaggtcttc

SEQ ID NO: 952602 - DNA, 25 bp, Homo sapien
ttgtaacagccggtatcagccttct

SEQ ID NO: 952603 - DNA, 25 bp, Homo sapien
tagtacgttactctagtgaacagcc

SEQ ID NO: 952604 - DNA, 25 bp, Homo sapien
caccaagggttattagtcaatgcca

SEQ ID NO: 952605 - DNA, 25 bp, Homo sapien
cagattgctagagctcagtttaaga

SEQ ID NO: 952606 - DNA, 25 bp, Homo sapien
taggctggtctgaagagattctact

SEQ ID NO: 952607 - DNA, 25 bp, Homo sapien
agattgctagagctcagtttaagac

SEQ ID NO: 952608 - DNA, 25 bp, Homo sapien
ggctggtctgaagagattctactgc

SEQ ID NO: 952609 - DNA, 25 bp, Homo sapien
acattgcacaaaaccacactcaatc

SEQ ID NO: 952610 - DNA, 25 bp, Homo sapien
tccaaacattgcacaaaaccacact

SEQ ID NO: 952611 - DNA, 25 bp, Homo sapien
caaacattgcacaaaaccacactca

SEQ ID NO: 952612 - DNA, 25 bp, Homo sapien
aaacattgcacaaaaccacactcaa

SEQ ID NO: 952613 - DNA, 25 bp, Homo sapien
atagtgcacttcatttatgctacag

SEQ ID NO: 952614 - DNA, 25 bp, Homo sapien
atggaaggtcatcccgtcggttggg

SEQ ID NO: 952615 - DNA, 25 bp, Homo sapien
gatgagcagggttgggaaaacacaa

SEQ ID NO: 952616 - DNA, 25 bp, Homo sapien
gaaaactcggggagtgccatcctca

SEQ ID NO: 952617 - DNA, 25 bp, Homo sapien
ccttgaaagcatccttacccaggca

SEQ ID NO: 952618 - DNA, 25 bp, Homo sapien
cttgaaagcatccttacccaggcat

SEQ ID NO: 952619 - DNA, 25 bp, Homo sapien
caatcagaggccaacgctaagtgct

SEQ ID NO: 952620 - DNA, 25 bp, Homo sapien
gccggttactagctgtttggacaga

SEQ ID NO: 952621 - DNA, 25 bp, Homo sapien
tggctgctccaagagccctaaagga

SEQ ID NO: 952622 - DNA, 25 bp, Homo sapien
tttggacagatttgcccattcagcc

SEQ ID NO: 952623 - DNA, 25 bp, Homo sapien
tgtctgtgctgactacgcggactcc

SEQ ID NO: 952624 - DNA, 25 bp, Homo sapien
gaaacttaaagctggactaggaaca

SEQ ID NO: 952625 - DNA, 25 bp, Homo sapien
gaaagggacacatcctaagctgttg

SEQ ID NO: 952626 - DNA, 25 bp, Homo sapien
tagcaaataacaggacccagagcgt

SEQ ID NO: 952627 - DNA, 25 bp, Homo sapien
gcttttgctcatgccgatcccattc

SEQ ID NO: 952628 - DNA, 25 bp, Homo sapien
cgtggactctctgatatttaactcg

SEQ ID NO: 952629 - DNA, 25 bp, Homo sapien
catgccgatcccattcaaaggcttc

SEQ ID NO: 952630 - DNA, 25 bp, Homo sapien
aactcggtcgtaactctgagggagc

SEQ ID NO: 952631 - DNA, 25 bp, Homo sapien
gctgaataaggcctgaactgtaggt

SEQ ID NO: 952632 - DNA, 25 bp, Homo sapien
tggtgctgatagaggtgtgagctct

SEQ ID NO: 952633 - DNA, 25 bp, Homo sapien
ataaggcctgaactgtaggtaaact

SEQ ID NO: 952634 - DNA, 25 bp, Homo sapien
gaataaggcctgaactgtaggtaaa

SEQ ID NO: 952635 - DNA, 25 bp, Homo sapien
gaattcacagtgaagctgttcccaa

SEQ ID NO: 952636 - DNA, 25 bp, Homo sapien
gggcagagctacagctgaaggtttt

SEQ ID NO: 952637 - DNA, 25 bp, Homo sapien
ccagcggccttttcagactgacttc

SEQ ID NO: 952638 - DNA, 25 bp, Homo sapien
cccgtgtggatcctccgatgcagaa

SEQ ID NO: 952639 - DNA, 25 bp, Homo sapien
cagtaggaccccatgtgatcttgtg

SEQ ID NO: 952640 - DNA, 25 bp, Homo sapien
ttgaaatcttcccagtaggacccca

SEQ ID NO: 952641 - DNA, 25 bp, Homo sapien
aatcttcccagtaggaccccatgtg

SEQ ID NO: 952642 - DNA, 25 bp, Homo sapien
ttcccagtaggaccccatgtgatct

SEQ ID NO: 952643 - DNA, 25 bp, Homo sapien
cagagctcaattccagaccccagat

SEQ ID NO: 952644 - DNA, 25 bp, Homo sapien
cctgagagtcccagagctcaattcc

SEQ ID NO: 952645 - DNA, 25 bp, Homo sapien
tgagagtcccagagctcaattccag

SEQ ID NO: 952646 - DNA, 25 bp, Homo sapien
agagtcccagagctcaattccagac

SEQ ID NO: 952647 - DNA, 25 bp, Homo sapien
gtgagaacctgggaacacttgaatc

SEQ ID NO: 952648 - DNA, 25 bp, Homo sapien
ggtgagaacctgggaacacttgaat

SEQ ID NO: 952649 - DNA, 25 bp, Homo sapien
tgagaacctgggaacacttgaatct

SEQ ID NO: 952650 - DNA, 25 bp, Homo sapien
aggtgagaacctgggaacacttgaa

SEQ ID NO: 952651 - DNA, 25 bp, Homo sapien
gaaacaccagcgagttttgttgaca

SEQ ID NO: 952652 - DNA, 25 bp, Homo sapien
tagcaaacgaagaagcaaagaaaca

SEQ ID NO: 952653 - DNA, 25 bp, Homo sapien
gcgagttttgttgacaaggcataac

SEQ ID NO: 952654 - DNA, 25 bp, Homo sapien
gaagaagcaaagaaacaccagcgag

SEQ ID NO: 952655 - DNA, 25 bp, Homo sapien
gcaggttccaaacgcttccactcct

SEQ ID NO: 952656 - DNA, 25 bp, Homo sapien
aacgcttccactccttccggatgaa

SEQ ID NO: 952657 - DNA, 25 bp, Homo sapien
tccaaacgcttccactccttccgga

SEQ ID NO: 952658 - DNA, 25 bp, Homo sapien
tgagaacacattcccgtaattctcc

SEQ ID NO: 952659 - DNA, 25 bp, Homo sapien
gtgaatggcggcaccaaaaaaatca

SEQ ID NO: 952660 - DNA, 25 bp, Homo sapien
atgtgaatggcggcaccaaaaaaat

SEQ ID NO: 952661 - DNA, 25 bp, Homo sapien
aggaatgtgaatggcggcaccaaaa

SEQ ID NO: 952662 - DNA, 25 bp, Homo sapien
gaatgtgaatggcggcaccaaaaaa

SEQ ID NO: 952663 - DNA, 25 bp, Homo sapien
aaggataaacggaaccacagctcac

SEQ ID NO: 952664 - DNA, 25 bp, Homo sapien
gacaggagtccaagatagaaggtga

SEQ ID NO: 952665 - DNA, 25 bp, Homo sapien
gctctgaatgggatgtcattgcaca

SEQ ID NO: 952666 - DNA, 25 bp, Homo sapien
tgattcagcaggacagaaccatggg

SEQ ID NO: 952667 - DNA, 25 bp, Homo sapien
ttggcctttaggagcgcagccgcca

SEQ ID NO: 952668 - DNA, 25 bp, Homo sapien
tggcctttaggagcgcagccgccaa

SEQ ID NO: 952669 - DNA, 25 bp, Homo sapien
ggcctttaggagcgcagccgccaac

SEQ ID NO: 952670 - DNA, 25 bp, Homo sapien
cctttaggagcgcagccgccaacat

SEQ ID NO: 952671 - DNA, 25 bp, Homo sapien
ccaggctgtccttgtcggaaaaggc

SEQ ID NO: 952672 - DNA, 25 bp, Homo sapien
caattatcaaacctatcaagctgtc

SEQ ID NO: 952673 - DNA, 25 bp, Homo sapien
ccactaggctgtgagttactgaatg

SEQ ID NO: 952674 - DNA, 25 bp, Homo sapien
cacatctggattctagtagttagcc

SEQ ID NO: 952675 - DNA, 25 bp, Homo sapien
gattactgttcggtcagcttcccca

SEQ ID NO: 952676 - DNA, 25 bp, Homo sapien
ttcaatggatgattgcagaatgact

SEQ ID NO: 952677 - DNA, 25 bp, Homo sapien
gcgatttcaatggatgattgcagaa

SEQ ID NO: 952678 - DNA, 25 bp, Homo sapien
tggtaagtgagcgatttcaatggat

SEQ ID NO: 952679 - DNA, 25 bp, Homo sapien
gtgagcgatttcaatggatgattgc

SEQ ID NO: 952680 - DNA, 25 bp, Homo sapien
ggcctgaggttcctgagatacgaga

SEQ ID NO: 952681 - DNA, 25 bp, Homo sapien
tcctgagatacgagatcagcctgag

SEQ ID NO: 952682 - DNA, 25 bp, Homo sapien
gaggttcctgagatacgagatcagc

SEQ ID NO: 952683 - DNA, 25 bp, Homo sapien
tgagatacgagatcagcctgagttt

SEQ ID NO: 952684 - DNA, 25 bp, Homo sapien
cagactcagcgggaagcgggtttta

SEQ ID NO: 952685 - DNA, 25 bp, Homo sapien
ctcctgggtgcagactcagcgggaa

SEQ ID NO: 952686 - DNA, 25 bp, Homo sapien
ggtctcctgggtgcagactcagcgg

SEQ ID NO: 952687 - DNA, 25 bp, Homo sapien
ggtgcagactcagcgggaagcgggt

SEQ ID NO: 952688 - DNA, 25 bp, Homo sapien
tatttcagtgagtacccaggaacag

SEQ ID NO: 952689 - DNA, 25 bp, Homo sapien
gaagaaatgtggcaactgggactag

SEQ ID NO: 952690 - DNA, 25 bp, Homo sapien
cagaaagatgggagctagtatttca

SEQ ID NO: 952691 - DNA, 25 bp, Homo sapien
tgtggcaactgggactagtctttta

SEQ ID NO: 952692 - DNA, 25 bp, Homo sapien
ctccagtctgggcaatagacagaga

SEQ ID NO: 952693 - DNA, 25 bp, Homo sapien
gggcaatagacagagactctgcctc

SEQ ID NO: 952694 - DNA, 25 bp, Homo sapien
cagtctgggcaatagacagagactc

SEQ ID NO: 952695 - DNA, 25 bp, Homo sapien
tgggcaatagacagagactctgcct

SEQ ID NO: 952696 - DNA, 25 bp, Homo sapien
gggcaactctggtcttcgggtagca

SEQ ID NO: 952697 - DNA, 25 bp, Homo sapien
gaaagtcagtcgcaagtttgggcaa

SEQ ID NO: 952698 - DNA, 25 bp, Homo sapien
tatagaatgtccaataccagagccc

SEQ ID NO: 952699 - DNA, 25 bp, Homo sapien
tattgccactcacaactgcaaggag

SEQ ID NO: 952700 - DNA, 25 bp, Homo sapien
tagcagggtcccttcaatggtgtct

SEQ ID NO: 952701 - DNA, 25 bp, Homo sapien
cctcctagcagggtcccttcaatgg

SEQ ID NO: 952702 - DNA, 25 bp, Homo sapien
ccaccatcgccctcctagcagggtc

SEQ ID NO: 952703 - DNA, 25 bp, Homo sapien
cagggtcccttcaatggtgtctcag

SEQ ID NO: 952704 - DNA, 25 bp, Homo sapien
ttccttccttctttgaagtcagtcc

SEQ ID NO: 952705 - DNA, 25 bp, Homo sapien
tttccttccttctttgaagtcagtc

SEQ ID NO: 952706 - DNA, 25 bp, Homo sapien
ccaaaggagcaattactgggaattt

SEQ ID NO: 952707 - DNA, 25 bp, Homo sapien
gcaattactgggaatttagcagcct

SEQ ID NO: 952708 - DNA, 25 bp, Homo sapien
ctctgttcaagttcccgggaattct

SEQ ID NO: 952709 - DNA, 25 bp, Homo sapien
tgttcaagttcccgggaattctgac

SEQ ID NO: 952710 - DNA, 25 bp, Homo sapien
ctgctgaaacttttaaacgctccag

SEQ ID NO: 952711 - DNA, 25 bp, Homo sapien
tcgccgttaaagtcacaaaaccaga

SEQ ID NO: 952712 - DNA, 25 bp, Homo sapien
gctccagctgggtcgccgttaaagt

SEQ ID NO: 952713 - DNA, 25 bp, Homo sapien
ttttaaacgctccagctgggtcgcc

SEQ ID NO: 952714 - DNA, 25 bp, Homo sapien
aggccctgttggaccctgtcacaga

SEQ ID NO: 952715 - DNA, 25 bp, Homo sapien
acagacccacacaccggggacagaa

SEQ ID NO: 952716 - DNA, 25 bp, Homo sapien
accggacacggaccaggccctgttg

SEQ ID NO: 952717 - DNA, 25 bp, Homo sapien
gaccaggccctgttggaccctgtca

SEQ ID NO: 952718 - DNA, 25 bp, Homo sapien
ctgtaatcccagctactctggaggc

SEQ ID NO: 952719 - DNA, 25 bp, Homo sapien
cccaggaggcggaggttgcagtgag

SEQ ID NO: 952720 - DNA, 25 bp, Homo sapien
attacccgggcgtggtggcagacgc

SEQ ID NO: 952721 - DNA, 25 bp, Homo sapien
tgagacaggagaatcgcttgaaccc

SEQ ID NO: 952722 - DNA, 25 bp, Homo sapien
cagggaccgcttagtccttgccgca

SEQ ID NO: 952723 - DNA, 25 bp, Homo sapien
cagggagatgcactttactcaggta

SEQ ID NO: 952724 - DNA, 25 bp, Homo sapien
gagaccctgcatttcatactggcgc

SEQ ID NO: 952725 - DNA, 25 bp, Homo sapien
taatggaagtcaggcccaggctaga

SEQ ID NO: 952726 - DNA, 25 bp, Homo sapien
aatctacaaacacttttattagcaa

SEQ ID NO: 952727 - DNA, 25 bp, Homo sapien
acaatctacaaacacttttattagc

SEQ ID NO: 952728 - DNA, 25 bp, Homo sapien
tctacaaacacttttattagcaaaa

SEQ ID NO: 952729 - DNA, 25 bp, Homo sapien
caatctacaaacacttttattagca

SEQ ID NO: 952730 - DNA, 25 bp, Homo sapien
tcccctcaaaggcatcactgcccct

SEQ ID NO: 952731 - DNA, 25 bp, Homo sapien
aggccagcagggaacaagaggaccc

SEQ ID NO: 952732 - DNA, 25 bp, Homo sapien
aggaccccagggttgcaagcaggct

SEQ ID NO: 952733 - DNA, 25 bp, Homo sapien
catgggagaaagaggggctcctcct

SEQ ID NO: 952734 - DNA, 25 bp, Homo sapien
tgagaccagttcacggacggtggca

SEQ ID NO: 952735 - DNA, 25 bp, Homo sapien
tgaagccacgagatacacagcgctg

SEQ ID NO: 952736 - DNA, 25 bp, Homo sapien
gacaaaagtgatccgtgtccgggaa

SEQ ID NO: 952737 - DNA, 25 bp, Homo sapien
ctcatattcatccagagccgcctgg

SEQ ID NO: 952738 - DNA, 25 bp, Homo sapien
tgccccttgtctcctagaagagagt

SEQ ID NO: 952739 - DNA, 25 bp, Homo sapien
tgtctgccccttgtctcctagaaga

SEQ ID NO: 952740 - DNA, 25 bp, Homo sapien
cccttgtctcctagaagagagtcct

SEQ ID NO: 952741 - DNA, 25 bp, Homo sapien
tgacatctccattagcctgatggct

SEQ ID NO: 952742 - DNA, 25 bp, Homo sapien
tgggcagcccatgggtcgcctactc

SEQ ID NO: 952743 - DNA, 25 bp, Homo sapien
gacacccttgttctggctttaaggc

SEQ ID NO: 952744 - DNA, 25 bp, Homo sapien
gtcgcctactcacaaaacaggagtg

SEQ ID NO: 952745 - DNA, 25 bp, Homo sapien
ccttgttctggctttaaggctgggc

SEQ ID NO: 952746 - DNA, 25 bp, Homo sapien
tgtcagaccgagacaagtgcaatgc

SEQ ID NO: 952747 - DNA, 25 bp, Homo sapien
gcagcgtccagcaattgcccaagtc

SEQ ID NO: 952748 - DNA, 25 bp, Homo sapien
ggccggcactgtcagaccgagacaa

SEQ ID NO: 952749 - DNA, 25 bp, Homo sapien
gggcagcgtccagcaattgcccaag

SEQ ID NO: 952750 - DNA, 25 bp, Homo sapien
cccggagttcagctgtcctgtgagg

SEQ ID NO: 952751 - DNA, 25 bp, Homo sapien
gagttcagctgtcctgtgagggaga

SEQ ID NO: 952752 - DNA, 25 bp, Homo sapien
agtcccggagttcagctgtcctgtg

SEQ ID NO: 952753 - DNA, 25 bp, Homo sapien
cggagttcagctgtcctgtgaggga

SEQ ID NO: 952754 - DNA, 25 bp, Homo sapien
tcgggaagtgctagctcagcagtag

SEQ ID NO: 952755 - DNA, 25 bp, Homo sapien
taggttgggtaatcacactacctgc

SEQ ID NO: 952756 - DNA, 25 bp, Homo sapien
tacctgcacgaacagcactttggag

SEQ ID NO: 952757 - DNA, 25 bp, Homo sapien
agctcagcagtaggttgggtaatca

SEQ ID NO: 952758 - DNA, 25 bp, Homo sapien
cacggagaggaccactatctgcact

SEQ ID NO: 952759 - DNA, 25 bp, Homo sapien
ccacagtgcggtagcacggagagga

SEQ ID NO: 952760 - DNA, 25 bp, Homo sapien
gaggaccactatctgcactgtcagc

SEQ ID NO: 952761 - DNA, 25 bp, Homo sapien
cagtgcggtagcacggagaggacca

SEQ ID NO: 952762 - DNA, 25 bp, Homo sapien
tccgggcagaagtataggtggcatc

SEQ ID NO: 952763 - DNA, 25 bp, Homo sapien
tctcgcggcacatggctatgtaacg

SEQ ID NO: 952764 - DNA, 25 bp, Homo sapien
gtgatgtagtcagccagagactctg

SEQ ID NO: 952765 - DNA, 25 bp, Homo sapien
tggaaaggcgcaggatagccagcag

SEQ ID NO: 952766 - DNA, 25 bp, Homo sapien
ggtgcacataggtgatgtgctgggc

SEQ ID NO: 952767 - DNA, 25 bp, Homo sapien
gtgctggtgcacataggtgatgtgc

SEQ ID NO: 952768 - DNA, 25 bp, Homo sapien
gagcttcatgtccagaggttcaaac

SEQ ID NO: 952769 - DNA, 25 bp, Homo sapien
agcttcatgtccagaggttcaaact

SEQ ID NO: 952770 - DNA, 25 bp, Homo sapien
tctgccacttcctcacagtgtagga

SEQ ID NO: 952771 - DNA, 25 bp, Homo sapien
tacgcacccatgtcctcttaggtgt

SEQ ID NO: 952772 - DNA, 25 bp, Homo sapien
ccctttttagggctacgcacccatg

SEQ ID NO: 952773 - DNA, 25 bp, Homo sapien
ggtgtccctcctttggctctgccac

SEQ ID NO: 952774 - DNA, 25 bp, Homo sapien
ggtcgggccggtcctgaatcagcca

SEQ ID NO: 952775 - DNA, 25 bp, Homo sapien
cgtaggtcattgtctcggtcgggcc

SEQ ID NO: 952776 - DNA, 25 bp, Homo sapien
cattgtctcggtcgggccggtcctg

SEQ ID NO: 952777 - DNA, 25 bp, Homo sapien
tcggtcgggccggtcctgaatcagc

SEQ ID NO: 952778 - DNA, 25 bp, Homo sapien
ttgtagcgcccgtaggcagggttgg

SEQ ID NO: 952779 - DNA, 25 bp, Homo sapien
caggtagctgtatgttctgctccag

SEQ ID NO: 952780 - DNA, 25 bp, Homo sapien
tcaaaccgggagagcagtgcagcag

SEQ ID NO: 952781 - DNA, 25 bp, Homo sapien
gtgtggtgagaatgccggccttggc

SEQ ID NO: 952782 - DNA, 25 bp, Homo sapien
tggctgtgcggtcggcctcagccat

SEQ ID NO: 952783 - DNA, 25 bp, Homo sapien
tgacctcgtggatggctgtgcggtc

SEQ ID NO: 952784 - DNA, 25 bp, Homo sapien
tctaaggtcagttctccactcacgg

SEQ ID NO: 952785 - DNA, 25 bp, Homo sapien
gagccccggcctgttgtgtactggc

SEQ ID NO: 952786 - DNA, 25 bp, Homo sapien
tgcgaggcgccagtcgatcaatgta

SEQ ID NO: 952787 - DNA, 25 bp, Homo sapien
ggcgccagtcgatcaatgtatgaca

SEQ ID NO: 952788 - DNA, 25 bp, Homo sapien
tcgatcaatgtatgacaggagctga

SEQ ID NO: 952789 - DNA, 25 bp, Homo sapien
ggatcccccatcagacagatgttga

SEQ ID NO: 952790 - DNA, 25 bp, Homo sapien
tttcatgcctcgaggagactggtcc

SEQ ID NO: 952791 - DNA, 25 bp, Homo sapien
atcttcatgcccgtatatttctggg

SEQ ID NO: 952792 - DNA, 25 bp, Homo sapien
agctgccagcttttcgtagaaatcc

SEQ ID NO: 952793 - DNA, 25 bp, Homo sapien
tatttctggggcgattgaagctgcc

SEQ ID NO: 952794 - DNA, 25 bp, Homo sapien
ttgttcatcttcacaatccgatggg

SEQ ID NO: 952795 - DNA, 25 bp, Homo sapien
cttccaggtaggtttctgagagtaa

SEQ ID NO: 952796 - DNA, 25 bp, Homo sapien
tccaggtaggtttctgagagtaaac

SEQ ID NO: 952797 - DNA, 25 bp, Homo sapien
ttccaggtaggtttctgagagtaaa

SEQ ID NO: 952798 - DNA, 25 bp, Homo sapien
cttgacaaatccctgggttctgttt

SEQ ID NO: 952799 - DNA, 25 bp, Homo sapien
aatcccttcaacttgcccatcactg

SEQ ID NO: 952800 - DNA, 25 bp, Homo sapien
ggattccctaacaatttcttgacaa

SEQ ID NO: 952801 - DNA, 25 bp, Homo sapien
tgccaggatacagatgtaatccctt

SEQ ID NO: 952802 - DNA, 25 bp, Homo sapien
gtagaatgagtaggtgagggaaaag

SEQ ID NO: 952803 - DNA, 25 bp, Homo sapien
gaaaaggggatgatccattcctcat

SEQ ID NO: 952804 - DNA, 25 bp, Homo sapien
ggtagaatgagtaggtgagggaaaa

SEQ ID NO: 952805 - DNA, 25 bp, Homo sapien
tagaatgagtaggtgagggaaaagg

SEQ ID NO: 952806 - DNA, 25 bp, Homo sapien
gaaaataccagtgacgctgacgtgg

SEQ ID NO: 952807 - DNA, 25 bp, Homo sapien
caggctgggcaatccttgtgttctc

SEQ ID NO: 952808 - DNA, 25 bp, Homo sapien
taccagcaccgtgatactacgaggg

SEQ ID NO: 952809 - DNA, 25 bp, Homo sapien
gaacccagtgcgcaggattggcaag

SEQ ID NO: 952810 - DNA, 25 bp, Homo sapien
tctcctggaatttgatgaatctgga

SEQ ID NO: 952811 - DNA, 25 bp, Homo sapien
catctcctggaatttgatgaatctg

SEQ ID NO: 952812 - DNA, 25 bp, Homo sapien
cctggaatttgatgaatctggagcc

SEQ ID NO: 952813 - DNA, 25 bp, Homo sapien
gaatttgatgaatctggagccccgt

SEQ ID NO: 952814 - DNA, 25 bp, Homo sapien
cggttggtttggcactcctggcttg

SEQ ID NO: 952815 - DNA, 25 bp, Homo sapien
gggcacatgatcagaggcatgaaag

SEQ ID NO: 952816 - DNA, 25 bp, Homo sapien
acagccgccctcctgagcggttggt

SEQ ID NO: 952817 - DNA, 25 bp, Homo sapien
atcagaggcatgaaagtgggagact

SEQ ID NO: 952818 - DNA, 25 bp, Homo sapien
cggctggtaggtctctgccccacac

SEQ ID NO: 952819 - DNA, 25 bp, Homo sapien
cacaagtgtaagtggccaccaccat

SEQ ID NO: 952820 - DNA, 25 bp, Homo sapien
tcacaagtgtaagtggccaccacca

SEQ ID NO: 952821 - DNA, 25 bp, Homo sapien
ggctggtaggtctctgccccacact

SEQ ID NO: 952822 - DNA, 25 bp, Homo sapien
agttaccaacttccccacagagtca

SEQ ID NO: 952823 - DNA, 25 bp, Homo sapien
gacgattccacgcacagttaccaac

SEQ ID NO: 952824 - DNA, 25 bp, Homo sapien
tcccggatcacacgaggcttgttgc

SEQ ID NO: 952825 - DNA, 25 bp, Homo sapien
tttgacttcagagacacgagtgacg

SEQ ID NO: 952826 - DNA, 25 bp, Homo sapien
tacatctttcccgacagagaccact

SEQ ID NO: 952827 - DNA, 25 bp, Homo sapien
ccctacatctttcccgacagagacc

SEQ ID NO: 952828 - DNA, 25 bp, Homo sapien
cctggagaaccaatccctacatctt

SEQ ID NO: 952829 - DNA, 25 bp, Homo sapien
tggagaaccaatccctacatctttc

SEQ ID NO: 952830 - DNA, 25 bp, Homo sapien
tgcgcatgagttcagcagggtactg

SEQ ID NO: 952831 - DNA, 25 bp, Homo sapien
gcgcatgagttcagcagggtactgg

SEQ ID NO: 952832 - DNA, 25 bp, Homo sapien
tctgcgcatgagttcagcagggtac

SEQ ID NO: 952833 - DNA, 25 bp, Homo sapien
aatctgcgcatgagttcagcagggt

SEQ ID NO: 952834 - DNA, 25 bp, Homo sapien
caatgtaaacgtccaggacatcttt

SEQ ID NO: 952835 - DNA, 25 bp, Homo sapien
ctcaatgtaaacgtccaggacatct

SEQ ID NO: 952836 - DNA, 25 bp, Homo sapien
atgctcaatgtaaacgtccaggaca

SEQ ID NO: 952837 - DNA, 25 bp, Homo sapien
tgctcaatgtaaacgtccaggacat

SEQ ID NO: 952838 - DNA, 25 bp, Homo sapien
cagaagcttaaacgcctcgcccttt

SEQ ID NO: 952839 - DNA, 25 bp, Homo sapien
ttgccattgttctctaaccactcac

SEQ ID NO: 952840 - DNA, 25 bp, Homo sapien
cctctctacagaagcttaaacgcct

SEQ ID NO: 952841 - DNA, 25 bp, Homo sapien
acgcctcgccctttgtttgccattg

SEQ ID NO: 952842 - DNA, 25 bp, Homo sapien
ggcagcagctcttgtacggcatcag

SEQ ID NO: 952843 - DNA, 25 bp, Homo sapien
atcagcaaagagcttcgcgtagcgc

SEQ ID NO: 952844 - DNA, 25 bp, Homo sapien
tcttgtacggcatcagcaaagagct

SEQ ID NO: 952845 - DNA, 25 bp, Homo sapien
cggcatcagcaaagagcttcgcgta

SEQ ID NO: 952846 - DNA, 25 bp, Homo sapien
tctcacaaattgagtccaccaactc

SEQ ID NO: 952847 - DNA, 25 bp, Homo sapien
gcattctcacaaattgagtccacca

SEQ ID NO: 952848 - DNA, 25 bp, Homo sapien
ctggcattctcacaaattgagtcca

SEQ ID NO: 952849 - DNA, 25 bp, Homo sapien
cacaaattgagtccaccaactcggg

SEQ ID NO: 952850 - DNA, 25 bp, Homo sapien
ggctacgtcgtccaggtccacatac

SEQ ID NO: 952851 - DNA, 25 bp, Homo sapien
ctacgtcgtccaggtccacatacag

SEQ ID NO: 952852 - DNA, 25 bp, Homo sapien
cgtcgtccaggtccacatacagagc

SEQ ID NO: 952853 - DNA, 25 bp, Homo sapien
acgtcgtccaggtccacatacagag

SEQ ID NO: 952854 - DNA, 25 bp, Homo sapien
agagccacattcactttgctcacca

SEQ ID NO: 952855 - DNA, 25 bp, Homo sapien
cacattcactttgctcaccagtgtt

SEQ ID NO: 952856 - DNA, 25 bp, Homo sapien
cattcactttgctcaccagtgttca

SEQ ID NO: 952857 - DNA, 25 bp, Homo sapien
gccacattcactttgctcaccagtg

SEQ ID NO: 952858 - DNA, 25 bp, Homo sapien
cctggtagaactcttgtaagaactt

SEQ ID NO: 952859 - DNA, 25 bp, Homo sapien
catcatcctggtagaactcttgtaa

SEQ ID NO: 952860 - DNA, 25 bp, Homo sapien
tcccgagttcatcatcctggtagaa

SEQ ID NO: 952861 - DNA, 25 bp, Homo sapien
tgcttcttcccgagttcatcatcct

SEQ ID NO: 952862 - DNA, 25 bp, Homo sapien
tgaaatgtaaaaccgtaagacacaa

SEQ ID NO: 952863 - DNA, 25 bp, Homo sapien
atgaaatgtaaaaccgtaagacaca

SEQ ID NO: 952864 - DNA, 25 bp, Homo sapien
cacactccggtctcaaggttctcag

SEQ ID NO: 952865 - DNA, 25 bp, Homo sapien
tgggtccccttagcccctgatttca

SEQ ID NO: 952866 - DNA, 25 bp, Homo sapien
cgaagaataaagagcccgtggcagt

SEQ ID NO: 952867 - DNA, 25 bp, Homo sapien
tccagccgcttcacagctcgggatt

SEQ ID NO: 952868 - DNA, 25 bp, Homo sapien
tgttccccgggaggctccccgcgca

SEQ ID NO: 952869 - DNA, 25 bp, Homo sapien
ggaggctccccgcgcaggacgccct

SEQ ID NO: 952870 - DNA, 25 bp, Homo sapien
gcaggacgccctcccgggctcgtag

SEQ ID NO: 952871 - DNA, 25 bp, Homo sapien
cccgcgcaggacgccctcccgggct

SEQ ID NO: 952872 - DNA, 25 bp, Homo sapien
tctctagcgcgtagtccttcagtgc

SEQ ID NO: 952873 - DNA, 25 bp, Homo sapien
tctagcgcgtagtccttcagtgcca

SEQ ID NO: 952874 - DNA, 25 bp, Homo sapien
cttctctagcgcgtagtccttcagt

SEQ ID NO: 952875 - DNA, 25 bp, Homo sapien
ctagcgcgtagtccttcagtgccat

SEQ ID NO: 952876 - DNA, 25 bp, Homo sapien
agctgagaatctccgcgcggtggac

SEQ ID NO: 952877 - DNA, 25 bp, Homo sapien
gggacccgctcatctacaaagactg

SEQ ID NO: 952878 - DNA, 25 bp, Homo sapien
aaagactgtatcctagacccttggg

SEQ ID NO: 952879 - DNA, 25 bp, Homo sapien
accgtgcgggcctagaatgagtgac

SEQ ID NO: 952880 - DNA, 25 bp, Homo sapien
agagtcctcagtcccaagaccagga

SEQ ID NO: 952881 - DNA, 25 bp, Homo sapien
atgggcccagcctttctgtggtatc

SEQ ID NO: 952882 - DNA, 25 bp, Homo sapien
tgggcccagcctttctgtggtatct

SEQ ID NO: 952883 - DNA, 25 bp, Homo sapien
gtcctcagtcccaagaccaggaggg

SEQ ID NO: 952884 - DNA, 25 bp, Homo sapien
catgaaggaagcaatctacaacttc

SEQ ID NO: 952885 - DNA, 25 bp, Homo sapien
tccgcttagcgagcatgcatgtgtg

SEQ ID NO: 952886 - DNA, 25 bp, Homo sapien
aacttccttccgcttagcgagcatg

SEQ ID NO: 952887 - DNA, 25 bp, Homo sapien
gaaactggctgtacaatatctaaaa

SEQ ID NO: 952888 - DNA, 25 bp, Homo sapien
tgacgggcgaagtggtggtggaacc

SEQ ID NO: 952889 - DNA, 25 bp, Homo sapien
ccaacttgacgatgggctgcacgct

SEQ ID NO: 952890 - DNA, 25 bp, Homo sapien
gatgtacttctggacactcccagga

SEQ ID NO: 952891 - DNA, 25 bp, Homo sapien
gggaagtgagaccacgatgtacttc

SEQ ID NO: 952892 - DNA, 25 bp, Homo sapien
ctggaggacgatgacattacaataa

SEQ ID NO: 952893 - DNA, 25 bp, Homo sapien
gctcgtgcagacaccagtgtctgga

SEQ ID NO: 952894 - DNA, 25 bp, Homo sapien
gggcctgcgagagggtcagcgtggg

SEQ ID NO: 952895 - DNA, 25 bp, Homo sapien
gaaccttcagcaagccaggggtgcg

SEQ ID NO: 952896 - DNA, 25 bp, Homo sapien
cgtgatggtcagagtggtcctgttg

SEQ ID NO: 952897 - DNA, 25 bp, Homo sapien
tgatggtcagagtggtcctgttgac

SEQ ID NO: 952898 - DNA, 25 bp, Homo sapien
tgcgtgatggtcagagtggtcctgt

SEQ ID NO: 952899 - DNA, 25 bp, Homo sapien
ctgcgtgatggtcagagtggtcctg

SEQ ID NO: 952900 - DNA, 25 bp, Homo sapien
ccaagggacccgaattctgcccgat

SEQ ID NO: 952901 - DNA, 25 bp, Homo sapien
cgataggcgtcctgattgtcaggcg

SEQ ID NO: 952902 - DNA, 25 bp, Homo sapien
gcgcagctttgccagaacaggagca

SEQ ID NO: 952903 - DNA, 25 bp, Homo sapien
cggtgggcgcagctttgccagaaca

SEQ ID NO: 952904 - DNA, 25 bp, Homo sapien
agggccgtccagcacactgcggatc

SEQ ID NO: 952905 - DNA, 25 bp, Homo sapien
gcagccggggcagaatcagagtctt

SEQ ID NO: 952906 - DNA, 25 bp, Homo sapien
caggaggctctgcacatggtctgct

SEQ ID NO: 952907 - DNA, 25 bp, Homo sapien
caatccggtcaatgttgctcagcac

SEQ ID NO: 952908 - DNA, 25 bp, Homo sapien
aagcaaaagccggagggtcaccagg

SEQ ID NO: 952909 - DNA, 25 bp, Homo sapien
cagatgggggtacagtgccctctat

SEQ ID NO: 952910 - DNA, 25 bp, Homo sapien
ctctataacctcatgactgtgtccc

SEQ ID NO: 952911 - DNA, 25 bp, Homo sapien
aggacaagcaaaagccggagggtca

SEQ ID NO: 952912 - DNA, 25 bp, Homo sapien
gagccataacgagtcgtccagggcg

SEQ ID NO: 952913 - DNA, 25 bp, Homo sapien
tgcgatggagccataacgagtcgtc

SEQ ID NO: 952914 - DNA, 25 bp, Homo sapien
gtcgtccagggcgtcttctcgtcca

SEQ ID NO: 952915 - DNA, 25 bp, Homo sapien
caagcctgcgatggagccataacga

SEQ ID NO: 952916 - DNA, 25 bp, Homo sapien
agtgattgtccacatctggtcgcag

SEQ ID NO: 952917 - DNA, 25 bp, Homo sapien
gcaggtcatcacagctggaatcagc

SEQ ID NO: 952918 - DNA, 25 bp, Homo sapien
tgctaaaatgcttgcagatctgggc

SEQ ID NO: 952919 - DNA, 25 bp, Homo sapien
gcaaagtctcggagtgcccagtgat

SEQ ID NO: 952920 - DNA, 25 bp, Homo sapien
tgttctgaaccacgttcacacggac

SEQ ID NO: 952921 - DNA, 25 bp, Homo sapien
tgagtagggccaggttgttctgaac

SEQ ID NO: 952922 - DNA, 25 bp, Homo sapien
gggttgtccatcagcgctttcacca

SEQ ID NO: 952923 - DNA, 25 bp, Homo sapien
gctttcaccatacgcatcaggtaga

SEQ ID NO: 952924 - DNA, 25 bp, Homo sapien
gagaccctcacaggagcttccactg

SEQ ID NO: 952925 - DNA, 25 bp, Homo sapien
cgtccctgcactgtggaacctcatg

SEQ ID NO: 952926 - DNA, 25 bp, Homo sapien
ggcagggagaccctcacaggagctt

SEQ ID NO: 952927 - DNA, 25 bp, Homo sapien
gcactgtggaacctcatgctctcac

SEQ ID NO: 952928 - DNA, 25 bp, Homo sapien
cctccgagataaaggtactgaaccg

SEQ ID NO: 952929 - DNA, 25 bp, Homo sapien
cagggtccgtggcaatgctttgcag

SEQ ID NO: 952930 - DNA, 25 bp, Homo sapien
tctgatacagtccagggtccgtggc

SEQ ID NO: 952931 - DNA, 25 bp, Homo sapien
actgaaccgtggcagcatctgatac

SEQ ID NO: 952932 - DNA, 25 bp, Homo sapien
gctgctccacagacaactcgtggat

SEQ ID NO: 952933 - DNA, 25 bp, Homo sapien
agcccacgcaggcctcggtgatctc

SEQ ID NO: 952934 - DNA, 25 bp, Homo sapien
tccacagacaactcgtggatgctcc

SEQ ID NO: 952935 - DNA, 25 bp, Homo sapien
acagacaactcgtggatgctccggg

SEQ ID NO: 952936 - DNA, 25 bp, Homo sapien
ctttgccgtcggctgtggtggcccc

SEQ ID NO: 952937 - DNA, 25 bp, Homo sapien
ttgccgtcggctgtggtggcccctt

SEQ ID NO: 952938 - DNA, 25 bp, Homo sapien
tttgccgtcggctgtggtggcccct

SEQ ID NO: 952939 - DNA, 25 bp, Homo sapien
tgccgtcggctgtggtggccccttg

SEQ ID NO: 952940 - DNA, 25 bp, Homo sapien
tggcagccctcgatgctcagccaat

SEQ ID NO: 952941 - DNA, 25 bp, Homo sapien
tcggggatagctggctggcagccct

SEQ ID NO: 952942 - DNA, 25 bp, Homo sapien
cagccctcgatgctcagccaatgag

SEQ ID NO: 952943 - DNA, 25 bp, Homo sapien
tggctggcagccctcgatgctcagc

SEQ ID NO: 952944 - DNA, 25 bp, Homo sapien
tgaattgccacgcatggacattggg

SEQ ID NO: 952945 - DNA, 25 bp, Homo sapien
aggtgaattgccacgcatggacatt

SEQ ID NO: 952946 - DNA, 25 bp, Homo sapien
gtcaaggtgaattgccacgcatgga

SEQ ID NO: 952947 - DNA, 25 bp, Homo sapien
gacattggggagttgccccatgcta

SEQ ID NO: 952948 - DNA, 25 bp, Homo sapien
gggtattgatgatgtcgctcagatc

SEQ ID NO: 952949 - DNA, 25 bp, Homo sapien
aggggtattgatgatgtcgctcaga

SEQ ID NO: 952950 - DNA, 25 bp, Homo sapien
aggcagacgtccaggggcacccggg

SEQ ID NO: 952951 - DNA, 25 bp, Homo sapien
tattgatgatgtcgctcagatcaac

SEQ ID NO: 952952 - DNA, 25 bp, Homo sapien
ggcgaagcggaaaggaatgaactcc

SEQ ID NO: 952953 - DNA, 25 bp, Homo sapien
ctcctcatagaagtaaagctcccgg

SEQ ID NO: 952954 - DNA, 25 bp, Homo sapien
cccaccagaggcgaagcggaaagga

SEQ ID NO: 952955 - DNA, 25 bp, Homo sapien
actcctgggcgtggaagccatagag

SEQ ID NO: 952956 - DNA, 25 bp, Homo sapien
ctcgacattctttagcttcaaggcg

SEQ ID NO: 952957 - DNA, 25 bp, Homo sapien
gcttcaaggcgtagtcaatgtcact

SEQ ID NO: 952958 - DNA, 25 bp, Homo sapien
tagtcaatgtcactggtggtgagct

SEQ ID NO: 952959 - DNA, 25 bp, Homo sapien
tctttagcttcaaggcgtagtcaat

SEQ ID NO: 952960 - DNA, 25 bp, Homo sapien
cgatctctttgatgcggtagctgac

SEQ ID NO: 952961 - DNA, 25 bp, Homo sapien
tgtgcgatctctttgatgcggtagc

SEQ ID NO: 952962 - DNA, 25 bp, Homo sapien
tgcgatctctttgatgcggtagctg

SEQ ID NO: 952963 - DNA, 25 bp, Homo sapien
ctgtgcgatctctttgatgcggtag

SEQ ID NO: 952964 - DNA, 25 bp, Homo sapien
gcaggtctcctcctgaatctgggcg

SEQ ID NO: 952965 - DNA, 25 bp, Homo sapien
aatctgggcgatgcccatggattca

SEQ ID NO: 952966 - DNA, 25 bp, Homo sapien
cctcctgaatctgggcgatgcccat

SEQ ID NO: 952967 - DNA, 25 bp, Homo sapien
tgcccatggattcagccaccacctt

SEQ ID NO: 952968 - DNA, 25 bp, Homo sapien
cagtgttgctaagcttcagcttctt

SEQ ID NO: 952969 - DNA, 25 bp, Homo sapien
cacagtgttgctaagcttcagcttc

SEQ ID NO: 952970 - DNA, 25 bp, Homo sapien
tgttgctaagcttcagcttcttctc

SEQ ID NO: 952971 - DNA, 25 bp, Homo sapien
agcacagtgttgctaagcttcagct

SEQ ID NO: 952972 - DNA, 25 bp, Homo sapien
gaaggatgaagcccccggtggagag

SEQ ID NO: 952973 - DNA, 25 bp, Homo sapien
gaagcccccggtggagagacggaga

SEQ ID NO: 952974 - DNA, 25 bp, Homo sapien
atgaagcccccggtggagagacgga

SEQ ID NO: 952975 - DNA, 25 bp, Homo sapien
aggatgaagcccccggtggagagac

SEQ ID NO: 952976 - DNA, 25 bp, Homo sapien
gaactccgagtgtcttatgtccatc

SEQ ID NO: 952977 - DNA, 25 bp, Homo sapien
gagaaagatacaaatctgggctggg

SEQ ID NO: 952978 - DNA, 25 bp, Homo sapien
gagtcagccctgaggtgtaacagag

SEQ ID NO: 952979 - DNA, 25 bp, Homo sapien
aaagaaacgtgagacacagggagag

SEQ ID NO: 952980 - DNA, 25 bp, Homo sapien
gtgagcaaagatctgtgtcattgca

SEQ ID NO: 952981 - DNA, 25 bp, Homo sapien
ttgcagtgagcaaagatctgtgtca

SEQ ID NO: 952982 - DNA, 25 bp, Homo sapien
gcagtgagcaaagatctgtgtcatt

SEQ ID NO: 952983 - DNA, 25 bp, Homo sapien
gagcaaagatctgtgtcattgcact

SEQ ID NO: 952984 - DNA, 25 bp, Homo sapien
gcacaacagcctgggtaacagacgg

SEQ ID NO: 952985 - DNA, 25 bp, Homo sapien
ctggtggtgtgaacctgtcatccca

SEQ ID NO: 952986 - DNA, 25 bp, Homo sapien
cgcttgaactgaggagttggaggct

SEQ ID NO: 952987 - DNA, 25 bp, Homo sapien
gctacttaggaggctgaggcaggag

SEQ ID NO: 952988 - DNA, 25 bp, Homo sapien
gcggtaccctctgccagtaaaggct

SEQ ID NO: 952989 - DNA, 25 bp, Homo sapien
ctacgaatccttcaatacccggcgg

SEQ ID NO: 952990 - DNA, 25 bp, Homo sapien
tcataaaacacgctacagtcacagg

SEQ ID NO: 952991 - DNA, 25 bp, Homo sapien
taacttaagcgagatcccagcagag

SEQ ID NO: 952992 - DNA, 25 bp, Homo sapien
tcctctttccagtccccacaaggga

SEQ ID NO: 952993 - DNA, 25 bp, Homo sapien
cgtcctctttccagtccccacaagg

SEQ ID NO: 952994 - DNA, 25 bp, Homo sapien
aggaaaactctagcggcagccgaga

SEQ ID NO: 952995 - DNA, 25 bp, Homo sapien
ggagcaggaaaactctagcggcagc

SEQ ID NO: 952996 - DNA, 25 bp, Homo sapien
tagcggcagccgagacgctgctcac

SEQ ID NO: 952997 - DNA, 25 bp, Homo sapien
ggtctcctccggggtaccactcaga

SEQ ID NO: 952998 - DNA, 25 bp, Homo sapien
ctgtatccaggaggctacacaccag

SEQ ID NO: 952999 - DNA, 25 bp, Homo sapien
tacacaccagcaaaccgtgaaggag

SEQ ID NO: 953000 - DNA, 25 bp, Homo sapien
agaatgggacactgggtcatggcct

SEQ ID NO: 953001 - DNA, 25 bp, Homo sapien
gaacggacattctctgcgatctata

SEQ ID NO: 953002 - DNA, 25 bp, Homo sapien
cctccgttgtccaggtttaagcaat

SEQ ID NO: 953003 - DNA, 25 bp, Homo sapien
ttacaggcatgagccactgtgccca

SEQ ID NO: 953004 - DNA, 25 bp, Homo sapien
tgcaacctccgttgtccaggtttaa

SEQ ID NO: 953005 - DNA, 25 bp, Homo sapien
taagcaattctcctgccttagcctc

SEQ ID NO: 953006 - DNA, 25 bp, Homo sapien
ttaaaaagttgcttcatgtgaccaa

SEQ ID NO: 953007 - DNA, 25 bp, Homo sapien
aaaaagttgcttcatgtgaccaata

SEQ ID NO: 953008 - DNA, 25 bp, Homo sapien
tcatgtgaccaatatgttttttatt

SEQ ID NO: 953009 - DNA, 25 bp, Homo sapien
aattaaaaagttgcttcatgtgacc

SEQ ID NO: 953010 - DNA, 25 bp, Homo sapien
accaagagatcaagcaatcaagtgt

SEQ ID NO: 953011 - DNA, 25 bp, Homo sapien
aggataattgaaaggagcatgggaa

SEQ ID NO: 953012 - DNA, 25 bp, Homo sapien
gagatcaagcaatcaagtgttatct

SEQ ID NO: 953013 - DNA, 25 bp, Homo sapien
caagagatcaagcaatcaagtgtta

SEQ ID NO: 953014 - DNA, 25 bp, Homo sapien
ctgtccattcgcctatagtccttgt

SEQ ID NO: 953015 - DNA, 25 bp, Homo sapien
gttctgtccattcgcctatagtcct

SEQ ID NO: 953016 - DNA, 25 bp, Homo sapien
ttcagttctgtccattcgcctatag

SEQ ID NO: 953017 - DNA, 25 bp, Homo sapien
ttcctacctaagcttcctcctggcc

SEQ ID NO: 953018 - DNA, 25 bp, Homo sapien
ccttcttcttttcaacaccctccat

SEQ ID NO: 953019 - DNA, 25 bp, Homo sapien
cagcaggaaccttcttcttttcaac

SEQ ID NO: 953020 - DNA, 25 bp, Homo sapien
ttaggcaaacttatttctcaggtgc

SEQ ID NO: 953021 - DNA, 25 bp, Homo sapien
tcagctctgcaaaattccttcgctt

SEQ ID NO: 953022 - DNA, 25 bp, Homo sapien
cccagggtggaatacgatggcgcaa

SEQ ID NO: 953023 - DNA, 25 bp, Homo sapien
tgcccagggtggaatacgatggcgc

SEQ ID NO: 953024 - DNA, 25 bp, Homo sapien
gttgcccagggtggaatacgatggc

SEQ ID NO: 953025 - DNA, 25 bp, Homo sapien
cagggtggaatacgatggcgcaatc

SEQ ID NO: 953026 - DNA, 25 bp, Homo sapien
caggctgcaaacgtaaacataaggg

SEQ ID NO: 953027 - DNA, 25 bp, Homo sapien
gaaaataagttacaggaacagacca

SEQ ID NO: 953028 - DNA, 25 bp, Homo sapien
tttcagttggaagcaatagttggaa

SEQ ID NO: 953029 - DNA, 25 bp, Homo sapien
aactcaacgggaatgaggaagagac

SEQ ID NO: 953030 - DNA, 25 bp, Homo sapien
ccaggcctcttcacccccgtctggg

SEQ ID NO: 953031 - DNA, 25 bp, Homo sapien
gccaggcctcttcacccccgtctgg

SEQ ID NO: 953032 - DNA, 25 bp, Homo sapien
aagagggaacagagctggcacggtg

SEQ ID NO: 953033 - DNA, 25 bp, Homo sapien
accaggaccttgcactcgcgcttgg

SEQ ID NO: 953034 - DNA, 25 bp, Homo sapien
cgcgcttggcaatcttgtccagaga

SEQ ID NO: 953035 - DNA, 25 bp, Homo sapien
gtccagagacaacacagccttgtcc

SEQ ID NO: 953036 - DNA, 25 bp, Homo sapien
cagagacaacacagccttgtccggg

SEQ ID NO: 953037 - DNA, 25 bp, Homo sapien
ccaagtcccggacagcagggctgct

SEQ ID NO: 953038 - DNA, 25 bp, Homo sapien
ggggctgctcttgcgggagaggggc

SEQ ID NO: 953039 - DNA, 25 bp, Homo sapien
ggctgctcttgcgggagaggggccg

SEQ ID NO: 953040 - DNA, 25 bp, Homo sapien
tctccaccaagtcccggacagcagg

SEQ ID NO: 953041 - DNA, 25 bp, Homo sapien
agcgcgctgcccttccgggaaaagc

SEQ ID NO: 953042 - DNA, 25 bp, Homo sapien
ccaaggttgttgaggggcgtgtggc

SEQ ID NO: 953043 - DNA, 25 bp, Homo sapien
aggccacactgaaggtgagcgcgct

SEQ ID NO: 953044 - DNA, 25 bp, Homo sapien
tggcagacgacggagtccagggcag

SEQ ID NO: 953045 - DNA, 25 bp, Homo sapien
tacagcgttcctcattcccacaggg

SEQ ID NO: 953046 - DNA, 25 bp, Homo sapien
gcaaacactacagcgttcctcattc

SEQ ID NO: 953047 - DNA, 25 bp, Homo sapien
cagggaccagcaaacactacagcgt

SEQ ID NO: 953048 - DNA, 25 bp, Homo sapien
gaccagcaaacactacagcgttcct

SEQ ID NO: 953049 - DNA, 25 bp, Homo sapien
tgtgtgcaaggcacgtcacgtatat

SEQ ID NO: 953050 - DNA, 25 bp, Homo sapien
gagaagtagagttcacaccagcgag

SEQ ID NO: 953051 - DNA, 25 bp, Homo sapien
taaactctccatctaggacactggg

SEQ ID NO: 953052 - DNA, 25 bp, Homo sapien
gccacaagtcgcctcctgtgatggg

SEQ ID NO: 953053 - DNA, 25 bp, Homo sapien
acacgggcggtccaagcggacactg

SEQ ID NO: 953054 - DNA, 25 bp, Homo sapien
gggacttacaagaagcggtcatcac

SEQ ID NO: 953055 - DNA, 25 bp, Homo sapien
tgaaacgctcgtaggtccgaacagg

SEQ ID NO: 953056 - DNA, 25 bp, Homo sapien
tcttggagattgttaagcagcgtgt

SEQ ID NO: 953057 - DNA, 25 bp, Homo sapien
gtagatgctctgagtgaagggcagc

SEQ ID NO: 953058 - DNA, 25 bp, Homo sapien
tttggggtagaccactgaaccacag

SEQ ID NO: 953059 - DNA, 25 bp, Homo sapien
cggtagtgggtgtagatgctctgag

SEQ ID NO: 953060 - DNA, 25 bp, Homo sapien
aagggcagctttggggtagaccact

SEQ ID NO: 953061 - DNA, 25 bp, Homo sapien
gcattcagcgggcaggggaagcagc

SEQ ID NO: 953062 - DNA, 25 bp, Homo sapien
ggtaggcggcagaaggagcccatgg

SEQ ID NO: 953063 - DNA, 25 bp, Homo sapien
tcagctgaaacaggaagttgtgttc

SEQ ID NO: 953064 - DNA, 25 bp, Homo sapien
gcagccagaggtcccgggtaggcgg

SEQ ID NO: 953065 - DNA, 25 bp, Homo sapien
acaaggcatggtctccccatgccag

SEQ ID NO: 953066 - DNA, 25 bp, Homo sapien
agaggacaaggcatggtctccccat

SEQ ID NO: 953067 - DNA, 25 bp, Homo sapien
aggacaaggcatggtctccccatgc

SEQ ID NO: 953068 - DNA, 25 bp, Homo sapien
gacaaggcatggtctccccatgcca

SEQ ID NO: 953069 - DNA, 25 bp, Homo sapien
caccagcagcacagagccatcgggc

SEQ ID NO: 953070 - DNA, 25 bp, Homo sapien
ccagcagcacagagccatcgggcat

SEQ ID NO: 953071 - DNA, 25 bp, Homo sapien
cagacattgtccaccagcagcacag

SEQ ID NO: 953072 - DNA, 25 bp, Homo sapien
tccaccagcagcacagagccatcgg

SEQ ID NO: 953073 - DNA, 25 bp, Homo sapien
gacaggtagataactggcgttgaag

SEQ ID NO: 953074 - DNA, 25 bp, Homo sapien
caggtagataactggcgttgaagtt

SEQ ID NO: 953075 - DNA, 25 bp, Homo sapien
ggaggattcggatatcccagatgga

SEQ ID NO: 953076 - DNA, 25 bp, Homo sapien
ggatatcccagatggagatttcctc

SEQ ID NO: 953077 - DNA, 25 bp, Homo sapien
tgtgggagaggaccagcttggctca

SEQ ID NO: 953078 - DNA, 25 bp, Homo sapien
ctcagaatagctggacccctcaggc

SEQ ID NO: 953079 - DNA, 25 bp, Homo sapien
ggaccagcttggctcagaatagctg

SEQ ID NO: 953080 - DNA, 25 bp, Homo sapien
cagcttggctcagaatagctggacc

SEQ ID NO: 953081 - DNA, 25 bp, Homo sapien
tgcccagaggaactgcatccaatca

SEQ ID NO: 953082 - DNA, 25 bp, Homo sapien
ctgcatccaatcagttcccttgttg

SEQ ID NO: 953083 - DNA, 25 bp, Homo sapien
cagttcccttgttgctcccggaggc

SEQ ID NO: 953084 - DNA, 25 bp, Homo sapien
agttcccttgttgctcccggaggct

SEQ ID NO: 953085 - DNA, 25 bp, Homo sapien
tctcagaaccggagggggcagcaga

SEQ ID NO: 953086 - DNA, 25 bp, Homo sapien
ccacagtgaactgccggcatctcag

SEQ ID NO: 953087 - DNA, 25 bp, Homo sapien
gcacggtcaagtgttttccagccac

SEQ ID NO: 953088 - DNA, 25 bp, Homo sapien
ccttgagcacggtcaagtgttttcc

SEQ ID NO: 953089 - DNA, 25 bp, Homo sapien
ggagatcgggtctgcagcaatcgca

SEQ ID NO: 953090 - DNA, 25 bp, Homo sapien
tgggccttgaaagcgctctgctcgc

SEQ ID NO: 953091 - DNA, 25 bp, Homo sapien
tcgcaggtagccttgatctctgacc

SEQ ID NO: 953092 - DNA, 25 bp, Homo sapien
tctctgacctctggtgcctcaatct

SEQ ID NO: 953093 - DNA, 25 bp, Homo sapien
ccagtgaaacggtgagtgggaagat

SEQ ID NO: 953094 - DNA, 25 bp, Homo sapien
tggacacaatcggttcctccacagg

SEQ ID NO: 953095 - DNA, 25 bp, Homo sapien
aagatgacctcatctgtggacacaa

SEQ ID NO: 953096 - DNA, 25 bp, Homo sapien
tccctgggggcagtctatccagtga

SEQ ID NO: 953097 - DNA, 25 bp, Homo sapien
cagcctttccctttaagaccggcag

SEQ ID NO: 953098 - DNA, 25 bp, Homo sapien
aagaggtcaggagcaagtcagaggc

SEQ ID NO: 953099 - DNA, 25 bp, Homo sapien
ttccctttaagaccggcagttcatc

SEQ ID NO: 953100 - DNA, 25 bp, Homo sapien
cagcaaaccgcccctccgtcctgtg

SEQ ID NO: 953101 - DNA, 25 bp, Homo sapien
gggctgcagcctcggaacaaacccc

SEQ ID NO: 953102 - DNA, 25 bp, Homo sapien
cgtggtcgctccccctgaggtagca

SEQ ID NO: 953103 - DNA, 25 bp, Homo sapien
cctgggggctccgaatcctggtcgc

SEQ ID NO: 953104 - DNA, 25 bp, Homo sapien
tccgaatcctggtcgccggcgccgc

SEQ ID NO: 953105 - DNA, 25 bp, Homo sapien
cccaagtacagatggttgcgccggg

SEQ ID NO: 953106 - DNA, 25 bp, Homo sapien
gcacggccgggaagtacatcgagta

SEQ ID NO: 953107 - DNA, 25 bp, Homo sapien
caccagcagaaaacggacagtctcc

SEQ ID NO: 953108 - DNA, 25 bp, Homo sapien
tcgagtagtcgcactgggactccat

SEQ ID NO: 953109 - DNA, 25 bp, Homo sapien
gcggcgaggacggcgcgactgggag

SEQ ID NO: 953110 - DNA, 25 bp, Homo sapien
cgaggacggcgcgactgggagcccg

SEQ ID NO: 953111 - DNA, 25 bp, Homo sapien
gacggcgcgactgggagcccggacc

SEQ ID NO: 953112 - DNA, 25 bp, Homo sapien
gcgcgactgggagcccggaccggag

SEQ ID NO: 953113 - DNA, 25 bp, Homo sapien
ggctggggcggccggagagaccggc

SEQ ID NO: 953114 - DNA, 25 bp, Homo sapien
aggccccggaatctgcgggtgcccg

SEQ ID NO: 953115 - DNA, 25 bp, Homo sapien
gtactgagccgaatgactggagaga

SEQ ID NO: 953116 - DNA, 25 bp, Homo sapien
gaaccgagacccggcagcgccggaa

SEQ ID NO: 953117 - DNA, 25 bp, Homo sapien
tgcgggtgcccggaccgtggaggag

SEQ ID NO: 953118 - DNA, 25 bp, Homo sapien
tcaacaaacatgtcagagagaaatg

SEQ ID NO: 953119 - DNA, 25 bp, Homo sapien
ggacgtatcattccaactcaccacg

SEQ ID NO: 953120 - DNA, 25 bp, Homo sapien
gacaaagactcatcccttctgggag

SEQ ID NO: 953121 - DNA, 25 bp, Homo sapien
gcccctctagggagcttcggtgatg

SEQ ID NO: 953122 - DNA, 25 bp, Homo sapien
gggagagtggccttgaagtcttgag

SEQ ID NO: 953123 - DNA, 25 bp, Homo sapien
gggggaactgcttggcatccagctt

SEQ ID NO: 953124 - DNA, 25 bp, Homo sapien
agctcaggggtagctaggcgctcac

SEQ ID NO: 953125 - DNA, 25 bp, Homo sapien
tcttgaggggcagtgagacggtagg

SEQ ID NO: 953126 - DNA, 25 bp, Homo sapien
agtaagttgcgagcgtagtggtccc

SEQ ID NO: 953127 - DNA, 25 bp, Homo sapien
tatccgtgcccagagactgcggttg

SEQ ID NO: 953128 - DNA, 25 bp, Homo sapien
gacaatgtttcgctagggcctctcg

SEQ ID NO: 953129 - DNA, 25 bp, Homo sapien
tagaagcctcgaggattggccagga

SEQ ID NO: 953130 - DNA, 25 bp, Homo sapien
tccccatagcggtgaagcaggctca

SEQ ID NO: 953131 - DNA, 25 bp, Homo sapien
cccggatttatgtgtcttcaggaac

SEQ ID NO: 953132 - DNA, 25 bp, Homo sapien
tggaagagctttgggtagccaaact

SEQ ID NO: 953133 - DNA, 25 bp, Homo sapien
tagccttttaccctagaggcctgga

SEQ ID NO: 953134 - DNA, 25 bp, Homo sapien
cggggtgggcaggacggaagggctg

SEQ ID NO: 953135 - DNA, 25 bp, Homo sapien
ggcaggacggaagggctggtcgtag

SEQ ID NO: 953136 - DNA, 25 bp, Homo sapien
cggaagggctggtcgtagggatggg

SEQ ID NO: 953137 - DNA, 25 bp, Homo sapien
gacggaagggctggtcgtagggatg

SEQ ID NO: 953138 - DNA, 25 bp, Homo sapien
ctggagtgcaaagccaatggtcatg

SEQ ID NO: 953139 - DNA, 25 bp, Homo sapien
aagggccctcccaagagctggagtg

SEQ ID NO: 953140 - DNA, 25 bp, Homo sapien
ccaatggtcatgaagactcccagag

SEQ ID NO: 953141 - DNA, 25 bp, Homo sapien
aggctccgaggtccccagagccgca

SEQ ID NO: 953142 - DNA, 25 bp, Homo sapien
tggcacagggaagggtgaggtgaca

SEQ ID NO: 953143 - DNA, 25 bp, Homo sapien
acagggaagggtgaggtgacagaga

SEQ ID NO: 953144 - DNA, 25 bp, Homo sapien
gcacagggaagggtgaggtgacaga

SEQ ID NO: 953145 - DNA, 25 bp, Homo sapien
gtggcacagggaagggtgaggtgac

SEQ ID NO: 953146 - DNA, 25 bp, Homo sapien
cggaaggcactggttggagatcggg

SEQ ID NO: 953147 - DNA, 25 bp, Homo sapien
atcggggggtcattccccaggcctg

SEQ ID NO: 953148 - DNA, 25 bp, Homo sapien
ctcacagtcttggttgagtctgccc

SEQ ID NO: 953149 - DNA, 25 bp, Homo sapien
gctgcggaaggcactggttggagat

SEQ ID NO: 953150 - DNA, 25 bp, Homo sapien
taggtggccccacaactactgtctc

SEQ ID NO: 953151 - DNA, 25 bp, Homo sapien
ttaacacagtcaggtcagaccatgg

SEQ ID NO: 953152 - DNA, 25 bp, Homo sapien
gagaaaaagccccagctcgtgaatg

SEQ ID NO: 953153 - DNA, 25 bp, Homo sapien
gaatgaggatcagacaggacacagg

SEQ ID NO: 953154 - DNA, 25 bp, Homo sapien
aaagataaggagaaaggcgcaaaca

SEQ ID NO: 953155 - DNA, 25 bp, Homo sapien
tttccaaccttatcagtgcacccgg

SEQ ID NO: 953156 - DNA, 25 bp, Homo sapien
cagagagactatgacacaaagataa

SEQ ID NO: 953157 - DNA, 25 bp, Homo sapien
aaccttatcagtgcacccggaggag

SEQ ID NO: 953158 - DNA, 25 bp, Homo sapien
ctttgatcgcggttctaggtctctc

SEQ ID NO: 953159 - DNA, 25 bp, Homo sapien
gctgctgcagctttgatcgcggttc

SEQ ID NO: 953160 - DNA, 25 bp, Homo sapien
gcagcaagggaaatcgggccgggcc

SEQ ID NO: 953161 - DNA, 25 bp, Homo sapien
ccgactcttggctcagctcaacttt

SEQ ID NO: 953162 - DNA, 25 bp, Homo sapien
tggactcaaacactgaaacatggag

SEQ ID NO: 953163 - DNA, 25 bp, Homo sapien
tggcagaggtcacgagatgagcacc

SEQ ID NO: 953164 - DNA, 25 bp, Homo sapien
ccttagagggctagagactatacct

SEQ ID NO: 953165 - DNA, 25 bp, Homo sapien
gcatccagctggtccatttctgaga

SEQ ID NO: 953166 - DNA, 25 bp, Homo sapien
cagcccccttcgactcctccccagg

SEQ ID NO: 953167 - DNA, 25 bp, Homo sapien
ctgcaaagtcccttctctaccctct

SEQ ID NO: 953168 - DNA, 25 bp, Homo sapien
caaagtcccttctctaccctctctg

SEQ ID NO: 953169 - DNA, 25 bp, Homo sapien
ctctgcagcccccttcgactcctcc

SEQ ID NO: 953170 - DNA, 25 bp, Homo sapien
gaacccttctgatgctagggcaccc

SEQ ID NO: 953171 - DNA, 25 bp, Homo sapien
gggaaagggccatgaacccttctga

SEQ ID NO: 953172 - DNA, 25 bp, Homo sapien
gggccatgaacccttctgatgctag

SEQ ID NO: 953173 - DNA, 25 bp, Homo sapien
catgaacccttctgatgctagggca

SEQ ID NO: 953174 - DNA, 25 bp, Homo sapien
ttatcgaggtccaagcagggccagg

SEQ ID NO: 953175 - DNA, 25 bp, Homo sapien
tggtttgggtgtgaaaaccaataga

SEQ ID NO: 953176 - DNA, 25 bp, Homo sapien
ctccggccctggttgtagcgggcac

SEQ ID NO: 953177 - DNA, 25 bp, Homo sapien
tcccttctaggagggtatggaggcc

SEQ ID NO: 953178 - DNA, 25 bp, Homo sapien
catcccttctaggagggtatggagg

SEQ ID NO: 953179 - DNA, 25 bp, Homo sapien
gccatccagtcatctgcatactgct

SEQ ID NO: 953180 - DNA, 25 bp, Homo sapien
ccgttttcattctggccgtggccgc

SEQ ID NO: 953181 - DNA, 25 bp, Homo sapien
agctgtagccgacgccgccgtgtcg

SEQ ID NO: 953182 - DNA, 25 bp, Homo sapien
tcgtgtcccagtgcggccgttttca

SEQ ID NO: 953183 - DNA, 25 bp, Homo sapien
ccgaggcgtccaccttgagctcggg

SEQ ID NO: 953184 - DNA, 25 bp, Homo sapien
gcgagcagagcagccccgaagcgcc

SEQ ID NO: 953185 - DNA, 25 bp, Homo sapien
gagcagagcagccccgaagcgccag

SEQ ID NO: 953186 - DNA, 25 bp, Homo sapien
ctgcgagcagagcagccccgaagcg

SEQ ID NO: 953187 - DNA, 25 bp, Homo sapien
tgcgagcagagcagccccgaagcgc

SEQ ID NO: 953188 - DNA, 25 bp, Homo sapien
cgctgccatgcgagagtctccgcac

SEQ ID NO: 953189 - DNA, 25 bp, Homo sapien
tccagcgaggcgtccgctgccatgc

SEQ ID NO: 953190 - DNA, 25 bp, Homo sapien
ctccagcgaggcgtccgctgccatg

SEQ ID NO: 953191 - DNA, 25 bp, Homo sapien
gtccgctgccatgcgagagtctccg

SEQ ID NO: 953192 - DNA, 25 bp, Homo sapien
ccgcatccgggccagacgctcgcgg

SEQ ID NO: 953193 - DNA, 25 bp, Homo sapien
atccgggccagacgctcgcggagct

SEQ ID NO: 953194 - DNA, 25 bp, Homo sapien
agaagccccgcatccgggccagacg

SEQ ID NO: 953195 - DNA, 25 bp, Homo sapien
ccagaagccccgcatccgggccaga

SEQ ID NO: 953196 - DNA, 25 bp, Homo sapien
ctcggtcaccatcgaccacagccgg

SEQ ID NO: 953197 - DNA, 25 bp, Homo sapien
ctgcggccgtcgtgggccgctcctc

SEQ ID NO: 953198 - DNA, 25 bp, Homo sapien
ggggctcgacggttgcgggcaggca

SEQ ID NO: 953199 - DNA, 25 bp, Homo sapien
tcgggggggccgcactcctgaaaca

SEQ ID NO: 953200 - DNA, 25 bp, Homo sapien
tgcggcaccgggaagagacctcaca

SEQ ID NO: 953201 - DNA, 25 bp, Homo sapien
gggaaaccacactgcgtccccactc

SEQ ID NO: 953202 - DNA, 25 bp, Homo sapien
gatcccctatactgcctctctgaca

SEQ ID NO: 953203 - DNA, 25 bp, Homo sapien
actctgaccccagagtctcttccca

SEQ ID NO: 953204 - DNA, 25 bp, Homo sapien
atggactcggccgtcagctcaaagg

SEQ ID NO: 953205 - DNA, 25 bp, Homo sapien
tgcaggtacatcaaaccctccgaga

SEQ ID NO: 953206 - DNA, 25 bp, Homo sapien
tgggcggacaccttcgcactgtttt

SEQ ID NO: 953207 - DNA, 25 bp, Homo sapien
cctggagcttatcagccaggatcag

SEQ ID NO: 953208 - DNA, 25 bp, Homo sapien
gatactgaactaggatgttcctgaa

SEQ ID NO: 953209 - DNA, 25 bp, Homo sapien
catgtatccccccaatttggcttta

SEQ ID NO: 953210 - DNA, 25 bp, Homo sapien
tgttcctgaaaatcctcactcgggc

SEQ ID NO: 953211 - DNA, 25 bp, Homo sapien
ctcactcgggccttagagaagcagc

SEQ ID NO: 953212 - DNA, 25 bp, Homo sapien
atcatgcccagccggccaagctggt

SEQ ID NO: 953213 - DNA, 25 bp, Homo sapien
catcatgcccagccggccaagctgg

SEQ ID NO: 953214 - DNA, 25 bp, Homo sapien
tcatgcccagccggccaagctggtc

SEQ ID NO: 953215 - DNA, 25 bp, Homo sapien
catgcccagccggccaagctggtct

SEQ ID NO: 953216 - DNA, 25 bp, Homo sapien
tcttgagatgacgtctagctatgtt

SEQ ID NO: 953217 - DNA, 25 bp, Homo sapien
gggacagccgatgagacgcatcaga

SEQ ID NO: 953218 - DNA, 25 bp, Homo sapien
gacagccacgaaccacgttgaggca

SEQ ID NO: 953219 - DNA, 25 bp, Homo sapien
gatgagacgcatcagagcctggctg

SEQ ID NO: 953220 - DNA, 25 bp, Homo sapien
ctgctgctgagacagccacgaacca

SEQ ID NO: 953221 - DNA, 25 bp, Homo sapien
cattcaaggacaagagtgagcccat

SEQ ID NO: 953222 - DNA, 25 bp, Homo sapien
taattcatcctaggacaccagggcc

SEQ ID NO: 953223 - DNA, 25 bp, Homo sapien
tactgctatggagatgagcaggccc

SEQ ID NO: 953224 - DNA, 25 bp, Homo sapien
tcagagatcatggatcgtggaccat

SEQ ID NO: 953225 - DNA, 25 bp, Homo sapien
ggccctgcacaaaggctcgggcagc

SEQ ID NO: 953226 - DNA, 25 bp, Homo sapien
aagcgcttcgctgaccacatttctt

SEQ ID NO: 953227 - DNA, 25 bp, Homo sapien
gctcgggcagccaccagggtccggg

SEQ ID NO: 953228 - DNA, 25 bp, Homo sapien
gcgcttcgctgaccacatttcttcc

SEQ ID NO: 953229 - DNA, 25 bp, Homo sapien
ccatagaagtctcgcagccgagaga

SEQ ID NO: 953230 - DNA, 25 bp, Homo sapien
tgtgcccagaaatccgccagggtgt

SEQ ID NO: 953231 - DNA, 25 bp, Homo sapien
catcggtagatgaggccaagcgtga

SEQ ID NO: 953232 - DNA, 25 bp, Homo sapien
aatatgagggcgtgctgggcataca

SEQ ID NO: 953233 - DNA, 25 bp, Homo sapien
tcactggaacagcaggtgtactcct

SEQ ID NO: 953234 - DNA, 25 bp, Homo sapien
tgtgtgaaccagaaaggagccgctg

SEQ ID NO: 953235 - DNA, 25 bp, Homo sapien
agaaaggagccgctgtcctccacca

SEQ ID NO: 953236 - DNA, 25 bp, Homo sapien
caggcctcggaaggtggcctcagtc

SEQ ID NO: 953237 - DNA, 25 bp, Homo sapien
ttacaggaggagaacagacattact

SEQ ID NO: 953238 - DNA, 25 bp, Homo sapien
cacgggatcatctatttaacagctg

SEQ ID NO: 953239 - DNA, 25 bp, Homo sapien
caagttcactcccattagccacggg

SEQ ID NO: 953240 - DNA, 25 bp, Homo sapien
cataggagggttattgtgatcccgg

SEQ ID NO: 953241 - DNA, 25 bp, Homo sapien
gggtctctgcacaactccgggtgac

SEQ ID NO: 953242 - DNA, 25 bp, Homo sapien
agcacctgccgggtctctgcacaac

SEQ ID NO: 953243 - DNA, 25 bp, Homo sapien
aactccgggtgacctttgcctcgct

SEQ ID NO: 953244 - DNA, 25 bp, Homo sapien
cagaagcaggagaggtcgcagcgcg

SEQ ID NO: 953245 - DNA, 25 bp, Homo sapien
gctgctccggaaaactgaataccga

SEQ ID NO: 953246 - DNA, 25 bp, Homo sapien
tgaataccgagcacgatagctggac

SEQ ID NO: 953247 - DNA, 25 bp, Homo sapien
ccaggacggcaaagtgggtcctaag

SEQ ID NO: 953248 - DNA, 25 bp, Homo sapien
gcagagcctcccaaactcgggaatc

SEQ ID NO: 953249 - DNA, 25 bp, Homo sapien
agcctctagagagggctgtgtctga

SEQ ID NO: 953250 - DNA, 25 bp, Homo sapien
agtttacacttctgaagcctctaga

SEQ ID NO: 953251 - DNA, 25 bp, Homo sapien
actcgtagggttaggcagtcctcct

SEQ ID NO: 953252 - DNA, 25 bp, Homo sapien
tcaggcgatcgtcccgcttcattct

SEQ ID NO: 953253 - DNA, 25 bp, Homo sapien
caaatagtgcaaggggacaccagtc

SEQ ID NO: 953254 - DNA, 25 bp, Homo sapien
tgacctcatgctggcagagagagat

SEQ ID NO: 953255 - DNA, 25 bp, Homo sapien
taggcaagtcggcttaacctccttg

SEQ ID NO: 953256 - DNA, 25 bp, Homo sapien
aagcctttgtacaggcctgggtact

SEQ ID NO: 953257 - DNA, 25 bp, Homo sapien
aatttgggtccatccgcttaagaga

SEQ ID NO: 953258 - DNA, 25 bp, Homo sapien
gaatttgggtccatccgcttaagag

SEQ ID NO: 953259 - DNA, 25 bp, Homo sapien
atttgggtccatccgcttaagagat

SEQ ID NO: 953260 - DNA, 25 bp, Homo sapien
gccgtcttaggattttagggtcatc

SEQ ID NO: 953261 - DNA, 25 bp, Homo sapien
ggtatgctgatggttaaaagaagac

SEQ ID NO: 953262 - DNA, 25 bp, Homo sapien
tgctctgacgtctcattttcattgc

SEQ ID NO: 953263 - DNA, 25 bp, Homo sapien
gtccactccaggacaggccgtctta

SEQ ID NO: 953264 - DNA, 25 bp, Homo sapien
tagtgtctaagacccctcctatgag

SEQ ID NO: 953265 - DNA, 25 bp, Homo sapien
ggcctcccagtgaactcgctttaaa

SEQ ID NO: 953266 - DNA, 25 bp, Homo sapien
caaccattgacaagggaggccaaat

SEQ ID NO: 953267 - DNA, 25 bp, Homo sapien
cagctgggtctgtcataagagtaac

SEQ ID NO: 953268 - DNA, 25 bp, Homo sapien
tatggacatataggtacttcagccc

SEQ ID NO: 953269 - DNA, 25 bp, Homo sapien
tcagccctaaagacttaagtatgtc

SEQ ID NO: 953270 - DNA, 25 bp, Homo sapien
cagatctctggcctttatctactag

SEQ ID NO: 953271 - DNA, 25 bp, Homo sapien
caataatggcactatggacgttgcg

SEQ ID NO: 953272 - DNA, 25 bp, Homo sapien
tctgaacctttagcgagttaaatct

SEQ ID NO: 953273 - DNA, 25 bp, Homo sapien
tgttaagtgtgcaagactattgtct

SEQ ID NO: 953274 - DNA, 25 bp, Homo sapien
gtattcacaacctcttcaccaggaa

SEQ ID NO: 953275 - DNA, 25 bp, Homo sapien
aatgctaatgacaatctgaaccttt

SEQ ID NO: 953276 - DNA, 25 bp, Homo sapien
gcctagaccggaatgtactggtgca

SEQ ID NO: 953277 - DNA, 25 bp, Homo sapien
ctgttgcctagaccggaatgtactg

SEQ ID NO: 953278 - DNA, 25 bp, Homo sapien
gaccggaatgtactggtgcagtcat

SEQ ID NO: 953279 - DNA, 25 bp, Homo sapien
ctctgttgcctagaccggaatgtac

SEQ ID NO: 953280 - DNA, 25 bp, Homo sapien
gctggcctttggttatggaatctga

SEQ ID NO: 953281 - DNA, 25 bp, Homo sapien
gggatgatgaatgccctcttcaggg

SEQ ID NO: 953282 - DNA, 25 bp, Homo sapien
gggcctctctcattgaagcagctgg

SEQ ID NO: 953283 - DNA, 25 bp, Homo sapien
tgttcatcggtacaggtgagctaat

SEQ ID NO: 953284 - DNA, 25 bp, Homo sapien
gagatccgtgctatctgcattgagg

SEQ ID NO: 953285 - DNA, 25 bp, Homo sapien
gaattaggctgtacaaggctggtgt

SEQ ID NO: 953286 - DNA, 25 bp, Homo sapien
tgtctgtgtctagggatgtccttcc

SEQ ID NO: 953287 - DNA, 25 bp, Homo sapien
tggatgcaaagctacagcacgtctt

SEQ ID NO: 953288 - DNA, 25 bp, Homo sapien
catggacagagagtatgatgtggca

SEQ ID NO: 953289 - DNA, 25 bp, Homo sapien
cattcctgagttgcagtatgttgag

SEQ ID NO: 953290 - DNA, 25 bp, Homo sapien
ctgatacttatccttaagtgagtcc

SEQ ID NO: 953291 - DNA, 25 bp, Homo sapien
catctgtgcaggttgactgaggtca

SEQ ID NO: 953292 - DNA, 25 bp, Homo sapien
gacactgtaggaaggagagcgatat

SEQ ID NO: 953293 - DNA, 25 bp, Homo sapien
tgcataggacctacaagtgggctgg

SEQ ID NO: 953294 - DNA, 25 bp, Homo sapien
tgaccacgctgcttacttagtagac

SEQ ID NO: 953295 - DNA, 25 bp, Homo sapien
taatcagtaaccacttcgtagggta

SEQ ID NO: 953296 - DNA, 25 bp, Homo sapien
tactcagtcttgacaggcaatgtgc

SEQ ID NO: 953297 - DNA, 25 bp, Homo sapien
aactgggagggattgcttgcttcac

SEQ ID NO: 953298 - DNA, 25 bp, Homo sapien
tgtacaaggcagcaacggtggcatc

SEQ ID NO: 953299 - DNA, 25 bp, Homo sapien
tccagtgcccggcaagcttcagagg

SEQ ID NO: 953300 - DNA, 25 bp, Homo sapien
tccatgtgagccaggtgattcccag

SEQ ID NO: 953301 - DNA, 25 bp, Homo sapien
tgaggtatataatctggcagccact

SEQ ID NO: 953302 - DNA, 25 bp, Homo sapien
ttcactttcttcagccgggcggact

SEQ ID NO: 953303 - DNA, 25 bp, Homo sapien
gactcgctgggagctctatgagcca

SEQ ID NO: 953304 - DNA, 25 bp, Homo sapien
ccatgacttggaaacataatagcac

SEQ ID NO: 953305 - DNA, 25 bp, Homo sapien
aaggcactgggagttcagaataagg

SEQ ID NO: 953306 - DNA, 25 bp, Homo sapien
gggatatccaatggtttcaagctta

SEQ ID NO: 953307 - DNA, 25 bp, Homo sapien
ttcaagcttaaaggagaagtaggag

SEQ ID NO: 953308 - DNA, 25 bp, Homo sapien
cattggaacgccaacaaggaagtga

SEQ ID NO: 953309 - DNA, 25 bp, Homo sapien
taaaagtagtagatggtgtcccaag

SEQ ID NO: 953310 - DNA, 25 bp, Homo sapien
tttgccttgagttttggaccccagc

SEQ ID NO: 953311 - DNA, 25 bp, Homo sapien
ttcatcgagatgagggacctggccc

SEQ ID NO: 953312 - DNA, 25 bp, Homo sapien
caattttatcaatcaggcagtggca

SEQ ID NO: 953313 - DNA, 25 bp, Homo sapien
tgcaggagccatttcagcctattgg

SEQ ID NO: 953314 - DNA, 25 bp, Homo sapien
taggacatgagaccaaagagggtac

SEQ ID NO: 953315 - DNA, 25 bp, Homo sapien
tcagtttgctgacttaggaacccaa

SEQ ID NO: 953316 - DNA, 25 bp, Homo sapien
ttctggctgctgtgtcgaaaacgac

SEQ ID NO: 953317 - DNA, 25 bp, Homo sapien
tactctgagtgcagtaggaaaacca

SEQ ID NO: 953318 - DNA, 25 bp, Homo sapien
tgtaggagtccagcccaagatgcaa

SEQ ID NO: 953319 - DNA, 25 bp, Homo sapien
ttttgaggaacgacaggatcaacct

SEQ ID NO: 953320 - DNA, 25 bp, Homo sapien
tgcttaaacccataggctgagcgct

SEQ ID NO: 953321 - DNA, 25 bp, Homo sapien
ggcatcacaccattaatagctcagg

SEQ ID NO: 953322 - DNA, 25 bp, Homo sapien
tggacaaggcctagctacaattctc

SEQ ID NO: 953323 - DNA, 25 bp, Homo sapien
tttaaggacatgaacgtgagtggct

SEQ ID NO: 953324 - DNA, 25 bp, Homo sapien
ccctgggctgtggttaatgtatgca

SEQ ID NO: 953325 - DNA, 25 bp, Homo sapien
tctcctcgtcccaggaagaaagtct

SEQ ID NO: 953326 - DNA, 25 bp, Homo sapien
agggcctgccaagcctaacagagag

SEQ ID NO: 953327 - DNA, 25 bp, Homo sapien
tgtttcatggttccctgctgtagca

SEQ ID NO: 953328 - DNA, 25 bp, Homo sapien
tagctttaaaatgcatctctctgag

SEQ ID NO: 953329 - DNA, 25 bp, Homo sapien
tcattgatcctgcttcattcccagc

SEQ ID NO: 953330 - DNA, 25 bp, Homo sapien
caggcaccgagaggtcaaggttctt

SEQ ID NO: 953331 - DNA, 25 bp, Homo sapien
cagctgatgcggtgagcttttctca

SEQ ID NO: 953332 - DNA, 25 bp, Homo sapien
gtctcacccattgcctctctgtggg

SEQ ID NO: 953333 - DNA, 25 bp, Homo sapien
tggacttgttttagccacagagcac

SEQ ID NO: 953334 - DNA, 25 bp, Homo sapien
ctgtctcacccattgcctctctgtg

SEQ ID NO: 953335 - DNA, 25 bp, Homo sapien
tgtcgcccactgtgaggggattcct

SEQ ID NO: 953336 - DNA, 25 bp, Homo sapien
tcaaatgaagaacggcaggatacag

SEQ ID NO: 953337 - DNA, 25 bp, Homo sapien
ccttatggaagaggacgaggaagaa

SEQ ID NO: 953338 - DNA, 25 bp, Homo sapien
ctgtcagcacaatcgggaaactact

SEQ ID NO: 953339 - DNA, 25 bp, Homo sapien
caggatacagacatggtgagtagac

SEQ ID NO: 953340 - DNA, 25 bp, Homo sapien
cctggcatttggagtgaggtgacat

SEQ ID NO: 953341 - DNA, 25 bp, Homo sapien
ggttggaatagcactctcgctccca

SEQ ID NO: 953342 - DNA, 25 bp, Homo sapien
ggtgacatgagtgctagtcctcaac

SEQ ID NO: 953343 - DNA, 25 bp, Homo sapien
ggaggtcattcagtccaagtggcag

SEQ ID NO: 953344 - DNA, 25 bp, Homo sapien
tgtaacagaattccatagactggtg

SEQ ID NO: 953345 - DNA, 25 bp, Homo sapien
cttataaatggaaaagggctatgtc

SEQ ID NO: 953346 - DNA, 25 bp, Homo sapien
tataaatggaaaagggctatgtctg

SEQ ID NO: 953347 - DNA, 25 bp, Homo sapien
aaatggaaaagggctatgtctgagt

SEQ ID NO: 953348 - DNA, 25 bp, Homo sapien
tcttccagcctgtagactgctggct

SEQ ID NO: 953349 - DNA, 25 bp, Homo sapien
gctgaagtccaagggttgggttctg

SEQ ID NO: 953350 - DNA, 25 bp, Homo sapien
ggtgagggccttcttccagcctgta

SEQ ID NO: 953351 - DNA, 25 bp, Homo sapien
tgctggcttctagttgtatcctcac

SEQ ID NO: 953352 - DNA, 25 bp, Homo sapien
tgataccttcaaaccagagactaga

SEQ ID NO: 953353 - DNA, 25 bp, Homo sapien
ctctggcctgggcttagaagggcat

SEQ ID NO: 953354 - DNA, 25 bp, Homo sapien
agtcagcaggccaagaagcgctctg

SEQ ID NO: 953355 - DNA, 25 bp, Homo sapien
gtcttgtgctcagaaggagaaacca

SEQ ID NO: 953356 - DNA, 25 bp, Homo sapien
tataggatttctgacaggactctgg

SEQ ID NO: 953357 - DNA, 25 bp, Homo sapien
ggcccagcatatagatgtccccaca

SEQ ID NO: 953358 - DNA, 25 bp, Homo sapien
tttgaatccacacgttcccaaggtg

SEQ ID NO: 953359 - DNA, 25 bp, Homo sapien
tcatcaaattgacaggccatagcct

SEQ ID NO: 953360 - DNA, 25 bp, Homo sapien
actcagacagacttgtttgctcttg

SEQ ID NO: 953361 - DNA, 25 bp, Homo sapien
gcagtatttgaagacggctgttgtc

SEQ ID NO: 953362 - DNA, 25 bp, Homo sapien
tagactgccacagtgcagcctcagg

SEQ ID NO: 953363 - DNA, 25 bp, Homo sapien
tgctcttgttttgccttgtggagca

SEQ ID NO: 953364 - DNA, 25 bp, Homo sapien
ccacgtgtaggtgttcctgccagca

SEQ ID NO: 953365 - DNA, 25 bp, Homo sapien
gaatctgggagcttgacaccatgct

SEQ ID NO: 953366 - DNA, 25 bp, Homo sapien
gatgccatgctagttagtgggccca

SEQ ID NO: 953367 - DNA, 25 bp, Homo sapien
tgtagccatagcaaccggaacaggg

SEQ ID NO: 953368 - DNA, 25 bp, Homo sapien
aaaatcatggttcaacattttctga

SEQ ID NO: 953369 - DNA, 25 bp, Homo sapien
aatcatggttcaacattttctgaag

SEQ ID NO: 953370 - DNA, 25 bp, Homo sapien
tctgaagttcagttgaaagttcagt

SEQ ID NO: 953371 - DNA, 25 bp, Homo sapien
cattttctgaagttcagttgaaagt

SEQ ID NO: 953372 - DNA, 25 bp, Homo sapien
gacaggcattgtctgggagcacaaa

SEQ ID NO: 953373 - DNA, 25 bp, Homo sapien
tgatttcccggcacagacaacagtg

SEQ ID NO: 953374 - DNA, 25 bp, Homo sapien
taatgaccttcataactgccaggag

SEQ ID NO: 953375 - DNA, 25 bp, Homo sapien
gaacaggtcagaggatgatttcccg

SEQ ID NO: 953376 - DNA, 25 bp, Homo sapien
tgtagatgtccagccctactaggtc

SEQ ID NO: 953377 - DNA, 25 bp, Homo sapien
ttgcccagcctggtaagtgatgcag

SEQ ID NO: 953378 - DNA, 25 bp, Homo sapien
ctgaggccagcttaggtagcaggca

SEQ ID NO: 953379 - DNA, 25 bp, Homo sapien
tgaagggttcatgccagcaagcccc

SEQ ID NO: 953380 - DNA, 25 bp, Homo sapien
agtgcgagtcatctctatcgataga

SEQ ID NO: 953381 - DNA, 25 bp, Homo sapien
accgcgctgctatttatggtattca

SEQ ID NO: 953382 - DNA, 25 bp, Homo sapien
tatcgatagataaggtcacatgagt

SEQ ID NO: 953383 - DNA, 25 bp, Homo sapien
ctgaatgcctgaccgcgctgctatt

SEQ ID NO: 953384 - DNA, 25 bp, Homo sapien
gggcatgacagagggttcacactcc

SEQ ID NO: 953385 - DNA, 25 bp, Homo sapien
cctgtccgggcatgacagagggttc

SEQ ID NO: 953386 - DNA, 25 bp, Homo sapien
tctgctaagtaacagttatcttccc

SEQ ID NO: 953387 - DNA, 25 bp, Homo sapien
cactggcaccactgctagaccaagg

SEQ ID NO: 953388 - DNA, 25 bp, Homo sapien
ggcagtgtcccaatcttagagatct

SEQ ID NO: 953389 - DNA, 25 bp, Homo sapien
gtctctgctccaatcccaccatgtt

SEQ ID NO: 953390 - DNA, 25 bp, Homo sapien
acctgtggctgcctagatagggctg

SEQ ID NO: 953391 - DNA, 25 bp, Homo sapien
gacacctgtggctgcctagataggg

SEQ ID NO: 953392 - DNA, 25 bp, Homo sapien
tgacacagaacctgttgctcgggct

SEQ ID NO: 953393 - DNA, 25 bp, Homo sapien
gtgacacagaacctgttgctcgggc

SEQ ID NO: 953394 - DNA, 25 bp, Homo sapien
ctggtgatgccgaggttctcggctg

SEQ ID NO: 953395 - DNA, 25 bp, Homo sapien
cacaggatggtgaactctgatgaca

SEQ ID NO: 953396 - DNA, 25 bp, Homo sapien
aggatggtgaactctgatgacaacg

SEQ ID NO: 953397 - DNA, 25 bp, Homo sapien
caggatggtgaactctgatgacaac

SEQ ID NO: 953398 - DNA, 25 bp, Homo sapien
ggatggtgaactctgatgacaacgt

SEQ ID NO: 953399 - DNA, 25 bp, Homo sapien
caaagggcaggtcccgcttgagcac

SEQ ID NO: 953400 - DNA, 25 bp, Homo sapien
ggtgacaaagggcaggtcccgcttg

SEQ ID NO: 953401 - DNA, 25 bp, Homo sapien
gtgggtgacaaagggcaggtcccgc

SEQ ID NO: 953402 - DNA, 25 bp, Homo sapien
tgacaaagggcaggtcccgcttgag

SEQ ID NO: 953403 - DNA, 25 bp, Homo sapien
caccctggaatagcgtggaagggca

SEQ ID NO: 953404 - DNA, 25 bp, Homo sapien
gagtgtgtcagaggcgggcccaagt

SEQ ID NO: 953405 - DNA, 25 bp, Homo sapien
gggcaccaacctctcaccctgagac

SEQ ID NO: 953406 - DNA, 25 bp, Homo sapien
ggcgtgtctgtgatggtcagctcac

SEQ ID NO: 953407 - DNA, 25 bp, Homo sapien
ttggtcatgccaataggctgggagc

SEQ ID NO: 953408 - DNA, 25 bp, Homo sapien
tcttggtcatgccaataggctggga

SEQ ID NO: 953409 - DNA, 25 bp, Homo sapien
atcttggtcatgccaataggctggg

SEQ ID NO: 953410 - DNA, 25 bp, Homo sapien
catgccaataggctgggagctggag

SEQ ID NO: 953411 - DNA, 25 bp, Homo sapien
ttgctcactgtacactcaacggtcc

SEQ ID NO: 953412 - DNA, 25 bp, Homo sapien
gatttgccgaagatcacttaggaaa

SEQ ID NO: 953413 - DNA, 25 bp, Homo sapien
aactctggacctggaaggctcagtg

SEQ ID NO: 953414 - DNA, 25 bp, Homo sapien
ggctaaaaagagaggtgctgaggct

SEQ ID NO: 953415 - DNA, 25 bp, Homo sapien
attgagtgaggcccatgcctgttcc

SEQ ID NO: 953416 - DNA, 25 bp, Homo sapien
gaaattgagtgaggcccatgcctgt

SEQ ID NO: 953417 - DNA, 25 bp, Homo sapien
gagtgaggcccatgcctgttcctac

SEQ ID NO: 953418 - DNA, 25 bp, Homo sapien
agggaaattgagtgaggcccatgcc

SEQ ID NO: 953419 - DNA, 25 bp, Homo sapien
ctgagaaggaccagtggtcagccag

SEQ ID NO: 953420 - DNA, 25 bp, Homo sapien
tgagaaggaccagtggtcagccagt

SEQ ID NO: 953421 - DNA, 25 bp, Homo sapien
gatatagcctccgaggtggtgaagt

SEQ ID NO: 953422 - DNA, 25 bp, Homo sapien
ggtgctgacataaccaagactctgc

SEQ ID NO: 953423 - DNA, 25 bp, Homo sapien
gaggcctgtctcttatcaaagccgc

SEQ ID NO: 953424 - DNA, 25 bp, Homo sapien
cagcggaagcggctgctgatatagc

SEQ ID NO: 953425 - DNA, 25 bp, Homo sapien
ccccaggagactctaccccaactca

SEQ ID NO: 953426 - DNA, 25 bp, Homo sapien
ctgtcttccccttttttacgtgctg

SEQ ID NO: 953427 - DNA, 25 bp, Homo sapien
aacccagccgaacaaccttcagtgg

SEQ ID NO: 953428 - DNA, 25 bp, Homo sapien
caggaatttcctacttcactccttg

SEQ ID NO: 953429 - DNA, 25 bp, Homo sapien
cgacaatgatagtgtaatcctctgg

SEQ ID NO: 953430 - DNA, 25 bp, Homo sapien
tccttcctcatcgacaatgatagtg

SEQ ID NO: 953431 - DNA, 25 bp, Homo sapien
cctcatcgacaatgatagtgtaatc

SEQ ID NO: 953432 - DNA, 25 bp, Homo sapien
taggaatccttcctcatcgacaatg

SEQ ID NO: 953433 - DNA, 25 bp, Homo sapien
aactcaagactggactacccttctg

SEQ ID NO: 953434 - DNA, 25 bp, Homo sapien
tactcgaaggtcactctgagatccg

SEQ ID NO: 953435 - DNA, 25 bp, Homo sapien
tcatgcctccaacagtgacgaatgt

SEQ ID NO: 953436 - DNA, 25 bp, Homo sapien
tctcgaagtcatctccctattgctg

SEQ ID NO: 953437 - DNA, 25 bp, Homo sapien
ccattatagtactgagattaatcac

SEQ ID NO: 953438 - DNA, 25 bp, Homo sapien
tagtactgagattaatcacttccat

SEQ ID NO: 953439 - DNA, 25 bp, Homo sapien
gccatggcgatatccattatagtac

SEQ ID NO: 953440 - DNA, 25 bp, Homo sapien
acctccccagccatggcgatatcca

SEQ ID NO: 953441 - DNA, 25 bp, Homo sapien
acttggcttcttagtcttagcaata

SEQ ID NO: 953442 - DNA, 25 bp, Homo sapien
tcctgaggccacctccttaccccga

SEQ ID NO: 953443 - DNA, 25 bp, Homo sapien
ttagcaataaataggatcaagtttc

SEQ ID NO: 953444 - DNA, 25 bp, Homo sapien
tgagctgtcggtttcatacttggct

SEQ ID NO: 953445 - DNA, 25 bp, Homo sapien
gctggtcttgaattcctggcctcaa

SEQ ID NO: 953446 - DNA, 25 bp, Homo sapien
agacagggtctaactatgttgctga

SEQ ID NO: 953447 - DNA, 25 bp, Homo sapien
acagggtctaactatgttgctgagg

SEQ ID NO: 953448 - DNA, 25 bp, Homo sapien
aaaaaatcttttcgtgtagagacag

SEQ ID NO: 953449 - DNA, 25 bp, Homo sapien
gaggacctacagatgctcacacctt

SEQ ID NO: 953450 - DNA, 25 bp, Homo sapien
atcccctgctcactatggaaccttg

SEQ ID NO: 953451 - DNA, 25 bp, Homo sapien
ctgctcactatggaaccttggccca

SEQ ID NO: 953452 - DNA, 25 bp, Homo sapien
gctgaggacctacagatgctcacac

SEQ ID NO: 953453 - DNA, 25 bp, Homo sapien
ggatcacacaaattgcctgaattgc

SEQ ID NO: 953454 - DNA, 25 bp, Homo sapien
gatcacacaaattgcctgaattgct

SEQ ID NO: 953455 - DNA, 25 bp, Homo sapien
ctggatcacacaaattgcctgaatt

SEQ ID NO: 953456 - DNA, 25 bp, Homo sapien
ccatgggggtgatgaacaggctctc

SEQ ID NO: 953457 - DNA, 25 bp, Homo sapien
tgtccccatcccctatcagcgttcc

SEQ ID NO: 953458 - DNA, 25 bp, Homo sapien
tcccctatcagcgttccacattcca

SEQ ID NO: 953459 - DNA, 25 bp, Homo sapien
cctatcagcgttccacattccagtg

SEQ ID NO: 953460 - DNA, 25 bp, Homo sapien
ccatcccctatcagcgttccacatt

SEQ ID NO: 953461 - DNA, 25 bp, Homo sapien
cgaccggtcctaagccctggacatg

SEQ ID NO: 953462 - DNA, 25 bp, Homo sapien
gaccggtcctaagccctggacatgg

SEQ ID NO: 953463 - DNA, 25 bp, Homo sapien
gacgaccggtcctaagccctggaca

SEQ ID NO: 953464 - DNA, 25 bp, Homo sapien
ccggtcctaagccctggacatggac

SEQ ID NO: 953465 - DNA, 25 bp, Homo sapien
ggatctcggcttcacgccattctcc

SEQ ID NO: 953466 - DNA, 25 bp, Homo sapien
ggcgggatctcggcttcacgccatt

SEQ ID NO: 953467 - DNA, 25 bp, Homo sapien
gcgggatctcggcttcacgccattc

SEQ ID NO: 953468 - DNA, 25 bp, Homo sapien
cgggatctcggcttcacgccattct

SEQ ID NO: 953469 - DNA, 25 bp, Homo sapien
agggagtagacagagccagagtgga

SEQ ID NO: 953470 - DNA, 25 bp, Homo sapien
gacagagccagagtggatagacaga

SEQ ID NO: 953471 - DNA, 25 bp, Homo sapien
cctaaaatagagcatgtgttgggaa

SEQ ID NO: 953472 - DNA, 25 bp, Homo sapien
ctaccatggttacctaaaatagagc

SEQ ID NO: 953473 - DNA, 25 bp, Homo sapien
ccacaggacagcggcttgttccctg

SEQ ID NO: 953474 - DNA, 25 bp, Homo sapien
cacaggacagcggcttgttccctgc

SEQ ID NO: 953475 - DNA, 25 bp, Homo sapien
accacaggacagcggcttgttccct

SEQ ID NO: 953476 - DNA, 25 bp, Homo sapien
ccaccacaggacagcggcttgttcc

SEQ ID NO: 953477 - DNA, 25 bp, Homo sapien
aggtgacagagctatgggtcaccac

SEQ ID NO: 953478 - DNA, 25 bp, Homo sapien
ggaggtgacagagctatgggtcacc

SEQ ID NO: 953479 - DNA, 25 bp, Homo sapien
agggaggtgacagagctatgggtca

SEQ ID NO: 953480 - DNA, 25 bp, Homo sapien
gaggtgacagagctatgggtcacca

SEQ ID NO: 953481 - DNA, 25 bp, Homo sapien
cctcaggcatttgacgaatgttccg

SEQ ID NO: 953482 - DNA, 25 bp, Homo sapien
caggcatttgacgaatgttccgcac

SEQ ID NO: 953483 - DNA, 25 bp, Homo sapien
tcaggcatttgacgaatgttccgca

SEQ ID NO: 953484 - DNA, 25 bp, Homo sapien
gcatttgacgaatgttccgcacctt

SEQ ID NO: 953485 - DNA, 25 bp, Homo sapien
ggcctgggacaggacaggctgcttt

SEQ ID NO: 953486 - DNA, 25 bp, Homo sapien
ctgggcctgggacaggacaggctgc

SEQ ID NO: 953487 - DNA, 25 bp, Homo sapien
tgggcctgggacaggacaggctgct

SEQ ID NO: 953488 - DNA, 25 bp, Homo sapien
gggcctgggacaggacaggctgctt

SEQ ID NO: 953489 - DNA, 25 bp, Homo sapien
tccaagccttggaacgtccagcccg

SEQ ID NO: 953490 - DNA, 25 bp, Homo sapien
ccaagccttggaacgtccagcccgg

SEQ ID NO: 953491 - DNA, 25 bp, Homo sapien
ctccaagccttggaacgtccagccc

SEQ ID NO: 953492 - DNA, 25 bp, Homo sapien
gctggcaacttgcagccggtgctcc

SEQ ID NO: 953493 - DNA, 25 bp, Homo sapien
gacgctggcaacttgcagccggtgc

SEQ ID NO: 953494 - DNA, 25 bp, Homo sapien
gcgacgctggcaacttgcagccggt

SEQ ID NO: 953495 - DNA, 25 bp, Homo sapien
tggcgacgctggcaacttgcagccg

SEQ ID NO: 953496 - DNA, 25 bp, Homo sapien
agttgcgagggggagccacgggtcg

SEQ ID NO: 953497 - DNA, 25 bp, Homo sapien
caagttgcgagggggagccacgggt

SEQ ID NO: 953498 - DNA, 25 bp, Homo sapien
gttgcgagggggagccacgggtcga

SEQ ID NO: 953499 - DNA, 25 bp, Homo sapien
tgcgagggggagccacgggtcgagg

SEQ ID NO: 953500 - DNA, 25 bp, Homo sapien
tcaaggctcactgtggtgtggtctt

SEQ ID NO: 953501 - DNA, 25 bp, Homo sapien
cagggccatatgctcgttaaaatca

SEQ ID NO: 953502 - DNA, 25 bp, Homo sapien
tgttgcttgcagctaagacccataa

SEQ ID NO: 953503 - DNA, 25 bp, Homo sapien
tctgtgatttttcccagcagcgtgg

SEQ ID NO: 953504 - DNA, 25 bp, Homo sapien
ctgcctccgaagacctgggaagttt

SEQ ID NO: 953505 - DNA, 25 bp, Homo sapien
aaagcttttgctgcctccgaagacc

SEQ ID NO: 953506 - DNA, 25 bp, Homo sapien
ctgtgccaggaaagcttttgctgcc

SEQ ID NO: 953507 - DNA, 25 bp, Homo sapien
catccagcctggcgacttgagtgag

SEQ ID NO: 953508 - DNA, 25 bp, Homo sapien
catgtttattgaataggccgggtgc

SEQ ID NO: 953509 - DNA, 25 bp, Homo sapien
tggccaccgtacagcatgaaaccga

SEQ ID NO: 953510 - DNA, 25 bp, Homo sapien
gaaaccgagtgtgtaattgcatggc

SEQ ID NO: 953511 - DNA, 25 bp, Homo sapien
tttggcctgacacacaggaccggct

SEQ ID NO: 953512 - DNA, 25 bp, Homo sapien
gagttaaatcagttggagccagcca

SEQ ID NO: 953513 - DNA, 25 bp, Homo sapien
taaagagctgcatgtagctaggagc

SEQ ID NO: 953514 - DNA, 25 bp, Homo sapien
ccagctggcagtggttgaaaccaga

SEQ ID NO: 953515 - DNA, 25 bp, Homo sapien
tgaccttggctgaaaccacctgaaa

SEQ ID NO: 953516 - DNA, 25 bp, Homo sapien
tcgtgttgacaagtccttgttgtcc

SEQ ID NO: 953517 - DNA, 25 bp, Homo sapien
gttgtccagactcacacggatacag

SEQ ID NO: 953518 - DNA, 25 bp, Homo sapien
agagagagattcgtgttgacaagtc

SEQ ID NO: 953519 - DNA, 25 bp, Homo sapien
cttgttgtccagactcacacggata

SEQ ID NO: 953520 - DNA, 25 bp, Homo sapien
caccgatgatgagcacacgggtcaa

SEQ ID NO: 953521 - DNA, 25 bp, Homo sapien
ctactatcctggcagtacgcagcca

SEQ ID NO: 953522 - DNA, 25 bp, Homo sapien
cttcccaacagaggcaccgatgatg

SEQ ID NO: 953523 - DNA, 25 bp, Homo sapien
atgagcacacgggtcaaagaccttg

SEQ ID NO: 953524 - DNA, 25 bp, Homo sapien
tagcattaaatggattgccccaaac

SEQ ID NO: 953525 - DNA, 25 bp, Homo sapien
gaggcagtgttcgaatcacagcttg

SEQ ID NO: 953526 - DNA, 25 bp, Homo sapien
acagcttggttagcgtgtgacctca

SEQ ID NO: 953527 - DNA, 25 bp, Homo sapien
aatgaatccgctaatcaccctgatg

SEQ ID NO: 953528 - DNA, 25 bp, Homo sapien
gccaccgcgtacatgttttagactg

SEQ ID NO: 953529 - DNA, 25 bp, Homo sapien
acagctcagggccaccgcgtacatg

SEQ ID NO: 953530 - DNA, 25 bp, Homo sapien
ccgcgtacatgttttagactgtaaa

SEQ ID NO: 953531 - DNA, 25 bp, Homo sapien
cagggccaccgcgtacatgttttag

SEQ ID NO: 953532 - DNA, 25 bp, Homo sapien
tgcagtgtcttatgcctgtattccc

SEQ ID NO: 953533 - DNA, 25 bp, Homo sapien
ctggcaaacatgacgaaaccctaaa

SEQ ID NO: 953534 - DNA, 25 bp, Homo sapien
catttgaagtcaggtgttcaagatc

SEQ ID NO: 953535 - DNA, 25 bp, Homo sapien
gcaaacatgacgaaaccctaaaata

SEQ ID NO: 953536 - DNA, 25 bp, Homo sapien
agacggcggcatgaccagaccacgg

SEQ ID NO: 953537 - DNA, 25 bp, Homo sapien
ccagaccacggacaggtgtggagaa

SEQ ID NO: 953538 - DNA, 25 bp, Homo sapien
cggcatgaccagaccacggacaggt

SEQ ID NO: 953539 - DNA, 25 bp, Homo sapien
tagcaaatgaagtgggggcacggat

SEQ ID NO: 953540 - DNA, 25 bp, Homo sapien
aacctcctcacctctggttatctgt

SEQ ID NO: 953541 - DNA, 25 bp, Homo sapien
ctggttatctgtcggcatcggcttc

SEQ ID NO: 953542 - DNA, 25 bp, Homo sapien
gcataccaggcttaaagacgggtta

SEQ ID NO: 953543 - DNA, 25 bp, Homo sapien
gacaatgtatcaacatcatctaaga

SEQ ID NO: 953544 - DNA, 25 bp, Homo sapien
ctcccaagtttaagccattctgctg

SEQ ID NO: 953545 - DNA, 25 bp, Homo sapien
tgctgcccccgcctcctgagtggct

SEQ ID NO: 953546 - DNA, 25 bp, Homo sapien
tctgctgcccccgcctcctgagtgg

SEQ ID NO: 953547 - DNA, 25 bp, Homo sapien
ccaagtttaagccattctgctgccc

SEQ ID NO: 953548 - DNA, 25 bp, Homo sapien
tgccctgtcccctaagctggagtgc

SEQ ID NO: 953549 - DNA, 25 bp, Homo sapien
ctcaccgcagcctccatatcctggg

SEQ ID NO: 953550 - DNA, 25 bp, Homo sapien
accgcagcctccatatcctgggctc

SEQ ID NO: 953551 - DNA, 25 bp, Homo sapien
agtggtgagatcatagctcaccgca

SEQ ID NO: 953552 - DNA, 25 bp, Homo sapien
tgtacgggaagacccactctcacat

SEQ ID NO: 953553 - DNA, 25 bp, Homo sapien
tacccttgcgccctaagcattggtt

SEQ ID NO: 953554 - DNA, 25 bp, Homo sapien
gcgccctaagcattggttccagtta

SEQ ID NO: 953555 - DNA, 25 bp, Homo sapien
agatagccttgttccagaagcgtcg

SEQ ID NO: 953556 - DNA, 25 bp, Homo sapien
catttgtgcagatcatctagaagaa

SEQ ID NO: 953557 - DNA, 25 bp, Homo sapien
tttgtgcagatcatctagaagaacc

SEQ ID NO: 953558 - DNA, 25 bp, Homo sapien
ccatttgtgcagatcatctagaaga

SEQ ID NO: 953559 - DNA, 25 bp, Homo sapien
atttgtgcagatcatctagaagaac

SEQ ID NO: 953560 - DNA, 25 bp, Homo sapien
gtagagttttttgatgagagttata

SEQ ID NO: 953561 - DNA, 25 bp, Homo sapien
gttcctgtagagttttttgatgaga

SEQ ID NO: 953562 - DNA, 25 bp, Homo sapien
cctgtagagttttttgatgagagtt

SEQ ID NO: 953563 - DNA, 25 bp, Homo sapien
tagagttttttgatgagagttatag

SEQ ID NO: 953564 - DNA, 25 bp, Homo sapien
tctaatgatctacccgaattggtct

SEQ ID NO: 953565 - DNA, 25 bp, Homo sapien
atgaagaaaacaggtttaattgact

SEQ ID NO: 953566 - DNA, 25 bp, Homo sapien
tatgaagaaaacaggtttaattgac

SEQ ID NO: 953567 - DNA, 25 bp, Homo sapien
tgaagaaaacaggtttaattgactc

SEQ ID NO: 953568 - DNA, 25 bp, Homo sapien
ttatgaagaaaacaggtttaattga

SEQ ID NO: 953569 - DNA, 25 bp, Homo sapien
aggcgaaggggaagcaggcacgttt

SEQ ID NO: 953570 - DNA, 25 bp, Homo sapien
tgacaatcacggcagaaggcgaagg

SEQ ID NO: 953571 - DNA, 25 bp, Homo sapien
actgacaatcacggcagaaggcgaa

SEQ ID NO: 953572 - DNA, 25 bp, Homo sapien
aaactgacaatcacggcagaaggcg

SEQ ID NO: 953573 - DNA, 25 bp, Homo sapien
agagtgaagcgggaggtggtgcatg

SEQ ID NO: 953574 - DNA, 25 bp, Homo sapien
tgaagcgggaggtggtgcatgcttc

SEQ ID NO: 953575 - DNA, 25 bp, Homo sapien
cgggaggtggtgcatgcttctaaac

SEQ ID NO: 953576 - DNA, 25 bp, Homo sapien
gtggtgcatgcttctaaacaaccag

SEQ ID NO: 953577 - DNA, 25 bp, Homo sapien
caaccactgagattgattgactgag

SEQ ID NO: 953578 - DNA, 25 bp, Homo sapien
gggatacggagctgaaccatatcaa

SEQ ID NO: 953579 - DNA, 25 bp, Homo sapien
accatatcaagggtagtacaaccac

SEQ ID NO: 953580 - DNA, 25 bp, Homo sapien
gtacaaccactgagattgattgact

SEQ ID NO: 953581 - DNA, 25 bp, Homo sapien
gcttgtattacaacaataccagcct

SEQ ID NO: 953582 - DNA, 25 bp, Homo sapien
tccaggtgaccccagaactcatttg

SEQ ID NO: 953583 - DNA, 25 bp, Homo sapien
cagcctttcaagctactccaggtga

SEQ ID NO: 953584 - DNA, 25 bp, Homo sapien
tagaaggcagtcgagtccactatac

SEQ ID NO: 953585 - DNA, 25 bp, Homo sapien
tgggacgcggtttgtaaatctgtaa

SEQ ID NO: 953586 - DNA, 25 bp, Homo sapien
gtcaccccatggcaggatccagtca

SEQ ID NO: 953587 - DNA, 25 bp, Homo sapien
agattgagttttggcgtcaccccat

SEQ ID NO: 953588 - DNA, 25 bp, Homo sapien
ttataaaacctgacatagccccgag

SEQ ID NO: 953589 - DNA, 25 bp, Homo sapien
aacatctttagtaaatcttttgctc

SEQ ID NO: 953590 - DNA, 25 bp, Homo sapien
atcttttgctcatgtgcattaacca

SEQ ID NO: 953591 - DNA, 25 bp, Homo sapien
ttttgctcatgtgcattaaccaata

SEQ ID NO: 953592 - DNA, 25 bp, Homo sapien
acatctttagtaaatcttttgctca

SEQ ID NO: 953593 - DNA, 25 bp, Homo sapien
aattctttatggtgcacaggtagcg

SEQ ID NO: 953594 - DNA, 25 bp, Homo sapien
aactgcttcacactgactgtcatcc

SEQ ID NO: 953595 - DNA, 25 bp, Homo sapien
tgcttcacactgactgtcatccctc

SEQ ID NO: 953596 - DNA, 25 bp, Homo sapien
tcacactgactgtcatccctctggg

SEQ ID NO: 953597 - DNA, 25 bp, Homo sapien
ttatctatatgttatgttcaaattg

SEQ ID NO: 953598 - DNA, 25 bp, Homo sapien
tgttcaaattgagaagttactgttt

SEQ ID NO: 953599 - DNA, 25 bp, Homo sapien
tctatatgttatgttcaaattgaga

SEQ ID NO: 953600 - DNA, 25 bp, Homo sapien
tattatctatatgttatgttcaaat

SEQ ID NO: 953601 - DNA, 25 bp, Homo sapien
gaagctgagatattgagacagaaaa

SEQ ID NO: 953602 - DNA, 25 bp, Homo sapien
agctggaagctgagatattgagaca

SEQ ID NO: 953603 - DNA, 25 bp, Homo sapien
tggaagctgagatattgagacagaa

SEQ ID NO: 953604 - DNA, 25 bp, Homo sapien
agctgagatattgagacagaaaact

SEQ ID NO: 953605 - DNA, 25 bp, Homo sapien
agccaaaagtttcaacctgaggtag

SEQ ID NO: 953606 - DNA, 25 bp, Homo sapien
cgaaagccaaaagtttcaacctgag

SEQ ID NO: 953607 - DNA, 25 bp, Homo sapien
gtgcacaaagtgagctcagagcttc

SEQ ID NO: 953608 - DNA, 25 bp, Homo sapien
cctgaggtaggtcggcaaactcttg

SEQ ID NO: 953609 - DNA, 25 bp, Homo sapien
cctgaaacttcaatgagatccactc

SEQ ID NO: 953610 - DNA, 25 bp, Homo sapien
cacatccattgcctgaaacttcaat

SEQ ID NO: 953611 - DNA, 25 bp, Homo sapien
ccattgcctgaaacttcaatgagat

SEQ ID NO: 953612 - DNA, 25 bp, Homo sapien
gagatccactccatagtccttaagc

SEQ ID NO: 953613 - DNA, 25 bp, Homo sapien
tagttgtaaagaccgttgcactttg

SEQ ID NO: 953614 - DNA, 25 bp, Homo sapien
gggagaccaaagcgagcggatcacc

SEQ ID NO: 953615 - DNA, 25 bp, Homo sapien
tttgggagaccaaagcgagcggatc

SEQ ID NO: 953616 - DNA, 25 bp, Homo sapien
atcgtgccattgcaccgcagcctcg

SEQ ID NO: 953617 - DNA, 25 bp, Homo sapien
cgtgccattgcaccgcagcctcggc

SEQ ID NO: 953618 - DNA, 25 bp, Homo sapien
ttttctactaactccttcaccgcag

SEQ ID NO: 953619 - DNA, 25 bp, Homo sapien
cgcagtgcttagactcggtaccacc

SEQ ID NO: 953620 - DNA, 25 bp, Homo sapien
ctgttttctactaactccttcaccg

SEQ ID NO: 953621 - DNA, 25 bp, Homo sapien
tctactaactccttcaccgcagtgc

SEQ ID NO: 953622 - DNA, 25 bp, Homo sapien
tttggcaataatggtgtcttctttc

SEQ ID NO: 953623 - DNA, 25 bp, Homo sapien
tctctcaaattaccaaaatctttgg

SEQ ID NO: 953624 - DNA, 25 bp, Homo sapien
aaatctttggcaataatggtgtctt

SEQ ID NO: 953625 - DNA, 25 bp, Homo sapien
tctttggcaataatggtgtcttctt

SEQ ID NO: 953626 - DNA, 25 bp, Homo sapien
agatacagacggcaaatttatttaa

SEQ ID NO: 953627 - DNA, 25 bp, Homo sapien
cagatatttagatacagacggcaaa

SEQ ID NO: 953628 - DNA, 25 bp, Homo sapien
tcaactgtgctagccaagattcggt

SEQ ID NO: 953629 - DNA, 25 bp, Homo sapien
gcgtttacaaatctgacatggaatt

SEQ ID NO: 953630 - DNA, 25 bp, Homo sapien
tgcaaattaggatgtgtctggacgc

SEQ ID NO: 953631 - DNA, 25 bp, Homo sapien
ttttttaaaactgcgcagctatgca

SEQ ID NO: 953632 - DNA, 25 bp, Homo sapien
tgggcaacatagctaaatccccgtc

SEQ ID NO: 953633 - DNA, 25 bp, Homo sapien
gtctggacgctctactgtccccaaa

SEQ ID NO: 953634 - DNA, 25 bp, Homo sapien
gctggggcgctgaggatgccgctcc

SEQ ID NO: 953635 - DNA, 25 bp, Homo sapien
taatgggcaccggatcgctggggcg

SEQ ID NO: 953636 - DNA, 25 bp, Homo sapien
tccggggcctccacgaggcggcctc

SEQ ID NO: 953637 - DNA, 25 bp, Homo sapien
aggcggcctcgccacgcgcctcggc

SEQ ID NO: 953638 - DNA, 25 bp, Homo sapien
gaggggcgaccgcgagcccagctca

SEQ ID NO: 953639 - DNA, 25 bp, Homo sapien
aggggcgaccgcgagcccagctcac

SEQ ID NO: 953640 - DNA, 25 bp, Homo sapien
cgagaggggcgaccgcgagcccagc

SEQ ID NO: 953641 - DNA, 25 bp, Homo sapien
gcgagaggggcgaccgcgagcccag

SEQ ID NO: 953642 - DNA, 25 bp, Homo sapien
gctccaaggatgcaacaccggatcc

SEQ ID NO: 953643 - DNA, 25 bp, Homo sapien
ggctcccaacggctgctttcgacgt

SEQ ID NO: 953644 - DNA, 25 bp, Homo sapien
ctgggctcccaacggctgctttcga

SEQ ID NO: 953645 - DNA, 25 bp, Homo sapien
tcagctcgctccaaggatgcaacac

SEQ ID NO: 953646 - DNA, 25 bp, Homo sapien
tctccttttcgcctagtggctctgt

SEQ ID NO: 953647 - DNA, 25 bp, Homo sapien
ttttcgcctagtggctctgtcaaag

SEQ ID NO: 953648 - DNA, 25 bp, Homo sapien
tagtggctctgtcaaaggtcgagtc

SEQ ID NO: 953649 - DNA, 25 bp, Homo sapien
gcctagtggctctgtcaaaggtcga

SEQ ID NO: 953650 - DNA, 25 bp, Homo sapien
agcgttggtgtctggcggtttccga

SEQ ID NO: 953651 - DNA, 25 bp, Homo sapien
ggtgcccctaggccggatagagtgc

SEQ ID NO: 953652 - DNA, 25 bp, Homo sapien
cgagcgttggtgtctggcggtttcc

SEQ ID NO: 953653 - DNA, 25 bp, Homo sapien
ttccgagcgttggtgtctggcggtt

SEQ ID NO: 953654 - DNA, 25 bp, Homo sapien
aatattttcataatcttagccttcc

SEQ ID NO: 953655 - DNA, 25 bp, Homo sapien
ctggccaaaggagaactttgtgttc

SEQ ID NO: 953656 - DNA, 25 bp, Homo sapien
gataatgttaaagatcaagcctcat

SEQ ID NO: 953657 - DNA, 25 bp, Homo sapien
caagcctcatgagaattcaaacagg

SEQ ID NO: 953658 - DNA, 25 bp, Homo sapien
gcctgaataggagcttcttaatcaa

SEQ ID NO: 953659 - DNA, 25 bp, Homo sapien
tggctctgggtcaaaattgaccagc

SEQ ID NO: 953660 - DNA, 25 bp, Homo sapien
gaccagctgatttaataagttgatg

SEQ ID NO: 953661 - DNA, 25 bp, Homo sapien
acggtgccccgcctgaataggagct

SEQ ID NO: 953662 - DNA, 25 bp, Homo sapien
acctcatcctttcgaggagctagga

SEQ ID NO: 953663 - DNA, 25 bp, Homo sapien
ccaggaaaagaaggaatgtacagca

SEQ ID NO: 953664 - DNA, 25 bp, Homo sapien
cagcctgaacaccctttcctggtaa

SEQ ID NO: 953665 - DNA, 25 bp, Homo sapien
gattcttccacctcatcctttcgag

SEQ ID NO: 953666 - DNA, 25 bp, Homo sapien
taagggtgcgtgaaacatctataaa

SEQ ID NO: 953667 - DNA, 25 bp, Homo sapien
tactttctcttaagagtggatgaag

SEQ ID NO: 953668 - DNA, 25 bp, Homo sapien
tctcacttattaagacaatcctggc

SEQ ID NO: 953669 - DNA, 25 bp, Homo sapien
ttgaagacattaaggagcctgattt

SEQ ID NO: 953670 - DNA, 25 bp, Homo sapien
tcaagagagagctatcttttagatc

SEQ ID NO: 953671 - DNA, 25 bp, Homo sapien
agagagagctatcttttagatctcc

SEQ ID NO: 953672 - DNA, 25 bp, Homo sapien
caagagagagctatcttttagatct

SEQ ID NO: 953673 - DNA, 25 bp, Homo sapien
aagagagagctatcttttagatctc

SEQ ID NO: 953674 - DNA, 25 bp, Homo sapien
aaggttgcctcatagcccaagacgg

SEQ ID NO: 953675 - DNA, 25 bp, Homo sapien
ggtcacatatcccacagctatctgt

SEQ ID NO: 953676 - DNA, 25 bp, Homo sapien
cccaagacggctgcaaggattccag

SEQ ID NO: 953677 - DNA, 25 bp, Homo sapien
acttcttcacgtgtgagagccccgg

SEQ ID NO: 953678 - DNA, 25 bp, Homo sapien
ccagcacttagcaacttctccctcc

SEQ ID NO: 953679 - DNA, 25 bp, Homo sapien
ttaacacagaaactgcaccacacac

SEQ ID NO: 953680 - DNA, 25 bp, Homo sapien
caccacacacatttgaacctcatag

SEQ ID NO: 953681 - DNA, 25 bp, Homo sapien
tagccaatgaacagacccagcactt

SEQ ID NO: 953682 - DNA, 25 bp, Homo sapien
aacatcttccatgagttgctccagg

SEQ ID NO: 953683 - DNA, 25 bp, Homo sapien
cacggggaagtcctcgccatcactg

SEQ ID NO: 953684 - DNA, 25 bp, Homo sapien
tcgccatcactgttgctgtgctgca

SEQ ID NO: 953685 - DNA, 25 bp, Homo sapien
ccaaacagcgccacggggaagtcct

SEQ ID NO: 953686 - DNA, 25 bp, Homo sapien
taggcccaggttctttggcactgtt

SEQ ID NO: 953687 - DNA, 25 bp, Homo sapien
gaggcttcgtcctcaagggggacac

SEQ ID NO: 953688 - DNA, 25 bp, Homo sapien
gggcaggcccccttacacgctgata

SEQ ID NO: 953689 - DNA, 25 bp, Homo sapien
tgggctcttctttcgcagatgaggg

SEQ ID NO: 953690 - DNA, 25 bp, Homo sapien
cagaatctgaattcccttggccttc

SEQ ID NO: 953691 - DNA, 25 bp, Homo sapien
tcagaatctgaattcccttggcctt

SEQ ID NO: 953692 - DNA, 25 bp, Homo sapien
agaatctgaattcccttggccttct

SEQ ID NO: 953693 - DNA, 25 bp, Homo sapien
tcctgcctagagatctcttcattat

SEQ ID NO: 953694 - DNA, 25 bp, Homo sapien
ctgcagtgtcctgcctcggccatct

SEQ ID NO: 953695 - DNA, 25 bp, Homo sapien
gagctgtggatttcctgcctagaga

SEQ ID NO: 953696 - DNA, 25 bp, Homo sapien
aggaggagctgtggatttcctgcct

SEQ ID NO: 953697 - DNA, 25 bp, Homo sapien
tcgcttacgaatgggcaaaattggg

SEQ ID NO: 953698 - DNA, 25 bp, Homo sapien
ttgactcgcttacgaatgggcaaaa

SEQ ID NO: 953699 - DNA, 25 bp, Homo sapien
ctcttggcttggttttttgggtctg

SEQ ID NO: 953700 - DNA, 25 bp, Homo sapien
tctgtattttgactcgcttacgaat

SEQ ID NO: 953701 - DNA, 25 bp, Homo sapien
ctctccttcctccttttccaactct

SEQ ID NO: 953702 - DNA, 25 bp, Homo sapien
tctctccttcctccttttccaactc

SEQ ID NO: 953703 - DNA, 25 bp, Homo sapien
caggatcctgggctgttcaaaccag

SEQ ID NO: 953704 - DNA, 25 bp, Homo sapien
ggatcctgggctgttcaaaccagag

SEQ ID NO: 953705 - DNA, 25 bp, Homo sapien
aggatcctgggctgttcaaaccaga

SEQ ID NO: 953706 - DNA, 25 bp, Homo sapien
ttactgttagatccgttgaatcggc

SEQ ID NO: 953707 - DNA, 25 bp, Homo sapien
gttagatccgttgaatcggctccag

SEQ ID NO: 953708 - DNA, 25 bp, Homo sapien
ccccattactgttagatccgttgaa

SEQ ID NO: 953709 - DNA, 25 bp, Homo sapien
ttccccattactgttagatccgttg

SEQ ID NO: 953710 - DNA, 25 bp, Homo sapien
tggctgcagtcatttctgcgctttt

SEQ ID NO: 953711 - DNA, 25 bp, Homo sapien
tctgcctcttgagccatcatcaggg

SEQ ID NO: 953712 - DNA, 25 bp, Homo sapien
cccagtttctggctgcagtcatttc

SEQ ID NO: 953713 - DNA, 25 bp, Homo sapien
ctgaatgctgatctgttctgcctct

SEQ ID NO: 953714 - DNA, 25 bp, Homo sapien
tccatgcacgagaaactgtttctcc

SEQ ID NO: 953715 - DNA, 25 bp, Homo sapien
actgtttctccaaaaaacgtcacat

SEQ ID NO: 953716 - DNA, 25 bp, Homo sapien
atccatgcacgagaaactgtttctc

SEQ ID NO: 953717 - DNA, 25 bp, Homo sapien
caaaaaacgtcacatggtacttaga

SEQ ID NO: 953718 - DNA, 25 bp, Homo sapien
aaaatattcccctaagtcaggatca

SEQ ID NO: 953719 - DNA, 25 bp, Homo sapien
gcagggaatcaagatgggaagtaaa

SEQ ID NO: 953720 - DNA, 25 bp, Homo sapien
tattcccctaagtcaggatcagatt

SEQ ID NO: 953721 - DNA, 25 bp, Homo sapien
agtcaggatcagattctatcatgcc

SEQ ID NO: 953722 - DNA, 25 bp, Homo sapien
gatggatcctgggatgtaggaggca

SEQ ID NO: 953723 - DNA, 25 bp, Homo sapien
gaatatcacagcgattatactgcac

SEQ ID NO: 953724 - DNA, 25 bp, Homo sapien
taaccgtattgcttggcccagatga

SEQ ID NO: 953725 - DNA, 25 bp, Homo sapien
aggaggcataggccacatcactctc

SEQ ID NO: 953726 - DNA, 25 bp, Homo sapien
ggacaggaagagactctttaagaga

SEQ ID NO: 953727 - DNA, 25 bp, Homo sapien
gacaggaagagactctttaagagaa

SEQ ID NO: 953728 - DNA, 25 bp, Homo sapien
tgtgttctgatcacaggaccaatta

SEQ ID NO: 953729 - DNA, 25 bp, Homo sapien
ggtcaatgttcccacacagccgcct

SEQ ID NO: 953730 - DNA, 25 bp, Homo sapien
gatcacaggaccaattatctgggag

SEQ ID NO: 953731 - DNA, 25 bp, Homo sapien
acactggacccagaccagacattga

SEQ ID NO: 953732 - DNA, 25 bp, Homo sapien
tttcatacctgacagaacacagctg

SEQ ID NO: 953733 - DNA, 25 bp, Homo sapien
gatgtctcacaaggatctcaaacct

SEQ ID NO: 953734 - DNA, 25 bp, Homo sapien
catgatacactttctcctgaggcaa

SEQ ID NO: 953735 - DNA, 25 bp, Homo sapien
tgagctcgagattcctaagccgcct

SEQ ID NO: 953736 - DNA, 25 bp, Homo sapien
ttcctgtctgtgctcatgtccacct

SEQ ID NO: 953737 - DNA, 25 bp, Homo sapien
ctgttttctttagtcggtcttcctg

SEQ ID NO: 953738 - DNA, 25 bp, Homo sapien
tctgagaatgatcctgaactgtttt

SEQ ID NO: 953739 - DNA, 25 bp, Homo sapien
gatctgagaatgatcctgaactgtt

SEQ ID NO: 953740 - DNA, 25 bp, Homo sapien
cttaaggtgagtctattggatttct

SEQ ID NO: 953741 - DNA, 25 bp, Homo sapien
ggatttcttcttagagggtgcagga

SEQ ID NO: 953742 - DNA, 25 bp, Homo sapien
tctcttgagtatgtggtacctcctc

SEQ ID NO: 953743 - DNA, 25 bp, Homo sapien
gatctggctggcctaacttagatgt

SEQ ID NO: 953744 - DNA, 25 bp, Homo sapien
cattatcagtatcagtagcagaagc

SEQ ID NO: 953745 - DNA, 25 bp, Homo sapien
ctggctccttgtctgattgggtaga

SEQ ID NO: 953746 - DNA, 25 bp, Homo sapien
ccattagcattatcagtatcagtag

SEQ ID NO: 953747 - DNA, 25 bp, Homo sapien
agatactacgggctgggcacaagaa

SEQ ID NO: 953748 - DNA, 25 bp, Homo sapien
ctgcaaaatcaaggccagatcccat

SEQ ID NO: 953749 - DNA, 25 bp, Homo sapien
tctattactccctaacattttctct

SEQ ID NO: 953750 - DNA, 25 bp, Homo sapien
gcctgaaagagcctacctgtcatat

SEQ ID NO: 953751 - DNA, 25 bp, Homo sapien
tccctgtagcctgaaagagcctacc

SEQ ID NO: 953752 - DNA, 25 bp, Homo sapien
gaaaaagccactctattactcccta

SEQ ID NO: 953753 - DNA, 25 bp, Homo sapien
agacttaactctccctctcaggtaa

SEQ ID NO: 953754 - DNA, 25 bp, Homo sapien
caggtaacagtcactgcttaactga

SEQ ID NO: 953755 - DNA, 25 bp, Homo sapien
agagaagctgtcagacttaactctc

SEQ ID NO: 953756 - DNA, 25 bp, Homo sapien
cctctcaggtaacagtcactgctta

SEQ ID NO: 953757 - DNA, 25 bp, Homo sapien
aatctggacaatctcctcaaattct

SEQ ID NO: 953758 - DNA, 25 bp, Homo sapien
ttctgcattggtaagacttgatttt

SEQ ID NO: 953759 - DNA, 25 bp, Homo sapien
ctgcattggtaagacttgatttttc

SEQ ID NO: 953760 - DNA, 25 bp, Homo sapien
gaacaatctggacaatctcctcaaa

SEQ ID NO: 953761 - DNA, 25 bp, Homo sapien
ttctcctgttccctgcttggaacat

SEQ ID NO: 953762 - DNA, 25 bp, Homo sapien
gcttgttgatttgtgcctttctttt

SEQ ID NO: 953763 - DNA, 25 bp, Homo sapien
gttccctgcttggaacattcttcat

SEQ ID NO: 953764 - DNA, 25 bp, Homo sapien
tcttctctgcttgcttgttgatttg

SEQ ID NO: 953765 - DNA, 25 bp, Homo sapien
ctttggcaggcttatcctggcctct

SEQ ID NO: 953766 - DNA, 25 bp, Homo sapien
ctggcctttggcaggcttatcctgg

SEQ ID NO: 953767 - DNA, 25 bp, Homo sapien
tggcctttggcaggcttatcctggc

SEQ ID NO: 953768 - DNA, 25 bp, Homo sapien
ctacaaggtaacaggctgtaagatt

SEQ ID NO: 953769 - DNA, 25 bp, Homo sapien
ttctttattctgcaacgttgtcatc

SEQ ID NO: 953770 - DNA, 25 bp, Homo sapien
tctttattctgcaacgttgtcatca

SEQ ID NO: 953771 - DNA, 25 bp, Homo sapien
cttctttattctgcaacgttgtcat

SEQ ID NO: 953772 - DNA, 25 bp, Homo sapien
ctttattctgcaacgttgtcatcat

SEQ ID NO: 953773 - DNA, 25 bp, Homo sapien
tcagcttagaaactacgctttgtgt

SEQ ID NO: 953774 - DNA, 25 bp, Homo sapien
gcttagaaactacgctttgtgtgcc

SEQ ID NO: 953775 - DNA, 25 bp, Homo sapien
cttagaaactacgctttgtgtgcct

SEQ ID NO: 953776 - DNA, 25 bp, Homo sapien
agcttagaaactacgctttgtgtgc

SEQ ID NO: 953777 - DNA, 25 bp, Homo sapien
tgataactcaggttgcccctcctct

SEQ ID NO: 953778 - DNA, 25 bp, Homo sapien
ataactcaggttgcccctcctctgt

SEQ ID NO: 953779 - DNA, 25 bp, Homo sapien
taactcaggttgcccctcctctgtt

SEQ ID NO: 953780 - DNA, 25 bp, Homo sapien
gataactcaggttgcccctcctctg

SEQ ID NO: 953781 - DNA, 25 bp, Homo sapien
tagcaccttcacctacaaccagaaa

SEQ ID NO: 953782 - DNA, 25 bp, Homo sapien
ttctcctcaggcaacgggtgccagg

SEQ ID NO: 953783 - DNA, 25 bp, Homo sapien
ggttgtcgccctgagaaagtttctc

SEQ ID NO: 953784 - DNA, 25 bp, Homo sapien
tggcagcgcctagcaccttcaccta

SEQ ID NO: 953785 - DNA, 25 bp, Homo sapien
gaggcgcatgcgcaactggaaacag

SEQ ID NO: 953786 - DNA, 25 bp, Homo sapien
gaaacagcgtctgcgtttccgcagc

SEQ ID NO: 953787 - DNA, 25 bp, Homo sapien
acctaaaggcgatgggcggaaccag

SEQ ID NO: 953788 - DNA, 25 bp, Homo sapien
tttccgcagctgaggtaaatccgcc

SEQ ID NO: 953789 - DNA, 25 bp, Homo sapien
ctggtatataagtcggcgtggcgcc

SEQ ID NO: 953790 - DNA, 25 bp, Homo sapien
cgcccacactcgctggtatataagt

SEQ ID NO: 953791 - DNA, 25 bp, Homo sapien
tagactcgcttcttcctcattggca

SEQ ID NO: 953792 - DNA, 25 bp, Homo sapien
cagcactccgctggcagggagaccg

SEQ ID NO: 953793 - DNA, 25 bp, Homo sapien
ggatcgcgcggcagagacaaaggag

SEQ ID NO: 953794 - DNA, 25 bp, Homo sapien
cggtgggtgggatcgcgcggcagag

SEQ ID NO: 953795 - DNA, 25 bp, Homo sapien
aaaggagatcagtagggccggacat

SEQ ID NO: 953796 - DNA, 25 bp, Homo sapien
agacaaaggagatcagtagggccgg

SEQ ID NO: 953797 - DNA, 25 bp, Homo sapien
tcgttgcgcgccatctgcggggtcc

SEQ ID NO: 953798 - DNA, 25 bp, Homo sapien
ctatcagccccaccggccacctggg

SEQ ID NO: 953799 - DNA, 25 bp, Homo sapien
aggcgcagtcgcatggggaggcccg

SEQ ID NO: 953800 - DNA, 25 bp, Homo sapien
agccgctgcggtcggtcgggaaagc

SEQ ID NO: 953801 - DNA, 25 bp, Homo sapien
tactgtgaaaatccttccctttgcc

SEQ ID NO: 953802 - DNA, 25 bp, Homo sapien
tcagtggaccatggatagagggact

SEQ ID NO: 953803 - DNA, 25 bp, Homo sapien
tttctcctcggccattgtacctagc

SEQ ID NO: 953804 - DNA, 25 bp, Homo sapien
tgacctctgttctcttagggcatgg

SEQ ID NO: 953805 - DNA, 25 bp, Homo sapien
caaaaatacgaactagccctccagg

SEQ ID NO: 953806 - DNA, 25 bp, Homo sapien
cacaaaaatacgaactagccctcca

SEQ ID NO: 953807 - DNA, 25 bp, Homo sapien
aaatacgaactagccctccagggat

SEQ ID NO: 953808 - DNA, 25 bp, Homo sapien
aatacgaactagccctccagggatc

SEQ ID NO: 953809 - DNA, 25 bp, Homo sapien
gggcagaccgtccagggtcaggtgt

SEQ ID NO: 953810 - DNA, 25 bp, Homo sapien
tccggtgcatgaggaaggtgtcctc

SEQ ID NO: 953811 - DNA, 25 bp, Homo sapien
catcgcctcagtgtccggtgcatga

SEQ ID NO: 953812 - DNA, 25 bp, Homo sapien
caggtgtggagattcataaaatagc

SEQ ID NO: 953813 - DNA, 25 bp, Homo sapien
cacaagatggtcatgtctggcccag

SEQ ID NO: 953814 - DNA, 25 bp, Homo sapien
acacaagatggtcatgtctggccca

SEQ ID NO: 953815 - DNA, 25 bp, Homo sapien
ctgttgggaggttgggcccaaagca

SEQ ID NO: 953816 - DNA, 25 bp, Homo sapien
tgttgggaggttgggcccaaagcaa

SEQ ID NO: 953817 - DNA, 25 bp, Homo sapien
gggtacatggaggaagccccacgcc

SEQ ID NO: 953818 - DNA, 25 bp, Homo sapien
ggtacatggaggaagccccacgccc

SEQ ID NO: 953819 - DNA, 25 bp, Homo sapien
gctcgagcctgtggcggcaggagag

SEQ ID NO: 953820 - DNA, 25 bp, Homo sapien
agccgcttggagcgcggcacgttca

SEQ ID NO: 953821 - DNA, 25 bp, Homo sapien
accaggtcccggaagagccgcttgg

SEQ ID NO: 953822 - DNA, 25 bp, Homo sapien
ctgagcgcggcattcagaacctgtt

SEQ ID NO: 953823 - DNA, 25 bp, Homo sapien
cagcggggacggaggtgagtggcgc

SEQ ID NO: 953824 - DNA, 25 bp, Homo sapien
gagcgcagcggggacggaggtgagt

SEQ ID NO: 953825 - DNA, 25 bp, Homo sapien
gacggaggtgagtggcgcgcctcac

SEQ ID NO: 953826 - DNA, 25 bp, Homo sapien
cggggacggaggtgagtggcgcgcc

SEQ ID NO: 953827 - DNA, 25 bp, Homo sapien
ccgactcccgcacgcggccggccgc

SEQ ID NO: 953828 - DNA, 25 bp, Homo sapien
cccgactcccgcacgcggccggccg

SEQ ID NO: 953829 - DNA, 25 bp, Homo sapien
cgactcccgcacgcggccggccgcc

SEQ ID NO: 953830 - DNA, 25 bp, Homo sapien
ccgcagcggatctggaacgactttc

SEQ ID NO: 953831 - DNA, 25 bp, Homo sapien
gatctggaacgactttctcagctgt

SEQ ID NO: 953832 - DNA, 25 bp, Homo sapien
ctcagctgttcctccacggccttcg

SEQ ID NO: 953833 - DNA, 25 bp, Homo sapien
ttcgcagcatcaaagtggctcccgg

SEQ ID NO: 953834 - DNA, 25 bp, Homo sapien
gtgggcgcgaggccgtcgcgggccg

SEQ ID NO: 953835 - DNA, 25 bp, Homo sapien
agggcagtgaccaggtgggcgcgag

SEQ ID NO: 953836 - DNA, 25 bp, Homo sapien
gcagtgaccaggtgggcgcgaggcc

SEQ ID NO: 953837 - DNA, 25 bp, Homo sapien
ggcagggcagtgaccaggtgggcgc

SEQ ID NO: 953838 - DNA, 25 bp, Homo sapien
cttcttccccgtccgccgacttcag

SEQ ID NO: 953839 - DNA, 25 bp, Homo sapien
cactggggctcggagttgcgggact

SEQ ID NO: 953840 - DNA, 25 bp, Homo sapien
cgtgccgcggctgagggctgtcggg

SEQ ID NO: 953841 - DNA, 25 bp, Homo sapien
cgggctcgggcactggggctcggag

SEQ ID NO: 953842 - DNA, 25 bp, Homo sapien
ggggtcgcagacgctccaacggtca

SEQ ID NO: 953843 - DNA, 25 bp, Homo sapien
gtcgcagacgctccaacggtcaggg

SEQ ID NO: 953844 - DNA, 25 bp, Homo sapien
gggatgcgggggtcgcagacgctcc

SEQ ID NO: 953845 - DNA, 25 bp, Homo sapien
atgcgggggtcgcagacgctccaac

SEQ ID NO: 953846 - DNA, 25 bp, Homo sapien
ccccaagccgaagtgtttttgagct

SEQ ID NO: 953847 - DNA, 25 bp, Homo sapien
caagccgaagtgtttttgagctggg

SEQ ID NO: 953848 - DNA, 25 bp, Homo sapien
tttgagctggggtcggttgaagccc

SEQ ID NO: 953849 - DNA, 25 bp, Homo sapien
cggttgaagccctacgggtcctcat

SEQ ID NO: 953850 - DNA, 25 bp, Homo sapien
gaatcttagtcctgctagcgctgcg

SEQ ID NO: 953851 - DNA, 25 bp, Homo sapien
aaaactctgctatggctgagttacc

SEQ ID NO: 953852 - DNA, 25 bp, Homo sapien
tgctagcgctgcgatgcccattgcc

SEQ ID NO: 953853 - DNA, 25 bp, Homo sapien
gcccattgcccagtgtgtcagtcct

SEQ ID NO: 953854 - DNA, 25 bp, Homo sapien
ctcggaccggagttggcctgtatga

SEQ ID NO: 953855 - DNA, 25 bp, Homo sapien
tgcctccaaactcggaccggagttg

SEQ ID NO: 953856 - DNA, 25 bp, Homo sapien
gcctgtatgagtgcgggcgagggtc

SEQ ID NO: 953857 - DNA, 25 bp, Homo sapien
cctgcacagcatttccggtgttccg

SEQ ID NO: 953858 - DNA, 25 bp, Homo sapien
cttgggagactgagtaggccagtca

SEQ ID NO: 953859 - DNA, 25 bp, Homo sapien
tgggagactgagtaggccagtcact

SEQ ID NO: 953860 - DNA, 25 bp, Homo sapien
gggagactgagtaggccagtcactg

SEQ ID NO: 953861 - DNA, 25 bp, Homo sapien
ttgggagactgagtaggccagtcac

SEQ ID NO: 953862 - DNA, 25 bp, Homo sapien
tccaagagaggcgattggacaagga

SEQ ID NO: 953863 - DNA, 25 bp, Homo sapien
tggagagtgattccatggaagcctc

SEQ ID NO: 953864 - DNA, 25 bp, Homo sapien
gaagcctctggattggacaaggaga

SEQ ID NO: 953865 - DNA, 25 bp, Homo sapien
gtttttccacagtccaagagaggcg

SEQ ID NO: 953866 - DNA, 25 bp, Homo sapien
tggcaatctgtacaatttcagcagt

SEQ ID NO: 953867 - DNA, 25 bp, Homo sapien
taggatgtagtatgtggcaatctgt

SEQ ID NO: 953868 - DNA, 25 bp, Homo sapien
cccgaaaccttcaccttggcagtat

SEQ ID NO: 953869 - DNA, 25 bp, Homo sapien
cacagctgaacctccctgagggtct

SEQ ID NO: 953870 - DNA, 25 bp, Homo sapien
cccgtggaagcagtgtcaccagtgc

SEQ ID NO: 953871 - DNA, 25 bp, Homo sapien
gctctggagaccctttagtgtttaa

SEQ ID NO: 953872 - DNA, 25 bp, Homo sapien
gaatccatccgctaatgtcggctcc

SEQ ID NO: 953873 - DNA, 25 bp, Homo sapien
gcagtgtcaccagtgcccattttat

SEQ ID NO: 953874 - DNA, 25 bp, Homo sapien
tattttgatacttgttttacaactg

SEQ ID NO: 953875 - DNA, 25 bp, Homo sapien
gaccccaggtaagagtgaggtcagg

SEQ ID NO: 953876 - DNA, 25 bp, Homo sapien
tacaactggaatacatggaatgaag

SEQ ID NO: 953877 - DNA, 25 bp, Homo sapien
aatgaaggggctgatatgggacccc

SEQ ID NO: 953878 - DNA, 25 bp, Homo sapien
gggactttgggcatccagtttcagg

SEQ ID NO: 953879 - DNA, 25 bp, Homo sapien
tttgggcatccagtttcagggactg

SEQ ID NO: 953880 - DNA, 25 bp, Homo sapien
ctagaggggactttgggcatccagt

SEQ ID NO: 953881 - DNA, 25 bp, Homo sapien
gtcggggggcagcatggcatcggac

SEQ ID NO: 953882 - DNA, 25 bp, Homo sapien
acagccggcgcaggtgtttccgaac

SEQ ID NO: 953883 - DNA, 25 bp, Homo sapien
gtacagccggcgcaggtgtttccga

SEQ ID NO: 953884 - DNA, 25 bp, Homo sapien
aggtgtttccgaacggcccacagca

SEQ ID NO: 953885 - DNA, 25 bp, Homo sapien
ggcgcaggtgtttccgaacggccca

SEQ ID NO: 953886 - DNA, 25 bp, Homo sapien
aggtgactgcgtcctcacttgggag

SEQ ID NO: 953887 - DNA, 25 bp, Homo sapien
aaaggtgactgcgtcctcacttggg

SEQ ID NO: 953888 - DNA, 25 bp, Homo sapien
tcaaaggtgactgcgtcctcacttg

SEQ ID NO: 953889 - DNA, 25 bp, Homo sapien
ttcaaaggtgactgcgtcctcactt

SEQ ID NO: 953890 - DNA, 25 bp, Homo sapien
aagagaagatgtgcatgcgtaaata

SEQ ID NO: 953891 - DNA, 25 bp, Homo sapien
gagaaactgccgctagaacgaccca

SEQ ID NO: 953892 - DNA, 25 bp, Homo sapien
tgtgcatgcgtaaatagctgggtct

SEQ ID NO: 953893 - DNA, 25 bp, Homo sapien
tagaacgacccatagataaacagca

SEQ ID NO: 953894 - DNA, 25 bp, Homo sapien
acctggcccatcagttctattcttc

SEQ ID NO: 953895 - DNA, 25 bp, Homo sapien
acacctggcccatcagttctattct

SEQ ID NO: 953896 - DNA, 25 bp, Homo sapien
ggcccatcagttctattcttctttt

SEQ ID NO: 953897 - DNA, 25 bp, Homo sapien
ctggcccatcagttctattcttctt

SEQ ID NO: 953898 - DNA, 25 bp, Homo sapien
taccaagttttatccagtatgcagg

SEQ ID NO: 953899 - DNA, 25 bp, Homo sapien
aagttttatccagtatgcaggttca

SEQ ID NO: 953900 - DNA, 25 bp, Homo sapien
ccaagttttatccagtatgcaggtt

SEQ ID NO: 953901 - DNA, 25 bp, Homo sapien
caagttttatccagtatgcaggttc

SEQ ID NO: 953902 - DNA, 25 bp, Homo sapien
tgggagctcgaccaacctcaaagtc

SEQ ID NO: 953903 - DNA, 25 bp, Homo sapien
tgtttcttggagtcagggtgtcctg

SEQ ID NO: 953904 - DNA, 25 bp, Homo sapien
cgtcctcggcagctgcagtagggat

SEQ ID NO: 953905 - DNA, 25 bp, Homo sapien
acctcggtctcctctgtagtcttgg

SEQ ID NO: 953906 - DNA, 25 bp, Homo sapien
tttgccaagcccgtctaacccatcg

SEQ ID NO: 953907 - DNA, 25 bp, Homo sapien
gccaagcccgtctaacccatcggaa

SEQ ID NO: 953908 - DNA, 25 bp, Homo sapien
ttgccaagcccgtctaacccatcgg

SEQ ID NO: 953909 - DNA, 25 bp, Homo sapien
caagcccgtctaacccatcggaaga

SEQ ID NO: 953910 - DNA, 25 bp, Homo sapien
cagagctagcatttggtacggtggg

SEQ ID NO: 953911 - DNA, 25 bp, Homo sapien
gacagggagaggagtcgaagtaggt

SEQ ID NO: 953912 - DNA, 25 bp, Homo sapien
cctggcaatgaatcccagacctttt

SEQ ID NO: 953913 - DNA, 25 bp, Homo sapien
tgtgggccggtgaccacctcttgag

SEQ ID NO: 953914 - DNA, 25 bp, Homo sapien
cctccatcaaggctggggatgatga

SEQ ID NO: 953915 - DNA, 25 bp, Homo sapien
caagccgtctactgctggggggtcc

SEQ ID NO: 953916 - DNA, 25 bp, Homo sapien
cacggggacattaaagctgcatagg

SEQ ID NO: 953917 - DNA, 25 bp, Homo sapien
gaggcacctcaagggaacaagatgg

SEQ ID NO: 953918 - DNA, 25 bp, Homo sapien
gcggctgacgcaaggccgggcagcc

SEQ ID NO: 953919 - DNA, 25 bp, Homo sapien
acgcaaggccgggcagccccaaagg

SEQ ID NO: 953920 - DNA, 25 bp, Homo sapien
ccaaaggcacattgtaagggaaggg

SEQ ID NO: 953921 - DNA, 25 bp, Homo sapien
agccccaaaggcacattgtaaggga

SEQ ID NO: 953922 - DNA, 25 bp, Homo sapien
gagggcccattgggcgcagggggcc

SEQ ID NO: 953923 - DNA, 25 bp, Homo sapien
gacggagggcccattgggcgcaggg

SEQ ID NO: 953924 - DNA, 25 bp, Homo sapien
ggagggcccattgggcgcagggggc

SEQ ID NO: 953925 - DNA, 25 bp, Homo sapien
tcagacggagggcccattgggcgca

SEQ ID NO: 953926 - DNA, 25 bp, Homo sapien
tccgctccgccaattcccggatctg

SEQ ID NO: 953927 - DNA, 25 bp, Homo sapien
accgcaaacatgaggtgggacttca

SEQ ID NO: 953928 - DNA, 25 bp, Homo sapien
tccgggctggccagggcgcgcagca

SEQ ID NO: 953929 - DNA, 25 bp, Homo sapien
cctcccggaccgcaaacatgaggtg

SEQ ID NO: 953930 - DNA, 25 bp, Homo sapien
cgtcaacggggtgggtgcctcatcc

SEQ ID NO: 953931 - DNA, 25 bp, Homo sapien
gacaggcacagcgtcaacggggtgg

SEQ ID NO: 953932 - DNA, 25 bp, Homo sapien
gcacagcgtcaacggggtgggtgcc

SEQ ID NO: 953933 - DNA, 25 bp, Homo sapien
agcgtcaacggggtgggtgcctcat

SEQ ID NO: 953934 - DNA, 25 bp, Homo sapien
gatggggaccagtagccagactaga

SEQ ID NO: 953935 - DNA, 25 bp, Homo sapien
gctgggagttggtgttccctggtaa

SEQ ID NO: 953936 - DNA, 25 bp, Homo sapien
tgtccagaggatgagggacaaagca

SEQ ID NO: 953937 - DNA, 25 bp, Homo sapien
ggaaaaggacgagggacagaggcag

SEQ ID NO: 953938 - DNA, 25 bp, Homo sapien
gttgtcaatgccaaccaggcttccg

SEQ ID NO: 953939 - DNA, 25 bp, Homo sapien
gcttgctcgattttgttgtcaatgc

SEQ ID NO: 953940 - DNA, 25 bp, Homo sapien
catggcttgctcgattttgttgtca

SEQ ID NO: 953941 - DNA, 25 bp, Homo sapien
gattttgttgtcaatgccaaccagg

SEQ ID NO: 953942 - DNA, 25 bp, Homo sapien
ggaggagaggagaagccttcccagg

SEQ ID NO: 953943 - DNA, 25 bp, Homo sapien
aggagaggagaagccttcccaggtg

SEQ ID NO: 953944 - DNA, 25 bp, Homo sapien
ctggagagacacaggaaggtgaggg

SEQ ID NO: 953945 - DNA, 25 bp, Homo sapien
ggggaggagaggagaagccttccca

SEQ ID NO: 953946 - DNA, 25 bp, Homo sapien
ttgtccatccccctgcgggttgaag

SEQ ID NO: 953947 - DNA, 25 bp, Homo sapien
ccaccactcgggtctcataagacga

SEQ ID NO: 953948 - DNA, 25 bp, Homo sapien
caccagggacttgacagagacccct

SEQ ID NO: 953949 - DNA, 25 bp, Homo sapien
cctgcgggttgaaggccgctgccca

SEQ ID NO: 953950 - DNA, 25 bp, Homo sapien
cacccccccaatggagagggatgca

SEQ ID NO: 953951 - DNA, 25 bp, Homo sapien
agacacccccccaatggagagggat

SEQ ID NO: 953952 - DNA, 25 bp, Homo sapien
gacacccccccaatggagagggatg

SEQ ID NO: 953953 - DNA, 25 bp, Homo sapien
tagacacccccccaatggagaggga

SEQ ID NO: 953954 - DNA, 25 bp, Homo sapien
cacggtcagtgccagtgtccccttc

SEQ ID NO: 953955 - DNA, 25 bp, Homo sapien
ctcggtgggcgggaattcccagaca

SEQ ID NO: 953956 - DNA, 25 bp, Homo sapien
ggaattcccagacacggtcagtgcc

SEQ ID NO: 953957 - DNA, 25 bp, Homo sapien
tgggcgggaattcccagacacggtc

SEQ ID NO: 953958 - DNA, 25 bp, Homo sapien
gccggccgaggaagtcagctggtgg

SEQ ID NO: 953959 - DNA, 25 bp, Homo sapien
gggggccggccgaggaagtcagctg

SEQ ID NO: 953960 - DNA, 25 bp, Homo sapien
gggccggccgaggaagtcagctggt

SEQ ID NO: 953961 - DNA, 25 bp, Homo sapien
cggccgaggaagtcagctggtggct

SEQ ID NO: 953962 - DNA, 25 bp, Homo sapien
tcgccacctccgaccccattctgtc

SEQ ID NO: 953963 - DNA, 25 bp, Homo sapien
cattctgtcccctccgtcactcaag

SEQ ID NO: 953964 - DNA, 25 bp, Homo sapien
tgtcccctccgtcactcaaggcctt

SEQ ID NO: 953965 - DNA, 25 bp, Homo sapien
ccctcgccacctccgaccccattct

SEQ ID NO: 953966 - DNA, 25 bp, Homo sapien
tgggtccgaaatcaactgtgtgcag

SEQ ID NO: 953967 - DNA, 25 bp, Homo sapien
tgccccggcctgatttgctattctg

SEQ ID NO: 953968 - DNA, 25 bp, Homo sapien
aagtctgtgacctgacagttctgag

SEQ ID NO: 953969 - DNA, 25 bp, Homo sapien
aggcactttcttacagctaccccgg

SEQ ID NO: 953970 - DNA, 25 bp, Homo sapien
ccaggctggcatcgtgggtgaagta

SEQ ID NO: 953971 - DNA, 25 bp, Homo sapien
ggtgaccactgatggccaacatgga

SEQ ID NO: 953972 - DNA, 25 bp, Homo sapien
tctggagatttgtgaaccaggctgg

SEQ ID NO: 953973 - DNA, 25 bp, Homo sapien
tctgagctgctactgctccgaaggg

SEQ ID NO: 953974 - DNA, 25 bp, Homo sapien
gggtctcaagatgttgtcccggctg

SEQ ID NO: 953975 - DNA, 25 bp, Homo sapien
tgctggaagaatgagccaccactcc

SEQ ID NO: 953976 - DNA, 25 bp, Homo sapien
taacacagggtctcaagatgttgtc

SEQ ID NO: 953977 - DNA, 25 bp, Homo sapien
ttttggttaacacagggtctcaaga

SEQ ID NO: 953978 - DNA, 25 bp, Homo sapien
tgtctctcccctgctagaaggtcag

SEQ ID NO: 953979 - DNA, 25 bp, Homo sapien
gaaggtcagtttgctcagtagctat

SEQ ID NO: 953980 - DNA, 25 bp, Homo sapien
ccctctcaaacttctcggactcagg

SEQ ID NO: 953981 - DNA, 25 bp, Homo sapien
gaatgaatggatcctcagaaactgc

SEQ ID NO: 953982 - DNA, 25 bp, Homo sapien
gaacatgacaagacgcctctgtgag

SEQ ID NO: 953983 - DNA, 25 bp, Homo sapien
gggcgacaggaacatgacaagacgc

SEQ ID NO: 953984 - DNA, 25 bp, Homo sapien
tccagggtggttaagggacagagca

SEQ ID NO: 953985 - DNA, 25 bp, Homo sapien
gaacagagagtccagggtggttaag

SEQ ID NO: 953986 - DNA, 25 bp, Homo sapien
ttaagagggagaagaggcatgaggg

SEQ ID NO: 953987 - DNA, 25 bp, Homo sapien
gaggcatgaggggacgtggaaggga

SEQ ID NO: 953988 - DNA, 25 bp, Homo sapien
gagaagaggcatgaggggacgtgga

SEQ ID NO: 953989 - DNA, 25 bp, Homo sapien
ctgttaagagggagaagaggcatga

SEQ ID NO: 953990 - DNA, 25 bp, Homo sapien
cagtgcagagactggcagcgcgcaa

SEQ ID NO: 953991 - DNA, 25 bp, Homo sapien
gggccacatatgctacaggctacat

SEQ ID NO: 953992 - DNA, 25 bp, Homo sapien
ccagctacccagctatccagctggg

SEQ ID NO: 953993 - DNA, 25 bp, Homo sapien
agcgcgcaaggcctaccttttactt

SEQ ID NO: 953994 - DNA, 25 bp, Homo sapien
gggatgtgcccgcactctcaccggt

SEQ ID NO: 953995 - DNA, 25 bp, Homo sapien
ctacagctttcctccgggacagtgg

SEQ ID NO: 953996 - DNA, 25 bp, Homo sapien
ttctggagcacccaactccatccgc

SEQ ID NO: 953997 - DNA, 25 bp, Homo sapien
aactccatccgcagccgcatgtcta

SEQ ID NO: 953998 - DNA, 25 bp, Homo sapien
ctggaatccaaagatctgcccccgg

SEQ ID NO: 953999 - DNA, 25 bp, Homo sapien
gaccgcggcgataaggctctcccag

SEQ ID NO: 954000 - DNA, 25 bp, Homo sapien
tccaggtctcgctcataaacatcca

SEQ ID NO: 954001 - DNA, 25 bp, Homo sapien
gaattccctccaggagtccgccgaa

SEQ ID NO: 954002 - DNA, 25 bp, Homo sapien
ctcatagtccgtggtgacgctggtg

SEQ ID NO: 954003 - DNA, 25 bp, Homo sapien
ggtgacgctggtgatttggaaacta

SEQ ID NO: 954004 - DNA, 25 bp, Homo sapien
ggccctcatagtccgtggtgacgct

SEQ ID NO: 954005 - DNA, 25 bp, Homo sapien
cgctggtgatttggaaactactctt

SEQ ID NO: 954006 - DNA, 25 bp, Homo sapien
gggacgtctgggtccgacatggcag

SEQ ID NO: 954007 - DNA, 25 bp, Homo sapien
ggtccgacatggcaggagggcctgg

SEQ ID NO: 954008 - DNA, 25 bp, Homo sapien
ggttggggctccttgaaggggctca

SEQ ID NO: 954009 - DNA, 25 bp, Homo sapien
acatggcggggacatccgagcccct

SEQ ID NO: 954010 - DNA, 25 bp, Homo sapien
gttgctgctgaactccagagctgag

SEQ ID NO: 954011 - DNA, 25 bp, Homo sapien
tgaactccagagctgagtttgcaaa

SEQ ID NO: 954012 - DNA, 25 bp, Homo sapien
ctgttgctgctgaactccagagctg

SEQ ID NO: 954013 - DNA, 25 bp, Homo sapien
gctgctgaactccagagctgagttt

SEQ ID NO: 954014 - DNA, 25 bp, Homo sapien
cgcctaagaggtcgggctgtccgtt

SEQ ID NO: 954015 - DNA, 25 bp, Homo sapien
ggcgatcagaggctgtcccgtcctc

SEQ ID NO: 954016 - DNA, 25 bp, Homo sapien
tccgaggagcctaggagcggcctct

SEQ ID NO: 954017 - DNA, 25 bp, Homo sapien
catctccgaggaaagtttgctctcc

SEQ ID NO: 954018 - DNA, 25 bp, Homo sapien
gccccggaccgacgctgggtgcgga

SEQ ID NO: 954019 - DNA, 25 bp, Homo sapien
cgcgccgggcgtacgggttgcacgg

SEQ ID NO: 954020 - DNA, 25 bp, Homo sapien
gacgcccaaagaccgcgacgggctg

SEQ ID NO: 954021 - DNA, 25 bp, Homo sapien
gggagaccgaactcagcaccgaccg

SEQ ID NO: 954022 - DNA, 25 bp, Homo sapien
gcacacctttgtgcgatttaggaaa

SEQ ID NO: 954023 - DNA, 25 bp, Homo sapien
tgggcactatgtcttgtgcctgcaa

SEQ ID NO: 954024 - DNA, 25 bp, Homo sapien
cagcttggagatcagtcagggccac

SEQ ID NO: 954025 - DNA, 25 bp, Homo sapien
tgggcagcaaggtagggcccagctt

SEQ ID NO: 954026 - DNA, 25 bp, Homo sapien
tctggagggcgattctgggcctttc

SEQ ID NO: 954027 - DNA, 25 bp, Homo sapien
aagcagagggcccaagaccattcac

SEQ ID NO: 954028 - DNA, 25 bp, Homo sapien
ctcctgagctaggagtggagaatca

SEQ ID NO: 954029 - DNA, 25 bp, Homo sapien
tctccccaatgccaatgcctaaagg

SEQ ID NO: 954030 - DNA, 25 bp, Homo sapien
gataattcaaaataaagtctatatt

SEQ ID NO: 954031 - DNA, 25 bp, Homo sapien
tctcagctactccagcagctgagct

SEQ ID NO: 954032 - DNA, 25 bp, Homo sapien
taaagtctatatttctgcattttcc

SEQ ID NO: 954033 - DNA, 25 bp, Homo sapien
tcaaaataaagtctatatttctgca

SEQ ID NO: 954034 - DNA, 25 bp, Homo sapien
acattgttgttgaacttagggcaga

SEQ ID NO: 954035 - DNA, 25 bp, Homo sapien
gcacattgttgttgaacttagggca

SEQ ID NO: 954036 - DNA, 25 bp, Homo sapien
gtccctcgcttctggaaggtcagca

SEQ ID NO: 954037 - DNA, 25 bp, Homo sapien
cacattgttgttgaacttagggcag

SEQ ID NO: 954038 - DNA, 25 bp, Homo sapien
ttcccagctggttggattggccgat

SEQ ID NO: 954039 - DNA, 25 bp, Homo sapien
caaagttgatggttccagccaaagt

SEQ ID NO: 954040 - DNA, 25 bp, Homo sapien
gggcagtgagcaaaattactagaat

SEQ ID NO: 954041 - DNA, 25 bp, Homo sapien
tacaaatatgtctccttcataaggg

SEQ ID NO: 954042 - DNA, 25 bp, Homo sapien
aactgctgcatcctggagtcacgtt

SEQ ID NO: 954043 - DNA, 25 bp, Homo sapien
tgctgcatcctggagtcacgttctc

SEQ ID NO: 954044 - DNA, 25 bp, Homo sapien
ctgctgcatcctggagtcacgttct

SEQ ID NO: 954045 - DNA, 25 bp, Homo sapien
actgctgcatcctggagtcacgttc

SEQ ID NO: 954046 - DNA, 25 bp, Homo sapien
caaaggactaggagactataatatg

SEQ ID NO: 954047 - DNA, 25 bp, Homo sapien
ggagactataatatgctttcccaca

SEQ ID NO: 954048 - DNA, 25 bp, Homo sapien
tatgctttcccacatgactaataga

SEQ ID NO: 954049 - DNA, 25 bp, Homo sapien
cccacatgactaatagacaagtaag

SEQ ID NO: 954050 - DNA, 25 bp, Homo sapien
aaaaaaagtgcatgaaatgaaaagc

SEQ ID NO: 954051 - DNA, 25 bp, Homo sapien
tgcaggtgtttcttgggccaccgcc

SEQ ID NO: 954052 - DNA, 25 bp, Homo sapien
aatgaaaagcaaacaggagtgcagg

SEQ ID NO: 954053 - DNA, 25 bp, Homo sapien
cttgggccaccgcctcctttgtgag

SEQ ID NO: 954054 - DNA, 25 bp, Homo sapien
tgccctgccgacgtgcggttctgcg

SEQ ID NO: 954055 - DNA, 25 bp, Homo sapien
cgcgtcccgagtgttccgagagcga

SEQ ID NO: 954056 - DNA, 25 bp, Homo sapien
tggcgggtgcgtgcaccaccagcaa

SEQ ID NO: 954057 - DNA, 25 bp, Homo sapien
cgagcagaagtttcgcgcgtgccga

SEQ ID NO: 954058 - DNA, 25 bp, Homo sapien
gagcccctgacgagctgcctcagct

SEQ ID NO: 954059 - DNA, 25 bp, Homo sapien
gctacgtcgatctggacctggtcct

SEQ ID NO: 954060 - DNA, 25 bp, Homo sapien
tctctgggggcacttggtgacgtcc

SEQ ID NO: 954061 - DNA, 25 bp, Homo sapien
agagagcctcggaaccggcaccgcc

SEQ ID NO: 954062 - DNA, 25 bp, Homo sapien
ctatgcggtgaggagacctgagacc

SEQ ID NO: 954063 - DNA, 25 bp, Homo sapien
tctgctcccagccacacggagcctg

SEQ ID NO: 954064 - DNA, 25 bp, Homo sapien
cactgttttattgtcaacacaacca

SEQ ID NO: 954065 - DNA, 25 bp, Homo sapien
ctgttttattgtcaacacaaccagc

SEQ ID NO: 954066 - DNA, 25 bp, Homo sapien
aaccaacactgttttattgtcaaca

SEQ ID NO: 954067 - DNA, 25 bp, Homo sapien
aacactgttttattgtcaacacaac

SEQ ID NO: 954068 - DNA, 25 bp, Homo sapien
cagaggtatggtctggggggccaac

SEQ ID NO: 954069 - DNA, 25 bp, Homo sapien
agagcgatcagctccggcccgctga

SEQ ID NO: 954070 - DNA, 25 bp, Homo sapien
gagcgatcagctccggcccgctgag

SEQ ID NO: 954071 - DNA, 25 bp, Homo sapien
tgagagcgatcagctccggcccgct

SEQ ID NO: 954072 - DNA, 25 bp, Homo sapien
agtgagagcgatcagctccggcccg

SEQ ID NO: 954073 - DNA, 25 bp, Homo sapien
gggcggcggcagcagtttcagggag

SEQ ID NO: 954074 - DNA, 25 bp, Homo sapien
ggcggcagcagtttcagggagccca

SEQ ID NO: 954075 - DNA, 25 bp, Homo sapien
cctggcagacatgatggggggcggc

SEQ ID NO: 954076 - DNA, 25 bp, Homo sapien
gcggcggcagcagtttcagggagcc

SEQ ID NO: 954077 - DNA, 25 bp, Homo sapien
tttcctgccaggcaagcctggaggc

SEQ ID NO: 954078 - DNA, 25 bp, Homo sapien
gagaatggaatgtgtttcctgccag

SEQ ID NO: 954079 - DNA, 25 bp, Homo sapien
aggagagagaatggaatgtgtttcc

SEQ ID NO: 954080 - DNA, 25 bp, Homo sapien
agagagaatggaatgtgtttcctgc

SEQ ID NO: 954081 - DNA, 25 bp, Homo sapien
gcagcagagggtccgagaggaagac

SEQ ID NO: 954082 - DNA, 25 bp, Homo sapien
acaggtacaggggaacacgctgccc

SEQ ID NO: 954083 - DNA, 25 bp, Homo sapien
gctggggggccttggacaggtacag

SEQ ID NO: 954084 - DNA, 25 bp, Homo sapien
agcagagggtccgagaggaagacat

SEQ ID NO: 954085 - DNA, 25 bp, Homo sapien
caccactagggtggcgggctgcggg

SEQ ID NO: 954086 - DNA, 25 bp, Homo sapien
ctaggaggaaacaccactagggtgg

SEQ ID NO: 954087 - DNA, 25 bp, Homo sapien
gaaacaccactagggtggcgggctg

SEQ ID NO: 954088 - DNA, 25 bp, Homo sapien
tcccagaggagttggggcagccttg

SEQ ID NO: 954089 - DNA, 25 bp, Homo sapien
gctgcttcatacagcggccagaatg

SEQ ID NO: 954090 - DNA, 25 bp, Homo sapien
tgaggggtgacacagcgtccggcct

SEQ ID NO: 954091 - DNA, 25 bp, Homo sapien
ggctgcttcatacagcggccagaat

SEQ ID NO: 954092 - DNA, 25 bp, Homo sapien
atgaggggtgacacagcgtccggcc

SEQ ID NO: 954093 - DNA, 25 bp, Homo sapien
actggagcctcaggccaccgcacag

SEQ ID NO: 954094 - DNA, 25 bp, Homo sapien
gagcctcaggccaccgcacagctcc

SEQ ID NO: 954095 - DNA, 25 bp, Homo sapien
gtcccacaggtttgcccccaactca

SEQ ID NO: 954096 - DNA, 25 bp, Homo sapien
gccagtcccacaggtttgcccccaa

SEQ ID NO: 954097 - DNA, 25 bp, Homo sapien
ggccgaggtcctgctttggcttcat

SEQ ID NO: 954098 - DNA, 25 bp, Homo sapien
ccacaccggccgaggtcctgctttg

SEQ ID NO: 954099 - DNA, 25 bp, Homo sapien
ggcttcatacttggggtcccagggc

SEQ ID NO: 954100 - DNA, 25 bp, Homo sapien
tcccagggcgctagtggagtcatcc

SEQ ID NO: 954101 - DNA, 25 bp, Homo sapien
ctccggggggctgctcagtggccgg

SEQ ID NO: 954102 - DNA, 25 bp, Homo sapien
ccggggggctgctcagtggccgggc

SEQ ID NO: 954103 - DNA, 25 bp, Homo sapien
ggggctccggggggctgctcagtgg

SEQ ID NO: 954104 - DNA, 25 bp, Homo sapien
ggctccggggggctgctcagtggcc

SEQ ID NO: 954105 - DNA, 25 bp, Homo sapien
cagcagctgctctctccagatccag

SEQ ID NO: 954106 - DNA, 25 bp, Homo sapien
ctgctctctccagatccaggaaggg

SEQ ID NO: 954107 - DNA, 25 bp, Homo sapien
cagctgctctctccagatccaggaa

SEQ ID NO: 954108 - DNA, 25 bp, Homo sapien
gctgctctctccagatccaggaagg

SEQ ID NO: 954109 - DNA, 25 bp, Homo sapien
gggagaccgagggacccaatctcca

SEQ ID NO: 954110 - DNA, 25 bp, Homo sapien
gggtgcctggtgcaagggagaccga

SEQ ID NO: 954111 - DNA, 25 bp, Homo sapien
aagcctccgtagagcgcgtggtgaa

SEQ ID NO: 954112 - DNA, 25 bp, Homo sapien
cagggacaatggagaagcctccgta

SEQ ID NO: 954113 - DNA, 25 bp, Homo sapien
cagctccctgggggcgtccgctccg

SEQ ID NO: 954114 - DNA, 25 bp, Homo sapien
gagcgcaggacggtaccgccgtgtc

SEQ ID NO: 954115 - DNA, 25 bp, Homo sapien
tcccgagcgcaggacggtaccgccg

SEQ ID NO: 954116 - DNA, 25 bp, Homo sapien
agcgcaggacggtaccgccgtgtcc

SEQ ID NO: 954117 - DNA, 25 bp, Homo sapien
ccgagcgcaggacggtaccgccgtg

SEQ ID NO: 954118 - DNA, 25 bp, Homo sapien
gcgactgggcggtgaattccggaaa

SEQ ID NO: 954119 - DNA, 25 bp, Homo sapien
gaacgtgccctcctggcgaacccac

SEQ ID NO: 954120 - DNA, 25 bp, Homo sapien
cggcgcgaacgtgccctcctggcga

SEQ ID NO: 954121 - DNA, 25 bp, Homo sapien
ccccctggcgactgggcggtgaatt

SEQ ID NO: 954122 - DNA, 25 bp, Homo sapien
cacagttacacctgagggccaccca

SEQ ID NO: 954123 - DNA, 25 bp, Homo sapien
cacgtgctctcagacacagttacac

SEQ ID NO: 954124 - DNA, 25 bp, Homo sapien
tctcagacacagttacacctgaggg

SEQ ID NO: 954125 - DNA, 25 bp, Homo sapien
gtgctctcagacacagttacacctg

SEQ ID NO: 954126 - DNA, 25 bp, Homo sapien
agcgcggagcccaggcgcgtcttct

SEQ ID NO: 954127 - DNA, 25 bp, Homo sapien
ttctctgagagcgcggagcccaggc

SEQ ID NO: 954128 - DNA, 25 bp, Homo sapien
tttattgcggctgacacgacacctg

SEQ ID NO: 954129 - DNA, 25 bp, Homo sapien
ctggcttctgtttattgcggctgac

SEQ ID NO: 954130 - DNA, 25 bp, Homo sapien
agggcgtggacgacagcagcgatgt

SEQ ID NO: 954131 - DNA, 25 bp, Homo sapien
tccagcagggcgtggacgacagcag

SEQ ID NO: 954132 - DNA, 25 bp, Homo sapien
gcagggcgtggacgacagcagcgat

SEQ ID NO: 954133 - DNA, 25 bp, Homo sapien
ggcgtggacgacagcagcgatgtag

SEQ ID NO: 954134 - DNA, 25 bp, Homo sapien
caagaaagctgtcagcgataacaga

SEQ ID NO: 954135 - DNA, 25 bp, Homo sapien
gggcagacccgagcatcaccgtgcg

SEQ ID NO: 954136 - DNA, 25 bp, Homo sapien
tccgggagcatgagaggccggcatc

SEQ ID NO: 954137 - DNA, 25 bp, Homo sapien
gggctcggcgacaaatgagacgcaa

SEQ ID NO: 954138 - DNA, 25 bp, Homo sapien
ccgaacccctacaaatatagatcct

SEQ ID NO: 954139 - DNA, 25 bp, Homo sapien
cgggtggagcagggaccttataaat

SEQ ID NO: 954140 - DNA, 25 bp, Homo sapien
aaggcaccgtcagcactgagaggtg

SEQ ID NO: 954141 - DNA, 25 bp, Homo sapien
tagagataatttagcccccccatag

SEQ ID NO: 954142 - DNA, 25 bp, Homo sapien
cgacgaagccgcccagaccagaggg

SEQ ID NO: 954143 - DNA, 25 bp, Homo sapien
agcatgaggaccacgtagaagacga

SEQ ID NO: 954144 - DNA, 25 bp, Homo sapien
catgaggaccacgtagaagacgacg

SEQ ID NO: 954145 - DNA, 25 bp, Homo sapien
aggaccacgtagaagacgacgaagc

SEQ ID NO: 954146 - DNA, 25 bp, Homo sapien
gaggagatccgagggcgagcacagg

SEQ ID NO: 954147 - DNA, 25 bp, Homo sapien
agtgccctggaggagatccgagggc

SEQ ID NO: 954148 - DNA, 25 bp, Homo sapien
cctggaggagatccgagggcgagca

SEQ ID NO: 954149 - DNA, 25 bp, Homo sapien
agatccgagggcgagcacaggtcag

SEQ ID NO: 954150 - DNA, 25 bp, Homo sapien
catgccacatgctcggctgagtccg

SEQ ID NO: 954151 - DNA, 25 bp, Homo sapien
tccggcatgccaccactctttagaa

SEQ ID NO: 954152 - DNA, 25 bp, Homo sapien
tgagagcagacatccgctgcaaatg

SEQ ID NO: 954153 - DNA, 25 bp, Homo sapien
cccacatgctgacgtgctgggcagg

SEQ ID NO: 954154 - DNA, 25 bp, Homo sapien
cacattcttccgagccttgagggca

SEQ ID NO: 954155 - DNA, 25 bp, Homo sapien
tctccacattcttccgagccttgag

SEQ ID NO: 954156 - DNA, 25 bp, Homo sapien
ccatttttcgacaggcttctagaaa

SEQ ID NO: 954157 - DNA, 25 bp, Homo sapien
aggcacccccatttttcgacaggct

SEQ ID NO: 954158 - DNA, 25 bp, Homo sapien
atgaagggcacggagcgcggccgta

SEQ ID NO: 954159 - DNA, 25 bp, Homo sapien
cgcggccgtagctggttggccagct

SEQ ID NO: 954160 - DNA, 25 bp, Homo sapien
cggagcgcggccgtagctggttggc

SEQ ID NO: 954161 - DNA, 25 bp, Homo sapien
gggagggcacatggatgaagggcac

SEQ ID NO: 954162 - DNA, 25 bp, Homo sapien
ctggcagtgtagaccacatagagca

SEQ ID NO: 954163 - DNA, 25 bp, Homo sapien
aggtctcaggacagagtctggtgag

SEQ ID NO: 954164 - DNA, 25 bp, Homo sapien
cgccgaggtctcaggacagagtctg

SEQ ID NO: 954165 - DNA, 25 bp, Homo sapien
ccgaggtctcaggacagagtctggt

SEQ ID NO: 954166 - DNA, 25 bp, Homo sapien
tctcaggacagagtctggtgaggaa

SEQ ID NO: 954167 - DNA, 25 bp, Homo sapien
actgctcaccactgactctgtagct

SEQ ID NO: 954168 - DNA, 25 bp, Homo sapien
accactgactctgtagctgggtccc

SEQ ID NO: 954169 - DNA, 25 bp, Homo sapien
ggcacctacacctcctgcctctctg

SEQ ID NO: 954170 - DNA, 25 bp, Homo sapien
agtggcctggcacctacacctcctg

SEQ ID NO: 954171 - DNA, 25 bp, Homo sapien
agaggaagctgtttggtctctgaat

SEQ ID NO: 954172 - DNA, 25 bp, Homo sapien
aagaggaagctgtttggtctctgaa

SEQ ID NO: 954173 - DNA, 25 bp, Homo sapien
gaggaagctgtttggtctctgaatg

SEQ ID NO: 954174 - DNA, 25 bp, Homo sapien
aggaagctgtttggtctctgaatgg

SEQ ID NO: 954175 - DNA, 25 bp, Homo sapien
aaccagggacacagcgacaggggca

SEQ ID NO: 954176 - DNA, 25 bp, Homo sapien
gacacagcgacaggggcaggtgaga

SEQ ID NO: 954177 - DNA, 25 bp, Homo sapien
gggccggaaccagggacacagcgac

SEQ ID NO: 954178 - DNA, 25 bp, Homo sapien
ccggaaccagggacacagcgacagg

SEQ ID NO: 954179 - DNA, 25 bp, Homo sapien
tcctcctcccaaaatccctgtccca

SEQ ID NO: 954180 - DNA, 25 bp, Homo sapien
ggaggcactggacttaggcgagccg

SEQ ID NO: 954181 - DNA, 25 bp, Homo sapien
tgggaggcactggacttaggcgagc

SEQ ID NO: 954182 - DNA, 25 bp, Homo sapien
tggtccagctatgggaaggggctct

SEQ ID NO: 954183 - DNA, 25 bp, Homo sapien
cttgggaggcactggacttaggcga

SEQ ID NO: 954184 - DNA, 25 bp, Homo sapien
attagagggatgatggtcataggaa

SEQ ID NO: 954185 - DNA, 25 bp, Homo sapien
ggatgatggtcataggaagaggagt

SEQ ID NO: 954186 - DNA, 25 bp, Homo sapien
gggaattagagggatgatggtcata

SEQ ID NO: 954187 - DNA, 25 bp, Homo sapien
gatgatggtcataggaagaggagtg

SEQ ID NO: 954188 - DNA, 25 bp, Homo sapien
catggcttgagtggacacggcggcg

SEQ ID NO: 954189 - DNA, 25 bp, Homo sapien
ttgtgcatggcttgagtggacacgg

SEQ ID NO: 954190 - DNA, 25 bp, Homo sapien
tgcatggcttgagtggacacggcgg

SEQ ID NO: 954191 - DNA, 25 bp, Homo sapien
tgtgcatggcttgagtggacacggc

SEQ ID NO: 954192 - DNA, 25 bp, Homo sapien
ccccaaggcagaacggctcagcggg

SEQ ID NO: 954193 - DNA, 25 bp, Homo sapien
tggggtcagctagccccaaggcaga

SEQ ID NO: 954194 - DNA, 25 bp, Homo sapien
ggctcagtgtccagcaacagccccg

SEQ ID NO: 954195 - DNA, 25 bp, Homo sapien
ctcagcggggctcggtggccccatt

SEQ ID NO: 954196 - DNA, 25 bp, Homo sapien
gccacagctgcaaggtgtccgggcg

SEQ ID NO: 954197 - DNA, 25 bp, Homo sapien
acagctgcaaggtgtccgggcgccg

SEQ ID NO: 954198 - DNA, 25 bp, Homo sapien
ccacagctgcaaggtgtccgggcgc

SEQ ID NO: 954199 - DNA, 25 bp, Homo sapien
cacagctgcaaggtgtccgggcgcc

SEQ ID NO: 954200 - DNA, 25 bp, Homo sapien
ctgccccagggcttaattcgggtgg

SEQ ID NO: 954201 - DNA, 25 bp, Homo sapien
ggcttaattcgggtggtcgctgctc

SEQ ID NO: 954202 - DNA, 25 bp, Homo sapien
agggcttaattcgggtggtcgctgc

SEQ ID NO: 954203 - DNA, 25 bp, Homo sapien
ccagggcttaattcgggtggtcgct

SEQ ID NO: 954204 - DNA, 25 bp, Homo sapien
ggacatggctgtcgatgaagtcaat

SEQ ID NO: 954205 - DNA, 25 bp, Homo sapien
tccacagtgcctcgctcttcatcct

SEQ ID NO: 954206 - DNA, 25 bp, Homo sapien
ctccacagtgcctcgctcttcatcc

SEQ ID NO: 954207 - DNA, 25 bp, Homo sapien
tccccggggacatggctgtcgatga

SEQ ID NO: 954208 - DNA, 25 bp, Homo sapien
gagccatcctccttgcgttctctgg

SEQ ID NO: 954209 - DNA, 25 bp, Homo sapien
agctctgagatccggaatgacagct

SEQ ID NO: 954210 - DNA, 25 bp, Homo sapien
tctgagatccggaatgacagctctg

SEQ ID NO: 954211 - DNA, 25 bp, Homo sapien
gccatcctccttgcgttctctgggt

SEQ ID NO: 954212 - DNA, 25 bp, Homo sapien
tcctgtgtgggactaagctcagggt

SEQ ID NO: 954213 - DNA, 25 bp, Homo sapien
ggtcctgtgtgggactaagctcagg

SEQ ID NO: 954214 - DNA, 25 bp, Homo sapien
tgtgtgggactaagctcagggtctc

SEQ ID NO: 954215 - DNA, 25 bp, Homo sapien
cctcaatcacccatggacaggacgc

SEQ ID NO: 954216 - DNA, 25 bp, Homo sapien
cagaccacctcttgctgccactatc

SEQ ID NO: 954217 - DNA, 25 bp, Homo sapien
catcgtaccgatgtcccggaaatag

SEQ ID NO: 954218 - DNA, 25 bp, Homo sapien
gtcccggaaatagatcctctgcagg

SEQ ID NO: 954219 - DNA, 25 bp, Homo sapien
gtccagcccaccatcgtaccgatgt

SEQ ID NO: 954220 - DNA, 25 bp, Homo sapien
ctgccagaaagcagggggtgcctgg

SEQ ID NO: 954221 - DNA, 25 bp, Homo sapien
cagccaggcggatctggtcagcctg

SEQ ID NO: 954222 - DNA, 25 bp, Homo sapien
gggcattcagtatcccagggcttcc

SEQ ID NO: 954223 - DNA, 25 bp, Homo sapien
ccgggaaggggcattcagtatccca

SEQ ID NO: 954224 - DNA, 25 bp, Homo sapien
cccggcctctgtggacaaatacttg

SEQ ID NO: 954225 - DNA, 25 bp, Homo sapien
gcccggcctctgtggacaaatactt

SEQ ID NO: 954226 - DNA, 25 bp, Homo sapien
ccggcctctgtggacaaatacttga

SEQ ID NO: 954227 - DNA, 25 bp, Homo sapien
tgcccggcctctgtggacaaatact

SEQ ID NO: 954228 - DNA, 25 bp, Homo sapien
cagcacacgccagggagttggcagg

SEQ ID NO: 954229 - DNA, 25 bp, Homo sapien
agctccccggatcctgctcagctat

SEQ ID NO: 954230 - DNA, 25 bp, Homo sapien
ggcagcacacgccagggagttggca

SEQ ID NO: 954231 - DNA, 25 bp, Homo sapien
gctcagctatccaaggggaccaacc

SEQ ID NO: 954232 - DNA, 25 bp, Homo sapien
caggagaaatccaggcggaccagag

SEQ ID NO: 954233 - DNA, 25 bp, Homo sapien
cggttacaggagaaatccaggcgga

SEQ ID NO: 954234 - DNA, 25 bp, Homo sapien
gagactgggattcgggagacgcggt

SEQ ID NO: 954235 - DNA, 25 bp, Homo sapien
ggagacgcggttacaggagaaatcc

SEQ ID NO: 954236 - DNA, 25 bp, Homo sapien
aaaagtcaggaacatgctcagggct

SEQ ID NO: 954237 - DNA, 25 bp, Homo sapien
cacagtctggattcatggcggccct

SEQ ID NO: 954238 - DNA, 25 bp, Homo sapien
taaatccctaagagatggccccaga

SEQ ID NO: 954239 - DNA, 25 bp, Homo sapien
gattctggtccacggtctaagcgag

SEQ ID NO: 954240 - DNA, 25 bp, Homo sapien
gtgttttcgttaccgcagcctgagc

SEQ ID NO: 954241 - DNA, 25 bp, Homo sapien
tgggacgcacatacaaacacctcct

SEQ ID NO: 954242 - DNA, 25 bp, Homo sapien
aatgcctgccatgtataagctaccc

SEQ ID NO: 954243 - DNA, 25 bp, Homo sapien
gctacccggtctgcagtgttttcgt

SEQ ID NO: 954244 - DNA, 25 bp, Homo sapien
ttcctccggacattgaggtcccgca

SEQ ID NO: 954245 - DNA, 25 bp, Homo sapien
aggccacacagttccgagggcaggg

SEQ ID NO: 954246 - DNA, 25 bp, Homo sapien
cttcgggcagcgtactgagctggtt

SEQ ID NO: 954247 - DNA, 25 bp, Homo sapien
gagggcagggattggagctcgttgc

SEQ ID NO: 954248 - DNA, 25 bp, Homo sapien
agctgtcgcaggcttcccagggtgc

SEQ ID NO: 954249 - DNA, 25 bp, Homo sapien
aggcttcccagggtgccgatgtcag

SEQ ID NO: 954250 - DNA, 25 bp, Homo sapien
atgtagggtggcagcagcgacagct

SEQ ID NO: 954251 - DNA, 25 bp, Homo sapien
tggcagcagcgacagctggtttcgg

SEQ ID NO: 954252 - DNA, 25 bp, Homo sapien
ctgagaagcacacgctcccacgtgg

SEQ ID NO: 954253 - DNA, 25 bp, Homo sapien
ggtcactcagtagtacttgagactg

SEQ ID NO: 954254 - DNA, 25 bp, Homo sapien
ggtgggtcactcagtagtacttgag

SEQ ID NO: 954255 - DNA, 25 bp, Homo sapien
gtacttgagactgagaagcacacgc

SEQ ID NO: 954256 - DNA, 25 bp, Homo sapien
gcatctcaggcaattgtggtagagg

SEQ ID NO: 954257 - DNA, 25 bp, Homo sapien
tcaggcatctcaggcaattgtggta

SEQ ID NO: 954258 - DNA, 25 bp, Homo sapien
gttcaggcatctcaggcaattgtgg

SEQ ID NO: 954259 - DNA, 25 bp, Homo sapien
tcaggcaattgtggtagaggctcag

SEQ ID NO: 954260 - DNA, 25 bp, Homo sapien
gcacggctgcaccctgagccggaat

SEQ ID NO: 954261 - DNA, 25 bp, Homo sapien
cacggctgcaccctgagccggaatg

SEQ ID NO: 954262 - DNA, 25 bp, Homo sapien
agcacggctgcaccctgagccggaa

SEQ ID NO: 954263 - DNA, 25 bp, Homo sapien
agatcctgcgggtggaggcgtggaa

SEQ ID NO: 954264 - DNA, 25 bp, Homo sapien
aggcgtggaaggacagtctctagct

SEQ ID NO: 954265 - DNA, 25 bp, Homo sapien
ggacagtctctagctggccagcact

SEQ ID NO: 954266 - DNA, 25 bp, Homo sapien
ggtgcatggttggacagatcctgcg

SEQ ID NO: 954267 - DNA, 25 bp, Homo sapien
tagacaggttcagggtcccggtggc

SEQ ID NO: 954268 - DNA, 25 bp, Homo sapien
acccgggcacggaggtcgtggctgc

SEQ ID NO: 954269 - DNA, 25 bp, Homo sapien
ggaagtgcttcaagcgccggttaga

SEQ ID NO: 954270 - DNA, 25 bp, Homo sapien
tctgacaggtcgtagctacgggccg

SEQ ID NO: 954271 - DNA, 25 bp, Homo sapien
gctcccggcggctcccgctgcctga

SEQ ID NO: 954272 - DNA, 25 bp, Homo sapien
ccgctcccggcggctcccgctgcct

SEQ ID NO: 954273 - DNA, 25 bp, Homo sapien
cgctcccggcggctcccgctgcctg

SEQ ID NO: 954274 - DNA, 25 bp, Homo sapien
cttggagccgccgtagttgcctcaa

SEQ ID NO: 954275 - DNA, 25 bp, Homo sapien
ttggagccgccgtagttgcctcaag

SEQ ID NO: 954276 - DNA, 25 bp, Homo sapien
ggacggaccaatcgtggccccgaga

SEQ ID NO: 954277 - DNA, 25 bp, Homo sapien
gacgcgtcagaagcggccaatcaga

SEQ ID NO: 954278 - DNA, 25 bp, Homo sapien
gattattagcacagtcacctctcca

SEQ ID NO: 954279 - DNA, 25 bp, Homo sapien
tgctgaatcatttgtgagctaaacg

SEQ ID NO: 954280 - DNA, 25 bp, Homo sapien
tcttgagctaccaatccctagaggc

SEQ ID NO: 954281 - DNA, 25 bp, Homo sapien
caagtctaaagagtttgctgaatca

SEQ ID NO: 954282 - DNA, 25 bp, Homo sapien
cacagagaggtttgttagccccaga

SEQ ID NO: 954283 - DNA, 25 bp, Homo sapien
aaaggatgtgggaccctcatgggac

SEQ ID NO: 954284 - DNA, 25 bp, Homo sapien
ccatgtgatggctagaactgagcta

SEQ ID NO: 954285 - DNA, 25 bp, Homo sapien
tagagtcagatgagccccaaggtag

SEQ ID NO: 954286 - DNA, 25 bp, Homo sapien
ccagatcaccgaggggccaccaaag

SEQ ID NO: 954287 - DNA, 25 bp, Homo sapien
gaataataggattgggggccagatc

SEQ ID NO: 954288 - DNA, 25 bp, Homo sapien
ggccagatcaccgaggggccaccaa

SEQ ID NO: 954289 - DNA, 25 bp, Homo sapien
tcattcctcccagtcagagaccttg

SEQ ID NO: 954290 - DNA, 25 bp, Homo sapien
gcatctgtcgcagactcagtccgcg

SEQ ID NO: 954291 - DNA, 25 bp, Homo sapien
cgtgtggagacgcatctgtcgcaga

SEQ ID NO: 954292 - DNA, 25 bp, Homo sapien
gctacttccacgaagtgtgcgatgg

SEQ ID NO: 954293 - DNA, 25 bp, Homo sapien
agtccgcgcctccaagatcagggtt

SEQ ID NO: 954294 - DNA, 25 bp, Homo sapien
agtctagtgggcagcgggtcttcaa

SEQ ID NO: 954295 - DNA, 25 bp, Homo sapien
ccgcaggaagtggtgggtaccacca

SEQ ID NO: 954296 - DNA, 25 bp, Homo sapien
tcaatgaccttcaagcagatcgtgc

SEQ ID NO: 954297 - DNA, 25 bp, Homo sapien
gcctgtgactgtgttgaggtctatc

SEQ ID NO: 954298 - DNA, 25 bp, Homo sapien
tgggctcaggcaaggagctgatttt

SEQ ID NO: 954299 - DNA, 25 bp, Homo sapien
gatgagaggctggactggcatagac

SEQ ID NO: 954300 - DNA, 25 bp, Homo sapien
gactggcatagacgggtgggctgag

SEQ ID NO: 954301 - DNA, 25 bp, Homo sapien
tggcatagacgggtgggctgagaat

SEQ ID NO: 954302 - DNA, 25 bp, Homo sapien
gcccatcaccctgtggtgcggcctc

SEQ ID NO: 954303 - DNA, 25 bp, Homo sapien
tgtggtgcggcctcaaccactccct

SEQ ID NO: 954304 - DNA, 25 bp, Homo sapien
tggcccaaggggagtgcctccttcg

SEQ ID NO: 954305 - DNA, 25 bp, Homo sapien
caaggggagtgcctccttcgtcaag

SEQ ID NO: 954306 - DNA, 25 bp, Homo sapien
agatcgtagggtggatgcccctgat

SEQ ID NO: 954307 - DNA, 25 bp, Homo sapien
tgatggccgcacagaaggacttctt

SEQ ID NO: 954308 - DNA, 25 bp, Homo sapien
cagttgccaaacgttgcaggaccgc

SEQ ID NO: 954309 - DNA, 25 bp, Homo sapien
tgcaggaccgcacggagaagatgaa

SEQ ID NO: 954310 - DNA, 25 bp, Homo sapien
ctccttggcctagtctggcccaggt

SEQ ID NO: 954311 - DNA, 25 bp, Homo sapien
tagttggaagaggtcatgggtgaga

SEQ ID NO: 954312 - DNA, 25 bp, Homo sapien
cttcaagtagttggaagaggtcatg

SEQ ID NO: 954313 - DNA, 25 bp, Homo sapien
agtagttggaagaggtcatgggtga

SEQ ID NO: 954314 - DNA, 25 bp, Homo sapien
gaacttgcctggtagctggattcca

SEQ ID NO: 954315 - DNA, 25 bp, Homo sapien
cacatctggaagtagttaggcggct

SEQ ID NO: 954316 - DNA, 25 bp, Homo sapien
tccaggttcaatcagagggccatcg

SEQ ID NO: 954317 - DNA, 25 bp, Homo sapien
tgcctctgtcttgaggaccccagcg

SEQ ID NO: 954318 - DNA, 25 bp, Homo sapien
gtgtccctctcattccgagtcttcg

SEQ ID NO: 954319 - DNA, 25 bp, Homo sapien
tgtccccgctatcaggtccccgagg

SEQ ID NO: 954320 - DNA, 25 bp, Homo sapien
ccgagtcttcgacctggagctgcac

SEQ ID NO: 954321 - DNA, 25 bp, Homo sapien
tccgtttctgcaagaaacgcttggg

SEQ ID NO: 954322 - DNA, 25 bp, Homo sapien
tacagggtcctggtataacacgcgg

SEQ ID NO: 954323 - DNA, 25 bp, Homo sapien
aacacgcgggcctgtcacttgtgag

SEQ ID NO: 954324 - DNA, 25 bp, Homo sapien
agaagtttgacctggagccggacac

SEQ ID NO: 954325 - DNA, 25 bp, Homo sapien
tattgaagatctgctgtgtcccgag

SEQ ID NO: 954326 - DNA, 25 bp, Homo sapien
cattagggtcagctacactgcaggg

SEQ ID NO: 954327 - DNA, 25 bp, Homo sapien
cctgaatcattcaagcgaggagcag

SEQ ID NO: 954328 - DNA, 25 bp, Homo sapien
cataaggctatggtgccagcgatct

SEQ ID NO: 954329 - DNA, 25 bp, Homo sapien
gattaaccgacagtatgaccgtcac

SEQ ID NO: 954330 - DNA, 25 bp, Homo sapien
tgacgccggaaacggctctcctgga

SEQ ID NO: 954331 - DNA, 25 bp, Homo sapien
ctggcgacacgtactgggaaaggaa

SEQ ID NO: 954332 - DNA, 25 bp, Homo sapien
gctaagcgcattggctgccccttgc

SEQ ID NO: 954333 - DNA, 25 bp, Homo sapien
atgttccagacatccccgctaagcg

SEQ ID NO: 954334 - DNA, 25 bp, Homo sapien
gagagataacatgagcctccaaggg

SEQ ID NO: 954335 - DNA, 25 bp, Homo sapien
gaacgagcaagagcaataggtttgt

SEQ ID NO: 954336 - DNA, 25 bp, Homo sapien
tctagtctgggcaagggagaacgag

SEQ ID NO: 954337 - DNA, 25 bp, Homo sapien
tgtgtgtgcacaagtggctctgtgt

SEQ ID NO: 954338 - DNA, 25 bp, Homo sapien
ccatttcttgacatcaaagggttga

SEQ ID NO: 954339 - DNA, 25 bp, Homo sapien
acatcaaagggttgaggggttgagt

SEQ ID NO: 954340 - DNA, 25 bp, Homo sapien
tttcttgacatcaaagggttgaggg

SEQ ID NO: 954341 - DNA, 25 bp, Homo sapien
gacatcaaagggttgaggggttgag

SEQ ID NO: 954342 - DNA, 25 bp, Homo sapien
gagttggaactggaggtggggtgtg

SEQ ID NO: 954343 - DNA, 25 bp, Homo sapien
ggaagtggaggagttggaactggag

SEQ ID NO: 954344 - DNA, 25 bp, Homo sapien
aatggaaggaagtggaggagttgga

SEQ ID NO: 954345 - DNA, 25 bp, Homo sapien
cttggagtaagaaaatggaaggaag

SEQ ID NO: 954346 - DNA, 25 bp, Homo sapien
cagcttttccgccgcccggatgtag

SEQ ID NO: 954347 - DNA, 25 bp, Homo sapien
ccgcattatgcgcacgttgtacatg

SEQ ID NO: 954348 - DNA, 25 bp, Homo sapien
gcgccgagtacacccactgcagggt

SEQ ID NO: 954349 - DNA, 25 bp, Homo sapien
catgcgtgtcagtcgctcgtctctc

SEQ ID NO: 954350 - DNA, 25 bp, Homo sapien
ctggggtggggaggcgcgggctggg

SEQ ID NO: 954351 - DNA, 25 bp, Homo sapien
ggacccccgcctagcatggggacaa

SEQ ID NO: 954352 - DNA, 25 bp, Homo sapien
gaggtagacgaggacagagtgctgg

SEQ ID NO: 954353 - DNA, 25 bp, Homo sapien
cccgcctagcatggggacaaggacc

SEQ ID NO: 954354 - DNA, 25 bp, Homo sapien
aggtagacgaggacagagtgctgga

SEQ ID NO: 954355 - DNA, 25 bp, Homo sapien
gggttaatgggctggattgccagag

SEQ ID NO: 954356 - DNA, 25 bp, Homo sapien
ttaatgggctggattgccagagagg

SEQ ID NO: 954357 - DNA, 25 bp, Homo sapien
ctcccagagaccaagagcggggtgg

SEQ ID NO: 954358 - DNA, 25 bp, Homo sapien
cagagaccaagagcggggtgggcct

SEQ ID NO: 954359 - DNA, 25 bp, Homo sapien
tgtgcctgaggacgacgtccccgta

SEQ ID NO: 954360 - DNA, 25 bp, Homo sapien
aactcgttgaggttcccgatgtgcc

SEQ ID NO: 954361 - DNA, 25 bp, Homo sapien
ttgaggtccccagagaactcgttga

SEQ ID NO: 954362 - DNA, 25 bp, Homo sapien
cctcctttgtgtgcaggaatgggta

SEQ ID NO: 954363 - DNA, 25 bp, Homo sapien
aggctgaaggactagcgctgtgtct

SEQ ID NO: 954364 - DNA, 25 bp, Homo sapien
ggctgaaggactagcgctgtgtctg

SEQ ID NO: 954365 - DNA, 25 bp, Homo sapien
ctgaaggactagcgctgtgtctggg

SEQ ID NO: 954366 - DNA, 25 bp, Homo sapien
gctgaaggactagcgctgtgtctgg

SEQ ID NO: 954367 - DNA, 25 bp, Homo sapien
ataggcactgctgtccatgggtagg

SEQ ID NO: 954368 - DNA, 25 bp, Homo sapien
ccgtgaaggaataggcactgctgtc

SEQ ID NO: 954369 - DNA, 25 bp, Homo sapien
agggactcccacaaaggccgtgaag

SEQ ID NO: 954370 - DNA, 25 bp, Homo sapien
agaactcgacggcagggactcccac

SEQ ID NO: 954371 - DNA, 25 bp, Homo sapien
attggtgaacaccacctgttcatag

SEQ ID NO: 954372 - DNA, 25 bp, Homo sapien
ggctggtcttggcatgaaacttgtc

SEQ ID NO: 954373 - DNA, 25 bp, Homo sapien
ggtcttggcatgaaacttgtcatcc

SEQ ID NO: 954374 - DNA, 25 bp, Homo sapien
tctcaatgagacttgtcagaagggg

SEQ ID NO: 954375 - DNA, 25 bp, Homo sapien
caatgagacttgtcagaagggggct

SEQ ID NO: 954376 - DNA, 25 bp, Homo sapien
ccagcactgcgttgtccaggctcac

SEQ ID NO: 954377 - DNA, 25 bp, Homo sapien
tacactacggctttgaggtgcagca

SEQ ID NO: 954378 - DNA, 25 bp, Homo sapien
cactacggctttgaggtgcagcacg

SEQ ID NO: 954379 - DNA, 25 bp, Homo sapien
acactacggctttgaggtgcagcac

SEQ ID NO: 954380 - DNA, 25 bp, Homo sapien
gtacactacggctttgaggtgcagc

SEQ ID NO: 954381 - DNA, 25 bp, Homo sapien
gtgaccagtgtggagtgggaacccc

SEQ ID NO: 954382 - DNA, 25 bp, Homo sapien
ctgtgggtgggtgaccagtgtggag

SEQ ID NO: 954383 - DNA, 25 bp, Homo sapien
ggtgggtgaccagtgtggagtggga

SEQ ID NO: 954384 - DNA, 25 bp, Homo sapien
tgaccagtgtggagtgggaaccccc

SEQ ID NO: 954385 - DNA, 25 bp, Homo sapien
aaagtcaccaccgtcccagctgatg

SEQ ID NO: 954386 - DNA, 25 bp, Homo sapien
aagaggagacttctgcggggccgga

SEQ ID NO: 954387 - DNA, 25 bp, Homo sapien
gtggagcccacgcttccaaagtcac

SEQ ID NO: 954388 - DNA, 25 bp, Homo sapien
caccgtcccagctgatgaagaggag

SEQ ID NO: 954389 - DNA, 25 bp, Homo sapien
tgggccccgatgacaacgtagtgat

SEQ ID NO: 954390 - DNA, 25 bp, Homo sapien
cagcggatttagctgctcctgggcc

SEQ ID NO: 954391 - DNA, 25 bp, Homo sapien
accatggaggaaaaggtccgcacca

SEQ ID NO: 954392 - DNA, 25 bp, Homo sapien
agctccaggagtatagccgtcccca

SEQ ID NO: 954393 - DNA, 25 bp, Homo sapien
agcggccttcgatgcagccgaagat

SEQ ID NO: 954394 - DNA, 25 bp, Homo sapien
cgatgcagccgaagatgttgttgat

SEQ ID NO: 954395 - DNA, 25 bp, Homo sapien
tcctgtgattgttgaccactagccg

SEQ ID NO: 954396 - DNA, 25 bp, Homo sapien
tgttgaccactagccgcagtcgtgg

SEQ ID NO: 954397 - DNA, 25 bp, Homo sapien
atcacttgaacccgggaggtggagg

SEQ ID NO: 954398 - DNA, 25 bp, Homo sapien
ttgcagtgagccaagattgcaccac

SEQ ID NO: 954399 - DNA, 25 bp, Homo sapien
atactctggagtctgaggcagaaga

SEQ ID NO: 954400 - DNA, 25 bp, Homo sapien
caagattgcaccactgcactccagc

SEQ ID NO: 954401 - DNA, 25 bp, Homo sapien
gcaggcgggaggcaatgtctgcact

SEQ ID NO: 954402 - DNA, 25 bp, Homo sapien
gcctgatgatgcaactggagggaac

SEQ ID NO: 954403 - DNA, 25 bp, Homo sapien
gaggcaatgtctgcactgatgggct

SEQ ID NO: 954404 - DNA, 25 bp, Homo sapien
tgctgggaaggcctgatgatgcaac

SEQ ID NO: 954405 - DNA, 25 bp, Homo sapien
ggaagccaggtgtgtaggggtctcc

SEQ ID NO: 954406 - DNA, 25 bp, Homo sapien
ggtttgattgaaggaagggaagcca

SEQ ID NO: 954407 - DNA, 25 bp, Homo sapien
tgtgtaggggtctccagttcccagg

SEQ ID NO: 954408 - DNA, 25 bp, Homo sapien
gtttgattgaaggaagggaagccag

SEQ ID NO: 954409 - DNA, 25 bp, Homo sapien
aacatgccagccctattctgagcaa

SEQ ID NO: 954410 - DNA, 25 bp, Homo sapien
gggtgcccacgcaaagctgcgagct

SEQ ID NO: 954411 - DNA, 25 bp, Homo sapien
gaaaggggtgcccacgcaaagctgc

SEQ ID NO: 954412 - DNA, 25 bp, Homo sapien
ccacgcaaagctgcgagctgggctt

SEQ ID NO: 954413 - DNA, 25 bp, Homo sapien
ccccgaagtcctgagcattggtcac

SEQ ID NO: 954414 - DNA, 25 bp, Homo sapien
cgctggctctgggtatatgagcact

SEQ ID NO: 954415 - DNA, 25 bp, Homo sapien
atatgagcactccttgagccccgaa

SEQ ID NO: 954416 - DNA, 25 bp, Homo sapien
atgtccatacactgcctgctggctg

SEQ ID NO: 954417 - DNA, 25 bp, Homo sapien
ctgtccatcccacggagaggatgtg

SEQ ID NO: 954418 - DNA, 25 bp, Homo sapien
ggcctttgcttgcaactgtccatcc

SEQ ID NO: 954419 - DNA, 25 bp, Homo sapien
cccgattcataagggcaggagaaac

SEQ ID NO: 954420 - DNA, 25 bp, Homo sapien
aaaacccgattcataagggcaggag

SEQ ID NO: 954421 - DNA, 25 bp, Homo sapien
acagcaccctgaacgattctcactg

SEQ ID NO: 954422 - DNA, 25 bp, Homo sapien
aacgattctcactggcagtccgacc

SEQ ID NO: 954423 - DNA, 25 bp, Homo sapien
caccctgaacgattctcactggcag

SEQ ID NO: 954424 - DNA, 25 bp, Homo sapien
cctgaacgattctcactggcagtcc

SEQ ID NO: 954425 - DNA, 25 bp, Homo sapien
cgtagtgggcgtacaccagctctcc

SEQ ID NO: 954426 - DNA, 25 bp, Homo sapien
ggatccacgcccctggcccgcaggt

SEQ ID NO: 954427 - DNA, 25 bp, Homo sapien
tgcaggtcttcgggccgcccgtagt

SEQ ID NO: 954428 - DNA, 25 bp, Homo sapien
agcagcaggcggcccactggatcca

SEQ ID NO: 954429 - DNA, 25 bp, Homo sapien
ctcatcgacccagtgcagggtgttg

SEQ ID NO: 954430 - DNA, 25 bp, Homo sapien
tgacgttgccgatggcgctgtaggg

SEQ ID NO: 954431 - DNA, 25 bp, Homo sapien
cagtagacgtcagggtcctccagcg

SEQ ID NO: 954432 - DNA, 25 bp, Homo sapien
cggcctcatcgacccagtgcagggt

SEQ ID NO: 954433 - DNA, 25 bp, Homo sapien
ggctggtgagcgccccgagccgcgt

SEQ ID NO: 954434 - DNA, 25 bp, Homo sapien
gagcggggctggtgagcgccccgag

SEQ ID NO: 954435 - DNA, 25 bp, Homo sapien
cggggctggtgagcgccccgagccg

SEQ ID NO: 954436 - DNA, 25 bp, Homo sapien
ggagcggggctggtgagcgccccga

SEQ ID NO: 954437 - DNA, 25 bp, Homo sapien
agtcagagcggccatcccggccgag

SEQ ID NO: 954438 - DNA, 25 bp, Homo sapien
atccgggaattgcagccccacgtag

SEQ ID NO: 954439 - DNA, 25 bp, Homo sapien
agagcgccgcgcgaatgtcctgagt

SEQ ID NO: 954440 - DNA, 25 bp, Homo sapien
cccacgtagtgcgtgtcggtccaca

SEQ ID NO: 954441 - DNA, 25 bp, Homo sapien
aaggatgccagagacgtggggtcgc

SEQ ID NO: 954442 - DNA, 25 bp, Homo sapien
gcaggggcggcgaggggttcctgag

SEQ ID NO: 954443 - DNA, 25 bp, Homo sapien
tgccagagacgtggggtcgccaggg

SEQ ID NO: 954444 - DNA, 25 bp, Homo sapien
gagggaaggatgccagagacgtggg

SEQ ID NO: 954445 - DNA, 25 bp, Homo sapien
gattccctagaatgcggcttctcag

SEQ ID NO: 954446 - DNA, 25 bp, Homo sapien
aatatgccaccctcagagcctcagt

SEQ ID NO: 954447 - DNA, 25 bp, Homo sapien
ctggaacctcagctccgaatgcctg

SEQ ID NO: 954448 - DNA, 25 bp, Homo sapien
gctccaaatctaggcgcctgggtga

SEQ ID NO: 954449 - DNA, 25 bp, Homo sapien
ctcggaaggcgacgtagcccagtag

SEQ ID NO: 954450 - DNA, 25 bp, Homo sapien
tggaggtcgctccagtagagtctgc

SEQ ID NO: 954451 - DNA, 25 bp, Homo sapien
tggaaatccaggtcaggctcatagt

SEQ ID NO: 954452 - DNA, 25 bp, Homo sapien
ggctcatagttgacatcctcactga

SEQ ID NO: 954453 - DNA, 25 bp, Homo sapien
cagggaatgaggtttggctgcctgg

SEQ ID NO: 954454 - DNA, 25 bp, Homo sapien
gtagggggcagccctccgtcctgct

SEQ ID NO: 954455 - DNA, 25 bp, Homo sapien
ggggcagccctccgtcctgctgccg

SEQ ID NO: 954456 - DNA, 25 bp, Homo sapien
cccagggaatgaggtttggctgcct

SEQ ID NO: 954457 - DNA, 25 bp, Homo sapien
ggggctcagggcccctcagctccat

SEQ ID NO: 954458 - DNA, 25 bp, Homo sapien
ccaggggctcagggcccctcagctc

SEQ ID NO: 954459 - DNA, 25 bp, Homo sapien
gcccaggggctcagggcccctcagc

SEQ ID NO: 954460 - DNA, 25 bp, Homo sapien
aggggctcagggcccctcagctcca

SEQ ID NO: 954461 - DNA, 25 bp, Homo sapien
ctttccgggggccttccacacgctg

SEQ ID NO: 954462 - DNA, 25 bp, Homo sapien
gcagaagtgggccaatgtctccgcc

SEQ ID NO: 954463 - DNA, 25 bp, Homo sapien
agaagtgggccaatgtctccgcccc

SEQ ID NO: 954464 - DNA, 25 bp, Homo sapien
gggcagaagtgggccaatgtctccg

SEQ ID NO: 954465 - DNA, 25 bp, Homo sapien
ctgagaggatcttggggacagttgt

SEQ ID NO: 954466 - DNA, 25 bp, Homo sapien
tgagaggatcttggggacagttgtt

SEQ ID NO: 954467 - DNA, 25 bp, Homo sapien
gagaggatcttggggacagttgttg

SEQ ID NO: 954468 - DNA, 25 bp, Homo sapien
cgctctctggaatagaccccaaagc

SEQ ID NO: 954469 - DNA, 25 bp, Homo sapien
ctctctggaatagaccccaaagccg

SEQ ID NO: 954470 - DNA, 25 bp, Homo sapien
ctctggaatagaccccaaagccgct

SEQ ID NO: 954471 - DNA, 25 bp, Homo sapien
tggaatagaccccaaagccgctcca

SEQ ID NO: 954472 - DNA, 25 bp, Homo sapien
ggctgtcccccagcgataaaccgat

SEQ ID NO: 954473 - DNA, 25 bp, Homo sapien
cagcgataaaccgataaaccgtttg

SEQ ID NO: 954474 - DNA, 25 bp, Homo sapien
ctgtcccccagcgataaaccgataa

SEQ ID NO: 954475 - DNA, 25 bp, Homo sapien
tgtcccccagcgataaaccgataaa

SEQ ID NO: 954476 - DNA, 25 bp, Homo sapien
ggccccttatcagtcctggcaggca

SEQ ID NO: 954477 - DNA, 25 bp, Homo sapien
gggccccttatcagtcctggcaggc

SEQ ID NO: 954478 - DNA, 25 bp, Homo sapien
cttccgagggccccaagacaagtag

SEQ ID NO: 954479 - DNA, 25 bp, Homo sapien
aggaaggaaggcatagcgcatctca

SEQ ID NO: 954480 - DNA, 25 bp, Homo sapien
tagtccccgccccatgtctgtcacc

SEQ ID NO: 954481 - DNA, 25 bp, Homo sapien
gctgggatgcaccagcgccctagtc

SEQ ID NO: 954482 - DNA, 25 bp, Homo sapien
cagagaagttccgagctgctgggat

SEQ ID NO: 954483 - DNA, 25 bp, Homo sapien
agacctaaggcctacgctgaggccc

SEQ ID NO: 954484 - DNA, 25 bp, Homo sapien
aggcgtgctgctcccctgagaccta

SEQ ID NO: 954485 - DNA, 25 bp, Homo sapien
ccctgagacctaaggcctacgctga

SEQ ID NO: 954486 - DNA, 25 bp, Homo sapien
gtgctgctcccctgagacctaaggc

SEQ ID NO: 954487 - DNA, 25 bp, Homo sapien
tccatctgagcttgggagcaggtgt

SEQ ID NO: 954488 - DNA, 25 bp, Homo sapien
caccattaatgaggacaagagggaa

SEQ ID NO: 954489 - DNA, 25 bp, Homo sapien
gcaatgtggcatgggggttaaggga

SEQ ID NO: 954490 - DNA, 25 bp, Homo sapien
taagggacttccatctgagcttggg

SEQ ID NO: 954491 - DNA, 25 bp, Homo sapien
tgcttcccgccctcctcatattcct

SEQ ID NO: 954492 - DNA, 25 bp, Homo sapien
gccctcctcatattcctgcttggag

SEQ ID NO: 954493 - DNA, 25 bp, Homo sapien
ctcatattcctgcttggagatccac

SEQ ID NO: 954494 - DNA, 25 bp, Homo sapien
cctcctcatattcctgcttggagat

SEQ ID NO: 954495 - DNA, 25 bp, Homo sapien
gatggaacccccgatccaggggctg

SEQ ID NO: 954496 - DNA, 25 bp, Homo sapien
tgaacttgcgctccatggtgctgtt

SEQ ID NO: 954497 - DNA, 25 bp, Homo sapien
tggcaatgagtttcagtcgcatgct

SEQ ID NO: 954498 - DNA, 25 bp, Homo sapien
ggtgctgttgctggcaatgagtttc

SEQ ID NO: 954499 - DNA, 25 bp, Homo sapien
ggaagcagacacctaggttctggga

SEQ ID NO: 954500 - DNA, 25 bp, Homo sapien
aagcagacacctaggttctgggaag

SEQ ID NO: 954501 - DNA, 25 bp, Homo sapien
agcagacacctaggttctgggaagg

SEQ ID NO: 954502 - DNA, 25 bp, Homo sapien
gaagcagacacctaggttctgggaa

SEQ ID NO: 954503 - DNA, 25 bp, Homo sapien
ttgagcctgtcagtgaagccctgca

SEQ ID NO: 954504 - DNA, 25 bp, Homo sapien
ctgcagcagtgtgttcccgccggtg

SEQ ID NO: 954505 - DNA, 25 bp, Homo sapien
tgttcccgccggtgacaatgacact

SEQ ID NO: 954506 - DNA, 25 bp, Homo sapien
ttctgggaaagctctcgattgagcc

SEQ ID NO: 954507 - DNA, 25 bp, Homo sapien
cacacccaacatggtgttccccgac

SEQ ID NO: 954508 - DNA, 25 bp, Homo sapien
cgaatatcaatgtcacacatgccga

SEQ ID NO: 954509 - DNA, 25 bp, Homo sapien
cgggcgaatatcaatgtcacacatg

SEQ ID NO: 954510 - DNA, 25 bp, Homo sapien
gcgaatatcaatgtcacacatgccg

SEQ ID NO: 954511 - DNA, 25 bp, Homo sapien
cattgggcatctcgtagtgcactgt

SEQ ID NO: 954512 - DNA, 25 bp, Homo sapien
ctcagggatgcggagtcgctcggcg

SEQ ID NO: 954513 - DNA, 25 bp, Homo sapien
tagtctgtattgtagccattgggca

SEQ ID NO: 954514 - DNA, 25 bp, Homo sapien
gtgcactgtgggcatttgtgcagcc

SEQ ID NO: 954515 - DNA, 25 bp, Homo sapien
gagtctgagacctgcagcacggagg

SEQ ID NO: 954516 - DNA, 25 bp, Homo sapien
tctgagacctgcagcacggaggcct

SEQ ID NO: 954517 - DNA, 25 bp, Homo sapien
agacctgcagcacggaggcctggaa

SEQ ID NO: 954518 - DNA, 25 bp, Homo sapien
tcatcgtagggggagtctgagacct

SEQ ID NO: 954519 - DNA, 25 bp, Homo sapien
attacacatgtagttatgccaggac

SEQ ID NO: 954520 - DNA, 25 bp, Homo sapien
tacacatgtagttatgccaggactt

SEQ ID NO: 954521 - DNA, 25 bp, Homo sapien
acatgtagttatgccaggacttgga

SEQ ID NO: 954522 - DNA, 25 bp, Homo sapien
ggagacctggggtagcttctccttc

SEQ ID NO: 954523 - DNA, 25 bp, Homo sapien
tgtgcctttcatgcggtgggtgcag

SEQ ID NO: 954524 - DNA, 25 bp, Homo sapien
atgtgtgcctttcatgcggtgggtg

SEQ ID NO: 954525 - DNA, 25 bp, Homo sapien
ctttcatgcggtgggtgcagctgat

SEQ ID NO: 954526 - DNA, 25 bp, Homo sapien
tgcctttcatgcggtgggtgcagct

SEQ ID NO: 954527 - DNA, 25 bp, Homo sapien
tcatgtgtcagagggttgacggcca

SEQ ID NO: 954528 - DNA, 25 bp, Homo sapien
tgtctgccagctggtttcatgacct

SEQ ID NO: 954529 - DNA, 25 bp, Homo sapien
tcggatgcctcgattataaaaggag

SEQ ID NO: 954530 - DNA, 25 bp, Homo sapien
tatattggaccctagaacccaccac

SEQ ID NO: 954531 - DNA, 25 bp, Homo sapien
cttggctgcgatcatgtaaggtggg

SEQ ID NO: 954532 - DNA, 25 bp, Homo sapien
cctgccagaggggacttgacgatgc

SEQ ID NO: 954533 - DNA, 25 bp, Homo sapien
atggagatgaagtcccctgccagag

SEQ ID NO: 954534 - DNA, 25 bp, Homo sapien
gatcatgtaaggtgggatgatgtca

SEQ ID NO: 954535 - DNA, 25 bp, Homo sapien
acctggtcctcctggagcaccccca

SEQ ID NO: 954536 - DNA, 25 bp, Homo sapien
gaaggcactgtcaggacctggtcct

SEQ ID NO: 954537 - DNA, 25 bp, Homo sapien
ctagaaggaaggcactgtcaggacc

SEQ ID NO: 954538 - DNA, 25 bp, Homo sapien
ctggtcctcctggagcacccccacc

SEQ ID NO: 954539 - DNA, 25 bp, Homo sapien
gaggccagtggaccgcccgtttgca

SEQ ID NO: 954540 - DNA, 25 bp, Homo sapien
ctgcagaacgtagccgtcatgtact

SEQ ID NO: 954541 - DNA, 25 bp, Homo sapien
agcacgaggccagtggaccgcccgt

SEQ ID NO: 954542 - DNA, 25 bp, Homo sapien
tcatgtactggaatggccgtggtgt

SEQ ID NO: 954543 - DNA, 25 bp, Homo sapien
ctggcatcggatgggtaagtcaaag

SEQ ID NO: 954544 - DNA, 25 bp, Homo sapien
gggtaagtcaaagagacagcagcag

SEQ ID NO: 954545 - DNA, 25 bp, Homo sapien
cagatcttgtctggtcactctctgc

SEQ ID NO: 954546 - DNA, 25 bp, Homo sapien
cactctctgctctaccggggtccag

SEQ ID NO: 954547 - DNA, 25 bp, Homo sapien
aattagggtcgctatcaccccagtg

SEQ ID NO: 954548 - DNA, 25 bp, Homo sapien
gggactgccgcagtgttctacacgt

SEQ ID NO: 954549 - DNA, 25 bp, Homo sapien
ggcagatcctaaaaacagtcagtgt

SEQ ID NO: 954550 - DNA, 25 bp, Homo sapien
cacagggttcaatgcaaggcagatc

SEQ ID NO: 954551 - DNA, 25 bp, Homo sapien
cccagccctccacccagtcagagca

SEQ ID NO: 954552 - DNA, 25 bp, Homo sapien
cagagcagctcagtccagaggatac

SEQ ID NO: 954553 - DNA, 25 bp, Homo sapien
tccacccagtcagagcagctcagtc

SEQ ID NO: 954554 - DNA, 25 bp, Homo sapien
cctccacccagtcagagcagctcag

SEQ ID NO: 954555 - DNA, 25 bp, Homo sapien
gcggtgagcacagccgtcttgcata

SEQ ID NO: 954556 - DNA, 25 bp, Homo sapien
tgtactgctcgaacatcagctctgt

SEQ ID NO: 954557 - DNA, 25 bp, Homo sapien
cttctcccgcttggcccgtgtgttc

SEQ ID NO: 954558 - DNA, 25 bp, Homo sapien
ccgtcttgcataagaagaaggcagg

SEQ ID NO: 954559 - DNA, 25 bp, Homo sapien
ctgtaggtgtgatccaggatggctc

SEQ ID NO: 954560 - DNA, 25 bp, Homo sapien
ggatggctcggaagcactcccagtc

SEQ ID NO: 954561 - DNA, 25 bp, Homo sapien
cactgggtgcaggtttggctcagac

SEQ ID NO: 954562 - DNA, 25 bp, Homo sapien
gacttgacgtgtttgctgtaggtgt

SEQ ID NO: 954563 - DNA, 25 bp, Homo sapien
tcatgccattcttgaggggcgacat

SEQ ID NO: 954564 - DNA, 25 bp, Homo sapien
cgctccatcccgaggcacgtgcagg

SEQ ID NO: 954565 - DNA, 25 bp, Homo sapien
ggcgacatgacctccgctccatccc

SEQ ID NO: 954566 - DNA, 25 bp, Homo sapien
tgccattcttgaggggcgacatgac

SEQ ID NO: 954567 - DNA, 25 bp, Homo sapien
ccagcgtacccagcgcggactgaga

SEQ ID NO: 954568 - DNA, 25 bp, Homo sapien
cggactgagaaggagccaatgtcaa

SEQ ID NO: 954569 - DNA, 25 bp, Homo sapien
cgcggactgagaaggagccaatgtc

SEQ ID NO: 954570 - DNA, 25 bp, Homo sapien
gactgagaaggagccaatgtcaaag

SEQ ID NO: 954571 - DNA, 25 bp, Homo sapien
ctccgccgtagacgcccccgctcat

SEQ ID NO: 954572 - DNA, 25 bp, Homo sapien
gtgcccgctgcgctgctagcggccc

SEQ ID NO: 954573 - DNA, 25 bp, Homo sapien
agcaccgaggcggccggacagctcc

SEQ ID NO: 954574 - DNA, 25 bp, Homo sapien
ctagcggcccgtgggcggtggcggg

SEQ ID NO: 954575 - DNA, 25 bp, Homo sapien
gcggtggcgggatcagcaccgaggc

SEQ ID NO: 954576 - DNA, 25 bp, Homo sapien
gcaatctcgactccctgtaatctga

SEQ ID NO: 954577 - DNA, 25 bp, Homo sapien
tgcaatctcgactccctgtaatctg

SEQ ID NO: 954578 - DNA, 25 bp, Homo sapien
ttcaactgcaacatctgggatgcca

SEQ ID NO: 954579 - DNA, 25 bp, Homo sapien
actgcaacatctgggatgccatgaa

SEQ ID NO: 954580 - DNA, 25 bp, Homo sapien
gcaacatctgggatgccatgaaggg

SEQ ID NO: 954581 - DNA, 25 bp, Homo sapien
cgacttcaactgcaacatctgggat

SEQ ID NO: 954582 - DNA, 25 bp, Homo sapien
gggtcaccgacgatggcatggctgt

SEQ ID NO: 954583 - DNA, 25 bp, Homo sapien
tgcccatgcccacactacaggccag

SEQ ID NO: 954584 - DNA, 25 bp, Homo sapien
tggccacgacaaccgcgtgagctgc

SEQ ID NO: 954585 - DNA, 25 bp, Homo sapien
gatctggaactaatggccccacccc

SEQ ID NO: 954586 - DNA, 25 bp, Homo sapien
gagctgctcacaacaggtctggcgg

SEQ ID NO: 954587 - DNA, 25 bp, Homo sapien
cattcagtcacaacaggagtctccc

SEQ ID NO: 954588 - DNA, 25 bp, Homo sapien
tgggtggtccacatcttacgagctg

SEQ ID NO: 954589 - DNA, 25 bp, Homo sapien
aaagcgcatcatatcagacccggaa

SEQ ID NO: 954590 - DNA, 25 bp, Homo sapien
atctcaccagaagatccgtgcaggg

SEQ ID NO: 954591 - DNA, 25 bp, Homo sapien
ccagaagatccgtgcagggagtacc

SEQ ID NO: 954592 - DNA, 25 bp, Homo sapien
tagtcatccacgctctcgatctcac

SEQ ID NO: 954593 - DNA, 25 bp, Homo sapien
ctctcgatctcaccagaagatccgt

SEQ ID NO: 954594 - DNA, 25 bp, Homo sapien
tgtgccaaggaagtcccgctcctgc

SEQ ID NO: 954595 - DNA, 25 bp, Homo sapien
tgccctgtgccaaggaagtcccgct

SEQ ID NO: 954596 - DNA, 25 bp, Homo sapien
gaagccggggagaagctgcgtctga

SEQ ID NO: 954597 - DNA, 25 bp, Homo sapien
agaagctgcgtctgagctctctcct

SEQ ID NO: 954598 - DNA, 25 bp, Homo sapien
ccgagtttggtgctgtggttggcct

SEQ ID NO: 954599 - DNA, 25 bp, Homo sapien
ctggggtctgagtgcagcatcagtg

SEQ ID NO: 954600 - DNA, 25 bp, Homo sapien
gccgtctgcagcgaggcgctgctca

SEQ ID NO: 954601 - DNA, 25 bp, Homo sapien
tggaaggccgtctgcagcgaggcgc

SEQ ID NO: 954602 - DNA, 25 bp, Homo sapien
ttggccctccgctccaggaattgtt

SEQ ID NO: 954603 - DNA, 25 bp, Homo sapien
cctccgctccaggaattgtttggca

SEQ ID NO: 954604 - DNA, 25 bp, Homo sapien
ttctttggcttccagcgtgtccccc

SEQ ID NO: 954605 - DNA, 25 bp, Homo sapien
cgctccaggaattgtttggcaaatt

SEQ ID NO: 954606 - DNA, 25 bp, Homo sapien
taatcgtggacatcatagggggatt

SEQ ID NO: 954607 - DNA, 25 bp, Homo sapien
atcgtggacatcatagggggattcc

SEQ ID NO: 954608 - DNA, 25 bp, Homo sapien
ggatataatcgtggacatcataggg

SEQ ID NO: 954609 - DNA, 25 bp, Homo sapien
tataatcgtggacatcataggggga

SEQ ID NO: 954610 - DNA, 25 bp, Homo sapien
ctccttgaggatcgctacagccatg

SEQ ID NO: 954611 - DNA, 25 bp, Homo sapien
ccttgaggatcgctacagccatggg

SEQ ID NO: 954612 - DNA, 25 bp, Homo sapien
cttgaggatcgctacagccatgggc

SEQ ID NO: 954613 - DNA, 25 bp, Homo sapien
ttgaggatcgctacagccatgggca

SEQ ID NO: 954614 - DNA, 25 bp, Homo sapien
gccgacccgataggtggctgtatga

SEQ ID NO: 954615 - DNA, 25 bp, Homo sapien
ttcttcctccgtctttttgcgaatg

SEQ ID NO: 954616 - DNA, 25 bp, Homo sapien
gcatctgctcgcaccactgggtgaa

SEQ ID NO: 954617 - DNA, 25 bp, Homo sapien
ctgcccgtggcgctcagcgtgtgca

SEQ ID NO: 954618 - DNA, 25 bp, Homo sapien
gccgaggccacggaccaggctcccg

SEQ ID NO: 954619 - DNA, 25 bp, Homo sapien
ccactcttgtctggcccgccccaca

SEQ ID NO: 954620 - DNA, 25 bp, Homo sapien
tccggctgttcttcaggccgaggcc

SEQ ID NO: 954621 - DNA, 25 bp, Homo sapien
cgctcttgggggtgtcctcccagag

SEQ ID NO: 954622 - DNA, 25 bp, Homo sapien
gctgcaactccaggagcgtcttcat

SEQ ID NO: 954623 - DNA, 25 bp, Homo sapien
agctgcaactccaggagcgtcttca

SEQ ID NO: 954624 - DNA, 25 bp, Homo sapien
tggctcccgaggtgggggctgtttg

SEQ ID NO: 954625 - DNA, 25 bp, Homo sapien
acttcagcaatagctcctgctgccg

SEQ ID NO: 954626 - DNA, 25 bp, Homo sapien
gcggggggcacagggaccgcctgct

SEQ ID NO: 954627 - DNA, 25 bp, Homo sapien
gctgctgctgtagcaacttcagcaa

SEQ ID NO: 954628 - DNA, 25 bp, Homo sapien
tgtagcaacttcagcaatagctcct

SEQ ID NO: 954629 - DNA, 25 bp, Homo sapien
tgcttgcgccgaaacagctcttcct

SEQ ID NO: 954630 - DNA, 25 bp, Homo sapien
gtgcttgcgccgaaacagctcttcc

SEQ ID NO: 954631 - DNA, 25 bp, Homo sapien
gcttctcctctcgacgcttgcgttc

SEQ ID NO: 954632 - DNA, 25 bp, Homo sapien
tcctctcgacgcttgcgttcctctt

SEQ ID NO: 954633 - DNA, 25 bp, Homo sapien
gcggcgcttctcctctcgacgcttg

SEQ ID NO: 954634 - DNA, 25 bp, Homo sapien
ggcgcttctcctctcgacgcttgcg

SEQ ID NO: 954635 - DNA, 25 bp, Homo sapien
agaccagtggcccatcagaggggag

SEQ ID NO: 954636 - DNA, 25 bp, Homo sapien
tgagaccagtggcccatcagagggg

SEQ ID NO: 954637 - DNA, 25 bp, Homo sapien
accagtggcccatcagaggggagag

SEQ ID NO: 954638 - DNA, 25 bp, Homo sapien
ctgagaccagtggcccatcagaggg

SEQ ID NO: 954639 - DNA, 25 bp, Homo sapien
taattggtatgtcccaaagactggc

SEQ ID NO: 954640 - DNA, 25 bp, Homo sapien
tcgaagagttaattggtatgtccca

SEQ ID NO: 954641 - DNA, 25 bp, Homo sapien
gcagctggagttgttctagaattgg

SEQ ID NO: 954642 - DNA, 25 bp, Homo sapien
tagaattggaccctgagtcgaagag

SEQ ID NO: 954643 - DNA, 25 bp, Homo sapien
ctgatctagtccagccgcagcagtg

SEQ ID NO: 954644 - DNA, 25 bp, Homo sapien
tgatctagtccagccgcagcagtgg

SEQ ID NO: 954645 - DNA, 25 bp, Homo sapien
actgatctagtccagccgcagcagt

SEQ ID NO: 954646 - DNA, 25 bp, Homo sapien
caggtgggcacttgggcccactgat

SEQ ID NO: 954647 - DNA, 25 bp, Homo sapien
aatctggcaccgacaaggaccggct

SEQ ID NO: 954648 - DNA, 25 bp, Homo sapien
tgatgaggctgaggtatgtacgtcc

SEQ ID NO: 954649 - DNA, 25 bp, Homo sapien
tcatcgtcgggagcaggttctggtc

SEQ ID NO: 954650 - DNA, 25 bp, Homo sapien
aggtatgtacgtcccagaggcggcc

SEQ ID NO: 954651 - DNA, 25 bp, Homo sapien
ctggggggtttgagcgcctggagct

SEQ ID NO: 954652 - DNA, 25 bp, Homo sapien
tcggagcgcgcactgtgggagctgg

SEQ ID NO: 954653 - DNA, 25 bp, Homo sapien
tgccttttctcggagcgcgcactgt

SEQ ID NO: 954654 - DNA, 25 bp, Homo sapien
gagcgcgcactgtgggagctggcgg

SEQ ID NO: 954655 - DNA, 25 bp, Homo sapien
gaccagctggagaaactgctggtgc

SEQ ID NO: 954656 - DNA, 25 bp, Homo sapien
tcaccagcagtgacatggaaaagta

SEQ ID NO: 954657 - DNA, 25 bp, Homo sapien
cactctgccatctcctgtgtcgtga

SEQ ID NO: 954658 - DNA, 25 bp, Homo sapien
tctgccatctcctgtgtcgtgaagg

SEQ ID NO: 954659 - DNA, 25 bp, Homo sapien
aagtagccggcctggaaccactctg

SEQ ID NO: 954660 - DNA, 25 bp, Homo sapien
cgccctgtgggtccttgtagaacca

SEQ ID NO: 954661 - DNA, 25 bp, Homo sapien
tgtagaaccacttccgggcagcccc

SEQ ID NO: 954662 - DNA, 25 bp, Homo sapien
gtctgcatggcagccgtgaactgct

SEQ ID NO: 954663 - DNA, 25 bp, Homo sapien
agccgtgaactgctcctcctccaag

SEQ ID NO: 954664 - DNA, 25 bp, Homo sapien
tgcaggtgcttcaagccttcatcat

SEQ ID NO: 954665 - DNA, 25 bp, Homo sapien
gctgcaggtgcttcaagccttcatc

SEQ ID NO: 954666 - DNA, 25 bp, Homo sapien
caggtgcttcaagccttcatcatcc

SEQ ID NO: 954667 - DNA, 25 bp, Homo sapien
ctgctgcaggtgcttcaagccttca

SEQ ID NO: 954668 - DNA, 25 bp, Homo sapien
cgggactcagctggatcccccgaat

SEQ ID NO: 954669 - DNA, 25 bp, Homo sapien
caccccgggactcagctggatcccc

SEQ ID NO: 954670 - DNA, 25 bp, Homo sapien
agcccaccccgggactcagctggat

SEQ ID NO: 954671 - DNA, 25 bp, Homo sapien
actcagctggatcccccgaatatca

SEQ ID NO: 954672 - DNA, 25 bp, Homo sapien
catccccgtttgtcccccagagtgg

SEQ ID NO: 954673 - DNA, 25 bp, Homo sapien
ctcctccaacccttggaagtccagc

SEQ ID NO: 954674 - DNA, 25 bp, Homo sapien
ctccaacccttggaagtccagctcc

SEQ ID NO: 954675 - DNA, 25 bp, Homo sapien
tccaacccttggaagtccagctcct

SEQ ID NO: 954676 - DNA, 25 bp, Homo sapien
tcctccaacccttggaagtccagct

SEQ ID NO: 954677 - DNA, 25 bp, Homo sapien
ggccggggtggggagcagagaacag

SEQ ID NO: 954678 - DNA, 25 bp, Homo sapien
catggggccggggtggggagcagag

SEQ ID NO: 954679 - DNA, 25 bp, Homo sapien
tggggccggggtggggagcagagaa

SEQ ID NO: 954680 - DNA, 25 bp, Homo sapien
gcatggggccggggtggggagcaga

SEQ ID NO: 954681 - DNA, 25 bp, Homo sapien
atcaaaggtgcccatttcttcatcc

SEQ ID NO: 954682 - DNA, 25 bp, Homo sapien
tcgatcccctcgcaaatcaaattca

SEQ ID NO: 954683 - DNA, 25 bp, Homo sapien
tcaaagccttcaggcgctcggcacc

SEQ ID NO: 954684 - DNA, 25 bp, Homo sapien
tcatcgtccaggcaccactctggga

SEQ ID NO: 954685 - DNA, 25 bp, Homo sapien
gcgggcgtgctccttccttgggcca

SEQ ID NO: 954686 - DNA, 25 bp, Homo sapien
cagggctggcggagcgccagcggtc

SEQ ID NO: 954687 - DNA, 25 bp, Homo sapien
cctcccgtagggagcgccagttctc

SEQ ID NO: 954688 - DNA, 25 bp, Homo sapien
cagttctcgctgtctgagcgggcgt

SEQ ID NO: 954689 - DNA, 25 bp, Homo sapien
ccttgctgacttctcaaaccgcctc

SEQ ID NO: 954690 - DNA, 25 bp, Homo sapien
tgctgacttctcaaaccgcctctcg

SEQ ID NO: 954691 - DNA, 25 bp, Homo sapien
tgacttctcaaaccgcctctcgcct

SEQ ID NO: 954692 - DNA, 25 bp, Homo sapien
cttgctgacttctcaaaccgcctct

SEQ ID NO: 954693 - DNA, 25 bp, Homo sapien
ccatcgccttcttcgatgcttcttt

SEQ ID NO: 954694 - DNA, 25 bp, Homo sapien
caaaggccccatcgccttcttcgat

SEQ ID NO: 954695 - DNA, 25 bp, Homo sapien
atcgccttcttcgatgcttctttgg

SEQ ID NO: 954696 - DNA, 25 bp, Homo sapien
ggccccatcgccttcttcgatgctt

SEQ ID NO: 954697 - DNA, 25 bp, Homo sapien
ccagatctgcccgtccccaggacac

SEQ ID NO: 954698 - DNA, 25 bp, Homo sapien
ctgctgcacgttctcgaagtcaggg

SEQ ID NO: 954699 - DNA, 25 bp, Homo sapien
ccaggacacgccatcacccctctac

SEQ ID NO: 954700 - DNA, 25 bp, Homo sapien
tgcccgtccccaggacacgccatca

SEQ ID NO: 954701 - DNA, 25 bp, Homo sapien
cgctgttcactgacagggagaagtt

SEQ ID NO: 954702 - DNA, 25 bp, Homo sapien
ctgcctcgggaggtgccagccaggg

SEQ ID NO: 954703 - DNA, 25 bp, Homo sapien
ctgttcactgacagggagaagtttc

SEQ ID NO: 954704 - DNA, 25 bp, Homo sapien
cccctgcctcgggaggtgccagcca

SEQ ID NO: 954705 - DNA, 25 bp, Homo sapien
ctgcagcaccgcggcgaactccttg

SEQ ID NO: 954706 - DNA, 25 bp, Homo sapien
tgcagcaccgcggcgaactccttgt

SEQ ID NO: 954707 - DNA, 25 bp, Homo sapien
gcaccgcggcgaactccttgtcctg

SEQ ID NO: 954708 - DNA, 25 bp, Homo sapien
cagcaccgcggcgaactccttgtcc

SEQ ID NO: 954709 - DNA, 25 bp, Homo sapien
ttgacgtagagagccagcatttcct

SEQ ID NO: 954710 - DNA, 25 bp, Homo sapien
ttgttctccttgacgtagagagcca

SEQ ID NO: 954711 - DNA, 25 bp, Homo sapien
ccttgacgtagagagccagcatttc

SEQ ID NO: 954712 - DNA, 25 bp, Homo sapien
ttctccttgacgtagagagccagca

SEQ ID NO: 954713 - DNA, 25 bp, Homo sapien
tcagccagcttgtatttgggcatgg

SEQ ID NO: 954714 - DNA, 25 bp, Homo sapien
ggtagtcagccagcttgtatttggg

SEQ ID NO: 954715 - DNA, 25 bp, Homo sapien
ccagcttgtatttgggcatggcagg

SEQ ID NO: 954716 - DNA, 25 bp, Homo sapien
aacggtagtcagccagcttgtattt

SEQ ID NO: 954717 - DNA, 25 bp, Homo sapien
actcaggcccaaagttgagtgtctc

SEQ ID NO: 954718 - DNA, 25 bp, Homo sapien
tcaggcccaaagttgagtgtctctg

SEQ ID NO: 954719 - DNA, 25 bp, Homo sapien
ctcaggcccaaagttgagtgtctct

SEQ ID NO: 954720 - DNA, 25 bp, Homo sapien
ggctgggcgtgtttgagaggccggg

SEQ ID NO: 954721 - DNA, 25 bp, Homo sapien
tggggctgggcgtgtttgagaggcc

SEQ ID NO: 954722 - DNA, 25 bp, Homo sapien
cgtggggctgggcgtgtttgagagg

SEQ ID NO: 954723 - DNA, 25 bp, Homo sapien
ctgggcgtgtttgagaggccggggg

SEQ ID NO: 954724 - DNA, 25 bp, Homo sapien
gggacatcctagtgggcacaacaat

SEQ ID NO: 954725 - DNA, 25 bp, Homo sapien
tgaagaacagcacacgaaggagaac

SEQ ID NO: 954726 - DNA, 25 bp, Homo sapien
tcacctggggtctaaaaggactcac

SEQ ID NO: 954727 - DNA, 25 bp, Homo sapien
actttaaagcgcagggaggacacca

SEQ ID NO: 954728 - DNA, 25 bp, Homo sapien
cacaccatgagttacccagagatga

SEQ ID NO: 954729 - DNA, 25 bp, Homo sapien
gccacgtggccactcacaccatgag

SEQ ID NO: 954730 - DNA, 25 bp, Homo sapien
cactcacaccatgagttacccagag

SEQ ID NO: 954731 - DNA, 25 bp, Homo sapien
caccatgagttacccagagatgagt

SEQ ID NO: 954732 - DNA, 25 bp, Homo sapien
tgggagggaccttcacatctgggaa

SEQ ID NO: 954733 - DNA, 25 bp, Homo sapien
catcaggtggaaataaggtcagggc

SEQ ID NO: 954734 - DNA, 25 bp, Homo sapien
ccaccaagggaacgaggatctcagg

SEQ ID NO: 954735 - DNA, 25 bp, Homo sapien
caagccactgggaattggtctgacc

SEQ ID NO: 954736 - DNA, 25 bp, Homo sapien
gcgcgcgggaaagggagcctgctct

SEQ ID NO: 954737 - DNA, 25 bp, Homo sapien
cagcttacccggctgagctttctca

SEQ ID NO: 954738 - DNA, 25 bp, Homo sapien
tctttctcgggcctgtctaccctca

SEQ ID NO: 954739 - DNA, 25 bp, Homo sapien
ctgggcccgggtgctccagtaggcg

SEQ ID NO: 954740 - DNA, 25 bp, Homo sapien
ggcgtgggtgggtcagcgttccttg

SEQ ID NO: 954741 - DNA, 25 bp, Homo sapien
gcaagtccctgatccggggtcgcct

SEQ ID NO: 954742 - DNA, 25 bp, Homo sapien
gcttagggctcacagcgtgggtccc

SEQ ID NO: 954743 - DNA, 25 bp, Homo sapien
tggcctgagagccacgaatccggcg

SEQ ID NO: 954744 - DNA, 25 bp, Homo sapien
ggcctcttctgaccagaggagctgc

SEQ ID NO: 954745 - DNA, 25 bp, Homo sapien
gggaccggctatgtccctcagttcc

SEQ ID NO: 954746 - DNA, 25 bp, Homo sapien
cgggccacagggacattagactagg

SEQ ID NO: 954747 - DNA, 25 bp, Homo sapien
agctgcgacggacgcggagttcagg

SEQ ID NO: 954748 - DNA, 25 bp, Homo sapien
tgctcccatggggaagaaccctgcc

SEQ ID NO: 954749 - DNA, 25 bp, Homo sapien
caggtgtcttccctacgctacccct

SEQ ID NO: 954750 - DNA, 25 bp, Homo sapien
ctccaggtgtcttccctacgctacc

SEQ ID NO: 954751 - DNA, 25 bp, Homo sapien
cttccctgctcccatggggaagaac

SEQ ID NO: 954752 - DNA, 25 bp, Homo sapien
gggagcgggcctcgcgcgcctggag

SEQ ID NO: 954753 - DNA, 25 bp, Homo sapien
ccggcgaacccttgagtggcctggc

SEQ ID NO: 954754 - DNA, 25 bp, Homo sapien
ctggccggcgaacccttgagtggcc

SEQ ID NO: 954755 - DNA, 25 bp, Homo sapien
ttgggctggccggcgaacccttgag

SEQ ID NO: 954756 - DNA, 25 bp, Homo sapien
tgtatgcggtctgtaactattgcca

SEQ ID NO: 954757 - DNA, 25 bp, Homo sapien
cgtgatatggctcttcgcatgctga

SEQ ID NO: 954758 - DNA, 25 bp, Homo sapien
acatgaagacggactttaaggccca

SEQ ID NO: 954759 - DNA, 25 bp, Homo sapien
gatctacattcacggcttgggcctg

SEQ ID NO: 954760 - DNA, 25 bp, Homo sapien
tctcttcgatgactagggcacctgc

SEQ ID NO: 954761 - DNA, 25 bp, Homo sapien
cagaaaagggacatgctggacgctt

SEQ ID NO: 954762 - DNA, 25 bp, Homo sapien
gaatccactgccaggaggaatccgt

SEQ ID NO: 954763 - DNA, 25 bp, Homo sapien
tctgagcatgtagtggagggaccac

SEQ ID NO: 954764 - DNA, 25 bp, Homo sapien
cagaacgcacgtgcggccatgtgtg

SEQ ID NO: 954765 - DNA, 25 bp, Homo sapien
gccagaagcataccagcctctgtct

SEQ ID NO: 954766 - DNA, 25 bp, Homo sapien
gcattgacgcaggagtcagggtcct

SEQ ID NO: 954767 - DNA, 25 bp, Homo sapien
cagggtctgagggaattaggccagc

SEQ ID NO: 954768 - DNA, 25 bp, Homo sapien
agcgactgcacctggaccctctagc

SEQ ID NO: 954769 - DNA, 25 bp, Homo sapien
tgctgggtaatcatgagcgactgca

SEQ ID NO: 954770 - DNA, 25 bp, Homo sapien
gctgggtaatcatgagcgactgcac

SEQ ID NO: 954771 - DNA, 25 bp, Homo sapien
atgagcgactgcacctggaccctct

SEQ ID NO: 954772 - DNA, 25 bp, Homo sapien
gacgaggccgatggaagattggcca

SEQ ID NO: 954773 - DNA, 25 bp, Homo sapien
gaaatctgagagaagacgaggccga

SEQ ID NO: 954774 - DNA, 25 bp, Homo sapien
tgggtcatttgggagcaccagatca

SEQ ID NO: 954775 - DNA, 25 bp, Homo sapien
ccctgtgaacaccagaagggttagg

SEQ ID NO: 954776 - DNA, 25 bp, Homo sapien
cacactctctttggtctgcgggaac

SEQ ID NO: 954777 - DNA, 25 bp, Homo sapien
tgcgggaacgcacccatcaaggtga

SEQ ID NO: 954778 - DNA, 25 bp, Homo sapien
cacgggctcaaagtgcaatccagcg

SEQ ID NO: 954779 - DNA, 25 bp, Homo sapien
cagcagcaagttgggactacaaacc

SEQ ID NO: 954780 - DNA, 25 bp, Homo sapien
agtactgcggggccggtcctcctgt

SEQ ID NO: 954781 - DNA, 25 bp, Homo sapien
tcagtactgcggggccggtcctcct

SEQ ID NO: 954782 - DNA, 25 bp, Homo sapien
ccggcttggcctgggacttcatgtg

SEQ ID NO: 954783 - DNA, 25 bp, Homo sapien
gttcccggcttggcctgggacttca

SEQ ID NO: 954784 - DNA, 25 bp, Homo sapien
gattttcttctggtgtcccgccaga

SEQ ID NO: 954785 - DNA, 25 bp, Homo sapien
ggtgtcccgccagagtgactccgat

SEQ ID NO: 954786 - DNA, 25 bp, Homo sapien
gccagagtgactccgattcggagca

SEQ ID NO: 954787 - DNA, 25 bp, Homo sapien
agtgactccgattcggagcaggtcc

SEQ ID NO: 954788 - DNA, 25 bp, Homo sapien
caaagatagctagaagtgagaggcg

SEQ ID NO: 954789 - DNA, 25 bp, Homo sapien
tgcacaaagatagctagaagtgaga

SEQ ID NO: 954790 - DNA, 25 bp, Homo sapien
atagatgcacaaagatagctagaag

SEQ ID NO: 954791 - DNA, 25 bp, Homo sapien
gtgagaggcggaagcgcgatggccc

SEQ ID NO: 954792 - DNA, 25 bp, Homo sapien
ccaaaagctgagtagtgaggctgcc

SEQ ID NO: 954793 - DNA, 25 bp, Homo sapien
ttttgatggcccgaagccactcgcc

SEQ ID NO: 954794 - DNA, 25 bp, Homo sapien
gatctggctgaccagctcgaaggag

SEQ ID NO: 954795 - DNA, 25 bp, Homo sapien
caaagccagcggctgcgaaactttc

SEQ ID NO: 954796 - DNA, 25 bp, Homo sapien
tctcccgggccacgattttgaggct

SEQ ID NO: 954797 - DNA, 25 bp, Homo sapien
gccattctcccgggccacgattttg

SEQ ID NO: 954798 - DNA, 25 bp, Homo sapien
cccgggccacgattttgaggctggc

SEQ ID NO: 954799 - DNA, 25 bp, Homo sapien
attctcccgggccacgattttgagg

SEQ ID NO: 954800 - DNA, 25 bp, Homo sapien
ccggtagtcctgttcaatggcattg

SEQ ID NO: 954801 - DNA, 25 bp, Homo sapien
agggaggtgggacagtctgggggcg

SEQ ID NO: 954802 - DNA, 25 bp, Homo sapien
gggcagccggtagtcctgttcaatg

SEQ ID NO: 954803 - DNA, 25 bp, Homo sapien
agtcctgttcaatggcattgatcac

SEQ ID NO: 954804 - DNA, 25 bp, Homo sapien
gaaagaggggaagaagctctgggtg

SEQ ID NO: 954805 - DNA, 25 bp, Homo sapien
ctggaaagaggggaagaagctctgg

SEQ ID NO: 954806 - DNA, 25 bp, Homo sapien
agaggggaagaagctctgggtgagg

SEQ ID NO: 954807 - DNA, 25 bp, Homo sapien
aaagaggggaagaagctctgggtga

SEQ ID NO: 954808 - DNA, 25 bp, Homo sapien
gaacactcgaggaaagcttggtagg

SEQ ID NO: 954809 - DNA, 25 bp, Homo sapien
ccaaatcccaggtgagagaacactc

SEQ ID NO: 954810 - DNA, 25 bp, Homo sapien
gcttggtaggaccacgggacactta

SEQ ID NO: 954811 - DNA, 25 bp, Homo sapien
aatcccaggtgagagaacactcgag

SEQ ID NO: 954812 - DNA, 25 bp, Homo sapien
actccaggcatcactggcggaagtg

SEQ ID NO: 954813 - DNA, 25 bp, Homo sapien
cactggcggaagtgaacttccggaa

SEQ ID NO: 954814 - DNA, 25 bp, Homo sapien
aaggcaatggcctccggggcagtcc

SEQ ID NO: 954815 - DNA, 25 bp, Homo sapien
ggcagtccatcggatgggaatcttt

SEQ ID NO: 954816 - DNA, 25 bp, Homo sapien
ctaagaagctcacacccagtattac

SEQ ID NO: 954817 - DNA, 25 bp, Homo sapien
ctggccctaagaagctcacacccag

SEQ ID NO: 954818 - DNA, 25 bp, Homo sapien
gccctaagaagctcacacccagtat

SEQ ID NO: 954819 - DNA, 25 bp, Homo sapien
cctaagaagctcacacccagtatta

SEQ ID NO: 954820 - DNA, 25 bp, Homo sapien
gtctcggtggacgtagctcatctcg

SEQ ID NO: 954821 - DNA, 25 bp, Homo sapien
tctcctccaggaatcgggaaaggcc

SEQ ID NO: 954822 - DNA, 25 bp, Homo sapien
ggtgggatcggaagagttctcctcc

SEQ ID NO: 954823 - DNA, 25 bp, Homo sapien
aaggtaccgcatgcccgaggcgatg

SEQ ID NO: 954824 - DNA, 25 bp, Homo sapien
gaactgcagtatgaccaatgatcgg

SEQ ID NO: 954825 - DNA, 25 bp, Homo sapien
tgagcaacccgtctacaggtggaga

SEQ ID NO: 954826 - DNA, 25 bp, Homo sapien
tgggttccgctaagatttggcagac

SEQ ID NO: 954827 - DNA, 25 bp, Homo sapien
tgatcggtgcaaaaaccaaggtctg

SEQ ID NO: 954828 - DNA, 25 bp, Homo sapien
ctctgggtgtaagtgggaactccgg

SEQ ID NO: 954829 - DNA, 25 bp, Homo sapien
gaaggagtccagggcgccgttctcc

SEQ ID NO: 954830 - DNA, 25 bp, Homo sapien
aggaaggagtccagggcgccgttct

SEQ ID NO: 954831 - DNA, 25 bp, Homo sapien
ccgcaggaaggagtccagggcgccg

SEQ ID NO: 954832 - DNA, 25 bp, Homo sapien
gcaggaaggagtccagggcgccgtt

SEQ ID NO: 954833 - DNA, 25 bp, Homo sapien
gaatcatgacgggcatgctgttggt

SEQ ID NO: 954834 - DNA, 25 bp, Homo sapien
tcagggtcttgattgccacacagct

SEQ ID NO: 954835 - DNA, 25 bp, Homo sapien
ggaggcctcgctcagaaactcacgc

SEQ ID NO: 954836 - DNA, 25 bp, Homo sapien
gatattggggtgctcgaactggccc

SEQ ID NO: 954837 - DNA, 25 bp, Homo sapien
gagacatcgatctcttttgcaaatt

SEQ ID NO: 954838 - DNA, 25 bp, Homo sapien
acctcttcaatcttgacgtaggaga

SEQ ID NO: 954839 - DNA, 25 bp, Homo sapien
cgtaggagacatcgatctcttttgc

SEQ ID NO: 954840 - DNA, 25 bp, Homo sapien
caatcttgacgtaggagacatcgat

SEQ ID NO: 954841 - DNA, 25 bp, Homo sapien
cataagtgaaggggtcgatgtagac

SEQ ID NO: 954842 - DNA, 25 bp, Homo sapien
actcccactggactcggaggctcgg

SEQ ID NO: 954843 - DNA, 25 bp, Homo sapien
agaaatcaggcagggccccgtcagc

SEQ ID NO: 954844 - DNA, 25 bp, Homo sapien
ggctcatagcttttagccccaaacc

SEQ ID NO: 954845 - DNA, 25 bp, Homo sapien
cgtcagctgggaattaactcccact

SEQ ID NO: 954846 - DNA, 25 bp, Homo sapien
cgatgagatactgtccgtgtttgtc

SEQ ID NO: 954847 - DNA, 25 bp, Homo sapien
catgtccgatgagatactgtccgtg

SEQ ID NO: 954848 - DNA, 25 bp, Homo sapien
tgtccgaatattctgcttctctccc

SEQ ID NO: 954849 - DNA, 25 bp, Homo sapien
tgtccgtgtttgtccgaatattctg

SEQ ID NO: 954850 - DNA, 25 bp, Homo sapien
ctgtagccgatgggaaaggaacaaa

SEQ ID NO: 954851 - DNA, 25 bp, Homo sapien
ctgccgtgcccgcaatcagggccag

SEQ ID NO: 954852 - DNA, 25 bp, Homo sapien
acacccacgactgccgtgcccgcaa

SEQ ID NO: 954853 - DNA, 25 bp, Homo sapien
agagaactgcgaccacaatgaccac

SEQ ID NO: 954854 - DNA, 25 bp, Homo sapien
gaggcagagaactgcgaccacaatg

SEQ ID NO: 954855 - DNA, 25 bp, Homo sapien
gctgctgatcaggagaaactgatgg

SEQ ID NO: 954856 - DNA, 25 bp, Homo sapien
aaaggctgctgatcaggagaaactg

SEQ ID NO: 954857 - DNA, 25 bp, Homo sapien
ggctgctgatcaggagaaactgatg

SEQ ID NO: 954858 - DNA, 25 bp, Homo sapien
tcaggagaaactgatggtcctgtag

SEQ ID NO: 954859 - DNA, 25 bp, Homo sapien
gctgcaatgcactatgatcagacca

SEQ ID NO: 954860 - DNA, 25 bp, Homo sapien
ggtgacaaagcaaaatcgtgtgttc

SEQ ID NO: 954861 - DNA, 25 bp, Homo sapien
taggcatgcccagccgccagagtgg

SEQ ID NO: 954862 - DNA, 25 bp, Homo sapien
cattcaatgaaacgttctaaaggtg

SEQ ID NO: 954863 - DNA, 25 bp, Homo sapien
ttcaggaaccgcacgctgctgggac

SEQ ID NO: 954864 - DNA, 25 bp, Homo sapien
cagctctgcccggttttctgacgtc

SEQ ID NO: 954865 - DNA, 25 bp, Homo sapien
cgaagggcccgtagccggcctcaga

SEQ ID NO: 954866 - DNA, 25 bp, Homo sapien
tgtgatgttcctggccgaagggccc

SEQ ID NO: 954867 - DNA, 25 bp, Homo sapien
actgggtgcccggggaacagcccag

SEQ ID NO: 954868 - DNA, 25 bp, Homo sapien
gtgaggaccgcgtcacccggatgtc

SEQ ID NO: 954869 - DNA, 25 bp, Homo sapien
ctgggtgaggaccgcgtcacccgga

SEQ ID NO: 954870 - DNA, 25 bp, Homo sapien
aggaccgcgtcacccggatgtcaga

SEQ ID NO: 954871 - DNA, 25 bp, Homo sapien
gtgagaggcagagacacagggaacc

SEQ ID NO: 954872 - DNA, 25 bp, Homo sapien
tgtgagaggcagagacacagggaac

SEQ ID NO: 954873 - DNA, 25 bp, Homo sapien
ctgtgagaggcagagacacagggaa

SEQ ID NO: 954874 - DNA, 25 bp, Homo sapien
cctctcggtcagtggtgacattgac

SEQ ID NO: 954875 - DNA, 25 bp, Homo sapien
tataggtgaagtcaggacgtagccc

SEQ ID NO: 954876 - DNA, 25 bp, Homo sapien
ttgacaggctcaaatgggacgggcc

SEQ ID NO: 954877 - DNA, 25 bp, Homo sapien
gaggataccccgttcaatgcagtga

SEQ ID NO: 954878 - DNA, 25 bp, Homo sapien
ggaagtacccgacgcggcactggca

SEQ ID NO: 954879 - DNA, 25 bp, Homo sapien
ttagagtggctattggctgggcatg

SEQ ID NO: 954880 - DNA, 25 bp, Homo sapien
acgcggcactggcagacggctgatc

SEQ ID NO: 954881 - DNA, 25 bp, Homo sapien
cggctgatccaatggtgttagagtg

SEQ ID NO: 954882 - DNA, 25 bp, Homo sapien
gcacaaaaacatccatctgcacggt

SEQ ID NO: 954883 - DNA, 25 bp, Homo sapien
acatccatctgcacggtgggctcgg

SEQ ID NO: 954884 - DNA, 25 bp, Homo sapien
aagcatgcacaaaaacatccatctg

SEQ ID NO: 954885 - DNA, 25 bp, Homo sapien
agagaaagcattcatcaaaagcatg

SEQ ID NO: 954886 - DNA, 25 bp, Homo sapien
gtgaccggctgttcggcccactggc

SEQ ID NO: 954887 - DNA, 25 bp, Homo sapien
gtgttcccctcagctgcctcgaacc

SEQ ID NO: 954888 - DNA, 25 bp, Homo sapien
ggggacggcatccaccacgcagcta

SEQ ID NO: 954889 - DNA, 25 bp, Homo sapien
catcctcacggcagtagaggctggg

SEQ ID NO: 954890 - DNA, 25 bp, Homo sapien
cagacgcagcgtcttgacattcacc

SEQ ID NO: 954891 - DNA, 25 bp, Homo sapien
ttgctgagcggtcccagacgcagcg

SEQ ID NO: 954892 - DNA, 25 bp, Homo sapien
ttccgggtgagatgctccgcggcca

SEQ ID NO: 954893 - DNA, 25 bp, Homo sapien
cacagtctccgggaatcgagtcagg

SEQ ID NO: 954894 - DNA, 25 bp, Homo sapien
tgtggctgagccctgggggcaccca

SEQ ID NO: 954895 - DNA, 25 bp, Homo sapien
cttggctgtggctgagccctggggg

SEQ ID NO: 954896 - DNA, 25 bp, Homo sapien
tggctgagccctgggggcacccagg

SEQ ID NO: 954897 - DNA, 25 bp, Homo sapien
ctgagccctgggggcacccaggtac

SEQ ID NO: 954898 - DNA, 25 bp, Homo sapien
gtgggacccaacctgtgcgaagcca

SEQ ID NO: 954899 - DNA, 25 bp, Homo sapien
gacaggcactcgagcatggtgaagc

SEQ ID NO: 954900 - DNA, 25 bp, Homo sapien
catagtagaagacggtgaaggtctc

SEQ ID NO: 954901 - DNA, 25 bp, Homo sapien
tgtccgcatcgctctcatagtagaa

SEQ ID NO: 954902 - DNA, 25 bp, Homo sapien
ctggcccggggcacgctgcacgtca

SEQ ID NO: 954903 - DNA, 25 bp, Homo sapien
ccggggcacgctgcacgtcacacac

SEQ ID NO: 954904 - DNA, 25 bp, Homo sapien
gcccggggcacgctgcacgtcacac

SEQ ID NO: 954905 - DNA, 25 bp, Homo sapien
tggcccggggcacgctgcacgtcac

SEQ ID NO: 954906 - DNA, 25 bp, Homo sapien
catccaggccgctcagttcctccca

SEQ ID NO: 954907 - DNA, 25 bp, Homo sapien
ttcgtaggtgcgcacgctgtgctgt

SEQ ID NO: 954908 - DNA, 25 bp, Homo sapien
gaatcctataaagtgagagggactg

SEQ ID NO: 954909 - DNA, 25 bp, Homo sapien
tgagaagggctcagacgacactgct

SEQ ID NO: 954910 - DNA, 25 bp, Homo sapien
tgctggtactgcgaggagggcgcct

SEQ ID NO: 954911 - DNA, 25 bp, Homo sapien
gggctgcatggggtgaatcctataa

SEQ ID NO: 954912 - DNA, 25 bp, Homo sapien
gaatgtcacccacttcagatcagca

SEQ ID NO: 954913 - DNA, 25 bp, Homo sapien
gggaatgtcacccacttcagatcag

SEQ ID NO: 954914 - DNA, 25 bp, Homo sapien
gcccgtccacctgagggaatgtcac

SEQ ID NO: 954915 - DNA, 25 bp, Homo sapien
ctgcccgtccacctgagggaatgtc

SEQ ID NO: 954916 - DNA, 25 bp, Homo sapien
ctggcttggctcggatcatcggggg

SEQ ID NO: 954917 - DNA, 25 bp, Homo sapien
ggcttggctcggatcatcgggggag

SEQ ID NO: 954918 - DNA, 25 bp, Homo sapien
tggcttggctcggatcatcggggga

SEQ ID NO: 954919 - DNA, 25 bp, Homo sapien
ccccataaccactttcataccagac

SEQ ID NO: 954920 - DNA, 25 bp, Homo sapien
cccataaccactttcataccagaca

SEQ ID NO: 954921 - DNA, 25 bp, Homo sapien
cgccccataaccactttcataccag

SEQ ID NO: 954922 - DNA, 25 bp, Homo sapien
gccccataaccactttcataccaga

SEQ ID NO: 954923 - DNA, 25 bp, Homo sapien
gcggccaacgaagcccagcagagca

SEQ ID NO: 954924 - DNA, 25 bp, Homo sapien
cttccaaagctgcggccaacgaagc

SEQ ID NO: 954925 - DNA, 25 bp, Homo sapien
caaagctgcggccaacgaagcccag

SEQ ID NO: 954926 - DNA, 25 bp, Homo sapien
agctgcggccaacgaagcccagcag

SEQ ID NO: 954927 - DNA, 25 bp, Homo sapien
gcctcactcgggtaggatccgaact

SEQ ID NO: 954928 - DNA, 25 bp, Homo sapien
tggacgccgatactccgcgcgggac

SEQ ID NO: 954929 - DNA, 25 bp, Homo sapien
cgcgcagcaagacgtggctggagtt

SEQ ID NO: 954930 - DNA, 25 bp, Homo sapien
tctgactctccctgggcgggtggac

SEQ ID NO: 954931 - DNA, 25 bp, Homo sapien
ggaagcacagccgatgcaggtttca

SEQ ID NO: 954932 - DNA, 25 bp, Homo sapien
ggcggcgtcctctcgttggttgccc

SEQ ID NO: 954933 - DNA, 25 bp, Homo sapien
aggcctccgactgctggcgtgcagt

SEQ ID NO: 954934 - DNA, 25 bp, Homo sapien
gcaaccgcagaaaaagcggcggtgt

SEQ ID NO: 954935 - DNA, 25 bp, Homo sapien
tgaagccatcatagtcgccgccatc

SEQ ID NO: 954936 - DNA, 25 bp, Homo sapien
tcataggctctaggatttctgctgg

SEQ ID NO: 954937 - DNA, 25 bp, Homo sapien
ttcataggctctaggatttctgctg

SEQ ID NO: 954938 - DNA, 25 bp, Homo sapien
cataggctctaggatttctgctgga

SEQ ID NO: 954939 - DNA, 25 bp, Homo sapien
agttcataggctctaggatttctgc

SEQ ID NO: 954940 - DNA, 25 bp, Homo sapien
ggcccacgtcctgccggagacgctt

SEQ ID NO: 954941 - DNA, 25 bp, Homo sapien
cacgtcctgccggagacgcttgtct

SEQ ID NO: 954942 - DNA, 25 bp, Homo sapien
tcctgccggagacgcttgtctgcag

SEQ ID NO: 954943 - DNA, 25 bp, Homo sapien
agacccgcggcccacgtcctgccgg

SEQ ID NO: 954944 - DNA, 25 bp, Homo sapien
cattgctagttaaggaaggagaggc

SEQ ID NO: 954945 - DNA, 25 bp, Homo sapien
tggagaagcctgtgccgtcagagaa

SEQ ID NO: 954946 - DNA, 25 bp, Homo sapien
tcagagaacctttgcccctttccag

SEQ ID NO: 954947 - DNA, 25 bp, Homo sapien
gatttggttcctcttgcattgctag

SEQ ID NO: 954948 - DNA, 25 bp, Homo sapien
tgatgacgagtacgatcgaaggcgc

SEQ ID NO: 954949 - DNA, 25 bp, Homo sapien
gttcagaagagagcgcagcgactac

SEQ ID NO: 954950 - DNA, 25 bp, Homo sapien
tcccgcgagagagatgaaagacgtc

SEQ ID NO: 954951 - DNA, 25 bp, Homo sapien
ttggagccgcgttctcaggcctagg

SEQ ID NO: 954952 - DNA, 25 bp, Homo sapien
tggctatgagatgccctatgctggg

SEQ ID NO: 954953 - DNA, 25 bp, Homo sapien
gctctgacccataccacagtggcta

SEQ ID NO: 954954 - DNA, 25 bp, Homo sapien
gggccaccctgacgtccacatcatg

SEQ ID NO: 954955 - DNA, 25 bp, Homo sapien
gacgtccacatcatgcagcaccatg

SEQ ID NO: 954956 - DNA, 25 bp, Homo sapien
cagagattgacctgggtgtgccgcc

SEQ ID NO: 954957 - DNA, 25 bp, Homo sapien
acggaggccgtcaagcgctataatg

SEQ ID NO: 954958 - DNA, 25 bp, Homo sapien
ccctggatgactcggtggatgagac

SEQ ID NO: 954959 - DNA, 25 bp, Homo sapien
tgaagaccttcaaggagtttctcct

SEQ ID NO: 954960 - DNA, 25 bp, Homo sapien
tcatcgacggagctcggagcaaacc

SEQ ID NO: 954961 - DNA, 25 bp, Homo sapien
actgggaactacacccgctcatcga

SEQ ID NO: 954962 - DNA, 25 bp, Homo sapien
attgctcaggcagctagccagtcag

SEQ ID NO: 954963 - DNA, 25 bp, Homo sapien
tgtgcacaatgcagcggtttagctg

SEQ ID NO: 954964 - DNA, 25 bp, Homo sapien
tactaccttgtcctatgaagctctg

SEQ ID NO: 954965 - DNA, 25 bp, Homo sapien
gagaattttttgtacgatcagcctt

SEQ ID NO: 954966 - DNA, 25 bp, Homo sapien
tgtatcatccatacttgtactacct

SEQ ID NO: 954967 - DNA, 25 bp, Homo sapien
ctggatgccccagacgatgttgatt

SEQ ID NO: 954968 - DNA, 25 bp, Homo sapien
tacataggtgcgtgtctgggacccg

SEQ ID NO: 954969 - DNA, 25 bp, Homo sapien
gaatctcagttctgtaacttcgtcc

SEQ ID NO: 954970 - DNA, 25 bp, Homo sapien
acaccagtgggaggtacataggtgc

SEQ ID NO: 954971 - DNA, 25 bp, Homo sapien
tattgatgtcaaaagcgccaggctt

SEQ ID NO: 954972 - DNA, 25 bp, Homo sapien
gctttttggagtgccccagtagtga

SEQ ID NO: 954973 - DNA, 25 bp, Homo sapien
tggtcaagcacaggttgtagaagga

SEQ ID NO: 954974 - DNA, 25 bp, Homo sapien
cccctgcgaagtgcgagtaaagcct

SEQ ID NO: 954975 - DNA, 25 bp, Homo sapien
aataccaggacataggcttccgtgc

SEQ ID NO: 954976 - DNA, 25 bp, Homo sapien
agtggtagtagaggtagtggcccga

SEQ ID NO: 954977 - DNA, 25 bp, Homo sapien
ctgtacggcggccagtccaggtacg

SEQ ID NO: 954978 - DNA, 25 bp, Homo sapien
gtcgtccaggccgtcgcagccgtag

SEQ ID NO: 954979 - DNA, 25 bp, Homo sapien
cacagcgtctgcagagtgcggtagc

SEQ ID NO: 954980 - DNA, 25 bp, Homo sapien
ggcccacgtggacgtccctcagcgg

SEQ ID NO: 954981 - DNA, 25 bp, Homo sapien
ggacaggcccacgtggacgtccctc

SEQ ID NO: 954982 - DNA, 25 bp, Homo sapien
ctcggcggggacaggcccacgtgga

SEQ ID NO: 954983 - DNA, 25 bp, Homo sapien
acaggcccacgtggacgtccctcag

SEQ ID NO: 954984 - DNA, 25 bp, Homo sapien
ggcgggagcggaggtcccaggccag

SEQ ID NO: 954985 - DNA, 25 bp, Homo sapien
tgggcgggagcggaggtcccaggcc

SEQ ID NO: 954986 - DNA, 25 bp, Homo sapien
gcggtgggcgggagcggaggtccca

SEQ ID NO: 954987 - DNA, 25 bp, Homo sapien
ctccagggcggtgggcgggagcgga

SEQ ID NO: 954988 - DNA, 25 bp, Homo sapien
ctccccgggcctcgttgatcaccgc

SEQ ID NO: 954989 - DNA, 25 bp, Homo sapien
ccggcgcgcagactggggacgcgct

SEQ ID NO: 954990 - DNA, 25 bp, Homo sapien
ggcgcggagcgacctcaggctccaa

SEQ ID NO: 954991 - DNA, 25 bp, Homo sapien
gggcctcgttgatcaccgcaggccg

SEQ ID NO: 954992 - DNA, 25 bp, Homo sapien
agctcagcctgagacatgcagagga

SEQ ID NO: 954993 - DNA, 25 bp, Homo sapien
gggctcgtctgtgttatagcccagc

SEQ ID NO: 954994 - DNA, 25 bp, Homo sapien
gcccagccctgaaataaatagtata

SEQ ID NO: 954995 - DNA, 25 bp, Homo sapien
aatagtatatacagctagggggccg

SEQ ID NO: 954996 - DNA, 25 bp, Homo sapien
ctgagcagcgatcctgcttgctgta

SEQ ID NO: 954997 - DNA, 25 bp, Homo sapien
ggtcgaactggttcttccagtgcac

SEQ ID NO: 954998 - DNA, 25 bp, Homo sapien
tgctgtagtggtcgaactggttctt

SEQ ID NO: 954999 - DNA, 25 bp, Homo sapien
tgagcagcgatcctgcttgctgtag

SEQ ID NO: 955000 - DNA, 25 bp, Homo sapien
aactcggccttccactggcgctccg

SEQ ID NO: 955001 - DNA, 25 bp, Homo sapien
agctccagcggtggaactcggcctt

SEQ ID NO: 955002 - DNA, 25 bp, Homo sapien
catgtaggagctccagcggtggaac

SEQ ID NO: 955003 - DNA, 25 bp, Homo sapien
tggcgctccgcctcgtcgagcgtgt

SEQ ID NO: 955004 - DNA, 25 bp, Homo sapien
cacggtccgaccactcattagagga

SEQ ID NO: 955005 - DNA, 25 bp, Homo sapien
tccattcaaacaacaaaggcgtggg

SEQ ID NO: 955006 - DNA, 25 bp, Homo sapien
gagcactaggtctgagatccctgag

SEQ ID NO: 955007 - DNA, 25 bp, Homo sapien
tggttgaccgttatagccccaatgg

SEQ ID NO: 955008 - DNA, 25 bp, Homo sapien
cagcctccccatgggtgaagcctgg

SEQ ID NO: 955009 - DNA, 25 bp, Homo sapien
gcagcctccccatgggtgaagcctg

SEQ ID NO: 955010 - DNA, 25 bp, Homo sapien
tcacagccgccggaggtgggagagg

SEQ ID NO: 955011 - DNA, 25 bp, Homo sapien
ggaggccgggcctcggagcagcctc

SEQ ID NO: 955012 - DNA, 25 bp, Homo sapien
caggtccagactaacgtactgctga

SEQ ID NO: 955013 - DNA, 25 bp, Homo sapien
tccagactaacgtactgctgagccc

SEQ ID NO: 955014 - DNA, 25 bp, Homo sapien
cggccgcaggtccagactaacgtac

SEQ ID NO: 955015 - DNA, 25 bp, Homo sapien
cgccgcacctccagcggccgcaggt

SEQ ID NO: 955016 - DNA, 25 bp, Homo sapien
cgccccctccatgtctacctcgtct

SEQ ID NO: 955017 - DNA, 25 bp, Homo sapien
tttccagagatagggccactcaggc

SEQ ID NO: 955018 - DNA, 25 bp, Homo sapien
tgcctctgtctctgcaagaccccct

SEQ ID NO: 955019 - DNA, 25 bp, Homo sapien
ccatgtctacctcgtctcctcctca

SEQ ID NO: 955020 - DNA, 25 bp, Homo sapien
gaagcacggtgttcaaagacgtagg

SEQ ID NO: 955021 - DNA, 25 bp, Homo sapien
gatgaactcgatctcgtagccgtgg

SEQ ID NO: 955022 - DNA, 25 bp, Homo sapien
agttggcccagtatcgcatcagtcg

SEQ ID NO: 955023 - DNA, 25 bp, Homo sapien
cagtcgctgggcgaagattttctcc

SEQ ID NO: 955024 - DNA, 25 bp, Homo sapien
tcgcccaccacatcgctcagggcct

SEQ ID NO: 955025 - DNA, 25 bp, Homo sapien
attgtggtcgcccaccacatcgctc

SEQ ID NO: 955026 - DNA, 25 bp, Homo sapien
tccctcaggcgtgccgggtcctcgg

SEQ ID NO: 955027 - DNA, 25 bp, Homo sapien
cacggggcacacgacattgtggtcg

SEQ ID NO: 955028 - DNA, 25 bp, Homo sapien
ctgtgtaatgcaggaccacagcctc

SEQ ID NO: 955029 - DNA, 25 bp, Homo sapien
gtgtaatgcaggaccacagcctcgg

SEQ ID NO: 955030 - DNA, 25 bp, Homo sapien
taatgcaggaccacagcctcggctg

SEQ ID NO: 955031 - DNA, 25 bp, Homo sapien
gtaatgcaggaccacagcctcggct

SEQ ID NO: 955032 - DNA, 25 bp, Homo sapien
ctgatgagagactcgttgtctttgc

SEQ ID NO: 955033 - DNA, 25 bp, Homo sapien
cagaaaatacgagccctcatccttc

SEQ ID NO: 955034 - DNA, 25 bp, Homo sapien
gtctttgctgaagcctggggccccg

SEQ ID NO: 955035 - DNA, 25 bp, Homo sapien
gccaggaactcggcccggctgatga

SEQ ID NO: 955036 - DNA, 25 bp, Homo sapien
gcttcacgccagctagccactagtt

SEQ ID NO: 955037 - DNA, 25 bp, Homo sapien
agacccggaaccatggacagagaga

SEQ ID NO: 955038 - DNA, 25 bp, Homo sapien
gtgggatggagcgacaggcacagac

SEQ ID NO: 955039 - DNA, 25 bp, Homo sapien
aaagagaaaatagacccatggtggc

SEQ ID NO: 955040 - DNA, 25 bp, Homo sapien
acgtgccattcgtggttcaccagga

SEQ ID NO: 955041 - DNA, 25 bp, Homo sapien
cacaggcacgaaggagaaccggaag

SEQ ID NO: 955042 - DNA, 25 bp, Homo sapien
ccgtggaagtctcccgcgttgatga

SEQ ID NO: 955043 - DNA, 25 bp, Homo sapien
gctttcttgaggcagcacgtgccat

SEQ ID NO: 955044 - DNA, 25 bp, Homo sapien
ggccatcgtacacgtccaaggagga

SEQ ID NO: 955045 - DNA, 25 bp, Homo sapien
gcctgtaccaagaagcggccatcgt

SEQ ID NO: 955046 - DNA, 25 bp, Homo sapien
caaacagcgtcactgatgtcgggtc

SEQ ID NO: 955047 - DNA, 25 bp, Homo sapien
tggtgtccacacgttgaggtacagg

SEQ ID NO: 955048 - DNA, 25 bp, Homo sapien
aggttgtagcgtctaccacccctga

SEQ ID NO: 955049 - DNA, 25 bp, Homo sapien
gcagacactctggaaggttgtagcg

SEQ ID NO: 955050 - DNA, 25 bp, Homo sapien
tagggtgtccacatattggtagcag

SEQ ID NO: 955051 - DNA, 25 bp, Homo sapien
gggtcttcaggcgaatgccccgcag

SEQ ID NO: 955052 - DNA, 25 bp, Homo sapien
cagctctgcatcctcccggccctca

SEQ ID NO: 955053 - DNA, 25 bp, Homo sapien
tgcagcagacactgcgggggcctca

SEQ ID NO: 955054 - DNA, 25 bp, Homo sapien
agggaaggcgtgtgcagcagacact

SEQ ID NO: 955055 - DNA, 25 bp, Homo sapien
gccagggaaggcgtgtgcagcagac

SEQ ID NO: 955056 - DNA, 25 bp, Homo sapien
gggaagccagggaaggcgtgtgcag

SEQ ID NO: 955057 - DNA, 25 bp, Homo sapien
gcccaagggttatcgctcagctgca

SEQ ID NO: 955058 - DNA, 25 bp, Homo sapien
agggtcggtcgagaagccaggaggg

SEQ ID NO: 955059 - DNA, 25 bp, Homo sapien
ggtgaagggtcggtcgagaagccag

SEQ ID NO: 955060 - DNA, 25 bp, Homo sapien
gcactgtcggcccaagggttatcgc

SEQ ID NO: 955061 - DNA, 25 bp, Homo sapien
aggcggccgatgttccccggcgcag

SEQ ID NO: 955062 - DNA, 25 bp, Homo sapien
ctggaggcggccgatgttccccggc

SEQ ID NO: 955063 - DNA, 25 bp, Homo sapien
cgatgttccccggcgcaggctgagc

SEQ ID NO: 955064 - DNA, 25 bp, Homo sapien
ggagctggaggcggccgatgttccc

SEQ ID NO: 955065 - DNA, 25 bp, Homo sapien
ctccgcggcggcagtggaaacttct

SEQ ID NO: 955066 - DNA, 25 bp, Homo sapien
cacgaccgaggtgcatgcggcaata

SEQ ID NO: 955067 - DNA, 25 bp, Homo sapien
gcattcattggccacgcggctggca

SEQ ID NO: 955068 - DNA, 25 bp, Homo sapien
tgacttcggactttcgtcaccaggg

SEQ ID NO: 955069 - DNA, 25 bp, Homo sapien
cggtagctgggtctgtaggtgcgcc

SEQ ID NO: 955070 - DNA, 25 bp, Homo sapien
ctcggtagctgggtctgtaggtgcg

SEQ ID NO: 955071 - DNA, 25 bp, Homo sapien
tcggtagctgggtctgtaggtgcgc

SEQ ID NO: 955072 - DNA, 25 bp, Homo sapien
gagatgaacagtggatggaagcatc

SEQ ID NO: 955073 - DNA, 25 bp, Homo sapien
tagccttggtcttcatttaatctga

SEQ ID NO: 955074 - DNA, 25 bp, Homo sapien
tcatttaatctgagatgaacagtgg

SEQ ID NO: 955075 - DNA, 25 bp, Homo sapien
gtgcctagccttggtcttcatttaa

SEQ ID NO: 955076 - DNA, 25 bp, Homo sapien
tacgctcatccaaggccttactcag

SEQ ID NO: 955077 - DNA, 25 bp, Homo sapien
aactgggtgccttcatatgcttcaa

SEQ ID NO: 955078 - DNA, 25 bp, Homo sapien
tcaactgggtgccttcatatgcttc

SEQ ID NO: 955079 - DNA, 25 bp, Homo sapien
tatgcttcaactgtttacgctcatc

SEQ ID NO: 955080 - DNA, 25 bp, Homo sapien
ctgagggtggctggttgaccatttt

SEQ ID NO: 955081 - DNA, 25 bp, Homo sapien
catttctaaaagacagcccagtgcc

SEQ ID NO: 955082 - DNA, 25 bp, Homo sapien
aagacagcccagtgccacacactgg

SEQ ID NO: 955083 - DNA, 25 bp, Homo sapien
cactgggcctggttgttaaagattg

SEQ ID NO: 955084 - DNA, 25 bp, Homo sapien
caccagtgaatattcggccagggtt

SEQ ID NO: 955085 - DNA, 25 bp, Homo sapien
gtgaatattcggccagggttttcat

SEQ ID NO: 955086 - DNA, 25 bp, Homo sapien
tgtactagagccaccagtgaatatt

SEQ ID NO: 955087 - DNA, 25 bp, Homo sapien
tcattcttgtcacatcggcccaaat

SEQ ID NO: 955088 - DNA, 25 bp, Homo sapien
tatgccctcaatatgtactgccagt

SEQ ID NO: 955089 - DNA, 25 bp, Homo sapien
ggtctgatctgtaaatatgccctca

SEQ ID NO: 955090 - DNA, 25 bp, Homo sapien
gttgcactaactgaccttccttgaa

SEQ ID NO: 955091 - DNA, 25 bp, Homo sapien
ttccttgaaaggtttatccaacgca

SEQ ID NO: 955092 - DNA, 25 bp, Homo sapien
agggcgatagttgcctccagatcca

SEQ ID NO: 955093 - DNA, 25 bp, Homo sapien
taggagggcgatagttgcctccaga

SEQ ID NO: 955094 - DNA, 25 bp, Homo sapien
ggagggcgatagttgcctccagatc

SEQ ID NO: 955095 - DNA, 25 bp, Homo sapien
ttataggagggcgatagttgcctcc

SEQ ID NO: 955096 - DNA, 25 bp, Homo sapien
ctcctgcctcagctacaggtacacg

SEQ ID NO: 955097 - DNA, 25 bp, Homo sapien
ccttggcctttcaaagtgctgggat

SEQ ID NO: 955098 - DNA, 25 bp, Homo sapien
cctgcctcagctacaggtacacgcc

SEQ ID NO: 955099 - DNA, 25 bp, Homo sapien
gtacacgccactacgcctggctaat

SEQ ID NO: 955100 - DNA, 25 bp, Homo sapien
cccggtggatgatggcttgatgcaa

SEQ ID NO: 955101 - DNA, 25 bp, Homo sapien
gatgcaacgagaacgtcaggccaga

SEQ ID NO: 955102 - DNA, 25 bp, Homo sapien
cataaggaatcgctccctgggtatt

SEQ ID NO: 955103 - DNA, 25 bp, Homo sapien
ctagcactttggcaaggttaggtgg

SEQ ID NO: 955104 - DNA, 25 bp, Homo sapien
ctacaacaataaaaatagtaataat

SEQ ID NO: 955105 - DNA, 25 bp, Homo sapien
gctgcagtgagctacaatgatacca

SEQ ID NO: 955106 - DNA, 25 bp, Homo sapien
tgagctacaatgataccactgcact

SEQ ID NO: 955107 - DNA, 25 bp, Homo sapien
ctgaggagaaaggatcactttagcc

SEQ ID NO: 955108 - DNA, 25 bp, Homo sapien
gctgaggagaaaggatcactttagc

SEQ ID NO: 955109 - DNA, 25 bp, Homo sapien
cccagctggagagcgagtatgagca

SEQ ID NO: 955110 - DNA, 25 bp, Homo sapien
tacacacaatgccatcaagagtggg

SEQ ID NO: 955111 - DNA, 25 bp, Homo sapien
tatgagcaggtgaagaccacgctga

SEQ ID NO: 955112 - DNA, 25 bp, Homo sapien
gagaacgggaataagtctacacaca

SEQ ID NO: 955113 - DNA, 25 bp, Homo sapien
caggcccctgaatagaatggatgag

SEQ ID NO: 955114 - DNA, 25 bp, Homo sapien
tcggaaatggaatcctcctcgcgca

SEQ ID NO: 955115 - DNA, 25 bp, Homo sapien
tcttcctggcgttggttagtggctt

SEQ ID NO: 955116 - DNA, 25 bp, Homo sapien
tcctcgcgcatattcagaggcacca

SEQ ID NO: 955117 - DNA, 25 bp, Homo sapien
ggacaacgccatcgactgtcaccag

SEQ ID NO: 955118 - DNA, 25 bp, Homo sapien
gcgccgctcccacgggctatgaaga

SEQ ID NO: 955119 - DNA, 25 bp, Homo sapien
tcccacgggctatgaagagttctac

SEQ ID NO: 955120 - DNA, 25 bp, Homo sapien
tgtcaccaaatgcacgtcgggcgtg

SEQ ID NO: 955121 - DNA, 25 bp, Homo sapien
taggatgaagcctagcctcacgcgc

SEQ ID NO: 955122 - DNA, 25 bp, Homo sapien
ctggttctgggatagaccccgccca

SEQ ID NO: 955123 - DNA, 25 bp, Homo sapien
cccgcccactcattctaggatgaag

SEQ ID NO: 955124 - DNA, 25 bp, Homo sapien
tgctccgtcgccctaaagtgtagcc

SEQ ID NO: 955125 - DNA, 25 bp, Homo sapien
gggccggctctgtctgaccgcgcgg

SEQ ID NO: 955126 - DNA, 25 bp, Homo sapien
cgggcggtgcgctccggatggtggg

SEQ ID NO: 955127 - DNA, 25 bp, Homo sapien
acacgcactggttctctggcccgcg

SEQ ID NO: 955128 - DNA, 25 bp, Homo sapien
agctgctactccaccgacacgcact

SEQ ID NO: 955129 - DNA, 25 bp, Homo sapien
cttgggcaagtcagtaacgagcctc

SEQ ID NO: 955130 - DNA, 25 bp, Homo sapien
gagacgcagttcacgtccaggctct

SEQ ID NO: 955131 - DNA, 25 bp, Homo sapien
ggcaagtcagtaacgagcctcagtt

SEQ ID NO: 955132 - DNA, 25 bp, Homo sapien
tggagacgcagttcacgtccaggct

SEQ ID NO: 955133 - DNA, 25 bp, Homo sapien
ggcagggcatgagttccccagtccc

SEQ ID NO: 955134 - DNA, 25 bp, Homo sapien
catgagttccccagtccccaaggaa

SEQ ID NO: 955135 - DNA, 25 bp, Homo sapien
agggcatgagttccccagtccccaa

SEQ ID NO: 955136 - DNA, 25 bp, Homo sapien
gggcagggcatgagttccccagtcc

SEQ ID NO: 955137 - DNA, 25 bp, Homo sapien
ctacaggtgcatgtaccacactggg

SEQ ID NO: 955138 - DNA, 25 bp, Homo sapien
ctcctgagtacctggaactgactac

SEQ ID NO: 955139 - DNA, 25 bp, Homo sapien
caggtgcatgtaccacactgggcta

SEQ ID NO: 955140 - DNA, 25 bp, Homo sapien
tgagtacctggaactgactacaggt

SEQ ID NO: 955141 - DNA, 25 bp, Homo sapien
cgtagtgaggaatcaacagcatcgc

SEQ ID NO: 955142 - DNA, 25 bp, Homo sapien
gaggaatcaacagcatcgcacagca

SEQ ID NO: 955143 - DNA, 25 bp, Homo sapien
acggcagcccgagctcaattccaac

SEQ ID NO: 955144 - DNA, 25 bp, Homo sapien
tagtgaggaatcaacagcatcgcac

SEQ ID NO: 955145 - DNA, 25 bp, Homo sapien
caggctcaacgcacacaacagcatt

SEQ ID NO: 955146 - DNA, 25 bp, Homo sapien
agctcaggcgtcagtgaagaatcca

SEQ ID NO: 955147 - DNA, 25 bp, Homo sapien
gaaacaacactcttacctgacaaca

SEQ ID NO: 955148 - DNA, 25 bp, Homo sapien
catgccaggcgtcagtcaggaatct

SEQ ID NO: 955149 - DNA, 25 bp, Homo sapien
gtcgtagtgaagaatcaagaacttc

SEQ ID NO: 955150 - DNA, 25 bp, Homo sapien
ggtcgtagtgaagaatcaagaactt

SEQ ID NO: 955151 - DNA, 25 bp, Homo sapien
tcgtagtgaagaatcaagaacttcc

SEQ ID NO: 955152 - DNA, 25 bp, Homo sapien
agctcaggcgtcagtgaagaatcca

SEQ ID NO: 955153 - DNA, 25 bp, Homo sapien
gttgaagcatctacacgcgtccaca

SEQ ID NO: 955154 - DNA, 25 bp, Homo sapien
cacaagctcaggcatcgttgaagca

SEQ ID NO: 955155 - DNA, 25 bp, Homo sapien
caggctcaatggaaacgacagcgtt

SEQ ID NO: 955156 - DNA, 25 bp, Homo sapien
cacctcccgtagccaaccaggttct

SEQ ID NO: 955157 - DNA, 25 bp, Homo sapien
tctactcactcaacagtgtcacctg

SEQ ID NO: 955158 - DNA, 25 bp, Homo sapien
caaccaggttctactcactcaacag

SEQ ID NO: 955159 - DNA, 25 bp, Homo sapien
ggttctactcactcaacagtgtcac

SEQ ID NO: 955160 - DNA, 25 bp, Homo sapien
acaacactgttcactgaggacagca

SEQ ID NO: 955161 - DNA, 25 bp, Homo sapien
tcacaaccgcagacctcggtgagga

SEQ ID NO: 955162 - DNA, 25 bp, Homo sapien
gaatcaactacctttcccagcagct

SEQ ID NO: 955163 - DNA, 25 bp, Homo sapien
agagcctacaaccttccacagccgg

SEQ ID NO: 955164 - DNA, 25 bp, Homo sapien
cacaagctcaggcatcgttgaagca

SEQ ID NO: 955165 - DNA, 25 bp, Homo sapien
caggctcaacggatacaacactgtt

SEQ ID NO: 955166 - DNA, 25 bp, Homo sapien
gttgaagcatctacacgcgtccaca

SEQ ID NO: 955167 - DNA, 25 bp, Homo sapien
cacagcagcccaggttcaactgaca

SEQ ID NO: 955168 - DNA, 25 bp, Homo sapien
tctactcactcaacagtgtcacctg

SEQ ID NO: 955169 - DNA, 25 bp, Homo sapien
cacctcccgtagccaaccaggttct

SEQ ID NO: 955170 - DNA, 25 bp, Homo sapien
ggttctactcactcaacagtgtcac

SEQ ID NO: 955171 - DNA, 25 bp, Homo sapien
caaccaggttctactcactcaacag

SEQ ID NO: 955172 - DNA, 25 bp, Homo sapien
gaatcaactacctttcccagcagct

SEQ ID NO: 955173 - DNA, 25 bp, Homo sapien
acaacactgttcactgaggacagca

SEQ ID NO: 955174 - DNA, 25 bp, Homo sapien
tcacaaccgcagacctcggtgagga

SEQ ID NO: 955175 - DNA, 25 bp, Homo sapien
agagcctacaaccttccacagccgg

SEQ ID NO: 955176 - DNA, 25 bp, Homo sapien
aggcctcgtggaggcatctacaccc

SEQ ID NO: 955177 - DNA, 25 bp, Homo sapien
cttcaggaagaatctaccactttcc

SEQ ID NO: 955178 - DNA, 25 bp, Homo sapien
gctccacaagcgctggccttcagga

SEQ ID NO: 955179 - DNA, 25 bp, Homo sapien
ctcaggcctcgtggaggcatctaca

SEQ ID NO: 955180 - DNA, 25 bp, Homo sapien
tacaacccgtcagggagaatctacc

SEQ ID NO: 955181 - DNA, 25 bp, Homo sapien
agctcaggcgtcagtgaagaatcca

SEQ ID NO: 955182 - DNA, 25 bp, Homo sapien
caggctcaacgcacacaacagcatt

SEQ ID NO: 955183 - DNA, 25 bp, Homo sapien
catgccaggcgtcagtcaggaatct

SEQ ID NO: 955184 - DNA, 25 bp, Homo sapien
cagagctggcctaactcgaaggaca

SEQ ID NO: 955185 - DNA, 25 bp, Homo sapien
tccagagctggcctaactcgaagga

SEQ ID NO: 955186 - DNA, 25 bp, Homo sapien
taactcgaaggacactacccctgca

SEQ ID NO: 955187 - DNA, 25 bp, Homo sapien
tggcctaactcgaaggacactaccc

SEQ ID NO: 955188 - DNA, 25 bp, Homo sapien
aagaatctacgacctaccacagcag

SEQ ID NO: 955189 - DNA, 25 bp, Homo sapien
tcaactcaaacaatgcacttccctg

SEQ ID NO: 955190 - DNA, 25 bp, Homo sapien
aaagcgacacaacttcaggccgtgg

SEQ ID NO: 955191 - DNA, 25 bp, Homo sapien
aacctcaggcctcgttgaagaatct

SEQ ID NO: 955192 - DNA, 25 bp, Homo sapien
agctcaggcgtcagtgaagaatcca

SEQ ID NO: 955193 - DNA, 25 bp, Homo sapien
caggctcaacgcacacaacagcatt

SEQ ID NO: 955194 - DNA, 25 bp, Homo sapien
ggcctcagtgagaaatctaccactt

SEQ ID NO: 955195 - DNA, 25 bp, Homo sapien
caggctcaatggaaacgacagcgtt

SEQ ID NO: 955196 - DNA, 25 bp, Homo sapien
aggcgtcagcgaagaatccagcaca

SEQ ID NO: 955197 - DNA, 25 bp, Homo sapien
aacactctcacctgcaaccacaaca

SEQ ID NO: 955198 - DNA, 25 bp, Homo sapien
ccggctctacaacccgtcagggaga

SEQ ID NO: 955199 - DNA, 25 bp, Homo sapien
catgccaggcgtcagtcaggaatct

SEQ ID NO: 955200 - DNA, 25 bp, Homo sapien
agcagcactggatcgccacacacaa

SEQ ID NO: 955201 - DNA, 25 bp, Homo sapien
gaaacaacactcttacctgacaaca

SEQ ID NO: 955202 - DNA, 25 bp, Homo sapien
ttcttgctgcatcacagcatggcaa

SEQ ID NO: 955203 - DNA, 25 bp, Homo sapien
tgctgcatcacagcatggcaacatg

SEQ ID NO: 955204 - DNA, 25 bp, Homo sapien
ctgcatcacagcatggcaacatggc

SEQ ID NO: 955205 - DNA, 25 bp, Homo sapien
gactttcttgctgcatcacagcatg

SEQ ID NO: 955206 - DNA, 25 bp, Homo sapien
aagctgagatggagcgtctgggtct

SEQ ID NO: 955207 - DNA, 25 bp, Homo sapien
acagcaccacatggggaagctgaga

SEQ ID NO: 955208 - DNA, 25 bp, Homo sapien
ctgagatggagcgtctgggtctcac

SEQ ID NO: 955209 - DNA, 25 bp, Homo sapien
cacagcaccacatggggaagctgag

SEQ ID NO: 955210 - DNA, 25 bp, Homo sapien
tctgcagggaacagtatgatgtgcc

SEQ ID NO: 955211 - DNA, 25 bp, Homo sapien
acggccatctgggaaggtacctcta

SEQ ID NO: 955212 - DNA, 25 bp, Homo sapien
tcaagagtggcgaaaggaaggcacc

SEQ ID NO: 955213 - DNA, 25 bp, Homo sapien
ccaactcagtgagggcatccagtgc

SEQ ID NO: 955214 - DNA, 25 bp, Homo sapien
atcacggcctctccctacagaccag

SEQ ID NO: 955215 - DNA, 25 bp, Homo sapien
tctccctacagaccagaatctgagg

SEQ ID NO: 955216 - DNA, 25 bp, Homo sapien
aagggcgtagggcagatgccgggct

SEQ ID NO: 955217 - DNA, 25 bp, Homo sapien
ctcccatcactcatcacggcctctc

SEQ ID NO: 955218 - DNA, 25 bp, Homo sapien
ggaatctgcactaactctccttgcc

SEQ ID NO: 955219 - DNA, 25 bp, Homo sapien
caggaatctgcactaactctccttg

SEQ ID NO: 955220 - DNA, 25 bp, Homo sapien
tccctggggctgtcattataaagca

SEQ ID NO: 955221 - DNA, 25 bp, Homo sapien
tggtacacgcctgtgtcccacctac

SEQ ID NO: 955222 - DNA, 25 bp, Homo sapien
tgcttgactttcagcgccgctcctg

SEQ ID NO: 955223 - DNA, 25 bp, Homo sapien
ggtgcacacgtaccactgcttgact

SEQ ID NO: 955224 - DNA, 25 bp, Homo sapien
gctctccctgtggtctgtcccactg

SEQ ID NO: 955225 - DNA, 25 bp, Homo sapien
tcctgccgacccttgagtctgttca

SEQ ID NO: 955226 - DNA, 25 bp, Homo sapien
agtgccgcgagacagtgcctgtgcc

SEQ ID NO: 955227 - DNA, 25 bp, Homo sapien
tgcctggactgtgccgatgacttgt

SEQ ID NO: 955228 - DNA, 25 bp, Homo sapien
caacttcttcgtcaatgggctgctg

SEQ ID NO: 955229 - DNA, 25 bp, Homo sapien
cacccaccgcgtggtggacctggtg

SEQ ID NO: 955230 - DNA, 25 bp, Homo sapien
agcccacgtggaggctgccgaagaa

SEQ ID NO: 955231 - DNA, 25 bp, Homo sapien
ctggcggagcttgagggccgggagc

SEQ ID NO: 955232 - DNA, 25 bp, Homo sapien
gaggccgagatcctctccctggaag

SEQ ID NO: 955233 - DNA, 25 bp, Homo sapien
tcggctgtcctttgaggagcagcag

SEQ ID NO: 955234 - DNA, 25 bp, Homo sapien
tggcacagggtcctacagagtcaga

SEQ ID NO: 955235 - DNA, 25 bp, Homo sapien
taccaagttatgagtgtcagagcag

SEQ ID NO: 955236 - DNA, 25 bp, Homo sapien
tgcactgtggaacagagctgagacc

SEQ ID NO: 955237 - DNA, 25 bp, Homo sapien
ggaaacagctaaaccctgcaggcca

SEQ ID NO: 955238 - DNA, 25 bp, Homo sapien
gaacagtatttggtcaaagaaccac

SEQ ID NO: 955239 - DNA, 25 bp, Homo sapien
taccctggaggaaatgtatgcaggc

SEQ ID NO: 955240 - DNA, 25 bp, Homo sapien
gatttgacgaggaaagccttggtct

SEQ ID NO: 955241 - DNA, 25 bp, Homo sapien
gaaccacataagctctgtaccctgg

SEQ ID NO: 955242 - DNA, 25 bp, Homo sapien
aattatcgtggagtgtctggaaggc

SEQ ID NO: 955243 - DNA, 25 bp, Homo sapien
ccctgccaggtgatcgaattatcgt

SEQ ID NO: 955244 - DNA, 25 bp, Homo sapien
ccaagtggagtttctacaggaccaa

SEQ ID NO: 955245 - DNA, 25 bp, Homo sapien
gcagtccaaggaaccgctctgggaa

SEQ ID NO: 955246 - DNA, 25 bp, Homo sapien
aaaccgatgaggttgctgacctgag

SEQ ID NO: 955247 - DNA, 25 bp, Homo sapien
ggcgaaagtccaaggcagaagtcaa

SEQ ID NO: 955248 - DNA, 25 bp, Homo sapien
tgttagcaggagaaagaccaagttc

SEQ ID NO: 955249 - DNA, 25 bp, Homo sapien
gaactgccagagagagtacctagga

SEQ ID NO: 955250 - DNA, 25 bp, Homo sapien
gggcagcctgacttgtctccagaga

SEQ ID NO: 955251 - DNA, 25 bp, Homo sapien
ttgacttagcaaccaagggacactg

SEQ ID NO: 955252 - DNA, 25 bp, Homo sapien
cgaggaatcaggacgtcggtgccta

SEQ ID NO: 955253 - DNA, 25 bp, Homo sapien
tgggctaaacccagtgtgctgtaaa

SEQ ID NO: 955254 - DNA, 25 bp, Homo sapien
tgggttctagagtagctaggcagcc

SEQ ID NO: 955255 - DNA, 25 bp, Homo sapien
ctccaagtctgggttctagagtagc

SEQ ID NO: 955256 - DNA, 25 bp, Homo sapien
caagtctgggttctagagtagctag

SEQ ID NO: 955257 - DNA, 25 bp, Homo sapien
gttctagagtagctaggcagcccca

SEQ ID NO: 955258 - DNA, 25 bp, Homo sapien
gcctgggtttgattatgagtcttgc

SEQ ID NO: 955259 - DNA, 25 bp, Homo sapien
cattgactatccccagaatacccag

SEQ ID NO: 955260 - DNA, 25 bp, Homo sapien
gaatttcccagatctgtgatgcttg

SEQ ID NO: 955261 - DNA, 25 bp, Homo sapien
tgatgcttgcaggacatgcatgtgt

SEQ ID NO: 955262 - DNA, 25 bp, Homo sapien
ggtcgccccatcagcacttccatcc

SEQ ID NO: 955263 - DNA, 25 bp, Homo sapien
agggtcgccccatcagcacttccat

SEQ ID NO: 955264 - DNA, 25 bp, Homo sapien
gccccatcagcacttccatccccaa

SEQ ID NO: 955265 - DNA, 25 bp, Homo sapien
ttagggtcgccccatcagcacttcc

SEQ ID NO: 955266 - DNA, 25 bp, Homo sapien
atgactctttctgaaggaagagaag

SEQ ID NO: 955267 - DNA, 25 bp, Homo sapien
tgttaatgactctttctgaaggaag

SEQ ID NO: 955268 - DNA, 25 bp, Homo sapien
agaattttagtgttaatgactcttt

SEQ ID NO: 955269 - DNA, 25 bp, Homo sapien
gaattttagtgttaatgactctttc

SEQ ID NO: 955270 - DNA, 25 bp, Homo sapien
ggcagctcggattcaactaccttag

SEQ ID NO: 955271 - DNA, 25 bp, Homo sapien
tctgaaaacctaccagccagagggt

SEQ ID NO: 955272 - DNA, 25 bp, Homo sapien
gacgtcagccatgtacaggatccac

SEQ ID NO: 955273 - DNA, 25 bp, Homo sapien
gattttgcactggacggtgacgtca

SEQ ID NO: 955274 - DNA, 25 bp, Homo sapien
tatttatctcaccactcataccact

SEQ ID NO: 955275 - DNA, 25 bp, Homo sapien
ttatctcaccactcataccactcat

SEQ ID NO: 955276 - DNA, 25 bp, Homo sapien
tctcaccactcataccactcattcc

SEQ ID NO: 955277 - DNA, 25 bp, Homo sapien
tcaccactcataccactcattcctt

SEQ ID NO: 955278 - DNA, 25 bp, Homo sapien
ggttgccatggtttccgcttctccg

SEQ ID NO: 955279 - DNA, 25 bp, Homo sapien
tccaaagcgcgaggaccttattgtc

SEQ ID NO: 955280 - DNA, 25 bp, Homo sapien
aggacagccgcgttaccatgacgac

SEQ ID NO: 955281 - DNA, 25 bp, Homo sapien
gctgcagtcaaggacctggttgcca

SEQ ID NO: 955282 - DNA, 25 bp, Homo sapien
ggctcaggcccttcaaacattccct

SEQ ID NO: 955283 - DNA, 25 bp, Homo sapien
gctgcctcacctttcggagtgagct

SEQ ID NO: 955284 - DNA, 25 bp, Homo sapien
agcgtggcgggaacggctgcttctc

SEQ ID NO: 955285 - DNA, 25 bp, Homo sapien
cctggcagcgtggcgggaacggctg

SEQ ID NO: 955286 - DNA, 25 bp, Homo sapien
gtggcaagggaactcgcacaaacca

SEQ ID NO: 955287 - DNA, 25 bp, Homo sapien
ctctgggagttcgggctcaggaccc

SEQ ID NO: 955288 - DNA, 25 bp, Homo sapien
gggtcaattcacagcgacttggaga

SEQ ID NO: 955289 - DNA, 25 bp, Homo sapien
cgggtgagctctgggagttcgggct

SEQ ID NO: 955290 - DNA, 25 bp, Homo sapien
catgcaaacaccgagggggagcggg

SEQ ID NO: 955291 - DNA, 25 bp, Homo sapien
tgcaaacaccgagggggagcgggca

SEQ ID NO: 955292 - DNA, 25 bp, Homo sapien
acaccgagggggagcgggcaacacg

SEQ ID NO: 955293 - DNA, 25 bp, Homo sapien
cgagggggagcgggcaacacggagg

SEQ ID NO: 955294 - DNA, 25 bp, Homo sapien
gccctggcgggtacacctcgtcctc

SEQ ID NO: 955295 - DNA, 25 bp, Homo sapien
tcccggccgggatagtggcgcgaag

SEQ ID NO: 955296 - DNA, 25 bp, Homo sapien
acgggcgccggagcagcacgtgctc

SEQ ID NO: 955297 - DNA, 25 bp, Homo sapien
cgcgaaggcggcaaggcgtggtggt

SEQ ID NO: 955298 - DNA, 25 bp, Homo sapien
gctgcggggagcggacgtgggtggg

SEQ ID NO: 955299 - DNA, 25 bp, Homo sapien
tcttccgcttccgcttctcctccac

SEQ ID NO: 955300 - DNA, 25 bp, Homo sapien
ggcgttcttcttccgcttccgcttc

SEQ ID NO: 955301 - DNA, 25 bp, Homo sapien
cttcttccgcttccgcttctcctcc

SEQ ID NO: 955302 - DNA, 25 bp, Homo sapien
ttcttcttccgcttccgcttctcct

SEQ ID NO: 955303 - DNA, 25 bp, Homo sapien
tcctcgatgatgctgaccacgtcgt

SEQ ID NO: 955304 - DNA, 25 bp, Homo sapien
tcgatgatgctgaccacgtcgtccg

SEQ ID NO: 955305 - DNA, 25 bp, Homo sapien
cctcgatgatgctgaccacgtcgtc

SEQ ID NO: 955306 - DNA, 25 bp, Homo sapien
ctcctcgatgatgctgaccacgtcg

SEQ ID NO: 955307 - DNA, 25 bp, Homo sapien
caggtggagtttggtggacagctca

SEQ ID NO: 955308 - DNA, 25 bp, Homo sapien
acagctcaatgaggctgtcgatcgt

SEQ ID NO: 955309 - DNA, 25 bp, Homo sapien
tttggtggacagctcaatgaggctg

SEQ ID NO: 955310 - DNA, 25 bp, Homo sapien
agtttggtggacagctcaatgaggc

SEQ ID NO: 955311 - DNA, 25 bp, Homo sapien
gaacaggagcgcgttctgccgcgcc

SEQ ID NO: 955312 - DNA, 25 bp, Homo sapien
tcctccgcgaacaggagcgcgttct

SEQ ID NO: 955313 - DNA, 25 bp, Homo sapien
cggcgtctcctcctgggagcgcttg

SEQ ID NO: 955314 - DNA, 25 bp, Homo sapien
gagcgcttgtcctcggcgccggctt

SEQ ID NO: 955315 - DNA, 25 bp, Homo sapien
ctctcgctcctccgccgcctcctgc

SEQ ID NO: 955316 - DNA, 25 bp, Homo sapien
tctctcgctcctccgccgcctcctg

SEQ ID NO: 955317 - DNA, 25 bp, Homo sapien
tcctccgccgcctcctgcagccccc

SEQ ID NO: 955318 - DNA, 25 bp, Homo sapien
tccgccgcctcctgcagcccccgac

SEQ ID NO: 955319 - DNA, 25 bp, Homo sapien
ggagcagcaggtccgaggcgaggtc

SEQ ID NO: 955320 - DNA, 25 bp, Homo sapien
ccgccctgcagcaaatactggagca

SEQ ID NO: 955321 - DNA, 25 bp, Homo sapien
caggtccgaggcgaggtcggccagc

SEQ ID NO: 955322 - DNA, 25 bp, Homo sapien
cctgcagcaaatactggagcagcag

SEQ ID NO: 955323 - DNA, 25 bp, Homo sapien
gggtgccaatgcctcgcctaggtgt

SEQ ID NO: 955324 - DNA, 25 bp, Homo sapien
cacgccttggtacgccttggacagg

SEQ ID NO: 955325 - DNA, 25 bp, Homo sapien
aggagtgcgctctccggccggcgcg

SEQ ID NO: 955326 - DNA, 25 bp, Homo sapien
tggagaaggcgctcgcccgcctcgg

SEQ ID NO: 955327 - DNA, 25 bp, Homo sapien
gaactctccccaggaagcgcgccat

SEQ ID NO: 955328 - DNA, 25 bp, Homo sapien
ggcaggggcgcgcgctccgggacac

SEQ ID NO: 955329 - DNA, 25 bp, Homo sapien
actctccccaggaagcgcgccatac

SEQ ID NO: 955330 - DNA, 25 bp, Homo sapien
gcaggggcgcgcgctccgggacacg

SEQ ID NO: 955331 - DNA, 25 bp, Homo sapien
gctgcgcacggtctcggtcagcaga

SEQ ID NO: 955332 - DNA, 25 bp, Homo sapien
gcgcttggcgctacttggactgaaa

SEQ ID NO: 955333 - DNA, 25 bp, Homo sapien
tcgggcccattctccggagtctgag

SEQ ID NO: 955334 - DNA, 25 bp, Homo sapien
gggctctccagattcactcgggtca

SEQ ID NO: 955335 - DNA, 25 bp, Homo sapien
tcgtcctgcggctcggaattccgag

SEQ ID NO: 955336 - DNA, 25 bp, Homo sapien
taacccgttgatcagcagaaggcag

SEQ ID NO: 955337 - DNA, 25 bp, Homo sapien
cggctaccggctctttatgctcaga

SEQ ID NO: 955338 - DNA, 25 bp, Homo sapien
aagagggcggaagccgacaatctga

SEQ ID NO: 955339 - DNA, 25 bp, Homo sapien
ccccttccctgagccatctcactgc

SEQ ID NO: 955340 - DNA, 25 bp, Homo sapien
ggcctcctcggccccttccctgagc

SEQ ID NO: 955341 - DNA, 25 bp, Homo sapien
cttccctgagccatctcactgccat

SEQ ID NO: 955342 - DNA, 25 bp, Homo sapien
cagggcctcctcggccccttccctg

SEQ ID NO: 955343 - DNA, 25 bp, Homo sapien
gagggacgaacagcggagtatttac

SEQ ID NO: 955344 - DNA, 25 bp, Homo sapien
ccccatcgagaggagagagaaccct

SEQ ID NO: 955345 - DNA, 25 bp, Homo sapien
gtgtttgcaacacccccatcgagag

SEQ ID NO: 955346 - DNA, 25 bp, Homo sapien
gctggctgccgagggtttgagggac

SEQ ID NO: 955347 - DNA, 25 bp, Homo sapien
ctggtgtcacgacgcgagaggtgga

SEQ ID NO: 955348 - DNA, 25 bp, Homo sapien
taggagcgacggtcgaggtctggcg

SEQ ID NO: 955349 - DNA, 25 bp, Homo sapien
gggcggctagctcgctccggcttca

SEQ ID NO: 955350 - DNA, 25 bp, Homo sapien
agatcgggacgcgtccgcctcggct

SEQ ID NO: 955351 - DNA, 25 bp, Homo sapien
gataaagattcaagagccgaccagg

SEQ ID NO: 955352 - DNA, 25 bp, Homo sapien
gaaaaagggtagtcccagcgtctga

SEQ ID NO: 955353 - DNA, 25 bp, Homo sapien
cccgcgttgctgagtggaatagaaa

SEQ ID NO: 955354 - DNA, 25 bp, Homo sapien
caaggacggcgtgaacctgagtgca

SEQ ID NO: 955355 - DNA, 25 bp, Homo sapien
ctgcagcctttaactgcgtcagcca

SEQ ID NO: 955356 - DNA, 25 bp, Homo sapien
tgcagcctttaactgcgtcagccat

SEQ ID NO: 955357 - DNA, 25 bp, Homo sapien
tctgcagcctttaactgcgtcagcc

SEQ ID NO: 955358 - DNA, 25 bp, Homo sapien
ctctgcagcctttaactgcgtcagc

SEQ ID NO: 955359 - DNA, 25 bp, Homo sapien
actttgggggatcgcagtctccgcc

SEQ ID NO: 955360 - DNA, 25 bp, Homo sapien
tgccttgcccgcgtccgcgcacgtc

SEQ ID NO: 955361 - DNA, 25 bp, Homo sapien
cctggcgcccccgtgtgttactttg

SEQ ID NO: 955362 - DNA, 25 bp, Homo sapien
gaaaaccaccttgtgctgccttgcc

SEQ ID NO: 955363 - DNA, 25 bp, Homo sapien
caaaaccagagctgcggaaagtggc

SEQ ID NO: 955364 - DNA, 25 bp, Homo sapien
gcggaaagtggcgaagcggcggctg

SEQ ID NO: 955365 - DNA, 25 bp, Homo sapien
tattgtcatacaatcgtggtcaccg

SEQ ID NO: 955366 - DNA, 25 bp, Homo sapien
gagagcagcacagtagcaaaaccag

SEQ ID NO: 955367 - DNA, 25 bp, Homo sapien
accttgtccacattcttccacctgc

SEQ ID NO: 955368 - DNA, 25 bp, Homo sapien
acattcttccacctgctggtgtcca

SEQ ID NO: 955369 - DNA, 25 bp, Homo sapien
ccccaccttgtccacattcttccac

SEQ ID NO: 955370 - DNA, 25 bp, Homo sapien
cacctgctggtgtccacctctgccc

SEQ ID NO: 955371 - DNA, 25 bp, Homo sapien
aaaccccagtgagagaggcaggctc

SEQ ID NO: 955372 - DNA, 25 bp, Homo sapien
gacacccgggttctattcgctggga

SEQ ID NO: 955373 - DNA, 25 bp, Homo sapien
aattccagttgcactagaaggcggc

SEQ ID NO: 955374 - DNA, 25 bp, Homo sapien
tgttaagcgtcgtagagatccagcg

SEQ ID NO: 955375 - DNA, 25 bp, Homo sapien
tcccaggagacgcagcgtcggaaat

SEQ ID NO: 955376 - DNA, 25 bp, Homo sapien
gctagaggcaagatagtaagggcaa

SEQ ID NO: 955377 - DNA, 25 bp, Homo sapien
ctgcgccggtaagggcaggagggca

SEQ ID NO: 955378 - DNA, 25 bp, Homo sapien
tccgcaagttcaggtcagggagtgg

SEQ ID NO: 955379 - DNA, 25 bp, Homo sapien
gcaggttgctttcgctaggccggta

SEQ ID NO: 955380 - DNA, 25 bp, Homo sapien
gatgttgagatagcgccaagtgccg

SEQ ID NO: 955381 - DNA, 25 bp, Homo sapien
cgtcgctaccgaaggcgtcgatgtt

SEQ ID NO: 955382 - DNA, 25 bp, Homo sapien
cgttgaatcggaccaaaaggatgcc

SEQ ID NO: 955383 - DNA, 25 bp, Homo sapien
gcgcctctcggcaggcatcttcact

SEQ ID NO: 955384 - DNA, 25 bp, Homo sapien
ggagcgaccgtgagggctccgggcc

SEQ ID NO: 955385 - DNA, 25 bp, Homo sapien
agcccggcgcctctcggcaggcatc

SEQ ID NO: 955386 - DNA, 25 bp, Homo sapien
cggggggcacgagtgagcgcgggga

SEQ ID NO: 955387 - DNA, 25 bp, Homo sapien
gcgtcgatcacgttcaccgactcca

SEQ ID NO: 955388 - DNA, 25 bp, Homo sapien
ggtgattaggcggtatttcttcagc

SEQ ID NO: 955389 - DNA, 25 bp, Homo sapien
ctgcgagcagaagcgctgcagcagc

SEQ ID NO: 955390 - DNA, 25 bp, Homo sapien
cccgggtgctgtctcttgaccagct

SEQ ID NO: 955391 - DNA, 25 bp, Homo sapien
gtgtgtcaagttccggaccgctcac

SEQ ID NO: 955392 - DNA, 25 bp, Homo sapien
ggttacaggagttagccgacgcgcc

SEQ ID NO: 955393 - DNA, 25 bp, Homo sapien
acccccaagacttcctagtagctgg

SEQ ID NO: 955394 - DNA, 25 bp, Homo sapien
cacgcacccctactctcggcttttt

SEQ ID NO: 955395 - DNA, 25 bp, Homo sapien
ctaagatccacgcacccgcaggtgg

SEQ ID NO: 955396 - DNA, 25 bp, Homo sapien
tcgaactttcaaacgctcacctgtc

SEQ ID NO: 955397 - DNA, 25 bp, Homo sapien
tgacatagcccctggatccgcactg

SEQ ID NO: 955398 - DNA, 25 bp, Homo sapien
cccagaaattcctccggtggatcct

SEQ ID NO: 955399 - DNA, 25 bp, Homo sapien
cacgaagtccaatggctcggcctca

SEQ ID NO: 955400 - DNA, 25 bp, Homo sapien
ccagctgtggtagcggctaggaagg

SEQ ID NO: 955401 - DNA, 25 bp, Homo sapien
ttggccagcaccaccgtgcggtcgg

SEQ ID NO: 955402 - DNA, 25 bp, Homo sapien
gaaggtagtccaggccgccgtagat

SEQ ID NO: 955403 - DNA, 25 bp, Homo sapien
atctcgggcagtcttcttttccggc

SEQ ID NO: 955404 - DNA, 25 bp, Homo sapien
tcttttccggcttagggacctctga

SEQ ID NO: 955405 - DNA, 25 bp, Homo sapien
cttttccggcttagggacctctgag

SEQ ID NO: 955406 - DNA, 25 bp, Homo sapien
gcagtcttcttttccggcttaggga

SEQ ID NO: 955407 - DNA, 25 bp, Homo sapien
cccactcccaccacaccccacacac

SEQ ID NO: 955408 - DNA, 25 bp, Homo sapien
cgatgcccttgaggccgatggcttc

SEQ ID NO: 955409 - DNA, 25 bp, Homo sapien
tatcgatgcccttgaggccgatggc

SEQ ID NO: 955410 - DNA, 25 bp, Homo sapien
aatatcgatgcccttgaggccgatg

SEQ ID NO: 955411 - DNA, 25 bp, Homo sapien
ctgaaatatcgatgcccttgaggcc

SEQ ID NO: 955412 - DNA, 25 bp, Homo sapien
cgaaaaggacgggaatggaggcaga

SEQ ID NO: 955413 - DNA, 25 bp, Homo sapien
cagtcgccggagaggcggagacaaa

SEQ ID NO: 955414 - DNA, 25 bp, Homo sapien
gagcagacaaaagcggacaggagat

SEQ ID NO: 955415 - DNA, 25 bp, Homo sapien
acaaagcgcccaaagatgagagcga

SEQ ID NO: 955416 - DNA, 25 bp, Homo sapien
ccgagatgccgcaaagccaagcggg

SEQ ID NO: 955417 - DNA, 25 bp, Homo sapien
caagagtcaaaggaggatgacgcgc

SEQ ID NO: 955418 - DNA, 25 bp, Homo sapien
tgtcggagcccgactctaacgtcgg

SEQ ID NO: 955419 - DNA, 25 bp, Homo sapien
ccccggtgccaagagagaggtccct

SEQ ID NO: 955420 - DNA, 25 bp, Homo sapien
taatcaggcaaactgatcccattgg

SEQ ID NO: 955421 - DNA, 25 bp, Homo sapien
ggatgtgccaatgcaataagaagga

SEQ ID NO: 955422 - DNA, 25 bp, Homo sapien
tccgaggtgataacttcataatcag

SEQ ID NO: 955423 - DNA, 25 bp, Homo sapien
ggtcatgttcctggaatcccacata

SEQ ID NO: 955424 - DNA, 25 bp, Homo sapien
tgcctggccatgttcacttccagaa

SEQ ID NO: 955425 - DNA, 25 bp, Homo sapien
cccaatctaaggcagcagctttgta

SEQ ID NO: 955426 - DNA, 25 bp, Homo sapien
tcagggtcctgatacccaatctaag

SEQ ID NO: 955427 - DNA, 25 bp, Homo sapien
ccagcctactacagctttaacagtc

SEQ ID NO: 955428 - DNA, 25 bp, Homo sapien
taatttttgtagaaatgaagtctca

SEQ ID NO: 955429 - DNA, 25 bp, Homo sapien
tgcccggctaattaacaacattatt

SEQ ID NO: 955430 - DNA, 25 bp, Homo sapien
agtctcactgtgttgcccaggctgg

SEQ ID NO: 955431 - DNA, 25 bp, Homo sapien
catgcccggctaattaacaacatta

SEQ ID NO: 955432 - DNA, 25 bp, Homo sapien
ggctcagcgaaaggccgcggccagg

SEQ ID NO: 955433 - DNA, 25 bp, Homo sapien
tggaggtctcagtgccttgggctca

SEQ ID NO: 955434 - DNA, 25 bp, Homo sapien
ggctcaggggctcagcgaaaggccg

SEQ ID NO: 955435 - DNA, 25 bp, Homo sapien
aggggctcagcgaaaggccgcggcc

SEQ ID NO: 955436 - DNA, 25 bp, Homo sapien
gatgaaggtgaggcaggtggaagcg

SEQ ID NO: 955437 - DNA, 25 bp, Homo sapien
aaggtgaggcaggtggaagcgggga

SEQ ID NO: 955438 - DNA, 25 bp, Homo sapien
tgaaggtgaggcaggtggaagcggg

SEQ ID NO: 955439 - DNA, 25 bp, Homo sapien
ctagatgaaggtgaggcaggtggaa

SEQ ID NO: 955440 - DNA, 25 bp, Homo sapien
gctccagggccgtcatgtagagggc

SEQ ID NO: 955441 - DNA, 25 bp, Homo sapien
gcgtgatagtgattgacttcctcct

SEQ ID NO: 955442 - DNA, 25 bp, Homo sapien
ccgtcatgtagagggcgtgatagtg

SEQ ID NO: 955443 - DNA, 25 bp, Homo sapien
tagagggcgtgatagtgattgactt

SEQ ID NO: 955444 - DNA, 25 bp, Homo sapien
tctccccaaaggagtacacgggcac

SEQ ID NO: 955445 - DNA, 25 bp, Homo sapien
aagagaccgcgaccccagaagatgc

SEQ ID NO: 955446 - DNA, 25 bp, Homo sapien
tgaaggtgagctggcaccaatgctg

SEQ ID NO: 955447 - DNA, 25 bp, Homo sapien
caaaagccttaagtctaaagatgtc

SEQ ID NO: 955448 - DNA, 25 bp, Homo sapien
gctctggcggctcaccggacagagt

SEQ ID NO: 955449 - DNA, 25 bp, Homo sapien
ctttgcgcttctggagcgtaaggca

SEQ ID NO: 955450 - DNA, 25 bp, Homo sapien
cagcgccaggcgcacgaagcctttg

SEQ ID NO: 955451 - DNA, 25 bp, Homo sapien
ggactgaatacagggcctcgtgcgc

SEQ ID NO: 955452 - DNA, 25 bp, Homo sapien
cagaggaagcctgtacacatgatcc

SEQ ID NO: 955453 - DNA, 25 bp, Homo sapien
gcccagcacgtagttccgatccggg

SEQ ID NO: 955454 - DNA, 25 bp, Homo sapien
gacatgatgtagtcgcgatagaccg

SEQ ID NO: 955455 - DNA, 25 bp, Homo sapien
catgatcccatgagggtgggcgccc

SEQ ID NO: 955456 - DNA, 25 bp, Homo sapien
gggaggatggaaggcaagacaccgg

SEQ ID NO: 955457 - DNA, 25 bp, Homo sapien
tgagcaggatgaagggaggatggaa

SEQ ID NO: 955458 - DNA, 25 bp, Homo sapien
cttcggggtgttgagcaggatgaag

SEQ ID NO: 955459 - DNA, 25 bp, Homo sapien
aagggaggatggaaggcaagacacc

SEQ ID NO: 955460 - DNA, 25 bp, Homo sapien
cttgacaggataataatcccttagt

SEQ ID NO: 955461 - DNA, 25 bp, Homo sapien
taataatcccttagttgtctccaaa

SEQ ID NO: 955462 - DNA, 25 bp, Homo sapien
caaattgcccggttccttatccact

SEQ ID NO: 955463 - DNA, 25 bp, Homo sapien
cttatccactccgaacgccttccac

SEQ ID NO: 955464 - DNA, 25 bp, Homo sapien
ctcaccccccatgtccccaccatct

SEQ ID NO: 955465 - DNA, 25 bp, Homo sapien
ccctcaccccccatgtccccaccat

SEQ ID NO: 955466 - DNA, 25 bp, Homo sapien
ccccccatgtccccaccatctctgg

SEQ ID NO: 955467 - DNA, 25 bp, Homo sapien
ccccatgtccccaccatctctggct

SEQ ID NO: 955468 - DNA, 25 bp, Homo sapien
gggtgtgtcccagtccacatagagc

SEQ ID NO: 955469 - DNA, 25 bp, Homo sapien
cttggttgggtgtgtcccagtccac

SEQ ID NO: 955470 - DNA, 25 bp, Homo sapien
ccacatagagccacaccaagtaaaa

SEQ ID NO: 955471 - DNA, 25 bp, Homo sapien
ggttgggtgtgtcccagtccacata

SEQ ID NO: 955472 - DNA, 25 bp, Homo sapien
aagaggaaagtgagcacatattggt

SEQ ID NO: 955473 - DNA, 25 bp, Homo sapien
ggaaagtgagcacatattggtaggc

SEQ ID NO: 955474 - DNA, 25 bp, Homo sapien
agtgagcacatattggtaggcgccc

SEQ ID NO: 955475 - DNA, 25 bp, Homo sapien
cacatattggtaggcgcccactgct

SEQ ID NO: 955476 - DNA, 25 bp, Homo sapien
ctgcaaggttttggaagtggttggg

SEQ ID NO: 955477 - DNA, 25 bp, Homo sapien
ccggaggacaaacgatgaaggcttg

SEQ ID NO: 955478 - DNA, 25 bp, Homo sapien
cccagaacccggaggacaaacgatg

SEQ ID NO: 955479 - DNA, 25 bp, Homo sapien
ttggatgtggacctgggcagacttt

SEQ ID NO: 955480 - DNA, 25 bp, Homo sapien
ggatgtggacctgggcagactttct

SEQ ID NO: 955481 - DNA, 25 bp, Homo sapien
aaatcacctcccagagtagcgtgtg

SEQ ID NO: 955482 - DNA, 25 bp, Homo sapien
gcctggctaagtcgcaaatcacctc

SEQ ID NO: 955483 - DNA, 25 bp, Homo sapien
cccagagtagcgtgtgtccgtaggt

SEQ ID NO: 955484 - DNA, 25 bp, Homo sapien
gggcctggctaagtcgcaaatcacc

SEQ ID NO: 955485 - DNA, 25 bp, Homo sapien
cggtggggcgcgcctccgtgaggac

SEQ ID NO: 955486 - DNA, 25 bp, Homo sapien
gcggtggggcgcgcctccgtgagga

SEQ ID NO: 955487 - DNA, 25 bp, Homo sapien
cacgtagcgcgcttgcagcgtgtcc

SEQ ID NO: 955488 - DNA, 25 bp, Homo sapien
tcctcgaagagctgcgtgagtcgcc

SEQ ID NO: 955489 - DNA, 25 bp, Homo sapien
atagcgcgcctggtgctcctcgaag

SEQ ID NO: 955490 - DNA, 25 bp, Homo sapien
ggctctgctgcacgggaatcgccga

SEQ ID NO: 955491 - DNA, 25 bp, Homo sapien
gacgcagagcctcctgcgtcctctg

SEQ ID NO: 955492 - DNA, 25 bp, Homo sapien
ctacggtgcggatgggcgcgcggaa

SEQ ID NO: 955493 - DNA, 25 bp, Homo sapien
ggccacgcttagcagcggacgcaga

SEQ ID NO: 955494 - DNA, 25 bp, Homo sapien
tgcagggccacgcttagcagcggac

SEQ ID NO: 955495 - DNA, 25 bp, Homo sapien
ctctgcgggttcgggaactgctgga

SEQ ID NO: 955496 - DNA, 25 bp, Homo sapien
tctgcgggttcgggaactgctggaa

SEQ ID NO: 955497 - DNA, 25 bp, Homo sapien
ctgcgggttcgggaactgctggaag

SEQ ID NO: 955498 - DNA, 25 bp, Homo sapien
cagcggggccttgacaaaggagacc

SEQ ID NO: 955499 - DNA, 25 bp, Homo sapien
ccgagttccagagctgacttaacca

SEQ ID NO: 955500 - DNA, 25 bp, Homo sapien
tccgaatcggcaagctcagttgtcc

SEQ ID NO: 955501 - DNA, 25 bp, Homo sapien
tcagttgtccgggttttgcctccag

SEQ ID NO: 955502 - DNA, 25 bp, Homo sapien
gctctgtgcagaagttggcgaaggc

SEQ ID NO: 955503 - DNA, 25 bp, Homo sapien
gttggcgaaggctcccacgaccagg

SEQ ID NO: 955504 - DNA, 25 bp, Homo sapien
agatggaaccaacaaggcagcatga

SEQ ID NO: 955505 - DNA, 25 bp, Homo sapien
caacaaggcagcatgagcaggtgtg

SEQ ID NO: 955506 - DNA, 25 bp, Homo sapien
caaagaggtagttccaggaggtgcc

SEQ ID NO: 955507 - DNA, 25 bp, Homo sapien
ggaggtgcccaactttgcagtttta

SEQ ID NO: 955508 - DNA, 25 bp, Homo sapien
ccaggaggtgcccaactttgcagtt

SEQ ID NO: 955509 - DNA, 25 bp, Homo sapien
aagaggtagttccaggaggtgccca

SEQ ID NO: 955510 - DNA, 25 bp, Homo sapien
ttaagaccattcagttgttgctcct

SEQ ID NO: 955511 - DNA, 25 bp, Homo sapien
aagaccattcagttgttgctcctac

SEQ ID NO: 955512 - DNA, 25 bp, Homo sapien
taagaccattcagttgttgctccta

SEQ ID NO: 955513 - DNA, 25 bp, Homo sapien
tcttctgtggcaggctgaatgctcc

SEQ ID NO: 955514 - DNA, 25 bp, Homo sapien
ccatccagtggcctgagtggtggga

SEQ ID NO: 955515 - DNA, 25 bp, Homo sapien
ttctgtggcaggctgaatgctccag

SEQ ID NO: 955516 - DNA, 25 bp, Homo sapien
agtcttctgtggcaggctgaatgct

SEQ ID NO: 955517 - DNA, 25 bp, Homo sapien
ccagtctgcaacctcaggttgagta

SEQ ID NO: 955518 - DNA, 25 bp, Homo sapien
tgaactcaggagccggagcagtcca

SEQ ID NO: 955519 - DNA, 25 bp, Homo sapien
ctgcacgccttcagaccagtctgca

SEQ ID NO: 955520 - DNA, 25 bp, Homo sapien
cctcaggttgagtagcagtgaactc

SEQ ID NO: 955521 - DNA, 25 bp, Homo sapien
cttctttttcaatgtcttcatgatc

SEQ ID NO: 955522 - DNA, 25 bp, Homo sapien
ttctttttcaatgtcttcatgatct

SEQ ID NO: 955523 - DNA, 25 bp, Homo sapien
ctcttctttttcaatgtcttcatga

SEQ ID NO: 955524 - DNA, 25 bp, Homo sapien
tgctcttctttttcaatgtcttcat

SEQ ID NO: 955525 - DNA, 25 bp, Homo sapien
aaatggtgccacgcatgcgcagaac

SEQ ID NO: 955526 - DNA, 25 bp, Homo sapien
gaaatggtgccacgcatgcgcagaa

SEQ ID NO: 955527 - DNA, 25 bp, Homo sapien
cacgggtgttcacaggaaatggtgc

SEQ ID NO: 955528 - DNA, 25 bp, Homo sapien
gacctcccacgggtgttcacaggaa

SEQ ID NO: 955529 - DNA, 25 bp, Homo sapien
ccagcatccaccacatcagacccac

SEQ ID NO: 955530 - DNA, 25 bp, Homo sapien
cgagccagcatccaccacatcagac

SEQ ID NO: 955531 - DNA, 25 bp, Homo sapien
ttcccgagccagcatccaccacatc

SEQ ID NO: 955532 - DNA, 25 bp, Homo sapien
ccgagccagcatccaccacatcaga

SEQ ID NO: 955533 - DNA, 25 bp, Homo sapien
tcccttgttgttgcttgggatggca

SEQ ID NO: 955534 - DNA, 25 bp, Homo sapien
tgttgttgcttgggatggcaatgtc

SEQ ID NO: 955535 - DNA, 25 bp, Homo sapien
tggcaatgtccacatggcgcagagg

SEQ ID NO: 955536 - DNA, 25 bp, Homo sapien
cttgggatggcaatgtccacatggc

SEQ ID NO: 955537 - DNA, 25 bp, Homo sapien
tggccagtatttctggagggtatga

SEQ ID NO: 955538 - DNA, 25 bp, Homo sapien
gccagtatttctggagggtatgaca

SEQ ID NO: 955539 - DNA, 25 bp, Homo sapien
agtatttctggagggtatgacactg

SEQ ID NO: 955540 - DNA, 25 bp, Homo sapien
ctctgtgagaggctgctgatcagcc

SEQ ID NO: 955541 - DNA, 25 bp, Homo sapien
aaattaaggacatcttcctccttca

SEQ ID NO: 955542 - DNA, 25 bp, Homo sapien
gctgcaaggaaattaaggacatctt

SEQ ID NO: 955543 - DNA, 25 bp, Homo sapien
tcaaggttggtgccacctaattggt

SEQ ID NO: 955544 - DNA, 25 bp, Homo sapien
caaggttggtgccacctaattggtt

SEQ ID NO: 955545 - DNA, 25 bp, Homo sapien
ggcacgcggaacatgaactcaggaa

SEQ ID NO: 955546 - DNA, 25 bp, Homo sapien
gaacattaataatttatcacgcggg

SEQ ID NO: 955547 - DNA, 25 bp, Homo sapien
actccgggagcttcctgagagggcc

SEQ ID NO: 955548 - DNA, 25 bp, Homo sapien
gacatattcagttcaggcacgcgga

SEQ ID NO: 955549 - DNA, 25 bp, Homo sapien
catgatgtagcgtgtgccccaggtc

SEQ ID NO: 955550 - DNA, 25 bp, Homo sapien
cctcgtggtagtgggtgaggcggcc

SEQ ID NO: 955551 - DNA, 25 bp, Homo sapien
ccaggtcgttggcagcccctcgtgg

SEQ ID NO: 955552 - DNA, 25 bp, Homo sapien
gatcacacagtcgtagcgcaggaag

SEQ ID NO: 955553 - DNA, 25 bp, Homo sapien
caagggagatggcagatatggcaga

SEQ ID NO: 955554 - DNA, 25 bp, Homo sapien
gggagatggcagatatggcagacac

SEQ ID NO: 955555 - DNA, 25 bp, Homo sapien
gatatggcagacaccggaggctggg

SEQ ID NO: 955556 - DNA, 25 bp, Homo sapien
atatggcagacaccggaggctgggg

SEQ ID NO: 955557 - DNA, 25 bp, Homo sapien
ggccggtagcgaaccacaaagttca

SEQ ID NO: 955558 - DNA, 25 bp, Homo sapien
tggatgagtcgtggtgtggccgcag

SEQ ID NO: 955559 - DNA, 25 bp, Homo sapien
tgtggttgagggcaacgttgagggt

SEQ ID NO: 955560 - DNA, 25 bp, Homo sapien
tggccgcagagacggctgctcgtct

SEQ ID NO: 955561 - DNA, 25 bp, Homo sapien
ctggcattaaattagggccaagcct

SEQ ID NO: 955562 - DNA, 25 bp, Homo sapien
gcggcgggacccctgcgtaggaggc

SEQ ID NO: 955563 - DNA, 25 bp, Homo sapien
tggcattaaattagggccaagcctc

SEQ ID NO: 955564 - DNA, 25 bp, Homo sapien
tcctgcagcgtctcattcccctggg

SEQ ID NO: 955565 - DNA, 25 bp, Homo sapien
ctgcgtggagacttcctgtccggga

SEQ ID NO: 955566 - DNA, 25 bp, Homo sapien
aaaatgcatggagcccaaatgctgc

SEQ ID NO: 955567 - DNA, 25 bp, Homo sapien
ttcccctgggaactaaaatgcatgg

SEQ ID NO: 955568 - DNA, 25 bp, Homo sapien
ggcagctggcaggtgggcagcgcac

SEQ ID NO: 955569 - DNA, 25 bp, Homo sapien
gggaaggtggggaggcagctggcag

SEQ ID NO: 955570 - DNA, 25 bp, Homo sapien
aaggtggggaggcagctggcaggtg

SEQ ID NO: 955571 - DNA, 25 bp, Homo sapien
aggcagctggcaggtgggcagcgca

SEQ ID NO: 955572 - DNA, 25 bp, Homo sapien
tgtggtaaccgggaaacaggctctc

SEQ ID NO: 955573 - DNA, 25 bp, Homo sapien
ctgcttcatgtggatgtccacggtg

SEQ ID NO: 955574 - DNA, 25 bp, Homo sapien
cacggtgggcacattctcgtagcct

SEQ ID NO: 955575 - DNA, 25 bp, Homo sapien
atggggcccacatacgtccgcagca

SEQ ID NO: 955576 - DNA, 25 bp, Homo sapien
gaatgcagttgtgaccccagggtct

SEQ ID NO: 955577 - DNA, 25 bp, Homo sapien
atgaatgcagttgtgaccccagggt

SEQ ID NO: 955578 - DNA, 25 bp, Homo sapien
cctgattccattgtttgtttaccag

SEQ ID NO: 955579 - DNA, 25 bp, Homo sapien
attccattgtttgtttaccagatcc

SEQ ID NO: 955580 - DNA, 25 bp, Homo sapien
actggccgtagtgctccatctctgc

SEQ ID NO: 955581 - DNA, 25 bp, Homo sapien
agcagtgggaaccagtacacgtccg

SEQ ID NO: 955582 - DNA, 25 bp, Homo sapien
tgggaaccagtacacgtccgggcat

SEQ ID NO: 955583 - DNA, 25 bp, Homo sapien
ggaaccagtacacgtccgggcatgg

SEQ ID NO: 955584 - DNA, 25 bp, Homo sapien
ctgctccacgattccttccccttcc

SEQ ID NO: 955585 - DNA, 25 bp, Homo sapien
agggcccggctgtagttctcgtgga

SEQ ID NO: 955586 - DNA, 25 bp, Homo sapien
gcccggctgtagttctcgtggatgt

SEQ ID NO: 955587 - DNA, 25 bp, Homo sapien
ccagggcccggctgtagttctcgtg

SEQ ID NO: 955588 - DNA, 25 bp, Homo sapien
cactcagtgtcctgcgctggcagca

SEQ ID NO: 955589 - DNA, 25 bp, Homo sapien
ggtgtcttccttagcacaaggcggg

SEQ ID NO: 955590 - DNA, 25 bp, Homo sapien
tggggggcacatcagatctgtgccc

SEQ ID NO: 955591 - DNA, 25 bp, Homo sapien
ttggtgtcttccttagcacaaggcg

SEQ ID NO: 955592 - DNA, 25 bp, Homo sapien
tccgtgtcgtatctggaagtggcca

SEQ ID NO: 955593 - DNA, 25 bp, Homo sapien
ggttgtcgaagatctgccagaggtc

SEQ ID NO: 955594 - DNA, 25 bp, Homo sapien
ccaggagccggccaaattcatgctg

SEQ ID NO: 955595 - DNA, 25 bp, Homo sapien
tcatgctgattgctcagatggagga

SEQ ID NO: 955596 - DNA, 25 bp, Homo sapien
gggggtgtccgtgatgcaggcgatg

SEQ ID NO: 955597 - DNA, 25 bp, Homo sapien
aggccagaccgtgcacccgcgctca

SEQ ID NO: 955598 - DNA, 25 bp, Homo sapien
ggggtgggggtgtccgtgatgcagg

SEQ ID NO: 955599 - DNA, 25 bp, Homo sapien
caggccagaccgtgcacccgcgctc

SEQ ID NO: 955600 - DNA, 25 bp, Homo sapien
taggcctgggagatgtatggtacat

SEQ ID NO: 955601 - DNA, 25 bp, Homo sapien
gtatcaccccggatcacataggcct

SEQ ID NO: 955602 - DNA, 25 bp, Homo sapien
gtctgtgtcactgcccgagaacaca

SEQ ID NO: 955603 - DNA, 25 bp, Homo sapien
cttacagaaggccatgtccgggtct

SEQ ID NO: 955604 - DNA, 25 bp, Homo sapien
aaatgcggtcagttcctaccccaag

SEQ ID NO: 955605 - DNA, 25 bp, Homo sapien
agctcatcccgggaagtccttcttc

SEQ ID NO: 955606 - DNA, 25 bp, Homo sapien
catgtcccttgtcaagcactgctgg

SEQ ID NO: 955607 - DNA, 25 bp, Homo sapien
agtccctgaacataaggcccctgca

SEQ ID NO: 955608 - DNA, 25 bp, Homo sapien
gggctcagggcgccccagaagttgg

SEQ ID NO: 955609 - DNA, 25 bp, Homo sapien
ctgcaccagctccacgtagtcctcg

SEQ ID NO: 955610 - DNA, 25 bp, Homo sapien
agttggaccacagcttgccgtggcg

SEQ ID NO: 955611 - DNA, 25 bp, Homo sapien
cgggcgtagtactcatcggggctca

SEQ ID NO: 955612 - DNA, 25 bp, Homo sapien
ggctgaagtagaactcacactcggg

SEQ ID NO: 955613 - DNA, 25 bp, Homo sapien
ggttggtgaggacagcgtcggcgtc

SEQ ID NO: 955614 - DNA, 25 bp, Homo sapien
tcaatgaggatacgcagggtctgca

SEQ ID NO: 955615 - DNA, 25 bp, Homo sapien
tgttctcctcaatgaggatacgcag

SEQ ID NO: 955616 - DNA, 25 bp, Homo sapien
ccggccccacgagcttcacagctga

SEQ ID NO: 955617 - DNA, 25 bp, Homo sapien
cggccaggagtcagcgatgtggggt

SEQ ID NO: 955618 - DNA, 25 bp, Homo sapien
cgatgtggggttcatggaagacctc

SEQ ID NO: 955619 - DNA, 25 bp, Homo sapien
cggccccacgagcttcacagctgag

SEQ ID NO: 955620 - DNA, 25 bp, Homo sapien
cacaaacacggccagaaacacccgg

SEQ ID NO: 955621 - DNA, 25 bp, Homo sapien
gttgttgtgcaggaaaagggtgacc

SEQ ID NO: 955622 - DNA, 25 bp, Homo sapien
caggaagcggggcagaaacggagta

SEQ ID NO: 955623 - DNA, 25 bp, Homo sapien
aacggagtaggctgttccacaaaca

SEQ ID NO: 955624 - DNA, 25 bp, Homo sapien
cgggagtgtcctccggtcctggttg

SEQ ID NO: 955625 - DNA, 25 bp, Homo sapien
agtgtcctccggtcctggttgcaga

SEQ ID NO: 955626 - DNA, 25 bp, Homo sapien
ctccctcaggagtccagccattggg

SEQ ID NO: 955627 - DNA, 25 bp, Homo sapien
gacgtagtttcccaggtagttgagc

SEQ ID NO: 955628 - DNA, 25 bp, Homo sapien
gcacacggttccgatcaaactttaa

SEQ ID NO: 955629 - DNA, 25 bp, Homo sapien
gggaccgtttccatggaccacaatg

SEQ ID NO: 955630 - DNA, 25 bp, Homo sapien
ttagtgggaccgtttccatggacca

SEQ ID NO: 955631 - DNA, 25 bp, Homo sapien
cgtgtcgtaggccacgttccggata

SEQ ID NO: 955632 - DNA, 25 bp, Homo sapien
agtctcactcccaacacgcaggctg

SEQ ID NO: 955633 - DNA, 25 bp, Homo sapien
ttttgttttttatgctgagatggag

SEQ ID NO: 955634 - DNA, 25 bp, Homo sapien
agcctttcaggtagctgagactatg

SEQ ID NO: 955635 - DNA, 25 bp, Homo sapien
atggagtctcactcccaacacgcag

SEQ ID NO: 955636 - DNA, 25 bp, Homo sapien
gatccagattaaggctgagtttctc

SEQ ID NO: 955637 - DNA, 25 bp, Homo sapien
aagccccgttgaggttctgaaagat

SEQ ID NO: 955638 - DNA, 25 bp, Homo sapien
cgagacttatgatccagattaaggc

SEQ ID NO: 955639 - DNA, 25 bp, Homo sapien
ggttctgaaagatccgagacttatg

SEQ ID NO: 955640 - DNA, 25 bp, Homo sapien
aatgcagtggtgcaaaacatcctca

SEQ ID NO: 955641 - DNA, 25 bp, Homo sapien
gcagtggtgcaaaacatcctcaaac

SEQ ID NO: 955642 - DNA, 25 bp, Homo sapien
ccggtttaattgattctcttgcttc

SEQ ID NO: 955643 - DNA, 25 bp, Homo sapien
cctcccggtttaattgattctcttg

SEQ ID NO: 955644 - DNA, 25 bp, Homo sapien
ccactggcgcacgatttggtggatg

SEQ ID NO: 955645 - DNA, 25 bp, Homo sapien
cgtcatcatccttgtacttccactg

SEQ ID NO: 955646 - DNA, 25 bp, Homo sapien
gaacagctggtcgtcgtcatcatcc

SEQ ID NO: 955647 - DNA, 25 bp, Homo sapien
cctgggtccaggtagagccgtgtgt

SEQ ID NO: 955648 - DNA, 25 bp, Homo sapien
ggcccctctgccttgggcactctgc

SEQ ID NO: 955649 - DNA, 25 bp, Homo sapien
ctgccttgggcactctgccactcac

SEQ ID NO: 955650 - DNA, 25 bp, Homo sapien
ctcttggcccctctgccttgggcac

SEQ ID NO: 955651 - DNA, 25 bp, Homo sapien
ctctgccttgggcactctgccactc

SEQ ID NO: 955652 - DNA, 25 bp, Homo sapien
cactctggacgaacttcttcagcag

SEQ ID NO: 955653 - DNA, 25 bp, Homo sapien
cagaattgaggaagcgcttccccgt

SEQ ID NO: 955654 - DNA, 25 bp, Homo sapien
aggcggctgccactctggacgaact

SEQ ID NO: 955655 - DNA, 25 bp, Homo sapien
ggctgccggccagaatcacgtcgta

SEQ ID NO: 955656 - DNA, 25 bp, Homo sapien
tcccggtcagcgtatttctccattt

SEQ ID NO: 955657 - DNA, 25 bp, Homo sapien
gatgatcatatcctcccggtcagcg

SEQ ID NO: 955658 - DNA, 25 bp, Homo sapien
caaacatgatgatcatatcctcccg

SEQ ID NO: 955659 - DNA, 25 bp, Homo sapien
tctgtcctccaccaactgttcgagc

SEQ ID NO: 955660 - DNA, 25 bp, Homo sapien
acgcaggtacccctcggtttcagct

SEQ ID NO: 955661 - DNA, 25 bp, Homo sapien
gagcgcaggaaacgcaggtacccct

SEQ ID NO: 955662 - DNA, 25 bp, Homo sapien
gtacccctcggtttcagctgtggcc

SEQ ID NO: 955663 - DNA, 25 bp, Homo sapien
aagaactccgcagagcgcaggaaac

SEQ ID NO: 955664 - DNA, 25 bp, Homo sapien
cggggccggtcggaggctgaggccg

SEQ ID NO: 955665 - DNA, 25 bp, Homo sapien
gcagcagcaggaaccggggtccagg

SEQ ID NO: 955666 - DNA, 25 bp, Homo sapien
tctgcagagggccactaggaacctc

SEQ ID NO: 955667 - DNA, 25 bp, Homo sapien
gaagccagccactttctttgacagt

SEQ ID NO: 955668 - DNA, 25 bp, Homo sapien
aaaaaggcgtatccggaggctacag

SEQ ID NO: 955669 - DNA, 25 bp, Homo sapien
gccagccgcttgacacatgtggaag

SEQ ID NO: 955670 - DNA, 25 bp, Homo sapien
cccagggtcagaagatgagggatcc

SEQ ID NO: 955671 - DNA, 25 bp, Homo sapien
tggccggcccctgaggttactatag

SEQ ID NO: 955672 - DNA, 25 bp, Homo sapien
tttatacacaatacaaacgtgcggg

SEQ ID NO: 955673 - DNA, 25 bp, Homo sapien
gatatgcgacttcccaagagcagtt

SEQ ID NO: 955674 - DNA, 25 bp, Homo sapien
cgccttcttggtccgaggtggcgac

SEQ ID NO: 955675 - DNA, 25 bp, Homo sapien
gccaaagctgctgtcgccttcttgg

SEQ ID NO: 955676 - DNA, 25 bp, Homo sapien
gtttctgccgtatttgccaaagctg

SEQ ID NO: 955677 - DNA, 25 bp, Homo sapien
acgggcatcacggacactggagcct

SEQ ID NO: 955678 - DNA, 25 bp, Homo sapien
gcggctgggtcctcgtcagagccgc

SEQ ID NO: 955679 - DNA, 25 bp, Homo sapien
gctgggtcctcgtcagagccgcagc

SEQ ID NO: 955680 - DNA, 25 bp, Homo sapien
cggctgggtcctcgtcagagccgca

SEQ ID NO: 955681 - DNA, 25 bp, Homo sapien
gggtcctcgtcagagccgcagcagc

SEQ ID NO: 955682 - DNA, 25 bp, Homo sapien
gtagagggcggggcccagctcgtac

SEQ ID NO: 955683 - DNA, 25 bp, Homo sapien
aggatggagatcagtgaggcgctcc

SEQ ID NO: 955684 - DNA, 25 bp, Homo sapien
ggtagagggcggggcccagctcgta

SEQ ID NO: 955685 - DNA, 25 bp, Homo sapien
aggtagagggcggggcccagctcgt

SEQ ID NO: 955686 - DNA, 25 bp, Homo sapien
gatgttgaaggcgtaccaggagatg

SEQ ID NO: 955687 - DNA, 25 bp, Homo sapien
cccgggtgatgttgaaggcgtacca

SEQ ID NO: 955688 - DNA, 25 bp, Homo sapien
tgaaggcgtaccaggagatggccac

SEQ ID NO: 955689 - DNA, 25 bp, Homo sapien
tcccgggtgatgttgaaggcgtacc

SEQ ID NO: 955690 - DNA, 25 bp, Homo sapien
gaggacgaccccagtccagtccagg

SEQ ID NO: 955691 - DNA, 25 bp, Homo sapien
ccagtccagggggagggatagtggg

SEQ ID NO: 955692 - DNA, 25 bp, Homo sapien
cagtccagtccagggggagggatag

SEQ ID NO: 955693 - DNA, 25 bp, Homo sapien
cggaggacgaccccagtccagtcca

SEQ ID NO: 955694 - DNA, 25 bp, Homo sapien
ttctgcaaattgaaaagcaatggcc

SEQ ID NO: 955695 - DNA, 25 bp, Homo sapien
gagtccagggtcgtcctttcctgaa

SEQ ID NO: 955696 - DNA, 25 bp, Homo sapien
tcaaaggcttattgtgaggcaatgg

SEQ ID NO: 955697 - DNA, 25 bp, Homo sapien
tggaaaacaagcaatacccacccta

SEQ ID NO: 955698 - DNA, 25 bp, Homo sapien
tcaagaaacactgccgatgggctga

SEQ ID NO: 955699 - DNA, 25 bp, Homo sapien
tgtgtgcgccatagcgtgcacccta

SEQ ID NO: 955700 - DNA, 25 bp, Homo sapien
gcccctactgggagctcaagaaaca

SEQ ID NO: 955701 - DNA, 25 bp, Homo sapien
taggatgtaagctcccggaggcagc

SEQ ID NO: 955702 - DNA, 25 bp, Homo sapien
tatgcctagcaagaggccgaggaag

SEQ ID NO: 955703 - DNA, 25 bp, Homo sapien
cggccagaatgtggagggcccctgc

SEQ ID NO: 955704 - DNA, 25 bp, Homo sapien
gcaggcccgctatgcctagcaagag

SEQ ID NO: 955705 - DNA, 25 bp, Homo sapien
ccaatgttggtgcagcgcaggcccg

SEQ ID NO: 955706 - DNA, 25 bp, Homo sapien
cctctgcgacggagccagcccaaca

SEQ ID NO: 955707 - DNA, 25 bp, Homo sapien
tgggggtgggcacagttgtcagcct

SEQ ID NO: 955708 - DNA, 25 bp, Homo sapien
ccatctcccctctgcgacggagcca

SEQ ID NO: 955709 - DNA, 25 bp, Homo sapien
ctgcgacggagccagcccaacagcc

SEQ ID NO: 955710 - DNA, 25 bp, Homo sapien
tccccaggtggctctagcagtcaat

SEQ ID NO: 955711 - DNA, 25 bp, Homo sapien
cacacccggtggagtttctgaccta

SEQ ID NO: 955712 - DNA, 25 bp, Homo sapien
gacaatcattgtgcaaagtcgcccg

SEQ ID NO: 955713 - DNA, 25 bp, Homo sapien
gatccaggtcagtctagctcagtct

SEQ ID NO: 955714 - DNA, 25 bp, Homo sapien
ttacagcggacgctcaacctgcaac

SEQ ID NO: 955715 - DNA, 25 bp, Homo sapien
cacaggggccctttatagacatcag

SEQ ID NO: 955716 - DNA, 25 bp, Homo sapien
gacatcagccggacaaggagaccag

SEQ ID NO: 955717 - DNA, 25 bp, Homo sapien
ttgcaagacgcctcccttcacaggg

SEQ ID NO: 955718 - DNA, 25 bp, Homo sapien
tcaacctctaagaatccaagatggg

SEQ ID NO: 955719 - DNA, 25 bp, Homo sapien
gctcaaccgtactgagtgcctatgt

SEQ ID NO: 955720 - DNA, 25 bp, Homo sapien
taacatcacgctaacattctgcact

SEQ ID NO: 955721 - DNA, 25 bp, Homo sapien
ccctaaccctacaggtgggagatga

SEQ ID NO: 955722 - DNA, 25 bp, Homo sapien
ggccagcatggacgggaactcccag

SEQ ID NO: 955723 - DNA, 25 bp, Homo sapien
ggtggtgatgacgttcccgtgcaca

SEQ ID NO: 955724 - DNA, 25 bp, Homo sapien
agcagttgtagacgcccagggagtc

SEQ ID NO: 955725 - DNA, 25 bp, Homo sapien
tggacactcgccagtagctgtttgg

SEQ ID NO: 955726 - DNA, 25 bp, Homo sapien
gggctgcggctaaggagggttgtcc

SEQ ID NO: 955727 - DNA, 25 bp, Homo sapien
tcgggctcaggtccgtctccacttt

SEQ ID NO: 955728 - DNA, 25 bp, Homo sapien
tgcggctaaggagggttgtccaggc

SEQ ID NO: 955729 - DNA, 25 bp, Homo sapien
cctcgggctcaggtccgtctccact

SEQ ID NO: 955730 - DNA, 25 bp, Homo sapien
tgatgatggattagcagcctctggt

SEQ ID NO: 955731 - DNA, 25 bp, Homo sapien
cacactgagacctcgttgggaccag

SEQ ID NO: 955732 - DNA, 25 bp, Homo sapien
gactctgggaccatggaaaagcccc

SEQ ID NO: 955733 - DNA, 25 bp, Homo sapien
tgtggctaagctctgcaacctgttc

SEQ ID NO: 955734 - DNA, 25 bp, Homo sapien
caggagtgacgtctccgccccctgt

SEQ ID NO: 955735 - DNA, 25 bp, Homo sapien
aggaccaggagtgacgtctccgccc

SEQ ID NO: 955736 - DNA, 25 bp, Homo sapien
accaggagtgacgtctccgccccct

SEQ ID NO: 955737 - DNA, 25 bp, Homo sapien
aggagtgacgtctccgccccctgtg

SEQ ID NO: 955738 - DNA, 25 bp, Homo sapien
aaaggacagcgaggatggacaggcc

SEQ ID NO: 955739 - DNA, 25 bp, Homo sapien
ggagcagaaattagctgaaggccac

SEQ ID NO: 955740 - DNA, 25 bp, Homo sapien
cacagccccgttttatttacactca

SEQ ID NO: 955741 - DNA, 25 bp, Homo sapien
gaaggccacagaggatagagacggg

SEQ ID NO: 955742 - DNA, 25 bp, Homo sapien
ctggagcgttctccgtgggctcccg

SEQ ID NO: 955743 - DNA, 25 bp, Homo sapien
cgttctccgtgggctcccgcgtctc

SEQ ID NO: 955744 - DNA, 25 bp, Homo sapien
gagcgttctccgtgggctcccgcgt

SEQ ID NO: 955745 - DNA, 25 bp, Homo sapien
ttctccgtgggctcccgcgtctcct

SEQ ID NO: 955746 - DNA, 25 bp, Homo sapien
gacttggacacagcaagtccgatga

SEQ ID NO: 955747 - DNA, 25 bp, Homo sapien
gcaagtccgatgagtccggccagtc

SEQ ID NO: 955748 - DNA, 25 bp, Homo sapien
ggccatgcctcccacgatggccatg

SEQ ID NO: 955749 - DNA, 25 bp, Homo sapien
gacacagcaagtccgatgagtccgg

SEQ ID NO: 955750 - DNA, 25 bp, Homo sapien
tcttcatggccttgtcaatgagccg

SEQ ID NO: 955751 - DNA, 25 bp, Homo sapien
tttcttcatggccttgtcaatgagc

SEQ ID NO: 955752 - DNA, 25 bp, Homo sapien
ttcttcatggccttgtcaatgagcc

SEQ ID NO: 955753 - DNA, 25 bp, Homo sapien
catggccttgtcaatgagccgctcc

SEQ ID NO: 955754 - DNA, 25 bp, Homo sapien
cagcaacccgcggacgtactttaag

SEQ ID NO: 955755 - DNA, 25 bp, Homo sapien
ctgtctgcagcaacccgcggacgta

SEQ ID NO: 955756 - DNA, 25 bp, Homo sapien
tgtctgcagcaacccgcggacgtac

SEQ ID NO: 955757 - DNA, 25 bp, Homo sapien
ctgcagcaacccgcggacgtacttt

SEQ ID NO: 955758 - DNA, 25 bp, Homo sapien
ctcggagtcctcatctgacaccgct

SEQ ID NO: 955759 - DNA, 25 bp, Homo sapien
cactctgatcttccctcggagtcct

SEQ ID NO: 955760 - DNA, 25 bp, Homo sapien
ggagtcctcatctgacaccgctctg

SEQ ID NO: 955761 - DNA, 25 bp, Homo sapien
tctgatcttccctcggagtcctcat

SEQ ID NO: 955762 - DNA, 25 bp, Homo sapien
tagaagacgtaatcccgctgttcct

SEQ ID NO: 955763 - DNA, 25 bp, Homo sapien
ttgagccggtagttccccacggcca

SEQ ID NO: 955764 - DNA, 25 bp, Homo sapien
ggccaggtagaagacgtaatcccgc

SEQ ID NO: 955765 - DNA, 25 bp, Homo sapien
caggtagaagacgtaatcccgctgt

SEQ ID NO: 955766 - DNA, 25 bp, Homo sapien
tatcagtattacagtcaactggtcc

SEQ ID NO: 955767 - DNA, 25 bp, Homo sapien
cagtattacagtcaactggtccatc

SEQ ID NO: 955768 - DNA, 25 bp, Homo sapien
tcagtattacagtcaactggtccat

SEQ ID NO: 955769 - DNA, 25 bp, Homo sapien
ttatcagtattacagtcaactggtc

SEQ ID NO: 955770 - DNA, 25 bp, Homo sapien
aggtgcctggactacggggcccaca

SEQ ID NO: 955771 - DNA, 25 bp, Homo sapien
taccggagacaactcagaggtgcct

SEQ ID NO: 955772 - DNA, 25 bp, Homo sapien
agagcagcccagatggcagcgggaa

SEQ ID NO: 955773 - DNA, 25 bp, Homo sapien
tacggggcccacatcgcagagcagc

SEQ ID NO: 955774 - DNA, 25 bp, Homo sapien
tgcgtgctcttggacaccgagcctg

SEQ ID NO: 955775 - DNA, 25 bp, Homo sapien
tcattgtacttgctccgcaccaggc

SEQ ID NO: 955776 - DNA, 25 bp, Homo sapien
cctcgagcagcacgatgcctttacg

SEQ ID NO: 955777 - DNA, 25 bp, Homo sapien
ggcaccaggcgtactcaaactgcgt

SEQ ID NO: 955778 - DNA, 25 bp, Homo sapien
ggcggccgaacagtaaacacgctgt

SEQ ID NO: 955779 - DNA, 25 bp, Homo sapien
tcgcaggtctcggtatctggcaccc

SEQ ID NO: 955780 - DNA, 25 bp, Homo sapien
catttagaaatgtagggcgtcaacc

SEQ ID NO: 955781 - DNA, 25 bp, Homo sapien
tattgtccaggaatagaagtagtgc

SEQ ID NO: 955782 - DNA, 25 bp, Homo sapien
gatggtcactgtattcctccaccgc

SEQ ID NO: 955783 - DNA, 25 bp, Homo sapien
ccgtgccggacgcagtaataggtga

SEQ ID NO: 955784 - DNA, 25 bp, Homo sapien
aataggtgacaccttatgatggtca

SEQ ID NO: 955785 - DNA, 25 bp, Homo sapien
atgcgatgccttagcaccgtgccgg

SEQ ID NO: 955786 - DNA, 25 bp, Homo sapien
ttccctctgtccgggccaggcctca

SEQ ID NO: 955787 - DNA, 25 bp, Homo sapien
tccctctgtccgggccaggcctcac

SEQ ID NO: 955788 - DNA, 25 bp, Homo sapien
ctttccctctgtccgggccaggcct

SEQ ID NO: 955789 - DNA, 25 bp, Homo sapien
tttccctctgtccgggccaggcctc

SEQ ID NO: 955790 - DNA, 25 bp, Homo sapien
caccagctcgttcagcacggcctcc

SEQ ID NO: 955791 - DNA, 25 bp, Homo sapien
agacaccagctcgttcagcacggcc

SEQ ID NO: 955792 - DNA, 25 bp, Homo sapien
acagacaccagctcgttcagcacgg

SEQ ID NO: 955793 - DNA, 25 bp, Homo sapien
cacagacaccagctcgttcagcacg

SEQ ID NO: 955794 - DNA, 25 bp, Homo sapien
ggccactgcccccgcgagcctcaca

SEQ ID NO: 955795 - DNA, 25 bp, Homo sapien
ggcccagtggcaggggcggagaacc

SEQ ID NO: 955796 - DNA, 25 bp, Homo sapien
acagtctccatggcccagtggcagg

SEQ ID NO: 955797 - DNA, 25 bp, Homo sapien
tactgtgccacagtctccatggccc

SEQ ID NO: 955798 - DNA, 25 bp, Homo sapien
tgccacagtctccatggcccagtgg

SEQ ID NO: 955799 - DNA, 25 bp, Homo sapien
tctgcccagccgctgtgcaaccttc

SEQ ID NO: 955800 - DNA, 25 bp, Homo sapien
gcccagccgctgtgcaaccttccaa

SEQ ID NO: 955801 - DNA, 25 bp, Homo sapien
agccgctgtgcaaccttccaagtgt

SEQ ID NO: 955802 - DNA, 25 bp, Homo sapien
acagccttgtatgtgatctttctgc

SEQ ID NO: 955803 - DNA, 25 bp, Homo sapien
tccacctccgacatagtgatagaaa

SEQ ID NO: 955804 - DNA, 25 bp, Homo sapien
tctagttagcatagtcatccacctc

SEQ ID NO: 955805 - DNA, 25 bp, Homo sapien
tagtgatagaaagtagtccctgtta

SEQ ID NO: 955806 - DNA, 25 bp, Homo sapien
tgccaatgaagagatccgtagtctg

SEQ ID NO: 955807 - DNA, 25 bp, Homo sapien
caaacacccgctgaacaggattcca

SEQ ID NO: 955808 - DNA, 25 bp, Homo sapien
cagccttttgcacaagaagggctca

SEQ ID NO: 955809 - DNA, 25 bp, Homo sapien
tggtgagactaagacctagaactgg

SEQ ID NO: 955810 - DNA, 25 bp, Homo sapien
tatgcctgtggacagtaatactcaa

SEQ ID NO: 955811 - DNA, 25 bp, Homo sapien
ggcgcggcatcctgtaccttggaaa

SEQ ID NO: 955812 - DNA, 25 bp, Homo sapien
gatcctcaaccactagacaccagag

SEQ ID NO: 955813 - DNA, 25 bp, Homo sapien
ctttagctggacacggaccgtgcct

SEQ ID NO: 955814 - DNA, 25 bp, Homo sapien
taggaggtccgaacagaacgctcag

SEQ ID NO: 955815 - DNA, 25 bp, Homo sapien
ggttgtcccatgtgcccttagctct

SEQ ID NO: 955816 - DNA, 25 bp, Homo sapien
cactggttgtcccatgtgcccttag

SEQ ID NO: 955817 - DNA, 25 bp, Homo sapien
tgcccttagctctcagagcatccag

SEQ ID NO: 955818 - DNA, 25 bp, Homo sapien
tcccatgtgcccttagctctcagag

SEQ ID NO: 955819 - DNA, 25 bp, Homo sapien
tatggaatgcatcgcgaatctgtgt

SEQ ID NO: 955820 - DNA, 25 bp, Homo sapien
caagaatatggaatgcatcgcgaat

SEQ ID NO: 955821 - DNA, 25 bp, Homo sapien
agaatatggaatgcatcgcgaatct

SEQ ID NO: 955822 - DNA, 25 bp, Homo sapien
gaatgcatcgcgaatctgtgtgtca

SEQ ID NO: 955823 - DNA, 25 bp, Homo sapien
ctccgatcacatataacacaagagg

SEQ ID NO: 955824 - DNA, 25 bp, Homo sapien
tcgtcacggatgacgaagctctggg

SEQ ID NO: 955825 - DNA, 25 bp, Homo sapien
agagagggcgggtgctcgtcacgga

SEQ ID NO: 955826 - DNA, 25 bp, Homo sapien
tgggggtgctccgatcacatataac

SEQ ID NO: 955827 - DNA, 25 bp, Homo sapien
gcccaggtctgagtgactttgagag

SEQ ID NO: 955828 - DNA, 25 bp, Homo sapien
ggtgagtctgatgccttctcgtggg

SEQ ID NO: 955829 - DNA, 25 bp, Homo sapien
tgactttgagagtggctcactctcc

SEQ ID NO: 955830 - DNA, 25 bp, Homo sapien
gggagatcagcctccgacgggtggg

SEQ ID NO: 955831 - DNA, 25 bp, Homo sapien
ttcactgttgtagtggaagaaggca

SEQ ID NO: 955832 - DNA, 25 bp, Homo sapien
cttcactgttgtagtggaagaaggc

SEQ ID NO: 955833 - DNA, 25 bp, Homo sapien
tcttcactgttgtagtggaagaagg

SEQ ID NO: 955834 - DNA, 25 bp, Homo sapien
tgtcttcactgttgtagtggaagaa

SEQ ID NO: 955835 - DNA, 25 bp, Homo sapien
gggatagcaggacccagaaggtgca

SEQ ID NO: 955836 - DNA, 25 bp, Homo sapien
ggatagcaggacccagaaggtgcag

SEQ ID NO: 955837 - DNA, 25 bp, Homo sapien
tgggggatagcaggacccagaaggt

SEQ ID NO: 955838 - DNA, 25 bp, Homo sapien
ggggatagcaggacccagaaggtgc

SEQ ID NO: 955839 - DNA, 25 bp, Homo sapien
catttcctacatgtccttgagtttc

SEQ ID NO: 955840 - DNA, 25 bp, Homo sapien
ctcatttcctacatgtccttgagtt

SEQ ID NO: 955841 - DNA, 25 bp, Homo sapien
gggcacccgaggaaggacatggatg

SEQ ID NO: 955842 - DNA, 25 bp, Homo sapien
gaggaaggacatggatgatgacaca

SEQ ID NO: 955843 - DNA, 25 bp, Homo sapien
tctggagtccgcatttttaactaga

SEQ ID NO: 955844 - DNA, 25 bp, Homo sapien
cgcatttttaactagatctcaggtc

SEQ ID NO: 955845 - DNA, 25 bp, Homo sapien
gcccggtctggagtccgcattttta

SEQ ID NO: 955846 - DNA, 25 bp, Homo sapien
actgtgcccggtctggagtccgcat

SEQ ID NO: 955847 - DNA, 25 bp, Homo sapien
gtgtgcacacggagcttgcggacca

SEQ ID NO: 955848 - DNA, 25 bp, Homo sapien
gtgcacacggagcttgcggaccagt

SEQ ID NO: 955849 - DNA, 25 bp, Homo sapien
tgtgcacacggagcttgcggaccag

SEQ ID NO: 955850 - DNA, 25 bp, Homo sapien
ctccagggaacgcccttgagtaact

SEQ ID NO: 955851 - DNA, 25 bp, Homo sapien
ccttgagtaactcgcgcacttggga

SEQ ID NO: 955852 - DNA, 25 bp, Homo sapien
ccagggaacgcccttgagtaactcg

SEQ ID NO: 955853 - DNA, 25 bp, Homo sapien
agtaactcgcgcacttgggacccat

SEQ ID NO: 955854 - DNA, 25 bp, Homo sapien
gccattcaggtgaacaaaatctgct

SEQ ID NO: 955855 - DNA, 25 bp, Homo sapien
atatttaatgggttgtactctggcc

SEQ ID NO: 955856 - DNA, 25 bp, Homo sapien
ccattcaggtgaacaaaatctgctg

SEQ ID NO: 955857 - DNA, 25 bp, Homo sapien
tcaaatatttaatgggttgtactct

SEQ ID NO: 955858 - DNA, 25 bp, Homo sapien
tctatgaataaggatcaagtatacg

SEQ ID NO: 955859 - DNA, 25 bp, Homo sapien
tctctgtgtgtctgcgaataactga

SEQ ID NO: 955860 - DNA, 25 bp, Homo sapien
tcaggatttccacccgtctcagact

SEQ ID NO: 955861 - DNA, 25 bp, Homo sapien
tgagggagggcagcatatgaaactt

SEQ ID NO: 955862 - DNA, 25 bp, Homo sapien
tactgttgtatcattgggctgcgac

SEQ ID NO: 955863 - DNA, 25 bp, Homo sapien
gatctgcaccgagaaacatgctgat

SEQ ID NO: 955864 - DNA, 25 bp, Homo sapien
tggtcagcagctagaacagcagtgc

SEQ ID NO: 955865 - DNA, 25 bp, Homo sapien
gatggtctgagtgaacgccctgtgt

SEQ ID NO: 955866 - DNA, 25 bp, Homo sapien
gtcataattgacatctcctccctgt

SEQ ID NO: 955867 - DNA, 25 bp, Homo sapien
ctctcagacatggagttgattatgc

SEQ ID NO: 955868 - DNA, 25 bp, Homo sapien
cagacatggagttgattatgctttt

SEQ ID NO: 955869 - DNA, 25 bp, Homo sapien
ctaggtcataattgacatctcctcc

SEQ ID NO: 955870 - DNA, 25 bp, Homo sapien
tttatgaattccatccggatctcct

SEQ ID NO: 955871 - DNA, 25 bp, Homo sapien
ttatgaattccatccggatctcctc

SEQ ID NO: 955872 - DNA, 25 bp, Homo sapien
gagacgtagtggactcacatggaga

SEQ ID NO: 955873 - DNA, 25 bp, Homo sapien
tgctcagtaactggacagagctgct

SEQ ID NO: 955874 - DNA, 25 bp, Homo sapien
tgtaggtgtccaaaacattcaagac

SEQ ID NO: 955875 - DNA, 25 bp, Homo sapien
caattgcctagggtacagtaggtgc

SEQ ID NO: 955876 - DNA, 25 bp, Homo sapien
cctggtttgtggtgtgcaattagca

SEQ ID NO: 955877 - DNA, 25 bp, Homo sapien
gcctggtttgtggtgtgcaattagc

SEQ ID NO: 955878 - DNA, 25 bp, Homo sapien
ctggtttgtggtgtgcaattagcat

SEQ ID NO: 955879 - DNA, 25 bp, Homo sapien
ggtttgtggtgtgcaattagcatac

SEQ ID NO: 955880 - DNA, 25 bp, Homo sapien
tgaagacgatcaccactccatgagc

SEQ ID NO: 955881 - DNA, 25 bp, Homo sapien
cttgggatgtcagcattgaagacga

SEQ ID NO: 955882 - DNA, 25 bp, Homo sapien
actgtgtgtcctgtaaggacggctg

SEQ ID NO: 955883 - DNA, 25 bp, Homo sapien
gctgttggacaaagcaggaatacca

SEQ ID NO: 955884 - DNA, 25 bp, Homo sapien
tttgttgttgctggtaacatgcggg

SEQ ID NO: 955885 - DNA, 25 bp, Homo sapien
cacagtcccatagctcgaattcaca

SEQ ID NO: 955886 - DNA, 25 bp, Homo sapien
acatgcgggttctcaaattctagga

SEQ ID NO: 955887 - DNA, 25 bp, Homo sapien
gctcgaattcacagcccgtgccttt

SEQ ID NO: 955888 - DNA, 25 bp, Homo sapien
atgaggctgcattacacttttggaa

SEQ ID NO: 955889 - DNA, 25 bp, Homo sapien
cgagccagttggacactctgggaca

SEQ ID NO: 955890 - DNA, 25 bp, Homo sapien
ttagaggaatgagcctccctgccga

SEQ ID NO: 955891 - DNA, 25 bp, Homo sapien
acagtagcagcaccaataatgaggc

SEQ ID NO: 955892 - DNA, 25 bp, Homo sapien
actccttgggttgggctgtattcag

SEQ ID NO: 955893 - DNA, 25 bp, Homo sapien
ccttgggttgggctgtattcagtga

SEQ ID NO: 955894 - DNA, 25 bp, Homo sapien
cttgggttgggctgtattcagtgat

SEQ ID NO: 955895 - DNA, 25 bp, Homo sapien
ctcactccttgggttgggctgtatt

SEQ ID NO: 955896 - DNA, 25 bp, Homo sapien
tgtgaaaatgagtgcaaataaaggt

SEQ ID NO: 955897 - DNA, 25 bp, Homo sapien
aaatgagtgcaaataaaggtctttg

SEQ ID NO: 955898 - DNA, 25 bp, Homo sapien
gtgaaaatgagtgcaaataaaggtc

SEQ ID NO: 955899 - DNA, 25 bp, Homo sapien
gggctcattaacaccgggctcgcct

SEQ ID NO: 955900 - DNA, 25 bp, Homo sapien
ggggctcattaacaccgggctcgcc

SEQ ID NO: 955901 - DNA, 25 bp, Homo sapien
aaggccccacgaagaggatcttggc

SEQ ID NO: 955902 - DNA, 25 bp, Homo sapien
gcaaggccccacgaagaggatcttg

SEQ ID NO: 955903 - DNA, 25 bp, Homo sapien
ctcgcaaggccccacgaagaggatc

SEQ ID NO: 955904 - DNA, 25 bp, Homo sapien
ccccacgaagaggatcttggctttc

SEQ ID NO: 955905 - DNA, 25 bp, Homo sapien
acggagctctacttggccgctttcg

SEQ ID NO: 955906 - DNA, 25 bp, Homo sapien
ggaggcggcgcgtcaggacggagct

SEQ ID NO: 955907 - DNA, 25 bp, Homo sapien
cttagccggccggagcccacgggag

SEQ ID NO: 955908 - DNA, 25 bp, Homo sapien
tcaggacggagctctacttggccgc

SEQ ID NO: 955909 - DNA, 25 bp, Homo sapien
ttttggggccgcctcccacatggca

SEQ ID NO: 955910 - DNA, 25 bp, Homo sapien
actgagctgccagcttaagtgccga

SEQ ID NO: 955911 - DNA, 25 bp, Homo sapien
tgggggcttgtgagactgaacctca

SEQ ID NO: 955912 - DNA, 25 bp, Homo sapien
gccagcttaagtgccgagtgcagga

SEQ ID NO: 955913 - DNA, 25 bp, Homo sapien
cactacgcatagcccaaaacctttt

SEQ ID NO: 955914 - DNA, 25 bp, Homo sapien
gagccactacgcatagcccaaaacc

SEQ ID NO: 955915 - DNA, 25 bp, Homo sapien
ccactacgcatagcccaaaaccttt

SEQ ID NO: 955916 - DNA, 25 bp, Homo sapien
gagtagctcctcttgtacattgcct

SEQ ID NO: 955917 - DNA, 25 bp, Homo sapien
acaaggacaggattttggccgccat

SEQ ID NO: 955918 - DNA, 25 bp, Homo sapien
aaggacaggattttggccgccatgg

SEQ ID NO: 955919 - DNA, 25 bp, Homo sapien
ttttcagccttggacttagcgactg

SEQ ID NO: 955920 - DNA, 25 bp, Homo sapien
tatccaagcgtgtgaataggtgcat

SEQ ID NO: 955921 - DNA, 25 bp, Homo sapien
ggctgagtgtgtgtttatccaagcg

SEQ ID NO: 955922 - DNA, 25 bp, Homo sapien
caagcacgagtgtgcacacgagtgt

SEQ ID NO: 955923 - DNA, 25 bp, Homo sapien
cataattgcgtacaagtgtgtgact

SEQ ID NO: 955924 - DNA, 25 bp, Homo sapien
ctttactctaagctacctgggacct

SEQ ID NO: 955925 - DNA, 25 bp, Homo sapien
cttcctgcaattcctaaggtggcct

SEQ ID NO: 955926 - DNA, 25 bp, Homo sapien
gtacaagggacagggccgctagtct

SEQ ID NO: 955927 - DNA, 25 bp, Homo sapien
cctgggacctttgcagtcttgggaa

SEQ ID NO: 955928 - DNA, 25 bp, Homo sapien
tgacggagtttcgctgttgttgtgc

SEQ ID NO: 955929 - DNA, 25 bp, Homo sapien
acggagtttcgctgttgttgtgcag

SEQ ID NO: 955930 - DNA, 25 bp, Homo sapien
gcaattctcttgctttggccttcca

SEQ ID NO: 955931 - DNA, 25 bp, Homo sapien
ttgtgcaggctggtgtgtaatgaca

SEQ ID NO: 955932 - DNA, 25 bp, Homo sapien
cccggtgacacgtgggagctcagta

SEQ ID NO: 955933 - DNA, 25 bp, Homo sapien
cgtactgtttactgggacccccatg

SEQ ID NO: 955934 - DNA, 25 bp, Homo sapien
tgtggtgtcatcaacagttccccgt

SEQ ID NO: 955935 - DNA, 25 bp, Homo sapien
ccccggtgacacgtgggagctcagt

SEQ ID NO: 955936 - DNA, 25 bp, Homo sapien
gggcaggacccatcatgagagtccc

SEQ ID NO: 955937 - DNA, 25 bp, Homo sapien
gcagggcaggacccatcatgagagt

SEQ ID NO: 955938 - DNA, 25 bp, Homo sapien
tggcagggcaggacccatcatgaga

SEQ ID NO: 955939 - DNA, 25 bp, Homo sapien
cagggcaggacccatcatgagagtc

SEQ ID NO: 955940 - DNA, 25 bp, Homo sapien
ctgtgtcttgaacatgtgctgggga

SEQ ID NO: 955941 - DNA, 25 bp, Homo sapien
tcaggtataagttatggagatgatg

SEQ ID NO: 955942 - DNA, 25 bp, Homo sapien
tatggagatgatgtagcatgttcgg

SEQ ID NO: 955943 - DNA, 25 bp, Homo sapien
tagcatgttcggtggttaaaccgta

SEQ ID NO: 955944 - DNA, 25 bp, Homo sapien
gaaccggcagcaccagtgtttctgg

SEQ ID NO: 955945 - DNA, 25 bp, Homo sapien
acagacactggacaccagtttgcga

SEQ ID NO: 955946 - DNA, 25 bp, Homo sapien
gacactggacaccagtttgcgaggt

SEQ ID NO: 955947 - DNA, 25 bp, Homo sapien
ctagaaacccaggaaccggcagcac

SEQ ID NO: 955948 - DNA, 25 bp, Homo sapien
gatgttgaatttaagagggtgagaa

SEQ ID NO: 955949 - DNA, 25 bp, Homo sapien
ccgctggtaagcctggatgttgaat

SEQ ID NO: 955950 - DNA, 25 bp, Homo sapien
aactgaatcctcttggaagtgacat

SEQ ID NO: 955951 - DNA, 25 bp, Homo sapien
tcttgtccagacagtagaatcttga

SEQ ID NO: 955952 - DNA, 25 bp, Homo sapien
ttctcagcaggtcggataaggatct

SEQ ID NO: 955953 - DNA, 25 bp, Homo sapien
atgagaaacagtgaccctgccggcg

SEQ ID NO: 955954 - DNA, 25 bp, Homo sapien
tgcgcaagaattgggagccccggtt

SEQ ID NO: 955955 - DNA, 25 bp, Homo sapien
catcatgcaggctaaaactggccag

SEQ ID NO: 955956 - DNA, 25 bp, Homo sapien
tgatcatcaaagacatgcctttaac

SEQ ID NO: 955957 - DNA, 25 bp, Homo sapien
cttcctgactgtcccggttgtttgg

SEQ ID NO: 955958 - DNA, 25 bp, Homo sapien
ctggaatccctactgtcactggcat

SEQ ID NO: 955959 - DNA, 25 bp, Homo sapien
cactggcatattgcaagcacatgtt

SEQ ID NO: 955960 - DNA, 25 bp, Homo sapien
agaactacctctcaggcatctggaa

SEQ ID NO: 955961 - DNA, 25 bp, Homo sapien
ggcgagggggatgctttgtaacgca

SEQ ID NO: 955962 - DNA, 25 bp, Homo sapien
cactgtggggacagaactacctctc

SEQ ID NO: 955963 - DNA, 25 bp, Homo sapien
gggacagaactacctctcaggcatc

SEQ ID NO: 955964 - DNA, 25 bp, Homo sapien
tcactgcgaggtgacttgctcctcc

SEQ ID NO: 955965 - DNA, 25 bp, Homo sapien
cacaatcactgcgaggtgacttgct

SEQ ID NO: 955966 - DNA, 25 bp, Homo sapien
ggagcctcacaatcactgcgaggtg

SEQ ID NO: 955967 - DNA, 25 bp, Homo sapien
gcctcacaatcactgcgaggtgact

SEQ ID NO: 955968 - DNA, 25 bp, Homo sapien
tttgataatggggatccagccagtc

SEQ ID NO: 955969 - DNA, 25 bp, Homo sapien
ctctcaatgggattttgataatggg

SEQ ID NO: 955970 - DNA, 25 bp, Homo sapien
tgataatggggatccagccagtctc

SEQ ID NO: 955971 - DNA, 25 bp, Homo sapien
ttttgataatggggatccagccagt

SEQ ID NO: 955972 - DNA, 25 bp, Homo sapien
taatgagctgatgtgtcccaaggga

SEQ ID NO: 955973 - DNA, 25 bp, Homo sapien
ggtgagtgacaactggacctccgca

SEQ ID NO: 955974 - DNA, 25 bp, Homo sapien
tacaaggctacagggatctcagtgg

SEQ ID NO: 955975 - DNA, 25 bp, Homo sapien
cacgcaggctccctaaaggtagagt

SEQ ID NO: 955976 - DNA, 25 bp, Homo sapien
cagcttactgaggtggcgttgcaaa

SEQ ID NO: 955977 - DNA, 25 bp, Homo sapien
tattcgaggactttgatgacagccc

SEQ ID NO: 955978 - DNA, 25 bp, Homo sapien
cctaggcctagacacagatacttga

SEQ ID NO: 955979 - DNA, 25 bp, Homo sapien
cctcgtggcgataaagggagcattt

SEQ ID NO: 955980 - DNA, 25 bp, Homo sapien
ctcactgcaatggaggctgggataa

SEQ ID NO: 955981 - DNA, 25 bp, Homo sapien
gaggagtctccatgcgagtgatgct

SEQ ID NO: 955982 - DNA, 25 bp, Homo sapien
cattgggcagcactagtcatatggc

SEQ ID NO: 955983 - DNA, 25 bp, Homo sapien
ttctgttcacagtccattgggcagc

SEQ ID NO: 955984 - DNA, 25 bp, Homo sapien
gcaggaagggatgcaaacatgtcct

SEQ ID NO: 955985 - DNA, 25 bp, Homo sapien
aggaagggatgcaaacatgtccttc

SEQ ID NO: 955986 - DNA, 25 bp, Homo sapien
ggcaggaagggatgcaaacatgtcc

SEQ ID NO: 955987 - DNA, 25 bp, Homo sapien
caggaagggatgcaaacatgtcctt

SEQ ID NO: 955988 - DNA, 25 bp, Homo sapien
aagcactcgggtaggtcaggaggga

SEQ ID NO: 955989 - DNA, 25 bp, Homo sapien
actcaggaaagcactcgggtaggtc

SEQ ID NO: 955990 - DNA, 25 bp, Homo sapien
gaaagcactcgggtaggtcaggagg

SEQ ID NO: 955991 - DNA, 25 bp, Homo sapien
tcaggaaagcactcgggtaggtcag

SEQ ID NO: 955992 - DNA, 25 bp, Homo sapien
tcctgcatataagaacttgtatgtg

SEQ ID NO: 955993 - DNA, 25 bp, Homo sapien
aatcctgcatataagaacttgtatg

SEQ ID NO: 955994 - DNA, 25 bp, Homo sapien
aaatcctgcatataagaacttgtat

SEQ ID NO: 955995 - DNA, 25 bp, Homo sapien
ctgcatataagaacttgtatgtgtc

SEQ ID NO: 955996 - DNA, 25 bp, Homo sapien
cttgagtccttcttgcatcatgatg

SEQ ID NO: 955997 - DNA, 25 bp, Homo sapien
gagtccttcttgcatcatgatgtcc

SEQ ID NO: 955998 - DNA, 25 bp, Homo sapien
gcatcatgatgtcctcactggtcat

SEQ ID NO: 955999 - DNA, 25 bp, Homo sapien
ttgcatcatgatgtcctcactggtc

SEQ ID NO: 956000 - DNA, 25 bp, Homo sapien
ttgctttgtccccaaccgtaggaca

SEQ ID NO: 956001 - DNA, 25 bp, Homo sapien
gacaagggaagcctttttcctgcag

SEQ ID NO: 956002 - DNA, 25 bp, Homo sapien
tgcaagagctccctgtcacacccca

SEQ ID NO: 956003 - DNA, 25 bp, Homo sapien
ctgaatgtcggggagacttgtgatc

SEQ ID NO: 956004 - DNA, 25 bp, Homo sapien
caccgtgagtgatgacgtagcacag

SEQ ID NO: 956005 - DNA, 25 bp, Homo sapien
gtagtccaggttgccgcacacatct

SEQ ID NO: 956006 - DNA, 25 bp, Homo sapien
gagtgatgacgtagcacaggtttct

SEQ ID NO: 956007 - DNA, 25 bp, Homo sapien
taatccttctcttcaccgtgagtga

SEQ ID NO: 956008 - DNA, 25 bp, Homo sapien
tctgcctgggtcataagtttttctt

SEQ ID NO: 956009 - DNA, 25 bp, Homo sapien
agcggtctgcctgggtcataagttt

SEQ ID NO: 956010 - DNA, 25 bp, Homo sapien
gaagcggtctgcctgggtcataagt

SEQ ID NO: 956011 - DNA, 25 bp, Homo sapien
tcctcctcactgaagcggtctgcct

SEQ ID NO: 956012 - DNA, 25 bp, Homo sapien
catgttcagggaacgggatacccag

SEQ ID NO: 956013 - DNA, 25 bp, Homo sapien
acgggatacccagcttgaacatgca

SEQ ID NO: 956014 - DNA, 25 bp, Homo sapien
cagggaacgggatacccagcttgaa

SEQ ID NO: 956015 - DNA, 25 bp, Homo sapien
gtcatgttcagggaacgggataccc

SEQ ID NO: 956016 - DNA, 25 bp, Homo sapien
cgaacactttgaaggcgtggagaat

SEQ ID NO: 956017 - DNA, 25 bp, Homo sapien
ctttgaaggcgtggagaatggtctc

SEQ ID NO: 956018 - DNA, 25 bp, Homo sapien
ttcccttcagtgtcgaacactttga

SEQ ID NO: 956019 - DNA, 25 bp, Homo sapien
tcagtgtcgaacactttgaaggcgt

SEQ ID NO: 956020 - DNA, 25 bp, Homo sapien
ccccacagggacaggcacaaggctg

SEQ ID NO: 956021 - DNA, 25 bp, Homo sapien
aggcaggtgaagagggccccacagg

SEQ ID NO: 956022 - DNA, 25 bp, Homo sapien
ctataagcagcacatacagggcagg

SEQ ID NO: 956023 - DNA, 25 bp, Homo sapien
gagagaggcaggtgaagagggcccc

SEQ ID NO: 956024 - DNA, 25 bp, Homo sapien
gagttctgtacgtggatgccaaaag

SEQ ID NO: 956025 - DNA, 25 bp, Homo sapien
ggaaaaagagttctgtacgtggatg

SEQ ID NO: 956026 - DNA, 25 bp, Homo sapien
cacaagaggccgtgggtggaggaaa

SEQ ID NO: 956027 - DNA, 25 bp, Homo sapien
ctgtacgtggatgccaaaaggctgg

SEQ ID NO: 956028 - DNA, 25 bp, Homo sapien
agagcctctgttcttgagactgcaa

SEQ ID NO: 956029 - DNA, 25 bp, Homo sapien
actgcaaacctcataaaatctgcta

SEQ ID NO: 956030 - DNA, 25 bp, Homo sapien
ataaaatctgctatagagtggccac

SEQ ID NO: 956031 - DNA, 25 bp, Homo sapien
cataaaatctgctatagagtggcca

SEQ ID NO: 956032 - DNA, 25 bp, Homo sapien
caggaacaccgtgaagttgatgggt

SEQ ID NO: 956033 - DNA, 25 bp, Homo sapien
ctccagttcctcgttcttgacattg

SEQ ID NO: 956034 - DNA, 25 bp, Homo sapien
gttcctcgttcttgacattgatgcg

SEQ ID NO: 956035 - DNA, 25 bp, Homo sapien
aacaccgtgaagttgatgggtccgg

SEQ ID NO: 956036 - DNA, 25 bp, Homo sapien
caagtcctctttgtcgatgaagcca

SEQ ID NO: 956037 - DNA, 25 bp, Homo sapien
cagcgcggcaaaggtgtccctcaag

SEQ ID NO: 956038 - DNA, 25 bp, Homo sapien
cctcaagtcctctttgtcgatgaag

SEQ ID NO: 956039 - DNA, 25 bp, Homo sapien
gcgcggcaaaggtgtccctcaagtc

SEQ ID NO: 956040 - DNA, 25 bp, Homo sapien
gtgctaagtagtcacctgcccttcc

SEQ ID NO: 956041 - DNA, 25 bp, Homo sapien
cagagacacaggtgctaagtagtca

SEQ ID NO: 956042 - DNA, 25 bp, Homo sapien
gagacacaggtgctaagtagtcacc

SEQ ID NO: 956043 - DNA, 25 bp, Homo sapien
cacaggtgctaagtagtcacctgcc

SEQ ID NO: 956044 - DNA, 25 bp, Homo sapien
gctcttttccgagctcttctcggtg

SEQ ID NO: 956045 - DNA, 25 bp, Homo sapien
atctgggactgatcaaacatggaga

SEQ ID NO: 956046 - DNA, 25 bp, Homo sapien
tgctcttttccgagctcttctcggt

SEQ ID NO: 956047 - DNA, 25 bp, Homo sapien
aaacatggagaagacgttggagctg

SEQ ID NO: 956048 - DNA, 25 bp, Homo sapien
agcggcccctgcctcgagggtcagc

SEQ ID NO: 956049 - DNA, 25 bp, Homo sapien
ctgcgaggtagcagacaaggccttg

SEQ ID NO: 956050 - DNA, 25 bp, Homo sapien
agcagacaaggccttgcagcggccc

SEQ ID NO: 956051 - DNA, 25 bp, Homo sapien
aggtagcagacaaggccttgcagcg

SEQ ID NO: 956052 - DNA, 25 bp, Homo sapien
ctcccagggcatcacggtccagaat

SEQ ID NO: 956053 - DNA, 25 bp, Homo sapien
atcacggtccagaatgacaccgctt

SEQ ID NO: 956054 - DNA, 25 bp, Homo sapien
tccagaatgacaccgctttgccctt

SEQ ID NO: 956055 - DNA, 25 bp, Homo sapien
cccagggcatcacggtccagaatga

SEQ ID NO: 956056 - DNA, 25 bp, Homo sapien
atcaggacgttttcccagcccatgg

SEQ ID NO: 956057 - DNA, 25 bp, Homo sapien
cccatggcaagaagcctgcacggcg

SEQ ID NO: 956058 - DNA, 25 bp, Homo sapien
agccttgcaggtaatcaggacgttt

SEQ ID NO: 956059 - DNA, 25 bp, Homo sapien
atggcaagaagcctgcacggcgtgc

SEQ ID NO: 956060 - DNA, 25 bp, Homo sapien
gctccggaaggtgggcagccggtgc

SEQ ID NO: 956061 - DNA, 25 bp, Homo sapien
ccacagagctggacagctgcttcct

SEQ ID NO: 956062 - DNA, 25 bp, Homo sapien
gccggtgcccgtgctgcagaacaga

SEQ ID NO: 956063 - DNA, 25 bp, Homo sapien
gcagccggtgcccgtgctgcagaac

SEQ ID NO: 956064 - DNA, 25 bp, Homo sapien
acagtcccgctggtgacaggcagtc

SEQ ID NO: 956065 - DNA, 25 bp, Homo sapien
tgacaggcagtccatagaggctgac

SEQ ID NO: 956066 - DNA, 25 bp, Homo sapien
tagaggctgactcggaggagggaca

SEQ ID NO: 956067 - DNA, 25 bp, Homo sapien
tcttggtccccaagaagatcacagt

SEQ ID NO: 956068 - DNA, 25 bp, Homo sapien
tcccttatcccgttcatagggcatg

SEQ ID NO: 956069 - DNA, 25 bp, Homo sapien
gctcaaacctctaggcggaccatgc

SEQ ID NO: 956070 - DNA, 25 bp, Homo sapien
acctctaggcggaccatgcagacag

SEQ ID NO: 956071 - DNA, 25 bp, Homo sapien
tatcccgttcatagggcatgcgatg

SEQ ID NO: 956072 - DNA, 25 bp, Homo sapien
agtgtaggagctcaggtacgtgcat

SEQ ID NO: 956073 - DNA, 25 bp, Homo sapien
gggagtgtaggagctcaggtacgtg

SEQ ID NO: 956074 - DNA, 25 bp, Homo sapien
taggagctcaggtacgtgcattctc

SEQ ID NO: 956075 - DNA, 25 bp, Homo sapien
tgtaggagctcaggtacgtgcattc

SEQ ID NO: 956076 - DNA, 25 bp, Homo sapien
cagggccgggcttcccatcccttct

SEQ ID NO: 956077 - DNA, 25 bp, Homo sapien
gaagcagggccgggcttcccatccc

SEQ ID NO: 956078 - DNA, 25 bp, Homo sapien
gccctgggctggaagcagggccggg

SEQ ID NO: 956079 - DNA, 25 bp, Homo sapien
agcagggccgggcttcccatccctt

SEQ ID NO: 956080 - DNA, 25 bp, Homo sapien
aagccagggcttttcatcagtagtt

SEQ ID NO: 956081 - DNA, 25 bp, Homo sapien
agccagggcttttcatcagtagttt

SEQ ID NO: 956082 - DNA, 25 bp, Homo sapien
ttttctgccgtctcaggaccaacac

SEQ ID NO: 956083 - DNA, 25 bp, Homo sapien
gccagggcttttcatcagtagtttg

SEQ ID NO: 956084 - DNA, 25 bp, Homo sapien
cttctccgtgggcttcaatagtgga

SEQ ID NO: 956085 - DNA, 25 bp, Homo sapien
tagtggagcaatggggaccaccctg

SEQ ID NO: 956086 - DNA, 25 bp, Homo sapien
gggccatattagcaccccctggaca

SEQ ID NO: 956087 - DNA, 25 bp, Homo sapien
accaccctgggggccatattagcac

SEQ ID NO: 956088 - DNA, 25 bp, Homo sapien
cttgagttgaaaggtagtcgtcgaa

SEQ ID NO: 956089 - DNA, 25 bp, Homo sapien
gacagtctcactcagattcacccgg

SEQ ID NO: 956090 - DNA, 25 bp, Homo sapien
gtcgtcgaaagaatagacagtctca

SEQ ID NO: 956091 - DNA, 25 bp, Homo sapien
tcactcagattcacccggcgattgg

SEQ ID NO: 956092 - DNA, 25 bp, Homo sapien
aatatgctttgtgggcagcaaagtc

SEQ ID NO: 956093 - DNA, 25 bp, Homo sapien
ctcctggttagtgggcacaagagtg

SEQ ID NO: 956094 - DNA, 25 bp, Homo sapien
cacaagagtgtcgagggaatatgct

SEQ ID NO: 956095 - DNA, 25 bp, Homo sapien
taccatgccctcctggttagtgggc

SEQ ID NO: 956096 - DNA, 25 bp, Homo sapien
tcgctgtgccccgttgccagccgtc

SEQ ID NO: 956097 - DNA, 25 bp, Homo sapien
gctgtgccccgttgccagccgtccc

SEQ ID NO: 956098 - DNA, 25 bp, Homo sapien
cctcgctgtgccccgttgccagccg

SEQ ID NO: 956099 - DNA, 25 bp, Homo sapien
gctcctcgctgtgccccgttgccag

SEQ ID NO: 956100 - DNA, 25 bp, Homo sapien
gatcctgttgctaaaccacctggca

SEQ ID NO: 956101 - DNA, 25 bp, Homo sapien
ctgatcctgttgctaaaccacctgg

SEQ ID NO: 956102 - DNA, 25 bp, Homo sapien
tcctgttgctaaaccacctggcagg

SEQ ID NO: 956103 - DNA, 25 bp, Homo sapien
ctgttgctaaaccacctggcaggag

SEQ ID NO: 956104 - DNA, 25 bp, Homo sapien
tcaggctgaagtcacgaagtagggt

SEQ ID NO: 956105 - DNA, 25 bp, Homo sapien
caggctgaagtcacgaagtagggtg

SEQ ID NO: 956106 - DNA, 25 bp, Homo sapien
agcttcatgcgcaggaatttcccca

SEQ ID NO: 956107 - DNA, 25 bp, Homo sapien
gctggtctgcccaaagtcagcgtgg

SEQ ID NO: 956108 - DNA, 25 bp, Homo sapien
gcttcatgcgcaggaatttccccat

SEQ ID NO: 956109 - DNA, 25 bp, Homo sapien
ggtctgcccaaagtcagcgtggaat

SEQ ID NO: 956110 - DNA, 25 bp, Homo sapien
ccaggcttgggagccgagcatataa

SEQ ID NO: 956111 - DNA, 25 bp, Homo sapien
gggagccgagcatataaccccccta

SEQ ID NO: 956112 - DNA, 25 bp, Homo sapien
ggcttgggagccgagcatataaccc

SEQ ID NO: 956113 - DNA, 25 bp, Homo sapien
ttgggagccgagcatataacccccc

SEQ ID NO: 956114 - DNA, 25 bp, Homo sapien
aacctccgcaggcatcgggccaggg

SEQ ID NO: 956115 - DNA, 25 bp, Homo sapien
cagctccaacctccgcaggcatcgg

SEQ ID NO: 956116 - DNA, 25 bp, Homo sapien
acagctccaacctccgcaggcatcg

SEQ ID NO: 956117 - DNA, 25 bp, Homo sapien
ctccaacctccgcaggcatcgggcc

SEQ ID NO: 956118 - DNA, 25 bp, Homo sapien
tccatttctggctaccgcggagctg

SEQ ID NO: 956119 - DNA, 25 bp, Homo sapien
ttttcctttcgcgtgaactcgccgc

SEQ ID NO: 956120 - DNA, 25 bp, Homo sapien
caaatgcgttgcagatgtacgtcct

SEQ ID NO: 956121 - DNA, 25 bp, Homo sapien
caaggtgaacctcgcacaaatgcgt

SEQ ID NO: 956122 - DNA, 25 bp, Homo sapien
atgataaacagtgagagattgcttt

SEQ ID NO: 956123 - DNA, 25 bp, Homo sapien
gatgataaacagtgagagattgctt

SEQ ID NO: 956124 - DNA, 25 bp, Homo sapien
gtatttttagtagcctgttggccag

SEQ ID NO: 956125 - DNA, 25 bp, Homo sapien
tatttttagtagcctgttggccagg

SEQ ID NO: 956126 - DNA, 25 bp, Homo sapien
tgtatttttagtagcctgttggcca

SEQ ID NO: 956127 - DNA, 25 bp, Homo sapien
atttttagtagcctgttggccaggc

SEQ ID NO: 956128 - DNA, 25 bp, Homo sapien
acaccaccatgtctgacaaatttca

SEQ ID NO: 956129 - DNA, 25 bp, Homo sapien
caccatgtctgacaaatttcatttt

SEQ ID NO: 956130 - DNA, 25 bp, Homo sapien
accaccatgtctgacaaatttcatt

SEQ ID NO: 956131 - DNA, 25 bp, Homo sapien
ccaccacgcctggtatgttgttgtt

SEQ ID NO: 956132 - DNA, 25 bp, Homo sapien
ggaaattgtggaaaaccagacctca

SEQ ID NO: 956133 - DNA, 25 bp, Homo sapien
gggaacactgatggcctaattctgg

SEQ ID NO: 956134 - DNA, 25 bp, Homo sapien
ggctcttttcacactggcgccagat

SEQ ID NO: 956135 - DNA, 25 bp, Homo sapien
caagttgattcaagtatctcaggca

SEQ ID NO: 956136 - DNA, 25 bp, Homo sapien
ggaaactccaagtcacacgtgtgta

SEQ ID NO: 956137 - DNA, 25 bp, Homo sapien
tcgtggcctaaactggaacggcttg

SEQ ID NO: 956138 - DNA, 25 bp, Homo sapien
gcatttctgtaaacttgggaccacg

SEQ ID NO: 956139 - DNA, 25 bp, Homo sapien
tcataaaacgtgtgctttcgccagc

SEQ ID NO: 956140 - DNA, 25 bp, Homo sapien
tcagccctggtcccgcagtttgtca

SEQ ID NO: 956141 - DNA, 25 bp, Homo sapien
gtcccgcagtttgtcatcccgcagt

SEQ ID NO: 956142 - DNA, 25 bp, Homo sapien
tttgtcatcccgcagtttgtcagca

SEQ ID NO: 956143 - DNA, 25 bp, Homo sapien
gcagtttgtcagcatcgatgtggga

SEQ ID NO: 956144 - DNA, 25 bp, Homo sapien
taaaaacagcattgggcagaacaat

SEQ ID NO: 956145 - DNA, 25 bp, Homo sapien
aaaaacagcattgggcagaacaatt

SEQ ID NO: 956146 - DNA, 25 bp, Homo sapien
acagcattgggcagaacaatttttt

SEQ ID NO: 956147 - DNA, 25 bp, Homo sapien
ttaaaaacagcattgggcagaacaa

SEQ ID NO: 956148 - DNA, 25 bp, Homo sapien
cattgcgggtggctgatggggggtg

SEQ ID NO: 956149 - DNA, 25 bp, Homo sapien
aggcccattgcgggtggctgatggg

SEQ ID NO: 956150 - DNA, 25 bp, Homo sapien
gcccattgcgggtggctgatggggg

SEQ ID NO: 956151 - DNA, 25 bp, Homo sapien
cccattgcgggtggctgatgggggg

SEQ ID NO: 956152 - DNA, 25 bp, Homo sapien
ggttacatcccggactttgctgagc

SEQ ID NO: 956153 - DNA, 25 bp, Homo sapien
ggggttacatcccggactttgctga

SEQ ID NO: 956154 - DNA, 25 bp, Homo sapien
agtgtttttcctcccgacctgcgct

SEQ ID NO: 956155 - DNA, 25 bp, Homo sapien
ttacatcccggactttgctgagctc

SEQ ID NO: 956156 - DNA, 25 bp, Homo sapien
ctgtacttaaccctgtgacggtcaa

SEQ ID NO: 956157 - DNA, 25 bp, Homo sapien
ttaaccctgtgacggtcaagaccag

SEQ ID NO: 956158 - DNA, 25 bp, Homo sapien
cctgtgacggtcaagaccagatccc

SEQ ID NO: 956159 - DNA, 25 bp, Homo sapien
tgacggtcaagaccagatccccact

SEQ ID NO: 956160 - DNA, 25 bp, Homo sapien
gctcctgtctgcttggtactaggac

SEQ ID NO: 956161 - DNA, 25 bp, Homo sapien
acttctgggcgcgtcggagcggctg

SEQ ID NO: 956162 - DNA, 25 bp, Homo sapien
tactaggactgccacttctgggcgc

SEQ ID NO: 956163 - DNA, 25 bp, Homo sapien
tgcttggtactaggactgccacttc

SEQ ID NO: 956164 - DNA, 25 bp, Homo sapien
cccagaccgttgtacagtggcacca

SEQ ID NO: 956165 - DNA, 25 bp, Homo sapien
tacagagcggcaaacaaccttaagt

SEQ ID NO: 956166 - DNA, 25 bp, Homo sapien
caattagctcgatgtggattacaga

SEQ ID NO: 956167 - DNA, 25 bp, Homo sapien
gatctgcgatactccagtcaaggct

SEQ ID NO: 956168 - DNA, 25 bp, Homo sapien
ccctctctgttagagaatactaaag

SEQ ID NO: 956169 - DNA, 25 bp, Homo sapien
tgtatgtgtcaataggatttaggcc

SEQ ID NO: 956170 - DNA, 25 bp, Homo sapien
gatttaggccttttttgcacttcta

SEQ ID NO: 956171 - DNA, 25 bp, Homo sapien
tctgtatgcgtgaaatattacgaaa

SEQ ID NO: 956172 - DNA, 25 bp, Homo sapien
taaggatttgaagcaaaatcaacac

SEQ ID NO: 956173 - DNA, 25 bp, Homo sapien
acactcagttgtagagggtaccacg

SEQ ID NO: 956174 - DNA, 25 bp, Homo sapien
cacgtggttgataccattgaagaca

SEQ ID NO: 956175 - DNA, 25 bp, Homo sapien
gaagcaaaatcaacacactcagttg

SEQ ID NO: 956176 - DNA, 25 bp, Homo sapien
cagccagtgtggtgtgacccccctg

SEQ ID NO: 956177 - DNA, 25 bp, Homo sapien
ttgctccagttgtcttcggccttct

SEQ ID NO: 956178 - DNA, 25 bp, Homo sapien
tcccggctggcccagttgagggtgg

SEQ ID NO: 956179 - DNA, 25 bp, Homo sapien
agtgtggtgtgacccccctgacagt

SEQ ID NO: 956180 - DNA, 25 bp, Homo sapien
cagggtccttggtggagctccagca

SEQ ID NO: 956181 - DNA, 25 bp, Homo sapien
ggtggagctccagcattgattcctg

SEQ ID NO: 956182 - DNA, 25 bp, Homo sapien
ccttggtggagctccagcattgatt

SEQ ID NO: 956183 - DNA, 25 bp, Homo sapien
cccgcagggtccttggtggagctcc

SEQ ID NO: 956184 - DNA, 25 bp, Homo sapien
tgtttgcgatacactgactacctcc

SEQ ID NO: 956185 - DNA, 25 bp, Homo sapien
cccgagttgtttgcgatacactgac

SEQ ID NO: 956186 - DNA, 25 bp, Homo sapien
caggcccgagttgtttgcgatacac

SEQ ID NO: 956187 - DNA, 25 bp, Homo sapien
ctggcaggcccgagttgtttgcgat

SEQ ID NO: 956188 - DNA, 25 bp, Homo sapien
tatttttacacacaagcctttcatg

SEQ ID NO: 956189 - DNA, 25 bp, Homo sapien
tctgtctcctttggcgggagtctgg

SEQ ID NO: 956190 - DNA, 25 bp, Homo sapien
ttcatttcctcgctgggttccaggc

SEQ ID NO: 956191 - DNA, 25 bp, Homo sapien
cctgcatgtcctctgtagtgcctat

SEQ ID NO: 956192 - DNA, 25 bp, Homo sapien
ttgccaccaacacgatacccgtggg

SEQ ID NO: 956193 - DNA, 25 bp, Homo sapien
gtaggcttttgccaccaacacgata

SEQ ID NO: 956194 - DNA, 25 bp, Homo sapien
tggcattcggcaaggtgtaggcttt

SEQ ID NO: 956195 - DNA, 25 bp, Homo sapien
cattcggcaaggtgtaggcttttgc

SEQ ID NO: 956196 - DNA, 25 bp, Homo sapien
ttagggtcccctgcgaggacccaca

SEQ ID NO: 956197 - DNA, 25 bp, Homo sapien
tgcactgcatgcctggatagcccat

SEQ ID NO: 956198 - DNA, 25 bp, Homo sapien
agaaaggcttagggtcccctgcgag

SEQ ID NO: 956199 - DNA, 25 bp, Homo sapien
ccacacgtgcactgcatgcctggat

SEQ ID NO: 956200 - DNA, 25 bp, Homo sapien
caaaggatggaccaggcacagcgtg

SEQ ID NO: 956201 - DNA, 25 bp, Homo sapien
aaggaggtcagtgccggacactgct

SEQ ID NO: 956202 - DNA, 25 bp, Homo sapien
cactgctgggcgttgttgagtcctg

SEQ ID NO: 956203 - DNA, 25 bp, Homo sapien
gcccaatagcaaatgttctgacgaa

SEQ ID NO: 956204 - DNA, 25 bp, Homo sapien
aaccactcccgccagtgtgtggtgg

SEQ ID NO: 956205 - DNA, 25 bp, Homo sapien
ttgatggtggaaccactcccgccag

SEQ ID NO: 956206 - DNA, 25 bp, Homo sapien
gaaggccagtggcagggactggctg

SEQ ID NO: 956207 - DNA, 25 bp, Homo sapien
ggtggaaccactcccgccagtgtgt

SEQ ID NO: 956208 - DNA, 25 bp, Homo sapien
ggaaggccagcgtgggataatcggt

SEQ ID NO: 956209 - DNA, 25 bp, Homo sapien
tgaaggaacgtgcttcagtatcagg

SEQ ID NO: 956210 - DNA, 25 bp, Homo sapien
atttgaaggaacgtgcttcagtatc

SEQ ID NO: 956211 - DNA, 25 bp, Homo sapien
tgggataatcggtgtcttggcagat

SEQ ID NO: 956212 - DNA, 25 bp, Homo sapien
cccaaaccggcacagtgggatgaga

SEQ ID NO: 956213 - DNA, 25 bp, Homo sapien
tgtcccccaaaccggcacagtggga

SEQ ID NO: 956214 - DNA, 25 bp, Homo sapien
gattcaaagaataggggggctgtgg

SEQ ID NO: 956215 - DNA, 25 bp, Homo sapien
tcccccaaaccggcacagtgggatg

SEQ ID NO: 956216 - DNA, 25 bp, Homo sapien
ttaatgatcggggtttacttctgac

SEQ ID NO: 956217 - DNA, 25 bp, Homo sapien
gaacccagagatcaataagacagcc

SEQ ID NO: 956218 - DNA, 25 bp, Homo sapien
acccagagatcaataagacagcccg

SEQ ID NO: 956219 - DNA, 25 bp, Homo sapien
aacccagagatcaataagacagccc

SEQ ID NO: 956220 - DNA, 25 bp, Homo sapien
ggaacccagagatcaataagacagc

SEQ ID NO: 956221 - DNA, 25 bp, Homo sapien
ttagcagggtcatagaagacgcact

SEQ ID NO: 956222 - DNA, 25 bp, Homo sapien
gcagggtcatagaagacgcactcat

SEQ ID NO: 956223 - DNA, 25 bp, Homo sapien
tcatagaagacgcactcataatcag

SEQ ID NO: 956224 - DNA, 25 bp, Homo sapien
gaagacgcactcataatcagaaacc

SEQ ID NO: 956225 - DNA, 25 bp, Homo sapien
tgcctggctcacccataaaattaaa

SEQ ID NO: 956226 - DNA, 25 bp, Homo sapien
tgcagcggcgcgaccttggctcact

SEQ ID NO: 956227 - DNA, 25 bp, Homo sapien
tcttgccctgtggcctgggctggag

SEQ ID NO: 956228 - DNA, 25 bp, Homo sapien
cggcgcgaccttggctcactgcaac

SEQ ID NO: 956229 - DNA, 25 bp, Homo sapien
tatctgtgatggaacctcgtgggca

SEQ ID NO: 956230 - DNA, 25 bp, Homo sapien
ggtgcacataggtgcagcatcccag

SEQ ID NO: 956231 - DNA, 25 bp, Homo sapien
ccactggcggctatttgtgcatggc

SEQ ID NO: 956232 - DNA, 25 bp, Homo sapien
caaggctgcctggtccaagttgctt

SEQ ID NO: 956233 - DNA, 25 bp, Homo sapien
gagaaaaagtcctgatgtctgtgta

SEQ ID NO: 956234 - DNA, 25 bp, Homo sapien
catcaggtatagagagatgtccttc

SEQ ID NO: 956235 - DNA, 25 bp, Homo sapien
cattttgctgagtttgatagagaaa

SEQ ID NO: 956236 - DNA, 25 bp, Homo sapien
ccttcctgggccaaaacaggtggtg

SEQ ID NO: 956237 - DNA, 25 bp, Homo sapien
aggaaagcttggtaattggcatgaa

SEQ ID NO: 956238 - DNA, 25 bp, Homo sapien
aaaaccggtgatgagaacttgaact

SEQ ID NO: 956239 - DNA, 25 bp, Homo sapien
ttggtaattggcatgaatttcctac

SEQ ID NO: 956240 - DNA, 25 bp, Homo sapien
tagagttcgagaaaaaccggtgatg

SEQ ID NO: 956241 - DNA, 25 bp, Homo sapien
catgtagtgtaacctgttggtgccc

SEQ ID NO: 956242 - DNA, 25 bp, Homo sapien
tgtaaacctcactcgctgaatgcgg

SEQ ID NO: 956243 - DNA, 25 bp, Homo sapien
gcgaaggaatcacttgcgacgcccg

SEQ ID NO: 956244 - DNA, 25 bp, Homo sapien
taaaatcgcatctccgctcttggca

SEQ ID NO: 956245 - DNA, 25 bp, Homo sapien
caggagccagttggcatcttttaac

SEQ ID NO: 956246 - DNA, 25 bp, Homo sapien
ccttgtaaaatccaggcagaaacat

SEQ ID NO: 956247 - DNA, 25 bp, Homo sapien
cccaggagccagttggcatctttta

SEQ ID NO: 956248 - DNA, 25 bp, Homo sapien
gagccagttggcatcttttaacttt

SEQ ID NO: 956249 - DNA, 25 bp, Homo sapien
tcggcccattgacttgagagaggaa

SEQ ID NO: 956250 - DNA, 25 bp, Homo sapien
gaatagttgccgtccagcgagtgct

SEQ ID NO: 956251 - DNA, 25 bp, Homo sapien
gaagctcttggtcagctcggcccat

SEQ ID NO: 956252 - DNA, 25 bp, Homo sapien
tctgctgtggacgacctgagccttg

SEQ ID NO: 956253 - DNA, 25 bp, Homo sapien
ggctgggtgggactgaaacctgacc

SEQ ID NO: 956254 - DNA, 25 bp, Homo sapien
tgggtgggactgaaacctgacccat

SEQ ID NO: 956255 - DNA, 25 bp, Homo sapien
ccaaggggccggctgggtgggactg

SEQ ID NO: 956256 - DNA, 25 bp, Homo sapien
gccggctgggtgggactgaaacctg

SEQ ID NO: 956257 - DNA, 25 bp, Homo sapien
gtggcggctcggtgttaaatttgga

SEQ ID NO: 956258 - DNA, 25 bp, Homo sapien
tgccaatctgtttctgtggtggcgg

SEQ ID NO: 956259 - DNA, 25 bp, Homo sapien
tcctcgctgtgccaatctgtttctg

SEQ ID NO: 956260 - DNA, 25 bp, Homo sapien
gcggctcggtgttaaatttggagac

SEQ ID NO: 956261 - DNA, 25 bp, Homo sapien
gcacggggaagggagggccgcagac

SEQ ID NO: 956262 - DNA, 25 bp, Homo sapien
ggcacggggaagggagggccgcaga

SEQ ID NO: 956263 - DNA, 25 bp, Homo sapien
ggctctgcagccccgggatcaaggt

SEQ ID NO: 956264 - DNA, 25 bp, Homo sapien
gccagcagcaagttgccgcaggcgc

SEQ ID NO: 956265 - DNA, 25 bp, Homo sapien
cagcagcaagttgccgcaggcgcac

SEQ ID NO: 956266 - DNA, 25 bp, Homo sapien
cgggatcaaggtgggttcaccttgc

SEQ ID NO: 956267 - DNA, 25 bp, Homo sapien
aaagacatcggtagatgcccaccga

SEQ ID NO: 956268 - DNA, 25 bp, Homo sapien
tcggtagatgcccaccgattgggta

SEQ ID NO: 956269 - DNA, 25 bp, Homo sapien
caactcaaagacatcggtagatgcc

SEQ ID NO: 956270 - DNA, 25 bp, Homo sapien
gatgcccaccgattgggtaaccgcc

SEQ ID NO: 956271 - DNA, 25 bp, Homo sapien
aggacacatttttagactctgtctt

SEQ ID NO: 956272 - DNA, 25 bp, Homo sapien
ggacacatttttagactctgtcttc

SEQ ID NO: 956273 - DNA, 25 bp, Homo sapien
ctggtgtgacaccaagggtgttgat

SEQ ID NO: 956274 - DNA, 25 bp, Homo sapien
gatggaaacgcccacgtctctcttt

SEQ ID NO: 956275 - DNA, 25 bp, Homo sapien
ccaagggtgttgatcttgatggaaa

SEQ ID NO: 956276 - DNA, 25 bp, Homo sapien
ctggtggtgttcctgctggtgtgac

SEQ ID NO: 956277 - DNA, 25 bp, Homo sapien
cattccaggagaaccagtgggtcac

SEQ ID NO: 956278 - DNA, 25 bp, Homo sapien
tctactctccttctcctccttgtgt

SEQ ID NO: 956279 - DNA, 25 bp, Homo sapien
ctactctccttctcctccttgtgtc

SEQ ID NO: 956280 - DNA, 25 bp, Homo sapien
ctctactctccttctcctccttgtg

SEQ ID NO: 956281 - DNA, 25 bp, Homo sapien
cagtcctactccagaacgcttcttg

SEQ ID NO: 956282 - DNA, 25 bp, Homo sapien
tcctggtgacgtcagtcggcccagt

SEQ ID NO: 956283 - DNA, 25 bp, Homo sapien
tcttgatctctggaacgttaatccc

SEQ ID NO: 956284 - DNA, 25 bp, Homo sapien
atttttgcctctacatttcttgatc

SEQ ID NO: 956285 - DNA, 25 bp, Homo sapien
gaggtccctcctttttattgatcag

SEQ ID NO: 956286 - DNA, 25 bp, Homo sapien
gatttctgtgttcccgggtagcagt

SEQ ID NO: 956287 - DNA, 25 bp, Homo sapien
gccggcctggcgcatttctctgatt

SEQ ID NO: 956288 - DNA, 25 bp, Homo sapien
ggagcaccctgtgctgctcacagaa

SEQ ID NO: 956289 - DNA, 25 bp, Homo sapien
acttttatgattcgtttttcactct

SEQ ID NO: 956290 - DNA, 25 bp, Homo sapien
tcgtttttcactctcggtgagaaaa

SEQ ID NO: 956291 - DNA, 25 bp, Homo sapien
atgctgtgaacttttatgattcgtt

SEQ ID NO: 956292 - DNA, 25 bp, Homo sapien
ttttcactctcggtgagaaaaggag

SEQ ID NO: 956293 - DNA, 25 bp, Homo sapien
tgggcccaagacttaggcacatccc

SEQ ID NO: 956294 - DNA, 25 bp, Homo sapien
caagacttaggcacatccctttctt

SEQ ID NO: 956295 - DNA, 25 bp, Homo sapien
ggcccaagacttaggcacatccctt

SEQ ID NO: 956296 - DNA, 25 bp, Homo sapien
ctgtgggcccaagacttaggcacat

SEQ ID NO: 956297 - DNA, 25 bp, Homo sapien
gagttttcctacccagaattcattc

SEQ ID NO: 956298 - DNA, 25 bp, Homo sapien
tgcctcttggagttttcctacccag

SEQ ID NO: 956299 - DNA, 25 bp, Homo sapien
ctcttggagttttcctacccagaat

SEQ ID NO: 956300 - DNA, 25 bp, Homo sapien
ttggagttttcctacccagaattca

SEQ ID NO: 956301 - DNA, 25 bp, Homo sapien
tgcagcaaatattcctggcagtccc

SEQ ID NO: 956302 - DNA, 25 bp, Homo sapien
gtgtgcagcaaatattcctggcagt

SEQ ID NO: 956303 - DNA, 25 bp, Homo sapien
tgtgcagcaaatattcctggcagtc

SEQ ID NO: 956304 - DNA, 25 bp, Homo sapien
cagcaaatattcctggcagtcccat

SEQ ID NO: 956305 - DNA, 25 bp, Homo sapien
gccccgagcctctcatgagttaaag

SEQ ID NO: 956306 - DNA, 25 bp, Homo sapien
ttgcagcttttggtagacgagaaac

SEQ ID NO: 956307 - DNA, 25 bp, Homo sapien
tttgtgtcccagaaagcgcttcccc

SEQ ID NO: 956308 - DNA, 25 bp, Homo sapien
tatggctcttcatgaagttgcccgc

SEQ ID NO: 956309 - DNA, 25 bp, Homo sapien
ccacactggtgcaggccgtgttgca

SEQ ID NO: 956310 - DNA, 25 bp, Homo sapien
ggcacacccaggttgcatctgtcgc

SEQ ID NO: 956311 - DNA, 25 bp, Homo sapien
tcctgctaagacaccctgggtcgtt

SEQ ID NO: 956312 - DNA, 25 bp, Homo sapien
tgggtcgtttcctccgggcagtcca

SEQ ID NO: 956313 - DNA, 25 bp, Homo sapien
cagagttaacaccaaatgccacgag

SEQ ID NO: 956314 - DNA, 25 bp, Homo sapien
gcaaggtgttgcaatttagcctggg

SEQ ID NO: 956315 - DNA, 25 bp, Homo sapien
ttggtatgaaatgagagggcctctt

SEQ ID NO: 956316 - DNA, 25 bp, Homo sapien
tgctgccgggttgaccccacttggt

SEQ ID NO: 956317 - DNA, 25 bp, Homo sapien
taaggcgctggatcagcagagcctc

SEQ ID NO: 956318 - DNA, 25 bp, Homo sapien
cgtaccaaatatagataaggcgctg

SEQ ID NO: 956319 - DNA, 25 bp, Homo sapien
tctgttttgtctcacgactggaggg

SEQ ID NO: 956320 - DNA, 25 bp, Homo sapien
taagaaatgcgaagagtggcctctc

SEQ ID NO: 956321 - DNA, 25 bp, Homo sapien
tatagagacacggtctggcagtgtt

SEQ ID NO: 956322 - DNA, 25 bp, Homo sapien
actccagtggtacagtcgtggctca

SEQ ID NO: 956323 - DNA, 25 bp, Homo sapien
tgttttccttacctagctctatgtg

SEQ ID NO: 956324 - DNA, 25 bp, Homo sapien
tggatggtgcctatagattcaggaa

SEQ ID NO: 956325 - DNA, 25 bp, Homo sapien
gaattcacactgagatatttctgga

SEQ ID NO: 956326 - DNA, 25 bp, Homo sapien
caagcctggccgagagttgatactc

SEQ ID NO: 956327 - DNA, 25 bp, Homo sapien
cattgaaagcgcatgatgggcacat

SEQ ID NO: 956328 - DNA, 25 bp, Homo sapien
actgtttgcttgatgtgggcttgtc

SEQ ID NO: 956329 - DNA, 25 bp, Homo sapien
tctttcgcaaataatggcctgcaac

SEQ ID NO: 956330 - DNA, 25 bp, Homo sapien
cgctagatctggtagccgcggacaa

SEQ ID NO: 956331 - DNA, 25 bp, Homo sapien
gcttccgaaacaccgcgctagatct

SEQ ID NO: 956332 - DNA, 25 bp, Homo sapien
tctccagtgggaaagattcaaaact

SEQ ID NO: 956333 - DNA, 25 bp, Homo sapien
tcttcagccttctccaggatatccc

SEQ ID NO: 956334 - DNA, 25 bp, Homo sapien
agccttctccaggatatccctgctg

SEQ ID NO: 956335 - DNA, 25 bp, Homo sapien
ttcagccttctccaggatatccctg

SEQ ID NO: 956336 - DNA, 25 bp, Homo sapien
ctagaattcttcagccttctccagg

SEQ ID NO: 956337 - DNA, 25 bp, Homo sapien
gactttgggtgggatctctgccagt

SEQ ID NO: 956338 - DNA, 25 bp, Homo sapien
ttgtctggggactttgggtgggatc

SEQ ID NO: 956339 - DNA, 25 bp, Homo sapien
tgtagaggcatcctggttgtctggg

SEQ ID NO: 956340 - DNA, 25 bp, Homo sapien
tccttggagtgtagaggcatcctgg

SEQ ID NO: 956341 - DNA, 25 bp, Homo sapien
agagatcgatcagaattttcttgcc

SEQ ID NO: 956342 - DNA, 25 bp, Homo sapien
cgttcggggacaaagagatcgatca

SEQ ID NO: 956343 - DNA, 25 bp, Homo sapien
ttttcttgcctcctcggacggcatc

SEQ ID NO: 956344 - DNA, 25 bp, Homo sapien
cggcatctgacctggctaggttgcg

SEQ ID NO: 956345 - DNA, 25 bp, Homo sapien
gagaagcgtgtcatggatcccgcat

SEQ ID NO: 956346 - DNA, 25 bp, Homo sapien
tcatggatcccgcatcgaaaacagc

SEQ ID NO: 956347 - DNA, 25 bp, Homo sapien
gagagagaagcgtgtcatggatccc

SEQ ID NO: 956348 - DNA, 25 bp, Homo sapien
cgtgtcatggatcccgcatcgaaaa

SEQ ID NO: 956349 - DNA, 25 bp, Homo sapien
gagagtgcggtgacataaaccacct

SEQ ID NO: 956350 - DNA, 25 bp, Homo sapien
tctaggccagcttgtaactgttcag

SEQ ID NO: 956351 - DNA, 25 bp, Homo sapien
ccagcccgccgtccgcacggatgta

SEQ ID NO: 956352 - DNA, 25 bp, Homo sapien
ggagacacctctcccgcttctgact

SEQ ID NO: 956353 - DNA, 25 bp, Homo sapien
ccaaacttgcatcctgatgatctgt

SEQ ID NO: 956354 - DNA, 25 bp, Homo sapien
caaacttgcatcctgatgatctgta

SEQ ID NO: 956355 - DNA, 25 bp, Homo sapien
tccaaacttgcatcctgatgatctg

SEQ ID NO: 956356 - DNA, 25 bp, Homo sapien
agaggagcgttctgtccacgatcat

SEQ ID NO: 956357 - DNA, 25 bp, Homo sapien
caagaggagcgttctgtccacgatc

SEQ ID NO: 956358 - DNA, 25 bp, Homo sapien
aagaggagcgttctgtccacgatca

SEQ ID NO: 956359 - DNA, 25 bp, Homo sapien
tgtttgacaccatgccgtgctgcaa

SEQ ID NO: 956360 - DNA, 25 bp, Homo sapien
tgtggctgtttgacaccatgccgtg

SEQ ID NO: 956361 - DNA, 25 bp, Homo sapien
tgacaccatgccgtgctgcaaactc

SEQ ID NO: 956362 - DNA, 25 bp, Homo sapien
gctgtttgacaccatgccgtgctgc

SEQ ID NO: 956363 - DNA, 25 bp, Homo sapien
ttctgtcttccacattagaagcaag

SEQ ID NO: 956364 - DNA, 25 bp, Homo sapien
tctgtcttccacattagaagcaagg

SEQ ID NO: 956365 - DNA, 25 bp, Homo sapien
acaggtgttctgaccccaacaccat

SEQ ID NO: 956366 - DNA, 25 bp, Homo sapien
tacaggtgttctgaccccaacacca

SEQ ID NO: 956367 - DNA, 25 bp, Homo sapien
tactcgtccaaaactgttgttggtg

SEQ ID NO: 956368 - DNA, 25 bp, Homo sapien
ggaagcatccaaacatcggctggcc

SEQ ID NO: 956369 - DNA, 25 bp, Homo sapien
atcggctggcccatgtcccataggg

SEQ ID NO: 956370 - DNA, 25 bp, Homo sapien
cccataggggcgtctgcttagcacc

SEQ ID NO: 956371 - DNA, 25 bp, Homo sapien
ctggctcttgtcttgtgtcctctga

SEQ ID NO: 956372 - DNA, 25 bp, Homo sapien
tcttgtcttgtgtcctctgaccgcc

SEQ ID NO: 956373 - DNA, 25 bp, Homo sapien
ggctcttgtcttgtgtcctctgacc

SEQ ID NO: 956374 - DNA, 25 bp, Homo sapien
tgtcttgtgtcctctgaccgcccat

SEQ ID NO: 956375 - DNA, 25 bp, Homo sapien
tgacaaattgcctggaaagacctcc

SEQ ID NO: 956376 - DNA, 25 bp, Homo sapien
tcgaagcaccccacgattagagtgt

SEQ ID NO: 956377 - DNA, 25 bp, Homo sapien
tcctgacagaggatgacgggctcgt

SEQ ID NO: 956378 - DNA, 25 bp, Homo sapien
tagaaagcaggattgccaccactcc

SEQ ID NO: 956379 - DNA, 25 bp, Homo sapien
atggaagatgcgcttggaaggctaa

SEQ ID NO: 956380 - DNA, 25 bp, Homo sapien
gctaaggctgccgaggttgaagtcc

SEQ ID NO: 956381 - DNA, 25 bp, Homo sapien
ttttggaagccgatggaagatgcgc

SEQ ID NO: 956382 - DNA, 25 bp, Homo sapien
cgagcggccgcgtggatgaggttgg

SEQ ID NO: 956383 - DNA, 25 bp, Homo sapien
tagcttttcaggaggcgagaccaca

SEQ ID NO: 956384 - DNA, 25 bp, Homo sapien
aaatagcttttcaggaggcgagacc

SEQ ID NO: 956385 - DNA, 25 bp, Homo sapien
aatagcttttcaggaggcgagacca

SEQ ID NO: 956386 - DNA, 25 bp, Homo sapien
caaaatagcttttcaggaggcgaga

SEQ ID NO: 956387 - DNA, 25 bp, Homo sapien
tcctgatgcgcaccccaggtctttt

SEQ ID NO: 956388 - DNA, 25 bp, Homo sapien
ggtgaatcctgatgcgcaccccagg

SEQ ID NO: 956389 - DNA, 25 bp, Homo sapien
gcaccccaggtcttttatcaggatt

SEQ ID NO: 956390 - DNA, 25 bp, Homo sapien
gatgcgcaccccaggtcttttatca

SEQ ID NO: 956391 - DNA, 25 bp, Homo sapien
ccagggtcatgaagagatggccctg

SEQ ID NO: 956392 - DNA, 25 bp, Homo sapien
tctttgaaggtactgcccagggtca

SEQ ID NO: 956393 - DNA, 25 bp, Homo sapien
tctgactggactctttgaaggtact

SEQ ID NO: 956394 - DNA, 25 bp, Homo sapien
tgcttccagaaggtatacattcccg

SEQ ID NO: 956395 - DNA, 25 bp, Homo sapien
ccacacaacagaggcccaggaggca

SEQ ID NO: 956396 - DNA, 25 bp, Homo sapien
acagcagcctgtggtctctgctcat

SEQ ID NO: 956397 - DNA, 25 bp, Homo sapien
ctgccacacaacagaggcccaggag

SEQ ID NO: 956398 - DNA, 25 bp, Homo sapien
ggcacagcagcctgtggtctctgct

SEQ ID NO: 956399 - DNA, 25 bp, Homo sapien
gcccagccatagctattcttccatt

SEQ ID NO: 956400 - DNA, 25 bp, Homo sapien
gaaatgcggtgatgtgttagcttcc

SEQ ID NO: 956401 - DNA, 25 bp, Homo sapien
attctttacgccttccacactcttt

SEQ ID NO: 956402 - DNA, 25 bp, Homo sapien
tggtcgttttccctggaccctgctg

SEQ ID NO: 956403 - DNA, 25 bp, Homo sapien
ccatgcgctttgctacaaccacgat

SEQ ID NO: 956404 - DNA, 25 bp, Homo sapien
gcattgtctcgtgtacatccataac

SEQ ID NO: 956405 - DNA, 25 bp, Homo sapien
tccatgcgctttgctacaaccacga

SEQ ID NO: 956406 - DNA, 25 bp, Homo sapien
ttggtgcattgtctcgtgtacatcc

SEQ ID NO: 956407 - DNA, 25 bp, Homo sapien
ctgcatcgttggaaggagtggagcc

SEQ ID NO: 956408 - DNA, 25 bp, Homo sapien
tgcatcgttggaaggagtggagccc

SEQ ID NO: 956409 - DNA, 25 bp, Homo sapien
tcgttggaaggagtggagcccaggt

SEQ ID NO: 956410 - DNA, 25 bp, Homo sapien
catcgttggaaggagtggagcccag

SEQ ID NO: 956411 - DNA, 25 bp, Homo sapien
gccacgttcagagctgcatgcagga

SEQ ID NO: 956412 - DNA, 25 bp, Homo sapien
cagcgcgctggccacgttcagagct

SEQ ID NO: 956413 - DNA, 25 bp, Homo sapien
catgcaggacgtgctctcggaggct

SEQ ID NO: 956414 - DNA, 25 bp, Homo sapien
gctctcggaggctgggttttactct

SEQ ID NO: 956415 - DNA, 25 bp, Homo sapien
ggcctgccatggttcactgatagta

SEQ ID NO: 956416 - DNA, 25 bp, Homo sapien
tggactctgatgtcgaactccgaag

SEQ ID NO: 956417 - DNA, 25 bp, Homo sapien
gctttgcttttcagggagccccttg

SEQ ID NO: 956418 - DNA, 25 bp, Homo sapien
tgaaatacagcagactcagcgcagc

SEQ ID NO: 956419 - DNA, 25 bp, Homo sapien
gaggctgaagcccagttgtcaagca

SEQ ID NO: 956420 - DNA, 25 bp, Homo sapien
gggcacgccagaccattctctatgg

SEQ ID NO: 956421 - DNA, 25 bp, Homo sapien
tacccgtccacctgggtgaaatgct

SEQ ID NO: 956422 - DNA, 25 bp, Homo sapien
ttctctatggaagacccacccagtg

SEQ ID NO: 956423 - DNA, 25 bp, Homo sapien
ggttttcatgccaagaagttcatca

SEQ ID NO: 956424 - DNA, 25 bp, Homo sapien
agtccacgtattccaggtctccagg

SEQ ID NO: 956425 - DNA, 25 bp, Homo sapien
ccttctcgaaggtgatagaaatgtg

SEQ ID NO: 956426 - DNA, 25 bp, Homo sapien
gattctgtacggtgactccagtcca

SEQ ID NO: 956427 - DNA, 25 bp, Homo sapien
tcaatccgcctctccatgtaggaca

SEQ ID NO: 956428 - DNA, 25 bp, Homo sapien
gggctcaatccgcctctccatgtag

SEQ ID NO: 956429 - DNA, 25 bp, Homo sapien
gttcataaacctggggctcaatccg

SEQ ID NO: 956430 - DNA, 25 bp, Homo sapien
gccaggttcataaacctggggctca

SEQ ID NO: 956431 - DNA, 25 bp, Homo sapien
cgcactgtgcaaacatgagcctcat

SEQ ID NO: 956432 - DNA, 25 bp, Homo sapien
cagagcgcactgtgcaaacatgagc

SEQ ID NO: 956433 - DNA, 25 bp, Homo sapien
atcgcccgcagagcgcactgtgcaa

SEQ ID NO: 956434 - DNA, 25 bp, Homo sapien
cccgcagagcgcactgtgcaaacat

SEQ ID NO: 956435 - DNA, 25 bp, Homo sapien
aagaaagtcatagctctctgcaacc

SEQ ID NO: 956436 - DNA, 25 bp, Homo sapien
agaaagtcatagctctctgcaacct

SEQ ID NO: 956437 - DNA, 25 bp, Homo sapien
aaaaaaagaaagtcatagctctctg

SEQ ID NO: 956438 - DNA, 25 bp, Homo sapien
aaaaagaaagtcatagctctctgca

SEQ ID NO: 956439 - DNA, 25 bp, Homo sapien
gaccagggaattcacttagagatcc

SEQ ID NO: 956440 - DNA, 25 bp, Homo sapien
tcacaatgtccccattaggtattgc

SEQ ID NO: 956441 - DNA, 25 bp, Homo sapien
gaatctgtggaatgcagttgcgagc

SEQ ID NO: 956442 - DNA, 25 bp, Homo sapien
aaggaatgctatttattgaccaggg

SEQ ID NO: 956443 - DNA, 25 bp, Homo sapien
atgcccgccataatacccgcctaat

SEQ ID NO: 956444 - DNA, 25 bp, Homo sapien
cacaaatttgacaaacggataatta

SEQ ID NO: 956445 - DNA, 25 bp, Homo sapien
agacatcagaagtcataattcaact

SEQ ID NO: 956446 - DNA, 25 bp, Homo sapien
acagatgcccgccataatacccgcc

SEQ ID NO: 956447 - DNA, 25 bp, Homo sapien
cacaatgatttcctgagtgttatct

SEQ ID NO: 956448 - DNA, 25 bp, Homo sapien
tattgtgctcattgcatggatgagg

SEQ ID NO: 956449 - DNA, 25 bp, Homo sapien
aggaacacgcagattcaggccctgg

SEQ ID NO: 956450 - DNA, 25 bp, Homo sapien
tgcttgagaccacggcggtcttcaa

SEQ ID NO: 956451 - DNA, 25 bp, Homo sapien
gcatcccaaaattgtgggggtcagg

SEQ ID NO: 956452 - DNA, 25 bp, Homo sapien
catcccaaaattgtgggggtcaggg

SEQ ID NO: 956453 - DNA, 25 bp, Homo sapien
caaaagaccggctttatcccacact

SEQ ID NO: 956454 - DNA, 25 bp, Homo sapien
tgcagcctgcccaatgaggacgttt

SEQ ID NO: 956455 - DNA, 25 bp, Homo sapien
ggcctctgtagcgttcagcctgcag

SEQ ID NO: 956456 - DNA, 25 bp, Homo sapien
ttagcacgtcgtggctctccaggaa

SEQ ID NO: 956457 - DNA, 25 bp, Homo sapien
gagtccctggccgccgctgggaggg

SEQ ID NO: 956458 - DNA, 25 bp, Homo sapien
aaagtgacttgcctcacgctgcccg

SEQ ID NO: 956459 - DNA, 25 bp, Homo sapien
catagcacgtcttatttgcttcaga

SEQ ID NO: 956460 - DNA, 25 bp, Homo sapien
aaatctcagtgacatagcacgtctt

SEQ ID NO: 956461 - DNA, 25 bp, Homo sapien
gtgacttgcctcacgctgcccggtt

SEQ ID NO: 956462 - DNA, 25 bp, Homo sapien
actttcggtgccagcgagaggaaga

SEQ ID NO: 956463 - DNA, 25 bp, Homo sapien
tagcctgccgaaaggcagactttcg

SEQ ID NO: 956464 - DNA, 25 bp, Homo sapien
gaaaggcagactttcggtgccagcg

SEQ ID NO: 956465 - DNA, 25 bp, Homo sapien
ctatgaacgttctcgtgcctccact

SEQ ID NO: 956466 - DNA, 25 bp, Homo sapien
cagttggggcaagtccccggagtgc

SEQ ID NO: 956467 - DNA, 25 bp, Homo sapien
cacagttggggcaagtccccggagt

SEQ ID NO: 956468 - DNA, 25 bp, Homo sapien
ggcacagttggggcaagtccccgga

SEQ ID NO: 956469 - DNA, 25 bp, Homo sapien
gttggggcaagtccccggagtgcag

SEQ ID NO: 956470 - DNA, 25 bp, Homo sapien
gatcaggtaaatctagccagttttg

SEQ ID NO: 956471 - DNA, 25 bp, Homo sapien
agtggaatcacctgaacggagaggc

SEQ ID NO: 956472 - DNA, 25 bp, Homo sapien
aggcagtggaatcacctgaacggag

SEQ ID NO: 956473 - DNA, 25 bp, Homo sapien
tagttgcccccaaacttcataatgg

SEQ ID NO: 956474 - DNA, 25 bp, Homo sapien
gacctgtcctcgtcatccagtggga

SEQ ID NO: 956475 - DNA, 25 bp, Homo sapien
tattaagccggcacaaggccattca

SEQ ID NO: 956476 - DNA, 25 bp, Homo sapien
ttttccagacgggtaggcagcagct

SEQ ID NO: 956477 - DNA, 25 bp, Homo sapien
tatgctgtcctgtctacgtcctcgg

SEQ ID NO: 956478 - DNA, 25 bp, Homo sapien
tctttttgacacatgaccaaattta

SEQ ID NO: 956479 - DNA, 25 bp, Homo sapien
taccaagactaagtttccagcaatc

SEQ ID NO: 956480 - DNA, 25 bp, Homo sapien
gacacatgaccaaatttataccaag

SEQ ID NO: 956481 - DNA, 25 bp, Homo sapien
acggcaacctcgaagtctcgggctc

SEQ ID NO: 956482 - DNA, 25 bp, Homo sapien
tcacctttacttaccacggagctgc

SEQ ID NO: 956483 - DNA, 25 bp, Homo sapien
ccccgcagtcttggctactcaaaga

SEQ ID NO: 956484 - DNA, 25 bp, Homo sapien
gccagattgtcctgatacgaaaccc

SEQ ID NO: 956485 - DNA, 25 bp, Homo sapien
gcatctgacttcaccaaaccagggt

SEQ ID NO: 956486 - DNA, 25 bp, Homo sapien
tgactgataggagatgggcactacc

SEQ ID NO: 956487 - DNA, 25 bp, Homo sapien
tgaaccaggcatagatcaaaagcca

SEQ ID NO: 956488 - DNA, 25 bp, Homo sapien
tgcttcatccctgactgataggaga

SEQ ID NO: 956489 - DNA, 25 bp, Homo sapien
gatgaacaagggattgcttcatccc

SEQ ID NO: 956490 - DNA, 25 bp, Homo sapien
gcttgagattctgggcctcgaagat

SEQ ID NO: 956491 - DNA, 25 bp, Homo sapien
gactttggacaacttgctcagccag

SEQ ID NO: 956492 - DNA, 25 bp, Homo sapien
tttggacaacttgctcagccagcca

SEQ ID NO: 956493 - DNA, 25 bp, Homo sapien
ttctgggcctcgaagatggactggc

SEQ ID NO: 956494 - DNA, 25 bp, Homo sapien
gctgggacttatagacactttccac

SEQ ID NO: 956495 - DNA, 25 bp, Homo sapien
tgggacttatagacactttccacca

SEQ ID NO: 956496 - DNA, 25 bp, Homo sapien
agctgggacttatagacactttcca

SEQ ID NO: 956497 - DNA, 25 bp, Homo sapien
ggacttatagacactttccaccaca

SEQ ID NO: 956498 - DNA, 25 bp, Homo sapien
gcttgtagacacatcccgttctctc

SEQ ID NO: 956499 - DNA, 25 bp, Homo sapien
cacattgggcattcagtacaagagg

SEQ ID NO: 956500 - DNA, 25 bp, Homo sapien
cagtccagcttgtagacacatcccg

SEQ ID NO: 956501 - DNA, 25 bp, Homo sapien
ataactctcgttcttcccgtcgctt

SEQ ID NO: 956502 - DNA, 25 bp, Homo sapien
ttttctaataccatcgtggaagacg

SEQ ID NO: 956503 - DNA, 25 bp, Homo sapien
gaaaatctcaacttggttctgcccg

SEQ ID NO: 956504 - DNA, 25 bp, Homo sapien
taaagcagtatggagagattaggag

SEQ ID NO: 956505 - DNA, 25 bp, Homo sapien
ttaggaggacgtgtaaaataatgta

SEQ ID NO: 956506 - DNA, 25 bp, Homo sapien
caccacaccggcgtgttccacgggc

SEQ ID NO: 956507 - DNA, 25 bp, Homo sapien
gcaccccaccacaccggcgtgttcc

SEQ ID NO: 956508 - DNA, 25 bp, Homo sapien
gaagacaggaggcaccccaccacac

SEQ ID NO: 956509 - DNA, 25 bp, Homo sapien
cacaccggcgtgttccacgggccat

SEQ ID NO: 956510 - DNA, 25 bp, Homo sapien
agccatggattctctgaggaatatc

SEQ ID NO: 956511 - DNA, 25 bp, Homo sapien
gccatggattctctgaggaatatcc

SEQ ID NO: 956512 - DNA, 25 bp, Homo sapien
tcgctgccatggttgaggaaagcct

SEQ ID NO: 956513 - DNA, 25 bp, Homo sapien
gattcagaagcaaggcttgggaact

SEQ ID NO: 956514 - DNA, 25 bp, Homo sapien
ctgaggagcccagcgtcgctgccat

SEQ ID NO: 956515 - DNA, 25 bp, Homo sapien
cgatgtctaatggagatggaggact

SEQ ID NO: 956516 - DNA, 25 bp, Homo sapien
ttgtatcttgcaccagtccccgcca

SEQ ID NO: 956517 - DNA, 25 bp, Homo sapien
agagcctgccgtgcatccttgtatc

SEQ ID NO: 956518 - DNA, 25 bp, Homo sapien
cttgtatcttgcaccagtccccgcc

SEQ ID NO: 956519 - DNA, 25 bp, Homo sapien
aaatgcatcatacaggatgtggcct

SEQ ID NO: 956520 - DNA, 25 bp, Homo sapien
cactcagtcataagatttatgttga

SEQ ID NO: 956521 - DNA, 25 bp, Homo sapien
cagcgtccctgtcatgtgtcaggca

SEQ ID NO: 956522 - DNA, 25 bp, Homo sapien
aggcattgtgggagaaatagcactc

SEQ ID NO: 956523 - DNA, 25 bp, Homo sapien
gactgccggcagtattgggtataat

SEQ ID NO: 956524 - DNA, 25 bp, Homo sapien
cggcagtattgggtataatttacaa

SEQ ID NO: 956525 - DNA, 25 bp, Homo sapien
tatctgattgttaggaagggatgaa

SEQ ID NO: 956526 - DNA, 25 bp, Homo sapien
gagggatagactgccggcagtattg

SEQ ID NO: 956527 - DNA, 25 bp, Homo sapien
agctgatttgtacctctcccctggg

SEQ ID NO: 956528 - DNA, 25 bp, Homo sapien
tggttgggcccctcagttggagtct

SEQ ID NO: 956529 - DNA, 25 bp, Homo sapien
tctttgatgtgaagctagcactgtc

SEQ ID NO: 956530 - DNA, 25 bp, Homo sapien
aataatacagcaatccgtggccagg

SEQ ID NO: 956531 - DNA, 25 bp, Homo sapien
tcaggcgtgcagctcatgaccagtt

SEQ ID NO: 956532 - DNA, 25 bp, Homo sapien
gctgcaaagagatcgctgtgggcct

SEQ ID NO: 956533 - DNA, 25 bp, Homo sapien
tgggcctcggctgactactttaaga

SEQ ID NO: 956534 - DNA, 25 bp, Homo sapien
taaatattcctttctggccaccgcc

SEQ ID NO: 956535 - DNA, 25 bp, Homo sapien
gacattagggaagcctttgtgacca

SEQ ID NO: 956536 - DNA, 25 bp, Homo sapien
ctgggcatcgacgacattagggaag

SEQ ID NO: 956537 - DNA, 25 bp, Homo sapien
catcgacgacattagggaagccttt

SEQ ID NO: 956538 - DNA, 25 bp, Homo sapien
gacgacattagggaagcctttgtga

SEQ ID NO: 956539 - DNA, 25 bp, Homo sapien
atttctatttcgatcaggttttgac

SEQ ID NO: 956540 - DNA, 25 bp, Homo sapien
cgaacgctaagagaatggtccaatt

SEQ ID NO: 956541 - DNA, 25 bp, Homo sapien
gccagtgtgatgtggttggatctca

SEQ ID NO: 956542 - DNA, 25 bp, Homo sapien
tctcagcgtgtactgaatgccagtc

SEQ ID NO: 956543 - DNA, 25 bp, Homo sapien
ggcagagcgtaaaacaagccccagc

SEQ ID NO: 956544 - DNA, 25 bp, Homo sapien
ctgtctgcccgacttccaaaaactg

SEQ ID NO: 956545 - DNA, 25 bp, Homo sapien
gaaatgcaatttccgcctgtctgcc

SEQ ID NO: 956546 - DNA, 25 bp, Homo sapien
cccttgggcttaatcaggacggaag

SEQ ID NO: 956547 - DNA, 25 bp, Homo sapien
ttccctccaaagataaccgtgtcca

SEQ ID NO: 956548 - DNA, 25 bp, Homo sapien
aaccgtgtccatgccatccgtggca

SEQ ID NO: 956549 - DNA, 25 bp, Homo sapien
ccaaagataaccgtgtccatgccat

SEQ ID NO: 956550 - DNA, 25 bp, Homo sapien
tgtccatgccatccgtggcatcatc

SEQ ID NO: 956551 - DNA, 25 bp, Homo sapien
ctccaagcgagagagtgatttcttg

SEQ ID NO: 956552 - DNA, 25 bp, Homo sapien
caaggcccgcatgggttgatacgtt

SEQ ID NO: 956553 - DNA, 25 bp, Homo sapien
tttttcttgcgtacaaagttggtca

SEQ ID NO: 956554 - DNA, 25 bp, Homo sapien
gagagtgatttcttgcaaggcccgc

SEQ ID NO: 956555 - DNA, 25 bp, Homo sapien
gactactaacagcacaagacgcact

SEQ ID NO: 956556 - DNA, 25 bp, Homo sapien
tgctcaccccaaggtaggctgggaa

SEQ ID NO: 956557 - DNA, 25 bp, Homo sapien
cactcacagggtggcggaatcttcc

SEQ ID NO: 956558 - DNA, 25 bp, Homo sapien
cttgccttgagagcgggtagcacca

SEQ ID NO: 956559 - DNA, 25 bp, Homo sapien
tctcagccaccacgtgggatcgatt

SEQ ID NO: 956560 - DNA, 25 bp, Homo sapien
gggatcgatttcttccacattgaac

SEQ ID NO: 956561 - DNA, 25 bp, Homo sapien
cattgaacttggtcaaggcccgctg

SEQ ID NO: 956562 - DNA, 25 bp, Homo sapien
tgctttgtgctgtggatcttctggc

SEQ ID NO: 956563 - DNA, 25 bp, Homo sapien
aagggcaccccgaatacttgcctgg

SEQ ID NO: 956564 - DNA, 25 bp, Homo sapien
tggccaacataaaccctggctgtca

SEQ ID NO: 956565 - DNA, 25 bp, Homo sapien
ggtgcctagaccacagacagcacga

SEQ ID NO: 956566 - DNA, 25 bp, Homo sapien
tagtacggatagacacaatgacctg

SEQ ID NO: 956567 - DNA, 25 bp, Homo sapien
tgtgcagctccgatcgagggctggc

SEQ ID NO: 956568 - DNA, 25 bp, Homo sapien
tggttcccaaccaggcgtgcaggcc

SEQ ID NO: 956569 - DNA, 25 bp, Homo sapien
gcccactgccgaagctttcattaaa

SEQ ID NO: 956570 - DNA, 25 bp, Homo sapien
gggctggcccactgccgaagctttc

SEQ ID NO: 956571 - DNA, 25 bp, Homo sapien
gatttatgagaaccaggcgtcgact

SEQ ID NO: 956572 - DNA, 25 bp, Homo sapien
tggtggcgccctcgagatttatgag

SEQ ID NO: 956573 - DNA, 25 bp, Homo sapien
ggcgtcgacttcctccgttgcgaca

SEQ ID NO: 956574 - DNA, 25 bp, Homo sapien
attgtccctgctgcggagagtctgg

SEQ ID NO: 956575 - DNA, 25 bp, Homo sapien
ggcgtgcagcatcttttggttcctc

SEQ ID NO: 956576 - DNA, 25 bp, Homo sapien
ggtgtgacccctcaacacgaggtca

SEQ ID NO: 956577 - DNA, 25 bp, Homo sapien
ttttatggctatgctctgtctaggg

SEQ ID NO: 956578 - DNA, 25 bp, Homo sapien
acatacttccgggccatctgagggt

SEQ ID NO: 956579 - DNA, 25 bp, Homo sapien
aacgcccacgtattcagcagtgaag

SEQ ID NO: 956580 - DNA, 25 bp, Homo sapien
tctctgcggaggtgagcagtaacac

SEQ ID NO: 956581 - DNA, 25 bp, Homo sapien
tgagcagtaacacgggcttgaaaac

SEQ ID NO: 956582 - DNA, 25 bp, Homo sapien
gaagcagagactgcgctgtgtgctg

SEQ ID NO: 956583 - DNA, 25 bp, Homo sapien
gtgggagtcactccaggccggaggg

SEQ ID NO: 956584 - DNA, 25 bp, Homo sapien
aggccggagggatgacctgcccaaa

SEQ ID NO: 956585 - DNA, 25 bp, Homo sapien
agagagagactcatacctagtcagc

SEQ ID NO: 956586 - DNA, 25 bp, Homo sapien
tcatacctagtcagcgggtgggagt

SEQ ID NO: 956587 - DNA, 25 bp, Homo sapien
ctgtgggaccactgaccatccctcc

SEQ ID NO: 956588 - DNA, 25 bp, Homo sapien
tgtgggaccactgaccatccctcct

SEQ ID NO: 956589 - DNA, 25 bp, Homo sapien
cccaatggaatgacagcccagtctt

SEQ ID NO: 956590 - DNA, 25 bp, Homo sapien
catcacttctgcatcaaaatcagga

SEQ ID NO: 956591 - DNA, 25 bp, Homo sapien
tcacttctgcatcaaaatcaggagc

SEQ ID NO: 956592 - DNA, 25 bp, Homo sapien
tgtccctagtcccaatggaatgaca

SEQ ID NO: 956593 - DNA, 25 bp, Homo sapien
caccaaggttggaggagctcccgcc

SEQ ID NO: 956594 - DNA, 25 bp, Homo sapien
caaggttggaggagctcccgccctg

SEQ ID NO: 956595 - DNA, 25 bp, Homo sapien
cagcaccaaggttggaggagctccc

SEQ ID NO: 956596 - DNA, 25 bp, Homo sapien
cttggcagcaccaaggttggaggag

SEQ ID NO: 956597 - DNA, 25 bp, Homo sapien
gcccttggaagattcctctctaagt

SEQ ID NO: 956598 - DNA, 25 bp, Homo sapien
cttggaagattcctctctaagttcc

SEQ ID NO: 956599 - DNA, 25 bp, Homo sapien
ggaagattcctctctaagttccact

SEQ ID NO: 956600 - DNA, 25 bp, Homo sapien
catgcccttggaagattcctctcta

SEQ ID NO: 956601 - DNA, 25 bp, Homo sapien
gcgagagcctcccccagggccctgt

SEQ ID NO: 956602 - DNA, 25 bp, Homo sapien
gagagcctcccccagggccctgtcc

SEQ ID NO: 956603 - DNA, 25 bp, Homo sapien
ctgcgagagcctcccccagggccct

SEQ ID NO: 956604 - DNA, 25 bp, Homo sapien
tgcgagagcctcccccagggccctg

SEQ ID NO: 956605 - DNA, 25 bp, Homo sapien
tagaggaagtaagatcaggatcccg

SEQ ID NO: 956606 - DNA, 25 bp, Homo sapien
tgcgccaccgcacatggcagtcttg

SEQ ID NO: 956607 - DNA, 25 bp, Homo sapien
atcccggggaccataaagcagctgc

SEQ ID NO: 956608 - DNA, 25 bp, Homo sapien
gggaggagaacagactttagaggaa

SEQ ID NO: 956609 - DNA, 25 bp, Homo sapien
caaagtgagttaccccataatccca

SEQ ID NO: 956610 - DNA, 25 bp, Homo sapien
tggagttcttcgtgccgcccaaagt

SEQ ID NO: 956611 - DNA, 25 bp, Homo sapien
cctctggctacaccaaagggttctg

SEQ ID NO: 956612 - DNA, 25 bp, Homo sapien
accgcgtggtctaatctggttgaca

SEQ ID NO: 956613 - DNA, 25 bp, Homo sapien
ttgaactcctgccctaagtgctgga

SEQ ID NO: 956614 - DNA, 25 bp, Homo sapien
cacaaacatttttgtgcctgtagtc

SEQ ID NO: 956615 - DNA, 25 bp, Homo sapien
tgaactcctgccctaagtgctggaa

SEQ ID NO: 956616 - DNA, 25 bp, Homo sapien
acgcctggccacaaacatttttgtg

SEQ ID NO: 956617 - DNA, 25 bp, Homo sapien
ggcatggtgtgaccgtgctttcatg

SEQ ID NO: 956618 - DNA, 25 bp, Homo sapien
gaaaatcaacatcaatcgagcttct

SEQ ID NO: 956619 - DNA, 25 bp, Homo sapien
caacatcaatcgagcttctgccttc

SEQ ID NO: 956620 - DNA, 25 bp, Homo sapien
tggtgtgaccgtgctttcatggtct

SEQ ID NO: 956621 - DNA, 25 bp, Homo sapien
ccttacaaaaagtgagatggtatca

SEQ ID NO: 956622 - DNA, 25 bp, Homo sapien
tacaaaaagtgagatggtatcaaca

SEQ ID NO: 956623 - DNA, 25 bp, Homo sapien
aaagtgagatggtatcaacagaggt

SEQ ID NO: 956624 - DNA, 25 bp, Homo sapien
caccttacaaaaagtgagatggtat

SEQ ID NO: 956625 - DNA, 25 bp, Homo sapien
gctggtggctctgactgtttccggc

SEQ ID NO: 956626 - DNA, 25 bp, Homo sapien
tggtggctctgactgtttccggcta

SEQ ID NO: 956627 - DNA, 25 bp, Homo sapien
ctggtggctctgactgtttccggct

SEQ ID NO: 956628 - DNA, 25 bp, Homo sapien
gtggctctgactgtttccggctatg

SEQ ID NO: 956629 - DNA, 25 bp, Homo sapien
tcacattgcgattgaagctatcttc

SEQ ID NO: 956630 - DNA, 25 bp, Homo sapien
cattgcgattgaagctatcttcaaa

SEQ ID NO: 956631 - DNA, 25 bp, Homo sapien
tgcgattgaagctatcttcaaagtc

SEQ ID NO: 956632 - DNA, 25 bp, Homo sapien
cttcacattgcgattgaagctatct

SEQ ID NO: 956633 - DNA, 25 bp, Homo sapien
ccagcccccaccagggttggtacat

SEQ ID NO: 956634 - DNA, 25 bp, Homo sapien
cagcccccaccagggttggtacatg

SEQ ID NO: 956635 - DNA, 25 bp, Homo sapien
ggggccaggaagacgaggaccgcag

SEQ ID NO: 956636 - DNA, 25 bp, Homo sapien
agacgaggaccgcagggtaggtttg

SEQ ID NO: 956637 - DNA, 25 bp, Homo sapien
ccgcagggtaggtttggcaatccag

SEQ ID NO: 956638 - DNA, 25 bp, Homo sapien
gaggaccgcagggtaggtttggcaa

SEQ ID NO: 956639 - DNA, 25 bp, Homo sapien
gggttgtctttctggtttcatggga

SEQ ID NO: 956640 - DNA, 25 bp, Homo sapien
ggttgtctttctggtttcatgggac

SEQ ID NO: 956641 - DNA, 25 bp, Homo sapien
tttcagctctgaaacatcacacatg

SEQ ID NO: 956642 - DNA, 25 bp, Homo sapien
ctaactgaggttgaaactttcggct

SEQ ID NO: 956643 - DNA, 25 bp, Homo sapien
caagagtttgccgacctaactgagg

SEQ ID NO: 956644 - DNA, 25 bp, Homo sapien
cacatgtaagattcaagagtttgcc

SEQ ID NO: 956645 - DNA, 25 bp, Homo sapien
cctcctgcctggtgtctgccattag

SEQ ID NO: 956646 - DNA, 25 bp, Homo sapien
cctgcctggtgtctgccattagcat

SEQ ID NO: 956647 - DNA, 25 bp, Homo sapien
tccacatctcccctgggtccagtgt

SEQ ID NO: 956648 - DNA, 25 bp, Homo sapien
aaaatccacatctcccctgggtcca

SEQ ID NO: 956649 - DNA, 25 bp, Homo sapien
tgctcaacgtggttagctgcacaag

SEQ ID NO: 956650 - DNA, 25 bp, Homo sapien
tgtaaaccaaagcttcactgaaccc

SEQ ID NO: 956651 - DNA, 25 bp, Homo sapien
ctgaaccctcgacccaaatcagtaa

SEQ ID NO: 956652 - DNA, 25 bp, Homo sapien
taactcaagtgcgtcaatcataatg

SEQ ID NO: 956653 - DNA, 25 bp, Homo sapien
ctaggaaaggtgagcgcgatctcgc

SEQ ID NO: 956654 - DNA, 25 bp, Homo sapien
aaaggtgagcgcgatctcgcgccca

SEQ ID NO: 956655 - DNA, 25 bp, Homo sapien
aggtgagcgcgatctcgcgcccaca

SEQ ID NO: 956656 - DNA, 25 bp, Homo sapien
ggaaaggtgagcgcgatctcgcgcc

SEQ ID NO: 956657 - DNA, 25 bp, Homo sapien
agtgctctgggtcataagcctggat

SEQ ID NO: 956658 - DNA, 25 bp, Homo sapien
ccagtgctctgggtcataagcctgg

SEQ ID NO: 956659 - DNA, 25 bp, Homo sapien
cagtgctctgggtcataagcctgga

SEQ ID NO: 956660 - DNA, 25 bp, Homo sapien
ctcgccaggatacccctctctcccc

SEQ ID NO: 956661 - DNA, 25 bp, Homo sapien
gactcgccaggatacccctctctcc

SEQ ID NO: 956662 - DNA, 25 bp, Homo sapien
gggactcgccaggatacccctctct

SEQ ID NO: 956663 - DNA, 25 bp, Homo sapien
ggactcgccaggatacccctctctc

SEQ ID NO: 956664 - DNA, 25 bp, Homo sapien
cgagttcatggaacggtataactgg

SEQ ID NO: 956665 - DNA, 25 bp, Homo sapien
ctcgagttcatggaacggtataact

SEQ ID NO: 956666 - DNA, 25 bp, Homo sapien
cagaagaagtggaaccgtcgtttct

SEQ ID NO: 956667 - DNA, 25 bp, Homo sapien
gccctcgagttcatggaacggtata

SEQ ID NO: 956668 - DNA, 25 bp, Homo sapien
gaatggcctaactggaaccaacgct

SEQ ID NO: 956669 - DNA, 25 bp, Homo sapien
tcatggaatggcctaactggaacca

SEQ ID NO: 956670 - DNA, 25 bp, Homo sapien
ctcgggttcatggaatggcctaact

SEQ ID NO: 956671 - DNA, 25 bp, Homo sapien
agcggttcttcctatacaggaagtg

SEQ ID NO: 956672 - DNA, 25 bp, Homo sapien
aggacagaaatcaggttgctgctca

SEQ ID NO: 956673 - DNA, 25 bp, Homo sapien
caggagaggcctccggctgaggtca

SEQ ID NO: 956674 - DNA, 25 bp, Homo sapien
ctgaggacagaaatcaggttgctgc

SEQ ID NO: 956675 - DNA, 25 bp, Homo sapien
accaccaggagaggcctccggctga

SEQ ID NO: 956676 - DNA, 25 bp, Homo sapien
gaccgtccctagctcaggactggca

SEQ ID NO: 956677 - DNA, 25 bp, Homo sapien
tggcacccaccctgcagagagccat

SEQ ID NO: 956678 - DNA, 25 bp, Homo sapien
gactggcacccaccctgcagagagc

SEQ ID NO: 956679 - DNA, 25 bp, Homo sapien
aggtaagggaccgtccctagctcag

SEQ ID NO: 956680 - DNA, 25 bp, Homo sapien
agccagcccggctgaaatacgctat

SEQ ID NO: 956681 - DNA, 25 bp, Homo sapien
gggaagccagcccggctgaaatacg

SEQ ID NO: 956682 - DNA, 25 bp, Homo sapien
gaagccagcccggctgaaatacgct

SEQ ID NO: 956683 - DNA, 25 bp, Homo sapien
aggaggggaagccagcccggctgaa

SEQ ID NO: 956684 - DNA, 25 bp, Homo sapien
gaaggtcggatgcaaatccgagaag

SEQ ID NO: 956685 - DNA, 25 bp, Homo sapien
aaggtcggatgcaaatccgagaagc

SEQ ID NO: 956686 - DNA, 25 bp, Homo sapien
tgtctaggtcggctggtgtcaggag

SEQ ID NO: 956687 - DNA, 25 bp, Homo sapien
gtgtgtctaggtcggctggtgtcag

SEQ ID NO: 956688 - DNA, 25 bp, Homo sapien
agggggtgtgtctaggtcggctggt

SEQ ID NO: 956689 - DNA, 25 bp, Homo sapien
tgtcaggagggtcttttgtgtgcca

SEQ ID NO: 956690 - DNA, 25 bp, Homo sapien
ccaagaatcttttaatgacaggatc

SEQ ID NO: 956691 - DNA, 25 bp, Homo sapien
aggccaagaatcttttaatgacagg

SEQ ID NO: 956692 - DNA, 25 bp, Homo sapien
gatctttgtcccaggccaagaatct

SEQ ID NO: 956693 - DNA, 25 bp, Homo sapien
ctttgtcccaggccaagaatctttt

SEQ ID NO: 956694 - DNA, 25 bp, Homo sapien
aaagaacaggattggaggtgctctc

SEQ ID NO: 956695 - DNA, 25 bp, Homo sapien
aagaacaggattggaggtgctctct

SEQ ID NO: 956696 - DNA, 25 bp, Homo sapien
ggctcaggggcgagcaccttccgtg

SEQ ID NO: 956697 - DNA, 25 bp, Homo sapien
ctcaggggcgagcaccttccgtggc

SEQ ID NO: 956698 - DNA, 25 bp, Homo sapien
gcaaaaggacctatgcggggggctg

SEQ ID NO: 956699 - DNA, 25 bp, Homo sapien
caaaaggacctatgcggggggctgg

SEQ ID NO: 956700 - DNA, 25 bp, Homo sapien
tgggataacaagcatgcctggctaa

SEQ ID NO: 956701 - DNA, 25 bp, Homo sapien
tcaaagcaacctcttccacctgggt

SEQ ID NO: 956702 - DNA, 25 bp, Homo sapien
tgttagtataaatgaggtttcgcta

SEQ ID NO: 956703 - DNA, 25 bp, Homo sapien
cgctatattggtctggttggtctcg

SEQ ID NO: 956704 - DNA, 25 bp, Homo sapien
aagaacaggattggaggtgctctct

SEQ ID NO: 956705 - DNA, 25 bp, Homo sapien
aaagaacaggattggaggtgctctc

SEQ ID NO: 956706 - DNA, 25 bp, Homo sapien
tggtgctcagggaggatggatgaca

SEQ ID NO: 956707 - DNA, 25 bp, Homo sapien
caagctgactgttgaagtccttgtg

SEQ ID NO: 956708 - DNA, 25 bp, Homo sapien
tgactgttgaagtccttgtggtgct

SEQ ID NO: 956709 - DNA, 25 bp, Homo sapien
ggatgacactcgctgttgcttcagc

SEQ ID NO: 956710 - DNA, 25 bp, Homo sapien
tgagtaaagaaaccaggccaccgtg

SEQ ID NO: 956711 - DNA, 25 bp, Homo sapien
accaggccaccgtgtaatgcttctg

SEQ ID NO: 956712 - DNA, 25 bp, Homo sapien
aggccaccgtgtaatgcttctgcat

SEQ ID NO: 956713 - DNA, 25 bp, Homo sapien
aagaaaccaggccaccgtgtaatgc

SEQ ID NO: 956714 - DNA, 25 bp, Homo sapien
atctgtcccctcttacggaacctag

SEQ ID NO: 956715 - DNA, 25 bp, Homo sapien
tacggaacctagtctccgttctgtc

SEQ ID NO: 956716 - DNA, 25 bp, Homo sapien
cttacggaacctagtctccgttctg

SEQ ID NO: 956717 - DNA, 25 bp, Homo sapien
tcaggaaggtcggaatctctgatgt

SEQ ID NO: 956718 - DNA, 25 bp, Homo sapien
caggaaggtcggaatctctgatgtc

SEQ ID NO: 956719 - DNA, 25 bp, Homo sapien
atcaggaaggtcggaatctctgatg

SEQ ID NO: 956720 - DNA, 25 bp, Homo sapien
tccaatcaggaaggtcggaatctct

SEQ ID NO: 956721 - DNA, 25 bp, Homo sapien
tctaggtctatcagccacagtctct

SEQ ID NO: 956722 - DNA, 25 bp, Homo sapien
ttctgcctttgcaggccggagccct

SEQ ID NO: 956723 - DNA, 25 bp, Homo sapien
tgtcactcttttagacccttctgag

SEQ ID NO: 956724 - DNA, 25 bp, Homo sapien
tctgcaagtttccaagagcagcaga

SEQ ID NO: 956725 - DNA, 25 bp, Homo sapien
cattcaaagatgtggctgtggattt

SEQ ID NO: 956726 - DNA, 25 bp, Homo sapien
tctcccatacctggattacagtgga

SEQ ID NO: 956727 - DNA, 25 bp, Homo sapien
gacaacatagcagtaccagtgagat

SEQ ID NO: 956728 - DNA, 25 bp, Homo sapien
gaaatgccttgcagatcatcagcac

SEQ ID NO: 956729 - DNA, 25 bp, Homo sapien
gacattagtgttcagtattctccca

SEQ ID NO: 956730 - DNA, 25 bp, Homo sapien
taacatgggtgaacaaggtgccacc

SEQ ID NO: 956731 - DNA, 25 bp, Homo sapien
ggctagagatctgggtaatcatttc

SEQ ID NO: 956732 - DNA, 25 bp, Homo sapien
agcttccttcccatgtcaggtaatg

SEQ ID NO: 956733 - DNA, 25 bp, Homo sapien
cacaaaggatctctacagcactatt

SEQ ID NO: 956734 - DNA, 25 bp, Homo sapien
ccttacaaaaagtgagatggtatca

SEQ ID NO: 956735 - DNA, 25 bp, Homo sapien
tacaaaaagtgagatggtatcaaca

SEQ ID NO: 956736 - DNA, 25 bp, Homo sapien
aaagtgagatggtatcaacagaggt

SEQ ID NO: 956737 - DNA, 25 bp, Homo sapien
caccttacaaaaagtgagatggtat

SEQ ID NO: 956738 - DNA, 25 bp, Homo sapien
gctggtggctctgactgtttccggc

SEQ ID NO: 956739 - DNA, 25 bp, Homo sapien
gtggctctgactgtttccggctatg

SEQ ID NO: 956740 - DNA, 25 bp, Homo sapien
tggtggctctgactgtttccggcta

SEQ ID NO: 956741 - DNA, 25 bp, Homo sapien
ctggtggctctgactgtttccggct

SEQ ID NO: 956742 - DNA, 25 bp, Homo sapien
caagctgtcttcaaagtcattgcct

SEQ ID NO: 956743 - DNA, 25 bp, Homo sapien
tttcttcttcacactgtgattcaag

SEQ ID NO: 956744 - DNA, 25 bp, Homo sapien
cttcacactgtgattcaagctgtct

SEQ ID NO: 956745 - DNA, 25 bp, Homo sapien
tgtgattcaagctgtcttcaaagtc

SEQ ID NO: 956746 - DNA, 25 bp, Homo sapien
ccaggcaacaagtaaagaactcttt

SEQ ID NO: 956747 - DNA, 25 bp, Homo sapien
caaaatccccaagtagaagaactag

SEQ ID NO: 956748 - DNA, 25 bp, Homo sapien
tacacagacctgtttacaaaatccc

SEQ ID NO: 956749 - DNA, 25 bp, Homo sapien
ttatacaatttaccaggcaacaagt

SEQ ID NO: 956750 - DNA, 25 bp, Homo sapien
ccagcccccaccaggggttgtacat

SEQ ID NO: 956751 - DNA, 25 bp, Homo sapien
cagcccccaccaggggttgtacata

SEQ ID NO: 956752 - DNA, 25 bp, Homo sapien
acacgatggatgatggattaaaaac

SEQ ID NO: 956753 - DNA, 25 bp, Homo sapien
gaaatgtgtttaagagaggtttaga

SEQ ID NO: 956754 - DNA, 25 bp, Homo sapien
ggtttagacacgatggatgatggat

SEQ ID NO: 956755 - DNA, 25 bp, Homo sapien
taagagaggtttagacacgatggat

SEQ ID NO: 956756 - DNA, 25 bp, Homo sapien
gaagtggccgcacaatgcaacatct

SEQ ID NO: 956757 - DNA, 25 bp, Homo sapien
tcatcaatgtgggaaaacgagaggg

SEQ ID NO: 956758 - DNA, 25 bp, Homo sapien
tgaacgagtacagcacttctggtgt

SEQ ID NO: 956759 - DNA, 25 bp, Homo sapien
ggtgtattcacacagtcccacgaat

SEQ ID NO: 956760 - DNA, 25 bp, Homo sapien
acctcccgcagctctctgcagtggg

SEQ ID NO: 956761 - DNA, 25 bp, Homo sapien
gaactagaagatgcagacaaggccc

SEQ ID NO: 956762 - DNA, 25 bp, Homo sapien
tctgagggatggtttgagtccctgt

SEQ ID NO: 956763 - DNA, 25 bp, Homo sapien
tgtcatcgaagggtagactggcaga

SEQ ID NO: 956764 - DNA, 25 bp, Homo sapien
ccgcagggtaggtttggcaatccag

SEQ ID NO: 956765 - DNA, 25 bp, Homo sapien
agacgaggaccgcagggtaggtttg

SEQ ID NO: 956766 - DNA, 25 bp, Homo sapien
ggggccaggaagacgaggaccgcag

SEQ ID NO: 956767 - DNA, 25 bp, Homo sapien
gaggaccgcagggtaggtttggcaa

SEQ ID NO: 956768 - DNA, 25 bp, Homo sapien
tgagcagtccctttctttgcaaggg

SEQ ID NO: 956769 - DNA, 25 bp, Homo sapien
gaagaaagggctcctaccacagcac

SEQ ID NO: 956770 - DNA, 25 bp, Homo sapien
ttctccatccccagccgtgagcagt

SEQ ID NO: 956771 - DNA, 25 bp, Homo sapien
aaagggctcctaccacagcacttct

SEQ ID NO: 956772 - DNA, 25 bp, Homo sapien
tatagagtaattcaaggcggacaaa

SEQ ID NO: 956773 - DNA, 25 bp, Homo sapien
cagggacgtgagcatctagctgcac

SEQ ID NO: 956774 - DNA, 25 bp, Homo sapien
gaacaggaaatgaaaccccgcagct

SEQ ID NO: 956775 - DNA, 25 bp, Homo sapien
atccaaggaagtgcccggacaaagc

SEQ ID NO: 956776 - DNA, 25 bp, Homo sapien
tgcccggcgccttatacgatttctg

SEQ ID NO: 956777 - DNA, 25 bp, Homo sapien
cctgggtccctgtcttagtgaatag

SEQ ID NO: 956778 - DNA, 25 bp, Homo sapien
gagaacacgtttgagcctgggtccc

SEQ ID NO: 956779 - DNA, 25 bp, Homo sapien
tctgcagacaacataggcagaggct

SEQ ID NO: 956780 - DNA, 25 bp, Homo sapien
gcacccttgaccctgaacgattttg

SEQ ID NO: 956781 - DNA, 25 bp, Homo sapien
aatgtcgtgtggttacaggacccgg

SEQ ID NO: 956782 - DNA, 25 bp, Homo sapien
gaacagggacttttgacttcccatc

SEQ ID NO: 956783 - DNA, 25 bp, Homo sapien
tgccatgcggtctaggaacagggac

SEQ ID NO: 956784 - DNA, 25 bp, Homo sapien
caggggtccagcagctctgcggagg

SEQ ID NO: 956785 - DNA, 25 bp, Homo sapien
gggtccagcagctctgcggaggcat

SEQ ID NO: 956786 - DNA, 25 bp, Homo sapien
cagcccaaggagcaggggtccagca

SEQ ID NO: 956787 - DNA, 25 bp, Homo sapien
tcagcccaaggagcaggggtccagc

SEQ ID NO: 956788 - DNA, 25 bp, Homo sapien
gaaaggcggctgtttggctctttct

SEQ ID NO: 956789 - DNA, 25 bp, Homo sapien
catggggcgatgacaatgtttgcca

SEQ ID NO: 956790 - DNA, 25 bp, Homo sapien
cgatgacaatgtttgccacagcctc

SEQ ID NO: 956791 - DNA, 25 bp, Homo sapien
ctggaacctggctcgtgctgtgacc

SEQ ID NO: 956792 - DNA, 25 bp, Homo sapien
gggaccacgccatagagggtctgct

SEQ ID NO: 956793 - DNA, 25 bp, Homo sapien
ctgcagctcccggtgctctcgtgtt

SEQ ID NO: 956794 - DNA, 25 bp, Homo sapien
gaccacgccatagagggtctgctcc

SEQ ID NO: 956795 - DNA, 25 bp, Homo sapien
tgctctcgtgttctgggaaggcctg

SEQ ID NO: 956796 - DNA, 25 bp, Homo sapien
ggtcaccggagagtgagcaggcgga

SEQ ID NO: 956797 - DNA, 25 bp, Homo sapien
tgagccagagcagaaggcgagggat

SEQ ID NO: 956798 - DNA, 25 bp, Homo sapien
gaacaggctgagagaggcgggactg

SEQ ID NO: 956799 - DNA, 25 bp, Homo sapien
aagtgggtggagctcctccttgcat

SEQ ID NO: 956800 - DNA, 25 bp, Homo sapien
aaactggcatccaggcactgggccc

SEQ ID NO: 956801 - DNA, 25 bp, Homo sapien
caaactggcatccaggcactgggcc

SEQ ID NO: 956802 - DNA, 25 bp, Homo sapien
ccctgtagcatctgtgatagcttct

SEQ ID NO: 956803 - DNA, 25 bp, Homo sapien
ttcatcggttcatgtcacagggatt

SEQ ID NO: 956804 - DNA, 25 bp, Homo sapien
tgtagtgtagattgccccggcccct

SEQ ID NO: 956805 - DNA, 25 bp, Homo sapien
gcttctgtcccttcatcggttcatg

SEQ ID NO: 956806 - DNA, 25 bp, Homo sapien
tcagcagtagcctgtaaaagacaac

SEQ ID NO: 956807 - DNA, 25 bp, Homo sapien
gatggatttaacctggcgtccgtaa

SEQ ID NO: 956808 - DNA, 25 bp, Homo sapien
cctggtttcattctggctgtcagca

SEQ ID NO: 956809 - DNA, 25 bp, Homo sapien
gaaccctgggatttgcttatgtcca

SEQ ID NO: 956810 - DNA, 25 bp, Homo sapien
tcgtggtctgtgggtagccggaccc

SEQ ID NO: 956811 - DNA, 25 bp, Homo sapien
agctcgtggtctgtgggtagccgga

SEQ ID NO: 956812 - DNA, 25 bp, Homo sapien
gctcgtggtctgtgggtagccggac

SEQ ID NO: 956813 - DNA, 25 bp, Homo sapien
ctgtgggtagccggacccccgatgg

SEQ ID NO: 956814 - DNA, 25 bp, Homo sapien
gcagctccggtgagtgtggcggcgc

SEQ ID NO: 956815 - DNA, 25 bp, Homo sapien
cctgcggctgggggggccggaattg

SEQ ID NO: 956816 - DNA, 25 bp, Homo sapien
cggccacgcagtccgagcgggagcc

SEQ ID NO: 956817 - DNA, 25 bp, Homo sapien
cacgcagtccgagcgggagccgagc

SEQ ID NO: 956818 - DNA, 25 bp, Homo sapien
gaaggggacgactgtaggctgcccg

SEQ ID NO: 956819 - DNA, 25 bp, Homo sapien
ggggaaggggacgactgtaggctgc

SEQ ID NO: 956820 - DNA, 25 bp, Homo sapien
ggaaggggacgactgtaggctgccc

SEQ ID NO: 956821 - DNA, 25 bp, Homo sapien
aaggggacgactgtaggctgcccgg

SEQ ID NO: 956822 - DNA, 25 bp, Homo sapien
agaggatcagggtcggcggcgcagc

SEQ ID NO: 956823 - DNA, 25 bp, Homo sapien
ttggtgacctccaccccgcgggatc

SEQ ID NO: 956824 - DNA, 25 bp, Homo sapien
cggcgcagccggttccggacaccgg

SEQ ID NO: 956825 - DNA, 25 bp, Homo sapien
gggtgcggcgcccagaggatcaggg

SEQ ID NO: 956826 - DNA, 25 bp, Homo sapien
ccagaatgatctagcagtgcccaga

SEQ ID NO: 956827 - DNA, 25 bp, Homo sapien
tcccaaaccagaatgatctagcagt

SEQ ID NO: 956828 - DNA, 25 bp, Homo sapien
cagaccgttccactcaccaatttct

SEQ ID NO: 956829 - DNA, 25 bp, Homo sapien
tgatctagcagtgcccagaccgttc

SEQ ID NO: 956830 - DNA, 25 bp, Homo sapien
gatcgaggagctccacaagctcaag

SEQ ID NO: 956831 - DNA, 25 bp, Homo sapien
tggaggccgtgagcaacatccacaa

SEQ ID NO: 956832 - DNA, 25 bp, Homo sapien
ggatcaagttcctccccgtggatgc

SEQ ID NO: 956833 - DNA, 25 bp, Homo sapien
tgcatcctgcccaatgtggaggccg

SEQ ID NO: 956834 - DNA, 25 bp, Homo sapien
acagtgatgacacgaaggcttcggc

SEQ ID NO: 956835 - DNA, 25 bp, Homo sapien
caaggctgccgggtagttcaagacc

SEQ ID NO: 956836 - DNA, 25 bp, Homo sapien
tttgcgttcagagaaggattgcccc

SEQ ID NO: 956837 - DNA, 25 bp, Homo sapien
cccagagacccgtggtggacttcat

SEQ ID NO: 956838 - DNA, 25 bp, Homo sapien
tctcataaatagtcactggggccgg

SEQ ID NO: 956839 - DNA, 25 bp, Homo sapien
taacctggagagtcagccatgcctt

SEQ ID NO: 956840 - DNA, 25 bp, Homo sapien
cgggagaatggcaatggcgtgaacc

SEQ ID NO: 956841 - DNA, 25 bp, Homo sapien
agctgtaacctggagagtcagccat

SEQ ID NO: 956842 - DNA, 25 bp, Homo sapien
aatagctaaaatatgattgtaccac

SEQ ID NO: 956843 - DNA, 25 bp, Homo sapien
aaaaatagctaaaatatgattgtac

SEQ ID NO: 956844 - DNA, 25 bp, Homo sapien
gggcgacagagggtgactcctcaaa

SEQ ID NO: 956845 - DNA, 25 bp, Homo sapien
cagagggtgactcctcaaaaaaaag

SEQ ID NO: 956846 - DNA, 25 bp, Homo sapien
tgaagagtatttaagaacagagggc

SEQ ID NO: 956847 - DNA, 25 bp, Homo sapien
gcagcctagaaattcggtttctgga

SEQ ID NO: 956848 - DNA, 25 bp, Homo sapien
ccagggcccatcctaatttggagca

SEQ ID NO: 956849 - DNA, 25 bp, Homo sapien
ggcgatgaggaatgccattgcagcc

SEQ ID NO: 956850 - DNA, 25 bp, Homo sapien
tgacatggtggtaaagccatcctcc

SEQ ID NO: 956851 - DNA, 25 bp, Homo sapien
cttgacatggtggtaaagccatcct

SEQ ID NO: 956852 - DNA, 25 bp, Homo sapien
ccttgacatggtggtaaagccatcc

SEQ ID NO: 956853 - DNA, 25 bp, Homo sapien
gacatggtggtaaagccatcctccc

SEQ ID NO: 956854 - DNA, 25 bp, Homo sapien
tgaaaccccgtgagttgcaggaggc

SEQ ID NO: 956855 - DNA, 25 bp, Homo sapien
caatcccgggatcagtcaagtctgg

SEQ ID NO: 956856 - DNA, 25 bp, Homo sapien
gacagtgagatatcgggaaacccca

SEQ ID NO: 956857 - DNA, 25 bp, Homo sapien
ccaaaaaagtgtggccacggtccag

SEQ ID NO: 956858 - DNA, 25 bp, Homo sapien
tcccggaaagtgacgcagacgcggc

SEQ ID NO: 956859 - DNA, 25 bp, Homo sapien
cagacgcggcgggcctcgatgtgtc

SEQ ID NO: 956860 - DNA, 25 bp, Homo sapien
cgacagctcccggaaagtgacgcag

SEQ ID NO: 956861 - DNA, 25 bp, Homo sapien
gagggcgatccgcagcagttcctgg

SEQ ID NO: 956862 - DNA, 25 bp, Homo sapien
gaggccgcagaagccctcggtcttt

SEQ ID NO: 956863 - DNA, 25 bp, Homo sapien
gaccggctgggtgctatcacgctgt

SEQ ID NO: 956864 - DNA, 25 bp, Homo sapien
tagtccaggttgcactgctcgacgg

SEQ ID NO: 956865 - DNA, 25 bp, Homo sapien
tcccgacacatggacagcacggtgg

SEQ ID NO: 956866 - DNA, 25 bp, Homo sapien
tgcttcctccgtccagactgggaga

SEQ ID NO: 956867 - DNA, 25 bp, Homo sapien
tcccgggtcacaaagtcctcgatca

SEQ ID NO: 956868 - DNA, 25 bp, Homo sapien
tgagccgcaccaactcggcttcttc

SEQ ID NO: 956869 - DNA, 25 bp, Homo sapien
gggtcacggtccatgagccgcacca

SEQ ID NO: 956870 - DNA, 25 bp, Homo sapien
cggagcagtaaatgaaacggtatgt

SEQ ID NO: 956871 - DNA, 25 bp, Homo sapien
gcccagccggtgtcggagcagtaaa

SEQ ID NO: 956872 - DNA, 25 bp, Homo sapien
ccggtgtcggagcagtaaatgaaac

SEQ ID NO: 956873 - DNA, 25 bp, Homo sapien
tgtcggagcagtaaatgaaacggta

SEQ ID NO: 956874 - DNA, 25 bp, Homo sapien
gctgccgctcgcagatcagacaggt

SEQ ID NO: 956875 - DNA, 25 bp, Homo sapien
gggcagctcccagggcgggtcactg

SEQ ID NO: 956876 - DNA, 25 bp, Homo sapien
agatcagacaggtccggatgccctt

SEQ ID NO: 956877 - DNA, 25 bp, Homo sapien
ttgcaaccgcattcccgaaggactt

SEQ ID NO: 956878 - DNA, 25 bp, Homo sapien
ggagctcatgggtttgcacacttct

SEQ ID NO: 956879 - DNA, 25 bp, Homo sapien
aatccatttgcttgcgaagtcaccg

SEQ ID NO: 956880 - DNA, 25 bp, Homo sapien
gaccccggatctttggtccagaatg

SEQ ID NO: 956881 - DNA, 25 bp, Homo sapien
gagttgaggcttctagagcagagac

SEQ ID NO: 956882 - DNA, 25 bp, Homo sapien
ccgctatactttattaggaatataa

SEQ ID NO: 956883 - DNA, 25 bp, Homo sapien
cgctatactttattaggaatataaa

SEQ ID NO: 956884 - DNA, 25 bp, Homo sapien
gctatactttattaggaatataaaa

SEQ ID NO: 956885 - DNA, 25 bp, Homo sapien
catggctgggaccggccgctctcct

SEQ ID NO: 956886 - DNA, 25 bp, Homo sapien
gggtggccacaaggcgggccatggc

SEQ ID NO: 956887 - DNA, 25 bp, Homo sapien
tgggaccggccgctctcctcggtgt

SEQ ID NO: 956888 - DNA, 25 bp, Homo sapien
tatgtacaggacacgtcggtgtcag

SEQ ID NO: 956889 - DNA, 25 bp, Homo sapien
caggcacaggtaggaacggggctca

SEQ ID NO: 956890 - DNA, 25 bp, Homo sapien
cacaggtaggaacggggctcacagg

SEQ ID NO: 956891 - DNA, 25 bp, Homo sapien
gtaggaacggggctcacaggccgag

SEQ ID NO: 956892 - DNA, 25 bp, Homo sapien
acggggctcacaggccgagcagagc

SEQ ID NO: 956893 - DNA, 25 bp, Homo sapien
ctactcaattccttcctgcttgtct

SEQ ID NO: 956894 - DNA, 25 bp, Homo sapien
cttcctgcttgtcttttatggccac

SEQ ID NO: 956895 - DNA, 25 bp, Homo sapien
ttccttcctgcttgtcttttatggc

SEQ ID NO: 956896 - DNA, 25 bp, Homo sapien
tactcaattccttcctgcttgtctt

SEQ ID NO: 956897 - DNA, 25 bp, Homo sapien
agtggagcagccaaagggccctccc

SEQ ID NO: 956898 - DNA, 25 bp, Homo sapien
gcaaggacgctggaaacacatgccc

SEQ ID NO: 956899 - DNA, 25 bp, Homo sapien
cagccattctctatggcagccccgg

SEQ ID NO: 956900 - DNA, 25 bp, Homo sapien
ctggtgagcagacgactcagacgtt

SEQ ID NO: 956901 - DNA, 25 bp, Homo sapien
tccagcagggacagctcactgatga

SEQ ID NO: 956902 - DNA, 25 bp, Homo sapien
tgatggcgttggtaaaggcttcctg

SEQ ID NO: 956903 - DNA, 25 bp, Homo sapien
tcggatgatgatcttgtgctccaag

SEQ ID NO: 956904 - DNA, 25 bp, Homo sapien
ctgtagtccggcgtggtctgcactc

SEQ ID NO: 956905 - DNA, 25 bp, Homo sapien
gagcagaagaacagactttctagcc

SEQ ID NO: 956906 - DNA, 25 bp, Homo sapien
tagcctcatgcccaagctgggtagc

SEQ ID NO: 956907 - DNA, 25 bp, Homo sapien
acagtgtgagggtctagcctcatgc

SEQ ID NO: 956908 - DNA, 25 bp, Homo sapien
cttttaggaagatacctcatgtggg

SEQ ID NO: 956909 - DNA, 25 bp, Homo sapien
caccgcagtgctggcaaagagatct

SEQ ID NO: 956910 - DNA, 25 bp, Homo sapien
accgggcaccgcagtgctggcaaag

SEQ ID NO: 956911 - DNA, 25 bp, Homo sapien
gctggaaacagattccagcaacctc

SEQ ID NO: 956912 - DNA, 25 bp, Homo sapien
tgcatccatgaggttgaaggacccg

SEQ ID NO: 956913 - DNA, 25 bp, Homo sapien
cttggaacttgtgctttgcccaggg

SEQ ID NO: 956914 - DNA, 25 bp, Homo sapien
gaacttgtgctttgcccaggggggc

SEQ ID NO: 956915 - DNA, 25 bp, Homo sapien
acttggaacttgtgctttgcccagg

SEQ ID NO: 956916 - DNA, 25 bp, Homo sapien
tggaacttgtgctttgcccaggggg

SEQ ID NO: 956917 - DNA, 25 bp, Homo sapien
ggcattgggtaccttggtgtccttg

SEQ ID NO: 956918 - DNA, 25 bp, Homo sapien
taaacaggcattgggtaccttggtg

SEQ ID NO: 956919 - DNA, 25 bp, Homo sapien
gtttcccagtgtgtggtcttctttg

SEQ ID NO: 956920 - DNA, 25 bp, Homo sapien
tggtgaataaacaggcattgggtac

SEQ ID NO: 956921 - DNA, 25 bp, Homo sapien
caccctgagtctaaaccctgtctcc

SEQ ID NO: 956922 - DNA, 25 bp, Homo sapien
cccaccctgagtctaaaccctgtct

SEQ ID NO: 956923 - DNA, 25 bp, Homo sapien
cctcccaccctgagtctaaaccctg

SEQ ID NO: 956924 - DNA, 25 bp, Homo sapien
ctaaaccctgtctcctcccggccag

SEQ ID NO: 956925 - DNA, 25 bp, Homo sapien
ctcggcccgccgcagccggcgtcac

SEQ ID NO: 956926 - DNA, 25 bp, Homo sapien
gcccgccgcagccggcgtcacttac

SEQ ID NO: 956927 - DNA, 25 bp, Homo sapien
tcggcccgccgcagccggcgtcact

SEQ ID NO: 956928 - DNA, 25 bp, Homo sapien
cggcccgccgcagccggcgtcactt

SEQ ID NO: 956929 - DNA, 25 bp, Homo sapien
gaagagcaagaacgactcgaaggct

SEQ ID NO: 956930 - DNA, 25 bp, Homo sapien
gccctcgaagagcaagaacgactcg

SEQ ID NO: 956931 - DNA, 25 bp, Homo sapien
ctcgccctcgaagagcaagaacgac

SEQ ID NO: 956932 - DNA, 25 bp, Homo sapien
agcaagaacgactcgaaggctggag

SEQ ID NO: 956933 - DNA, 25 bp, Homo sapien
catcgccccctgttgggctggagga

SEQ ID NO: 956934 - DNA, 25 bp, Homo sapien
cggcggggcaaacccgctcaaggat

SEQ ID NO: 956935 - DNA, 25 bp, Homo sapien
aacccgctcaaggatcggctcatcg

SEQ ID NO: 956936 - DNA, 25 bp, Homo sapien
gctcatcgccccctgttgggctgga

SEQ ID NO: 956937 - DNA, 25 bp, Homo sapien
tgcacttggtggatgtgggcagcaa

SEQ ID NO: 956938 - DNA, 25 bp, Homo sapien
tggatgtgggcagcaagccacccag

SEQ ID NO: 956939 - DNA, 25 bp, Homo sapien
tcccaaagtgcacttggtggatgtg

SEQ ID NO: 956940 - DNA, 25 bp, Homo sapien
cacttggtggatgtgggcagcaagc

SEQ ID NO: 956941 - DNA, 25 bp, Homo sapien
gaggggacaatgaggagtgaccaga

SEQ ID NO: 956942 - DNA, 25 bp, Homo sapien
ggagctgaggggacaatgaggagtg

SEQ ID NO: 956943 - DNA, 25 bp, Homo sapien
gctgaggggacaatgaggagtgacc

SEQ ID NO: 956944 - DNA, 25 bp, Homo sapien
tttgtagtaattattctttattcca

SEQ ID NO: 956945 - DNA, 25 bp, Homo sapien
gcccaccgtggtctagctgtagcgt

SEQ ID NO: 956946 - DNA, 25 bp, Homo sapien
gccaagcccaccgtggtctagctgt

SEQ ID NO: 956947 - DNA, 25 bp, Homo sapien
aagcccaccgtggtctagctgtagc

SEQ ID NO: 956948 - DNA, 25 bp, Homo sapien
caagcccaccgtggtctagctgtag

SEQ ID NO: 956949 - DNA, 25 bp, Homo sapien
gggtttccctgtttggagctctcca

SEQ ID NO: 956950 - DNA, 25 bp, Homo sapien
gtttccctgtttggagctctccaag

SEQ ID NO: 956951 - DNA, 25 bp, Homo sapien
ggtttccctgtttggagctctccaa

SEQ ID NO: 956952 - DNA, 25 bp, Homo sapien
ttatcagctcgtggctacctctacc

SEQ ID NO: 956953 - DNA, 25 bp, Homo sapien
gatatacaaagatagactatgcagg

SEQ ID NO: 956954 - DNA, 25 bp, Homo sapien
acatactccgcatctcttgtctgta

SEQ ID NO: 956955 - DNA, 25 bp, Homo sapien
gtctgtaattatcagctcgtggcta

SEQ ID NO: 956956 - DNA, 25 bp, Homo sapien
tgttgcaattggttaaatatcttct

SEQ ID NO: 956957 - DNA, 25 bp, Homo sapien
caatcatcctatagttgattagtgt

SEQ ID NO: 956958 - DNA, 25 bp, Homo sapien
ttccaatcatcctatagttgattag

SEQ ID NO: 956959 - DNA, 25 bp, Homo sapien
gttttgttgcaattggttaaatatc

SEQ ID NO: 956960 - DNA, 25 bp, Homo sapien
gggtcccagtttcgtgatctcttct

SEQ ID NO: 956961 - DNA, 25 bp, Homo sapien
tagagataacaggataaaggtgagg

SEQ ID NO: 956962 - DNA, 25 bp, Homo sapien
gatgtctaagttcaaagcccactcc

SEQ ID NO: 956963 - DNA, 25 bp, Homo sapien
taaacaacctatttgagctctgagg

SEQ ID NO: 956964 - DNA, 25 bp, Homo sapien
caagttttgccaaccatcggaccag

SEQ ID NO: 956965 - DNA, 25 bp, Homo sapien
gaacagctggttggacacactgggc

SEQ ID NO: 956966 - DNA, 25 bp, Homo sapien
caacggtgcacctttgggatctggg

SEQ ID NO: 956967 - DNA, 25 bp, Homo sapien
gactgcatggcaaggcaagagctga

SEQ ID NO: 956968 - DNA, 25 bp, Homo sapien
gctggagctatgggcctcgcggagg

SEQ ID NO: 956969 - DNA, 25 bp, Homo sapien
tcgcggaggtcctgcagcacccgga

SEQ ID NO: 956970 - DNA, 25 bp, Homo sapien
ctcgcggaggtcctgcagcacccgg

SEQ ID NO: 956971 - DNA, 25 bp, Homo sapien
agctatgggcctcgcggaggtcctg

SEQ ID NO: 956972 - DNA, 25 bp, Homo sapien
cacccgtgcatctctggagggggct

SEQ ID NO: 956973 - DNA, 25 bp, Homo sapien
agtgagcccgaggaccccacccgtg

SEQ ID NO: 956974 - DNA, 25 bp, Homo sapien
ctcgggccacgagcaagtcccaggt

SEQ ID NO: 956975 - DNA, 25 bp, Homo sapien
gaggcagccgtgagggcccctggga

SEQ ID NO: 956976 - DNA, 25 bp, Homo sapien
cccgctcagctcccggtgcctctcc

SEQ ID NO: 956977 - DNA, 25 bp, Homo sapien
ccaccttcgtgggttttgagggcag

SEQ ID NO: 956978 - DNA, 25 bp, Homo sapien
tgtgacagatgaatgagctccagct

SEQ ID NO: 956979 - DNA, 25 bp, Homo sapien
gaagctgagcgcatgggaagcactg

SEQ ID NO: 956980 - DNA, 25 bp, Homo sapien
taaaccctggaagagtcgatgagga

SEQ ID NO: 956981 - DNA, 25 bp, Homo sapien
cagatgtggccaattacaagagagg

SEQ ID NO: 956982 - DNA, 25 bp, Homo sapien
ggcctcgtgctgcagagaggtactc

SEQ ID NO: 956983 - DNA, 25 bp, Homo sapien
tctgtcctaacctgagctggcctcg

SEQ ID NO: 956984 - DNA, 25 bp, Homo sapien
acatggcatgaagcaggcatggccc

SEQ ID NO: 956985 - DNA, 25 bp, Homo sapien
tggtcaagagggtcattccactcct

SEQ ID NO: 956986 - DNA, 25 bp, Homo sapien
tcctgcagggtcacccgtgaccggg

SEQ ID NO: 956987 - DNA, 25 bp, Homo sapien
tgggcctcaaggtcatggtcaagag

SEQ ID NO: 956988 - DNA, 25 bp, Homo sapien
caggtgccggtagatgagctgggcc

SEQ ID NO: 956989 - DNA, 25 bp, Homo sapien
ttgggactaccatgtccaacactgt

SEQ ID NO: 956990 - DNA, 25 bp, Homo sapien
ggctgggagcatagcctggtaagtc

SEQ ID NO: 956991 - DNA, 25 bp, Homo sapien
gactaccatgtccaacactgtggtt

SEQ ID NO: 956992 - DNA, 25 bp, Homo sapien
gcagacacttgggactaccatgtcc

SEQ ID NO: 956993 - DNA, 25 bp, Homo sapien
ggtgagagagtgagagacccaactc

SEQ ID NO: 956994 - DNA, 25 bp, Homo sapien
tgagagagtgagagacccaactcaa

SEQ ID NO: 956995 - DNA, 25 bp, Homo sapien
gagagagtgagagacccaactcaaa

SEQ ID NO: 956996 - DNA, 25 bp, Homo sapien
tgggtgagagagtgagagacccaac

SEQ ID NO: 956997 - DNA, 25 bp, Homo sapien
taaagtaagtgtggataacagggag

SEQ ID NO: 956998 - DNA, 25 bp, Homo sapien
gaactgtgctgttctacagggcggc

SEQ ID NO: 956999 - DNA, 25 bp, Homo sapien
gctgagtctactctgtaaagtaagt

SEQ ID NO: 957000 - DNA, 25 bp, Homo sapien
gagaaggtctcgaaagttctagaac

SEQ ID NO: 957001 - DNA, 25 bp, Homo sapien
aaccacgttagaaatggaattctag

SEQ ID NO: 957002 - DNA, 25 bp, Homo sapien
ctgtcaaaagagtttgggaagtgct

SEQ ID NO: 957003 - DNA, 25 bp, Homo sapien
ccctgtcaaaagagtttgggaagtg

SEQ ID NO: 957004 - DNA, 25 bp, Homo sapien
aaatggaattctaggccgggcgtgg

SEQ ID NO: 957005 - DNA, 25 bp, Homo sapien
gcttgcgcctgtagtacttgggagg

SEQ ID NO: 957006 - DNA, 25 bp, Homo sapien
caaaacaagagcagcttgactaaca

SEQ ID NO: 957007 - DNA, 25 bp, Homo sapien
ttggtggcgagtgccggtcatccca

SEQ ID NO: 957008 - DNA, 25 bp, Homo sapien
acaagagcagcttgactaacatggt

SEQ ID NO: 957009 - DNA, 25 bp, Homo sapien
atcgttcagccagaggcccgatctc

SEQ ID NO: 957010 - DNA, 25 bp, Homo sapien
cacacatcacgtggcatttcccaaa

SEQ ID NO: 957011 - DNA, 25 bp, Homo sapien
ttagagccttcagcgaattcactca

SEQ ID NO: 957012 - DNA, 25 bp, Homo sapien
tctcgcagtggacggatgcagagcc

SEQ ID NO: 957013 - DNA, 25 bp, Homo sapien
cagacagccactggttaagctcatt

SEQ ID NO: 957014 - DNA, 25 bp, Homo sapien
cccagcagtccggtgttgttgatgc

SEQ ID NO: 957015 - DNA, 25 bp, Homo sapien
agacagccactggttaagctcattc

SEQ ID NO: 957016 - DNA, 25 bp, Homo sapien
tccagaacccgccaaatatatttgg

SEQ ID NO: 957017 - DNA, 25 bp, Homo sapien
ttggtggccctgatatcactacttt

SEQ ID NO: 957018 - DNA, 25 bp, Homo sapien
ctcgtaggtattccagaacccgcca

SEQ ID NO: 957019 - DNA, 25 bp, Homo sapien
aatatatttggtggccctgatatca

SEQ ID NO: 957020 - DNA, 25 bp, Homo sapien
caggcatgagccgacatttgaaaca

SEQ ID NO: 957021 - DNA, 25 bp, Homo sapien
tgtatcccctcacctagaatcatgc

SEQ ID NO: 957022 - DNA, 25 bp, Homo sapien
gaatcatgcctggaacctaggaggt

SEQ ID NO: 957023 - DNA, 25 bp, Homo sapien
cagggatatcagctccatgagggca

SEQ ID NO: 957024 - DNA, 25 bp, Homo sapien
accctgcggtgcctgatgtagctgg

SEQ ID NO: 957025 - DNA, 25 bp, Homo sapien
catcacggggatgcacctgtctgtg

SEQ ID NO: 957026 - DNA, 25 bp, Homo sapien
tccaacaaacgggtgcaacgtgcaa

SEQ ID NO: 957027 - DNA, 25 bp, Homo sapien
cccatctcagttatctggaaatagt

SEQ ID NO: 957028 - DNA, 25 bp, Homo sapien
ggcgtcgtccgtgtagatgacctgc

SEQ ID NO: 957029 - DNA, 25 bp, Homo sapien
atgttggctaacttgatgagggcgc

SEQ ID NO: 957030 - DNA, 25 bp, Homo sapien
tggctaacttgatgagggcgctttt

SEQ ID NO: 957031 - DNA, 25 bp, Homo sapien
gctgcccggatgttggctaacttga

SEQ ID NO: 957032 - DNA, 25 bp, Homo sapien
aggtggcgcctgcaaactcagcgtc

SEQ ID NO: 957033 - DNA, 25 bp, Homo sapien
ccttgcccttggtcctgtggatgaa

SEQ ID NO: 957034 - DNA, 25 bp, Homo sapien
tagagcttcttgaaggaggaggaca

SEQ ID NO: 957035 - DNA, 25 bp, Homo sapien
gcgtcttcgcgaagctgagggcctc

SEQ ID NO: 957036 - DNA, 25 bp, Homo sapien
cgtgtccatgttgcccacgttctgg

SEQ ID NO: 957037 - DNA, 25 bp, Homo sapien
agtccttcagctgcgccacgccctg

SEQ ID NO: 957038 - DNA, 25 bp, Homo sapien
ctggaagccggcgtgtccatgttgc

SEQ ID NO: 957039 - DNA, 25 bp, Homo sapien
aagccggcgtgtccatgttgcccac

SEQ ID NO: 957040 - DNA, 25 bp, Homo sapien
ggaagagcttgggcgacatgatggc

SEQ ID NO: 957041 - DNA, 25 bp, Homo sapien
ggccaacaggagcagggtgcggctg

SEQ ID NO: 957042 - DNA, 25 bp, Homo sapien
ccaacaggagcagggtgcggctggt

SEQ ID NO: 957043 - DNA, 25 bp, Homo sapien
gggcgtccgcgtggcgctcccgcag

SEQ ID NO: 957044 - DNA, 25 bp, Homo sapien
aggggtgcggaagagcgcgggctgg

SEQ ID NO: 957045 - DNA, 25 bp, Homo sapien
ctggaggggtgcggaagagcgcggg

SEQ ID NO: 957046 - DNA, 25 bp, Homo sapien
tggaggggtgcggaagagcgcgggc

SEQ ID NO: 957047 - DNA, 25 bp, Homo sapien
gaggggtgcggaagagcgcgggctg

SEQ ID NO: 957048 - DNA, 25 bp, Homo sapien
gaaccgagcggctgagcgcgctcag

SEQ ID NO: 957049 - DNA, 25 bp, Homo sapien
tcggcctcggtctgcgggcggtgca

SEQ ID NO: 957050 - DNA, 25 bp, Homo sapien
tcgcgcacgcgccggaagagctggc

SEQ ID NO: 957051 - DNA, 25 bp, Homo sapien
caggtgggcgcgcagcgtctgcgcg

SEQ ID NO: 957052 - DNA, 25 bp, Homo sapien
caggacgccgtgcaggtactgcatc

SEQ ID NO: 957053 - DNA, 25 bp, Homo sapien
taacttccactttgctggggtccag

SEQ ID NO: 957054 - DNA, 25 bp, Homo sapien
gcccaggacgccgtgcaggtactgc

SEQ ID NO: 957055 - DNA, 25 bp, Homo sapien
acgccgtgcaggtactgcatcccgg

SEQ ID NO: 957056 - DNA, 25 bp, Homo sapien
cggcagccgcccttgcaccgtttgc

SEQ ID NO: 957057 - DNA, 25 bp, Homo sapien
gcaggtcacattgatcctgtctccc

SEQ ID NO: 957058 - DNA, 25 bp, Homo sapien
tggggaccaccgcaggtcacattga

SEQ ID NO: 957059 - DNA, 25 bp, Homo sapien
gaccaccgcaggtcacattgatcct

SEQ ID NO: 957060 - DNA, 25 bp, Homo sapien
ctccggaacagggtgttggtctcac

SEQ ID NO: 957061 - DNA, 25 bp, Homo sapien
tgctccggaacagggtgttggtctc

SEQ ID NO: 957062 - DNA, 25 bp, Homo sapien
gagttgctccggaacagggtgttgg

SEQ ID NO: 957063 - DNA, 25 bp, Homo sapien
gaggccagagagttgctccggaaca

SEQ ID NO: 957064 - DNA, 25 bp, Homo sapien
ttggggctgggggatctaagctggc

SEQ ID NO: 957065 - DNA, 25 bp, Homo sapien
tcaataaagggcctcctcgccacct

SEQ ID NO: 957066 - DNA, 25 bp, Homo sapien
agctggcccctcaataaagggcctc

SEQ ID NO: 957067 - DNA, 25 bp, Homo sapien
tgggggatctaagctggcccctcaa

SEQ ID NO: 957068 - DNA, 25 bp, Homo sapien
cccccaaacacctcccagtgttctg

SEQ ID NO: 957069 - DNA, 25 bp, Homo sapien
ccaaacacctcccagtgttctgggc

SEQ ID NO: 957070 - DNA, 25 bp, Homo sapien
gttctgggcccagctccttcccagg

SEQ ID NO: 957071 - DNA, 25 bp, Homo sapien
caaacacctcccagtgttctgggcc

SEQ ID NO: 957072 - DNA, 25 bp, Homo sapien
tctcctcgatgagtgggatcagctg

SEQ ID NO: 957073 - DNA, 25 bp, Homo sapien
aagagcttgagcaggttcgtggcca

SEQ ID NO: 957074 - DNA, 25 bp, Homo sapien
tggccacgtcctggcgacactcggt

SEQ ID NO: 957075 - DNA, 25 bp, Homo sapien
tcctggcgacactcggtgctggttg

SEQ ID NO: 957076 - DNA, 25 bp, Homo sapien
ctggagggcagcaccgtctcgtccc

SEQ ID NO: 957077 - DNA, 25 bp, Homo sapien
tgcaccagtggctggtagtagctgg

SEQ ID NO: 957078 - DNA, 25 bp, Homo sapien
tggagggcagcaccgtctcgtcccg

SEQ ID NO: 957079 - DNA, 25 bp, Homo sapien
gcccagcttgacctcgtggcacagc

SEQ ID NO: 957080 - DNA, 25 bp, Homo sapien
tcgtcatgccgccggctcttggact

SEQ ID NO: 957081 - DNA, 25 bp, Homo sapien
tgcaccacccgcagtctctggacat

SEQ ID NO: 957082 - DNA, 25 bp, Homo sapien
gcagtctctggacatcaatcaccac

SEQ ID NO: 957083 - DNA, 25 bp, Homo sapien
atgccgccggctcttggactggtcg

SEQ ID NO: 957084 - DNA, 25 bp, Homo sapien
caggaagtcgtttcggctgacaagg

SEQ ID NO: 957085 - DNA, 25 bp, Homo sapien
caaattcaaacgtctcattccagcg

SEQ ID NO: 957086 - DNA, 25 bp, Homo sapien
tttgcccaggaagtcgtttcggctg

SEQ ID NO: 957087 - DNA, 25 bp, Homo sapien
cagcgtgggtagcatgacttcttca

SEQ ID NO: 957088 - DNA, 25 bp, Homo sapien
gtgccattgcggtcctttggggcca

SEQ ID NO: 957089 - DNA, 25 bp, Homo sapien
gtccggcccttgtagcgcactcgga

SEQ ID NO: 957090 - DNA, 25 bp, Homo sapien
gtgtccggcccttgtagcgcactcg

SEQ ID NO: 957091 - DNA, 25 bp, Homo sapien
ccttgtagcgcactcggacgaaggg

SEQ ID NO: 957092 - DNA, 25 bp, Homo sapien
ttccagccgcaggtggatctcgccc

SEQ ID NO: 957093 - DNA, 25 bp, Homo sapien
tgtcaggtgggcccacccgctgaaa

SEQ ID NO: 957094 - DNA, 25 bp, Homo sapien
gtcaggtgggcccacccgctgaaac

SEQ ID NO: 957095 - DNA, 25 bp, Homo sapien
ctgtcaggtgggcccacccgctgaa

SEQ ID NO: 957096 - DNA, 25 bp, Homo sapien
taggccaacccttcagacttaggac

SEQ ID NO: 957097 - DNA, 25 bp, Homo sapien
gacacagtagtactagggcccagat

SEQ ID NO: 957098 - DNA, 25 bp, Homo sapien
caggcttgggaacatgctgcagaac

SEQ ID NO: 957099 - DNA, 25 bp, Homo sapien
tagagtgtaaggaggccccttcttc

SEQ ID NO: 957100 - DNA, 25 bp, Homo sapien
aggtctccgagtgggagggaggcca

SEQ ID NO: 957101 - DNA, 25 bp, Homo sapien
gggcagaccagtgtgggagggaagg

SEQ ID NO: 957102 - DNA, 25 bp, Homo sapien
ggaggtctccgagtgggagggaggc

SEQ ID NO: 957103 - DNA, 25 bp, Homo sapien
agggactgggcagaccagtgtggga

SEQ ID NO: 957104 - DNA, 25 bp, Homo sapien
gctatggtgtcccttgtaaggcaga

SEQ ID NO: 957105 - DNA, 25 bp, Homo sapien
tatggtgtcccttgtaaggcagacc

SEQ ID NO: 957106 - DNA, 25 bp, Homo sapien
ttgtaaggcagacctttccgataac

SEQ ID NO: 957107 - DNA, 25 bp, Homo sapien
gcagacctttccgataacgtcgtcc

SEQ ID NO: 957108 - DNA, 25 bp, Homo sapien
gagggcatcctcatccatgacatag

SEQ ID NO: 957109 - DNA, 25 bp, Homo sapien
tcatccatgacatagaaagccacag

SEQ ID NO: 957110 - DNA, 25 bp, Homo sapien
ctgagggcatcctcatccatgacat

SEQ ID NO: 957111 - DNA, 25 bp, Homo sapien
acatagaaagccacagcgtggaagg

SEQ ID NO: 957112 - DNA, 25 bp, Homo sapien
ggcacagggtcttccacactgtggc

SEQ ID NO: 957113 - DNA, 25 bp, Homo sapien
cagggtcttccacactgtggctgtc

SEQ ID NO: 957114 - DNA, 25 bp, Homo sapien
ccagaaggggcacagggtcttccac

SEQ ID NO: 957115 - DNA, 25 bp, Homo sapien
cttggtactcctcaccccagaaggg

SEQ ID NO: 957116 - DNA, 25 bp, Homo sapien
gcgggccgatgagaggctgagcgcc

SEQ ID NO: 957117 - DNA, 25 bp, Homo sapien
ggagagcgcgggccgatgagaggct

SEQ ID NO: 957118 - DNA, 25 bp, Homo sapien
agaggctgagcgcccctcggtcctg

SEQ ID NO: 957119 - DNA, 25 bp, Homo sapien
agcgcgggccgatgagaggctgagc

SEQ ID NO: 957120 - DNA, 25 bp, Homo sapien
ccttcacgatgcagtaggggtcgct

SEQ ID NO: 957121 - DNA, 25 bp, Homo sapien
gggctcattgtccaccttcacgatg

SEQ ID NO: 957122 - DNA, 25 bp, Homo sapien
ctgatgatgggctcattgtccacct

SEQ ID NO: 957123 - DNA, 25 bp, Homo sapien
gatgggctcattgtccaccttcacg

SEQ ID NO: 957124 - DNA, 25 bp, Homo sapien
tcttttggcccctcgggaggagtgc

SEQ ID NO: 957125 - DNA, 25 bp, Homo sapien
cctcagcccgggagcggatggtgag

SEQ ID NO: 957126 - DNA, 25 bp, Homo sapien
gaggctgagtctccgcgtcctggtt

SEQ ID NO: 957127 - DNA, 25 bp, Homo sapien
ggagaccgcaggctcctccggccaa

SEQ ID NO: 957128 - DNA, 25 bp, Homo sapien
cccattgtcatggtaactgctgagc

SEQ ID NO: 957129 - DNA, 25 bp, Homo sapien
ttgtcatggtaactgctgagctggg

SEQ ID NO: 957130 - DNA, 25 bp, Homo sapien
tccccattgtcatggtaactgctga

SEQ ID NO: 957131 - DNA, 25 bp, Homo sapien
gtcatggtaactgctgagctgggcc

SEQ ID NO: 957132 - DNA, 25 bp, Homo sapien
tgtacagcgagctgcgcttggccat

SEQ ID NO: 957133 - DNA, 25 bp, Homo sapien
tcttcccctccacgatgcggatgta

SEQ ID NO: 957134 - DNA, 25 bp, Homo sapien
tcccctccacgatgcggatgtacag

SEQ ID NO: 957135 - DNA, 25 bp, Homo sapien
atgcggatgtacagcgagctgcgct

SEQ ID NO: 957136 - DNA, 25 bp, Homo sapien
ggcggcgggcgctggactgggcgcc

SEQ ID NO: 957137 - DNA, 25 bp, Homo sapien
cgggcggcgggcgctggactgggcg

SEQ ID NO: 957138 - DNA, 25 bp, Homo sapien
gcggcgggcgctggactgggcgccg

SEQ ID NO: 957139 - DNA, 25 bp, Homo sapien
ggcgggcgctggactgggcgccgca

SEQ ID NO: 957140 - DNA, 25 bp, Homo sapien
aaatcttatgtggacagctcgagga

SEQ ID NO: 957141 - DNA, 25 bp, Homo sapien
tacacaggcctacgactgcatgacc

SEQ ID NO: 957142 - DNA, 25 bp, Homo sapien
agctcgaggaagtcttacacaggcc

SEQ ID NO: 957143 - DNA, 25 bp, Homo sapien
gcttccttgtgtcccataccagtca

SEQ ID NO: 957144 - DNA, 25 bp, Homo sapien
aacctgcctcttcactagcctgtgg

SEQ ID NO: 957145 - DNA, 25 bp, Homo sapien
cagtgtatatttgcttgtgcctggc

SEQ ID NO: 957146 - DNA, 25 bp, Homo sapien
aatagcattctacggtgtgggcgga

SEQ ID NO: 957147 - DNA, 25 bp, Homo sapien
tagcctgtggatgaacgtctgttgt

SEQ ID NO: 957148 - DNA, 25 bp, Homo sapien
gagactgtggtcaagctattcctgc

SEQ ID NO: 957149 - DNA, 25 bp, Homo sapien
aaccggcggctcacagaaaggtggg

SEQ ID NO: 957150 - DNA, 25 bp, Homo sapien
tggacaacagggaaccggcggctca

SEQ ID NO: 957151 - DNA, 25 bp, Homo sapien
ctgtttgcagtccatccctctgtgg

SEQ ID NO: 957152 - DNA, 25 bp, Homo sapien
tgggctgaagtgacctgggtagctg

SEQ ID NO: 957153 - DNA, 25 bp, Homo sapien
aacactgctactgtgcatgaggctt

SEQ ID NO: 957154 - DNA, 25 bp, Homo sapien
ccaagggcccatcttaacactgcta

SEQ ID NO: 957155 - DNA, 25 bp, Homo sapien
tgggtggccaggagataatctttct

SEQ ID NO: 957156 - DNA, 25 bp, Homo sapien
tcgatatttgagatattcttgaact

SEQ ID NO: 957157 - DNA, 25 bp, Homo sapien
ccgcacctggtcgatatttgagata

SEQ ID NO: 957158 - DNA, 25 bp, Homo sapien
cacctggtcgatatttgagatattc

SEQ ID NO: 957159 - DNA, 25 bp, Homo sapien
cctggtcgatatttgagatattctt

SEQ ID NO: 957160 - DNA, 25 bp, Homo sapien
gtttctgtcccctgatatccacttg

SEQ ID NO: 957161 - DNA, 25 bp, Homo sapien
gccccggctcccatgtcaaagaggg

SEQ ID NO: 957162 - DNA, 25 bp, Homo sapien
gctgcctggtttccaacagtggtcc

SEQ ID NO: 957163 - DNA, 25 bp, Homo sapien
tgccccagactcttggacaagctga

SEQ ID NO: 957164 - DNA, 25 bp, Homo sapien
actgagtccagccgcggaactgacg

SEQ ID NO: 957165 - DNA, 25 bp, Homo sapien
ccactgagtccagccgcggaactga

SEQ ID NO: 957166 - DNA, 25 bp, Homo sapien
ctgagtccagccgcggaactgacgc

SEQ ID NO: 957167 - DNA, 25 bp, Homo sapien
cactgagtccagccgcggaactgac

SEQ ID NO: 957168 - DNA, 25 bp, Homo sapien
ctgattttatcttgtgtttattggg

SEQ ID NO: 957169 - DNA, 25 bp, Homo sapien
ttatcttgtgtttattgggaaatgg

SEQ ID NO: 957170 - DNA, 25 bp, Homo sapien
gattttatcttgtgtttattgggaa

SEQ ID NO: 957171 - DNA, 25 bp, Homo sapien
tgtgtttattgggaaatggtggtgc

SEQ ID NO: 957172 - DNA, 25 bp, Homo sapien
ctgagatggactggccttgatggcc

SEQ ID NO: 957173 - DNA, 25 bp, Homo sapien
tgtgcatgtctagatgccactgaga

SEQ ID NO: 957174 - DNA, 25 bp, Homo sapien
cagcatggctagctgaagtcagtgg

SEQ ID NO: 957175 - DNA, 25 bp, Homo sapien
gatggccgggactctatgtcttagc

SEQ ID NO: 957176 - DNA, 25 bp, Homo sapien
gactcacaggcctcagagaacctgg

SEQ ID NO: 957177 - DNA, 25 bp, Homo sapien
ggattctcaggatccctctatggga

SEQ ID NO: 957178 - DNA, 25 bp, Homo sapien
acctggagaagccagcctcactcac

SEQ ID NO: 957179 - DNA, 25 bp, Homo sapien
ggctccgacattttctctcccaggg

SEQ ID NO: 957180 - DNA, 25 bp, Homo sapien
actgtggtcagggagagaggttgcc

SEQ ID NO: 957181 - DNA, 25 bp, Homo sapien
gagagaggttgcctggggctgtcca

SEQ ID NO: 957182 - DNA, 25 bp, Homo sapien
gtggtcagggagagaggttgcctgg

SEQ ID NO: 957183 - DNA, 25 bp, Homo sapien
ggtactgtggtcagggagagaggtt

SEQ ID NO: 957184 - DNA, 25 bp, Homo sapien
gacagctttgggctcggctgtcggg

SEQ ID NO: 957185 - DNA, 25 bp, Homo sapien
ccaaggacatatgagaggcagctga

SEQ ID NO: 957186 - DNA, 25 bp, Homo sapien
tcctagatgtctggtcagagatggc

SEQ ID NO: 957187 - DNA, 25 bp, Homo sapien
cagctgagggttgccgggcgagctg

SEQ ID NO: 957188 - DNA, 25 bp, Homo sapien
agggtcattagtccacatgggagct

SEQ ID NO: 957189 - DNA, 25 bp, Homo sapien
ttagcagccctctgtctgggcagga

SEQ ID NO: 957190 - DNA, 25 bp, Homo sapien
aaaatttgccctgtcccctgagact

SEQ ID NO: 957191 - DNA, 25 bp, Homo sapien
tctccagtctggagaccagaaggcc

SEQ ID NO: 957192 - DNA, 25 bp, Homo sapien
aagaaagttagctaggtgcctgtag

SEQ ID NO: 957193 - DNA, 25 bp, Homo sapien
tcatctagaaacaatctctctcacc

SEQ ID NO: 957194 - DNA, 25 bp, Homo sapien
tctcaccagacttgatggctcacgc

SEQ ID NO: 957195 - DNA, 25 bp, Homo sapien
tttctgatagagactggcacaagct

SEQ ID NO: 957196 - DNA, 25 bp, Homo sapien
caagctttgggctaaggacacccgc

SEQ ID NO: 957197 - DNA, 25 bp, Homo sapien
agtgctgaacgcgaggtgcgtggtg

SEQ ID NO: 957198 - DNA, 25 bp, Homo sapien
tctgggcctgatagggaagtgctcc

SEQ ID NO: 957199 - DNA, 25 bp, Homo sapien
gaggtgcgtggtgtatcttctcaca

SEQ ID NO: 957200 - DNA, 25 bp, Homo sapien
ctcctctgggcctgatagggaagtg

SEQ ID NO: 957201 - DNA, 25 bp, Homo sapien
cacttgcaatcccagatgctgccac

SEQ ID NO: 957202 - DNA, 25 bp, Homo sapien
tcctccttgggcgcctccccgactg

SEQ ID NO: 957203 - DNA, 25 bp, Homo sapien
acttgcaatcccagatgctgccacc

SEQ ID NO: 957204 - DNA, 25 bp, Homo sapien
gcctccccgactggggtgtccgcag

SEQ ID NO: 957205 - DNA, 25 bp, Homo sapien
cttggaaggtgggcaggggcgggcg

SEQ ID NO: 957206 - DNA, 25 bp, Homo sapien
ggaggatagacaggatggcgatgat

SEQ ID NO: 957207 - DNA, 25 bp, Homo sapien
gacggccaggaggatagacaggatg

SEQ ID NO: 957208 - DNA, 25 bp, Homo sapien
atgatgaccacggtgcccgggctct

SEQ ID NO: 957209 - DNA, 25 bp, Homo sapien
gcgatgatgaccacggtgcccgggc

SEQ ID NO: 957210 - DNA, 25 bp, Homo sapien
aggcgagtgtcgctggaccactttg

SEQ ID NO: 957211 - DNA, 25 bp, Homo sapien
gtgtcgctggaccactttgtttcag

SEQ ID NO: 957212 - DNA, 25 bp, Homo sapien
gccacgggtccttcgtcattcatca

SEQ ID NO: 957213 - DNA, 25 bp, Homo sapien
gcgagtgtcgctggaccactttgtt

SEQ ID NO: 957214 - DNA, 25 bp, Homo sapien
cagtgtgagatagtagcccctctgg

SEQ ID NO: 957215 - DNA, 25 bp, Homo sapien
acccggttggccctcagtgtgagat

SEQ ID NO: 957216 - DNA, 25 bp, Homo sapien
ttggttggcagtgggtatcattgcc

SEQ ID NO: 957217 - DNA, 25 bp, Homo sapien
ccctcagtgtgagatagtagcccct

SEQ ID NO: 957218 - DNA, 25 bp, Homo sapien
gggccaccaccagccagatggtatc

SEQ ID NO: 957219 - DNA, 25 bp, Homo sapien
gttgctgagggccaccaccagccag

SEQ ID NO: 957220 - DNA, 25 bp, Homo sapien
tgctgagggccaccaccagccagat

SEQ ID NO: 957221 - DNA, 25 bp, Homo sapien
caccaccagccagatggtatccaag

SEQ ID NO: 957222 - DNA, 25 bp, Homo sapien
tcgtttgagagctggggcacatagc

SEQ ID NO: 957223 - DNA, 25 bp, Homo sapien
gaactggcctagaggctgctccagc

SEQ ID NO: 957224 - DNA, 25 bp, Homo sapien
tcagagatgttgtggctgctgaact

SEQ ID NO: 957225 - DNA, 25 bp, Homo sapien
tccagcgtgaaggtggacagggtga

SEQ ID NO: 957226 - DNA, 25 bp, Homo sapien
ctgtccgtccgtctgcagtgtctgc

SEQ ID NO: 957227 - DNA, 25 bp, Homo sapien
ggacacgggtcagtagcagcaacag

SEQ ID NO: 957228 - DNA, 25 bp, Homo sapien
gctggacacgggtcagtagcagcaa

SEQ ID NO: 957229 - DNA, 25 bp, Homo sapien
tgtccgtccgtctgcagtgtctgca

SEQ ID NO: 957230 - DNA, 25 bp, Homo sapien
ggggcagaatctgccagcccagtga

SEQ ID NO: 957231 - DNA, 25 bp, Homo sapien
tttgggggcagaatctgccagccca

SEQ ID NO: 957232 - DNA, 25 bp, Homo sapien
agaatctgccagcccagtgaatctg

SEQ ID NO: 957233 - DNA, 25 bp, Homo sapien
atctgccagcccagtgaatctggca

SEQ ID NO: 957234 - DNA, 25 bp, Homo sapien
ttgtccaaacagtccccaatgtagc

SEQ ID NO: 957235 - DNA, 25 bp, Homo sapien
taagtctaccccgtggatctccttg

SEQ ID NO: 957236 - DNA, 25 bp, Homo sapien
tgccccagggacaatcccgctaagt

SEQ ID NO: 957237 - DNA, 25 bp, Homo sapien
gagaacatacagttgcaagacaagc

SEQ ID NO: 957238 - DNA, 25 bp, Homo sapien
agggcttggctaagagcacccagga

SEQ ID NO: 957239 - DNA, 25 bp, Homo sapien
tgtggcactcctggtatagccctgc

SEQ ID NO: 957240 - DNA, 25 bp, Homo sapien
gcaggactggggattagatcacacc

SEQ ID NO: 957241 - DNA, 25 bp, Homo sapien
gcactcctggtatagccctgctgtc

SEQ ID NO: 957242 - DNA, 25 bp, Homo sapien
tccaggggaccggctgtctcttcct

SEQ ID NO: 957243 - DNA, 25 bp, Homo sapien
ccagcctctgtcagggcagggtagt

SEQ ID NO: 957244 - DNA, 25 bp, Homo sapien
ctctgtcagggcagggtagttcctc

SEQ ID NO: 957245 - DNA, 25 bp, Homo sapien
ctttatccaggggaccggctgtctc

SEQ ID NO: 957246 - DNA, 25 bp, Homo sapien
cgtggtggcttgttcttgtaactcc

SEQ ID NO: 957247 - DNA, 25 bp, Homo sapien
tctcccctggatcggggtactagcc

SEQ ID NO: 957248 - DNA, 25 bp, Homo sapien
tggacgtggtggcttgttcttgtaa

SEQ ID NO: 957249 - DNA, 25 bp, Homo sapien
gacgtggtggcttgttcttgtaact

SEQ ID NO: 957250 - DNA, 25 bp, Homo sapien
ccccgaggggattcagatgttcacc

SEQ ID NO: 957251 - DNA, 25 bp, Homo sapien
ctcagttccccgaggggattcagat

SEQ ID NO: 957252 - DNA, 25 bp, Homo sapien
gggattcagatgttcacctcaactc

SEQ ID NO: 957253 - DNA, 25 bp, Homo sapien
gattcagatgttcacctcaactcac

SEQ ID NO: 957254 - DNA, 25 bp, Homo sapien
aagaaaaacttctggccgggcgcag

SEQ ID NO: 957255 - DNA, 25 bp, Homo sapien
accagcctgaccaatgtggaaaaac

SEQ ID NO: 957256 - DNA, 25 bp, Homo sapien
ggttcacacctgtaatcccagcact

SEQ ID NO: 957257 - DNA, 25 bp, Homo sapien
cagcctgaccaatgtggaaaaaccc

SEQ ID NO: 957258 - DNA, 25 bp, Homo sapien
aaaatgcatcctaagccgggtgcag

SEQ ID NO: 957259 - DNA, 25 bp, Homo sapien
tgaaagtgttaaaatccacctagat

SEQ ID NO: 957260 - DNA, 25 bp, Homo sapien
tgcacccgcccttgaatggatttta

SEQ ID NO: 957261 - DNA, 25 bp, Homo sapien
tcaagttagcccgttattcaaacac

SEQ ID NO: 957262 - DNA, 25 bp, Homo sapien
tggtgcaatttcggctcgttgtagc

SEQ ID NO: 957263 - DNA, 25 bp, Homo sapien
agtggtgcaatttcggctcgttgta

SEQ ID NO: 957264 - DNA, 25 bp, Homo sapien
aggcgcacaccaccaacccacataa

SEQ ID NO: 957265 - DNA, 25 bp, Homo sapien
gtgcaatttcggctcgttgtagcct

SEQ ID NO: 957266 - DNA, 25 bp, Homo sapien
catgcaaagtgatcacactggaccc

SEQ ID NO: 957267 - DNA, 25 bp, Homo sapien
gaaatgccgtttttatcatacgctg

SEQ ID NO: 957268 - DNA, 25 bp, Homo sapien
gcagactaatgcatcctcagtgtca

SEQ ID NO: 957269 - DNA, 25 bp, Homo sapien
gtgcagaagagatgccaacagtgac

SEQ ID NO: 957270 - DNA, 25 bp, Homo sapien
tcatttcttggatcaatctgtctgt

SEQ ID NO: 957271 - DNA, 25 bp, Homo sapien
tctgtctgttcaggtgtcagtacta

SEQ ID NO: 957272 - DNA, 25 bp, Homo sapien
gagggtcatggagtctttcacgcct

SEQ ID NO: 957273 - DNA, 25 bp, Homo sapien
tgtcagtactagactattttaatcc

SEQ ID NO: 957274 - DNA, 25 bp, Homo sapien
tctcgagtgtaactcactagtgggc

SEQ ID NO: 957275 - DNA, 25 bp, Homo sapien
taaatgatccctctcgagtgtaact

SEQ ID NO: 957276 - DNA, 25 bp, Homo sapien
taactcactagtgggctgtgtcctt

SEQ ID NO: 957277 - DNA, 25 bp, Homo sapien
tgttctgtaaatgatccctctcgag

SEQ ID NO: 957278 - DNA, 25 bp, Homo sapien
ggagtctagctttgctgtccaggct

SEQ ID NO: 957279 - DNA, 25 bp, Homo sapien
catgatcctagctcactacaaccac

SEQ ID NO: 957280 - DNA, 25 bp, Homo sapien
tgatcctagctcactacaaccaccg

SEQ ID NO: 957281 - DNA, 25 bp, Homo sapien
agatggagtctagctttgctgtcca

SEQ ID NO: 957282 - DNA, 25 bp, Homo sapien
ctgcgcccagccaatttttaaattt

SEQ ID NO: 957283 - DNA, 25 bp, Homo sapien
gccactgcgcccagccaatttttaa

SEQ ID NO: 957284 - DNA, 25 bp, Homo sapien
actgcgcccagccaatttttaaatt

SEQ ID NO: 957285 - DNA, 25 bp, Homo sapien
acctcaaatgatccatccccctcgg

SEQ ID NO: 957286 - DNA, 25 bp, Homo sapien
tctcaaactctaggcctcaagtcct

SEQ ID NO: 957287 - DNA, 25 bp, Homo sapien
aaagtgctgagattataggcatgag

SEQ ID NO: 957288 - DNA, 25 bp, Homo sapien
ctcaagtcctcctgccccgacctcc

SEQ ID NO: 957289 - DNA, 25 bp, Homo sapien
catgagccactgtgctcagccccaa

SEQ ID NO: 957290 - DNA, 25 bp, Homo sapien
tatttttgacagataatagggatgt

SEQ ID NO: 957291 - DNA, 25 bp, Homo sapien
caattatttttgacagataataggg

SEQ ID NO: 957292 - DNA, 25 bp, Homo sapien
ttgacagataatagggatgtctcct

SEQ ID NO: 957293 - DNA, 25 bp, Homo sapien
tttttgacagataatagggatgtct

SEQ ID NO: 957294 - DNA, 25 bp, Homo sapien
cgttttatagcatcaggctggtgac

SEQ ID NO: 957295 - DNA, 25 bp, Homo sapien
gcccggccgtgacactcgttttata

SEQ ID NO: 957296 - DNA, 25 bp, Homo sapien
gtcttcctagtgcagatgtccccag

SEQ ID NO: 957297 - DNA, 25 bp, Homo sapien
gcctggagtccaatgccgtggtctc

SEQ ID NO: 957298 - DNA, 25 bp, Homo sapien
tcagtattcctgggatctcttgtac

SEQ ID NO: 957299 - DNA, 25 bp, Homo sapien
ggcttaggtaatccatggattccct

SEQ ID NO: 957300 - DNA, 25 bp, Homo sapien
gactagagtttcttagccgaactgg

SEQ ID NO: 957301 - DNA, 25 bp, Homo sapien
gtctcttggactcaaaattgcctta

SEQ ID NO: 957302 - DNA, 25 bp, Homo sapien
tcttgtacatgataatctcactctt

SEQ ID NO: 957303 - DNA, 25 bp, Homo sapien
tcctaggcttgagaattgataacat

SEQ ID NO: 957304 - DNA, 25 bp, Homo sapien
gaaggccatggacagaacggagact

SEQ ID NO: 957305 - DNA, 25 bp, Homo sapien
gacagattacgggaaagatcacgac

SEQ ID NO: 957306 - DNA, 25 bp, Homo sapien
tgcctggagatcagttggacaacag

SEQ ID NO: 957307 - DNA, 25 bp, Homo sapien
gagtggtcagatgaatctgaggagg

SEQ ID NO: 957308 - DNA, 25 bp, Homo sapien
ccatgtaggtcccttggctggaaaa

SEQ ID NO: 957309 - DNA, 25 bp, Homo sapien
tgtaggtcccttggctggaaaagga

SEQ ID NO: 957310 - DNA, 25 bp, Homo sapien
cccccatgtaggtcccttggctgga

SEQ ID NO: 957311 - DNA, 25 bp, Homo sapien
agctgaagcaacagcgagtgtcacc

SEQ ID NO: 957312 - DNA, 25 bp, Homo sapien
tgaagcaacagcgagtgtcacccat

SEQ ID NO: 957313 - DNA, 25 bp, Homo sapien
gctgaagcaacagcgagtgtcaccc

SEQ ID NO: 957314 - DNA, 25 bp, Homo sapien
ctgaagcaacagcgagtgtcaccca

SEQ ID NO: 957315 - DNA, 25 bp, Homo sapien
tcacgcctgagatgctagcacgttg

SEQ ID NO: 957316 - DNA, 25 bp, Homo sapien
gctcacgcctgagatgctagcacgt

SEQ ID NO: 957317 - DNA, 25 bp, Homo sapien
ctcacgcctgagatgctagcacgtt

SEQ ID NO: 957318 - DNA, 25 bp, Homo sapien
acgcctgagatgctagcacgttggg

SEQ ID NO: 957319 - DNA, 25 bp, Homo sapien
gataagaaagcttggtttcgggcca

SEQ ID NO: 957320 - DNA, 25 bp, Homo sapien
tgaagtgatcactcatgagggacac

SEQ ID NO: 957321 - DNA, 25 bp, Homo sapien
taggtcaacttgataaaggtcagcg

SEQ ID NO: 957322 - DNA, 25 bp, Homo sapien
caatgggaaaaataggccccagtgg

SEQ ID NO: 957323 - DNA, 25 bp, Homo sapien
taagctaaggtcgagccactgtact

SEQ ID NO: 957324 - DNA, 25 bp, Homo sapien
acaaactccaatgccagtgtacaaa

SEQ ID NO: 957325 - DNA, 25 bp, Homo sapien
cagtaagctaaggtcgagccactgt

SEQ ID NO: 957326 - DNA, 25 bp, Homo sapien
gtaagctaaggtcgagccactgtac

SEQ ID NO: 957327 - DNA, 25 bp, Homo sapien
ttaggccattccatgaacccgaggg

SEQ ID NO: 957328 - DNA, 25 bp, Homo sapien
tataccgttccatgaactcgagggc

SEQ ID NO: 957329 - DNA, 25 bp, Homo sapien
taagcgttggttccagttaggccat

SEQ ID NO: 957330 - DNA, 25 bp, Homo sapien
gcatacccttgctccgtaagcgtcg

SEQ ID NO: 957331 - DNA, 25 bp, Homo sapien
aggcttatgacccagagcactgggt

SEQ ID NO: 957332 - DNA, 25 bp, Homo sapien
tccagatccaggcttatgacccaga

SEQ ID NO: 957333 - DNA, 25 bp, Homo sapien
gatccaggcttatgacccagagcac

SEQ ID NO: 957334 - DNA, 25 bp, Homo sapien
tccaggcttatgacccagagcactg

SEQ ID NO: 957335 - DNA, 25 bp, Homo sapien
taaaggcagaatattggggtctatt

SEQ ID NO: 957336 - DNA, 25 bp, Homo sapien
cagaatattggggtctatttcggaa

SEQ ID NO: 957337 - DNA, 25 bp, Homo sapien
ggtaaaggcagaatattggggtcta

SEQ ID NO: 957338 - DNA, 25 bp, Homo sapien
aggcagaatattggggtctatttcg

SEQ ID NO: 957339 - DNA, 25 bp, Homo sapien
ggagcctggaaggtcggggccgcac

SEQ ID NO: 957340 - DNA, 25 bp, Homo sapien
tggaaggtcggggccgcacggagcc

SEQ ID NO: 957341 - DNA, 25 bp, Homo sapien
agcctggaaggtcggggccgcacgg

SEQ ID NO: 957342 - DNA, 25 bp, Homo sapien
cctggaaggtcggggccgcacggag

SEQ ID NO: 957343 - DNA, 25 bp, Homo sapien
gcatttctcaattgacatgggacgt

SEQ ID NO: 957344 - DNA, 25 bp, Homo sapien
catttctcaattgacatgggacgtg

SEQ ID NO: 957345 - DNA, 25 bp, Homo sapien
ctggaggtcctgtttcttacggact

SEQ ID NO: 957346 - DNA, 25 bp, Homo sapien
ttcttacggacttgcagtccaggag

SEQ ID NO: 957347 - DNA, 25 bp, Homo sapien
tgcggcaccaccaccctttttatat

SEQ ID NO: 957348 - DNA, 25 bp, Homo sapien
caatgcaggggctcagattgggaca

SEQ ID NO: 957349 - DNA, 25 bp, Homo sapien
tttgaaaaacatgggtatagaatta

SEQ ID NO: 957350 - DNA, 25 bp, Homo sapien
gatatatatactaacacgtctaata

SEQ ID NO: 957351 - DNA, 25 bp, Homo sapien
tgatgttacctcaaatgccacaggt

SEQ ID NO: 957352 - DNA, 25 bp, Homo sapien
cgcccagcctatgtgatgcaattct

SEQ ID NO: 957353 - DNA, 25 bp, Homo sapien
tgccacaggttaaggccaccagtcc

SEQ ID NO: 957354 - DNA, 25 bp, Homo sapien
cactaggctgccctcgctttagaca

SEQ ID NO: 957355 - DNA, 25 bp, Homo sapien
caagttcgataactcactaaaacaa

SEQ ID NO: 957356 - DNA, 25 bp, Homo sapien
caccatgccctcaagttcgataact

SEQ ID NO: 957357 - DNA, 25 bp, Homo sapien
gataactcactaaaacaattcacag

SEQ ID NO: 957358 - DNA, 25 bp, Homo sapien
aacggcattgacgtgggccatggaa

SEQ ID NO: 957359 - DNA, 25 bp, Homo sapien
cctgtttatgaaatcagccgaggta

SEQ ID NO: 957360 - DNA, 25 bp, Homo sapien
gccacggcccaaatagctgcatgag

SEQ ID NO: 957361 - DNA, 25 bp, Homo sapien
gtttatgaaatcagccgaggtactt

SEQ ID NO: 957362 - DNA, 25 bp, Homo sapien
ctgcttccttcggtacctgtttatg

SEQ ID NO: 957363 - DNA, 25 bp, Homo sapien
taacgatccacctgaattggtttcc

SEQ ID NO: 957364 - DNA, 25 bp, Homo sapien
acgatccacctgaattggtttccca

SEQ ID NO: 957365 - DNA, 25 bp, Homo sapien
tgacctctaacgatccacctgaatt

SEQ ID NO: 957366 - DNA, 25 bp, Homo sapien
cctctaacgatccacctgaattggt

SEQ ID NO: 957367 - DNA, 25 bp, Homo sapien
gcctatggctcctggtggatttaga

SEQ ID NO: 957368 - DNA, 25 bp, Homo sapien
gctcctggtggatttagatacctcc

SEQ ID NO: 957369 - DNA, 25 bp, Homo sapien
gatgcctatggctcctggtggattt

SEQ ID NO: 957370 - DNA, 25 bp, Homo sapien
ggtggatttagatacctcctggtgc

SEQ ID NO: 957371 - DNA, 25 bp, Homo sapien
cttcaactatttactagcagaacac

SEQ ID NO: 957372 - DNA, 25 bp, Homo sapien
ccttcaactatttactagcagaaca

SEQ ID NO: 957373 - DNA, 25 bp, Homo sapien
aaccttcaactatttactagcagaa

SEQ ID NO: 957374 - DNA, 25 bp, Homo sapien
ttcaactatttactagcagaacact

SEQ ID NO: 957375 - DNA, 25 bp, Homo sapien
tgtacaggaagcgtggctggggagg

SEQ ID NO: 957376 - DNA, 25 bp, Homo sapien
aaactgacaatcacggcagaaggcg

SEQ ID NO: 957377 - DNA, 25 bp, Homo sapien
actgacaatcacggcagaaggcgaa

SEQ ID NO: 957378 - DNA, 25 bp, Homo sapien
ggctgtacaggaagcgtggctgggg

SEQ ID NO: 957379 - DNA, 25 bp, Homo sapien
ggatctggcccacagcacccgaggg

SEQ ID NO: 957380 - DNA, 25 bp, Homo sapien
caggcgccctgctaggaacaggtgt

SEQ ID NO: 957381 - DNA, 25 bp, Homo sapien
tgcagcactacagaagtcccatggg

SEQ ID NO: 957382 - DNA, 25 bp, Homo sapien
ttgccaatcaccgacaagggacgta

SEQ ID NO: 957383 - DNA, 25 bp, Homo sapien
acacgggccagtgtccagcccaccc

SEQ ID NO: 957384 - DNA, 25 bp, Homo sapien
cacacgggccagtgtccagcccacc

SEQ ID NO: 957385 - DNA, 25 bp, Homo sapien
aggacctccgaagaaacaggccagg

SEQ ID NO: 957386 - DNA, 25 bp, Homo sapien
cgggccagtgtccagcccaccccgt

SEQ ID NO: 957387 - DNA, 25 bp, Homo sapien
tgatggcgttggtaaaggcttcctg

SEQ ID NO: 957388 - DNA, 25 bp, Homo sapien
tagccagcaaatagcacttgcgggt

SEQ ID NO: 957389 - DNA, 25 bp, Homo sapien
tcggatgatgatcttgtgctccaag

SEQ ID NO: 957390 - DNA, 25 bp, Homo sapien
ctgtagtccggcgtggtctgcactc

SEQ ID NO: 957391 - DNA, 25 bp, Homo sapien
gtgagggtctagcctcacgcccaag

SEQ ID NO: 957392 - DNA, 25 bp, Homo sapien
cagtgtgagggtctagcctcacgcc

SEQ ID NO: 957393 - DNA, 25 bp, Homo sapien
acagtgtgagggtctagcctcacgc

SEQ ID NO: 957394 - DNA, 25 bp, Homo sapien
gtgtgagggtctagcctcacgccca

SEQ ID NO: 957395 - DNA, 25 bp, Homo sapien
cagaggggcccattaaacatagccc

SEQ ID NO: 957396 - DNA, 25 bp, Homo sapien
tggaacttgtgctttgcccagaggg

SEQ ID NO: 957397 - DNA, 25 bp, Homo sapien
tgagagcctgtgacgggaaacttac

SEQ ID NO: 957398 - DNA, 25 bp, Homo sapien
gacttggaacttgtgctttgcccag

SEQ ID NO: 957399 - DNA, 25 bp, Homo sapien
tggtgaataaacaggcattgggtac

SEQ ID NO: 957400 - DNA, 25 bp, Homo sapien
gtttcccagtgtgtggtcttctttg

SEQ ID NO: 957401 - DNA, 25 bp, Homo sapien
ggcattgggtaccttggtgtccttg

SEQ ID NO: 957402 - DNA, 25 bp, Homo sapien
taaacaggcattgggtaccttggtg

SEQ ID NO: 957403 - DNA, 25 bp, Homo sapien
gccctccgcagccggcgtcacttac

SEQ ID NO: 957404 - DNA, 25 bp, Homo sapien
tcggccctccgcagccggcgtcact

SEQ ID NO: 957405 - DNA, 25 bp, Homo sapien
cggccctccgcagccggcgtcactt

SEQ ID NO: 957406 - DNA, 25 bp, Homo sapien
ctcggccctccgcagccggcgtcac

SEQ ID NO: 957407 - DNA, 25 bp, Homo sapien
gaagagcaagaacgactcgaaggct

SEQ ID NO: 957408 - DNA, 25 bp, Homo sapien
gccctcgaagagcaagaacgactcg

SEQ ID NO: 957409 - DNA, 25 bp, Homo sapien
agcaagaacgactcgaaggctggag

SEQ ID NO: 957410 - DNA, 25 bp, Homo sapien
ctcgccctcgaagagcaagaacgac

SEQ ID NO: 957411 - DNA, 25 bp, Homo sapien
ccgttgcgtccagaccccaagtgtc

SEQ ID NO: 957412 - DNA, 25 bp, Homo sapien
ctcccaaagtgcacttggtggatgt

SEQ ID NO: 957413 - DNA, 25 bp, Homo sapien
tgcacttggtggatgtgggcagcaa

SEQ ID NO: 957414 - DNA, 25 bp, Homo sapien
tggatgtgggcagcaagccacccag

SEQ ID NO: 957415 - DNA, 25 bp, Homo sapien
cccaaagtgcacttggtggatgtgg

SEQ ID NO: 957416 - DNA, 25 bp, Homo sapien
acctgttgccaagcccaccgtggtc

SEQ ID NO: 957417 - DNA, 25 bp, Homo sapien
tgccaagcccaccgtggtctagcgg

SEQ ID NO: 957418 - DNA, 25 bp, Homo sapien
gggaagacacctgttgccaagccca

SEQ ID NO: 957419 - DNA, 25 bp, Homo sapien
aagacacctgttgccaagcccaccg

SEQ ID NO: 957420 - DNA, 25 bp, Homo sapien
gctacatggcatggtggttgtgact

SEQ ID NO: 957421 - DNA, 25 bp, Homo sapien
ggcaccacggcgccctgctagtttt

SEQ ID NO: 957422 - DNA, 25 bp, Homo sapien
cctggccacacataccatgctaatt

SEQ ID NO: 957423 - DNA, 25 bp, Homo sapien
tttgttacacattggctgtggttgc

SEQ ID NO: 957424 - DNA, 25 bp, Homo sapien
ggtggttgctgcatacctgttcaga

SEQ ID NO: 957425 - DNA, 25 bp, Homo sapien
ctcaagacatctgggactgggcatg

SEQ ID NO: 957426 - DNA, 25 bp, Homo sapien
tgggtccagtcaagccttcccaggg

SEQ ID NO: 957427 - DNA, 25 bp, Homo sapien
gaatgttccactatcctccagcttg

SEQ ID NO: 957428 - DNA, 25 bp, Homo sapien
ggaaatggtatccaccaaggccaca

SEQ ID NO: 957429 - DNA, 25 bp, Homo sapien
tgtacccctaaggaagtagccagag

SEQ ID NO: 957430 - DNA, 25 bp, Homo sapien
gagggacccaatccagcaaaaaggc

SEQ ID NO: 957431 - DNA, 25 bp, Homo sapien
aaaggcttagttgcccataggacgg

SEQ ID NO: 957432 - DNA, 25 bp, Homo sapien
gggtgagtctctggtaggaccaggc

SEQ ID NO: 957433 - DNA, 25 bp, Homo sapien
ggtgaggtggtgatcagggggaccc

SEQ ID NO: 957434 - DNA, 25 bp, Homo sapien
ggagtgtgagatgcgtgtgaaaatg

SEQ ID NO: 957435 - DNA, 25 bp, Homo sapien
ggtgatcagggggacccatgcttct

SEQ ID NO: 957436 - DNA, 25 bp, Homo sapien
gtctgtaattatcagctcgtggcta

SEQ ID NO: 957437 - DNA, 25 bp, Homo sapien
ttatcagctcgtggctacctctacc

SEQ ID NO: 957438 - DNA, 25 bp, Homo sapien
acatactccgcatctcttgtctgta

SEQ ID NO: 957439 - DNA, 25 bp, Homo sapien
gatatacaaagatagactatgcagg

SEQ ID NO: 957440 - DNA, 25 bp, Homo sapien
gtgcagtatcttatcacacctttaa

SEQ ID NO: 957441 - DNA, 25 bp, Homo sapien
tgcagtatcttatcacacctttaaa

SEQ ID NO: 957442 - DNA, 25 bp, Homo sapien
accgtcacacccagcttcaagtctc

SEQ ID NO: 957443 - DNA, 25 bp, Homo sapien
aagtctcttattataaagttctggc

SEQ ID NO: 957444 - DNA, 25 bp, Homo sapien
gtcacacccagcttcaagtctctta

SEQ ID NO: 957445 - DNA, 25 bp, Homo sapien
tattataaagttctggccacgcaca

SEQ ID NO: 957446 - DNA, 25 bp, Homo sapien
aatggatgcaggcagacgtgaaaac

SEQ ID NO: 957447 - DNA, 25 bp, Homo sapien
tggagacgccccgtgtctatgagct

SEQ ID NO: 957448 - DNA, 25 bp, Homo sapien
acgccccgtgtctatgagctgctgt

SEQ ID NO: 957449 - DNA, 25 bp, Homo sapien
gagacgccccgtgtctatgagctgc

SEQ ID NO: 957450 - DNA, 25 bp, Homo sapien
gctggagctatgggcctcgcggagg

SEQ ID NO: 957451 - DNA, 25 bp, Homo sapien
agctatgggcctcgcggaggtcctg

SEQ ID NO: 957452 - DNA, 25 bp, Homo sapien
tcgcggaggtcctgcagcacccgga

SEQ ID NO: 957453 - DNA, 25 bp, Homo sapien
ctcgcggaggtcctgcagcacccgg

SEQ ID NO: 957454 - DNA, 25 bp, Homo sapien
ctcgggccacgagcaagtcccaggt

SEQ ID NO: 957455 - DNA, 25 bp, Homo sapien
cacccgtgcatctctggagggggct

SEQ ID NO: 957456 - DNA, 25 bp, Homo sapien
agtgagcccgaggaccccacccgtg

SEQ ID NO: 957457 - DNA, 25 bp, Homo sapien
gaggcagccgtgagggcccctggga

SEQ ID NO: 957458 - DNA, 25 bp, Homo sapien
cccgctcagctcccggtgcctctcc

SEQ ID NO: 957459 - DNA, 25 bp, Homo sapien
tggtcaagagggtcattccactcct

SEQ ID NO: 957460 - DNA, 25 bp, Homo sapien
tcctgcagggtcacccgtgaccggg

SEQ ID NO: 957461 - DNA, 25 bp, Homo sapien
tgggcctcaaggtcatggtcaagag

SEQ ID NO: 957462 - DNA, 25 bp, Homo sapien
tgaccgggtcttatcgcagccctga

SEQ ID NO: 957463 - DNA, 25 bp, Homo sapien
catcaggatatgactcgggttgctg

SEQ ID NO: 957464 - DNA, 25 bp, Homo sapien
gaggagcatggatatcatcaggata

SEQ ID NO: 957465 - DNA, 25 bp, Homo sapien
gctgggagcatagcctggtaagtct

SEQ ID NO: 957466 - DNA, 25 bp, Homo sapien
cctgcaccacgggatgcgtgactga

SEQ ID NO: 957467 - DNA, 25 bp, Homo sapien
tgagagagtgagagacccaactcaa

SEQ ID NO: 957468 - DNA, 25 bp, Homo sapien
tgggtgagagagtgagagacccaac

SEQ ID NO: 957469 - DNA, 25 bp, Homo sapien
gagagagtgagagacccaactcaaa

SEQ ID NO: 957470 - DNA, 25 bp, Homo sapien
ggtgagagagtgagagacccaactc

SEQ ID NO: 957471 - DNA, 25 bp, Homo sapien
acaacaacaaaacaagagcagcttg

SEQ ID NO: 957472 - DNA, 25 bp, Homo sapien
caacaacaaaacaagagcagcttga

SEQ ID NO: 957473 - DNA, 25 bp, Homo sapien
cacacatcacgtggcatttcccaaa

SEQ ID NO: 957474 - DNA, 25 bp, Homo sapien
tctcgcagtggacggatgcagagcc

SEQ ID NO: 957475 - DNA, 25 bp, Homo sapien
catcgttcagccagaggcccgatct

SEQ ID NO: 957476 - DNA, 25 bp, Homo sapien
tggtccacgggaccctttctgccca

SEQ ID NO: 957477 - DNA, 25 bp, Homo sapien
cagacagccactggttaagctcatt

SEQ ID NO: 957478 - DNA, 25 bp, Homo sapien
cccagcagtccggtgttgttgatgc

SEQ ID NO: 957479 - DNA, 25 bp, Homo sapien
agacagccactggttaagctcattc

SEQ ID NO: 957480 - DNA, 25 bp, Homo sapien
gctcgtaggtattccagaacccgcc

SEQ ID NO: 957481 - DNA, 25 bp, Homo sapien
cacttgtccccacggaaggcaccgg

SEQ ID NO: 957482 - DNA, 25 bp, Homo sapien
tggccccttggccacgctcgtaggt

SEQ ID NO: 957483 - DNA, 25 bp, Homo sapien
aaggcaccgggatggtaggagccca

SEQ ID NO: 957484 - DNA, 25 bp, Homo sapien
caggcatgagccgacatttgaaaca

SEQ ID NO: 957485 - DNA, 25 bp, Homo sapien
tgtatcccctcacctagaatcatgc

SEQ ID NO: 957486 - DNA, 25 bp, Homo sapien
gaatcatgcctggaacctaggaggt

SEQ ID NO: 957487 - DNA, 25 bp, Homo sapien
cagggatatcagctccatgagggca

SEQ ID NO: 957488 - DNA, 25 bp, Homo sapien
catcacggggatgcacctgtctgtg

SEQ ID NO: 957489 - DNA, 25 bp, Homo sapien
tccaacaaacgggtgcaacgtgcaa

SEQ ID NO: 957490 - DNA, 25 bp, Homo sapien
accctgcggtgcctgatgtagctgg

SEQ ID NO: 957491 - DNA, 25 bp, Homo sapien
cccatctcagttatctggaaatagt

SEQ ID NO: 957492 - DNA, 25 bp, Homo sapien
gctgcccggatgttggctaacttga

SEQ ID NO: 957493 - DNA, 25 bp, Homo sapien
atgttggctaacttgatgagggcgc

SEQ ID NO: 957494 - DNA, 25 bp, Homo sapien
tggctaacttgatgagggcgctttt

SEQ ID NO: 957495 - DNA, 25 bp, Homo sapien
ggcgtcgtccgtgtagatgacctgc

SEQ ID NO: 957496 - DNA, 25 bp, Homo sapien
tagagcttcttgaaggaggaggaca

SEQ ID NO: 957497 - DNA, 25 bp, Homo sapien
ccttgcccttggtcctgtggatgaa

SEQ ID NO: 957498 - DNA, 25 bp, Homo sapien
aggtggcgcctgcaaactcagcgtc

SEQ ID NO: 957499 - DNA, 25 bp, Homo sapien
gcgtcttcgcgaagctgagggcctc

SEQ ID NO: 957500 - DNA, 25 bp, Homo sapien
cgtgtccatgttgcccacgttctgg

SEQ ID NO: 957501 - DNA, 25 bp, Homo sapien
ctggaagccggcgtgtccatgttgc

SEQ ID NO: 957502 - DNA, 25 bp, Homo sapien
acgccctggcgcacggtgggctgca

SEQ ID NO: 957503 - DNA, 25 bp, Homo sapien
agtccttcagctgcgccacgccctg

SEQ ID NO: 957504 - DNA, 25 bp, Homo sapien
ccatgagatggagctcggacaaggt

SEQ ID NO: 957505 - DNA, 25 bp, Homo sapien
ggcctgttcccttatccatgagatg

SEQ ID NO: 957506 - DNA, 25 bp, Homo sapien
caaactgtgaagtgcagtgcctacg

SEQ ID NO: 957507 - DNA, 25 bp, Homo sapien
accaccgacaggatgggcggccttg

SEQ ID NO: 957508 - DNA, 25 bp, Homo sapien
ggccaacaggagcagggtgcggctg

SEQ ID NO: 957509 - DNA, 25 bp, Homo sapien
ccaacaggagcagggtgcggctggt

SEQ ID NO: 957510 - DNA, 25 bp, Homo sapien
gggcgtccgcgtggcgctcccgcag

SEQ ID NO: 957511 - DNA, 25 bp, Homo sapien
ggaagagcttgggcgacatgatggc

SEQ ID NO: 957512 - DNA, 25 bp, Homo sapien
agcctagcccagcgggtggagggcg

SEQ ID NO: 957513 - DNA, 25 bp, Homo sapien
gcctagcccagcgggtggagggcgc

SEQ ID NO: 957514 - DNA, 25 bp, Homo sapien
cagcctagcccagcgggtggagggc

SEQ ID NO: 957515 - DNA, 25 bp, Homo sapien
cctagcccagcgggtggagggcgca

SEQ ID NO: 957516 - DNA, 25 bp, Homo sapien
tcgcgcacgcgccggaagagctggc

SEQ ID NO: 957517 - DNA, 25 bp, Homo sapien
caggtgggcgcgcagcgtctgcgcg

SEQ ID NO: 957518 - DNA, 25 bp, Homo sapien
tcggcctcggtctgcgggcggtgca

SEQ ID NO: 957519 - DNA, 25 bp, Homo sapien
gaaccgagcggctgagcgcgctcag

SEQ ID NO: 957520 - DNA, 25 bp, Homo sapien
taacttccactttgctggggtccag

SEQ ID NO: 957521 - DNA, 25 bp, Homo sapien
caggacgccgtgcaggtactgcatc

SEQ ID NO: 957522 - DNA, 25 bp, Homo sapien
acgccgtgcaggtactgcatcccgg

SEQ ID NO: 957523 - DNA, 25 bp, Homo sapien
gcccaggacgccgtgcaggtactgc

SEQ ID NO: 957524 - DNA, 25 bp, Homo sapien
gcaggtcacattgatcctgtctccc

SEQ ID NO: 957525 - DNA, 25 bp, Homo sapien
tggggaccaccgcaggtcacattga

SEQ ID NO: 957526 - DNA, 25 bp, Homo sapien
gaccaccgcaggtcacattgatcct

SEQ ID NO: 957527 - DNA, 25 bp, Homo sapien
cggcagccgcccttgcaccgtttgc

SEQ ID NO: 957528 - DNA, 25 bp, Homo sapien
tgctccggaacagggtgttggtctc

SEQ ID NO: 957529 - DNA, 25 bp, Homo sapien
ctccggaacagggtgttggtctcac

SEQ ID NO: 957530 - DNA, 25 bp, Homo sapien
gaggccagagagttgctccggaaca

SEQ ID NO: 957531 - DNA, 25 bp, Homo sapien
gagttgctccggaacagggtgttgg

SEQ ID NO: 957532 - DNA, 25 bp, Homo sapien
aagagcttgagcaggttcgtggcca

SEQ ID NO: 957533 - DNA, 25 bp, Homo sapien
tctcctcgatgagtgggatcagctg

SEQ ID NO: 957534 - DNA, 25 bp, Homo sapien
tcctggcgacactcggtgctggttg

SEQ ID NO: 957535 - DNA, 25 bp, Homo sapien
tggccacgtcctggcgacactcggt

SEQ ID NO: 957536 - DNA, 25 bp, Homo sapien
tgcaccagtggctggtagtagctgg

SEQ ID NO: 957537 - DNA, 25 bp, Homo sapien
tggagggcagcaccgtctcgtcccg

SEQ ID NO: 957538 - DNA, 25 bp, Homo sapien
gcccagcttgacctcgtggcacagc

SEQ ID NO: 957539 - DNA, 25 bp, Homo sapien
ctggagggcagcaccgtctcgtccc

SEQ ID NO: 957540 - DNA, 25 bp, Homo sapien
tcgtcatgccgccggctcttggact

SEQ ID NO: 957541 - DNA, 25 bp, Homo sapien
gcagtctctggacatcaatcaccac

SEQ ID NO: 957542 - DNA, 25 bp, Homo sapien
tgcaccacccgcagtctctggacat

SEQ ID NO: 957543 - DNA, 25 bp, Homo sapien
atgccgccggctcttggactggtcg

SEQ ID NO: 957544 - DNA, 25 bp, Homo sapien
cagcgtgggtagcatgacttcttca

SEQ ID NO: 957545 - DNA, 25 bp, Homo sapien
tttgcccaggaagtcgtttcggctg

SEQ ID NO: 957546 - DNA, 25 bp, Homo sapien
caaattcaaacgtctcattccagcg

SEQ ID NO: 957547 - DNA, 25 bp, Homo sapien
caggaagtcgtttcggctgacaagg

SEQ ID NO: 957548 - DNA, 25 bp, Homo sapien
gtgtccggcccttgtagcgcactcg

SEQ ID NO: 957549 - DNA, 25 bp, Homo sapien
ccttgtagcgcactcggacgaaggg

SEQ ID NO: 957550 - DNA, 25 bp, Homo sapien
gtccggcccttgtagcgcactcgga

SEQ ID NO: 957551 - DNA, 25 bp, Homo sapien
gtgccattgcggtcctttggggcca

SEQ ID NO: 957552 - DNA, 25 bp, Homo sapien
ttccagccgcaggtggatctcgccc

SEQ ID NO: 957553 - DNA, 25 bp, Homo sapien
taggccaacccttcagacttaggac

SEQ ID NO: 957554 - DNA, 25 bp, Homo sapien
gacacagtagtactagggcccagat

SEQ ID NO: 957555 - DNA, 25 bp, Homo sapien
tagagtgtaaggaggccccttcttc

SEQ ID NO: 957556 - DNA, 25 bp, Homo sapien
caggcttgggaacatgctgcagaac

SEQ ID NO: 957557 - DNA, 25 bp, Homo sapien
tatggtgtcccttgtaaggcagacc

SEQ ID NO: 957558 - DNA, 25 bp, Homo sapien
gctatggtgtcccttgtaaggcaga

SEQ ID NO: 957559 - DNA, 25 bp, Homo sapien
gcagacctttccgataacgtcgtcc

SEQ ID NO: 957560 - DNA, 25 bp, Homo sapien
ttgtaaggcagacctttccgataac

SEQ ID NO: 957561 - DNA, 25 bp, Homo sapien
gagggcatcctcatccatgacatag

SEQ ID NO: 957562 - DNA, 25 bp, Homo sapien
tcatccatgacatagaaagccacag

SEQ ID NO: 957563 - DNA, 25 bp, Homo sapien
ctgagggcatcctcatccatgacat

SEQ ID NO: 957564 - DNA, 25 bp, Homo sapien
acatagaaagccacagcgtggaagg

SEQ ID NO: 957565 - DNA, 25 bp, Homo sapien
aaggggcacagggtcttccacactg

SEQ ID NO: 957566 - DNA, 25 bp, Homo sapien
ccagaaggggcacagggtcttccac

SEQ ID NO: 957567 - DNA, 25 bp, Homo sapien
gggcacagggtcttccacactgtgg

SEQ ID NO: 957568 - DNA, 25 bp, Homo sapien
cttggtactcctcaccccagaaggg

SEQ ID NO: 957569 - DNA, 25 bp, Homo sapien
agaggctgagcgcccctcggtcctg

SEQ ID NO: 957570 - DNA, 25 bp, Homo sapien
gcgggccgatgagaggctgagcgcc

SEQ ID NO: 957571 - DNA, 25 bp, Homo sapien
agcgcgggccgatgagaggctgagc

SEQ ID NO: 957572 - DNA, 25 bp, Homo sapien
ggagagcgcgggccgatgagaggct

SEQ ID NO: 957573 - DNA, 25 bp, Homo sapien
gatgggctcattgtccaccttcacg

SEQ ID NO: 957574 - DNA, 25 bp, Homo sapien
ccttcacgatgcagtaggggtcgct

SEQ ID NO: 957575 - DNA, 25 bp, Homo sapien
gggctcattgtccaccttcacgatg

SEQ ID NO: 957576 - DNA, 25 bp, Homo sapien
ctgatgatgggctcattgtccacct

SEQ ID NO: 957577 - DNA, 25 bp, Homo sapien
tcttttggcccctcgggaggagtgc

SEQ ID NO: 957578 - DNA, 25 bp, Homo sapien
gaggctgagtctccgcgtcctggtt

SEQ ID NO: 957579 - DNA, 25 bp, Homo sapien
cctcagcccgggagcggatggtgag

SEQ ID NO: 957580 - DNA, 25 bp, Homo sapien
ggagaccgcaggctcctccggccaa

SEQ ID NO: 957581 - DNA, 25 bp, Homo sapien
cccattgtcatggtaactgctgagc

SEQ ID NO: 957582 - DNA, 25 bp, Homo sapien
gtcatggtaactgctgagctgggcc

SEQ ID NO: 957583 - DNA, 25 bp, Homo sapien
tccccattgtcatggtaactgctga

SEQ ID NO: 957584 - DNA, 25 bp, Homo sapien
ttgtcatggtaactgctgagctggg

SEQ ID NO: 957585 - DNA, 25 bp, Homo sapien
tcttcccctccacgatgcggatgta

SEQ ID NO: 957586 - DNA, 25 bp, Homo sapien
atgcggatgtacagcgagctgcgct

SEQ ID NO: 957587 - DNA, 25 bp, Homo sapien
tcccctccacgatgcggatgtacag

SEQ ID NO: 957588 - DNA, 25 bp, Homo sapien
tgtacagcgagctgcgcttggccat

SEQ ID NO: 957589 - DNA, 25 bp, Homo sapien
cggctcgggggaagccagacaccgg

SEQ ID NO: 957590 - DNA, 25 bp, Homo sapien
tcccggctcgggggaagccagacac

SEQ ID NO: 957591 - DNA, 25 bp, Homo sapien
gtcccggctcgggggaagccagaca

SEQ ID NO: 957592 - DNA, 25 bp, Homo sapien
ccggctcgggggaagccagacaccg

SEQ ID NO: 957593 - DNA, 25 bp, Homo sapien
cagactctgacagtggcttctggtg

SEQ ID NO: 957594 - DNA, 25 bp, Homo sapien
tcctgagccaccttccgtcctcacc

SEQ ID NO: 957595 - DNA, 25 bp, Homo sapien
tctcctggaaaaaattgtccctgcc

SEQ ID NO: 957596 - DNA, 25 bp, Homo sapien
gccctaaggaaggactcctgagcca

SEQ ID NO: 957597 - DNA, 25 bp, Homo sapien
tcccaatttattgccatggattact

SEQ ID NO: 957598 - DNA, 25 bp, Homo sapien
tctatcccaatttattgccatggat

SEQ ID NO: 957599 - DNA, 25 bp, Homo sapien
caatttattgccatggattactccc

SEQ ID NO: 957600 - DNA, 25 bp, Homo sapien
tatcccaatttattgccatggatta

SEQ ID NO: 957601 - DNA, 25 bp, Homo sapien
tggagtttcaccttattggccaggc

SEQ ID NO: 957602 - DNA, 25 bp, Homo sapien
tctggggttcaagtgattctcctgc

SEQ ID NO: 957603 - DNA, 25 bp, Homo sapien
gctcacttcagcctctgcctctggg

SEQ ID NO: 957604 - DNA, 25 bp, Homo sapien
gatggagtttcaccttattggccag

SEQ ID NO: 957605 - DNA, 25 bp, Homo sapien
ttgagtacaaccaagaaccactggc

SEQ ID NO: 957606 - DNA, 25 bp, Homo sapien
caagggtgttgtcctgagcagagtc

SEQ ID NO: 957607 - DNA, 25 bp, Homo sapien
tgacattcatggagatccctctggg

SEQ ID NO: 957608 - DNA, 25 bp, Homo sapien
tccagagatgtagcttcaaggtcca

SEQ ID NO: 957609 - DNA, 25 bp, Homo sapien
ccaagggcccatcttaacactgcta

SEQ ID NO: 957610 - DNA, 25 bp, Homo sapien
tgggctgaagtgacctgggtagctg

SEQ ID NO: 957611 - DNA, 25 bp, Homo sapien
tgggtggccaggagataatctttct

SEQ ID NO: 957612 - DNA, 25 bp, Homo sapien
aacactgctactgtgcatgaggctt

SEQ ID NO: 957613 - DNA, 25 bp, Homo sapien
tcgatatttgagatattcttgaact

SEQ ID NO: 957614 - DNA, 25 bp, Homo sapien
ccgcacctggtcgatatttgagata

SEQ ID NO: 957615 - DNA, 25 bp, Homo sapien
tgtattcgagatattctttttgttg

SEQ ID NO: 957616 - DNA, 25 bp, Homo sapien
caggtgtaaactaccacggccagct

SEQ ID NO: 957617 - DNA, 25 bp, Homo sapien
tgtgaccctgcaatggaaatatccc

SEQ ID NO: 957618 - DNA, 25 bp, Homo sapien
tgtgagccctcatgcaccatcctgg

SEQ ID NO: 957619 - DNA, 25 bp, Homo sapien
cgtccagcaagcaagggttccagct

SEQ ID NO: 957620 - DNA, 25 bp, Homo sapien
ctttgggcctgacagcacagctcaa

SEQ ID NO: 957621 - DNA, 25 bp, Homo sapien
actgagtccagccgcggaactgacg

SEQ ID NO: 957622 - DNA, 25 bp, Homo sapien
ctgagtccagccgcggaactgacgc

SEQ ID NO: 957623 - DNA, 25 bp, Homo sapien
cactgagtccagccgcggaactgac

SEQ ID NO: 957624 - DNA, 25 bp, Homo sapien
ccactgagtccagccgcggaactga

SEQ ID NO: 957625 - DNA, 25 bp, Homo sapien
gctgtccccttaagagctgggctgc

SEQ ID NO: 957626 - DNA, 25 bp, Homo sapien
tttcccaggctgtccccttaagagc

SEQ ID NO: 957627 - DNA, 25 bp, Homo sapien
ccaggctgtccccttaagagctggg

SEQ ID NO: 957628 - DNA, 25 bp, Homo sapien
ccccttaagagctgggctgccgcgg

SEQ ID NO: 957629 - DNA, 25 bp, Homo sapien
tggaatgcccctaaagccctcccag

SEQ ID NO: 957630 - DNA, 25 bp, Homo sapien
attgctctcctgtgggtgtgcccgg

SEQ ID NO: 957631 - DNA, 25 bp, Homo sapien
ccagccattgctctcctgtgggtgt

SEQ ID NO: 957632 - DNA, 25 bp, Homo sapien
cagccccttacccagccttcaaggc

SEQ ID NO: 957633 - DNA, 25 bp, Homo sapien
ggattctcaggatccctctatggga

SEQ ID NO: 957634 - DNA, 25 bp, Homo sapien
gactcacaggcctcagagaacctgg

SEQ ID NO: 957635 - DNA, 25 bp, Homo sapien
gaagccagcctcacatggctgggat

SEQ ID NO: 957636 - DNA, 25 bp, Homo sapien
ggctccgacattttctctcccaggg

SEQ ID NO: 957637 - DNA, 25 bp, Homo sapien
actgtggtcagggagagaggttgcc

SEQ ID NO: 957638 - DNA, 25 bp, Homo sapien
gagagaggttgcctggggctgtcca

SEQ ID NO: 957639 - DNA, 25 bp, Homo sapien
gtggtcagggagagaggttgcctgg

SEQ ID NO: 957640 - DNA, 25 bp, Homo sapien
ggtactgtggtcagggagagaggtt

SEQ ID NO: 957641 - DNA, 25 bp, Homo sapien
gacagctttgggctcggctgtcggg

SEQ ID NO: 957642 - DNA, 25 bp, Homo sapien
tcctagatgtctggtcagagatggc

SEQ ID NO: 957643 - DNA, 25 bp, Homo sapien
ccaaggacatatgagaggcagctga

SEQ ID NO: 957644 - DNA, 25 bp, Homo sapien
cagctgagggttgccgggcgagctg

SEQ ID NO: 957645 - DNA, 25 bp, Homo sapien
agggtcattagtccacatgggagct

SEQ ID NO: 957646 - DNA, 25 bp, Homo sapien
ttagcagccctctgtctgggcagga

SEQ ID NO: 957647 - DNA, 25 bp, Homo sapien
aaaatttgccctgtcccctgagact

SEQ ID NO: 957648 - DNA, 25 bp, Homo sapien
aagaaagttagctaggtgcctgtag

SEQ ID NO: 957649 - DNA, 25 bp, Homo sapien
tctccagtctggagaccagaaggcc

SEQ ID NO: 957650 - DNA, 25 bp, Homo sapien
ggctcatagctgttctgaaaaggtt

SEQ ID NO: 957651 - DNA, 25 bp, Homo sapien
tggcctaaccattgctttttatgta

SEQ ID NO: 957652 - DNA, 25 bp, Homo sapien
agtgtgagtgatctgtcttgggtca

SEQ ID NO: 957653 - DNA, 25 bp, Homo sapien
gttggggctcatagctgttctgaaa

SEQ ID NO: 957654 - DNA, 25 bp, Homo sapien
caagctttgggctaaggacacccgc

SEQ ID NO: 957655 - DNA, 25 bp, Homo sapien
tttgggggcatttatttccgataga

SEQ ID NO: 957656 - DNA, 25 bp, Homo sapien
atttatttccgatagagactggcac

SEQ ID NO: 957657 - DNA, 25 bp, Homo sapien
tagaaacaatctctctcgccagact

SEQ ID NO: 957658 - DNA, 25 bp, Homo sapien
ggtccagaagcttcagggcgtgtcc

SEQ ID NO: 957659 - DNA, 25 bp, Homo sapien
tctctcagggtccagaagcttcagg

SEQ ID NO: 957660 - DNA, 25 bp, Homo sapien
ttcagggcgtgtcccagctcaggct

SEQ ID NO: 957661 - DNA, 25 bp, Homo sapien
aagaaacaatctctctcagggtcca

SEQ ID NO: 957662 - DNA, 25 bp, Homo sapien
agtgctgaacgcgaggtgcgtggtg

SEQ ID NO: 957663 - DNA, 25 bp, Homo sapien
gaggtgcgtggtgtatcttctcaca

SEQ ID NO: 957664 - DNA, 25 bp, Homo sapien
tctgggcctgatagggaagtgctcc

SEQ ID NO: 957665 - DNA, 25 bp, Homo sapien
ctcctctgggcctgatagggaagtg

SEQ ID NO: 957666 - DNA, 25 bp, Homo sapien
cctgtatggcgtcttgaggcaatgc

SEQ ID NO: 957667 - DNA, 25 bp, Homo sapien
gcctccccgactggggtgtccgcag

SEQ ID NO: 957668 - DNA, 25 bp, Homo sapien
acttgcaatcccagatgctgccacc

SEQ ID NO: 957669 - DNA, 25 bp, Homo sapien
cacttgcaatcccagatgctgccac

SEQ ID NO: 957670 - DNA, 25 bp, Homo sapien
tcctccttgggcgcctccccgactg

SEQ ID NO: 957671 - DNA, 25 bp, Homo sapien
cttggaaggtgggcaggggcgggcg

SEQ ID NO: 957672 - DNA, 25 bp, Homo sapien
aggcatgggcggtctcagcccggtc

SEQ ID NO: 957673 - DNA, 25 bp, Homo sapien
tgggcggtctcagcccggtccactc

SEQ ID NO: 957674 - DNA, 25 bp, Homo sapien
gcatgggcggtctcagcccggtcca

SEQ ID NO: 957675 - DNA, 25 bp, Homo sapien
atgggcggtctcagcccggtccact

SEQ ID NO: 957676 - DNA, 25 bp, Homo sapien
gacggccaggaggatagacaggatg

SEQ ID NO: 957677 - DNA, 25 bp, Homo sapien
ggaggatagacaggatggcgatgat

SEQ ID NO: 957678 - DNA, 25 bp, Homo sapien
atgatgaccacggtgcccgggctct

SEQ ID NO: 957679 - DNA, 25 bp, Homo sapien
gcgatgatgaccacggtgcccgggc

SEQ ID NO: 957680 - DNA, 25 bp, Homo sapien
tggtttcagccacgggtccttcgtc

SEQ ID NO: 957681 - DNA, 25 bp, Homo sapien
caggcgagtgtcgctggaccacttg

SEQ ID NO: 957682 - DNA, 25 bp, Homo sapien
gtgtcgctggaccacttggtttcag

SEQ ID NO: 957683 - DNA, 25 bp, Homo sapien
gccacgggtccttcgtcattcatca

SEQ ID NO: 957684 - DNA, 25 bp, Homo sapien
cagtgtgagatagtagcccctctgg

SEQ ID NO: 957685 - DNA, 25 bp, Homo sapien
ccctcagtgtgagatagtagcccct

SEQ ID NO: 957686 - DNA, 25 bp, Homo sapien
acccggttggccctcagtgtgagat

SEQ ID NO: 957687 - DNA, 25 bp, Homo sapien
ttggttggcagtgggtatcattgcc

SEQ ID NO: 957688 - DNA, 25 bp, Homo sapien
tgctgagggccaccaccagccagat

SEQ ID NO: 957689 - DNA, 25 bp, Homo sapien
gttgctgagggccaccaccagccag

SEQ ID NO: 957690 - DNA, 25 bp, Homo sapien
caccaccagccagatggtatccaag

SEQ ID NO: 957691 - DNA, 25 bp, Homo sapien
gggccaccaccagccagatggtatc

SEQ ID NO: 957692 - DNA, 25 bp, Homo sapien
tcgtttgagagctggggcacatagc

SEQ ID NO: 957693 - DNA, 25 bp, Homo sapien
gaactggcctagaggctgctccagc

SEQ ID NO: 957694 - DNA, 25 bp, Homo sapien
tccagcgtgaaggtggacagggtga

SEQ ID NO: 957695 - DNA, 25 bp, Homo sapien
tcagagatgttgtggctgctgaact

SEQ ID NO: 957696 - DNA, 25 bp, Homo sapien
ggacacgggtcagtagcagcaacag

SEQ ID NO: 957697 - DNA, 25 bp, Homo sapien
ctgtccgtccgtctgcagtgtctgc

SEQ ID NO: 957698 - DNA, 25 bp, Homo sapien
tgtccgtccgtctgcagtgtctgca

SEQ ID NO: 957699 - DNA, 25 bp, Homo sapien
gctggacacgggtcagtagcagcaa

SEQ ID NO: 957700 - DNA, 25 bp, Homo sapien
atctgccagcccagtgaatctggca

SEQ ID NO: 957701 - DNA, 25 bp, Homo sapien
ggggcagaatctgccagcccagtga

SEQ ID NO: 957702 - DNA, 25 bp, Homo sapien
agaatctgccagcccagtgaatctg

SEQ ID NO: 957703 - DNA, 25 bp, Homo sapien
tttgggggcagaatctgccagccca

SEQ ID NO: 957704 - DNA, 25 bp, Homo sapien
tgccccagggacaatcccgctaagt

SEQ ID NO: 957705 - DNA, 25 bp, Homo sapien
gagaacatacagttgcaagacaagc

SEQ ID NO: 957706 - DNA, 25 bp, Homo sapien
taagtctaccccgtggatctccttg

SEQ ID NO: 957707 - DNA, 25 bp, Homo sapien
ttgtccaaacagtccccaatgtagc

SEQ ID NO: 957708 - DNA, 25 bp, Homo sapien
gagtgaccctcactttctagcacac

SEQ ID NO: 957709 - DNA, 25 bp, Homo sapien
gattggcaatttggcctgtgtccag

SEQ ID NO: 957710 - DNA, 25 bp, Homo sapien
tcccaggctcaaggttctcagattc

SEQ ID NO: 957711 - DNA, 25 bp, Homo sapien
gacagagggactcaggattggcaat

SEQ ID NO: 957712 - DNA, 25 bp, Homo sapien
agccctgctgtccccctgtagcctg

SEQ ID NO: 957713 - DNA, 25 bp, Homo sapien
gggctcccagacttcacaccccctc

SEQ ID NO: 957714 - DNA, 25 bp, Homo sapien
gctgtccccctgtagcctggccctg

SEQ ID NO: 957715 - DNA, 25 bp, Homo sapien
gaggggggctcccagacttcacacc

SEQ ID NO: 957716 - DNA, 25 bp, Homo sapien
ctttatccaggggaccggctgtctc

SEQ ID NO: 957717 - DNA, 25 bp, Homo sapien
tccaggggaccggctgtctcttcct

SEQ ID NO: 957718 - DNA, 25 bp, Homo sapien
ccagcctctgtcagggcagggtagt

SEQ ID NO: 957719 - DNA, 25 bp, Homo sapien
ctctgtcagggcagggtagttcctc

SEQ ID NO: 957720 - DNA, 25 bp, Homo sapien
cagaaaattaccagatggaagtcca

SEQ ID NO: 957721 - DNA, 25 bp, Homo sapien
ctcgagacagaaaattaccagatgg

SEQ ID NO: 957722 - DNA, 25 bp, Homo sapien
gagacagaaaattaccagatggaag

SEQ ID NO: 957723 - DNA, 25 bp, Homo sapien
gacagaaaattaccagatggaagtc

SEQ ID NO: 957724 - DNA, 25 bp, Homo sapien
tggagcgagacctgtgaccacctct

SEQ ID NO: 957725 - DNA, 25 bp, Homo sapien
gtcagcctgaccttcacgctctaat

SEQ ID NO: 957726 - DNA, 25 bp, Homo sapien
cgctctaattatgccagatgtcttc

SEQ ID NO: 957727 - DNA, 25 bp, Homo sapien
caacagattatcacctgtgggcccc

SEQ ID NO: 957728 - DNA, 25 bp, Homo sapien
tcaactcacaagaaaaacttctggc

SEQ ID NO: 957729 - DNA, 25 bp, Homo sapien
actcacaagaaaaacttctggccgg

SEQ ID NO: 957730 - DNA, 25 bp, Homo sapien
gattcagatgttcacctcaactcac

SEQ ID NO: 957731 - DNA, 25 bp, Homo sapien
tcagttccccgaggggattcagatg

SEQ ID NO: 957732 - DNA, 25 bp, Homo sapien
taggaagagttggtgtctgtttttg

SEQ ID NO: 957733 - DNA, 25 bp, Homo sapien
tctgtttttggttcgtagagagtgc

SEQ ID NO: 957734 - DNA, 25 bp, Homo sapien
aaaactaggaagagttggtgtctgt

SEQ ID NO: 957735 - DNA, 25 bp, Homo sapien
ttggttcgtagagagtgccttctag

SEQ ID NO: 957736 - DNA, 25 bp, Homo sapien
gaaaacacgttcttgctcatcgact

SEQ ID NO: 957737 - DNA, 25 bp, Homo sapien
accatgtccggcctgtataatacaa

SEQ ID NO: 957738 - DNA, 25 bp, Homo sapien
caaaaggcagttgaaagcagacatc

SEQ ID NO: 957739 - DNA, 25 bp, Homo sapien
cagggcaggtgttatgactaatctc

SEQ ID NO: 957740 - DNA, 25 bp, Homo sapien
ggagaataataataagccgagatcg

SEQ ID NO: 957741 - DNA, 25 bp, Homo sapien
caagttagcccgttattcaaacact

SEQ ID NO: 957742 - DNA, 25 bp, Homo sapien
tgcacccgcccttgaatggatttta

SEQ ID NO: 957743 - DNA, 25 bp, Homo sapien
aaaatgcatcctaagccgggtgcag

SEQ ID NO: 957744 - DNA, 25 bp, Homo sapien
catgcaaagtgatcacactggaccc

SEQ ID NO: 957745 - DNA, 25 bp, Homo sapien
gcctggcctgaaatgcggtttttat

SEQ ID NO: 957746 - DNA, 25 bp, Homo sapien
ggtttttatcatacgctgcagacta

SEQ ID NO: 957747 - DNA, 25 bp, Homo sapien
gcagactaatgcatcctcagtgtca

SEQ ID NO: 957748 - DNA, 25 bp, Homo sapien
tctcgagtgtaactcactagtgggc

SEQ ID NO: 957749 - DNA, 25 bp, Homo sapien
taaatgatccctctcgagtgtaact

SEQ ID NO: 957750 - DNA, 25 bp, Homo sapien
tgttctgtaaatgatccctctcgag

SEQ ID NO: 957751 - DNA, 25 bp, Homo sapien
taactcactagtgggctgtgtcctt

SEQ ID NO: 957752 - DNA, 25 bp, Homo sapien
cccggccgtgacactcgttttatag

SEQ ID NO: 957753 - DNA, 25 bp, Homo sapien
cgttttatagcatcaggctggtgac

SEQ ID NO: 957754 - DNA, 25 bp, Homo sapien
gcctggagtccaatgccgtggtctc

SEQ ID NO: 957755 - DNA, 25 bp, Homo sapien
gtcttcctagtgcagatgtccccag

SEQ ID NO: 957756 - DNA, 25 bp, Homo sapien
gactagagtttcttagccgaactgg

SEQ ID NO: 957757 - DNA, 25 bp, Homo sapien
ggcttaggtaatccatggattccct

SEQ ID NO: 957758 - DNA, 25 bp, Homo sapien
tcagtattcctgggatctcttgtac

SEQ ID NO: 957759 - DNA, 25 bp, Homo sapien
gtctcttggactcaaaattgcctta

SEQ ID NO: 957760 - DNA, 25 bp, Homo sapien
tcttgtacatgataatctcactctt

SEQ ID NO: 957761 - DNA, 25 bp, Homo sapien
tcctaggcttgagaattgataacat

SEQ ID NO: 957762 - DNA, 25 bp, Homo sapien
gaaggccatggacagaacggagact

SEQ ID NO: 957763 - DNA, 25 bp, Homo sapien
tgcctggagatcagttggacaacag

SEQ ID NO: 957764 - DNA, 25 bp, Homo sapien
gacagattacgggaaagatcacgac

SEQ ID NO: 957765 - DNA, 25 bp, Homo sapien
cgaaacctcatttatactaacaata

SEQ ID NO: 957766 - DNA, 25 bp, Homo sapien
tagcgaaacctcatttatactaaca

SEQ ID NO: 957767 - DNA, 25 bp, Homo sapien
gcgaaacctcatttatactaacaat

SEQ ID NO: 957768 - DNA, 25 bp, Homo sapien
atagcgaaacctcatttatactaac

SEQ ID NO: 957769 - DNA, 25 bp, Homo sapien
tgggtcgggctctagtgtgatcaac

SEQ ID NO: 957770 - DNA, 25 bp, Homo sapien
gtcgggctctagtgtgatcaactgc

SEQ ID NO: 957771 - DNA, 25 bp, Homo sapien
ggtcgggctctagtgtgatcaactg

SEQ ID NO: 957772 - DNA, 25 bp, Homo sapien
ttttgggtcgggctctagtgtgatc

SEQ ID NO: 957773 - DNA, 25 bp, Homo sapien
caatgggaaaaataggccccagtgg

SEQ ID NO: 957774 - DNA, 25 bp, Homo sapien
taggtcaacttgataaaggtcagcg

SEQ ID NO: 957775 - DNA, 25 bp, Homo sapien
gataagaaagcttggtttcgggcca

SEQ ID NO: 957776 - DNA, 25 bp, Homo sapien
tgaagtgatcactcatgagggacac

SEQ ID NO: 957777 - DNA, 25 bp, Homo sapien
actgcagccgatgcgtcctgggttc

SEQ ID NO: 957778 - DNA, 25 bp, Homo sapien
ggagggcagtgtctcgatcttgact

SEQ ID NO: 957779 - DNA, 25 bp, Homo sapien
tgactcactgcagccgatgcgtcct

SEQ ID NO: 957780 - DNA, 25 bp, Homo sapien
gagggcagtgtctcgatcttgactc

SEQ ID NO: 957781 - DNA, 25 bp, Homo sapien
agagtctagctctgctccccaggat

SEQ ID NO: 957782 - DNA, 25 bp, Homo sapien
cagagtctagctctgctccccagga

SEQ ID NO: 957783 - DNA, 25 bp, Homo sapien
atttttgaaatgtttgtagaaacag

SEQ ID NO: 957784 - DNA, 25 bp, Homo sapien
gctcaactaatttttgaaatgtttg

SEQ ID NO: 957785 - DNA, 25 bp, Homo sapien
tatggtcatagcgtatttcagccgg

SEQ ID NO: 957786 - DNA, 25 bp, Homo sapien
tatccgtcaatatccaatgccctgg

SEQ ID NO: 957787 - DNA, 25 bp, Homo sapien
caaatgagtagtcaccccaacactg

SEQ ID NO: 957788 - DNA, 25 bp, Homo sapien
tccatcccgcaatttccaaatgagt

SEQ ID NO: 957789 - DNA, 25 bp, Homo sapien
tagctccgactacagggctgtgcca

SEQ ID NO: 957790 - DNA, 25 bp, Homo sapien
accgcgtctggcatatttcttacat

SEQ ID NO: 957791 - DNA, 25 bp, Homo sapien
tcagcttctttattagctccgacta

SEQ ID NO: 957792 - DNA, 25 bp, Homo sapien
tctttattagctccgactacagggc

SEQ ID NO: 957793 - DNA, 25 bp, Homo sapien
ttaggccattccatgaacccgaggg

SEQ ID NO: 957794 - DNA, 25 bp, Homo sapien
taccgttccatgaactcgagggcca

SEQ ID NO: 957795 - DNA, 25 bp, Homo sapien
gcatacccttgctccgtaagcgtcg

SEQ ID NO: 957796 - DNA, 25 bp, Homo sapien
ggaagaaccgctctcgcataccctt

SEQ ID NO: 957797 - DNA, 25 bp, Homo sapien
ggagcctggaaggtcggggccgcac

SEQ ID NO: 957798 - DNA, 25 bp, Homo sapien
tggaaggtcggggccgcacggagcc

SEQ ID NO: 957799 - DNA, 25 bp, Homo sapien
cctggaaggtcggggccgcacggag

SEQ ID NO: 957800 - DNA, 25 bp, Homo sapien
agcctggaaggtcggggccgcacgg

SEQ ID NO: 957801 - DNA, 25 bp, Homo sapien
catttctcaattgacatgggacgtg

SEQ ID NO: 957802 - DNA, 25 bp, Homo sapien
gcatttctcaattgacatgggacgt

SEQ ID NO: 957803 - DNA, 25 bp, Homo sapien
atttgtgcagatcatctagaagaac

SEQ ID NO: 957804 - DNA, 25 bp, Homo sapien
ccatttgtgcagatcatctagaaga

SEQ ID NO: 957805 - DNA, 25 bp, Homo sapien
tttgtgcagatcatctagaagaacc

SEQ ID NO: 957806 - DNA, 25 bp, Homo sapien
catttgtgcagatcatctagaagaa

SEQ ID NO: 957807 - DNA, 25 bp, Homo sapien
tgcggcaccaccaccctttttatat

SEQ ID NO: 957808 - DNA, 25 bp, Homo sapien
ctggaggtcctgtttcttacggact

SEQ ID NO: 957809 - DNA, 25 bp, Homo sapien
ttcttacggacttgcagtccaggag

SEQ ID NO: 957810 - DNA, 25 bp, Homo sapien
caatgcaggggctcagattgggaca

SEQ ID NO: 957811 - DNA, 25 bp, Homo sapien
attttgaaaaacatgggtatagaat

SEQ ID NO: 957812 - DNA, 25 bp, Homo sapien
tttgaaaaacatgggtatagaatta

SEQ ID NO: 957813 - DNA, 25 bp, Homo sapien
agatatatatactaacacgtctaat

SEQ ID NO: 957814 - DNA, 25 bp, Homo sapien
gatatatatactaacacgtctaata

SEQ ID NO: 957815 - DNA, 25 bp, Homo sapien
tatagctatgtagtagttcccctaa

SEQ ID NO: 957816 - DNA, 25 bp, Homo sapien
tagctatgtagtagttcccctaaat

SEQ ID NO: 957817 - DNA, 25 bp, Homo sapien
gctatgtagtagttcccctaaattc

SEQ ID NO: 957818 - DNA, 25 bp, Homo sapien
ctatgtagtagttcccctaaattct

SEQ ID NO: 957819 - DNA, 25 bp, Homo sapien
aatccctgtggttttggaggtcatg

SEQ ID NO: 957820 - DNA, 25 bp, Homo sapien
cctacaatccctgtggttttggagg

SEQ ID NO: 957821 - DNA, 25 bp, Homo sapien
tagctctggaagataatcctgtgct

SEQ ID NO: 957822 - DNA, 25 bp, Homo sapien
cacacctacaatccctgtggttttg

SEQ ID NO: 957823 - DNA, 25 bp, Homo sapien
ccctcgctttagacacacctgcagg

SEQ ID NO: 957824 - DNA, 25 bp, Homo sapien
cgcccagcctatgtgatgcaattct

SEQ ID NO: 957825 - DNA, 25 bp, Homo sapien
tgccctcgctttagacacacctgca

SEQ ID NO: 957826 - DNA, 25 bp, Homo sapien
aggctgccctcgctttagacacacc

SEQ ID NO: 957827 - DNA, 25 bp, Homo sapien
ggagtacagtgaccaccatgcttgg

SEQ ID NO: 957828 - DNA, 25 bp, Homo sapien
cagagatgtgattcaagaagggaga

SEQ ID NO: 957829 - DNA, 25 bp, Homo sapien
aaacagaaataacggcattgacgtg

SEQ ID NO: 957830 - DNA, 25 bp, Homo sapien
caccatgcccggttgacttctagag

SEQ ID NO: 957831 - DNA, 25 bp, Homo sapien
cctgtttatgaaatcagccgaggta

SEQ ID NO: 957832 - DNA, 25 bp, Homo sapien
gccacggcccaaatagctgcatgag

SEQ ID NO: 957833 - DNA, 25 bp, Homo sapien
gtttatgaaatcagccgaggtactt

SEQ ID NO: 957834 - DNA, 25 bp, Homo sapien
ctgcttccttcggtacctgtttatg

SEQ ID NO: 957835 - DNA, 25 bp, Homo sapien
tagcaattctcctgcatcagacttc

SEQ ID NO: 957836 - DNA, 25 bp, Homo sapien
tttagcaattctcctgcatcagact

SEQ ID NO: 957837 - DNA, 25 bp, Homo sapien
cctctccctcctgggttttagcaat

SEQ ID NO: 957838 - DNA, 25 bp, Homo sapien
gttttagcaattctcctgcatcaga

SEQ ID NO: 957839 - DNA, 25 bp, Homo sapien
taacgatccacctgaattggtttcc

SEQ ID NO: 957840 - DNA, 25 bp, Homo sapien
acgatccacctgaattggtttccca

SEQ ID NO: 957841 - DNA, 25 bp, Homo sapien
tgacctctaacgatccacctgaatt

SEQ ID NO: 957842 - DNA, 25 bp, Homo sapien
cctctaacgatccacctgaattggt

SEQ ID NO: 957843 - DNA, 25 bp, Homo sapien
gctcctggtggatttagatacctcc

SEQ ID NO: 957844 - DNA, 25 bp, Homo sapien
gcctatggctcctggtggatttaga

SEQ ID NO: 957845 - DNA, 25 bp, Homo sapien
gatgcctatggctcctggtggattt

SEQ ID NO: 957846 - DNA, 25 bp, Homo sapien
ggtggatttagatacctcctggtgc

SEQ ID NO: 957847 - DNA, 25 bp, Homo sapien
cttcaactatttactagcagaacac

SEQ ID NO: 957848 - DNA, 25 bp, Homo sapien
aaccttcaactatttactagcagaa

SEQ ID NO: 957849 - DNA, 25 bp, Homo sapien
ttcaactatttactagcagaacact

SEQ ID NO: 957850 - DNA, 25 bp, Homo sapien
ccttcaactatttactagcagaaca

SEQ ID NO: 957851 - DNA, 25 bp, Homo sapien
gctgtacaggaagcgtggctgggga

SEQ ID NO: 957852 - DNA, 25 bp, Homo sapien
acaggaagcgtggctggggaggcct

SEQ ID NO: 957853 - DNA, 25 bp, Homo sapien
ggctgtacaggaagcgtggctgggg

SEQ ID NO: 957854 - DNA, 25 bp, Homo sapien
accatgtcaagggtagttcaaccgc

SEQ ID NO: 957855 - DNA, 25 bp, Homo sapien
ttcaaccgctgagattgattgattg

SEQ ID NO: 957856 - DNA, 25 bp, Homo sapien
agttcaaccgctgagattgattgat

SEQ ID NO: 957857 - DNA, 25 bp, Homo sapien
gtcaagggtagttcaaccgctgaga

SEQ ID NO: 957858 - DNA, 25 bp, Homo sapien
ggccttgccaatcaccgacaaggga

SEQ ID NO: 957859 - DNA, 25 bp, Homo sapien
cctgcagcactacagaagtcccatg

SEQ ID NO: 957860 - DNA, 25 bp, Homo sapien
tgcagcactacagaagtcccatggg

SEQ ID NO: 957861 - DNA, 25 bp, Homo sapien
gatctggcccacagcacccgaggga

SEQ ID NO: 957862 - DNA, 25 bp, Homo sapien
cgggccagtgtccagcccaccccgt

SEQ ID NO: 957863 - DNA, 25 bp, Homo sapien
acacgggccagtgtccagcccaccc

SEQ ID NO: 957864 - DNA, 25 bp, Homo sapien
cacacgggccagtgtccagcccacc

SEQ ID NO: 957865 - DNA, 25 bp, Homo sapien
aggacctccgaagaaacaggccagg

SEQ ID NO: 957866 - DNA, 25 bp, Homo sapien
tccagcagggacagctcactgatga

SEQ ID NO: 957867 - DNA, 25 bp, Homo sapien
tgatggcgttggtaaaggcttcctg

SEQ ID NO: 957868 - DNA, 25 bp, Homo sapien
ctgtagtccggcgtggtctgcactc

SEQ ID NO: 957869 - DNA, 25 bp, Homo sapien
tcggatgatgatcttgtgctccaag

SEQ ID NO: 957870 - DNA, 25 bp, Homo sapien
agagcagaagaacagactttctagc

SEQ ID NO: 957871 - DNA, 25 bp, Homo sapien
acagtgtgagggtctagcctcatgc

SEQ ID NO: 957872 - DNA, 25 bp, Homo sapien
cagaagaacagactttctagccaaa

SEQ ID NO: 957873 - DNA, 25 bp, Homo sapien
tagcctcatgcccaagctgggtagc

SEQ ID NO: 957874 - DNA, 25 bp, Homo sapien
cctgagagcctgtgacgggaaactt

SEQ ID NO: 957875 - DNA, 25 bp, Homo sapien
tacagaataagccactacagaagtg

SEQ ID NO: 957876 - DNA, 25 bp, Homo sapien
tggaacttgtgctttgcccagaggg

SEQ ID NO: 957877 - DNA, 25 bp, Homo sapien
cagaaggacttcctgtagctcagag

SEQ ID NO: 957878 - DNA, 25 bp, Homo sapien
tttcccagtgtgtggtcttctttgt

SEQ ID NO: 957879 - DNA, 25 bp, Homo sapien
gtttcccagtgtgtggtcttctttg

SEQ ID NO: 957880 - DNA, 25 bp, Homo sapien
ggcctgaatcccacgtttaagtaca

SEQ ID NO: 957881 - DNA, 25 bp, Homo sapien
gacactctgggttcgaatacaagcg

SEQ ID NO: 957882 - DNA, 25 bp, Homo sapien
tttggctgacacaggccgagcagac

SEQ ID NO: 957883 - DNA, 25 bp, Homo sapien
ggcttttacgcaggccgctgacaga

SEQ ID NO: 957884 - DNA, 25 bp, Homo sapien
gccctcgaagagcaagaacgactcg

SEQ ID NO: 957885 - DNA, 25 bp, Homo sapien
agcaagaacgactcgaaggctggag

SEQ ID NO: 957886 - DNA, 25 bp, Homo sapien
gaagagcaagaacgactcgaaggct

SEQ ID NO: 957887 - DNA, 25 bp, Homo sapien
ctcgccctcgaagagcaagaacgac

SEQ ID NO: 957888 - DNA, 25 bp, Homo sapien
ccaccagagccctaataagaggcct

SEQ ID NO: 957889 - DNA, 25 bp, Homo sapien
gccctaataagaggcctcttccgga

SEQ ID NO: 957890 - DNA, 25 bp, Homo sapien
aggcctcttccggattactccggcg

SEQ ID NO: 957891 - DNA, 25 bp, Homo sapien
taagaggcctcttccggattactcc

SEQ ID NO: 957892 - DNA, 25 bp, Homo sapien
ggagtgtgagatgcgtgtgaaaatg

SEQ ID NO: 957893 - DNA, 25 bp, Homo sapien
ggtgatcagggggacccatgcttct

SEQ ID NO: 957894 - DNA, 25 bp, Homo sapien
ggtgaggtggtgatcagggggaccc

SEQ ID NO: 957895 - DNA, 25 bp, Homo sapien
gggtgagtctctggtaggaccaggc

SEQ ID NO: 957896 - DNA, 25 bp, Homo sapien
gcaattggttgctgtaagtcaccta

SEQ ID NO: 957897 - DNA, 25 bp, Homo sapien
ccaagtgcagtatcttatcacacct

SEQ ID NO: 957898 - DNA, 25 bp, Homo sapien
tccaattgcctcataaaaagatcat

SEQ ID NO: 957899 - DNA, 25 bp, Homo sapien
taaggacgcttacaacacaactgca

SEQ ID NO: 957900 - DNA, 25 bp, Homo sapien
caagttttgccaaccatcggaccag

SEQ ID NO: 957901 - DNA, 25 bp, Homo sapien
caacggtgcacctttgggatctggg

SEQ ID NO: 957902 - DNA, 25 bp, Homo sapien
gactgcatggcaaggcaagagctga

SEQ ID NO: 957903 - DNA, 25 bp, Homo sapien
gaacagctggttggacacactgggc

SEQ ID NO: 957904 - DNA, 25 bp, Homo sapien
ctcgcggaggtcctgcagcacccgg

SEQ ID NO: 957905 - DNA, 25 bp, Homo sapien
gctggagctatgggcctcgcggagg

SEQ ID NO: 957906 - DNA, 25 bp, Homo sapien
tcgcggaggtcctgcagcacccgga

SEQ ID NO: 957907 - DNA, 25 bp, Homo sapien
agctatgggcctcgcggaggtcctg

SEQ ID NO: 957908 - DNA, 25 bp, Homo sapien
cccgctcagctcccggtgcctctcc

SEQ ID NO: 957909 - DNA, 25 bp, Homo sapien
ccaccttcgtgggttttgagggcag

SEQ ID NO: 957910 - DNA, 25 bp, Homo sapien
gaagctgagcgcatgggaagcactg

SEQ ID NO: 957911 - DNA, 25 bp, Homo sapien
taaaccctggaagagtcgatgagga

SEQ ID NO: 957912 - DNA, 25 bp, Homo sapien
tgtgacagatgaatgagctccagct

SEQ ID NO: 957913 - DNA, 25 bp, Homo sapien
cagatgtggccaattacaagagagg

SEQ ID NO: 957914 - DNA, 25 bp, Homo sapien
tctgtcctaacctgagctggcctcg

SEQ ID NO: 957915 - DNA, 25 bp, Homo sapien
ggcctcgtgctgcagagaggtactc

SEQ ID NO: 957916 - DNA, 25 bp, Homo sapien
acatggcatgaagcaggcatggccc

SEQ ID NO: 957917 - DNA, 25 bp, Homo sapien
tcctgcagggtcacccgtgaccggg

SEQ ID NO: 957918 - DNA, 25 bp, Homo sapien
tgggcctcaaggtcatggtcaagag

SEQ ID NO: 957919 - DNA, 25 bp, Homo sapien
tggtcaagagggtcattccactcct

SEQ ID NO: 957920 - DNA, 25 bp, Homo sapien
caggtgccggtagatgagctgggcc

SEQ ID NO: 957921 - DNA, 25 bp, Homo sapien
taaagtaagtgtggataacagggag

SEQ ID NO: 957922 - DNA, 25 bp, Homo sapien
gaactgtgctgttctacagggcggc

SEQ ID NO: 957923 - DNA, 25 bp, Homo sapien
gctgagtctactctgtaaagtaagt

SEQ ID NO: 957924 - DNA, 25 bp, Homo sapien
gagaaggtctcgaaagttctagaac

SEQ ID NO: 957925 - DNA, 25 bp, Homo sapien
ccttcagcgaattcactcatatgca

SEQ ID NO: 957926 - DNA, 25 bp, Homo sapien
ttggtggcgagtgccggtcatccca

SEQ ID NO: 957927 - DNA, 25 bp, Homo sapien
tctcgcagtggacggatgcagagcc

SEQ ID NO: 957928 - DNA, 25 bp, Homo sapien
cttgggttaggtccctgcaggtgca

SEQ ID NO: 957929 - DNA, 25 bp, Homo sapien
cagacagccactggttaagctcatt

SEQ ID NO: 957930 - DNA, 25 bp, Homo sapien
cccagcagtccggtgttgttgatgc

SEQ ID NO: 957931 - DNA, 25 bp, Homo sapien
agacagccactggttaagctcattc

SEQ ID NO: 957932 - DNA, 25 bp, Homo sapien
ctgcaggggacacggagggggaggc

SEQ ID NO: 957933 - DNA, 25 bp, Homo sapien
ccttgcccttggtcctgtggatgaa

SEQ ID NO: 957934 - DNA, 25 bp, Homo sapien
aggtggcgcctgcaaactcagcgtc

SEQ ID NO: 957935 - DNA, 25 bp, Homo sapien
tagagcttcttgaaggaggaggaca

SEQ ID NO: 957936 - DNA, 25 bp, Homo sapien
gcgtcttcgcgaagctgagggcctc

SEQ ID NO: 957937 - DNA, 25 bp, Homo sapien
cgtgtccatgttgcccacgttctgg

SEQ ID NO: 957938 - DNA, 25 bp, Homo sapien
agtccttcagctgcgccacgccctg

SEQ ID NO: 957939 - DNA, 25 bp, Homo sapien
ctggaagccggcgtgtccatgttgc

SEQ ID NO: 957940 - DNA, 25 bp, Homo sapien
acgccctggcgcacggtgggctgca

SEQ ID NO: 957941 - DNA, 25 bp, Homo sapien
ggaagagcttgggcgacatgatggc

SEQ ID NO: 957942 - DNA, 25 bp, Homo sapien
gggcgtccgcgtggcgctcccgcag

SEQ ID NO: 957943 - DNA, 25 bp, Homo sapien
gccaacaggagcagggtgcggctgg

SEQ ID NO: 957944 - DNA, 25 bp, Homo sapien
ccaacaggagcagggtgcggctggt

SEQ ID NO: 957945 - DNA, 25 bp, Homo sapien
tcggcctcggtctgcgggcggtgca

SEQ ID NO: 957946 - DNA, 25 bp, Homo sapien
tcgcgcacgcgccggaagagctggc

SEQ ID NO: 957947 - DNA, 25 bp, Homo sapien
caggtgggcgcgcagcgtctgcgcg

SEQ ID NO: 957948 - DNA, 25 bp, Homo sapien
gaaccgagcggctgagcgcgctcag

SEQ ID NO: 957949 - DNA, 25 bp, Homo sapien
caggacgccgtgcaggtactgcatc

SEQ ID NO: 957950 - DNA, 25 bp, Homo sapien
taacttccactttgctggggtccag

SEQ ID NO: 957951 - DNA, 25 bp, Homo sapien
acgccgtgcaggtactgcatcccgg

SEQ ID NO: 957952 - DNA, 25 bp, Homo sapien
gcccaggacgccgtgcaggtactgc

SEQ ID NO: 957953 - DNA, 25 bp, Homo sapien
agccgcccttgcaccgtttgcctgc

SEQ ID NO: 957954 - DNA, 25 bp, Homo sapien
gtttgcctgccgtatccgcccagga

SEQ ID NO: 957955 - DNA, 25 bp, Homo sapien
caccgtttgcctgccgtatccgccc

SEQ ID NO: 957956 - DNA, 25 bp, Homo sapien
tgcctgccgtatccgcccaggaggg

SEQ ID NO: 957957 - DNA, 25 bp, Homo sapien
gagttgttctgacaataccccagat

SEQ ID NO: 957958 - DNA, 25 bp, Homo sapien
gttgttctgacaataccccagattc

SEQ ID NO: 957959 - DNA, 25 bp, Homo sapien
aatagagttgttctgacaatacccc

SEQ ID NO: 957960 - DNA, 25 bp, Homo sapien
tagagttgttctgacaataccccag

SEQ ID NO: 957961 - DNA, 25 bp, Homo sapien
gccatttttgcagatacagtttctg

SEQ ID NO: 957962 - DNA, 25 bp, Homo sapien
tcatctgcacttttgccatttttgc

SEQ ID NO: 957963 - DNA, 25 bp, Homo sapien
tcagttgtcatctgcacttttgcca

SEQ ID NO: 957964 - DNA, 25 bp, Homo sapien
gttgtcatctgcacttttgccattt

SEQ ID NO: 957965 - DNA, 25 bp, Homo sapien
attatccctccggtcttctaacagg

SEQ ID NO: 957966 - DNA, 25 bp, Homo sapien
gcaggatgagaaacaagtgggctat

SEQ ID NO: 957967 - DNA, 25 bp, Homo sapien
taggttttatcacggttagcagctg

SEQ ID NO: 957968 - DNA, 25 bp, Homo sapien
gtgggctatatctccaccacacggg

SEQ ID NO: 957969 - DNA, 25 bp, Homo sapien
aacctgtacatgtatgccctgtatc

SEQ ID NO: 957970 - DNA, 25 bp, Homo sapien
gcaatatgcccatgtacaaaacctg

SEQ ID NO: 957971 - DNA, 25 bp, Homo sapien
ttaccacctggatgcaatatgccca

SEQ ID NO: 957972 - DNA, 25 bp, Homo sapien
ggtactaggcttaccacctggatgc

SEQ ID NO: 957973 - DNA, 25 bp, Homo sapien
tgagttgggttttactgtagtaaca

SEQ ID NO: 957974 - DNA, 25 bp, Homo sapien
tgttgagttgggttttactgtagta

SEQ ID NO: 957975 - DNA, 25 bp, Homo sapien
ttgggttttactgtagtaacatata

SEQ ID NO: 957976 - DNA, 25 bp, Homo sapien
agaaaaatgaaagctggagtttcag

SEQ ID NO: 957977 - DNA, 25 bp, Homo sapien
tgaaagctggagtttcagataaatc

SEQ ID NO: 957978 - DNA, 25 bp, Homo sapien
aaaatgaaagctggagtttcagata

SEQ ID NO: 957979 - DNA, 25 bp, Homo sapien
agctggagtttcagataaatcaaca

SEQ ID NO: 957980 - DNA, 25 bp, Homo sapien
tgggcactatggcataaatgggctc

SEQ ID NO: 957981 - DNA, 25 bp, Homo sapien
gggcactatggcataaatgggctct

SEQ ID NO: 957982 - DNA, 25 bp, Homo sapien
catatgtggctatttaggagtatct

SEQ ID NO: 957983 - DNA, 25 bp, Homo sapien
ccatatgtggctatttaggagtatc

SEQ ID NO: 957984 - DNA, 25 bp, Homo sapien
atccatatgtggctatttaggagta

SEQ ID NO: 957985 - DNA, 25 bp, Homo sapien
ttaatccatatgtggctatttagga

SEQ ID NO: 957986 - DNA, 25 bp, Homo sapien
gaagataactgcaattgtcatgctt

SEQ ID NO: 957987 - DNA, 25 bp, Homo sapien
tctcattggattggctgttccttga

SEQ ID NO: 957988 - DNA, 25 bp, Homo sapien
gcttttagggtctgatcttctgctg

SEQ ID NO: 957989 - DNA, 25 bp, Homo sapien
tcattggattggctgttccttgatg

SEQ ID NO: 957990 - DNA, 25 bp, Homo sapien
cccttggtcctgatccttatttagg

SEQ ID NO: 957991 - DNA, 25 bp, Homo sapien
tggtcctgatccttatttaggctcc

SEQ ID NO: 957992 - DNA, 25 bp, Homo sapien
cctgatccttatttaggctcctatt

SEQ ID NO: 957993 - DNA, 25 bp, Homo sapien
gtcctgatccttatttaggctccta

SEQ ID NO: 957994 - DNA, 25 bp, Homo sapien
cattaattgcctagatggtagtaaa

SEQ ID NO: 957995 - DNA, 25 bp, Homo sapien
tagcttttagtggagaaacaattcc

SEQ ID NO: 957996 - DNA, 25 bp, Homo sapien
caattccttatcaagtcagatgtgg

SEQ ID NO: 957997 - DNA, 25 bp, Homo sapien
caaagtacttaggtctgttgattac

SEQ ID NO: 957998 - DNA, 25 bp, Homo sapien
cagggtttagacctctgacacaaaa

SEQ ID NO: 957999 - DNA, 25 bp, Homo sapien
gaaaccaggcctagaagtgcatata

SEQ ID NO: 958000 - DNA, 25 bp, Homo sapien
tgagtctgaactacccttacaaggg

SEQ ID NO: 958001 - DNA, 25 bp, Homo sapien
tacagtgtctgtcctaagtgcagct

SEQ ID NO: 958002 - DNA, 25 bp, Homo sapien
ttaatcgttcgcaaagacatctgga

SEQ ID NO: 958003 - DNA, 25 bp, Homo sapien
cttaatcgttcgcaaagacatctgg

SEQ ID NO: 958004 - DNA, 25 bp, Homo sapien
tcttaatcgttcgcaaagacatctg

SEQ ID NO: 958005 - DNA, 25 bp, Homo sapien
taatcgttcgcaaagacatctggaa

SEQ ID NO: 958006 - DNA, 25 bp, Homo sapien
aaagatcaagacagggttcacagga

SEQ ID NO: 958007 - DNA, 25 bp, Homo sapien
cagagggaatagaacctggtgctca

SEQ ID NO: 958008 - DNA, 25 bp, Homo sapien
gttcacaggacaaagtaccagaggg

SEQ ID NO: 958009 - DNA, 25 bp, Homo sapien
tagtgggaaacaatcagtcttaggc

SEQ ID NO: 958010 - DNA, 25 bp, Homo sapien
tcatgtggggacaattagcttagaa

SEQ ID NO: 958011 - DNA, 25 bp, Homo sapien
ataatgtagctctcacatgacaggt

SEQ ID NO: 958012 - DNA, 25 bp, Homo sapien
acattcataggagtgatggcccatc

SEQ ID NO: 958013 - DNA, 25 bp, Homo sapien
atgacaggttttctacttagtacct

SEQ ID NO: 958014 - DNA, 25 bp, Homo sapien
caaggcttgtttgcggcagtcagaa

SEQ ID NO: 958015 - DNA, 25 bp, Homo sapien
tacagagttaattggcggcatttag

SEQ ID NO: 958016 - DNA, 25 bp, Homo sapien
cctagcataaaattgagggagcatc

SEQ ID NO: 958017 - DNA, 25 bp, Homo sapien
tcttagtttgacatatggccatctc

SEQ ID NO: 958018 - DNA, 25 bp, Homo sapien
agaagaactactgatgtgtttggaa

SEQ ID NO: 958019 - DNA, 25 bp, Homo sapien
tttagacagaagaactactgatgtg

SEQ ID NO: 958020 - DNA, 25 bp, Homo sapien
ttatttagacagaagaactactgat

SEQ ID NO: 958021 - DNA, 25 bp, Homo sapien
cagaagaactactgatgtgtttgga

SEQ ID NO: 958022 - DNA, 25 bp, Homo sapien
ttgcttgtttacattgttattgaga

SEQ ID NO: 958023 - DNA, 25 bp, Homo sapien
gcttgtttacattgttattgagatt

SEQ ID NO: 958024 - DNA, 25 bp, Homo sapien
tgagattcagctagtaaacatactt

SEQ ID NO: 958025 - DNA, 25 bp, Homo sapien
agattcagctagtaaacatacttgc

SEQ ID NO: 958026 - DNA, 25 bp, Homo sapien
taaggctcctttagatgatgttatg

SEQ ID NO: 958027 - DNA, 25 bp, Homo sapien
tgtcaagctctgtaacagggtttcc

SEQ ID NO: 958028 - DNA, 25 bp, Homo sapien
ttttcactgttaattctaaggctcc

SEQ ID NO: 958029 - DNA, 25 bp, Homo sapien
caaaccaacgtggagggtcattagt

SEQ ID NO: 958030 - DNA, 25 bp, Homo sapien
cctccacctggtatgtctttagggc

SEQ ID NO: 958031 - DNA, 25 bp, Homo sapien
gggagcaaaggatcagatctcagac

SEQ ID NO: 958032 - DNA, 25 bp, Homo sapien
tagggcctgttttagtctgaagtgc

SEQ ID NO: 958033 - DNA, 25 bp, Homo sapien
cacctggtatgtctttagggcctgt

SEQ ID NO: 958034 - DNA, 25 bp, Homo sapien
ccagagatatccaaaatgtgcaggt

SEQ ID NO: 958035 - DNA, 25 bp, Homo sapien
ttgcatcttaaggatccggagttgt

SEQ ID NO: 958036 - DNA, 25 bp, Homo sapien
caaggatttggtcagtaagcaagac

SEQ ID NO: 958037 - DNA, 25 bp, Homo sapien
ccggagttgtttgcagcctatctga

SEQ ID NO: 958038 - DNA, 25 bp, Homo sapien
ctgcaattggtgtcttgggaagtcc

SEQ ID NO: 958039 - DNA, 25 bp, Homo sapien
tgcaattggtgtcttgggaagtccc

SEQ ID NO: 958040 - DNA, 25 bp, Homo sapien
tatccctctcagaggtgcattgcag

SEQ ID NO: 958041 - DNA, 25 bp, Homo sapien
ccctctcagaggtgcattgcagaga

SEQ ID NO: 958042 - DNA, 25 bp, Homo sapien
tctcagaggtgcattgcagagacat

SEQ ID NO: 958043 - DNA, 25 bp, Homo sapien
cttatccctctcagaggtgcattgc

SEQ ID NO: 958044 - DNA, 25 bp, Homo sapien
ggatgaggtcacagtactactaact

SEQ ID NO: 958045 - DNA, 25 bp, Homo sapien
tgagtgctttgaactggccccagag

SEQ ID NO: 958046 - DNA, 25 bp, Homo sapien
tactaactgaccttcgaggtgaggt

SEQ ID NO: 958047 - DNA, 25 bp, Homo sapien
gaaacctggcacagaatgatgagcc

SEQ ID NO: 958048 - DNA, 25 bp, Homo sapien
caaaagccttcagtgtgtacaatag

SEQ ID NO: 958049 - DNA, 25 bp, Homo sapien
tgttcacgattaagagtggaggact

SEQ ID NO: 958050 - DNA, 25 bp, Homo sapien
gaagagaacacgattgttaataacc

SEQ ID NO: 958051 - DNA, 25 bp, Homo sapien
gaaggtcagagtacacgcatctcta

SEQ ID NO: 958052 - DNA, 25 bp, Homo sapien
agagaacatattctgagtccagccc

SEQ ID NO: 958053 - DNA, 25 bp, Homo sapien
tccaatgaatacctcaaccatggca

SEQ ID NO: 958054 - DNA, 25 bp, Homo sapien
gatcgctgtcctgccttgtcccttg

SEQ ID NO: 958055 - DNA, 25 bp, Homo sapien
ttgacaccagtggaatcataagcta

SEQ ID NO: 958056 - DNA, 25 bp, Homo sapien
ccagcaatgctgagagatgtgaggt

SEQ ID NO: 958057 - DNA, 25 bp, Homo sapien
aatgcagtaaatggccagtgctttg

SEQ ID NO: 958058 - DNA, 25 bp, Homo sapien
taaatggccagtgctttgataatca

SEQ ID NO: 958059 - DNA, 25 bp, Homo sapien
gagagatgtgaggttaatgcagtaa

SEQ ID NO: 958060 - DNA, 25 bp, Homo sapien
agatcagtgagcttttgcagaatgc

SEQ ID NO: 958061 - DNA, 25 bp, Homo sapien
aatgttccaagatcagtgagctttt

SEQ ID NO: 958062 - DNA, 25 bp, Homo sapien
taagagacatccaaatgttccaaga

SEQ ID NO: 958063 - DNA, 25 bp, Homo sapien
ctgggagcaataagagacatccaaa

SEQ ID NO: 958064 - DNA, 25 bp, Homo sapien
tgttaactactatcaggatttgcac

SEQ ID NO: 958065 - DNA, 25 bp, Homo sapien
atgttaactactatcaggatttgca

SEQ ID NO: 958066 - DNA, 25 bp, Homo sapien
gttaactactatcaggatttgcaca

SEQ ID NO: 958067 - DNA, 25 bp, Homo sapien
tagaacaggctggtcataggccatt

SEQ ID NO: 958068 - DNA, 25 bp, Homo sapien
ctttctgacctgagtatccttgtag

SEQ ID NO: 958069 - DNA, 25 bp, Homo sapien
tgaggtaggtactcctgggcctttc

SEQ ID NO: 958070 - DNA, 25 bp, Homo sapien
ccagagaggaatgtgtagaacaggc

SEQ ID NO: 958071 - DNA, 25 bp, Homo sapien
taacagatgatcttaatgatcttac

SEQ ID NO: 958072 - DNA, 25 bp, Homo sapien
ttaacagatgatcttaatgatctta

SEQ ID NO: 958073 - DNA, 25 bp, Homo sapien
tccttcaattttttatgtctggaaa

SEQ ID NO: 958074 - DNA, 25 bp, Homo sapien
ccatcttgagggaagtgacaggctc

SEQ ID NO: 958075 - DNA, 25 bp, Homo sapien
tatcactagcttgatgggaccaaca

SEQ ID NO: 958076 - DNA, 25 bp, Homo sapien
caatggaccataacctctgtgagaa

SEQ ID NO: 958077 - DNA, 25 bp, Homo sapien
gactgtttgcctcctacttgatgga

SEQ ID NO: 958078 - DNA, 25 bp, Homo sapien
tatagacagactcagaacactgcag

SEQ ID NO: 958079 - DNA, 25 bp, Homo sapien
ctgcagcaaaggtgagtacgagaaa

SEQ ID NO: 958080 - DNA, 25 bp, Homo sapien
ctcgctataaatgtgtgggcttatt

SEQ ID NO: 958081 - DNA, 25 bp, Homo sapien
ctgcatgtagctatccaggtttccc

SEQ ID NO: 958082 - DNA, 25 bp, Homo sapien
taaggcaacttaagtaacagactga

SEQ ID NO: 958083 - DNA, 25 bp, Homo sapien
caaatatggcggtgactaaggcaac

SEQ ID NO: 958084 - DNA, 25 bp, Homo sapien
tcctgtggtctttagcaaatgataa

SEQ ID NO: 958085 - DNA, 25 bp, Homo sapien
tgccctcaccatggatcctgtggtc

SEQ ID NO: 958086 - DNA, 25 bp, Homo sapien
actcaagtagtttaaattagggcag

SEQ ID NO: 958087 - DNA, 25 bp, Homo sapien
gatgtctgttccagagagatctatt

SEQ ID NO: 958088 - DNA, 25 bp, Homo sapien
tatccaattccttgggcagtcaaat

SEQ ID NO: 958089 - DNA, 25 bp, Homo sapien
tattgataccaaggaaaagatgttt

SEQ ID NO: 958090 - DNA, 25 bp, Homo sapien
tcataacagaggcatcacttagccg

SEQ ID NO: 958091 - DNA, 25 bp, Homo sapien
tatcctcatgcttgcaggaccatca

SEQ ID NO: 958092 - DNA, 25 bp, Homo sapien
acttagccgcacacagttgcttaaa

SEQ ID NO: 958093 - DNA, 25 bp, Homo sapien
ccatcaagaaattgctttagtccca

SEQ ID NO: 958094 - DNA, 25 bp, Homo sapien
gagtttccaccattgcaatcctaag

SEQ ID NO: 958095 - DNA, 25 bp, Homo sapien
ggctggatgtctgtttggcccatca

SEQ ID NO: 958096 - DNA, 25 bp, Homo sapien
gcatttcagcaaataaagcaggaca

SEQ ID NO: 958097 - DNA, 25 bp, Homo sapien
tccctgtcttccattgggatcttca

SEQ ID NO: 958098 - DNA, 25 bp, Homo sapien
caggtgggcgtacagatgggaagaa

SEQ ID NO: 958099 - DNA, 25 bp, Homo sapien
ctacaggtgggcgtacagatgggaa

SEQ ID NO: 958100 - DNA, 25 bp, Homo sapien
ggtgggcgtacagatgggaagaaca

SEQ ID NO: 958101 - DNA, 25 bp, Homo sapien
tacaggtgggcgtacagatgggaag

SEQ ID NO: 958102 - DNA, 25 bp, Homo sapien
cagttgcttcaaaggtgaaagggat

SEQ ID NO: 958103 - DNA, 25 bp, Homo sapien
ttgccaaattcaacacagtcagttg

SEQ ID NO: 958104 - DNA, 25 bp, Homo sapien
aattcaacacagtcagttgcttcaa

SEQ ID NO: 958105 - DNA, 25 bp, Homo sapien
tcagttgcttcaaaggtgaaaggga

SEQ ID NO: 958106 - DNA, 25 bp, Homo sapien
tgttattcccttgcagtcagccata

SEQ ID NO: 958107 - DNA, 25 bp, Homo sapien
gccatataaatgtgactgagatttg

SEQ ID NO: 958108 - DNA, 25 bp, Homo sapien
tgcagtcagccatataaatgtgact

SEQ ID NO: 958109 - DNA, 25 bp, Homo sapien
cccttgcagtcagccatataaatgt

SEQ ID NO: 958110 - DNA, 25 bp, Homo sapien
ctataaatttgaaggatgcatcagt

SEQ ID NO: 958111 - DNA, 25 bp, Homo sapien
gaaggatgcatcagtaaccctttta

SEQ ID NO: 958112 - DNA, 25 bp, Homo sapien
aatttgaaggatgcatcagtaaccc

SEQ ID NO: 958113 - DNA, 25 bp, Homo sapien
gatgcatcagtaacccttttatttc

SEQ ID NO: 958114 - DNA, 25 bp, Homo sapien
gtgcaccagtgaaaaccagcgatgt

SEQ ID NO: 958115 - DNA, 25 bp, Homo sapien
cggatctttctgagtttacaagcag

SEQ ID NO: 958116 - DNA, 25 bp, Homo sapien
ccagcgatgtaatacgagagcattt

SEQ ID NO: 958117 - DNA, 25 bp, Homo sapien
tacaatcggagatatgcggtgcacc

SEQ ID NO: 958118 - DNA, 25 bp, Homo sapien
ctgtttgcaatgtacctgaagcctt

SEQ ID NO: 958119 - DNA, 25 bp, Homo sapien
ttacacagttgtccgtcagagttgg

SEQ ID NO: 958120 - DNA, 25 bp, Homo sapien
gatgcataattccagtgcagctgtt

SEQ ID NO: 958121 - DNA, 25 bp, Homo sapien
catgtcattaatggtaagatgcata

SEQ ID NO: 958122 - DNA, 25 bp, Homo sapien
tgagatctgattcccgtttggttgt

SEQ ID NO: 958123 - DNA, 25 bp, Homo sapien
agatctgattcccgtttggttgtaa

SEQ ID NO: 958124 - DNA, 25 bp, Homo sapien
atctgattcccgtttggttgtaaag

SEQ ID NO: 958125 - DNA, 25 bp, Homo sapien
tgattcccgtttggttgtaaagtga

SEQ ID NO: 958126 - DNA, 25 bp, Homo sapien
tctgccgctctaaggtagtaaaaag

SEQ ID NO: 958127 - DNA, 25 bp, Homo sapien
tcctccaaaactgcctgtgagtcag

SEQ ID NO: 958128 - DNA, 25 bp, Homo sapien
tatccatctgagatagacatggccc

SEQ ID NO: 958129 - DNA, 25 bp, Homo sapien
gaagagacttagtgacagggatgat

SEQ ID NO: 958130 - DNA, 25 bp, Homo sapien
caacctcaaagccccattatccttc

SEQ ID NO: 958131 - DNA, 25 bp, Homo sapien
gaaataagcacactatggagactgt

SEQ ID NO: 958132 - DNA, 25 bp, Homo sapien
cctcaacctcaaagccccattatcc

SEQ ID NO: 958133 - DNA, 25 bp, Homo sapien
ctcaacctcaaagccccattatcct

SEQ ID NO: 958134 - DNA, 25 bp, Homo sapien
atggttgttgtaagtgggtttacat

SEQ ID NO: 958135 - DNA, 25 bp, Homo sapien
cgtaggtcaattttttatcctgtga

SEQ ID NO: 958136 - DNA, 25 bp, Homo sapien
tcgtaggtcaattttttatcctgtg

SEQ ID NO: 958137 - DNA, 25 bp, Homo sapien
atgctactaattttcgtaggtcaat

SEQ ID NO: 958138 - DNA, 25 bp, Homo sapien
cacaacggcgagttagaaaagtact

SEQ ID NO: 958139 - DNA, 25 bp, Homo sapien
ggaacaatgggtggagccttctgtt

SEQ ID NO: 958140 - DNA, 25 bp, Homo sapien
tacaataattgcctcatggtaactg

SEQ ID NO: 958141 - DNA, 25 bp, Homo sapien
ttatcagtgggatatgtcaagcaca

SEQ ID NO: 958142 - DNA, 25 bp, Homo sapien
gaagccaagagcctataatagcgat

SEQ ID NO: 958143 - DNA, 25 bp, Homo sapien
gtggtccgtttcctcatccaatgag

SEQ ID NO: 958144 - DNA, 25 bp, Homo sapien
gtttgtgtcttggtagcaactccag

SEQ ID NO: 958145 - DNA, 25 bp, Homo sapien
gcaactccagagttttcaggacttg

SEQ ID NO: 958146 - DNA, 25 bp, Homo sapien
agttcaggtactgtaagcctttgtc

SEQ ID NO: 958147 - DNA, 25 bp, Homo sapien
gcatccattccccaagttcaggtac

SEQ ID NO: 958148 - DNA, 25 bp, Homo sapien
aagattctgtaagttgtggaagtgc

SEQ ID NO: 958149 - DNA, 25 bp, Homo sapien
gcctttgtctgtgaaccgtctgcaa

SEQ ID NO: 958150 - DNA, 25 bp, Homo sapien
ttgcatgccatagcgaattacttga

SEQ ID NO: 958151 - DNA, 25 bp, Homo sapien
taaatgggaaataagatatacaagc

SEQ ID NO: 958152 - DNA, 25 bp, Homo sapien
tatacaagcactgaccattaatcag

SEQ ID NO: 958153 - DNA, 25 bp, Homo sapien
aacacacatcccgatctgggaaggg

SEQ ID NO: 958154 - DNA, 25 bp, Homo sapien
ttggtgatagttgtgttagacagat

SEQ ID NO: 958155 - DNA, 25 bp, Homo sapien
cctgttggtgatagttgtgttagac

SEQ ID NO: 958156 - DNA, 25 bp, Homo sapien
tgttggtgatagttgtgttagacag

SEQ ID NO: 958157 - DNA, 25 bp, Homo sapien
gtgatagttgtgttagacagattga

SEQ ID NO: 958158 - DNA, 25 bp, Homo sapien
tcccagaaagaatagaccactgcag

SEQ ID NO: 958159 - DNA, 25 bp, Homo sapien
tatagggaaggttctatgcacccat

SEQ ID NO: 958160 - DNA, 25 bp, Homo sapien
cacccatgctgcatgagaggccagt

SEQ ID NO: 958161 - DNA, 25 bp, Homo sapien
tgtttgacgctacatcagtcccaga

SEQ ID NO: 958162 - DNA, 25 bp, Homo sapien
ggcagtcagagacattcaactcttg

SEQ ID NO: 958163 - DNA, 25 bp, Homo sapien
gcagtcagagacattcaactcttgc

SEQ ID NO: 958164 - DNA, 25 bp, Homo sapien
tagaagttactatgaagaatgcccc

SEQ ID NO: 958165 - DNA, 25 bp, Homo sapien
gagatcacaccgcaaagaagcaaag

SEQ ID NO: 958166 - DNA, 25 bp, Homo sapien
gcctggaatgcaaaacgcctgaaga

SEQ ID NO: 958167 - DNA, 25 bp, Homo sapien
ggttaaagcaccactacaatgtcca

SEQ ID NO: 958168 - DNA, 25 bp, Homo sapien
caccctctggtaagccctagtgtcc

SEQ ID NO: 958169 - DNA, 25 bp, Homo sapien
accctctggtaagccctagtgtcca

SEQ ID NO: 958170 - DNA, 25 bp, Homo sapien
cctctggtaagccctagtgtccatc

SEQ ID NO: 958171 - DNA, 25 bp, Homo sapien
ctctggtaagccctagtgtccatca

SEQ ID NO: 958172 - DNA, 25 bp, Homo sapien
cacctttgcaaagtagacactatat

SEQ ID NO: 958173 - DNA, 25 bp, Homo sapien
acatttaaacgccacctttgcaaag

SEQ ID NO: 958174 - DNA, 25 bp, Homo sapien
aattcaaacgcagcacatttaaacg

SEQ ID NO: 958175 - DNA, 25 bp, Homo sapien
ttgggtcggagaagacaaccacgaa

SEQ ID NO: 958176 - DNA, 25 bp, Homo sapien
ttccacagtgagtttagttgtgtca

SEQ ID NO: 958177 - DNA, 25 bp, Homo sapien
gcattccacagtgagtttagttgtg

SEQ ID NO: 958178 - DNA, 25 bp, Homo sapien
tcaacatccaggcatgattaacttg

SEQ ID NO: 958179 - DNA, 25 bp, Homo sapien
gattaacttgaccacatattatcac

SEQ ID NO: 958180 - DNA, 25 bp, Homo sapien
gtaaaatgatggttatcagccttcc

SEQ ID NO: 958181 - DNA, 25 bp, Homo sapien
gaagtaacgagtaaaatgatggtta

SEQ ID NO: 958182 - DNA, 25 bp, Homo sapien
cgagtaaaatgatggttatcagcct

SEQ ID NO: 958183 - DNA, 25 bp, Homo sapien
acgagtaaaatgatggttatcagcc

SEQ ID NO: 958184 - DNA, 25 bp, Homo sapien
tcatgattccaaagcaatgccgaca

SEQ ID NO: 958185 - DNA, 25 bp, Homo sapien
tgactgccatgacctagtaagaatg

SEQ ID NO: 958186 - DNA, 25 bp, Homo sapien
ggtgaaagcctagctgtgactgcca

SEQ ID NO: 958187 - DNA, 25 bp, Homo sapien
aagccaacatctggaggtacagtca

SEQ ID NO: 958188 - DNA, 25 bp, Homo sapien
tgtagtgcaataaaaggagggctgt

SEQ ID NO: 958189 - DNA, 25 bp, Homo sapien
cttgtagtgcaataaaaggagggct

SEQ ID NO: 958190 - DNA, 25 bp, Homo sapien
agggctgtctttggaacataaaaca

SEQ ID NO: 958191 - DNA, 25 bp, Homo sapien
aacacggactcttgagttaattgat

SEQ ID NO: 958192 - DNA, 25 bp, Homo sapien
tttagagtttccaaattcatcagca

SEQ ID NO: 958193 - DNA, 25 bp, Homo sapien
aactaaccactctctatccccccat

SEQ ID NO: 958194 - DNA, 25 bp, Homo sapien
tgtactatcaaacactaactcttat

SEQ ID NO: 958195 - DNA, 25 bp, Homo sapien
cagtcacccaactgtactatcaaac

SEQ ID NO: 958196 - DNA, 25 bp, Homo sapien
tggtaaccaccaatatatcctctac

SEQ ID NO: 958197 - DNA, 25 bp, Homo sapien
tagatgttcacaatactctctaatg

SEQ ID NO: 958198 - DNA, 25 bp, Homo sapien
agccatcaggtctggctttccttta

SEQ ID NO: 958199 - DNA, 25 bp, Homo sapien
ggttcaatcttgataggcttcatgt

SEQ ID NO: 958200 - DNA, 25 bp, Homo sapien
taatctcattacttgctatgggtgt

SEQ ID NO: 958201 - DNA, 25 bp, Homo sapien
ctttctaaccattgctctttctcaa

SEQ ID NO: 958202 - DNA, 25 bp, Homo sapien
tagaatcctctttgaccctgacctt

SEQ ID NO: 958203 - DNA, 25 bp, Homo sapien
cttggggtagtcttaattgtgttga

SEQ ID NO: 958204 - DNA, 25 bp, Homo sapien
tattctctatatcttgtaggcattc

SEQ ID NO: 958205 - DNA, 25 bp, Homo sapien
gagtgttgcccatcataggctggcg

SEQ ID NO: 958206 - DNA, 25 bp, Homo sapien
caactgtgtgagaagaacactggct

SEQ ID NO: 958207 - DNA, 25 bp, Homo sapien
cactagtggtgctgtaagtccatcc

SEQ ID NO: 958208 - DNA, 25 bp, Homo sapien
gctagaggtttgtgcccagaggacc

SEQ ID NO: 958209 - DNA, 25 bp, Homo sapien
tcacattctacagtcattagattgg

SEQ ID NO: 958210 - DNA, 25 bp, Homo sapien
tgggccaagcagagtagacatccat

SEQ ID NO: 958211 - DNA, 25 bp, Homo sapien
cattctacagtcattagattgggcc

SEQ ID NO: 958212 - DNA, 25 bp, Homo sapien
attctacagtcattagattgggcca

SEQ ID NO: 958213 - DNA, 25 bp, Homo sapien
cagctcttttgagtattaacctatt

SEQ ID NO: 958214 - DNA, 25 bp, Homo sapien
cagaagaacttcgttcaggaaaatt

SEQ ID NO: 958215 - DNA, 25 bp, Homo sapien
gtctcatctacaagaaagacttcag

SEQ ID NO: 958216 - DNA, 25 bp, Homo sapien
ttttagagtctcatctacaagaaag

SEQ ID NO: 958217 - DNA, 25 bp, Homo sapien
gatcatagtgttactttgagcatac

SEQ ID NO: 958218 - DNA, 25 bp, Homo sapien
catgtttctacatctgatcatagtg

SEQ ID NO: 958219 - DNA, 25 bp, Homo sapien
caaatttaggtgagtagaggcattg

SEQ ID NO: 958220 - DNA, 25 bp, Homo sapien
tgagcatactaaaccaatattaagt

SEQ ID NO: 958221 - DNA, 25 bp, Homo sapien
taggataatggttagcttgtgacaa

SEQ ID NO: 958222 - DNA, 25 bp, Homo sapien
ccattttgttaggataatggttagc

SEQ ID NO: 958223 - DNA, 25 bp, Homo sapien
tagcttgtgacaatagatgatctgt

SEQ ID NO: 958224 - DNA, 25 bp, Homo sapien
gatctgttgtatccgcaatagaata

SEQ ID NO: 958225 - DNA, 25 bp, Homo sapien
gaaattgtagcatgtcactgctctg

SEQ ID NO: 958226 - DNA, 25 bp, Homo sapien
tgtacgagctatgtctctccaagtg

SEQ ID NO: 958227 - DNA, 25 bp, Homo sapien
tttttcagccaggacgacattttca

SEQ ID NO: 958228 - DNA, 25 bp, Homo sapien
tccatataagagtgccagtgatgaa

SEQ ID NO: 958229 - DNA, 25 bp, Homo sapien
gagtctttactaaatgtccagtata

SEQ ID NO: 958230 - DNA, 25 bp, Homo sapien
actaaatgtccagtataaaagctac

SEQ ID NO: 958231 - DNA, 25 bp, Homo sapien
aatgagtctttactaaatgtccagt

SEQ ID NO: 958232 - DNA, 25 bp, Homo sapien
tgtccagtataaaagctacaggctt

SEQ ID NO: 958233 - DNA, 25 bp, Homo sapien
attgtctgcctctcccaaatgatta

SEQ ID NO: 958234 - DNA, 25 bp, Homo sapien
tcatcagtaagacttttcaaatcca

SEQ ID NO: 958235 - DNA, 25 bp, Homo sapien
tatcaaccaactgattcttatttgg

SEQ ID NO: 958236 - DNA, 25 bp, Homo sapien
ctccagcccctaagggtcttaagat

SEQ ID NO: 958237 - DNA, 25 bp, Homo sapien
tcaaatatagaaacagggaatcctt

SEQ ID NO: 958238 - DNA, 25 bp, Homo sapien
actcaaatatagaaacagggaatcc

SEQ ID NO: 958239 - DNA, 25 bp, Homo sapien
tacacgtgcatactcctagttaggt

SEQ ID NO: 958240 - DNA, 25 bp, Homo sapien
aagactcagctattgatacacgtgc

SEQ ID NO: 958241 - DNA, 25 bp, Homo sapien
tatgaacttaaagttcaaggttcca

SEQ ID NO: 958242 - DNA, 25 bp, Homo sapien
tagactgtgaagcagttgattatcc

SEQ ID NO: 958243 - DNA, 25 bp, Homo sapien
tctttaggttctagactgtgaagca

SEQ ID NO: 958244 - DNA, 25 bp, Homo sapien
gcagttgattatcctcggtgaacca

SEQ ID NO: 958245 - DNA, 25 bp, Homo sapien
gctgatcatccaattcaaaaagttg

SEQ ID NO: 958246 - DNA, 25 bp, Homo sapien
gatcatccaattcaaaaagttgttc

SEQ ID NO: 958247 - DNA, 25 bp, Homo sapien
ctgatcatccaattcaaaaagttgt

SEQ ID NO: 958248 - DNA, 25 bp, Homo sapien
cagctgatcatccaattcaaaaagt

SEQ ID NO: 958249 - DNA, 25 bp, Homo sapien
caaagaagattctgaagaccacttt

SEQ ID NO: 958250 - DNA, 25 bp, Homo sapien
tacctcagcggatcctcaggacatg

SEQ ID NO: 958251 - DNA, 25 bp, Homo sapien
cagcggatcctcaggacatgtaaca

SEQ ID NO: 958252 - DNA, 25 bp, Homo sapien
ctctaaatacctcagcggatcctca

SEQ ID NO: 958253 - DNA, 25 bp, Homo sapien
ggatcctcaggacatgtaacaagta

SEQ ID NO: 958254 - DNA, 25 bp, Homo sapien
gaggaaaacacttggacatagagaa

SEQ ID NO: 958255 - DNA, 25 bp, Homo sapien
taatagaagatgttaggacaaaagc

SEQ ID NO: 958256 - DNA, 25 bp, Homo sapien
gcagtagcacaatcaacccagtgta

SEQ ID NO: 958257 - DNA, 25 bp, Homo sapien
gccttaagtgatcgtccttcctctc

SEQ ID NO: 958258 - DNA, 25 bp, Homo sapien
cccaactggccttttgtggaatcca

SEQ ID NO: 958259 - DNA, 25 bp, Homo sapien
gatgctttaggtttcaagtaacaaa

SEQ ID NO: 958260 - DNA, 25 bp, Homo sapien
ggtaattgccaatgttcccaggact

SEQ ID NO: 958261 - DNA, 25 bp, Homo sapien
tgaagcttcagtgtgggtttaaccc

SEQ ID NO: 958262 - DNA, 25 bp, Homo sapien
ccggccgttgtgcaaccctcgaagt

SEQ ID NO: 958263 - DNA, 25 bp, Homo sapien
ctttgcccggccgttgtgcaaccct

SEQ ID NO: 958264 - DNA, 25 bp, Homo sapien
gccgttgtgcaaccctcgaagtgtg

SEQ ID NO: 958265 - DNA, 25 bp, Homo sapien
gagcgcctttgcccggccgttgtgc

SEQ ID NO: 958266 - DNA, 25 bp, Homo sapien
tcttgtccaaaccttaaaatctgag

SEQ ID NO: 958267 - DNA, 25 bp, Homo sapien
tatcttaggtgactagtgcctactc

SEQ ID NO: 958268 - DNA, 25 bp, Homo sapien
tccgatctgggccttgtgctcattc

SEQ ID NO: 958269 - DNA, 25 bp, Homo sapien
tgatcgcctacaagtccgaatttga

SEQ ID NO: 958270 - DNA, 25 bp, Homo sapien
ctcgggttggcattgcgtagcgagg

SEQ ID NO: 958271 - DNA, 25 bp, Homo sapien
tcagcctcgggttggcattgcgtag

SEQ ID NO: 958272 - DNA, 25 bp, Homo sapien
ggttggcattgcgtagcgaggccat

SEQ ID NO: 958273 - DNA, 25 bp, Homo sapien
cagcctcgggttggcattgcgtagc

SEQ ID NO: 958274 - DNA, 25 bp, Homo sapien
gcccaaggcctgacggagaagctgc

SEQ ID NO: 958275 - DNA, 25 bp, Homo sapien
gagaagctgcgatagtaccctcccc

SEQ ID NO: 958276 - DNA, 25 bp, Homo sapien
aaggcctgacggagaagctgcgata

SEQ ID NO: 958277 - DNA, 25 bp, Homo sapien
gacggagaagctgcgatagtaccct

SEQ ID NO: 958278 - DNA, 25 bp, Homo sapien
tggttgtatacctgccctcattgac

SEQ ID NO: 958279 - DNA, 25 bp, Homo sapien
tgctgatagtcagtcaggccagatg

SEQ ID NO: 958280 - DNA, 25 bp, Homo sapien
gaaacttcattgacattggagccag

SEQ ID NO: 958281 - DNA, 25 bp, Homo sapien
ggaccatcctatttcatacctcctg

SEQ ID NO: 958282 - DNA, 25 bp, Homo sapien
gagaaaaatcacttacaaggttata

SEQ ID NO: 958283 - DNA, 25 bp, Homo sapien
gaaaaatcacttacaaggttataca

SEQ ID NO: 958284 - DNA, 25 bp, Homo sapien
aaaaatcacttacaaggttatacat

SEQ ID NO: 958285 - DNA, 25 bp, Homo sapien
taatcacactccctagagatcagag

SEQ ID NO: 958286 - DNA, 25 bp, Homo sapien
ggattttcaattcggcgtgcagcag

SEQ ID NO: 958287 - DNA, 25 bp, Homo sapien
caacgctggctagtattagggcaac

SEQ ID NO: 958288 - DNA, 25 bp, Homo sapien
ggaatatggctacaacaacgctggc

SEQ ID NO: 958289 - DNA, 25 bp, Homo sapien
tactggcttaccaaaagaatcatgc

SEQ ID NO: 958290 - DNA, 25 bp, Homo sapien
tagagcactgcctgggtagcatttg

SEQ ID NO: 958291 - DNA, 25 bp, Homo sapien
gaatgggcctccagtggtatctaat

SEQ ID NO: 958292 - DNA, 25 bp, Homo sapien
taacgtggcaccacacatacaggtg

SEQ ID NO: 958293 - DNA, 25 bp, Homo sapien
tgcattaatgcgaaagaactgtaca

SEQ ID NO: 958294 - DNA, 25 bp, Homo sapien
tgtaggcctctgaaaaacatctagg

SEQ ID NO: 958295 - DNA, 25 bp, Homo sapien
gaatggtggtcatgggtgcattaat

SEQ ID NO: 958296 - DNA, 25 bp, Homo sapien
ctaggtaggtagagagccttgactc

SEQ ID NO: 958297 - DNA, 25 bp, Homo sapien
aatgaatcttcaatatcggtttttc

SEQ ID NO: 958298 - DNA, 25 bp, Homo sapien
gaatcttcaatatcggtttttcacc

SEQ ID NO: 958299 - DNA, 25 bp, Homo sapien
tcaatatcggtttttcacctcagga

SEQ ID NO: 958300 - DNA, 25 bp, Homo sapien
gaaaaatgaatcttcaatatcggtt

SEQ ID NO: 958301 - DNA, 25 bp, Homo sapien
ccattgcagtgcttatatcatgata

SEQ ID NO: 958302 - DNA, 25 bp, Homo sapien
ttaaacttagatgatgcctttttca

SEQ ID NO: 958303 - DNA, 25 bp, Homo sapien
catgagctgatcatactaggaagca

SEQ ID NO: 958304 - DNA, 25 bp, Homo sapien
cctgaaccctctcatagtgtacatg

SEQ ID NO: 958305 - DNA, 25 bp, Homo sapien
gcttcactggaggctctaagtaatg

SEQ ID NO: 958306 - DNA, 25 bp, Homo sapien
aaaatcttcagcgttaagtccgtat

SEQ ID NO: 958307 - DNA, 25 bp, Homo sapien
tagagcttcattcagcttcactgga

SEQ ID NO: 958308 - DNA, 25 bp, Homo sapien
taagtccgtatctctctagagcttc

SEQ ID NO: 958309 - DNA, 25 bp, Homo sapien
gatagaaatcatgccaacaccatgt

SEQ ID NO: 958310 - DNA, 25 bp, Homo sapien
taaccaacagatgcctagttagaat

SEQ ID NO: 958311 - DNA, 25 bp, Homo sapien
tgaagcattagcaaatgggtctatc

SEQ ID NO: 958312 - DNA, 25 bp, Homo sapien
tggtgccatcttactttgaacatca

SEQ ID NO: 958313 - DNA, 25 bp, Homo sapien
taaactgcattaaccaacaagcaaa

SEQ ID NO: 958314 - DNA, 25 bp, Homo sapien
actaagcttcaaagcgaaggtgaaa

SEQ ID NO: 958315 - DNA, 25 bp, Homo sapien
gcttcaaagcgaaggtgaaataaaa

SEQ ID NO: 958316 - DNA, 25 bp, Homo sapien
tgaataaactgcattaaccaacaag

SEQ ID NO: 958317 - DNA, 25 bp, Homo sapien
taaagggtaacatatcctctctgaa

SEQ ID NO: 958318 - DNA, 25 bp, Homo sapien
gctaaaaatctaggagtcaaccttg

SEQ ID NO: 958319 - DNA, 25 bp, Homo sapien
caactgtctaaccagctattgaagc

SEQ ID NO: 958320 - DNA, 25 bp, Homo sapien
tctcagtaaagagcacaactgtcta

SEQ ID NO: 958321 - DNA, 25 bp, Homo sapien
tagggtccatctgccttaaggaaaa

SEQ ID NO: 958322 - DNA, 25 bp, Homo sapien
gctggaaggaagtgccgtaatctcg

SEQ ID NO: 958323 - DNA, 25 bp, Homo sapien
ggcacatagcagacaccgagtcaat

SEQ ID NO: 958324 - DNA, 25 bp, Homo sapien
tagagaagaccttggatccaggaaa

SEQ ID NO: 958325 - DNA, 25 bp, Homo sapien
tcttctgggtctacatgctggtatt

SEQ ID NO: 958326 - DNA, 25 bp, Homo sapien
gtttggacatcagtgtgaatcctta

SEQ ID NO: 958327 - DNA, 25 bp, Homo sapien
ttctttgtttggacatcagtgtgaa

SEQ ID NO: 958328 - DNA, 25 bp, Homo sapien
tttgtttggacatcagtgtgaatcc

SEQ ID NO: 958329 - DNA, 25 bp, Homo sapien
caaactttaagattctgcgcaggac

SEQ ID NO: 958330 - DNA, 25 bp, Homo sapien
gaaccactgggataaaacatgcagt

SEQ ID NO: 958331 - DNA, 25 bp, Homo sapien
gcaggactatggatgttgagaatta

SEQ ID NO: 958332 - DNA, 25 bp, Homo sapien
caatttcttaattctgacctttgag

SEQ ID NO: 958333 - DNA, 25 bp, Homo sapien
gactgggaaataagtcctgcctcac

SEQ ID NO: 958334 - DNA, 25 bp, Homo sapien
cagactaatgggtaaatgattaagg

SEQ ID NO: 958335 - DNA, 25 bp, Homo sapien
tcctggatatgtatcaaagaaactg

SEQ ID NO: 958336 - DNA, 25 bp, Homo sapien
ggtttggcaagaagatcagactaat

SEQ ID NO: 958337 - DNA, 25 bp, Homo sapien
tagctcttgcagttcttagaatgcc

SEQ ID NO: 958338 - DNA, 25 bp, Homo sapien
gagaaagtgtactgtctacaagcaa

SEQ ID NO: 958339 - DNA, 25 bp, Homo sapien
ggaaagtctgttcaaattctctgag

SEQ ID NO: 958340 - DNA, 25 bp, Homo sapien
cttgggtgtgaatcctagctcttgc

SEQ ID NO: 958341 - DNA, 25 bp, Homo sapien
gaacatacatcgagtaaagaccaat

SEQ ID NO: 958342 - DNA, 25 bp, Homo sapien
aaatatataagttgacaggttttga

SEQ ID NO: 958343 - DNA, 25 bp, Homo sapien
aatatctagcccctccaaataagga

SEQ ID NO: 958344 - DNA, 25 bp, Homo sapien
aagggataaataagcattagtaaat

SEQ ID NO: 958345 - DNA, 25 bp, Homo sapien
gaatagctgcaaggtcaaaaggtcc

SEQ ID NO: 958346 - DNA, 25 bp, Homo sapien
gacgaaatcgctttggacccatgta

SEQ ID NO: 958347 - DNA, 25 bp, Homo sapien
catgtactgcgatggtgaagcacga

SEQ ID NO: 958348 - DNA, 25 bp, Homo sapien
taaggaccgcatctattggagggag

SEQ ID NO: 958349 - DNA, 25 bp, Homo sapien
aaatatggcttaagcactgggagtt

SEQ ID NO: 958350 - DNA, 25 bp, Homo sapien
taaaatatggcttaagcactgggag

SEQ ID NO: 958351 - DNA, 25 bp, Homo sapien
aaaatatggcttaagcactgggagt

SEQ ID NO: 958352 - DNA, 25 bp, Homo sapien
agcttcttcagggttagtgataaaa

SEQ ID NO: 958353 - DNA, 25 bp, Homo sapien
tctattgccattctactcagctgat

SEQ ID NO: 958354 - DNA, 25 bp, Homo sapien
gataatatggtaatcttcttcctcc

SEQ ID NO: 958355 - DNA, 25 bp, Homo sapien
ggtcagtccctggaaatagtaaaga

SEQ ID NO: 958356 - DNA, 25 bp, Homo sapien
cagaagtagactggcctagatgcag

SEQ ID NO: 958357 - DNA, 25 bp, Homo sapien
tgaatatgatcccttcctgtgagaa

SEQ ID NO: 958358 - DNA, 25 bp, Homo sapien
ccatgtatgtgttcaggctgcagac

SEQ ID NO: 958359 - DNA, 25 bp, Homo sapien
caaaatggagcgctgtgatgattcc

SEQ ID NO: 958360 - DNA, 25 bp, Homo sapien
catggaggtctctcataggaagcca

SEQ ID NO: 958361 - DNA, 25 bp, Homo sapien
ctagagtccaaatgatggcatggag

SEQ ID NO: 958362 - DNA, 25 bp, Homo sapien
aactgagaggtcaatgagagagtga

SEQ ID NO: 958363 - DNA, 25 bp, Homo sapien
tgagcaaaggatacaccggtagaca

SEQ ID NO: 958364 - DNA, 25 bp, Homo sapien
aacagttgccaagatatgaagagat

SEQ ID NO: 958365 - DNA, 25 bp, Homo sapien
tactggctacgaccacaacactgga

SEQ ID NO: 958366 - DNA, 25 bp, Homo sapien
ttagggaagttacagcactcaggca

SEQ ID NO: 958367 - DNA, 25 bp, Homo sapien
cgtacttggcatcatattgggcaca

SEQ ID NO: 958368 - DNA, 25 bp, Homo sapien
catttccgtggagctactaacctag

SEQ ID NO: 958369 - DNA, 25 bp, Homo sapien
ttcatggctagatcaagactttctt

SEQ ID NO: 958370 - DNA, 25 bp, Homo sapien
atcaagactttcttggctggtcttc

SEQ ID NO: 958371 - DNA, 25 bp, Homo sapien
tcaagactttcttggctggtcttcc

SEQ ID NO: 958372 - DNA, 25 bp, Homo sapien
tttacagatgaccagaccaaggcag

SEQ ID NO: 958373 - DNA, 25 bp, Homo sapien
tacgactctacgagacacaaggttt

SEQ ID NO: 958374 - DNA, 25 bp, Homo sapien
tacccaatcaggagtgaaatctagg

SEQ ID NO: 958375 - DNA, 25 bp, Homo sapien
caaagtcatgcaagaggtaagtacc

SEQ ID NO: 958376 - DNA, 25 bp, Homo sapien
tacagagaattgatccaggaggtcc

SEQ ID NO: 958377 - DNA, 25 bp, Homo sapien
aatgtaagtcggcagagaccctggg

SEQ ID NO: 958378 - DNA, 25 bp, Homo sapien
cactggtgccaaagagaggattctc

SEQ ID NO: 958379 - DNA, 25 bp, Homo sapien
tactgaacgatgaactttagggcct

SEQ ID NO: 958380 - DNA, 25 bp, Homo sapien
cctagaagaatcacttgctccggaa

SEQ ID NO: 958381 - DNA, 25 bp, Homo sapien
tccatgttggccacggattcacaaa

SEQ ID NO: 958382 - DNA, 25 bp, Homo sapien
tatcagccatctgagaacatttgga

SEQ ID NO: 958383 - DNA, 25 bp, Homo sapien
ctctttagaacttggaacactgctg

SEQ ID NO: 958384 - DNA, 25 bp, Homo sapien
tcaaacataacacaaggtactattt

SEQ ID NO: 958385 - DNA, 25 bp, Homo sapien
acataaaggcattcaaacataacac

SEQ ID NO: 958386 - DNA, 25 bp, Homo sapien
caaggtactatttgttagccaataa

SEQ ID NO: 958387 - DNA, 25 bp, Homo sapien
aaatactgagttgaacataaaggca

SEQ ID NO: 958388 - DNA, 25 bp, Homo sapien
ccccagaaagaacagccagtccaaa

SEQ ID NO: 958389 - DNA, 25 bp, Homo sapien
ccagaaagaacagccagtccaaatc

SEQ ID NO: 958390 - DNA, 25 bp, Homo sapien
ctgaagatattctgtaaccaatgcc

SEQ ID NO: 958391 - DNA, 25 bp, Homo sapien
ttctgtaaccaatgcccccagaaag

SEQ ID NO: 958392 - DNA, 25 bp, Homo sapien
tcatgtacccacttcagggcgacca

SEQ ID NO: 958393 - DNA, 25 bp, Homo sapien
tttcctcagatgtatcatgtaccca

SEQ ID NO: 958394 - DNA, 25 bp, Homo sapien
tctgctccataaacacggcctgaaa

SEQ ID NO: 958395 - DNA, 25 bp, Homo sapien
gcgaccaactgccacgttgtcatat

SEQ ID NO: 958396 - DNA, 25 bp, Homo sapien
gttaggtcacacgttatacatgaca

SEQ ID NO: 958397 - DNA, 25 bp, Homo sapien
aaataaatacgttgggacaggagtg

SEQ ID NO: 958398 - DNA, 25 bp, Homo sapien
tgatttcaggccaacaccaactgaa

SEQ ID NO: 958399 - DNA, 25 bp, Homo sapien
taccatgaattgtaaggcaccctga

SEQ ID NO: 958400 - DNA, 25 bp, Homo sapien
cataaattatgaagcggcaaatcat

SEQ ID NO: 958401 - DNA, 25 bp, Homo sapien
ggcccttttgatacaatgctagata

SEQ ID NO: 958402 - DNA, 25 bp, Homo sapien
gagaaagggcccttttgatacaatg

SEQ ID NO: 958403 - DNA, 25 bp, Homo sapien
tccttatccttattgaagagaaagg

SEQ ID NO: 958404 - DNA, 25 bp, Homo sapien
tatccttattgaagagaaagggccc

SEQ ID NO: 958405 - DNA, 25 bp, Homo sapien
tcacggaggccagtatgtacacaca

SEQ ID NO: 958406 - DNA, 25 bp, Homo sapien
actttaatggctgatctatgtaatc

SEQ ID NO: 958407 - DNA, 25 bp, Homo sapien
tttttgcaagcagataaaggcttat

SEQ ID NO: 958408 - DNA, 25 bp, Homo sapien
cagtatgtacacacaaaggggcagc

SEQ ID NO: 958409 - DNA, 25 bp, Homo sapien
gtgctcttcatagctcttgtgtgct

SEQ ID NO: 958410 - DNA, 25 bp, Homo sapien
gaggtgctcttcatagctcttgtgt

SEQ ID NO: 958411 - DNA, 25 bp, Homo sapien
ggtgctcttcatagctcttgtgtgc

SEQ ID NO: 958412 - DNA, 25 bp, Homo sapien
ggaggtgctcttcatagctcttgtg

SEQ ID NO: 958413 - DNA, 25 bp, Homo sapien
gctgtgatacatgcggcgatcaatc

SEQ ID NO: 958414 - DNA, 25 bp, Homo sapien
atacatgcggcgatcaatcttctta

SEQ ID NO: 958415 - DNA, 25 bp, Homo sapien
gtacccttccgcttacctatgccca

SEQ ID NO: 958416 - DNA, 25 bp, Homo sapien
gcagccggtgcagaatcctcattct

SEQ ID NO: 958417 - DNA, 25 bp, Homo sapien
caaggtgtttttccggcatcaagcg

SEQ ID NO: 958418 - DNA, 25 bp, Homo sapien
tttccggcatcaagcgggggaatgg

SEQ ID NO: 958419 - DNA, 25 bp, Homo sapien
tgtttttccggcatcaagcggggga

SEQ ID NO: 958420 - DNA, 25 bp, Homo sapien
gccaaggtgtttttccggcatcaag

SEQ ID NO: 958421 - DNA, 25 bp, Homo sapien
tctcattggggtctaaccagatatt

SEQ ID NO: 958422 - DNA, 25 bp, Homo sapien
ggtctcattggggtctaaccagata

SEQ ID NO: 958423 - DNA, 25 bp, Homo sapien
taaccagatattcttcttgccacag

SEQ ID NO: 958424 - DNA, 25 bp, Homo sapien
agcagaggacactagaggcaagcct

SEQ ID NO: 958425 - DNA, 25 bp, Homo sapien
cagtggtaaagacgaaaagatgcct

SEQ ID NO: 958426 - DNA, 25 bp, Homo sapien
ttgagtagttaaattctatgtggta

SEQ ID NO: 958427 - DNA, 25 bp, Homo sapien
ccaggtgtggcgggctgagatagga

SEQ ID NO: 958428 - DNA, 25 bp, Homo sapien
tggtaaagcggcagcacagtggtaa

SEQ ID NO: 958429 - DNA, 25 bp, Homo sapien
ggctcttcaccgaggcagcttcaga

SEQ ID NO: 958430 - DNA, 25 bp, Homo sapien
agcagtgtggattgctccgcccaga

SEQ ID NO: 958431 - DNA, 25 bp, Homo sapien
tcctatcagtgaagatgcaacctgg

SEQ ID NO: 958432 - DNA, 25 bp, Homo sapien
gaggtccaacagaaaccacggagct

SEQ ID NO: 958433 - DNA, 25 bp, Homo sapien
tgcaggcagcgcttcagctctcgcc

SEQ ID NO: 958434 - DNA, 25 bp, Homo sapien
gctggctccgccgaggacgccagca

SEQ ID NO: 958435 - DNA, 25 bp, Homo sapien
gcaggcgctcgggttcttcctaacc

SEQ ID NO: 958436 - DNA, 25 bp, Homo sapien
gcgcgccgcctcagttccgcggctt

SEQ ID NO: 958437 - DNA, 25 bp, Homo sapien
gaccttcgaatctgacagcagggcc

SEQ ID NO: 958438 - DNA, 25 bp, Homo sapien
tcgccgggtcactcccttattatga

SEQ ID NO: 958439 - DNA, 25 bp, Homo sapien
agtcgtcgccgggtcactcccttat

SEQ ID NO: 958440 - DNA, 25 bp, Homo sapien
tcccttattatgaccttcgaatctg

SEQ ID NO: 958441 - DNA, 25 bp, Homo sapien
ctgtgggccggggcgccgaagccat

SEQ ID NO: 958442 - DNA, 25 bp, Homo sapien
cttaccaagatggccgcccctgtgg

SEQ ID NO: 958443 - DNA, 25 bp, Homo sapien
gatggccgcccctgtgggccggggc

SEQ ID NO: 958444 - DNA, 25 bp, Homo sapien
tggccgcccctgtgggccggggcgc

SEQ ID NO: 958445 - DNA, 25 bp, Homo sapien
gcaacaaagttgatcccaattttgt

SEQ ID NO: 958446 - DNA, 25 bp, Homo sapien
ggtcagcaacaaagttgatcccaat

SEQ ID NO: 958447 - DNA, 25 bp, Homo sapien
ttgggtcagcaacaaagttgatccc

SEQ ID NO: 958448 - DNA, 25 bp, Homo sapien
tttgttgggtcagcaacaaagttga

SEQ ID NO: 958449 - DNA, 25 bp, Homo sapien
tggtgcttggtggctttaacatcca

SEQ ID NO: 958450 - DNA, 25 bp, Homo sapien
aagtgtgttgttgtcttctatcttc

SEQ ID NO: 958451 - DNA, 25 bp, Homo sapien
tgatctggtgcttggtggctttaac

SEQ ID NO: 958452 - DNA, 25 bp, Homo sapien
tttggccacatcagtgtcatagagc

SEQ ID NO: 958453 - DNA, 25 bp, Homo sapien
gcagactcagtggtcagaggaaact

SEQ ID NO: 958454 - DNA, 25 bp, Homo sapien
ggcagactcagtggtcagaggaaac

SEQ ID NO: 958455 - DNA, 25 bp, Homo sapien
ctgtgacagcatagtggtcaagctt

SEQ ID NO: 958456 - DNA, 25 bp, Homo sapien
cttgtttctcctggggacgctcttc

SEQ ID NO: 958457 - DNA, 25 bp, Homo sapien
agcttgtttctcctggggacgctct

SEQ ID NO: 958458 - DNA, 25 bp, Homo sapien
tgtttctcctggggacgctcttctt

SEQ ID NO: 958459 - DNA, 25 bp, Homo sapien
gtcgtttttcccgtggtcttcagca

SEQ ID NO: 958460 - DNA, 25 bp, Homo sapien
gccatgatccacagtcgtttttccc

SEQ ID NO: 958461 - DNA, 25 bp, Homo sapien
tttttcccgtggtcttcagcagcag

SEQ ID NO: 958462 - DNA, 25 bp, Homo sapien
tcagcagcagctctaactgtcctct

SEQ ID NO: 958463 - DNA, 25 bp, Homo sapien
tgaaggcaatactgcatccccagtg

SEQ ID NO: 958464 - DNA, 25 bp, Homo sapien
caagaatgtggacgggaagaaatcc

SEQ ID NO: 958465 - DNA, 25 bp, Homo sapien
aaggatgaggtatggcacgcctgta

SEQ ID NO: 958466 - DNA, 25 bp, Homo sapien
gacaaatatgagaccagctgaaagg

SEQ ID NO: 958467 - DNA, 25 bp, Homo sapien
agggcaccctggctattcccttgct

SEQ ID NO: 958468 - DNA, 25 bp, Homo sapien
caccaagaggtggcaccaaacctgc

SEQ ID NO: 958469 - DNA, 25 bp, Homo sapien
caggtggctctggcaccaagaggtg

SEQ ID NO: 958470 - DNA, 25 bp, Homo sapien
cctggctattcccttgctccatgct

SEQ ID NO: 958471 - DNA, 25 bp, Homo sapien
ggagcagcgagcatgccagagaagg

SEQ ID NO: 958472 - DNA, 25 bp, Homo sapien
ccagagggagcagcgagcatgccag

SEQ ID NO: 958473 - DNA, 25 bp, Homo sapien
agggagcagcgagcatgccagagaa

SEQ ID NO: 958474 - DNA, 25 bp, Homo sapien
agcagcgagcatgccagagaagggc

SEQ ID NO: 958475 - DNA, 25 bp, Homo sapien
tcaccagaatgcccgccaccagctg

SEQ ID NO: 958476 - DNA, 25 bp, Homo sapien
ccaccagctgtcacagctccacggg

SEQ ID NO: 958477 - DNA, 25 bp, Homo sapien
gtgcaggagtgaggccctggctcca

SEQ ID NO: 958478 - DNA, 25 bp, Homo sapien
cagaatgcccgccaccagctgtcac

SEQ ID NO: 958479 - DNA, 25 bp, Homo sapien
catgttagaatttactgacagagtt

SEQ ID NO: 958480 - DNA, 25 bp, Homo sapien
tgtgtgccacccatctgctcttctg

SEQ ID NO: 958481 - DNA, 25 bp, Homo sapien
agcaactccatgttggtggttatgg

SEQ ID NO: 958482 - DNA, 25 bp, Homo sapien
ctgtgtgccacccatctgctcttct

SEQ ID NO: 958483 - DNA, 25 bp, Homo sapien
gtcctgataatctcccccagtgaac

SEQ ID NO: 958484 - DNA, 25 bp, Homo sapien
taaagtcctgataatctcccccagt

SEQ ID NO: 958485 - DNA, 25 bp, Homo sapien
aagtcctgataatctcccccagtga

SEQ ID NO: 958486 - DNA, 25 bp, Homo sapien
aaagtcctgataatctcccccagtg

SEQ ID NO: 958487 - DNA, 25 bp, Homo sapien
tgactgccttgccattactggacct

SEQ ID NO: 958488 - DNA, 25 bp, Homo sapien
cttgccattactggaccttctcagt

SEQ ID NO: 958489 - DNA, 25 bp, Homo sapien
ctgccttgccattactggaccttct

SEQ ID NO: 958490 - DNA, 25 bp, Homo sapien
gccttgccattactggaccttctca

SEQ ID NO: 958491 - DNA, 25 bp, Homo sapien
gacagactatgcctcgtggtaggat

SEQ ID NO: 958492 - DNA, 25 bp, Homo sapien
tatatgtgattgtgagatgtatccc

SEQ ID NO: 958493 - DNA, 25 bp, Homo sapien
tatctccagagtctggaatagcacc

SEQ ID NO: 958494 - DNA, 25 bp, Homo sapien
gatctagccaattgaccactgtgca

SEQ ID NO: 958495 - DNA, 25 bp, Homo sapien
gtaattcaaacaccctacaaatgag

SEQ ID NO: 958496 - DNA, 25 bp, Homo sapien
tctcggctcaaggaggacgctacat

SEQ ID NO: 958497 - DNA, 25 bp, Homo sapien
gggtgaaatgagacaacatacaacg

SEQ ID NO: 958498 - DNA, 25 bp, Homo sapien
tgtatgattttggatcccaatcaag

SEQ ID NO: 958499 - DNA, 25 bp, Homo sapien
gatttcaagcatgctgcaaccaggc

SEQ ID NO: 958500 - DNA, 25 bp, Homo sapien
ccagatttcaagcatgctgcaacca

SEQ ID NO: 958501 - DNA, 25 bp, Homo sapien
agatttcaagcatgctgcaaccagg

SEQ ID NO: 958502 - DNA, 25 bp, Homo sapien
cagatttcaagcatgctgcaaccag

SEQ ID NO: 958503 - DNA, 25 bp, Homo sapien
tgtattcctgtctagagaaaataga

SEQ ID NO: 958504 - DNA, 25 bp, Homo sapien
attcctgtctagagaaaatagatac

SEQ ID NO: 958505 - DNA, 25 bp, Homo sapien
atgtattcctgtctagagaaaatag

SEQ ID NO: 958506 - DNA, 25 bp, Homo sapien
gaaatgtattcctgtctagagaaaa

SEQ ID NO: 958507 - DNA, 25 bp, Homo sapien
caaatgaaagacatatcctaataat

SEQ ID NO: 958508 - DNA, 25 bp, Homo sapien
ttttcgcatctcatttgaccaaatg

SEQ ID NO: 958509 - DNA, 25 bp, Homo sapien
gaatgaaattaagcacgttgcattt

SEQ ID NO: 958510 - DNA, 25 bp, Homo sapien
tatcctaataataaagcttcaatat

SEQ ID NO: 958511 - DNA, 25 bp, Homo sapien
tttgatagggatgacaacaagcatc

SEQ ID NO: 958512 - DNA, 25 bp, Homo sapien
tctagtaaatcgtacatttccacgg

SEQ ID NO: 958513 - DNA, 25 bp, Homo sapien
caggctcatccatatctaggcttgc

SEQ ID NO: 958514 - DNA, 25 bp, Homo sapien
gagtgacaacatgcactattcatct

SEQ ID NO: 958515 - DNA, 25 bp, Homo sapien
ttttccagcgcatttcagtatttct

SEQ ID NO: 958516 - DNA, 25 bp, Homo sapien
cttttccagcgcatttcagtatttc

SEQ ID NO: 958517 - DNA, 25 bp, Homo sapien
gatattttgaagtgaccgtagaacc

SEQ ID NO: 958518 - DNA, 25 bp, Homo sapien
tattttgaagtgaccgtagaacctg

SEQ ID NO: 958519 - DNA, 25 bp, Homo sapien
attttgaagtgaccgtagaacctgt

SEQ ID NO: 958520 - DNA, 25 bp, Homo sapien
tgaagtgaccgtagaacctgttttg

SEQ ID NO: 958521 - DNA, 25 bp, Homo sapien
taattcacatgtaactccaacaatt

SEQ ID NO: 958522 - DNA, 25 bp, Homo sapien
aataattcacatgtaactccaacaa

SEQ ID NO: 958523 - DNA, 25 bp, Homo sapien
aattcacatgtaactccaacaattt

SEQ ID NO: 958524 - DNA, 25 bp, Homo sapien
ataataattcacatgtaactccaac

SEQ ID NO: 958525 - DNA, 25 bp, Homo sapien
tgtagaataaactatttttgtccaa

SEQ ID NO: 958526 - DNA, 25 bp, Homo sapien
atgtagaataaactatttttgtcca

SEQ ID NO: 958527 - DNA, 25 bp, Homo sapien
tagaataaactatttttgtccaagc

SEQ ID NO: 958528 - DNA, 25 bp, Homo sapien
tatatgtagaataaactatttttgt

SEQ ID NO: 958529 - DNA, 25 bp, Homo sapien
tcttgaagaaatacttatcagctgc

SEQ ID NO: 958530 - DNA, 25 bp, Homo sapien
gaagaaatacttatcagctgccaac

SEQ ID NO: 958531 - DNA, 25 bp, Homo sapien
tgggagtcgccaagtgagtcttgaa

SEQ ID NO: 958532 - DNA, 25 bp, Homo sapien
ctaagaattgggagtcgccaagtga

SEQ ID NO: 958533 - DNA, 25 bp, Homo sapien
cacaatgggatgaagtgtagacagc

SEQ ID NO: 958534 - DNA, 25 bp, Homo sapien
caatgggatgaagtgtagacagctt

SEQ ID NO: 958535 - DNA, 25 bp, Homo sapien
acaatgggatgaagtgtagacagct

SEQ ID NO: 958536 - DNA, 25 bp, Homo sapien
ctggtacggtattgtatttgatcca

SEQ ID NO: 958537 - DNA, 25 bp, Homo sapien
ggtacggtattgtatttgatccact

SEQ ID NO: 958538 - DNA, 25 bp, Homo sapien
taaattctcctgttatgctccattg

SEQ ID NO: 958539 - DNA, 25 bp, Homo sapien
gattacagaggtttgcataaccttg

SEQ ID NO: 958540 - DNA, 25 bp, Homo sapien
aagataacattctctctgcgaactc

SEQ ID NO: 958541 - DNA, 25 bp, Homo sapien
gataacattctctctgcgaactctg

SEQ ID NO: 958542 - DNA, 25 bp, Homo sapien
attctctctgcgaactctgcgaaaa

SEQ ID NO: 958543 - DNA, 25 bp, Homo sapien
aacattctctctgcgaactctgcga

SEQ ID NO: 958544 - DNA, 25 bp, Homo sapien
tcatggacaggatattaacagaggg

SEQ ID NO: 958545 - DNA, 25 bp, Homo sapien
acagaggggaaatgtttgcctaatc

SEQ ID NO: 958546 - DNA, 25 bp, Homo sapien
gtgccaggcactcttacacaaacct

SEQ ID NO: 958547 - DNA, 25 bp, Homo sapien
cctgaactctaaaaggttatgttca

SEQ ID NO: 958548 - DNA, 25 bp, Homo sapien
gagcatatcaaggaagccataacac

SEQ ID NO: 958549 - DNA, 25 bp, Homo sapien
agagcatatcaaggaagccataaca

SEQ ID NO: 958550 - DNA, 25 bp, Homo sapien
tatcaaggaagccataacacacatg

SEQ ID NO: 958551 - DNA, 25 bp, Homo sapien
gcatatcaaggaagccataacacac

SEQ ID NO: 958552 - DNA, 25 bp, Homo sapien
tggtgcatcagcagcaaggttatac

SEQ ID NO: 958553 - DNA, 25 bp, Homo sapien
gctgaacaactcactactgatggtg

SEQ ID NO: 958554 - DNA, 25 bp, Homo sapien
taaaattacacataccgaagggcag

SEQ ID NO: 958555 - DNA, 25 bp, Homo sapien
ccagcaaatctacgtggtggcagat

SEQ ID NO: 958556 - DNA, 25 bp, Homo sapien
ctcactgtgttcaaggagctgtttt

SEQ ID NO: 958557 - DNA, 25 bp, Homo sapien
agattgtacctctcattaataaatg

SEQ ID NO: 958558 - DNA, 25 bp, Homo sapien
tttatagtcatcctattcaagatat

SEQ ID NO: 958559 - DNA, 25 bp, Homo sapien
gagattgtacctctcattaataaat

SEQ ID NO: 958560 - DNA, 25 bp, Homo sapien
atttatagtcatcctattcaagata

SEQ ID NO: 958561 - DNA, 25 bp, Homo sapien
tagctaaaacacgcgaaatatcacc

SEQ ID NO: 958562 - DNA, 25 bp, Homo sapien
tttgtagctaaaacacgcgaaatat

SEQ ID NO: 958563 - DNA, 25 bp, Homo sapien
taaaacacgcgaaatatcaccaaca

SEQ ID NO: 958564 - DNA, 25 bp, Homo sapien
tagataaacgtttgtagctaaaaca

SEQ ID NO: 958565 - DNA, 25 bp, Homo sapien
tcaaatcaatgaaacttttgtaagg

SEQ ID NO: 958566 - DNA, 25 bp, Homo sapien
gaaacttttgtaaggaatactgcaa

SEQ ID NO: 958567 - DNA, 25 bp, Homo sapien
tcaatgaaacttttgtaaggaatac

SEQ ID NO: 958568 - DNA, 25 bp, Homo sapien
atgaaacttttgtaaggaatactgc

SEQ ID NO: 958569 - DNA, 25 bp, Homo sapien
tgtaatcaccataacaactggaagc

SEQ ID NO: 958570 - DNA, 25 bp, Homo sapien
taaaacatgtaatcaccataacaac

SEQ ID NO: 958571 - DNA, 25 bp, Homo sapien
aacatgtaatcaccataacaactgg

SEQ ID NO: 958572 - DNA, 25 bp, Homo sapien
catgtaatcaccataacaactggaa

SEQ ID NO: 958573 - DNA, 25 bp, Homo sapien
caagtggcctagattattaaaagta

SEQ ID NO: 958574 - DNA, 25 bp, Homo sapien
tttccaagtggcctagattattaaa

SEQ ID NO: 958575 - DNA, 25 bp, Homo sapien
tccaagtggcctagattattaaaag

SEQ ID NO: 958576 - DNA, 25 bp, Homo sapien
gtaattgatttggaataatagtaat

SEQ ID NO: 958577 - DNA, 25 bp, Homo sapien
caaattcgggagaacaggtgtattt

SEQ ID NO: 958578 - DNA, 25 bp, Homo sapien
gctgctataagatcactcaggcaaa

SEQ ID NO: 958579 - DNA, 25 bp, Homo sapien
tcaaattcgggagaacaggtgtatt

SEQ ID NO: 958580 - DNA, 25 bp, Homo sapien
tataccttaagattccggctgctat

SEQ ID NO: 958581 - DNA, 25 bp, Homo sapien
ggtctgaaacgcctaagattttaga

SEQ ID NO: 958582 - DNA, 25 bp, Homo sapien
gattttagatgtcagaaatttcaaa

SEQ ID NO: 958583 - DNA, 25 bp, Homo sapien
caaaatgattgttccacaccaccag

SEQ ID NO: 958584 - DNA, 25 bp, Homo sapien
ttcaaaatgattgttccacaccacc

SEQ ID NO: 958585 - DNA, 25 bp, Homo sapien
ccagtctactattgaaaatgttgtt

SEQ ID NO: 958586 - DNA, 25 bp, Homo sapien
tccttgttcaggttgtgtgtaataa

SEQ ID NO: 958587 - DNA, 25 bp, Homo sapien
tgcttctattgacgttaaactctaa

SEQ ID NO: 958588 - DNA, 25 bp, Homo sapien
aacagaagataatacctagggaggc

SEQ ID NO: 958589 - DNA, 25 bp, Homo sapien
gagtttagatactcccagtttttga

SEQ ID NO: 958590 - DNA, 25 bp, Homo sapien
tgagtttagatactcccagtttttg

SEQ ID NO: 958591 - DNA, 25 bp, Homo sapien
cgtattatttagacttagattccaa

SEQ ID NO: 958592 - DNA, 25 bp, Homo sapien
gaaactgaattcttcgacttgcgta

SEQ ID NO: 958593 - DNA, 25 bp, Homo sapien
gggtgaaaacagtgcgctcatgaga

SEQ ID NO: 958594 - DNA, 25 bp, Homo sapien
caagttgataggttatttgtttatt

SEQ ID NO: 958595 - DNA, 25 bp, Homo sapien
gaagataagtacattgaatttccaa

SEQ ID NO: 958596 - DNA, 25 bp, Homo sapien
tcaaaatgaaactaagggtaactga

SEQ ID NO: 958597 - DNA, 25 bp, Homo sapien
gataagtacattgaatttccaaaca

SEQ ID NO: 958598 - DNA, 25 bp, Homo sapien
aagaagataagtacattgaatttcc

SEQ ID NO: 958599 - DNA, 25 bp, Homo sapien
aatgtatcccacaacatacatggga

SEQ ID NO: 958600 - DNA, 25 bp, Homo sapien
aaagagcttcttagtttcatcagta

SEQ ID NO: 958601 - DNA, 25 bp, Homo sapien
caaagagcttcttagtttcatcagt

SEQ ID NO: 958602 - DNA, 25 bp, Homo sapien
cccaaagagcttcttagtttcatca

SEQ ID NO: 958603 - DNA, 25 bp, Homo sapien
ccaaagagcttcttagtttcatcag

SEQ ID NO: 958604 - DNA, 25 bp, Homo sapien
gccagggaagcataaaagcaacatt

SEQ ID NO: 958605 - DNA, 25 bp, Homo sapien
taaactgagcaaattgccagggaag

SEQ ID NO: 958606 - DNA, 25 bp, Homo sapien
caacattggaaagacagagtgcaat

SEQ ID NO: 958607 - DNA, 25 bp, Homo sapien
agtataaactgagcaaattgccagg

SEQ ID NO: 958608 - DNA, 25 bp, Homo sapien
gaatgggcagcttccatcacctaat

SEQ ID NO: 958609 - DNA, 25 bp, Homo sapien
gtagcaaggggtgatgaagaatggg

SEQ ID NO: 958610 - DNA, 25 bp, Homo sapien
ttctaggaattaaactgggaatgag

SEQ ID NO: 958611 - DNA, 25 bp, Homo sapien
gaattaaactgggaatgagtagcaa

SEQ ID NO: 958612 - DNA, 25 bp, Homo sapien
aactttcacggagaggtggtgtcca

SEQ ID NO: 958613 - DNA, 25 bp, Homo sapien
ggagaggtggtgtccacatcacaca

SEQ ID NO: 958614 - DNA, 25 bp, Homo sapien
ctgaagtacaaggaaaggataggaa

SEQ ID NO: 958615 - DNA, 25 bp, Homo sapien
agttaaaacatacatctgaagtaca

SEQ ID NO: 958616 - DNA, 25 bp, Homo sapien
ggcctgaggcctctttcattgttgt

SEQ ID NO: 958617 - DNA, 25 bp, Homo sapien
ctttcattgttgttaaggggagagc

SEQ ID NO: 958618 - DNA, 25 bp, Homo sapien
tggcagtgtcttaactgtgtccctg

SEQ ID NO: 958619 - DNA, 25 bp, Homo sapien
actgtgtccctgctgtcaggcctga

SEQ ID NO: 958620 - DNA, 25 bp, Homo sapien
aataagacctcccagttcagtacca

SEQ ID NO: 958621 - DNA, 25 bp, Homo sapien
tgtaataagacctcccagttcagta

SEQ ID NO: 958622 - DNA, 25 bp, Homo sapien
gtactgtaataagacctcccagttc

SEQ ID NO: 958623 - DNA, 25 bp, Homo sapien
ctctccatggttgaaaaagaagcac

SEQ ID NO: 958624 - DNA, 25 bp, Homo sapien
gaaaggtaagtatctgttggcattg

SEQ ID NO: 958625 - DNA, 25 bp, Homo sapien
aggtaagtatctgttggcattggtt

SEQ ID NO: 958626 - DNA, 25 bp, Homo sapien
aaggtaagtatctgttggcattggt

SEQ ID NO: 958627 - DNA, 25 bp, Homo sapien
aaaggtaagtatctgttggcattgg

SEQ ID NO: 958628 - DNA, 25 bp, Homo sapien
tccatatatgaagaacaatcccatc

SEQ ID NO: 958629 - DNA, 25 bp, Homo sapien
catatatgaagaacaatcccatcat

SEQ ID NO: 958630 - DNA, 25 bp, Homo sapien
cttaggtatgttccatatatgaaga

SEQ ID NO: 958631 - DNA, 25 bp, Homo sapien
taggtatgttccatatatgaagaac

SEQ ID NO: 958632 - DNA, 25 bp, Homo sapien
ttaaaataaagattacaccaacata

SEQ ID NO: 958633 - DNA, 25 bp, Homo sapien
acaccaacataaaagcaagcaggat

SEQ ID NO: 958634 - DNA, 25 bp, Homo sapien
tagtccatttaaaataaagattaca

SEQ ID NO: 958635 - DNA, 25 bp, Homo sapien
aataaagattacaccaacataaaag

SEQ ID NO: 958636 - DNA, 25 bp, Homo sapien
gaatatatgactccaaagcaagtgg

SEQ ID NO: 958637 - DNA, 25 bp, Homo sapien
cagtgtttaatgaatatatgactcc

SEQ ID NO: 958638 - DNA, 25 bp, Homo sapien
tttaatgaatatatgactccaaagc

SEQ ID NO: 958639 - DNA, 25 bp, Homo sapien
aatacagataatcagtgtttaatga

SEQ ID NO: 958640 - DNA, 25 bp, Homo sapien
ttcactattcccatgaatgtgcgat

SEQ ID NO: 958641 - DNA, 25 bp, Homo sapien
cagcaggtcttagtttctagtccaa

SEQ ID NO: 958642 - DNA, 25 bp, Homo sapien
catgaatgtgcgataccaggaggct

SEQ ID NO: 958643 - DNA, 25 bp, Homo sapien
tgcgataccaggaggctatgattac

SEQ ID NO: 958644 - DNA, 25 bp, Homo sapien
cttcaggaagatgcaacatcaaggc

SEQ ID NO: 958645 - DNA, 25 bp, Homo sapien
caggaagatgcaacatcaaggcacc

SEQ ID NO: 958646 - DNA, 25 bp, Homo sapien
tcaggaagatgcaacatcaaggcac

SEQ ID NO: 958647 - DNA, 25 bp, Homo sapien
gaagatgcaacatcaaggcaccatc

SEQ ID NO: 958648 - DNA, 25 bp, Homo sapien
gggaaaagacagttaccacaatgga

SEQ ID NO: 958649 - DNA, 25 bp, Homo sapien
gtggtattggcataattatagatca
